United States Patent Application Publication US 2017/0009304 A1 - sequence listing, part 19

SEQ ID NO: 388340 - DNA, 88 bp, Homo sapiens
gcggctgtatccgacgccgcgagttcgcgatgttacagtggtttatcaaaatgggttacctgtgatatctgtgaggctaccatcccgg

SEQ ID NO: 388341 - DNA, 80 bp, Homo sapiens
cgacaagccgctggcagccgcggatctcaccgccgctcaggaaatggaggtggagcccgcccggaaaggggaagaggagc

SEQ ID NO: 388342 - DNA, 83 bp, Homo sapiens
tggaggaagaccactacggcatggaggacgtcaagaaacgcatcctgcacatgattaagtaccggtacatcccgttcacacat

SEQ ID NO: 388343 - DNA, 75 bp, Homo sapiens
agatgaatatgacttcaaatgcaaaaccttgcagaacagaggagagaagatgactgaggaggaggtggagaccgt

SEQ ID NO: 388344 - DNA, 90 bp, Homo sapiens
cggaagtaggagaggagttcggcgccgcttctgtggccacggcaggttgggacaaacattcctatggttaccatggtgatgatgggcatt

SEQ ID NO: 388345 - DNA, 82 bp, Homo sapiens
tatggatctctttttaacaccattcaagcattaattgatgagggagatgaagctttatcctgtggataaacgcagagtgaac

SEQ ID NO: 388346 - DNA, 101 bp, Homo sapiens
gaagcgcaggagccgtgagagcctcaacgtggacgtggtcaagtacgagagtggccctgacggaggggaggaaatctgcgtggtgattgctgccgtgttcg

SEQ ID NO: 388347 - DNA, 101 bp, Homo sapiens
atggtgtcagataccagtgctactgctatggccgtggcattggggagtggcattgccaacctttacagacctatccaactatccaacttgataaagtcaat

SEQ ID NO: 388348 - DNA, 102 bp, Homo sapiens
cgtccttctccactttcgccagcccgtgccgcgagcgcggcctgcaggaggtttggtgcacctcgatttggaggaagtagggcagggcccttatctggaaag

SEQ ID NO: 388349 - DNA, 100 bp, Homo sapiens
gcccctcgggggactctgagcaggaatcaaacattttaagtccagtgcaggatggaacaaagaaacctcagattgacagcaacaagagcaataactaccg

SEQ ID NO: 388350 - DNA, 97 bp, Homo sapiens
ttcccgtcatccagcggggcgatgagtgtgggcatggggcagccgccagcccaaacaggcgtgtcacaggtgagcgaaatgcagaagctggatgcac

SEQ ID NO: 388351 - DNA, 47 bp, Homo sapiens
gaagtccacccagcgtttccgaggcaatctgaaggcaaatcctgttt

SEQ ID NO: 388352 - DNA, 90 bp, Homo sapiens
atcctggacacggcatgatgttcgtccgcaacgattgcaagagtaagaaacaggatattcctcgtgaagatcagggaccaaccaccaaga

SEQ ID NO: 388353 - DNA, 100 bp, Homo sapiens
aatcgcatcatcggtgccaaggaccacgcatccatccagatgaacgtggccgaggccactgggagacgcaggaggaggacaaggacacagcagaggacag

SEQ ID NO: 388354 - DNA, 134 bp, Homo sapiens
ggaagcggagggggaccaccgtggagagcgcggtcccagcccggccactgcggatccctgaaaccaagcatctctcgggacaactggcacaagcgccgcaaaaccgggggcaagagaaagccctaccacaagaa

SEQ ID NO: 388355 - DNA, 95 bp, Homo sapiens
aatgttgtttatgtaggaggaatcctaaccaaaccagccagcccactaccagaaccaatgttttcagttgcaccaagcttagccaccaatgcatc

SEQ ID NO: 388356 - DNA, 96 bp, Homo sapiens
cggggtctggatggcttgaggaccctattggagctggagtgagccttccaggaattttggctgccaaatgtggtgcagaagtaatactgtcagaca

SEQ ID NO: 388357 - DNA, 87 bp, Homo sapiens
ggccacctctgagaagggagacgacgctgctgggtccgctgagcggggcgacccgagatatttcagcagttgaatcagttgaattca

SEQ ID NO: 388358 - DNA, 83 bp, Homo sapiens
ccattctcttgcactctcaaaagcctcagaatattctgttgacaagtgaatctccattgggtgacattaagattgttgatttt

SEQ ID NO: 388359 - DNA, 73 bp, Homo sapiens
ggagccgctgctcgagctgctgctggattgaactcagagaagccgggattcgtgtgagggatgacaagatgcc

SEQ ID NO: 388360 - DNA, 90 bp, Homo sapiens
aacagtggaaaatgcaaagtgtgtgcaagcaaatgcttttattcaggatgagaacaagttgagcagtgccaacggccatgaagaacgtag

SEQ ID NO: 388361 - DNA, 75 bp, Homo sapiens
cgacaccatgcatctcctcggcccctggctcctgctcctgggagatgtgggttccttcgtgctgaagttagtgga

SEQ ID NO: 388362 - DNA, 89 bp, Homo sapiens
aagatggaaaaccagttattgaatatcaagaggaggagttgttgaaactggcgatggaatatgagaggagccctctggaaagaaaagga

SEQ ID NO: 388363 - DNA, 82 bp, Homo sapiens
cacgactactagaaggggaggggagtggaaaggctctcagtgaaaaagcttcctgcctgacacagctcacttcaagaagtgc

SEQ ID NO: 388364 - DNA, 100 bp, Homo sapiens
ttggctagtcaatacctgaagagagattggcctggagtaaaagctgatgatcggaatgattacaggtatttacctcctgagtgttttgtagttggaaaag

SEQ ID NO: 388365 - DNA, 74 bp, Homo sapiens
ggaggcactgcctgagcagtcagaaggcaaagaacagaagatcctccttggagcggagcagcgaacagaatcca

SEQ ID NO: 388366 - DNA, 100 bp, Homo sapiens
agagaactcggcgccgccaaacagcccagctcgcgcttcagcgtcccggcgccgtcgcgccactcctccgagatcagttcgacagcttagacaagcatac

SEQ ID NO: 388367 - DNA, 100 bp, Homo sapiens
cgccgtacatcgtgggcttctacggggccttctacagtgacggggagatcagcatttgcatggaacacatggttgacaactacaggcacaagccattgaa

SEQ ID NO: 388368 - DNA, 101 bp, Homo sapiens
tctctcttggctcctgtcccgctggccctctgtctgcctgtgtccctgaccatggctccctgcagtaccctttaacgacaggggcaagtgtccgagtggtg

SEQ ID NO: 388369 - DNA, 100 bp, Homo sapiens
gactagggctcgggcgccggcgagatgcctttgttcaccgccaaccccttcgagcaagacgtggacacattcctgaaggcgctaaaagacgaaaagttac

SEQ ID NO: 388370 - DNA, 100 bp, Homo sapiens
accagatcgaaggcagcaaagccgtgccctgggtgattctgtccgacggcgacggcaccgtggagaaaggttttgaagtacaggaagaaggttatctggc

SEQ ID NO: 388371 - DNA, 100 bp, Homo sapiens
ggtgacagagcctctggatagagaacgcattgccacatacactgtaatcttcagcaagtactgcaactccagcgacatcatggacctgttctgcatcgcc

SEQ ID NO: 388372 - DNA, 100 bp, Homo sapiens
gttccagggaggtgggattgagtcccagtcatgcagggaacaggaatgcaaggagcaagtatacagggtggaagccagcctggcggctttagtcccgggc

SEQ ID NO: 388373 - DNA, 83 bp, Homo sapiens
gtcctgcccgtttctgcggacttgttctgaggccgagaaccaaaaacttttgctagaaaatcagcttttacgagagaaaactc

SEQ ID NO: 388374 - DNA, 100 bp, Homo sapiens
aaaccattgaacagactgatggccagcagagggcgaagtttcaagcagacttcacttgctcttgtacatgaggttcaaatggtgaaagacgatgacccct

SEQ ID NO: 388375 - DNA, 100 bp, Homo sapiens
accgactcccctttcttcccaatgatgcttcctacttcctttccgtgcataagaagccgaatggtggagccgccaccaaaatgcagattttcgtgaaaac

SEQ ID NO: 388376 - DNA, 51 bp, Homo sapiens
ttaaggattccaagtaactcttatttgggctggtgaattaccagatctctg

SEQ ID NO: 388377 - DNA, 82 bp, Homo sapiens
gcctactcgcccgccaccctgcgctgccgccgctctgaggagttaaaggtgagaagccctaccactgcaactgggacggctg

SEQ ID NO: 388378 - DNA, 51 bp, Homo sapiens
ttccttggaatggacctgttgagaagtacaacagttccatcctgctgttag

SEQ ID NO: 388379 - DNA, 100 bp, Homo sapiens
cctgaggcgaaggagcggccgggagcccgccgcgctggtagcgctccaccgggggacggctacgtgcaggcggacgcccggggccccccggaccacgagg

SEQ ID NO: 388380 - DNA, 100 bp, Homo sapiens
tatgatgcccctgaagatgtgcacctagggggcggctaccccgtggggctgtatcgcatccattgaatactgtgaccgaggacatgtacaccaacgggtc

SEQ ID NO: 388381 - DNA, 112 bp, Homo sapiens
acttccctttggatgtagcaaggaagaaattgttcagttcttctcagggttatgtggtccgaatcagtggtgggaacgacaaacaaggtttccccatgaagcagggtgtctt

SEQ ID NO: 388382 - DNA, 98 bp, Homo sapiens
cgggattcgcggcccggagctcgggaccgggtcatgtaggtacaacagcaaccaagaagatcgatgtctacctccctctgcactcgagccaggacaga

SEQ ID NO: 388383 - DNA, 99 bp, Homo sapiens
acgccatcaacaccgagttcaagaacacccgcaccaacgagaaggtggagcaggccaggaggaagcagcgagaagaacgcctgcagcagctgcagcaca

SEQ ID NO: 388384 - DNA, 82 bp, Homo sapiens
gacgcggaggcagagaagggaacgcccggcccagccccacaatgcagatcttcgtgaagactctgactggtaagaccatcac

SEQ ID NO: 388385 - DNA, 99 bp, Homo sapiens
gaggaaggtcttgaagcccattcaactcacagatccaggaaaaatcaaacgtattagaggaatggcttcagcatcatcatcaagccgctgtttgagtcg

SEQ ID NO: 388386 - DNA, 100 bp, Homo sapiens
cagggatggaccgccgaggcggcggccggggcggcggaggcggaggcggccggcccggctccagaacctgggtatcaacccagcaaacattggcttcagt

SEQ ID NO: 388387 - DNA, 100 bp, Homo sapiens
gtaagcgcacgtttaaacatctcaagttatgtgaaatcctagctaaagaaaaggacactataagaaaggaatattggagatacattggaagatcccttca

SEQ ID NO: 388388 - DNA, 50 bp, Homo sapiens
cagaatcctgaccttgctgcacagggttatgtggtccgaatcagtggtgg

SEQ ID NO: 388389 - DNA, 99 bp, Homo sapiens
gcacctgggactcttggaactgggcttggtgcaggatttggaacagatggccgccaagaacgagtcatgtttgacaaaattacatctcgaatccagaag

SEQ ID NO: 388390 - DNA, 100 bp, Homo sapiens
cctgacacacacagccgacatcaccgtgctccgttggagccccagtggaaactgcctgctgtctggggacagggccaacgcagacccgtcagtgataaac

SEQ ID NO: 388391 - DNA, 100 bp, Homo sapiens
tggcgggtgccctggctaccatggaccatcctgctggtcagcactgcggctggttatcaagttatacccaaccagcagcaaaactaccaaggaatagttg

SEQ ID NO: 388392 - DNA, 96 bp, Homo sapiens
aggttcaagtgattctcctacctcagcctcccgagtagctgggactacaggcgtgcaccaccatccccaggatggaacaaaattcatctgtattgg

SEQ ID NO: 388393 - DNA, 98 bp, Homo sapiens
ttaaatactcatctactaggcaagcatggagttggcaccccaaaagaaagtgatccgtatgtgaaactttcattgtacgtagcggatgagaatagaga

SEQ ID NO: 388394 - DNA, 97 bp, Homo sapiens
agggaagcctccgcggtggtgcaagtggaacccaagccttgaggtttcaccacagcctggcagctctgatcaggaaagtgaggaacagcaacaattc

SEQ ID NO: 388395 - DNA, 96 bp, Homo sapiens
ccttgatagcatggatttctgtgagctcactggtttctatgttgcactgagactggtggcctgtgcacagagtggccatgaagttaccttgagcaa

SEQ ID NO: 388396 - DNA, 100 bp, Homo sapiens
tcgctcgtctacttcctcagcagcaccttcaagcagataaacgaattaagctttacatgagaaggctactttgtcttccaagccctcaaaaatgcatgcc

SEQ ID NO: 388397 - DNA, 100 bp, Homo sapiens
gtgcagaaggaggtcctgccgtccatgcggaagatcgtcgccacctggatgctggaggtgtcgtgaaaactacccctaaaagccaaaatgggaaaggaaa

SEQ ID NO: 388398 - DNA, 98 bp, Homo sapiens
cgaccccatcgtgggctggggccccagcgggggctatgtcttccagaaggtgcggcggcagcacatggagcgttgtaccagcttcctggtggatgagc

SEQ ID NO: 388399 - DNA, 106 bp, Homo sapiens
catgatcctgctggtgggccagtacagcaccggcaagaccaccttcatcagccgggaagatttccagaggattccagaacttgccatcaacccactgggggaccgg

SEQ ID NO: 388400 - DNA, 80 bp, Homo sapiens
tccaccatgcaccgtcgagaattggagcattgctatcgaaaggatgggcaatgctgtgataaaacataaggaagctgagg

SEQ ID NO: 388401 - DNA, 100 bp, Homo sapiens
cactggcggtgcgcgacctgggctggctccgggggtggcgggcgcagctgctgtgacaggtaccagcaactaaggtttcagagctgaaccctaatgcaga

SEQ ID NO: 388402 - DNA, 100 bp, Homo sapiens
tatacattcagtaggtctgatccaacttcgtatgcagggtacattgaagaccttaagaagtttctaaaactgcacagccagagaacaacacatcacacac

SEQ ID NO: 388403 - DNA, 99 bp, Homo sapiens
aagcaaaccgggaaaggagaggatcccggagccggatccggaaagtatggcagaggaggaagtgttcagtcaagaatgggattctgaccatctcacatg

SEQ ID NO: 388404 - DNA, 75 bp, Homo sapiens
ttgaaggtgcaagatactatataaagtttcagaaccttctgtggtccagaaagacatttgtggacaacatgaaaa

SEQ ID NO: 388405 - DNA, 90 bp, Homo sapiens
cgcggacgcggaacccggcgcggcggcggcacgatggtcatggcgtatttcgtcgagaatttttggcgaagcagcagttttgggaatttc

SEQ ID NO: 388406 - DNA, 100 bp, Homo sapiens
tgcacaagcgagccgcctggcaggccttgcaggctgcccaggctttgctgaggttctgcagaccttcagcacctgcaaggggatgctgggtgagatcctg

SEQ ID NO: 388407 - DNA, 76 bp, Homo sapiens
gggagaaagtttcatctgtggatggagtattggtaacttgggtttttactcctgtaacaactgaaataacaagtct

SEQ ID NO: 388408 - DNA, 80 bp, Homo sapiens
tttgggaaccattgccaagtctggtactaaagcattcatggaggctcttcagattgaaaaggctgtggtgtctcagcgcc

SEQ ID NO: 388409 - DNA, 100 bp, Homo sapiens
cgtgctgcagtgggaccgcaagctgagcgagctgtcagagcccggggacggcgaggccctcatgtaccacacgggcttccagcaaaagttctccttccac

SEQ ID NO: 388410 - DNA, 75 bp, Homo sapiens
cacatgaccagcttagcttctgtcctaaaggcagcggtagtagtggtgttcaattttgccatggttctgctcatt

SEQ ID NO: 388411 - DNA, 99 bp, Homo sapiens
tcctcggaagaaacttaaccatcttttgaaagcccttgaaacgtcaaagggaatgaaagctactggttgattttaaagtgcctgggcctcacaggtttg

SEQ ID NO: 388412 - DNA, 99 bp, Homo sapiens
gagaaaaaagatgttgtggggagagccagggggtctcagccacctttgcggctagtcttgtcagcagcccggccattggagcatatctttctgccagtt

SEQ ID NO: 388413 - DNA, 74 bp, Homo sapiens
tcgaagtgcccgcctacatgagaaaaaggagcattctacagcagggaacactgtgaagaacatgttgctttttt

SEQ ID NO: 388414 - DNA, 82 bp, Homo sapiens
ccgggaggaaggaacgaggcaaggagctaaagcagcgtgcgttcagccctgggaatgcggattgtggatgatgatgtgagct

SEQ ID NO: 388415 - DNA, 50 bp, Homo sapiens
cgaagaagagaccatccatatttccagacaccagagaagcctatgatgac

SEQ ID NO: 388416 - DNA, 82 bp, Homo sapiens
tttgaagtctgtgtcaaacatccatatcataagtggaattttggagatattcaaagatactttggtgttgaacatttgggat

SEQ ID NO: 388417 - DNA, 80 bp, Homo sapiens
ccggggcgctcacggccacggcgctggtcaccggggtctgcctgggctctcctttgataaagatgcgatggtggccagag

SEQ ID NO: 388418 - DNA, 75 bp, Homo sapiens
cagaacagttggatcttgctcagtctctgtcagaggaagatcccttggcgccaagcccatctttgtgtgcttgca

SEQ ID NO: 388419 - DNA, 89 bp, Homo sapiens
tggttccggaggccgtgagacctgccggggctgacaggtgcctggactacgtgttggaggagctgaagcacaacgccaaggccaaggtg

SEQ ID NO: 388420 - DNA, 100 bp, Homo sapiens
ccagtgggctggggactcacggccgggacactcagggcaggtaactaggatttctacctcaaccgcgagacctatgcaaggacggtgtggaccaactcgc

SEQ ID NO: 388421 - DNA, 98 bp, Homo sapiens
caatattatactttgctgaataaagctccggaatatttacacagtcttcaggagacatatgaagcaaaaaggaatgaattcctgggagaactgcagaa

SEQ ID NO: 388422 - DNA, 97 bp, Homo sapiens
acgcctgaaaattctcataccgctcccctcactgctagcaccgtggtctcatccgcctgcacagctgagtccagtgggagctgacgccatgaccctc

SEQ ID NO: 388423 - DNA, 87 bp, Homo sapiens
tcatcagcccaccaactgtatggctttgctcacgggaagcctagtcctgatgaatcaagccacaatatgagaacacttcactccaga

SEQ ID NO: 388424 - DNA, 51 bp, Homo sapiens
cttcgatgtgcgagactttggaaaggaagatgcaatcacacccaatgataa

SEQ ID NO: 388425 - DNA, 75 bp, Homo sapiens
caagccgaagccaccgtcagcgggagccccgaggccccagggaccaacgtggatggacgtggtagaggtcgcggg

SEQ ID NO: 388426 - DNA, 90 bp, Homo sapiens
aaggacagcagcgactttggggcccgtcaccctcagcatggacaaggacagcccggaggtccaccaggacctgaacgccctcaaaagcaa

SEQ ID NO: 388427 - DNA, 100 bp, Homo sapiens
cccgagataccggcgccatgtccagcgctcggacccccctacccacgctgaacgagagggacacggagcagaggtcctgctgtactagccaccaaagcag

SEQ ID NO: 388428 - DNA, 83 bp, Homo sapiens
cctgcagcgggagctggacggcgagcgcgagcggcgcgagaaatcccaggggcagccactggcctcccagcccccggtcgtcg

SEQ ID NO: 388429 - DNA, 105 bp, Homo sapiens
atgggatctttccggatcaatccagatggcagccagtcagtggtggagatcaaaggtttggagtggctggtgtccctgtacaacaacaacctgaacggcatcctg

SEQ ID NO: 388430 - DNA, 100 bp, Homo sapiens
tcaaatgagttgatgatacttgcacggcgctcggatcgtgacaagttggatggcttgaggactggtactaaaaggaaacgtgactgggaggccattgcca

SEQ ID NO: 388431 - DNA, 83 bp, Homo sapiens
cacggaaacctcgcgccgaccggggccctaggcccgacgacggcagggcgaccattgacgaggtggagacggacgtggtggag

SEQ ID NO: 388432 - DNA, 75 bp, Homo sapiens
ttccagagccaaggaggaagggttgtccggaattttgtagccaccttggctaatgggatgagcctccagccgcct

SEQ ID NO: 388433 - DNA, 142 bp, Homo sapiens
cgcctcagctctcctctgcgccggcccgctcactccgcccggccccagccctagcgctggccgcgaccccggcgacacgatgaggcgagtggtacgacagagcaagtttcggcatgtatttgggcaagcggtgaaaaatgac

SEQ ID NO: 388434 - DNA, 82 bp, Homo sapiens
ttcaagcttaggaccacccaccatgcctatccaggtgtttcccattaaacactaccaggacaaaatcaggccttacatccag

SEQ ID NO: 388435 - DNA, 100 bp, Homo sapiens
ggggacgcggcggcggcgttgacaatgagccatcatcaaccactttaaccccaaaattgagtcctacgctgctgtgaatcacatatcccaactgtcagag

SEQ ID NO: 388436 - DNA, 83 bp, Homo sapiens
aggagccggagacgccgcggaggagaccggaccgaagacggaccgtgccgggaagaggttgcgaggggcggtgttgaagaatg

SEQ ID NO: 388437 - DNA, 75 bp, Homo sapiens
aagccggacctcatgcagctgcgcaagatccgagaccagtacctcgtgtttgttgataagccggggcccttcgtg

SEQ ID NO: 388438 - DNA, 88 bp, Homo sapiens
caagccgctggcagccgcggatctcaccgccgctcagggtcgcgtggggcaggcagtggcgctgcgggccaaggccttcggcttcaac

SEQ ID NO: 388439 - DNA, 90 bp, Homo sapiens
ggaagatggtccaggctgggagcatccccttagcagcagcctctgctctccccacctggtgcaggttcgggagcggatccgcatcaatgg

SEQ ID NO: 388440 - DNA, 80 bp, Homo sapiens
aatcgtatcgtatgtccgctatccagaacctccactctttcgaggccacaagaggaagctgaatgaagaggacgccgcca

SEQ ID NO: 388441 - DNA, 101 bp, Homo sapiens
cctgttatgagaaagcaggggacatcgcactcctgtatctccaagagatagaaaggaccggaacatgaacattttgcagtactgcccctcttccgacatgt

SEQ ID NO: 388442 - DNA, 100 bp, Homo sapiens
tcctcgggtgcctgcacctcggccgtcccggcgcccctggggacgccgccctcccgggaagaggagcaggacttggatggtgagaaggggccatcatcgg

SEQ ID NO: 388443 - DNA, 100 bp, Homo sapiens
cccgggaaagggtcagaggcttcctaacgcagactcgagtgcgaagcgcgcagtcgccgggtaccccaagaagctagtgcagacttattcagtgtttccc

SEQ ID NO: 388444 - DNA, 100 bp, Homo sapiens
ggagctggaaaacatcgtggccaacacggtcttgctgaaagccagggaagtactatactggcaattgctggagaagattttgcaattgttgcttctgata

SEQ ID NO: 388445 - DNA, 58 bp, Homo sapiens
gttcgagaacgaccccgagacggcttctctacagtttagcctttaatgccaggtttct

SEQ ID NO: 388446 - DNA, 75 bp, Homo sapiens
ccgggctgagcttcctggagaagaggaagatttcaggtatgctgctgaaagtgggaatcctctacattggtgggc

SEQ ID NO: 388447 - DNA, 97 bp, Homo sapiens
caaatcttgcggcaacgcccccgggacatgcatcgtcccctggactctctcaaggtgggtattctgctccctccttctctccttggcagggctcctt

SEQ ID NO: 388448 - DNA, 83 bp, Homo sapiens
ttgcagctgcttagacgctggatttttttcgggtagtggaaaaccaggtgcttttgaagatgatgatatcacgcacgttgaag

SEQ ID NO: 388449 - DNA, 75 bp, Homo sapiens
gccccgggcacgcctccctcatccggaccatcatcggcggtgctgctcctctgaagattcaagcttatttcaatg

SEQ ID NO: 388450 - DNA, 80 bp, Homo sapiens
gcaactttgagctgcacgttgcacaagcattaaaacttccttttggcaaaacaacagtgatgcatttggtggccagagag

SEQ ID NO: 388451 - DNA, 98 bp, Homo sapiens
ggctcatgcaccaactaaaggactttggatgccactggggaaagaagtcaaagttatgcagtggtgtccgcaatgttgccagtgtctgtctgcagatt

SEQ ID NO: 388452 - DNA, 75 bp, Homo sapiens
aaccattgtttggtcctttaccttgcagactgagcctttgaaattggtgaaactcagggcattgctgctggagaa

SEQ ID NO: 388453 - DNA, 100 bp, Homo sapiens
tccttgcagctgcttagacgctggatttttttcgggtagtggaaaaccaggtctcctctgagcctccggcctccataagacccaaaacagatgacacctc

SEQ ID NO: 388454 - DNA, 82 bp, Homo sapiens
agcatggatatccaggtgctgagccaggagcagcagcctttctgccactgcagaacaaattagacttgcacagatgatttcg

SEQ ID NO: 388455 - DNA, 73 bp, Homo sapiens
ccttgatgatgcctctggtggatcagctgtagaaatgagggacaatccagaattgaaggataaacccattgct

SEQ ID NO: 388456 - DNA, 75 bp, Homo sapiens
atcagttgttggagaaaattaaaggtgttaagtgtgatgcttccataatacatttggatgctgtcagctaagttc

SEQ ID NO: 388457 - DNA, 90 bp, Homo sapiens
agttgatggcctggagaagaaagatgttttgcctactgttgatccggttttgagaacagagtgctgttttagagctggcagcagcatctc

SEQ ID NO: 388458 - DNA, 100 bp, Homo sapiens
acccttccatttcaaagaacagaatgctaaggaagctgtggcaaggaaggaagccatgctgaagcaccgggactacgagacggccacactatcggacatc

SEQ ID NO: 388459 - DNA, 96 bp, Homo sapiens
gtgaagagacaggaggcagtagccaaacacccaggagcagatgtctcaagtattagatgccatgtttgaaaaattggtcaaagatggggagcatgt

SEQ ID NO: 388460 - DNA, 75 bp, Homo sapiens
acaccgcctacaggagtatgatgcaaggttgtgaccgagattcccgacgagagagactgaggggaagagaggaag

SEQ ID NO: 388461 - DNA, 80 bp, Homo sapiens
catctgcttctcctcctcagaggttttggctacgggcctccacctccaccgccagatcagtttgcccctccgggggttcc

SEQ ID NO: 388462 - DNA, 75 bp, Homo sapiens
ggaacagcctatgtgggcttccacggaggctgcaaggacccggcccagggacaactcctgaaagagctgatgcag

SEQ ID NO: 388463 - DNA, 100 bp, Homo sapiens
aaagattctttgtagcagacactgcaaatgaagctctcgaggctgctaagagactaactgctgcattttttatcacctatgaatatgtgaagtggttttt

SEQ ID NO: 388464 - DNA, 100 bp, Homo sapiens
gggtctcggctgagcggcggcggcggcaccaacggcaccaactattcgcggagctggaatgactggcaacccaggcgcacctatgttggcagcatgcctg

SEQ ID NO: 388465 - DNA, 100 bp, Homo sapiens
tttacctatgacccgtggattggcaagttattgtatcttgaggacttcttcgtgatgagtgattatagaggcattggttcctgtcaccattgaagtagag

SEQ ID NO: 388466 - DNA, 123 bp, Homo sapiens
cgctgttcacctacgggcctgatcaaacttgccttcctgttctccaagaccaggttcaagtgctggggccggcagtggagagttccacgtgtacagacatctgcgccggagagaatatcagcg

SEQ ID NO: 388467 - DNA, 100 bp, Homo sapiens
agacgggcgtcttctacctgacgctcgtcctcatcctggtcactagcggactcttcttcgccttcgaccagaagtggacttccctgtccccccaggcaga

SEQ ID NO: 388468 - DNA, 90 bp, Homo sapiens
ccagctggtcgccaccatgccagtctctccggcaggcagtcacaagcagcagaacttcgggttcatgttggcagataaattgaacatgac

SEQ ID NO: 388469 - DNA, 74 bp, Homo sapiens
cccaaccacaagacgactcaataggaggaaggaccgtgtgtatgtacaacaaaataatgtggagaacgtctaca

SEQ ID NO: 388470 - DNA, 83 bp, Homo sapiens
gcggtcggagaagtggcctaaaacttcggcgttggccctgggcgctgcctatggcacagccaagagcggtaccggcattgcgg

SEQ ID NO: 388471 - DNA, 75 bp, Homo sapiens
ctacttcaaagggtactttttagaaccaaaggtgccttatgcccgctcagaggcccacctcacagagctgctgga

SEQ ID NO: 388472 - DNA, 100 bp, Homo sapiens
tctcaaggcctgagtagccggtaacaaacgagggttcccgggattggaccgacgcagccatggaaatttgcgagaatccccgatttatcattgatggagc

SEQ ID NO: 388473 - DNA, 100 bp, Homo sapiens
actatagtaacttggtgtcactggatgccatggacaatattaccaggcagaaccaattctacgatacccaagtcatcaaacaagaaaacgagtcaggcta

SEQ ID NO: 388474 - DNA, 75 bp, Homo sapiens
caaagatgaacgatttgaacaaagcgctagcaacttctaccaacaacagtagagacggtgtttcaccatgttggc

SEQ ID NO: 388475 - DNA, 85 bp, Homo sapiens
ctcctagaccgacttctgcagtacgagaacgtggatgaagactcttcgggagaagtttgaagtgcagcactctgaaggctaccgg

SEQ ID NO: 388476 - DNA, 100 bp, Homo sapiens
gactcttgcggcagggtttgcagtgtaaaggttcttcacacacccccattcggcgtagtacccagagagctcaagatgtgtggcagttttcggatggaag

SEQ ID NO: 388477 - DNA, 75 bp, Homo sapiens
ctcgacctgcagggagcagaggggacagaggcaccaaggacctccaagacagaatgagatgctggaggaaggaca

SEQ ID NO: 388478 - DNA, 50 bp, Homo sapiens
cccagctgcagttcaaagatgccttttggaattgaagatgttcctgctcc

SEQ ID NO: 388479 - DNA, 87 bp, Homo sapiens
tgctaaaaatcattctcccaaacaactccaagaaggtacaccaggggttggaaaaaccacactaggcaaagaacttgcgtcaaaatc

SEQ ID NO: 388480 - DNA, 100 bp, Homo sapiens
cggctgcagacttggccaaatggacgggactattaaggttagcactctacgtatatgaatatctgctccatgtaggagctcagaaatcagctcaaacatt

SEQ ID NO: 388481 - DNA, 80 bp, Homo sapiens
cacagctcccgaaagcgacgttcggccaccggaggagcgggagccaagcagattgtcactgctgttccaagggcacacgc

SEQ ID NO: 388482 - DNA, 73 bp, Homo sapiens
tcaaacagaattgaaagaatgcatggtgatgaatgagaacagccacatcatcctgtgtggtcaaatttctcag

SEQ ID NO: 388483 - DNA, 100 bp, Homo sapiens
aggaggaaactgcttattggaaggaactttccttgaagtataagcaaagatgaaaaagagaggtttgaccctactcagtttcaagactgtattattcaag

SEQ ID NO: 388484 - DNA, 100 bp, Homo sapiens
gtccctttgtggctctatgtggaccctgcggaatccaccggcgcagtttcatctagcgactgatctcttccctgaagaacaggctgaaaaaggtctccac

SEQ ID NO: 388485 - DNA, 100 bp, Homo sapiens
gggtagtgcacagtggagatggaccttataaatatgtcatctgggtgattctcagtgtggaggtgggtggacttttaggagtaacgcagcagctgtcatc

SEQ ID NO: 388486 - DNA, 145 bp, Homo sapiens
ttgagatgatccttacggaaaaggaacagattgttcctaaaccagaagaggaggttgcccagaagaaaaaggatgctttggagtctgcaatgaagaatggcctgtggggtcacgctctgctacttgcaagtaagatggacagccg

SEQ ID NO: 388487 - DNA, 82 bp, Homo sapiens
tgactctgctgccctgagacctggccaggagtgaggagccttcacgtaaatgggtccagtcatgcctcccagtaagaagcca

SEQ ID NO: 388488 - DNA, 90 bp, Homo sapiens
gtggaggagaccatcgagggcatgctcctcaggctggaagagttttgcagcctggctgacctgaaccgagctgaagctgccatggaattc

SEQ ID NO: 388489 - DNA, 100 bp, Homo sapiens
gttcaacgccctggaacttgatgacagtgacctggccctattcattgcggccatcattctgtgtggaggaaaccactgttgctgcgattgccccggatat

SEQ ID NO: 388490 - DNA, 100 bp, Homo sapiens
cagccgcttgtcagtgtgatgaagattggcacccagctattactataacaagcgcattctgcacaagaccaaggggaaacggttcacctacaagttcaat

SEQ ID NO: 388491 - DNA, 96 bp, Homo sapiens
tgggaaggagctggaaaatttggattatttagccttcaaacgtcagcaggcaaccacacctccaaatcaaggaaggccagattctcctgtctatgc

SEQ ID NO: 388492 - DNA, 101 bp, Homo sapiens
cgaagcttgaaagacttggtaatggcgacgggtttgagcactgcagtttcctcctgaaggctggctccggctctccctcaataatggcagcatcacccacc

SEQ ID NO: 388493 - DNA, 51 bp, Homo sapiens
aatgcaaagcaactgctcattaggtggacgagatcagcaacagaatgaaat

SEQ ID NO: 388494 - DNA, 75 bp, Homo sapiens
gtttgccaatgttggagccgtctgcaaagtgtccccggcaagaaggtttattcttcagtccaaggaagcaattca

SEQ ID NO: 388495 - DNA, 83 bp, Homo sapiens
ctccatctacaacacagtaatgaagagtgctgatggcagagattggtgaggatttggataaatctgatgtgtcctcattaatt

SEQ ID NO: 388496 - DNA, 90 bp, Homo sapiens
gtgcagctgcctcagttcttagcgcagcctggagaaacacatgctgtcacatactgaagagagggaatacaagtgtgatcagtgtcccaa

SEQ ID NO: 388497 - DNA, 100 bp, Homo sapiens
gagaaaactgaagaggcaactagaagtcgtcctcttgagttctggcgccttgactactgggaagatgacttgcggcgccggcgacgatttgtgcgtaacc

SEQ ID NO: 388498 - DNA, 84 bp, Homo sapiens
ggttcgggctggttgttccgttgcgagctgcagctgcgatctctgtggtaggcccaggagcgtgaggatcatccccggagagga

SEQ ID NO: 388499 - DNA, 82 bp, Homo sapiens
gcgcaccttggagtccaagcttgtgctctttggtgaaatgacaatggatgctctgttggctcgattgaaacttctgaatcca

SEQ ID NO: 388500 - DNA, 90 bp, Homo sapiens
cccgcgccgccgggacccccaggacgacgtgtacctggacatcaccggaatctggtggacagtaacaaactttggtgaaatttcaggaac

SEQ ID NO: 388501 - DNA, 100 bp, Homo sapiens
gactctcatattacatgggccagcactgcttcatccgggaagtgcttggggatggagtgcctccaaaggttgctgagaactgataaatttcaaacggaag

SEQ ID NO: 388502 - DNA, 73 bp, Homo sapiens
agagcttccggagcagcttcaggaacatgctgcaaaagtcaacaactctagcttaattggagtaggctatact

SEQ ID NO: 388503 - DNA, 100 bp, Homo sapiens
ctcgcccccacctgtggactctgaccgcaaacaaggagagcctactgagcagcctgagtggccctactgccaataaagggaaaataagagatgctcatcg

SEQ ID NO: 388504 - DNA, 74 bp, Homo sapiens
atacacttcgagatcagcatcttaacaattcatcattgatgctacaggacgaagaggaatggataaaaacattg

SEQ ID NO: 388505 - DNA, 99 bp, Homo sapiens
gccattcagcagaaactgaacctctcgcagcagctggaagcttggcaggtggaggagaagatcaagcagacccaccgtaagtacctgctgcaggagcag

SEQ ID NO: 388506 - DNA, 75 bp, Homo sapiens
tgggagagctgctgaagtcaaaggagcaattgctggtcctgagcctgagagctggagtggaccagagaaattgct

SEQ ID NO: 388507 - DNA, 75 bp, Homo sapiens
cagatgtggaggagaatatatcctctaaatctgatgttgggggccgtcccgctcctaaggcaggaagatggtggc

SEQ ID NO: 388508 - DNA, 80 bp, Homo sapiens
tggaaactcggttcataccagccattctaggggtgggtttcacagatcctgccatctccatggatctcctccgagctgtc

SEQ ID NO: 388509 - DNA, 83 bp, Homo sapiens
ctgagtggttgtgtggtcgcgtctcggaaaccggtagcgcttgcagcatgaaagtttcctacactactgaggtttaggggcac

SEQ ID NO: 388510 - DNA, 100 bp, Homo sapiens
gatgcttccgaactgtgggcaaaaatggcgctgctgcattttttatcacctatgaatatgtgaagtggtttttgcatgctgattcatcttcatatttgac

SEQ ID NO: 388511 - DNA, 89 bp, Homo sapiens
cttgttggcaaatcagatgcagctgttttaactatccctgcctgtgactttcaagatccagctccaggtcccacaggggctcttcttcc

SEQ ID NO: 388512 - DNA, 71 bp, Homo sapiens
gcctcccaagtagctgggattacaggaagctcataaaatggtgagagaagcaaatatcaagcaggcaacag

SEQ ID NO: 388513 - DNA, 88 bp, Homo sapiens
ttagaagggggtcatattagtgcttatctttttaaacaaggactcttcaggatttggtggcttttgaacatcagtggactagcttctt

SEQ ID NO: 388514 - DNA, 100 bp, Homo sapiens
ccgaggacaccgccaaggaggatgcggccaaccgcaagctggccaagctctacaaggtggacattgaagtggacctaattcggttttccttttaaaagcc

SEQ ID NO: 388515 - DNA, 83 bp, Homo sapiens
gccggagcttctgaagaaggccggctacgtcagcaagattgtcggcaagtggatgatgacctggaagaaggtgaagtgaagga

SEQ ID NO: 388516 - DNA, 75 bp, Homo sapiens
ctggtcagtgtggcaaccagatcggtgccaaggactgggaggtgctggtcctagggaagctcaagtgggacctgg

SEQ ID NO: 388517 - DNA, 100 bp, Homo sapiens
gtatctattcacaatgaagttgcagtctcccgaattccagtcacttttcacagaaggactgaagagtctgacagagatatactgccattggagaactggg

SEQ ID NO: 388518 - DNA, 75 bp, Homo sapiens
agaactacagaaacctcgtctccctgggatccaaggagctggttctgctggttggaccaaacctcgtgagccagc

SEQ ID NO: 388519 - DNA, 90 bp, Homo sapiens
gttggcggtccctgtgacctgtggagacacggccagatctgccctccagcggcttacagggagaacacagttggcctccaccgtttctgc

SEQ ID NO: 388520 - DNA, 90 bp, Homo sapiens
ctgaacagagcgtggccaaagccagcctgtgcacagcaggattcctggttttcaagcctgagctgatctctcggctggagcagggagaag

SEQ ID NO: 388521 - DNA, 74 bp, Homo sapiens
ttctgcacctcaggagggaattcagcctcagtgatgtccatgaggaagcaggagctggccaacagctcggatgc

SEQ ID NO: 388522 - DNA, 99 bp, Homo sapiens
cagggatgagtcatgtggcagtggaaaatgcgctcgggctggaccagcagaccatggtgaatccgggcagcagctcgcagccgcccccggtgacggccg

SEQ ID NO: 388523 - DNA, 100 bp, Homo sapiens
tgctttgtggagggtacttcattgatgccacaaccataatagaatgtctacattcctcattggattcaaaggctaacaatttgtccagtctgtccaagaa

SEQ ID NO: 388524 - DNA, 101 bp, Homo sapiens
actctgtgtgagggaaagaaaacaatttctcctgctctgcagcttctgttcaggtacagagaactacaacttagtacagaaagcaaagtaacagaatttct

SEQ ID NO: 388525 - DNA, 98 bp, Homo sapiens
ccgccaccgtcgccggccgcccgcacgtccgtccggtttacccaaggtccagcctagcccctaggcaccatgtcggacagtgatctaggtgaggacga

SEQ ID NO: 388526 - DNA, 82 bp, Homo sapiens
caagtccggtccctggtcattgggctgcagaacctcctggtgcagctcaagaggtttggatatggaccttcttcaattcctg

SEQ ID NO: 388527 - DNA, 100 bp, Homo sapiens
gcctgctcttccccgtgagggaagcccaggagaccaggcagctgcgctcttgacagccaggtaccaggtgtcattccacacatccacaaatctctgattg

SEQ ID NO: 388528 - DNA, 100 bp, Homo sapiens
ctttggatgaaggagcttcaaacccaaagaggcagagatcctacaagaatccaggatgatgatcccagattgccagcgcaggttggaagccgcatatttg

SEQ ID NO: 388529 - DNA, 85 bp, Homo sapiens
gtggcagcaaggagcccgcagagcctgaagatgaccatggacaagacgggtctcctgctgctcagtgacccagacaaagtgacca

SEQ ID NO: 388530 - DNA, 50 bp, Homo sapiens
cccatccctgcagcatgaacaaggtttttgactaaaggccagaatgcatt

SEQ ID NO: 388531 - DNA, 75 bp, Homo sapiens
ctaacgagattcaagattatttgcaacagctcacgggagcaagaacggtacctgtggcatatcccattgacctac

SEQ ID NO: 388532 - DNA, 82 bp, Homo sapiens
cttcatcaaaaatagtgatagctttgataaacctgcctagagctggaacgttacctccagagcgagccctgctatgtttcag

SEQ ID NO: 388533 - DNA, 90 bp, Homo sapiens
gctgtgggctcctggggagatggaggggccggggctgggctcgcagatgtggtggtacagtgggagctattctgacatgtccactggaag

SEQ ID NO: 388534 - DNA, 51 bp, Homo sapiens
ggcagcctacccggctcactcagggtgcttggatgaagctgaaaagacact

SEQ ID NO: 388535 - DNA, 98 bp, Homo sapiens
agagaaaatggcagacgatattgatattgaagcaatgcttgaggctccttacaagaagaacctctgtattactggcaacagactgaagatgatttgac

SEQ ID NO: 388536 - DNA, 98 bp, Homo sapiens
atctaagagcccagaaaaagtgtcatcgttctcaaactcctcctccaacaagtccatcaataaagccatggagaaagaccatgaagaatacaacattg

SEQ ID NO: 388537 - DNA, 75 bp, Homo sapiens
gagaatacaagaggattatcttagaattttaagatacttcaggcctaatgggattgtttgaaaaacgtcgcttca

SEQ ID NO: 388538 - DNA, 96 bp, Homo sapiens
cctacttctgtgacaagtgccaaaaatggataccagccaggcagagcggcttgggtaaatccaccttaatcaacaccctcttcaaatccaaaatca

SEQ ID NO: 388539 - DNA, 75 bp, Homo sapiens
gatgccgtctagttttgccatgaagaaatttccatcgtgaagcctttaatcatcttacccaaggctctaacaacc

SEQ ID NO: 388540 - DNA, 120 bp, Homo sapiens
cgaaaattgctaatgactgttgaatctgctaaaaattcagtgttggggaagatcagttttcctgccatccaggctgctccctccttcagcaactcattcccacagatcttccgagacagg

SEQ ID NO: 388541 - DNA, 97 bp, Homo sapiens
tgagaagcaagaaggccctggacacagcaatatctctgggctttcacagagcaacaagatatggatttggatatagaatttgatgtacaccttggaa

SEQ ID NO: 388542 - DNA, 75 bp, Homo sapiens
ccccctgctccggaggctggtgcagtcttaggaaaagtcctcagtgctgtgggcagtgcccagctactgatgtcc

SEQ ID NO: 388543 - DNA, 82 bp, Homo sapiens
cctatgtgaaactgctttctaaaacaccagaactcaacctgaattatatccagatcgagagacagaagattctgaaagggtt

SEQ ID NO: 388544 - DNA, 50 bp, Homo sapiens
gagagtgagagaaaggctggaagacgaggttctggctccttggcagcaat

SEQ ID NO: 388545 - DNA, 82 bp, Homo sapiens
cccaaatgtctgactctgactctcggactgagaaacgcaaggtgtgggcaagagcagtttactgttgcgttttgcagacaac

SEQ ID NO: 388546 - DNA, 50 bp, Homo sapiens
tggggcagtatcaacggagtctccggggtttctggtcctcataccgtgtg

SEQ ID NO: 388547 - DNA, 100 bp, Homo sapiens
ggagctcatcggcactctgaacgcggccaaggtgccggccgacaccgagttcaaggaggccttccagctgtttgaccgaacaggtgatggcaagatcctg

SEQ ID NO: 388548 - DNA, 90 bp, Homo sapiens
tggagcaggtcctgagcctcgagccgcagcacgagctcaaattccgagggaagagtgacccattttgcttgttggagttaggcaatgacc

SEQ ID NO: 388549 - DNA, 100 bp, Homo sapiens
ctgctgctgaggagaggagcgtcaacagcagcaccatggattgatatcagtaaatgccattatttagtggatttggacaccatgagagaaacaccccggg

SEQ ID NO: 388550 - DNA, 100 bp, Homo sapiens
ctcctgtttgtcttctgctttggcccagtaagagatgctaaaaaccttgtacctatggaccccaatggcctgtcagatccctacgtaaaactgaaactga

SEQ ID NO: 388551 - DNA, 101 bp, Homo sapiens
tccggcaccaaatcggcccgcggtgcggtgcggagactccatgaggccctggggtattccctcagcggatactacacccatccatttcaaggctatgagca

SEQ ID NO: 388552 - DNA, 137 bp, Homo sapiens
gccaggaattctcagcgggttccacaccctcttgactccaaaaccacgtcggatgttttaaggtacaggtttgcagattccgccagcagcacagcaagctctacagatgagtggctctttggcatttggtgctgtgg

SEQ ID NO: 388553 - DNA, 50 bp, Homo sapiens
gccttgactacggaggggttgccagtttgtagtctatcatctggaaaatt

SEQ ID NO: 388554 - DNA, 95 bp, Homo sapiens
gcttccggaagttcctggtccacaacgtcaaggagctggaagtgctgctgatgtgcaacaatgcccaccagaagtatgtccgacaagcctggcag

SEQ ID NO: 388555 - DNA, 98 bp, Homo sapiens
cagaacccaagaagattccgataagaaacacggaagtgcattttcagctgagcacctcaaacttcaactccagaaggaatccctaaatgagctgagga

SEQ ID NO: 388556 - DNA, 51 bp, Homo sapiens
tcaagctcatattttgaagtgtttacggtctgaagttgcagccggagtgaa

SEQ ID NO: 388557 - DNA, 75 bp, Homo sapiens
caaggtcagaaggaagcaccacacagagacctgcctagagctggaacgttacctccagagcgagccctgctatgt

SEQ ID NO: 388558 - DNA, 100 bp, Homo sapiens
attgaaatgcatttgccttatacagctaaagccatggaaagaaacaaagggtcatcctttctagaaagagaaccgctgtgctatcaggagggaaataatc

SEQ ID NO: 388559 - DNA, 83 bp, Homo sapiens
tcccctgcgtcccgccaccggccgcttctgtcctcgctacgagttccagggagctctgtcctggtgaccgtgcccgggttatg

SEQ ID NO: 388560 - DNA, 51 bp, Homo sapiens
caccaaagtagttctagatgacaagattgttgtgtccactgtatcctggct

SEQ ID NO: 388561 - DNA, 97 bp, Homo sapiens
tacgttctccaagaaaaaccaatagagagttttaatgaataccttttcgctcttcagagtcacttatgctattggggccatggcacctgcaaggtgt

SEQ ID NO: 388562 - DNA, 87 bp, Homo sapiens
cgggaagcgcgcacctgccaagcaggcaagaagttatgaaatggaatggatggggatataatgattctaaattcatcttcaataaga

SEQ ID NO: 388563 - DNA, 75 bp, Homo sapiens
cagaaagaatttactgacaatgtgagcagtgcttttgaacaaggcaggagtgcagatgtgatctcggcacaccgc

SEQ ID NO: 388564 - DNA, 100 bp, Homo sapiens
ggagtatctggacctgtacctgatgcactggccttatgcctttgagtgaatatgaccatctcccagaacaggccttctatatggtgggacccattgaaga

SEQ ID NO: 388565 - DNA, 100 bp, Homo sapiens
gcatgtgaaagcccgcttcaagaggttcggaagtgccaaggtcatccggtccctccacgggcggctgcagggtggaggtcatattgaacattccagatac

SEQ ID NO: 388566 - DNA, 75 bp, Homo sapiens
caggcgctcaccatgttccctggaggacttctgcacggacctggccgtctccagtgccaacttcattcccacggt

SEQ ID NO: 388567 - DNA, 100 bp, Homo sapiens
ccccgagccgccgccgctgtccggagccccacaggtactcaccagatgagctgcggtatctgccattaaacacagccctgtatgagccccctctggatcc

SEQ ID NO: 388568 - DNA, 100 bp, Homo sapiens
cctagagataaggcgcttcaggactaccgcaagaagttgcttgaacacaaggagatcgacggccgtcttaaggagtcaaaccagtccagctacgggggcc

SEQ ID NO: 388569 - DNA, 97 bp, Homo sapiens
tgtgagaaatacatcacggggcgcgtgctggagaccctgtattcagtggatcagctggcaccacccaaatagataaattggcccatctggtcttgtg

SEQ ID NO: 388570 - DNA, 73 bp, Homo sapiens
ggggaccataactgatgatgtgcgggttcaggaggtacccaaactgaaggattggcaggagattatagctctg

SEQ ID NO: 388571 - DNA, 82 bp, Homo sapiens
tgccgtggtgcgactcatccacctccggctgaagctccaggagctgaaggtcaccacctcccacagccctgctgcaccaggg

SEQ ID NO: 388572 - DNA, 83 bp, Homo sapiens
ctgcgggcccgctccgacgcggaagaccatggtgaatccgggcagcagctcgcagccgcccccggtgacggccggctccctct

SEQ ID NO: 388573 - DNA, 89 bp, Homo sapiens
ggcagtggaggagtgtgacagggatgatgaagaagacctgctggatgcccattgcagatgcaaaggctcctgagaagcgggcctcacca

SEQ ID NO: 388574 - DNA, 91 bp, Homo sapiens
caaacttgtaaaacctggaacagcagcatcattgtcaaaggagattacctggggcaattgatgttatcggtcagactataactatcagccg

SEQ ID NO: 388575 - DNA, 90 bp, Homo sapiens
gggcggcggcggcggcggctgcggcccaatataggtctagatgttgatggaatatatcgagttagtggcaatctggcaacaatacagaag

SEQ ID NO: 388576 - DNA, 75 bp, Homo sapiens
tgctgatcacttggagtgctgtcccttggaacaggaggagtaagattgaggctttatgaaggcaaagaacagatg

SEQ ID NO: 388577 - DNA, 75 bp, Homo sapiens
tgagctggagcagcaggccaggctcggagacctttccccccgcagagactaatagacaagtcacgagttacctgt

SEQ ID NO: 388578 - DNA, 74 bp, Homo sapiens
atcaacagcagggcaacaaggcagagaaggccggagctcttgtccctggcaaagcgaaagcgcagtgactctga

SEQ ID NO: 388579 - DNA, 100 bp, Homo sapiens
caggcatacctgtaaagccttcagtgaaaggaaagatacattcacacagttttaaaataacctggggttcagcagactgtacaggatctttttggcagag

SEQ ID NO: 388580 - DNA, 75 bp, Homo sapiens
cgagctgcagctgcgatctctgtggtaggcccagcatcccagctatggctggcgattctaggaatgccatgaacc

SEQ ID NO: 388581 - DNA, 80 bp, Homo sapiens
agacctgctgctgcttcaatgtccgcatcgcaaccaccgccctggccatctaccatgtgtgtccttgaatccgaccccta

SEQ ID NO: 388582 - DNA, 83 bp, Homo sapiens
gccgtggtgcgggctctgcagcgagcgctcgatggaacctcatcccagacacagaatgttcagcttaacaaagaaatgacact

SEQ ID NO: 388583 - DNA, 75 bp, Homo sapiens
cagattcgcagtggtcgcttcttctccttgattccgttgcagacgctctggatggcgaataccattaaacttctg

SEQ ID NO: 388584 - DNA, 85 bp, Homo sapiens
agggaagagattcagccagcacactcctcgcgagcaaggctaccggctctctgaccagttccacgacatcctcattcgaaagttt

SEQ ID NO: 388585 - DNA, 125 bp, Homo sapiens
agcctggagtctgcgaaggccgggacccggttccccggcccacagtgggggtgtgcaaacccgagagaactggttgctatagcccaaggtggaacaatccagatttctaacccaggatctgatgg

SEQ ID NO: 388586 - DNA, 90 bp, Homo sapiens
agcatgttgtggctgttccaatcgctcctgtttgtcttctgctttggcccaggaataggaaaattgtccacggctgatggtaaagccttt

SEQ ID NO: 388587 - DNA, 75 bp, Homo sapiens
ccatcacccaccaacaacaccacaataatccacagccaagatggactcaccctgtcacccaggttggactgcact

SEQ ID NO: 388588 - DNA, 75 bp, Homo sapiens
tacaagttatatcagagtctgggggcaatggcggcttcctgtgttctactgcacactgggcagaagatgcctctg

SEQ ID NO: 388589 - DNA, 100 bp, Homo sapiens
gacatactgctgtgcccagcaccaagatgatggcccagacagaagagaagagtcacatcatctagatgatgaatgaaaagatatgtcattattctccttt

SEQ ID NO: 388590 - DNA, 116 bp, Homo sapiens
gagagggactgacgtgtttggagggaaatgggaatgtacacgataattaaagagtaaagttgtgctcaacggcagcagtacctgtccaaagatcgctttagttccaccttgctcca

SEQ ID NO: 388591 - DNA, 83 bp, Homo sapiens
ttgagaatttatcctcaagagtcagctggcagaccctgaaggaagattgggaatctgaaaaagatttatgtttagaaaatcta

SEQ ID NO: 388592 - DNA, 97 bp, Homo sapiens
tcgtgcccgagaagctaaacaaccagctcctgagcctcccaaaccttacaggtgacaatctccaatagacttgtgtcttcaccttgctgcattgtga

SEQ ID NO: 388593 - DNA, 82 bp, Homo sapiens
cacgcagaagtcgcgtgtctagagtaaatattatcagtgtcactaacaagggactactgcactccttcgacctcctgaaggc

SEQ ID NO: 388594 - DNA, 83 bp, Homo sapiens
gcgggcggcggcgccggcaggaagccctgggcgctgcctatggcacagccaagagcggtaccggcattgcggccatgtctgtc

SEQ ID NO: 388595 - DNA, 74 bp, Homo sapiens
gcagtggtcgcttcttctccttgtaacaattgctcgagcaattgaactaaaacatgctcctggactaattgctg

SEQ ID NO: 388596 - DNA, 101 bp, Homo sapiens
gcgaccccaacccagccccacgtcaagcagaatgagcgctacggccagttgactctggtcaactccacctcggcagacacaggtgaattcagctgctgggt

SEQ ID NO: 388597 - DNA, 75 bp, Homo sapiens
gggaaccctggtcaccgtctcctcaggaaaactttattctcaagagatttctcattccgcagaaataaggatctg

SEQ ID NO: 388598 - DNA, 89 bp, Homo sapiens
gctggccgggggcgcgggcggcggcgccggcaggaagggcagctggtggaatttttgaagaaaatggaatctcgaggccccctttcgtg

SEQ ID NO: 388599 - DNA, 83 bp, Homo sapiens
gaaggtgcatctgcagtacaggatatgaagaaattgagggttcttgccatgatgtagatgaatgctcagaaaacagatgtcac

SEQ ID NO: 388600 - DNA, 83 bp, Homo sapiens
ttttgggaatttcgatcgttttcggaataattctttatcaaaaccagatgattcaactgagccattaacaggccagatatcac

SEQ ID NO: 388601 - DNA, 82 bp, Homo sapiens
atccccagtggagccggagtgcgggcgcgccccaccaccgccctcaccatgtcttattgttacaggtatcgctgtgctgctc

SEQ ID NO: 388602 - DNA, 88 bp, Homo sapiens
gggggaggactgctttatggacttgcatcaggagtagcaattggctggggaacagaccagggaattggtggatttggagaagagccgg

SEQ ID NO: 388603 - DNA, 75 bp, Homo sapiens
tctgaagatctcaagatctggactactgttgaaaaaatttccagtgagggttttcagagaaagatgctgatgagg

SEQ ID NO: 388604 - DNA, 75 bp, Homo sapiens
ggacttccagccttcaacactgaaaaccagtgcagcctgtcaagcgagagcttttacggcatagggactacaagg

SEQ ID NO: 388605 - DNA, 126 bp, Homo sapiens
acctgcaggagagaaaggtgttcgtggagcggatgcgagaggcagtccagaaaattttcgtgctctgagcactggagagaaaggatttggttataagggttcctgctttcacagaattattccagg

SEQ ID NO: 388606 - DNA, 75 bp, Homo sapiens
caaggagaaggatcgccaggtgctggaggacttcccaacgtgtttgtggagaaggtgctgcagagactttttcct

SEQ ID NO: 388607 - DNA, 100 bp, Homo sapiens
cctatgctgtctaccctcaggcaacccaaacgtatggactacctccttttgattggtggaacgagaatgcctacacgcagccacaggaatccagtttcca

SEQ ID NO: 388608 - DNA, 100 bp, Homo sapiens
gatcagatcaagaagatgagagagggtcctgcaaaggatcccttggttccagtaccccattatctatgacattcgggccagacctcgaaaaatctcctcc

SEQ ID NO: 388609 - DNA, 51 bp, Homo sapiens
cacactctggggctgcctgtggctcgggttcatgacgctctcgatattcct

SEQ ID NO: 388610 - DNA, 100 bp, Homo sapiens
cgcccccgcccctctcttccctggctggacttgcggagtccccgccgaagaacccgagtaagaagactgttagaatgccctcggtaacacagaggctgag

SEQ ID NO: 388611 - DNA, 101 bp, Homo sapiens
gctacccagaagtcatacctgatacccagaaataatcgcttaatgtatattcatagctaccaaagctatgtgtggaataacatggtaagcaagaggataga

SEQ ID NO: 388612 - DNA, 82 bp, Homo sapiens
cacttcaaacattcgtctcggaaaccccgcctcttacagtcacgaggtaaatatgcagaggacatttttggagagctcttta

SEQ ID NO: 388613 - DNA, 100 bp, Homo sapiens
aaggaatggaaaaattttgtgaagacattggtgttgaacctgaaaatgaatccatgggaaagagctatgatgggagagcttatgtcatcactggcatgtg

SEQ ID NO: 388614 - DNA, 90 bp, Homo sapiens
tgaaacattaaatgacagttcacataagaagttcttcgatgtatctaaacttggcaccaagtatgctggcgttgcagacggggcgtgaac

SEQ ID NO: 388615 - DNA, 75 bp, Homo sapiens
gcgcagagctggaaagcatggctgttggatatcttctaaccataccgatgattctccgtatagctggtcttttcc

SEQ ID NO: 388616 - DNA, 100 bp, Homo sapiens
tctgcccccatggtggcgggcatcatcgccttggctctagaagcaaagtcagaatggcggcagtggagcatcgtcattcttcaggattgccctactggcc

SEQ ID NO: 388617 - DNA, 100 bp, Homo sapiens
cagagctagttcctctccagctcagccgcatgccatggacaatattaccaggcagaaccaattctacgatacccaagtcatcaaacaagaaaacgagtca

SEQ ID NO: 388618 - DNA, 100 bp, Homo sapiens
atcctgctcctgggtgccgtggcatgtcgatttgtccttcactacaggagccgggtgtgggctgagccctgcctgattgatgctgccaaggaggagtaca

SEQ ID NO: 388619 - DNA, 75 bp, Homo sapiens
cgactccctatgttactgacgagaccggcgagtccgtgcgtcctggtgcctcctacaaacggcagaatgaaggaa

SEQ ID NO: 388620 - DNA, 75 bp, Homo sapiens
gaaaaatgtccttaaagcaattgagcaggctgatctactgcaggaggctcatgtacagtcaggaatggttccttc

SEQ ID NO: 388621 - DNA, 100 bp, Homo sapiens
ccagaatccaccgtcaggcataaattgattattcctcgcccacatctgtgccaggagcctgtggtgctgaccgacacaaatcttgtgtatcctgccctga

SEQ ID NO: 388622 - DNA, 142 bp, Homo sapiens
gcgagatgaatactgctgaggactggggcctcattttggatatctgtgataaagttggtcagtctcgcactggcctctacggcagacacatgcaggccaacccagaaccaccgaagaagaataatgacaaatcgaaaaagat

SEQ ID NO: 388623 - DNA, 88 bp, Homo sapiens
gttgccatgtcaggtccaaaaacagagacttttccctcccagtccctaagtttaaggcgaaagacagtgatgatgaagaggaggtggt

SEQ ID NO: 388624 - DNA, 51 bp, Homo sapiens
aggtggggtttgaggaaaagagttacaagggacaagaatccttcaagaaac

SEQ ID NO: 388625 - DNA, 90 bp, Homo sapiens
agaggaggtcccacaggctcctgccctggactaccgaggtgctatcagtgctaaagcattcattgctgtccttcaagcaacccagagtca

SEQ ID NO: 388626 - DNA, 75 bp, Homo sapiens
agtcctccagtgtttggatattcagaacaccaccgatagccacaccgaagagttctcccatttgctggttcccgg

SEQ ID NO: 388627 - DNA, 51 bp, Homo sapiens
ggcgataatttttcagatgtggcaattcagctgtgaagagggataccaagg

SEQ ID NO: 388628 - DNA, 82 bp, Homo sapiens
cccgtacttgaagccctacgccgtggacttccagcgcaggaactgtggctgcaccatctgtcttcatcttcccgccatctga

SEQ ID NO: 388629 - DNA, 82 bp, Homo sapiens
ggagctgggccagggcctggactacttctacgacctgctctagggacccagacatggagctgcgggaagaagcctggtctcc

SEQ ID NO: 388630 - DNA, 50 bp, Homo sapiens
ttgaaagaacttgccagacttaaacaggtcatactccctgtcacaaactc

SEQ ID NO: 388631 - DNA, 83 bp, Homo sapiens
ccgagttatgcccaccctccaactttgcgacggaaatgtgtcatcgaaagccagaaacctgtttccctccaatcttgtggttg

SEQ ID NO: 388632 - DNA, 100 bp, Homo sapiens
gcggccgcgccatgtggctgctggggccgctgtgcctgctgctgagcagcgccgcgggtgaaaggtgtagcagtcactcggcctacacccacagcatcga

SEQ ID NO: 388633 - DNA, 82 bp, Homo sapiens
caaggccatctccaagaacgtgctcttcgctcacctggatgacaacgagaggaggcatctgcatctgggaccgacctcctgg

SEQ ID NO: 388634 - DNA, 75 bp, Homo sapiens
tttcagttgtactactacaagcactatttatcaacaaaggtgcagtggcttctatgttttgggttgatgctgaat

SEQ ID NO: 388635 - DNA, 90 bp, Homo sapiens
aacagttaatcctcaatttaagcctgatctaacccctagaaacagctttgcccgaagtttttacatacaaattctactagtcacacctgg

SEQ ID NO: 388636 - DNA, 82 bp, Homo sapiens
cccgacctcttaggcgccgggaccctcaggctcagatcagtggccgaggccccagaggtgggatgctatggaatatgatgag

SEQ ID NO: 388637 - DNA, 75 bp, Homo sapiens
tcctgtacagcctgcagaactggcagctgcaatgactctccgcacggtattattgtcattgcaagcactattggc

SEQ ID NO: 388638 - DNA, 75 bp, Homo sapiens
acatttacgcggatgtcggcgaagagttcaaccagatatgagggaaggcaccattggagatatggctatcctggg

SEQ ID NO: 388639 - DNA, 98 bp, Homo sapiens
cggaaagtggcagcaccaacccatgggttcagttcttttgttccacggagaacagatgaggagcgggaaggcctcctgcaccctggagaccgtgtggg

SEQ ID NO: 388640 - DNA, 100 bp, Homo sapiens
aatcgtcactgaggttgcagttggcgtgaaggcaccatactggacataccttttatgtgcactgggactttttatttaccagtcactggatgctattgat

SEQ ID NO: 388641 - DNA, 98 bp, Homo sapiens
gagcctcagttggaagcagccgatccagcctgcggagcctgtggggcaggttgtgcagcctgactctgaagaagctggtggtcttcaaggagctggag

SEQ ID NO: 388642 - DNA, 100 bp, Homo sapiens
ggattaatcgaattacagctgctagccaggaacatggactgaagtatccagcgctcattgggaatttagttaagatggactcccagaggcctgagcccag

SEQ ID NO: 388643 - DNA, 100 bp, Homo sapiens
aactacctgaattggaaacagagtgggggtactgaatggaccaaggaagatgaaatcaatctcatcctcagattttctaccctagcaaggatggtacgaa

SEQ ID NO: 388644 - DNA, 85 bp, Homo sapiens
taactctgtccttattatcggaccccgaggatcaggaaaaactatgccttgctatacatcctgacaaaattaggattgcaactgg

SEQ ID NO: 388645 - DNA, 100 bp, Homo sapiens
aaatcctgctttcttttcctcagaactactatattcagtggctaaatggctccctgattcatggtattggttgctctggcatctgaagaacttgccaaag

SEQ ID NO: 388646 - DNA, 100 bp, Homo sapiens
agaagcaaaagttctcactcaaactgatgaccgacaacaagacaggagaggtgctgatctccgagaatgtggtggcatccattcaaccagcggaggggag

SEQ ID NO: 388647 - DNA, 75 bp, Homo sapiens
tgagactgtctggggagctctccgaggagagagcattccagtgctgaagacggcactgccggaggggctggggcc

SEQ ID NO: 388648 - DNA, 100 bp, Homo sapiens
tttgcaacagaattacagagtatgatgtgacgcagaagttctccctggtgattgtgcagggccacctggtgtcagaaggggtcctgctttttggccacca

SEQ ID NO: 388649 - DNA, 98 bp, Homo sapiens
ggcagtgagcggcggcagaggctacggggctcggtttggctgactggggagtcggcaggcggcaggagccagatgaccaggatgccccagatgagcat

SEQ ID NO: 388650 - DNA, 100 bp, Homo sapiens
gaaaaggagaaggataaagggaaggacaaggaattacataacatcaaacgtggatgtttcaggacccagtggcctttgaggatgtggctgtgaacttcac

SEQ ID NO: 388651 - DNA, 83 bp, Homo sapiens
gaagaccgtgatgggagctgcagcacagtcgggggtgtaggttatggggaataatcatgggccagactgggaagaaatctgag

SEQ ID NO: 388652 - DNA, 100 bp, Homo sapiens
gtaaacacggctgtgctcagggctcgcgggtgaccgaaaggatcatgaactagtgacctggaaagaatctttagaacacgatgttcttgatgataataca

SEQ ID NO: 388653 - DNA, 75 bp, Homo sapiens
cggcgggacccgagctgctaatgacttaattcagtgcacaaatgagatgaatgtgaacatcccacagttggcaga

SEQ ID NO: 388654 - DNA, 87 bp, Homo sapiens
ttgagtccgcatcgccacagctgaaggctgcgagggactaagagcagagcctgcacagctgaccacagttgggaaacgttgctgtct

SEQ ID NO: 388655 - DNA, 110 bp, Homo sapiens
cacccgctcaagtcagacattgccaacatcctggactggatgttgaatcaagatttcaccacagcctacagaagtgaggttactattgaatgtaaaacaaggtactggac

SEQ ID NO: 388656 - DNA, 100 bp, Homo sapiens
ggctgggtcctgcgtgcggccctggattcaggggccttccagagtaatgctacagccctttgactatgatccgaatgaaaagagtaaacacaagtttatg

SEQ ID NO: 388657 - DNA, 100 bp, Homo sapiens
agccgccccccgaaaccccagacatcaaccagctgccgccgtccatcctgctcaagttttctggatatgccgcagaaggatccgtgccagaagcaagcct

SEQ ID NO: 388658 - DNA, 75 bp, Homo sapiens
ttatcatcggctgagggtggaagcggcccccgcagacgctcggcaggttcctggggcttcagggctaggagggag

SEQ ID NO: 388659 - DNA, 90 bp, Homo sapiens
ctaatgtaccatcttcgcagtctacagccagcttcctgtctcataaacatgttccaaatcaagtatagatattgagaatgggtttatttc

SEQ ID NO: 388660 - DNA, 101 bp, Homo sapiens
ggcaccggaacaaactcaaccaactccactacagctgttcccagcttggttgcacttgagaaaattaatgtggcagaccactttacctgcattgtgaaggt

SEQ ID NO: 388661 - DNA, 76 bp, Homo sapiens
ggctatgaacccagaggtcgtggaggtggccgtggaggcagaggtggcatgggagtaccaagtatggtgtccttgg

SEQ ID NO: 388662 - DNA, 50 bp, Homo sapiens
gggcgaagccatgacgtcagtcagcaattctgtggtgttcttggtcacac

SEQ ID NO: 388663 - DNA, 100 bp, Homo sapiens
aattcctgaggcgctgggagccgcaccacctaacgctggccgacaacagcctggcgtccgccacgattctcgatgaattcaaaaaggattcgtccgtgtt

SEQ ID NO: 388664 - DNA, 100 bp, Homo sapiens
agagcgtcgagcagatccgcgaggtggcgtccggcgctgccaggatccgcggggagaccttgggcatcatcggacttgacagaagccctgggggatgcgg

SEQ ID NO: 388665 - DNA, 75 bp, Homo sapiens
cgaacttgggctcgggaagccggcggaccgcgtcctgcgccggagcagattaagatgttctacgaggagcatttg

SEQ ID NO: 388666 - DNA, 102 bp, Homo sapiens
agtgccaaggctaaaagacgaaataccaccggaactggtcgaatgaggcacctaaaaattgtataccgcagattcagtgaattgaatgcaggaattataaaa

SEQ ID NO: 388667 - DNA, 83 bp, Homo sapiens
caaaccgcaggcatttcaatcacattatgacctgcctagagctggaacgttacctccagagcgagccctgctatgtttcagcc

SEQ ID NO: 388668 - DNA, 100 bp, Homo sapiens
ataggagccacaaacttcccagaggcattagataagtttttgtagaactcactaaagaacaagaggaggaagataatagttgtggaactttaaacagcac

SEQ ID NO: 388669 - DNA, 83 bp, Homo sapiens
gtgaatttgtattccctttcacctcctggaagattctgctcctaagtgtaggagagaacttggtgcctcttccactctggagt

SEQ ID NO: 388670 - DNA, 55 bp, Homo sapiens
gcccaggaagcaatccaggcccagaaaagagagattggttgagagtctccgtttg

SEQ ID NO: 388671 - DNA, 96 bp, Homo sapiens
accagcacccccaccgtcagcagctacagccctccacagcacccccccaggcagcagcagcagttttcatctctggatgacaagccccagttccca

SEQ ID NO: 388672 - DNA, 99 bp, Homo sapiens
ttatggagcatatattatggaacacagtacggcttgtagatgcaggctttgtttggactgagcctcattctaagagacttaaagttaaactgactattc

SEQ ID NO: 388673 - DNA, 74 bp, Homo sapiens
cagagtcggcgtaactatcgcctgacagggtatctgaagtaaaaggggatccagtttgctgaccagaagcaaga

SEQ ID NO: 388674 - DNA, 80 bp, Homo sapiens
ctgccctgcggacctagtggtgtgtgacggggctcctgatgagttactgaaagctctcgaaattacggttacaatccttc

SEQ ID NO: 388675 - DNA, 95 bp, Homo sapiens
atatcactttctttgtttatgtcagtaatttcacctggcccatcaaaattcagggttattttggagctgttggagcactccttgagctgttgaag

SEQ ID NO: 388676 - DNA, 97 bp, Homo sapiens
gactccggagacagcccaaatatcctcggaagagcgctcccaggagaaacaaatcaaaggctcgtggtccagcaagaggggcggtgaggcctctgtc

SEQ ID NO: 388677 - DNA, 103 bp, Homo sapiens
aaaaggaggaattcgccgtgcccgagaatagctccgtccagcaggagccttcacgtaaatgggtccagtcatgcctcccagtaagaagccagaaagctcagga

SEQ ID NO: 388678 - DNA, 86 bp, Homo sapiens
ggaatcatcgatgcaggggcctcaattaatgtatctgtcagtcccctcttctgcaggtctgctgcaattcgctgggggtccactac

SEQ ID NO: 388679 - DNA, 100 bp, Homo sapiens
cctggaagggtattaagagaattacagctggtagaagatccccactggaatttccaggaagagacgctgaaggccaaaaaaagattgcctcaatctggat

SEQ ID NO: 388680 - DNA, 100 bp, Homo sapiens
aactgcgcccggtgcggcaagatcgtgtatcccacggagaaggtgaactgtctggataagagagaaaaggaacagttccgtaagctctttattggtggct

SEQ ID NO: 388681 - DNA, 98 bp, Homo sapiens
ttccttcacagatgggtctgtcagatctggttcaggcacagatggatcaggttctcaggaatcagatagctcgcagtcggccaagaaggacatgctgg

SEQ ID NO: 388682 - DNA, 75 bp, Homo sapiens
gaagtgttgaagtttgtctcctgtcctcctgaccctcacaaagggatcgccacataaagaagatccctaatagtc

SEQ ID NO: 388683 - DNA, 115 bp, Homo sapiens
gggtgattcacgtgtgcccaggccctgaggtgggccggacctgggagtggcagcgccacgcactcctctttctgcctggccggccactcccgtctgctgtgacgcgcggacagag

SEQ ID NO: 388684 - DNA, 99 bp, Homo sapiens
acactctgggacagtgggagatttggaacagctttgagaagagcaaggttacaaaagtggatgaaaccagagggatcgcacatgtttatttatttaccc

SEQ ID NO: 388685 - DNA, 98 bp, Homo sapiens
acccgccaggcaccaactgcagctggtacatccagggcgaccgtggtgacatgattaccatcagctttagccagggccctctgaaggatgcacccaac

SEQ ID NO: 388686 - DNA, 100 bp, Homo sapiens
actggaagaaaaaagaaaagaaactgacaaaaacatttctgaggagcccatgaaatcaagagcaccacagctacatttggaatacagattctataagcag

SEQ ID NO: 388687 - DNA, 75 bp, Homo sapiens
ccagaacctgggctacactgcggtcagtgtggagtatacagagaagatggtgtccatcagtaactaccccctttc

SEQ ID NO: 388688 - DNA, 76 bp, Homo sapiens
tttaggtctcaaggcaagcctattgagttaacacctctgccgctgctaaaaggtcagcaactgtaatctgtatcgc

SEQ ID NO: 388689 - DNA, 101 bp, Homo sapiens
gctggttagtgtgctctgagggagggtccgagccagccgctgttttgccggaggagcccctcaggccatgaagtaaagaaggtcttagacaaattttacaa

SEQ ID NO: 388690 - DNA, 82 bp, Homo sapiens
ggaagagattcagccagcacactcctcgcgagcaaggcaccacactgtaactcgaggcatcaccaaaggcgtgaaggaggac

SEQ ID NO: 388691 - DNA, 75 bp, Homo sapiens
ggtgtccaacagagtctaggctgggttcattacatgattcatgagccaggccaagaataaaatctttatgaacta

SEQ ID NO: 388692 - DNA, 82 bp, Homo sapiens
agaaagcaaagcgcagaaatgttggatttgaaagctggaagtcgagtgtgctactcaactcaggagatttggagacaaactg

SEQ ID NO: 388693 - DNA, 82 bp, Homo sapiens
cgtcaaccgcaggaggatgaagctgctgctgggcatcgccttgctggcctacgtcgcctatgatatcatcaagttgaatcga

SEQ ID NO: 388694 - DNA, 75 bp, Homo sapiens
ctgcgatcatcctggaacacatattactcaaatacagaggtgagtggcagtgtgatgagtgtttatagtggagac

SEQ ID NO: 388695 - DNA, 100 bp, Homo sapiens
tgatggcctgcaaagcatatcgggatctggcctttgagaaggggatcaaaactccagaaatgaactcgaatcatttatgacagaaagtttctgttggatc

SEQ ID NO: 388696 - DNA, 75 bp, Homo sapiens
ggttcagatggtcatacctactcttttcaggtacaagaaaattccccaggacacagagctggtttggagcctttc

SEQ ID NO: 388697 - DNA, 98 bp, Homo sapiens
gtttttctcaggtgaaaggagcagtagatgatgatgtagcagaagagacaaagcatggaggacacaagaatgggaggaaaggcggactctcaggaact

SEQ ID NO: 388698 - DNA, 90 bp, Homo sapiens
aaagcgaagatttcgagatcttgttgagacgccggaaaactcaaatatatgtgaggtgtgcaacaaatggggacggctgttctgctgcga

SEQ ID NO: 388699 - DNA, 100 bp, Homo sapiens
tgtcctcggcggttggtcagtgtgaatttgtgacagctgcagttgctccccgcccccgagcagccgagacaatgattgaagctcacgttgatgtcaagac

SEQ ID NO: 388700 - DNA, 90 bp, Homo sapiens
cgcagtttccagcccgacgagcttgttttgtcccggactcggttgctaggaagaggctcaatgtttgtgttttcaccagatcagtttcag

SEQ ID NO: 388701 - DNA, 100 bp, Homo sapiens
tggggaggtcctccatgcgcagtcatgagtcgcttcaagtttatcggacttgaaagaggagattgatattcgactctccagggttcaggatatcaagtat

SEQ ID NO: 388702 - DNA, 75 bp, Homo sapiens
acatcctggaagctgggaaatggtggatgatctgaaagcaaagctggctgcccaggaagtagagctgaagcagaa

SEQ ID NO: 388703 - DNA, 51 bp, Homo sapiens
cgaggcgaggaggagcgctggcggaccaagaatcgccttcagccctgtctg

SEQ ID NO: 388704 - DNA, 74 bp, Homo sapiens
gtggttgtgtggtcgcgtctcggaaaccggtagcgcttgcagcatggatgattgaggaaagtgggaacaagcgg

SEQ ID NO: 388705 - DNA, 96 bp, Homo sapiens
gtcttcgcagcctgcttccttccagacagcagcctccccgactaccactacatcatggagaacctcttccttgagggccccaaggctgttgcagct

SEQ ID NO: 388706 - DNA, 85 bp, Homo sapiens
gagaatcgcttgaacccgggaggcagaggttgcggtcttgtagcttcaatgagcatggctaccacctcttccaggctatgcggct

SEQ ID NO: 388707 - DNA, 82 bp, Homo sapiens
gcgccgctgcccatggagggagtggacatcagccccaaacaggacgaaggcgtgctgaagggtgctttcttctgcgacctgg

SEQ ID NO: 388708 - DNA, 50 bp, Homo sapiens
tgcagttttgctatgcttttctccaaaggcgcagatcaggcctctataac

SEQ ID NO: 388709 - DNA, 87 bp, Homo sapiens
tccttttagacaagggagtatatgatcgttaactgaagacaatatgcaaaattctcacatggatgaatacagaaattctagtaatgg

SEQ ID NO: 388710 - DNA, 99 bp, Homo sapiens
cggcaggctgagctgaaggcacttagtgcccacaaccgcaccaagaagcacgacctgctgagatcactttgggaagcagtgacatccaacctgtatcaa

SEQ ID NO: 388711 - DNA, 80 bp, Homo sapiens
gggagccacgcagaggacgccggaacaccctggaagccgagaaatgcttgctcacttccgacagagaaaaacaaaaggtg

SEQ ID NO: 388712 - DNA, 98 bp, Homo sapiens
gggagagagagaggcagagagggagagagggagagtgacagcagcgctcgggctttgttcgcgggggtcacagctctcatggctgcagctagcgtgac

SEQ ID NO: 388713 - DNA, 75 bp, Homo sapiens
gaagagatcaccaggaaggagcttcagagtgttagggaccttaaaccggaaaacattttgttaaatgaagatatg

SEQ ID NO: 388714 - DNA, 75 bp, Homo sapiens
gcgtcgcgcggcgtgccctgcttgtcacagaggcggggtttcaccatgttgcccagactggtcttgaactcctga

SEQ ID NO: 388715 - DNA, 51 bp, Homo sapiens
agaacagagccaaatcaaaggctgttttacttgtaatggacacaaggacag

SEQ ID NO: 388716 - DNA, 90 bp, Homo sapiens
ctctgacaccagcacagcaaacccgccgggatcaaagtgtaccagtcggcagcatgggaaacaagcctccaggtctgcttccccgcaaag

SEQ ID NO: 388717 - DNA, 82 bp, Homo sapiens
caaagtgattccccggaatcgtgtgctgggctggtcccccttggttcaaaccttgtactactcagctgatcacaagctgctt

SEQ ID NO: 388718 - DNA, 83 bp, Homo sapiens
ccgctgaatgggctgaaggaggaggacaaagagcccctcatcgagctcttcgtcaaggtacaatgactcttcttgcttttcac

SEQ ID NO: 388719 - DNA, 82 bp, Homo sapiens
gcacgagctggagggagaatttcaagaactgcagcaggatacagacgtccctcaccagtgccagcttggggtctgcagatga

SEQ ID NO: 388720 - DNA, 96 bp, Homo sapiens
acggctaccgggcctacctgccgtccaggctgtgtatcaaaaggatgttggttcctgcaaacaagaactgaccctatcacctctgcctcacagtgg

SEQ ID NO: 388721 - DNA, 83 bp, Homo sapiens
gtaccgcggcgagaagccccagctgcactacgcggcaaatgaagaggattcttccagttctctagtgaaggatcacctttttc

SEQ ID NO: 388722 - DNA, 100 bp, Homo sapiens
tcttgctcgcctgcggcagcttcaatcccatcaccaaagggcacattcagatgtttggtagtaagcattaataatgtctttcatctttgagtggatctac

SEQ ID NO: 388723 - DNA, 142 bp, Homo sapiens
cgatttgctggtgtagacatccgtgtccgtgtaaagggtggtggtcacgtggcccagatttatgggtcctggatatgcccacccaagaactgggcctccccgcctaccgcaagtttgacattgaggcctggatgccaggccg

SEQ ID NO: 388724 - DNA, 90 bp, Homo sapiens
cctcctaccaggagctcatggttgagtgtacgaagaaatggtgtggatccggagttgtatgagttaacaacttctaagctggaaatctcc

SEQ ID NO: 388725 - DNA, 75 bp, Homo sapiens
cgccgggaccctcgcgcgcgaccgccgaatcgctcctgcagcagagccgcttacaaacacgcagatggcaagaag

SEQ ID NO: 388726 - DNA, 75 bp, Homo sapiens
cggcacggacgacagaagcgactttggtgagactctggtccttcttgtgggacttgaagaactgaccaatatccg

SEQ ID NO: 388727 - DNA, 90 bp, Homo sapiens
cttcgccagcaagcggcggagctgcgcctcggcccgctcttctccctgcttaacgagaaccatagaagtttcaggcacctgcaagagaga

SEQ ID NO: 388728 - DNA, 89 bp, Homo sapiens
gtcgacatgagtgatgtggaggaaaacaacttcgagggcagacggatctgaaaagaacaattgctgtccttctggatgacattttgcaa

SEQ ID NO: 388729 - DNA, 100 bp, Homo sapiens
cgagtgtccagacctgctcgatggtgtctcccagtctgctaaagccctaaggccatcaccatggacttccagcatcgccccgggggcaagaccgggagcg

SEQ ID NO: 388730 - DNA, 75 bp, Homo sapiens
ctctccttttccctctccctttccctaagaatgttgtaccatctttgggtaggcagacttccctgacgacatcag

SEQ ID NO: 388731 - DNA, 90 bp, Homo sapiens
ccatgtcgaatctgagcaaaggcacgggcagccggaaggacaccaagatgcggatccgggcctttccgacttcctctgctaaattacctc

SEQ ID NO: 388732 - DNA, 87 bp, Homo sapiens
aaagttgaggaagactttaatcttgctaccaagggaaagctttaggcaaatccacagtggtacctgtaccatatgagaagatgctgc

SEQ ID NO: 388733 - DNA, 50 bp, Homo sapiens
cgctgacacttgtgtttgaatatgtgaagaagaagaggacagtgctccag

SEQ ID NO: 388734 - DNA, 100 bp, Homo sapiens
ttctgaaggcaggagcagatgtgaataaaactgaccatagccagagaacagccctccatcttgcagcccagaagtctcgagtgattgtgcaacagccagg

SEQ ID NO: 388735 - DNA, 85 bp, Homo sapiens
cctgatacattcaattcatggtttcttataaccctactccacgtctgttttaattgataaagaccagagtccaaaatggaaacca

SEQ ID NO: 388736 - DNA, 98 bp, Homo sapiens
agatgccaagaagaatctagacagacaggcctttctaggctgctgatactttggctgtgaggcaaaaaaggagaatttatgatatcaccaatgtctta

SEQ ID NO: 388737 - DNA, 87 bp, Homo sapiens
ttacttcagatggtctgcatgctgagggccgttgctccagggagaactgcaaatatcttcatccacccccacatttaaaaacgcagt

SEQ ID NO: 388738 - DNA, 83 bp, Homo sapiens
tggcctggaggctatccagcgtgctgggcctcgtgcgggtcccgctgtacacccagaaggaccgagtcggaggcttccccaac

SEQ ID NO: 388739 - DNA, 100 bp, Homo sapiens
taccagccccgggggctcagccccctgtgattccacaggcacaacctgtgagacctccaaggtcacggagactcaccagttggcagaattaaatgagaag

SEQ ID NO: 388740 - DNA, 100 bp, Homo sapiens
ctcaagccgatggagatcaaccccgagattgaaatggcgattgagacgctgcaaaagtctgacggtctgtccactcacagaagctctcttctcaacagcc

SEQ ID NO: 388741 - DNA, 80 bp, Homo sapiens
aatatctgtcttcggtggactccttcggcagtccacccaccgccgccgcctcccagctgtgtcagcgtgttatgatgccg

SEQ ID NO: 388742 - DNA, 100 bp, Homo sapiens
ccctccggaagactctggctgacctccagctggagtatctggacctgtacctgatgcactggccttatgcctttgagtgctgctgatgtagagaaggtgg

SEQ ID NO: 388743 - DNA, 90 bp, Homo sapiens
ctgcaaacatagagaattctgggcttccacacaactccagtgctaactcaacaggattttttatcaagcagaaatgcatcgaacaacgag

SEQ ID NO: 388744 - DNA, 98 bp, Homo sapiens
ctgggttctctgaagatgattacacggcattaatctcccaaaatattctagaaggggaaaagctacttcaagatcggatcaacatcaagaggaaggga

SEQ ID NO: 388745 - DNA, 75 bp, Homo sapiens
ctgcgccatcctgcaccgccaccggcccgacctcatgttattcagcttctcaaggctggaaaagcgaaggaagtt

SEQ ID NO: 388746 - DNA, 101 bp, Homo sapiens
ggtgatttgttctgtatcagaagacaatatcatgcaagtgtggcaaatgaggtatcctgtagtgatgtccacgtatcttggagttatgggtcgagttctac

SEQ ID NO: 388747 - DNA, 113 bp, Homo sapiens
ctggcttcgtctcccaggacgccacctactccaagcccccctcgcctatgccttcagacatcaccagccagtgctgtccccggcataggtccatctctgcagaagccatttca

SEQ ID NO: 388748 - DNA, 101 bp, Homo sapiens
acccgagaaagagacccaggcccctggcgagcaggacagcatgctgcctgaggacacagcattgttggttttgccatgtactattttacctatgacccgtg

SEQ ID NO: 388749 - DNA, 100 bp, Homo sapiens
atgaacttcataagaagttgcatcaggtggtggagacatcccatgaggatctgcccgcttcccaggaaaggtccgaggtttcattgtttgcggaactttt

SEQ ID NO: 388750 - DNA, 75 bp, Homo sapiens
aactagcatcctcctggaggagctcggggttttcagagaaagatgctgatgaggtgaaaggaatttttgtagata

SEQ ID NO: 388751 - DNA, 83 bp, Homo sapiens
aggaacagggcagacgttagcgtgagtgatcactctcaatcccggggcaaatccagacagaacctttgacttggtgttgaaag

SEQ ID NO: 388752 - DNA, 100 bp, Homo sapiens
cctcagctggtcctagacatgcgtggcgtcggggctgtggcacggtcgggtccgggcggacggaatagacctcagcagcggcgtggtgaggacttagctg

SEQ ID NO: 388753 - DNA, 50 bp, Homo sapiens
aaggattccaagtaactcttatttggactcgctgattcttgagaagagtc

SEQ ID NO: 388754 - DNA, 75 bp, Homo sapiens
gcatccccttagcagcagcctctgacgccctgaaagccatcacagaggtgaccaccacactacagcacattctca

SEQ ID NO: 388755 - DNA, 75 bp, Homo sapiens
acagagcagcagcagcagagatgataacatgtttcaggtgaaaggtgtagcagtcactcggcctacacccacagc

SEQ ID NO: 388756 - DNA, 100 bp, Homo sapiens
ccggcatggccggcccgctgcccgacgagcaggacttcatccaggcctacgaggaggtgcgcgagaagtacaaagtgcagtgctggagttcgtgggtgac

SEQ ID NO: 388757 - DNA, 100 bp, Homo sapiens
caggcctggctcgcgcctctcccaggacccgcctggctgcgagatatcttccacagcgcggcacctgtacctccggggtggcgctggggttggctccatg

SEQ ID NO: 388758 - DNA, 50 bp, Homo sapiens
gcctggttaatcaacagtcttttcagcgggtccatatggaatatttgctg

SEQ ID NO: 388759 - DNA, 75 bp, Homo sapiens
tgctaagattcttggataccacagtatcataaaattcctctaaatgcacgttttaccaacgaggatcatttggct

SEQ ID NO: 388760 - DNA, 103 bp, Homo sapiens
gtaggtgcgggtgaagatggcggcagccgaggccgcgaactgcatcatggagagtttgctctccaaagctcggggaattgattccagctctgttaaactccgg

SEQ ID NO: 388761 - DNA, 83 bp, Homo sapiens
cagaaggtctctggagacatcttcagcaggtcagttcctggcatggtgccctgactgcttggtgagcaagacgaaagaaagtc

SEQ ID NO: 388762 - DNA, 105 bp, Homo sapiens
gcaagccagccatcctgggaccccaggcgtgcaggttctctttgaggggcattcaaggaccccctggccccaagggagaccccggtgcctttggactgaaaggag

SEQ ID NO: 388763 - DNA, 97 bp, Homo sapiens
ggagatttgtgtggctgcagccgagggagaccaggaagatctgcatggtgggaaggacctgatgatacagaggctggagtgcaatggcgcaatctcg

SEQ ID NO: 388764 - DNA, 75 bp, Homo sapiens
agcaggaagctgcggctgagtcggttcaaaccttgtactactcagctgatcacaagctgcttgatgggaacctac

SEQ ID NO: 388765 - DNA, 100 bp, Homo sapiens
caagttgctactcgggacgctgcacctcccgcgccgcacggtggacgaggtatgtgccagtcaaagatctactgggaatttatgagaaactgtatggtcg

SEQ ID NO: 388766 - DNA, 100 bp, Homo sapiens
gaaaatggagctgcatttgcaggaggcactagtctgatacagaaggaaattatgatgtgatgaccccaatggttgatatacttatgaaactttttcgaaa

SEQ ID NO: 388767 - DNA, 106 bp, Homo sapiens
ggcggatggccccaggtgtaagcgcagaaagcaggcgaacccgcggcgcaataacgctgggagtgtccactcgccttccaccagcatggcaacgtcttcacagtac

SEQ ID NO: 388768 - DNA, 90 bp, Homo sapiens
ccttccgttttcgcgtggttcttttgcaagagtgcctggtgaagaatgtgatgggatcactagcatgtctgcggagagcggccctgggac

SEQ ID NO: 388769 - DNA, 98 bp, Homo sapiens
agaggaggttgcccagaagaaaaagccgccgccgcgccgccgtcgctctccaacgccagcgccgcctctcgctcgccgagctccagccgaaggagaag

SEQ ID NO: 388770 - DNA, 100 bp, Homo sapiens
gtttactataaactggcaagaggatggcctgaagtttgggctggaagtatttcctttgacctcgctgagtacactgcggacgttgacggagttggcactc

SEQ ID NO: 388771 - DNA, 90 bp, Homo sapiens
ctctacgtgagcacctccccctgtggagacgcaagactccactctccctacgagatcaccacagaccggcaaactctttgattctacaat

SEQ ID NO: 388772 - DNA, 100 bp, Homo sapiens
tctccgtgcagcccaacttccagcaggacaaggataagccagagacatgggaaaaccaatggaagtgtttcaaagttcttctctttaatcacttctgtat

SEQ ID NO: 388773 - DNA, 100 bp, Homo sapiens
cgtgcggaggaccgcgtgatttccttccagttctcctcggttttcaggaaaaaaccctgatccatgggctaagaatctgaatgaaaaagactatgagttg

SEQ ID NO: 388774 - DNA, 73 bp, Homo sapiens
gtcatctgtctgtctgctggtcatcgtggggcttctcatgtttagcctccacctcctggatgccctcccaatg

SEQ ID NO: 388775 - DNA, 101 bp, Homo sapiens
tctgtgtacatggaggaatgtcacctgaaattacttctttagatgacattaggaaagtctatcatctcatgaagaactgctgggagacagaggcgtccttt

SEQ ID NO: 388776 - DNA, 100 bp, Homo sapiens
ttatgatgatttgggaaagaaacaaatctgtgagcccaacagtcaatccaatgtctactgctatgcagaatgaacgggggagtcggtgaagtacttcctg

SEQ ID NO: 388777 - DNA, 74 bp, Homo sapiens
aatacgccatgaagtcccttagccttctctaccccaagtccctctccagtgatggaatggggagaagatattaa

SEQ ID NO: 388778 - DNA, 51 bp, Homo sapiens
gtcttgtagcagcgcctcctcggtggcagacgctcattggtggacttttgc

SEQ ID NO: 388779 - DNA, 96 bp, Homo sapiens
gtgaagtcggccagcctgagcaagcggaggacctacgccggcctgggattgtcagtggcttcgccccgaggagagctgactgccctgggctgctgc

SEQ ID NO: 388780 - DNA, 80 bp, Homo sapiens
tgatcatcctgctgggcttcgtccagatcgggaaggtgtcaacagcatctccaccctggagcctgtgagccggtgccagc

SEQ ID NO: 388781 - DNA, 49 bp, Homo sapiens
cagagggctctgatctgtgcgacagaaagatgattgaagaatcactgaa

SEQ ID NO: 388782 - DNA, 75 bp, Homo sapiens
caaaatccatagatggaaaagatgacacatcttcggcctctgaggatgagggctctctgagacgccaagctgcgc

SEQ ID NO: 388783 - DNA, 83 bp, Homo sapiens
tggttccccttctactacatgctgaagacattccacttcttccatctattacatctctgagtctaaatgaaaatgaagagaag

SEQ ID NO: 388784 - DNA, 73 bp, Homo sapiens
gcgcagggcgaggaggacgatgccgaggggcaagaccaggacaagccttccattatgagagcaacaatgatct

SEQ ID NO: 388785 - DNA, 75 bp, Homo sapiens
tgcctatgtgaaactgctttctaaaacaccagaactcaacctgaaccgggtgaacatgacctacgagaagatgtc

SEQ ID NO: 388786 - DNA, 83 bp, Homo sapiens
ctccgtcaccagccacatctaccagaaaatgtggtgacctggaagaagaactcaagaatgttactaacaatctgaaatctctg

SEQ ID NO: 388787 - DNA, 100 bp, Homo sapiens
gcggcagaggcttgcccgatcctcggccatgtcactgctctgcgtgcgcgggggtggcaccgagagccgaccagtccttcgctacagcaaggaacagagg

SEQ ID NO: 388788 - DNA, 82 bp, Homo sapiens
tccctggtcgaacagttttttctaatggctattcaagggggatatgagactttctactcggaatatcctgagtgttgcgtgg

SEQ ID NO: 388789 - DNA, 75 bp, Homo sapiens
gacaaacccaccttcatcaaaggggaatggaagttggatacactttgtgacttgtacgagacactgaccattaca

SEQ ID NO: 388790 - DNA, 75 bp, Homo sapiens
caacattcagacccatttccagtcatgagatgcatcatctgcagacatcagaaaagcatatcgtaagctttcact

SEQ ID NO: 388791 - DNA, 92 bp, Homo sapiens
ggattccaagtaactcttatttgctgggatctagcaattgggaggcagcagacttgggtaatgaagagagaaaacaaaagttcttgagactt

SEQ ID NO: 388792 - DNA, 51 bp, Homo sapiens
aatgccaacgccgtgtctgaaggtgcacagcgacttcaccgcggcagccac

SEQ ID NO: 388793 - DNA, 83 bp, Homo sapiens
gtggaatgcagttatatttggagttgccggccttctgatgcttccgctaccagatctcgacctctggccactggaccgtcttc

SEQ ID NO: 388794 - DNA, 75 bp, Homo sapiens
ctcacatcaacttctaccagctggatggccaggccatgttatgggatctcaacgaaggcaaacacctttacacgc

SEQ ID NO: 388795 - DNA, 98 bp, Homo sapiens
atttcggctcagctggaggaggccagctctacaggcggaatgagagaggaaatgtcattaggatgccaggaggcttttgaaatcttcaagagggacca

SEQ ID NO: 388796 - DNA, 97 bp, Homo sapiens
gagaatgatggcgccactgccttggcagaagcttttagggtagcttgtatgcagctcatcaatgccctggttacatctcctgatgatttggatttca

SEQ ID NO: 388797 - DNA, 75 bp, Homo sapiens
ccttctaccaactgcagttttagatacgttttgaaaatttcatcacctgagactaatagggatgccaaaggaaaa

SEQ ID NO: 388798 - DNA, 100 bp, Homo sapiens
gacctgtggccagtgttgtcatggacaaggacaaggtttgtctgccattgtggatttcctgggcagagtggagtgaaggtgccaaaagccaagaagacac

SEQ ID NO: 388799 - DNA, 100 bp, Homo sapiens
cggagccgaaacaccggtaggagcggggaggactcatctgatgatgtgagaagagttcagaggagggagaaaaatcgtattgccgcccagaagagccgac

SEQ ID NO: 388800 - DNA, 98 bp, Homo sapiens
ccgcttcgaggtggagagagcccagtgggaggtggagcgggcggagctgcagtagcaggacccagtgctccataaaggataatagtttccagtacact

SEQ ID NO: 388801 - DNA, 74 bp, Homo sapiens
ccaggaggaggttttcaggaccaaaattgtggaaaagtcactctgggtgtcctgttcccaaagctgagctgatc

SEQ ID NO: 388802 - DNA, 90 bp, Homo sapiens
cagctgtgtgtccagaacgtgccatggagacgcttaacggcattgatcaatatgacagagatagcatcataaatgactttaagaatggga

SEQ ID NO: 388803 - DNA, 75 bp, Homo sapiens
accaacagaagaacctcagaacatacccaagaggacaaatcccccaggtcttgagtcaccacgtccgaatataat

SEQ ID NO: 388804 - DNA, 83 bp, Homo sapiens
ggcccaggcagagcccggagaaaagccacatgatattaataaggcagcggaaagaagaaatatgaatacggctccatcaagac

SEQ ID NO: 388805 - DNA, 98 bp, Homo sapiens
tgcagttgcgtgttgttcagaaagacggtctggaaaatcccgaagcagaagcccgtattcatctaggcattcaagatctcgtagcaggcacagattgt

SEQ ID NO: 388806 - DNA, 100 bp, Homo sapiens
tctactcaagagtggaagttttcacagaatcccaaggactgcagcaaagccaaaaagctggtgtgtaatatcaacaaaggctgtggctatggctgtcagc

SEQ ID NO: 388807 - DNA, 50 bp, Homo sapiens
tgtgtcagcaacagcagctccaaggagaaattacgacaactacgagactg

SEQ ID NO: 388808 - DNA, 75 bp, Homo sapiens
cgcgaatatcgtcatcgttagaaggttagagaggggtggcctggggtgcttcatgagaaatgtcttcctggatct

SEQ ID NO: 388809 - DNA, 100 bp, Homo sapiens
aagtgggagagctgctgaagtcaaaggagcaattgctggtcctgagcctgagtattgctgacagacagaacgccttggaggctgagtggaggacggtgca

SEQ ID NO: 388810 - DNA, 74 bp, Homo sapiens
cggcccctggatgcacagccccggcgctgctcctgacccctgaggattaccagcgatttctagacctgggcatc

SEQ ID NO: 388811 - DNA, 102 bp, Homo sapiens
atattatacacaaacctgcggaatggactttaattgctatggtgttgctgtcattctcattgctatggacagtgctatcaccctgtggcagttccttcttca

SEQ ID NO: 388812 - DNA, 101 bp, Homo sapiens
attctgaagagggtctggaggagccttctcaagaacagaggctgacgtgatggcagacagggttccccgctgcccggtctgcaccggcgttgtgaagcccg

SEQ ID NO: 388813 - DNA, 100 bp, Homo sapiens
agcaacagctcctgcagcagtaccgagtgccccggggaagccattccccaccccccaggtgtggggttagccaccagaaaactgggaaatttggccaaac

SEQ ID NO: 388814 - DNA, 82 bp, Homo sapiens
gcgggcggtcattcgcatcgcagtgaagatagtgatccggggagacaggaacacgggcaagacagcgctgtggcaccgcctg

SEQ ID NO: 388815 - DNA, 50 bp, Homo sapiens
tttccctcaacactgagaagattctgaaacttactcaagtttatagaact

SEQ ID NO: 388816 - DNA, 98 bp, Homo sapiens
gccagccgaggccatggtgctatactcttgaccctcacacccgctgggagtactgtgcaattaaaacatgcgcccgaggcctgacagacgcgggcagt

SEQ ID NO: 388817 - DNA, 80 bp, Homo sapiens
aggaccagactttgttaatgaaggtcaaaatgcagatcttcgtgaaaacccttaccggcaagaccatcacccttgaggtg

SEQ ID NO: 388818 - DNA, 90 bp, Homo sapiens
cccagcctaactgcccagtggcttccagatgtaaccaggctgattcaccccaagagtggccgttcctaccacgaggagttcaaccctcca

SEQ ID NO: 388819 - DNA, 97 bp, Homo sapiens
tcgaagcagcagctctcgctccagaagcttcactttgcagcagccgctcttctaaaacattcaaaccaaagaagaatatccctgaaggatctcatca

SEQ ID NO: 388820 - DNA, 74 bp, Homo sapiens
cgcgggtctgtcatcatgtcgcgttacgggcggtacggaggagtacctggagtagaacagaaaaattattatgt

SEQ ID NO: 388821 - DNA, 96 bp, Homo sapiens
cacagaagtcaacccaaagatctgtccgccgcgatggggaagccctggctgcgtgcgctacagctgctgctcctgctgggcgcgtcgtgggcgcgg

SEQ ID NO: 388822 - DNA, 97 bp, Homo sapiens
gcgcccgcctcatttgcgccttgcagcactgctggaccagttttcggctttgtgagaaaccttaccatcaaacacgatggccagcaacgttaccaac

SEQ ID NO: 388823 - DNA, 82 bp, Homo sapiens
aatcagattgagcgctgtaactctttaggtcagtcatatgaaattcggatgctggataatcggaaaatgggtgatatgcctg

SEQ ID NO: 388824 - DNA, 99 bp, Homo sapiens
aaagacaatgacttgcactgggaaccaatcagggacccagcagtggtgaactatgacaatgtagtggacacaggttctgaaacagatgaggaagacaag

SEQ ID NO: 388825 - DNA, 82 bp, Homo sapiens
cgacgagatcttccgcaacctggagaacgccaagcgcttcgccatcgacatagggagtgcatccgccccaacccttttcccc

SEQ ID NO: 388826 - DNA, 88 bp, Homo sapiens
cggcgcgagctcaagctgctgctgctcgatcatgatgctgccgccaccgccgccaccacggagcgagaagcccagatagacgccccgg

SEQ ID NO: 388827 - DNA, 75 bp, Homo sapiens
tcccaggacgactgtgtcagcaaagagcgcagctcctccaggtggtgatgatgtccagcaactctgtgaagcagg

SEQ ID NO: 388828 - DNA, 83 bp, Homo sapiens
cgccgcccccggagctgctggtttcattcgaggtttcgggccggagccagcaccgctctttgaccttgccatgcttgccttag

SEQ ID NO: 388829 - DNA, 113 bp, Homo sapiens
gtgattctgaagagggtctggaggagccttctcaagaacagaggaggaaattatcactgtttcaggaggagagttacttcaggaaccctgcggacagagggacagcccaccag

SEQ ID NO: 388830 - DNA, 83 bp, Homo sapiens
gggctgcggacgctcggtcccgcgctgcgcatccccgcggacgccacagcgctatgtgaagttcatttccaatccgccctcca

SEQ ID NO: 388831 - DNA, 100 bp, Homo sapiens
aaaaagcatcttaaagcaggctgcagatcttacacagattcaaccctatgaaaagataaaggccaggggcttgcctgataatatatcttccgtgttgaac

SEQ ID NO: 388832 - DNA, 51 bp, Homo sapiens
gcctcttctatcactgcctgaaaagacgagccttcacagttgttgatcaca

SEQ ID NO: 388833 - DNA, 100 bp, Homo sapiens
cgtggaggcagaggtggcatggggtcgcccggctcatggagatgggattttccagaggtgatgctttggaagccctgagagcttcaaacaatgacctcaa

SEQ ID NO: 388834 - DNA, 83 bp, Homo sapiens
agcggcaggaccagcgggcgggggcccacgacagcctcccgcgacgatgcccctcaacgttagcttcaccaacaggaactatg

SEQ ID NO: 388835 - DNA, 75 bp, Homo sapiens
cgacagggaggctgggcaggtgattccgtgaaggcttcgaagtatttaaaccatgtcagagctgcctcaccacag

SEQ ID NO: 388836 - DNA, 75 bp, Homo sapiens
caaaaactccaaactcctctccaccagcgccaagaggcaatccacctcgaagatccaagtctgcacctcctcgtg

SEQ ID NO: 388837 - DNA, 98 bp, Homo sapiens
tctgacttggaatatcgaattcgtcagcaaacagacatttacaaacagatacgtgctaataaggctccaggttatggagatgttaggttgtctttgga

SEQ ID NO: 388838 - DNA, 80 bp, Homo sapiens
cgtgctgtctggcgcttctcagaagccgcttgcgcgatctctggcctcttcaactgcatcaccatccaccctctgaacat

SEQ ID NO: 388839 - DNA, 95 bp, Homo sapiens
gttgctgccgccatacgcgctctccctgtttagggcgccctgcgtccggcagaggaggcgagcatcccgctcaggtgatgaggaacccctcgcgc

SEQ ID NO: 388840 - DNA, 101 bp, Homo sapiens
gggctgtgacgcgcgcgccggagcggggtccgatggttctcgaaggcccgcggcgccccgtgctgcagggattaaagcctgtggtttccacagaagcacca

SEQ ID NO: 388841 - DNA, 100 bp, Homo sapiens
gaaatgttgatgtggtacttgaagacacctgtactgttggactcagtggcctctgaggatgtggctgtgaacttcacacttgaggagtgggctttgctgg

SEQ ID NO: 388842 - DNA, 100 bp, Homo sapiens
aaggaactagaagaattgttgggacatcaggtcgtcctaaagtgctatgctggaaaatgagaagaagaagcgtgaaatggcagagaaggagaaagagaag

SEQ ID NO: 388843 - DNA, 100 bp, Homo sapiens
agaggctcaacttcatcactgagtacatcaagggcggcacgctccggggcatcatcaagagcatggggctggtggcagcagcgtcgtcataggtaatatt

SEQ ID NO: 388844 - DNA, 98 bp, Homo sapiens
tgtaccggcccaaccagaacggccgcggttggacacgagttgccgctggttgtccaaatcaacaaccaggtcgtccagctcctgctgaagcctgttct

SEQ ID NO: 388845 - DNA, 100 bp, Homo sapiens
aaactcctgggctcaagtggttctctcacttcagtctcccaagtagctgggactacagacatgtgccaccatgtccagctggatctaccatgaaagactt

SEQ ID NO: 388846 - DNA, 97 bp, Homo sapiens
tttttcatgctcctccttgctccaaagaaaagccggatggcaaaagagcccagaacctattgccccacaccagtgagaagcatcagcaccgtgaact

SEQ ID NO: 388847 - DNA, 100 bp, Homo sapiens
aatagagcattttgctacttttgtaattctgtacagaagttaccaatttgtgcacagtgtggcatagaatgtcaagctaaccaggcgtccgctacttcag

SEQ ID NO: 388848 - DNA, 103 bp, Homo sapiens
gcttcgacttagccctgctccaggaatgggacctcgagtcactgtgggactggtgattgcagctggaagtgcccatgaccgagctggcgtcctccgggggcgg

SEQ ID NO: 388849 - DNA, 78 bp, Homo sapiens
cctacgcagagctcatcgtccttggttacgcccccagtgacttgccggtcaaagcaaagcgcagcacctacaactaca

SEQ ID NO: 388850 - DNA, 82 bp, Homo sapiens
cctgcagagctgtggcttaccagaacctcaagaaggcatgaagccagcccctgcagtgccgtccacccgcccctctgggcct

SEQ ID NO: 388851 - DNA, 100 bp, Homo sapiens
ggagaaataaggctgcattacttttttggcacattcttcttttaggacctattgtgaggtgcctctggactcatcccctgccacctgccataacaacatc

SEQ ID NO: 388852 - DNA, 100 bp, Homo sapiens
gctccatgctcctcgatatcagtctatgagaagggtatttggaaactttgttacgacaagtcagcaatggccatatagcatattttcctgcaatgaaagc

SEQ ID NO: 388853 - DNA, 73 bp, Homo sapiens
cctcagcctccggagtagctgggattacaggtagtcaaaccacacactccattaataaggtttcctgacagaa

SEQ ID NO: 388854 - DNA, 75 bp, Homo sapiens
gcttcaaattggacttaagtctgaatttcggcagaatttaggtaatcagtccaaaaaccagcgtgccaaagcgtt

SEQ ID NO: 388855 - DNA, 97 bp, Homo sapiens
caaatgccaaaggaattggttatccagttatggctgcagcttcgattgccaatattgtaaaaagttctcttggtccagttggcttggataaaatgtt

SEQ ID NO: 388856 - DNA, 113 bp, Homo sapiens
gccagtcctgacaatgggcagaacgaattcagtgatatcattaagtccagatctgatggcaatcaggaattgtttccctgtgaagtctgtggaagacgttttgcagcagatgt

SEQ ID NO: 388857 - DNA, 49 bp, Homo sapiens
tgcgcaacgccaacctcaggcgagatggatgtaatccctgttcattact

SEQ ID NO: 388858 - DNA, 83 bp, Homo sapiens
ctttttcagaaatgcgcagagcaaacatctttcaaagcagcccctgtcaaagggaacaggaagcagtccacggagggtgacgc

SEQ ID NO: 388859 - DNA, 74 bp, Homo sapiens
atgagatcgaagacactttccgctacctgaacgacctggagcgtattgcacagagtgactacatccccacacag

SEQ ID NO: 388860 - DNA, 100 bp, Homo sapiens
tcgcccgaggcgaggaggagcgctggcggattgacttctaaggactcttggtacatgaggaagaaacccggaaggggaagaggaaagcaaaggcgtcagg

SEQ ID NO: 388861 - DNA, 100 bp, Homo sapiens
aagaggctgcccagaaagcagttaacagtgccaccggtgttccaactgtttaaagagaccttaatggacagaatcaagaaacagctacgtgaatgggatg

SEQ ID NO: 388862 - DNA, 87 bp, Homo sapiens
ctctgcctccttccgcatgtggtcccagatcgtcagtatttaaacagatcacatcatgcgtgagtacaagctagtggtccttggttc

SEQ ID NO: 388863 - DNA, 100 bp, Homo sapiens
ctagcatgaccgacgcgctgttgcccgcggccccccagccgctggagaaggagaacgacggctactttcggaagatccgagtgaagcctgacaggaccgg

SEQ ID NO: 388864 - DNA, 95 bp, Homo sapiens
tgaggagccccgagggggaccccggcctgggatgccccaccccaagggggctccagccttccagttgaaccggtatcgtgatttccgatacccac

SEQ ID NO: 388865 - DNA, 75 bp, Homo sapiens
tgggagtccatgtcccagccacacctcagggctctcctatgaaagtactgccaaatctgtcgaaagggagataat

SEQ ID NO: 388866 - DNA, 98 bp, Homo sapiens
gctcagcttccctgagctcgagatcggcttcaccaccgaccctcggatggcccgctcctccccctaccccactgacgtggcccgagtggtgaatgccc

SEQ ID NO: 388867 - DNA, 100 bp, Homo sapiens
ccgccgctgccgcctccgagcagcccgccagggttctgagcaaggttcaaccagtcaagaacaggccttatctgctcagcaagctgctgttattaacctt

SEQ ID NO: 388868 - DNA, 75 bp, Homo sapiens
agaacttccgtacgacctcgaggatgccatggtgttctggatcaacaagactctttttgatcagaacaatgctgc

SEQ ID NO: 388869 - DNA, 98 bp, Homo sapiens
aaagctctgttacgtctccaggatacctacaatttggatacagataccatctcaaagggtaatcttccagggccagcaccttctctctaaagcccaag

SEQ ID NO: 388870 - DNA, 74 bp, Homo sapiens
ccagtccccagctcgccagcgccaccctgaggcacaaactaactgtcatgtacagtcagatcaacggggcgtcg

SEQ ID NO: 388871 - DNA, 101 bp, Homo sapiens
gagcgagctgagtggttgtgtggtcgcgtctcggaaaccggtagcgcttgcagcatgactgattttgcacgatttagcggaacaaatgtggaaactgactt

SEQ ID NO: 388872 - DNA, 50 bp, Homo sapiens
cgacatcaagagctgcgagatccaacagagggaaaccaaagggcagtttc

SEQ ID NO: 388873 - DNA, 87 bp, Homo sapiens
aacacccccccatggaggcgaggtagagttggggtcgcagggtcttaccaggatgtgcttccagccctatacatatagccagctgca

SEQ ID NO: 388874 - DNA, 87 bp, Homo sapiens
tggaacaagggaaagagccctggatggttgtgagggatgagaaaagaagatggactctaggtgactctcctattccatctgtttctt

SEQ ID NO: 388875 - DNA, 90 bp, Homo sapiens
cccatcacctacagcaagccaacatccaggtattgatgaagatgaccctactgctgatgataccagtgctgctgtaactgaagaaatgcc

SEQ ID NO: 388876 - DNA, 78 bp, Homo sapiens
cctcttctaccaagtggctgagtacaccttccgccagactccaattccagggtttcagaaccgcatcgcagcatcttt

SEQ ID NO: 388877 - DNA, 50 bp, Homo sapiens
ctccgcgtcccgctcgctgggagagagattgagaggatccagaatccaga

SEQ ID NO: 388878 - DNA, 82 bp, Homo sapiens
tgaaatgtttgacgacactgatggtttgtgataatagagtgacatccttcagagacctcattcatgaccaagatgaagatga

SEQ ID NO: 388879 - DNA, 100 bp, Homo sapiens
cgaggagccccgggaggtgcttctgcggctgtacggagccatcttgcaggcagcctggcatcctcgctacaacctcattgttgtgggccgatacccagat

SEQ ID NO: 388880 - DNA, 100 bp, Homo sapiens
ctgactgtgcaggctgcaatgtgatctcactctgttgcccaggctggagtgcagtggcacaatcacagctgaccgcaaccttgacctcccaaggctcagg

SEQ ID NO: 388881 - DNA, 90 bp, Homo sapiens
cccattgcaggtcaaagtgcaagggcccaaaggtcctgaggaccagacagtgctgttggtgactgtccctgacttcagtgccacgcagac

SEQ ID NO: 388882 - DNA, 100 bp, Homo sapiens
ctagaaaccagtatttcttcttgtaagacaagcctgcagcgggttcagctgcatattgccatgtttcaggactggaagcaaccccaaaattagacgcaac

SEQ ID NO: 388883 - DNA, 101 bp, Homo sapiens
ggccaagctcccccggcaggcctcctcctctaccgtcaccgaagacttcagcgaggattccgagagtgagtatattgctccatgtgactgtcggcgggctt

SEQ ID NO: 388884 - DNA, 74 bp, Homo sapiens
gcagccgcttgtcagtgtgatgaagattggcacccagacaatgcagatcttcgtgaagactctgactggtaaga

SEQ ID NO: 388885 - DNA, 96 bp, Homo sapiens
cggcggtggaggctgaggcggcggccgaggcggcgacggaggaaacagaagatggtgagaagccctaccactgcaactgggacggctgcggctgga

SEQ ID NO: 388886 - DNA, 99 bp, Homo sapiens
atccttcttctggataacactgtacaagctttcaaagtcaatgttttgctgttactgctcagtgtagtcacaccttgaataagaaatggaaaaccttgg

SEQ ID NO: 388887 - DNA, 100 bp, Homo sapiens
aaccggggcacagccacctttataacaaccgctatgctggttgccgaacaagcaaccggaaaagcttaataggcaatgggcagtcaccagcattgcctcg

SEQ ID NO: 388888 - DNA, 100 bp, Homo sapiens
tgaggcagattatctgacctttccatctggggagtatgttgcagaagaaatctgtattgctgcttctaaagcttgtgagcagatcctgaagatagttaag

SEQ ID NO: 388889 - DNA, 82 bp, Homo sapiens
tggaagaaaaagatacaacgaactagcacaacgaggagtcttttattcaaaacttcagcgttctctatagtcccttgaaaag

SEQ ID NO: 388890 - DNA, 75 bp, Homo sapiens
gtcggcggcgcccggatgggcagctgaggccgactcgcgggccgctgcacccaccgccaaggacaaaaggagccc

SEQ ID NO: 388891 - DNA, 100 bp, Homo sapiens
acctcatctataacctccttgaaaaactgggatacatggatctggcctcaagactggtgattcttattgccaagtcccctctggctcccttcacctcatt

SEQ ID NO: 388892 - DNA, 97 bp, Homo sapiens
gaggcttccctggttgcttagctgggtctcggccacggcgtggagagcggcaaaatgcaccgacagagaagtccaacacaatctcctccagcagaca

SEQ ID NO: 388893 - DNA, 100 bp, Homo sapiens
cgagcctctcagccggccgggatggctaccacggccgagctcttcgagtccagttacaacacagggatcacaacaaacacaaccgccacagaagcactat

SEQ ID NO: 388894 - DNA, 100 bp, Homo sapiens
cggggaggagatcccggtgcagaagaacatcctggcggcggccagcccgtacatcagcaacagggagctgccaccaccgtgtactgtgctgctgtcccag

SEQ ID NO: 388895 - DNA, 75 bp, Homo sapiens
caaggcccaaaagcgtcaaactcaccaaaaacaacatctttccagaaagagtgcacagccagagaacaacacatc

SEQ ID NO: 388896 - DNA, 107 bp, Homo sapiens
gcccgacatggcgccggagctgaccccggaggaggagcaggtgatgagaagctacaaggcgaccatccagcagaccttggacatcctgttcctccgggaaggctccg

SEQ ID NO: 388897 - DNA, 100 bp, Homo sapiens
agttgatgacacctcaattgttgttcgctggagcagaccccaggctcccatcacaggtggacattgaagtggacctaattcggttttccttttaaaagcc

SEQ ID NO: 388898 - DNA, 100 bp, Homo sapiens
gtacttggcaatgaacagtgagggatacttgtacacctcggtgttcaggcgcttcgtggaggttggccgggtggcctatgtctcctttggacctcatgcc

SEQ ID NO: 388899 - DNA, 83 bp, Homo sapiens
cccatcttcggcatgtccttcgcctgccagtcgattttttatcaagcagaaatgcatcgaacaacgagaatcaagatcactga

SEQ ID NO: 388900 - DNA, 82 bp, Homo sapiens
acgagccggagatgccttctgcaggtgatgtgtccaatctagatcccaacttctcatttgaaggcaccaaactggatgtggg

SEQ ID NO: 388901 - DNA, 97 bp, Homo sapiens
tgatgccaccccagcccgtggtcctgatgccaacagtgtaccagcagggcgttggctatgtgcccatcacagaccattcctcaagaattttgtatcc

SEQ ID NO: 388902 - DNA, 83 bp, Homo sapiens
gaattttgggggaaaatgggaagaaatccacaaagcagtatgtttggccaaatggtgttggggatgtcctttgcactgaccct

SEQ ID NO: 388903 - DNA, 100 bp, Homo sapiens
ggtactctttcctcgtggaatttgaagattctacagataaatcagggagcggacatggactacgactcgtaccagcactatttctacgactatgactgcg

SEQ ID NO: 388904 - DNA, 74 bp, Homo sapiens
gaagaagttaaaacatttcagggcaagccaattatgaaacttattggagaagtgtttaatattgtgagccaaca

SEQ ID NO: 388905 - DNA, 100 bp, Homo sapiens
ccgtggtcagccgcttcgacgagcaggatgtttcgtctgaactcactttctgctttggcagaactggctgtgggttctcgatggtaccatggaggatcac

SEQ ID NO: 388906 - DNA, 90 bp, Homo sapiens
cctgtatctaaaaaagcaggaggcaagaaaggggcccggaaatccaaggtctatcagccacagtctctgcaagtttccaagagcagcaga

SEQ ID NO: 388907 - DNA, 75 bp, Homo sapiens
ggagaaaaagttcagtgggaagcatgtcgtctttatcgctcagggtgggagggatgaaggaaattatctggacga

SEQ ID NO: 388908 - DNA, 75 bp, Homo sapiens
catcccgctgccactgccgcagcccaatacctgcaaaggttttaaaatcaaagatgggaaaatcggagaaaattg

SEQ ID NO: 388909 - DNA, 100 bp, Homo sapiens
gtaacagaattaaccagagaaggtgaaacgatcatcgagctaaaatatcgtgttggtatcttctcagtcctcagcttggcctctgagtgcacaacccttg

SEQ ID NO: 388910 - DNA, 98 bp, Homo sapiens
ccagatttttgctcattaacagaaaagaagaggagaatgctaagcagagagtgacctgccgtgtggctatgaggctgaggaccaggccaagcttttcc

SEQ ID NO: 388911 - DNA, 74 bp, Homo sapiens
tggcggcagcggtgctgacggaccgggcccagaggctgacccgcggctgattgagtccctctcccagatgctgt

SEQ ID NO: 388912 - DNA, 100 bp, Homo sapiens
cctgacaaattatgctgcagcatattgtactggcctgctgctggcccgcagggagaagctagctgcacttgaatcaagtattgaacagcgactcaagtgg

SEQ ID NO: 388913 - DNA, 100 bp, Homo sapiens
taattttgcaattattaaatatgctatgccaagctcagccccgaagtgcttcagatgtagaggcttacatcaaaatctatcaaggagaagaacttccaca

SEQ ID NO: 388914 - DNA, 75 bp, Homo sapiens
aggacgttttcgaagatgccttggaaaccatctcaatgcttcccagctggcgtgtatgttgtaaagagagttctt

SEQ ID NO: 388915 - DNA, 75 bp, Homo sapiens
ggagctacctggaggaccagcgggcttctagaggagctgaatgcagaggcagataacaacgaacttgatgcaagt

SEQ ID NO: 388916 - DNA, 100 bp, Homo sapiens
tcctgattacgatgctttggatgttgccaacaaaagtccgaaattgaagttcagaggaagaattgccttccaccgcatcttatcagaccctatgggtgcc

SEQ ID NO: 388917 - DNA, 100 bp, Homo sapiens
attttacacccttggagaatgtgggctcatatccttttcagactacattttcctcacaactgttctttccagtgcacttacagagtgctacgatgaactg

SEQ ID NO: 388918 - DNA, 89 bp, Homo sapiens
cggcgcccggatgggcagctgagtttgaatcagcttgggtactgacaaatattgcttcaggaaattctcttcagacccgaattgtgatt

SEQ ID NO: 388919 - DNA, 88 bp, Homo sapiens
ggatgactcggagcccgggggcccccctgctcctcggcgtcggaccccccgagaaaatgaacctcaagaaggcatgaagccagcccct

SEQ ID NO: 388920 - DNA, 100 bp, Homo sapiens
gcggaaggaagtcatcattgccaaggatgcccttgtgcttactccagcctccttgtggaaacccagctctcctgtctcccagtgaagacttggatggcag

SEQ ID NO: 388921 - DNA, 76 bp, Homo sapiens
aactgagagttcaaatacaacaattgaggatgaagatgtgaaagagtatctgactgtcttctctcagatgattgca

SEQ ID NO: 388922 - DNA, 75 bp, Homo sapiens
cgagctttgatttgtttattgagtgccagcccggttcccggacagttacagaatgtctgaaggggacagtgtggg

SEQ ID NO: 388923 - DNA, 100 bp, Homo sapiens
cttcgtctccgagtttgcgactcgcggaccggcgtccccggcgcgaagaggctggactcggattcgttgcctgaggcagcagcccagacgcggcacagag

SEQ ID NO: 388924 - DNA, 101 bp, Homo sapiens
aggttcctgtgaacgtattaagaactgattcctctcatcaagcctgatgacagtcatgtccctttccagggacctcaaggacgactttcacagtgacacgg

SEQ ID NO: 388925 - DNA, 82 bp, Homo sapiens
ccgaaactttcaccgcgagcgggcttttaaggataccggaaaaacacccgtggagccggaggtggcaattcaccgaattcga

SEQ ID NO: 388926 - DNA, 82 bp, Homo sapiens
cgacgtcttgcctgtgtcccacttgttcgcggcctatagcaactccgatccaatatccgagaaattgagaaactttgtttga

SEQ ID NO: 388927 - DNA, 90 bp, Homo sapiens
gcagcccgtatcggggcctttatttctcgtcggcggcgccctgcaccgcgcctcgcaaagatcctggggcgtcctttggcagtcgattgc

SEQ ID NO: 388928 - DNA, 87 bp, Homo sapiens
aaactcagaaaatacgtggttggagagctcatctggaattttgccgatttcatgactaaccagtatttgcttgtaaatgcatcacga

SEQ ID NO: 388929 - DNA, 99 bp, Homo sapiens
acacaaggtcaagcctgacagcaaagtgttcctcttgaaacttacagcctatttagatcttaacctggataagtgctatgtgatccctctgaacacttc

SEQ ID NO: 388930 - DNA, 100 bp, Homo sapiens
aatgaagaccccattcggaaagacacctggccagcggtccagagctgatgcaggtcaagaacccagtatggaagggagaagtgaaaagttgaagaaaaat

SEQ ID NO: 388931 - DNA, 50 bp, Homo sapiens
ctggcgccgggtcccgcggggaaagctgccctgaggatctgtgtttggtg

SEQ ID NO: 388932 - DNA, 82 bp, Homo sapiens
aagccctcagtaccagagacagaagcagatggattcgtccttttaggcttgagtttgaagaaacagaagaacctgattttac

SEQ ID NO: 388933 - DNA, 100 bp, Homo sapiens
tccctcccggctgtagccaagaactattcggttctctacttccaacagaaggacattgccgagaatggctgcgcccccaccccagaagagcagctgccaa

SEQ ID NO: 388934 - DNA, 90 bp, Homo sapiens
ggcggctcccagtgccgcgcgccaagatccattcgttgccgccggaggggaagcttgggatcatggccatcaaccgtgctatgcagaaac

SEQ ID NO: 388935 - DNA, 102 bp, Homo sapiens
tgagaatcatgttgaagctaaacccatatgcaaagaccatgcgccggaacaccattcttcgccaggccaggaatgctgaaagtcacaacatgaaaaaccaac

SEQ ID NO: 388936 - DNA, 98 bp, Homo sapiens
aactcaaccccttctcttccaaaaggaggagtatttgaagacttctgagcggaggagtcgcatgtcagagctgtccttcagaaagataaatcaggcag

SEQ ID NO: 388937 - DNA, 90 bp, Homo sapiens
cctcaggatctggcatcagcccctcccatagccagatcgtaaagctgaaaattgaaatcatgaaagtagacaggactaaactgaagaaga

SEQ ID NO: 388938 - DNA, 119 bp, Homo sapiens
aaatttggaaggaaacagttccctgtcttgggaaaaggagaactcctgactgattagcattcacaccagccggatcgagctgggagatgtgacaccacacaatattaaacagttgaaaa

SEQ ID NO: 388939 - DNA, 100 bp, Homo sapiens
agcgaatcaaggagcgtgtggaggagaaagagggaatccccccacaacagcagaggctcatctacagtggcaagcagataaatatcttcccttccaacct

SEQ ID NO: 388940 - DNA, 98 bp, Homo sapiens
ggtgctaagcatggaaacatccaagtcagctgtgtggagtgttctaaccaacaaggaagaagtttatgcgaattccatgtgtggatgctggattgatt

SEQ ID NO: 388941 - DNA, 50 bp, Homo sapiens
ctgggcctgcccttcaccctctacatggatgcctttgtggaactgtacgg

SEQ ID NO: 388942 - DNA, 100 bp, Homo sapiens
tagacagcaaaagtggtattccaccttcctttataacactacagattaaagactttctgaatggaccagtttgcaatggattttggataaacaagatctg

SEQ ID NO: 388943 - DNA, 90 bp, Homo sapiens
aattaaaggagtcgagagacttatctccggacaacaaggttgcccccaagtttcctggcagtgtgtgatactgaggaggtgagcttgttt

SEQ ID NO: 388944 - DNA, 97 bp, Homo sapiens
caaatggagaactggtcaaaagatgtgctcatcttttgctacgggacccagacaatacgatggaatattctatgaatttcgttcttattaccttaag

SEQ ID NO: 388945 - DNA, 82 bp, Homo sapiens
caagtacaagcggcgggtgccccggatagccatccgagcttgtttcctggggtttgtgttcggctgcggcacgctgctaagt

SEQ ID NO: 388946 - DNA, 100 bp, Homo sapiens
gaaataacccttgatcctcctcctaattgcagcttacagcctggatgcctgtcaccaaatccctttgagcagtgacctgagccacctggtggcagaggta

SEQ ID NO: 388947 - DNA, 75 bp, Homo sapiens
aaagatatattacatgctgcaaagcagataggtccatctgaactgtttactgtttgttcatcgattagcagaaga

SEQ ID NO: 388948 - DNA, 110 bp, Homo sapiens
acaaatacttattcatcaacagcagtttcagcagttgttaaattctcaacagctcacaccagcacctgaatggacagaagaggacctcagccaactgacaagaagtatgg

SEQ ID NO: 388949 - DNA, 80 bp, Homo sapiens
gtcggaacagaaccaaaggctattggatcagctcagcagggttttcctttggaatatggataaatacaccatgatacgga

SEQ ID NO: 388950 - DNA, 100 bp, Homo sapiens
cgttctgaagcccgagaggagccacaatggagacgccgccgctgcctcccgcagttttgccgaattgacaagcccctgtgtcacagtgaggatgagaaac

SEQ ID NO: 388951 - DNA, 100 bp, Homo sapiens
ggccaggtttactggagtaggtgttagtaaggtatcattggaacatttcaagatcatcaaatcaaattccacagggattggtgaccaaccagaaggctca

SEQ ID NO: 388952 - DNA, 74 bp, Homo sapiens
tcgaggtggagaagaaggacaagcttgcgggtccccagctgctgagcagctccaggacatcctgggggaggaag

SEQ ID NO: 388953 - DNA, 100 bp, Homo sapiens
ataaaattctgcttgttaagaacaagtttggctctggcatgggcaagaaggacgaccccaagctgatgcaggagtggttcaagctagtgcaggagaagaa

SEQ ID NO: 388954 - DNA, 50 bp, Homo sapiens
agaaaattgaacttttgtgccaggaccagaagggaaagatttcagcattc

SEQ ID NO: 388955 - DNA, 100 bp, Homo sapiens
gcctgttcctggcccgcagccgccacctacccagtgaccatgatagatgaacacaatgacgtacagaagaaaacctttaccaaatggataaatgctcgat

SEQ ID NO: 388956 - DNA, 100 bp, Homo sapiens
gaggaatcgctgaagagcccagtaccagttcagcaagtgtctctactgtcagaccacacacagaaaaaatgagcaggcggaattgttggatttgtaagat

SEQ ID NO: 388957 - DNA, 82 bp, Homo sapiens
tggcctgttatttgtctcaacaaaagaacttaattcagtgcacaaatgagatgaatgtgaacatcccacagttggcagacag

SEQ ID NO: 388958 - DNA, 50 bp, Homo sapiens
ttttggcagttctaaatttgaatttgaggaaggctttgtgatacctgatg

SEQ ID NO: 388959 - DNA, 75 bp, Homo sapiens
cctgaggagccggaccgatgtggaaactgctgcccgccgcgggcccggcaggagacaatgcagatcttcgtgaag

SEQ ID NO: 388960 - DNA, 75 bp, Homo sapiens
gaggcctgtctggctcctttctctacacaggagaaaggggagtgtgtttgcctacagtgtctctctggatcctct

SEQ ID NO: 388961 - DNA, 98 bp, Homo sapiens
cgggacggctctgtaggaaggaacttggttccccctccctcagcttccgccccaaaaggaagaaggtagataatgactataatgcccttcgagaaaga

SEQ ID NO: 388962 - DNA, 75 bp, Homo sapiens
acaaggatagttttggctgatgtgagtctactcttcatcttgtgttgagacttcgtggtggtgctaagaaaagga

SEQ ID NO: 388963 - DNA, 96 bp, Homo sapiens
gagacgacccgctcctgcatgtgcacagccggctatagcctccggagtggccagcaggcctgcgaggctatcatggtgaacttacttcagattgtg

SEQ ID NO: 388964 - DNA, 50 bp, Homo sapiens
ggcagcagttcgtgaagtctgtgaggagaacatcatcaagaaggtgatcg

SEQ ID NO: 388965 - DNA, 74 bp, Homo sapiens
ctttggaaacgacgtcatgtgttaggctgacgtgatggcagacagggttccccgctgcccggtctgcaccggcg

SEQ ID NO: 388966 - DNA, 98 bp, Homo sapiens
agacatcaaaacctggaccttctggattacaggccaaattagcaagccaggtgtggtgtcttacacctgtaatcccagcactgtgggaagccagggca

SEQ ID NO: 388967 - DNA, 48 bp, Homo sapiens
gtgaggaaaggcacctccaccagccaaaagaatgcaatggtgtaaaga

SEQ ID NO: 388968 - DNA, 100 bp, Homo sapiens
ctcggatcgaatccctcacgcgggcgcggatcgaccggagcagagagctggcgagcaaggttagcatacgtatcaaggacagtaactaccatggctcccg

SEQ ID NO: 388969 - DNA, 98 bp, Homo sapiens
aaccagtatttgcaacccacactgccccctgttgtcataggtggtttcatcagtttcaatggctcctggagggtccagggaatcctggccatgtctcg

SEQ ID NO: 388970 - DNA, 100 bp, Homo sapiens
tctgagctttccaagcctgttgtttatgatgtctgcgatgatcaagagatccagaagaggctcgctgagcagcaggtcatttcttcagatagctccccag

SEQ ID NO: 388971 - DNA, 90 bp, Homo sapiens
cgcgtccgccgattcctcctccttggtcgccgcgtccttggctggcgtctttccccagacatggccaacaagggtccttcctatggcatg

SEQ ID NO: 388972 - DNA, 100 bp, Homo sapiens
gatcttccagctcccctcacccaacgtcgtgtggcccgaggcagccgggatgacagctctccccaggaatcctgctgcctgctgagaaacatggtcagca

SEQ ID NO: 388973 - DNA, 100 bp, Homo sapiens
agccaagaaatttccaactggagatctgactgcagccatgagcagcaatgagtgcttcaagtgtggacgatctggccactgggcccgggaatgtcctact

SEQ ID NO: 388974 - DNA, 100 bp, Homo sapiens
gggacacgccaaacctgagtttctacagaaatgagatccgcttcctgcccaacgattctgaaaaagagttccacgtcctcccttatcgagtctttgttcc

SEQ ID NO: 388975 - DNA, 75 bp, Homo sapiens
aaactctgggatctacaaggcagctttcccactccatgattttctctgtttgaagaacataaggacatttctcac

SEQ ID NO: 388976 - DNA, 83 bp, Homo sapiens
gctgtgctctgtgaagaaccaggagcggattctccgcgaggtgtgcagagtgctgagaccggatgtggtaccacagattgtcc

SEQ ID NO: 388977 - DNA, 100 bp, Homo sapiens
cgcgactcgagggtgacgctcgctccgctcgtcccgctcgtcatggcctacccgggatacggaggagggttcgatcctttggtacagaagacagaccgac

SEQ ID NO: 388978 - DNA, 83 bp, Homo sapiens
gagacgagccccgagcccggctggacgccgctgcctcaggcctggtctccaagtcctctcctaagaagcctcgtggacgtaac

SEQ ID NO: 388979 - DNA, 100 bp, Homo sapiens
attacaagagatttcgactgtggaagctctgcctcctcctccatctcccttcagggaccagcgtcaccctccaccatgcaagatctcaacaccatgttgt

SEQ ID NO: 388980 - DNA, 100 bp, Homo sapiens
aaaccacagactacgagggagtttgacagctattaaaaccagggctccacagttaggagccaggtctaaactgcagtaatccatttactcagctggagag

SEQ ID NO: 388981 - DNA, 100 bp, Homo sapiens
aggaaatgattatagaaatatccaagggacgttcagggcttggtctcagcattgtgggaggaaaagacacacccttgctgatgttctaatcatgtcagat

SEQ ID NO: 388982 - DNA, 75 bp, Homo sapiens
atcccttgctcccatccctgcagcatgaacaagtaaataacagatgcgggtgaaagatccaactaaagctttacc

SEQ ID NO: 388983 - DNA, 75 bp, Homo sapiens
caagggactgtgtccaccctcaggcttgggcactgtttaaaggaaagttccgagaaggcatcgacaagccggacc

SEQ ID NO: 388984 - DNA, 75 bp, Homo sapiens
ccagagctagcaaatcacccaaactcccaagacgcccactattgcttggttctacttcctttatcccgattggcc

SEQ ID NO: 388985 - DNA, 75 bp, Homo sapiens
gaggcttactgcaagaagtatgagcagctcaaggtgaacgaggtggtcttcagccccggggagtcccactgcgcc

SEQ ID NO: 388986 - DNA, 97 bp, Homo sapiens
catcattaaggacggaggcacggttagagccacagctgaaacaactacaaacaaaatatgatgaacttaaagagagaaagtcttcccttaggaatgc

SEQ ID NO: 388987 - DNA, 95 bp, Homo sapiens
ggaagcctgtcacttttgactgtgcagtgaaaccatctgttacctgtgttgaagaaggagagacgaccatcttgcaactagaaaaagatttgcgc

SEQ ID NO: 388988 - DNA, 75 bp, Homo sapiens
atttcaaacgaaaatgtcaagatccttgccggtgtcctgggattacaaggcagagaaaatcctgaaggagcaaga

SEQ ID NO: 388989 - DNA, 100 bp, Homo sapiens
cttacataatgcattggaacatgacatgagattaagaggcgtgcaaagactccagaattggaggcatgatgaagactctgctgctgtttgtggggctgct

SEQ ID NO: 388990 - DNA, 83 bp, Homo sapiens
acccggacctttccgagctgcttatggtgtctgccccaagtagttggcaaaaaaggagaaagccactaaggtacaaaagacac

SEQ ID NO: 388991 - DNA, 100 bp, Homo sapiens
cagtttcaaaagaattggccaaagaagttgagaaaatgggagcagttttcatggatgcccctgtttctggtgcggccctccaggcactgaagcgtaagaa

SEQ ID NO: 388992 - DNA, 100 bp, Homo sapiens
ttacaatttgtaaaagcaaatgatgatgtagctcaagagattgctgaaagacaccaactctacaacattacctgtcatatactgaagaatctcttcttcc

SEQ ID NO: 388993 - DNA, 87 bp, Homo sapiens
gcgttagtcaccagctgctcctccgtcttctcaggagaccagctggtccaacggacttcagtactagtgctaataacatccagattg

SEQ ID NO: 388994 - DNA, 88 bp, Homo sapiens
gaagattcaccaaataagctatatactttggttacctatgtacctgttaccactttcaaaactcagaattctgcaaatgcagattttg

SEQ ID NO: 388995 - DNA, 83 bp, Homo sapiens
cttgtcccagcacacgcctgtggaggagcaggcccagcacagcgacctggccctggaatcaaccctgcctaccggactgagga

SEQ ID NO: 388996 - DNA, 98 bp, Homo sapiens
gccgccagtaccaggcgctggagaaggacgaagaggaagccttggcagagtggctcctcacagcctgaagctcatccttctgcacgggccagccaggc

SEQ ID NO: 388997 - DNA, 101 bp, Homo sapiens
agtctatttaccagataatattaatgaaggacaagtacaagttagaactctttatctttctgtggatccttacatgctgagatctgtatctgtggacctga

SEQ ID NO: 388998 - DNA, 83 bp, Homo sapiens
cccgacctctcctcactctcgctcgccgtttccaggagcacagtgttctggacttggtgcctctttctgttatatgctttcct

SEQ ID NO: 388999 - DNA, 100 bp, Homo sapiens
ctggtctcggcttccagctcgcgggttcagggaagaaatggtggagtcaatgaagaaagtagcagggatggatgtggagctgacagttgaagaaagaaac

SEQ ID NO: 389000 - DNA, 100 bp, Homo sapiens
agggcgttcccatggagccagggcaattccagtcttagaggcacgagcctgtgcagctgccggacagagtgggctgatggccttgtatgaggctatgttt

SEQ ID NO: 389001 - DNA, 75 bp, Homo sapiens
ctccagtggagagttcttacggtgctggagaatctggtaaaagcaccattgtgaagcagatgaggatcctgcatg

SEQ ID NO: 389002 - DNA, 128 bp, Homo sapiens
gtgtaatggtaaaattatatccaaatatgactgcggtactgcttcataacacacaacttgatcaacgaaaggtgaacacacagtgttcatcccctcaggaggacacagcttttgaggtaccatcttgg

SEQ ID NO: 389003 - DNA, 75 bp, Homo sapiens
ctcttctccatgatcgaatccggcctcattgtgggccaaactgaaattgcagaaggcttcagaacgatggcagcc

SEQ ID NO: 389004 - DNA, 100 bp, Homo sapiens
tggtgctcaagactttctccgaggagaatgacatcttcctgggctgggaaaaaggagcttataagaaatggggaaagagtaagaaaaaatgttcagatct

SEQ ID NO: 389005 - DNA, 97 bp, Homo sapiens
accacgtcgttccgcgacggcctggctttctgcgccatcctgcaccgccaccggcccgacctcattttgaagaaaacaggtctgaaacaaggtctta

SEQ ID NO: 389006 - DNA, 99 bp, Homo sapiens
ctgagctgttactaggacaaccaatatttccaggggatagtggtgtggatcagttggtagaaataatcaaggtgaccaagaatatggcccaggtgacca

SEQ ID NO: 389007 - DNA, 97 bp, Homo sapiens
gcaacaggaacaagatgtgaactgtttctcttctgcagaaaaagaggctcttcctcctcctcccgcgacgataacgtggttagaaggccattcactg

SEQ ID NO: 389008 - DNA, 87 bp, Homo sapiens
gaacttgaaggttaaaccactagcccatttcacaggggacccccggagaccctacccaactgatttagagatgagaagtgggttact

SEQ ID NO: 389009 - DNA, 98 bp, Homo sapiens
tgtcctgagatcaaatggcacttcattggccacctacagaaacaaaatgtcaacaaattgatgggtgtctgatgatttgtgagcctcaagtgactact

SEQ ID NO: 389010 - DNA, 100 bp, Homo sapiens
ccgggagtcgctgagcggccaggccgtgcgccggcctttggtcgcctccgtgggcctcaatggcagtacatgccacactactacccttcctgctcttgtg

SEQ ID NO: 389011 - DNA, 95 bp, Homo sapiens
ctgtggcccttgtctcctcttcaggatgaccggaaagaagggatgaccgcgtttgtggaaaagagaaaggccaacttcaaagaccagtgagaacc

SEQ ID NO: 389012 - DNA, 89 bp, Homo sapiens
agcgcgagggccctgggcaaggcccgacagttacagaatgtctgaaggggacagtgtgggagaatccgtccatgggaaaccttcggtgg

SEQ ID NO: 389013 - DNA, 75 bp, Homo sapiens
ccaaagagttttaccagaagtacgaccctaaggacgtcatcggcagatgtcagtattgaatatggtggtgaggcg

SEQ ID NO: 389014 - DNA, 75 bp, Homo sapiens
tgtctgcccggttccgcctggccatgagcctggctcaggcctgcatgctgccactgcagagccccgccatggaag

SEQ ID NO: 389015 - DNA, 74 bp, Homo sapiens
tggcgtctaggagagatggtcacccgcctgcctgttggctggttccctgccaactacgtggaggaagattattc

SEQ ID NO: 389016 - DNA, 87 bp, Homo sapiens
agtggtccccgaaggctatttcgccgctggcgtcaggactattttcacgttttaatgccgagaggcagttccggcgaggggggagcc

SEQ ID NO: 389017 - DNA, 100 bp, Homo sapiens
cagtttctttgtcatgtagccaagactggagaaacaattttgtcccatgaggagcacccccatagccatcctctctatggacatggtgtatgcaagtggc

SEQ ID NO: 389018 - DNA, 90 bp, Homo sapiens
ggatgtcgggacaccccggaagctgggaaatgatacattccaccgttgatctgggggaaaagtggacacatccagacagccttgtatggg

SEQ ID NO: 389019 - DNA, 75 bp, Homo sapiens
tgagagcagcggcagccggcggtgcagcagccggccgacccagagtgtattaatctctggagaagacacatccac

SEQ ID NO: 389020 - DNA, 75 bp, Homo sapiens
gaaaatgtccttccagcgctgcgcccggacagacaagaaatcatattccatgcccatcagcattgaatttcagcg

SEQ ID NO: 389021 - DNA, 82 bp, Homo sapiens
ggcagcctcccctcggaactcgggcatcatggcctcaggaggactccctcaatgtggctgacttgacttccctccgggcccc

SEQ ID NO: 389022 - DNA, 75 bp, Homo sapiens
gtacttctgccactgctgctccgtggagatcgtcccgcgcctgccgagagtcacaccccaaagcctctttattct

SEQ ID NO: 389023 - DNA, 80 bp, Homo sapiens
gcttcatgaactccaagccaaaatcacagctttgagtgagaaacaggttttgagcaaaattttggactgtgaagcaaggc

SEQ ID NO: 389024 - DNA, 101 bp, Homo sapiens
ccagcctctcctatgactccagcctgagcagcagactgatgaccttctgaggatgacagaatcctggttttcttctttatctcgggatccactggagctct

SEQ ID NO: 389025 - DNA, 82 bp, Homo sapiens
cctcctgaggaggacccagagcaggacagcggcccggaggacctgcctctcgtcagtttggtgccctggttgtcagatgttg

SEQ ID NO: 389026 - DNA, 101 bp, Homo sapiens
gtgaatctggcaatggtggactatccttatgcctctaactttttacagcctttgcctgcttggcctatcaaggaaaccacccctactcctaatcccccgac

SEQ ID NO: 389027 - DNA, 101 bp, Homo sapiens
ccagagaaaataatgcagtgtatgccttcttaggcttgacagccccacctggttcaaagtgctattaccacagctactggcactccatggtctatgtgcca

SEQ ID NO: 389028 - DNA, 100 bp, Homo sapiens
tcctaccatggtatttgctaacgtttagagagtgcttccccttgccgagcactgggttgctccttgagggcaggacagttcttatggctttatccgttgc

SEQ ID NO: 389029 - DNA, 75 bp, Homo sapiens
ctgcagaaatgggtgccggaatctgtctcctgatcatcattcagggtatacagggagctaccctgtgtttctgag

SEQ ID NO: 389030 - DNA, 82 bp, Homo sapiens
cgcggctgtgcaagtacctgccagagaacgacctgaaggtccgcgggagagctgtggggcttggtgagtgtttcgtggcctc

SEQ ID NO: 389031 - DNA, 75 bp, Homo sapiens
atcatcattgttggagatgagatccttaagaaatgaagctgttgtcatttctggaaggaaactggcccagcagat

SEQ ID NO: 389032 - DNA, 82 bp, Homo sapiens
agcagctcggcccgcctctttgagaggtctcgcattaaggctctggcagcacagccatgacagtgcagatcctgctgaagct

SEQ ID NO: 389033 - DNA, 101 bp, Homo sapiens
ggtgaacggagctttcgcagctggagaagagtctttgtggaagtggtgaaaagtacatcccacctcatgtgaggcaagctgaggagacagtggacttcaag

SEQ ID NO: 389034 - DNA, 100 bp, Homo sapiens
ttggtgctgagtatccagcaagagtgaccggggtgaagaagcaaagactcgcattagtgccagcagtagttcccaagggctgtctcagccatccacccag

SEQ ID NO: 389035 - DNA, 50 bp, Homo sapiens
ttcccatgggggtctgtctccaaggtcattttatgccacctgaaaaagta

SEQ ID NO: 389036 - DNA, 102 bp, Homo sapiens
gaattcagaaggagctggcggacatcactttagaccctccacctaattgcagaattcagaaggaacttgcagaaatcacattggaccctcctcccaactgta

SEQ ID NO: 389037 - DNA, 94 bp, Homo sapiens
gaagacagaagacctgaagaacagcgcccagcagtttgcagaaactgcgcacaaggacatttgtgaagatatttctgatcatgttgagcaaatc

SEQ ID NO: 389038 - DNA, 97 bp, Homo sapiens
ctcgcccgccaccctgcgctgccgccgctctgaggagttaaaggttgaaaggattgttgacaaaaggaaaaataaaaaagggaagacagagtatttg

SEQ ID NO: 389039 - DNA, 90 bp, Homo sapiens
atgagaaggttcagttggcaaaccagatatatgacttggtcctatggcagcgtatacaaagctattcataaagagaccggccagattgtt

SEQ ID NO: 389040 - DNA, 100 bp, Homo sapiens
tggggaatttcccaccaggatgagtatgattggctgtgattttagacgctctgctgttgcccgtattcaggagttcttcagacggagaaaagaaaggaaa

SEQ ID NO: 389041 - DNA, 75 bp, Homo sapiens
cgatcaggtcattgccagcggttcagaggactgcacggtcatggccgagcatgtcgggactccacctggtgaaga

SEQ ID NO: 389042 - DNA, 100 bp, Homo sapiens
caggagccaggtatttacacctggccagagaagacacgaataatctgttcagacctgcgtgatttgtacaatgtactttatttctgctacgagtaatttc

SEQ ID NO: 389043 - DNA, 98 bp, Homo sapiens
aggagttcgtctcttacgtctgcggaagtgcagctgcctcagttcttagcgcagaaacgggtatgcaggagattagaagccagtgggcatgagcgtgg

SEQ ID NO: 389044 - DNA, 100 bp, Homo sapiens
tgaagaattaaatttagagaacaataacatttctactttaccagagccatcagagggttctcgcttcagcacaagatccggagttttgaagaagcgcgag

SEQ ID NO: 389045 - DNA, 90 bp, Homo sapiens
attggaacttcatcaacagtttgaaacatttattccatattctcagggttgcttcacccacaccgtcatgtactacggccactacagtaa

SEQ ID NO: 389046 - DNA, 90 bp, Homo sapiens
catgtcagccttcccagtagctgggaccacaggaagagagaagggcacagttacctaagtatcaacgtaatcttcctcggccaggacagg

SEQ ID NO: 389047 - DNA, 98 bp, Homo sapiens
ctccttcaacccgtggctgatagctgaaaggcagttatacttaagcatgaacattgacgacaaactggaaggattgtttcttaaatgtggcggcatag

SEQ ID NO: 389048 - DNA, 83 bp, Homo sapiens
atttgaccatcttggtgagaaacattaagacctactaccagaagctgaacatggttatgcctccatgttaccatacaataaca

SEQ ID NO: 389049 - DNA, 75 bp, Homo sapiens
cagattcgcagtggtcgcttcttctccttggttgcagaggcagtgttaacatcccaactgaaagcacatcaagag

SEQ ID NO: 389050 - DNA, 83 bp, Homo sapiens
caagagtccttggaagtgcagagaggtgagacactcgccgcaccccgacagagcagcccgacggccatggaggctgaagagac

SEQ ID NO: 389051 - DNA, 74 bp, Homo sapiens
gggaggtaccaggtatttgagagcaatcgccaccgctttcctggaacttgaggatctttcgaagatggtttggc

SEQ ID NO: 389052 - DNA, 75 bp, Homo sapiens
agaaaacagaaatcgaaacagatacagagatgtaagcccatatcactgtgtccactactatgatcttcgtaacac

SEQ ID NO: 389053 - DNA, 100 bp, Homo sapiens
gccgccggcggccaagcagccaaccatgctcaacttcggtgcctctctccagcagactgcgggcgtgatggtgggcatgggtcagaaggattcctatgtg

SEQ ID NO: 389054 - DNA, 100 bp, Homo sapiens
cgtcatctttccaaagaagagtgagtagcttggttggtggtaccctaaaattagggcatgattaagctggtcctatagtacccctcctcaggaatgtctc

SEQ ID NO: 389055 - DNA, 100 bp, Homo sapiens
gaaggcggcggctctctggtccgcagcggcaacagtaacgaaaaacagggctgtcctggatgcctcatcccttagtttcaacaccagattgaaatggttt

SEQ ID NO: 389056 - DNA, 90 bp, Homo sapiens
gcattttccaggataactgtgactccaggtatcgtcagatcctggaaaaagccattcagttatctggagcagaacaactagaagctttga

SEQ ID NO: 389057 - DNA, 83 bp, Homo sapiens
ccctatctcagcagtgatggggagagccatagcggtattgctattaaggagtcagcaaaagtgggtgatcaagctcaaaggag

SEQ ID NO: 389058 - DNA, 100 bp, Homo sapiens
gcatgacatcagtgacgagagggagagcaagaccatcatgctgcgcggccttcccatcaccatcacagagagcgatgggccttcagaaggaagaagttgt

SEQ ID NO: 389059 - DNA, 100 bp, Homo sapiens
caggtgtggaacgcctagctcttgtcacaggtggttctgacaaccatttgatccttgtggatctccgttccaaaggcacagatggtggaagggctgagaa

SEQ ID NO: 389060 - DNA, 85 bp, Homo sapiens
ccccaaggagccacacctggaccagaccccaggaaagggttcccagcaccatgagggcctggatcttctttctcctttgcctggc

SEQ ID NO: 389061 - DNA, 100 bp, Homo sapiens
gttaggagtccgggggttcgcccgcggaggccggggagcagccgaccatggagccccagagctgaactcacgggaatcaaatggcgtaggtacaattttg

SEQ ID NO: 389062 - DNA, 100 bp, Homo sapiens
tcccagacaaatggaagtgttatgatgcccttcgaaaaatgatcaactattgaccatataggagaaactcccatgtatggaatcccactgtatgatttat

SEQ ID NO: 389063 - DNA, 75 bp, Homo sapiens
aaaaattgcacttctaagaaaagcttttcagctgaaccttcacctagccccaggattacaaggaaaagcaccagg

SEQ ID NO: 389064 - DNA, 98 bp, Homo sapiens
aagatccaggagctgttccacgtggagccaggcctgcagaggctgttctacaggggcaaacaggaaccatcactgttgctggaggcacctgacaaatc

SEQ ID NO: 389065 - DNA, 98 bp, Homo sapiens
cggctggtccaggccttccagtacacagacgagcatggggaaggcaattttcgttctgctctcaatgatgtgacagctgccagaaagctaaaaccctg

SEQ ID NO: 389066 - DNA, 97 bp, Homo sapiens
actgccattaacctccagctttttaagcaggtgattgatgagatttatcgtgtgttgagatatgtcaattctaccagagcccctcaacgagctcatg

SEQ ID NO: 389067 - DNA, 50 bp, Homo sapiens
tctccgccctggggtcattgtcaggatggcagaggcggaattgcacaagg

SEQ ID NO: 389068 - DNA, 98 bp, Homo sapiens
tggggcagacaatgtatttatctgaggccgtgtacctcaacgactccacctatgacggacataccgtgggcggggtgaggacgcttgagcggaagtta

SEQ ID NO: 389069 - DNA, 49 bp, Homo sapiens
ttgaagcactacaaacaagcagctgaagtgctgatggcagagattggtg

SEQ ID NO: 389070 - DNA, 50 bp, Homo sapiens
gatttatgaagcatatcagcagctcttttaagagcctgtgccgatggagg

SEQ ID NO: 389071 - DNA, 97 bp, Homo sapiens
cgcggccgttagtcatgtcgggactgagcagggggaggaacatttaagctgatggaagtggaagtggaagttgctgtacattggcagcaaggcctcc

SEQ ID NO: 389072 - DNA, 82 bp, Homo sapiens
ggcgggacagcggccccctggagggggcagtcccgggagaacctgcggcggccggagcggctggcgcccatgcggctctaca

SEQ ID NO: 389073 - DNA, 100 bp, Homo sapiens
gacagaccggggggtgcgagagcagtcataccctaatgatcccagcaagataatgtcctgtcttctaagatgtgcatcaagcctggtacatactgaaaac

SEQ ID NO: 389074 - DNA, 82 bp, Homo sapiens
tctttgctttgcatatcaagttgccaaaggaatggaatttctggaatttaagtcgggcaactccaacaacattgccaccgtg

SEQ ID NO: 389075 - DNA, 75 bp, Homo sapiens
gtctccgccggctactgccgcttcagttctcccggtgtggccacgagtcgggtatcaaattgtagtggaaataat

SEQ ID NO: 389076 - DNA, 73 bp, Homo sapiens
cacttccccggggtgtaataatgttaactgagattccagaggggtgactaccatattgatgtctgtatcaatg

SEQ ID NO: 389077 - DNA, 88 bp, Homo sapiens
tgtcaggcctgcggcccggcactcaagtggaccctgagattgagctttttgtaaaggtttggaagaggacagttgccctttattctgg

SEQ ID NO: 389078 - DNA, 100 bp, Homo sapiens
tggatgccaatctgaatatcaaaatagcagatgaacagtgctttgagacaaatgtcatatggtggaaaatttggttcttcacctctggatcaatcaggat

SEQ ID NO: 389079 - DNA, 82 bp, Homo sapiens
cgaaggcctgaggctgaacaacatgaataaatatgactacgtgctcacaggttctgcggggagtgtctccagccctgcctgc

SEQ ID NO: 389080 - DNA, 98 bp, Homo sapiens
atttccctgagccactccatgatttgggccattgaaagtcgtttggactgggagactcttgtgcacgaaaatctgcccgggctaatggaaatggatca

SEQ ID NO: 389081 - DNA, 100 bp, Homo sapiens
gtttatgccaaatcaactgccttacagcttcttggacacttaatgattgttggcaagaaatgtgctgctgatctgggcctgaataagggttatcgaatgg

SEQ ID NO: 389082 - DNA, 80 bp, Homo sapiens
gaacgaggcaaggagctaaagcagcgtgcgttcagccctgggcagtcctgcgttaactgcggccgggaggctatgagcga

SEQ ID NO: 389083 - DNA, 105 bp, Homo sapiens
cagaggttcccacagttcatcctcctgctccagatgttggggatcagccaggtgaggtaggttattcaggctctcctgctgaagctcctccaagcaagtcaccat

SEQ ID NO: 389084 - DNA, 100 bp, Homo sapiens
aagtattttcagcgagggtactgtatttatggagaccgctgcagtacctttgtgttggatgaatttaagcgcaagtactccaatgaggacacactctctg

SEQ ID NO: 389085 - DNA, 95 bp, Homo sapiens
tacctcaggggccgtccccaggacactgtccggatcttccctccctgatctcttccgttccctgctggcagttcatcagctggatcagccacatg

SEQ ID NO: 389086 - DNA, 100 bp, Homo sapiens
tgacccacgcggaggccgtcaagcaaagggttaccttccagttcaacatttaccttggaagaggggaccatctacttgaccgctgagcccaacactctgg

SEQ ID NO: 389087 - DNA, 99 bp, Homo sapiens
ctggcagctccactgccgtcaactcctgttctcctcagagcctggtcatgcaagacaagataatctgccttccgaaaagagtgcagcctgctcagaacc

SEQ ID NO: 389088 - DNA, 83 bp, Homo sapiens
cttggggttaattttccactctcctttccaaacctttgcagctgccctttgttaaaggttgtatcagagtaagatggacggta

SEQ ID NO: 389089 - DNA, 98 bp, Homo sapiens
ctcgatccagcaccatggggaagcgggacaatcgggtgctcattgctatggacagtgctatcaccctgtggcagttccttcttcagctcctgcagaag

SEQ ID NO: 389090 - DNA, 83 bp, Homo sapiens
ctcggggacattattgcgcgtggaacggctgcttttggaaggccgccatggcatcagatgaaggcaaactttttgttggaggg

SEQ ID NO: 389091 - DNA, 98 bp, Homo sapiens
atcaagcacgcacacgagaacgacatcacccacttctacatgctcactatagacaagggttacacatcattttggaatgactgtatatcatctggatt

SEQ ID NO: 389092 - DNA, 75 bp, Homo sapiens
ggaggctgcggcggggcggacggtcgcgcggcggcaggcacaggaccagagatcaagaagccccagaggatgtac

SEQ ID NO: 389093 - DNA, 90 bp, Homo sapiens
gcctccagaagcaaagatgaggatgaagaatattggaagggatgatccaccaacacattctcagccagacagtgatgatgaagcagaaga

SEQ ID NO: 389094 - DNA, 90 bp, Homo sapiens
cctcccgcccggaaagctgcccagccaccagcaaccccccaggaagaagaccgaaaactgttagttggattcttagaagatgtaatgacg

SEQ ID NO: 389095 - DNA, 75 bp, Homo sapiens
cccgcccatgaagccagatttctcccaggccgcggagctggtgacccagaactgcgaggcttatgaggcccacat

SEQ ID NO: 389096 - DNA, 76 bp, Homo sapiens
ctcagatccagtgataattgacagccccccgaatccaagcccaacttcacccctctcgccatcttggcccatgttc

SEQ ID NO: 389097 - DNA, 74 bp, Homo sapiens
tcaagcagaatgtgatttgcttgaagatatgagatgcttgctctgtcaaggcacagcctattgtctcctttgct

SEQ ID NO: 389098 - DNA, 83 bp, Homo sapiens
gaagaacctgtacagagaggtgatgctggagaactacaggaacgtggtctccctgggaaccctaaggactctgcaatatgaat

SEQ ID NO: 389099 - DNA, 100 bp, Homo sapiens
tcaacgccactcatcagattggctgccagtgtgagcggagaattagagtacatacactttgtttgccagtggtaagttcactagcagatgtatatgcggg

SEQ ID NO: 389100 - DNA, 50 bp, Homo sapiens
ctcaggcgtgcgcggacggtgtgcggggacacactcaggacaccaacacc

SEQ ID NO: 389101 - DNA, 82 bp, Homo sapiens
ctttacaagacgcacccacaggcctgtcctcccaaagccaactctaaggagaggagaggaagagcagttcttggggcagagt

SEQ ID NO: 389102 - DNA, 100 bp, Homo sapiens
atatgcccagttcgctagtcaaacctgtgagttcaacatgatagagcagagtggaccaccccatgaacctcggtatgtgacgcattcccagactcttcag

SEQ ID NO: 389103 - DNA, 100 bp, Homo sapiens
ttgatggatatatcttccttgacagcaaagaagctcctgaaaagtacatcaagtctaaagtgaaccagctaactcattaagactggaatcatgagcaaca

SEQ ID NO: 389104 - DNA, 78 bp, Homo sapiens
atggatctctctgatattgtagaaggcatactgaatgcacatgacaccacaaagcattgctatggcaacaaaagaaaa

SEQ ID NO: 389105 - DNA, 98 bp, Homo sapiens
caggacccacttgcagcatggagtcgcccgcctcgagccagcccgccagcatgccccagtccaaaggatgttctagtgactggatcctttccagttgg

SEQ ID NO: 389106 - DNA, 74 bp, Homo sapiens
gagtttgattcccgaaggaccttaactaggttggttttgcggattgccactgatgattccaaagcagtctgtcg

SEQ ID NO: 389107 - DNA, 83 bp, Homo sapiens
ctctacctgtggctctttctgctgggcctgcccttcaccctctacatggcatatgttgaaacaattagactaaaagatgatga

SEQ ID NO: 389108 - DNA, 100 bp, Homo sapiens
tcgtccgatctgtcatcaatacctcagacaaagagagacttgttgaaatgctccgtgccatgaagcagaaggcactgtcagcagcagtggccgactcctt

SEQ ID NO: 389109 - DNA, 98 bp, Homo sapiens
acttcatccagtttgctacggtctacggggcagagcagagagagtttcctcaccttggggtgttttcaagtctgtcacctatacctggtttcaccaaa

SEQ ID NO: 389110 - DNA, 75 bp, Homo sapiens
gccggggcactggaagggcaggcattccttgggtccctctctgtcctgctcgatgacctgcaggacctgagtgaa

SEQ ID NO: 389111 - DNA, 115 bp, Homo sapiens
gttctgcgtgcgctgccggacgaggctcccgccgccgattgacccgcgctccgcccgtagtcgggccgggctctcacctttgtgtatccttttggtgccacattgagtgtcatga

SEQ ID NO: 389112 - DNA, 83 bp, Homo sapiens
caagtcctccacagagggcgagccagggtggagaagagccagcccagtgtcagcaaagaagccttaaacagtaaaaatcctca

SEQ ID NO: 389113 - DNA, 75 bp, Homo sapiens
ctggtgtgggtttcccaagcaaggttccttggaagaagatgtctgcagaggtctctaattaacagaagatggcaa

SEQ ID NO: 389114 - DNA, 90 bp, Homo sapiens
cttcggtttcagttggagttggaatttgtgcaatgtttagccaacccaaattaccttaattattgggctaatggatactacagacaacag

SEQ ID NO: 389115 - DNA, 100 bp, Homo sapiens
ctccctgctgagatgcgcaaattcactccccagtacaaagacccaacatgagtgaagtttcctgcaagaaacgggacgactatttggaatggccagagta

SEQ ID NO: 389116 - DNA, 97 bp, Homo sapiens
gctccaccgaggccatttaccggcgctacagcaagttttttgacctccagaaaatgatgcatcctgttgccagcagtaatccagctttctgtgggcc

SEQ ID NO: 389117 - DNA, 75 bp, Homo sapiens
ggcggcggagggcaccccgggcgggcggcggctgctgatcaccattaacaaggacaccaaggtacccaatgcctg

SEQ ID NO: 389118 - DNA, 90 bp, Homo sapiens
ggcgaggccggacgcacctctgtttgggggtcctcagagaacactgctccctagaccatcggaaaaccagtcccacaacgtttgttcctt

SEQ ID NO: 389119 - DNA, 51 bp, Homo sapiens
aggtcaacggtgcccctgcatgtgctcaaattcaaggaagccttctcccta

SEQ ID NO: 389120 - DNA, 75 bp, Homo sapiens
tttggggtagtgtctgggatccagtacgagttgaatcattgttcaaataagatcatgacaagatgtttaagatga

SEQ ID NO: 389121 - DNA, 50 bp, Homo sapiens
ctggagggtcttgctttttcaaactcagcctgtggccagcaaacttcaag

SEQ ID NO: 389122 - DNA, 80 bp, Homo sapiens
ctcacggcaacgggctgctctacgccggcttcaaccaggaccacggccagaagaatgtttgaaggtgagatggcaagttt

SEQ ID NO: 389123 - DNA, 75 bp, Homo sapiens
gccgactggtggtccttcggcgtgctcatgaatgaggtgcagaacatcaagttcaacagttcaggccagtgcgaa

SEQ ID NO: 389124 - DNA, 75 bp, Homo sapiens
ctgagctgttcctcccagctacgagctgccccagtttgcctgagaatacagatcaacccacagaacaaagcggat

SEQ ID NO: 389125 - DNA, 98 bp, Homo sapiens
tagtgaattcggatctacctgggaggggggagtggaagttcccgccccggagagcggcgaggcggcagccacaggggacatcacccagaagggctatg

SEQ ID NO: 389126 - DNA, 98 bp, Homo sapiens
tgtgcaaaaaggtttcaggtggagcagatcggagagaataaataccgggtctgcgcaggcatggcactaagtgtcccatggcacatttggccctcatg

SEQ ID NO: 389127 - DNA, 75 bp, Homo sapiens
gggtcctctaactgtttggcatgaagtggagttggatcacaggattgattttgaactcagagaaggccttgtgga

SEQ ID NO: 389128 - DNA, 79 bp, Homo sapiens
cggccttcatcgacatcagtgaagaagatcagacttaattcagtgcacaaatgagatgaatgtgaacatcccacagttg

SEQ ID NO: 389129 - DNA, 96 bp, Homo sapiens
atcagctggcctggtttgatactgacctgtaaatcatcctttagagtattgggaaagggtcgttgtggtgcatagacccagagtatagacaaaatc

SEQ ID NO: 389130 - DNA, 74 bp, Homo sapiens
agcgacgaccggcgcatgacacagtggggtgcactatagccatctggagctgagccctggggagccagtgcagg

SEQ ID NO: 389131 - DNA, 50 bp, Homo sapiens
cggagccgcgcagccctcggagcacggctaagtcctatcagccatggaaa

SEQ ID NO: 389132 - DNA, 90 bp, Homo sapiens
tctgggatcccggccaccagcaattgtccggagatggaataaactgagactgcaggacaaagagaaacgtctgaagctggaggacgattc

SEQ ID NO: 389133 - DNA, 100 bp, Homo sapiens
tacactagagcagagtacgagtctgaggcggagggagtaatgacaggaccagtgcatctataacaccacctacctgaatgtccagcgggaaaatgggacc

SEQ ID NO: 389134 - DNA, 125 bp, Homo sapiens
cagagagagagcgcgagagatggagatgggcagacggattcatttagagctgcggaacaggacgccctctgatgtcaaaatgcagatcttcgtgaaaacccttaccggcaagaccatcacccttg

SEQ ID NO: 389135 - DNA, 100 bp, Homo sapiens
cgggctgcggcgtgtgcgcgcccgccagctgctccggagatacgtaagagatgctaaaaaccttgtacctatggaccccaatggcctgtcagatccctac

SEQ ID NO: 389136 - DNA, 101 bp, Homo sapiens
gctccggcagaacccaggcgagggacagctccggacagagactctgacctgtttttgttggacacccgtgtagtatgggcctcagaagaaggctggctgga

SEQ ID NO: 389137 - DNA, 75 bp, Homo sapiens
aagtgaagaccaatattcaacaggcaattttaccaaatgttgcaagaactctggagttcttatggtagtaaaatg

SEQ ID NO: 389138 - DNA, 97 bp, Homo sapiens
aaagggcacgtatagcattggtaaagaacgatcgtccagtggaggccgattcaacagtcattgagaagtggatggatggcgtgaaagacttcttaat

SEQ ID NO: 389139 - DNA, 100 bp, Homo sapiens
gcgcgaacgagcgacggcggaacccgtgggcctgtggactgcagcctcggcggtcagcagttggttgaatctggcgatgtggaacccatggatatggagg

SEQ ID NO: 389140 - DNA, 75 bp, Homo sapiens
gggaacgctcacggactgtgtgagtgatcagcagctggactgtgccttggacctaatgaggcgcctgcctcccca

SEQ ID NO: 389141 - DNA, 82 bp, Homo sapiens
cggcagccttgcgctgctctaatggtccggacttccgtgtaaacgatggaaagaactttctaaggaagacttatctcctgcc

SEQ ID NO: 389142 - DNA, 100 bp, Homo sapiens
tgaagaagcgcctcttgatgcccagtaggggacttcactgaggatgtcaactgtgcttttgagttcctgctgaagctcacccccttgttggacaaagctg

SEQ ID NO: 389143 - DNA, 75 bp, Homo sapiens
aaaaaaaatagctcagttaatgaaggatcaacgtatcataaaagtggaatcaactatgaaattataatcatagat

SEQ ID NO: 389144 - DNA, 90 bp, Homo sapiens
gcctgaggcggctggcacagagcttccggcccgccatgcggaggcaggtcaatggccagcaaggaggggggtccgagccggcggcggcgg

SEQ ID NO: 389145 - DNA, 99 bp, Homo sapiens
gatgtcaacagcaataataacatgtcttacaggtcaagaaatccctgaggagggacgggaagtagaggaattttcagaggacgatgatgaagatgattc

SEQ ID NO: 389146 - DNA, 97 bp, Homo sapiens
ctcgaacccccgcttcgcagctcaggagcctgaggtccgaaaggaccgtataattgatgccggcccaaaaggaaattattctcgcttcatgaaccac

SEQ ID NO: 389147 - DNA, 75 bp, Homo sapiens
ttaaaaagcagtctaaacctgtgaccacccctgaagaaattgcacagctttcaagtgttctctgggatagagaga

SEQ ID NO: 389148 - DNA, 116 bp, Homo sapiens
actgcagagaaacacggaaactaggaagaggaaattaactatctgtacttataagggttccccactgaaggacttggtccagctgtctggcagggaggagagacagaagctctggc

SEQ ID NO: 389149 - DNA, 115 bp, Homo sapiens
ctcttcttatctttcataatgtttgcttcagtcctgcaaataaacccaagatcctggctaatgatagttttgaggcagctgtgccatcaaatagccacattgtttcggaacctgg

SEQ ID NO: 389150 - DNA, 75 bp, Homo sapiens
cttgcatgcgagggaccattgcattaaaaggagcccaagccccatctcatcctagcacaccctcctccactgtcc

SEQ ID NO: 389151 - DNA, 100 bp, Homo sapiens
cttcaatccatcctcggatgtcgctgccttgcataaggccataatggttaaaggtatgatcagcaacttgcttgggaaaggagccgtggaccagctgaca

SEQ ID NO: 389152 - DNA, 100 bp, Homo sapiens
gggagggatcgggttctcctaggaagtttcaggtgaggaaactggagttagatattttacccttacaagaagcaaatgctgagctgagtgagaaaagcgg

SEQ ID NO: 389153 - DNA, 100 bp, Homo sapiens
gggcaaggccatcggcgtcctgaccagcggcggcgacgcgcaaggtggctgcaatattaaaggtgaagatgagagctgggactttggcactggtgctgga

SEQ ID NO: 389154 - DNA, 75 bp, Homo sapiens
tgtccatcgtgtgcctgatgatcacgcagctggctggcttcagtggaccacccagtggagcaaaatgagagcgca

SEQ ID NO: 389155 - DNA, 83 bp, Homo sapiens
cggcataaagcaattgagaattcaggacttaaacaggcacaatcaaaaccatctcagtcagaagtcagagcgtggtacctggg

SEQ ID NO: 389156 - DNA, 73 bp, Homo sapiens
gctgggagagaggtacctctccttttccctctccctttccctaagatataattggtgattacaactttcctct

SEQ ID NO: 389157 - DNA, 90 bp, Homo sapiens
attcccggaatcagacggtgccccatagatggccagctttcccccgagggtcaacgagaaagagatcgagcctgctgaaggagtttgacc

SEQ ID NO: 389158 - DNA, 100 bp, Homo sapiens
atgagaacaagagtagcaggaaaaacgaaattacttgcaattatgccaggtggcttgttttacacgattttcaaagaacttttttcttcatccagtccta

SEQ ID NO: 389159 - DNA, 75 bp, Homo sapiens
agaaagaatgcgtgtattttgtggaaagttccaaactgtctgatgctgggcataatcaccagcaacacccgggac

SEQ ID NO: 389160 - DNA, 82 bp, Homo sapiens
tgaaaaataaagctccaggattagggaaagtcaatggagtccaacctataccttctcagggaggcaaactagaaatagctgg

SEQ ID NO: 389161 - DNA, 83 bp, Homo sapiens
gtgggagcaaaaccaacgcctggctcggagcagcagcctctgaggttttgggatttgagattgacgcggtgaactctgtccag

SEQ ID NO: 389162 - DNA, 100 bp, Homo sapiens
cgcacgcggcgatatggaagaggagggcaagaagggcaagaaggtattgttgcagcatctggcagtgagactgaggatgaggacagcatggacattccct

SEQ ID NO: 389163 - DNA, 100 bp, Homo sapiens
taacaaaagaagaaagaacttttcaagaaattatgaaaagttataggaatcagccccaagctaatagtcacatcctgataacttaagtgactctctcttt

SEQ ID NO: 389164 - DNA, 101 bp, Homo sapiens
accgggcgagcagagtaagaagcaggaggctctgtcggtggtgagcgacgaccagtccctctttgactcagcgtacggagcggcagcccatctccccaagg

SEQ ID NO: 389165 - DNA, 100 bp, Homo sapiens
gtgtcaaggaaggatataagttttacccacctaaagtggagttgtttttcaaggatgtggacttggagttcctggctaaaatgactaatggcttctctgg

SEQ ID NO: 389166 - DNA, 75 bp, Homo sapiens
cgcgacaagtacgtggccgagttcctcgagtggggtttattcagtcaccatgaagctgctgctgctgcacccggc

SEQ ID NO: 389167 - DNA, 50 bp, Homo sapiens
gatttcggaacctggagaaaatctgcctgtgtcagggaatctgcttgatg

SEQ ID NO: 389168 - DNA, 98 bp, Homo sapiens
aggagcgaactgaagaggttctacacaattggagccatgtggctagaaatcctcctcacttcagtgctgggctttgccatctactggttcatctcccg

SEQ ID NO: 389169 - DNA, 74 bp, Homo sapiens
caaaatcctcaacatcgactttagcaatgcagacattgacgtgttggagggtctccctctgatgccgagccgaa

SEQ ID NO: 389170 - DNA, 101 bp, Homo sapiens
atggaggcacctccagtcaccatgatgcctgtcactgggggcaccattaacatgatggagtacctgttgcaggctcccatggctattgaagaacaagtggc

SEQ ID NO: 389171 - DNA, 98 bp, Homo sapiens
agaatatggcccttatcctattgaaggaggactctttggatttccaggaatggatggaggtgctttaactgatacaagtctcacagattcctatttta

SEQ ID NO: 389172 - DNA, 100 bp, Homo sapiens
cagccagtttgttcactttcacaacccagcagacttctttgagattggtctggattttacagaacttgactgagaatgcagtaatagtggccttgtcttc

SEQ ID NO: 389173 - DNA, 97 bp, Homo sapiens
tgaccgagaccgtgaccgagagcgtgaccgagagcgcgaatatcgtcatcgttagaagattctccctgactctgctcatctggaccttttctgtgtg

SEQ ID NO: 389174 - DNA, 76 bp, Homo sapiens
caacaaggtgttgatgccgccggacgttcaaatctgaacatcaatgatgtactagggaactactcattgactcttg

SEQ ID NO: 389175 - DNA, 98 bp, Homo sapiens
caccagtgcctcagaggtccatggcagtatcccagccaaatctcggttaacacagaaatctgcctcctgggccatgccgcttctaaggcctgtttctt

SEQ ID NO: 389176 - DNA, 96 bp, Homo sapiens
tcctccacctaccttcccgaatgtaaaaaaagattggtctgaccatgctctctggtgggaaaagaagagaacttggcttctgaagacacattggac

SEQ ID NO: 389177 - DNA, 73 bp, Homo sapiens
aagacaaaaggagattctgatgaagaagttattcaagatggacctgctgaagctcacacccgtggaccaccca

SEQ ID NO: 389178 - DNA, 98 bp, Homo sapiens
gtgaagcggccccagcactcccagctgcgcagggcctgccaggtggcgctcggtttcacaagaagtactgtggctgtatacagtacctgtatgctggt

SEQ ID NO: 389179 - DNA, 75 bp, Homo sapiens
ccggggcctggggctgcctgccgggcggccgggcgcggcgagcccagggtgaagttgaacaaattgctatgatga

SEQ ID NO: 389180 - DNA, 75 bp, Homo sapiens
ctcctttattgcagcaggaatttgattcttctgatgtagagcgactggaaagattcttcgactcagaagatgaag

SEQ ID NO: 389181 - DNA, 75 bp, Homo sapiens
tcggaagagcgctcccaggagaaacaattccagaaagctgagtctgatctggattacattcaatacaggctggaa

SEQ ID NO: 389182 - DNA, 75 bp, Homo sapiens
ggcgtaccgtggccagggtcagaaagtgcagaaggttatggtgcagcccatctcctggatgcactaatcgtgagc

SEQ ID NO: 389183 - DNA, 80 bp, Homo sapiens
ggactctgtagttgaagattataattcagtggataaaactaccacaggaacttaaaaggagtctagaaaatccagcagaa

SEQ ID NO: 389184 - DNA, 75 bp, Homo sapiens
gagaagtaccaggaggcgttggccaaggcgtctcgcccttttgcccaggctagagtgcagtggtgcggtcatggt

SEQ ID NO: 389185 - DNA, 82 bp, Homo sapiens
caaagcagcgcccgtctgcttcgggcctctggaatttagcgctcgcccagctagccgcagatagcctgggctggaagctctt

SEQ ID NO: 389186 - DNA, 100 bp, Homo sapiens
ggagggctgagcagtcaactcaaatgcaagtccaagaggaggaggaggcggaggtccaagcggaaaggaagttctacagactttgaccaagttttgtttc

SEQ ID NO: 389187 - DNA, 98 bp, Homo sapiens
gagcagcggcggcggggagcgaccgggagcggcggcagcggcggcgcggaggcggctgaggtgcgagccgatccgtgattctaactgcaactatgagg

SEQ ID NO: 389188 - DNA, 75 bp, Homo sapiens
ttcctgtacagcctgcagaacttgctaccagatggggctgatgtcccggtatgttgagtcctggagagtaggaga

SEQ ID NO: 389189 - DNA, 100 bp, Homo sapiens
aacctggacccggtcctctttagaacttcttcttttctcgcaagtgttctggtcctggtcgccacacctttttcgcctgacttcacccagtccaatccac

SEQ ID NO: 389190 - DNA, 75 bp, Homo sapiens
ccctccatggccaggaggacacccctggtggcctgcttgggtatcaaaaagccattcacagaggtcatccgagcc

SEQ ID NO: 389191 - DNA, 73 bp, Homo sapiens
cctcccaaagtgctggaattacagataaacaggggtcacatgacgacagaagccaagagggctgcaaagatgg

SEQ ID NO: 389192 - DNA, 50 bp, Homo sapiens
cttcagaccagcaggtaattagcactgcagcctgtggtgttgaggctcac

SEQ ID NO: 389193 - DNA, 75 bp, Homo sapiens
ttcgcagtggtcgcttcttctccttgttcctaatgtggatctaccacccctgtgttcatcgagattccggtctgg

SEQ ID NO: 389194 - DNA, 75 bp, Homo sapiens
agttagatggacctatattacagattctattcatgaacaatgctatttcaaaccaagggcacgtgaagttgttga

SEQ ID NO: 389195 - DNA, 75 bp, Homo sapiens
acgcacagagaccgtgaagattccaagttcaggagaactcgaccgagataatcattcaggtcttcgtgagctaag

SEQ ID NO: 389196 - DNA, 100 bp, Homo sapiens
cgggctacggaggccgggttgccagattacggtgtcacaccatgtctgaccggaaggcagtgatcaagaacgcagacatgtctgaggacatgcaacagga

SEQ ID NO: 389197 - DNA, 82 bp, Homo sapiens
cctgtggactcagcagcagcaactgtgggactttttgactacaattctcaacaacaggctgctctttggcgtaaattgcaat

SEQ ID NO: 389198 - DNA, 95 bp, Homo sapiens
tggttgccaccaccttcactcacagctaccctttttgctggaggcttaacagcattgcgcagtgatgaagtgattgatttaatgataaaagaata

SEQ ID NO: 389199 - DNA, 74 bp, Homo sapiens
acgaggtcctgtacagcatcgccgagaaggttaaatggaaaccacccttgggaactggatgcctgtgtagctgt

SEQ ID NO: 389200 - DNA, 75 bp, Homo sapiens
ggctgacatcgatggagatggccaggtcaattatgaagagcggcaacacccttctcagactcgtggtactacccg

SEQ ID NO: 389201 - DNA, 75 bp, Homo sapiens
cggcaaagttcacgtgactgtggatctcaagtactaccggccaactgaagtggttttcaaatggaacattttgat

SEQ ID NO: 389202 - DNA, 75 bp, Homo sapiens
tacaccgtggtgacattgtatcattggtgcccgggaccgtggcgcttcgagagattcgtcgttatcagaagtcga

SEQ ID NO: 389203 - DNA, 82 bp, Homo sapiens
aactgcccagcgtgaccagtggccacctctgcagtgtcttccacaacctggttggttgaatctggcgatgtggaacccatgg

SEQ ID NO: 389204 - DNA, 100 bp, Homo sapiens
caaattgcctctccaagaaagtgaagaagaagagagggaggagaggtctggcctccaactaagtcttgaacaagataatttgcaagtaccttttgagtga

SEQ ID NO: 389205 - DNA, 75 bp, Homo sapiens
cttagcccatgggacatggaaccaattcctgataatgcgttacagtgtttctgccacctctgtacaaaagacaat

SEQ ID NO: 389206 - DNA, 97 bp, Homo sapiens
tggtggggaagcctctgcgccgccggcaccatgaggtagatgatgagctggagatcaaggcctactatgcaggccacgtgctgggggcagccatgtt

SEQ ID NO: 389207 - DNA, 101 bp, Homo sapiens
agatgaagtagaagcaaaagcaaaacttattactgatcttcaagagaaaggatttgaagatgatcgaattgaggctttacttcataaaattgaaatacaga

SEQ ID NO: 389208 - DNA, 100 bp, Homo sapiens
tgacgggacagagcggtcggtgacagcctcaagggcttcagcaccgcgcccatggcagagccagaccactggccaatcacaggcaggaagatgaaggttc

SEQ ID NO: 389209 - DNA, 50 bp, Homo sapiens
gtgggcagccagggtcggtgaaggactccagtgggggtgactcatgtgct

SEQ ID NO: 389210 - DNA, 82 bp, Homo sapiens
ccaaagtgtgtggagtttgcaaacaaattattgacggtcaaggtatttcatgccgaggtagctacagcaagctgggtagcag

SEQ ID NO: 389211 - DNA, 83 bp, Homo sapiens
ctaccctgagcaaatgacttacgctccattggattttccgtgtggacactgccagcggctgcagccgacttggaatgacctgg

SEQ ID NO: 389212 - DNA, 99 bp, Homo sapiens
aaggatagcagtggcctgagaaaggcaagccggtatattcggggcccaggagcaaggaaaagtggccttttgcgtgacacagaagtggacacatcattc

SEQ ID NO: 389213 - DNA, 75 bp, Homo sapiens
atggcccaggtggccggcgcggcgttgtcccaggcgggttggttctttggcatggacacaagttcagtgggagga

SEQ ID NO: 389214 - DNA, 100 bp, Homo sapiens
accgtgtcctcggatcccgcgggcccgcattgccaggcgctgcgcccagcgctgggccgacctgggctgcaggaacttatgctgtgctatttgattaaac

SEQ ID NO: 389215 - DNA, 97 bp, Homo sapiens
cagtggacgaggtgttggcggaaggttaaacccatccagagtaatggctgcggccttacccaggaccctgggggagttgcagctgtatagaatatta

SEQ ID NO: 389216 - DNA, 85 bp, Homo sapiens
gtgtaagcgcagaaagcaggcgaacccgcggcgcaataacggtcatcatcagatttgaaatatttaaagtggatacaaaactatt

SEQ ID NO: 389217 - DNA, 100 bp, Homo sapiens
ggaagagcaagattgtgcagaaggcagccccagaagtccaggaagatgtgaaggctttcaagacagaccctgaaaattgttcggacagcagaactttcgc

SEQ ID NO: 389218 - DNA, 75 bp, Homo sapiens
gaactgactaatggggaagacacagaggatgaggcaaagtggaagatgctttctacaaaggtgaactcaggctga

SEQ ID NO: 389219 - DNA, 100 bp, Homo sapiens
aatcctgagagagagaattaaagtctaactctccaaatgttcacgcctacatcatcagctccctcaagaaagagatgcccaatgtctttggtaaagagag

SEQ ID NO: 389220 - DNA, 101 bp, Homo sapiens
ttctgcctcttccctcagctccatgagctcagtggcctcctctgtgagcagcaggcccagtcggacaggactagatcttttgccagaaatgagggcatact

SEQ ID NO: 389221 - DNA, 75 bp, Homo sapiens
caccgggagatccagaagtgaaacgccaggctctctggaggccaggagatgatctttggggccgtagaagaggac

SEQ ID NO: 389222 - DNA, 99 bp, Homo sapiens
caaactcctgggctcaagtgatcctcctgcctcagcctcccgagtacctgagattagcccaggcttatgccaaattttctggtgcacccttgaaagtca

SEQ ID NO: 389223 - DNA, 100 bp, Homo sapiens
catgtgcgacctcgatctgtcccaagcattcatgttccctcaccagctgtaagattatgcatgatgtgataaagaaggtcaagaagaagggggaatggaa

SEQ ID NO: 389224 - DNA, 142 bp, Homo sapiens
ctgggtgaagaataccagcaaaggcaccgtgacaggccaagtgcaggggccagaagacaaagtcaattccatatgagcgtgaagccgtgcagaagaagaccttcaccaagtgggtcaattcccaccttgcccgtgtgtcctg

SEQ ID NO: 389225 - DNA, 75 bp, Homo sapiens
gctgctctccgccgcagcttcagcacctcggcccaggatgaacgtgaagccagagaaaatgtgaagagagagcaa

SEQ ID NO: 389226 - DNA, 78 bp, Homo sapiens
tccaacacagatgtccaagctgccaaccaaggccacctttgatgccatttctaagacctacagctacctgacccccga

SEQ ID NO: 389227 - DNA, 100 bp, Homo sapiens
cagaatgtatcccagaaggactggtccaatgatgtgacccagtcctgcagttctgggagatcaaccaccatccgcgtcaggtgcagtccacagaaaactg

SEQ ID NO: 389228 - DNA, 82 bp, Homo sapiens
accagacagggcagcacgccgtcattgacatcaatgccttcccaggtgatgtgtccaatctagatcccaacttctcatttga

SEQ ID NO: 389229 - DNA, 87 bp, Homo sapiens
gttctggaccagaatacctcaaacgtctaccattacagtggaatccatcaacagcatcaagtccagactaagcaaaagtgggcacat

SEQ ID NO: 389230 - DNA, 82 bp, Homo sapiens
agtggtcgcttcttctccttgctggtattccctctcgagtggtttccactcaacaagcccagtgttggggactacttccaca

SEQ ID NO: 389231 - DNA, 74 bp, Homo sapiens
acagaatattttgttcatgttattgaaaggagaagagcaagttagtaccttgtaccaaaacatcaaccttgtgg

SEQ ID NO: 389232 - DNA, 100 bp, Homo sapiens
ccctgccgtacaagctgatctccctgctaaatgaaaaagggcaagatactgggggacccagatggaaggatgctcttagatatttttgatgaaaatcttc

SEQ ID NO: 389233 - DNA, 51 bp, Homo sapiens
agaataagatttttggaagaaaagattttaccaaatgttgcaagaactctg

SEQ ID NO: 389234 - DNA, 50 bp, Homo sapiens
tggtgaaacaccactgaagcattgccaagtaatctcaggggcgatataat

SEQ ID NO: 389235 - DNA, 100 bp, Homo sapiens
ctccttcacgcacgccctgcgcctggtgaaccaagaaggacagaataacgggctcccagattcacaagccccaccaagaggatcaccccaggaacgcttg

SEQ ID NO: 389236 - DNA, 100 bp, Homo sapiens
agcgggagggccgggcaattcccgaccgaaccaaacggtacgttgaagatggagaacaactgatgtcaagacacattttggttgtaagggacagaagtcc

SEQ ID NO: 389237 - DNA, 100 bp, Homo sapiens
cgaagccggagtgtaggcggcagaggattcgctcccagagcagctgcggccaggccctgcacatacagcggctgcgccccaaacctgaagccaggccccg

SEQ ID NO: 389238 - DNA, 90 bp, Homo sapiens
ggccgagggaccctgcggctccgatcccggggccccgccacggtggaggatctgtacgcctgcctcacaccttgcgatgcgccaacatca

SEQ ID NO: 389239 - DNA, 98 bp, Homo sapiens
cggcgacctcaagaagcagctccacgaaaggcagccgcggatcgccgcgctcagcgacaaacaagctctggaagaggatctgaaccagaagaagcggg

SEQ ID NO: 389240 - DNA, 82 bp, Homo sapiens
atgctttttgcacttatcgcactggaaaagtttgcacagacaacacttcgtgaggcagatgtagactgcttgactttaggac

SEQ ID NO: 389241 - DNA, 76 bp, Homo sapiens
cgaggggtctggaagccagagaccaacgagatcctgcacatgtctttgtcagccatgtcatctgagcctcccccac

SEQ ID NO: 389242 - DNA, 90 bp, Homo sapiens
aagtgtgtgcctgtgtgccgagggtgtgggccgaagatatgctcatgtggtgttgaggaaagcagacattgacctcaccaagagggcggg

SEQ ID NO: 389243 - DNA, 103 bp, Homo sapiens
tctttgctggcaagcagctggaagatggacgtactttgtctgactacaatattcaaaaggtcaagagcaatctgaatccaaatgcaaaggagtttgttcctgg

SEQ ID NO: 389244 - DNA, 100 bp, Homo sapiens
tccatgcagcctgccttaccgtggtggacttgctttgtgaagagacagttcatgaacaagagtctttcaggacctggacagtgaagggagcccgggcagc

SEQ ID NO: 389245 - DNA, 75 bp, Homo sapiens
tgttccgcggctcctaccagttcctcgtgcccatcgccacgcattgatgacggggagccttcctggctttgtcga

SEQ ID NO: 389246 - DNA, 51 bp, Homo sapiens
atggagcgagcctagggcccgacaggccgactgcagcagtggcccagggca

SEQ ID NO: 389247 - DNA, 82 bp, Homo sapiens
ttgaggggaaatggatgctaaagaggctggacccttgttcttcccggtggatgccagctgcagcggagtgttccggccccgg

SEQ ID NO: 389248 - DNA, 139 bp, Homo sapiens
cacaggggccgtgggggtcgtgggccggagcgcctccttcgcaggcttcagcagtgcacagagccggaggatcgcaaactggcgatggaatatgagaggagccctctggaaagaaaaggacagaccctgtgctttcatg

SEQ ID NO: 389249 - DNA, 90 bp, Homo sapiens
ggcaccctatgcctccctgacagagataggatatccaggtacctgtgtgccctctctgtaatgtgcctgtgcctgtggccagaggggagc

SEQ ID NO: 389250 - DNA, 87 bp, Homo sapiens
catccgcatcggcaatactgaggatggggctcctcacaaggaggatgagggcccagtcctatgcggagagactgcgtctgggtttgg

SEQ ID NO: 389251 - DNA, 100 bp, Homo sapiens
cagagcctggagtctgcgaaggccgggacccggttccccggcccacagtgggggtgtgcaaacccgagagaactgggtctgcgcaggcatggcactaagt

SEQ ID NO: 389252 - DNA, 82 bp, Homo sapiens
gtggccggaagatccacagccaggaggaagccttgcggacaatgcagatcttcgtgaagactctgactggtaagaccatcac

SEQ ID NO: 389253 - DNA, 100 bp, Homo sapiens
atgtctacggatgaggaaactgaggcctggagaggttaaagagacccgttcagagtcctacagtggcagcacctgtggaatcctctcaagaggaacagtc

SEQ ID NO: 389254 - DNA, 75 bp, Homo sapiens
acattggaggcgtgatgcttaagctggtggagaaactcgatacagatccacgggttttagaaaaacaagaattac

SEQ ID NO: 389255 - DNA, 74 bp, Homo sapiens
tagtgcgccagggcctcaagtgcgatgcccccaaatacatcaagatgtttgtactggatgaagctgacgaaatg

SEQ ID NO: 389256 - DNA, 100 bp, Homo sapiens
gttttaaatagcatggcagcatttattgcccttccatcaatcttgcaaagaatcttacagacagcgtggaagatgaactggagatggccaccgtcaggca

SEQ ID NO: 389257 - DNA, 95 bp, Homo sapiens
ccttgggcctgcggctctctacgtccctgcggagcagccggcacgcacagaggctgggctgcggtccagatgcgtttgctccatgaattggtcta

SEQ ID NO: 389258 - DNA, 100 bp, Homo sapiens
atcaactgcagcgatggttacattgaatactacatatgtcgagggaatgcagaaagagttaaggaaggcaggcataccagatactcccttcagtaaggac

SEQ ID NO: 389259 - DNA, 75 bp, Homo sapiens
taggcatcttattgatcctccagtcgagcccctgcagatcaagtcagtagtggcaccagagcatgtgaagggcta

SEQ ID NO: 389260 - DNA, 82 bp, Homo sapiens
acttctctggaccaacttgaccgtctactggaaatctgaatgctgttatcacattctgaaaaagagttccacgtcctccctt

SEQ ID NO: 389261 - DNA, 83 bp, Homo sapiens
tgaagaagtagagtatttcaaccataaagacatcttaattgggcacgaaagaggtttctctggaaacccccctggtaagtgtg

SEQ ID NO: 389262 - DNA, 83 bp, Homo sapiens
ccaagaagactgagagtcaccacaaggccaagggtcatgcaagacaagataatctgccttccgaaaagagtgcagcctgctca

SEQ ID NO: 389263 - DNA, 72 bp, Homo sapiens
gtgtgaacggagacgctgcctccggattgtggaaagggcatatgggcaacaaagctatggaacctatggaca

SEQ ID NO: 389264 - DNA, 90 bp, Homo sapiens
ctgacactatgaatgctacttggatgcctcttaaggaatagcgggttttgcagcaattgttgcatatggattatataaactgaagagcag

SEQ ID NO: 389265 - DNA, 100 bp, Homo sapiens
agggtccacagaatggtcagaaaccctccataacctgaaggtgctgttggcagcagcggtctgcacaaaagcaggaaaggctattgtttctcgacagttt

SEQ ID NO: 389266 - DNA, 75 bp, Homo sapiens
tggacagttcttcaggcttgggtgactacctagaactgcatatagagctctgccagtgccggccgggagaaggca

SEQ ID NO: 389267 - DNA, 100 bp, Homo sapiens
gaaaagcggcacgacaacattaaaccatcagatgagggatacctttcgtccctgcatttaaaggctttcacttatattaatctggataaagcggttcttg

SEQ ID NO: 389268 - DNA, 115 bp, Homo sapiens
ctcaatatctgtcttcggtggactccttcggcagtccacccaccgccgccgcctcccaggaatactcccccagttgcaagaggcgcaggaccgtggaagacttcaacaaattctg

SEQ ID NO: 389269 - DNA, 51 bp, Homo sapiens
gttttgtaacatctactgtcaaggcaaatcctgatcctaactgttgtcttg

SEQ ID NO: 389270 - DNA, 76 bp, Homo sapiens
aaaaggtcacaaattacattacccaatggtggaatattgtatacctgtgatattgaagcagctttcaataaccttc

SEQ ID NO: 389271 - DNA, 88 bp, Homo sapiens
ctgaaggcgacggtgtcggagcagctcagccaggatttgctcaggtttcccaggcagctgcagacttgaaacagttctgtctgcagaa

SEQ ID NO: 389272 - DNA, 80 bp, Homo sapiens
gctgcatcaggatgaatgatgacccaagtatggaactcaaatctaatccaagtgaaaatgaagaaaaggaagcacagtct

SEQ ID NO: 389273 - DNA, 82 bp, Homo sapiens
gacttggcgaaggccttcctttttcgtctgggctgccaacatgtgctgtgaagccatctactccagcgtgtccggactcaag

SEQ ID NO: 389274 - DNA, 75 bp, Homo sapiens
cttgatcttggtccagccttcagaactaagattaagattgcggccctgcgcatgtatactagctgtgtggagaaa

SEQ ID NO: 389275 - DNA, 82 bp, Homo sapiens
acaggccgacaagatacctctcgcatgtccacctcacagtgcctggagaagttccctgtgatccagcacttcaagttcggga

SEQ ID NO: 389276 - DNA, 83 bp, Homo sapiens
gcggaagatcgtcgccacctggatgctggaggaagtcctgacggccacgctggatctggaggacgtccggagctacagggcgg

SEQ ID NO: 389277 - DNA, 95 bp, Homo sapiens
taaggaacagatccccggaggagggctgctcttcacctatcgtggtgaagtttgctgacactcagaaggacaaagagcaaaggcgcctccagcag

SEQ ID NO: 389278 - DNA, 100 bp, Homo sapiens
cgctcaggtgcagtatgtggaaggaagcgatactgtctataccaatggagcaatgtaagaatgattgatgttggctgatattggagtgctcattcacatg

SEQ ID NO: 389279 - DNA, 101 bp, Homo sapiens
tgggaaggtggagccaccagcctctccctgaaaaactaagacgcagtcttccaaacctgtcccgaacatctaatacacaagttgactcagtgaaaagcagc

SEQ ID NO: 389280 - DNA, 100 bp, Homo sapiens
aacgcggccgctgtgcactctgcccatagggagtacatggagttctgggaaatcgttcattcatttacagatgaacagaaaagactcttcttgcagttta

SEQ ID NO: 389281 - DNA, 102 bp, Homo sapiens
ttgtgcagctctattaccacgggaagatttggagcaagaggtggtggtggccttcccccgaagaaatttggtaatcctggggagcgtttgcgtaaaaaaaag

SEQ ID NO: 389282 - DNA, 75 bp, Homo sapiens
gcgaggcagatcctgccccgtggccgcggccgtctcgtagatcaacaggcggtccttcgggtcggagtggacatc

SEQ ID NO: 389283 - DNA, 76 bp, Homo sapiens
ttcctggcaatgatagatacatcagtgtgggaagccaagcagatacaagccatccggctgtccttagagcaagccc

SEQ ID NO: 389284 - DNA, 82 bp, Homo sapiens
gcgcgcgaagcgagcgagaaggcacggagtcgccgcggagcgcaggtactccaaagattcaggtttactcacgtcatccagc

SEQ ID NO: 389285 - DNA, 75 bp, Homo sapiens
cggattcatttagagctgcggaacaggacgccctctgatgtctcggcgcggaagatggccggcggcgtggacggc

SEQ ID NO: 389286 - DNA, 75 bp, Homo sapiens
cagaagctcatccgcaaggtgtccacgtcgggtcagatccgacagaaggccatgttcgagctggtcacttccgag

SEQ ID NO: 389287 - DNA, 100 bp, Homo sapiens
actttccctcatggctggtcgtctccagactccacactcctagcaaggccaaggagatctgttgaagaatgccaagaatgaagctatagaaaacatgaag

SEQ ID NO: 389288 - DNA, 133 bp, Homo sapiens
aagcaggttttaaatcaagatttaacattccaacacataaaaattatttatccaacagctcctcccagatttgagttctgtgaacctgcatttgttgttggtaattgcctccagatagcttctgacagtcatc

SEQ ID NO: 389289 - DNA, 120 bp, Homo sapiens
ggaaaatgggagctgtatatcccaccaaagcagaataaatctgtactcgtgcctcatggatccaaattaaaggaggagatgttaaagtaacccatcttgcaggacgacattgaagattgg

SEQ ID NO: 389290 - DNA, 100 bp, Homo sapiens
caacctccgcctcccgggttcaagagtcagagtcagaagcaaaggtagatggagagactgcatcggacagtgagagccgggcagaatccgcacccctgcc

SEQ ID NO: 389291 - DNA, 51 bp, Homo sapiens
tacatgcggttagatgacagtgggattgagtatgccaagatggaaggaagc

SEQ ID NO: 389292 - DNA, 87 bp, Homo sapiens
cgggaggtcaacgaggtcatccaggaacttagtgatttggcccgtgaccctccagcacaatgttctgcaggtccagttggggatgat

SEQ ID NO: 389293 - DNA, 100 bp, Homo sapiens
gctgttgcaactgttctgctggtgactctgacatcattagaagcatgccagaacagactggtgaaaagtaaaccttttcacctacaaaatttcacctgca

SEQ ID NO: 389294 - DNA, 75 bp, Homo sapiens
tggagccagaaacattaccgtcatattccacccattactaaggtgtccaaggcagctgcagatttgatggcctac

SEQ ID NO: 389295 - DNA, 98 bp, Homo sapiens
gccgctgctacctgcagcgccgtgtggcacgacacaaaaatcagattgttcagattccattctgtggggaaattgactgtgaggactggatcaaaaag

SEQ ID NO: 389296 - DNA, 96 bp, Homo sapiens
cttgcctcaagtatcagctggaaaacagctcctgggcaacgtgctggtctgtgtgctggcccatcactttggcaaagaattcaccccaccagtgca

SEQ ID NO: 389297 - DNA, 51 bp, Homo sapiens
gattcgcagtggtcgcttcttctccttggctcaaagatttggaaagagaca

SEQ ID NO: 389298 - DNA, 82 bp, Homo sapiens
cccggcaccccccgccgacaaggaggccgcttacaaacacgcagatggcaagaagattgatggcaggagggtccttgtggac

SEQ ID NO: 389299 - DNA, 82 bp, Homo sapiens
ggagctggacggcgagcgcgagcggcgcgagaaagtgcaactgacatgggtgaaccccagggatccatgcggattctagtga

SEQ ID NO: 389300 - DNA, 98 bp, Homo sapiens
gattagggatcatgctgtctctgtgtgctcaggatttgacacaggtgcacaaatggagtccagaggaggctgtaagagccatcgccaagatccggtca

SEQ ID NO: 389301 - DNA, 84 bp, Homo sapiens
ggcaaggagctaaagcagcgtgcgttcagccctgggccccagtggacaggaaagctaaggcctcagcgatgccggactccccag

SEQ ID NO: 389302 - DNA, 94 bp, Homo sapiens
gggatttcgttttgcctccggttggggctgctgtttctcttcgccgacgattgcccccgaggaattagcacttgttcacaacttgaggaaaatg

SEQ ID NO: 389303 - DNA, 86 bp, Homo sapiens
tgccgtcggagaagaccttcaagcagcgccgcaccttcgatgtgaagttcatttccaatccgccctccatggtggcagcggggagc

SEQ ID NO: 389304 - DNA, 100 bp, Homo sapiens
gatcaatgccctcattaaagcagccggtgtaaatgttgagcctttttggcctggcttgtttgcaaaggaaaccagctgtcaggcctcccagatagtatca

SEQ ID NO: 389305 - DNA, 89 bp, Homo sapiens
ctcaaactcccaggctcaagcagtcctaccatgtcagccttcccagtagctgggaccacagagatgagcatcaggattttatggatgag

SEQ ID NO: 389306 - DNA, 76 bp, Homo sapiens
gcttcccaagagagtcaaatctagactggttcaaaccttgtactactcagctgatcacaagctgcttgatgggaac

SEQ ID NO: 389307 - DNA, 88 bp, Homo sapiens
cacagccagcaccgcacgccctgcaagggagggaaatcctcattgacgattcaatttgttgaaggccaatttgtggactcctacgatc

SEQ ID NO: 389308 - DNA, 83 bp, Homo sapiens
ctctgaatggctttggtgggatgtgtatgaccttcacctcattaacaacatgcaagaaagcacttcagccaagcagaagggag

SEQ ID NO: 389309 - DNA, 100 bp, Homo sapiens
ccagagaacagccctccatcttgcagcccagaaggccaccccagcagacatgtttgccaaggcctttcgggtcaagtccaacacggccatcaaggggtcg

SEQ ID NO: 389310 - DNA, 90 bp, Homo sapiens
cgactactacgaggcgcaccagatgtaccggaccctgttcttcagagctgaagaagcaggtggagagtgccgagctgaagaaccagcggc

SEQ ID NO: 389311 - DNA, 75 bp, Homo sapiens
agtggcactgaaatgaggcatagatgagctattgtggacgatgaaaggctctctgcagaggagatggatgagagg

SEQ ID NO: 389312 - DNA, 90 bp, Homo sapiens
gctgtggagacggtgacagattctagccgctactttgtaatccggatccaggatggtactgcatggcggacaccgacctgttcatggaat

SEQ ID NO: 389313 - DNA, 108 bp, Homo sapiens
cacggtctgggccgccgaatctccggccgaagagcggcggcggcagcggcgttggaatcgaagcctcttaaaatggcagatgacttggacttcgagacaggagatgca

SEQ ID NO: 389314 - DNA, 100 bp, Homo sapiens
atgtgacgctggaaaccttcaggaacctggcctcggtcgagtggaatgttggctgtccgtgaaaaccgctacattgtcctggccaaggacttcgagaaag

SEQ ID NO: 389315 - DNA, 75 bp, Homo sapiens
agaaaacaccgaagggacattctgtcttcatggacatttttgaacttgtgctgccactgcagagccccgccatgg

SEQ ID NO: 389316 - DNA, 100 bp, Homo sapiens
ggcgctgaggcggccaccgcgactccggctctgcgctcggctgcctgacttcttcctgctgctgcttttcaggggtatcatgaactgatcactaaatatg

SEQ ID NO: 389317 - DNA, 82 bp, Homo sapiens
tccgtttgttggtggaggaggtggcaggcctcggcggagcatcagatccatgctgctgctgactcggagccccacagcttgg

SEQ ID NO: 389318 - DNA, 75 bp, Homo sapiens
gagacagacttgtggttcttcaacagctgtgcagagcagagacgtaaatttaagttatctggaagtattttggat

SEQ ID NO: 389319 - DNA, 98 bp, Homo sapiens
gctcacagagctatgaacagaatatcaaacagattggcacctttgcctctcctgcagtgcctcaaagccctttgaaaaatgaattaagaaggaaatac

SEQ ID NO: 389320 - DNA, 100 bp, Homo sapiens
ggatcattgctctttgaattccagtcccgttgaatttggttccaaaatcatcttgcttaagccaattatcaaagtgttgccaaaactctttgagtctcga

SEQ ID NO: 389321 - DNA, 100 bp, Homo sapiens
cgaggtggactatgaggctatccgcagcgagatggagcagctcaaggagaataaggagagattatcttctgctgttactgacctcaacataataatggag

SEQ ID NO: 389322 - DNA, 95 bp, Homo sapiens
ccacttgattacccgttaagtcccccaaagatgagatttacctgtgagatgtttcatcccaacatatatgaaaatgatgatcagctcctgtggga

SEQ ID NO: 389323 - DNA, 101 bp, Homo sapiens
catctcctacattagcgtctacgaccaccaaggtgaatcaggtctaggaaaatcgactctcataaacagcctattcctaactgatctgtacccagaaagag

SEQ ID NO: 389324 - DNA, 100 bp, Homo sapiens
cttggacttgtccaagtacatcgacaagacgatccgggtaaagttccagggaggccgcgaaggtgtttggagaagagggattgaccctgaatcttgaaga

SEQ ID NO: 389325 - DNA, 90 bp, Homo sapiens
cctggagccctcctcaggtgagctggagctgcccggctcggcagcgggaaggctgaccccgcactacatctacccaccagccatcgtgca

SEQ ID NO: 389326 - DNA, 89 bp, Homo sapiens
agcagctgttcacttcagtcctccgactctgtggaattggcagcaatgaaacagattctcgttaagatgcatagtaaacattctgagaa

SEQ ID NO: 389327 - DNA, 50 bp, Homo sapiens
ttccacttacaacacacaactttgattggccatttgatgatggagctcca

SEQ ID NO: 389328 - DNA, 51 bp, Homo sapiens
cctgtacttgttccaactcaataaacctatgatggacttgttgatattcct

SEQ ID NO: 389329 - DNA, 122 bp, Homo sapiens
acagttgggaaatgcagtcactacctgagtataaggataaaaagggatattcaccccttgaaattggcgtgttagccaaggctttcattgaccaagggaaactcatcccagatgatgtcatg

SEQ ID NO: 389330 - DNA, 50 bp, Homo sapiens
aggagccgcgcccggacccagggactccagaagacctttccagattcgtg

SEQ ID NO: 389331 - DNA, 74 bp, Homo sapiens
ttcgtcatggggctgtttggaaagacccaggagaagccgcccaaagaactgctgacaagctctctactgatgat

SEQ ID NO: 389332 - DNA, 51 bp, Homo sapiens
gcttggcgtccctccgggctagcaaatttttcagaacataaaacaagaata

SEQ ID NO: 389333 - DNA, 100 bp, Homo sapiens
aaactgaggcctggagaggttaaagagacccgttcagagtcctacagtggcagggtgtacaactatgagcctttgacacagctcaagaatgtcagagcaa

SEQ ID NO: 389334 - DNA, 90 bp, Homo sapiens
tttggacaactattttcgtcatctttggaacaaaggcctatatgaacccaatagcaatggcgagatcaaggggtccaatccagtcttcag

SEQ ID NO: 389335 - DNA, 83 bp, Homo sapiens
gtgaggctggtgttggtttgcaaagagcttactcacatagcatattggtatatcaaaatgaaatgcaaggaaccaaaaataac

SEQ ID NO: 389336 - DNA, 94 bp, Homo sapiens
acggtacttctgccactgctgctccgtggagatcgtcccgcgcctgccgggtttccaggcctgaggtgcccgccctggccccaggagaatgaac

SEQ ID NO: 389337 - DNA, 100 bp, Homo sapiens
ccaaacaccctcagctccacattgagagcaaaatctacaagatgatgcagggaggagctgagatctgtatctgtggacctgaatgttgatccctcgcttc

SEQ ID NO: 389338 - DNA, 75 bp, Homo sapiens
caagtatgctgcaagtgagaacatatttaacaggagagttgtggactggggcaacctttgccagtgatgagaagt

SEQ ID NO: 389339 - DNA, 90 bp, Homo sapiens
tcaatgactgccctctaaaggaagaggaagctgcagtaaaggaagatgaagaagaagtttcagataagggcagtgattctgaagaagaag

SEQ ID NO: 389340 - DNA, 96 bp, Homo sapiens
gcggggactgtcccggcggcaaaggcaagagcatcaactgctcaggtgagaagccctaccactgcaactgggacggctgcggctggaagtttgcgc

SEQ ID NO: 389341 - DNA, 75 bp, Homo sapiens
ctatggcgctgtcaataaagaacggcagtttgaatcggtgctgaacagctgtttgcagacaaggtcccaaagaca

SEQ ID NO: 389342 - DNA, 90 bp, Homo sapiens
caaggccatctgggtcacgggctggggacacacccagtatggagtgaataaccctataccttccaatttgaaatcagaagcaaaaaaggc

SEQ ID NO: 389343 - DNA, 75 bp, Homo sapiens
tggggaatttcccaccaggatgagtatgattggctgtgattttaggaccaggcctcctcttcccacctgtccagc

SEQ ID NO: 389344 - DNA, 75 bp, Homo sapiens
ttggcccatggacctgaaggagaagcacctgaggctgaggggatctggcggtggagcgctaggatcagacgcccc

SEQ ID NO: 389345 - DNA, 100 bp, Homo sapiens
aggacgaagaggaagaagcagcagcagccctccggagagctgtttgagattgaaatagacaccctggaaaccacctgccatgtgctggaccccacccctg

SEQ ID NO: 389346 - DNA, 101 bp, Homo sapiens
tggctgcaagactgtcgacctaaagcctgactggggcaagcgacttggactgggcggtgtttgagcctgacctcctggttaccagctctgtggacacctac

SEQ ID NO: 389347 - DNA, 100 bp, Homo sapiens
cgggagtgcgccagcgccgcgcgtggggctgtggtggccgcggctctcaggctggaactcagatcagcctggcagatttaccattttccagtgaggtttt

SEQ ID NO: 389348 - DNA, 99 bp, Homo sapiens
gcaacgtgttggaccttccggagcttctcagaagacagagggttttcttttgaggcaaggatatcctgaaggatactatagttccaaaagtggatggag

SEQ ID NO: 389349 - DNA, 98 bp, Homo sapiens
ggaaaccagctgcacatgctaaccaacaggcacgacaagtttctggacactctccgagaggtgaagtgttcctaaacccaaaggaaagaaaaccaaag

SEQ ID NO: 389350 - DNA, 75 bp, Homo sapiens
tgctactgagcaatatcaagcccattcaaacagaggcatgggtagcttgtatgcagctcatcaatgccctggtta

SEQ ID NO: 389351 - DNA, 75 bp, Homo sapiens
ggaactggtgctgcagcgagagggagaagatgtcaaccggacactagaaggtggaaggaaacctcttcattatgc

SEQ ID NO: 389352 - DNA, 100 bp, Homo sapiens
aggaacgaggcaaggagctaaagcagcgtgcgttcagccctggggtgaagctttgttctaagaatatttgtttcatctagtttatgagtccaaatgatat

SEQ ID NO: 389353 - DNA, 71 bp, Homo sapiens
agatttcccaagagcagcggaaaatgatccagtcacaggtggcgacatgtctaagaatgtgagccagtcac

SEQ ID NO: 389354 - DNA, 74 bp, Homo sapiens
attcagatgtggaggagaatatatcctctaaatctgataacattgtgctgtctgtcagcatatgtatatcagct

SEQ ID NO: 389355 - DNA, 100 bp, Homo sapiens
ccccgcagccccccaacatcctgctcctgctcatggacgacgaacttgctactaccagcaccatgccctaccaatatccagcactgaccccggagcagaa

SEQ ID NO: 389356 - DNA, 84 bp, Homo sapiens
aatggcatcaccatgtacggggccacgcagtcacagagtgacatggctcgggttatgtatgattttgctgctgaacctggaaat

SEQ ID NO: 389357 - DNA, 126 bp, Homo sapiens
ggaattccatattttgtggaccacaatagaagaactaccacctatatagatccccgcacaggaaaatctgccctgctgaagtggagagatcgcctgagcccaggaggtcaaggctacagtgagccg

SEQ ID NO: 389358 - DNA, 100 bp, Homo sapiens
gacttgaaaagctgagatatgatgattttgaagtcatttcacatcgaagccatgatttaaatatcggcgttaagcattgcagtgtcgagatggctatgaa

SEQ ID NO: 389359 - DNA, 82 bp, Homo sapiens
ctgggccagagcgtggttgctgaccagttgaaagggcagtcagggcgacagcaagaatgccaagaagaagaacaacaagaaa

SEQ ID NO: 389360 - DNA, 100 bp, Homo sapiens
agcacgcagccttcctggtgcccctaggcccgggacagatctcagcagaaggaatgtctgatcacagatacggggatggtggctctactttccagagcac

SEQ ID NO: 389361 - DNA, 75 bp, Homo sapiens
ttttcagcttcgggacaagtacatgtttgctacaaaggtggtgatcacaaaatttgtccaggatagacatagagc

SEQ ID NO: 389362 - DNA, 100 bp, Homo sapiens
aggagaagctgagagagacccaggagtataaccgaattcagaaggagctggagagagagaaagccaggtctttatcagtaccatatgcttatcagtgctg

SEQ ID NO: 389363 - DNA, 51 bp, Homo sapiens
agaagatcgaaaattaaacctcaggtagcagtagctgatgtgcagtttggc

SEQ ID NO: 389364 - DNA, 90 bp, Homo sapiens
tgtggtcggtgctggcggcggcgcttgggctctgcttcaacggaccacaccaaaatgccatctcaaatggaacacgccatggaaaccatg

SEQ ID NO: 389365 - DNA, 90 bp, Homo sapiens
cagttctgctggtagatatgttaggagacgctgcaaaccgttgaagaagttggacggactagcgaagatccggactgctcgggaagctcc

SEQ ID NO: 389366 - DNA, 100 bp, Homo sapiens
agacaccaggacagaaaagacagtgttctgctttcatggagttcacagaagagtcgaggagggaccagttactctccacaagaaaattcacacaaccaca

SEQ ID NO: 389367 - DNA, 53 bp, Homo sapiens
tgagatggagtctcactctgtcgcccaggctggaatgcagtggtgcaatctcg

SEQ ID NO: 389368 - DNA, 82 bp, Homo sapiens
gaggaagcaggagcagcccaagcgccttccctcactgcagagcagagcgggcggaggaccccgggcgcgggcgcggacggca

SEQ ID NO: 389369 - DNA, 75 bp, Homo sapiens
ggtgacgctgggcctgcagcgcggagcagaaagcagaacccgcaggtactaggttttgacaagcttgcatcatgc

SEQ ID NO: 389370 - DNA, 128 bp, Homo sapiens
tggctacacagcactggttgtttctggtgggatcgttggctatgtaaaaacaggtgtcatggagaaactccagctgggcccagagattctgcagcgggaaaatccaaggcttatttatgccaggctga

SEQ ID NO: 389371 - DNA, 100 bp, Homo sapiens
catgaatggagcaaaatggcggatcatgtgcaggtcaaaatgcagatcttcgtgaaaacccttaccggcaagaccatcacccttgaggtggagcccagtg

SEQ ID NO: 389372 - DNA, 51 bp, Homo sapiens
acaacaatatcggcattctgtgctacgaagtttgtggggacattcatggac

SEQ ID NO: 389373 - DNA, 85 bp, Homo sapiens
ttccagcttctgctgtccttctttgtggagagcaagcttcttcctcatctcagctgccctcttcatgggtggcagcttctacgcc

SEQ ID NO: 389374 - DNA, 88 bp, Homo sapiens
gggcgtggcccggccgcactatggctacaatgcagatcttcgtgaagactctgactggtaagaccatcaccctcgaggttgagcccag

SEQ ID NO: 389375 - DNA, 74 bp, Homo sapiens
ctggaaagatgtggtgatggggcattcttgctaacaacggctgacaggacaactggatcagtttcattaaaaag

SEQ ID NO: 389376 - DNA, 101 bp, Homo sapiens
tcctcgctggctggtgccgcgttcctgctgctctgcctgctccacaagcggcgccgcgccctcggcctgcacgggaactttatattgctgttggaatatct

SEQ ID NO: 389377 - DNA, 74 bp, Homo sapiens
ggacttccaaagctgggaatcctattttttattatgttgcacggagagtggacagctggttttgaggggtacag

SEQ ID NO: 389378 - DNA, 100 bp, Homo sapiens
cccaagtatctcgtcacaaatcacactatcgtaatcgagaacactttgctactatacggacagcatcactgatataaagtgaaacttactcctggagtgc

SEQ ID NO: 389379 - DNA, 100 bp, Homo sapiens
tcagtgactttggattgtcaaaaatggagggcaaaggagatgtgatgtccactgcctgtggaactccaggctatgtcgattgtctccagctttaagacca

SEQ ID NO: 389380 - DNA, 101 bp, Homo sapiens
atcactgaagttggatggtctgttagaagaaaatgtaaactgtcttgagccccaccctcacctgcctgtgctggcaaccagtggcctagaccatgatgtga

SEQ ID NO: 389381 - DNA, 75 bp, Homo sapiens
cggggcagttcgggccggctgtcctggcgcgttctgatgaacatacaccagtggaggatgaagagccaaagaaaa

SEQ ID NO: 389382 - DNA, 98 bp, Homo sapiens
gggaggctccttgtgccacattcttgcagctgcctacaaattcaagagtgaccagggatgttccgatgaagttaaattccgtcaagatttaatgaata

SEQ ID NO: 389383 - DNA, 75 bp, Homo sapiens
cttgaccttcgtgctgtttctctccctggcttttggggcaagctacggaacagatgtgttcagagcaacattgtt

SEQ ID NO: 389384 - DNA, 75 bp, Homo sapiens
caaaacctcgagcatctagaaaagaaaatggacctgttgtagctgactggaaataccggcatgcaggattgatgg

SEQ ID NO: 389385 - DNA, 98 bp, Homo sapiens
ttcgactggctcctgattacgatgctttggatgttgccaacaaagttcaacaaacacctggatcgcggcttcaactcgtgcgcgcgcagcgacctgta

SEQ ID NO: 389386 - DNA, 127 bp, Homo sapiens
ttctggggagcgcctcgtcgacatgagtgatgtggaggaaaacaacttcgagggcagagtatgtgaggagcagcgctgtgaggaggaagtcttccccctggccatgaactacctggatcgctacctg

SEQ ID NO: 389387 - DNA, 90 bp, Homo sapiens
catctactactacatggatgagccagcacccagtgccccaccccaaggtgtaactgtatccaagaatgatggaaacggaactgcaattct

SEQ ID NO: 389388 - DNA, 75 bp, Homo sapiens
cagacatctacaaccttcgatctcctgacgaggcagctgcaatgactctccgcacggtattattgtcattgcaag

SEQ ID NO: 389389 - DNA, 80 bp, Homo sapiens
gctgtgcgcgctggcgctgagcctgcagccggccctgccggtcgcaatggaagaagagatcgccgcgctggtcattgaca

SEQ ID NO: 389390 - DNA, 50 bp, Homo sapiens
gctggatttgattttccatgtagacaagagatcaatggcttttcaaaagc

SEQ ID NO: 389391 - DNA, 74 bp, Homo sapiens
tggaattatgccctgttggttccaatgctgggattggctgcttttcgctgaccccgcactacatctacccacca

SEQ ID NO: 389392 - DNA, 100 bp, Homo sapiens
catgttccagtgcctcgagcgctcaggatggaggaagactcgatccgcctgcctgcgcacctgcgaatttgaagcctacattaatgcttctggagaacat

SEQ ID NO: 389393 - DNA, 100 bp, Homo sapiens
tgctgaagaaggcaacgctgaaaggtgtgggttttgctaccaggcaggtggccagcatgaccaagcctaccacaatcatcgaaaagaatggggacattct

SEQ ID NO: 389394 - DNA, 75 bp, Homo sapiens
gccacaaatgctccttctcctggagacgcaactcaagcacattggagatatatttccacagcatctggcttttct

SEQ ID NO: 389395 - DNA, 101 bp, Homo sapiens
gcttagagaaaaccagttaaaaatgttgcctaatgatcctgccatgaagcagtttctgctgtacttggatgagtccaatgccctggggaagaagttcatca

SEQ ID NO: 389396 - DNA, 75 bp, Homo sapiens
agttcgagaccagtctggccaacatggcagaaggccacaagctgtacaaggacctgaagaacttccttagtgcag

SEQ ID NO: 389397 - DNA, 49 bp, Homo sapiens
cttcgttcaagacaggtgtttaagccaggactgccttaagtgagaagaa

SEQ ID NO: 389398 - DNA, 75 bp, Homo sapiens
ggtctacaagactctcttcgctctttgcatcttaactgcaggagcatcagatccatgctgctgctgactcggagc

SEQ ID NO: 389399 - DNA, 78 bp, Homo sapiens
gttggaatccttgctgtgctgaatcctggctgtgtgaccccaaatgcctgctctgtgcctgtatctgagatcatcgcc

SEQ ID NO: 389400 - DNA, 75 bp, Homo sapiens
gaggaaaatgttttgccacgtggatgtgaagatttcctctaaaaggctgctgaaaatatgacaagctgactttct

SEQ ID NO: 389401 - DNA, 82 bp, Homo sapiens
ggacgaggaggaggccatggtggtggccgtaattccgcggcccgagccgatgctcagagaataccaagctgctattttacac

SEQ ID NO: 389402 - DNA, 82 bp, Homo sapiens
catgaacttaggggcacttctgttttcctgagggctacaccgttttcttttgaaagagatgtgttcagagcaacattgtttt

SEQ ID NO: 389403 - DNA, 82 bp, Homo sapiens
cgcgtccagcacctacgtcccgctgccgtcgccgccgccaccatgcccaagagaaagccgaggaggagctggtggaggctga

SEQ ID NO: 389404 - DNA, 82 bp, Homo sapiens
tgctgcgaaagctgccaaaagtgacatgcagatcattcccagtgaccccttctgggtgccaactactgaggaggaatacttg

SEQ ID NO: 389405 - DNA, 96 bp, Homo sapiens
ggcgctgggccgggtttcggcttcggccacaggtggcacgcactacccttcttcctggcctcctgaagaccatagcagcaaatcgtaagatgcccc

SEQ ID NO: 389406 - DNA, 74 bp, Homo sapiens
cggccctttccatagccagagcagtacaagactgcagcagaaggccgtggctagtgagatcttcaagggcaaga

SEQ ID NO: 389407 - DNA, 75 bp, Homo sapiens
tgaagcctcgacccacccagatgcactggttggcacagaatacgagccatcatgggaagagcagccaatgcctga

SEQ ID NO: 389408 - DNA, 75 bp, Homo sapiens
tgccttatgttcctccagccaattgcaaagggccagtctgcttccttcagtccctgctctcaaaggggaaatccc

SEQ ID NO: 389409 - DNA, 100 bp, Homo sapiens
cattgagcccctacttcaagtactccgtcatgatcaacaaggccacgccctacaactacccaggtacaggtttgcagattccgccagcagcacagcaagc

SEQ ID NO: 389410 - DNA, 118 bp, Homo sapiens
tggaattaaaattgtcaaaattgcagccaatcatttggaaaccttgtgtccacaggtgttgtttggtgacaaaatgttccaccctcatacattgtttgaccaattcattgccaccaaa

SEQ ID NO: 389411 - DNA, 82 bp, Homo sapiens
tctttggagacaaaactatgccaaatggcttattcagaagagcataaaggtatgccctgtggtttcatccgccagaattccg

SEQ ID NO: 389412 - DNA, 75 bp, Homo sapiens
ttcgaacttagacttccggaaggactttggcgaggattcagccagcaacagtccttcgtacagattctccaggag

SEQ ID NO: 389413 - DNA, 82 bp, Homo sapiens
ttggtagcggaggcacccgaatgctgcccgggtgagacgccgcaccaggctgcaggccagcccttcaagttcactatcccgg

SEQ ID NO: 389414 - DNA, 51 bp, Homo sapiens
tgagcctcaagtgcttctgcattacagtgcttttgaagatgatgatatcac

SEQ ID NO: 389415 - DNA, 83 bp, Homo sapiens
atctgctgtcaaggatcttgtgtgctccatagtttatcaaaaggagtctgatgatgaagaaaattttattgatgcaaatgatg

SEQ ID NO: 389416 - DNA, 101 bp, Homo sapiens
ctttgccacagggttttatgtgggacactttagacttgagtgatgccgaagtgccaccagtggtaaaaacagagatggtaacaatttctgatgcctcacaa

SEQ ID NO: 389417 - DNA, 82 bp, Homo sapiens
ggcaaacaagtgtaatcgtttatacatacccacagcccttagagatttgtttgattccatggataaaacttcttccagtatt

SEQ ID NO: 389418 - DNA, 50 bp, Homo sapiens
ctccagtccctcccaaatccgaggcggaaggagttgacccgaagaagctg

SEQ ID NO: 389419 - DNA, 80 bp, Homo sapiens
accctggggactacgacgtccctcaaaccttgcttctaggagataaaaaggcccagctgagagccagcctggaggttacc

SEQ ID NO: 389420 - DNA, 112 bp, Homo sapiens
ctgccccggcttcaggatttacacagacgtggggcgatgcttgtgaccctgcagctcctcaaactttccgcttggccctcatccagcttcagatttcttccatcaaatcaga

SEQ ID NO: 389421 - DNA, 51 bp, Homo sapiens
attctgcaagcaggcaacctgaatacaggtttgaagcaaagaagagatggg

SEQ ID NO: 389422 - DNA, 100 bp, Homo sapiens
tatccatggctacctgggcatcgtggagcttttggtgtccttgggtgctgatgtcaatgctcagaattctcagaagccaccgctgaactgaccgtctcat

SEQ ID NO: 389423 - DNA, 104 bp, Homo sapiens
tgaagaagtagagtatttcaaccataaagacatcttaattgggcacgaaagaggtttggtgcacctcgatttggaggaagtagggcagggcccttatctggaaa

SEQ ID NO: 389424 - DNA, 90 bp, Homo sapiens
ggctgactgagagcgtctgcttgagtgatcagcagctggactgtgccttggacctaatgaggcgcctgcctccccagcaaatcgagaaaa

SEQ ID NO: 389425 - DNA, 100 bp, Homo sapiens
tcgtgtggctcgcggaccagtatgacgccatctgctgccacaccagcaccagcaagcggcattggctgcgggcggcgactggcggcgcgatggacctgac

SEQ ID NO: 389426 - DNA, 75 bp, Homo sapiens
gcaggacatcgtgtataagctggtgcctggcttgcaagacagctttgtgtgcaacacgtgccctgaaaagtggat

SEQ ID NO: 389427 - DNA, 75 bp, Homo sapiens
cggaagaacatcgacctcacagccatcatatcagacctgcgcagccgggtggtgaagcagtattttccaatttga

SEQ ID NO: 389428 - DNA, 100 bp, Homo sapiens
tcgacttcggtttcagttggagttggaatttgtgcaatgtttagccaacccaaattaccttaattaaacacctgctgcatttccagacaccataaaagaa

SEQ ID NO: 389429 - DNA, 75 bp, Homo sapiens
ctacgagctagagttgccatttcgctgggatttttgggtggtgcaaaggatggccttgtgaaaactgatatggag

SEQ ID NO: 389430 - DNA, 100 bp, Homo sapiens
gaggatgacaaactctggagtaattggagccaagaaatgagtataggtaacctgtctggtcagagtgcagcttcagtcttgcacccccagcagaccctcc

SEQ ID NO: 389431 - DNA, 83 bp, Homo sapiens
caagatgtgggcacaaaaactaccattcgcctgatgaactctcaggtgcctggaatacttattaagaaacgatgcaaatccag

SEQ ID NO: 389432 - DNA, 83 bp, Homo sapiens
gccctctgcgctcctgcatctgcctccccatgttatggaaacaaaggacatgctttacatcgtcactgaatttgctaaaaatg

SEQ ID NO: 389433 - DNA, 98 bp, Homo sapiens
agtggtacaaggaccagaagaaactgcaccggaaatgtgcctaccagacaatgcagatcttcgtgaagactctgactggtaagaccatcaccctcgag

SEQ ID NO: 389434 - DNA, 75 bp, Homo sapiens
agtcgccgctggagaggggctcggcgcccggcggggactgcaggactggacctcactgtgggaacaacaagatca

SEQ ID NO: 389435 - DNA, 100 bp, Homo sapiens
ccagccaggcgtggaggaagaggcattgaggactttccttacctgtttttccagctcacccactgccagcagaggtccaggtgcaggtacagcagtctcc

SEQ ID NO: 389436 - DNA, 75 bp, Homo sapiens
gagtttgagccccggaggcagagcggctgccatggacccagacagttactcttggaggcatcttccagttgggaa

SEQ ID NO: 389437 - DNA, 90 bp, Homo sapiens
ccagccagcagttctgtgcctgcagaggctgagctggcaggcgaaggcatctcagttaacacaggttcgagactataagaggcttacccc

SEQ ID NO: 389438 - DNA, 75 bp, Homo sapiens
cctcagttggaagcagccgatccagcctgcggagcctgtggggcaggctattcagcttgaccctgaagaaactcg

SEQ ID NO: 389439 - DNA, 74 bp, Homo sapiens
gattgccagatcggggtcaaaggttggacaccagctcttcctgtgtcatcccgataccagtatcctgaggagag

SEQ ID NO: 389440 - DNA, 75 bp, Homo sapiens
aaccaaagccagcctggcatactttgaagatcgtcatgggtctcaggaggaggtctgcgatttgctccatgccgc

SEQ ID NO: 389441 - DNA, 90 bp, Homo sapiens
agcgagggtactgtatttatggagaccgctgcagaccccagagtcagaaggagtgagaaccctgacccctaatcccactgcatccagcca

SEQ ID NO: 389442 - DNA, 80 bp, Homo sapiens
ctcgagaacatcgtggccaactcgctgctgctgaaagcgcgtcaagtacgaattggagcaatgttggcttatacacctct

SEQ ID NO: 389443 - DNA, 82 bp, Homo sapiens
atgggccagaacgacctgatgggcacggccgaggacttcgccgaccaggattttttatcaagcagaaatgcatcgaacaacg

SEQ ID NO: 389444 - DNA, 83 bp, Homo sapiens
agcgggagctggacggcgagcgcgagcggcgcgagaaagcagcaatgaatgtggatcacgaggttaacctcttagtggaggaa

SEQ ID NO: 389445 - DNA, 82 bp, Homo sapiens
gaagcggatttccgattgaatggtgatgtgctctatgaactccttcagcatattctgaagcagaggaaacctcggattcttt

SEQ ID NO: 389446 - DNA, 101 bp, Homo sapiens
gacagattgaccagtttttagttgtagcacgtgagtgttgtggggccctagaatactacgacaaagcctttgaccgcatcaccacgaggagtgagaagcca

SEQ ID NO: 389447 - DNA, 82 bp, Homo sapiens
gctgggcctccagtcaccctcgtcttgcattttcccgcgtgcgtgtgtgagaagccctaccactgcaactgggacggctgcg

SEQ ID NO: 389448 - DNA, 76 bp, Homo sapiens
ggtcacttaagttttccgtgtgcgggttgcaaggagcgtgcgtgcgtctgagcctccattatggcatgctgaattt

SEQ ID NO: 389449 - DNA, 82 bp, Homo sapiens
gtgtctgtctgttggaatgtcaagagatggaattgcattttgtgaaaaaagaacaagaattttctgcaaggatcatatctaa

SEQ ID NO: 389450 - DNA, 50 bp, Homo sapiens
cttgcttacaggagtgaaaaacaggttacacggtgtgggcacacaacctc

SEQ ID NO: 389451 - DNA, 82 bp, Homo sapiens
gagaccaaagagcaacatcgcagtggaaggccggaggacgtctgtgccgagccctgagcactccagaaacatgacaaggagg

SEQ ID NO: 389452 - DNA, 100 bp, Homo sapiens
ctcagagatccaagtgcgcgccctggcgggtccggaccaagcctcctgacaaggtgatccgggcgggccccgcaggaattttatcccctcaccggcctca

SEQ ID NO: 389453 - DNA, 90 bp, Homo sapiens
tgagccatctccacttaatgactgtctcacattggccggcaacttgttccaggtaccgagcccctgaactgctgttgggaaccaccacgc

SEQ ID NO: 389454 - DNA, 90 bp, Homo sapiens
cgtccagaggtatttgagcagcgagcagaaccaaaccactgagcatattgttaaactagtggaacaacacggcagtgatatctggtggac

SEQ ID NO: 389455 - DNA, 100 bp, Homo sapiens
gagcacagagcctcgcctttgccgatccgccgcccgtccacacccgccgccagagagaagcaagcagaaggcccggaggagaacaagatccagctcctcc

SEQ ID NO: 389456 - DNA, 101 bp, Homo sapiens
tttatatcaagactcatggtgaacatgtaggttttagaattttcatggatgccatactactttctttgactagaaagttaattggccttggtcctcacagc

SEQ ID NO: 389457 - DNA, 96 bp, Homo sapiens
aaacgggagagcacgttttagtcacagcaggagaagtccaccttcagcgatgcctggatgacttaaaagaaagctatacctgcaggcccgcttcac

SEQ ID NO: 389458 - DNA, 87 bp, Homo sapiens
tcactgtatttgaccttaaaaagaccgtggcaaggaggtgtacagccctgactttcatagcctcggaggagaaggtcttggtggccg

SEQ ID NO: 389459 - DNA, 101 bp, Homo sapiens
aaaaatccttctaccagtttcagcattatagagcaattccaggagtagtagagactcaaggagaaattgaagccatagtcgtgcctgtttgcttagcattc

SEQ ID NO: 389460 - DNA, 100 bp, Homo sapiens
tcccacttgattacccgttaagtcccccaaagatgagatttacctgtgagatgtttcatcccaacaaggaaatactatgtgaagtatgccggaaaacatt

SEQ ID NO: 389461 - DNA, 75 bp, Homo sapiens
gtcgccagtcagtgttgtgtggaagccagaacatcgttctcaatggcaaggaggaagacaatgtgtggcaccctg

SEQ ID NO: 389462 - DNA, 119 bp, Homo sapiens
ggagatcccctcagttctgcgctgctcccgttccccctccccagagcaagaatgatatggaacctagcaaagctgttccactgaatgcatctaagcaagatggacctatgccaaaacca

SEQ ID NO: 389463 - DNA, 90 bp, Homo sapiens
aaagtcaacctcactcctcagcactcacagcacctagctctccagggatcctgaaactccgccacatctggaacctgaagttgatgcgtt

SEQ ID NO: 389464 - DNA, 83 bp, Homo sapiens
ctaagcgggagcctccgtggaactcagcgctccgctcctcccagttcctaagaggagtaactattcccagtcagaggcgctat

SEQ ID NO: 389465 - DNA, 100 bp, Homo sapiens
gtttaagattaagaggcatacaccacttagtaaactaatgaaagcctattgtgaacgacaggccaacgaggtgacggacagcgcgtacatgggctccgag

SEQ ID NO: 389466 - DNA, 50 bp, Homo sapiens
cttagaccacagcgacgaggacgactgcccgtctcccttctctcctggac

SEQ ID NO: 389467 - DNA, 90 bp, Homo sapiens
ccagcgtctcgggctccttgcagcagggcagagcttgggatatggctttgtgaactacattgaccccaaggatgcagagaaagctatcaa

SEQ ID NO: 389468 - DNA, 82 bp, Homo sapiens
cgccatgggccagaacgacctgatgggcacggccgaggacttcgccgaccaggtttaactatagatcaacacatcatcttgc

SEQ ID NO: 389469 - DNA, 96 bp, Homo sapiens
gcaaaagtggaagcgaagccgaaaaaggcagcagcgaagagctggctttatgtgctggggcagaagagatccgatagctatgttctgctggagcat

SEQ ID NO: 389470 - DNA, 90 bp, Homo sapiens
tcattgcactcgcgggtaacaaggcagacctggccagcaagagagccgtggaattccaggtatttgactggaatggttgacaaaaggacg

SEQ ID NO: 389471 - DNA, 75 bp, Homo sapiens
cacgtctacaaggcgaggcggaaagatgggttcggctttccagtttggcagcagcactacaaatttcaacttcac

SEQ ID NO: 389472 - DNA, 74 bp, Homo sapiens
cagtatgaagtggtgaaggagtgtgtgcagcgattgacgcgtcatgccttacgtgggaaggacaacagttccag

SEQ ID NO: 389473 - DNA, 100 bp, Homo sapiens
gttcaattatgaatctcaggaacaccaccttctgtcaggtgctggtcgttatgtaccaggttctgcaagtatgggaactaccatggccggagttgatcca

SEQ ID NO: 389474 - DNA, 75 bp, Homo sapiens
gtaaaatatggtgaactcattgtcttagggctggatctccagaactgttctctggaggaccctggtccaaacttt

SEQ ID NO: 389475 - DNA, 90 bp, Homo sapiens
gcgagtctcggagaagatgtggtggcttccgtttgttggtggaggaggtggcaggcctcggcggcactgccgccctgcactgtagcagat

SEQ ID NO: 389476 - DNA, 137 bp, Homo sapiens
gcgactacgacggcgttgatatcggtggtaacgacggcctcagcaggcggggaagatgaaagggtacgccgtcatgaaatacacaaatcgaagaatagagcattagtacactgggaactccaagaaaaagctttgaa

SEQ ID NO: 389477 - DNA, 75 bp, Homo sapiens
ttctatgaccagatggacctggctggagaagaagagattgagctctactcagttggtcagcatcggctcctctta

SEQ ID NO: 389478 - DNA, 100 bp, Homo sapiens
accgaaggcttaaagtaggacaaccatggagccttcctgtggcaggagagacaacaaagcgctattatcctaaggtgtgaactgcgaagtgaacattgac

SEQ ID NO: 389479 - DNA, 100 bp, Homo sapiens
aaatcacacgcataatggatgaaaggaaccgacaggcttgtaattccacatctgaagtcaaagatctattggaacagaaaagcaagttgaccatagaagt

SEQ ID NO: 389480 - DNA, 133 bp, Homo sapiens
tcgaagcgagggtctgaagttcacgactactagaaggggaggggagtggaaaggctctcagtgaaaaaggtatcattgcccagtgcctaagatcttttatgttcagctcactgtaggaaataatgaatttttt

SEQ ID NO: 389481 - DNA, 51 bp, Homo sapiens
agaatcgctctataagatctgcaagtgttccttgcctgtatctccccttgg

SEQ ID NO: 389482 - DNA, 74 bp, Homo sapiens
gaagaggatcaggagctggagagcttcaagagatggttccgttgctttggggtgaacttggtaccagtgccgtg

SEQ ID NO: 389483 - DNA, 75 bp, Homo sapiens
tggaaattcccagaggactttggagaccaggagggtgcatctgcccggaagactcagactcctgcagcccagcca

SEQ ID NO: 389484 - DNA, 83 bp, Homo sapiens
gggccacccctcctttcaggtcaaggagggtgtgaagacagagaatgaccacatcaacctgaaggtggccgggcaggacggct

SEQ ID NO: 389485 - DNA, 96 bp, Homo sapiens
tccccaggataagtcacagggctatgcaaggagtgaatgtttcagggtggagaagaatctgcttgtctatggtcctgccattgactctaccagagg

SEQ ID NO: 389486 - DNA, 75 bp, Homo sapiens
cggagaccccgcgccgacggctgctcaaacatcaggccgttccaacaaaacccagactgtggcagtggcagccgg

SEQ ID NO: 389487 - DNA, 83 bp, Homo sapiens
ctccgagccccttcctgagaagatcccagttggaatcgaagcctcttaaaatggcagatgacttggacttcgagacaggagat

SEQ ID NO: 389488 - DNA, 127 bp, Homo sapiens
gaagtttgagacgggcgccttctcctactatgggactatggccctgacctcggtcccctccgctgattgctgtgtttgaagaacaagaaccactccacaagattgagagccccagtggaaaccctgc

SEQ ID NO: 389489 - DNA, 112 bp, Homo sapiens
gctgctgctgctgcatgtctaccaggagaggagggaactgcggagcggcgagtgatagacagccaagcagagaaactgaaggagcttgacaaggagatccggcccttccggc

SEQ ID NO: 389490 - DNA, 75 bp, Homo sapiens
tggcagtagcagcttatgaggatggttggtgaaaaccctgtgtccttggagaaagctggttcccgttttccagag

SEQ ID NO: 389491 - DNA, 100 bp, Homo sapiens
cacacaatgtcggggatggacctccagatttccttactggaatgaatctgaagtctgctgcagtaaaacacagaaggctttaaaatgttttcttgcataa

SEQ ID NO: 389492 - DNA, 80 bp, Homo sapiens
ttcctatggattctagtaacggaaactgtagaggggcaagcagtgctttagccacagtagaagacttccagattcgtcca

SEQ ID NO: 389493 - DNA, 100 bp, Homo sapiens
tttgctgcagcggtattggatggaatgatatatgccattggtgggtatggtcctgcccacatgaacagaccccaccaacaactgaacgctttggtcaggc

SEQ ID NO: 389494 - DNA, 55 bp, Homo sapiens
acaacgttgaggactgcaagatgatggtgattcatcctaaaactgatgaacagag

SEQ ID NO: 389495 - DNA, 50 bp, Homo sapiens
ctcgtgcactttacacacatgaggaaactcgaaggaaggaaggcattgta

SEQ ID NO: 389496 - DNA, 90 bp, Homo sapiens
tgggcggcttggggcgtgtgtgggccgtggcttcccagcacggccgcatctctgggtttgagacaatctctatgggaagcagaaggcaag

SEQ ID NO: 389497 - DNA, 128 bp, Homo sapiens
ttagaatctcaaacaagacaacttgagctgaaagcgaaaaactatgctgaccagaagttaatgttctcctcagaggtggaagaatatcctgataaagagaaagaaatcaaagcctcttcataatacca

SEQ ID NO: 389498 - DNA, 74 bp, Homo sapiens
gtgaagtgtctgcgctgcctgctctacgccctcaatctgctcttttggatctgactgcagccatgagcagcaat

SEQ ID NO: 389499 - DNA, 95 bp, Homo sapiens
agacgctctgaactgactgccccgcatcaccggagcgtcccagctgcgaggagacctacaacggccagagcgagaacaacgaagactatgagatc

SEQ ID NO: 389500 - DNA, 119 bp, Homo sapiens
agcgcattgctcagcgtctgaaggaggcccagaatacatgtgcaatgctgacaacttttaatgagattgacatgagtttgggcttcctgtagacacccttttcctgcgcaacagagctg

SEQ ID NO: 389501 - DNA, 83 bp, Homo sapiens
agtgactcgctactacagagcacccgaggtcatccttggcatgggctacaaggaaaacgagcagtcattatggcgaaccttgg

SEQ ID NO: 389502 - DNA, 100 bp, Homo sapiens
gcttcttccagagccaaggaggaagggttgtccggccttatttagtgtctctgacaaaaccggccttgtggaatttgcaagaaacctgaccgctcttggt

SEQ ID NO: 389503 - DNA, 100 bp, Homo sapiens
gagaagatgtatgaaaattcctactggacaagaatatgctgccaaaattatcaacaccaaaaagctttctgctagggtgttgttacagatcttataacag

SEQ ID NO: 389504 - DNA, 101 bp, Homo sapiens
gcaagaagaaagacgtggcagcaagcgggagtcggggatagtgtcatcggttcggctgttccacctcccaacttcgagatgccagtctccatcccagtgtc

SEQ ID NO: 389505 - DNA, 98 bp, Homo sapiens
actgtgcaaagaagattgttaaaggttctaggtagattaaaagatgaagaaattcgatgtcgaaaatacctacatccaagttcatatactaaggtgat

SEQ ID NO: 389506 - DNA, 125 bp, Homo sapiens
acatgatgtcttcagccagtataaaaacacagctcgacagtacgcctacttctataaagtcatccagacccttctcaggtgcagccagagagacactagcccactgatggacggacagacgtggg

SEQ ID NO: 389507 - DNA, 90 bp, Homo sapiens
cagacgctggcgggcgcagtttctcacgacgggccgagcctgccactggagtgcatccgccccaacccttttccccctcgtctcctgtga

SEQ ID NO: 389508 - DNA, 101 bp, Homo sapiens
aagaccgaggcctcggtggttcccctctctcccgcctggctccctcaggagaaggagcggctaagaactggtcatgctgctggagtggtggtcctgcacgg

SEQ ID NO: 389509 - DNA, 98 bp, Homo sapiens
accgagagcgcgaatatcgtcatcgttagaagatacagtggaagcagtttttgatttcattcagagaagcagaaggatgattgttgttctgagccctg

SEQ ID NO: 389510 - DNA, 75 bp, Homo sapiens
ctgagtggttgtgtggtcgcgtctcggaaaccggtagcgcttgcagcatggctcagctgtcgcaggccctggagg

SEQ ID NO: 389511 - DNA, 90 bp, Homo sapiens
acaagtggagctccttttcctccacctaccttcccgagcaccagttggagatgccaggacattactctcatctggctgccttctatgagg

SEQ ID NO: 389512 - DNA, 50 bp, Homo sapiens
ctggaggagccttctcaagaacagagcttccgggaggatttccattataa

SEQ ID NO: 389513 - DNA, 100 bp, Homo sapiens
agcaagcagttcagaagagccaaggaataaacatgcaatgaacccaaaaggacttcacatgtatcattctccgagcctgatattccgtcctcaaaaagta

SEQ ID NO: 389514 - DNA, 100 bp, Homo sapiens
ttttcagcttccagacagcaaccacaactatgcaagcttcaccaaccgctgcctgctcaagtggctgaagttgtgggacctggtggtgtttggccacgag

SEQ ID NO: 389515 - DNA, 82 bp, Homo sapiens
aaggctctgtcccacatataggtggattaactgtctggcaaaggcagcctggagcattggtaagcgtcacactgccaaagtg

SEQ ID NO: 389516 - DNA, 101 bp, Homo sapiens
tgtatgggctctatgagtacctcaggctcagcttgtcaatcggaaacagaaattagagtctgtggaactttctagccaatcagaaattcaacacttaagca

SEQ ID NO: 389517 - DNA, 100 bp, Homo sapiens
ggactatgggggattgggcagaggtaaacttgaagggtcaaagtgcaaagggcagcttttgatttttggggcaaccaactgggacttgattggtcgaaaa

SEQ ID NO: 389518 - DNA, 101 bp, Homo sapiens
tgggaaaggacaaaaaaattcctggaaaaagaagtccaagaagcaaaaaagggactgctaagaagataccaccaggtcaagaagaagagagattggcccta

SEQ ID NO: 389519 - DNA, 100 bp, Homo sapiens
aaaacatggaactagaagaaaaggagaaggcagagaaaaagaaacgaggaccaaagccttcattggaaaatggatataccttatttgattatgatgttgg

SEQ ID NO: 389520 - DNA, 50 bp, Homo sapiens
caacctgcagcctcctggcaccaaaggatgtgataggccaggttctgcct

SEQ ID NO: 389521 - DNA, 51 bp, Homo sapiens
gagaactcggagggcaccggagggatttttgccaagcctgaccatgttaag

SEQ ID NO: 389522 - DNA, 97 bp, Homo sapiens
atcaatttttcttacttgaagaatatacaggatctgattatcagtacgtaggcaagatgctgcagttggagaagaaacttgaacgtgaacttgagga

SEQ ID NO: 389523 - DNA, 100 bp, Homo sapiens
gccacatgcttcagatagagggacagtctaagaagttttgtagttcatcgtgtatcacggcatacaagcaggggtttaaagccaatttgtctctcttgag

SEQ ID NO: 389524 - DNA, 100 bp, Homo sapiens
gtgcctggcggaaggggcaggggacgtggcttttgtgaagcacagcacggtactggagaacacggatggtctataagaaggagaaagctcgagtcatcac

SEQ ID NO: 389525 - DNA, 83 bp, Homo sapiens
ggcagcagcggcagcggcaagcaccgggagatcttcgagctgaaggcagagctcaacagtgacaagaaggagaagaagaagga

SEQ ID NO: 389526 - DNA, 100 bp, Homo sapiens
gactgtcgctgctttctgaggccacaggaaaggggccgtcggtcgccgccatgacagcgagcgaggcggagaaggagtctcgctctgtcgccaggctgga

SEQ ID NO: 389527 - DNA, 96 bp, Homo sapiens
ttctgtggagaataacggctgcacctggagattgacgcagagtgggcggcggtggtgtctgcgggccaggcatcgacatccgcaacgactatcagc

SEQ ID NO: 389528 - DNA, 83 bp, Homo sapiens
gggagtggcagagagtatgcattaaagcaggttacgggcaggacttgagtggcttcggacagggcttctcagaccccagccag

SEQ ID NO: 389529 - DNA, 82 bp, Homo sapiens
tctcttctccctccccttcttggtggtgtttggactctagaccatgtgcctaggtagaagtttttcctttctccgcagctct

SEQ ID NO: 389530 - DNA, 123 bp, Homo sapiens
actgcagccggagcccgggaggggccgcgccgccaccgtctgaactaggatgtcccgacatgaaggaatcctacggcccctgaatattttggcatcttcaacctaccgcaactgtgtcaagaa

SEQ ID NO: 389531 - DNA, 75 bp, Homo sapiens
aactacggagacaagtttgcagagaacgatgtgattggctgctttgcgctccagaacctgggtatcaacccagca

SEQ ID NO: 389532 - DNA, 90 bp, Homo sapiens
ctgaggaagaaccagagcagtgaagatatcttgcgggatgctcagatgatgtgcgaggtgatgccgaccatcagcgaagcagaaggcccc

SEQ ID NO: 389533 - DNA, 101 bp, Homo sapiens
cgcccgtcggacggggaggaggagcaggagctggaggaggagccgccgccgccaggtatctcagatgaagacatcatcaacattactcttcctactggagt

SEQ ID NO: 389534 - DNA, 100 bp, Homo sapiens
tgaggatgaactggcgggtgtggacgccactacagttcatcaacatcaactacgtccctctgaaggacttacaccagaggatcgataagttccgtttcac

SEQ ID NO: 389535 - DNA, 83 bp, Homo sapiens
ccaggctgagactcggggcgccagtccgggcaggggcagcgggagccggccgggagccttcacgtaaatgggtccagtcatgc

SEQ ID NO: 389536 - DNA, 82 bp, Homo sapiens
gccgctgtcgtctttgcttcagccgcagtcgccactggctgcctgagggggatatgagactttctactcggaatatcctgag

SEQ ID NO: 389537 - DNA, 100 bp, Homo sapiens
cctcgtggtgtggtgtatggccgtgggcatctcctacattagcgtctacgaccaccaaggagaagaaaacctcctggcaattttacgacgaagatggtgg

SEQ ID NO: 389538 - DNA, 90 bp, Homo sapiens
acatctatgccatcacagacaccgcctacaggagtatgatgcaaggttcattgcagaagaggccgcggcttctggggccaagtgtgtgct

SEQ ID NO: 389539 - DNA, 83 bp, Homo sapiens
gagcttccgggagggcggctcgcaggatggaggcgtcctgcctagagctggcgctggagggcgagcgtctgtgcaaggcgggc

SEQ ID NO: 389540 - DNA, 100 bp, Homo sapiens
ccgcgtcctcagccaccgctccctcttcccacggtctcggacagcccgggagacgagccctcggagtccccatacgaaagtgcagacgaaacacaaactg

SEQ ID NO: 389541 - DNA, 49 bp, Homo sapiens
cgagaccattccgtatggagagccggacatcaacatggctggagagcct

SEQ ID NO: 389542 - DNA, 83 bp, Homo sapiens
ggccgagggtggccctaggggcagcgagcaagacagcaagcaggtcccttcaccgatgttgtcaccaccaacctaaagcttgg

SEQ ID NO: 389543 - DNA, 100 bp, Homo sapiens
caaatgtctgactctgactctcggactgagaaacgcaagaggtcctgggcctatgtcaagaagtgcaaaaacaacatgtgtccaaatcggggattggtga

SEQ ID NO: 389544 - DNA, 100 bp, Homo sapiens
tgcccggagttccgctcctgcgggcttagcaggaaagggtgcctaagaggcctgtgggagcaaatctgtgtatgacggcccggagcaggaggagtattcg

SEQ ID NO: 389545 - DNA, 101 bp, Homo sapiens
ggcctggggctgagcatggagcagcgcggcggagctgttccggagacttcaaggcactagctcgatggtctgaaaaacagagatgagctccttgaacttgg

SEQ ID NO: 389546 - DNA, 100 bp, Homo sapiens
aaaagaggcgaagatcgagtaggaactgcaggggaaatggaaagaacatcaggagagcattctgggtaataccatgcaaagtgtgattgcattactcagc

SEQ ID NO: 389547 - DNA, 97 bp, Homo sapiens
agcaatcctaccatgtcagccttcccagtagctggaactacagtccaagccttatgcatttgatcgggtgttccagtcaagcacatctcaagagcaa

SEQ ID NO: 389548 - DNA, 50 bp, Homo sapiens
agtgaaaagagatctgttttcagtttggaccccaatgaccagaagtctct

SEQ ID NO: 389549 - DNA, 100 bp, Homo sapiens
agtacttcacatcgtcgttcacatgggatctgggacttggctagtggcaaattaaaactgtcattgactgggcatattagtactgtgcggggcgtgatag

SEQ ID NO: 389550 - DNA, 50 bp, Homo sapiens
cgcattttccaggataactgtgactccagcggagaatccggggcaggaaa

SEQ ID NO: 389551 - DNA, 98 bp, Homo sapiens
ggaaatcaagtcgtaaaaacaggtcaagtggctcccagaaccctggccgaagctcacctccccctggctatgttcctgagcggcagcagcacattgcc

SEQ ID NO: 389552 - DNA, 90 bp, Homo sapiens
gaaaactgatggctaagtttgcatgaaaactgcactttattgcaaggatagctgggagtatggccaccctgctccacgatgcggtaatga

SEQ ID NO: 389553 - DNA, 100 bp, Homo sapiens
ctcctcaggcctctcctctgagcgctcagactcagaccaagagagtttgaggagacaatggatgcactccaggctgacatcgaccagctggaggcagaga

SEQ ID NO: 389554 - DNA, 75 bp, Homo sapiens
gctgtttctcatctttatactcttccaggtgtggaagatttccttacaagggccgtgttacatgacactgttaat

SEQ ID NO: 389555 - DNA, 96 bp, Homo sapiens
tttgtaactacctggcattgccttttgttgaggccctggagagtgaatttgtttcctgccagcttcaccaatggattgatctcatttttggctata

SEQ ID NO: 389556 - DNA, 82 bp, Homo sapiens
tttcaagaaaatggatttaaacatatttccctgtggagccttatgccagcctggaccatcttggaggcagtgtaggatcatg

SEQ ID NO: 389557 - DNA, 100 bp, Homo sapiens
ctggtaatagaggacttgaagcagaaagcaagtgaatacgagtcagaaggtcggaagtctatgcgtcagtctacagctgagcatacacgacaaacgttcc

SEQ ID NO: 389558 - DNA, 73 bp, Homo sapiens
ccaacttttggagactcccagagtgactatgatacgggaccagaggaagaccgagaggcagaatccgagttaa

SEQ ID NO: 389559 - DNA, 83 bp, Homo sapiens
gaacagctaaaggatgtgaccattttggcagctactaaccgtccagataggatagacaaggcgcctccttggcattataacaa

SEQ ID NO: 389560 - DNA, 100 bp, Homo sapiens
cgagtgcacactggaggtcccagagcacgacgagcgcggaggaccgggaggctcccgggcttgcgtgggtttctgggtggagcggacccctgtgcacgag

SEQ ID NO: 389561 - DNA, 110 bp, Homo sapiens
accgaggcacggacaacatcaccgtgaggcagggggacacagccatcctcagatgattcagtccctcaaggcgttgattgaaaatgcagatgctgtatatgaaaagatcg

SEQ ID NO: 389562 - DNA, 51 bp, Homo sapiens
aggaaaacaagtgtctgcttatgtcggcagctgtgtcaatgttgaaacaag

SEQ ID NO: 389563 - DNA, 90 bp, Homo sapiens
ctctacgccgacatcgacgccgcgtggcaggcgctgcgcacccgtgttctcaggcgctgtggtctcaccttccactggggcaacaatggg

SEQ ID NO: 389564 - DNA, 98 bp, Homo sapiens
ctggccggatggaaatcctaatgacagtctccaaattcgcctccatctgtaccatgtatctccaggctccagcacttgcttagctgttatgactccgg

SEQ ID NO: 389565 - DNA, 75 bp, Homo sapiens
cacagctcaggccagttcgtcggctgccagcaacaatcaccaggcctcagaaaacggaatctctgtctgtgacct

SEQ ID NO: 389566 - DNA, 100 bp, Homo sapiens
ccggcttcaggatttacacagacgtggggcgatgcttgtgaccctgcagctcctcaaaaatttgcagtggtgtgctgcttctttcaaaggatttgtaaat

SEQ ID NO: 389567 - DNA, 100 bp, Homo sapiens
gagacgggggaagcagcacgggatcccagcctcaggcctgcacggacggtgttggttgggaagcctccccagctttctgaggatgatatctggctaaaaa

SEQ ID NO: 389568 - DNA, 99 bp, Homo sapiens
cagcatctacatgttcaactggcacccagtgcttatggttgctggcatggtggtattctatggaggtgagccagaagagggtttagggaccagtgctat

SEQ ID NO: 389569 - DNA, 82 bp, Homo sapiens
ccgaaagcgacgttcggccaccggaggagcgggagccaagcaggttttaaaatcaaagatgggaaaatcggagaaaattgcc

SEQ ID NO: 389570 - DNA, 101 bp, Homo sapiens
aaaccagttttaattcttctgcccgggagacctaaccgccgaatgcgttcggagtggaatgcagtagccctctgggcctgggatattgtggttgataactg

SEQ ID NO: 389571 - DNA, 100 bp, Homo sapiens
tcctctcctgatctggcctcatctgttccagggaggtgggattgaatcaatgtaaccactgtgcgggaatatctgccagaaggagacttttcaataatga

SEQ ID NO: 389572 - DNA, 100 bp, Homo sapiens
gtcggacaaagccctcgcgtcggacccttgccagaactttcaacttcctcaattgctttgcctcactcttctatattgcctttgtcttgaaagatatgaa

SEQ ID NO: 389573 - DNA, 100 bp, Homo sapiens
catgcttttggctgccctgagctggcagtacctgaccactctctcccaggttcgagaacttgtcttggacaattgcaaatcaaatgatggaaaaattgag

SEQ ID NO: 389574 - DNA, 97 bp, Homo sapiens
tgaaaaatgaagatgatgtagacactggactattagaagagaagctgaatttggacgacagccagtgggaggacatccacgttgtcaccggagcact

SEQ ID NO: 389575 - DNA, 85 bp, Homo sapiens
cacggctcgcaggccgggggcaaggggcggccgggcgcggccgatgactcctcctctgagagtggcagcggcaatggctcctcca

SEQ ID NO: 389576 - DNA, 75 bp, Homo sapiens
cccgtggagtcggctgagggaaaagcgaggcaaggcaggcgggatatagaagacttagatcactacgagatgaaa

SEQ ID NO: 389577 - DNA, 60 bp, Homo sapiens
gcctgctgcactttgggttcaaggcgacactggaaaaggattttggtctgagatgctggg

SEQ ID NO: 389578 - DNA, 90 bp, Homo sapiens
aatcaggaagattttggataaaacacgatttagtatcttgcctccaaagctatttagcctcattagaaagaaggctgctgggctggaatc

SEQ ID NO: 389579 - DNA, 87 bp, Homo sapiens
actccctgcctcctgagtcccactctgctgtgtgcgtgcaccagctgcctccaggccaactacacgtgtgagacagatggggcctgc

SEQ ID NO: 389580 - DNA, 101 bp, Homo sapiens
gtgaccgtgtgtcagaacaatcttgaatcatgaagctactaaccagagccggctctttctcgtataaatcaaagccattctgtgaaaaactgctttcctgg

SEQ ID NO: 389581 - DNA, 100 bp, Homo sapiens
gttcgaggatgtgtacgagctgtgcgaggtgatcggaaagaggttcgtaaagtgaatgaaagcatcaagtataatcacccattgagaaaatgtgttgata

SEQ ID NO: 389582 - DNA, 95 bp, Homo sapiens
caggacgtgtggctggtacactctgtggaggagacccaggtggcacaagaatggctcaactctccaaatagagagaatttctatcagttgcaagt

SEQ ID NO: 389583 - DNA, 82 bp, Homo sapiens
cgccttctacagcctggactacacccgttttacggagaagacttttactgtgaaattcctcggagctttcgtcacctgtcct

SEQ ID NO: 389584 - DNA, 100 bp, Homo sapiens
atctgcagtatcttctcccctgttggaccagcagagtttaatgatcttgtggccgagaaggaagctgtgtcttcagaatgtgtcaatttggccaaagaca

SEQ ID NO: 389585 - DNA, 80 bp, Homo sapiens
agctgcagcacagtcgggggtgtaggttatggggctctagaggacaaaatcccagtccttggcacaaactcaggaaatgg

SEQ ID NO: 389586 - DNA, 100 bp, Homo sapiens
attttatctcgacgctgtcctatgccattgataatccattgcactatcagaaggacacagcattgttggttttgccatgtactattttacctatgacccg

SEQ ID NO: 389587 - DNA, 100 bp, Homo sapiens
gtggatctttgggggtgtgaaataccagtatggtggcaaccaagaagatgctgagggttggaaaagcaaaagcagatgtgtggcccaaaactgctccaaa

SEQ ID NO: 389588 - DNA, 123 bp, Homo sapiens
cttcagtctacaaaggactcttctaaaaggatatgtgttgctaatacccatctttactggcatcctaaaggtgctggagaatctggtaaaagcaccattgtgaagcagatgaggatcctgcat

SEQ ID NO: 389589 - DNA, 100 bp, Homo sapiens
cagctatcacaaacgtcatttggatagaccagtgttcttacggttttgggaaacattggacagcccatgatgatgccatttggtcagttgcttgggggac

SEQ ID NO: 389590 - DNA, 51 bp, Homo sapiens
attccaagtaactcttatttgcctcttagcaaatatccggctgtgatcaat

SEQ ID NO: 389591 - DNA, 83 bp, Homo sapiens
gtaccaggaggcgttggccaagggaatgggtaccacagaccatgtcatcgtcctggcgtccacgaaccgagctgacattttgg

SEQ ID NO: 389592 - DNA, 100 bp, Homo sapiens
cgtgtctgatcctttcattcctcttcaagtacctgatgcaccaggtggagccgccaccaaaatgcagattttcgtgaaaacccttacggggaagaccatc

SEQ ID NO: 389593 - DNA, 100 bp, Homo sapiens
ctcaagttttcacttatcatctattccaccgtgttctggggttggggtctgctaggtccccggaatgagttgtttgacgcagccaaataccgagtgctag

SEQ ID NO: 389594 - DNA, 88 bp, Homo sapiens
gggcctccgaagagctgccgcgacgcccggcccgcagggcagatacacagccaccactaagtgctctccgagtgtggatcccgagagg

SEQ ID NO: 389595 - DNA, 100 bp, Homo sapiens
caagcaattcttcccgttcggagaccccaccaagtttgccacatttgttttcaacgtctttgatgaaaacaagactgtgccctgtccacggtgcctcctg

SEQ ID NO: 389596 - DNA, 75 bp, Homo sapiens
agataacttgtactggagagaaatcctacaagtgtgagcaggctcctccccgtggctatgtcaccttcaacagca

SEQ ID NO: 389597 - DNA, 98 bp, Homo sapiens
cactccaaatgatgacactttggatgaaggagtaggacttgtgcattcaaacatagcaactgagtgattcgcctttgccagtctcatctcgtgtctgc

SEQ ID NO: 389598 - DNA, 83 bp, Homo sapiens
cttctcaaatgccttctcatccccacatagtggcagaactggtgaagccattgtagatgctgcgctgagtgctctgcgccagc

SEQ ID NO: 389599 - DNA, 83 bp, Homo sapiens
aaggattccaagtaactcttatttggtgtcagctgtgatgcatgtttaaaaggaaattttcgaggtcgcagatataagtgttt

SEQ ID NO: 389600 - DNA, 96 bp, Homo sapiens
cctaccaggtgtcggagtctgacagcagtggggagaccaagtgaacagagtatctgtcaggcaagagctgctgtgatggtttatgatgatgccaat

SEQ ID NO: 389601 - DNA, 98 bp, Homo sapiens
ctcttcctcgttagaagaaatcaggataacaaaggcatattgggcacccctacaaaagggccaaacaccagagcaccctagaaggtttaactaaaaga

SEQ ID NO: 389602 - DNA, 100 bp, Homo sapiens
cccaaaggatatgtggcaaagtcaccagatgaagcttatgcaattgccaaaaaattagggaatcacttcagtcactgccattacagtgctctacttcctc

SEQ ID NO: 389603 - DNA, 137 bp, Homo sapiens
catctttaactgcttggccgtgcttgccctgtcatcccacctgagaaccatgctcaccgaccctgagctggccaagaggactcccggcaagcacccagaccaccccgcggtccagagtgccctgcaggccatgaaga

SEQ ID NO: 389604 - DNA, 98 bp, Homo sapiens
ctcccgggttcaagcgattcttctgcctcagcctcccgacctggctttctccggaccccctgtttctggaacagaggagggtcagagaagcaaagacc

SEQ ID NO: 389605 - DNA, 100 bp, Homo sapiens
tgcggaaggcgagtgccaggagggagagatcctggccacaggcagtacggcatggtgctcggatgtgataggccaggttctgcctgaagcaacaactaca

SEQ ID NO: 389606 - DNA, 83 bp, Homo sapiens
ctaaaaagccctcagtaccagagacagaagcagatggattcgtccttttaggaagaggatcacctagcccgggtagaagaggc

SEQ ID NO: 389607 - DNA, 100 bp, Homo sapiens
tacagttctctgccaatattcctgctctttacaatagtaaacagcttgaagactttttcaagttgctgatatgtgttcaagatgagtgggatgggagaaa

SEQ ID NO: 389608 - DNA, 74 bp, Homo sapiens
agacttcctgtgttaactccttcctctgccactttttaccttggggacctcagctggtattccctctcgagtgg

SEQ ID NO: 389609 - DNA, 75 bp, Homo sapiens
ttgaatcagaaattgagaagctgaagtctcaggggatccagaactgcagccagtccttgctgggctgttcctgtc

SEQ ID NO: 389610 - DNA, 100 bp, Homo sapiens
agacgtcagcgtctaccggattccgccccgggcctccaaccgcggttacagcctcctgacaaggtgatccgggcgggccccgcaggaattttatcccctc

SEQ ID NO: 389611 - DNA, 82 bp, Homo sapiens
tctccggcctgccttcactggtttgtgtccagagccggactgattctctcaatttgcgagtcctggcaaaataagcatgcag

SEQ ID NO: 389612 - DNA, 76 bp, Homo sapiens
gccccacagaccagcccagcattcaggtcttcatcctccaggtccacctttagcaagacctattctcccccgagaa

SEQ ID NO: 389613 - DNA, 83 bp, Homo sapiens
ccaagttggatgccatgctggaggagttcaagaaggtaatgtggaatgtataaaactcttgcagagcagcggagcagatttcc

SEQ ID NO: 389614 - DNA, 75 bp, Homo sapiens
ctgtggttgccggaagttgagcggcggcgaagctgctctcaggggagaacccagaatacagaccctgccggtggc

SEQ ID NO: 389615 - DNA, 76 bp, Homo sapiens
tggagcaattgaagctgactactaaggagaataaggtctcacagatttcaagcctggctactggattggtgtccgc

SEQ ID NO: 389616 - DNA, 95 bp, Homo sapiens
tcagaagaggcctgccatactacattcgcttaaattttgcagagaaaggagtgcctgtgaagaaaacggggtattgccctgaggcttatattctg

SEQ ID NO: 389617 - DNA, 75 bp, Homo sapiens
gcagcgtgcgttcagccctgggatgggaaagggctccttcaagtatgcctgggtcttggataaactgaaagctga

SEQ ID NO: 389618 - DNA, 100 bp, Homo sapiens
cgtaagcgcacgtttaaacatctcaagtgtcccttttgatgagaagaataagcctcattctgattcaacagcagagatcaaagaaaagacttctgttttc

SEQ ID NO: 389619 - DNA, 74 bp, Homo sapiens
cgctgaagcgcgcgggcaaggaggtgctgctggaggagtgagcacaaatggatcagatgaccctgaagatgcag

SEQ ID NO: 389620 - DNA, 110 bp, Homo sapiens
gttattccgaggcagttgtgaataagatacctgcttaagcaagtcattatttagaagcaaggtccttgaatgagcgagattatcgggaccggagatacgttgacgaatac

SEQ ID NO: 389621 - DNA, 100 bp, Homo sapiens
aagccggcgtcgtcggatgttgtgttgcccgccaccatgagctacacagaaaagatgttggtttaaagcgattttttcctaagagtttactggattctgt

SEQ ID NO: 389622 - DNA, 74 bp, Homo sapiens
gcacaatgtggattttttgaagtgataacgtggtgctggaccagacctacctgtggcagggtgttcgagtggcg

SEQ ID NO: 389623 - DNA, 100 bp, Homo sapiens
caaacagcactgctcagcattttgaacttctgttcagagcttcagcacctcagtttaggcagttgtgtcatggggtctgaagactatgagactgctctat

SEQ ID NO: 389624 - DNA, 90 bp, Homo sapiens
cttccatcaatcatatctcacagctttaccgatttgttacaactcaagcaagggccagcagaaattctcttttgacagatataattgctg

SEQ ID NO: 389625 - DNA, 100 bp, Homo sapiens
gcagcgtgtcaggcggagagacccgccgccaggtcctgctcaatctggaattttgtcagatcgtgaagtggtaaacctctttcttcattttactgtcaac

SEQ ID NO: 389626 - DNA, 75 bp, Homo sapiens
tttcattatatccagctgggaactgtctacaggatgtgttcgaaatgcgctttgccaagatgccggacgagcctg

SEQ ID NO: 389627 - DNA, 100 bp, Homo sapiens
tggcactctggcgggcataccagcgggccctggccgctcacccgtggaaagtacaggtcctgacagctgccagaagatcagctgccatgttacttgactc

SEQ ID NO: 389628 - DNA, 101 bp, Homo sapiens
cagaaaagacagtgttctgctttcatggagttcacagaagagtcgaggagcctggcacctgtgtttgctctgtttgtaccattttactgctccataccaag

SEQ ID NO: 389629 - DNA, 100 bp, Homo sapiens
tgctgggatgtgccttagaggattatggtgataaacaagcaactttgattcctgatgaggtgtttgatgcagtaaaaagcaacatcgtcacttctattaa

SEQ ID NO: 389630 - DNA, 75 bp, Homo sapiens
gccctacacagatatttgagcatgtgttcctggagtccaatgtgctgattgctgctaacagtcagggtacaatta

SEQ ID NO: 389631 - DNA, 90 bp, Homo sapiens
cacatttgacattgatccgatggtggttactgatctggagaagggactcctgaaagccctgaaggttttagacaattacttaacatcccc

SEQ ID NO: 389632 - DNA, 100 bp, Homo sapiens
caccaatgcatggagcaggagatgcaaaaccgatacccacctgtatcaggaaagcagatggtggagctgaatatgccacttaccagactaaatcaaccac

SEQ ID NO: 389633 - DNA, 100 bp, Homo sapiens
ggcgacgctaagttgctgatcgtggcgatcacccggaagttcaggctgaattctgaaggcaaacttgagcagacggtctccatggcaaccacgacacagc

SEQ ID NO: 389634 - DNA, 51 bp, Homo sapiens
aaggaattcctagatctaaacaccaggtgagacaggcattggcaaatccac

SEQ ID NO: 389635 - DNA, 109 bp, Homo sapiens
tgctgtgggtgctgggacttcccgtccgcggcgtggagggattgtcagtggcttcgccccgaggagagctgactgccctgggctgctgcctccggcagagctgagccaa

SEQ ID NO: 389636 - DNA, 98 bp, Homo sapiens
aggactcggagcgcatgcagctgctgctgaccctggccttcaaccccgagccgctggtgctacagagctccactggttcaacagcctctcctccagtt

SEQ ID NO: 389637 - DNA, 75 bp, Homo sapiens
ccgccccgcccggagccccggcccccacaggtgacttaagagattaaaattaatttggttgctgttggttctgaa

SEQ ID NO: 389638 - DNA, 100 bp, Homo sapiens
ttgttcaccgccaaccccttcgagcaagacgtggctccgccgcatgcaagagatgattgcaaggatgcaggcgcagatgcagatgcagatgcagggcggg

SEQ ID NO: 389639 - DNA, 50 bp, Homo sapiens
gtgctgcgcgacccccgcgcatgtagtattattgattccacagaatacag

SEQ ID NO: 389640 - DNA, 100 bp, Homo sapiens
ttggagccatcctctacaggacccgctttctaccattaaggtacaattttgtgatgctggccctgtcctcctcattcctggtgttatcctatctcttgac

SEQ ID NO: 389641 - DNA, 83 bp, Homo sapiens
tcctgaggaggcagctgcggtggcagctgctgagttctcggtgaagaacaagttgaaatcatcgcagaaggataaagttcgtc

SEQ ID NO: 389642 - DNA, 98 bp, Homo sapiens
cctatggcctgttatttgtctcaacaaaagagcagacctacaggtggacaaggagaggcacaattttttcgagtcctctcttgattatgtttatcaaa

SEQ ID NO: 389643 - DNA, 75 bp, Homo sapiens
caagagtgttgactttaaggtttcgctggccaaaggatgaagtggctgtaattgatgaaattcaaatgattagag

SEQ ID NO: 389644 - DNA, 51 bp, Homo sapiens
tttgcagctgacctacatctcgaagatcaatgaactgagccatgttcaaat

SEQ ID NO: 389645 - DNA, 100 bp, Homo sapiens
gatccttgtgaaaacaaaatcaagtggataaactttttagcgcttggatgcagcatgcttggtgggttgctctaggtcgtaaccagcctttgaaaaagga

SEQ ID NO: 389646 - DNA, 100 bp, Homo sapiens
ccattggcaagctacaataatggggccacgtgtgaaggcaaagaagaatgctgctccattcagaagtgaagtctgctttgggaaagagggcctttggaaa

SEQ ID NO: 389647 - DNA, 100 bp, Homo sapiens
tgagaacttcctgatctctctcgctgtgagacatgtctgagactcctgctcagtgtagcattaagaaactgaggcttcttgaagagcttgaagacacttg

SEQ ID NO: 389648 - DNA, 75 bp, Homo sapiens
gctgtccccttccaggtggcccagaaagagcagcccctgtcaaagggaacaggaagcagtccacggagggtgacg

SEQ ID NO: 389649 - DNA, 75 bp, Homo sapiens
ggaactcgtcctacgtaacacagccagttaggtatatgaatgacctaaaggtacaaataaagacggagagagaac

SEQ ID NO: 389650 - DNA, 100 bp, Homo sapiens
atttgaacaaattgaaaacacagccaatccttccagatgtcctgtgaaaatgtttgaatgctacttgtctaaaaggatggatgcaaccttgaaagaactg

SEQ ID NO: 389651 - DNA, 75 bp, Homo sapiens
ccatgctgctgaaagagtaccggatctgcatgccgctcaccgtagacgagatgggtgagtcaagtgaagacatag

SEQ ID NO: 389652 - DNA, 123 bp, Homo sapiens
gtgaggctcagagatgcctgtaccgtgatgtgacgctggagaacctggcacttatgtcctccctggtgatgtggagccaactgcaccgatggaggaacccacagtggtggaggagtcccaggg

SEQ ID NO: 389653 - DNA, 100 bp, Homo sapiens
gaagcttccggacgacgaggaaccgcccaacatggcctcggagagaactggaacgctgagaagaggtcccccaccttccacctgggagatgcagcccacc

SEQ ID NO: 389654 - DNA, 100 bp, Homo sapiens
ctggaggtgggatccacacagctcagaacagctggatcttgctcacactctttcaagagaagcttccttgaacaatccatttcacagatgaagaaacaga

SEQ ID NO: 389655 - DNA, 82 bp, Homo sapiens
caacaagaagatggtaccgtgcatcgcacctatttaagaggaatttggataaagagagggcagtgctactacaacgccggaa

SEQ ID NO: 389656 - DNA, 76 bp, Homo sapiens
gaaaccataatgctacaaactctaggagaaacatcagatggagtgaggaagtcagttcacaaggtctttgcttcca

SEQ ID NO: 389657 - DNA, 75 bp, Homo sapiens
gggcaccaggaagcgaaggctggtgacttaagagattaaaattaatttggttgctgttggttctgaacaaataat

SEQ ID NO: 389658 - DNA, 101 bp, Homo sapiens
gcggcagcggcagcggcacccccggccccgtagggtccccggcgccaggccacccggccgtcagcagcatgcaggctttccccacaaataaaccagagaaa

SEQ ID NO: 389659 - DNA, 100 bp, Homo sapiens
agcttttcgctgactacattcagaatcatgtcaaccctgccatggacttcacgcagactccacctgggatgttggctctggacaacatgctgtactttgc

SEQ ID NO: 389660 - DNA, 100 bp, Homo sapiens
gcaagatggcagccaccacgggctcgggtgaagctttgttctaagaatatttgtttcatctagtttatgagtccaaatgatatagactgtaaatgtcaca

SEQ ID NO: 389661 - DNA, 75 bp, Homo sapiens
cgcgaattggagaaaaagttcagtgggaagcatgtcgtctttatcgctcagggtgtccgcaatgttgccagtgtc

SEQ ID NO: 389662 - DNA, 101 bp, Homo sapiens
ccttcgccggtcaccggctcctgcagggctaatctagacgaaatccagatgagttcacctacattccttagagctttaatgactgctgtttgtaaagcagc

SEQ ID NO: 389663 - DNA, 104 bp, Homo sapiens
ctttgcccgagcatatgcacagggtatcagccgaaccaagtactgggagggtgtccgcaatgttgccagtgtctgtctgcagattggctacccaactgttgcat

SEQ ID NO: 389664 - DNA, 89 bp, Homo sapiens
gaagagcctagcacctcttatactgatagcactgcagcctgtggtgttgaggctcacagcgatgccatccagccctgccacatcagaga

SEQ ID NO: 389665 - DNA, 98 bp, Homo sapiens
ccagctgacggagatggtgcagaagatggaggaggaaggaaaatcacctcggcagtgtttgaaggaaggatactgcaactctttgaagtacgcatttt

SEQ ID NO: 389666 - DNA, 97 bp, Homo sapiens
ctcagaaggaataattgaggaatacctagcattcgatcacatagatatgggcaagattcttgccaagagaattaatgtgcgtattgagcacattaag

SEQ ID NO: 389667 - DNA, 88 bp, Homo sapiens
tttttcgtttttcggatgatgccttcaatactacctttatttccaccataggcagatccagttcctaatggtttgcgagctttgccag

SEQ ID NO: 389668 - DNA, 74 bp, Homo sapiens
ttcttcttcgagtatttgtagaagggtctctaattaacagaagatggcaaagcccagccacagcagctatgtcc

SEQ ID NO: 389669 - DNA, 75 bp, Homo sapiens
cggggagctggtgtggacagaggagggacagccacaaccaaagtcccggagatccgtgatgtaacaaggattgag

SEQ ID NO: 389670 - DNA, 95 bp, Homo sapiens
gtttagcagcagctttgatagttctgacggagtctggcaggaagctgtgctgaatggtttggtggccactgaggtgttgatgtggttttatgtcg

SEQ ID NO: 389671 - DNA, 98 bp, Homo sapiens
cagaaggcgatcaaggccaagtatccgccagtcaataggaagtacgagtgaccagttacagaagtggatccgcggtaatgtgagtgcatgtgcgaact

SEQ ID NO: 389672 - DNA, 90 bp, Homo sapiens
tgttcaagtgcagggagttcccgttacaatcactagtgttgcagaattaaacaaccaccatgtcgagcaaaaaggcaaagaccaagacca

SEQ ID NO: 389673 - DNA, 75 bp, Homo sapiens
cctggagttaatgtccaacctagggtctgcggagacccgatccgaggaatactcccccagttgcaagaggcgcag

SEQ ID NO: 389674 - DNA, 100 bp, Homo sapiens
actggacaatgtattactggactctgaaggccacattaaactcactgactacggcatgtgtaaggttatttccagaaagaagagaatggcaaagtatgag

SEQ ID NO: 389675 - DNA, 74 bp, Homo sapiens
cgtgaggatgcctgtgggaaaaagggaaattttcattacgttcagggataggatttttgggccttggtctcatg

SEQ ID NO: 389676 - DNA, 100 bp, Homo sapiens
cgacttgaccggcgccaaacagaacacaggagtgtggctagtcaagttgctgatgattcctctgatcatgtcagtactttatgtctgggcccagctgaac

SEQ ID NO: 389677 - DNA, 90 bp, Homo sapiens
aatggagctcatgccactggtcaccctccccaaagctggaaactgacaaactagctctcccgatgagccccagcccgcttagcccgagcc

SEQ ID NO: 389678 - DNA, 83 bp, Homo sapiens
gcgcgcagggcctgcagcgggagctggacggcgagcgcgagcggcgcgagaaaatgaggtggaaagtgagaaatggtacctgt

SEQ ID NO: 389679 - DNA, 100 bp, Homo sapiens
cagaaacacaaagcagcccaaccaaagggttggtcaaagaaaaagtgatgtatgaaaaagaggcaaaacaacaagaagaaaagattgaaaaaatgagagc

SEQ ID NO: 389680 - DNA, 100 bp, Homo sapiens
gtcgcctccaggccaagagggatccttcacccgtgtctgccactgaggcggctcccagctgcgttggcgacatggccgacacccccagagatgccgggct

SEQ ID NO: 389681 - DNA, 75 bp, Homo sapiens
actacttttggtctgtgatgagcttaattatgcaagaaggatttgatgccctggatccctttattcccatcctgg

SEQ ID NO: 389682 - DNA, 101 bp, Homo sapiens
ccgccaaaggtctggttcctgccgcccgtctgcatggcccactgcatccgcctggcgctcatccgcttccacgtcaagatactggtagacacagtctgggc

SEQ ID NO: 389683 - DNA, 100 bp, Homo sapiens
acggcaagcagccctggtaccagctctccaacacggagcgctctgtgcccaggagtgtgtccatggccgttgtgtggcacccaatcagtgccaatgtgtg

SEQ ID NO: 389684 - DNA, 51 bp, Homo sapiens
gtccacctgcaaggattcaaagaaggtccaagacaactttgacaagattga

SEQ ID NO: 389685 - DNA, 100 bp, Homo sapiens
ttaagttccgtgaactcagtactgatgcccagtggggcattcgtcttggtaaacttggtctaagaagaaatttcctgacttgtttgtcttcttggaagat

SEQ ID NO: 389686 - DNA, 75 bp, Homo sapiens
gcctggacctggttctgccttctggacaatctttccgaaccgagctgaagctgccatggaattcttacaagaatt

SEQ ID NO: 389687 - DNA, 75 bp, Homo sapiens
cctggatcttcgaacttttgacacggctttggaaacgacgtcatgtgttagactcagattgatggacaacttttc

SEQ ID NO: 389688 - DNA, 73 bp, Homo sapiens
cagtggctggagaatggagctgaagaaggcatcgtcaaatcaggttgacaatggtctccaggatggtctctac

SEQ ID NO: 389689 - DNA, 100 bp, Homo sapiens
ggctgtgctgaacgggaagggcctcggcactggtaccctttacatcgctgagagtgccggtggtggtgtgcacattgagccccggtatagacagttcccc

SEQ ID NO: 389690 - DNA, 90 bp, Homo sapiens
cggccatctcgctgcccgacgatgtccgcaggcggacacattcagctaacgtattttagcaggtggagtgaggttgaagattcctgtgac

SEQ ID NO: 389691 - DNA, 97 bp, Homo sapiens
ctgacttcaagaatgaagctgcggaccctcgcggtcctttgctgccagcatgatgtcgtatttataatatgtggaggagagagagctcaccatgctc

SEQ ID NO: 389692 - DNA, 75 bp, Homo sapiens
ttaggtctcaaggcaagcctattgagttaacacctctgccgctgctaaaaggtcgttgaggacttccacatggag

SEQ ID NO: 389693 - DNA, 73 bp, Homo sapiens
gaaaaattacagcacatctcagtgaatttgcaagtgcaatttccagtttatgtactaccaaaagtagagtatc

SEQ ID NO: 389694 - DNA, 98 bp, Homo sapiens
tggaagaagagccagaggtgatccctgggcctccatcagagagccctggcatgctgactaagctccaggtagatgacattaatgctgataagaatatc

SEQ ID NO: 389695 - DNA, 83 bp, Homo sapiens
gtggccttagctgtgctcgcgctactctctctttctggcctggaggctatccagcgacgagcctgtggagtgggagacacctg

SEQ ID NO: 389696 - DNA, 80 bp, Homo sapiens
tgagctctgcccggaccgctgcatccacaggtaccgttttgcagagattcgctaccatcgccctgaggagacccacaagg

SEQ ID NO: 389697 - DNA, 51 bp, Homo sapiens
cctgacagctctgcggctcgggccctgagccaagggcacgtgaagttgttg

SEQ ID NO: 389698 - DNA, 90 bp, Homo sapiens
ctcagcggccgcgaccgagtcatggctgagacctacggaatggatgtatatggctacctactggcacgagaagggcggctagaggatgtt

SEQ ID NO: 389699 - DNA, 51 bp, Homo sapiens
ccacccacagcactggaccaagccaatgttttcagttgcaccaagcttagc

SEQ ID NO: 389700 - DNA, 97 bp, Homo sapiens
gtcttttccgcccgcttcgatcgcctcgcgccggctgctctttccggacaatgcagatcttcgtgaagactctgactggtaagaccatcaccctcga

SEQ ID NO: 389701 - DNA, 75 bp, Homo sapiens
gatccgcccacagacctcaaattcaaaggtctcaccaacggctttgggggtgcgaggagcgagcaggagccgggc

SEQ ID NO: 389702 - DNA, 90 bp, Homo sapiens
atcgcaaccacagcatcttcttggcagatataaatcaggagcgggatcccggctactcaacagaaatgaaggaggaatctgtaaagaaac

SEQ ID NO: 389703 - DNA, 50 bp, Homo sapiens
ggccccgaggggaagggatccgaggcagggtactggaagatgaaagagac

SEQ ID NO: 389704 - DNA, 83 bp, Homo sapiens
aaagcagcagccttctcgacagccttttactgtgaacagacgttgcctgaaaaaagcaatagagattacagaatgtatggaag

SEQ ID NO: 389705 - DNA, 75 bp, Homo sapiens
gaaggaaaaacagaatcagctgttccctgcgaaaggaattaaacatgggccagcgatgttcagatactagaggaa

SEQ ID NO: 389706 - DNA, 101 bp, Homo sapiens
acttcggcggcggcgcctcaggcacctcggcccgggtgggcaccatgtccttgaagcttcaggcaagcaatgtaaccaacaagaatgaccccaagtccatc

SEQ ID NO: 389707 - DNA, 96 bp, Homo sapiens
ccaccatcctcagatagaacccctgagattctcaaaaaagctctatctggtttatcttcaagatacttgttacgtcctctcctttgccatcatcat

SEQ ID NO: 389708 - DNA, 76 bp, Homo sapiens
acccggacctcgcttacctgcatgctgctttcctcttgctgatgacatgattcctgtttgaatctgttgacaagat

SEQ ID NO: 389709 - DNA, 98 bp, Homo sapiens
cagccctttgcacctcgcagctaaaaacggccacatcgacatcatcaggaaggtgaagcagatgcaccttaacttcatggatgaaaaggatcggatca

SEQ ID NO: 389710 - DNA, 83 bp, Homo sapiens
ggacgaggtgtcggcgcgggagcagcacttccacagccaagtgcgggagtccacgggggagtcggtgaagtacttcctggaca

SEQ ID NO: 389711 - DNA, 74 bp, Homo sapiens
gctacatccttaccaaccgtggcatcgcccagatggtggtcctgggcggtggtcaggaagccatggatgtaacc

SEQ ID NO: 389712 - DNA, 100 bp, Homo sapiens
gaatccagtagaaaactggtcaaggaagcttctcacagaaagttctccgctcccagacatgggtccctcggcttcctgcctcggaagcgcagcagcaggc

SEQ ID NO: 389713 - DNA, 98 bp, Homo sapiens
tgccgccgctctgccacggtctgcccacccaacgcgaagacggtaacccgtgtgactttgactggtggaagatagatgataagcctgtaaaaattgac

SEQ ID NO: 389714 - DNA, 117 bp, Homo sapiens
gcccgtggccgccgtgcaggcggccgtcagcaacctcgtccgggatgctgaaaacgccattcaacagatgggtggccagtggcttggtggaagacaaatcagaactaactgggcaac

SEQ ID NO: 389715 - DNA, 100 bp, Homo sapiens
gaaatccagtatctgagtaatttgcagtactttgctgtgaccaacaacaatgatgaaggtgaccaagcagcaagtgttgaagagctggaaaaacagattg

SEQ ID NO: 389716 - DNA, 75 bp, Homo sapiens
caaacttatagatattgcacgacagactgcacagggcatggaatttctccacccaggtgaactcctccctcacct

SEQ ID NO: 389717 - DNA, 98 bp, Homo sapiens
aggaccacccaccatgcctatccaggacctgaaggccaatgagtcacggttgaaggacattaacaaggtagctgaagacctggagtctgaaggtctca

SEQ ID NO: 389718 - DNA, 74 bp, Homo sapiens
ctagcagtgcagggaacttgggagtactcattcctgtaatagctgtgtttgggcttcctgtagacacccttttc

SEQ ID NO: 389719 - DNA, 121 bp, Homo sapiens
aaggcaatgatttataccatgaaatgattgaatctggtgttatcaacttaaaagatgccacctctaagctgaaggaagaggatcaccttccaagacaaaacagtcttcatgggggaaaaat

SEQ ID NO: 389720 - DNA, 100 bp, Homo sapiens
gggcccgccgccccgcgggggagggcggagctggcgcggcccctagctttctccttctggtgtggggcccgaggtgattcgcatctaggtggcggcagtc

SEQ ID NO: 389721 - DNA, 75 bp, Homo sapiens
aaatatgtaggagctgtccagatgctgaaaagagaaggtcaaacagctgaaggaaagtatgtgatggtgatggga

SEQ ID NO: 389722 - DNA, 100 bp, Homo sapiens
agtagtttggagaggccttatggtaatgtcggccattgagaaattgttgaggcaggagccttttgtggcagatgaatatattgaacgtcttgtatggaga

SEQ ID NO: 389723 - DNA, 100 bp, Homo sapiens
gagaaaacaaagcccccagctgtcagcagaggaaggaggcgacagcgccggagcagactcagggggcaggctctccccgctcctcccccagccacaccat

SEQ ID NO: 389724 - DNA, 87 bp, Homo sapiens
tccccgcaagatggacggtttcgccggcagtctcggcccagattgccttcctgcagggagaaaggaagggccaagaaaatttgaaga

SEQ ID NO: 389725 - DNA, 75 bp, Homo sapiens
cgcaggagcaacacgtgatgtgtctacttatcaggatacatttcatcaatgaagccttctggacctggagtttcc

SEQ ID NO: 389726 - DNA, 100 bp, Homo sapiens
agctgggctggctgctggatcccccaaaagatgggatgcacttttgtcttcctggccagtgttttactacaatgaggatggcaagtctggacaacagcca

SEQ ID NO: 389727 - DNA, 101 bp, Homo sapiens
gtgcggtcacgtgggccggcggtccacggccggaatggcagcaagctcagcaacatggccaacgccctggccagcgccacttgcgagcgctgcaagggcgg

SEQ ID NO: 389728 - DNA, 75 bp, Homo sapiens
cgttatccccacctctgatgattcctcagccaagaagtatgatgcgtttttggcctcagagtctctgatcaagca

SEQ ID NO: 389729 - DNA, 98 bp, Homo sapiens
cagaagaagggaaggcgcgagtgaggaaaggaggtactgtagccgattacaaggagagctttaatacgattggaaacattgaagagattgcatataat

SEQ ID NO: 389730 - DNA, 51 bp, Homo sapiens
ctttcaggaatctaataaaatgcacttgctgaggtgcctgggcatccctac

SEQ ID NO: 389731 - DNA, 98 bp, Homo sapiens
aacacacagtgcaagtggcagttcggagagaaagccaagctctgcatgctggactttaaaaagggatatcccagagaaggaaggaaataccctttgcc

SEQ ID NO: 389732 - DNA, 100 bp, Homo sapiens
tgaaagtaaagaacgaacagcatgtaaaggaaagattgccatatcagggtccgcaagcaggtggtgaacatcccgtccttcattgtccgcctggattccc

SEQ ID NO: 389733 - DNA, 82 bp, Homo sapiens
ctgggtggttgttggcgtgtccctgcagcgaaggatcctgataacgaaggaggcccaacttcattcaataaggagcctgacg

SEQ ID NO: 389734 - DNA, 75 bp, Homo sapiens
cagaggggaaagtatttgtggtaataacccttaccgggagtttcactgaagatatggaatgtgcagatgtcccac

SEQ ID NO: 389735 - DNA, 90 bp, Homo sapiens
agcactatggagtagcgcagggtctcgagctgtggccgtggacttaggcaacaggttggtcaaagaaaaagtgatgtatgaaaaagaggc

SEQ ID NO: 389736 - DNA, 90 bp, Homo sapiens
gtccgctttggagaactacatcaaccctctgtgacctgcctgctgcctccctcaacgaccagttgccccaacatacatttcgcgtcattt

SEQ ID NO: 389737 - DNA, 90 bp, Homo sapiens
cagctctgcggctcgggccctgagatgttctcagtgcagctgagtcttggtgagcagacatgggaatccgaaggcagcagtataaagaag

SEQ ID NO: 389738 - DNA, 100 bp, Homo sapiens
gaacagccatgcaaaggcaggggaggaagccacctcgagcgtcatcacgtagacataaccaagaaacttcacccaaatcaagctggcctggattcaaaag

SEQ ID NO: 389739 - DNA, 98 bp, Homo sapiens
cttcatcttcttcttctccctctcttcgtcctgtctgtacttcatctatgtggccccaggcatcgctccatcaagtatgatggtgaaggatgaatatg

SEQ ID NO: 389740 - DNA, 87 bp, Homo sapiens
gggcttctgtgaaacatggcggtaggctgggaccataacacaaggtctaacttcaaacttgtggctgttaattcaaaactctatgcc

SEQ ID NO: 389741 - DNA, 97 bp, Homo sapiens
gaaggccctatcaggacatggagtatgaaagacggcagacctgttatcctaaactaggtgagtcagcttttggtacatgtgatgattttcagtgtaa

SEQ ID NO: 389742 - DNA, 90 bp, Homo sapiens
cgagacctcgcagtaccacgtccagtacgtcccggaggacctccttcccgtctacaaagaaaaagtggtgccgcttgcagacattatcac

SEQ ID NO: 389743 - DNA, 75 bp, Homo sapiens
ggaaaatcgcttggttaaaacctgacacttttaacagatatatttttgccatcatggatcagtttggagatatat

SEQ ID NO: 389744 - DNA, 96 bp, Homo sapiens
ggttcagccctacaattcactcctgacactcaagaggctgacgcagaacgcagattgtgtgcaaaattctgtggcatctctggaatactacctgag

SEQ ID NO: 389745 - DNA, 96 bp, Homo sapiens
cagcatgtatcagccgaggtggagctgcggggccctggcatgaaaggtgccttggcatctcccaatggggtggctttgctctgggctcctgttccc

SEQ ID NO: 389746 - DNA, 82 bp, Homo sapiens
gcatggtactggatatagtacagacactacaacaacaggagtgcaaacttctctacagccgaaaagagggtcaaaggcaaga

SEQ ID NO: 389747 - DNA, 50 bp, Homo sapiens
ccggcgcagcagcatcatcaaggcagaaatactcagtgtcctcagtcaca

SEQ ID NO: 389748 - DNA, 101 bp, Homo sapiens
agaagaatattataatgtcacagttcaatgataacaccctatgcccattgtcctgatctgaaaattcttggaaattgttccatgtgattaacatggaactg

SEQ ID NO: 389749 - DNA, 80 bp, Homo sapiens
ggggctcggagaggtgctcggattctcgtagctgtgccggactccatcaagaatgctggaggaagggtgtttgtccactg

SEQ ID NO: 389750 - DNA, 98 bp, Homo sapiens
atgaagaattaggtatccctcctgatgatgaagactgaaggtgtagactcagcctcactctgtacaattgcaaagcctcattccttttgttcagctgc

SEQ ID NO: 389751 - DNA, 83 bp, Homo sapiens
caaccattgacgccatgtcgggttattcgagtgaccgagaccgcggccgggaccgagggacggggaggtttactgcatcgacg

SEQ ID NO: 389752 - DNA, 75 bp, Homo sapiens
ccggggggcggccaggggccgactgtgaagtggctgcttcaacccccaactccactgctggtgcagccatgaact

SEQ ID NO: 389753 - DNA, 50 bp, Homo sapiens
gaagagcttctgtcgccgctctagggaagttccaggttaaaggcagcctc

SEQ ID NO: 389754 - DNA, 105 bp, Homo sapiens
ggcgcctaaagtctgagagagggaagtcgcctctgtgctcgtgagtgcatggggtataaggtcctggctataagtcaccatggcacagcaagctgccgataagta

SEQ ID NO: 389755 - DNA, 100 bp, Homo sapiens
aggcaccttgggatgagggaatacaagtgtcatgtctgtggggatgaccctgaaaatgataacagtgaattacccaccgcaaaggagtatttccgagatc

SEQ ID NO: 389756 - DNA, 75 bp, Homo sapiens
gctcgtaaggtccctcaaagcgggaaatgcgtcaaaggttttgagagattacctgaagttgcactcaaaagcaag

SEQ ID NO: 389757 - DNA, 75 bp, Homo sapiens
ctgggccgcaggggcgcgcagcgcggggagctgccagtgagaaggcaaccaaagtgcaggacatcaaaaacaacc

SEQ ID NO: 389758 - DNA, 100 bp, Homo sapiens
taccatggaccatcctgctggtcagcactgcggctgagtgtgaacatggctacgcctcttcattcccgtccatgccgagcccccgactgcagcattcaaa

SEQ ID NO: 389759 - DNA, 75 bp, Homo sapiens
ccgggatttgggtcgcagttcttgtttgtggatcgctgtgatcgtcacttgcagaaaggacccaggagcgataac

SEQ ID NO: 389760 - DNA, 99 bp, Homo sapiens
ggaagatggtgccgggggtcgctggctctgctgctgccgccggcgaaggaggaggcgttgccgggtcattcactggaactcccccaagaagctccgggt

SEQ ID NO: 389761 - DNA, 75 bp, Homo sapiens
gctgagtacgacagcctcaaacaggagctggagcagctcaaagagattgagaggatccagaatccagatctctgg

SEQ ID NO: 389762 - DNA, 75 bp, Homo sapiens
acacacctgaccgactcggacatcgagcagggcggatcccgttgaagataccacattacacttaggctcctgttg

SEQ ID NO: 389763 - DNA, 80 bp, Homo sapiens
gctgctggtttggggactggacccgggcacaggtgctggagaatctggtaaaagcaccattgtgaagcagatgaggatcc

SEQ ID NO: 389764 - DNA, 75 bp, Homo sapiens
aaggagtatgctgaagatgacaacatctatcaacagaagatcaagttccatgccattgcagtgtcaactaggcct

SEQ ID NO: 389765 - DNA, 74 bp, Homo sapiens
cccagccctgcctctccctgggctctgttccaagagcctctgagttcctgccttttttcatctctgaatcccca

SEQ ID NO: 389766 - DNA, 82 bp, Homo sapiens
gtcaggcagttggttgggacccgctccaaccctcgacctgcctagagctggaacgttacctccagagcgagccctgctatgt

SEQ ID NO: 389767 - DNA, 73 bp, Homo sapiens
aaccattttaaacaaagccgtctgtagaggatcctttccccattaacttaaagcagcagtattacacaggata

SEQ ID NO: 389768 - DNA, 90 bp, Homo sapiens
ctatcttcatcccaacatactgtgtatgaaatacttgatggaagtcaacctccctgaaacagcataccaattgtgacagagcagcccctc

SEQ ID NO: 389769 - DNA, 87 bp, Homo sapiens
taaaaataaaacaagagtcttctgaagaagcacagtggttgtgtcaaaccgattggtgacatctccatgctgtattgtcacaagcac

SEQ ID NO: 389770 - DNA, 83 bp, Homo sapiens
ctctgctgtgggcgctgctggcgctctggctgtgctgcgcgacccccgcgcatgaaggaagaggcccagcagaagggactcgc

SEQ ID NO: 389771 - DNA, 98 bp, Homo sapiens
cccgtcctccttcgccgccgcgcacaaccgcacgtgcaggtctgaatttcctgctgctgttcacaaagatgctttttatctttaactttttgttttcc

SEQ ID NO: 389772 - DNA, 95 bp, Homo sapiens
tccgagggatgctgaaaacctttgggcttcatggagtcgtcttagatgttgattcaggagaagagtggcagttgcattggaaacctgattagaat

SEQ ID NO: 389773 - DNA, 75 bp, Homo sapiens
cttccggagcttctcagaagacagagggttttcttttgagagctttcagcagaggccaaggcagcattgcttgaa

SEQ ID NO: 389774 - DNA, 74 bp, Homo sapiens
cagtggtcgcttcttctccttgataggactgaggctttcagtgcatactggcaaccttggaaggcaggaatgtg

SEQ ID NO: 389775 - DNA, 100 bp, Homo sapiens
ctgaattttacccttcaggttattcttccagttacacagactgactgcattgcacagatgatggatatttacgtatgtttgaaacgaccatcctggatgg

SEQ ID NO: 389776 - DNA, 82 bp, Homo sapiens
catcacaactggattgtagctgcatatgcccattttgctgtgtgttacaggtttactggactcatgcgggtggtagacacgc

SEQ ID NO: 389777 - DNA, 83 bp, Homo sapiens
gaaaaaacacgctcagagataacctagaaatcatgccctaatccgggagaaatacgaaatggtcagattgatgtaccaggtgg

SEQ ID NO: 389778 - DNA, 74 bp, Homo sapiens
ttggtggtgtgtccaaatctgctgagagacccatctattttggatagtttagatttgaatgaagatgaacggga

SEQ ID NO: 389779 - DNA, 97 bp, Homo sapiens
ttctcgtgcctcagcctctccagcagctgggattacagattacagagtcacgggagacaccgttctgtgttactgctgtggcctgcgcagcttccgt

SEQ ID NO: 389780 - DNA, 100 bp, Homo sapiens
gcccgcactgtgactggactgttagagggatccgtggagaggaggccaggacacctggaagccgggaaatggaactgtggctgcaccatctgtcttcatc

SEQ ID NO: 389781 - DNA, 100 bp, Homo sapiens
gtcgctctgcctttgacaggagaggctgcttcttgtagaggaccaagaatcgccttcagccctgtctggtgcatccttggcagaaagtgaggaggaaaac

SEQ ID NO: 389782 - DNA, 100 bp, Homo sapiens
ctttcttcttggacacctaatacccacagtcctccagagttggccaccctgttcaagggcttaggagaaagtcaacacacttcgcaacttgaattggtcc

SEQ ID NO: 389783 - DNA, 100 bp, Homo sapiens
gtccaactacgtggagcggaagaacagcctgaagaagggctccctcgtgaagaacctgaaggacacactagtttgcagaaaaaacttcagcatgtgccag

SEQ ID NO: 389784 - DNA, 82 bp, Homo sapiens
gcagctcatcttctcaaaaacaggggtgagcctccaggcaaatggaaaacggaatttcctgcaattggtgaccatgtgttcc

SEQ ID NO: 389785 - DNA, 100 bp, Homo sapiens
agactgtatgaactggacatctcgttccctcccaggagcagaagttctgccagcgctatgaccagctcatggaggcctgggagaagaaggtggagcgcat

SEQ ID NO: 389786 - DNA, 98 bp, Homo sapiens
tggaccagaagaagccgaaggaagtcttctaaggttgaaaggattgtagacaagaggaagaacaagaaaggaaaatgggagtatcttatccgatggaa

SEQ ID NO: 389787 - DNA, 74 bp, Homo sapiens
aacaagtggaatagtgctgtcttccttggcgggacccttgcgtttgtcagcccaagcctggcggtgcacaagag

SEQ ID NO: 389788 - DNA, 100 bp, Homo sapiens
ccaagacccgacacaaggcagcttcccacagcaggttggacagttcacagtgacgaggaattgacaatggccatgtcctacgtgaaggatgacatcttcc

SEQ ID NO: 389789 - DNA, 100 bp, Homo sapiens
cagtccgtggactttcccgctgcacactgccctccgaagtcggggacgcgggctcggaagagaatggagactacacatatgtggaaagagtgaagatacc

SEQ ID NO: 389790 - DNA, 112 bp, Homo sapiens
ccacaatgtgcctttgcaggggagcctgagagccacagtaagactttgaccccgacgcaggcttcagtgattgccgcggatcagaagcctgagcactttggctcgagacaat

SEQ ID NO: 389791 - DNA, 100 bp, Homo sapiens
ggaagtggaggtgtcactggccccggcctttgccccaatcttgtgtgggcactgaagggggactacaggttcgagactattgacctgaaaagtggttctg

SEQ ID NO: 389792 - DNA, 97 bp, Homo sapiens
gcagaatgcattcaatctggctgaaaaggaactgggacttaccaagctgctggatcccgaagatgcgtctgttactagagtggagagtctaccttcg

SEQ ID NO: 389793 - DNA, 97 bp, Homo sapiens
cggcgtacgccctcatggggaaaatctccccggtgactttcagtgcctagcccctcctgtaatggttttgacaacaccctttcaagaccttgccggg

SEQ ID NO: 389794 - DNA, 90 bp, Homo sapiens
gtgtggttctcaaatataggcattctgatgggaacttgtgtgttaaagtaacagatgatttagttgtacgagtggctgctttacagaatc

SEQ ID NO: 389795 - DNA, 75 bp, Homo sapiens
ctttgtcatgtagccaagactggagaaacaatgtcctaggcctacttacaagcctccagtctcaaattatccagg

SEQ ID NO: 389796 - DNA, 98 bp, Homo sapiens
gcctaacggggtcacggtgacagcagaggcagtcagtcaagcatcatcacatccggagaactcggaggaagaggagccgtttccctggggagatggta

SEQ ID NO: 389797 - DNA, 96 bp, Homo sapiens
gggaccttgccaaccctcccaagaagttcagaggtactccaaagattcaggtttactcacgtcatccagcagagaatggaaagtcaaatttcctga

SEQ ID NO: 389798 - DNA, 100 bp, Homo sapiens
ctggtcacctgtctggagcaaagaaaagagccctacaatgtgaagatacataagatcgtagccagacccccaggcacagtaaccttggtgcacgaccgaa

SEQ ID NO: 389799 - DNA, 100 bp, Homo sapiens
agcggcaacggggctccgggccctaaggggtttgacaactattcagccaatgtgatggtggacagcaagccagtgaacctggggctgtgggacactgctg

SEQ ID NO: 389800 - DNA, 123 bp, Homo sapiens
ctagacctgcagagtgaagaaagctggtaatagatgtctgacaaactaaagaaagacttgtgttacgtgttagacaaacccagtaggctaactgaaaaggaacttgctgaggctgcaagcaag

SEQ ID NO: 389801 - DNA, 82 bp, Homo sapiens
ccagtgcttctgtctcgactgcactttgagaaggtgtacagagccagtgggccggatggagccactggcagaggccagagaa

SEQ ID NO: 389802 - DNA, 50 bp, Homo sapiens
ccacaagtctctgaaactttatcagtatggcatgcagctgtaccagaatt

SEQ ID NO: 389803 - DNA, 82 bp, Homo sapiens
caacaagaccctgcccatcgctttcaagtcgacattactctgaagggacgcacagttatcgtgaagggccccagaggaaccc

SEQ ID NO: 389804 - DNA, 75 bp, Homo sapiens
cagtgcccagggctctgatgtgtctctcacagcttgaaaagagctggctttatgtgctggggcagaagagatccg

SEQ ID NO: 389805 - DNA, 98 bp, Homo sapiens
acacacccaagacactgctggaaaacacaggacagagcgggatgccaccagcttgtccaaagggaagttccaggagctcctggtgggcatcgttgtgg

SEQ ID NO: 389806 - DNA, 108 bp, Homo sapiens
atctgtcttcggtggactccttcggcagtccacccaccgccgccgcctcccaggaatccagacgctctgcagtgtcccatcgtcttatgcggatggcggggaaaggcc

SEQ ID NO: 389807 - DNA, 75 bp, Homo sapiens
caagaaggcttcatatccccagaggacagttctttttactctgacgtctgtggttgtacttgtgattacaacgga

SEQ ID NO: 389808 - DNA, 75 bp, Homo sapiens
cgacctccgcatcctggacagcgcgcccaccgattgctatgctatgccttgtatgactaagacctcttaccaaga

SEQ ID NO: 389809 - DNA, 83 bp, Homo sapiens
tcagccactggttgccttggtaggcaataaaagaggaagttaacatccctaataggagggttctggttactggtgccactggg

SEQ ID NO: 389810 - DNA, 100 bp, Homo sapiens
ttgaaccaccaactcagcttagaaggaagccaagacttaaagtttcctagatcccagcttagaagcctgtgtctcccaaatcaggaacactgaagagccc

SEQ ID NO: 389811 - DNA, 75 bp, Homo sapiens
caagaacgtgctcttcgctcacctggatgacaacgagaggaggaaacccctcctggagtttccccaaagccatgg

SEQ ID NO: 389812 - DNA, 82 bp, Homo sapiens
ctgctccgtggtgctctatgaccccctgacaatgcagatcttcgtgaagactctgactggtaagaccatcaccctcgaggtt

SEQ ID NO: 389813 - DNA, 75 bp, Homo sapiens
caggctaccatggtctacaagactctcttcgctctttgcatcttaactgcaggcttcttttggaagttcgagccc

SEQ ID NO: 389814 - DNA, 100 bp, Homo sapiens
tccccggagaactctaccctggaggagattctggggcagtatcaacggagtctccggggaacattcctcgtgaaggactgtgaccagcatagaaaggctg

SEQ ID NO: 389815 - DNA, 75 bp, Homo sapiens
gctgtttcagtagcaatgtccaaggtttctgggtgtctctggggagcccctgggccagattttcctctagactcc

SEQ ID NO: 389816 - DNA, 100 bp, Homo sapiens
aggccagtgctaagctggagcaagctgaaaataccatcaggaagctccagcaccaacaacaatgggtgaaaaaccatacaagtgtcaaatttgcaatcag

SEQ ID NO: 389817 - DNA, 126 bp, Homo sapiens
tgcgtcctcaacttactctcaggtggagaacctgaatcgggagctgaccagcaggatggtctcctgatcctggctgataagctccagggccccttttcctttgagctgacggccgagtccattggg

SEQ ID NO: 389818 - DNA, 100 bp, Homo sapiens
accagaacgtaagttctttccaaagaaaatttgttggtgaggtgaagaggtgtgaagagctagagcgaatattgggtgatcatggagctcagcttggtct

SEQ ID NO: 389819 - DNA, 101 bp, Homo sapiens
ccgcgacccttggcgcctgcccctgcaacgggaggtgctggagaatctggtaaaagcaccattgtgaagcagatgaggatcctgcatgttaatgggtttaa

SEQ ID NO: 389820 - DNA, 74 bp, Homo sapiens
acccaggctaactgcctcctctggtatatggacaacccccaggctgacccaccccaatgtggtggctgcccgag

SEQ ID NO: 389821 - DNA, 75 bp, Homo sapiens
cggccacccggagccagcggagggacagggcaacgggcatgaggaggtagttgcatgcgcctgggatggacagac

SEQ ID NO: 389822 - DNA, 75 bp, Homo sapiens
gcaggatggcgcggccgagtccccgtacggccacccggcgggttcgatacaagaggctgttttcctagcgtggct

SEQ ID NO: 389823 - DNA, 75 bp, Homo sapiens
gcggcgctggaggagcgaggcagctgtactaggactgggaacgggaaagatgaatgggagggctgattttcgaga

SEQ ID NO: 389824 - DNA, 123 bp, Homo sapiens
tctgaacttggaccgcaaggtggaagacatgtccgagctgttccggcccttccacacgttgctgcggaaaataagagctccctctttgcccactagcagggcattagctggtgctgaagacag

SEQ ID NO: 389825 - DNA, 50 bp, Homo sapiens
aacaccctgatctggcatggacatttgccaaaacaaaggggatttggtga

SEQ ID NO: 389826 - DNA, 100 bp, Homo sapiens
cttgggactacacaaaccccaatctcagtggacaagggagtgcatccgccccaacccttttccccctcgtctcctgtgagaattccccgtcggatacgag

SEQ ID NO: 389827 - DNA, 75 bp, Homo sapiens
tagtcaactgcgtggaagagaagcaactcaagcatcccaaccttgttaacctcctggaagtcttcaggaggaaac

SEQ ID NO: 389828 - DNA, 98 bp, Homo sapiens
cagtgtttccgtcagtacgcgaaggatatcggtttcattaaggttccagcaacagatagaaatgctttaagttcactctggggaaagctggcctctga

SEQ ID NO: 389829 - DNA, 113 bp, Homo sapiens
aatggatcaaccaagaacgtcaaacactccaacaattgagagcatttaaagatgatctagtgaaaagccatttgatgtatgcggtcagagaagaagtggaggtcctcaaagag

SEQ ID NO: 389830 - DNA, 50 bp, Homo sapiens
cagggcacaccaaactccatctggccggcctcggccgcgctggcgactcg

SEQ ID NO: 389831 - DNA, 98 bp, Homo sapiens
ctggagtctgcgaaggccgggacccggttccccggcccacagtgggggtgtgcaaacccgagagaactggggagccgatatgtggatttactcccttg

SEQ ID NO: 389832 - DNA, 87 bp, Homo sapiens
ccattcgctgcggagccggaggaggaggggagaggcctggaggacaccaacatgcactttcatttggacccgtggatacccattgaa

SEQ ID NO: 389833 - DNA, 50 bp, Homo sapiens
gcaagatactgaaatgtgatgaacatgacacattggcgtgagacctggga

SEQ ID NO: 389834 - DNA, 75 bp, Homo sapiens
ccttgcagagacagctcaacacggcacttccacaggatttacttaaatccattgtttcaagaatgaaaaaggcag

SEQ ID NO: 389835 - DNA, 98 bp, Homo sapiens
agtaaatgcactaggatccagagagctcgagaggagaatgtggccactttccgaggctcagagtatctgtgctacgacctgtctcagaacccgatcca

SEQ ID NO: 389836 - DNA, 98 bp, Homo sapiens
gaacggcaaagtcatgggagcagagctcagacatgttctcaccacccttggtcttggtcttgatgccaagtttgggaaaggagctaagaagacatccc

SEQ ID NO: 389837 - DNA, 90 bp, Homo sapiens
tagctgccgatcctgctctgctcctgggtttgctgtgtggcccttgaatcttgccctgtcgctcaagctggggtgcagcggtgtgatctt

SEQ ID NO: 389838 - DNA, 98 bp, Homo sapiens
ttatggatgtcttcacgtggtctttaccgtttgttggagaaaaagctgtaaaactaccatagaagctatccatggattgatgtctcaggttattaagg

SEQ ID NO: 389839 - DNA, 95 bp, Homo sapiens
caaaaaggagaaacagcttttacttgcatccagggccaatcatcgcagacccagacgtctgcagagggatgggcaggcaggaaggcagactggtg

SEQ ID NO: 389840 - DNA, 83 bp, Homo sapiens
tggatcgctgtgatcgtcacttggataaagataaagtttctctaaccaagaccccaaaactggagcgtggcgatggcgggaag

SEQ ID NO: 389841 - DNA, 74 bp, Homo sapiens
aattttctgtaaacttatcactattagatttcattagaaacctttcaacgaagtctaaaaataggaagcttcca

SEQ ID NO: 389842 - DNA, 83 bp, Homo sapiens
gtctgcttggtgtggagccatgaaggtgctggagaatctggtaaaagcaccattgtgaagcagatgaggatcctgcatgttaa

SEQ ID NO: 389843 - DNA, 90 bp, Homo sapiens
agacctcactgaccccagagtggcagaaaggctgatgcagcaggtggaagcagggaaaggcctggagatgaggaagctggttctctcggg

SEQ ID NO: 389844 - DNA, 50 bp, Homo sapiens
cctcattgctctttggcgactcttattggagttaaagttcctcgtaattt

SEQ ID NO: 389845 - DNA, 100 bp, Homo sapiens
tggaagtgacaaatatgctgcaagatttggggaatctatagttaatcttggcgacattgacaatgatggctttgaagccatccgcagagccatcctgtgc

SEQ ID NO: 389846 - DNA, 100 bp, Homo sapiens
cacggcgcctgccttggcgctggccggctacatcgagccctggcaggtgcccggcccgccccccaccctccggctcccagggcctgctggaggagatgct

SEQ ID NO: 389847 - DNA, 75 bp, Homo sapiens
gtcaggtctggagctcgaccgggccaggttgacaatggtctccaggatggtctctaccatgctatctggcctact

SEQ ID NO: 389848 - DNA, 120 bp, Homo sapiens
tcggctacagcttcggcggcgaaggtcagcgccgacggcagccggcacctgacggcgtgaccgacccgagccggtgctggagaatctggtaaaagcaccattgtgaagcagatgaggatc

SEQ ID NO: 389849 - DNA, 50 bp, Homo sapiens
ccagagcattcagctgtctcaaatgcaggatttgtacacacagatatgac

SEQ ID NO: 389850 - DNA, 90 bp, Homo sapiens
gctgctctgcctgctccacaagcggcgccgcgccctcggcctgcacggggaaaagcttcactctgaccatcactgtcttcacaaacccac

SEQ ID NO: 389851 - DNA, 100 bp, Homo sapiens
acaaaagccaagaggaggacagttcgctacacagcaatgcatcgagcctcgtctcctaagcccctccctcctcctggctcctcttccctgtcctgtctgg

SEQ ID NO: 389852 - DNA, 75 bp, Homo sapiens
tggacttctcagcctccagaatggtggaagagaaacctgatgtcacatacagtgatgttggtggctgtaaggaac

SEQ ID NO: 389853 - DNA, 82 bp, Homo sapiens
gaggcctactgcaagcacaagtacccagagcagccgggaagacctgcctagagctggaacgttacctccagagcgagccctg

SEQ ID NO: 389854 - DNA, 132 bp, Homo sapiens
aggaggtgaaggcggccggggccgggacgccatgtccatggaggaccccttctttgtggtgaaaggaacgaggtcactcggacactatggtgttcttttacctgtggattgtcttttatatcatcagttcct

SEQ ID NO: 389855 - DNA, 87 bp, Homo sapiens
gcggatcgccgcgctcagcgacaaacaaagatcgagatggtgatcatggagcgtagcaagctctcagagctggccgccagcacctcc

SEQ ID NO: 389856 - DNA, 95 bp, Homo sapiens
gttgttccaatcagaaaaattcatgctctgaccatcacatgggcacttcctcctcaacagcaacattacagtgagttctctggtgatgttgatag

SEQ ID NO: 389857 - DNA, 51 bp, Homo sapiens
gacccttctctcccctccactttctcccggagctcccagctcctccagcag

SEQ ID NO: 389858 - DNA, 101 bp, Homo sapiens
ctaaggacctcaacccaggagttaaaaaggaagaccagggaatttatcagagcaaagttcgggagctgatcagtgacaaccaataccggctgattgtcaat

SEQ ID NO: 389859 - DNA, 87 bp, Homo sapiens
aagtcattttaaactatggacgactccgaggaacattgagtgactttctggctgatcaagctgcatgttatgttcaggcaatacagt

SEQ ID NO: 389860 - DNA, 100 bp, Homo sapiens
ttttggcagattatggctttgtccccacccagcactgatgatattataaagaaacatgccctgaactgtcacagaatgaaaccagcgctcttcagcgtcc

SEQ ID NO: 389861 - DNA, 75 bp, Homo sapiens
ctgcacatcgtggtggtcggatttcaccacaagaagggctgccaggctcctggatttggatttggaattgcaata

SEQ ID NO: 389862 - DNA, 75 bp, Homo sapiens
caggtggtgcggaaagtggctggattggacaagcaggcaaagctgagactcagtgttcctgaaagtacacctttc

SEQ ID NO: 389863 - DNA, 75 bp, Homo sapiens
ctgcagagcctgtccgtcagtccctaggtatccgcactgctcagggatatgatgcttcctggtgtgtttagtggt

SEQ ID NO: 389864 - DNA, 95 bp, Homo sapiens
actaaaccacaaatatacaacaaggccattttctcaaacgagagtcagcctttaacggtgttagtaaaatggcctttcgccatttaattgagttc

SEQ ID NO: 389865 - DNA, 50 bp, Homo sapiens
gtgaggtgtgggtgttcgtttctcaggacaaggacacactcagcattcac

SEQ ID NO: 389866 - DNA, 90 bp, Homo sapiens
ccagtcctcggtgcggcgcggccagagccccccaagatgaacccagtggtggagccactgtcctggatgctgggcacctggctgtcggac

SEQ ID NO: 389867 - DNA, 82 bp, Homo sapiens
gacggcgagcgcgagcggcgcgagaaaggatatgtggtgcctgtcataagctccagagagctgccttccacaagaccagcag

SEQ ID NO: 389868 - DNA, 100 bp, Homo sapiens
gaacagtaggaaaccagatcttcgagttgtcatccccccttcaagcaagggcatgatgcctccactaatcaacctctccacttctcctacacctgcacag

SEQ ID NO: 389869 - DNA, 100 bp, Homo sapiens
agcactcgttccgggggtgaagcctcctgcgccggccttgcctcgggcatcagcaatgcagaagcacggcagccagggaaggcccccaacttcagtgtca

SEQ ID NO: 389870 - DNA, 74 bp, Homo sapiens
ctgacgactgtgcaggaagaaaacgagccagtgatttacaatagagcaagatcagcatctcatggaatacttcc

SEQ ID NO: 389871 - DNA, 100 bp, Homo sapiens
ctgagcaaggacatccggcctgtgtgcaggaagttcatgcaggatgactcatctgatgatgtgagaagagttcagaggagggagaaaaatcgtattgccg

SEQ ID NO: 389872 - DNA, 83 bp, Homo sapiens
gcggcgcccgctggccgggctggctgcggccgccctgggccgggccccaccggacgataccggggagaccacgacgctgcctc

SEQ ID NO: 389873 - DNA, 101 bp, Homo sapiens
aaggaggccggcggcagcgacgggccccgagggtcatctcaggctggctgcatgcctcagctgaagatcccagctcctgtcaatgccacctctctgcttga

SEQ ID NO: 389874 - DNA, 100 bp, Homo sapiens
tcttacgcaagctgacagtggatgtgcaattcttaaagaatgggcaggccatcgaggagggcacgctggaggagatcgaagaggaggtccggcagaagaa

SEQ ID NO: 389875 - DNA, 80 bp, Homo sapiens
cttagctgtgctcgcgctactctctctttctggcctggaggctatccagcacggccgaagccctgcagcccacgctacag

SEQ ID NO: 389876 - DNA, 101 bp, Homo sapiens
aacatagagaaggacattgcggctcatatcaagaagacttaattcagtgcacaaatgagatgaatgtgaacatcccacagttggcagacagtttatttgaa

SEQ ID NO: 389877 - DNA, 73 bp, Homo sapiens
gcagcctccagcagggacctgtgacaggtgctgggcgtcctcttctttgccatagcctgcttcttatacaagc

SEQ ID NO: 389878 - DNA, 83 bp, Homo sapiens
aatttcctggtggtggagaaggatacaaccatcaatgagatcgaagacactttccgaggctgaggctgcagtggccacccagg

SEQ ID NO: 389879 - DNA, 100 bp, Homo sapiens
aatgctgacttaaagaaacagcttcatgaactccaagccaaaatcacagctttgagtgagaaacaggtctacaactcgaacaaagacagccagagtgaag

SEQ ID NO: 389880 - DNA, 80 bp, Homo sapiens
gcacagccacagccattctcccatgtctactcgcaggcgtcatgttgggaatcggaaatttctgaataaattggcagaag

SEQ ID NO: 389881 - DNA, 90 bp, Homo sapiens
ctttctcggacacttttgggtagccatggacaagaactgcttatagaaggaacaagtggacctgcccatgggtggagtgaaggctttaac

SEQ ID NO: 389882 - DNA, 76 bp, Homo sapiens
caggatctcgggctcggaacgagactgcacggaccaagaatcgccttcagccctgtctggtgcatccttggcagaa

SEQ ID NO: 389883 - DNA, 95 bp, Homo sapiens
cgcctttatcgtggtggagtccaccctggctgtggtaaggggcctggataccaagaagtgactgctcatctaatccataaagctatgttaacaga

SEQ ID NO: 389884 - DNA, 90 bp, Homo sapiens
atcgacccggtaccaagaaggggagtgcccgcggcagagatgcccgagtggtaaaagacatggcaacaggaaagtctaagggatatggct

SEQ ID NO: 389885 - DNA, 100 bp, Homo sapiens
tcactgggggatatccgggagcgaagtccctgagctgctgaggaagctttacgcctaaggagaatgaccagtcaacaggggacataaaagtaattggtgg

SEQ ID NO: 389886 - DNA, 100 bp, Homo sapiens
tcgtgaccgagaccgtgaccgagagcgtgaccgagagcgcgaatatcgtcatcgttagaagttgttacagggtagatcacccaaacctgacaagtgggaa

SEQ ID NO: 389887 - DNA, 75 bp, Homo sapiens
ctggaccctgccaagaagtcgcccatcgcagcagctcggaaaatatatgcagatgatgaacattcttaagccaat

SEQ ID NO: 389888 - DNA, 75 bp, Homo sapiens
cgcgccgctgccgctgcgtgggggtgaggggatcagatggtgagaacaagaccaagattggaaagccagcttcag

SEQ ID NO: 389889 - DNA, 100 bp, Homo sapiens
agatgattgagccgcgcacgctacagtacaagacgcatcttctctccagactgccgatcccagaaagccaggtgatcaccattaaccccgagctgcctgt

SEQ ID NO: 389890 - DNA, 99 bp, Homo sapiens
ggaaagagtacaaagacagcacaagaaaaaaacagatttcataaaaatagtggctgctctttggcgtaaattgcaatcgattagggatcgtttctcaga

SEQ ID NO: 389891 - DNA, 82 bp, Homo sapiens
gagcggccaggccgtgcgccggcctttggtcgcctccgtgggcctcaatgttgttgacctcctgtactggagagacattaag

SEQ ID NO: 389892 - DNA, 145 bp, Homo sapiens
gttagctgttgatgctgtaattgctgaacttaaaaagcagtctaaacctgtgaccacccctgaagaaattgcacaggatgtcttccaagcgaccagcctctccgtatggggaagcagatggagaggtagccatggtgacaagcag

SEQ ID NO: 389893 - DNA, 100 bp, Homo sapiens
gcttattttctgcttccaaaggtccagagcattcagctgtctcaaatgcaggttgaagcactggacaatgccacatactttgtggatggtgtgggtcttg

SEQ ID NO: 389894 - DNA, 82 bp, Homo sapiens
cagaagtcagaaaacaaggtgtctgcaggaccaacctctcctctggatgctctagggtgagcccatcactttctgtgaggag

SEQ ID NO: 389895 - DNA, 85 bp, Homo sapiens
tagtctcaagagatcctccagcctcagcctccctgtgaaggaagcccatcccccagaattgagctgctgcataatattgacccga

SEQ ID NO: 389896 - DNA, 100 bp, Homo sapiens
acctcccacctgtcctcaggcatatcaaagtctttcccagggaactccgatgaagtgttccaacaaaatgagcgagtgaaccaagaagaggatgacatta

SEQ ID NO: 389897 - DNA, 98 bp, Homo sapiens
cgaacaggaaaactggcatgaaggcaaagaaaacatcagagctgctgttgcagaagccccagggccatcaaaagttaagacagggaagcctgaagaag

SEQ ID NO: 389898 - DNA, 115 bp, Homo sapiens
gttcggtgcgtgccccgacggggcgcgcgcgaagcgagcgagaaggcacggagtcgccgcggagcgcaggttttgggatttgagattgacgcggtgaactctgtccagttttcaa

SEQ ID NO: 389899 - DNA, 98 bp, Homo sapiens
agacgacaagcacacactatggcgctgaaacggattaataagtttgctctgaaaacgagtccgaagccgaagctgaccagcagatggacaacttgtac

SEQ ID NO: 389900 - DNA, 116 bp, Homo sapiens
ggaaaggagtagtcggcggtggcggcggcaccaaggcccccaagccctccttcgtgtcgtacgtacgccctgagagatttaccgcattgtttctcagaagcaaatgtcagacagac

SEQ ID NO: 389901 - DNA, 50 bp, Homo sapiens
agcagcagtgaggacaccaaagacacgatgaggcgagtggtacgacagag

SEQ ID NO: 389902 - DNA, 100 bp, Homo sapiens
gaaggaagatggcggacggcgtggaccacatagacatttacgcggatgtcggcgaagagttcaaccaggcgacattgactacagcaccgtgctcctcggc

SEQ ID NO: 389903 - DNA, 82 bp, Homo sapiens
acaccaagcacatgttcatccactcggtggacatcctcatcatggatgatgacgacgtccccagctggcctcccaccaagct

SEQ ID NO: 389904 - DNA, 96 bp, Homo sapiens
cccgctggacagcgccgacgtccgggtgcacgtgccacgcacggtgtccccagcgcagccaatcggcttccgaagtaggtgagttgctgcctgaag

SEQ ID NO: 389905 - DNA, 75 bp, Homo sapiens
cgctggcagccgcggatctcaccgccgctcaggatgatcaagcggtgctgattcacgagagtggaagcctccaga

SEQ ID NO: 389906 - DNA, 100 bp, Homo sapiens
gaagcactacaagggtcctgaagtcagttgttgcatcaaatacttcatatttggcttcaatgtcatattttggaaaatgcatccgatgcagatttatggc

SEQ ID NO: 389907 - DNA, 49 bp, Homo sapiens
ctaaaattagggcatgattaagggctgagggaggaagacggcatggtta

SEQ ID NO: 389908 - DNA, 100 bp, Homo sapiens
ttcagtcattgggggaatccaatgcacaaatgcagtcctgcgttaactgcggccgggaggctatgagcgagtgcaccggctgccacaaggtcaactactg

SEQ ID NO: 389909 - DNA, 97 bp, Homo sapiens
ttttgtggcgctcttgctcctctctccttggcctctcctgggatcggcccaaggccagttctccgcaggttttgctgatttgggaaaataaagacta

SEQ ID NO: 389910 - DNA, 95 bp, Homo sapiens
caacccatccagatcaccatgccgtaatcagttcaagaagttccctcagatgacctcatatcaccggatgctattacaccgggtagctgcctatt

SEQ ID NO: 389911 - DNA, 53 bp, Homo sapiens
gaacggagtgtgcgacggattgggaggtgaatgcgtccccgtctctcacgtcc

SEQ ID NO: 389912 - DNA, 100 bp, Homo sapiens
agaagttgggctggtccaggaggaacgagtccgagaactggctgaagccgatgaacagcgccgggatccagggtcgacaagtgcccccaatgatttatgg

SEQ ID NO: 389913 - DNA, 51 bp, Homo sapiens
gcgagttacatgttgagccatttcaggtgatactatcaaccaaagcaccct

SEQ ID NO: 389914 - DNA, 75 bp, Homo sapiens
acaagccgtggaataggtgtatcaagtaatggtgcaaagcctgaatcctgtcagccctcctgttgtggatctcag

SEQ ID NO: 389915 - DNA, 100 bp, Homo sapiens
aagacatcaagggaaaatggggtgaggaagattttgaagacaatcgtcacttatacagattattcttggagaaaccctgtctgtttactgtaaccttttg

SEQ ID NO: 389916 - DNA, 100 bp, Homo sapiens
cagcttcctcggcgcccccggccgctaccgctcaggtgctgcaggcacagcccgagaaaccgcagcactacacgaaacctcgacctgtctcccagttggt

SEQ ID NO: 389917 - DNA, 100 bp, Homo sapiens
cttgctaagagcaaacttgaaggtatggataaggccctgagtcatcttcctgagctgaatgatagttaagctgaatcagaagaatcccagacttcttaga

SEQ ID NO: 389918 - DNA, 83 bp, Homo sapiens
cctgaagttgcctcttctggtgtcaaagcttttggacattcctgggctgccactcagcaactgccatacagcaaaaggaggga

SEQ ID NO: 389919 - DNA, 90 bp, Homo sapiens
ccggtactggaggtgtacgtggccatctgcaggaggctggtggcatgttgtcctcaatctcgacactactatcgccatcacccaaaattt

SEQ ID NO: 389920 - DNA, 98 bp, Homo sapiens
cacctgcgcgaagctggccaaagcctgcccagacggctcacctgtgcgggatggaacaaaaggctgtgggtgagcgtggaggatgctcagatgcacac

SEQ ID NO: 389921 - DNA, 76 bp, Homo sapiens
cggcttcaggaggcccaagacaccacagaagccctccgagcccagtaacaaatgtggcaattattttggatctatc

SEQ ID NO: 389922 - DNA, 100 bp, Homo sapiens
tgattgtcttatatttcaagttaaggtccaaaaaaactccagctgtgaaagcaacataaatgtgtccacagcaacgtcctgcaatgaccctgggatcccg

SEQ ID NO: 389923 - DNA, 100 bp, Homo sapiens
gaaaacaatttctcctgctctgcagcttctgttcagtctgaacagcagaagaagcaacaggaggctgagaaactgcatcgacaagaaaggaaaagactcc

SEQ ID NO: 389924 - DNA, 83 bp, Homo sapiens
agcaaaccgggaaaggagaggatcccggagccggtctttcccgcggtgacttcccttgggctgaatgaacaggagctgttatt

SEQ ID NO: 389925 - DNA, 100 bp, Homo sapiens
cgcgtgacagcacagagataacggccagccctgggcgaagaaaatatttacaccagcagctccagttcataccaataaagaagatcctgctacccaaact

SEQ ID NO: 389926 - DNA, 83 bp, Homo sapiens
cgggcgagaagccctacgagtgcaacatctgcaaggtccgcttcaccagaacccccagacctgactccggaggagcggatgga

SEQ ID NO: 389927 - DNA, 75 bp, Homo sapiens
ttttaaacaaagccgtctgtagaggatcctttccccattagacgagttgtactgctgtcacaggaaatggacgct

SEQ ID NO: 389928 - DNA, 99 bp, Homo sapiens
agcaaatgttacttgttccacgtttcttccatgtcaggatattattgctggattcctatataccattttaatcttagctgtcttctatccatttgtgga

SEQ ID NO: 389929 - DNA, 75 bp, Homo sapiens
gctccgggcgaagcctccctgctgcagataaacaatcagattctgtatggaagaagtcaccaaaatgcatctgcc

SEQ ID NO: 389930 - DNA, 75 bp, Homo sapiens
gacgatccatggcatcccggggctttgacggccccaaggcccagaagaaatttaagcgtcttatgctgcatcgga

SEQ ID NO: 389931 - DNA, 100 bp, Homo sapiens
gctcggtgcggctctcggactctgctcctcactcaccgcgtggacacgatcggctgactgtgctgtcctgattgttgctgctggtgttggtgaatttgaa

SEQ ID NO: 389932 - DNA, 98 bp, Homo sapiens
cccagttccaggtagacatggaggccgtcggggagacgctgtggtgtgactggggcaggaccatcagaggttgcagaacttgaagctaatttaccttg

SEQ ID NO: 389933 - DNA, 98 bp, Homo sapiens
acgaggactactacgggagcgcggccgagtggggcgacgaggctgacggcggccagctacatccgatactcccagatctgtgcaaaagcagtgagaga

SEQ ID NO: 389934 - DNA, 99 bp, Homo sapiens
aagatggaagaacttaaagaaggcctgcggcaaagagatgagcttattgaggctgtgtttgatgtggacaagaagaaagggttgactctgattgagctc

SEQ ID NO: 389935 - DNA, 98 bp, Homo sapiens
ttgggaaccaggaggaatcactgactgagatttgccaaccagacctctatggtgtggcagagaagacacagcttctgaaattgagtgtacctgctact

SEQ ID NO: 389936 - DNA, 76 bp, Homo sapiens
aggaggcggaaaaggacgcaaagttctccggcgagcggggatctgatgagcttctttcttctggcatcattaacgg

SEQ ID NO: 389937 - DNA, 98 bp, Homo sapiens
acaactttcggggcatgtacaatcagagtgaggatgaggatgatgaccttcagtatgccgatcatgattatgaagtaccacaacaaaaaggactgaag

SEQ ID NO: 389938 - DNA, 100 bp, Homo sapiens
gcacccggtgtaccgcggcgagaagccccagctgcactacgcgagaactttacctcagtttcatgcaagcctccttctcctcctccaaaaatagaaagga

SEQ ID NO: 389939 - DNA, 100 bp, Homo sapiens
catccaggcgaactcggcctatcgctaccctccgaagtccggtctccgtgaggccgggtgacgctccagaatgggagacaagccaatttgggagcagatt

SEQ ID NO: 389940 - DNA, 50 bp, Homo sapiens
ggacaagcgacataccgtggagagacagttgttgacctcctgtactggag

SEQ ID NO: 389941 - DNA, 82 bp, Homo sapiens
gtggaagatggcgcctgttgtgacaggcagctggcttggctttttcagaggaaacagagactctcagacatgaatactgtga

SEQ ID NO: 389942 - DNA, 75 bp, Homo sapiens
gcagtccagcgtgaactacagtcagggcagcctgaaggatgcatcactgtatatatgccttatttcctgggtcca

SEQ ID NO: 389943 - DNA, 74 bp, Homo sapiens
actgcagctgaagccgctgcccctgctacagctaaaaatgaagctgatcgtcaggcagaaaaacgagaaattaa

SEQ ID NO: 389944 - DNA, 94 bp, Homo sapiens
cgagccggacaaggcgccgcggcgactcaacaagcggcgcttcccggggctgcggctcttcgggcacagagtcctccctgctgctgtgtggacg

SEQ ID NO: 389945 - DNA, 83 bp, Homo sapiens
agaccatcgaggatctgaggaacaaggaaataatgcaaaaggtgtcccaaggctcctgaccagtgaacaaagatttgagaaag

SEQ ID NO: 389946 - DNA, 74 bp, Homo sapiens
tcccgaggctccgcaccagccgcgcttctgtccgcctgcagatacccagaaagcggtactctagaaatgaatgt

SEQ ID NO: 389947 - DNA, 145 bp, Homo sapiens
ttgttggggagaagaggattggaggtgtcagtgttaaaggaacctctacaacgaaggtgaagccacggaagataaggctcacagaacatttcctgcctgttgctcacactctgttgtccacagcatacccgcaccctagatggct

SEQ ID NO: 389948 - DNA, 75 bp, Homo sapiens
tggactgatggcagcacactgctggccctgaaggaccctgttcatacagtgtcactgcagcagttcatctacgag

SEQ ID NO: 389949 - DNA, 100 bp, Homo sapiens
gcgcggctactacaaccagagcgaggccgggaagctgcctatcgtcaatgattgcgatgagctggtggccatcatcgcccgcaccgacctgaagaagaac

SEQ ID NO: 389950 - DNA, 99 bp, Homo sapiens
cagaccgcgtgtcccccggacagctatgaaactcaagtcagactaactgcagatggttgctgtactttgccaacaaggaagatgttggatccagggttg

SEQ ID NO: 389951 - DNA, 100 bp, Homo sapiens
ataagaccatggcacaaaactgtgacgattggctttggagtaaccctgtgtgcggttcctattgcacaggctggagtgcaatggcgggatctcggctcac

SEQ ID NO: 389952 - DNA, 75 bp, Homo sapiens
ctgctatcagtgcccgctttgttcagctgcagcatggagagatagataaacggaaactgcagggatcaggccctc

SEQ ID NO: 389953 - DNA, 101 bp, Homo sapiens
ggtcaacatcgacgacctcgtcaagctttaccactcctgaaggccctaaaccccgttccagatgctctgactgggcaagtgcagttgaagaagatgaaatg

SEQ ID NO: 389954 - DNA, 99 bp, Homo sapiens
gtcgccaagccgcgccgtcgcggggctcccgggagcggcccttagcgaccccgcccgggccccctcagatcgggagcggtgccgagaaaaatttcctta

SEQ ID NO: 389955 - DNA, 75 bp, Homo sapiens
ttcagttgcgatgcatgcaagtcggaggaaacgctagtgcaacaatgcagatcttcgtgaagactctgactggta

SEQ ID NO: 389956 - DNA, 100 bp, Homo sapiens
tttgtcggtgccaatgttgttgtattatttgatcctacttggaatccagccaatgatcttcaagccattgacaggtttagcccaaaggcgtcccttcaac

SEQ ID NO: 389957 - DNA, 74 bp, Homo sapiens
ggggcctcatcagaaatgttacacacggagtatcaaactctgctgccaagtgggtaattccagaattgattggc

SEQ ID NO: 389958 - DNA, 82 bp, Homo sapiens
ttgagcccagtgacaccatcgagaatgtcaaggctgccccctcggtcactctgttcccgccctcctctgaggagcttcaagc

SEQ ID NO: 389959 - DNA, 100 bp, Homo sapiens
cggacgccagcggacacgcgggcgagctttccccagacatggccaacaagggtccttcctatggcatgagccgcgaagtgcagtccaaaatcgagaagaa

SEQ ID NO: 389960 - DNA, 87 bp, Homo sapiens
tgaagaagcagttctacaaggcgagccagggccatgaagcccccaggaggagaatcgagcaatctttttggaagtccagaagaagct

SEQ ID NO: 389961 - DNA, 136 bp, Homo sapiens
ggtatacaaaactaggatatgctggaaatacagaaccacagtttatcatcccttcctatggtggttgctatttcaggcccagacataatcaaatccatgtgaagaaaagagatttcttcctgcgtggccctttgta

SEQ ID NO: 389962 - DNA, 101 bp, Homo sapiens
aattgagcaagaacaaggtgacacatattctgtctgtccacgatagtgccaggcctatgttggaggatatatcccctggggcagctggtggggctgaagat

SEQ ID NO: 389963 - DNA, 82 bp, Homo sapiens
gtctgactctgactctcggactgagaaacgcaaggatgataatgaagataattcaaatgatgggacccagccatccaaaagg

SEQ ID NO: 389964 - DNA, 100 bp, Homo sapiens
ttacctagtcatcctgctgcacctcctgaacatcttaaagaacctttggtatacatgaggaaagcacagatccctgcatgtcactgagtccaccatgctt

SEQ ID NO: 389965 - DNA, 75 bp, Homo sapiens
tcttttgagatcgtgattatggtgctgaaggacaaattccagctctacattaatcatactcctccaccactgtcc

SEQ ID NO: 389966 - DNA, 83 bp, Homo sapiens
gccaagaggaatcagaaacctgaagttagaaaggctcaacgagaacaagctatcagcccagtactataaagaacgtttcacca

SEQ ID NO: 389967 - DNA, 96 bp, Homo sapiens
gacagaatcaccagcactggctgaagaatcctgttacacctgggatttaggcactttcaatctgaaaaaatacatatcctttcagcactctggacg

SEQ ID NO: 389968 - DNA, 74 bp, Homo sapiens
gtgaagctcctgggagcctactatcacgacgggaagctgtggaatgttcccacaggccccaacaataagcccaa

SEQ ID NO: 389969 - DNA, 90 bp, Homo sapiens
caccagtgaagatgaggaagtctgggggccgagaccacacaggtccaagaatgcctcaggatggatcagatgacgaggacgaggagtggc

SEQ ID NO: 389970 - DNA, 100 bp, Homo sapiens
tggctctgtgaccagtatgggatccctaaatgtatctgtgactgaaactgttgaggagcccatggaggaagaagaagcagccaaagaagagaaagaagaa

SEQ ID NO: 389971 - DNA, 100 bp, Homo sapiens
ggggaggcagcgcgggatcccagcctcaggcgtgcgcggacggtgtgcggcatcaagatggtgctcatgtggaccagtggtgacgccttcaagacggcct

SEQ ID NO: 389972 - DNA, 101 bp, Homo sapiens
atggagctgaagcaggaagccctcacctttgccaggaactggggggccgactatatcctgatcctgaccaagatgaagcagcagggtcatgagacagccgc

SEQ ID NO: 389973 - DNA, 100 bp, Homo sapiens
tggcttacagacgctgccagcatcgccgccgccaggtacatgtcccagagcaagcacacggaggcccgggagctcatgtactcgggagccctgctcttct

SEQ ID NO: 389974 - DNA, 51 bp, Homo sapiens
tgaaagggagtttggttctgtagatggtcctaggcctacttacaagcctcc

SEQ ID NO: 389975 - DNA, 100 bp, Homo sapiens
aggagaggcacccgatatatgttctctaggccttttagaaaacatgagataatagtagcagaatttcacaaaaaaatcaaagaggcatttgaagtctttg

SEQ ID NO: 389976 - DNA, 82 bp, Homo sapiens
gtgctctgccatattgtgtcttccccggccggtccctcgcctcccggccgagctgacgaatgttgtaccatctttgggtagg

SEQ ID NO: 389977 - DNA, 100 bp, Homo sapiens
gactcaatgttctcgatgccaatctctgcttgaaaggagaagacttggattctcagttttaattgataaagaccagagtccaaaatggaaaccagctgat

SEQ ID NO: 389978 - DNA, 51 bp, Homo sapiens
gagctgcagctcctcctgtgcgggacgtggtgggtcctctggtgcgaaatt

SEQ ID NO: 389979 - DNA, 87 bp, Homo sapiens
aagaatggcccttgtggataagcacaaagtcaagagacagcgattggacagaatttgtgaagggcaaactctttgattctacaatag

SEQ ID NO: 389980 - DNA, 133 bp, Homo sapiens
atttgttctgcctgacttggaccctggaaaacctggccctcttcaatttctgacaaaagtattaaaggtggaagaaggtccatatctttttctgtgggtgcttcaagtgttgttggaagtggaggcagcagtg

SEQ ID NO: 389981 - DNA, 83 bp, Homo sapiens
ctttggagagcaaagacatcagacatatccagttcaatcacatggtggaaactatatgggtcagagcattcaccaagtaactg

SEQ ID NO: 389982 - DNA, 50 bp, Homo sapiens
cgacaaggcttggaaacatacttacagagcatgtaacttctaatgccagc

SEQ ID NO: 389983 - DNA, 83 bp, Homo sapiens
ccttcttcagatgcctggaaagaatgaagatgataaccgagccagtgagagcaagaaacccaaaacggaggacaagaattcag

SEQ ID NO: 389984 - DNA, 50 bp, Homo sapiens
caatgggggaccagattcgtgtggatgtcttcactcctgaagccagcgag

SEQ ID NO: 389985 - DNA, 100 bp, Homo sapiens
cctgacccgaagtaccgacccgagttatgcccaccctccaactttgcgacggaaatgtgtcatcgaaagccagattgtgagatccatgagagcccagaaa

SEQ ID NO: 389986 - DNA, 100 bp, Homo sapiens
tggtgatctacgtgtgctttttcaagggagctgataaagaacttcttcccaaaatggtgttagatgatgaagatagcaacaacatcacagtaggatcctt

SEQ ID NO: 389987 - DNA, 100 bp, Homo sapiens
cgccttggcgctttcttcctggagcggagcgcaggcgccgagactgacaacgcggtcccacagggttggggtctgctaggtccccggaatgagttgtttg

SEQ ID NO: 389988 - DNA, 74 bp, Homo sapiens
gcctcagttggaagcagccgatccagcctgcggagcctgtggggcagcaaagtggaagatgctttctacaaagg

SEQ ID NO: 389989 - DNA, 100 bp, Homo sapiens
cttcccagccttcagaaattgccggtctgggagttgggggcaaggagaagatcctggaaaaacagcactggaggcaatgtttctataaatcaaagaagag

SEQ ID NO: 389990 - DNA, 98 bp, Homo sapiens
gtggaagaggaggaaactaaaacatttaaagacctgataagtatgctgtgcgcttcatccctcgggagaatggcgtttacctgattgacgtcaagttc

SEQ ID NO: 389991 - DNA, 74 bp, Homo sapiens
accccgccagctctcgggagccagactgtgaaagcactaaaccacttaaaagaaaacttgaaaattattcacag

SEQ ID NO: 389992 - DNA, 96 bp, Homo sapiens
ctgacgcatccggaactcaggctgctgtccaagccttatgcatttgatcgggtgttccagtcaagcacatctcaagagcaagtgtataatgactgt

SEQ ID NO: 389993 - DNA, 51 bp, Homo sapiens
ctcccatcattgatgtggtgcgatcggttatgatgtgattgctcaagccca

SEQ ID NO: 389994 - DNA, 100 bp, Homo sapiens
gggagatgaacccaacctagtgggtgtaatacatcatgaactgcaggttcccatggagaatgttgcaacaattgctgattgtgccagtgtgattgaagga

SEQ ID NO: 389995 - DNA, 89 bp, Homo sapiens
gaaaaccacagccaagtgctctaaaaagatacactctgtgcagttttagagagagacacactcagtattcgagaaagtcgactttttgg

SEQ ID NO: 389996 - DNA, 100 bp, Homo sapiens
gccgggagctggtacacagcctcagctgcacatcattgactcctgggcccaactgtgaccgatttaaactgcacataccatatgctggagagacattaaa

SEQ ID NO: 389997 - DNA, 74 bp, Homo sapiens
gaggctcgggactttgcagccggccttagtgctcgcgcaggtgattacgtttttgaagaagaaggacaagttca

SEQ ID NO: 389998 - DNA, 50 bp, Homo sapiens
tgcgaatgtgaacctgagcaataagtctatccttcactggagtctgatga

SEQ ID NO: 389999 - DNA, 71 bp, Homo sapiens
ttgcagggcgcaccatgccgttgtcgggcgcatgcaggaatccctttgcccacgtccagctgaagccgaca

SEQ ID NO: 390000 - DNA, 80 bp, Homo sapiens
acttgcacgaaagctttcctaggccaaaaagagcacccctgcagtggaccatgagtcggtaatgcccactgaggacctct

SEQ ID NO: 390001 - DNA, 100 bp, Homo sapiens
gactgcctcactgagcaaccaagaaagaataactgtgtgatgcctgaagatgtgaagaacttttacctgatgaccaatggcttccacatgacatggagtg

SEQ ID NO: 390002 - DNA, 99 bp, Homo sapiens
cttggatggaggagcagctgtcctacttctgtgacaagtgccaaaaatggataccagccagttcacagcagatgaggctcgggacctgattcaacgtta

SEQ ID NO: 390003 - DNA, 100 bp, Homo sapiens
gtgtaattgtggcttgtatcaacactgttactttcgtacattgctaactgccttctatgaaagcagtcattattcaaggtgatcgtattcttccagtgaa

SEQ ID NO: 390004 - DNA, 100 bp, Homo sapiens
catgtgtcaatggcattgcttgggccccacattcatcctgccacatctgcactgcagatctcaggaaacaggctcgacagctggaaaatgaacttgacct

SEQ ID NO: 390005 - DNA, 100 bp, Homo sapiens
gtttcccgggagatcccaggcggtgacagagtggagccatggctagaggcctggagctgctgaagactgctattgggaaagctggctacactgataaggt

SEQ ID NO: 390006 - DNA, 75 bp, Homo sapiens
aagacgcagcctggccgcgctctcccattggagtcattcgttgcccagtttgcagccaagaatgtgcagagagac

SEQ ID NO: 390007 - DNA, 110 bp, Homo sapiens
caccaccaagatttatgctgtgagcatcagggaaatggaaggcaccaagccacaccagcagctgaaggaagtttccgtggaagaaagggaatcagcagtctcttcagttc

SEQ ID NO: 390008 - DNA, 75 bp, Homo sapiens
tacacctcagcccggggctgcactgccaccctgggcaacttcggttttttgccctgacatctcttcgtcttgtgt

SEQ ID NO: 390009 - DNA, 75 bp, Homo sapiens
ttggaccttccggagcttctcagaagacagagggttttcttttgagattcttagatatggcagaggtattgcccc

SEQ ID NO: 390010 - DNA, 95 bp, Homo sapiens
cgcggagcggacgcgcgtggcgctgcccgaagactggactttatgagtataaagtctttggtgttctggaggactgctcaccaactctactggca

SEQ ID NO: 390011 - DNA, 90 bp, Homo sapiens
gatatgtagcgaggaggaacgcgctaaggcaaagcacctggaattgaatgatctggcacgggaccctccagcacagtgttcagcaggtcc

SEQ ID NO: 390012 - DNA, 98 bp, Homo sapiens
ccgagttacacacccccagctcgaaccgcagcaccccaggctcccaggccagtgccagtacttgggcttgccagtggcggattacttcaagcagtgga

SEQ ID NO: 390013 - DNA, 100 bp, Homo sapiens
ccaaacagcggcgtttcacggtggcacatacatgtgttatccaagataaattctgtgggattataaacatttcagtagaaggcctgcatgatgtcatgac

SEQ ID NO: 390014 - DNA, 75 bp, Homo sapiens
gatactttgaagtagaagaagctgatggtgaagattgtccccagtggatggtccctatcacaatctctactagtg

SEQ ID NO: 390015 - DNA, 51 bp, Homo sapiens
caaaaacatcctgaatcagaatggccgagtccaacctataccttctcaggg

SEQ ID NO: 390016 - DNA, 51 bp, Homo sapiens
gataattgataacaccctgtaacagctgaaaaatgtgccagaggaacttca

SEQ ID NO: 390017 - DNA, 75 bp, Homo sapiens
ttccagagcgtgaagatcaagatcggaggcatacacggaatacctgaggagcatccactatatctcccaggtgtt

SEQ ID NO: 390018 - DNA, 100 bp, Homo sapiens
caaactcccaggctcaagcagtcctaccatgtcagccttcccagtagctgggaccacaggcgctgagatgcgtctggagagccagagggcctgcctgaag

SEQ ID NO: 390019 - DNA, 83 bp, Homo sapiens
caagcagtgcaagacccatccccactttgtgattccctaccgctgcttagggaagagagcaaattcccaagaaaatcgtaatt

SEQ ID NO: 390020 - DNA, 101 bp, Homo sapiens
atcctggaggtggatctgaagaacggataaacaggggtcacatgacgacagaagccaagagggctgcaaagatggaaaagaagatgaaaattttgcttggg

SEQ ID NO: 390021 - DNA, 120 bp, Homo sapiens
ggcgctgtgtcgagggcgatccccccaaagcagcgtcccgtgctaaaggtgcaatggatgagcttcatagtctggatccaagaaggcaagagttattggaagctagatttactggagttg

SEQ ID NO: 390022 - DNA, 82 bp, Homo sapiens
attttctgtacaccaatggaaagtgcgtcatcctaaggaacatcgacgtttggtgcacctcgatttggaggaagtagggcag

SEQ ID NO: 390023 - DNA, 100 bp, Homo sapiens
cagaaccccggcgcggcccttgtaaacctattgatggcaattttgctgactgtggaagtgactcatccaaactccatgccagctgtcaacattcagtatg

SEQ ID NO: 390024 - DNA, 97 bp, Homo sapiens
tacagctggagcgcccagaggcgagccctggtggaggaagaggtgtgtgaatatcctgatggaaccaagtctttgaaactgggagactttgggcttg

SEQ ID NO: 390025 - DNA, 100 bp, Homo sapiens
cacagcccacggccagggctacggcaagagcgggctgctcaccagccacacgacagattcactgcagattaagatgttctacgaggagcatttgcacttg

SEQ ID NO: 390026 - DNA, 75 bp, Homo sapiens
cggacagtgcagggaagcaactgcagaggatgatgatgacgacatgggagaggatgaagatgaggacgatggttt

SEQ ID NO: 390027 - DNA, 100 bp, Homo sapiens
agagaacagaagacacagacacgtacgtctactacccttgttagaaggaagctttggatcttcggtgggtaagaatgattgatgttggctgatattggag

SEQ ID NO: 390028 - DNA, 98 bp, Homo sapiens
gcagtgtaatctcattccatcttcattcatgactccagacagtgtttggtgtataaaacagaccaagctcaagatgtaaagaagattgagaaattcca

SEQ ID NO: 390029 - DNA, 87 bp, Homo sapiens
caagagcagaggccttctctagaccttgccaagatggcacaggaggaattttgttgtcagagaataaaaggaggttgtccataattg

SEQ ID NO: 390030 - DNA, 100 bp, Homo sapiens
gtatctcgtatcataaattacaacgtggagcaagagtgtaataactttctaagaacgaaggccatgtttttggtatactgtgcactggagaaagaacctg

SEQ ID NO: 390031 - DNA, 50 bp, Homo sapiens
aaagatggattcagttatttaaggtctattctggataagcaggttttgtg

SEQ ID NO: 390032 - DNA, 100 bp, Homo sapiens
cttgaaggtcatttaaccaacctcagctttacaaaccctgaatttataactgaggcagcttttggcaaggagtctgaagttcttattgggaacctgggtg

SEQ ID NO: 390033 - DNA, 100 bp, Homo sapiens
cacagaggagctaccagatgaacgggaatctggactgcttggataccagcctacgaggacaagcagaaactcaagcggaccgagatcatcagccgctcct

SEQ ID NO: 390034 - DNA, 74 bp, Homo sapiens
atggagcaactgctttcacaggggcaccagtgttttctaaagatcaaacccgtgtctctcacattttctcaagc

SEQ ID NO: 390035 - DNA, 49 bp, Homo sapiens
cctggccaaggcctcatcctgatggagtcttactctgtcgcccaggctg

SEQ ID NO: 390036 - DNA, 75 bp, Homo sapiens
atcagacagaacagttaatcctcaatttaagcctgatctaacccctagaaacagaaatgatgtgctcacgggtgc

SEQ ID NO: 390037 - DNA, 76 bp, Homo sapiens
atcaagttttaaagaggaaggagcagactctcctctgctaatgcaaagaacaacatatctgaagagatggattaag

SEQ ID NO: 390038 - DNA, 80 bp, Homo sapiens
ggatctgaaagctgaaattgagaagctttgtgagaagggcagaagatcttaccaatatatttgagtccttcctgcctcag

SEQ ID NO: 390039 - DNA, 98 bp, Homo sapiens
gcgcgccgcctgtgggaagccgtgtccggtgcccagccggtgggtagagaggaagctatatgttctcctttcagccaagacctttcaccagtgcaggg

SEQ ID NO: 390040 - DNA, 88 bp, Homo sapiens
gggagtaaaccacagactacgagggagtttgacagctattaaaaccagggctccacagttaggaggccactatctaccactggcacca

SEQ ID NO: 390041 - DNA, 75 bp, Homo sapiens
aagaaggaacccaaagaaccatctcccaaacaggatgatatcaacctgaattctcctaacaaaggtctgctgtct

SEQ ID NO: 390042 - DNA, 74 bp, Homo sapiens
cccaaagtttgcaacaatcagtcagatattcaagagaagcttatgtggagttagttcaccatattagagaatct

SEQ ID NO: 390043 - DNA, 80 bp, Homo sapiens
ttttactaattgtcccagatataccaggagtgggaatagctttgcgaaaaatgggcgcaatggccaagccagattgtatc

SEQ ID NO: 390044 - DNA, 100 bp, Homo sapiens
gacacgggtgaatgctgctaaaaacaagactggggctgctcccatcattgatgtggtgcgatcgatctcactgatgaaaaggcctccaggtttttcacct

SEQ ID NO: 390045 - DNA, 99 bp, Homo sapiens
cttggagctggtgctttgcgtgctggtcagcatccggaacaacagttttcggctttgtgagaaaccttaccatcaaacacgatggccagcaacgttacc

SEQ ID NO: 390046 - DNA, 75 bp, Homo sapiens
tcttcgagcgccgcggacgcgtcatcgagtgtgacgtggtgaaaggtcaaaatgcagatcttcgtgaaaaccctt

SEQ ID NO: 390047 - DNA, 75 bp, Homo sapiens
cggcgcgggcccggcggcggcggcagcggggtccgggtccggagcgccacaccgtgcttcctcaaagactgggaa

SEQ ID NO: 390048 - DNA, 75 bp, Homo sapiens
gatgttcagcagcgcggcagagtcatggggattcttggtgccaccattgagaactccaggattgtcctgcagatc

SEQ ID NO: 390049 - DNA, 50 bp, Homo sapiens
taaggattccaagtaactcttatttgccgggcccctcagatgagagctgc

SEQ ID NO: 390050 - DNA, 100 bp, Homo sapiens
cagggcctggtcgagacaactatttttgaggtatctgaggctaccccacagcactctctggcattggcctgagggaagacatgctggagaccctggttcc

SEQ ID NO: 390051 - DNA, 75 bp, Homo sapiens
ggaaaacaaaagctgctacttatggaagatacaaaggtccccgcatcagagacttctcctgggcctcccccaatg

SEQ ID NO: 390052 - DNA, 133 bp, Homo sapiens
aattaagaaaacagagcgacgagcaagaagcagcccaaagtcgaatgattcagacttgcaagatgtggtggtacagtgggagctattctgacatgtccactggaagttgtaaaaacacgactgcagtcatctt

SEQ ID NO: 390053 - DNA, 100 bp, Homo sapiens
ttaatgaagtaaagcccacagagatctacaaccttggagcccagagccacgtcaaagtgttcctggctctatgccaaatgcatcctggactggaaacctc

SEQ ID NO: 390054 - DNA, 74 bp, Homo sapiens
ggtggttttggcccctttgctgcaaagtggtccggaccctatttgtcagtggccttcctctggatatcaaacct

SEQ ID NO: 390055 - DNA, 82 bp, Homo sapiens
ctgatagagaccctagtaacatgatataatgaagatctggaacttgaagatgccattcatacagccatcttaaccctaaagg

SEQ ID NO: 390056 - DNA, 100 bp, Homo sapiens
cgggcacgtccaagcggtaccagctctgcagagtgcaggagcatccatcattggtgtgaactgccactttgaccccaccattagtttaaaaacagtgaag

SEQ ID NO: 390057 - DNA, 90 bp, Homo sapiens
cagaaaattctctgttgcatctgaaaacagtcaaacatgagcttcttccaaggtgcttgtactatttggcagagcggtaaacattttccc

SEQ ID NO: 390058 - DNA, 82 bp, Homo sapiens
tgttgtagaaccaagtgaagccacaaacagatcaggaagggaaaaggccgaggcatcagcgtgtgaagaccgcaaagacgat

SEQ ID NO: 390059 - DNA, 83 bp, Homo sapiens
gggcggccgggggctcagagatccaagtgcgcgccctggcgggtccggaccaaggttctctacttttagagtcgaaaataaat

SEQ ID NO: 390060 - DNA, 97 bp, Homo sapiens
ccatgtcgggttattcgagtgaccgagaccgcggccgggaccgaggtgtcaacagcatctccaccctggagcctgtgagccggtgccagcgcctgag

SEQ ID NO: 390061 - DNA, 51 bp, Homo sapiens
cctcaccttggacacctcgcttgggaaaaatgccagctgtgggacaaggag

SEQ ID NO: 390062 - DNA, 75 bp, Homo sapiens
cgaggagtagtcgctggagtccgcgcctccctggaaactggcagacctttcacttcgtatccaacaaattgaaac

SEQ ID NO: 390063 - DNA, 90 bp, Homo sapiens
acccgttcttgcctcaggccagtcgcctccaggccaagagggatccttcacccgtgtctgcttgtcttttccaggcaccctggagtcccc

SEQ ID NO: 390064 - DNA, 97 bp, Homo sapiens
agaagaaccgctcgctgcagtccgagaacgccgcgctgcgcatctccaacagcgacctgagcggtgtcatggagaaactccagctgggcccagagat

SEQ ID NO: 390065 - DNA, 100 bp, Homo sapiens
gtccgcggccgggatccggcccctcccctcgcctcctctcctaggtgccggccgggagggcggccgcagcagtggtggtgaccgcggtggcttcaaaaat

SEQ ID NO: 390066 - DNA, 96 bp, Homo sapiens
gatcaaaatcaaccaggatcccttaggcatccagggacgcaggattcacaagtggaaagaggcaaaacctgatgaattaatggattccaaattgag

SEQ ID NO: 390067 - DNA, 101 bp, Homo sapiens
gcaggggttcctccaagatggcggcgcagaggaggagcttgctgcagagtaaggaagaggcccagcagaagggactcgctgagccaccccccgccccactc

SEQ ID NO: 390068 - DNA, 87 bp, Homo sapiens
tcgcagtggtcgcttcttctccttgtccttcagtgaatctacagacctattttctcaggagctcagcctggccttacttcagtgata

SEQ ID NO: 390069 - DNA, 50 bp, Homo sapiens
gagagatatgccaccagcatttattaaatgatgattattccccaccttct

SEQ ID NO: 390070 - DNA, 100 bp, Homo sapiens
taacttttgatgatcatgatacagttgataaaattgttgaaactaatctggattcactccctctggttgatacccactcaaaaaggacacttctgattaa

SEQ ID NO: 390071 - DNA, 100 bp, Homo sapiens
gcggcggggccggcgggtgcagcggaggcggcggcggcggcggcagtgacgtcgccgggctctgtgtgctccgggatggagcaggtgtgcagagggtgag

SEQ ID NO: 390072 - DNA, 82 bp, Homo sapiens
cgccgtctcttcgagttcttcgtgctgctcaagggcgtgatggtgggcatgggtcagaaggattcctatgtgggcgacgagg

SEQ ID NO: 390073 - DNA, 50 bp, Homo sapiens
ggtacctcacagatccaaacaatcaggtcatcatcagatttgaaatattt

SEQ ID NO: 390074 - DNA, 100 bp, Homo sapiens
gaagtggctttgtggaatattcccatctcctgcctcctaatagctttgagggtcatcatcctgaaccacccggggcagattagcgccggctactccccgg

SEQ ID NO: 390075 - DNA, 75 bp, Homo sapiens
tttcagattaaaccagttgaattaccagaaaacaggtggagccatcgaagcccccacccacaggctgacagaggc

SEQ ID NO: 390076 - DNA, 100 bp, Homo sapiens
tgggcagctggtggtacatgaactcttttccagtgtccttcaggagatctgtgatgagattcatgcattgatcacaggcccatttgacactccttatgaa

SEQ ID NO: 390077 - DNA, 74 bp, Homo sapiens
ccggttccgcctggccatgagcctggctcaggcctgcatggcccattgctagaagactgggacataatcagccc

SEQ ID NO: 390078 - DNA, 75 bp, Homo sapiens
ccatgctgggccggcgccctggggccccggagaggggagccttctcggtggtgcgaaggtgtgtgaaggtgctgg

SEQ ID NO: 390079 - DNA, 98 bp, Homo sapiens
tttgaagcgttcgatcttttaacatcacatcacatgctgacagcacaagaaggctaacagagaccctgatgctggaattgatgaagctcaagttgaac

SEQ ID NO: 390080 - DNA, 83 bp, Homo sapiens
ctcaattacacttcgactctcaaagcaataccaggatagctgttgtttcagagaaagccatcatcgtctacagactgccgtgg

SEQ ID NO: 390081 - DNA, 110 bp, Homo sapiens
aaaggaagcaagcagttcagaagagccaaggaataaacatgcaatgaacccaaaagggtctatgttaacaatgaatgggcaaccagtgttggggaaggagggagctttgg

SEQ ID NO: 390082 - DNA, 100 bp, Homo sapiens
gggcaacttacccgagaacgtgcgggaagagaagatcatcgagcatttcaaacggttatgaagacagtatggagtttccagaccatagtagacatttgct

SEQ ID NO: 390083 - DNA, 100 bp, Homo sapiens
agggaagatgggggccgtcctgaggagcctcctggcctgcagcttctgtgtgctcctgagagcgaccgtggcagccatgtattacagctactacatgcta

SEQ ID NO: 390084 - DNA, 83 bp, Homo sapiens
cgcaaggtcgccctcaaggccatgatcaaaacgtgcccccacttgactctcgccccagctccccagccctctacttcacccac

SEQ ID NO: 390085 - DNA, 50 bp, Homo sapiens
gtgccttcaagggatggaaaattcagatacatttcatcaatgaagccttc

SEQ ID NO: 390086 - DNA, 74 bp, Homo sapiens
gaatcctaatgagcagccaactcataaattactgtcaagaacaagtatgccacatcgaagcatgctaagatcag

SEQ ID NO: 390087 - DNA, 87 bp, Homo sapiens
acagcaatggagaagagaaagcacaaagcatggagaccctccctccaggtgtgatccctcacatccacaaatctctgattggaaaga

SEQ ID NO: 390088 - DNA, 74 bp, Homo sapiens
accttcgcaagaagcaccagttcaagtggccctcagggcatccccgttttcgggtgtccgcaatgttgccagtg

SEQ ID NO: 390089 - DNA, 82 bp, Homo sapiens
tccccttctactacatgctgaaggtccgggttgactctgccaccatcccccggcaggacgaagttccccagcagacagtggc

SEQ ID NO: 390090 - DNA, 98 bp, Homo sapiens
gctcgctccggcgccggcctcgcctcctcgcagcagcgccatggcgaggccttcttgggcagctttgtggccagcgggatggggccctcggcctcgtc

SEQ ID NO: 390091 - DNA, 83 bp, Homo sapiens
gcactaatatttaagaaagaagatgttaactttcaggcagtggatataacttcttgtggaaactttgctgtaattggcctctc

SEQ ID NO: 390092 - DNA, 100 bp, Homo sapiens
tcttcttactattccacctggtttcaagaaaggcatggactttgcaccaaaagggccaaatccttgtagctgtcttcttgccccggtcagtgccagccgt

SEQ ID NO: 390093 - DNA, 100 bp, Homo sapiens
gcgcacggtttggccaaagaagcccccatactcccggtgaaaaaggaattcctcctgatcagcagagactgatctttgctggcaagcagctggaagatgg

SEQ ID NO: 390094 - DNA, 75 bp, Homo sapiens
atgggggcgtgcatattgtagggggtgaactggattggactggctaaggacgatcagctgaaggttcatgggttt

SEQ ID NO: 390095 - DNA, 100 bp, Homo sapiens
cccagaggtccgtgcggcagcagctccagagctttgtcaaagaccttgctctgtcatccaggctggagtgcagtggcacaatcttggctcactgctacct

SEQ ID NO: 390096 - DNA, 101 bp, Homo sapiens
ggtggatcctgtccttcatgcagtctctcattggcttctttgagactgaaatggcaggaatagccaggccagaagaaggaaggcctgtggtgagtgggaca

SEQ ID NO: 390097 - DNA, 71 bp, Homo sapiens
agaagggcaggacctgggcggaggccgccaagacggaccaggactaaaacctccagaggaacggacaatag

SEQ ID NO: 390098 - DNA, 74 bp, Homo sapiens
gtcgacctaaagcctgactggggcaagattgctcgagactttaatcccaactggatgagtgctgtggaaatctt

SEQ ID NO: 390099 - DNA, 82 bp, Homo sapiens
tcttcaccgccgttcccatccttggttaccctcggcagctgccaggtcacgcatgaagggagcaccgtggagaagacagtgg

SEQ ID NO: 390100 - DNA, 107 bp, Homo sapiens
cagtggatcacaacttggttcaatgggtagcctcaccatgaaatcacagcttcagatcactgagtaatcaagtcagaggattatatgacttttatctgcctagagaa

SEQ ID NO: 390101 - DNA, 122 bp, Homo sapiens
ggagaccagacctactgcagccacgcgggcgagcggctgtgtggatgtcggcgaagccgcgggcgagtaagactttgaccccgacgcaggcttcagtgattgccgcggatcagaagcctgag

SEQ ID NO: 390102 - DNA, 100 bp, Homo sapiens
tgcaaggccacacaaggtggatggaagagttgtggaaccaaagagagctgtctccagagaaactggcattgctcgggtaccacttgctggagctgctgga

SEQ ID NO: 390103 - DNA, 75 bp, Homo sapiens
gactcacacaggagaaaagccgtttgtgcctactgaacttgacgcactggtatttggccatctatacaccattct

SEQ ID NO: 390104 - DNA, 82 bp, Homo sapiens
cagtgacgggtctggagtgcgtgggggaccggctgttggcggttatgcaaagggtgacctggacatatcttacatcacatcc

SEQ ID NO: 390105 - DNA, 100 bp, Homo sapiens
ctcagaaccattagacacatcagtggagtccatgctacctgattgcccccgggtctcagcaggtgtgtcacggggtcccagccctgtcagccttggaaat

SEQ ID NO: 390106 - DNA, 75 bp, Homo sapiens
ctgggaaacatcattaaatcgaagatgagaatgtgcctactgctcctgatcctccaagtcaacatttacgtgggc

SEQ ID NO: 390107 - DNA, 75 bp, Homo sapiens
aaattaaaggaagaagaacgaatggttgagatgtttctggaatatcaaaatcgtgtaggagctgcacgatctggg

SEQ ID NO: 390108 - DNA, 100 bp, Homo sapiens
ctctgtgtgagggaaagaaaacaatttctcctgctctgcagcttctgttcagaacattctagtatgccagtagaaaaaaatatcactttagaaaggcctt

SEQ ID NO: 390109 - DNA, 50 bp, Homo sapiens
aggaaccacacgctgatcatgggtagtggtggtgcacgaagatccgcact

SEQ ID NO: 390110 - DNA, 75 bp, Homo sapiens
agctgcgcatcgagaagcgccagcagcccgcggcgccatggctcacgtcggctcccgcaagcgctcgaggagtcg

SEQ ID NO: 390111 - DNA, 90 bp, Homo sapiens
agcaatcaatgtcttttccatcatgtacacaggagcaccagacttaattcagtgcacaaatgagatgaatgtgaacatcccacagttggc

SEQ ID NO: 390112 - DNA, 82 bp, Homo sapiens
atgcgtgttcgcgggtgtgtgctgcgttcacaggtgtttctgcggcaggcctccggtgtggctgtctctgatggtgtcatca

SEQ ID NO: 390113 - DNA, 80 bp, Homo sapiens
acatgcggagactccgaggtggaggaggagtccccaggaaagcgcctggacgcaggctccataaaaatacagactcacca

SEQ ID NO: 390114 - DNA, 75 bp, Homo sapiens
tttccatcagtctcaacatagaattcacacaaaagatgttggacaatttctacaattttgcttcatcatttgctg

SEQ ID NO: 390115 - DNA, 100 bp, Homo sapiens
tgcggcccagcgagttggtcggtcccggggtcacccgctacgggaagcaggcctcgccacagatcatcaatgctgtggtactgttgattttattgagtgc

SEQ ID NO: 390116 - DNA, 100 bp, Homo sapiens
gatgaaaattctcttcattctcttggactgaacttaaatactgatagtcttcccatgcacaagatgattaatacagatcttagcagaatcttgaaaagcc

SEQ ID NO: 390117 - DNA, 100 bp, Homo sapiens
gctgggtcagtccgccgctcaccccgcggccgcaccttcccgccttctcagacctgcctagagctggaacgttacctccagagcgagccctgctatgttt

SEQ ID NO: 390118 - DNA, 82 bp, Homo sapiens
aggagatgcacacggcactcgagtgtgagactagacgcttgaagcaaagctgccatcccagaagacgacatgctctcagcaa

SEQ ID NO: 390119 - DNA, 75 bp, Homo sapiens
cgagaaggcacggagtcgccgcggagcgcagttccacttacttacatgatcatttcgagagatgtaatgttgatt

SEQ ID NO: 390120 - DNA, 91 bp, Homo sapiens
aagcaatagtgagccaaccacctgggccagtattatcaggcatggagatgctactgatgtcaggcacttgcacctcctgcgccgccgcccc

SEQ ID NO: 390121 - DNA, 100 bp, Homo sapiens
gactggaaaagaactatgtcatggatcaaggaaggagagctgtcactttgggagcggttctgtgccaacatcataaagcaattctgtggtgttcttggtc

SEQ ID NO: 390122 - DNA, 100 bp, Homo sapiens
gccgcattcctgggagcgctcgcctcgctgggcagcctcaacatcccctacaagatcgaggccgtgcagagaagcgtcagcccccgtagcacctctgtta

SEQ ID NO: 390123 - DNA, 90 bp, Homo sapiens
ggtggagctcaaggagcaggagctggccagtgaggtggtggtgaagaacctgcggctgttctctattcagaaacttgaacctttcctaag

SEQ ID NO: 390124 - DNA, 90 bp, Homo sapiens
caagtgtcctacgtaaaggagtattggaatgatgtgttcagagcctcattttacagatgaggaaactgaggctggctgcgtgctcagagg

SEQ ID NO: 390125 - DNA, 73 bp, Homo sapiens
tctgaacatgcagcgcagcagggaccacggcctcccaggatgagagccactcagagtgggtgtcttgtgtccg

SEQ ID NO: 390126 - DNA, 51 bp, Homo sapiens
tttgcatccggagagtggacaagaaaatttggagcaagaggtggtggtggc

SEQ ID NO: 390127 - DNA, 100 bp, Homo sapiens
aagatgatgataatgttttcagcagcaatttgccctcagagatatggatcagaaactttcgaagttggtagaagagctcacaacttcaggagaaccccga

SEQ ID NO: 390128 - DNA, 98 bp, Homo sapiens
taagttggacacgtctcagtggccccttttgctaaagttttctggatatgccgcagaaggatccgtgccagaagcaagcctgtgagatacagaaatgt

SEQ ID NO: 390129 - DNA, 101 bp, Homo sapiens
cacacactgcatctgcatctgcctcattcataccctaatgatcccagcaagataatgtcctgtcttctaagatgtgcatcaagcctggtacatactgaaaa

SEQ ID NO: 390130 - DNA, 73 bp, Homo sapiens
tgggattacaggcacgcgccaccactcccagaagatctcttaggctttctgctcagaaggatttggaacagaa

SEQ ID NO: 390131 - DNA, 50 bp, Homo sapiens
tgacaacgtggatcgttgttttgaaactccagaaaaggctttgaaagact

SEQ ID NO: 390132 - DNA, 100 bp, Homo sapiens
gggatctctcctggcaaagactggacaagctgcaggaacagcgccttttgatagtcctaagtaattgctgctatctagaacgtcacaccttcctaaatat

SEQ ID NO: 390133 - DNA, 100 bp, Homo sapiens
ttttagaaggagtatgtggaagggcaaggagtacctatagaaccccggaggagggtgaggagcagagctgggatattcattaccttgcactagataaagg

SEQ ID NO: 390134 - DNA, 100 bp, Homo sapiens
ccgggctgatgtgtacgtgggcgtggatgtgtttgctcgagggaacgtggtcggaggccgattcgacacagacaaggatgtagcccatcggatgctggcc

SEQ ID NO: 390135 - DNA, 75 bp, Homo sapiens
ccaggaggccagaaggaaatacgagtctttgttgctggctatgaaagcctgaaaaagaatgaaattcttcatctg

SEQ ID NO: 390136 - DNA, 100 bp, Homo sapiens
acgtgtccttcgtgaaaggggacagtgtccgcgcttgtgcttccctggtggtgctcagcttccctgagctcgaggagctatgaagacatgattggtgagg

SEQ ID NO: 390137 - DNA, 76 bp, Homo sapiens
gcaatatataattctggtcaaggtgcttgtgaatgacttcttcttggtggcttgtcttgaggatttcattgaaaat

SEQ ID NO: 390138 - DNA, 73 bp, Homo sapiens
ttttgcaccactggatgttgtttactggatacctacctggtttatattctaaatgaattggctggaaactcct

SEQ ID NO: 390139 - DNA, 98 bp, Homo sapiens
ccgcccacgtcccatttcgcccctcgcgtccggagtccccgtggccaggtaacacgtacacagacctctcggccggaatctccagggatgaccagccc

SEQ ID NO: 390140 - DNA, 74 bp, Homo sapiens
ggacagcggcacagaggagggaggactaccgaccagactcccggaaatcatgttggtaggatcccagtcttttt

SEQ ID NO: 390141 - DNA, 101 bp, Homo sapiens
ctcggaggaacctctgtgggaactcagctcaggagacagttatgagcctcagtccgatgagatttaagcgagagcctcactggttcccaggacatcaacct

SEQ ID NO: 390142 - DNA, 100 bp, Homo sapiens
tccgggccccggggggtccaggtctgaagatgatgagaaactgaaaaagaggaaggagcgatttgggattgtcacaagttcagctggaactggaaccaca

SEQ ID NO: 390143 - DNA, 88 bp, Homo sapiens
aggaagctaaggccgcgttggggtgagaccctcacttcatccggctaacatttccaatgatcactggccatctttggttcaagaggct

SEQ ID NO: 390144 - DNA, 82 bp, Homo sapiens
ttcctggagggaaagtgccgctttaaggagaactgcaggtactgctataaccagaatttggtagaaaaaggatttacttgtt

SEQ ID NO: 390145 - DNA, 75 bp, Homo sapiens
gcagcttcacctccatcgcctcggagttacagctcttttgaggaagcttaagcagcaatccagggaaagtgttga

SEQ ID NO: 390146 - DNA, 87 bp, Homo sapiens
cccaggggaccagaggaactcagccctgattgcgctctctattggaggcatcatcattctgaaggataccagtgaagacattgagga

SEQ ID NO: 390147 - DNA, 75 bp, Homo sapiens
tggtggaggctgtggcaatggaacaggcttgagaaacagccctttggagtgaatcaacctggaccttatatcatg

SEQ ID NO: 390148 - DNA, 82 bp, Homo sapiens
gcggagccgcggcggagccggaggaagctgatggtcatcttttccaacccgtggaccgggagcccgtggaccgggagccggt

SEQ ID NO: 390149 - DNA, 100 bp, Homo sapiens
cgacatcaccacggagaaccagtaccggctgacctcgctgtacgccgagcacccaggcgactgcctcatcttcaagggttctcggaccagcagtgacctt

SEQ ID NO: 390150 - DNA, 76 bp, Homo sapiens
atcccacaggcactcagcactccaggaacaacgatggcaggcctgttctgccccacacagcagaaaatgcccacga

SEQ ID NO: 390151 - DNA, 98 bp, Homo sapiens
ggccccctttaacctgtatatgttcaagagcaacaatcctctcagcagtgagctagatttgaagaactacgtgacagtggtctctggttcatcatcca

SEQ ID NO: 390152 - DNA, 83 bp, Homo sapiens
cgctgagcctgcagccggccctgccgggcgtctctggccgagcctctttttgtggaaaacgacagcagcagcagtggcctgga

SEQ ID NO: 390153 - DNA, 82 bp, Homo sapiens
cggcggtggggactgcacgtagcccggcgctcggcatggctctcctggtgctcgctggccagctcagcgtccctggaaggga

SEQ ID NO: 390154 - DNA, 100 bp, Homo sapiens
gtaaagaggccacctgggtggtggatgtgaagaatggcaaaggatcagtgcttcctaactcagctgatttagaagaaagttttaatgaacatgaactgga

SEQ ID NO: 390155 - DNA, 90 bp, Homo sapiens
agatgcctttgttcaccgccaaccccttcgagcaagacgtggaaacttgtggtggagaatgttgatgtgttaacacaaatgaggaccagc

SEQ ID NO: 390156 - DNA, 80 bp, Homo sapiens
ctttgacatggacggacttcttctggaatatggttgagccccttatacccacgaattgctgatggaacccacaaatctgg

SEQ ID NO: 390157 - DNA, 146 bp, Homo sapiens
attggattgaaagaagcccagcttttccatcctggagatctacaggatttatcaaatcgagtcactgtcaagatgaaacgaggaggaagagatagtgaccgtaattcatcagaagaaggaactgcagagaaatccaagaaactgag

SEQ ID NO: 390158 - DNA, 90 bp, Homo sapiens
ggagccctggatggttgtgagggaagagacaggaagatggtgcccagtgatgaatcaccaacaccagcagcagatggcccccagtaccct

SEQ ID NO: 390159 - DNA, 100 bp, Homo sapiens
cttctagaatagtatgttctcctgttcctatgttaagggatctgacacagaacactgtagtcagtggattccaaagcatgagttgggctgcttttgaata

SEQ ID NO: 390160 - DNA, 100 bp, Homo sapiens
tgatgtctccctgcctctcaataccttgggcccagtcatgaagatggaacctctgaataacctccaggttcttgggtgtctctggggagtccctgggcca

SEQ ID NO: 390161 - DNA, 50 bp, Homo sapiens
aaaggtcaactcgatccaatacagaccttgcagaatgaagaagagtctgg

SEQ ID NO: 390162 - DNA, 50 bp, Homo sapiens
ctctgtgcaggtgcagtactacaacaaggaagtgaggagcgtctctgcct

SEQ ID NO: 390163 - DNA, 100 bp, Homo sapiens
ctggaagcttcgtcctggttgccttttctcattctgtggggaccagcctgtgtgatgacaatctgggagtgtgctggcaggaagtgggggctgacctcgt

SEQ ID NO: 390164 - DNA, 100 bp, Homo sapiens
cctgcgcgaagctggccaaagcctgcccagacggctcacctgtgcgggatggaacaaaagccagtttcaagcgcccggtagtgatcctgggacccgtggc

SEQ ID NO: 390165 - DNA, 73 bp, Homo sapiens
aagtgagtttattctgaagagcatccaggtgcagtcagcctcagtttccaaagccggaaaaggatcctctagt

SEQ ID NO: 390166 - DNA, 100 bp, Homo sapiens
tccatgttcttcccaggaaggctggagactttcacaggaatgacagcatctatgaggagattgtcacggattctgcctctgtggagcgtttactggggaa

SEQ ID NO: 390167 - DNA, 145 bp, Homo sapiens
agacccgtagttcctattgattcatcagattttgcattggatattcgcatgcctggggttacacctaaacaggattgtgcagactggtgcttaaaatggaagtcgatattaatggagagtctagaagtaccctgaccaccttgcc

SEQ ID NO: 390168 - DNA, 90 bp, Homo sapiens
ggaaaacttccagaacctggcctcactaggcagacatgcagcgttgggaggagcagagccagggagccatctacactgtggagtacgcct

SEQ ID NO: 390169 - DNA, 100 bp, Homo sapiens
gagatttttgggacctgaaatcttttttcatccagaggaaggagctcattgccaagttagatcaggcagaaaaggagaaggtggatgctgctgagctggt

SEQ ID NO: 390170 - DNA, 100 bp, Homo sapiens
gcgagcgcgagcggcgcgagaaaataacatccctgaggacctcagagaccctttctacgttgaccagtatgagcaggagcacattaagccgcctgttatc

SEQ ID NO: 390171 - DNA, 50 bp, Homo sapiens
cgcatcttcaacccccatctaattcagaaggaacttgcagaaatcacatt

SEQ ID NO: 390172 - DNA, 98 bp, Homo sapiens
gctgttgctggtctctggctccctcctcccagggccaggcgccgctcagaacgccccttggatctcccttcgtggagacgacaccggggtcctcctgc

SEQ ID NO: 390173 - DNA, 107 bp, Homo sapiens
cctgccgtccttctccactttcgccagcccgtgccgcgagcgcggcctgcaggagcagcctcccgcgacgatgcccctcaacgttagcttcaccaacaggaactatg

SEQ ID NO: 390174 - DNA, 76 bp, Homo sapiens
tatggcttccagtggaggcattttggggcagaatacagagatatggaatcagtgtggcaaaggagcagagaacttt

SEQ ID NO: 390175 - DNA, 50 bp, Homo sapiens
atccaactactcgctggccagacatacttcctctacggcagacacatgca

SEQ ID NO: 390176 - DNA, 120 bp, Homo sapiens
cgggagcgccgagcgtcgccgccgccgccgccatgaacaactcgggcgccgacgagatcgggagaagaaggaagttgtggaagaggcagaaaatggaagagacgcccctgctaacgggaa

SEQ ID NO: 390177 - DNA, 100 bp, Homo sapiens
gccgccgcgcacaaccgcacgtgcagggtctcactgtgtcatccagagctggagtgcagcggcacagtcatggctcactggaactcaggctcaagcaatc

SEQ ID NO: 390178 - DNA, 75 bp, Homo sapiens
cggggagcagccgaccatggagccccagacttggagctcggcggcacaaccagcaccatctggtcgcgatggtgg

SEQ ID NO: 390179 - DNA, 100 bp, Homo sapiens
aagcagaagaagctgaggatgaagaagatggtggtagagaaaacgaaccctacagaaccagttggagtggtttgccgagtggatggagtttaccaggtgg

SEQ ID NO: 390180 - DNA, 49 bp, Homo sapiens
aacaaaacgaccactgaaaacaatgccgatcacgagctgctcaggcaag

SEQ ID NO: 390181 - DNA, 105 bp, Homo sapiens
ctaaatcctggatggaagatagcttgaacagggctgacaacatttttccttttccgatttttggaagtaccagcacagtgacgcttcctgaaaccttgttgtttg

SEQ ID NO: 390182 - DNA, 74 bp, Homo sapiens
aaaattccccagtgttcgcagttgcagtatctggagtccatctttcaccatcttctcctgagattgtactggac

SEQ ID NO: 390183 - DNA, 100 bp, Homo sapiens
taacgtccctgtcgtgtgacattttctgagttacactgttagaccttatgatagccaagataacgagtgatgagccactcaccaaggatgacatccctgt

SEQ ID NO: 390184 - DNA, 78 bp, Homo sapiens
gaatctttccttgatttgtccctcccagttttagatgatcagatgtattgcttggtaaaagattggcctccaatcaaa

SEQ ID NO: 390185 - DNA, 99 bp, Homo sapiens
tgcgggagagagaatgagccagagggacacgctggtgcatctgtttgccggagggtgactctgttttgagaagtgcaaccagatctctcctggaattca

SEQ ID NO: 390186 - DNA, 83 bp, Homo sapiens
atggcggatggccccaggtgtaagcgcagaaagcaggcgaacccgcggcgcaataacggttcattccagccaacaaatgaaat

SEQ ID NO: 390187 - DNA, 83 bp, Homo sapiens
gtggaattacaagagatttcgactgtggaaggtgatgagaaaacaagcttagaaagggaaaggaacttgcttgagttaatagc

SEQ ID NO: 390188 - DNA, 74 bp, Homo sapiens
ccgcgcacttccaggtgcacagcgcgggagccgtcacggtgctcaagagtgaagtcaccctgctgagaaatgaa

SEQ ID NO: 390189 - DNA, 97 bp, Homo sapiens
tggtgcacacaccctcgtattctcctgcccttccccagagagaaagagagagtgggcagacatcgaagccaaacagcagtatcccggaagcactcat

SEQ ID NO: 390190 - DNA, 82 bp, Homo sapiens
ggagtttgagccccggaggcagagcggctgccatgtacctggagtagaacagaaaaattattatgtctgtgttcccttggga

SEQ ID NO: 390191 - DNA, 75 bp, Homo sapiens
aacctggtctggccagagacctgctggaagttggagtgcttagtgcagttggtgagagcgggagccacactcaac

SEQ ID NO: 390192 - DNA, 90 bp, Homo sapiens
cggccgcggcggcggccgccaccggctctaggtaggtgagctcgtgaaacaatatgaagaggagaaaatagccttttaaggaaattggcc

SEQ ID NO: 390193 - DNA, 83 bp, Homo sapiens
ggaagaggaagtgagagcagcggcagccggcggtgcagcagccggccgacccagagtcaaattgtggctactaatttgccccc

SEQ ID NO: 390194 - DNA, 80 bp, Homo sapiens
gagcggcaacggggctccgggccctaaggggggccagcagtttgcccagcagatgcagcagcagaacccagagttgatag

SEQ ID NO: 390195 - DNA, 100 bp, Homo sapiens
ttcagacagcatatttgagtcatttccttcgtacccacagtgcttcatgagagggatgacatgccaagctcgaagctcctacatcaccagtgagatcctg

SEQ ID NO: 390196 - DNA, 75 bp, Homo sapiens
cagaaagagtcaacagcagtggcaacagaccaagacatttggaggaggtggtggtggtgctagaagtaatctcaa

SEQ ID NO: 390197 - DNA, 97 bp, Homo sapiens
atgaagtgctttcacatcttgtggaaggaccaagaagatggcgaattagaagatggtgaaatagacgatgcaggatttgaagaaatacaagaaaaag

SEQ ID NO: 390198 - DNA, 75 bp, Homo sapiens
actatcccaagactgctggcaacagcacccagtttcatgtatttgaatcgacaagacagctccctcgattctcca

SEQ ID NO: 390199 - DNA, 131 bp, Homo sapiens
gagagtgaataagtcatctctaacctctcccagcctttttttcataagagagaccatattaaacttacatggcttttttccagacttcaagctcccattccaacagtaagagcttcttccacatcacagcc

SEQ ID NO: 390200 - DNA, 75 bp, Homo sapiens
gctgctcaaggccaagatggacgccgagcaggatcccagagtggaggcagcacagacagtgaggacgaagaagag

SEQ ID NO: 390201 - DNA, 100 bp, Homo sapiens
ttactccattgctgaggagtggtcacgagaagagaatgccttctagatgcaaaatcacctccaaaccagaccacttttcttgacttgcctgttttggcca

SEQ ID NO: 390202 - DNA, 100 bp, Homo sapiens
gcaaggagctaaagcagcgtgcgttcagccctggggtgccatcgcctgcaggattctttattcagctctgacagtggcttcagcaactaccgtggcatcc

SEQ ID NO: 390203 - DNA, 98 bp, Homo sapiens
cggcatctgattcccaggagattaaaattcagcagccttcgaaacgctcctttaccctcatcgtggaggcctgggactgggacaacgataccaccccg

SEQ ID NO: 390204 - DNA, 100 bp, Homo sapiens
acaagatggacagggatgataattgggcctccaagatgccggtggtggtgtgcacattgagccccggtatagacagttcccccagctgaccagatcccag

SEQ ID NO: 390205 - DNA, 100 bp, Homo sapiens
gggtataaatgatctcgtcactcctttctttgtggtcttcatttgtgaatacataggattcactccttctccagttgcacagccacacccttcagctggc

SEQ ID NO: 390206 - DNA, 83 bp, Homo sapiens
cccggacatccgcgccacacgattttttatcaagcagaaatgcatcgaacaacgagaatcaagatcactgagctaaatcccca

SEQ ID NO: 390207 - DNA, 98 bp, Homo sapiens
cggcttctgtccgctccgcggagggaagcgccttccccacaggaaagagcatctacggtgagcgcttccccgatgagaacttcaaactgaagcactac

SEQ ID NO: 390208 - DNA, 87 bp, Homo sapiens
cggtcatctcgcagaacgccatcaaccagctggtgataaaagaaaatgtggctgaagttacccgaagttcagcttgcagtgtaattc

SEQ ID NO: 390209 - DNA, 80 bp, Homo sapiens
tgggactcagcagccttggtgctcaggtgccagatgcaaaggatatacacatgacaccatccactgacttctataagaaa

SEQ ID NO: 390210 - DNA, 83 bp, Homo sapiens
ctcctccaggtggtagtgctcgctctggcgcagattgtggaccaggtgctctgaggctggcgtacagacacagcacgtgcgac

SEQ ID NO: 390211 - DNA, 100 bp, Homo sapiens
cttcacttccctcggtctgggcttctctgaggcggcgagagatggtcaggtctggagctcgaccgggccaggaggaagacagcgaacccctcccaccaca

SEQ ID NO: 390212 - DNA, 87 bp, Homo sapiens
ttccatctctgctgctctctcatttgctggccatcggattgggcttactgaaacaaatgcaggtatcaagtgcttggactccatgtg

SEQ ID NO: 390213 - DNA, 96 bp, Homo sapiens
ccagaacccaggcccacggaggaagagccgggcagtccctggagcgggccagatgtagccgcctgtcccgggagcctggactgtgccctgaagagg

SEQ ID NO: 390214 - DNA, 100 bp, Homo sapiens
acatgccggatgtcattgacttccttgtgctacatcagttttataatgaagccaaagaaaggaactggcagattggttgaagatgaaatccactgaggag

SEQ ID NO: 390215 - DNA, 75 bp, Homo sapiens
cgcgacccccggcaacccggagaaggtctacagagcggcctgcgccagcgaccctggcctcccacgactacatcc

SEQ ID NO: 390216 - DNA, 100 bp, Homo sapiens
actctacttctctggaagcagaaagaggctggaagtttttctccagtgtctggtgaggtacattgactatggaaatactgaaattctaaatcgatctgat

SEQ ID NO: 390217 - DNA, 83 bp, Homo sapiens
gccctgcagctggaagaggagctgttccagtctattatcctcccagtccacaacgctgaaccgtggctggacgaatgtttgag

SEQ ID NO: 390218 - DNA, 75 bp, Homo sapiens
acaagaaaactgcacataactccgaagcatgtttgtgtcattagtgaaactggaaaagcaaaatacaaagcctaa

SEQ ID NO: 390219 - DNA, 100 bp, Homo sapiens
ctaacccaactgctgactgcaaaacagccgtcaattgttcatctgattttgatgcgtgtctcattaccaaagctgacctgctcccctcaaaagcttcgtg

SEQ ID NO: 390220 - DNA, 100 bp, Homo sapiens
atataatattaggggtgttacgtataggctcactcaagatcctgataacttaagtgactctctcttttccggtgatgaagaaaatgctgggactgaggaa

SEQ ID NO: 390221 - DNA, 128 bp, Homo sapiens
agcagtcgtaagaagaggtcccaatcccccactctttccgccctaatggaggtctccagtttcggtactctgtggatatccccttggacaaaactgtcgtcaataaggatgtcttcagagatcctgct

SEQ ID NO: 390222 - DNA, 51 bp, Homo sapiens
ccgggccgcgcacgccgcctcagcatcctgaggttagcattacacttctcc

SEQ ID NO: 390223 - DNA, 100 bp, Homo sapiens
gtttgcatttgtgtatgaagctcaagatgtggggagtggcagagagtatgcattaaaggtcgcaatggaagaagagatcgccgcgctggtcattgacaat

SEQ ID NO: 390224 - DNA, 74 bp, Homo sapiens
taaaccctatgaagaagcactgataaaatttgatgctgggactctccttcttagtacacaccgactgatttgga

SEQ ID NO: 390225 - DNA, 100 bp, Homo sapiens
tcaagctgctgcaccgcggcgccgacatcaattacgccaatgtggacggactcactgccctgcaccaggtttggccggaagaatgtgctgttcgtgacca

SEQ ID NO: 390226 - DNA, 83 bp, Homo sapiens
tgcccgggagcggaaggtgcctgtgacgaggattggccggctggccaacttcggagacagccctcagcgcctttttccaggag

SEQ ID NO: 390227 - DNA, 100 bp, Homo sapiens
ggtggggaaaatggcggtgtctacagtgttctcgacttcgtcgctgatattaacctggctgcagagccaaaagtgaaccgaggaaaagcaggtgtgaaac

SEQ ID NO: 390228 - DNA, 100 bp, Homo sapiens
gtctgatcccttgctcccatccctgcagcatgaacaagttgagtcagcagatactggagttatttgaaacatgtcagcagcaaataagtgatttaaagaa

SEQ ID NO: 390229 - DNA, 88 bp, Homo sapiens
cgccatcgttgctgccttcttcgtcaagttttcatggagtgataatgaaaggagcagcagccgcattaatatcccagagagagcaagt

SEQ ID NO: 390230 - DNA, 74 bp, Homo sapiens
caggcaaaccaccatcacatctcattttgcaaaggggtaactaggatttctacctcaaccgcgagacctatgca

SEQ ID NO: 390231 - DNA, 100 bp, Homo sapiens
agatatggcagtgagagaccataacgtggaattcaggtccaatttatatataggtgtcatggagaaactccagctgggcccagagattctgcagcgggaa

SEQ ID NO: 390232 - DNA, 100 bp, Homo sapiens
ccatcgcctggccccggctctctggaccttgtctcgctcgggagcggaaacagcggcagccagagattatgatgcatcattatcacagaagaaattcgtg

SEQ ID NO: 390233 - DNA, 100 bp, Homo sapiens
agtctttggcagacatcgagaagcataatgacattgtggacagtgacagcgatgctgaggatcgaggaacgttgtctgtgtgtgttttaatagaaaagtt

SEQ ID NO: 390234 - DNA, 74 bp, Homo sapiens
ggatgatcctcactccttccaccacatttggccaagagacgaatgtccctttgaacaacttcagtgctgatcag

SEQ ID NO: 390235 - DNA, 51 bp, Homo sapiens
ccggaatacctcggaagccgggaaatgagctgtttacgatctgtgctggaa

SEQ ID NO: 390236 - DNA, 101 bp, Homo sapiens
cgagtggatggtgcgttgcgtgccctacttcaaggataagggcgacagcaacagctctgccggctggaagggacacaggctcaagaactctgagaatcaga

SEQ ID NO: 390237 - DNA, 98 bp, Homo sapiens
gtgacagcaagtccattcagaagtcgcccaatggtgatctccagtgggatgcagtcaatggacaccatgaagcaagtttatcagatcgtgaagcccct

SEQ ID NO: 390238 - DNA, 101 bp, Homo sapiens
tggctgtcctgaaatattataaggttgatgacaacaagaaactaggagaatgggtaggcctttgtaaaattgacagagaggggaaaccccgtaaagtggtt

SEQ ID NO: 390239 - DNA, 100 bp, Homo sapiens
ttataaaactgaagcaccaacttgggagacacatggaaatctcatgccgtttccctggggagatggtaaccatactctattccataaccctcatgtgaat

SEQ ID NO: 390240 - DNA, 110 bp, Homo sapiens
ggagaccatggagaccctcacggagctgggcgacgagctgaccctgggagacatcgacggtttacccaaggtccagcctagcccctaggcaccatgtcggacagtgatct

SEQ ID NO: 390241 - DNA, 90 bp, Homo sapiens
caagagactgccttggagaggttactttcaatggaggttgtgggcccacctggtacaggcaaaacagatgtggcagttcagatcatatcc

SEQ ID NO: 390242 - DNA, 100 bp, Homo sapiens
ctctgcaaaatggcccctaccaagctgcagaaaagcatttcatctttttggagaaataagcgggttttgaaaacaaaaaaaagaaggagtggaagagggg

SEQ ID NO: 390243 - DNA, 100 bp, Homo sapiens
cgcttgcagtcgggctacggaggccgggttgccagattacgggaaaatgtttataggaggccttagctgggacactacaaagaaagatctgaaggactac

SEQ ID NO: 390244 - DNA, 95 bp, Homo sapiens
agtagcaggagccctctatcttttgttctctggcatggaaggggtcctcagagttactggggctttctgtgaagaattggaatcaatgatacagg

SEQ ID NO: 390245 - DNA, 100 bp, Homo sapiens
tggttttaagaaattcctggagagcggtggccaggatggggcaggggatgatgacggccatgtgtccttcaagcccagcttagaccaacagcgttcatgc

SEQ ID NO: 390246 - DNA, 96 bp, Homo sapiens
acacctggaacaactaccagcacatgctgcgtgtcatcaagaagtactggctccagttccgggaaggcccctgggagatggggtttcgccatgttg

SEQ ID NO: 390247 - DNA, 76 bp, Homo sapiens
ccatatcacagtatcccagatgccaaatgttattattgcagcagaactcctaaaaaatgcagatgaattagtcaaa

SEQ ID NO: 390248 - DNA, 60 bp, Homo sapiens
ttgacaagattttcaatcagaaaattgttgggccggtgcacaaacagcgtggtcaagtat

SEQ ID NO: 390249 - DNA, 83 bp, Homo sapiens
tggctctgcgtgagtgtggtctacgagctgtttctcatctttatactcttccagatctgccgacaccccaggccatcgagccc

SEQ ID NO: 390250 - DNA, 100 bp, Homo sapiens
gaggtagcatccgttggatatccacaccatccttctcgctgcaggatgctgcagttggagaagaaacttgaacgtgaacttgaggatgatgcacgagtta

SEQ ID NO: 390251 - DNA, 119 bp, Homo sapiens
cgtggctgccggggaggccagagcgtggagcgctgcgcggcgcggcggccgggccctcgagacggggacggaagcgagtcacgtcccagcgctgctccctggagtttctggaagatgcc

SEQ ID NO: 390252 - DNA, 100 bp, Homo sapiens
cccggtgtaccgcggcgagaagccccagctgcactacgcgattcctcgaggtctgaacaagaaccactgacgcagaacgtgaaaactagaagcgttcatt

SEQ ID NO: 390253 - DNA, 50 bp, Homo sapiens
ggtcgagccggaggaagccaccaggacttaaagatggaggaagctatgag

SEQ ID NO: 390254 - DNA, 100 bp, Homo sapiens
gcacctccatccgcgaagacatcctggtgtacaactatgagcctttgacacagctcaagaatgtcagagcaaattactatggaaaatacattgctctaag

SEQ ID NO: 390255 - DNA, 106 bp, Homo sapiens
gtccgtggccttcgcgtctgcccggccaagaggcaaaggggaggttacgcagcaaaccatccagaaggtccctgtgcgttttattgcgacctgccggtgggaactt

SEQ ID NO: 390256 - DNA, 51 bp, Homo sapiens
cagggaaccctggtcaccgtctcctcagaaaaagcttgtggtgaagggggg

SEQ ID NO: 390257 - DNA, 75 bp, Homo sapiens
caggcatctaatgttcttagtgacattagttactatactggcaattgctggagaagattttgcaattgttgcttc

SEQ ID NO: 390258 - DNA, 101 bp, Homo sapiens
acgacgtccttctggaagaggcgaaactggttaatactcttcagaattggctggcagagttcaacatgtggcttccacctcctgaagccctcccggctgac

SEQ ID NO: 390259 - DNA, 50 bp, Homo sapiens
ctttccaaagtggatgcctccggggaggacagctaacccccgcatcggtg

SEQ ID NO: 390260 - DNA, 73 bp, Homo sapiens
cacttcattggccacctacagaaacaaaatgtcaacaaattgatgggactgaccactgagcagatgctgagaa

SEQ ID NO: 390261 - DNA, 83 bp, Homo sapiens
cttagctgtgctcgcgctactctctctttctggcctggaggctatccagcaaatctcccaagcctaagaagaagaagcacagg

SEQ ID NO: 390262 - DNA, 82 bp, Homo sapiens
gaaagtgcctacatgttgttttatcggaaatcccagttgcagagaccccctgaagttcttatcaggagaggatcaatggaag

SEQ ID NO: 390263 - DNA, 101 bp, Homo sapiens
atctcagtagggacaacaggcaggagaattatgggagcgcatttccccagggtatgaaaatgaaagtcttcagaatggaaggaagtcaactgaatttccaa

SEQ ID NO: 390264 - DNA, 74 bp, Homo sapiens
cctcaacggagggctgcggagatcggtagcgcctgctgcccccaccaggttggtcaaagaaaaagtgatgtatg

SEQ ID NO: 390265 - DNA, 144 bp, Homo sapiens
gcgtgttgtccacccaagatggagttcctcctggggaacccgttcagcacaccagtggggcagtgcctcggtactccaaagattcaggtttactcacgtcatccagcagagaatggaaagtcaaatttcctgaattgctatgtg

SEQ ID NO: 390266 - DNA, 75 bp, Homo sapiens
agatcttcgagttcaaagagaccctcggaacaagccccatgtgccactcccctgatctgcagcttcggtaggccg

SEQ ID NO: 390267 - DNA, 75 bp, Homo sapiens
gagagagatgccatctacaaagaattctccttccacaattttaatcagctatgctaagaaggaatctgatcttaa

SEQ ID NO: 390268 - DNA, 82 bp, Homo sapiens
actgaagacgtctgcgtgagaatagagaccaccgaggtgtgggcaagagcagtttactgttgcgttttgcagacaacacttt

SEQ ID NO: 390269 - DNA, 78 bp, Homo sapiens
tgtaggaaagcggaagcggcctggcaggggaaggatcgaggtgcgctcccctggggccccagggcccctgactctgaa

SEQ ID NO: 390270 - DNA, 83 bp, Homo sapiens
aaggtcgccctcaaggccatgatcaaaaccgtgagtgcatctccatccacgttggccaggctggtgtccagattggcaatgcc

SEQ ID NO: 390271 - DNA, 75 bp, Homo sapiens
ctcccgggctccgggaaaactacactggccaggtggctattatcatggaaaactaatttttcccagagaatttcc

SEQ ID NO: 390272 - DNA, 75 bp, Homo sapiens
cgcctgccctcagccgcccgctggccgggagcggagcccctgtgggatccactagttcctggactatgggaactg

SEQ ID NO: 390273 - DNA, 90 bp, Homo sapiens
atggatattctggtggggagatgaacccaacctagtgggtgtaatacatcatgaactgcaggcttatttctgacgcagggtaccaggggg

SEQ ID NO: 390274 - DNA, 74 bp, Homo sapiens
ctgccgccgttgcctccgccgccaagagtgagcgagcggacccgcgatgggattggccatttgatgatggagct

SEQ ID NO: 390275 - DNA, 100 bp, Homo sapiens
cctcctcctccacctccggcttttgggggatcactgtcctctctcggcagcagtaagactttgaccccgacgcaggcttcagtgattgccgcggatcaga

SEQ ID NO: 390276 - DNA, 50 bp, Homo sapiens
ggtgcctctgatcaaagcccccaagagagccttagattgtaagcaaaaga

SEQ ID NO: 390277 - DNA, 90 bp, Homo sapiens
cgctgcggacttggttcggagggacgtccgcttctggtggacagattgagcaaagctgccactgcagagccccgccatggaagacacgcc

SEQ ID NO: 390278 - DNA, 75 bp, Homo sapiens
tgcgggcagcgcttgaggccctgctgccctacactggtggtctttgggaagaagcttcctgcctttgccaccatc

SEQ ID NO: 390279 - DNA, 88 bp, Homo sapiens
ggggctgggctgcagcaagccgcacctggagaagctgaccctgggcatcacgcgcatcctaggtgctggagaatctggtaaaagcacc

SEQ ID NO: 390280 - DNA, 100 bp, Homo sapiens
ggcttcctggaggtggaggcctgttgagctggtgtgatctgctacggattattggtggatagatacttctcaagacatcacacagcgtgagtcaatcaag

SEQ ID NO: 390281 - DNA, 100 bp, Homo sapiens
tcttcagcaagaggaccgggctgggcgcgcccggccgcgacgcccgggacccagattgcgggttcaggtatgaggatacatgggctgcacttcacagaag

SEQ ID NO: 390282 - DNA, 101 bp, Homo sapiens
caagtttatttctgatcgtgaaagtagaagaagtctcacaaacagccatttggaaaaaaagaagtgtgatgagtatagtcttcctgcgagcaattaatcag

SEQ ID NO: 390283 - DNA, 51 bp, Homo sapiens
ggggaagcgggacaatcgggtgtggtggtgaccgcggtggcttcaaaaatt

SEQ ID NO: 390284 - DNA, 100 bp, Homo sapiens
tgaccagttacggcaggaggccgagcaacttaagaaccagattcgacaccggcagctgctgaaggacagcttcatggtggagctggtggagggggcccgc

SEQ ID NO: 390285 - DNA, 100 bp, Homo sapiens
cctcaacccgctcaaggagccactcggcttcatcaaggtcctcgagtggtcagcagataagcagagagccctagaagaaaccaaagcctacaccacccaa

SEQ ID NO: 390286 - DNA, 76 bp, Homo sapiens
tgaacgaagtcagaatttcctgtgttccctttgccgctcctggagttcactgggatcaaggtggtcggacattgtg

SEQ ID NO: 390287 - DNA, 82 bp, Homo sapiens
cctgaaccgcgcggccgaaccctccggtggtgcagagccggagccggagccggagccgcgccgcgccgcaccatggcgccca

SEQ ID NO: 390288 - DNA, 100 bp, Homo sapiens
gttattatggactttcaaacatctgaagatgacaatttattagatggtgacactgcagttgttgctgccaaacaaggtgaatccgacccagagaggaaag

SEQ ID NO: 390289 - DNA, 97 bp, Homo sapiens
gggaaaatggcggacgggaaggcgggagacgagaagcctgaaaagtcgcagcgagctggagccgccggagggaagcagtttaagtgcacggtgtgtg

SEQ ID NO: 390290 - DNA, 74 bp, Homo sapiens
aagtacatcataatcggcgacacagattgataggcagcagtttgaagaaacagttcgaactctaaataaccttt

SEQ ID NO: 390291 - DNA, 131 bp, Homo sapiens
gaaagatgattccttcttggggaaactcggagggaccctggcccggaggaagaaagccaaggagggtgtttgttgaaagctccgagactttggattaccagatggcctttgcagactctcatttatggaaa

SEQ ID NO: 390292 - DNA, 90 bp, Homo sapiens
tgcggggccatggcggggaccgcgctcaagaggctgatggccgagtacaaacctctaagcgaaagacatgaggcctcagcctgaaatgag

SEQ ID NO: 390293 - DNA, 83 bp, Homo sapiens
ggactttgagaaagtgcaggagcaactgggaaatgatggtatcatgaactgatcactaaatatgggaagttggagcctttggc

SEQ ID NO: 390294 - DNA, 115 bp, Homo sapiens
aggaaaggaaaaacccacaaacatgttcacaacgggcatgagcccataggcagcatgtcatccatggaagtgaacgtggacatgctggagcagatggacctgatggacatatcgg

SEQ ID NO: 390295 - DNA, 121 bp, Homo sapiens
cctatacaaggagtatgctgaagatgacaacatctatcaacagaagatcaaggcttcttctcatatcggtaattccactcaggccactgtgagggatgcagttgttggaagaccatccatg

SEQ ID NO: 390296 - DNA, 90 bp, Homo sapiens
caacgcggtggcttagacgcgcgagatccggccagggtcagaggtatctttcagatgaaggcattgaagcttgcacaagctctccagaca

SEQ ID NO: 390297 - DNA, 100 bp, Homo sapiens
gttcatggagccagtcagtcgccctgctgcctcctcagtcacacgctgtcctccttggttcgccccttgtattacaagtggataaataatgtgcactgct

SEQ ID NO: 390298 - DNA, 75 bp, Homo sapiens
cgcggacgctcacgataaccaaggacgaccgcgaaccaagcaagagtgagccatggagctacgtgtggggaacaa

SEQ ID NO: 390299 - DNA, 83 bp, Homo sapiens
gtcatcgccacaggctgcaagcgcccaaagccaatgggaatcacctggttcaaggtacaaacccgtagtgctgatgaaccaat

SEQ ID NO: 390300 - DNA, 100 bp, Homo sapiens
caccaactggacaaggctttggcaaagctggggattggccagctgactgctcaggaagtaaaatcgactattgcagatatcatccgaacatgtttgggac

SEQ ID NO: 390301 - DNA, 95 bp, Homo sapiens
ccggagttcaaacctaagcagctggaagggctgaagccgacgtagcttctctgaacagacgcatccagctggttgaggaagagttggatcgtgcc

SEQ ID NO: 390302 - DNA, 98 bp, Homo sapiens
gagaagatggcgcctggcagggcagccagctggccaggggggcccgtctgggccagccacctggtgtccgactcatggagagatttctcatggatggc

SEQ ID NO: 390303 - DNA, 50 bp, Homo sapiens
ttcccttgcggacgcgaaggcgtgaattaaatatgggtgatgttgagaaa

SEQ ID NO: 390304 - DNA, 71 bp, Homo sapiens
ccggctgcagagacaggcgttcgaggagatcatcctgcagtagaaacttttccatgtctgtaaatagtgct

SEQ ID NO: 390305 - DNA, 100 bp, Homo sapiens
caatgatgacaacttctgcaaggcggtttctagtgcaaatcccctgctcagggtcttcatccagaaacgaggttttgcacactagggaccaagaagccct

SEQ ID NO: 390306 - DNA, 75 bp, Homo sapiens
gtcaggttcacctgcatcgtcacagattctacaagggggttgctcctctctggatgagacagataccatacacca

SEQ ID NO: 390307 - DNA, 97 bp, Homo sapiens
gggttgggttgataatctaaatggatgtagccgactcattattgcggagacgttgacatttagggatgtggccatagaattctctctggaggagtgg

SEQ ID NO: 390308 - DNA, 96 bp, Homo sapiens
ttgtagataagcaactggattttttaactgaagatagtgcctttcagccctaccaggtaatacattgcatgcaactggatcctgcaagaatcattt

SEQ ID NO: 390309 - DNA, 75 bp, Homo sapiens
ttcaccgccaaagaggtgtccttctccaacaagccctacttccgggatgctgagctcctgtgctgggatctccgg

SEQ ID NO: 390310 - DNA, 74 bp, Homo sapiens
tgacatatctgagggagaagcacaagatcatgcacagagggcatggtgctgatgtgaaatgtgtagactggcat

SEQ ID NO: 390311 - DNA, 93 bp, Homo sapiens
ctccgagcgcaaggacagcgcgaggtccgcgcagcccagcgcagccatgtgtcgtgaaaactacccctaaaagccaaaatgggaaaggaaaag

SEQ ID NO: 390312 - DNA, 82 bp, Homo sapiens
gtcggaactagatctttctgacaacaaactcgaagactggcatgaggttgcagtattttacagagctagcccaaggcacaag

SEQ ID NO: 390313 - DNA, 82 bp, Homo sapiens
agagcgtcacggcgtacgccctcatggggaaaatctccccggtgactttcaggaagctcttcgtgggcggtcttgactggag

SEQ ID NO: 390314 - DNA, 74 bp, Homo sapiens
tcgcttccagctgtgggtggcgctaggcagcttcagccggaccgggtcactcctggaagcaaggcggctctagc

SEQ ID NO: 390315 - DNA, 100 bp, Homo sapiens
ctcagaggccgccatcaaccgccagatcaacctggagctctacgcctcctacgtttacctgtccatgtatgttggtgagagtgaacgtgctgtgcgacaa

SEQ ID NO: 390316 - DNA, 74 bp, Homo sapiens
cggtgatgaagaatccccccgaaaggaccccccaggtcctcagaatggttggaatgaccctccagctttgaaca

SEQ ID NO: 390317 - DNA, 82 bp, Homo sapiens
tgcctcttctttcaagccctatttggaaatagtgggatttattgatatagctgatatttcaagtcccccagttctgtccaga

SEQ ID NO: 390318 - DNA, 101 bp, Homo sapiens
ggctacgccgaagcactcgttccgggggtgaagcctcctgcgccggccttgcctcggggaggttcccctgaaggatgctaaggaatacgctgaatccatag

SEQ ID NO: 390319 - DNA, 50 bp, Homo sapiens
tcacaggggagcaggcggaggcaaggagcagcccgacggccatggaggct

SEQ ID NO: 390320 - DNA, 100 bp, Homo sapiens
atattccgctactttccctcttagtgtacagaagttcatgctctgctggccgtccgctctgactaccactgtgccgtgtggaagtttggtaaacagtggc

SEQ ID NO: 390321 - DNA, 83 bp, Homo sapiens
gagtttgcaatccagccaaatacaactggaaaacagctttttgatcaggtgtcgtgaaaactacccctaaaagccaaaatggg

SEQ ID NO: 390322 - DNA, 100 bp, Homo sapiens
gaaaattcctactggacaagaatatgctgccaaaattatcaacaccaaaaagctttctgctaggggaagctgagctgaacacattacgatggatgatgga

SEQ ID NO: 390323 - DNA, 100 bp, Homo sapiens
tgataccaaactcatcggaaacatggcactgttgcctatcagaagtcaattcaaaggacctgcccccagagagagaaaatttctaccttgaaccgtatct

SEQ ID NO: 390324 - DNA, 83 bp, Homo sapiens
cggcagagcaaggggcttacgcagaaggacctggccacgcaaatgcagccctgaggatttggctactgcatataacaacaggg

SEQ ID NO: 390325 - DNA, 100 bp, Homo sapiens
gccggttcctcaccctcggggagcaacatggcgcgcagggaccatgtcggcggagaccgcgagcggccccacagaggaccaggtggaaatcctggagtac

SEQ ID NO: 390326 - DNA, 74 bp, Homo sapiens
ggagcgtcaacagcagcaccatgggacaacttgcctttgatgattttcaagagagttgtgctatgatgtggcaa

SEQ ID NO: 390327 - DNA, 75 bp, Homo sapiens
tgaaaaagttgggaaagaaaattggctacccagaagtcatacctgataaagactatttcctgattgtgattcaga

SEQ ID NO: 390328 - DNA, 75 bp, Homo sapiens
atgagcgaggtgcactcccccggcgagcactcggggcgtgatggtgggcatgggtcagaaggattcctatgtggg

SEQ ID NO: 390329 - DNA, 100 bp, Homo sapiens
catggcggagctgacggtggaggttcgcggctctaacggggctttctacaagatttttgattgtccccggctgaagttttctgagattccccagcgcctc

SEQ ID NO: 390330 - DNA, 75 bp, Homo sapiens
gctttagagcctggctactcacagttgaagcctgattgcaggctttgatgacagtagggaaagaaccatttccta

SEQ ID NO: 390331 - DNA, 58 bp, Homo sapiens
cggcagccgagcccgcccgcgcgccggaccaggcagttaaatggcacttgtaccagct

SEQ ID NO: 390332 - DNA, 75 bp, Homo sapiens
ccacagcctagcagtcgggaccgtactgaggtgtgaacccacatccctgcccccagggccacctgcaggacgccg

SEQ ID NO: 390333 - DNA, 100 bp, Homo sapiens
aaacgaacctctttgaaactgaagaaactcaagggcaccgaagatgaactggacaaatactctgaggctctcaaagatgcccaggagaagctggagctgg

SEQ ID NO: 390334 - DNA, 75 bp, Homo sapiens
atgacacagcagaaggactccttcgaaatggaagaggtagccctaatggagaaccttgtggaaagacttgtttgg

SEQ ID NO: 390335 - DNA, 146 bp, Homo sapiens
caagctcttaagcatcgtggcgctggtggggggagtcctcatcatcatcgcctcctgcgtcatcaacttaggcggcatcttcttctgaagacatgggcaggtggattgggattttactcgcagagacgggatcgtccacagacccg

SEQ ID NO: 390336 - DNA, 74 bp, Homo sapiens
gagacctcaagaaggagatcaatgagcggctgcttactgctcgacaggtttttagaacttcagccataaaaatg

SEQ ID NO: 390337 - DNA, 75 bp, Homo sapiens
ccaacatcgacacggccagtctcttccgctggcggcatcaggtgttggagagcacaatggctgaacaagtccttc

SEQ ID NO: 390338 - DNA, 100 bp, Homo sapiens
cctcgtgccgttacggccatcacggcggccgcagtggcgtcctggagccctcctcaggactgttctgatggctacatgtgcaaaatacactttcaaatta

SEQ ID NO: 390339 - DNA, 80 bp, Homo sapiens
aaattgtggaaaagtcactctgattgtaaaccatggctgtgtggatacaagctcagcagctccaaggagaagcccttcat

SEQ ID NO: 390340 - DNA, 100 bp, Homo sapiens
ttgatggatgtactttaccttctaaaaaggaagtagagagatctagaagagagaaggatttgatgccctggatccctttattcccatcctggtttccaac

SEQ ID NO: 390341 - DNA, 113 bp, Homo sapiens
aaaatggcgaccggcaactactttggattcacccacagcggggcggcggcggcggcggctgcggcccaatatagactggaatcagccattttaccaagaaagttgggtttctt

SEQ ID NO: 390342 - DNA, 82 bp, Homo sapiens
ctaaagtatcaactatcaacttttcttgatgctggttctgtgaattatctttctcctggcctgccctccatgtcggggagct

SEQ ID NO: 390343 - DNA, 80 bp, Homo sapiens
tcttgaccaaaatgtggcaccccaacatttatgagaaggattgagtcatcgggctccaatgcgtggggatgtttaccgcc

SEQ ID NO: 390344 - DNA, 80 bp, Homo sapiens
agctcactctcttgtgttgactgacagggaaggagatgatgattattctccaccgtctaagagaccaaaggccaatgagc

SEQ ID NO: 390345 - DNA, 100 bp, Homo sapiens
attgaaaaacagtacatttctgcaattgagaaacaggcacacaagtgtgaggagttgctaaatgctcagcacatgcagatgacaatccaggctctccagg

SEQ ID NO: 390346 - DNA, 51 bp, Homo sapiens
atccaattcactgtgggagaggagcctcataggaacttctccctttcttct

SEQ ID NO: 390347 - DNA, 96 bp, Homo sapiens
agcatgtgccaggaacacaacctcaccttgatcagatattggtatcttgatggacaaacactactaataatcatatgtgttggcattgtgttccct

SEQ ID NO: 390348 - DNA, 90 bp, Homo sapiens
ccattgaacctgcttgagcgtgttggatttgaagtttaatggatcgagaagtggcgttgcttgctgaaatggacaaagtgaaagctgaag

SEQ ID NO: 390349 - DNA, 82 bp, Homo sapiens
ccagcccgtgccgcgagcgcggcctgcaggagacctcgcgacctgtgtcagcagagccgccctgcaccaccatgtgcatcat

SEQ ID NO: 390350 - DNA, 98 bp, Homo sapiens
agttcaagtggccctcagggcatccccgttttcgtgctacaaggtgagctgcctggaaatccctgggccctctggccccaagggctaccgtggacaga

SEQ ID NO: 390351 - DNA, 90 bp, Homo sapiens
aatggctgccagatccgcagacatcctacaggaaccacccctccagttaagctcttcacgggcaataagaagcagcctgttatagtgccc

SEQ ID NO: 390352 - DNA, 101 bp, Homo sapiens
cacaggggccactcagagtcgcccgagaagtgtctctgatgcatattctcagagcctaccaggaaaatcctagaatcgagaagggcttgggacacagagag

SEQ ID NO: 390353 - DNA, 82 bp, Homo sapiens
cttttctctggacttccccagaagaagattgtggttgaattcagctgccaatggctctaatgaagatagaggagaggttgca

SEQ ID NO: 390354 - DNA, 90 bp, Homo sapiens
tacatgtccctggttaatgtgggccatgtctgctttaacgtctcctaagccgaacttgatgggtctgcccagcacaactgttccttcccc

SEQ ID NO: 390355 - DNA, 100 bp, Homo sapiens
ttcacaaattacagcagtctgaatcgagctcagctaacctttgaatatctgcacacaaattcggatttcaaggatttggatttggagatggtggcttcca

SEQ ID NO: 390356 - DNA, 100 bp, Homo sapiens
cggaaagataaggaagcttgcgtccacaagatattacgtcaacagcagctcctttagcggcagagttttccgagtgaccttcttgatgctggctgtttct

SEQ ID NO: 390357 - DNA, 80 bp, Homo sapiens
cccgggtcctcctagaaattccccccgaagaagactcccccacatctgggtctctaattaacagaagatggcaaagccca

SEQ ID NO: 390358 - DNA, 74 bp, Homo sapiens
ccactacctcctggctgccgtgaataggcagcctaaaggtggcaattttggaggtagccccggttatggaggag

SEQ ID NO: 390359 - DNA, 101 bp, Homo sapiens
agaagaatgacaaagataagaagatagctgagttggaaagcatttaaatcaaacggtattgagatggattgggttatgaaacataatggtccaaatgacgc

SEQ ID NO: 390360 - DNA, 83 bp, Homo sapiens
ggggtgagaccctcacttcatccgctatggaagtgataaacaagtccagtgttaagtattcagtacaacttgaagacaggaag

SEQ ID NO: 390361 - DNA, 90 bp, Homo sapiens
ctgaaagtgcaatatttgagtatcactgcgagattgcctgtttggtacctgtggaccagtttcaactttatcagaggttaaaatttgaaa

SEQ ID NO: 390362 - DNA, 51 bp, Homo sapiens
aacaagcaactggctattgaaaagatctcacattcttgaaggtggcattga

SEQ ID NO: 390363 - DNA, 100 bp, Homo sapiens
ctggacctgatcttccttcgaggcattatggaaagtcccatagtaagatccctggccaaggttgagactgagctaaagttaatctgttgtgacattctgg

SEQ ID NO: 390364 - DNA, 74 bp, Homo sapiens
cggcggtctgataggctacatcgcggcatgagatgaagctgtgacagtgccggtggtggtgtgcacattgagcc

SEQ ID NO: 390365 - DNA, 100 bp, Homo sapiens
gtgacacagttgctgatatagaaagtgaaccagtggtagaaagcacagaaactgaggggacataatcatcactcagtagtgaggatgaggatgatgacct

SEQ ID NO: 390366 - DNA, 88 bp, Homo sapiens
gactcagtggaacaatcttttgttggattgaaacagctaatccacatcccgctctgggctttaaacgtgacccctcgcctcgactcgc

SEQ ID NO: 390367 - DNA, 98 bp, Homo sapiens
ctgcccttcgccaaggagatcgtctctctcatcgaggcccaaaccgccaaggttccgaggcctcatcctgctgctgaccttcctaatttacgcctgct

SEQ ID NO: 390368 - DNA, 91 bp, Homo sapiens
tcggacgtgcggggcctgggcctcccggtccgcaagcagcagggagagcaacaagccccggccctcagagctcagccggatgagcgcagcc

SEQ ID NO: 390369 - DNA, 98 bp, Homo sapiens
caagaagattcacgtgtacggctattccatggctaagtcctatcagccatggaaacaccattgctctcttcttccggtcactgttgccaaactatacc

SEQ ID NO: 390370 - DNA, 75 bp, Homo sapiens
ctgtgcagcaggacatcaagttcttgccgttcaaggttaatccctatatcctgaagaagaacatgatcctcatga

SEQ ID NO: 390371 - DNA, 75 bp, Homo sapiens
aacgtttgaagttccaattctggatctcccagccatccagccccggctagtggcggtcagcaaaaccaaacctgc

SEQ ID NO: 390372 - DNA, 75 bp, Homo sapiens
cagctttaggcatatgtatgtgtttggagacttcaaagatgtattggacactggcccagggagagctgaatgaga

SEQ ID NO: 390373 - DNA, 95 bp, Homo sapiens
caaccgcagcagtggtggctatgaacccagaggtcgtggaggtggccgtggaggcagaggtggcatgggagatggagtttcactgtgtcagccag

SEQ ID NO: 390374 - DNA, 100 bp, Homo sapiens
atctgcatgctctgtgttggactagtgctggggttcctcatctcgtcagtgactttctttactccactggcccgcgtgaccccaactctgccgaagcagg

SEQ ID NO: 390375 - DNA, 100 bp, Homo sapiens
gggcgccctccccgccaaggcccgtgcgagcttcctcttccaggccttcttgttcttgccttgtggcaatagctttggggcttctgactgcagttcttct

SEQ ID NO: 390376 - DNA, 96 bp, Homo sapiens
caaagtaccaatatgccattgatgaatattatcggatgaagaaggaggatgcaatgcagtatgcttctgaatctaaagatactgaattggctgaag

SEQ ID NO: 390377 - DNA, 100 bp, Homo sapiens
ctccacccctggaatccctgtctgggtgcggactcggagaagccctcgagcatccccacagagcaatgttgatcccagggatgatgtatttggatatcct

SEQ ID NO: 390378 - DNA, 83 bp, Homo sapiens
cctgtcaccccgactcaacgtgagacgcaccgcccggactcaccatggtgtggacactgccagcggctgcagccgacttggaa

SEQ ID NO: 390379 - DNA, 96 bp, Homo sapiens
ggctctggtgtgttaccaagaggggattgatctgctcctgcaggttctgaaaggtgagacgtggtcttgtaacacagtggttaagaatgtgacttt

SEQ ID NO: 390380 - DNA, 100 bp, Homo sapiens
ctgaaagaaatggcataatcttaaaacttgttggaagctgaaggtgttcctgaagtatctgaaaaatatgaaattagctctgttcccacttttctgtttt

SEQ ID NO: 390381 - DNA, 100 bp, Homo sapiens
tggaaaccagctgcgctgtcctaaatgtggcgacttgtgcacacatgtagagacctttgtataggttcagatgtatgtgtgcaacaaggaggagtacgga

SEQ ID NO: 390382 - DNA, 100 bp, Homo sapiens
gtcaggttcctaatcctgagtcacctggaaaatccttccagcccatcaccatgagctgcaagattgtgtcagaattggcagagggggtcgatttgggagg

SEQ ID NO: 390383 - DNA, 100 bp, Homo sapiens
ccctccctcctgaacagcagagtcttgctgcaccacgccaaagctggcaccatcattgcccgccagggagaccaggtctcagcggcggtggcagccgagg

SEQ ID NO: 390384 - DNA, 100 bp, Homo sapiens
agaacactggatagacttcgaacatttaaacaggatgtgaaatggtctgacttcgggtttcctggaagaaatggacaggaaagtacattgtggattggct

SEQ ID NO: 390385 - DNA, 82 bp, Homo sapiens
tgcaaggagcgtgcgtgcgtctgggcaacttcctgggagctaaggctactaaaaggtagaagccacagtactcatctgcaga

SEQ ID NO: 390386 - DNA, 88 bp, Homo sapiens
gcaacgagaccgatcctcatcagctcccaatgtgcatataaacacaatagaacctgtcaatattgataagaagctcattcacacagaa

SEQ ID NO: 390387 - DNA, 51 bp, Homo sapiens
ctggaattggcaacatctctgagaggtgtgatccctcacatccacaaatct

SEQ ID NO: 390388 - DNA, 100 bp, Homo sapiens
ttcttctgtgggctgtgattttcagaggggaatgctaagaggcagactgccagattcacttacagccccagctaattccaccaaacatggaggagtacat

SEQ ID NO: 390389 - DNA, 98 bp, Homo sapiens
cccttcagaaaagctgaggaagcaggcggagaagagacaagaccaagatcactccatggatgaaatgacagctgtggtgaaaattgaaaaaggagttg

SEQ ID NO: 390390 - DNA, 75 bp, Homo sapiens
ggcagtcacctttccaggaatcaaggtcttattagtaggtaagaaacagctgctcctccacctccaccccagccc

SEQ ID NO: 390391 - DNA, 100 bp, Homo sapiens
gttcttcaggaatggagacacggcttcccccaaggaatatacaggttgtactcgtaaaacaaggatcatcgatgttgtctacaatgcatctaataacgag

SEQ ID NO: 390392 - DNA, 97 bp, Homo sapiens
aggaaagtctgtcattctggactgcacccctacgggaacccacgaccattatatgctggaatggttccttactggcacagcctccaggttggcgggc

SEQ ID NO: 390393 - DNA, 75 bp, Homo sapiens
cactaagactttctgcttaattcaggagcttagaggattcttcaaagagtgtgagggaaaacccctgatcctaaa

SEQ ID NO: 390394 - DNA, 100 bp, Homo sapiens
agcccgtctccgccgaccagcgagccggcccgctcgggccaccgcgggaaccgagcccgaggagttagccgtacataccgagcatcaaatattaaggcac

SEQ ID NO: 390395 - DNA, 98 bp, Homo sapiens
gctgagaacttggccctggtgtcttggaacagcccacagtggtggtgggcaagggcagacttgggccagcaggtaaagggagaagatgaggaagagaa

SEQ ID NO: 390396 - DNA, 100 bp, Homo sapiens
ccctctgccggtgatccctcaccagaagggggccgaaggccagagaccaggatttggctacggaggcagagcgtccgactataaatcggctcacaaggga

SEQ ID NO: 390397 - DNA, 100 bp, Homo sapiens
cagggatcttgagagtgaagatctcgaaggatttcataggaagaggagcaggacttggatggtgagaaggggccatcatcggaagggcctgaggaggagg

SEQ ID NO: 390398 - DNA, 81 bp, Homo sapiens
aaaattatccctactacaggactgcggacaagggctggcagcgccgtgccgtccctgcagtgacaccgaggtgctcctagc

SEQ ID NO: 390399 - DNA, 80 bp, Homo sapiens
ggagggagcaccccagggccctgtggcatgaggaagctgggggcatcttctccccaggccttgtttgtatgaagtccagc

SEQ ID NO: 390400 - DNA, 98 bp, Homo sapiens
gcccggtactcacccagcaatcattgttgcctgacaaaagtcacagagaaggctcagttcttccttcctattgctatgctggaaaatgagaagaagaa

SEQ ID NO: 390401 - DNA, 51 bp, Homo sapiens
gagaaacaaagccacccagccaatgaaggaagtgagctcacaatgactcaa

SEQ ID NO: 390402 - DNA, 75 bp, Homo sapiens
tagaattgcaaataatcctggaaaagtacttggcaggcgagaagatgttccagatcgacagcgggaggaacgcgc

SEQ ID NO: 390403 - DNA, 100 bp, Homo sapiens
cctgtacctgttttatacttgcttttgcttcagcgttctgtggttgtcaacaggaggcgtggctgctgaaccgggaacaggagctgagggaagaaatccg

SEQ ID NO: 390404 - DNA, 102 bp, Homo sapiens
cttcaagctattttggaagacatccaggtcacccttttcacaagggcaagaagtacaagcccctggacctgcggcctaagaagacacgtgccatgcgccgcc

SEQ ID NO: 390405 - DNA, 73 bp, Homo sapiens
agcgacaagtggaggcgccgctctagcggccgggactctgaactatggcgggctgacaggacaactggatcag

SEQ ID NO: 390406 - DNA, 75 bp, Homo sapiens
ggctgagcttgcaagaggatcaacatgcctgaggaaaagctgaccagcaagaagaacgtcggagacaaaagcaga

SEQ ID NO: 390407 - DNA, 76 bp, Homo sapiens
ctccttccagcttgggaacaggctacttcgaggctctgtcggtggtgagcgacgaccagtccctctttgactcagc

SEQ ID NO: 390408 - DNA, 74 bp, Homo sapiens
ttcatccctcgtcgaaaggattggattggcatctttagaatccacagaccagcatggctgccactgctgctgtg

SEQ ID NO: 390409 - DNA, 100 bp, Homo sapiens
ccctgggtcctcgctgtggggcaatccgggcttgcagacgagccatgaaccagagaatcagtcagagtgctccagtgaaacagccaccacccctggctcc

SEQ ID NO: 390410 - DNA, 109 bp, Homo sapiens
cgcggaggcggcagcacctgggagcgacgggcggcccaggcgcgcagctgggcgcctccttcctgcaggccagcaaatggttatgagccttagagtttctgaactccaa

SEQ ID NO: 390411 - DNA, 82 bp, Homo sapiens
aagagaaaggaggcttatgagagagaaaaaaaagtgtgggaagagcatgacccatgccccctttgtgatgaagccaaggaag

SEQ ID NO: 390412 - DNA, 82 bp, Homo sapiens
ggaagcagccgatccagcctgcggagcctgtggggcagcccaagaagatgaaaggattgttcttgttgacaacaaatgtaag

SEQ ID NO: 390413 - DNA, 100 bp, Homo sapiens
cagtgcccaacaagaaggggaccagcaaagagattgttctgaagaccgtgctctaagggcatttgaaagactgccaggtagtgcgagcctgagatggtct

SEQ ID NO: 390414 - DNA, 50 bp, Homo sapiens
acagcttcagttaatgaaaatgggctagccctacctgaacccatccttcc

SEQ ID NO: 390415 - DNA, 90 bp, Homo sapiens
ccgagagcgcgaatatcgtcatcgttagaaggtgctgctagctgaggaggggatagctcctctttcttctgcaggaccagggaaagagga

SEQ ID NO: 390416 - DNA, 100 bp, Homo sapiens
actacaggactgcggacaagggctggcaggtgctggagaatctggtaaaagcaccattgtgaagcagatgaggatcctgcatgttaatgggtttaatgga

SEQ ID NO: 390417 - DNA, 100 bp, Homo sapiens
acggcagggagtgcatcaaaggtgtgaacacaggttcgccaagcagcttttcagtctctgggacctttcatatctacttttgctaatccatctagctcag

SEQ ID NO: 390418 - DNA, 100 bp, Homo sapiens
gcctagcagctcgggcaaggatggtggaggcgagaacactgaggaggcgaacagctgcttggagaactacaagtgaagaaaagaaagcattagatcaggc

SEQ ID NO: 390419 - DNA, 100 bp, Homo sapiens
tcaggagggcagcagtagaatcacttgggttcattctattcaggtctgctcaccaggtggccagataccgcccacgtgcccccatcattgctgtgacccg

SEQ ID NO: 390420 - DNA, 100 bp, Homo sapiens
ctcgatgatgccctctcctgcaagccactcgctgacggtatgagaaagtgccagtcatcttggttgggaacaaagtggacctggaaagtgagagagaagt

SEQ ID NO: 390421 - DNA, 83 bp, Homo sapiens
gctaatattggaacaagcgttcagaagcgcagttgtgtagcagttgagtaatgctggttagctgttaaggtggcgtgttgcag

SEQ ID NO: 390422 - DNA, 90 bp, Homo sapiens
cccataattcagaacttctgccacgtgcccctgggcgctgggattgctctagcctgtaagtataatggaaaagatgaggtctgcctgact

SEQ ID NO: 390423 - DNA, 100 bp, Homo sapiens
gatgggcaacgcatgggccccctgtctgtggtcatcgtgacgggcctagttccccgagagcgttcagacagtgggggctcaagctcagagccatttgacc

SEQ ID NO: 390424 - DNA, 74 bp, Homo sapiens
gctcctgcagctcgtcagcccatttctgggggaggctgagaagacaaaactccttatagctgcacagaaacaaa

SEQ ID NO: 390425 - DNA, 93 bp, Homo sapiens
cggctctgtaggaaggaacttggttccccctccctcagcttccgccccaaaagggaggtggggaagacagggctccagctaccacaggacggg

SEQ ID NO: 390426 - DNA, 83 bp, Homo sapiens
ggctcccattgctccggcgcgttctcaagggcttgcagctgacctgcctagagctggaacgttacctccagagcgagccctgc

SEQ ID NO: 390427 - DNA, 100 bp, Homo sapiens
gaaatgtaccgtccagcgagttgcagatctacacttgggtaaagttctttacaaagttcgctggaaaggctatacatcggatgatgatacctgggagccc

SEQ ID NO: 390428 - DNA, 100 bp, Homo sapiens
ctgccctggggcagctgaactgagcgtatgtgccacgccgcccaggagacccctctgctgcaccacttcatgtctcgcccaagaacttcaaggtgaaaat

SEQ ID NO: 390429 - DNA, 75 bp, Homo sapiens
tgacaatctcctcagggaaggggcagcacatgccggtggtggtgtgcacattgagccccggtatagacagttccc

SEQ ID NO: 390430 - DNA, 78 bp, Homo sapiens
cttaggagggcaggaagagctgcagtctttgtgggacaaggctcagctgtcgcaggccctggaggagctgggaggcca

SEQ ID NO: 390431 - DNA, 100 bp, Homo sapiens
tgaaaattccttatggatctctgagaaggcgcagcgttgaaaggctctttcgacgtgtagcagcagctttgccgggaatggaaagcacacaggacagaag

SEQ ID NO: 390432 - DNA, 98 bp, Homo sapiens
cggaggcggcggcggcgagcggttccttgtgggctaggcattttggagatcaaagatgggtagaaaagatgctgctactataaaacttcctgttgatc

SEQ ID NO: 390433 - DNA, 83 bp, Homo sapiens
ctcagttggaagcagccgatccagcctgcggagcctgtggggcagccagcaatacaggaatgcacaggaggcaaatcactgac

SEQ ID NO: 390434 - DNA, 100 bp, Homo sapiens
cgagtttccgatttaaagctgagctgcgaggaaaatggcggcgggaggtgtgtatgagtgagaaattctgcagcaccctgaggaagaaagttaacgatat

SEQ ID NO: 390435 - DNA, 90 bp, Homo sapiens
gccggcggctgggactgaagagggacgggtcccgcggcgagcgagctcctgaggtacggcgtcggggtgaaaagaacggaggggagcccg

SEQ ID NO: 390436 - DNA, 100 bp, Homo sapiens
ctccctgtatgcatggtgtggggttggtgtgattagcttcgcagtctggaaagctttaggagttcacagtgtttctgacgtagaagagcttacccctcca

SEQ ID NO: 390437 - DNA, 75 bp, Homo sapiens
atagatgcttctaaatctgttgatgaagatctagtttgaagcactaagaagaataagacatcagtttgaaaagag

SEQ ID NO: 390438 - DNA, 83 bp, Homo sapiens
ctccaggtggccatcaaagtgattccccggaatcgtgtgctgggctggtcccccttgacaggggcaagtgtccgagtggtgaa

SEQ ID NO: 390439 - DNA, 83 bp, Homo sapiens
gattccacccaaatcctcttctccaagaaggtacctagtcgatagtcgctggttcaaacagtggaaaaaatatgttggctttg

SEQ ID NO: 390440 - DNA, 73 bp, Homo sapiens
cgcaccatggaggaggacgacagctacgatggcccactgcgtgaccttggttcagctgtccatttcctgtgac

SEQ ID NO: 390441 - DNA, 100 bp, Homo sapiens
ggatgtggtgctgcccgagaaggtggacgtgctggtgtctgagtggatggggacctgcctgctgaggctgggaggcggcagaatgcagccagaggagggc

SEQ ID NO: 390442 - DNA, 83 bp, Homo sapiens
tagactttcagcctgacactgtggccaacattcagcagcgtcagaagagccttgcaaaggaccatcgcatgaaacttatgcaa

SEQ ID NO: 390443 - DNA, 83 bp, Homo sapiens
ctgcgcatgcggtctcggggagaggctactctacaatgcagatcttcgtgaagactctgactggtaagaccatcaccctcgag

SEQ ID NO: 390444 - DNA, 100 bp, Homo sapiens
aaagaaatgagcagctttggataatgacgacagcaacccgaagacagggaaatttaggtcgccatgggctactcacactccttggtgatagcaagagatg

SEQ ID NO: 390445 - DNA, 83 bp, Homo sapiens
acaagctaaagacgggccattttccagacctcatccagaaggaagaggcccagcagaagggactcgctgagccaccccccgcc

SEQ ID NO: 390446 - DNA, 75 bp, Homo sapiens
accaccatttcaaattttcacactcaggttggacgtgataagtatgagcctgcagctgtttcagaacaaggtgat

SEQ ID NO: 390447 - DNA, 50 bp, Homo sapiens
tgagcctcaagtgcttctgcattacagcaaatactgtggtctggggttgc

SEQ ID NO: 390448 - DNA, 100 bp, Homo sapiens
aacaagttaaagcacaactcccaagagttcttggagtctctgcggagtccctgggccagatctcacagtgaaagctgcaggatcttccttctgaccccag

SEQ ID NO: 390449 - DNA, 100 bp, Homo sapiens
gtactaccggccaactgaagtggtgtggcggggcgccctgctcctggcagactacatcctgttccgacaggacctcttccgaggatgtacagcgctggag

SEQ ID NO: 390450 - DNA, 88 bp, Homo sapiens
caagtctgccctggtgcaccggtacctgacgggcacatatgtccaggaggagtctccggaaggacctaaagggagcatcgttaccgac

SEQ ID NO: 390451 - DNA, 83 bp, Homo sapiens
gccgctggcagccgcggatctcaccgccgctcagggagggccctcctggacccgggagcggaccctggtggcggtgaagcccg

SEQ ID NO: 390452 - DNA, 100 bp, Homo sapiens
aaccctttcctgtatgccatctgttttctgtggggccctgagtgatgaggagaggaacaaggattcatggaagtgaggtgccttagctggaccaattatt

SEQ ID NO: 390453 - DNA, 75 bp, Homo sapiens
gccatggcaaaaagctaccacctgccagtctgaagcaccgagatgggtgggttaggagtacagaagatgctgtgg

SEQ ID NO: 390454 - DNA, 73 bp, Homo sapiens
cccttctccaaggagcagctgctccgcctcctaatacaggtacaccaggggttggaaaaaccacactaggcaa

SEQ ID NO: 390455 - DNA, 75 bp, Homo sapiens
tcttaccttgtgtttgatgaagcagatcgaatgtttgacatgggatttgggtggtgtaccatgagctggtgctca

SEQ ID NO: 390456 - DNA, 85 bp, Homo sapiens
cggctgaagcgcgtgcgcatgcgcatggatttaggagaatgtaccaaaatccacgacttggccctccgagcagattatgagattg

SEQ ID NO: 390457 - DNA, 80 bp, Homo sapiens
tgtcttaacctctggtggagatgcccaagagtccccagggagacacttaagggaaattaaactgcagagtgcaagagatg

SEQ ID NO: 390458 - DNA, 83 bp, Homo sapiens
ctgggttacaagcagcaagtgcgcggttggggccactgcgaggccgttttagagctctgagctcttcaccctgacctatggtg

SEQ ID NO: 390459 - DNA, 98 bp, Homo sapiens
gattcgcgctgctgggcacccacggagcctccggggctggggcaagattcttgccaagagaattaatgtgcgtattgagcacattaagcactctaaga

SEQ ID NO: 390460 - DNA, 100 bp, Homo sapiens
tggctcgcttctggcaaataccgatttgctcgaatatttgggtacccagtaggtatcgttggaaacaacggagttctcttttctgaatctgcaaaaaagg

SEQ ID NO: 390461 - DNA, 75 bp, Homo sapiens
acaaaatctgtccagtcaaagtgattttcttcaagagccgttacagtcctacaagattatcaattttgcccccag

SEQ ID NO: 390462 - DNA, 83 bp, Homo sapiens
gtcggaaagagtgcatctgtagatgctgaaaaatcaatgctgtccaaacttaaacatgagatacaatcttgcttgaccgtttg

SEQ ID NO: 390463 - DNA, 92 bp, Homo sapiens
cgcgtccagctcgcccagctcgcccagcgtccgccgcgcctcggccaaggggcatggtctagtggcccagtcaggacgcggaaacactccct

SEQ ID NO: 390464 - DNA, 82 bp, Homo sapiens
ttcgatgacctccagagcctcccaaacgacgtggtaagaactcagggccctatcctcacagcaagtggcaaaaaccctgtaa

SEQ ID NO: 390465 - DNA, 100 bp, Homo sapiens
tgactcctttgacgacgttgaccgcacactggatgaatggaagcactttggcttcatgtttgaaagctcgccgggcggcaatctcggctgggaacccgac

SEQ ID NO: 390466 - DNA, 97 bp, Homo sapiens
tctgattccagatatgatgatggaagagggcgttacatagccatgtgccgcgagaagcagcccatggtgccagagtctctggctgactacatcacag

SEQ ID NO: 390467 - DNA, 100 bp, Homo sapiens
ggcgggtcctcctgggagtctcggaggggaccggctgtgcaggtggcatggaatattcacatgggagagccgcatgaggccgcccaccacgcttcctgaa

SEQ ID NO: 390468 - DNA, 51 bp, Homo sapiens
ccaagctcggatccctgaatttgatccagccttgaaaagatcttttgaggt

SEQ ID NO: 390469 - DNA, 83 bp, Homo sapiens
aaaacaccagatgatgaccctgagcaaggaaaatctgagggctgactgtgctgtcctgattgttgctgctggtgttggtgaat

SEQ ID NO: 390470 - DNA, 75 bp, Homo sapiens
aggagagctccgtggagagaagagtgcctggtgaagaatgtgatgggatcactagcatgtctgcggagagcggcc

SEQ ID NO: 390471 - DNA, 100 bp, Homo sapiens
tctgtgaaccaacttttcaagaaaaagcaatggagattggatggatgcacaatcggagacaaagaaataagcgggttttgaaaacaaaaaaaagaaggag

SEQ ID NO: 390472 - DNA, 74 bp, Homo sapiens
tggacctgaaacagaaattctggaacacctatatgactacatgaggaaataattgacttttataacttcatgtc

SEQ ID NO: 390473 - DNA, 75 bp, Homo sapiens
cggaggcggaagcaggactcggggcacttggatttccttgatagctgccgtgccagtactctattggctgagctc

SEQ ID NO: 390474 - DNA, 124 bp, Homo sapiens
cggacgtgggcgaggggcggggtgtctggactggaacctctgggcccacgtacaggtttgcagattccgccagcagcacagcaagctctacagatgagtggctctttggcatttggtgctgtgg

SEQ ID NO: 390475 - DNA, 100 bp, Homo sapiens
agtagaaaaagttcttgggacaaacttcatttggatcaactcactatcctgaaggtccattctcccaagaagaggggacagaaagacagatctatttgta

SEQ ID NO: 390476 - DNA, 78 bp, Homo sapiens
caacaaaatcgagcaagctatggacttggtgaagtcccacctcatgtttgcggtccgggaggaggtggaggtgctgaa

SEQ ID NO: 390477 - DNA, 75 bp, Homo sapiens
cacataacagtgagattcataggaccaaagcatggggagggtcccctcctcggccgccccccgcccggccgcccg

SEQ ID NO: 390478 - DNA, 100 bp, Homo sapiens
ggtggtgttgatcactcctcaggtgtccagcctgctcagcactggatgtgtgtgagaagtggggagaaatgccaccactacaacccaaacatatgaggga

SEQ ID NO: 390479 - DNA, 90 bp, Homo sapiens
ccgggttcgccgagccgcaggagagacacgctgggccgaccccagagaggcgctggacagatgccatggacaatattaccaggcagaacc

SEQ ID NO: 390480 - DNA, 100 bp, Homo sapiens
ttgttcaagataaagtgattttttgcctttgttgattaactggacaaattcagtgcctgaagacctctcattagaagagagagaagaacttctagacatt

SEQ ID NO: 390481 - DNA, 75 bp, Homo sapiens
tgagtttgtcacctggctcgatggcattaagctacttcacccccctcaacaccccacagagctatgaaaccctgg

SEQ ID NO: 390482 - DNA, 100 bp, Homo sapiens
gtgatgttggagaactacaggaacctgctttctctcgatgaggataacatccctccagaagatggcgcaaatatcctgcgagattcaacaggcaacgtca

SEQ ID NO: 390483 - DNA, 100 bp, Homo sapiens
caggatgggagggctcagggtgtgcgttcccctctgctgaggcagagctccagtgaacagtgcaggttctgccctgatgtttcctggaataatgctgagg

SEQ ID NO: 390484 - DNA, 95 bp, Homo sapiens
ccaagctcctggccctggccctgatcatcctgctgggcttcgtccagatcgggaaggtaagactttgaccccgacgcaggcttcagtgattgccg

SEQ ID NO: 390485 - DNA, 88 bp, Homo sapiens
ttttttttttttaggtaccagcatcaagatgatttatggtaataagcaggggaaatgctgtctgtagctgagcacttcctggagcagc

SEQ ID NO: 390486 - DNA, 82 bp, Homo sapiens
atggaagtgaaccaagcattcctcaggaaacagagcaaatgcagcgttacaatcaaagacttattgaggaattgaaaaacag

SEQ ID NO: 390487 - DNA, 98 bp, Homo sapiens
ggcggcggccgaggaggaggagggggaagcggcggcggcaaaggggagcgcttgtgagtgccttggctgatgacaccttacacttatggaatttacgt

SEQ ID NO: 390488 - DNA, 89 bp, Homo sapiens
ggatggtttcaagggacgtgctgggaggatggtgccgagctctggcttatcaggactccatagttctccaacagagaaatcttgaaaag

SEQ ID NO: 390489 - DNA, 120 bp, Homo sapiens
tacctcagcggcttcttgtcctccttcctcatgaagcccatcaacaagtgcattgggaggaacgtgaaatgacaatggatgctctgttggctcgattgaaacttctgaatccagatgacc

SEQ ID NO: 390490 - DNA, 100 bp, Homo sapiens
atgcgccggatggatcctgtgctttccgagcccgtctatgacaagatccagaagcactggaaatccatggatcattcacatggcttggacaaacacagta

SEQ ID NO: 390491 - DNA, 82 bp, Homo sapiens
gggcctgcagcgggagctggacggcgagcgcgagcggcgcgagaaatctatccttcactggagtctgatgatgatgaccctg

SEQ ID NO: 390492 - DNA, 88 bp, Homo sapiens
aaaaaggaagaattgacccttgaaggaatcaaacagttttatattaatgttgagagagaggtaaactttcctgagaatggctttctct

SEQ ID NO: 390493 - DNA, 83 bp, Homo sapiens
cgtcgtgatccagaagtccagagctgaggactgcctgtttgcaggttgctccgactgtgtgttccaggagtggtggctctgag

SEQ ID NO: 390494 - DNA, 100 bp, Homo sapiens
gtggacatcaagccggataagtgtccccgtagagtcaaccgaagccttgtactacacagatgacacagccatggccagggccctggtgcagtccctgcta

SEQ ID NO: 390495 - DNA, 75 bp, Homo sapiens
gcccgcggcgaccaagatcaggaacctgccctgggattaatgaaaatcaagttccatcctcagacaagaggtaaa

SEQ ID NO: 390496 - DNA, 82 bp, Homo sapiens
cttgcgcctgcctctccaggatgtctacaaaattggtgatgctgagatgaatcgtcacctgtgtgtttggctttttagacat

SEQ ID NO: 390497 - DNA, 101 bp, Homo sapiens
ggctgcggttcgaagtggctgtgggtattgctgcggctggtgcgtcgtcgctctaggtgcagcggaactgctgcctgacgctctgcaacttcagcatcccc

SEQ ID NO: 390498 - DNA, 100 bp, Homo sapiens
tgggtcctcgctgtggggcaatccgggcttgcagacgagcaaacggggattcagcgtccgatcctttggaacagggactcacgtgaagcttccaggacca

SEQ ID NO: 390499 - DNA, 82 bp, Homo sapiens
ctcagacgtggataaagataatcccggtgaccctggcaaagatgagagtgcacatttcgtcctgcctgaaggtccaggagca

SEQ ID NO: 390500 - DNA, 75 bp, Homo sapiens
gaggactcagaggaactggcagctcagctgcaggtaagaatgattgatgttggctgatattggagtgctcattca

SEQ ID NO: 390501 - DNA, 75 bp, Homo sapiens
ccctcacagtttgctctgctcttccaacaccagtggaagatgatcacatcccagagtttcactcttgttgcccag

SEQ ID NO: 390502 - DNA, 99 bp, Homo sapiens
caaggaacgggtcggctacagggagggacccaccgtagagactaagagcagcccgacggccatggaggctgaagagacgatggaatgccttcaggagtt

SEQ ID NO: 390503 - DNA, 95 bp, Homo sapiens
ggcatctgcggccatggcggcgactactgccaaccccgaatgaagaagcagtacgacgtctcatctgggaaaagaatctaaagtttgtgatgctt

SEQ ID NO: 390504 - DNA, 82 bp, Homo sapiens
ccggcacctgcacacctggatccaggataacggaggctggattcccaacttcttctggagcctggggatcggtcacactggt

SEQ ID NO: 390505 - DNA, 90 bp, Homo sapiens
ccagcagtggtggtaacacttcccctgccagctgccagagtctctcctggaggcggatcttagctttctgtctctggaagttcctactcc

SEQ ID NO: 390506 - DNA, 74 bp, Homo sapiens
cttggacaacatgtcccaacattacatcccaaatgcagtaatagtggccttgtcttcaaaatcatgggatgtag

SEQ ID NO: 390507 - DNA, 51 bp, Homo sapiens
aagcctttctgctccaggtcaagggaactctaatgatccaggacaaagaag

SEQ ID NO: 390508 - DNA, 90 bp, Homo sapiens
cattttgatcatgcctagtcacaggaaaaccagtagattcccagacatcgcgaagtgaatctgaaattgtgccaaaagttgctaaaatga

SEQ ID NO: 390509 - DNA, 100 bp, Homo sapiens
tcctgatgtttctcagtgccattgtgatgatgaagaaccgcagatccagttggtttgttggaccttgaactcaatcggctgacgaaagcgctatttttgg

SEQ ID NO: 390510 - DNA, 82 bp, Homo sapiens
gacggtccacatcagccggcagcccgggcgggtcccggggtgcgagcagcgcacttccggagcggaaagaatgtcggagcgg

SEQ ID NO: 390511 - DNA, 75 bp, Homo sapiens
cgtgccgccttcccaggaccctcagggagagcgggcagccttccaggtggacagccacaatggtgcgcatgaatg

SEQ ID NO: 390512 - DNA, 100 bp, Homo sapiens
tgataactctggacttctcaaaggattctcaaagttggattggtggaaacaatgaaccattgacaggctttacatggcgaggtggctgtgaaagagaaac

SEQ ID NO: 390513 - DNA, 83 bp, Homo sapiens
ggaggaatcctgatactgagcggaagaggagatcccagaactggagattgacgtggatgagctcctggacatggagagtgacg

SEQ ID NO: 390514 - DNA, 75 bp, Homo sapiens
taacaatttacgcgccgtgtaactgtgaatctttcaaagagttgatctctctaatgtattagatcttcatgcctt

SEQ ID NO: 390515 - DNA, 75 bp, Homo sapiens
gccaccagtaccaggagcaccaggaatgcctccagtgagaagcgccaccttcaagtgaacgtcaccaacccagta

SEQ ID NO: 390516 - DNA, 75 bp, Homo sapiens
ttttaattcccactctagattctggtcaaatgggctctctcattcttggagtgaaaggattccagacacaaaaca

SEQ ID NO: 390517 - DNA, 74 bp, Homo sapiens
ggcggcgccgggtggtggttaaaccatgttaaggaggattttacagaggtctacgcctgcaagctctcagaccg

SEQ ID NO: 390518 - DNA, 98 bp, Homo sapiens
tcctgtttttaggagatacttaaataagattttaattgaagctggaaagcttggacttgtaccattgttggatactggtgacatcatcattgacggag

SEQ ID NO: 390519 - DNA, 74 bp, Homo sapiens
gtggacagatctgagagatactgagcgggagatacagatgacccaccaagaattactcagaaccctgtgatcaa

SEQ ID NO: 390520 - DNA, 101 bp, Homo sapiens
gaacgcgcctgctcccctcgtcgcagtttccagcccgacgagcttgttttgtcccggactcggctatggtgaactaaacggtaatgctggagaaagagaaa

SEQ ID NO: 390521 - DNA, 50 bp, Homo sapiens
cgcccccaaagaccagctctaacggtaacaagatgctcaactatagtgct

SEQ ID NO: 390522 - DNA, 74 bp, Homo sapiens
gcaggccaaggcctgctgggcccccgcggacccagggttgatccattttctaagaaagattggtatgatgtgaa

SEQ ID NO: 390523 - DNA, 82 bp, Homo sapiens
ccacgtccgagacctggagcagccaccgccgcaatcatgctttgacagatccaaatgcttctgctgcccagcaggctgttct

SEQ ID NO: 390524 - DNA, 98 bp, Homo sapiens
cagaaataagccgttttttgacatctgtacttcaagaaagtgcatgcaagatatgggaaatactaaagcaagactactctatgaagccaatcttccag

SEQ ID NO: 390525 - DNA, 100 bp, Homo sapiens
ggtgcgcgggcgaggacagcggcagcgatggtctgtttatgatggtgaagaacatggacgtttcatggagaagcttgaaactcgtatccgtaatcacgac

SEQ ID NO: 390526 - DNA, 98 bp, Homo sapiens
aggagtggactagggtcgccggggaagcgggaagaattttaaatcgtttctccaaagacattggacacttggatgatttgctgccgctgacgttttta

SEQ ID NO: 390527 - DNA, 100 bp, Homo sapiens
gacaggacgaagccggagtgtaggcggcagaggattcgctcccagagcagctgcggccaggtaagaatgattgatgttggctgatattggagtgctcatt

SEQ ID NO: 390528 - DNA, 75 bp, Homo sapiens
cagacttgtcgcacggatgcagaaaacttaatggaggaggctgagcgaagctgccgcccatgctgtcgccaccct

SEQ ID NO: 390529 - DNA, 88 bp, Homo sapiens
gccatcttccagagtcactgtggatagatccaccattgcaagacatttgctcaggtgtagaatgagccaaggagactcaaacccagca

SEQ ID NO: 390530 - DNA, 75 bp, Homo sapiens
ttcagatagtaagaaagtatacgcctcttcgggtctgggaggggctgaacgtggtgaagacaggccgagtgatgc

SEQ ID NO: 390531 - DNA, 89 bp, Homo sapiens
cgaaaaaataagaaggaacccaaagaaccatctcccaaacaggatggctattactcgtggaggagcccaggaagaggctcctggtttgt

SEQ ID NO: 390532 - DNA, 75 bp, Homo sapiens
cttggccaggctggccccgagcggaactggagaaagctgaggtttcctccagcttatggaggcatatctgaggtg

SEQ ID NO: 390533 - DNA, 95 bp, Homo sapiens
gcggtctgggccttttgggcagcttttccggcctgacaacttcatctttgatatgaggccccaggattcctggcgaggtcctcctccccttttcc

SEQ ID NO: 390534 - DNA, 107 bp, Homo sapiens
ggggagacaagttcatccccattttccaaggggacgacagcgtcgttattggggagctaggggaagggggttgtttgccttcttcaggacctgactggacagatgga

SEQ ID NO: 390535 - DNA, 96 bp, Homo sapiens
aggcgcggggagccaggcctgggccccgggtccccaagacccttgtgctcgttgtcgccgcggtcctgctgttggcatatgttgaaacaattagac

SEQ ID NO: 390536 - DNA, 82 bp, Homo sapiens
aaggtggcctaccaggaggccaggggtgtcgccatgctcagattccaaatgaaaatgtttgagagcgctgactctacagcca

SEQ ID NO: 390537 - DNA, 100 bp, Homo sapiens
gccctttcctccccttgcctcccagcctgacctggctctttcgcccctcggagaaccgaatgctgcgtttttatatggccttggtttggtctacttctac

SEQ ID NO: 390538 - DNA, 75 bp, Homo sapiens
gagtgggcgcggaggcgaccgccatggcgttcctcaaactccgtgaccagggattatgatcaagaacagtttgct

SEQ ID NO: 390539 - DNA, 74 bp, Homo sapiens
aatgatccttactaaccacgaccatcaaatccgtgtcggagtccttacagctgtgaaagttgtgtagatttact

SEQ ID NO: 390540 - DNA, 75 bp, Homo sapiens
gatgcgtcacactacgacagtgagaaaggaggctgacttcaaaatttctgaggagtgcatcgcacagtggaagca

SEQ ID NO: 390541 - DNA, 82 bp, Homo sapiens
gcggcttccaggcgcactaccgcgcgagggcggcactgctcacaggacggctacccatccgcaatggcttctacaccaccaa

SEQ ID NO: 390542 - DNA, 90 bp, Homo sapiens
ttattgtattcgtggaagctcagagtgtgaccaactggaaccctcaagaggaccgagaacatgaacgattggatgcccatcgccaaggag

SEQ ID NO: 390543 - DNA, 82 bp, Homo sapiens
ctgaggacttaaatgaagccactgattagcaatttaaagatcctctccaagttaattggccttggtcctcacagctccaaaa

SEQ ID NO: 390544 - DNA, 87 bp, Homo sapiens
agaacctgcaattacatcgcagaacagccctgaggcaagagaagaaagacattgtatgcaaacctgttccattctttcttcgtggac

SEQ ID NO: 390545 - DNA, 100 bp, Homo sapiens
ttcgacattgctgaggagctggtcaagaccatggacctccccaagggcctgcaggaggagaaggcagagcccccccaggctatgaatgccctgatgcggt

SEQ ID NO: 390546 - DNA, 74 bp, Homo sapiens
agcaatgagcttgtgttccaggtgaagcttgtggctgaggacctctcccaggactgcttctggacaaaggtgaa

SEQ ID NO: 390547 - DNA, 60 bp, Homo sapiens
atttaaccgagttacttaatggcatggatgaaggtttgatgaacttgtgaaaaaattcaa

SEQ ID NO: 390548 - DNA, 50 bp, Homo sapiens
ggaagagctgcagtctttgtgggacaaggagcagcaggaggaggtgagga

SEQ ID NO: 390549 - DNA, 88 bp, Homo sapiens
aaagatacattgaactcttcaggagcacagcagctgaagttcagcaggattttgcctaccattttacagtatttgtcttctattttgg

SEQ ID NO: 390550 - DNA, 50 bp, Homo sapiens
gagctgcagtcccagctcatcatgaaagctgggctggagaactcactggc

SEQ ID NO: 390551 - DNA, 100 bp, Homo sapiens
acaaattaagtactgcttacaattgtgaacacagcaggtgtgagatgtcatcttggaagacaggccttgcagaaataggcctacatccaaaatattatct

SEQ ID NO: 390552 - DNA, 101 bp, Homo sapiens
ctgtgccagcgttgcggctcccgggtgctgcagccagggaccgctctcttctctcgccgacaggccatgttttatggatgagtatgagaagactgaggaag

SEQ ID NO: 390553 - DNA, 48 bp, Homo sapiens
gtcccggaagaccacgtacacctcagggcgtctctggccgagcctctt

SEQ ID NO: 390554 - DNA, 74 bp, Homo sapiens
ccgatccagcctgcggagcctgtggggcaggcatacccagagtatcttatcacttaccagatcatgaagccaga

SEQ ID NO: 390555 - DNA, 83 bp, Homo sapiens
caccatgtcagacgcagccgtagacaccagctccgaaatcaccaccaaggttgtggcagcactgcctgaaggtatgagaccag

SEQ ID NO: 390556 - DNA, 98 bp, Homo sapiens
agcaacatgctcctagcagaagcctatggatctggaggtgggctgggggccctgactggacctggcctggccagcttactggggagcagtgggcctcc

SEQ ID NO: 390557 - DNA, 75 bp, Homo sapiens
aatgtacttctttttagtacattggacagcatttgctttaaagaaagtgtttgctgaaaataaagaaatccagaa

SEQ ID NO: 390558 - DNA, 83 bp, Homo sapiens
caagtgcgaatgttaaatcagctggagaaggagaagtggagaagaaatcagtcagccgcagacaatgcagatcttcgtgaaga

SEQ ID NO: 390559 - DNA, 90 bp, Homo sapiens
ccgtgtgccagcaacagagctgggtccgggtgtacgggtctcttgcaacgtgtgagctgcctcttgccaagagtgagtggcaaaagaaac

SEQ ID NO: 390560 - DNA, 87 bp, Homo sapiens
tcctggtatgagtttggagccagagagaagacccaggaccaaaatgtgaccccagttattaaagcttttggcatcttgaagcgagcg

SEQ ID NO: 390561 - DNA, 75 bp, Homo sapiens
agattcgcagtggtcgcttcttctccttgcatgcaatgatgctacctgttctgacccatcatatccgctaccacc

SEQ ID NO: 390562 - DNA, 100 bp, Homo sapiens
gtgcttctgcccccagagaaggtgcaggcaggcgccgtgaggaacacgcagcatctctgggagtacctgcagatgaaatggcccctcctcgatgtcccct

SEQ ID NO: 390563 - DNA, 82 bp, Homo sapiens
gaagagacgtcgggcccagggggaacaggcacgagctgaactcttggatgactttgacaacgatgtggatgctctgctggaa

SEQ ID NO: 390564 - DNA, 83 bp, Homo sapiens
tctgcttcactcctagttaccagaaaggtggaatctggatgagtggaggaagaaatgttggctatttggcgatgagaggtggt

SEQ ID NO: 390565 - DNA, 107 bp, Homo sapiens
cgccaggcaaggggcttgggagcccggaccccgccccctgcggcccagcgcccccagatattgatgatgttaagaagttcaaaccgggttacctggaagctactctt

SEQ ID NO: 390566 - DNA, 75 bp, Homo sapiens
gccttttgccacctttccctttatttccggagctgcctgtggaggaaccgattgtgtccacagatgaggtcatct

SEQ ID NO: 390567 - DNA, 101 bp, Homo sapiens
agcagcgggatttggcctggggatggagcaaagtgaccccctgctgtagagcaagggggaaaaaaatagtggctttgatgtcctctaccataatatgaaac

SEQ ID NO: 390568 - DNA, 75 bp, Homo sapiens
attgaaaactccttggatgctggtgccacaagcgtagatgttaaactgggtctcactctctgacctcagctggag

SEQ ID NO: 390569 - DNA, 100 bp, Homo sapiens
accctactggctggttgccaactcctggaacactgactggggtgacaatggcgaggccccttccaaaacacttgttgagacagccaaggaagccaaggag

SEQ ID NO: 390570 - DNA, 102 bp, Homo sapiens
tctgggaccttctccctgcctggacccctactattgcaacaaggaatttagataatgggctgtgtgcaatgtaaggataaagaagcaacaaaactgacggag

SEQ ID NO: 390571 - DNA, 98 bp, Homo sapiens
ttaatccggcagtgaccgtgtgtcagaacaatcttgaatcatgaagctactaaccagagccggctctttctcgggccctgaaaaaaactctcttcctg

SEQ ID NO: 390572 - DNA, 128 bp, Homo sapiens
gtagaaatgagaatgacagctgtgataaaaaaaaaattcatctgggcggtatctggaacttggtcacatatcctggagcaggaaaacttccacacatcattggaggatcagatctaatagctcatcat

SEQ ID NO: 390573 - DNA, 75 bp, Homo sapiens
ccagatggtggaggaatacacttatttatgaacgtgttcctgccatccagtaggatcagctgtccttcctgccaa

SEQ ID NO: 390574 - DNA, 75 bp, Homo sapiens
caaatatcaatggagctagcaaaagtggcccaatgtaaaggctgttgctactgctgtggaacagatttacccatt

SEQ ID NO: 390575 - DNA, 50 bp, Homo sapiens
ccgatcccgacctggactcagacaagatctctgttgaggagctggcgcgg

SEQ ID NO: 390576 - DNA, 100 bp, Homo sapiens
cggatacatcaggagactcttagaagactggaaagcagattttttgaagaaaagcttgaacaggaattggagctatctcgaaggttattgaatcaatcag

SEQ ID NO: 390577 - DNA, 83 bp, Homo sapiens
gaaaaagcagaaagtagatgaagatgagattcagaagatgcagaagctgcagtaaaggaagatgaagaagaagtttcagataa

SEQ ID NO: 390578 - DNA, 75 bp, Homo sapiens
gtttgttctgggcgaatggcagcccatcgagatggccaaaaaggctttgaaatctgagtccgctgcctcaagtac

SEQ ID NO: 390579 - DNA, 98 bp, Homo sapiens
gtgaattcctggtgaaggaggtgaccaagctgattgacaacaacaagactgaggaaggtgtcttgctgcaggtaactaatgaagaagtggtcaaccac

SEQ ID NO: 390580 - DNA, 75 bp, Homo sapiens
ttcatagtgggacagcattaccgacaagcaaggcatctaataggattcaggaatcaaagaatcagtgtactcagg

SEQ ID NO: 390581 - DNA, 97 bp, Homo sapiens
gagcctcaggctttaggaactgaagaggcatgaatgctttacagttgcagaacctggcgacgctggctgctgctgcagctgcggcccagacctcagc

SEQ ID NO: 390582 - DNA, 98 bp, Homo sapiens
agcggagccggccgtacgcggtgctgcgagggcagaacctggatgcttttactgactctgctatcagtgctaaagtgaatggcgaacacaaagagaag

SEQ ID NO: 390583 - DNA, 97 bp, Homo sapiens
aagaaggtctgcccaggactcagatatcatttgaggatgtggctgtggatttcacgctggaggaatggcagctacttaatcctactcagaagaactt

SEQ ID NO: 390584 - DNA, 75 bp, Homo sapiens
ttagatcaaaacttaaaattgaagacataaaagaagccaacaaagcattgcagcatttaaatcaaacggtattga

SEQ ID NO: 390585 - DNA, 98 bp, Homo sapiens
ggctctcctggagggtccaaacccccatcctcctgcatgttctctgcttgatggaccagacaaataggatgatggctgcccccacacaataaatggta

SEQ ID NO: 390586 - DNA, 89 bp, Homo sapiens
gtggcccccgccccgtcgggcctcacgaggttgtgaactaaaggccgacaaagattatcactttaaggtggataatgatgaaaatgagc

SEQ ID NO: 390587 - DNA, 83 bp, Homo sapiens
agccgatccagcctgcggagcctgtggggcagtttggtgccctggttgtcagatgttggaaagcagtaggacggaacatactc

SEQ ID NO: 390588 - DNA, 100 bp, Homo sapiens
tctctggccggccttggtgcggcgagccgagcgaggcagctctgagccgcgcgaagatgctcatgaagcagcaggaccggctggaggagcgagagcagga

SEQ ID NO: 390589 - DNA, 80 bp, Homo sapiens
cttctgttttcctgagggctacaccgttttcttttgaaagaggtcagcccaaggccaaccccactgtcactctgttcccg

SEQ ID NO: 390590 - DNA, 98 bp, Homo sapiens
tgaaatttcagacatacacaccaaattgttgagacatttaaatcaaacggtattgagatggattgggttatgaaacataatggtccaaatgacgctag

SEQ ID NO: 390591 - DNA, 90 bp, Homo sapiens
ccgccccgtgctccggggacagggctccccgcgccccgcgcagctgagcgctgccgccgccgcagcagtggtgaactatgacaatgtagt

SEQ ID NO: 390592 - DNA, 101 bp, Homo sapiens
tctctactgtgactcggggtagcatgaagaaggaagactgtatcgctaggtacaagttgctggttgaactggtccaaaagaaaaaacaagctaaaagctga

SEQ ID NO: 390593 - DNA, 138 bp, Homo sapiens
attcagaatgatgggcctgtgaccatagagctggaatcgccagctcccggcactgctacctctgacccaaagcaggcctcaggagtgcaagtagctgatgaagtatgtcgcattttttatgacatgaaagttcgtaaa

SEQ ID NO: 390594 - DNA, 100 bp, Homo sapiens
ggcggccgtgtcagtttggggcatctccgcggtccggcccggggccccgggatctcggctgtccttcctcccggtggctttaaccaagagagcagatcca

SEQ ID NO: 390595 - DNA, 100 bp, Homo sapiens
attcagatgggatctttccggatcaatccagatggcagccagtcagtggtggagatgactttgaagaagccaaggaaattttgacaaagatgagatactt

SEQ ID NO: 390596 - DNA, 98 bp, Homo sapiens
aatgtcaagagcctgattgaaccagtcaaccagtctattgttgtcagtggagagagtggtgctggaaagatgaagatctccttcaacgacaaaagcct

SEQ ID NO: 390597 - DNA, 100 bp, Homo sapiens
ccgagggcatcctgggcaccatcaactccatcgtgatggcctttttaggagttcagcgaggctctcttcttagtgagcctgcaatccaggtgagaagaaa

SEQ ID NO: 390598 - DNA, 97 bp, Homo sapiens
agctgcagcacgtggaggactaccgccggtatgtaaaatggaccaatgacaagagtctcggtggcatcgagggctgcctgtcaaagctcaaagcagc

SEQ ID NO: 390599 - DNA, 98 bp, Homo sapiens
caaagagaaagaggaagtggcagaggaggacccatgggccgtggaggctatggaggtggtggcagtggtggtggtggccgaggaggatttcccagtgg

SEQ ID NO: 390600 - DNA, 99 bp, Homo sapiens
ctggaggccagtcgcttactgaaaaggcaaaactgactttaaggccaggaatagttgctgaacaccccaggcctgctgaggtccctccttgagtctcat

SEQ ID NO: 390601 - DNA, 111 bp, Homo sapiens
tggagattaaagaccagggagcccaaatggagccgctgctgcctacggggccacctacagatgctcctgcagtggacacagcagaacaagtctatatctcttccctggcac

SEQ ID NO: 390602 - DNA, 51 bp, Homo sapiens
gacatatccttacaggcagagagagagctgtggaagtcatgtgcatagtac

SEQ ID NO: 390603 - DNA, 75 bp, Homo sapiens
gaccttacctgtcaccttggctctcccacccaatggagatggctctaatgaaaatggacccaagtggggtcaaag

SEQ ID NO: 390604 - DNA, 100 bp, Homo sapiens
gtgaccgagaccgtgaccgagagcgtgaccgagagcgcgaatatcgtcatcgttagaagataacgaaggaggcccaacttcattcaataaggagcctgac

SEQ ID NO: 390605 - DNA, 100 bp, Homo sapiens
ctgggaagcagaacgcaggccccctgctgtgacgctgcacctgagcagaggctgacctcagagcccgattactgaggctgcaagaaagttcacaagggga

SEQ ID NO: 390606 - DNA, 98 bp, Homo sapiens
atgaagattcaccaaataagctatatactttggttacctatgtacctgttaccactttcaaaatgccaaacccaagtctgaaatccacgtgtctatgg

SEQ ID NO: 390607 - DNA, 100 bp, Homo sapiens
gagcagtccagaaagcggcttatcgaacagagccgggagttcaagaagaacactccagagggatttgaaactggacaacatccttctggatgcagaaggt

SEQ ID NO: 390608 - DNA, 76 bp, Homo sapiens
cgtcagctggctgatccgcgctgcccctagcagtcttcttgatgctttggaacaacatttagcttccttggaagga

SEQ ID NO: 390609 - DNA, 83 bp, Homo sapiens
caagaagctcaaggacgagggctgccgggcgttctacctggaagcctgcggcgagagggctacaccgtgcaggtgaacgtgaa

SEQ ID NO: 390610 - DNA, 82 bp, Homo sapiens
ggcgatccgggcgctcgagacttaccagagccacaaggatcctcccaccactggaaggcccccctgcccaggcatccccgag

SEQ ID NO: 390611 - DNA, 100 bp, Homo sapiens
cgctgaggatgaactggcgggtgtggacgccactacagttcatcaacatcaactacgtccctctgaaggtcatagcaaatgacagaagtcccttggtggg

SEQ ID NO: 390612 - DNA, 83 bp, Homo sapiens
agattgatcatccactgatgattctaaaagcaatcttattagagaagaggactgtcagaaggacgtagaaggcacggttttac

SEQ ID NO: 390613 - DNA, 98 bp, Homo sapiens
ggccaccgagctcagggtccagctggcccagaaggagcaggagctagccagagccaaagaagccttgcagggagctgtgcggtcttatgcattggaac

SEQ ID NO: 390614 - DNA, 50 bp, Homo sapiens
atgatacagttgataaaattgttgatattttcaggaacatctaagaggac

SEQ ID NO: 390615 - DNA, 101 bp, Homo sapiens
ggatggcttgaacagacagattctgtcttaactaataagattggaactgtattagggctgttgataatcaggtgtatgtggccacagcctctcctgcccgg

SEQ ID NO: 390616 - DNA, 75 bp, Homo sapiens
ggcagaatttgggagctgtttattgcagcactgttgtgccctctgatgaataacctgggtatcttgtggtctgaa

SEQ ID NO: 390617 - DNA, 51 bp, Homo sapiens
aaaataagctggaaaaatctgagattctgatagttggtggtggtgttgctg

SEQ ID NO: 390618 - DNA, 85 bp, Homo sapiens
gactcttaacaacctgctcttgcggaaggacgtctgctcttggagcacaggcatgcaactcaggagctgggctgcttggatcaga

SEQ ID NO: 390619 - DNA, 75 bp, Homo sapiens
gccaaagcctgcccagacggctcacctgtgcgggatggaacaaaaggcacggcgcagaagaacacggtctgtgag

SEQ ID NO: 390620 - DNA, 82 bp, Homo sapiens
caagtgtgtgcatctggctgttagaagaattcatgctcatccggatgtgtcgtggaggccgaatgtttgcaccaaccaaaac

SEQ ID NO: 390621 - DNA, 100 bp, Homo sapiens
gcctcaagccatcttcccatctcagccttcaaagtgtgggattacagacctgtcatttactccatcctttatagtgatgctacaggacgaagaggaatgg

SEQ ID NO: 390622 - DNA, 90 bp, Homo sapiens
gtgctggcgaagctcgcctggtgtgccaaaatgacctggaattggagatggtgaaggcaatccaggtcctgagaatccacctgctggagc

SEQ ID NO: 390623 - DNA, 102 bp, Homo sapiens
agtggcttctgctcaccaacagatgaagacagatgcaccaacgaggtcacagatgtgacattgatgtgtccactgaagccatgtatgctgcaaccagacgag

SEQ ID NO: 390624 - DNA, 75 bp, Homo sapiens
agccgcgaggaggcgcgggaggtgttcgagaacgaccccgagacgacctgcgaccgcatcaagcagtccgccagc

SEQ ID NO: 390625 - DNA, 90 bp, Homo sapiens
tgcttcccaatcccactgatgaggatcagcccatggtaacaaacctgaatttggcaactggcatcataaacagaagcagtgcttcagctc

SEQ ID NO: 390626 - DNA, 101 bp, Homo sapiens
gtttttctcaggtgaaaggagcagtagatgatgatgtagcagaagggcagctttggaagaagtagaaggtgatgtggcagaattggaactaaaacttgata

SEQ ID NO: 390627 - DNA, 75 bp, Homo sapiens
gttggcaaacagttctgggggtcgtccgatcctgcagaatgaccagtcaacaggggacataaaagtaattggtgg

SEQ ID NO: 390628 - DNA, 74 bp, Homo sapiens
accgtatcaagccaagaacagcccaatctcctttctgggcaaacgttccaagaagctgaacatggttatgcctc

SEQ ID NO: 390629 - DNA, 95 bp, Homo sapiens
aaccctgtggacctgttcgaggccaacgacctgtttgagagtgggaacatgacgcaggtgcagtggcgtgcagggccctggaggcggactcaggg

SEQ ID NO: 390630 - DNA, 100 bp, Homo sapiens
gtttgagaacctctgcaagctcatgaaagaaatcttagataagaaggttgagaaggcttcactgtataaataggagaggatgagagcccagaggtaacag

SEQ ID NO: 390631 - DNA, 100 bp, Homo sapiens
gagaaaaggcctaagaattttggcattgatgacagtcgaactgcaagccagttggatgaatttcaggaatgcttgtccaagtttactcgatataattcag

SEQ ID NO: 390632 - DNA, 83 bp, Homo sapiens
ttgtattctccgagtcagattggagcatttgtgttgatgaagatgaaagagactgcaggcttttattgagatggagacaagag

SEQ ID NO: 390633 - DNA, 83 bp, Homo sapiens
cgagagatggtcaggtctggagctcgaccgggccagggaggtggggaagacagggctccagctaccacaggacgggctctggg

SEQ ID NO: 390634 - DNA, 98 bp, Homo sapiens
cccggtgcctggccctctagccccgctaccggactacatgtcggaggagaagctgcaggagaaagcgacaagactctgggacgatgaagaagccgcac

SEQ ID NO: 390635 - DNA, 100 bp, Homo sapiens
cggcgcacgccttgcccgcccaggccctgggcagtgacggggttcgggtgaccatggagagtgcgctcaccgcccgtgaccgggtgggggtgcaggattt

SEQ ID NO: 390636 - DNA, 100 bp, Homo sapiens
gctactgtactggctattggaaggaggagattctgaagataaggaggtccacctgggcttgcgaaggcacagattccccgtccacagctcacgaccagat

SEQ ID NO: 390637 - DNA, 90 bp, Homo sapiens
ggtgtctacagtgttctcgacttcgtcgctggtcttctttgtgatccgcctcattgctggccctgctgccaactccctgcctcccattgt

SEQ ID NO: 390638 - DNA, 100 bp, Homo sapiens
gtgaaaagatagaagcttcccgaaatgagctacataatcttctagataaaccacagttacaaggaattccaataatgggaaattcatccgagttccagaa

SEQ ID NO: 390639 - DNA, 87 bp, Homo sapiens
acggtacagccttcaccatcatgcactacgcaggaaggctaatcacatatggctctgatagaactgaggcactgaagagaatggcag

SEQ ID NO: 390640 - DNA, 82 bp, Homo sapiens
aaccaccagcacctgttgatccaccagtggaactgtggctgcaccatctgtcttcatcttcccgccatctgatgagcagttg

SEQ ID NO: 390641 - DNA, 75 bp, Homo sapiens
agcctgcggagcctgtggggcaggcacaagtgatccttatgtgaaatttaagctgaatgggaagacgctgtacaa

SEQ ID NO: 390642 - DNA, 98 bp, Homo sapiens
tttgaggggtctgaagactgaaagagtcgaatggtttgttggcagggccctcatctttgtgtcccatggagccggagagcacagtggccgctatgaag

SEQ ID NO: 390643 - DNA, 90 bp, Homo sapiens
tctgcgtgagaatagagaccaccgagatgatatcatcaagttgaatcgaaaggaagggaagaagcagaattttccaagactaaatagaag

SEQ ID NO: 390644 - DNA, 75 bp, Homo sapiens
ggggctgtttggaaagacccaggagaagccgcccaaagaactggttaatacaatctgttggaatgacactggaga

SEQ ID NO: 390645 - DNA, 75 bp, Homo sapiens
ccgcgggccctgccctgggctggaacgaccctgagtctgtagaagaggcgacaccagggcttccaaatgaacaac

SEQ ID NO: 390646 - DNA, 50 bp, Homo sapiens
gggaatactttgagaggttggagaaggccatccggctgtccttagagcaa

SEQ ID NO: 390647 - DNA, 100 bp, Homo sapiens
ctggactcagcggtagcaacctcgccccttgcaacaaaggcagactgagcgccagagaggacgtttccaactcaaattatgtagtaacgagttctggatt

SEQ ID NO: 390648 - DNA, 80 bp, Homo sapiens
gttttctctcacccatccatgggaagccctgctactgctggattagcgccaggtgctgctacccccgtatgatgatgcca

SEQ ID NO: 390649 - DNA, 100 bp, Homo sapiens
cctggccgccccggcccgccgtgacccacggccgcctccggagcccgacgcggacatgaacaagctgagtggaggcggcgggcgcaggactcgggtggaa

SEQ ID NO: 390650 - DNA, 100 bp, Homo sapiens
ggagtgcatcaaaggtgtgaacacagacttttttgtataacgagctctatgtctacaataccagaaaggacacctggaccaaagttgacatccccagtcc

SEQ ID NO: 390651 - DNA, 100 bp, Homo sapiens
tgaggcgcgcggcgctctggctctggctgtgcgcgctggcgctgagcctgcagccggccctgccgaacatgacgaacaccgtggtgaggaccacgctgag

SEQ ID NO: 390652 - DNA, 100 bp, Homo sapiens
atggctttactgactcctctaaatgtgaattgccatgcaagtgatgggcgaaaggtaatctgtaagtcagatgctccaacaggggatgttcttcttgatg

SEQ ID NO: 390653 - DNA, 97 bp, Homo sapiens
ggccggtggaatgggtccaggccgtggtcagccgcttcgacgagcaggtccacgctgcttttatgagctgtaacactcaccgcgaagatctgcagct

SEQ ID NO: 390654 - DNA, 100 bp, Homo sapiens
ctgaggttgaaaactatcttaaggaaggctttatgaataaggagcttgtagaccctggagttaaggcatggacacccactaaaggaaaacaaaatgtgat

SEQ ID NO: 390655 - DNA, 74 bp, Homo sapiens
gttcagtccttttatgatgggagccctgatgatgtggaagagcactgcagtttcctcctgaaggctggctccgg

SEQ ID NO: 390656 - DNA, 75 bp, Homo sapiens
tctctcaagattcagtagggaacaggaaattatctcattcaaagctagtgcaactttatggagtctgtatacagc

SEQ ID NO: 390657 - DNA, 75 bp, Homo sapiens
ccagggcctccttgttctggtcatacacagtggagtgtaggtcgagcgacaagatgtcgccaccatgcagttctg

SEQ ID NO: 390658 - DNA, 97 bp, Homo sapiens
cgaaataccaccggaactggtcgaatgaggcacctaaaaattgtataccgcagattcaggtgttactgcggaaatgcaaaacttagtccatcggcgg

SEQ ID NO: 390659 - DNA, 152 bp, Homo sapiens
ccttccttacaaagacaatgctcattgtacatcacagaactcacacgggagagagaccctatggctgtgatgagttccacaggtcctggctaccctgggaagagacaagaagtaaatgaagaaagaggaagattccaggacctagatatgat

SEQ ID NO: 390660 - DNA, 85 bp, Homo sapiens
ttttagagcaggtgtatgatcttttggaggaggaggatgaatttgatagagaggccctggccaacgtcaacattgggagcctcat

SEQ ID NO: 390661 - DNA, 75 bp, Homo sapiens
gggctgcaacctgcagcacatcagcgaccgggagaacatagacggcacgttgcccctggcctcgcaggagtcggc

SEQ ID NO: 390662 - DNA, 100 bp, Homo sapiens
ccaatttcagtggtgaaatgcacttctatgagcttgtggaagacacaaaagatggcatctggctggttcagcttgacaaaagtaagctgaagccaggaac

SEQ ID NO: 390663 - DNA, 100 bp, Homo sapiens
cgggcccagcacagccagcaccgcacgccctgcaagggagagtcttcctgcgagcaattaatcagtatgcagatatgctgaacaaaaaatttctggatca

SEQ ID NO: 390664 - DNA, 49 bp, Homo sapiens
agccctggaggtggggagaaaagtctcacaccattttgctggtacagcc

SEQ ID NO: 390665 - DNA, 74 bp, Homo sapiens
tgggcagagtggaccacggggagccccacgaggattattgcatcgagcttttagtgtcttcttattcaacaccg

SEQ ID NO: 390666 - DNA, 74 bp, Homo sapiens
ggggcccccgccgccgccggagcgatcacaagatttctgttgtgaaggatgtggctctgccatgaaggatgtcc

SEQ ID NO: 390667 - DNA, 118 bp, Homo sapiens
aatagagggtatgcatttatcaccttctgtggaaaggaagctgcacaggaagccgtgaaactgttgactaagataacacgcacaggtccttcagcttgggaaaccaaaaagattcttg

SEQ ID NO: 390668 - DNA, 82 bp, Homo sapiens
caataagatagttgcccggactgcacaactagcaagacttcagtgtggaaaagccactggcagtgattcaagtggtgtcatt

SEQ ID NO: 390669 - DNA, 100 bp, Homo sapiens
ggaagtgaagtcagtgcctcagttgctgttgtatatgaacacagatcaagattagagaaatccttgcaaaaagaaagacttgaacataaaaaagcaaagg

SEQ ID NO: 390670 - DNA, 93 bp, Homo sapiens
gcgggtctgtcatcatgtcgcgttacgggcggtacggaggagatgatatcatcaagttgaatcgaaaggaagggaagaagcagaattttccaa

SEQ ID NO: 390671 - DNA, 74 bp, Homo sapiens
ccgccgccgccgctgccgctgccgctgccgcacctccgtagctgactcggctgaccccgcactacatctaccca

SEQ ID NO: 390672 - DNA, 83 bp, Homo sapiens
gatcgatctaagatggcgactgtcgaaccggcgcctgtgtctggcagagctggtgtgagacgagacaatcctgccccgccgcc

SEQ ID NO: 390673 - DNA, 116 bp, Homo sapiens
ctcccttgcgaggaactgttatgcaggctcctgctgttcggcaggtcaatccccaaaatagttctgccattactgcaatagccacatctgtgtgtcacggcccaccctgtcgccag

SEQ ID NO: 390674 - DNA, 90 bp, Homo sapiens
ggactacagcgactcactgacggagaagcagtggctcaaggttgcgtaggaggctctgtctggtatcttgaaagaagaactatacaggac

SEQ ID NO: 390675 - DNA, 98 bp, Homo sapiens
tggacttcatgcttagatacatgtataacaagaccccaactgtaaacttgaagacaagactgaagatggagaggcactagattgtaagaagaggccgg

SEQ ID NO: 390676 - DNA, 100 bp, Homo sapiens
ctttgtctgaagatcctctgggtgatcatggttcagcgctttagcctcaggaggcagctatccaagtgtctttggtgcaacactaacaaggcttgtctgg

SEQ ID NO: 390677 - DNA, 75 bp, Homo sapiens
aacagctgcacactgacctgcagaaggcgggtgccacgtctatgtgggcttcgtgctgtgggctgctgaatgaag

SEQ ID NO: 390678 - DNA, 101 bp, Homo sapiens
gttcaaggcaagaccgaattcagaaggatatcgacgtcgtgatccagaagtccagagctgaggactgcctgtttgcagattgcttccaagtatgatcatca

SEQ ID NO: 390679 - DNA, 82 bp, Homo sapiens
gttcccatggttcggaagaatttcagatacatgttttctcctgtgaaattaaagaggcaaataactgaagtgaagtgatgga

SEQ ID NO: 390680 - DNA, 106 bp, Homo sapiens
aagcgtgaggccggcatcgtctttccgtcctctgaggcgacggccgcggctgcacagtaatctcaggggcgatataatcaatgaggtggtcctaaagttgctcaag

SEQ ID NO: 390681 - DNA, 98 bp, Homo sapiens
gcttcctgcgcatcgtctgcaagaccgcgaggcgagacctcttgcctccggtgtggctgtctctgatggtgtcatcaaggtgttcaacgacatgaagg

SEQ ID NO: 390682 - DNA, 75 bp, Homo sapiens
tatgttatcaataatactttaatgtcattatcagaaaagcagcatctgttatagcaaaatacccacacaaaataa

SEQ ID NO: 390683 - DNA, 98 bp, Homo sapiens
ggctagaagcagagacaccaggacagaaaagacagtgttctgctttcatggagttcacagaagagtcgaggagtgccggtggtggtgtgcacattgag

SEQ ID NO: 390684 - DNA, 83 bp, Homo sapiens
tgataaaagtggctttgcagaggcttcaggtcttgaggtagtcaaaccacacactccattaataaggtttcctgacagaagag

SEQ ID NO: 390685 - DNA, 100 bp, Homo sapiens
tggtgagcccctaccacacccaccgggccggggaccccttagacctcgtggcgctcgcagagcaggtgcagaagggctacttctacaagtccgaacagcc

SEQ ID NO: 390686 - DNA, 101 bp, Homo sapiens
tcgtaagaagaggtcccaatcccccactctttccgccctaatggaggtctccagtttcggattatatctgtccaagatgcgagtctggttttatcgaggag

SEQ ID NO: 390687 - DNA, 74 bp, Homo sapiens
caaaagcaatgcagcagaacgcagggggcctctgtaaggcacatggaggtgtgatgttagctgttgatgctgta

SEQ ID NO: 390688 - DNA, 96 bp, Homo sapiens
ggtgtttttcctgtcgtacgtgggacaggccacgctgtccgtccgcagtaccgacgcctgcaggaagaaatgttggctatttggcgatgagaggtg

SEQ ID NO: 390689 - DNA, 100 bp, Homo sapiens
gggagggtgtaccattacaggatcaacactgcttctgatggcaaggtgaccttgggaaaggtgttgaaagtgatcgtcgtcatgcggagcctgttcattg

SEQ ID NO: 390690 - DNA, 82 bp, Homo sapiens
cacctcaggacacggcctacaacaccaagagacttcccaagtaagaagcggaagaggagccgctggaaccaagacacaatgg

SEQ ID NO: 390691 - DNA, 98 bp, Homo sapiens
atttaaacaagagatttccacagaagatggagaggagaaaacctatggtggctgtgaaggacctgatgccatgtatgtcaaattgatatcatctgatg

SEQ ID NO: 390692 - DNA, 100 bp, Homo sapiens
gccagtgacgtcctgtgcaccatcaccaagaccatggactacctccattcccagggggctggtgggccaccaaaaaaggggaaaccagctgcaccaggag

SEQ ID NO: 390693 - DNA, 100 bp, Homo sapiens
ggggatttctggctctttcctcttcgccttaaattcgattcttcgctgctgctgccttaccgccgagaaccaccacccgccaggcgtcttgcggccacac

SEQ ID NO: 390694 - DNA, 90 bp, Homo sapiens
ggctctgaaagctagaagaaaaggtgtacttgcaagaaacctcaggacttgagtaacagcaacatggcggggctggagggcgcctccgag

SEQ ID NO: 390695 - DNA, 75 bp, Homo sapiens
gcatgggcggcaactctttgatgtactactataatgggaaagcggttcaaaccttgtactactcagctgatcaca

SEQ ID NO: 390696 - DNA, 90 bp, Homo sapiens
attacagggctcgtccaactggtccctcagtcacacatgccagagattgctcaggaagcaatggaggtggttgtgtcaaaccgattggtg

SEQ ID NO: 390697 - DNA, 90 bp, Homo sapiens
aggcactccatgagctaaaactggaagagtggtggtgcctcggtgcacaacgccatgcagctgaagccgggcaagcccaatggctggagg

SEQ ID NO: 390698 - DNA, 100 bp, Homo sapiens
gcctggacaggacaggggacgagggaggaacactctctgaggaagcccaactcctatgagctcctctctggcagcacttttccagccattaactccaggc

SEQ ID NO: 390699 - DNA, 75 bp, Homo sapiens
cgacgtcatcaactctcgcacccagggcttcctggcgctcttctcaggtgatcccaaaacgaaccaacagaccag

SEQ ID NO: 390700 - DNA, 97 bp, Homo sapiens
tgcgttacaagctttgtctccttcgacttggagtctttgtccaggacgagctcttcagaaaccaggctgctttcaggaacattgctgtggattccca

SEQ ID NO: 390701 - DNA, 74 bp, Homo sapiens
cagcggcaccttcgagcgtctcctagagtatgggctcacaagaagatgattcaggaaacaaaccatccagttat

SEQ ID NO: 390702 - DNA, 83 bp, Homo sapiens
ccaacattcccaacagccaccaccaccaccagatgaagtccattggaatattaagcccaggagttgctttggggatggctgga

SEQ ID NO: 390703 - DNA, 75 bp, Homo sapiens
attccaagtaactcttatttgcagtatcctggtgtgaaccagctatcctccagtataggaggattgagtcttcag

SEQ ID NO: 390704 - DNA, 50 bp, Homo sapiens
accagctcttcgaggaattgggcaaatttgcctgaagacctggataatct

SEQ ID NO: 390705 - DNA, 102 bp, Homo sapiens
tgccaagcagccttagccctagtgtagaggcagctggctaagagtcttgggcaggctggtgaaattgagcctgaaacagaaggaatactaacagagtatggc

SEQ ID NO: 390706 - DNA, 51 bp, Homo sapiens
caccgaggaagagcgggagaaagggatagctagcggccaggagaaatacag

SEQ ID NO: 390707 - DNA, 75 bp, Homo sapiens
tccgcgcccttcctcggcgggccggactgctggactgggcagcctttggggtcatgacccttccctccatcggca

SEQ ID NO: 390708 - DNA, 75 bp, Homo sapiens
gagaaaatggagcagacattcaggaatcccctactttgaaactagtgctgccaatgggacaaacataagccaagc

SEQ ID NO: 390709 - DNA, 128 bp, Homo sapiens
ggagggaggtggggggggtcagccccccgcccggccagccgccccgtccgggagacaattcctcctcgcttcaagaagatgaagaagtagagatggaggccatcagctggcaggccagcagtccagcc

SEQ ID NO: 390710 - DNA, 83 bp, Homo sapiens
gccggggctggcacactttttggagcacaaaggagaaaggcaagattcttctatgtttcttgactcgaaacatcttaatccag

SEQ ID NO: 390711 - DNA, 100 bp, Homo sapiens
agttccgtcacaggggctatttgtttggatatcctgaaagatcaatgcacaccacacaaatgagtgatgaggaagaggatgatgatggctgtgacctttt

SEQ ID NO: 390712 - DNA, 100 bp, Homo sapiens
tccgagtcaactggcccggcaccgagttctctctgtggaaagaggcaaaacctgatgaattaatggattccaaattgagatgcgtatttgaaatgcccaa

SEQ ID NO: 390713 - DNA, 75 bp, Homo sapiens
agcatcttcatcaagatcattgacagaatcagtgaccagaggtgctgttggacttcatggagctcatggcctcga

SEQ ID NO: 390714 - DNA, 75 bp, Homo sapiens
cgtgggtgagcggcgcagcggcggcagcggagagcgagagaggggagcagttttcggctttgtgagaaaccttac

SEQ ID NO: 390715 - DNA, 75 bp, Homo sapiens
ctgggagagaggtacctctccttttccctctccctttccctaagcttttcgctgtggcctgcagtttttaggcaa

SEQ ID NO: 390716 - DNA, 100 bp, Homo sapiens
agaaactcttcgactacttcaaccaggaggttttccgagacaacaacggcaccgcgcctgacatttaccccggtaactgctgggcatttaaaggctccca

SEQ ID NO: 390717 - DNA, 75 bp, Homo sapiens
gatcatggtggccaaacccacaggtgtctactatgaaccatcctgtactcagaatgtgaatcatggtgtacttgt

SEQ ID NO: 390718 - DNA, 75 bp, Homo sapiens
gcgtgatcgggatcgactttgggcatgcgtttggatccgctacacaggaagttattccaacttttgacatggctg

SEQ ID NO: 390719 - DNA, 101 bp, Homo sapiens
ggtcgatgcccgattctttggacaacatgacagaccaaagagagtctacagtatgcattagaaaccttgactatgaatggctgctcagttgaagatctagg

SEQ ID NO: 390720 - DNA, 100 bp, Homo sapiens
ggacattccctgttgactgcgtcgcgatgtgtggcgactgtgtggagaaggaatatcccaaccggatctggaatatgaagaccacagaatgttcaaatac

SEQ ID NO: 390721 - DNA, 76 bp, Homo sapiens
gaactccgcgacccgagcgcaaggtactccaaagattcaggtttactcacgtcatccagcagagaatggaaagtca

SEQ ID NO: 390722 - DNA, 75 bp, Homo sapiens
gtgcaaagtagcaattaactggtctggagggtggcatcatgcaaagaaatgggtggaacaggaccctaaggaaat

SEQ ID NO: 390723 - DNA, 100 bp, Homo sapiens
gttaatcaagaattctctatttctgctccgtcatccatgccactgcagctgcagttgcactttcctccctgattcatgctttggatgacttagacatggt

SEQ ID NO: 390724 - DNA, 100 bp, Homo sapiens
ctgcgcgtggctggggaggcgaggccggacgcacctctgtttgggggtcctcagaacaccttccaccatgaccacctcagcaagttcccacttaaataaa

SEQ ID NO: 390725 - DNA, 89 bp, Homo sapiens
gacacgaattggccttattaatgatatgatagctcgtcagcatgtgcaagttccagggggtacagatagtgaatgtattgaatatgctt

SEQ ID NO: 390726 - DNA, 75 bp, Homo sapiens
cacagacgacgccaggacggcaagtgtcggcactgtgggaagggctgctggtcaacctctccctcatcccagtca

SEQ ID NO: 390727 - DNA, 100 bp, Homo sapiens
tcggcctcaccttttgtacctgctacctggcttcttacctcacgaacaaggagccaaaaacctgtatatcatctccgtgaaggggatcaagggacggctg

SEQ ID NO: 390728 - DNA, 119 bp, Homo sapiens
ccagaagcaaagactatgcccaattcttcaactcctaccagccagatcaacacaattgataaattggcagagggggtcgatttgggaggaaaggtgtggctataaactttgttactgaa

SEQ ID NO: 390729 - DNA, 82 bp, Homo sapiens
gaaccctggtcaccgtctcctcaggatattagaaatggctactccccagtcaattttcatctttgcaatctgcattttaatg

SEQ ID NO: 390730 - DNA, 75 bp, Homo sapiens
aaaatctcctggcaattacacaaaccaagatggagtatgagtggaaacctgacgagcaagggcttcagcaaatcc

SEQ ID NO: 390731 - DNA, 100 bp, Homo sapiens
ttggaacattcaaattcacaaaggtcaacttgagatggttaaagctgcaactgagcactgccagtgaaagatgtagaagataaacctgaacaacaaacca

SEQ ID NO: 390732 - DNA, 99 bp, Homo sapiens
agaagatacagatctggcagaaaactgtgaaggaggctcatttgacaaagatgtgaagttaccccagatgtaaacatttcaggccaaaaatttaacatt

SEQ ID NO: 390733 - DNA, 98 bp, Homo sapiens
tgtatgactatgaggggcaggagcatgatgagctgagcttcaaggctgatgtgtcatccccacaccagcgagcctctgccaagatgaaaccgatagaa

SEQ ID NO: 390734 - DNA, 100 bp, Homo sapiens
ataaaactcgctgacttcggccttgcccgcatctatagtttccagatggctctaacctcagtgaatgcatatgttctgtactatttggctattgtgggtc

SEQ ID NO: 390735 - DNA, 100 bp, Homo sapiens
gcctggaaaggaattgttttggcctaggatcatccagttcacacaaaagatgttggacaatttctacaattttgcttcatcatttgctgtctctcaggcc

SEQ ID NO: 390736 - DNA, 42 bp, Homo sapiens
ctggtcctcggggaagccctggtgaccgtggtgagaccggcc

SEQ ID NO: 390737 - DNA, 82 bp, Homo sapiens
tgagccctggctgcgcgcgcggcccctcctccccggcgcctcccagattttgcaagaacgaggctcaaggatgtgagggaca

SEQ ID NO: 390738 - DNA, 83 bp, Homo sapiens
caaaagaccatcctgctctcaactacaacatcgtttcaggggcgtctctggccgagcctctttttgtggaaaacgacagcagc

SEQ ID NO: 390739 - DNA, 158 bp, Homo sapiens
ggtgttcaaacagcactgccaaatagcagaagaataccatgaggtcaaaaaggaaatcaccctgcttgagcaaaggaatatgattccatggcattggcaaggctgagaatgggaaacttgtcatcagtggaaatcctatcaccgtgttcccggaggaa

SEQ ID NO: 390740 - DNA, 75 bp, Homo sapiens
atgccgttgtcgggcgcatgcaggaaggttatagagatggaatagatgctggcaaagcagttactcttcaacagg

SEQ ID NO: 390741 - DNA, 74 bp, Homo sapiens
actacgttaagatgacgacagactcagatccaagtcaacagtcggatgtgatgctggtacaacccagagtagaa

SEQ ID NO: 390742 - DNA, 119 bp, Homo sapiens
tggttggggctgtgggacttcgaaggagggctctcctgtctgccaccatcctgggttgacaattctacacaaggaggaggcaagtgaggcctatctggttggcctttttgaagacacca

SEQ ID NO: 390743 - DNA, 99 bp, Homo sapiens
gggaggctccaagacctcatcaacaattaagatgttcctgcagcagccagctgtatccctgagcttcagcagcacccagcgacctgaggctcagcagca

SEQ ID NO: 390744 - DNA, 101 bp, Homo sapiens
gctggttcctcttggaaggtgcatctgcagtacaggatatgaagaaattgagggttcttgccatgctcaggtgcctaaaaggccagaggggcttctcaggc

SEQ ID NO: 390745 - DNA, 87 bp, Homo sapiens
cttctggaggctctgatgaacaatccatctcggtcctcttggtggcttgtaatattctttgcctattggttgatgaaacagcaatgc

SEQ ID NO: 390746 - DNA, 95 bp, Homo sapiens
gccggtggaatgggtccaggccgtggtcagccgcttcgacgagcagaataacaagcctttgtattcatttgaagataatgcagactatgtttatg

SEQ ID NO: 390747 - DNA, 83 bp, Homo sapiens
aatattgaccaactggcatcccacagcctcctcttccagaatgcctttgcgcagagctagagccggtgcaggccacgcagaac

SEQ ID NO: 390748 - DNA, 96 bp, Homo sapiens
ctgcacctgcacaagaagaaaaagccaccaagcatcagcgcccagttccagacatccttgaaatacaatattctcccagaaaaggaagagttcccc

SEQ ID NO: 390749 - DNA, 50 bp, Homo sapiens
atgaagaggatgatgtttttggtgaagtatgggattgtgctggatgcggg

SEQ ID NO: 390750 - DNA, 109 bp, Homo sapiens
agtcttcttaatgaggctcagggatgcctgtaccatgatgtgatgctggagaccttgacacttatatcctccctgggtgctcgcatttggcttttcgttggtttcatgt

SEQ ID NO: 390751 - DNA, 82 bp, Homo sapiens
aaatataataatggcagcacagagctacattcgagtaggtggcaagtgggagaaaccatcagaaattttggaaatcaaagga

SEQ ID NO: 390752 - DNA, 113 bp, Homo sapiens
cggggacccagaccctggagcctcagttggaagcagccgatccagcctgcggagcctgtggggcaggccaccagcccctcgggttccaagatgcagctactggagacagagtt

SEQ ID NO: 390753 - DNA, 83 bp, Homo sapiens
caccttataaggtgttagccaccagtacaaaacatgttcagagaagccgaactgggattaccatgcagaaatacaagcttttg

SEQ ID NO: 390754 - DNA, 50 bp, Homo sapiens
ggcgccaccgcctcatgcactgtgattaagttgtcatcattctgggaaga

SEQ ID NO: 390755 - DNA, 100 bp, Homo sapiens
aaattgagactgacaaagctgtggttaccttagatgcaagtgatgatggaatcttggccaaaatcgtggtgcacttcacattcagaaacgccaactgtcg

SEQ ID NO: 390756 - DNA, 100 bp, Homo sapiens
cccagcgaaggggagagtttgctcccaaaggcgcaccaatgaccaacatttgccccccggaggaaagaactggaaccagatcgggcccgggacacccaga

SEQ ID NO: 390757 - DNA, 83 bp, Homo sapiens
tgccgctcctaagcctgcacagccgcggcggcagcagcagtgagagctattactataacaagcgcattctgcacaagaccaag

SEQ ID NO: 390758 - DNA, 90 bp, Homo sapiens
cagcctcctgaggagctgggactacagatgggaacagcgagagctgcccaacggacgtgtctattatgttgaccacaataccaagaccac

SEQ ID NO: 390759 - DNA, 75 bp, Homo sapiens
gagtcggtgctggccaagacaagatgcatattctcaagatgcctacctgaaaggcaacgaagcttatagcggcaa

SEQ ID NO: 390760 - DNA, 122 bp, Homo sapiens
atccagcacctgcggccagatagccagttacccgctggccctggtccggacccgcatgcaggcacaaggccaatccggagccggcaacaactgggcaaaggggcactacacggagggcgcag

SEQ ID NO: 390761 - DNA, 87 bp, Homo sapiens
gtgccctccacttgcagccagggactgggcatccacccggccaggttcccaggaagccgattacacctcaacaagaaggcaactgac

SEQ ID NO: 390762 - DNA, 100 bp, Homo sapiens
ctccggaggagcccaacggcatcatcctgggtgtcatggagaaactccagctgggcccagagattctgcagcgggaaaatccaaggcttatttatgccag

SEQ ID NO: 390763 - DNA, 100 bp, Homo sapiens
agtccagctgccagatggcttcaacctgctctgcccaaccccaccacctcccccagacacagacccctcattgctgccaaaaatcccaagattgctgtct

SEQ ID NO: 390764 - DNA, 75 bp, Homo sapiens
tacaacatggcagacattgacaacatacctccagataatctctctattcaagagtttcaaagaaatgaaaatatt

SEQ ID NO: 390765 - DNA, 90 bp, Homo sapiens
cgaccaagagctgaagctgatcggccatctggctgctgtgcacaggcgctcgtgaggctgccttccggaacattaagaccattgctgagt

SEQ ID NO: 390766 - DNA, 100 bp, Homo sapiens
tactaccaaacagcacttcctggcaatgatagatacatcagtgtgggaagccaagcagatacaaacccttctcaggtgcagccagagagacactagccca

SEQ ID NO: 390767 - DNA, 101 bp, Homo sapiens
ccgccactgcctaccggccggactggaaccgtctgagcggcctaacccgcgcccgggtagaggtggacccaagtggagagattgtggaactggcgaaaggt

SEQ ID NO: 390768 - DNA, 100 bp, Homo sapiens
cggaagaattttactgcgaagttttgctcctggatgaatccaagttaacccttaccacccagcagcagggcatcaaggtaaacgcaaagcactgaagttg

SEQ ID NO: 390769 - DNA, 90 bp, Homo sapiens
atcgaggatttggcgctgcagaaccagatccgggagcacgtcatctccatcgagggcccgcgatgctcccagcccggtgagacctgcctg

SEQ ID NO: 390770 - DNA, 51 bp, Homo sapiens
acacaggggagagtcagttaacagagatgctgaagaaggaagaagcaattc

SEQ ID NO: 390771 - DNA, 100 bp, Homo sapiens
cagcccctccgccgcgcggagcccacgaaggggacagcgcagccggcccagagctcgggtctccggggaccgagccttccaacagcaacatgaagttggc

SEQ ID NO: 390772 - DNA, 51 bp, Homo sapiens
ggattccaagtaactcttatttggttacgtggtgcttctgtaatcattagg

SEQ ID NO: 390773 - DNA, 75 bp, Homo sapiens
tctgggcctacatggttatctctaagcaaaccagagaaagtttgtgaagatgatgtctcgctgaggaggtcctgg

SEQ ID NO: 390774 - DNA, 82 bp, Homo sapiens
cgggtctggagtgcgtgggggaccggctgttggcggaccaaatacacgctgatcgatgagcaggacatcccgctggtggaga

SEQ ID NO: 390775 - DNA, 99 bp, Homo sapiens
cgccccgcgtgcgggggctgtggcggttacacggccgggcgcgccggagcgttcaggcttcccgtttttaaggtgaaggtcatgcgatgcctggaacac

SEQ ID NO: 390776 - DNA, 100 bp, Homo sapiens
gaagatgtatgaaaattcctactggacaagaatatgctgccaaaattatcaacaccaaaaagctttctgctaggggtgttgacagctcttctaccacaag

SEQ ID NO: 390777 - DNA, 82 bp, Homo sapiens
gctccatgcttgaaaacatggggattggaattcgaaaggaaggcagaggaagccacggccactggaccctggcgagggttcc

SEQ ID NO: 390778 - DNA, 75 bp, Homo sapiens
tgcgaggcctcccgggctccgggaaaactacactggccagataacgaaggaggcccaacttcattcaataaggag

SEQ ID NO: 390779 - DNA, 98 bp, Homo sapiens
tggtggaaggggcgaggagctttgcagttgtgtgcgagtgtgtacagttggttgaaagactggaaaagaagagctgaattggaagaaaggcagaatct

SEQ ID NO: 390780 - DNA, 90 bp, Homo sapiens
gattattaaggaatcccagcagcagcatggtttacggcatggagattttcagaggtacaggaaaacgggccttactatacatcatatccc

SEQ ID NO: 390781 - DNA, 75 bp, Homo sapiens
tgcccgtactgcccgtggcatgagggagccggaagagctgatgcccggttatcaatactctggctgaccatcatc

SEQ ID NO: 390782 - DNA, 50 bp, Homo sapiens
gggagcggagccatggcctccgacctacctggtggttctgtgccttcccc

SEQ ID NO: 390783 - DNA, 98 bp, Homo sapiens
cgacttcctcacccgcgcctgcgacctcgataaccagcccgagtcatgcagtcttttcgagaaaggtgtggtttccatggcaaacaacagaactacca

SEQ ID NO: 390784 - DNA, 83 bp, Homo sapiens
gctatacttgaattttctaaggtgtcattaggacagcagcctgcctgtaggagtctttgtgtgggatgtggaaaatgaagggg

SEQ ID NO: 390785 - DNA, 75 bp, Homo sapiens
agctcccagtcccaatgaggaaccagcaggaaccctaaggactctgcaatatgaataattccctagagaacacca

SEQ ID NO: 390786 - DNA, 75 bp, Homo sapiens
agctcccctcacccaacgtcgtaacaagttgaaatcatcgcagaaggataaagttcgtcagtttatgatcttcac

SEQ ID NO: 390787 - DNA, 100 bp, Homo sapiens
attactacaagagaggcgatttcattcctgggctgagaggaaggccagtgccacggaggcgcgctacaacaagctgaaggaaaagcacagtgagctcgtc

SEQ ID NO: 390788 - DNA, 97 bp, Homo sapiens
cgacctcaagaagcagctccacgaaaggcagccgcggatcgccgcgctcagcgacaaacaaattgctgctaaaattgattcaattcctcacttgaat

SEQ ID NO: 390789 - DNA, 100 bp, Homo sapiens
aaggaaagcaccatgacgtccatccatttcgtggttcacccgctgccgggcaccgaggaccagctcaatgacagttgcagaggaaagtggtcgcttatgg

SEQ ID NO: 390790 - DNA, 99 bp, Homo sapiens
cgggcgggaagatggcggctgggttcaaggcgaacgctgttggagaagctgttcagccagcaggagaacgggcctccagaagaagcagagaagttttgc

SEQ ID NO: 390791 - DNA, 90 bp, Homo sapiens
agcgtcgagatcccgggcgggggcaccgagggctaccacgttctgcggatgagtgaccgaggaggtggcgttcctttgaggaaaattgac

SEQ ID NO: 390792 - DNA, 123 bp, Homo sapiens
ggcggcggcggcggcggagtgtaggaagaggcactgctgagggggcgcgaggggaacggaggccagagctgcggagcctcctcaacaagcccaagagtgagatgaccccagaggagctgcaga

SEQ ID NO: 390793 - DNA, 80 bp, Homo sapiens
gtctggaaggaacctgagctacgagccgcggcggcagcggggcggcggggaagcgtatgaggagatgaccgccgggttct

SEQ ID NO: 390794 - DNA, 88 bp, Homo sapiens
ggcagtgccctttgtggaagactgggacttggtgcaaaccctgggagaaggtgcctatggagagtgatccatgctctagggcaatcat

SEQ ID NO: 390795 - DNA, 98 bp, Homo sapiens
tcccgtgggcaatagagtcactgtatttgaccttaaaaaactactgtcagaggatgtaggaatggacatcccctttgaagagggcgtgctgagtccca

SEQ ID NO: 390796 - DNA, 75 bp, Homo sapiens
ggaggaggaggtggaggaggtggaggaggtggaggaggcgccggaccggggggatctgttacctaaagcaataaa

SEQ ID NO: 390797 - DNA, 100 bp, Homo sapiens
ccatattcagattggccagtgtggcaaccagatcggagccaaggttcttctgagctatgaaggggcccagatttaagggctatttttgacaccctaaatg

SEQ ID NO: 390798 - DNA, 100 bp, Homo sapiens
agaatgccaacatgtggttcaagaaccttgacaagctcatccggctggtaaatgcgcagtcagcgagatgatccgccacccgtatgagacccagtctgac

SEQ ID NO: 390799 - DNA, 101 bp, Homo sapiens
ccagctgcgggagcagctgccccgctacctcatgggggagacgcagctgtgcaccacaaggaatgacatctcggtctggtacagatgtcgatgcagcaaac

SEQ ID NO: 390800 - DNA, 90 bp, Homo sapiens
atttcgtcctcggggagaagagaccccaagagtgttgagcagcccatcgtgcttaaagaaggggctccacgtgttccccacgtttgtggc

SEQ ID NO: 390801 - DNA, 100 bp, Homo sapiens
ggagctttcctttatcagagctgcagaagagtccaggaaacacatcaacacctgggtctcaaaaaagaccgaagggagtggttttcagagacatttcaga

SEQ ID NO: 390802 - DNA, 100 bp, Homo sapiens
aaggaaccagtgaaatttgttccacaggatgtgccaccagaacccaagaagattccgataagaaacacggttttcttgcagctggtaccatccatgtctc

SEQ ID NO: 390803 - DNA, 75 bp, Homo sapiens
acgccgggactccctggaaacctagaaatggactcacaccacccggcaagaactgctcactacggctccctgccc

SEQ ID NO: 390804 - DNA, 90 bp, Homo sapiens
tgctgtctctattctctcggcctgtcagcaaagttcttttgaagtaaccagtgatcttttttgcttaccctcatcaacagaatggatgaa

SEQ ID NO: 390805 - DNA, 74 bp, Homo sapiens
tggagaccccaatccgcatgagcgtcctttcggccttctctcagctccttggcctactgccgtggccttggtgc

SEQ ID NO: 390806 - DNA, 100 bp, Homo sapiens
cttgagaaagccatcaccactcaaaactgtaatactaaatgtgttaccataccaagggctctggctgagaacatggccaatgacattgatgagctcattg

SEQ ID NO: 390807 - DNA, 51 bp, Homo sapiens
ctagtagacaaccttgcatcaaaggattggattcagcatcaaaatacatct

SEQ ID NO: 390808 - DNA, 100 bp, Homo sapiens
cgcctttgctgctcctctctctgcacggtgaaaggtgtagcagtcactcggcctacacccacagcatcgaccttgtgaacccagcgacctgactgccttg

SEQ ID NO: 390809 - DNA, 90 bp, Homo sapiens
caatcggctgggagcctcgtggaggctgagcatagttgttgcccaaatctcttggtacagaatgtttttgtagaaacacacaacaggaat

SEQ ID NO: 390810 - DNA, 90 bp, Homo sapiens
ggctccctgcctccgcgtcgcagcccccgccgtagccgcctccgagcccgccgccacatcctctgaggagttccgattctgaagaggcat

SEQ ID NO: 390811 - DNA, 98 bp, Homo sapiens
cgggaacaagatggcagcccccatacctcaagggttctcttgtttatcgaggtttttgggctggtggtttcggcagggctacttctacaagtccgaac

SEQ ID NO: 390812 - DNA, 96 bp, Homo sapiens
ctcgcgctactctctctttctggcctggaggctatccagcgtcttgagtcaccacgtccgaatataattcttgggttagtaatctgccaaaaaatc

SEQ ID NO: 390813 - DNA, 83 bp, Homo sapiens
gtgacaccgaggccactgaagccatggcgccagacatcttagccaggaagaagttggtgaaccatctaaagaagagaaggctg

SEQ ID NO: 390814 - DNA, 99 bp, Homo sapiens
ttggacttagctgcctgtggagctgtttggaactgaggatgctttaatctggatcccaatagagttttggatgtcattttagaagtgtttgaatgcagg

SEQ ID NO: 390815 - DNA, 100 bp, Homo sapiens
gtgattagaggtcttttgctggaggttgactgtgctgtctgaatgtgtgaatgacaactactggtttgggagggacaaaagctgtgaatattgctttgat

SEQ ID NO: 390816 - DNA, 82 bp, Homo sapiens
tcactgtgaatcttccattgtgattgtatcaccttttgccatgatagcatttctttcattggacagttccttacaagggctc

SEQ ID NO: 390817 - DNA, 75 bp, Homo sapiens
aggacaggcttttgctctgcgacggctgcgatgcgggatatcagttttagagaatgtggcgtggagaaattctca

SEQ ID NO: 390818 - DNA, 50 bp, Homo sapiens
ggagcatatattatggaacacaagggaagtggaatcccgattgcttgatg

SEQ ID NO: 390819 - DNA, 80 bp, Homo sapiens
gtcgaagacatggaccagggctacggagttcatagccctgatgaagcaagttactctgctctcctaataaatgcaagaaa

SEQ ID NO: 390820 - DNA, 100 bp, Homo sapiens
accttcggctgcttcatcaccaccgccttcaaagacaggagcgtcccggtgcggctgcacgtctcgcggatcatgctctacaagagactgtgaaaaggaa

SEQ ID NO: 390821 - DNA, 75 bp, Homo sapiens
tctcttcggctgccccaatccccggcagctctctcagataatgtggatgcaaatgatcttaagcagttttttgag

SEQ ID NO: 390822 - DNA, 90 bp, Homo sapiens
cgctaatggagtcagcagaggtgttggctttgccaggtttctagagaggaaggatctccccagctgtcttcagcaaggccgtctcctgcc

SEQ ID NO: 390823 - DNA, 90 bp, Homo sapiens
ccattcccaccaggtccgggtgaaagcctactaccgcggaatctacctgttactcgtattttggacaatcttatggagatgaagtcaaac

SEQ ID NO: 390824 - DNA, 100 bp, Homo sapiens
acaacaagtgcatccctgagtgtccctccgggtacacgatgaattccagcaagaagaaggtagataatgactataatgcccttcgagaaagactcagcac

SEQ ID NO: 390825 - DNA, 100 bp, Homo sapiens
cccggaggcagagcggctgccatgaatgtatgacaacatgtccacaatggtgtacataaaggaagacaagttggagaagcttacacaggatgaaattatt

SEQ ID NO: 390826 - DNA, 100 bp, Homo sapiens
tgctgcccttccggagtccgccccgtgaggagaatgatctgttagtcaagtgtattggtgaagaaaccaagtatgaaagcatcagacttctgtttgatgg

SEQ ID NO: 390827 - DNA, 100 bp, Homo sapiens
aattctctatttctgctccgtcatccatgccactgtgtcatggagaaactccagctgggcccagagattctgcagcgggaaaatccaaggcttatttatg

SEQ ID NO: 390828 - DNA, 100 bp, Homo sapiens
tcccacttgattacccgttaagtcccccaaagatgagatttacctgtgagatgtttcatcccaacagatcttcagcctgttaaacaagaaaacgaaaaac

SEQ ID NO: 390829 - DNA, 51 bp, Homo sapiens
cggtgtctctttatcttctgtcacagtgcatcgtccatgccaaagtgtgcg

SEQ ID NO: 390830 - DNA, 100 bp, Homo sapiens
cggtcatggaagtacaaccagagcatatccctgcgccggcctcgcctcgcttctcagttgctccactgtgcctaggaagagctggagcttgtgttgtgac

SEQ ID NO: 390831 - DNA, 90 bp, Homo sapiens
gccgcagatgcccaccggaatggagaaggaagaggagtcgacatttttacaggaaggaatgcctacttctgcacgatgtgatgatttaga

SEQ ID NO: 390832 - DNA, 124 bp, Homo sapiens
ccaagctgtcatcacaaaagagttgattgaaattatctctggtgctgcagctctgtactttagattgattgccgagcggggcagttttgtgagccttcatctgaagccttcagttcacccctct

SEQ ID NO: 390833 - DNA, 98 bp, Homo sapiens
taccgctatgcccggagcctggaggagctgctgctggacgccaaccagctccgcgagctgcccgagataacgaaggaggcccaacttcattcaataag

SEQ ID NO: 390834 - DNA, 100 bp, Homo sapiens
tcgctttgccctgtcatttttggtcatgaagccatgaagaagatgtacaaggcgtgcctcaagtaccccgagtggaaacagaagcacctgcctcacttca

SEQ ID NO: 390835 - DNA, 75 bp, Homo sapiens
ggaaccccgcgctgtatgccagcaacgtgcggcgagtcatggccgagatagaactggaggaacctccacttgttt

SEQ ID NO: 390836 - DNA, 100 bp, Homo sapiens
gaactgtgtcaaaacagctgctacactaacgggcatctttgtcttgttctcagtcttaaaaagagaatccccatctctaatgtaagcttggagatccggg

SEQ ID NO: 390837 - DNA, 107 bp, Homo sapiens
ccgggaggaaggaacgaggcaaggagctaaagcagcgtgcgttcagccctgggtcttgctatgttgctcaggctggtcttgaacccctgagctcaagtgatccaccg

SEQ ID NO: 390838 - DNA, 118 bp, Homo sapiens
ctgaaattcaatcaaatgagtcactctacttctctggaagcagaaagaggctggaagtttttctccagttccatgccattgcagtgtcaactaggcctcagttacttttcagtttgcc

SEQ ID NO: 390839 - DNA, 75 bp, Homo sapiens
agacacacttccgcgccgtggaccctgacggggacgccattgagacccagagcagcagttctgaagagatagtgc

SEQ ID NO: 390840 - DNA, 74 bp, Homo sapiens
agaagtgatcatggagaccaaggagaacagggcgaactttctgaccaagtatacaactacccagagggcctagg

SEQ ID NO: 390841 - DNA, 74 bp, Homo sapiens
tctggcggccatggtgttgctgctgtactccttctccggccatttcataattctgaatcatgtctgataacgga

SEQ ID NO: 390842 - DNA, 100 bp, Homo sapiens
agagggctacctggagacagtggcggcttattatgaggagcagcacccacctgtgccatatttcgggaggctgcaaggagggctcacagctcgaagaacc

SEQ ID NO: 390843 - DNA, 100 bp, Homo sapiens
cggcgccgcgccctcggcctgcacggttcccattctgtgatggggctcacacaaaacataacgaagagactggagacaatgtgggccctctgatcatcaa

SEQ ID NO: 390844 - DNA, 99 bp, Homo sapiens
tgtggcgatgtggtggcccaggaggcggcaggacggccaagaccagcgcgagggccctgggcaaggcccgacagcacagacgcagtcttcagcaaggaa

SEQ ID NO: 390845 - DNA, 100 bp, Homo sapiens
ccccacccagtgactggtccccatcctgggtcatgtggctggaattaccacggtacagcagggaagaactggaaactcagagaaagaaactgcccttcca

SEQ ID NO: 390846 - DNA, 90 bp, Homo sapiens
atgcatgctacagtataagaaaaaagctgctgcctatatgaagtctttgagaaaggttatcaatactctggctgaccatcatcatcgtgg

SEQ ID NO: 390847 - DNA, 90 bp, Homo sapiens
ctgctccggcctcgactacggcgagcctgagcgcggcggcggcccacgcgcagcgacagggagagactgtgagctgcttgtccccatcct

SEQ ID NO: 390848 - DNA, 100 bp, Homo sapiens
ctgagagtcaccacaaggccaaggcatatgctactttgattgaaaatgattcaaatccagaagttagacgggcagtgttatcatgtattgcaccatcagc

SEQ ID NO: 390849 - DNA, 75 bp, Homo sapiens
cgcgatctatgggggtgtagagggctgcatcttcctcccgtgaggctggccgagctccacgctgatctgaagata

SEQ ID NO: 390850 - DNA, 75 bp, Homo sapiens
ggaaagggccgctggaaaacccaaagcgtaggaaaacagaggctcttcggttgcagtatcgctacttagacttgc

SEQ ID NO: 390851 - DNA, 100 bp, Homo sapiens
ccccagtggggaacgtctggctgtgcttatgaaagggttactattgaacatgctagggctcggtcacgaggtggaagaggtagaggacgatactctgacc

SEQ ID NO: 390852 - DNA, 75 bp, Homo sapiens
ctaaaccgacctatactgtacagtgaacagctctcctgccacagctcctcaccccctgaaaatgttcgcctgctc

SEQ ID NO: 390853 - DNA, 75 bp, Homo sapiens
gttcgagatcagccagccgaccgaggttgtggcagcactgcctgaaggtatgagaccagattctaatctttatgg

SEQ ID NO: 390854 - DNA, 73 bp, Homo sapiens
acctgttgataaatgcaaaacagtggctgttgcagagctccatgaacctgcctccagacaaggcccggctcct

SEQ ID NO: 390855 - DNA, 83 bp, Homo sapiens
gtcaagatcgccgaagtagactgcactgctgaacggaatatctgcagcaagtattcggtttcaggtgttgaccaggggcaaga

SEQ ID NO: 390856 - DNA, 75 bp, Homo sapiens
ctgggagaagatggctttaaagaatacacttcaacctaggcgaggacttctaccgcgaggccatcgagcactgcc

SEQ ID NO: 390857 - DNA, 75 bp, Homo sapiens
gcggctgggactgaagagggacgggtcccgcggcgagcgagctcctgagggcctggaaatttacactccaagatt

SEQ ID NO: 390858 - DNA, 100 bp, Homo sapiens
ctcggccgatgaagtgcagaggtttttttctgagctttgaaaggagttttgcgagtgggagtattggcaaaaggattacttctccgaggagatagaaatg

SEQ ID NO: 390859 - DNA, 100 bp, Homo sapiens
cgcctctgcaatcatgggtcaccaagagaggctgagagaccaggcttcatagagcccagtgtgcaattaaacagactcaggtaactgttcagaaaattgg

SEQ ID NO: 390860 - DNA, 75 bp, Homo sapiens
gtcctggatcttctggggttccctatgcaaatgccaaaggaattggttatccagtgccaaacccaagtctgaaat

SEQ ID NO: 390861 - DNA, 100 bp, Homo sapiens
tacagtggaaaaaagcaaactgctcttgatcccaggagtaatggagtccaaagagaaacgagcagtaaacagtctcagcatggaaaatgccaaccaagaa

SEQ ID NO: 390862 - DNA, 100 bp, Homo sapiens
ggagagactccttgggggtcgagcacataacggggttcgggtgtctcgtgtgtgaacatcacaggctgcctgctgtttcccggggagatcatgaaacgag

SEQ ID NO: 390863 - DNA, 82 bp, Homo sapiens
agcgagccacgggagcgagccagcgcgagcccagcattgacctgctgcaggccttcgtggagcactggaagggcatcacgca

SEQ ID NO: 390864 - DNA, 100 bp, Homo sapiens
gcatgctgcagcttatgaccatcaatatgtttgcagtacacaactcccagctgaaagggtggatccatgctgtgctgacgcctgtggactgccttgcctt

SEQ ID NO: 390865 - DNA, 100 bp, Homo sapiens
gtggggaagacctgcgtcctttttcgtttttcggatgatgccttcaatactacctttatttccaccatagggcaaacttgaagataaatcttttgactcc

SEQ ID NO: 390866 - DNA, 89 bp, Homo sapiens
gcgcaggttcgcaagcgcataacccagtgccaaagaatcctttacttcatctaaaggcagcagtgaaagaaaagaaaagaaacaagaag

SEQ ID NO: 390867 - DNA, 97 bp, Homo sapiens
ctggaaaacttcccttccctttcgacaacatctggggaagatgtacgagacttcacaaaggtacttaagaacaagttcaggtcgaagaagtactttg

SEQ ID NO: 390868 - DNA, 73 bp, Homo sapiens
cttttaaagcagcctagcactagaagaaagctgatgtcctgaccactggagctggtaacccagtaggagacaa

SEQ ID NO: 390869 - DNA, 73 bp, Homo sapiens
taagccaagggattcaggtgtggtgccggtgggaactgaggaagcgcccaagaacttattgaaagcgcaatgt

SEQ ID NO: 390870 - DNA, 87 bp, Homo sapiens
cggcactaggcagcggaggagcccgaccgacccgcatgatgccttcttctgtagagtgggcgctttgcagaatacgtgttgaatgaa

SEQ ID NO: 390871 - DNA, 76 bp, Homo sapiens
caagaggaggaatcacgctcggaaacaatgggctgaaggtgatgtggccgccctcaaccgacgcatccagctcgtt

SEQ ID NO: 390872 - DNA, 50 bp, Homo sapiens
cgctgcgcaagcacgctgaggaggttcaccggaacagcacaatccgccct

SEQ ID NO: 390873 - DNA, 50 bp, Homo sapiens
ctcctgagtggctgggactacaggccttgtccatcaaaacctcatcccta

SEQ ID NO: 390874 - DNA, 83 bp, Homo sapiens
cactccgtcccccgcgggtctgctctgtgtgccatggacggagctacatggaccccatgaacgagtacaacgcgctgaacgag

SEQ ID NO: 390875 - DNA, 100 bp, Homo sapiens
ccctactgggggccttggtctgaacttggccctgaatgaaatccacgatgggatgaacctggagctttattatcaatagatgagaatcctcatcttcctg

SEQ ID NO: 390876 - DNA, 75 bp, Homo sapiens
gcacactgcccaggccctgggtgtctctagcctcaaagatgctggatctcatttgccacatcgtagaaaccaatt

SEQ ID NO: 390877 - DNA, 110 bp, Homo sapiens
aaactttggcgacaatgttggcctgtctgcaagcttgtgcaggctcctggtggacccatgtggaaatgggacctccagatcccattctgggagtcactgaagcctttaag

SEQ ID NO: 390878 - DNA, 75 bp, Homo sapiens
caagatgtggtgatgacagaatcagcttttgtcatgatgatgggcagcgcccgagtggcggagctgctgctgctc

SEQ ID NO: 390879 - DNA, 110 bp, Homo sapiens
ctccagtcgtcagcccacttcctagctgaacagcgcgaggcggcggcagcgagccgggtcccaccatggccgcgaatggacatgggcggctttgccatctggtgcaagaa

SEQ ID NO: 390880 - DNA, 83 bp, Homo sapiens
attgaagccgcctctgtattacttaccagaacccagtgacttgattgtaaaaatttacagagcggaatcatatgctggtctcc

SEQ ID NO: 390881 - DNA, 100 bp, Homo sapiens
aacctgataacactgcatgaaatgttagagagtcaactactggattttctgtctggcaaacagtatgcagtaggtgatgaaactgatctttctataccaa

SEQ ID NO: 390882 - DNA, 76 bp, Homo sapiens
aggttcaagatgtaaagaagactattcagaaaaagatgattgacgctgaatttgtaagtgtctgggttcgagatcc

SEQ ID NO: 390883 - DNA, 73 bp, Homo sapiens
gctgacacggaaccctcacctcaacaaggaacagcgccttttgatagtcctaagtaattgctgctatctagaa

SEQ ID NO: 390884 - DNA, 100 bp, Homo sapiens
cgcctcccaccatggctctgaagagaatccacaaggtgatttgatgaaggctgctgcaggagagttcgcagatgatccctgctcttctgtgaagcgaggc

SEQ ID NO: 390885 - DNA, 51 bp, Homo sapiens
cttccatcaatcatatctcacagcctcttagcaaatatccggctgtgatca

SEQ ID NO: 390886 - DNA, 75 bp, Homo sapiens
ggccttccagtacacagacgagcatggggaaggaacaccagtgtattcagtagcgtggggccctgattcagaaaa

SEQ ID NO: 390887 - DNA, 75 bp, Homo sapiens
ccaggatctcgggctcggaacgagactgcacggccagaaacgcgaaatgctgtcggccttccagaggctgttccg

SEQ ID NO: 390888 - DNA, 58 bp, Homo sapiens
ccgcaacagccccttcgtcccaagttggtgggacaagtgatgttgaagtgaatgaaaa

SEQ ID NO: 390889 - DNA, 75 bp, Homo sapiens
gccagtcataatagatttcgagacaacagtggccttctgatgaatactttaactgaagaaaattcgatcactgct

SEQ ID NO: 390890 - DNA, 100 bp, Homo sapiens
cagcatggagggccccgacgatagcgaggtcacctttgcattgcactcagggggaagacgttttcatcccgctaatcttgggaataagaggaggaagcgg

SEQ ID NO: 390891 - DNA, 87 bp, Homo sapiens
tatcaactctggtatggacacagcttctagtgttgctttggatcttgtggaaagtcagagttgaccccctgtttacagtgccagcgc

SEQ ID NO: 390892 - DNA, 88 bp, Homo sapiens
agagccgggagttcaagaagaacactccagaggaggagccgaggaaggtctgcttcacctacgacctgttcctgaacctggaaggcaa

SEQ ID NO: 390893 - DNA, 98 bp, Homo sapiens
tacctctggaagaagcggaaggatgggaagaccacccgagaggaccacatgaagctgaaggtccagggcatggaggcatatgagcccccgccacctcc

SEQ ID NO: 390894 - DNA, 82 bp, Homo sapiens
gtgtgatctcgagagacctgcgtacattcggggtgccagaaggaaagcatagcggacaaggcaaaatctcagcaagttcgga

SEQ ID NO: 390895 - DNA, 100 bp, Homo sapiens
ttctctgtttcgttttcaggtcaccaaccaggccgaagaacagttgagaattgttgaagaacaaagaaagattcatgaggaaaggatgaaactagaacaa

SEQ ID NO: 390896 - DNA, 50 bp, Homo sapiens
aaaaaactttgctgccaatactctggatttacaagggtcccgactcttcc

SEQ ID NO: 390897 - DNA, 75 bp, Homo sapiens
cagaaagaccacttaagcaaacttaatataccagacactgcaactgaaatttaagatccgcattgaagacccacc

SEQ ID NO: 390898 - DNA, 100 bp, Homo sapiens
tggagcgcggaaatctggaaccgggatggcgacgtctacactgagtcggaggcgaaggccaagtcctgtatctgccatgtctgtggcgtccacctcaaca

SEQ ID NO: 390899 - DNA, 134 bp, Homo sapiens
cgaggaggcccgggagcgccgagcgtcgccgccgccgccgccatgaacaactcgggcgccgacgagatcgggtggcctgtgagtacggcatggtgcacgtggtctcccaggccgggggccccgaaggcaaagac

SEQ ID NO: 390900 - DNA, 75 bp, Homo sapiens
cggacgggcactgggcgactctgtgcctcgctgaggacaaatttacatgtattggagaccagaccagaagccctt

SEQ ID NO: 390901 - DNA, 82 bp, Homo sapiens
tttctcaacccagagcaaattgagacgtccggaaccaaaaacttttgctagaaaatcagcttttacgagagaaaactcatgg

SEQ ID NO: 390902 - DNA, 100 bp, Homo sapiens
cctcaatgacctccagtaagggagggcaagaagatatgaacctgagccttcagtcaagaccctccagcttgcctgtcattgctagaatcgtggatggaag

SEQ ID NO: 390903 - DNA, 74 bp, Homo sapiens
attggaggcagcatcgcaaacttcaccaacgtggctgccacgttcaagtggagacctttggcgacttggccttt

SEQ ID NO: 390904 - DNA, 101 bp, Homo sapiens
gaatcaatgagaacacagggagcgtctccgtgacacggaccttggacagagaagtaatcgctgtttatcaaattcgtgaagaaagcaacaccaaaatcgac

SEQ ID NO: 390905 - DNA, 75 bp, Homo sapiens
gagctgcgcctggacctggttctgccttctggacaatctttccgggacctgatttcccatcgccttctgtccccc

SEQ ID NO: 390906 - DNA, 75 bp, Homo sapiens
agctctttgaccttctggatgtccttgagttcaaccaggagccggcatcatggattccttcaaagtagtgctgga

SEQ ID NO: 390907 - DNA, 98 bp, Homo sapiens
gccaacagctcggatgcgaccctcccagaccggccgctctcccctcctctcacggcacctcccaccatgaaggtgtacgaagccatcgacagcagaga

SEQ ID NO: 390908 - DNA, 75 bp, Homo sapiens
ccacaaaccgctgccagaaaagtgtggatgtggaagcagccaagcgggcagaagaggaattgctccttcatgaca

SEQ ID NO: 390909 - DNA, 90 bp, Homo sapiens
atgagctgagggctgtggtgcggcaccggcgagccagccccccttacccaggaatggaacaacctccacaccatccttactatcagcacc

SEQ ID NO: 390910 - DNA, 96 bp, Homo sapiens
cgatgaagtgcagaggtttttttctgtgtaccacatgaaggaagatggttgggtgaaagtagaaagtacagatgtcagtgacctgctgcaccagta

SEQ ID NO: 390911 - DNA, 98 bp, Homo sapiens
gcagtcagagcatcgggagcaacgtcacgctcatcaccctgaactcggaaggaatcgggcgcctgattgctgagtgtcatctcaaccccatcatcctg

SEQ ID NO: 390912 - DNA, 100 bp, Homo sapiens
aaaacttgcctgctctctacactattttccaaggagaggtacaacagagcctgtatcatggaggggtccagcatgaggaattcggactggttttcatttg

SEQ ID NO: 390913 - DNA, 83 bp, Homo sapiens
tcagaatggagaatttgcaactcatcatagtcctgtcattgaaagaaaatcttgcaaggtgttggacacttactgaagcagag

SEQ ID NO: 390914 - DNA, 98 bp, Homo sapiens
aatttgtttcacccccgtggattccagtgggcccgacagcgcaacaggaaaggaatgtagaagctgtaagaaatgcaaaagatgagcgtgttcgggaa

SEQ ID NO: 390915 - DNA, 100 bp, Homo sapiens
gcagctgcacagcctgagaaactccttcaagctgcccccgcacatcagcctgcaggtgcagcccggaatcccgaggatgtggaccgggagcggcgagaac

SEQ ID NO: 390916 - DNA, 82 bp, Homo sapiens
tggagcctcagttggaagcagccgatccagcctgcggagcctgtggggcagatttcaacactacacttgcacaatgtctttg

SEQ ID NO: 390917 - DNA, 100 bp, Homo sapiens
atgtgtgtgcgcgcgaaggagcggaagaatggcagtgctcaaactcaccgaccaggagcatctttccttgaagaagtacattattgacattgtggttgaa

SEQ ID NO: 390918 - DNA, 98 bp, Homo sapiens
tcgtcgaaaggattggattggcatctttagatgtctcctttcctcttgggccgggcactttgggctgccagtcggttcactgttgctatgtcccctga

SEQ ID NO: 390919 - DNA, 100 bp, Homo sapiens
atgctcttcaggatagtatcttggccagggaactcaaacagcagatgcagatcatggagctttgtggtgcaacaagacttggttattttggaagaagtca

SEQ ID NO: 390920 - DNA, 82 bp, Homo sapiens
ccgccgctcaccgcagccccctcctggcgacccgcaaggtgaaaagttcggaccctttgctggagagaagagaatgcctgaa

SEQ ID NO: 390921 - DNA, 90 bp, Homo sapiens
ggcgcaccagatgtaccggaccctgttcttcaggaaggaagcagccaccctcgccatggcctccccgcccgcctgcccctcggaggagga

SEQ ID NO: 390922 - DNA, 101 bp, Homo sapiens
tccttcatggcttgacagttccacagctccctgtccacactccccaagggctcagatctgctccctggagcccccatcctcagtctgcgcttctcctacat

SEQ ID NO: 390923 - DNA, 90 bp, Homo sapiens
atgacacaaaagctgataccagagctatacagctgctattaggcaggttgggggccgtcccgctcctaaggcaggaagatggtggccgca

SEQ ID NO: 390924 - DNA, 82 bp, Homo sapiens
agctgctcccttcgccttcgccctttccacctcgcggcagttcggttgaaatcacaaagattagacacctttttagataggt

SEQ ID NO: 390925 - DNA, 90 bp, Homo sapiens
acaatgaggaggagacggagcacgccaaagggatatggctttagttgcccctgaagctccttcagaacaagccagaagagtttttcaaac

SEQ ID NO: 390926 - DNA, 87 bp, Homo sapiens
agaaatgatgcaattgtatatcagaactgttggcaacacttacggtaatttttcgttagcaaccatgtttcccaggagggaatttac

SEQ ID NO: 390927 - DNA, 83 bp, Homo sapiens
ccccatgagccgagccaccagtggctccagtttgcctgttggaatcaataggcagtgttatagttttgccgctggactcttcc

SEQ ID NO: 390928 - DNA, 90 bp, Homo sapiens
gtcccctgctttaaccatcgaaaatgagttaagtgggcagaccaacatccacctcagcaaaaacttcttcctgacgaatcgcgccaggga

SEQ ID NO: 390929 - DNA, 74 bp, Homo sapiens
ttgccggaggagcccctcaggccgttgttgccctggatgcccaaaatattgtagctgtttcatgtggagaagct

SEQ ID NO: 390930 - DNA, 100 bp, Homo sapiens
gcggaagtgcaggacaacaatgggaatacgccactccacctggcctgcacctacggccacgaggacgattttatcctggaacattacagtgaagatggct

SEQ ID NO: 390931 - DNA, 100 bp, Homo sapiens
gttctgggagacgcacagctaagatgccaggacatcctggaagctgggaaaaggaagatgaagtcctcagtacattctgaagaagatgattttgttccag

SEQ ID NO: 390932 - DNA, 100 bp, Homo sapiens
ggcgtgaggcgccgcccgggtgtccccgcggcgcaggaggcggtggagcgcagagcgggcgagcgcgtgagaaagatcagtctaaagaaaaggagaagaa

SEQ ID NO: 390933 - DNA, 100 bp, Homo sapiens
gcggccagagagcagcagccgcctgatatacacagaagttcctgctcttcgctacaatgagggaaaaaagtggcaacatcgatagaggctagaggcagag

SEQ ID NO: 390934 - DNA, 100 bp, Homo sapiens
tgctcaactccagcctcatgcggatcaccctgcggaacctggaggaggtggagttctgtgtggaagttgtcgccgtgatcctgaaggcgctgacctacga

SEQ ID NO: 390935 - DNA, 96 bp, Homo sapiens
ctgaagtgcccatgccgcttgctccggagaagggacctaccagggccagtgggtcggtggcatgcgccagggctacggcgtccggcagagcgtccc

SEQ ID NO: 390936 - DNA, 97 bp, Homo sapiens
ctcgagctgcggtagcagcgactcatgagagcgcggccggaggacaggccttccggagcagtactacagcctcacctggttcctgagccccatcctt

SEQ ID NO: 390937 - DNA, 99 bp, Homo sapiens
tttagaagatttggagaccctaaggctcttctcaagagtgtccttcagtgaatctacagacctattttctcaggagctcagcctggccttacttcagtg

SEQ ID NO: 390938 - DNA, 120 bp, Homo sapiens
ccgggaggaaggaacgaggcaaggagctaaagcagcgtgcgttcagccctgggaacatccagtcatggataaaaatgagctggttcagaaggccaaactggccgagcaggctgagcgata

SEQ ID NO: 390939 - DNA, 90 bp, Homo sapiens
ttcacagcatgtggttttgtgcaggtaaaataccatgaagattttgaaaaaacaaaggggagaggctttactcccgtcgtggacgatcct

SEQ ID NO: 390940 - DNA, 75 bp, Homo sapiens
actattggaaagtttttccaagctgacattgcagaaaatgctttgaactgataaatttcaaacggaagagagtgg

SEQ ID NO: 390941 - DNA, 101 bp, Homo sapiens
gaacccagaagtggaagggacgctaattcgggtacccattccccagtgctgggtcttcagctctaaagaggccatttgaagatggattaggggatgataaa

SEQ ID NO: 390942 - DNA, 82 bp, Homo sapiens
gccgcgccgtccgcgccgcccgttctggttacaggaggttccagtggcatcgggaagtgcattgctatcgagtgctataaac

SEQ ID NO: 390943 - DNA, 100 bp, Homo sapiens
caatcttccgtaacccctgcacagagcagattctgaaacttcttgacaatttgcttgcgcttataaggttttgcacactagggaccaagaagccctcggg

SEQ ID NO: 390944 - DNA, 101 bp, Homo sapiens
agctgtcaatgaagactccatcattggtgtggaaggagaacatgaatctctcagaggcccaagtacaggcgttagcattaagtagacaagccagccaggag

SEQ ID NO: 390945 - DNA, 75 bp, Homo sapiens
tcatggttcggctttttgtggtgattgtgatgtttgcctggtctatagttggtgctgatgggaagggtgcctgac

SEQ ID NO: 390946 - DNA, 75 bp, Homo sapiens
gcccaagaggggacttgatgttaacaaatgtgagattgccagatctgtgactttggcctggcccgtgttgcagat

SEQ ID NO: 390947 - DNA, 75 bp, Homo sapiens
ttcctggtccagggaccacattttgaaatcactaatgtaagaagaagatagtggtgagctggcaaagccaaagat

SEQ ID NO: 390948 - DNA, 87 bp, Homo sapiens
tggggaactgcctccggcttcacgttcagccagtgctacccctgaatttgaaggtagaggaggtgatgaccttggcaccgagatcgc

SEQ ID NO: 390949 - DNA, 75 bp, Homo sapiens
ttgcgggatcaggagaaacaggctcgccaggtccgaggccccagccagtagagacggggtttcactgtgttagcc

SEQ ID NO: 390950 - DNA, 73 bp, Homo sapiens
ccgagtcactactgcctgcctgcctgcctgctacgcaaagccttctagacaagctcagtggaatctgaagggc

SEQ ID NO: 390951 - DNA, 75 bp, Homo sapiens
gtttggtcagcagtcacaggcaaagaacactgcctcatggggatcaaaggaactgtgaagcgtagcacagacggg

SEQ ID NO: 390952 - DNA, 83 bp, Homo sapiens
cgcggacagcgggctggagcctgacgagctggcgggtgctgcagggtgcacagctgatcgccgtggcctcctcggaccccgcg

SEQ ID NO: 390953 - DNA, 83 bp, Homo sapiens
ccagagcctcagtttgtgcaggacaccgacatggaacagggactcactggggattatgctgctgcccagttacgccagtatca

SEQ ID NO: 390954 - DNA, 51 bp, Homo sapiens
tgacagtctgcctctatcttacaaaaaagcttgtggtgaaggggggcaaaa

SEQ ID NO: 390955 - DNA, 90 bp, Homo sapiens
gagccacctgctgcctgggcccaaagagcctgttttggcactcttaaaagacccattttacatgggcttgtaccagaaacgagatcgcac

SEQ ID NO: 390956 - DNA, 100 bp, Homo sapiens
tggaacttcgttgcttgcttgcctgtgcgcgcgtgcgcggacatggcctcaaacgcgatggcaagccggcaggtggatattgcaactcagggctggttca

SEQ ID NO: 390957 - DNA, 98 bp, Homo sapiens
agaaagcatcgtcctaggaatggatttctcctctaatgacaggttacgaggcaaatgcaagaacatgagcaggactctgagcttagagaacaaatgtc

SEQ ID NO: 390958 - DNA, 75 bp, Homo sapiens
agccccctcctggcgacccgcaagttgacatcatggacatatgtgagtccatcctggagaggaagcggcatgaca

SEQ ID NO: 390959 - DNA, 80 bp, Homo sapiens
cggatagagaagagcgagtcgtcgtgagcgcggtcggcggtgctcgcggtgaggatcgatgacctggaccacctcccgga

SEQ ID NO: 390960 - DNA, 98 bp, Homo sapiens
ggacattctttcaccagagtttcatgaacatttcaataaattgatggccagacctgcagttgctctacactttcaggccaaatttgagtttcatcatg

SEQ ID NO: 390961 - DNA, 75 bp, Homo sapiens
gcttttcctcgctggggtgtacggaaccgaatattgtatctgacgcatcctgtaatactgaagagcaactgaaga

SEQ ID NO: 390962 - DNA, 89 bp, Homo sapiens
gcagactgtggagccgggagccggcaggcgtctacggtgacgtgcagcgcgtgaagatcctgttcaataagaaggagaacgccctagtg

SEQ ID NO: 390963 - DNA, 100 bp, Homo sapiens
aatcaagatgaatatgaccctatggaagcagaagaagctgaggatgaagaagatgaacaaaatccagtctcatagcagaggagaatataatgtttacagc

SEQ ID NO: 390964 - DNA, 51 bp, Homo sapiens
cagccagacgttctagaagtgcaagcagatccagctccaggtcccacaggg

SEQ ID NO: 390965 - DNA, 100 bp, Homo sapiens
tcccaatgctccagaaggacaaactggtaggagcaattgtctactatgacggaaaatgtttataggaggccttagctgggacactacaaagaaagatctg

SEQ ID NO: 390966 - DNA, 82 bp, Homo sapiens
gactgaggccggacggggcggacggcgacgcagcccgcggcagaaggtcagcccaaggccaaccccactgtcactctgttcc

SEQ ID NO: 390967 - DNA, 100 bp, Homo sapiens
ttctgtgtggagctcagcggctacgacctgaaactctacgaggataaccagacagttttgattcccaccatggccatcacccagtttcggttatttaaat

SEQ ID NO: 390968 - DNA, 80 bp, Homo sapiens
taaggactgggacaatgaatactgcagcaatgagtgtgtggtgaagcactgcagatgttcattctggacagagtggaagg

SEQ ID NO: 390969 - DNA, 97 bp, Homo sapiens
agaaatcagaaatgtggcctcagaaaccctcttgtctctggttccagccaccaagttaaacacgatgagcaaaaccagccttggccagagcatgagc

SEQ ID NO: 390970 - DNA, 100 bp, Homo sapiens
aaaagctgatgctggcaaggaggggaataaccctgcagaaaatggagatgccaaaacagaccaggatgaaactgattccaagacagcctccccgtggaag

SEQ ID NO: 390971 - DNA, 100 bp, Homo sapiens
gaggacgatttcctggggggcatggagtgcaccctggggcaggcctgtagtggtggagacacgcccagtggatgatcctactgctcccagcaacctctac

SEQ ID NO: 390972 - DNA, 75 bp, Homo sapiens
gttcagcccagaggagaaactcgctcgccttcagaagacagtgtctaccatcagagggagatctctgccccctgg

SEQ ID NO: 390973 - DNA, 100 bp, Homo sapiens
catacttctggtataaaaaaagctctgtggtgcagtgaggataaacagattctttctgctgatgacaaaactgttcgtctgcagatctccaggggagccc

SEQ ID NO: 390974 - DNA, 100 bp, Homo sapiens
gtggaaaagttgcagtttgaagaggaggactttgtcaagtgtcttggcaaatcttcctttcttcacgtaagatgtgtattggcggcagccgtgggaggtc

SEQ ID NO: 390975 - DNA, 100 bp, Homo sapiens
acaaccatcaccattgaatctgaaggaaaaggttccacctttgctaagcctgattcggactccaccaaacactcaactccatcgaatagctccaacccca

SEQ ID NO: 390976 - DNA, 83 bp, Homo sapiens
atctctatgagcttttgaaacttgttaagatactctggatgaatattttgaatatgatgcagaggagttcttggtctctttgg

SEQ ID NO: 390977 - DNA, 89 bp, Homo sapiens
aagtgttaagaattgcctttgggactctgaaggctgaagaactgtcaagtaatccacctctggctaccatccttattcctcctcatgct

SEQ ID NO: 390978 - DNA, 76 bp, Homo sapiens
tcagctggggcagaagcgcgtggtcaagattgttgaacagataaatacgaaactgccatcatcatttgtagaaaaa

SEQ ID NO: 390979 - DNA, 100 bp, Homo sapiens
cgggtccccggcagcggggtaggatggcgctaaagcggatccagaaggttggcgggacgaagactggcgtggtgcggtacgtgggggagacagactttgc

SEQ ID NO: 390980 - DNA, 90 bp, Homo sapiens
tcggtcggtacagtctctgcacctcgcgccccagcagggggtgagtggtgcactgacagtgcttatgaaggacgcaatcaagcccaatct

SEQ ID NO: 390981 - DNA, 98 bp, Homo sapiens
cagaagcaaaatgacacggagaacaagaaggtgcatggggatgtcgtgaagtatggcagtgtgatccaggactaccgtggtttgttctgcagcctcct

SEQ ID NO: 390982 - DNA, 101 bp, Homo sapiens
tgaagcggcaactcgggcgactgctgctgctcctgagggtgctggaccccctgctctgcgacttcctggaatgatctctgcctttcacaaagaccaccttt

SEQ ID NO: 390983 - DNA, 75 bp, Homo sapiens
ccagctcgagtctcaagtggacaatgtgttgtacatcagtacacagaagagacggatgtgaagacaccaagagag

SEQ ID NO: 390984 - DNA, 73 bp, Homo sapiens
tgagctcagacaggagaccaacaggggcccatcctgatggagctgcagacttaccgttaccacggacacagta

SEQ ID NO: 390985 - DNA, 100 bp, Homo sapiens
gttaattttgcagaagataaaggagagagcacatcagtattccggaaaagactaaatgtgttaaatgggcttgccaacaatatggatgatttgaagataa

SEQ ID NO: 390986 - DNA, 76 bp, Homo sapiens
agattatctacaacactgatgagatgccttcaattaagttgcagagttctgatggagagatatttgaagttgatgt

SEQ ID NO: 390987 - DNA, 82 bp, Homo sapiens
gaaacatcatccagttttatggagtaattcttgaacctcccaactatggcattgtcacagaacgatatcgcattcagagtga

SEQ ID NO: 390988 - DNA, 100 bp, Homo sapiens
gctgctcaagttccagatttgatggtcagtaggacagaaggtaacattgatgactcgctcattggtggaaatgcctccgctgaaggccccgagggcgaag

SEQ ID NO: 390989 - DNA, 102 bp, Homo sapiens
cagtcctcatcctggatgaagccaccagcgctttggatgccgagagcgagtatctgacaatgcagatcttcgtgaagactctgactggtaagaccatcaccc

SEQ ID NO: 390990 - DNA, 74 bp, Homo sapiens
caaagggaaaactacagccaccacacacaaggtgtctgtgatcaaagttttgggattcatgttgcagagcttgc

SEQ ID NO: 390991 - DNA, 100 bp, Homo sapiens
acttcttgaaaagtactgtggcttccatgaagataacattccccagctggaagacgtttctcagttcctgcagactagagcatggactaggctatatgcc

SEQ ID NO: 390992 - DNA, 100 bp, Homo sapiens
ctgggcgccggcgcttacagcatgagagctgcagctttggaacagttcaagtctcttggtgctgagcccttggaggtggacttgaaggaatctggtgagg

SEQ ID NO: 390993 - DNA, 90 bp, Homo sapiens
aacagaagagagaatgaaatgcttatattacttatatgctagtttggatccaaatgctgtaaattttgtttggctatgccaccacagtca

SEQ ID NO: 390994 - DNA, 97 bp, Homo sapiens
gaaaattgaaaaaatcttaaactctcaaagttctaaagaaacctctgcactagaagcaagcaggtcagctcaagtaatgtcgtcttgaagacgggat

SEQ ID NO: 390995 - DNA, 89 bp, Homo sapiens
ccgccctgagtcactgcctgcgcagctccggccgcctggctccccatactagtcgccgcgagtaaccagctcataaatcacatcgaaca

SEQ ID NO: 390996 - DNA, 98 bp, Homo sapiens
gcatcttcccgaggcccagaatccaccgtcaggcataaattgattattcctcgcccacatctgtgccaggttctgtcagtgtgtgtggaagaagaaaa

SEQ ID NO: 390997 - DNA, 90 bp, Homo sapiens
ggaaggatccgtacaggggcccaacactactccaccaaccgaagcccccaaaagaatccagactccaaaatgatgcaaatcaacctgact

SEQ ID NO: 390998 - DNA, 100 bp, Homo sapiens
tttgagtgagatggtcccagaggcctggaggagcggactgttttaattgataaagaccagagtccaaaatggaaaccagctgatctaaaagaagttactg

SEQ ID NO: 390999 - DNA, 83 bp, Homo sapiens
gccgaggcggcggtgtgggcgcgtcaggccgcgacgagggcgctgaggattttttatcaagcagaaatgcatcgaacaacgag

SEQ ID NO: 391000 - DNA, 50 bp, Homo sapiens
ggaaacgcttgtagggtttcaccagagagcacagtcagacgaactcgaaa

SEQ ID NO: 391001 - DNA, 90 bp, Homo sapiens
ctccagcccttcttgcagcgctactacgaggttctgggtgctgctgccaccacggactacaataacaattgctacaaggtgagctgcctg

SEQ ID NO: 391002 - DNA, 90 bp, Homo sapiens
cccagaacagaggactctaattgttactcattccaatcagagcagtcattatggcgaaccttggctgctggatgctggttctctttgtgg

SEQ ID NO: 391003 - DNA, 78 bp, Homo sapiens
tggccggccttggtgcggcgagccgagcgaggcagctctgagccgcgcggttatgaagacagtatggagtttccagac

SEQ ID NO: 391004 - DNA, 131 bp, Homo sapiens
tcaagtttccagcaaatgccaatagtactaaagaggaggtggaaatgaattgggacatggtacaggtttctggccagaagaaccaactccacattcaaccaggttgtgttgaagaggttgtttatgagtcg

SEQ ID NO: 391005 - DNA, 97 bp, Homo sapiens
gcaaggacacccttcttcataatggaaatcaaagcactgcagtttcctcctgaaggctggctccggctctccctcaataatggcagcatcacccacc

SEQ ID NO: 391006 - DNA, 51 bp, Homo sapiens
aaccaccgccctggccatctaccatgtggcctgtttaaagaagaaaacccg

SEQ ID NO: 391007 - DNA, 100 bp, Homo sapiens
cctgtgacctctgcctaccatccataaaatactcattcccctctcagcacactgggaccccaaagtttttacagcttatgacgtatttcgagtaagtcta

SEQ ID NO: 391008 - DNA, 101 bp, Homo sapiens
tgccctccggaagactctggctgacctccagctggagtatctggacctgtacctgatgcactggccttatgcctttgagcgcggtggctcatgcctgtaat

SEQ ID NO: 391009 - DNA, 98 bp, Homo sapiens
agccgccgccggcgccgaacttgggctcgggaagccggcggaccgcgtcctgcgccggagcagaagttaccccccaagcgtccagaactccctccaac

SEQ ID NO: 391010 - DNA, 75 bp, Homo sapiens
ggaagccatgaggccaaaggcagttgtattggagaaggaagccaacatccttttggagccatgaatattgtccga

SEQ ID NO: 391011 - DNA, 100 bp, Homo sapiens
tcccactggtctagaacccggctctgagggcactggcctagttcccgacttgtttctcaggttcttaagcagatggctgccaggtgggcctaggtgtgtt

SEQ ID NO: 391012 - DNA, 83 bp, Homo sapiens
agccaccctgcccccaagaaggaagtcatcatgggccggcctggaacagaattttgtagccaccttggctaatgggatgagcc

SEQ ID NO: 391013 - DNA, 101 bp, Homo sapiens
aaactaataataataattccagcttctacacaggtgacagagctgaatgaacctctctccaatgaagatcgaaatctcctctctgtggcctacaagaatgt

SEQ ID NO: 391014 - DNA, 100 bp, Homo sapiens
cagaagaacatggccatgttggcccagcaaatgcaactagccaatgccatgatgcctggtgccccattacaacccgtgttggtgcttcccgtgctgctgt

SEQ ID NO: 391015 - DNA, 78 bp, Homo sapiens
gccggtgcagcagccttcagcttttggcagcatgaaagttagcactgccccagagcacatcagctatgtgccccagct

SEQ ID NO: 391016 - DNA, 108 bp, Homo sapiens
cttctccactttcgccagcccgtgccgcgagcgcggcctgcaggaggtcaccgacgatgagggcgcacctgctgtcctggagcttccgatctctgttcggggaccctg

SEQ ID NO: 391017 - DNA, 100 bp, Homo sapiens
cgaggagtcagaaactcagccactggttgccttggtaggcaataaaatcaactttgaccattttcagattctgcgggccattggtaaagggagttttgga

SEQ ID NO: 391018 - DNA, 100 bp, Homo sapiens
cttgggagagctcctgggccacccctcctttcaggtcaaggtaatggcaccattgacttccccgaatttttgactatgatggctagaaaaatgaaagata

SEQ ID NO: 391019 - DNA, 96 bp, Homo sapiens
tcaagcttaggaccacccaccatgcctatccagctccagaaagcagtggggcctgagatcaccaagacagacctggtccctgccttccagaacctg

SEQ ID NO: 391020 - DNA, 101 bp, Homo sapiens
ggaaccgcagccggagccggaggcgggagcagcgagccggagccccgggcgctcgaatgcaggatagccatccgagcttgtttcctggggtttgtgttcgg

SEQ ID NO: 391021 - DNA, 100 bp, Homo sapiens
agaagccacccgagcggactcccgagtggaatgagaccgtggagctttttcgtgctaagatgccgttacggaaacatcgctgtcgtttcaagagctatga

SEQ ID NO: 391022 - DNA, 100 bp, Homo sapiens
gcaaggaggagtggaatgaaatacggcaccagattggaaacacactgatccggaacagcgacatctcactcatgaaaatgtacagcgcaagcaagccagg

SEQ ID NO: 391023 - DNA, 118 bp, Homo sapiens
ctcattccggagaagaagggcctcttcctgaagcatgtggagtatgaggtttccagccaggatattagaaatggctactccccagtcaattttcatctttgcaatctgcattttaatg

SEQ ID NO: 391024 - DNA, 100 bp, Homo sapiens
gttgccgctgccgctgccgccatcgtgccagcccctcgggcgaaggaggtggaggagaccatcgagggcatgctcctcaggctggaagagttttgcagcc

SEQ ID NO: 391025 - DNA, 100 bp, Homo sapiens
cctggctcaaggcctctccaccatgcttgccaacctcttctccatgaggtcattcataaagatatgaagcaacagcatgtcatagaaaccttgattggca

SEQ ID NO: 391026 - DNA, 75 bp, Homo sapiens
agaggaccccggtacatctgaaagccgggaaatggtgtatctacatcagcaatcaaaatggcatcaaccagactt

SEQ ID NO: 391027 - DNA, 98 bp, Homo sapiens
gcgacttggggtccaacttctttgcccggctgttcgggtttcagccgaggcctgcctggagccccagatcaccccttcctactacaccacttctgacg

SEQ ID NO: 391028 - DNA, 75 bp, Homo sapiens
gggccccaagcggccggagcggcgccatggaggagggggcgccgcggcagtcttcaggagacatatgaagcaaaa

SEQ ID NO: 391029 - DNA, 90 bp, Homo sapiens
caggagcggaacaacgtcggcgagcgggatgcaacaaggagacgcgcctttgccctggtctctcaagcgtatacttcaatcatcgccgat

SEQ ID NO: 391030 - DNA, 90 bp, Homo sapiens
aaagatggatttttgcatgagacgcttctggacagccccactgtgttctccttgcctcaaaagaaaactcggcacctgttaaacttggag

SEQ ID NO: 391031 - DNA, 75 bp, Homo sapiens
tgtcttggtatactacatggcaaaatgggaaagtatcagatgtagaaggtggtgatggactgcagctcagaaagg

SEQ ID NO: 391032 - DNA, 74 bp, Homo sapiens
agtggagaatataaattggggtctctttttgaaggtcctaggcctacttacaagcctccagtctcaaattatcc

SEQ ID NO: 391033 - DNA, 75 bp, Homo sapiens
cctggctcatcctgggcagcaaggaacagactgtcaccatcaggaggatacgaagcgttttcggcttcctgcccg

SEQ ID NO: 391034 - DNA, 75 bp, Homo sapiens
cgcgacgcgcccggcccggagcccccagcgcagcggccgcggaggaggaagccaagaatctggtgagcgaagcca

SEQ ID NO: 391035 - DNA, 100 bp, Homo sapiens
cgggtccagctctggaaggacctaaaggcaaccctgggccccaaggtcctcctgggagaccagactccagcgggaggaagaagaggcctttgccagcagt

SEQ ID NO: 391036 - DNA, 100 bp, Homo sapiens
gaaaaactctaaacgggattacactgggtgctgctacccccgtatgatgatgccactgtgaatggtgctgccaaggagccaccgccaccttacgtgtctg

SEQ ID NO: 391037 - DNA, 90 bp, Homo sapiens
tgctgacttacgcttgtttgaggctatggagttactagtagagaaagcaatcagcagtgcttctagccctcagagccctggggatgcact

SEQ ID NO: 391038 - DNA, 144 bp, Homo sapiens
gtgggcgtcgtggccttcggcctggtctacgtgctgaaccacgctgaggggctgggagccgcgcacaccaccatcacgagaacctggagatgtagctactccaccacggaagagaaagaagatagtggttgaagccccagcaaa

SEQ ID NO: 391039 - DNA, 108 bp, Homo sapiens
cagaggttacccagcagaccatagagctgaaggaagagtgcaaagactttgtggacaatttaccttcagctttaacaaaaaattggccgtcaaaacctgagtcctgtc

SEQ ID NO: 391040 - DNA, 100 bp, Homo sapiens
tctcttcccactatctgctaggaaacacgagggacggctgtcctcagcgaggggccgtgcacccgctcctgagcagcgccatgggcctgctggccttcct

SEQ ID NO: 391041 - DNA, 100 bp, Homo sapiens
gctggacggaccgcccaaccccaaaagagccaaactcagctcgcccggtttctcggcgaatgacagcacagtttacaggagaacgccatcggggatgacg

SEQ ID NO: 391042 - DNA, 75 bp, Homo sapiens
tgcccgctccccgcgaggccggctcaggagcagggcaagctggaaatgaccttggagattgtagcagagagtgag

SEQ ID NO: 391043 - DNA, 82 bp, Homo sapiens
cttggactgagtcctgcaggacacaggttcatccacataaaacttatttcacagtagctgaaaaagggagttttccagatat

SEQ ID NO: 391044 - DNA, 104 bp, Homo sapiens
agagacagaagaagctggaggccggcaaagccaaggctgtggagtttgaaggctgggctgacaccctctttcttctgcagttcaccctctcctgtgtgatgggg

SEQ ID NO: 391045 - DNA, 75 bp, Homo sapiens
agccttggagagagatggggagctgggatccccaggaggtgctggagaatctggtaaaagcaccattgtgaagca

SEQ ID NO: 391046 - DNA, 100 bp, Homo sapiens
ggtaaattgggatattcacaatgtatggaaacagaggaggatttgacagctaaggatattgaagaaattattgatgagctcaaggctggcaaaatcccaa

SEQ ID NO: 391047 - DNA, 73 bp, Homo sapiens
acagcttggaactgctagatgaacccatcccccagatagtggctacagatggtgaaatagggccttctaaacc

SEQ ID NO: 391048 - DNA, 75 bp, Homo sapiens
ccggccagaagcgggcggcgcgggggagatgtggacaggttgctggaccccgccaacagagcccacctgggcctg

SEQ ID NO: 391049 - DNA, 73 bp, Homo sapiens
tcctctgatctacgaaagtcatgttacccaacaccggagtgtgaacatggctacgcctcttcattcccgtcca

SEQ ID NO: 391050 - DNA, 98 bp, Homo sapiens
gcggtgctctgccatattgtgtcttccccggccggtccctcgcctcccggccgagctgacggttgccaagagggtgatcctgttgtcgggcacaccag

SEQ ID NO: 391051 - DNA, 100 bp, Homo sapiens
ggttccagcagcagcagtagctatggcagtggcagaagattttaattagcccacatttttggattatgtccggccacgttcctggacttgtcgttacgtg

SEQ ID NO: 391052 - DNA, 98 bp, Homo sapiens
aattccattaagatgcccgaagaggaagacgagtttgtgaagtgtggatatgcaggctctaactttccagaacacatcttcccagctttggttggaag

SEQ ID NO: 391053 - DNA, 75 bp, Homo sapiens
ctttaatgagatgaagggagcgtttactcaggatgtgcagaaggcgatggacgagaggagatttcaagatgcggt

SEQ ID NO: 391054 - DNA, 50 bp, Homo sapiens
gaacttgccctgtctcctcgcagatgagtgagcatgtttttgaacacatt

SEQ ID NO: 391055 - DNA, 82 bp, Homo sapiens
gggctgtgccactacctacaacaagcacattaacatcagcttccacagtgtggcaaaggagcagagaactttgacaagttct

SEQ ID NO: 391056 - DNA, 100 bp, Homo sapiens
gctgccagccccaagaaggagaccctcatccagctgatgcccttcttcgtgattttttatcaagcagaaatgcatcgaacaacgagaatcaagatcactg

SEQ ID NO: 391057 - DNA, 74 bp, Homo sapiens
ctgaagtggtttttcctaatggaaaatcacatacctttccagcatcatctctttcaacgtataaaatagcagaa

SEQ ID NO: 391058 - DNA, 51 bp, Homo sapiens
aaaggcaggggaggaagccacctcgaggctcgggttatgtatgattttgct

SEQ ID NO: 391059 - DNA, 98 bp, Homo sapiens
ctcaaccaaacaactcattaatgctgcaaactagcaaggagaatcatgctttaggaattgattcggaaggccatgcagctaactttgtagaaacagaa

SEQ ID NO: 391060 - DNA, 95 bp, Homo sapiens
aaaacaacttcgagggcagacctaactctggtgaactggatcctttgtatgtagtagaagtacttctgcgctgtagcaaagagagcttgaaaaat

SEQ ID NO: 391061 - DNA, 98 bp, Homo sapiens
gcggagtatggaaagttagagtggacctacctgataaataccctttcaaatctccatctatagattcttgaagacctggatgaacaaatttatatcat

SEQ ID NO: 391062 - DNA, 50 bp, Homo sapiens
tcatgggcaaaggacagatccaggcctggtactgtggcgctccgtgaaat

SEQ ID NO: 391063 - DNA, 100 bp, Homo sapiens
cgaaaacccggagtgccccgcacagatctgatctactgtggtcggaagctaaaagatgaccagacacttgacttctatggcattcaacctgggtccactg

SEQ ID NO: 391064 - DNA, 149 bp, Homo sapiens
aggtttaataatgatagaatgaagaccacaataaaagagacctctacttagctcagcaattcttacctttaaggatggggatgataagaagagacctgtgatcattcatcgagccattttgggatcagtggaaagaatgatagccattc

SEQ ID NO: 391065 - DNA, 82 bp, Homo sapiens
aacaaagaccagccagctaaccctacagaagattgacatggtacatcgtaacaagtccgaaggattcttccttgatgcatct

SEQ ID NO: 391066 - DNA, 100 bp, Homo sapiens
ggaccccctgaaagcctagacatgcacatgcagatgacaatccaggctctccaggatgaattgcggatccagagggacctgaatcagctgtttcagcagg

SEQ ID NO: 391067 - DNA, 75 bp, Homo sapiens
caaccgcctacgtatcagctccatccaggccaccactgcggcgggctctggaacagctgaatagatttgctggat

SEQ ID NO: 391068 - DNA, 55 bp, Homo sapiens
caaatccgggggcaaggccaaaaagaagttgccaggtataaactccgaattgtta

SEQ ID NO: 391069 - DNA, 75 bp, Homo sapiens
gctgctgctgcatgtctaccaggagaggagggaactgcggagcgggttactggagttggctataatcaatttggg

SEQ ID NO: 391070 - DNA, 101 bp, Homo sapiens
gccactgccgcagccaggagatggttcgggcctagcggagccgggactggagtctagagcatgtttggaaaggattcaagaattagaggacttgcttgcta

SEQ ID NO: 391071 - DNA, 90 bp, Homo sapiens
gcagatgttgtgggtgcccttctgttcctggaggattatgttcggtacacaaagctacccaggaggaggttttaaaagactacatcaagc

SEQ ID NO: 391072 - DNA, 98 bp, Homo sapiens
acttggagagacatatgtctgaatttatggagtctctcttatttagtgcaacttttcggaagaagattgaaaagttggccagagacatcctgatcgac

SEQ ID NO: 391073 - DNA, 100 bp, Homo sapiens
gtccgatgcagagcaatatctcaaaaatctctatgatctgtatacaagacactttttcaaaaatggcaatggtatcagaattcctcaagcaggcctggtt

SEQ ID NO: 391074 - DNA, 74 bp, Homo sapiens
tgcagataaggatggagatggaagaatatcctttgaagaattctgtgctgtgcaatggatgagcttcatagtct

SEQ ID NO: 391075 - DNA, 100 bp, Homo sapiens
aatatattgactactgccacaattccgggacccgagtgtatagccctccagagtggatccgctaccatcgctaccatggcaggtcggcggcagtctggtc

SEQ ID NO: 391076 - DNA, 90 bp, Homo sapiens
ctcaagagtcataggattagatgatccaagtcaccaagaaattactgtctcaagtgatacgcaacacagatgtacacacggtggcatcac

SEQ ID NO: 391077 - DNA, 75 bp, Homo sapiens
gcacaacccgaagcggcctgtgacctgtgaacagggctgtggaactcccccactggaaaggattctgaaagaaat

SEQ ID NO: 391078 - DNA, 101 bp, Homo sapiens
tccacgcggaaagaagtaccttcgccggtcaccggctcctgcagggtgtaagaacatatgtggacccctttacgtacgaagatcccaaccaagcagtgcga

SEQ ID NO: 391079 - DNA, 100 bp, Homo sapiens
atctactgcgtggcttgtcaggaactcgactcagacgtggataaagataatcccgacttcacagagaatgcagttgtcttgacttcaggtctgtctgttc

SEQ ID NO: 391080 - DNA, 121 bp, Homo sapiens
tcaggcactgaggaggccgagagatgaggccggagcccaccaagttctgggaatccacaggtcctggctaccctgggaagagacaagaagtaaatgaagaaagaggaagattccaggacct

SEQ ID NO: 391081 - DNA, 75 bp, Homo sapiens
agccatagcactcgcagagaaatatggatgggagattctttggtcagagagacctacgaaggtgaatgcttccca

SEQ ID NO: 391082 - DNA, 100 bp, Homo sapiens
gtgactgcttgcgaaccagttcagcagtgcctcaggtatctgctgtgcgtttcagtcaacaatacagcttgtgttcgacaatattccttgatgacagcac

SEQ ID NO: 391083 - DNA, 75 bp, Homo sapiens
ctctgttccaaatgctttgctgaaaattttaagagcttgcattgaacaagtgaaaaagtattcagaattctatac

SEQ ID NO: 391084 - DNA, 75 bp, Homo sapiens
gaactctatcccaggaatacagctttgcattagatgaagtggctgtaattgatgaaattcaaatgattagagatc

SEQ ID NO: 391085 - DNA, 74 bp, Homo sapiens
tgatagtattggcatttataatactgaactatggacctatgaggaaaatatttgcaatacctgccacgtccaag

SEQ ID NO: 391086 - DNA, 78 bp, Homo sapiens
gagcttgccttgaaggacaagaacagcgccgtcaccagcagagtaatcaagtcagaggattatatgacttttatctgc

SEQ ID NO: 391087 - DNA, 82 bp, Homo sapiens
ggacacggtgctggccgccggttgcaagcagatactggtgcctggagtggggaaggccagggccagattctgcagcgcttcc

SEQ ID NO: 391088 - DNA, 96 bp, Homo sapiens
tgtgcaacaacctcttgaggatcgaatcttcactcccgctgtctcagcagtctacagcacggattgtcaccagacctgcaatctatggagcagatt

SEQ ID NO: 391089 - DNA, 100 bp, Homo sapiens
gtggatcctgtccttcatgcagtctctcattggcttctttgagactgaaatggcagttactccacaggatccgctgaacataggatgttgccacaaaatc

SEQ ID NO: 391090 - DNA, 98 bp, Homo sapiens
ggaggacgatgcaccagtgatctacgggctggagttccaggttgaattgaccaaagcaatggtgatggagaagcctagtcccctgctggtcgggcggg

SEQ ID NO: 391091 - DNA, 100 bp, Homo sapiens
cgcgctactctctctttctggcctggaggctatccagcggagaggctagtggtaacaggccgagctggatggatgggtatggggagaggggcaggacgtt

SEQ ID NO: 391092 - DNA, 100 bp, Homo sapiens
ctgtaacttcagccaaggaaaccataggttacatcgttctggatttaagaaccgctcaagaaacaaagcaggcttatgcatctggatgtgacattgtaat

SEQ ID NO: 391093 - DNA, 100 bp, Homo sapiens
tccgtctcaagactgtgaaaccagcccagtggagcaaaatgagagcgcagtgagccgggcccagcttctctcctagccgttccgactcccaccatgaacc

SEQ ID NO: 391094 - DNA, 74 bp, Homo sapiens
cctgcaccgcgcctcgcaaaaatttaagcagaacggtgggaagccctatttgtctgtgattacggggagaggaa

SEQ ID NO: 391095 - DNA, 82 bp, Homo sapiens
ggcgtgagcctccgcgcccggccgatggcagttgaattcctgcatgaactgaatgttccatttttcaaagttggatctggag

SEQ ID NO: 391096 - DNA, 98 bp, Homo sapiens
ccttacagggaagcatctctgtgcattcagaagagaagaacatttctgagtcctcacgaaactatttcagtaagaatgattgatgttggctgatattg

SEQ ID NO: 391097 - DNA, 97 bp, Homo sapiens
ggacgagcacctgccgcgtggcggggctgtggagcggccgctgaccccggagccacctgagctgaagattcccttgagaacaagtactgtcctgtgg

SEQ ID NO: 391098 - DNA, 101 bp, Homo sapiens
tggaggacaggggtcagtggtggaagtgagaccgaaatagactctgaagtaatatctggactttgaaattgaaatcatgactctcaagacaaatgagctat

SEQ ID NO: 391099 - DNA, 89 bp, Homo sapiens
catgcaggcagccgtggatgccgtggcccgggtcactggccagcaccccgagagctttcattgttgaggttcctcagtgctgaactaac

SEQ ID NO: 391100 - DNA, 82 bp, Homo sapiens
caagaagcacagagttcagtatgaaatgagaacactttacagatgtttagagggaatttaccagctgaagaaagcctgccgg

SEQ ID NO: 391101 - DNA, 100 bp, Homo sapiens
gcggagccgcgcagccctcggagcacggctgaaggtgatgtggccgccctcaaccgacgcatccagctcgttgaggaggagttggacagggctcaggaac

SEQ ID NO: 391102 - DNA, 100 bp, Homo sapiens
gttaagcagattacttccatcagtattgagccaggagttgaggtgcgagaaggccgaggagaaggccaaggagattgcgaagatggcagagatgctggtg

SEQ ID NO: 391103 - DNA, 90 bp, Homo sapiens
atgttagccagatcaagcagggcttcattgtggtaaaaggtcatagcacggcgagatgatgcctattggccggaagccaagcgggccgcc

SEQ ID NO: 391104 - DNA, 74 bp, Homo sapiens
gactccacctttacttttacctacgttggcggccccagaagccttagattgtaagcaaaagaaatcaaggtcaa

SEQ ID NO: 391105 - DNA, 83 bp, Homo sapiens
attatcgattatgtgccaaacattttgagacctctatgatctgtagaactgttgctatcaagatcatagataagacccagctg

SEQ ID NO: 391106 - DNA, 75 bp, Homo sapiens
agaagaaaaggtgtacttgcaagaaacctcaggacttgagtaacagcaacatgttactccacaggatccgctgaa

SEQ ID NO: 391107 - DNA, 100 bp, Homo sapiens
ccctcgcgacgcgcccggcccggagcccccagcgcagcggccgcgttggagagaggcgatttcctctcagaagagtggagggagcgaatcgccaacacga

SEQ ID NO: 391108 - DNA, 100 bp, Homo sapiens
cttcacggggctggctgctctgtgtctcttccaagccttcatctcctcgtcctccaggcagcacaagccattgtggaatctccaccaggtgtacagaacg

SEQ ID NO: 391109 - DNA, 80 bp, Homo sapiens
gcgaggcctcccgggctccgggaaaactacactggccagattggcggcagtaagcacacaatgaatgatcacctgcatgt

SEQ ID NO: 391110 - DNA, 100 bp, Homo sapiens
cataactgccatagtgaagcaacttaatcgggatatcgagtattctaccttgtaaatactgttatttgtatatactgtaaatgatgacatcggtgggcac

SEQ ID NO: 391111 - DNA, 80 bp, Homo sapiens
aacttcttcagaattagaaaggagctgcttcccaataaggaaacagaatactcccccagttgcaagaggcgcaggaccgt

SEQ ID NO: 391112 - DNA, 82 bp, Homo sapiens
gttaaacatacagtcgcctctgacaagccagctgatccaccttgagatcaagccggccatccggaaccagatcatccgcgag

SEQ ID NO: 391113 - DNA, 88 bp, Homo sapiens
ggaaaactgcacagagaattccatcatggacctgacccaactgatacagccccaggagaggaagctgccacttttgctagagagcaag

SEQ ID NO: 391114 - DNA, 87 bp, Homo sapiens
gagcgcaaggacagcgcgaggtccgcgcagcccagcgcagccatggctgaagaagatgcagagcagcctgaagctggtggactgtat

SEQ ID NO: 391115 - DNA, 100 bp, Homo sapiens
agcactcgttccgggggtgaagcctcctgcgccggccttgcctcggcccccctggtggacctcactccaacccacagtggatctgccatgctgatgctgc

SEQ ID NO: 391116 - DNA, 75 bp, Homo sapiens
cgaggaagcgtgcgtccctggcgcttccttcttctcttccggcggagaggacaaggctttgcttttcgaagaaaa

SEQ ID NO: 391117 - DNA, 90 bp, Homo sapiens
ctacgctcgccggggctgcggccgcccgagctgataggaagatgtcttcaggaaatgctaaaattgggcaccctgcccccaacttcaaag

SEQ ID NO: 391118 - DNA, 100 bp, Homo sapiens
tactctttttagtgctgcacagctaacagctgaatgtgcaatagtaactttggacatggatttgattgacatactttggaggcaagatatagatcttgga

SEQ ID NO: 391119 - DNA, 100 bp, Homo sapiens
tcctggtgtcccctagtcttggcggaggagccttttagatgagccccgaaaggccgggcagatatcagttttagagaatgtggcgtggagaaattctcaa

SEQ ID NO: 391120 - DNA, 100 bp, Homo sapiens
cgccggccctagaagctccccacgcgccaccatgcctctgctggacgttttctggtcttgcttcaggaaggtgaagaggcctttgaaattgttgttcgcc

SEQ ID NO: 391121 - DNA, 82 bp, Homo sapiens
tccaagctagtgcggggagtcgggcaataagcctcagaactgccattggatgtccagaatcccctgtagttgataatgttgg

SEQ ID NO: 391122 - DNA, 75 bp, Homo sapiens
ggagcaggagctggatccggcttccggaagcgggaagcaatcaattgccattgatgactgcaccttccaccagtg

SEQ ID NO: 391123 - DNA, 80 bp, Homo sapiens
ccctccaagagggcatctttgcagacgtgacctccctgtctcacctgtaactgttcagtcctcacctaattttacacagc

SEQ ID NO: 391124 - DNA, 100 bp, Homo sapiens
cacagtttatcatcccttcctgagtttgctataaaatgggagttctggttgtactcactgttctgtggctgttctcctcagtaaaggccgactcaaaagc

SEQ ID NO: 391125 - DNA, 83 bp, Homo sapiens
tggcgcctgtgggcacagacaaggagctcagtgacctcctggacttcagcatggaagctcttcgtgggcggtcttgactggag

SEQ ID NO: 391126 - DNA, 96 bp, Homo sapiens
aagcagctgcttgccggccccaacacggaccttggagcggcctattgccaattcatggacatgctcttccctggctgcattagtttgaagaaagta

SEQ ID NO: 391127 - DNA, 96 bp, Homo sapiens
agaattctctatttctgctccgtcatccatgccactgacacattcagctaacgtattttagcaggtggagtgaggttgaagattcctgtgacagcg

SEQ ID NO: 391128 - DNA, 97 bp, Homo sapiens
cgtagcaggtctccttgcaagacttcgaaagctggaaaggcagctcatcatgcagagtgaaatgagggaaagacaaatggccatgcagattgcgtgg

SEQ ID NO: 391129 - DNA, 75 bp, Homo sapiens
aaggattccaagtaactcttatttgaataattgtgtgcccaagaagatgctgcagctggttggtgtcactgccat

SEQ ID NO: 391130 - DNA, 50 bp, Homo sapiens
catccctgtctggtatgccttctcggagtcgatagcagcagttggtgacg

SEQ ID NO: 391131 - DNA, 100 bp, Homo sapiens
tgcatgcacaaatgaatggtaggaaaattactctgaaaagagaacaagagagtgagaaaccaagccaaggcatagaatgtcaagctaaccaggcgtccgc

SEQ ID NO: 391132 - DNA, 82 bp, Homo sapiens
ccttgagcgctgagcaagcaaaggacatacttggcaagtgcaagacaaaatcgatgcaaacaatgtggcttacacaactggg

SEQ ID NO: 391133 - DNA, 128 bp, Homo sapiens
gtgaggatgatgtaaatgagcaacactccggatcagacactggaagtgtagaacgtcattcagaggtctatgttaacaatgaatgggcaaccagtgttggggaaggagggagctttggagaacttgct

SEQ ID NO: 391134 - DNA, 100 bp, Homo sapiens
attggcaagagtggagacaaagagatgagcaggcaatgcatgaaccattgcaaacttggcaagatgcaccatacatttttattgtacatattggcatttc

SEQ ID NO: 391135 - DNA, 100 bp, Homo sapiens
ctgggcaaggggacgtctgcagctgaggcttcataaacttcacttaccaaatacttcaagggattcagaaacagccaagccttctgtaaatgggcatcag

SEQ ID NO: 391136 - DNA, 98 bp, Homo sapiens
gcatatcctgggtagcctctaggaagcgctagacacataaaccatccacggagcagcccctgtacagcagcagcctgtggggcccggcggttgatggc

SEQ ID NO: 391137 - DNA, 100 bp, Homo sapiens
tggaaatgtagcttaatgacctccttgtcctggagtctcccttaatacagtatgccgagattttgctgtcctggaggaccacaccctggctcacagcctg

SEQ ID NO: 391138 - DNA, 100 bp, Homo sapiens
gtttaagttgaaggagcgctaccgcaacgtgctggacaccatgttcgagctgctgccccggatggccaggtaccgagcccctgaactgctgttgggaacc

SEQ ID NO: 391139 - DNA, 51 bp, Homo sapiens
aatgcccagtccccagctcgccagctgttcctttctgccgaaattctccat

SEQ ID NO: 391140 - DNA, 83 bp, Homo sapiens
ccagagtgtatgcactttactacaaagatggacttctctgtacaggttggactccatgaaagaattgcacaaaacaaatcgac

SEQ ID NO: 391141 - DNA, 101 bp, Homo sapiens
taatggaggtctccagtttcgtcactgtgtgcccagtattctgcagacaaacgagaagatgagaagatgtgtgatcatttgataagagcagcaaaatatcg

SEQ ID NO: 391142 - DNA, 51 bp, Homo sapiens
ttttagacaagggagtatatgggcttcgtgggacacatatgcaacatgcct

SEQ ID NO: 391143 - DNA, 100 bp, Homo sapiens
gacagacggagtcctgttccaccttcagagcgtcacggcgtacgccctcatggggaaaatctccccggtgactttcaggcggtaaccagcgtgagctcgc

SEQ ID NO: 391144 - DNA, 88 bp, Homo sapiens
aagaatcagctccgcttccttgcaggtttaaaagacgagtcctaattcagtaccttgagaaggtactagaaaaaataaattcccacca

SEQ ID NO: 391145 - DNA, 131 bp, Homo sapiens
catcttgttttttcatattacatctacaagaggggacaagtacctttatgaaccagtgtatcccaaggccggtgcataaacttctcccgagttccatctcagtaaaagggaagcaggaagaccaagaaggt

SEQ ID NO: 391146 - DNA, 50 bp, Homo sapiens
accacggcctcctgtcccgccagttgctgaacctgtttgcatgagttgct

SEQ ID NO: 391147 - DNA, 74 bp, Homo sapiens
cggtgccagcacctttcggcttctgagacggcggcagcagcggcattcagggcataattggaatatcatttgga

SEQ ID NO: 391148 - DNA, 98 bp, Homo sapiens
ggagttgttcctcttacagcatgatctccccaataatatgatttaccaagtcgccattaagtctcttcctcaagactggctgtggtgtgaaacctggt

SEQ ID NO: 391149 - DNA, 75 bp, Homo sapiens
cgagagcgcgaatatcgtcatcgttagaaggaggaaacaccaattggaagcctccgctcaactgtaagatttata

SEQ ID NO: 391150 - DNA, 90 bp, Homo sapiens
ggggcagaatacagagatatggaatcaggtggcacgcactacccttcttcctggcctcctgaagaccatagcagcaaatcgtaagatgcc

SEQ ID NO: 391151 - DNA, 75 bp, Homo sapiens
ccaagcagaatgtccagcgggtcctggaggctgctaacctcttccagcaaccctgatctccggagaactgagccc

SEQ ID NO: 391152 - DNA, 75 bp, Homo sapiens
tttaagccaaacgatctcaaagaaaactgtcaggagcatacaagaggctccaggggtctctctttttggcatgtc

SEQ ID NO: 391153 - DNA, 83 bp, Homo sapiens
ccagcaaaaagctccgcaacaagatagcagggactctctgggaggaaacagccgcacagtgatgatcgctcacatcagtcctg

SEQ ID NO: 391154 - DNA, 100 bp, Homo sapiens
cgcgaacgtgggcgtggggatggccaccagtttccggacagcttcgtgctgggagagaagatgactgaggaggaggtggagaccgttctggcaggacacg

SEQ ID NO: 391155 - DNA, 100 bp, Homo sapiens
cgaagagggggtcgaggagagccggagtcggggacccaggagtttcctgtgtccagcgctgccggagccgcctgaggttaatttggagtggcccctggag

SEQ ID NO: 391156 - DNA, 74 bp, Homo sapiens
gaagaatttcctctgaagcaccgacctgcgaccgcatcaagcagtccgccagcggaaccaagcggcgcgtgttc

SEQ ID NO: 391157 - DNA, 100 bp, Homo sapiens
tcttatttagccggagtgagaagcaagaaggccctggacacagcaatatctctgggctttcacagtgtgctggagaagagaaacgagttggcacacgcac

SEQ ID NO: 391158 - DNA, 99 bp, Homo sapiens
ctcagaggcagagcggcgcaagggccaaggagtactggcgtccatggaccctgggttctttggggtgactttcaagatggactctactctaacagcaag

SEQ ID NO: 391159 - DNA, 78 bp, Homo sapiens
gacgattcacctgtccagcatccgaccaccgaggctggagggggagaacacccagcaacatggccaatctttcctaag

SEQ ID NO: 391160 - DNA, 73 bp, Homo sapiens
agggctgattttcgagagccgaatgcagaggttccaagaccaattccccgaaccactcgttttgactattatt

SEQ ID NO: 391161 - DNA, 100 bp, Homo sapiens
tggaagggtagaccatacgcaaaaactggcgatggaatatgagaggagccctctggaaagaaaaggacagaccctgtgctttcatgaaagtgaagatctg

SEQ ID NO: 391162 - DNA, 99 bp, Homo sapiens
caaggatatgggagcaaccaccatggaccagaagtctctctgggcaggggaagaattttttgtactgaagtcatttttctctgccatctcagagaaaaa

SEQ ID NO: 391163 - DNA, 100 bp, Homo sapiens
cttggaagaagatgtctgcagagggatttgtcttggctgttactatgacacgggaagcaattgatgaatttcggcgttttcagcgtgacaaggaagtgaa

SEQ ID NO: 391164 - DNA, 100 bp, Homo sapiens
acttccaagaagatgagcagtttctgggagccgttatgccaaggcttggtgactctgacatcattagaagcatgccagaacagactggtgaaaagtaaac

SEQ ID NO: 391165 - DNA, 100 bp, Homo sapiens
caattcccgaccgaaccaaacggtggggtaaaaccttgtgcattaaactgcttggctgaaggttataatttctacactgaacgtgctcctgcggtgatcg

SEQ ID NO: 391166 - DNA, 100 bp, Homo sapiens
cacgccgaccggcgccgggagatcctggtgaacagagtatctgtcaggcaagagctgctgtgatggtttatgatgatgccaataagaagtgggtgccagc

SEQ ID NO: 391167 - DNA, 82 bp, Homo sapiens
agaggacgccggaacaccctggaagccgagaaatgtaagcaagctgtgtgggaagtgcagccccactgacgtggacatcctg

SEQ ID NO: 391168 - DNA, 99 bp, Homo sapiens
accaaggataacaatgcccacacagtgaagagcaggctagaagagctcgatgagaggtgttatttggaagatggagcttcaaagggtgcctggctgaac

SEQ ID NO: 391169 - DNA, 75 bp, Homo sapiens
ccgcaccgcggcttaaatgatgtattttgtgatcgcagcgatgaaaggtttacccaaggtccagcctagccccta

SEQ ID NO: 391170 - DNA, 82 bp, Homo sapiens
ccggccttcgggctccatggacgggcgccgcgtccctgcacagcccgccgcagagaagatgaacaagtttctgctgtttgag

SEQ ID NO: 391171 - DNA, 97 bp, Homo sapiens
ctaggatcagatgttccagatcctgggatggttaacgaaggcacaaaatgtggtgctggaaagatacaagaggaggaagtagctgtcgtggcctgaa

SEQ ID NO: 391172 - DNA, 90 bp, Homo sapiens
gtcaacaccaagtgcatcaccatccccagatgctgctagagaaactgaacggcacagtgccctgcctgttggataccagcaccatccccg

SEQ ID NO: 391173 - DNA, 50 bp, Homo sapiens
gcccaacagcaacaggtctcaattgtgcaatgattctggactgagacgcg

SEQ ID NO: 391174 - DNA, 50 bp, Homo sapiens
caagccttcctttgatgtgaagggtctggagtatcagccaggagcccgat

SEQ ID NO: 391175 - DNA, 80 bp, Homo sapiens
tcgtcctgctggtgttcctgggcttcatgagctgtgagtacccaggaagctgcaccgtgtggcctggagctgtctatctg

SEQ ID NO: 391176 - DNA, 100 bp, Homo sapiens
atcatcagtcaaggaagacccactggagagtgtcatggagaaactccagctgggcccagagattctgcagcgggaaaatccaaggcttatttatgccagg

SEQ ID NO: 391177 - DNA, 88 bp, Homo sapiens
ccacgcagtgctgcacctggagcaggtgctcaccactgatgtggacgagtgctcactagcagaaaaaacctgtgtgaggaaaaacgaa

SEQ ID NO: 391178 - DNA, 99 bp, Homo sapiens
gccaagaactattcggttctctacttccaacagaagtcacatcgatcagacaacaacatggcaggaccccaggaaggccatgctgtcccagatgaacgt

SEQ ID NO: 391179 - DNA, 100 bp, Homo sapiens
aagcggcctcacagtcatggatctggaagctgagggcacgtgtttgcggttcagccctttgatgaccgcagcagcttccaattgtggacaagataaggac

SEQ ID NO: 391180 - DNA, 101 bp, Homo sapiens
ctggacgaccggctctactgcgtctaccagagcatggtgctcttcttcttcgagaattacaccggggtccagactatctgttatagtccctgggtcaagac

SEQ ID NO: 391181 - DNA, 100 bp, Homo sapiens
gccgtccagcagatggcggatgccctgcagtacctgcagaaggtctctggagacatcttcagcaggtggaacctaacttcttgtggaacaagtgttgcca

SEQ ID NO: 391182 - DNA, 75 bp, Homo sapiens
gttagcgtgagtgatcactctcaatcccggacttcccaagtaagaagcggaagaggagccgctggaaccaagaca

SEQ ID NO: 391183 - DNA, 90 bp, Homo sapiens
cggcgaacgcggagagcacgccatgaaggcctcgggcacggactcctcctattttgaggacttctccaacatctccatcttctcctcgtc

SEQ ID NO: 391184 - DNA, 100 bp, Homo sapiens
tgaggaccctagatgaccgtctgctcaacatccccatcaatgacatcatccagtaaatgccatctgctatggggccaagattatgcttccaggtgttctt

SEQ ID NO: 391185 - DNA, 82 bp, Homo sapiens
tgctgcgggaggcggcggcggtaggaagccggagacagcagggtgacaggtggtgttcccactgatgaagagcaggcgactg

SEQ ID NO: 391186 - DNA, 98 bp, Homo sapiens
caacttgctgcctatcaagaggaagcagaacgtctgcacaagcggaccaatctgaagaaatgcatggatcacattcagcatcgcttggtggagaagat

SEQ ID NO: 391187 - DNA, 89 bp, Homo sapiens
cagcgtgagcgcgaggaggcggaggctgcggcggggcggacggtcgcgcggcggcaggcacagcatacttccacaggctgcactcgagg

SEQ ID NO: 391188 - DNA, 82 bp, Homo sapiens
ctccttttcgtttccggaaacatgaagctggcagggcggagatgctggaccacgccgtcctgcttcaggtgatcaaagaaca

SEQ ID NO: 391189 - DNA, 98 bp, Homo sapiens
ctccagcccggcaggcccagccggcagccggcggtccatccagctgtcaataccagcaaatatgcagaaagctatcggatccaaacctatgctgaata

SEQ ID NO: 391190 - DNA, 75 bp, Homo sapiens
attcggccatctttgctcctccctgcaactaactccattcttaattgtggtctcacgtgtgaaacatggctacag

SEQ ID NO: 391191 - DNA, 97 bp, Homo sapiens
tacacggtagcatcatggtcgagaaaagaggcacagttagatgaagaaggacagtttcttgtcagaataatatatgatgactccaaaacttatgatt

SEQ ID NO: 391192 - DNA, 100 bp, Homo sapiens
aaaaggcaaactcttcacctggtgtgactgcacagaaaagttacaaaacaaatttgactttttgcgctcacagttgaatgatatttcgtcatttaagaat

SEQ ID NO: 391193 - DNA, 100 bp, Homo sapiens
gtcatctttaactgcttggccgtgcttgccctgtcatcccacctgagaaccatgctcaccgaccctgtgtggtggacacaggcctattcatcaacatggc

SEQ ID NO: 391194 - DNA, 100 bp, Homo sapiens
aagagaagtcacaaaacagcagatttcccaagagcagcggaaaatgatccagtcacaggcctggaggagaaacccaccattgcgtttgccacaatccccg

SEQ ID NO: 391195 - DNA, 75 bp, Homo sapiens
aatcccagacctaagtttgaagattggctttgtaacaagtatgtgggtgccccggtggcttatgtccagcagata

SEQ ID NO: 391196 - DNA, 90 bp, Homo sapiens
ggaattcctctatgacaatctcatcattttctccccttcggtagaaggggggcttcgcccgctgctacgaggccactgacacagagactg

SEQ ID NO: 391197 - DNA, 75 bp, Homo sapiens
atatcaggatgagataactgaaagggaagcagaaccatactatattgtccccttggggcggaaagaagccaaggc

SEQ ID NO: 391198 - DNA, 106 bp, Homo sapiens
cccgctctgctgtgggcgctgctggcgctctggctgtgctgcgcgacccccgcgcatggttaaagatcgaggtccggaagccactaggagattttttaattggttt

SEQ ID NO: 391199 - DNA, 75 bp, Homo sapiens
gcggcggcccagctctctctgacacagaaatatggctacacacacctttctgcaggagagctgcttcgtgatgaa

SEQ ID NO: 391200 - DNA, 75 bp, Homo sapiens
tggacgtttgccgtccactctgagtctgaagttgcagccggagtgaagaagagcggaccgctgcccagtgctgag

SEQ ID NO: 391201 - DNA, 75 bp, Homo sapiens
tgaagctgagagttttgccattcagtttggactagatgttgaggtggcagtagagaagagcatcacagaagttgc

SEQ ID NO: 391202 - DNA, 100 bp, Homo sapiens
tttaattccttttcgaccttcaatccagttccaaggactccacggggatggacatgtagaggtggcacgtttgcttttggatagtggtgctcaagtgaac

SEQ ID NO: 391203 - DNA, 51 bp, Homo sapiens
gtttccggacagcttcgtgctgggttaatgtgtgaaactgtgagatatgag

SEQ ID NO: 391204 - DNA, 98 bp, Homo sapiens
cttccaaatacaagctgtatagagtgtgaacatggctacgcctcttcattcccgtccatgccgagcccccgactgcagcattcaaagcccccacggag

SEQ ID NO: 391205 - DNA, 100 bp, Homo sapiens
agagaagccttttccgttgccggtgccggcctagcgtcctggaattacttcaatcaaggagatacttcaggggattaccggaagattctgctgaagatct

SEQ ID NO: 391206 - DNA, 100 bp, Homo sapiens
ggccactggagcaggtcacctgttacaagaaaccagcctggacaccaagtctgtgtcagaaggccacctcaagaggaacatcgtggtgaagaccgtggag

SEQ ID NO: 391207 - DNA, 100 bp, Homo sapiens
gtaccgctgcagccaccgcggcccccgcgggcgacctgggagacccagccagtaccgcccagacggacttcggagtggtgatggggtacctccaagaagc

SEQ ID NO: 391208 - DNA, 104 bp, Homo sapiens
cgagcgcaaggacagcgcgaggtccgcgcagcccagcgcagccatgtttggtgcacctcgatttggaggaagtagggcagggcccttatctggaaagaagtttg

SEQ ID NO: 391209 - DNA, 83 bp, Homo sapiens
gataccagttcctttgtcaagagcatactttggaccctgttttcagaaagcagaacagctttgctgagccatcaaggtctaat

SEQ ID NO: 391210 - DNA, 100 bp, Homo sapiens
ggacgcccaggcggacgaggccgtgttagattgaaaaggaagatcaggccaaccccaaagaagaagtgaccaaggaggagtttaaactgaatgaacaacc

SEQ ID NO: 391211 - DNA, 83 bp, Homo sapiens
gaaggacagtggagtctggcatcttattggaaagtgggaggtagaggaaatgaaggagtcaaagcttccaggtgataaaggac

SEQ ID NO: 391212 - DNA, 100 bp, Homo sapiens
ggataccaaggtcctaccaagatgacaaaagaagagttaaatgccctcaagtcgacaggggatgggaccctagaagtaaaagattatgagcctccatttg

SEQ ID NO: 391213 - DNA, 75 bp, Homo sapiens
tctctagtcacaagagccttggggaagacagttggaagctcagacatgtgaacagctctgcgctttttgttactg

SEQ ID NO: 391214 - DNA, 96 bp, Homo sapiens
ctcgattccttttgtccaaagtgaacccatctcagacacacaataacctgtatgcttggggacagggcaccagaactagcacctctgaaaagtaaa

SEQ ID NO: 391215 - DNA, 50 bp, Homo sapiens
ctcccaagtagcttggattacagactatgtcttcagcagtggtgcagtta

SEQ ID NO: 391216 - DNA, 100 bp, Homo sapiens
aaattgaaaatattggggccatttagtaacttctttgcaaggtccctccttgtggtccatttctgggcaccatgggctccacagtgtgcacagatgaacg

SEQ ID NO: 391217 - DNA, 90 bp, Homo sapiens
acgaacaggaatacatggaagtccgggagagaatacacagagccatcagggactatgcggcgcaaacatctccttcgccaaaagcaggcg

SEQ ID NO: 391218 - DNA, 90 bp, Homo sapiens
cacatctgtcctccacagaggctttttgtgtgttttatcatctaaaatccaatccctcggttcaaaccttgtactactcagctgatcaca

SEQ ID NO: 391219 - DNA, 96 bp, Homo sapiens
agcgggagcctccgtggaactcagcgctccgctcctcccagttcctaagagccaaggaggagcggctggcagaggagaaggccaagaaaaaggcgg

SEQ ID NO: 391220 - DNA, 100 bp, Homo sapiens
agatctgtctgcttgctgtggaaggcaatctttttgaaataaagaaacttcgagaactggaaggctatgataaggccataggaaaaggatacagagtaga

SEQ ID NO: 391221 - DNA, 97 bp, Homo sapiens
tcccccggaccaggggcgagggctacccgctctttgccgtgacaacaccgttcccccagccgggctgtgaagcctgaggcctggctgtccagtggcc

SEQ ID NO: 391222 - DNA, 83 bp, Homo sapiens
ccgcgggcgccgagcagccaccgtcccgaccaagcgccggccctgcccgcagcggcaggatgccatggacaatattaccaggc

SEQ ID NO: 391223 - DNA, 73 bp, Homo sapiens
cggaaggggtcccgaagccccctgcaggaactctacaacccaatccaggtcacaaacatgtcagacaaaagtg

SEQ ID NO: 391224 - DNA, 75 bp, Homo sapiens
tctactgctccccaattacagcccacctcttgcatcgtcacctacagcttctcaataggtttggcatggacaaga

SEQ ID NO: 391225 - DNA, 83 bp, Homo sapiens
tttaccgcaaccaccgccaccagtccacggagggcatgagatccagagacaatggccccgatgggatggagcccgaaggcgtc

SEQ ID NO: 391226 - DNA, 75 bp, Homo sapiens
gctgagggcagccccgtccaggaaaacatgtctcaacttagcgaggaagaacagaataaagattatcaagactgt

SEQ ID NO: 391227 - DNA, 90 bp, Homo sapiens
tggtgccaatgatgttggaggatacctgtgggcagagcggcttgggtaaatccaccttaatcaacaccctcttcaaatccaaaatcagcc

SEQ ID NO: 391228 - DNA, 100 bp, Homo sapiens
ctgaacctgcacctccatcacgacccattcaggagcctccaggagcccagacaccagccccccaccatgggcatcacggggctatatcggggaatggctg

SEQ ID NO: 391229 - DNA, 76 bp, Homo sapiens
gtggagttcacctggatcttcccagggcagaaggctgaccggttccctgatgtgttacctgcttctgctactgatc

SEQ ID NO: 391230 - DNA, 75 bp, Homo sapiens
tgacatcgcctgcagccgagcgggcccgttccgccggagctgaggaccagaaacctctgcgccatgagagccaag

SEQ ID NO: 391231 - DNA, 100 bp, Homo sapiens
atgctgggagccatctgtgccatcatcgtggtagttattgtaaggcggcgactggcggcgcgatggacctgaccgggctcctgctggacgaagaaggcac

SEQ ID NO: 391232 - DNA, 89 bp, Homo sapiens
aaagtccggctgagcgtctatggagccctgggcatttcacaaggcactaactgtgacatctatgaccttttttatcatcgcacaagccc

SEQ ID NO: 391233 - DNA, 82 bp, Homo sapiens
cacatggtgggggccacaccatttgccgtggccaggctagaggcagcggaggaggaaatggcaggtcctaatcaactctgca

SEQ ID NO: 391234 - DNA, 100 bp, Homo sapiens
caacttcgcggtggtcaagcgggccacgcacctcgtcaccaaggccaagtatttgattttcatcaagcagctgatggtatccaggaacaacagagacaag

SEQ ID NO: 391235 - DNA, 75 bp, Homo sapiens
cgacaagccgctggcagccgcggatctcaccgccgctcagggctttactgcagatggtgcgtgacgagagccacc

SEQ ID NO: 391236 - DNA, 75 bp, Homo sapiens
cgctctcgcttcgtcctacacttgcgcaaatgtctccgggccacccagtgctcctgcagaagatcgttcaggaac

SEQ ID NO: 391237 - DNA, 100 bp, Homo sapiens
ggacagtctggcaaaagcctctgctctgcctccggggacaagaaactagagcaaataaccgttttgaaattgtccctgtcccaccaattttgggttttta

SEQ ID NO: 391238 - DNA, 112 bp, Homo sapiens
atggcggcgcggcccccggacctgcaagtgccgcctccctccggaggtgcgcggaggcttggtgtgccagaaacctgtgaaggtcgaaacagctgcgtttcctgttttaatg

SEQ ID NO: 391239 - DNA, 76 bp, Homo sapiens
ctgcagtactcgggcaagaccaccttcgtcaatgtcatcgcgctgcagaagaaagatcagcaactggagcctaaaa

SEQ ID NO: 391240 - DNA, 140 bp, Homo sapiens
ggctgtggctaccatgttctctcgcgcgggtgtcgctgggctgtcggcctggaccttgcagccgcaatggactgactgcattgcacagatgatggatatttacgtatgtttgaaacgaccatcctggatggtggacaata

SEQ ID NO: 391241 - DNA, 82 bp, Homo sapiens
ttcagcctcgtctagagagcttggtatctagaagtcgttggaaagagcaatataagcttgcattggacacacactactggac

SEQ ID NO: 391242 - DNA, 90 bp, Homo sapiens
ggctttttgttgtggttcctgatgctcctttgcagataatactaatgcctcagttaccccaacaagccgaagcttactaaggcagccaga

SEQ ID NO: 391243 - DNA, 97 bp, Homo sapiens
cccactgccatgacggggggctggtgctgcgggacctcaagctgcggaaattcatctttaaggacgaagagaggctgaccaactgactgaagagcag

SEQ ID NO: 391244 - DNA, 100 bp, Homo sapiens
ccaaaatgacagagctctaccagtctttagaaaatgactgtggtgctagaagatcattacttttggaaagccggttaacatccatttcctaagagaaact

SEQ ID NO: 391245 - DNA, 75 bp, Homo sapiens
gaagccttcctttatcgctttcaggttttatgacttacctagtggagcctttatttacagaatgggccaggtttt

SEQ ID NO: 391246 - DNA, 100 bp, Homo sapiens
agcggtatattagttcagttaccactaccaggaaccttggcaaagtgtatacagactgaggatggaaaatggttcacccccatggaatttgaaatcaaag

SEQ ID NO: 391247 - DNA, 75 bp, Homo sapiens
gatctggtgtaccaggcgaagctggccgagcaggctgagcgatacgacggtctggccgtgggcctgggcttcggg

SEQ ID NO: 391248 - DNA, 100 bp, Homo sapiens
ccagtgagggtgtacaaatacccctttgaattaattatggctcaaaacaagctatcgatcagggaagatctccagttataatagataacactaatataca

SEQ ID NO: 391249 - DNA, 100 bp, Homo sapiens
cctcagcctcgcaagtagctgggattacagttgatttggagcatatgcgaacaataaaacctgaaaaacacttacggttttgccaggaaaatggttttag

SEQ ID NO: 391250 - DNA, 89 bp, Homo sapiens
gttctgctgcagaacctgtgctgcaggatcctgggcaggagcgaagcaccagcaacaagtggtgcaggctgtggaacgggccaagcagg

SEQ ID NO: 391251 - DNA, 74 bp, Homo sapiens
ttgacattgatccgatggtggttactggtcccgcccagctgcagaccctccaggctggaggaccagccgccctc

SEQ ID NO: 391252 - DNA, 120 bp, Homo sapiens
agcccaggcccggaagctggtggaacagctacgcatagaagccgggattgagcgcatcaagggtgaatcctggttctttcgttggctacctggaaagaaaaagacagaagcttatttgcc

SEQ ID NO: 391253 - DNA, 100 bp, Homo sapiens
ggacatagagacacctggtttggcgataccccttcaccaaggagactgctatttcatgcttggtgttaagtgtgatgcttccataatacatttggatgct

SEQ ID NO: 391254 - DNA, 75 bp, Homo sapiens
cgagcgcccccggatcatggccaccgagacgccctgctggcggacttggagtctaccacctcccacatctccaaa

SEQ ID NO: 391255 - DNA, 50 bp, Homo sapiens
gccaaggtgccggccgacaccgggtgaggtggctttgaccccgggttgcc

SEQ ID NO: 391256 - DNA, 100 bp, Homo sapiens
tgcagatcgggagcgcaaggtcgccctcaaggccatgatcaaaacctcctgctgctgctctgaggactcaggaacaccttcgagctttgcagacctgcgg

SEQ ID NO: 391257 - DNA, 50 bp, Homo sapiens
gtcagaaccctccgcagagtaaagctttctaaaaccaatttttccaacaa

SEQ ID NO: 391258 - DNA, 100 bp, Homo sapiens
ctcctgggagcctactatcacgacgggaagctgtgggtcagcccaaggccaaccccactgtcactctgttcccgccctcctctgaggagctccaagccaa

SEQ ID NO: 391259 - DNA, 100 bp, Homo sapiens
tgctgtttgagcgatccctctatcccgggtcgctgctgtgttctggaaaggcacattgtaccctggatgcagcagaggtatgtagaaaaccccaacatca

SEQ ID NO: 391260 - DNA, 100 bp, Homo sapiens
ctggattttggagtctcagacgccgatattcaggtgtcccgacccaggctaagcttgagcatggctgagcaggagcccacagccgagcagctggcccaga

SEQ ID NO: 391261 - DNA, 51 bp, Homo sapiens
gcaaaatcgagcgggccattgactgctgagaaggaagaatttgaacatcaa

SEQ ID NO: 391262 - DNA, 100 bp, Homo sapiens
cgcgctgccgagaagctttacctcgctgaccctatgaaggctcttgggaaagctggtgctgctgctgcctgattcccgccgacagaccttgggaccgggg

SEQ ID NO: 391263 - DNA, 100 bp, Homo sapiens
ctggtggccaggggacgcacaaccaatgaacaggatgacttgttcgcggacctggccaacctgagccacctcttcctccacgggaaccgcctgcggctgc

SEQ ID NO: 391264 - DNA, 82 bp, Homo sapiens
tgagattgagctttttgtaaagatccaggtgattgagaatgatagagccagcagaggaggacaagtttatgccaccaacacc

SEQ ID NO: 391265 - DNA, 75 bp, Homo sapiens
cgtggacatctcaggtcttcagggtcttccatctgtgcctggctctctggctatgaaaatcctgtggtgtctcga

SEQ ID NO: 391266 - DNA, 75 bp, Homo sapiens
aacaaatatgaatgacttcaaacgaggcaattcaagctgctggaacaagaccgagatataaaggagccagtgcaa

SEQ ID NO: 391267 - DNA, 83 bp, Homo sapiens
ccgccttggcctcggggtctccctacaccaacgccatcactggtgcaagctatatttaacggagatcctgatgaagttcgagc

SEQ ID NO: 391268 - DNA, 75 bp, Homo sapiens
gtttcatctgtggatggagtattggtcaaaatgcagatcttcgtgaaaacccttaccggcaagaccatcaccctt

SEQ ID NO: 391269 - DNA, 75 bp, Homo sapiens
cttcttcctttgcaaaactgcagttttgacagcgaggcaccaggctggcagatgcccactggtgccatgaccttt

SEQ ID NO: 391270 - DNA, 75 bp, Homo sapiens
aggacagcttttttcctgcaaggatatgtgacgcagccacaattcactgtcttttggagcaagaactggcccatg

SEQ ID NO: 391271 - DNA, 100 bp, Homo sapiens
gcgaaattggtcattctcgctaacaactgcccagctttgagaagaagccattgaagatgttgaaggacccagtgaaacagctgctgatccagaggagctt

SEQ ID NO: 391272 - DNA, 82 bp, Homo sapiens
gggccccctccgccctctccagctcccctctcctcacggctcctcatgctgaaggggatgctaagggagataaagcaaaggt

SEQ ID NO: 391273 - DNA, 80 bp, Homo sapiens
agctatcccctgaggcccgacccagagatgtggtatggtgtattcctgtgggcactggtgtcttctctcttctttcatgt

SEQ ID NO: 391274 - DNA, 90 bp, Homo sapiens
ggctctggcgcgcagcccggcgggacagcggggcggctggcgccgggggccggggagcgccagagtttgaacaactgactcttgatggac

SEQ ID NO: 391275 - DNA, 90 bp, Homo sapiens
atcgtggtcgtaggaggctgtcctgtctgcaggaatccagacgctctgcagtgtcccatcgtcttatgcggatggcggggaaaggcctcc

SEQ ID NO: 391276 - DNA, 50 bp, Homo sapiens
ggccgatgaagtgcagaggtttttttctgcctcttagcaatgcataccac

SEQ ID NO: 391277 - DNA, 75 bp, Homo sapiens
atatcagatgcctcgcagagcaccaggcccaccgtgaaagacaggtgatttggcttctgcacagttaggaggagc

SEQ ID NO: 391278 - DNA, 82 bp, Homo sapiens
gatgtgggatccggttccttggtgtcatccagccttagcaaaccagaggtacggttcctggagcagcagaacaagatgctgg

SEQ ID NO: 391279 - DNA, 100 bp, Homo sapiens
aggtgggggacagatcgtcttgtctggggaaaccgcagcagccgtcggagcacttactggagtccaagatgctaatgaccgatttgggatgttgcccctg

SEQ ID NO: 391280 - DNA, 98 bp, Homo sapiens
gtggaggctgtggcaatggaacaggcttgagaaacaggagagacagcgtctggagaccatcctcagtctctgtgctgaatacacaaagcctgacagtc

SEQ ID NO: 391281 - DNA, 100 bp, Homo sapiens
gtggaagaggtcaaatacatgaaaaatggggcagaagaagagcagaaaatagcagccaggaaccaagaaaacttgatttgtcccatcagatgaaaagaag

SEQ ID NO: 391282 - DNA, 100 bp, Homo sapiens
ctgatgacctcattgatgtggtggaaggaaacagcttaattgagtccctgaagttctggaggacccgcttcctgctgctgccagcctgtgtcaccgccac

SEQ ID NO: 391283 - DNA, 83 bp, Homo sapiens
ctctcgtctggtttgatcacaagacgggcaaggtataagcagtttagccaaattttgaagaacattggagaaaatgaaggtgg

SEQ ID NO: 391284 - DNA, 100 bp, Homo sapiens
cagtgatacaacattggaacttagtgttatgccaaaagatgaagacattctccaagtggtaaaggcgacacaggaggagaaccgggagctgaggagcagg

SEQ ID NO: 391285 - DNA, 82 bp, Homo sapiens
ccaacaacaattccgatggcaaagccgttgccaaggcagggcaagaatcctttcgttccatcacaaggtcgtattacagagg

SEQ ID NO: 391286 - DNA, 98 bp, Homo sapiens
ccttggctccccaaagttccacaggttataggaagactttgaggccagagcacagtgacattggagggagccgcaaccctccctgggttgaaggaact

SEQ ID NO: 391287 - DNA, 90 bp, Homo sapiens
gcctcagagagagctgtggttgccggaagttgagcggcggaacaagactgccaatggagactgccgcagagacccccgggagcggagccg

SEQ ID NO: 391288 - DNA, 75 bp, Homo sapiens
cgctgctcaaaacctcgctccggaaaggggacacctggagcatcagatccatgctgctgctgactcggagcccca

SEQ ID NO: 391289 - DNA, 100 bp, Homo sapiens
gtgcacatccaggcgggccagtgcggcaaccagatcggcgccaaggtccaggttatgggatcagccaatcaagtcgactgtcgtcttctgttagtgccat

SEQ ID NO: 391290 - DNA, 100 bp, Homo sapiens
ctggccaagatccgcaaggccgcccgggaactgctgacgcttgatgagaaggacccacggcgtctgttcgaagatggcgagcggctgcagctgcaggatg

SEQ ID NO: 391291 - DNA, 100 bp, Homo sapiens
cctgggagttcagcttttagagcaggtgtatgatcttttggaggaggaggatgaatttgatagagaggtgaaagaacttgtcctggacaacagtcggtcg

SEQ ID NO: 391292 - DNA, 100 bp, Homo sapiens
gggtcacccgcactgagtcaacagactgagcgcgtccaggcctgacagctctgcggctcgggccctgaggtaagaatgattgatgttggctgatattgga

SEQ ID NO: 391293 - DNA, 75 bp, Homo sapiens
ctcccccaggactcctttgaaggcgtggacgaggacgagtggtccaaggttcgagagctggaagagaaatgccgg

SEQ ID NO: 391294 - DNA, 101 bp, Homo sapiens
ctggagcacagagaagctcccagctttgaagagtcctgtgtatggaaactcacatgagtcagctcagtctagaagggtagtaatttctcataatatggata

SEQ ID NO: 391295 - DNA, 100 bp, Homo sapiens
tcccattcacaaggcagctcgctctgggagcctagaatgcatcagtgcccttgtggcgaatggggctcacgtcgatatcatcgagaaaggagaagaacac

SEQ ID NO: 391296 - DNA, 90 bp, Homo sapiens
cacacacacctgatttaacaacatctcattatctcaggcattatattgtacttctagcaagtgcaccaacagaaaaacaacgcctggaat

SEQ ID NO: 391297 - DNA, 90 bp, Homo sapiens
cagcaagctgaaggacatccggaacgcctggaagcacagccgtgaaaattgataccaaggccattccactgtttgggaactccctgaagc

SEQ ID NO: 391298 - DNA, 90 bp, Homo sapiens
aactgaagagcttgcagtaccttcaacattccttcagaccctgtccccagaggggctggttctgccatgagtactgatgcttacccaaag

SEQ ID NO: 391299 - DNA, 100 bp, Homo sapiens
cgggacttactctggggcaatgccgtgtacctaaaggaggccaatgccatcagtgtggaactgaaaaagaaggtgcagtggctactggggaagacccaac

SEQ ID NO: 391300 - DNA, 98 bp, Homo sapiens
atacttgacatctaaaatttttggtattgcagatgacagctgcggtgcaaccctgggcagtttgcgtgtcgcagcggcaccatccagtgcatccccct

SEQ ID NO: 391301 - DNA, 100 bp, Homo sapiens
gcacgagcgaagtacagcttatggatgggctgagaagaaagccaaggtcattgcaggaatgaatgctgtggaagaaaaccaggggcccggggagtctcag

SEQ ID NO: 391302 - DNA, 98 bp, Homo sapiens
ctgcccagccaccagcaaccccccagatatttggtttccaggcaggactgacgtctttggattgcagtggatcttactgcttacctgtaccagttatt

SEQ ID NO: 391303 - DNA, 78 bp, Homo sapiens
tagcatcttctgtcatgagaagtggcgatcaaaattgggcatgagccagaaggagagctctaagtctgccatgatgta

SEQ ID NO: 391304 - DNA, 75 bp, Homo sapiens
gaagatgcagagttcattgttgccaagttattggagggtggtgaagagaggatggagacaccccaggaagaccac

SEQ ID NO: 391305 - DNA, 75 bp, Homo sapiens
attagcgtctacgaccaccaagggaagcagtttaagtgcacggtgtgtgactacacagcggcccagaagccacag

SEQ ID NO: 391306 - DNA, 100 bp, Homo sapiens
cacagaggtgggcaagcacatcatgaaaagttctggaggctgggaagttcaagatcaaagtgccagcagattcagtgtcatgtgaggacgtgcttcctgc

SEQ ID NO: 391307 - DNA, 51 bp, Homo sapiens
cctttcagctttaaagagaattgaaggttctgcagcagtgcatgagaaagc

SEQ ID NO: 391308 - DNA, 97 bp, Homo sapiens
ggtactagtcaagacaagaaaatcaacaggctttcagccttgaggcaacattggatattattgaggttttgaaaacattgaattgactcctcttgct

SEQ ID NO: 391309 - DNA, 51 bp, Homo sapiens
cgatgaagtgcagaggtttttttctgatagtggaggagcgccggactgtgg

SEQ ID NO: 391310 - DNA, 83 bp, Homo sapiens
ccgtgcggagaagaagctgcggccgcacctggccaaggaacgtcaaggtcgtgggaaataaaaggcagttctacacagactgc

SEQ ID NO: 391311 - DNA, 50 bp, Homo sapiens
gtcatccgtgtcattgcccacacccagcccgagatgatcggccactacct

SEQ ID NO: 391312 - DNA, 100 bp, Homo sapiens
ctaacatcgacagagagaaggcaatgagccgacccatcttgtacagcaactggctgtcaaaggtggttgtgtcaaaccgattggtgacatctccatgctg

SEQ ID NO: 391313 - DNA, 74 bp, Homo sapiens
ggccgggatggaggacgttaactctaacgtgaacgcggaccaggaggctgatgaattcatccgagcaaatgcca

SEQ ID NO: 391314 - DNA, 75 bp, Homo sapiens
ccagaacgtgccatggagacgcttaacgctctccctccggacggtgaactcctcccgctctgcctatgcctgctt

SEQ ID NO: 391315 - DNA, 75 bp, Homo sapiens
ggcgaatagctctgaccacccggcgaagagggatcgtgatctggaactcgctgctcgaattggacaagctctctt

SEQ ID NO: 391316 - DNA, 100 bp, Homo sapiens
acagcccagacgcccaggcgtgccttgtttttggattcagttctcctgtgtgcatggctttccaaaaggagagcagtctcacaggtgctggacagcctgg

SEQ ID NO: 391317 - DNA, 75 bp, Homo sapiens
ttcttttccggccctgggatgtcacgctccgccgcatgcaagagatgattgcaaggatgcaggcgcagatgcaga

SEQ ID NO: 391318 - DNA, 100 bp, Homo sapiens
agcgctactgtgaccattgaggagctcggcctgacctctcgggacacacccagccctgtggacccagacaccgtggaggtgttgatgacctttgaacccg

SEQ ID NO: 391319 - DNA, 101 bp, Homo sapiens
agagccggaacgtcatccctgatatccctgaccacttcctgtgtctgtgggagcactgtgagctcactgcaaatctaacttcatcatggtgaactaattta

SEQ ID NO: 391320 - DNA, 99 bp, Homo sapiens
gacctgaaggatatgatgctctactgcaagttcaaagggcaggagtgcggccaccaagacttcaccacaccagagactgctgctactttgaaacgtacg

SEQ ID NO: 391321 - DNA, 95 bp, Homo sapiens
cgggccgtcaccctgcctcccctgcgtcccgccaccggccgcttctgtcctcggtgaatgaaaactttgccattgatttgatagcagagcagccc

SEQ ID NO: 391322 - DNA, 80 bp, Homo sapiens
cagcgtgcgttcagccctgggggaacgggtatggcaatccccgaaactcaccaggtctgctggtctcacctggtaacttg

SEQ ID NO: 391323 - DNA, 97 bp, Homo sapiens
gtggcagtgtgaccaagaaccatgcctggtggatccagacatgatcaaagccatcaaccagggcaactatggtgccccagttcccaagagcctgcac

SEQ ID NO: 391324 - DNA, 74 bp, Homo sapiens
ttggtggagaattatccaacaagaaaaagacctgtggctattaagatagcaactacactgcgctgcatcggact

SEQ ID NO: 391325 - DNA, 96 bp, Homo sapiens
agaggatttgcttttgtaacttttgatgatcatgatacagttgataaaattgttggtttttctttggactcagggaaaggtattgtttctaaagat

SEQ ID NO: 391326 - DNA, 83 bp, Homo sapiens
cagggggagcgcctggaacatgcagcagctttgcgggccctacaagatcagccgtacacggccttccctcccgcagtgcccgg

SEQ ID NO: 391327 - DNA, 100 bp, Homo sapiens
aggccacaactctgcagtggaccacagcattcctgaaatacatccaggaaagacatggagattctcttaaaaagatgctgcacttaaaaggatgcttgtt

SEQ ID NO: 391328 - DNA, 75 bp, Homo sapiens
cagagatcaatggaaccatgaacgacactgcccatctctaagataagaacctggaaaggggactctgttggccat

SEQ ID NO: 391329 - DNA, 98 bp, Homo sapiens
tttcaaaggatcagtttgaaaagaagaaaaatgataccttagaccccgaacccggaaggcagacagattgctgccaacatgaggggtattgggatgat

SEQ ID NO: 391330 - DNA, 100 bp, Homo sapiens
aattcccagaccttcagcccgtggcccggatgcaggacagacccctcaggtaaacctagcctttaagcaacctggaaagaggctagaacaccaaggaatt

SEQ ID NO: 391331 - DNA, 100 bp, Homo sapiens
gcgggagaaagagctctctatacactttgttcccgggagctgtcggctggtggagatgtgcactgggaactacacctttgttccttacatgataactcca

SEQ ID NO: 391332 - DNA, 82 bp, Homo sapiens
acagccactgccgccgtcgccgcggagctggtttctgccgacaaacaatgcagatcttcgtgaagactctgactggtaagac

SEQ ID NO: 391333 - DNA, 90 bp, Homo sapiens
ctgctgttcagcaggagaaaatttcagagctgcaaaattatcaggcacgtgtggttctcaaatataggcattctgatgggaacttgtgtg

SEQ ID NO: 391334 - DNA, 75 bp, Homo sapiens
aattctggacaatcaaaacttaactcctggatacaggtaacttgggtttttactcctgtaacaactgaaataaca

SEQ ID NO: 391335 - DNA, 90 bp, Homo sapiens
cagcgcggctacctgctgacacggaaccctcacctcaacaagtgcactatatgttgtggatctgaagaagtttaggaaaatagctgctgg

SEQ ID NO: 391336 - DNA, 100 bp, Homo sapiens
ggcacggaatctatctctgagaatgacccgttctggaatcagcttctctcattttctttccctgcaccaactagcagcagccccgggctcagctcctggt

SEQ ID NO: 391337 - DNA, 87 bp, Homo sapiens
cggcacctgcacacctggatccaggataacggaggctggacccctctgccatgaaccagtccatcccagtggctcccaccccacccc

SEQ ID NO: 391338 - DNA, 100 bp, Homo sapiens
ggaacaattaatatatatgctactggacattctagcaagatcaagggtaaaattccattctgatatcaaaatgcagtattcgcaccactgtgagcacctt

SEQ ID NO: 391339 - DNA, 82 bp, Homo sapiens
agtccacccaccgccgccgcctcccagggtaattttatggagtgtcagcccgagagcagcatctctcaccgtttccacaaag

SEQ ID NO: 391340 - DNA, 82 bp, Homo sapiens
tcgcgcagccatgtccgaggagaagcccaaggtcagcccaaggccaaccccactgtcactctgttcccgccctcctctgagg

SEQ ID NO: 391341 - DNA, 83 bp, Homo sapiens
cacaagagcgaggagaagcgagaaaagatgaaacggaccctccgttggacataccagatggtcgaagagctccacttcctgct

SEQ ID NO: 391342 - DNA, 82 bp, Homo sapiens
ccggcgctgatctacaagaaaatccacaagaacgcactttcctcccaggtgccaaatgtgacatccagatgacccagtctcc

SEQ ID NO: 391343 - DNA, 85 bp, Homo sapiens
gagtgttcctgtggtctctgcacctcctttctgcagcttgaaatccactctccagatgctaagcacacggtgatcctaaggagca

SEQ ID NO: 391344 - DNA, 74 bp, Homo sapiens
gagacggcctgggtgctggcgaagcggaggccggagaaagtgactgagaccgaagatgatagtgatagtgacag

SEQ ID NO: 391345 - DNA, 100 bp, Homo sapiens
cctgatgttgctaaatgtagacaatggttagagaagaattttccaaatgaatttgcaaaacttactgtagattcctgacattcagacaactgacttgtaa

SEQ ID NO: 391346 - DNA, 101 bp, Homo sapiens
ggacaggtctacgccacatcacttagagacggtaaagaacaggtccaagaaaagctcaaagaaagcaaataccagcagcagcagtagcaacagcagcaagt

SEQ ID NO: 391347 - DNA, 74 bp, Homo sapiens
agagtaggaaataattttcacaaccttcaagaaattcggattcatgagatatttgattgtcaagaatgtatgaa

SEQ ID NO: 391348 - DNA, 100 bp, Homo sapiens
gaggatttggtggcagaggccggggaggctttggaggttctaaggcccagcagctactacaaggattgcaagccagtgatgaaagtcaacagcttcaggc

SEQ ID NO: 391349 - DNA, 99 bp, Homo sapiens
aggatgcaagatggactgcagccttcaatggtgtcatggagaaactccagctgggcccagagattctgcagcgggaaaatccaaggcttatttatgcca

SEQ ID NO: 391350 - DNA, 101 bp, Homo sapiens
gcctgttccagaactgctggaagctgaggttcctggatgcctatgctgagcacaagttacagttctgggcagtgacagctgaaaatgagccttctgctggg

SEQ ID NO: 391351 - DNA, 98 bp, Homo sapiens
aaaagcccaagctacttctggaacagtatcctaccaggccgcacattgcaggagttcatgatcaagtgttgcccacaccaaatgcttcatccagagtc

SEQ ID NO: 391352 - DNA, 100 bp, Homo sapiens
gggggtcgcggaggtggcagggggcctggctccgggcagtgcggatttggagtcaaaatatggacctgagaaaatatctccagaaaatgatatttttgaa

SEQ ID NO: 391353 - DNA, 100 bp, Homo sapiens
ggaaagggaagcttagcccgccgctgccgcctccgagcagcccgccagttggagaaggaggagcagatacacagtgtggacattgggaatgatggctcag

SEQ ID NO: 391354 - DNA, 82 bp, Homo sapiens
agccacatccctgctcttggtaaaggttctgaagccagacacaagatgaaaaagctaactccaaaacagaaattttctgaag

SEQ ID NO: 391355 - DNA, 82 bp, Homo sapiens
agaacaacatatcgtatcagatggcagacatacatcatttaaagggctgcctgctgtttcccggggagatcatgaaacgagg

SEQ ID NO: 391356 - DNA, 100 bp, Homo sapiens
tttcaacggtgtttcccgctcagcaattctgcaggagaattctactctgtctgcaagtaacaagtgttgcatccttacgacagtctgcctacctcacaga

SEQ ID NO: 391357 - DNA, 73 bp, Homo sapiens
tttcatttgttgatcccggcaccgccagatgatgataattccgaagaaggcttccacactattcattcaggaa

SEQ ID NO: 391358 - DNA, 90 bp, Homo sapiens
ccaagaaggcccccagcctacccagtttccgtgaccattccgccctgggaaagcggcttcccaggaatatgactggcgaaactatcagcc

SEQ ID NO: 391359 - DNA, 75 bp, Homo sapiens
aaggcagaaccagtcccttgtgtatggcaaagtggatagcttctggaagggctgattgttgtgacattggccgta

SEQ ID NO: 391360 - DNA, 75 bp, Homo sapiens
ctcatcctgggcagcaaggaacagactgtcaccatcagaacaagcactgcctgctggaggctgggatcggctgca

SEQ ID NO: 391361 - DNA, 75 bp, Homo sapiens
gaagtggctgtgaagatttttaataaacatacatcactcaggctgttaagacaatggcttacagaagagacgaaa

SEQ ID NO: 391362 - DNA, 78 bp, Homo sapiens
tttccgccctaatggaggtctccagtttcgcggaatggccaaagactatgacgggtcttcctagcacatcagggacaa

SEQ ID NO: 391363 - DNA, 101 bp, Homo sapiens
ccgagtgtgcgaagctagccaaggtttctgctttgggacaaccatacatctaattccttaaagtagttttatatgtaaaacttgcaaagaatcagaacaat

SEQ ID NO: 391364 - DNA, 54 bp, Homo sapiens
aaaccacaaaatgggtaatatactataggggatgatccagggaaaagaatgaat

SEQ ID NO: 391365 - DNA, 73 bp, Homo sapiens
ttggtcgcaaaggtcatgctgttggtgatattcctggagtccgctttaaggaactacataaagcgcgcagccg

SEQ ID NO: 391366 - DNA, 98 bp, Homo sapiens
ctccctcgtgagttgggcttggtaccgtgctgcccagaatgcccttcgggagcaattttacccgaaacaaactgacgagtttgtctaggaaacatttc

SEQ ID NO: 391367 - DNA, 83 bp, Homo sapiens
ttaaatgatgtattttgtgatcgcagcgatgaaaggcaggatggactccaacactgctccgctgggcccctcctgcccacagc

SEQ ID NO: 391368 - DNA, 75 bp, Homo sapiens
ctcccaccaggcaccactgaccaggacctaatcaagctgtgccaaccattttaccaaatgttgcaagaactctgg

SEQ ID NO: 391369 - DNA, 100 bp, Homo sapiens
agaaaacagaaatcgaaacagatacagagatgtaagcccatcccttgaaggtagtggacccagatcatcccctcgcagcacttgttcgtaaggcacaggc

SEQ ID NO: 391370 - DNA, 75 bp, Homo sapiens
gggaacttcggagagctcagattaggagtggaaacaaaatgtcagtcagtgtgcatgagaaccgcaagtccaggg

SEQ ID NO: 391371 - DNA, 98 bp, Homo sapiens
cgcttcttcagctctgagaccaccgcagcccactccctagggatgcttgaagatggaaagaaatttgattcctcccgggacagaaacaagccctttaa

SEQ ID NO: 391372 - DNA, 100 bp, Homo sapiens
aatggaaaaacaaaaatgaatgaatcaagagtgatttgttaattttccaggaatatggatctactggaacagcccatgctgatagtgaatatgaaagaag

SEQ ID NO: 391373 - DNA, 100 bp, Homo sapiens
ataagcaatccactaacaagcagtcaaccaatagatgatgaaatttatgaagaacttccagctgaggagaagaaagtggaagcaaagaaagaagaatccg

SEQ ID NO: 391374 - DNA, 97 bp, Homo sapiens
tacaaactttaaacttatttacagatatgcgtttgactttgcacgggaagagaagttaaacttctagagaaacctaacagacaatatccacaacagg

SEQ ID NO: 391375 - DNA, 76 bp, Homo sapiens
cggctgaccaggaacctgggcgagcagcggcgggggcccgagggacaacactaagcagttgagatttgaagatgta

SEQ ID NO: 391376 - DNA, 100 bp, Homo sapiens
agttgattactcagtctctaaaaagctaaggtatgccattttgaagactgagacgttggagttttatcctagaggataaaggaaatctttgggaaagtca

SEQ ID NO: 391377 - DNA, 100 bp, Homo sapiens
atagatgtaggcagaatacctttacagaggttaaaattggtggaatacatgttggtatcttttgatcatgaaaataaaaaagtccggttggtcctgtctg

SEQ ID NO: 391378 - DNA, 100 bp, Homo sapiens
gcttcaccacccgcacggcgcagtgccggaacactgtggcggccatcgaggagacaggcatggtacattgtgatacagcagttggaacaccggattatat

SEQ ID NO: 391379 - DNA, 76 bp, Homo sapiens
aattcggtaaccatagaccaaaaggtacaggtttgcagattccgccagcagcacagcaagctctacagatgagtgg

SEQ ID NO: 391380 - DNA, 88 bp, Homo sapiens
ctgcggagccgggcgctctccgccttcaagttgcggggcttgctgctccgtgggttttgatggacatgtttgatcaggatgacatagg

SEQ ID NO: 391381 - DNA, 101 bp, Homo sapiens
gctgcagctgcgatctctgtggtaggcccaggagacgcaggtcagaatggaaatgggctgcagaccgggcagctattgtcagccgctggaactggcttcag

SEQ ID NO: 391382 - DNA, 50 bp, Homo sapiens
acctgcacgacatgctggcctcgctggctatatgtgagacagagcctgaa

SEQ ID NO: 391383 - DNA, 100 bp, Homo sapiens
cctggttctccatcattgtcaccctggccctcgcggtggctgcctttagctacaactgaggtggaaattaagaagaaaggccctggatctcttttagttt

SEQ ID NO: 391384 - DNA, 90 bp, Homo sapiens
atttttaacccagataatcctaaagtaacccaagccatacaaagcttctgtttggagaagcatttgaagacacttcgtcacccttgcttg

SEQ ID NO: 391385 - DNA, 76 bp, Homo sapiens
ccaagatcccgatctacaagttccctaaggactgcagaggcagtttggccccttcacagatgtagtcactacaaat

SEQ ID NO: 391386 - DNA, 100 bp, Homo sapiens
ctgactcatgggccctggcggtggacgagcaggaagctgcggctgagtcgacagtacaatgtagattataaactggagacttacttgaagattgctaggc

SEQ ID NO: 391387 - DNA, 49 bp, Homo sapiens
cgaccagctgctggacatgtcctacaactgtgtggtccctacgtcttca

SEQ ID NO: 391388 - DNA, 100 bp, Homo sapiens
tacaagacgattcacctgtccagcatccgaccaccgaggctggagggggagaacacccagcatatagcactttctacattgtgggtttaatattatcaat

SEQ ID NO: 391389 - DNA, 82 bp, Homo sapiens
tccaccgaggaaaaggaatcgtatcgtatgtccgctatccagaacctccactctttcgattcttcgctgctgctgccttacc

SEQ ID NO: 391390 - DNA, 106 bp, Homo sapiens
ggaccccgcggcgcccctcggcctcggagcaacgagcgcagcgccggttaacacagaaatctgcctcctgggccatgccgcttctaaggcctgtttcttctcatga

SEQ ID NO: 391391 - DNA, 90 bp, Homo sapiens
agacagaaccagtcagcattctacaaccccagaccaccgttaatccagatcgcatcaaacaagtggaagttaaacgagctgagcctcggg

SEQ ID NO: 391392 - DNA, 49 bp, Homo sapiens
ggaatgtcatccagcgagtgattagcggatgtgatgctggtacaaccca

SEQ ID NO: 391393 - DNA, 75 bp, Homo sapiens
cacagacaccgcctacaggagtatgatgcaaggctctctttaaactgtggggctccccagacaagtatcccaaag

SEQ ID NO: 391394 - DNA, 98 bp, Homo sapiens
cgagccaaggacgacgggacccaggcctccggtgtggctgtctctgatggtgtcatcaaggtgttcaacgacatgaaggtgcgtaagtcttcaacgcc

SEQ ID NO: 391395 - DNA, 90 bp, Homo sapiens
gccgctcctaagcctgcacagccgcggcggcagcagcagtgagaggttcatgatcaagagggcccaaggacggaagcgctttgggatgaa

SEQ ID NO: 391396 - DNA, 75 bp, Homo sapiens
acctgccctctacctggtgcccttctgcaggacccctacttcatccagtcgatgacagtcgtctagaggagctca

SEQ ID NO: 391397 - DNA, 98 bp, Homo sapiens
gatgtactgtgcttggctggaaaaccccaaaagtgtacataaggaaggagtcaagactgagaacaacgatcatattaatttgaaggtggcggggcagg

SEQ ID NO: 391398 - DNA, 100 bp, Homo sapiens
gacatctatacccatctggtcaaatctctgcaggaatcagacaggttggcaaaagcagcttttgatgatgcaattgcagaactggatacgctgagtgaag

SEQ ID NO: 391399 - DNA, 74 bp, Homo sapiens
ctgtcttggaggacatcagaagacagccagctaaaggtgtggatgagcaaatacggctggagtgccgacgagtc

SEQ ID NO: 391400 - DNA, 80 bp, Homo sapiens
gtggcacctcttccagaactcggccaccgccgtggcccagctctacaaagacaatgcagatcttcgtgaagactctgact

SEQ ID NO: 391401 - DNA, 100 bp, Homo sapiens
tgacatttaattttagggtcctttatatagaagggagagtagctgggctcaaaatgcagagaactcaaagatattcatttcggccagtgttacaagatct

SEQ ID NO: 391402 - DNA, 50 bp, Homo sapiens
ccctcaacaacttttcagtggcaagcccaagtctgttttggtggtctgag

SEQ ID NO: 391403 - DNA, 51 bp, Homo sapiens
attctcaaagactggtgctatgaagctttaagtgggcagaccaacatccac

SEQ ID NO: 391404 - DNA, 98 bp, Homo sapiens
gaaattgtcccgaatccctgcaggtgtggttcccaacaaaggtcagtttcccttggctgtgggagcccaggagttgtttctgtgcactggtcctatgt

SEQ ID NO: 391405 - DNA, 83 bp, Homo sapiens
atattgtgtcttccccggccggtccctcgcctcccggccgagctgacgatgcctgaggaagtgcaccatggagaggaggaggt

SEQ ID NO: 391406 - DNA, 82 bp, Homo sapiens
ctcgctgggagagaggtacctctccttttccctctccctttccctaagcaattctgtggtgttcttggtcacacatttatgg

SEQ ID NO: 391407 - DNA, 100 bp, Homo sapiens
ctttttggatggctgcttgtcgcaatattgtcttcttcgctttagacaagtatcagcggcagggaaggaggctttgccatcttggctgcactgggactca

SEQ ID NO: 391408 - DNA, 76 bp, Homo sapiens
tttgcaaagaggaggaaggagggacttcttggcttctcccagcatagccccagagtggccacaaactcaaaggtgc

SEQ ID NO: 391409 - DNA, 90 bp, Homo sapiens
cagatcttcacagcacagttcctgggaaggtggagccaccagcctctccctgttgctggatttgtgcgactcggtgaaggatgatgcccg

SEQ ID NO: 391410 - DNA, 76 bp, Homo sapiens
accaaccaaattgtcgccattaagaaattccgatgaagttaaattccgtcaagatttaatgaatattgcgggcaca

SEQ ID NO: 391411 - DNA, 51 bp, Homo sapiens
gaattcccatagatatgtggaatataacagaattgttgtacaaggatggac

SEQ ID NO: 391412 - DNA, 88 bp, Homo sapiens
taaggactcggcggacatcgagtgatccgggccaaggtggtggggaagaagctggtaaaggaggggcccttcggcacgctggtctaca

SEQ ID NO: 391413 - DNA, 95 bp, Homo sapiens
ctccccatgggcctgatcatcatgccgggcatgatcagccgcgcattgttcccagggtcctcactgagcagcgagtcgtcccccgtgtcctctcc

SEQ ID NO: 391414 - DNA, 82 bp, Homo sapiens
cggcacgcgactccccccgggcccaaaaccctctttcccagctgcccgctcctcagcacccgaagattcgcctgtacaacgc

SEQ ID NO: 391415 - DNA, 100 bp, Homo sapiens
taaaggccatgaccaaggctcgcaattttgagagagttttgggaaagtgtcttgggacaaggtgcgcattcctggtgtgctgcagcgattgggagtgaca

SEQ ID NO: 391416 - DNA, 100 bp, Homo sapiens
ccggagtcgaggattccagggtcgaacactcgccacccaggtcgatccgtgcaacctccaggagctgttccaggagatgtcggccaacgtcttccgaatc

SEQ ID NO: 391417 - DNA, 75 bp, Homo sapiens
ggacggcgagcgcgagcggcgcgagaaagctgaaggggctgggggaaggaagcaaacagtggtcatcaagtgccc

SEQ ID NO: 391418 - DNA, 101 bp, Homo sapiens
cgagtggtaaaagacatggcaacaggaaagtctaagggatatggctttgtctcctttttcaacaaatggtgttgcctatgattgctccatggcaaagaaga

SEQ ID NO: 391419 - DNA, 78 bp, Homo sapiens
tacgtgtacgacctgtccaaaggcctggcccggcggctcagccccatcatgctggtgatgaattgactctggaaggca

SEQ ID NO: 391420 - DNA, 100 bp, Homo sapiens
ctgtaccctgcgctggctccgtgaaccttagggacaacaccgggacacccgcgaggccggaaaatggtatcgagaaccttccctgcgaacttcagaggaa

SEQ ID NO: 391421 - DNA, 73 bp, Homo sapiens
tcacattggccggcaacttgttccagggaacactgaaaggttttgaccagaccattaatttgattttggatga

SEQ ID NO: 391422 - DNA, 96 bp, Homo sapiens
gagagggattcgtggtgaaggtccggggcttgccctggtcttgctcggccgatgaagtgcagaggtttttttctgccgggtgcaggatggcaggag

SEQ ID NO: 391423 - DNA, 99 bp, Homo sapiens
aaccgtcccaaaatatggcaaagaaacctattctgagtgttttaaccaaacagttgtggctactcatggtgaggaatgaccgctaagagtttgggttct

SEQ ID NO: 391424 - DNA, 98 bp, Homo sapiens
tggcacagcgaggttttgctcagcccttgtctcgggaccgcaggaccttccaagaagtgcctcacagttagatgcaagaaacactaaagtcctcactt

SEQ ID NO: 391425 - DNA, 101 bp, Homo sapiens
ggagagacacgctgggccgaccccagagcggcgctggacaggcccagctgagagccagcctggaggttacccagcagcaggccacccaggccgaaggccag

SEQ ID NO: 391426 - DNA, 82 bp, Homo sapiens
cctgcttccagactcagagtgtgagaaaaaaataaactcctatttgtttatggcaagaagaaaggtgagcagccaacaggcc

SEQ ID NO: 391427 - DNA, 85 bp, Homo sapiens
gacggccagaagttcgactccagccctggactttgtctcacaagatgaaatgttgacgcccctggggagattggacaagtatgct

SEQ ID NO: 391428 - DNA, 82 bp, Homo sapiens
gccgagcgcggccctgcaggcgatgtcgccgaaaccgggctgcaggcgggacttgcaattgtgaccaaatatattacaaagg

SEQ ID NO: 391429 - DNA, 80 bp, Homo sapiens
gggagatgcagcatcccagtttttggtcttctgtcaaaaacacagggatgagacaatgcagatcttcgtgaagactctga

SEQ ID NO: 391430 - DNA, 75 bp, Homo sapiens
agagaccttggagtaattcgtcgacagggtgtgtttgaccatcgaatgaagtgctggcagaaatgggaagatgct

SEQ ID NO: 391431 - DNA, 90 bp, Homo sapiens
gctctgagctgcgcctggacctggttctgccttctggacaatctttccgacctctcaagctggatccaaggataaaaagatggaccaacc

SEQ ID NO: 391432 - DNA, 75 bp, Homo sapiens
atcgtgctgggcaccggcctgacgatacagatcacttggattcagtcgagtttgctttgctccgtgggaactgca

SEQ ID NO: 391433 - DNA, 75 bp, Homo sapiens
gtttaagaagtgcaccatagcgggagttgcttatgggttttcttccgccatctgtgacagcttcttgatctgtcc

SEQ ID NO: 391434 - DNA, 75 bp, Homo sapiens
agaaagtgacctctgagaaagtgagccagaaacatgctgagcctttgacagtcattttttgagaccagtactgtt

SEQ ID NO: 391435 - DNA, 100 bp, Homo sapiens
ctcggggacattattgcgcgtggaacggctgcttttggaagtgtaaacaggaacatcgataagtagtgtaaaaacttgcacaatgaaatccgaagccaag

SEQ ID NO: 391436 - DNA, 95 bp, Homo sapiens
agcatgctgtcctatgtcagcaaaaactggagcagaaattggaggctcagcatagatgaagcgttctgtcagccaccctggttcttgcagttcag

SEQ ID NO: 391437 - DNA, 74 bp, Homo sapiens
caacatttcaggaaaacagagaaagaagtgataggagggctctgtagtataatggaatgtgcttacaagggcca

SEQ ID NO: 391438 - DNA, 100 bp, Homo sapiens
caccagctctttctccaagtttgatggctgatcttgaaggtttacacttgtcaacttcctcttcagtcatcagtataagaccatcatcatgtggaaactg

SEQ ID NO: 391439 - DNA, 99 bp, Homo sapiens
actacatcccgcagtacaagaactggagaggtgtcatggagaaactccagctgggcccagagattctgcagcgggaaaatccaaggcttatttatgcca

SEQ ID NO: 391440 - DNA, 90 bp, Homo sapiens
aagatggcggcgcggacagcgttcggtgctgtgtgccggcgcctctggcagatctgactgcagccatgagcagcaatgagtgcttcaagt

SEQ ID NO: 391441 - DNA, 100 bp, Homo sapiens
tgtctgcaaacagtggtatcgacttatcaaagctttcagattgcatcttctctgtctaaagagctctgtgccctggtcttcggggtcaacacgttctttg

SEQ ID NO: 391442 - DNA, 100 bp, Homo sapiens
gcttcagtagcaaataaggacatcatctgctataacctacaagcagttggacagaaaccaatagagccatggcgactccctctgctgccttcgaggccct

SEQ ID NO: 391443 - DNA, 90 bp, Homo sapiens
tgctactgcacggtgaacctggaccaggaggaggttttcaggaccaaaattgtggaaaagtcactctggatcaatgtgactctaagaaca

SEQ ID NO: 391444 - DNA, 51 bp, Homo sapiens
ggccttgataacacagagtttcaaggcgggtgccacgtctatgtgggcttc

SEQ ID NO: 391445 - DNA, 89 bp, Homo sapiens
cctcagcaacggcagcgtgcagatcaacttcttccagggtaacttctgccagcctcttcccccagcccccaccaactgccccacagaga

SEQ ID NO: 391446 - DNA, 75 bp, Homo sapiens
agagtgttaattctgctcctctcctgggcggcggggatgggagtctggcagttgtagaaccatccatgatgctct

SEQ ID NO: 391447 - DNA, 75 bp, Homo sapiens
caagtgctggtgtccatattgtgatgcctggttattacaggatgcaaggtgttgtaaaccgactgtccaagttac

SEQ ID NO: 391448 - DNA, 82 bp, Homo sapiens
cgccttatgggtatttcttaatcagcgcttgcaaagacaatgcagatcttcgtgaagactctgactggtaagaccatcaccc

SEQ ID NO: 391449 - DNA, 76 bp, Homo sapiens
ccccccaagactgcctggcccagctgcgcctggcgcaggaggccgcccagatctttgatgtgggtgagaatctaac

SEQ ID NO: 391450 - DNA, 101 bp, Homo sapiens
ctaccccttgtcatgcagggtgtgagcagggctgagatgggcaccgcggatctggggccgtcctcaggggcttcataaaagtcagagttcatgtttgtcag

SEQ ID NO: 391451 - DNA, 50 bp, Homo sapiens
agcgctcattgggaatttagttaaggccacggcgtatgcctccgaggacg

SEQ ID NO: 391452 - DNA, 74 bp, Homo sapiens
gacatggcccaattcgagcggctagaatcttgcctgctccacagtttggtactatttcttgatcatccaaaaaa

SEQ ID NO: 391453 - DNA, 75 bp, Homo sapiens
cagctacatcaaggcatgtttccccaagcaatgaagaatctgagactggtcagcccaaggccaaccccactgtca

SEQ ID NO: 391454 - DNA, 50 bp, Homo sapiens
gccaagagcttagttgaactccttggtcccgggattcttgagctgtgccc

SEQ ID NO: 391455 - DNA, 97 bp, Homo sapiens
tgccgtcgccatgtttggctgcttggtggcggggaggctggctaccggctctctgaccagttccacgacatcctcattcgaaagtttgacaggcagg

SEQ ID NO: 391456 - DNA, 88 bp, Homo sapiens
acgctcatcagagggaagatctttttcctcaattggggacagccggaggctgaagggggccatccagaggagcacggagacgggcctg

SEQ ID NO: 391457 - DNA, 51 bp, Homo sapiens
cccgccaccatgagctacacaggagctggccctaaagcaaggacctgagtg

SEQ ID NO: 391458 - DNA, 83 bp, Homo sapiens
caccctcgtattctcctgcccttccccaggtgctcttacagcctgttccaagtgtggcttaatccgtctccaccaccagatct

SEQ ID NO: 391459 - DNA, 90 bp, Homo sapiens
ttcttgcggcgcctcggctcctcccaggtggcctcccgcgtgctggccatgaaggatacctacctggtttatattctaaatgaattggct

SEQ ID NO: 391460 - DNA, 74 bp, Homo sapiens
atgtctttggagaacttctggagctggccaacgtgcaggagtcatatttgatcagaaattggatgaaccttcgg

SEQ ID NO: 391461 - DNA, 100 bp, Homo sapiens
atccagtgtgtgggagcaggaccagcagagacagggtctagctatgttgccccggctggtatcaaactcctggactcaaacgaaagtgctgggattccag

SEQ ID NO: 391462 - DNA, 95 bp, Homo sapiens
ccaagaccaaccatggccaagttaatggattttctgccgtctcttggcaaaaatggcaaataatgatgctgttctgaagagactggagcagaagg

SEQ ID NO: 391463 - DNA, 106 bp, Homo sapiens
cagttggagttggaatttgtgcaatgtttagccaacccaaattaccttaattaaggacagaataacgggctcccagattcacaagccccaccaagaggatcacccc

SEQ ID NO: 391464 - DNA, 100 bp, Homo sapiens
cgctgcgcccgacgctccctgtctgggaccttctccctgcctggacccctactattgcaacaagtaaggattgtatcctggagccgctttccctgccaga

SEQ ID NO: 391465 - DNA, 100 bp, Homo sapiens
gcctccaccatgctgactgctgccaaagggggcaatggcggcttcctgtgttctactgcacactgggcagaagatgcctctgattggtctgggtacctgg

SEQ ID NO: 391466 - DNA, 75 bp, Homo sapiens
cagaggatctgcaagtacccgctcctccttaaggcaaatcctgatcctaactgttgtcttggagtatttgggctg

SEQ ID NO: 391467 - DNA, 99 bp, Homo sapiens
ccgccgttggtattcaggtccaacactaagactgtgtccatgttagaactcatagaaggagtctccccaggacagtgctatcacccgggatattaaccg

SEQ ID NO: 391468 - DNA, 101 bp, Homo sapiens
gtgcctgtcttcagatcttcacagcacagttcctgggaaggtggagccaccagcctctccctgatctatccaataaaggagagaaaggaccgcatacgcct

SEQ ID NO: 391469 - DNA, 75 bp, Homo sapiens
gtggatggcgtggagatatggcgcaactgcggcgcggtgctttcttctgcgacctggtactcatctacctcatca

SEQ ID NO: 391470 - DNA, 96 bp, Homo sapiens
tggtagcccccacccctctccgtccatggccccagatgacacttcaggtatacatggactggtacgagaagttccaggacaggctcaacaagaagg

SEQ ID NO: 391471 - DNA, 80 bp, Homo sapiens
ggcagaggcacttatgcttgtcagtttttcagaagaagtgaagtcaagatgaagaaccatttgcttttctggggagtcct

SEQ ID NO: 391472 - DNA, 133 bp, Homo sapiens
gtcacttgaaagagcctctacttacatttcatctttttgatgcttttgtcagtgtactgggcctctgaggaaacactacattccagtaatgaagaggaagaccctttccgcggaatggaaccctatcttgtcc

SEQ ID NO: 391473 - DNA, 100 bp, Homo sapiens
aggaaacagaccagttatactaacatatcatgacattggcctcaaccgatcttagtaagagccctaagaccatgaaaaagctgctgcccaagcgcaaacc

SEQ ID NO: 391474 - DNA, 83 bp, Homo sapiens
ccgagcccggagcccggagcccgggcaagagctggggcagcgaggtcacaggccccacctttgctgatggcgagctcatcccc

SEQ ID NO: 391475 - DNA, 83 bp, Homo sapiens
tgaaaattgtttcgtagcagagaacagctctttgcatccggagagtggacaagaaagaaagtatgcctcagactcctcccttt

SEQ ID NO: 391476 - DNA, 75 bp, Homo sapiens
gcactccggcgaggccaaggccttccaggactatgagcaggccgggctctcgccatgggtcactgtcgcctctgc

SEQ ID NO: 391477 - DNA, 82 bp, Homo sapiens
actcggcgtccaccttaaagccagctccccggcaccacggatctgacccgggctgaaggtgatgtggccgccctcaaccgac

SEQ ID NO: 391478 - DNA, 143 bp, Homo sapiens
caggcttctgcgcagaatgcttctcagcagcaacatccccaaacagcggcgtttcacggtggcacatacatggcctggttgcagcatgcttgaaatctgggatgtggaagacccttccaatgcagctaaccctcccttatgta

SEQ ID NO: 391479 - DNA, 100 bp, Homo sapiens
ccacggggccgctgctcaagttccagatttgcctaactctggtgaactggatcctttgtatgtagtagaagtacttctgcgctgtagcaaagagagcttg

SEQ ID NO: 391480 - DNA, 74 bp, Homo sapiens
tatcacagaggaaactctgcattctcgcttcctggaggaaaccttctggcgaattccagccaagctgagtccta

SEQ ID NO: 391481 - DNA, 100 bp, Homo sapiens
ttctagggttctaagtgatgtccaggaaggaggaggaataatatttatggagcatatattatggaacacaaaagggtctcactcttttgcccaggctggg

SEQ ID NO: 391482 - DNA, 96 bp, Homo sapiens
gttgagtaaacagaccaagttgggagaaaatgcagaagtctccatggacgtttccctggcttaccgtgatgacgcgtttgctgagtggactgaaat

SEQ ID NO: 391483 - DNA, 100 bp, Homo sapiens
ggtcccgccagcgccgtgacgtggactacagtgacgccctcacggagaagcagtggctaagggcacaattcagattcagaagcgtcaacagttagtcaga

SEQ ID NO: 391484 - DNA, 100 bp, Homo sapiens
ctacaatcacctaatgcccacaagatgccatggacaatattaccaggcagaaccaattctacgatacccaagtcatcaaacaagaaaacgagtcaggcta

SEQ ID NO: 391485 - DNA, 75 bp, Homo sapiens
cttttccctaatacgtacctcattgtgggaggtgggtgaaacagcagtgtgaatttgcaaaacaagcccagaacc

SEQ ID NO: 391486 - DNA, 97 bp, Homo sapiens
ccgcgagcgctgagggtgagtgccgggagctctgaggaactgccattggatgtccagaatcccctgtagttgataatgttgggaataagctctgcaa

SEQ ID NO: 391487 - DNA, 100 bp, Homo sapiens
catcccagctccacatcaccccagggacagcatatcagagctttgaacagccgagaccgacccgcccgcccgcggccccgcagcagctccaagaaggaac

SEQ ID NO: 391488 - DNA, 83 bp, Homo sapiens
caggaggccaaggacggcgttctggatctcaaagcgccaaaactggacaagccaaggcatctgtagccaaagtaaacaaatct

SEQ ID NO: 391489 - DNA, 96 bp, Homo sapiens
tcccggcgttcttccgctggctcagccgcaagtacccgtccatcatagtcaactgcgtggaagagaaggatgctgatatgctaactggtgatgagc

SEQ ID NO: 391490 - DNA, 88 bp, Homo sapiens
aagtagcccactggttcctcccccgggagcacattattgacacgtttgtagtggagcttgaagttactacaggtcagcccggccagca

SEQ ID NO: 391491 - DNA, 99 bp, Homo sapiens
ctgcaaggagcatcccggctggagcagagccaggagctgaacaagacaatctgggaggtgcccgagcgttaccagaacctgtctccagtgggctctggc

SEQ ID NO: 391492 - DNA, 90 bp, Homo sapiens
gaccagtttaatgaccttgttatcagtgatggctcttctctggaagatcttgtgtgggctcgggatgagtttgaaggcctcttcaagcag

SEQ ID NO: 391493 - DNA, 98 bp, Homo sapiens
taaccctgagacaaccacttctggtggttgccactcacctgaggatagctcccctgaacagcagctgcagcagccatggccccgccctgggtgcccgc

SEQ ID NO: 391494 - DNA, 100 bp, Homo sapiens
gttagaaagaagtggaagatttggtggttctaagcgcttttctcctgctggcctccatcatcgtatggcagcagaactcagttatctgaacgccattgag

SEQ ID NO: 391495 - DNA, 95 bp, Homo sapiens
cccgcagcccagcagccccgcagcggcgccgaggacagtgcagccgagttgcgtctccctcgcgcgagttgtgcatgcctaaagggctatctttc

SEQ ID NO: 391496 - DNA, 75 bp, Homo sapiens
ctgagggcgtcctccgggccctgctggcccagaagcaggaggtgctgggcctggtgtgagtgcccctgtaccctg

SEQ ID NO: 391497 - DNA, 100 bp, Homo sapiens
ggctctagggaccccccccgcgcctgcacttagccccgcgcccgagcattccaggatgccttgaagattttctgtaggataaaaggtggtcgagtttcaa

SEQ ID NO: 391498 - DNA, 100 bp, Homo sapiens
tttggctgccctgagctggcagtacctgaccactctctcccaggccagaagcggactcctagaagaggggagcagcaaggatggaatgacagccgtgggc

SEQ ID NO: 391499 - DNA, 130 bp, Homo sapiens
cagagtgttgccaaggccaaatatgaatttttatttggcagatctgaagggaaagctccagatactagaagcagaatctggtaatataagtcaaaagtctgatgaagaagattttgtaaaagttgaagat

SEQ ID NO: 391500 - DNA, 100 bp, Homo sapiens
tcgaaatggagttgcactcactgccctggatcaggatcacgtcgcagtcctaggaagtccactagcagcttctaagggtccacgctgcttttatgagctg

SEQ ID NO: 391501 - DNA, 50 bp, Homo sapiens
aaaaggacaagcagtttgttgccaaggaacgggattttccaacagaaacc

SEQ ID NO: 391502 - DNA, 75 bp, Homo sapiens
gggacttcccgtccgcggcgtggaggaacacacgcaggacttgaaagatgttactaataatgtccactacgagaa

SEQ ID NO: 391503 - DNA, 83 bp, Homo sapiens
aactgggaaattattttgggtcttcttcttaatcccatatctggacatctggaacatccatgccaataatttctgaagatcag

SEQ ID NO: 391504 - DNA, 109 bp, Homo sapiens
aggagataaatcaaaggaaaataccagaaagatttttagtggccccaaacggcatcctccaggacaaatagcaaggaaatacagttcctgctccaccattttcctagat

SEQ ID NO: 391505 - DNA, 100 bp, Homo sapiens
gaagatcatcattaaggacggaggcacggtgtcatggagaaactccagctgggcccagagattctgcagcgggaaaatccaaggcttatttatgccaggc

SEQ ID NO: 391506 - DNA, 90 bp, Homo sapiens
gcctctgtctctagcatgaaatccctggagagtgattttgcagcccctcttccagaacacagtgtggtgctcaccttgggcacatttttg

SEQ ID NO: 391507 - DNA, 101 bp, Homo sapiens
taatgacagtctccaaattcgcctccatctgtaccatgatcatatactcctatgaaaggaggaatctccaatgtatggtttgacagatttaaaataaccaa

SEQ ID NO: 391508 - DNA, 101 bp, Homo sapiens
ttctccgcagaatttctgaaggtgttcattccatctctcttcctttctcatgttttggctttggggctaggaatggtagataacgcagatcatctctggaa

SEQ ID NO: 391509 - DNA, 133 bp, Homo sapiens
aataatccgttatggagcatgcctttaccccgttggagcccctgctttccactgttactggctgaccaacaaagttcctatcaaaagacccagcacaggtcttctcatgtatacacttgccacaagattctgt

SEQ ID NO: 391510 - DNA, 100 bp, Homo sapiens
cggcgggcggacagcatgctgagcctcctcgtctggatcctcactctctccgatactttctcccaaggtgactgctggctgctggcagccattgcctccc

SEQ ID NO: 391511 - DNA, 83 bp, Homo sapiens
caacacgctgaacggcttgaggctccagtcaaaaaccattaagtttggcaatgaggagcagcagctggcgtgggccaagcggg

SEQ ID NO: 391512 - DNA, 80 bp, Homo sapiens
ttggtacattcacaaatacgtacagagccaaatctcctcagccacctgttgaagaagaagatgaacacttcgatgacaca

SEQ ID NO: 391513 - DNA, 112 bp, Homo sapiens
gttttcgaagatgccttggaaaccatctcaatgccatcgaagacggcaatttggaggaaatggaagaggaagtacggcttaagaagcgaaaaagacgaagaaatgtggataa

SEQ ID NO: 391514 - DNA, 95 bp, Homo sapiens
gacttcagctgaacctctgagtgccaaggacaccactggaactcacaaaggaagctattgaatccttcaaagaagctttgaagcagaaagttgac

SEQ ID NO: 391515 - DNA, 77 bp, Homo sapiens
ccccagcagcccccgaaggccctatcaggacatggagtatgaaagacgattgtctaaagccccaggaaaaatggtgg

SEQ ID NO: 391516 - DNA, 100 bp, Homo sapiens
tttagcttcaaaaatgacaagttcgataaaagtgtgcagaccaaggaatctggaaaaccaggggctcatgtaactgtgaagaagctgtttgttggcggaa

SEQ ID NO: 391517 - DNA, 90 bp, Homo sapiens
gccgcatggaggccggctgaggagcgccgctgcctcgcctcgatgaaggatttgggggcagagcacttggcaggtcatgaaggggtccaa

SEQ ID NO: 391518 - DNA, 100 bp, Homo sapiens
gcagcctggaggagctgctgctcgacgccaaccagctgcgcgagctgcccaagcaagagtgagccatggagctacgtgtggggaacaagtaccgcctggg

SEQ ID NO: 391519 - DNA, 75 bp, Homo sapiens
atgacaaggagaaactccgagaagcttgcctgctggtgggtacccttgatgttgtgttggactccagcgcccggg

SEQ ID NO: 391520 - DNA, 82 bp, Homo sapiens
agcaattaaacacaagaagttctcgaaatgggagtttgaagacctggaatgggggaggtcacagaagatgtgaattcaagta

SEQ ID NO: 391521 - DNA, 100 bp, Homo sapiens
agtcagaatttttctcctgtggtgagagatgaaagtccatcagcttgataatggaggagaacaatgactccacggagaacccccaacaaggccaagggcg

SEQ ID NO: 391522 - DNA, 83 bp, Homo sapiens
tttcgggacagctctctagaaactcgctctaaagacggaaccgccacagcactcaagagccttcacgtaaatgggtccagtca

SEQ ID NO: 391523 - DNA, 88 bp, Homo sapiens
agcacgagagccgcacctttgccgtgtacctcaatagcactggctaccggacaggctcttgggaaagctggtgctgctgctgcctgat

SEQ ID NO: 391524 - DNA, 96 bp, Homo sapiens
gcagaagaatggagctggattacacacagcaagttcctgcttctgggacagctctactgacggaacagtggaggccatgtgtcttttggcagtcag

SEQ ID NO: 391525 - DNA, 75 bp, Homo sapiens
tgaaaatcaacgacaacttgagcacagctgcagaagaaagatcagcaactggagcctaaaaaaagtaccagccct

SEQ ID NO: 391526 - DNA, 100 bp, Homo sapiens
gcagctgtagaagtgtgtcagtgcccaccagggtatactggctcctcttgtgaaattttctaccctagcaaggatggtacgaagattccaatgttcattg

SEQ ID NO: 391527 - DNA, 101 bp, Homo sapiens
gcgggcggtgttcccggctccgtggggccgtcttcccggcgagtccgcgacggtcgccgcccacggcgaggagccttccttccgacctggccttcaacggg

SEQ ID NO: 391528 - DNA, 96 bp, Homo sapiens
caatgctgatgtttgataaaactaccaacaggcacagaggacgtcctccccaacgtcgccctcaattccaccgcctatgatccagtgaggcatttc

SEQ ID NO: 391529 - DNA, 76 bp, Homo sapiens
ccgaaccagaagccggagcagttcctaccggagttacaaaagtcacaggaaagaccacagcaagattctttcattc

SEQ ID NO: 391530 - DNA, 98 bp, Homo sapiens
aacacggctccatcatcacccaggcgcggagggaagacgccctggtgctcaccaagcaagtactatactggcaattgctggagaagattttgcaattg

SEQ ID NO: 391531 - DNA, 75 bp, Homo sapiens
gaagaacaaggaagcggagaggcaagagggaacccatattgaaatgtctattggaattattttgggaatttcaac

SEQ ID NO: 391532 - DNA, 100 bp, Homo sapiens
gacggcggaggaggcgcagccggacatttagccgctcatcttcgtcctccatgaatgccatgggctccctttccgtcctgtcgccggaccgggtcctccc

SEQ ID NO: 391533 - DNA, 75 bp, Homo sapiens
tggaccctgcggaatccaccggcgcagtttcatctagcgactggaagactatgaccgtctgaggcctttatctta

SEQ ID NO: 391534 - DNA, 98 bp, Homo sapiens
agcagagctggatgaggttgggagctgggaggaagtctctcctgccacagctgctgtgaggaaagagagccagaaggcggacgagtacctgcgggaga

SEQ ID NO: 391535 - DNA, 90 bp, Homo sapiens
gcggacacctccacatcgccttttgccacctttccctttatttccggagcggggatctgatgagcttctttcttctggcatcattaacgg

SEQ ID NO: 391536 - DNA, 100 bp, Homo sapiens
cccctgcaggaactctacaacccaatccagctccaaagacaacaggccctccctctgccctcccgtctgtgagctccctgcccagcaccacctcctgcac

SEQ ID NO: 391537 - DNA, 90 bp, Homo sapiens
cgcggccctgggagctggaggaaccgcggattcactccttctccagttgcacagccacacccttcagctggccttaatgttgactttgaa

SEQ ID NO: 391538 - DNA, 96 bp, Homo sapiens
agtacccgcatgctgcagcttatgaccatcaatatgtttgcagtacacaactcccagctgaaaggtttctagatcacattaagaatgaggacagcc

SEQ ID NO: 391539 - DNA, 100 bp, Homo sapiens
tcttcaacctgctcatggagatgttggtgagcggagacttaaatgccgtccatggagccatgcgtgtgctgacagggctcttcaaaggcctaaaagctaa

SEQ ID NO: 391540 - DNA, 82 bp, Homo sapiens
agccaagctcgtagcctgccactccgtgctgagtgatggattggaactgagaccgaaatataatggaattttacattgcttg

SEQ ID NO: 391541 - DNA, 88 bp, Homo sapiens
ctcccccgccaaggggtcccccaaaggctcccccagcaggcacagccggtcctgtatggtggaagagtcggggaccctcgaatcccag

SEQ ID NO: 391542 - DNA, 100 bp, Homo sapiens
tccacttgccgagcctgatgatggggacgtgccgcccctttgcggctgctgtattaaagtatgaaaataatgtgatgaatattcgacagtttaactgttc

SEQ ID NO: 391543 - DNA, 100 bp, Homo sapiens
gggcgcggatgggatccagctgttagtcgggtaggcatagggtgttaaataccacattatttgaaagctgggagatcgttggaccttacccttcctggtg

SEQ ID NO: 391544 - DNA, 83 bp, Homo sapiens
gcgaagctagggtcgccgccactgccgcaggaggcgtgagataacaagacctctgccagaagaaccatggctttggaaggcgg

SEQ ID NO: 391545 - DNA, 80 bp, Homo sapiens
ggactgtgcagtatttccagtctgtctcaggatcaccccttctgtgtcattctctgaggaaaacaagttcttctcaagga

SEQ ID NO: 391546 - DNA, 90 bp, Homo sapiens
gtaaaggcaaagaggggagtgcactgagccatggacaaatatggccctgaaggctccatgagcagacgagaaggctggacttcgcaactg

SEQ ID NO: 391547 - DNA, 82 bp, Homo sapiens
tcaatatctgtcttcggtggactccttcggcagtccacccaccgccgccgcctcccagggctcttccgtgggcggcggcttc

SEQ ID NO: 391548 - DNA, 82 bp, Homo sapiens
gatgtgaaaactctgttactgaagatggcagtcttgggcacgtccatctgtaaacctgctgagagctctggtgacaagaaag

SEQ ID NO: 391549 - DNA, 83 bp, Homo sapiens
ctccagcatgggctcgcctgtcaacgcgcaggaatccgagcggctggaactcatgaacgcagagctgaagacccagattgagg

SEQ ID NO: 391550 - DNA, 88 bp, Homo sapiens
cctgtcgcggcgcgagacctctggtggcagacgctcattggtggacttttgcttcatgtgtcctggaaactgggctgggtagagatca

SEQ ID NO: 391551 - DNA, 99 bp, Homo sapiens
caaagatggcggcagggaccagcagttactgggaagtgccctctggtggtcagaagatgctgtgctgtctcgttaggatgaatggattaaaatgtactt

SEQ ID NO: 391552 - DNA, 74 bp, Homo sapiens
ggaaagaatcccggccagacgtgcgaacagctccagctgggtgctggagaatctggtaaaagcaccattgtgaa

SEQ ID NO: 391553 - DNA, 100 bp, Homo sapiens
tatgaagaggcagtgaagactctgccaacagcccttctgtgacggctcccacttcttccaacgcactggcctatctccactcaagttcaaggcccaagag

SEQ ID NO: 391554 - DNA, 90 bp, Homo sapiens
ggcagtgctgaggcggaacaggccgggcaccaaggcgcagatcaacagtacaaattctgaagtttgtaaacttgctgatggtggtggtaa

SEQ ID NO: 391555 - DNA, 51 bp, Homo sapiens
gctggtgggaggattggatattgtgaagccgaccccttggtgggaagtatt

SEQ ID NO: 391556 - DNA, 90 bp, Homo sapiens
aaatcctactccacccataggaagacccacgtccacacctactcctcctcagcaaatgcagccctgaggatttggctactgcatataaca

SEQ ID NO: 391557 - DNA, 100 bp, Homo sapiens
gcacccgcctccgggcatcttcaactttggtcatgttcggagtttgacctgaatgagattcgcctgatagtttaccaggactgtgacaggagaggcagac

SEQ ID NO: 391558 - DNA, 82 bp, Homo sapiens
ggtcccaatcccccactctttccgccctaatggaggtctccagtttcggttctgcggggagtgtctccagccctgcctgcag

SEQ ID NO: 391559 - DNA, 100 bp, Homo sapiens
cggcggccgcggtaatgctggtggtctgcatcaccaccggatcaacttcgacaaatagcagttgtgaaaaacttcaggacaaaaatgtttcatttaagga

SEQ ID NO: 391560 - DNA, 75 bp, Homo sapiens
tggacagtgacagcgatgctgaggatcgaggaacgttgtctggcttacagcttcgccatgggctgctggcccaag

SEQ ID NO: 391561 - DNA, 100 bp, Homo sapiens
caacgggtacaaacgagtcctggccttgtctgtggagacggattacaccttcccacttgctgaaaaggtcaaggccatggtgctcaacttcttgaaacag

SEQ ID NO: 391562 - DNA, 75 bp, Homo sapiens
ggcctccccagccatgtggaactatcagtacaatggaacatgaattttcaataaaggaacgtggatttgaagttc

SEQ ID NO: 391563 - DNA, 100 bp, Homo sapiens
ctaagacttggcgaagcgctgcgctcgcgcccggatccctcagagctcaggccccggggcctccagcggcaccagcggagaccacggtgagctcgtcgtc

SEQ ID NO: 391564 - DNA, 75 bp, Homo sapiens
cggtaaggatttcaacatgcctctgacaatctctagtgaactttatattgctgttggaatatctggagccatcca

SEQ ID NO: 391565 - DNA, 83 bp, Homo sapiens
cgcacttcgtcatgttcttcgcgccctgtgatgtcttggcattgcccattttcaagcaggaagattccagccttccattggat

SEQ ID NO: 391566 - DNA, 82 bp, Homo sapiens
ggagaggtggctccatggacacagacctgctgtgtgtgcttctgcgccccagggtggctgttgcaccacgccctccctcctg

SEQ ID NO: 391567 - DNA, 106 bp, Homo sapiens
aggagttcgtctcttacgtctgcggaagtgcagctgcctcagttcttagcgcagaaaatgtggtgacctggaagaagaactcaagaatgttactaacaatctgaaa

SEQ ID NO: 391568 - DNA, 100 bp, Homo sapiens
gccaaccaccgtgtaaccactatgagcagtgcctacaaaaccttaaaggttgcagagaacacatcttagaagatgaaaaacctgaatctatcagtgacac

SEQ ID NO: 391569 - DNA, 83 bp, Homo sapiens
acctcatccacagggcctcctgccagccccagcccctggagaggatgcaggactcggtacatccagacagagctgggctcccg

SEQ ID NO: 391570 - DNA, 101 bp, Homo sapiens
caacctcttccccaatttcaatgcgggtgctgataagactgtgaaaggcccagatggactgaccgcctttgaagccactgacaaccaggcaatcaaagctc

SEQ ID NO: 391571 - DNA, 74 bp, Homo sapiens
tatcataagtggaattttggagatattcaaaggtgtcagaaactatttaaaagaagcactggtgaatataattg

SEQ ID NO: 391572 - DNA, 100 bp, Homo sapiens
gatgatcaggtttttctggatggaaatgaggattagaatggctgaacacagaagaacctatttctgtctacaaggatctatgtggaaaaatagtcgtcct

SEQ ID NO: 391573 - DNA, 75 bp, Homo sapiens
tgcgtggcctgcgggctcctgcgcacgccgcggccgaaaccggatctgcgcctgcagctgctggacgtgaagaac

SEQ ID NO: 391574 - DNA, 50 bp, Homo sapiens
gtcggagggagtccatctggagcggccaaagttgtccagacctcccaaag

SEQ ID NO: 391575 - DNA, 78 bp, Homo sapiens
aaggaacagtgccaagttagatgccgattacccacttcgagtcctttattgtggagtgatgtcttggcattgcccatt

SEQ ID NO: 391576 - DNA, 82 bp, Homo sapiens
gagctcagtaaccacacacggcccgtcatcctcggtgaacctatgggtcgtggaacaaaagttatcctacacctgaaagaag

SEQ ID NO: 391577 - DNA, 75 bp, Homo sapiens
aggacccaggagaaattcgccctcaaaatgcagtgagtgaggggggggccatggcggaggagcggcccccccggc

SEQ ID NO: 391578 - DNA, 82 bp, Homo sapiens
agaagaaggccttgactacggaggggttgccagtcctcctgcatatgcccaagaggattgggagtggaatggacaccagcag

SEQ ID NO: 391579 - DNA, 98 bp, Homo sapiens
cccagcgggagtcgcggaacagcaggcccgagcccaccgcgccgggccccggacgccgcgcggaaaaggctgctgatactttggctgtgaggcaaaaa

SEQ ID NO: 391580 - DNA, 87 bp, Homo sapiens
tggcggatggccccaggtgtaagcgcagaaagcaggcgaacccgcggcgcaataacggtcgtttatacgcaatgcagactggaatga

SEQ ID NO: 391581 - DNA, 76 bp, Homo sapiens
tcttgggtcctccgagagcagcagcggtcgtttggactgggagactcttgtgcacgaaaatctgcccgggctaatg

SEQ ID NO: 391582 - DNA, 100 bp, Homo sapiens
cattagttccccttgggatgtagtttttggaacatcaggaatacatggactccaataaatacattgagcatctgctgactcagcttgaggagcaacacag

SEQ ID NO: 391583 - DNA, 88 bp, Homo sapiens
ttgaaactgaattactggatggaaaaaccaagctaatattgtctccatatgatggttggaatccattttcgtacccatacaaaaaact

SEQ ID NO: 391584 - DNA, 74 bp, Homo sapiens
cagcggcagtgccaagaggaggtggcctcgctgcaggccatcctgaaaggcagcaagagcaactcaccaccagc

SEQ ID NO: 391585 - DNA, 51 bp, Homo sapiens
ctgggtccgctgagcggggcgacccgaggaatcaaagatcaactcccactg

SEQ ID NO: 391586 - DNA, 75 bp, Homo sapiens
cattgataacaagggcatcgactcagacgcttcctatccctacaaagccatgagtgatcagcagctggactgtgc

SEQ ID NO: 391587 - DNA, 82 bp, Homo sapiens
cactacccacaggacctggcccggcccctcttccccagcacaggtgtccttaagtttgctcgcttggtcaagtcctacgaag

SEQ ID NO: 391588 - DNA, 87 bp, Homo sapiens
cctacactggcaacattagatccacctcatacaggagaatgaagtttctagattagaagacataatgcagcatttaaaatcaaagaa

SEQ ID NO: 391589 - DNA, 76 bp, Homo sapiens
catacgctgaggagtttggcaacgagacgtggggcgtaacaaaggtaagaatgattgatgttggctgatattggag

SEQ ID NO: 391590 - DNA, 75 bp, Homo sapiens
ccacctctgcagtgtcttccacaacctggcaatgtctcaggctgtgcagacaaacggaactcaaccattaagcaa

SEQ ID NO: 391591 - DNA, 75 bp, Homo sapiens
cttcactcgaaacttaactctcatgtccattctcaccatagccagtgcaatttgagggctctttgggaaagctta

SEQ ID NO: 391592 - DNA, 82 bp, Homo sapiens
cgccgctgagccgtcgcggagccgcgcagccctcggagcacggatttttagactctgaggagcagttggagctaatccacat

SEQ ID NO: 391593 - DNA, 100 bp, Homo sapiens
catcccttctgtggcagttaggagactgaatcaaggtccagagaaggtggaggaatcctgatactgagcgatatattcgactttatgggagaaaatttag

SEQ ID NO: 391594 - DNA, 83 bp, Homo sapiens
ataattgagacgtctgagttgagcaggtagctacagcaagctgggtagcaggcagatccaaaggatatcatgaagtttccagg

SEQ ID NO: 391595 - DNA, 90 bp, Homo sapiens
cacaacttggttcaatgggtagcctcaccatgaaatcacagcttcagatcactgccccgtcgcagaatttagtctcaaaggaaacttcaa

SEQ ID NO: 391596 - DNA, 82 bp, Homo sapiens
gcccccaaactgtcacagaaagagctgttaacacttcctagataacggtttggtgccctggttgtcagatgttggaaagcag

SEQ ID NO: 391597 - DNA, 75 bp, Homo sapiens
ttcagcctggaggagctcaggcgttatacgcagagcaatgggcgcaggccgtttggcatctctgccctcatcgtg

SEQ ID NO: 391598 - DNA, 82 bp, Homo sapiens
ctactgcgtggcttgtcaggaactcgactcagacgtggataaagataatcccgctgcggttggatttctcacgatgtccagt

SEQ ID NO: 391599 - DNA, 100 bp, Homo sapiens
cagctaagctaacctctgaccccactgatattcctgtggtgtgtctagaatcagataatgggctccatgacaattcaaaaggtgaagggattgctgtcac

SEQ ID NO: 391600 - DNA, 100 bp, Homo sapiens
gtctgttgcaagcgtcttgctgtaccttgacacagaaaagcccgatggctccccagtatttattgccttcagatcctctacaaagaaaagtgtgcagtac

SEQ ID NO: 391601 - DNA, 76 bp, Homo sapiens
ctcgggagctggctgaagatggctactctggagttgagtgtactaatggtcacttgatgtgcgctggctgttttat

SEQ ID NO: 391602 - DNA, 83 bp, Homo sapiens
ccggctctgggctacggactatgggcgaatagctctgaccacccggcgaagcggacaaggcaaaatctcagcaagttcggacc

SEQ ID NO: 391603 - DNA, 90 bp, Homo sapiens
ggtgtcgtctctttgagtatggccagggtgtgctgggcatcaaggtgaagatcatgctgccctgggacccaactggtaagattggcccta

SEQ ID NO: 391604 - DNA, 100 bp, Homo sapiens
aacgcgaagacggtaacccgtgtgactttgactggagaaacttgcccaggccaaagaagagaacgtgggcttacatcagacactggatcagacactaaac

SEQ ID NO: 391605 - DNA, 95 bp, Homo sapiens
ctgagcttcctggagaagaggaaggtgtgttgtgaaagtttggaaggtcagacctttttctccaagaaggacaagcccctgtgtaagaaacatgc

SEQ ID NO: 391606 - DNA, 101 bp, Homo sapiens
ctacctggagcatttgctgcagaagcgtagtcggccagaggctccataaaaatacagactcaccagttcctgctttgatgtgacatgtgactccccagaat

SEQ ID NO: 391607 - DNA, 50 bp, Homo sapiens
ggatgaccctgagccccgagaacatattgacttgatgcacaacatcacaa

SEQ ID NO: 391608 - DNA, 83 bp, Homo sapiens
cacagactggattttctgacatcaagtcccacgcgttcttccgcagcatagactgggacttgcaccgaacaagatttgtgatg

SEQ ID NO: 391609 - DNA, 73 bp, Homo sapiens
ggaggtttgcaggggtgcagtgtgtctggtcttatgagaagaaaaagtcagcactttttgaagtgtctgaggt

SEQ ID NO: 391610 - DNA, 71 bp, Homo sapiens
aagatgattctactgtagcctgccgtttctttcacttccggaggaaagaccacagcaagattctttcattc

SEQ ID NO: 391611 - DNA, 100 bp, Homo sapiens
acttcatctcattgctcagcgcggacctagacctggaatcgcccaagtccctctactcgcgaggtgtggacactgccagcggctgcagccgacttggaat

SEQ ID NO: 391612 - DNA, 83 bp, Homo sapiens
ctggtgcgcaaggccccgaacaacaggattttttatcaagcagaaatgcatcgaacaacgagaatcaagatcactgagctaaa

SEQ ID NO: 391613 - DNA, 50 bp, Homo sapiens
ggaaccgacagcctcctccgagaaggcctgtcaggattggagctgctttc

SEQ ID NO: 391614 - DNA, 100 bp, Homo sapiens
tgaggatgaagattcaccaaataagctatatactttggttacctatgtacctgttaccactttcaaaagaggacttggcccctcagccacctacagctcc

SEQ ID NO: 391615 - DNA, 80 bp, Homo sapiens
catggatccctatgatggctacggacgtagacaagtttggcaacgagatcacccagctggcccggcccctgcctgtggag

SEQ ID NO: 391616 - DNA, 82 bp, Homo sapiens
ggactgcggttggggcgggaagagccggggccgtggctgacatggagcagaaccagccacgcagcaagcctctctggatgtg

SEQ ID NO: 391617 - DNA, 100 bp, Homo sapiens
gatgaaaaatgtcacctttgaacatgttaaagggatgcttgggatttgctttacattctaagtggatttggagaagagacaataaagaataagcagtcaa

SEQ ID NO: 391618 - DNA, 50 bp, Homo sapiens
aaggctgccgggcgtgctgtgtggcaccacctgaagaaactggagggccg

SEQ ID NO: 391619 - DNA, 73 bp, Homo sapiens
ttctctgtgtctgttcccactctcatctatactggcatctctcgggacaactggcacaagcgccgcaaaaccg

SEQ ID NO: 391620 - DNA, 82 bp, Homo sapiens
gtatgtgatcatcgatctctcagggtcgtcgggtgaagacgccgcaccaggctgcaggccagcccttcaagttcactatccc

SEQ ID NO: 391621 - DNA, 96 bp, Homo sapiens
caactgctctctgcaggaccccagaagtggccgatcagccaacgcctctgtcatccttaatgtgcaatgccctcgggaccaaggatcacgtcatga

SEQ ID NO: 391622 - DNA, 50 bp, Homo sapiens
ggattccaagtaactcttatttgattgtgttcagtgtggacccctccgag

SEQ ID NO: 391623 - DNA, 82 bp, Homo sapiens
catcattaaggacggaggcacgcattccccgtcggagccctttctagagaaaccagtgccggatatgactcaggttagtgga

SEQ ID NO: 391624 - DNA, 98 bp, Homo sapiens
cgggacgtcagtcctggaggaggcgaggactcctgtggaagaggtccctgctgctattgccccattccaggggagggtgttgattggtgtggggaagc

SEQ ID NO: 391625 - DNA, 75 bp, Homo sapiens
atgtgccgccagtgtttccgtcagtacgcgaaggatatcggtttcattaaggatgaaatctttgacatggtaaaa

SEQ ID NO: 391626 - DNA, 102 bp, Homo sapiens
agagacaccaggacagaaaagacagtgttctgctttcatggagttcacagaagagtcgaggaggtttggaataaattgcctcatccaatttgaagacttcgc

SEQ ID NO: 391627 - DNA, 90 bp, Homo sapiens
ctttgcaacagaattacagagtatgatgcgcagttgtgtagcagttgagtaatgctggttagctgttaaggtggcgtgttgcagtgcaga

SEQ ID NO: 391628 - DNA, 99 bp, Homo sapiens
cagaccagtatggatgaactattaaataacaagcctttgtattcatttgaagataatgcagactatgtttatgatgttatgtggtcacctacccaccca

SEQ ID NO: 391629 - DNA, 121 bp, Homo sapiens
cgggactccctcagctcggcaagagactgcctcagtttgatgacgatgcggacactgggcaccgcgtccgtgctgcagcgccggtcccccaatgaggagtacgtggaggtggggcgcctgg

SEQ ID NO: 391630 - DNA, 75 bp, Homo sapiens
gttccaaccagttcaaagcttgttgtctttgatactacattacaaaattcaattcgtcataatctgtccctacac

SEQ ID NO: 391631 - DNA, 75 bp, Homo sapiens
ttacttggtgcattactgcggatggaatgtgagcagcaagatgaagagcgacgtcggcagctgagagagagagct

SEQ ID NO: 391632 - DNA, 90 bp, Homo sapiens
gccggccgccgcgccgcccggcagcctcggcagatcaggatcctcatgaccagccaaagagaagaagaattaggaagcataaatcaaaga

SEQ ID NO: 391633 - DNA, 102 bp, Homo sapiens
ctgacgctcagaaggatgccctgggctgctgcgtggtacaggaatgtatcctgtcaggtataatgtcagtgaatggcaagaaagttcttcatatggatcgaa

SEQ ID NO: 391634 - DNA, 82 bp, Homo sapiens
ctacttcaacatcgtggcagatagtgtgtaatgatgcctcctgggagactcgccaaaattgcctggaaaagagcagtgagag

SEQ ID NO: 391635 - DNA, 75 bp, Homo sapiens
atccgcaaacattcagacaaaattggagagactgccatgaagcaagtggcatggaatattcacatgggagagccg

SEQ ID NO: 391636 - DNA, 82 bp, Homo sapiens
cagggagagcctggggacgacttttacatcatcacggaggctccttcgagagcagtggatccgggccaagtacgagcgacag

SEQ ID NO: 391637 - DNA, 101 bp, Homo sapiens
agacctggtggaggtgttaaatgaaaattgtcactgctgttccaagggcacacgcagagggatttggaattcctggagagttgcctttgtgagaagctgga

SEQ ID NO: 391638 - DNA, 100 bp, Homo sapiens
catttacttctctgctgaaaagcaatggtcccttcaataatcaggagatggcagaatggtttcaggcgggctattttactatgtctttattggtgaagag

SEQ ID NO: 391639 - DNA, 101 bp, Homo sapiens
ccggggtaggggtctcccgcgaggaactcagcgagatgctgtacacagaccggcccgactggcagagtgtgatgcagtacgtggcccaaatctacaagtac

SEQ ID NO: 391640 - DNA, 90 bp, Homo sapiens
gagcctgtcctgtgttggcgtgtgttccacatgcgcttgggcctggccacaaatgacatcttcgagtggtccagggaccaccgagcccac

SEQ ID NO: 391641 - DNA, 50 bp, Homo sapiens
gagcgccgctgcctcgcctcggttttgagcaaaattttggactgtgaagc

SEQ ID NO: 391642 - DNA, 90 bp, Homo sapiens
cgcgaagctggccaaagcctgcccagacggctcacctgtgcgggatggaacaaaagaaatggttcaccaaaccaccagccagagccaccc

SEQ ID NO: 391643 - DNA, 97 bp, Homo sapiens
gatgatgagaaataaggacaaaagccaagaggaggacagttcgctacacagcaatgcatcgaggctctatgtgctgctgtagtgaaaccggatgttc

SEQ ID NO: 391644 - DNA, 82 bp, Homo sapiens
ttggctttcattcatgaatgaggtctctgcttggggtggttatgtatttatcatcaatcttattccactgcatgtatttgtg

SEQ ID NO: 391645 - DNA, 91 bp, Homo sapiens
ccctcccactccgcgaggacagaggactctgcaagaagggagcccagggtttgcgaggcatcaccggcatagttggggacaaaggggaaaa

SEQ ID NO: 391646 - DNA, 100 bp, Homo sapiens
tgacaacacctacagccgggagctgtttgaggaggtgaagctagatgtgaccctgggtgacctgaccaagattgggaagtcacagaagttcacgctgagc

SEQ ID NO: 391647 - DNA, 75 bp, Homo sapiens
gccggggtcgggagccgcccggggcagggctcgggagagcgggactatgatgccaacatcgtagctgtggtgaat

SEQ ID NO: 391648 - DNA, 83 bp, Homo sapiens
cgcgaccatgggcgggaagaacaagcagcgaactaaagggaacctgagggagagagaagctcttcagaaacagctggatgaag

SEQ ID NO: 391649 - DNA, 100 bp, Homo sapiens
gttccttaacgtcattcgagtctgtgatggggccatccgggaagttgtaggtagtatggatgcacacccaagcagatactgtgccacagtaagagttcag

SEQ ID NO: 391650 - DNA, 111 bp, Homo sapiens
gcgatggggacaaaggcgcaagtcgagaggaaactgttgtgcctcttcatattggcgatcctgttgtaacaagttgaaatcatcgcagaaggataaagttcgtcagtttat

SEQ ID NO: 391651 - DNA, 75 bp, Homo sapiens
tttggagcagcagcctgcagcaggtctcagcggcggtggcagccgaggtgcaggatgcaagaaggcgccccccgg

SEQ ID NO: 391652 - DNA, 100 bp, Homo sapiens
gggaacaagatctatgtcctgggggcccggttcgatgtccccatctgcccacggcgcctctcgtgccagctgctccgcctgtcctgcccttgctcagacc

SEQ ID NO: 391653 - DNA, 75 bp, Homo sapiens
caaaaaccaactgaagcagctgacagaggtctctgagcggcccctgatgttcctgttggacactcctggcgtgct

SEQ ID NO: 391654 - DNA, 90 bp, Homo sapiens
gaaaaccttccctttgaattacagagaaactttcagctcatgagggacctagaccaaagaacagaggatggtgtcctcagaccgaagcca

SEQ ID NO: 391655 - DNA, 100 bp, Homo sapiens
cgcagaagcagggggatgacagctctgaatgggggaactccttcttctgatcaatgtccgagttaccaccatggatgcagagctggagtttgcaatccag

SEQ ID NO: 391656 - DNA, 85 bp, Homo sapiens
ctgatgataagcagctgctatacagtgaggccaagataaagaaatgggggctcagagcagtcaagaacatgccccaagttattcg

SEQ ID NO: 391657 - DNA, 75 bp, Homo sapiens
cccagctcggcccgcgggggagccccgggagccgcacgatgcagcagcttttttatgagaattacgagcagaaca

SEQ ID NO: 391658 - DNA, 90 bp, Homo sapiens
ggggtctttcgaggcccggtactacccaaacgtcagtcgaatcacaggcaggagggggtccactggacggggcctgagctacaacttcac

SEQ ID NO: 391659 - DNA, 100 bp, Homo sapiens
atatgagtgtgtggccaccaacagcgccggcgtgcgctactcctcacctgccaacctctacgtgcgagatggcagtggcagcaccatgatgcaaaccaag

SEQ ID NO: 391660 - DNA, 74 bp, Homo sapiens
ccaataaccctgagttattcagtggcatgctgaaaatacgaatcgggggacggaaaatatagtcgcggtgatga

SEQ ID NO: 391661 - DNA, 98 bp, Homo sapiens
ttgacttagtggaggaggtgcagctcaacttctaccagttcctcggggtgcagcagataggtgatcttcagctttgcaaactggatgaactagattgc

SEQ ID NO: 391662 - DNA, 50 bp, Homo sapiens
ccggttctcagggacagtgcacgcagatgcagaggccaggatgtgggccc

SEQ ID NO: 391663 - DNA, 100 bp, Homo sapiens
cccatctccgcatcaggaccaagatgaacagcacagccagtactccaagttgctgctggcctctaaggagcaggtgctgcaccgggtagttctggaggag

SEQ ID NO: 391664 - DNA, 73 bp, Homo sapiens
catggccatgaatgcccaacaagataattctattatcctcccagtccacaacgctgaaccgtggctggacgaa

SEQ ID NO: 391665 - DNA, 90 bp, Homo sapiens
ggaatgaggagttacagagggccgagaaggacaggatcaggtgctgaagacgcggttgaccttgcgtcggacgggccagtacaaggggct

SEQ ID NO: 391666 - DNA, 50 bp, Homo sapiens
cctaccccttgcacacctaccctaaggttcttgatagtccacaatgggtg

SEQ ID NO: 391667 - DNA, 75 bp, Homo sapiens
aaataaaagatgggtggattattttctcgatggagggtatcgaaggatgatcgcagtgatgtggagagcagctca

SEQ ID NO: 391668 - DNA, 97 bp, Homo sapiens
gtgttggaccttccggagcttctcagaagacagagggttttcttttgagaaacgctgcagcagtgctgtgacctttcgcagctgtggttccgagagt

SEQ ID NO: 391669 - DNA, 100 bp, Homo sapiens
cgagcagcggacgccggtctctgttccgcaggatgcaggggaaatgctgtctgtagctgagcacttcctggagcagcagatgcacccaacagtggtgatc

SEQ ID NO: 391670 - DNA, 83 bp, Homo sapiens
cagattctgcgcgtcaacgacaaatccctggcccgggtgacccacgcggaggccgtcaaggaaagaaccggaggctgaagcag

SEQ ID NO: 391671 - DNA, 95 bp, Homo sapiens
ccctatggtggctccgggccactttacacttgtgtgcctgctggtagtccagcatccagctcgacgttagaagggtctccctcttttgtccaagg

SEQ ID NO: 391672 - DNA, 75 bp, Homo sapiens
gtcgctttcacggccatcgagccgaacctctcgcaaatgagcgggatcgtgtgcagaagaaaaccttcaccaagt

SEQ ID NO: 391673 - DNA, 100 bp, Homo sapiens
gggacttctcagcctccattaattgcatctttaaatggatgagatggctaccactcagatttccaaagatgagcttgatgaactcaaagaggcctttgca

SEQ ID NO: 391674 - DNA, 100 bp, Homo sapiens
ctgcagaccaggaacaagagagaaagagtggatttcagcctgcacggatggtcttgaaacacaaatggtttttggcaatgctggacgtggctgcaaacca

SEQ ID NO: 391675 - DNA, 100 bp, Homo sapiens
ctttcccgctggcgcgcagcctcagctaggtcactttagacaactgtgttgaagttggacggattgccaacacctacaatctaaccgaagtggataaata

SEQ ID NO: 391676 - DNA, 74 bp, Homo sapiens
aagagagttggctgtgcagatccagaagaattcaattcgccacaatctctctctgaatcgttatttcatcaaag

SEQ ID NO: 391677 - DNA, 51 bp, Homo sapiens
ctttagaccctccacctaattgcagtagtcgtgaaaggtgccaaattggca

SEQ ID NO: 391678 - DNA, 100 bp, Homo sapiens
tggccacctacagaaacaaaatgtcaacaaattgatgggtgcagagtccagtggtgacatggatgttctcctgacccatcccagcttcacttcagaatca

SEQ ID NO: 391679 - DNA, 74 bp, Homo sapiens
cgatgcttgtgaccctgcagctcctcaaaagtgaagacatttccacctggacacctgaccatgtgcctgccctg

SEQ ID NO: 391680 - DNA, 100 bp, Homo sapiens
cacggccgaggacttcgccgaccagatcctctgtcgatgggtcctcagaaagctctggaaaccatcggtgcaaatttacagaagcagtacgagaactggc

SEQ ID NO: 391681 - DNA, 100 bp, Homo sapiens
attttgaggagatgaggaaggctggtatctttcagagtgtaaagtaatcttggaatataaagggagttctgggaaatcgttcattcatttacagatgaac

SEQ ID NO: 391682 - DNA, 50 bp, Homo sapiens
gttggaattgaagaagataatgcgagtaaccagctcataaatcacatcga

SEQ ID NO: 391683 - DNA, 100 bp, Homo sapiens
gaaaatctccccggtgactttcaggtcagtactcctgcatttgtaccaacgaaaactcacgtgctgcttcatcgaatgagtggaaaaggactagctgccc

SEQ ID NO: 391684 - DNA, 82 bp, Homo sapiens
gtcggccgcatccgtttccacgactttctgggagactcgtgtcgtgaaaactacccctaaaagccaaaatgggaaaggaaaa

SEQ ID NO: 391685 - DNA, 100 bp, Homo sapiens
ggccgtggagaggctcaaggagtattcagagactgagaaggaggctttcaaggggggctgcaaagctcctcatgctatgatatcttcttgtggaacaatc

SEQ ID NO: 391686 - DNA, 90 bp, Homo sapiens
aaagaagcattctcaagtaatttcagtgcgtcagcatttatcccgtttgccaaccattgatccgaataccaggaccctgcttttgtgtgg

SEQ ID NO: 391687 - DNA, 75 bp, Homo sapiens
cccctggctgtgggtttcttatagatggcttttattacattgagagatttgccacaatatggacagaagcagtgg

SEQ ID NO: 391688 - DNA, 74 bp, Homo sapiens
tggaccccggcttctgggacgcgtcaggactcgggcagccgcaagtagctcctccagcgccagcagccagccca

SEQ ID NO: 391689 - DNA, 131 bp, Homo sapiens
cacaccctggcccagactgccagccctgacgggacagagccagggcactcaccaggctgcaagaacagtgctgggctctagaggacaaaatcccagtccttggcacaaactcaggaaatggaagccggagt

SEQ ID NO: 391690 - DNA, 75 bp, Homo sapiens
agggtggagagtatggacagacagtcccgaaaataatgttgagtttccatgaagaacaggaagtactgccagaaa

SEQ ID NO: 391691 - DNA, 74 bp, Homo sapiens
tgcacttccccccgggactctccttccgcaaggtggagatgctgaaggtgggcaaacgcagaggcgggaacaaa

SEQ ID NO: 391692 - DNA, 90 bp, Homo sapiens
cgcgcctggacactcgcggggcgccgacctggcaggacaatgcagatcttcgtgaagactctgactggtaagaccatcaccctcgaggtt

SEQ ID NO: 391693 - DNA, 100 bp, Homo sapiens
gtgacagtggggaccctgtgctgctgcgcctcttctaccaagtggctgagtacaccttccgccagctggcaaactgatacaactcagaaactgctcaatg

SEQ ID NO: 391694 - DNA, 51 bp, Homo sapiens
atcacaagctgcaccagcttctaaccgagttgatatccctgaaagtactta

SEQ ID NO: 391695 - DNA, 76 bp, Homo sapiens
atgtgatgccattccagcactggactcatggaggctgagcatttattcaggtagtttctctccctggctcatcttg

SEQ ID NO: 391696 - DNA, 74 bp, Homo sapiens
caatgctgtaaagggggcgctgatggccaacttcctcacacaaggccagatccgaaatgtggcagcaaatctct

SEQ ID NO: 391697 - DNA, 98 bp, Homo sapiens
atcccgctggtgaccctgccgctggcgagcgccaccgcatggatttggagtggtatgagaagtccgaagaaactcacgcctcccagatagaactactt

SEQ ID NO: 391698 - DNA, 75 bp, Homo sapiens
cagagcgtcacggcgtacgccctcatggggaaaatctccccggtgactttcagagtttgaacaactgactcttga

SEQ ID NO: 391699 - DNA, 82 bp, Homo sapiens
cggcggcggcgcgcagcgtgtcaggcggagagacccgccgccaggaagttctccagcagctgattgtaatgaatttgcccaa

SEQ ID NO: 391700 - DNA, 100 bp, Homo sapiens
ctcaggctatgactactaccacattgatgacctggagctcctggccaggtgtcaccagcacccaatcagccatgactgcctttgcactgtccatgctctc

SEQ ID NO: 391701 - DNA, 75 bp, Homo sapiens
acctccttcaagtggctgataacaggtatggagatggtccacgtcctcccaagatggcccgatacgacaatggaa

SEQ ID NO: 391702 - DNA, 109 bp, Homo sapiens
gctggcggcaatagggaaagtgaggcagctgcaaggagggcggcgggactgcactcgagtgtccagacctgctcgatgtgttctggacttggtgcctctttctgttata

SEQ ID NO: 391703 - DNA, 50 bp, Homo sapiens
taaagcctggaatgatatcaaaaaggtatccctctggttggtaacttaag

SEQ ID NO: 391704 - DNA, 74 bp, Homo sapiens
agcagtggccgcccgggcggcgggatccactgtccggcagagtgacaaccatgagtggaaaaaactaattatgg

SEQ ID NO: 391705 - DNA, 75 bp, Homo sapiens
cgcttcgaagccgagaaagcccgctgggaggccgagcgcgccgagttacagaaggtggtcttctgccctgttaaa

SEQ ID NO: 391706 - DNA, 90 bp, Homo sapiens
agatggagaatacagactgctacctccccgatgccttcaaaattatgactcaaagtgagccccatgcacggttctatgcagctcagatag

SEQ ID NO: 391707 - DNA, 96 bp, Homo sapiens
gagccaccgaggctgtggttgcactctgccaggaccacagccgctttgtcaactgtgtgcgattctctcctgatgggaacagatttgccacagcca

SEQ ID NO: 391708 - DNA, 100 bp, Homo sapiens
acgtgctggccggccccggcggcggcggcggccttgggccggtggacgtacccagcgctcggcttgtctgagacgacaggaatatagaagagacccaaat

SEQ ID NO: 391709 - DNA, 74 bp, Homo sapiens
gtgcaacatctgcaaggtccgcttcaccaggagcaggccgggctctcgccatgggtcactgtcgcctctgccac

SEQ ID NO: 391710 - DNA, 87 bp, Homo sapiens
ggcaactctttgatgtactactataatgggaaagcgctatatcgagaagtttactgactttcttcggctctttgtgagtgttcacct

SEQ ID NO: 391711 - DNA, 100 bp, Homo sapiens
acatgccgtcagagttccacctcttcctggaccacattgccagcctcgactacttcaccaagcccgactaccaggtcactgcagccagaggggtccagaa

SEQ ID NO: 391712 - DNA, 100 bp, Homo sapiens
ggacccgccccgcggccgggggatgctgcccatcccagtggcggctgccaaggagacgacacgaatgcagagtttgagtccagatcccaaagcccagtac

SEQ ID NO: 391713 - DNA, 83 bp, Homo sapiens
agcaataccaggatagctgttgtttcagagaaagaatggcgccattttgcggtacggaagctacacagcaacacgtataggag

SEQ ID NO: 391714 - DNA, 100 bp, Homo sapiens
cggatatgaagaccctggagtaggatcaactcactatcctgaaggtccattctcccaagaagaggggacagaaagacagatctatttgtaagaaaggctt

SEQ ID NO: 391715 - DNA, 75 bp, Homo sapiens
catcgtcaccatgacaacactagggacccggtcagcccaaggagcaggggtccagcagctctgcggaggcatctg

SEQ ID NO: 391716 - DNA, 100 bp, Homo sapiens
attggactgacttttcttatgctgggatgtgccttagaggattatggatcctccaggtcctattgacaatactaagattgcagtcactaaatgtggtaat

SEQ ID NO: 391717 - DNA, 74 bp, Homo sapiens
atactctcgctcacgcagcaggagcaggggacgaaggcaacttcagttcatttatgcagaaggaaatatttgag

SEQ ID NO: 391718 - DNA, 83 bp, Homo sapiens
caagccagaagaaatcaacctgctcaccggggagtctgatacacagggatccacaaatgctaaagagctgtcttccaagggag

SEQ ID NO: 391719 - DNA, 75 bp, Homo sapiens
ttttgaagcttctcattctgtcaatggctgctgtattatgtacagctggataacttgccaggaatgagtctcgtg

SEQ ID NO: 391720 - DNA, 75 bp, Homo sapiens
gcaaagttgaccagatccgagccagagtggagcgtaacgcagtggtttggaaggtttgcagttgctgctcttcag

SEQ ID NO: 391721 - DNA, 75 bp, Homo sapiens
caagggcttcctggccctctaccaaaccgtgggtacaggtttgcagattccgccagcagcacagcaagctctaca

SEQ ID NO: 391722 - DNA, 85 bp, Homo sapiens
aaggtggctaaggacctcaacccaggagttaaaaaggtggcgacatgtctaagaatgtgagccagtcacagatggcaaaattgaa

SEQ ID NO: 391723 - DNA, 110 bp, Homo sapiens
aaagccaagagactgcttttgagtgacatttatttagcagctagtaacttcacttatttcaggcattgatctggtagccttgctccagaagcctgttcctcacagtcaag

SEQ ID NO: 391724 - DNA, 50 bp, Homo sapiens
atcgaatctcttctccctccccttcttgggtttagatgtagattctctgg

SEQ ID NO: 391725 - DNA, 90 bp, Homo sapiens
agctaagacgccaggacccactggaagcctagaaatgacttaattcagtgcacaaatgagatgaatgtgaacatcccacagttggcagac

SEQ ID NO: 391726 - DNA, 90 bp, Homo sapiens
tggccatgaccatctggattctcaaagtcatgaacttcacaattctgacattatctctacggtagaattcaaccacacgggagaattact

SEQ ID NO: 391727 - DNA, 74 bp, Homo sapiens
gacggccaatgaaacccccaagatgggcatctattacattccagcattaaacgtcgtctttgaaaaaatcccgg

SEQ ID NO: 391728 - DNA, 101 bp, Homo sapiens
gtgacctgtggagacacggccagatctgccctccactctattaccaggttttaaacttcgccatgatcgtgtcttctgcactcatgatatggaaaggcttg

SEQ ID NO: 391729 - DNA, 74 bp, Homo sapiens
cctctagtgctcccttcacccagccattgtcttccaatgagggtttgactgccgatgtggaaatttgttttgtg

SEQ ID NO: 391730 - DNA, 97 bp, Homo sapiens
ccttggcgaagccttgggtttctttcttaaaggactgatttttagaactccacatttgaggctttttctcctccgtgacagccagagtaatccaaag

SEQ ID NO: 391731 - DNA, 90 bp, Homo sapiens
ccgcgttggggtgagaccctcacttcatccggcgtcctgcctctgcggctctgccccctgcatcctgtgcagctgctgccccgccagccg

SEQ ID NO: 391732 - DNA, 100 bp, Homo sapiens
ccaatcattggaagatttggaacctcactgaaaattggtattgttggattgccaaatgttggagccgctcccgaggccccggcgcggcgcgagggcgcgg

SEQ ID NO: 391733 - DNA, 100 bp, Homo sapiens
ggaccgtgggcagccagggtcggtgaagggcttccgagtggacctgccaatcaagtcggcccgctaccgtggccagtacaacacctatcccatcaagctc

SEQ ID NO: 391734 - DNA, 100 bp, Homo sapiens
atgaccttaacacagtagcagctggaaccatgacaggcatgttgtataaatgtacagattcgggaactggagcctctcctctgtcacagtgacaatccat

SEQ ID NO: 391735 - DNA, 89 bp, Homo sapiens
gcagatggaaacacatgaaagacttcctcaaggactacagtatgcacttaatgtccctatctattcttacatacagccgaattggagga

SEQ ID NO: 391736 - DNA, 50 bp, Homo sapiens
cggcgttggaggccaccgtttccaggttatgatgtgattgctcaagccca

SEQ ID NO: 391737 - DNA, 75 bp, Homo sapiens
tgctgtttgccctgaacatcatgaattcccaagaaggagattatgccaagggctttggtggccagtatggaatcc

SEQ ID NO: 391738 - DNA, 99 bp, Homo sapiens
gggaatgctggagcaatacttaaataggacataagcagctctatgaccaatagcacagctgccagtagacccccggtcaccctgaggctggtggtccct

SEQ ID NO: 391739 - DNA, 74 bp, Homo sapiens
tggcggccgccggggctgcggctacacacctaggttgggggccgtcccgctcctaaggcaggaagatggtggcc

SEQ ID NO: 391740 - DNA, 112 bp, Homo sapiens
agagcggccccggtccatggtggtcatcgaggtgttcacccccgtggtgcagcgaatcctcaagcataacatgctggccaactcagccaatccgcacatttagctctccaac

SEQ ID NO: 391741 - DNA, 101 bp, Homo sapiens
tcgccaaagccgctctgggcaagaccagaggaagagtcttcatcatcctccagtgatgaagatgaggatgataggaaacagattgatgagctactaggcaa

SEQ ID NO: 391742 - DNA, 135 bp, Homo sapiens
aaaagagtctccgcggtggaggtctgcgttgctcttgcttttcctcgctggggtgtacggtactccaaagattcaggtttactcacgtcatccagcagagaatggaaagtcaaatttcctgaattgctatgtgtc

SEQ ID NO: 391743 - DNA, 98 bp, Homo sapiens
gtggattaactcagtggctcaacaggctgaagggaggttgcttttaactttgacagaggaagaattttccaagacgccctataccatagaaaacagca

SEQ ID NO: 391744 - DNA, 100 bp, Homo sapiens
ctggcagcaccgacgaacccccaatgctgaccaaggaggagcctgttccagaactgctggaagctgaggaggccagcaagcgcatctccagccacatccc

SEQ ID NO: 391745 - DNA, 82 bp, Homo sapiens
ttcttgcctgtggcataaacccggaaaaaagcatccttttccaacaatctcaggtcatggaaaatggaagatttgcaaaata

SEQ ID NO: 391746 - DNA, 75 bp, Homo sapiens
cgctcaggtccttttggccagatctttagaccagacaactttgtatttggtgaatcacaagcctttgagaacagc

SEQ ID NO: 391747 - DNA, 75 bp, Homo sapiens
cactggtattgctttgagtgcaggtgcatggaggactgcaacagaggagtgggggactgaagattggaatgaaga

SEQ ID NO: 391748 - DNA, 100 bp, Homo sapiens
gggccggagcgcctccttcgcaggcttcagcagtgcacagagccggaggatcgcgtatcgagaaccttccctgcgaacttcagaggaacttccagctgat

SEQ ID NO: 391749 - DNA, 75 bp, Homo sapiens
cgacaagccgctggcagccgcggatctcaccgccgctcaggggagcttctgataattggaggtgttgcagcccgg

SEQ ID NO: 391750 - DNA, 82 bp, Homo sapiens
cggttgctgagccgggagcgctgactggcccggctgggcaggagtcgtccttgtctactccactaccaaatgttgaagttct

SEQ ID NO: 391751 - DNA, 98 bp, Homo sapiens
cttccatcttcatgagtactccaagaagatggttcagttgactattgcaaagcggaatggccaaagactatgacgggtcttcctagcacatcagggac

SEQ ID NO: 391752 - DNA, 100 bp, Homo sapiens
gcaccattaacatgatggagtacctgttgcaggattggaagtgatattggtggaagacaacattttgccgcttggaattctcacctccacaccaaagaag

SEQ ID NO: 391753 - DNA, 75 bp, Homo sapiens
gaaaagcgaggcaaggcaggcggagaatggatcttggagaatgtctgaaagtccatgacctggctttaagagcgg

SEQ ID NO: 391754 - DNA, 98 bp, Homo sapiens
agcactctgggcgaaaattggatgtgaaaatgaagccagaccgagaggctaagaatattgtacacaaagattcttgatgttcttgaggaaatccctaa

SEQ ID NO: 391755 - DNA, 90 bp, Homo sapiens
gtttgctgctcttggtgttttagttacatccctttatcaagtggttacagtccctggacatgatccacacatcacaaaggtgattattcc

SEQ ID NO: 391756 - DNA, 100 bp, Homo sapiens
agtagagatggaaacctcatagcagctgcctgccagaatggaagcatacagatctgggaccgaaatttgacttctccagagaatacagagggcaaagatg

SEQ ID NO: 391757 - DNA, 90 bp, Homo sapiens
agagaactcagcgaggattctgagggtcagtttgaaaaggaggatcgagctcactgtggagtatccatggagatgtggagccttgtcacc

SEQ ID NO: 391758 - DNA, 82 bp, Homo sapiens
caagacttcagtgatgagaatcgcacctaccaggcttccagcccggatgaggtgacttaagagattaaaattaatttggttg

SEQ ID NO: 391759 - DNA, 99 bp, Homo sapiens
ctcccaggccacaagacatttcctgctcggaaccttgtttactaattgtcctcagaatggttggaatgaccctccagctttgaacagagtacccaaaaa

SEQ ID NO: 391760 - DNA, 146 bp, Homo sapiens
aaaaaaattcctgaagaatcacgttattgaagacatcaagggaaaatggggtgaggaagattttgaagacaatcgtcacttatacagtttgtgatgtctggctggggtataggttattcatttcgatgtgacattgttgactattc

SEQ ID NO: 391761 - DNA, 94 bp, Homo sapiens
agacaggagtggagtgatatcagacaccgagcttcagcaagctctctccaacgggaaatcctcattgacgattcaatttgttgaaggccaattt

SEQ ID NO: 391762 - DNA, 71 bp, Homo sapiens
tcacgccactgcctggagctccgaaactggcgatggaatatgagaggagccctctggaaagaaaaggacag

SEQ ID NO: 391763 - DNA, 95 bp, Homo sapiens
ccaattcaaccacatacatctcttcagataccttcccaaggccagccacagtcacaaccccaggattcagaatccatggctggaagaggtagtaa

SEQ ID NO: 391764 - DNA, 75 bp, Homo sapiens
agattacgccccctatcctatccgcaaacatttcgagtatttacagcccccttccataaggtaggctttgctgat

SEQ ID NO: 391765 - DNA, 90 bp, Homo sapiens
gcgcaccctggaccccaactcagccttcctgcataccctggaccagcagaaacctagagtgggggcagtacccaaaggaaacgctacgaa

SEQ ID NO: 391766 - DNA, 83 bp, Homo sapiens
ccgaggtgctgacgtcgcaaaaaaattggataatgccaattctcggaagcaagaagcagagtggaaagaaaaggcaataaagg

SEQ ID NO: 391767 - DNA, 116 bp, Homo sapiens
gatgaaacagagtatggctgcagaggatccatctgtcttagcaaggctgtcatcacagccaacagagcacttatggcaaggcatctcgagggggtggcaatcaccaaaacaattac

SEQ ID NO: 391768 - DNA, 74 bp, Homo sapiens
gacgacatcaagaaggtgatggcggccatcgagaaagtgcggaaatggaactatactgaagagtctgcttctga

SEQ ID NO: 391769 - DNA, 98 bp, Homo sapiens
cctggaccccaactcagccttcctgcataccctggaccagcagaaacctagagtggtgtattttgattacatgagaagctggatccaaatgctacagc

SEQ ID NO: 391770 - DNA, 74 bp, Homo sapiens
tcgtagcctgccactccgtgcgtgatgtgtccaatctagatcccaacttctcatttgaaggcaccaaactggat

SEQ ID NO: 391771 - DNA, 97 bp, Homo sapiens
tcagcttgcacgtggactgaagctgaccttcgattcatccttctcacctaacactggttgtatcacggactgattcaccgagcccaaccgtactcaa

SEQ ID NO: 391772 - DNA, 51 bp, Homo sapiens
ggcgcgagtgaggaaaggaggtactgtagaccaagatcactccatggatga

SEQ ID NO: 391773 - DNA, 100 bp, Homo sapiens
gcgccctgaccggagccttcagcggggggagctcggagccctcccagcctgctgtccagcagggccatgtgtccttcaagcccagcttagaccaacagcg

SEQ ID NO: 391774 - DNA, 75 bp, Homo sapiens
caacgtctattgaaagcccattcaacctgcctagggtagttaaaagacgagtgaatgctctcaaaaacctgcaag

SEQ ID NO: 391775 - DNA, 90 bp, Homo sapiens
tgagcatgcagattttgcaggtgtggaacgcctagctcttgtcacaggtggtaatacttcatcacatgttatccaaagcaactgtgaagg

SEQ ID NO: 391776 - DNA, 50 bp, Homo sapiens
gattgctgcagtggaaaatcagtttattaaccttgcaagaactcttcagg

SEQ ID NO: 391777 - DNA, 95 bp, Homo sapiens
tgagtggttgtgtggtcgcgtctcggaaaccggtagcgcttgcagcatggcgagaaccactgtctctgatcaacgtgcggaagaggaacgtggaa

SEQ ID NO: 391778 - DNA, 98 bp, Homo sapiens
ttggaagaactcacagctagtctatttgaggaccctgatgctcccataagacagaaaatgccccttgatgatctggatagagaagatgaagttagatt

SEQ ID NO: 391779 - DNA, 75 bp, Homo sapiens
atcaagctgaacttttccaagaacagtgaggacctcctgccccccgaggtctgcagtctcctgaacccagcagcc

SEQ ID NO: 391780 - DNA, 51 bp, Homo sapiens
gtggactctgccgacaccggagagaggatgtgtgctgtgtttggtggaatt

SEQ ID NO: 391781 - DNA, 75 bp, Homo sapiens
gtgcctgcagttcagacccttctctcccctccactttctcccggagtactgtggacaaactcattaagaagacaa

SEQ ID NO: 391782 - DNA, 80 bp, Homo sapiens
agaagcgcctcttgatgcccagtaggggaactgtggctgcaccatctgtcttcatcttcccgccatctgatgagcagttg

SEQ ID NO: 391783 - DNA, 98 bp, Homo sapiens
tctgtgacctgctggcattgaatgatttatagctaagactccaggacacccctgaagccgagaaatggcaaagcataattgatttgaaggagaaggaa

SEQ ID NO: 391784 - DNA, 51 bp, Homo sapiens
tgttggtggaggaggtggcaggcctcggcgcaccagcagacgtttttgaat

SEQ ID NO: 391785 - DNA, 75 bp, Homo sapiens
gtcaccccgctgtgacgcgcacgctgtaggaaaactgagtggagtcaacatatcaatggagcaagtcacagtcgt

SEQ ID NO: 391786 - DNA, 74 bp, Homo sapiens
ccgtgaacgaaagcagtgacggaggagcttgtaccaccgtcagcagataagcagagagccctagaagaaaccaa

SEQ ID NO: 391787 - DNA, 75 bp, Homo sapiens
ccgggaccggccgaaaggcgaggaaccggcaagagcggtgagcggggcgcctatgcctccttcgggagagacgca

SEQ ID NO: 391788 - DNA, 96 bp, Homo sapiens
gttccgccggagcccccggcccaagggcgacttctccagccgggcccgcgaagtgctgtgtcagcgtgttatgatgccgtcccgtaccaacctggc

SEQ ID NO: 391789 - DNA, 100 bp, Homo sapiens
atttgaaagacaagagttctttagtttcatctctctataaagttatccaggagccacaaagtgagggtgtacaggagagagttaatctttctgcacctct

SEQ ID NO: 391790 - DNA, 106 bp, Homo sapiens
cgcgtacggcctttcacgagtcttcaagccttcagagctacagagacttctgaagtggagagtctgcgacctcctcggttcttcaatgaagatggagttatcagac

SEQ ID NO: 391791 - DNA, 100 bp, Homo sapiens
catttatctggcatggatgtgactattgttaagttcttcaccaaaggacatggatgaaaatgaaagcaaccagtctctgatgacaagcagccaatatcct

SEQ ID NO: 391792 - DNA, 83 bp, Homo sapiens
caacccgataccatcggacaggatttctccgcctcagcccaacggggagattctgaaaaagagttccacgtcctcccttatcg

SEQ ID NO: 391793 - DNA, 75 bp, Homo sapiens
gaggccgggctggcacatcgagtgctctgccatcgctagggtggctgtgctggctctggctgtggcaaatgtgac

SEQ ID NO: 391794 - DNA, 75 bp, Homo sapiens
cggcgctcacgcttccgcaactttgcagcgctcatggtcagctggccgccggcacctgtgagattgtgaccttgg

SEQ ID NO: 391795 - DNA, 90 bp, Homo sapiens
caagaaggccctggacacagcaatatctctgggctttcacagattgactatccaccatttgaaaaaaacttttacaatgagcatgaagag

SEQ ID NO: 391796 - DNA, 100 bp, Homo sapiens
agtacaatgtgaactcaacatcacagctcaactccaggagggagcttgcattcacaagagatgggctctgtggtctgtggaatgaaatggttaaagatgg

SEQ ID NO: 391797 - DNA, 83 bp, Homo sapiens
gaagaacctcagaacatacccaagaggacaaatcccccaggctatgtcttgcccagccacgtgactgaggagatgctatggga

SEQ ID NO: 391798 - DNA, 100 bp, Homo sapiens
caatacattgagtttgtggcagacagacttatgctggaactgggttttagcaaggtccttatgtcgtcagaagatcgagaagctcaggaggatgaattgc

SEQ ID NO: 391799 - DNA, 83 bp, Homo sapiens
ctcggctcctgtcgtccgttctctcaggctcccgttcagggtgctttcttctgcgacctggtactcatctacctcatcaaaaa

SEQ ID NO: 391800 - DNA, 83 bp, Homo sapiens
tgatatgatctgtcctgaatgtggcttggttgtaggttgaatcatgtagctgctggtctcgtttcaccaagtctgaaatcgga

SEQ ID NO: 391801 - DNA, 75 bp, Homo sapiens
tggcaacctgcaagacttaaaagtaggagagcaaatttttcagaacataaaacaagaatatagtcgttatcagag

SEQ ID NO: 391802 - DNA, 101 bp, Homo sapiens
gaaagaatacatcaagattctgaatctggtgatgaacttagcagcagctccactgaacagataaggacatatctgaagagatggattaagaatgctttgga

SEQ ID NO: 391803 - DNA, 100 bp, Homo sapiens
ctggaaggtccaagattaagataatcagcagatctggtgtctgtattgcctaagtgtaatcttgaacatgggcggtgctgtgagtgctggtgaagacaat

SEQ ID NO: 391804 - DNA, 50 bp, Homo sapiens
tttaaccgctctctgcctcccaggatgctggcacgtgtgtcctggtcctc

SEQ ID NO: 391805 - DNA, 114 bp, Homo sapiens
agtcagctcgctctgtccgtgcccagcgccacaccgacatgcccaagacccagaagggtgtaccagtgatggcaataagaaacaaaatgatatcagaaggactagacccagatc

SEQ ID NO: 391806 - DNA, 75 bp, Homo sapiens
gtacgtggtggagctctgcgtgtgtgaccattgtgaggtagatattttgttctaattttccagatgaggaagctg

SEQ ID NO: 391807 - DNA, 98 bp, Homo sapiens
caacagcttccataaatcctgcttcctgtgcattacccagcatgccacaatctgattgctgacctggatggaacagagtgaaataaatgatttacaaa

SEQ ID NO: 391808 - DNA, 74 bp, Homo sapiens
aacagcgacagtacaaagaagactcttgtcacactaattgccaacaacaatgatgtcaagccctccaacatcct

SEQ ID NO: 391809 - DNA, 97 bp, Homo sapiens
agggctgggagaactcaggaagcctggaagtagaccagttgcgtttggagagattacaaattgatgagcagttgcgacagattggagctagttctag

SEQ ID NO: 391810 - DNA, 100 bp, Homo sapiens
ctgtaggcggtagcagtttgcacgatgaacttgacacgatgaggcgagtggtacgacagagcaagtttcggcatgtatttgggcaagcggtgaaaaatga

SEQ ID NO: 391811 - DNA, 75 bp, Homo sapiens
tctgggccgagaccattccgtatggagagccgggttgagcaatgtttaaagcgtttgaaaaacatgaatttggag

SEQ ID NO: 391812 - DNA, 83 bp, Homo sapiens
tgctgaatttgcagagagaacggttgcaaaactggaaaagacaattgatgacctggaagagtgcctggtgaagaatgtgatgg

SEQ ID NO: 391813 - DNA, 98 bp, Homo sapiens
cagcatcgaccgcatgttcgacaagaatctgcaggacttggtccgcggcatccgtaaccacaaggaggacgaggtggaagcagggaaaggcctggaga

SEQ ID NO: 391814 - DNA, 75 bp, Homo sapiens
aggacaccgagtgctcatcttctcgcagccacctggtttccatcgggcctatagttccccactctacagcaacca

SEQ ID NO: 391815 - DNA, 88 bp, Homo sapiens
tggccgccgccgccgcgagcgctcccgatggtagtgaaaacctttatggatatggatcaggactcagaagatgaaaaacagcagtatc

SEQ ID NO: 391816 - DNA, 100 bp, Homo sapiens
aaaagctgaggaagcaggcggagaagagacaagacaagttggatggcttgaggactggtactaaaaggaaacgtgactgggaggccattgccagcagaat

SEQ ID NO: 391817 - DNA, 83 bp, Homo sapiens
aggtccctaatggtgcaggagcagcggctggtgcatgagaagcacctgaggcaggagccagggacccagccctacaacatcag

SEQ ID NO: 391818 - DNA, 75 bp, Homo sapiens
ggcctgtggactgcagcctcggcggtcagcagataatttttatggtgggacgaggatacctgtctccagatctca

SEQ ID NO: 391819 - DNA, 75 bp, Homo sapiens
cggaaatctggaaccgggatggcgacgtctacactgagtcggaggcgaagatgcctgaggaaacccagacccaag

SEQ ID NO: 391820 - DNA, 74 bp, Homo sapiens
aaacagttcaacatcttctgtcatatgctggagtcagccctcactcaggctttatcctgtggataaacgcagag

SEQ ID NO: 391821 - DNA, 100 bp, Homo sapiens
tgaacctgtcactgttcgggaagtcacctgtgagcccattggcaggggtaccaaagtgatcctccatcttaaagaagatcagacagagtacctagaagag

SEQ ID NO: 391822 - DNA, 100 bp, Homo sapiens
cagtcttcaccgcggaaagcatgttgtggctgttccaatcgctcctgtttgtcttctgctttggcccagtctgcgctcctcagaccaccggcaggtgaac

SEQ ID NO: 391823 - DNA, 75 bp, Homo sapiens
tttcctgaagaacgttggggagagtgtggcagctgcccttagccctctgggtgcactggagctgggagcaaagga

SEQ ID NO: 391824 - DNA, 100 bp, Homo sapiens
accaaggatctggggatcttcgcactatcccaagaaattattcttgacagaagtattttaaaagaaaaatctttacgatggcctcagcagtacttagttc

SEQ ID NO: 391825 - DNA, 100 bp, Homo sapiens
ggcgtcctggagccctcctcaggtgagctggagctgcccggctcggcagcgggaagagattctacattgcattgactgggattccagtagcaattttcat

SEQ ID NO: 391826 - DNA, 75 bp, Homo sapiens
ggccaaatatgaatttttatttggcagatctgaagggaaagctccagatactacaattctgtggtgttcttggtc

SEQ ID NO: 391827 - DNA, 82 bp, Homo sapiens
cctcattcctggaaattgcactggaactgtctgattaagatacaaggcagatccaaccatccccaccgtggtcctacgatca

SEQ ID NO: 391828 - DNA, 60 bp, Homo sapiens
tacagaacttgaggaagaggcccaacggggtacctgtggaaaagtgaaaagccactctac

SEQ ID NO: 391829 - DNA, 98 bp, Homo sapiens
cgggaactctgaacctcaataacgagggctctctaaatacgtacagattctgcgataatgtgtggacttttgtactgaatgatgttgaattcagagag

SEQ ID NO: 391830 - DNA, 101 bp, Homo sapiens
agtgcctgggccgctgggagccgttattggctgccgttaaggaccgttacgtttcccggtcttcccaagggattgttgaagaaacttctgaagagggaaac

SEQ ID NO: 391831 - DNA, 100 bp, Homo sapiens
aggagttcatctacccggagaagcaggagccctactcggcaggtcttattagtaggtaagaaacagctgctcctccacctccaccccagccccatggagc

SEQ ID NO: 391832 - DNA, 101 bp, Homo sapiens
caatcttgcgtgtcctgggctctaatgtcagagaatttctacaggtcaacagcgacctcatttacattacagctaagaaagatggcactcatgtggtggaa

SEQ ID NO: 391833 - DNA, 100 bp, Homo sapiens
aagaacagatagacgcttttcttaagacgctgcgcagagtacaagccagctgccatgttgtgagcacataccacatagctccatggagatgcccatgtga

SEQ ID NO: 391834 - DNA, 75 bp, Homo sapiens
tgagcctggcccgacagcccaaggctgatggccgtgtgttgtatgactatgaatatgatgaaaatggtgacagag

SEQ ID NO: 391835 - DNA, 96 bp, Homo sapiens
catgccctatttcatccaggtcatgaaggagtacttgacaaaggtcaaatgaagcgcaacagaggggaagaaatagattttgagacacctgggtcc

SEQ ID NO: 391836 - DNA, 51 bp, Homo sapiens
tttcatctgtctgtgggaattgtaagcaagcttccttcaaaatgtctactg

SEQ ID NO: 391837 - DNA, 100 bp, Homo sapiens
agaagagaagcagtgaaggagtgcagaggcatcacctgaaaggatgactcactggttgtgtggaaggaagtcgatttgacccggctgtctgagaaggaac

SEQ ID NO: 391838 - DNA, 97 bp, Homo sapiens
gtgaagtgacactcccaccagagatacagtatttcacttatggtccttttccatgtgatatatgtggtcgccagtttaacgacactggaaatttgaa

SEQ ID NO: 391839 - DNA, 75 bp, Homo sapiens
ccaaggtggacaagaaagttgagccctggactatgggattcagcaaaagcttcaagaagaagttcttctacaaca

SEQ ID NO: 391840 - DNA, 83 bp, Homo sapiens
gaaggattctggagccacagaagatagacagatggctggcagtgatggggccaagattgggaactgcccattctcccagagac

SEQ ID NO: 391841 - DNA, 82 bp, Homo sapiens
ccggagcaagcgggcgagggcagcgccctaagcagggggatatgagactttctactcggaatatcctgagtgttgcgtggat

SEQ ID NO: 391842 - DNA, 75 bp, Homo sapiens
gttaaggattccaagtaactcttatttgaaagtatgctgaggccttggattaccaccgtcaggcactggtgttga

SEQ ID NO: 391843 - DNA, 100 bp, Homo sapiens
atgttgctcaccaccctttctgggcttcagcatgtactcccaccgttttctggatatgccgcagaaggatccgtgccagaagcaagcctgtgagatacag

SEQ ID NO: 391844 - DNA, 100 bp, Homo sapiens
ccgacatattgcccgcaggagctgcggcggcgaagcggagagcaccggggggaggagatggacgccatggagttggtgctggtcttcctctgcagcctgc

SEQ ID NO: 391845 - DNA, 96 bp, Homo sapiens
ccatcggagagcagtgcagcgtgtgtggggtcgagcttcctgataacgaggctgtggagcagcacagagttcgcagtatgtgcagtgcgtggccgg

SEQ ID NO: 391846 - DNA, 98 bp, Homo sapiens
gctctgcagccacatactatccgtttgttcaggaaccaccagtgacagagagaatgacatcttcctgggctgggaaaaaggagcttataagaaatggg

SEQ ID NO: 391847 - DNA, 99 bp, Homo sapiens
gggggccgctctgggatcccggccaccagcaattgtccgatgactttgggaaattgctgctggctgaggccctcctggagcagtgtttgaaggagaacc

SEQ ID NO: 391848 - DNA, 100 bp, Homo sapiens
cttttggtaccagacatccaaaagactgctgagatagtttatgcagccaccaccagtttgcggcaagcaaatcaggagccaggactgtctccagtttggt

SEQ ID NO: 391849 - DNA, 95 bp, Homo sapiens
ttggtagctaagactcccgaatacttcagaagtggggaaatgaaaaattgtatggcgacttcttgagctggaagctagaggaaacccttgcccag

SEQ ID NO: 391850 - DNA, 74 bp, Homo sapiens
tgcgaccgtcgcggaccatgggcgacaaagggacccggaacggttttccaaagcagacagcagctcagctgatt

SEQ ID NO: 391851 - DNA, 90 bp, Homo sapiens
ttcaactatggcaaatattgtgaaaggcctgtataccctcagaccagacactttttcaaaaatggcaatggtatcagaattcctcaagca

SEQ ID NO: 391852 - DNA, 75 bp, Homo sapiens
atcaatgccatatgtgttaattccacccacatttttactgcagctgagtactacagtgcaaccattctgcagatg

SEQ ID NO: 391853 - DNA, 90 bp, Homo sapiens
tcctgagcaggcacatcccccgtgagcctccgacgctgttgcacaagctgactcttcgtcacgtgatgcgaccgggctccgccccggcgg

SEQ ID NO: 391854 - DNA, 101 bp, Homo sapiens
accttcagcggatttggggattaggctcttttagttggttggcagagaatttgaactggagatgaactttattatccaggatgctgagagtataacatgca

SEQ ID NO: 391855 - DNA, 75 bp, Homo sapiens
ggggccaggacgctggttcatacactccaagggaaatcctcattgacgattcaatttgttgaaggccaatttgtg

SEQ ID NO: 391856 - DNA, 75 bp, Homo sapiens
gagtttcctgtgtccagcgctgccggagccgcctgagctggtctcttgtggctcagcgccgtgcggaggttgaag

SEQ ID NO: 391857 - DNA, 90 bp, Homo sapiens
cttcccccctctctctctgcttggtaccacagaataatctccgtagaactaccaggtgatgcaaagcagtttggaattcagttcagatgg

SEQ ID NO: 391858 - DNA, 100 bp, Homo sapiens
ggcaattgaaaacactgcctcagtatctgaacacaaggtcacctttggctcttcagagatgcagggacacacgatgggcttctggttaaccaaactgaat

SEQ ID NO: 391859 - DNA, 90 bp, Homo sapiens
gagcaaacggaaggcgccgcaggagactctcaacgggggaatcaccgacatgctcacagctcaggcatttgaaaggatgatgagtccaac

SEQ ID NO: 391860 - DNA, 100 bp, Homo sapiens
cagacacaactacggggttggtgagagcttcacagtgcagcggcgagctggcccggtgatcatgtccattgaggagaagatggaggctgatgcccgttcc

SEQ ID NO: 391861 - DNA, 100 bp, Homo sapiens
acagagggacaacaaaagcctcctacaagagtcctaccaaaaggcagagcggcttgggtaaatccaccttaatcaacaccctcttcaaatccaaaatcag

SEQ ID NO: 391862 - DNA, 83 bp, Homo sapiens
cgggaatcacacacatacctcagagtgctgcagcagctcccagtccagtgctaggaaacattcccccaggagatggcatgcca

SEQ ID NO: 391863 - DNA, 80 bp, Homo sapiens
gaatcatgaagctactaaccagagccggctctttctcgtttgcccgaccatctgtaagtcacacggctgcaccgccgaag

SEQ ID NO: 391864 - DNA, 96 bp, Homo sapiens
caaagagcaacatcgcagtggaaggccggaggacgtctgtgccgagccctgagcaagttgcatgctgagaatttgaaaaatgaagatgatgtagac

SEQ ID NO: 391865 - DNA, 83 bp, Homo sapiens
cctgcagcgggagctggacggcgagcgcgagcggcgcgagaaacctgaactctttgcttccggaatccgggattgttgctgac

SEQ ID NO: 391866 - DNA, 75 bp, Homo sapiens
tggaaaggagtgttgtaagactaggttttggctaaggaagagccaatgttttccacccataatcctttctgccga

SEQ ID NO: 391867 - DNA, 108 bp, Homo sapiens
cccaacttgacccagttcacggagcacttcaacaacatgtcctactggataatttcttgagaggagataactcccgtaaagttcagcaccagcagcagaggaaaccca

SEQ ID NO: 391868 - DNA, 98 bp, Homo sapiens
gcccttcttgtgtatctggagaaaatagagcttggctgaagaggaaataaaaacagaacaggaggtggtagagggcatggatatctctactcgctcca

SEQ ID NO: 391869 - DNA, 99 bp, Homo sapiens
aatgcatggagcaggagatgcaaaaccgatacccacctgtatcagagttctaaatgtcgcacagtgcttgcttcgccccagaagattgaaggttttaag

SEQ ID NO: 391870 - DNA, 75 bp, Homo sapiens
tccctattacaactccctcaaggactgcctttcctggcacgtgtggttctcaaatataggcattctgatgggaac

SEQ ID NO: 391871 - DNA, 75 bp, Homo sapiens
tgaaactgctttctaaaacaccagaactcaacctggcagcctggcatcctcgctacaacctcattgttgtgggcc

SEQ ID NO: 391872 - DNA, 80 bp, Homo sapiens
aagtggtgagcctttttgtcactggtgagaagccatacaaatgtgaattgtgtgataaaggatttgctcagaaatgtcag

SEQ ID NO: 391873 - DNA, 75 bp, Homo sapiens
ccaaaattgaagaatgtaaagacttgaacatatttggatctattttcggctttgtgagaaaccttaccatcaaac

SEQ ID NO: 391874 - DNA, 83 bp, Homo sapiens
tagctatggcagtggcagaagattttaattagggccttcatcccagaataatcactgaaggatttgaagctgtgaaggaaaag

SEQ ID NO: 391875 - DNA, 89 bp, Homo sapiens
gataagtcgaaggggaaggcgcctgaagaggacgaagatccatctgtgtgtgctgtggaattcaggatacttgggcattgcctactatg

SEQ ID NO: 391876 - DNA, 82 bp, Homo sapiens
cggaagatggcggccggcgaaaggagctggtgcctgtgcaagttgttgaggtaatctgtaagtcagatgctccaacagggga

SEQ ID NO: 391877 - DNA, 74 bp, Homo sapiens
tcacatgtggacctccctgaagattttctaaggagcaaagtacaaaattggacagctgtacatgatcagcaaac

SEQ ID NO: 391878 - DNA, 100 bp, Homo sapiens
agcagagaggagcggggagcaatgcagcaatcttcctgagctcttttcgggtgccatatgaggaaatcagaatgatgatattggaagtagatgaaacacg

SEQ ID NO: 391879 - DNA, 51 bp, Homo sapiens
cagatcacagaccatggtctcaggtttattgggcacttcctagcaccaggc

SEQ ID NO: 391880 - DNA, 100 bp, Homo sapiens
ggctgagagtaggctccgggccccggacctagaaaaatggctacaaacttcctagcacatgagaagatctggttcgacaagttcaaatatgacgacgcag

SEQ ID NO: 391881 - DNA, 82 bp, Homo sapiens
ccgtacgccctgctgggccagtaccatgacatcaagcagaaactatgttccaacttcctgtcaacaatcttggcagtttaag

SEQ ID NO: 391882 - DNA, 78 bp, Homo sapiens
tggaattttggagatattcaaagaggaagtatcattctgcaaaggaggcatatgaacaacttttgcagacagaaaacc

SEQ ID NO: 391883 - DNA, 74 bp, Homo sapiens
gctagtatcggacatgatcctcatcttttatacactcttagtgctgtccagaagtggtccaaaggcaaagttcg

SEQ ID NO: 391884 - DNA, 75 bp, Homo sapiens
tcttcctgtttgtggataagacagtcccacagtccaggcggaaccataatcatatttggcaggtattaatgtatg

SEQ ID NO: 391885 - DNA, 75 bp, Homo sapiens
gaggagtgtgactgcggccctggccagctgctgccttccagggtcttctgctgctgttgccgccaccaccatctg

SEQ ID NO: 391886 - DNA, 100 bp, Homo sapiens
ggtggcgaacggggcgagcctggaggattgtcactccaacctcttttcgctgcctaccgtatgtgaacgggagctgtgtgtgtttgcttttcaaaccctg

SEQ ID NO: 391887 - DNA, 100 bp, Homo sapiens
gggtatggttggcatggaattgaatttcatctgtctgtgggaattgtaagcaagctccagaaacatgacaaggaggactttcctgcctcttggagatcag

SEQ ID NO: 391888 - DNA, 90 bp, Homo sapiens
gctgcaggaacagctggaaaaggcagcctcaggagtgcaagtagctgatgaagtatgtcgcattttttatgacatgaaagttcgtaaatg

SEQ ID NO: 391889 - DNA, 90 bp, Homo sapiens
aattaagccacggcagtaataccaaggccattcgcacaactgcccactacgatcctgccactgaggaagccacttggaggatgtgcttta

SEQ ID NO: 391890 - DNA, 50 bp, Homo sapiens
aaaacggcccttggatgatggaggccctcgggaccaaggatcacgtcatg

SEQ ID NO: 391891 - DNA, 82 bp, Homo sapiens
atggacatgaagaggaggatccacctggagctgaggaaccggaccccggcagctcatcatcggctggttcgtgcgaagcttc

SEQ ID NO: 391892 - DNA, 75 bp, Homo sapiens
tgcaggaaaacaagttcagggctcccactgattctacattatggaaaccactgattgcttgtgtggagaaacagc

SEQ ID NO: 391893 - DNA, 75 bp, Homo sapiens
atgcacccccagcagccaccagcagaggagctctacggtgactttgaagacttggaaacaggggacgtgcacaag

SEQ ID NO: 391894 - DNA, 76 bp, Homo sapiens
catgctgggagccatctgtgccatcatcgtggtagttattgtaaggctgacagtgagtgacgtggacatcttcgag

SEQ ID NO: 391895 - DNA, 74 bp, Homo sapiens
tctcaaccttgtgggatgtgaaaactctgttactgaaggtgtgatgaatgcagactctgctaccattttggctg

SEQ ID NO: 391896 - DNA, 75 bp, Homo sapiens
gcggccaagccatgctcggccccagacagggaaactgaaacttcccaggctgtgcagctagtaggtgggacttgg

SEQ ID NO: 391897 - DNA, 100 bp, Homo sapiens
ctggctggagccctgcattcgcggcgtgtgcaggctacctgacagtcaacattgagcctctcccccctgtggtggctggagacgccgtgactttgaagtg

SEQ ID NO: 391898 - DNA, 89 bp, Homo sapiens
ttgagacttgtctaaagtaacatgaccagtaagtgcttgaattaatgcaggaagcagaatctttaattgcaaaaaagattcatccacag

SEQ ID NO: 391899 - DNA, 82 bp, Homo sapiens
ctccagctgccccctgtgtggcaaacctttcttgagctcagacccctcctcctgtagagagtggtgctgccctctcgggatg

SEQ ID NO: 391900 - DNA, 99 bp, Homo sapiens
tcacctgagactgctccagaagtggagaccagcagaactccaccaggatgcttaaatggcagaggccaagcccagactccagacggacatgcggataag

SEQ ID NO: 391901 - DNA, 100 bp, Homo sapiens
ctgttttcgtgatcttcagaccccaggttctttgggaatgggtactgttcaaaaaggaatgccccacaagtgttaccatggcaaaactggaagagtctac

SEQ ID NO: 391902 - DNA, 51 bp, Homo sapiens
gacaaagcccgaaagtgtctccaccaggctcagctggaagctcagaaagcc

SEQ ID NO: 391903 - DNA, 82 bp, Homo sapiens
ggcggtgaaggaagactgcaaagtttgcagagtgggcaggatcttaagacccgataggtgcagaacccatctggacacggag

SEQ ID NO: 391904 - DNA, 83 bp, Homo sapiens
cacgggctgggcgcccccagaagcccgggaacaaacagtccctgtgaagcaggaagagtgagggcaggttcactgcagctcag

SEQ ID NO: 391905 - DNA, 51 bp, Homo sapiens
gctgtacctcaggtgaagttttatgaagagctcagagtcaagatctccact

SEQ ID NO: 391906 - DNA, 101 bp, Homo sapiens
tctgcagtcaagacgctgggcgcgtcgaggactgggagcgggctgcagatgacagcaaagaggttgagagcttccagcagctgctcaatgctcggacacag

SEQ ID NO: 391907 - DNA, 76 bp, Homo sapiens
cccaaaatgaaaatttctccaaaaaggatgtcatgttcctggcctggcaagatgatgatgaatgaagtcctggcag

SEQ ID NO: 391908 - DNA, 50 bp, Homo sapiens
accggatcccaggccccgtttgcaagtctccacaaaccggaggactaccc

SEQ ID NO: 391909 - DNA, 74 bp, Homo sapiens
tggggaccccctcccctgaggactgtgagctggaggagctgcagaggctggagacagagttgggccaacccgct

SEQ ID NO: 391910 - DNA, 100 bp, Homo sapiens
gaaaaaagcaagagagactattttacacagttggtattagcatgtttgtgaagtgaagacttacgatccttctggtgactccacacttccaacctgttct

SEQ ID NO: 391911 - DNA, 83 bp, Homo sapiens
cgcaaggccgaagccaaagccagctggagctctcaaacactgctgtcctgcaccagatgcggcgggaccaggtgacagacacg

SEQ ID NO: 391912 - DNA, 75 bp, Homo sapiens
catgagctggtgtgcagccgcccaggagggctgagatctgtatctgtggacctgaatgttgatccctcgcttcag

SEQ ID NO: 391913 - DNA, 83 bp, Homo sapiens
cggcagggagcctcctcaagtgggaaccactgagattaactcattatccgttggcagagagacacctcctctatgggcgacct

SEQ ID NO: 391914 - DNA, 100 bp, Homo sapiens
agtggactgtccggggccgggctcaggagcagagggaaggtggccatccagaaggaggacttgcagaagtaccacaacagggacacctggttccagctgc

SEQ ID NO: 391915 - DNA, 116 bp, Homo sapiens
ggcggatggccccaggtgtaagcgcagaaagcaggcgaacccgcggcgcaataacgggactttgaacatgtcggggatcgccctcagcagactcgcccaggagaggaaagcatgga

SEQ ID NO: 391916 - DNA, 96 bp, Homo sapiens
acaggagtattaaatgaaaacacagtttctgcaggaaaagatctctctacttctcctaagaaaggaggtgcactgttcaacacagcaatgaccaaa

SEQ ID NO: 391917 - DNA, 83 bp, Homo sapiens
aaagaacggagcttgaagcaaagctgcaggttttaaagctattcaggattatgaaactgctcaggaacacaatgaaaatgatc

SEQ ID NO: 391918 - DNA, 83 bp, Homo sapiens
gagtgagagatggaacccgaagaagaaaggattcgttacagccagagattgaattcagaaggagctggcggacatcactttag

SEQ ID NO: 391919 - DNA, 75 bp, Homo sapiens
tcgaccccaacagcaggaatagctcccggtcttattagtaggtaagaaacagctgctcctccacctccaccccag

SEQ ID NO: 391920 - DNA, 75 bp, Homo sapiens
agaaaaccgacaaccttcccagaaagtccaagctcgtggcagaaaaggctggcatggttcatttgttggatttcc

SEQ ID NO: 391921 - DNA, 98 bp, Homo sapiens
gccatttcgccaaaggatgcttttgaaactcggcaggacttaaatgagcttagcagtgtctgcaaaaacgaatcttttcctacaacctgttaactgac

SEQ ID NO: 391922 - DNA, 100 bp, Homo sapiens
ggaattagcaaagcaggtgaagagtttgccagtggtaaattacaacctcctcaagtatatttgcagaaccaacttcgattatcttcaagaggtgcctatc

SEQ ID NO: 391923 - DNA, 90 bp, Homo sapiens
gagagctctggggtcgacacggcctcaggagtgcaagtagctgatgaagtatgtcgcattttttatgacatgaaagttcgtaaatgctcc

SEQ ID NO: 391924 - DNA, 75 bp, Homo sapiens
gggctccggcccggacctgcagcctcccaggtggctgggaaggtgctggagaatctggtaaaagcaccattgtga

SEQ ID NO: 391925 - DNA, 50 bp, Homo sapiens
gcgggcccggcggctctcactatccagacatgcaagaaagcacttcagcc

SEQ ID NO: 391926 - DNA, 50 bp, Homo sapiens
tgcagatctacttcggggacccccaggacataagcagctctatgaccaat

SEQ ID NO: 391927 - DNA, 128 bp, Homo sapiens
gtttgtcctgtcctggatcagtttctttgtcatgtagccaagactggagaaacaatgatctagtgaaaagccatttgatgtatgcggtcagagaagaagtggaggtcctcaaagagcaaatcaaagaa

SEQ ID NO: 391928 - DNA, 49 bp, Homo sapiens
ggaacttggattcaaggcagtggaaaatggctttgtaaagaagtttgaa

SEQ ID NO: 391929 - DNA, 98 bp, Homo sapiens
aagctgggattggagattccacccaaacttgctggtcactgggagaataatcatgggccagactgggaagaaatctgagaagggaccagtttgttggc

SEQ ID NO: 391930 - DNA, 87 bp, Homo sapiens
aaaggaaactggaagaaaaaagaaaagaaactgacaaaaacatttctgaggttgaggaacaggttagcaccactgagagagtgtttc

SEQ ID NO: 391931 - DNA, 74 bp, Homo sapiens
gggaagcctcctgccgagataaagccaccacgtctggctttgtgtgcaacacgtgccctgaaaagtggatcaat

SEQ ID NO: 391932 - DNA, 75 bp, Homo sapiens
ctggagactctctgcacgctgggcaaggccgaggatgatcggctgaatgtaacagaggaactaacgtccaacgac

SEQ ID NO: 391933 - DNA, 100 bp, Homo sapiens
ccattctttacagaaagggaacaaaccctgcaggttctaagaagactcttcccggttgatcgtggattatttgaggtggcagggcccagccccgaaccag

SEQ ID NO: 391934 - DNA, 74 bp, Homo sapiens
agcttctcagaagacagagggttttcttttgagccggagtcagagtggtggctacagtgaccggagctcgggcg

SEQ ID NO: 391935 - DNA, 100 bp, Homo sapiens
gatgctgacacttcacaattggctttcattctatgagaagaattatgtgtgtgttggtgcagtggaggcttgcctcttgcatcagctgagacgccgtgcc

SEQ ID NO: 391936 - DNA, 98 bp, Homo sapiens
aacagatgcagtctgtgtgctctgattgtaatggagaagtgataatagagtgacatccttcagagacctcattcatgaccaagatgaagatgaggagg

SEQ ID NO: 391937 - DNA, 75 bp, Homo sapiens
agaacaaagacttaaggaacagcttggcgctcaacactttggacaaagtttaccaaatgaaaagcaaacctcggg

SEQ ID NO: 391938 - DNA, 100 bp, Homo sapiens
gcccacgcagccagaatcctttagcagtgggtcccaggacgtgcaccagaaaagagcggagctccctgggtcctcagcagtgaggctggcctccctgcgt

SEQ ID NO: 391939 - DNA, 100 bp, Homo sapiens
atgctgggctcctccaagaacacgcgtctctcggacaccccaccgctgctgcagcagaactgctcatgctagggtgatcagcccatgacctaaacctcca

SEQ ID NO: 391940 - DNA, 102 bp, Homo sapiens
tccgttgctttactttttgcttcaccgacatagtcattatgccgaagagaaagcaattctgtggtgttcttggtcacacatttatggagtttctgaagggca

SEQ ID NO: 391941 - DNA, 137 bp, Homo sapiens
ggaaaccaggcatctctgggtgggcaacttacccgagaacgtgcgggaagagaagatcatcgagcatttcaaacgcctcttcgagcactactgctactcccggggcggcatgcgccacagctcctacacctgcatct

SEQ ID NO: 391942 - DNA, 98 bp, Homo sapiens
cttcaaagaagaaagaagcctctctacagtttgttgtagaaccaagtgaagccacaaacagatcagaagagaagctgaatttggacgacagccagtgg

SEQ ID NO: 391943 - DNA, 98 bp, Homo sapiens
ggagatgcagcggggcgccgcgctgtgcctgcgactgtggctctgcctgggactcctggacggcccgcgatgctcccagcccggtgagacctgcctga

SEQ ID NO: 391944 - DNA, 99 bp, Homo sapiens
cgaccccggccgcccagtgggcctggagcagctgcggcggctcggggtgctctactggaagacaatgcagatcttcgtgaagactctgactggtaagac

SEQ ID NO: 391945 - DNA, 100 bp, Homo sapiens
tagtaaacggggctgctggtgggccgcgtcgaagacatggaccagggctacggaggatattgactgggtacagacagagaagcacgtgtttgagcaggca

SEQ ID NO: 391946 - DNA, 83 bp, Homo sapiens
gccgtctcgctctgggtctccaggcccgcgaccgtccgccagtcgtcccgagcaaccatgtccaagggacctgcagttggtat

SEQ ID NO: 391947 - DNA, 83 bp, Homo sapiens
accaggcccggctgctggccctcctggtcatcccgcctgccatcacccccgggcccactgctcagtggagcgtggaggacgag

SEQ ID NO: 391948 - DNA, 100 bp, Homo sapiens
gcgaggatgacattgatgatggattcaggagactgtttgcccagttggcaggagagaggatgaagtttttgctgctgcagcagaagtacctagaatacct

SEQ ID NO: 391949 - DNA, 122 bp, Homo sapiens
ctcgaacccgcctgcgatggggcgagaaaggtcccactgcagccctccaagcagcaaacggggattcagcgtccgatcctttggaacagggactcacgtgaagcttccaggaccagctcccg

SEQ ID NO: 391950 - DNA, 100 bp, Homo sapiens
gaagggatcgtgtggcatgaaacagaagaagtagaacttcatggaggaacacggagtgacccaaaccgaacatatggctaccatagaagcacatgcagtg

SEQ ID NO: 391951 - DNA, 98 bp, Homo sapiens
tcaccatggtggagaacgaccatatccgtggggccaagagtgagatcttgtacattcgcaccaatgcttcaggaaggtgtcttgctgcaggtaactaa

SEQ ID NO: 391952 - DNA, 82 bp, Homo sapiens
ggattcgcaagccgagaccaaatccttgagtttcaggtcatgcaagacaagataatctgccttccgaaaagagtgcagcctg

SEQ ID NO: 391953 - DNA, 100 bp, Homo sapiens
aaaaccctgctgatgtcagtgttatatcctccaggaatactggccagttaagtgggcagaccaacatccacctcagcaaaaacttcttcctgacgaatcg

SEQ ID NO: 391954 - DNA, 100 bp, Homo sapiens
tgacatcaaatggtttcaccattgcagacccagatgatagagggttatgtaccgaaggactctaccgtgtcagcgggaataaaactgaccaagacaatat

SEQ ID NO: 391955 - DNA, 73 bp, Homo sapiens
cctccgctcccgccgactggcctgagaacgaggtgtattttgacctacgaattggagatgaagatgtaggccg

SEQ ID NO: 391956 - DNA, 82 bp, Homo sapiens
aggaggggaccgagaatcaaggcgttgagcctcaaggctgtggatgagatgaacggaaaggagctcaatggaaaacaaattt

SEQ ID NO: 391957 - DNA, 73 bp, Homo sapiens
ggtcctatccaaacagagacgccgaaaggaatccagacgctctgcagtgtcccatcgtcttatgcggatggcg

SEQ ID NO: 391958 - DNA, 98 bp, Homo sapiens
caccgctttacatagtcctcagccagtcagttggaggagctttttccagtgcaaagacagctatgtcttcatggctttccactttcaccacttccacc

SEQ ID NO: 391959 - DNA, 51 bp, Homo sapiens
gaaaaaacatctgccagtttctcttggaggctgttcttgccttagctgcat

SEQ ID NO: 391960 - DNA, 75 bp, Homo sapiens
ggtgaatgggagcgcgcagggcgcacagatcgggctactacaaagttctgggaaagggaaagctcccaaagcagc

SEQ ID NO: 391961 - DNA, 90 bp, Homo sapiens
gatgagatcaatgacagagtgaggtttctgcagacaatcaatccccacagccaaggaaaatcatttgtatgtccagagaagacttcacgc

SEQ ID NO: 391962 - DNA, 73 bp, Homo sapiens
ttccagaagcgcagcagctgcttgaagagggagcagcctgtggccagagcctagaggagagatcaaagaccct

SEQ ID NO: 391963 - DNA, 74 bp, Homo sapiens
attgcttggttccttgtcacaaggaatggcatcaccagctgccggatgcggactgagagtgagccatcttgtgg

SEQ ID NO: 391964 - DNA, 88 bp, Homo sapiens
caatattgcctggacgattgcttagaggagtatttcctgaactgtgtggacaagttggatggcttgaggactggtactaaaaggaaac

SEQ ID NO: 391965 - DNA, 75 bp, Homo sapiens
aagatgaatatgaccctatggaagcagaagaagctgaggatgaagaagatgtggagcccacagtgaccatctccc

SEQ ID NO: 391966 - DNA, 74 bp, Homo sapiens
cgccgagctggacccggaccggttttggtggtatcccgccactcccaggagcttccagctatcctggatgatac

SEQ ID NO: 391967 - DNA, 115 bp, Homo sapiens
tcaagctgcccaagctgcggaccctggatgtgttttctggctgcggggggttgtcggagggattccaccaagcaggacgactgggtttggattcagaagaggattattatacacc

SEQ ID NO: 391968 - DNA, 100 bp, Homo sapiens
gtcggctgagagcccacaggcccccacagatatggctcgtggacagcagaaaattcagtctcagcagaaaaatgccaaaaagcaagctggacaaaagaag

SEQ ID NO: 391969 - DNA, 75 bp, Homo sapiens
ctgcagtcagagctgctaaagctgtaaattatgttggagcaggccctcgggaccaaggatcacgtcatgactccg

SEQ ID NO: 391970 - DNA, 98 bp, Homo sapiens
tttaatgggacctgtgaagcaactgaagaaaatgtttgaagcaacaagattgcttgcaacaattgttatgcttatgagcacaatgcctggactcccca

SEQ ID NO: 391971 - DNA, 82 bp, Homo sapiens
atcgagcgcccctccgagctggggttggacgctgccagtttgcacagcagcagtccagaatgacagggtccagaaactggcg

SEQ ID NO: 391972 - DNA, 90 bp, Homo sapiens
ggaatgtgattcttcatcttccaagacaagttggatggcttgaggactggtactaaaaggaaacgtgactgggaggccattgccagcaga

SEQ ID NO: 391973 - DNA, 100 bp, Homo sapiens
ggcagcaagaagatcgatgctgagcggcaggctgcagctgcagcctgccagctgttcaagggcttgtcaatgaggcagatcagattcaggttcgacgggc

SEQ ID NO: 391974 - DNA, 100 bp, Homo sapiens
tcaaaaatagtgatagctttgataaagaaagcatgggattatggcaaccacagaatctcagtagtacaagttccattcagttttttctgaaagaaagccc

SEQ ID NO: 391975 - DNA, 74 bp, Homo sapiens
cagagcaaagactccagtaacactcaagcaaagaagagttgagcacaatcagctgagaagagccctaacccgag

SEQ ID NO: 391976 - DNA, 119 bp, Homo sapiens
cccggagagcgcgctctgcctgccgcctgcctgcctgccactgaggtacaccaaaccgctcacctttgctgactgcattagtgatgagttgccgctaggatgggaagaggcatatgacc

SEQ ID NO: 391977 - DNA, 100 bp, Homo sapiens
cacctggccaggcttggaagaaaaagactgtagatccaaaatgatacgggtgctgacacctttacggcaaaagttaatattgaagtacagttggcttcag

SEQ ID NO: 391978 - DNA, 128 bp, Homo sapiens
agacgatctgcacttcgcattttggcattgacatttaattttagggtcctttatatagaagggagagtagcacatccgcgtgggctgggagcagctgctcaccaccattgcccgcaccatcaacgagg

SEQ ID NO: 391979 - DNA, 100 bp, Homo sapiens
ctggagctgctgttgcagcacttgttccccaaacaagtgctcctacattctgtatagacggcgtttcacgctgttaggcaggatggtctcaatctcctga

SEQ ID NO: 391980 - DNA, 50 bp, Homo sapiens
gtctctggagacatcttcagcaggtgtggacgatggtgaggacattcccc

SEQ ID NO: 391981 - DNA, 87 bp, Homo sapiens
tgcaaaacgtgactccccacaataagtaccagttcttagaggatgcagtgaggaaccagcgcaagctcctggcctcactggtgaagc

SEQ ID NO: 391982 - DNA, 51 bp, Homo sapiens
ctcctgaggagctgggactacaggaagattcttacctctgaagacaatgtt

SEQ ID NO: 391983 - DNA, 100 bp, Homo sapiens
atcctctgacatcactccagcagaagaaagggaaggaacacgctgcattactgcgtgggtgattctgggggtccacttgtctgtaatggtgtgcttcaag

SEQ ID NO: 391984 - DNA, 76 bp, Homo sapiens
ggagatgtccctggaagaacacagccagtgtgaatgcaggctcgagaactcttcctaaaagcagtagaagaagaac

SEQ ID NO: 391985 - DNA, 90 bp, Homo sapiens
gattgtagatgttattgatcagaacagggtttaaggagttcatgagtaaacatgttcacttaatgtgttaccggatctgcgtgcgagcgc

SEQ ID NO: 391986 - DNA, 75 bp, Homo sapiens
ctcaggcttccatgcagcctgccttaccgacagagtgggaagctttggagctgacggatcaccagtgggcactag

SEQ ID NO: 391987 - DNA, 82 bp, Homo sapiens
ctttggtgggatgtgtatgaccttcacctcattaacaatcagtcgcatcgaatacattcattcaaagaacttcatccaccgg

SEQ ID NO: 391988 - DNA, 100 bp, Homo sapiens
gacactttgttattggagaaacatgcagattatatcgcatcctatggctcaaagaaagatgattatgagagaagatgactgaggaggaggtggagaccgt

SEQ ID NO: 391989 - DNA, 100 bp, Homo sapiens
cgcggcggggcgatgtgtgattaccatggcgaggagtctctgtccgggggcctggctaaggaaaccctattacctccagaagcctggaatggtcccccct

SEQ ID NO: 391990 - DNA, 100 bp, Homo sapiens
aggaactctatttagatgctaatcagattgaagagcttccaaaggccgaatacatcaagcaatggtaacatctttaaatgaagataatgaaagtgtaact

SEQ ID NO: 391991 - DNA, 100 bp, Homo sapiens
gatgaagaagcagaggaagaacaagaagagaaccttgaagcaagtgatgaggtggaggaccatcctgctacagtattgctttctcttgattacatgttta

SEQ ID NO: 391992 - DNA, 75 bp, Homo sapiens
ggaagtcggagtttgagccccggaggcagagcggctgccatgggaaatgtttcaacgtgcgcaagcgttgcggcg

SEQ ID NO: 391993 - DNA, 100 bp, Homo sapiens
caggacgagaggatgcggagcccgcagaacctccacagtcaagaggacggaagtgcacggctgtctataacgtgctgccgggtctcaggatggaggagtg

SEQ ID NO: 391994 - DNA, 75 bp, Homo sapiens
cttcatgtcactcgccacactcacaataagtgggcggaaaaaccagcctttgggactcccctagaagaacacctg

SEQ ID NO: 391995 - DNA, 88 bp, Homo sapiens
catttcatccaccacattacttagaactttacagactagcatggcaaagcttctctccgatcttagtgtggacagtgctcgctgcaag

SEQ ID NO: 391996 - DNA, 82 bp, Homo sapiens
ggaaatcgtgcacatccaggctggtcagtgtggcaaccagatcggtgccaagatttcaacactacacttgcacaatgtcttt

SEQ ID NO: 391997 - DNA, 97 bp, Homo sapiens
attcgatagaccactgcctgtgtctcgtcttgtatctctaattggaagcattctttgtgacatacgagcagttgaagaaattggatttgtgacaagc

SEQ ID NO: 391998 - DNA, 90 bp, Homo sapiens
gcggccgggagcccgccgcgctggtagcggaccgcagctgaatgcacagctagaaggttggctttcacaagtacagtctacaaaaagacc

SEQ ID NO: 391999 - DNA, 98 bp, Homo sapiens
acaggatcaaggtttgaatcacacgtgtaactactacctgcagccagaggaagacgtgaccattggagtctggtttaaatgtgatactggtgtagatc

SEQ ID NO: 392000 - DNA, 75 bp, Homo sapiens
gtgtcggagtctgacagcagtggggagaccaagacatatctgaagagatggattaagaatgctttggattaagga

SEQ ID NO: 392001 - DNA, 100 bp, Homo sapiens
cgcccgccgacccgcgccctgctccctctcagcacctgggcggacgtaattcgccaaaatgacgaacacaaagggaaagaggagaggcacccgatatatg

SEQ ID NO: 392002 - DNA, 80 bp, Homo sapiens
gccagcatcaacggcttctgcgagcagctcaacgaggactttgagggagtgaaattcacatgtctgaagaagctatacag

SEQ ID NO: 392003 - DNA, 83 bp, Homo sapiens
ggaaaccggtagcgcttgcagcatggaccatggccaacctggagcgcaccttcatcgccatcaagccggacggcgtgcagcgc

SEQ ID NO: 392004 - DNA, 96 bp, Homo sapiens
gcctatcctccctccctggcacccctgggaaaataggtctgcagccagaaaactgaaggtcagagaggctgcaagctttcttcctggtggcagatg

SEQ ID NO: 392005 - DNA, 100 bp, Homo sapiens
tcaggtctggaatactcctaaccaagaagttgcccaggtctgtctgctatcagctatgccgctgcccgttgcgctgcagacccgcttggccaagagaggc

SEQ ID NO: 392006 - DNA, 100 bp, Homo sapiens
aatggcaggacctgtcggagaaggtggtctaccggcgcttcaccgagatctacgagttccatggatttggacatttggtgccatcttcagaagatccagg

SEQ ID NO: 392007 - DNA, 101 bp, Homo sapiens
tcatcggtcaccggtcgctctcaggaacagcaggatgcagatgtctccagccctcacctgcctagtcctgggcctggcccttgtctttggtgaagggtctg

SEQ ID NO: 392008 - DNA, 82 bp, Homo sapiens
cctttcttcaatgaccggccgtggaggagggcaactgcggaaagtgccagtgaatgcctgctggaggtgaagccggtgctgc

SEQ ID NO: 392009 - DNA, 97 bp, Homo sapiens
gccaagtgggaatgcctactccagtcttgccaacaggactccagggttcgctgctgatgaagaagcatttgaagataattctgaggagtacataagg

SEQ ID NO: 392010 - DNA, 100 bp, Homo sapiens
tcaacttcactgtctttgaaattggaagttctgcccactgtgaaacagattatgttgaggtggagctgatcagaataatgttcagcatcaaccccctgga

SEQ ID NO: 392011 - DNA, 75 bp, Homo sapiens
gggagagtgtgcagccgagtcactactgcctgcctgcctgcctgctacggaaccctaaggactctgcaatatgaa

SEQ ID NO: 392012 - DNA, 99 bp, Homo sapiens
tcaaccccagcagctctgggcgctcagcgaggaccgttagcagcaacagcttctgctcagtctgcagatctccaggggagcccaccagcctagtcaaca

SEQ ID NO: 392013 - DNA, 73 bp, Homo sapiens
aggattccaagtaactcttatttgccattcaaactcctccccacgacactctgaagcagcgacggcacagcgg

SEQ ID NO: 392014 - DNA, 51 bp, Homo sapiens
gtgctcaccacccaccaccactgtgtccacaggatgaaatgtccgagtcag

SEQ ID NO: 392015 - DNA, 100 bp, Homo sapiens
aggattacaatttgaaactggaacttcttcatcctataataccagaacagagcacgtttaaagtactttcaacaaaggactgaaaactggatatttggtc

SEQ ID NO: 392016 - DNA, 100 bp, Homo sapiens
gatccaacacctttccccagctctgcgcgtaccgcgctctttggaaacgaattgaggactggaatgaaattgaccccattaaaaagaaagaccttcatca

SEQ ID NO: 392017 - DNA, 50 bp, Homo sapiens
gcccatgcgagtacctgaggaagattgacttgatgcacaacatcacaaag

SEQ ID NO: 392018 - DNA, 83 bp, Homo sapiens
tcttcactgtctgggtatttggaggaggaacaacccccatgttgacttggcttcagatcagcttgcaagtagaagtctcaggc

SEQ ID NO: 392019 - DNA, 76 bp, Homo sapiens
cgcttctttaagggctacgggaagatcctggaggtggatctgaagaacgggttgtttttcaccattcagaacattg

SEQ ID NO: 392020 - DNA, 75 bp, Homo sapiens
agatcttggcaaagcttctccctcagtatttagaccaggttttagctaaagaagatactgaggcagctattcaat

SEQ ID NO: 392021 - DNA, 100 bp, Homo sapiens
gttttgaatacgtagtctgtcctgttctttcaaattttgagtatccgaggagcccaggaggaggaacccacagacccccagctgatgcggctggacaaca

SEQ ID NO: 392022 - DNA, 90 bp, Homo sapiens
atattcaccaagcgcttcgctacaagttacagctcttttgaggaagcttaagcagcaatccagggaaagtgttgaagaaaaacgacctcg

SEQ ID NO: 392023 - DNA, 82 bp, Homo sapiens
cccagaccctggagcctcagttggaagcagccgatccagcctgcggagcctgtggggcaggatgccaaagaagagtgaatgg

SEQ ID NO: 392024 - DNA, 75 bp, Homo sapiens
ctttgacttcttgcatgcgagggaccattgcgtttcccaaaccactccttatgatccagtgaatattcaagagag

SEQ ID NO: 392025 - DNA, 98 bp, Homo sapiens
tttctagaagacatggaagcatatgctgaggtttctaccatgaatgaaatgaagagttattctcaagctgtcacaggagtgagttttttaaaatcctt

SEQ ID NO: 392026 - DNA, 99 bp, Homo sapiens
agtaccacacctaaagggaattcaagcaatggaaatagtggctctaacaggctctgtggatagcaactggatcgtgggtgccacgctggagaagaagct

SEQ ID NO: 392027 - DNA, 74 bp, Homo sapiens
ttgccctgtctcctcgcagatgaggactccctggaggaaaagcggaagcggcagcggtctgaacgcctggaacg

SEQ ID NO: 392028 - DNA, 99 bp, Homo sapiens
gcggtatttctctgcctcctgtggacaaaaaaaggattcaggagcagttccagaaaaatcccgacagttacaatggtgctgtccgagagaactacacct

SEQ ID NO: 392029 - DNA, 125 bp, Homo sapiens
tttatattcatctcaaaaacaaaattctgaactcaggacttggcaacagcccatcaataagggaggggtcaggactccagtacctccaagaggaagactctctgtggcttctactcccatcagcc

SEQ ID NO: 392030 - DNA, 100 bp, Homo sapiens
ggtgcgccaacgtgagaggaaacccgtgcgcggctgcgctttcctgtccccaagccgttctagacgcggatgatttcaagctttttagatcagcaagcca

SEQ ID NO: 392031 - DNA, 100 bp, Homo sapiens
catttcttcggcattctgcaacaggaaggatcgagatcgagaccgggatcgtgaagatcggtctaaagatcgagaccgagaacgtgatagaggagataga

SEQ ID NO: 392032 - DNA, 99 bp, Homo sapiens
ggaacaaaaacccccatcctgggaaaaatggggaagctggagacttcttggcatcatcacaaaaaaggatgttctgagacatatggcccagatggcaaa

SEQ ID NO: 392033 - DNA, 98 bp, Homo sapiens
gaacttagacttccggaaggactttggcgagggtgtcatggagaaactccagctgggcccagagattctgcagcgggaaaatccaaggcttatttatg

SEQ ID NO: 392034 - DNA, 100 bp, Homo sapiens
gcgcgagctgcccgataatggcggcctgcagagcccatgagagggagaagcggcagcgtctaccctgaggaaagaccacagcaagattctttcattcgtc

SEQ ID NO: 392035 - DNA, 50 bp, Homo sapiens
cctggtgcagagctcagatttcaagtgtgaaataaaagtagccatgtcga

SEQ ID NO: 392036 - DNA, 51 bp, Homo sapiens
atctcctgaagcaacatctggttctacagatgccctgctgtgccatgatga

SEQ ID NO: 392037 - DNA, 83 bp, Homo sapiens
ctgctaacatggataagcatgccctgaaaaagtatcgtcgagaagcctatcatcgttcccagaggtccacttgggccagtggt

SEQ ID NO: 392038 - DNA, 87 bp, Homo sapiens
cggaggagaacatcctggaccccaggctgctgatcgccttccagaacagttccacagaggacgtcccccacaggcccaaaaaacatg

SEQ ID NO: 392039 - DNA, 100 bp, Homo sapiens
cgtttacaaggccagagataagaacaccaaccaaattgtcgccattaagaaaaataccgtagcagtaggcaggacagttccaattcaacaaaaacctctt

SEQ ID NO: 392040 - DNA, 50 bp, Homo sapiens
gggagagtgtggaagaagcaaccaaggagtagctatccagatcacaagga

SEQ ID NO: 392041 - DNA, 83 bp, Homo sapiens
gcccgtccgtccgccgccaccacccactccggacacagttctgggaggtgatcagtgatgaacatggcatcgaccccaccggc

SEQ ID NO: 392042 - DNA, 101 bp, Homo sapiens
ggagccgctgccgctatggatgatcgagaggatctggtgtaccaggcgaagctggccgagcaggctgagcgatacgacgtagccatcctaatggatatggg

SEQ ID NO: 392043 - DNA, 60 bp, Homo sapiens
aagagctgcatcatgaattcaggagcatcggctgagggaggaagacggcatggttacatg

SEQ ID NO: 392044 - DNA, 98 bp, Homo sapiens
cacagaggctgaagttaaagagacagcaatgattgcgtgccgtgagtggaaatgtgatcgtgaacaccatcgcaggggtcccagctgccaccttccag

SEQ ID NO: 392045 - DNA, 83 bp, Homo sapiens
ggaacttcatcatcatctacttcacaggaattgccatttgcctccccatggccacccatggaccagtcggcattcacttcctc

SEQ ID NO: 392046 - DNA, 97 bp, Homo sapiens
gtaaccagttctgtttgcctgttttggatagcaatgatcccaatttccagatgccttgttcaacaggtgcttctggcccagtgtgtggtctactttg

SEQ ID NO: 392047 - DNA, 90 bp, Homo sapiens
gaggaattcgagaccatagttttgaaggcccttgtgaaggaccaggactgacaagggagccactgcctctgccataatcagaaaattgca

SEQ ID NO: 392048 - DNA, 100 bp, Homo sapiens
tgatcttgtgcttcatgggaccggcagtgatgagaagctgaagcagtgcctggtggccgaccttgtccacacagtccatagtattgttacaatcacattt

SEQ ID NO: 392049 - DNA, 90 bp, Homo sapiens
ccctctgcgacctggggccctgggtgaagtgctccgtcgcccttgcctccaggctggcgcccatgcggctctacacgctctccaagcgcc

SEQ ID NO: 392050 - DNA, 100 bp, Homo sapiens
ggcaacctcattatccgctatgatgtggaccgggccatctccgggggctccattcagcaggtgaacagctcggagaagctgcagctgcaggagtgcttgt

SEQ ID NO: 392051 - DNA, 51 bp, Homo sapiens
gagccaactggtagagcaatttccaggtatgccattttgaagactgagacg

SEQ ID NO: 392052 - DNA, 75 bp, Homo sapiens
gctgtccaccgtggccgcggtggtgctagacttaattcagtgcacaaatgagatgaatgtgaacatcccacagtt

SEQ ID NO: 392053 - DNA, 75 bp, Homo sapiens
ccggcagccagcacggccaaaccccctcctctgcctcgctccaacacaggcattgagatgttccacaagagcctg

SEQ ID NO: 392054 - DNA, 87 bp, Homo sapiens
acacatcaccttgatttttaatcccacgatcactaaggaggaagagcgagagaagaagttttctagaaggctaaatcacagtcctcc

SEQ ID NO: 392055 - DNA, 83 bp, Homo sapiens
gtccagatgctgaaaagagaaggtcaaacagctgaagacaatgcagatcttcgtgaagactctgactggtaagaccatcaccc

SEQ ID NO: 392056 - DNA, 100 bp, Homo sapiens
cactgatcgtttctgcagctgcagattctgctgttcgactctggtctaaaaagggtccagaaggtctcgatctagaagacggtcacgaagtaggagtcgc

SEQ ID NO: 392057 - DNA, 82 bp, Homo sapiens
cctactctggggcttcctgctccagctggtgaatgaaaactttgccattgatttgatagcagagcagcccgtgagcgaggtg

SEQ ID NO: 392058 - DNA, 100 bp, Homo sapiens
gagaactggttctacacgcgagctgcgggtacagcaggccgcgttgcgggccgcccggctccggcaccaggagctgttccggctgcgcgggatcaaggcc

SEQ ID NO: 392059 - DNA, 100 bp, Homo sapiens
tgcaaatgaagctctcgaggctgctaagagactaagaaaagatggtaaagcacgcaataaagacaagaggaatgtaaagaagctcgcagtgacaaaaccg

SEQ ID NO: 392060 - DNA, 82 bp, Homo sapiens
attttctttaacatttcctgaagaactgtctcctggaattacattgaatatacagggttttggccaaattgggcgagggcac

SEQ ID NO: 392061 - DNA, 100 bp, Homo sapiens
gtatggattcatctcactgactgaaacctgagttttgattcaccaggcagagaaggacaagatcctgaagctgagtgcagagatacttcgattggagaag

SEQ ID NO: 392062 - DNA, 82 bp, Homo sapiens
cggcgagcgcgagcggcgcgagaaatattctaccttgtaaatactgttatttgtatatactgtaaatgatgacatcggtggg

SEQ ID NO: 392063 - DNA, 83 bp, Homo sapiens
ctcgacaacatgtcacccgcgctccaagacctgtcgcaacccggtgaatatgagaagggcgtagaccatctgacaaatgcaat

SEQ ID NO: 392064 - DNA, 100 bp, Homo sapiens
ggaggcgacggcagcggtcccagcggcagcagcagcggcgggaggagcctccgggatgcctgaggaaacccagacccaagaccaaccgatggaggaggag

SEQ ID NO: 392065 - DNA, 111 bp, Homo sapiens
gttttgagttgtctccagtttttggctgttatgagtaaagctgctgagaacgttcatgaacagcagcccactcacccagtgtacaacattggaccagacaaggtgatccag

SEQ ID NO: 392066 - DNA, 50 bp, Homo sapiens
ttctcttctgtgctgtcaaggcaattctgtggtgttcttggtcacacatt

SEQ ID NO: 392067 - DNA, 100 bp, Homo sapiens
ggacagtcatcaccatgggccgggatcacattctgattgatgaaacaagtgaagatgctaactgtcttgctttgagtggacatgataaaacagaagcaaa

SEQ ID NO: 392068 - DNA, 50 bp, Homo sapiens
tcgtctaatagtgttgcgtataaggtgcagcggaactgctgcctgacgct

SEQ ID NO: 392069 - DNA, 98 bp, Homo sapiens
ttgccgctatggctggcagtcaggacatattcgatgccatcgtgatggcggatgagagtgacccaggaggctctcacgtggagtccccagaacagcat

SEQ ID NO: 392070 - DNA, 75 bp, Homo sapiens
agaggagccacaatggagacgccgccgctgcctcccgcggtgttttgaatgctgtatcaaatgcctggggggcat

SEQ ID NO: 392071 - DNA, 100 bp, Homo sapiens
ccttattaatacggggatctgtgagtcttctggcaaacagtgtttgcctctggttcagctcatacaacagcttcttagataagccaatggacacgtcagt

SEQ ID NO: 392072 - DNA, 100 bp, Homo sapiens
ctgcggccggcagccggcagctttgcagcgggctatggaaagggcaaatggaatggagctggatggtagaagaattcgggtggattattctataaccaag

SEQ ID NO: 392073 - DNA, 50 bp, Homo sapiens
cagaagccaattcttctcatttgtcagcaaagtgtgggatgctgtctcag

SEQ ID NO: 392074 - DNA, 96 bp, Homo sapiens
gcgaccgtcgccggcagcgccgcgaaggcggtgctcgggccagcccttctctgccgtccctgggaggtacatgtcccagagcaagcacacggaggc

SEQ ID NO: 392075 - DNA, 74 bp, Homo sapiens
tgctgcgtcctgctgaccttcggtgtggtggctggaggtggccgaattgacaaacccatcttgaaggctggccg

SEQ ID NO: 392076 - DNA, 100 bp, Homo sapiens
tatcctatcatgtacagcacggaccctgaaaatgggcacatcttcaactgcattcagcgagcccaccagaacacggccatggagttggggagagaatgtc

SEQ ID NO: 392077 - DNA, 74 bp, Homo sapiens
agtcgcagacatggacaccaaacatttcctgccgctcgcccaggatccggttgtggccgtggctgaggatggcc

SEQ ID NO: 392078 - DNA, 75 bp, Homo sapiens
tccagaactttccaagcgggggaaacttggcggcggtgttatagttttgccgctggactcttccctcccttcccc

SEQ ID NO: 392079 - DNA, 75 bp, Homo sapiens
caccaacagcggcgcgggcaagaagcgctttgaagtgaaaaaggagaactacgatgacccgcacaaaacccctgc

SEQ ID NO: 392080 - DNA, 80 bp, Homo sapiens
cggccggcggcggcggcggcggcggcggcggcgcagcagttggaattgatcacaccttttcagttgtacttcaatcctga

SEQ ID NO: 392081 - DNA, 90 bp, Homo sapiens
tttccctcggcgtgctactgtgcgctcgatccagcaccatggggaagcgggacaatcgggtggtgaatctggattgggaaagtcgacatt

SEQ ID NO: 392082 - DNA, 98 bp, Homo sapiens
ccagcccgtgggcgagccgcccgcccgccgagcagccatgagtgcccaccagaagtatgtccgacaagcctggcagaaggcagacatcaatacaaaat

SEQ ID NO: 392083 - DNA, 55 bp, Homo sapiens
gagctggagaaggaggtccgcgcgggccagaagactggactttatgagtataaag

SEQ ID NO: 392084 - DNA, 74 bp, Homo sapiens
gcctcgtcgacatgagtgatgtggaggaaaacaacttcgagggcagagcatgtaatgaatttactacacatgtg

SEQ ID NO: 392085 - DNA, 74 bp, Homo sapiens
cacacatgggtcctggagatggaatacagatcctgaaagatctgcccatggtgaccaagaatatggcccaggtg

SEQ ID NO: 392086 - DNA, 76 bp, Homo sapiens
caggacaacccagatgtgcaacaaagtgcgatgatacactggcagtgatgtctgtggacctgggcagtgagtccat

SEQ ID NO: 392087 - DNA, 100 bp, Homo sapiens
aaaaacatcaagtctgtgaccgaactcaacggcgacataatcaccaatgacatgaagaatgcaaccctctccctgaattctaatgacagtgagccaaaat

SEQ ID NO: 392088 - DNA, 80 bp, Homo sapiens
gccgggggcgcgggcggcggcgccggcaggaaggttaacacagaaatctgcctcctgggccatgccgcttctaaggcctg

SEQ ID NO: 392089 - DNA, 100 bp, Homo sapiens
cgaggacgggatccttcattatgcaacaacccggcaagacaccgagcgtgtgccactggacctcagtcctcgcctggaggagacgctggacttcggcgag

SEQ ID NO: 392090 - DNA, 80 bp, Homo sapiens
ctcggccgaacccctccgcagcagagtgaagacatttccacctggacacctgaccatgtgcctgccctgagcagcgaggc

SEQ ID NO: 392091 - DNA, 51 bp, Homo sapiens
ggaggacagctctgatgaggaggaagctcttcgtgggcggtcttgactgga

SEQ ID NO: 392092 - DNA, 74 bp, Homo sapiens
aagcgtccgcttccagctttgcgcaggaagatttcgatgtcgatcattttgtgtctgactgtaggaagcgggtc

SEQ ID NO: 392093 - DNA, 100 bp, Homo sapiens
gacaagtggcctgattttaatacagtggttgtctgccctcaggagcagataacaacgaacttgatgcaagtgataggtttgccaaggtcagacctctcat

SEQ ID NO: 392094 - DNA, 100 bp, Homo sapiens
ctgctcttgaggttcacagatgatacctttgatccagaacttgcagcaacaataggtgattgtagagaaggctccaaaagccagggtgcctgatctggac

SEQ ID NO: 392095 - DNA, 99 bp, Homo sapiens
ggtgcccgggacgaagccatggccctggaggcggcgggagggccgccggaggaaacgctgtcactgtggaaacggtgctggagaatctggtaaaagcac

SEQ ID NO: 392096 - DNA, 98 bp, Homo sapiens
gcgtgcagaaaagcgaccggcggccacaggtgtggatgaggtcaccattgtcaacattttgaccaaccgcagcaatgcacagagacaggatattgcct

SEQ ID NO: 392097 - DNA, 98 bp, Homo sapiens
caggggccatggcgaagcacgagcagatcctggtcctcgatccgcccacagacctcaaattcaaaggtgcattggatcgttgtgtgatggggataaca

SEQ ID NO: 392098 - DNA, 100 bp, Homo sapiens
gaaacagatgctaatttgggaaaaagctccaggattctgacagggatgttgcgaaggaaagaccacagcaagattctttcattcgtctcctcctagcctg

SEQ ID NO: 392099 - DNA, 100 bp, Homo sapiens
agggagaggatattacctccaaaaaagacaggggagtattaaagggtcgttttagcatcaacctttatggaaccggcttgtctttaactgaatctgccag

SEQ ID NO: 392100 - DNA, 100 bp, Homo sapiens
actacacaaccgtctccagccttggtctgagtggactgtcctgcagtggtggtgctagagaatgaattgatgtatggggttccttttgaatttcctccgg

SEQ ID NO: 392101 - DNA, 50 bp, Homo sapiens
gctctcgagagtctcacggagacgcagtagagacggggtttcaccatgtt

SEQ ID NO: 392102 - DNA, 75 bp, Homo sapiens
ccttccgctagtgatcctttgcaccctgcttggagacggacttgcttccgcgagtgatagacagccaagcagaga

SEQ ID NO: 392103 - DNA, 100 bp, Homo sapiens
cgcgcgtggacgcggctttgcctcccggagaagcattaaagggcagtatttaaagtcagttggcaagcagtggaataagatttttgtaaagaaaccttgt

SEQ ID NO: 392104 - DNA, 101 bp, Homo sapiens
ggaaaacagtttgggggagtaaaaagtattagggaaaagagtgggcattttgcctggaaaaaagcaagttgaagtagatgcacaacagtgtatgcttgaaa

SEQ ID NO: 392105 - DNA, 48 bp, Homo sapiens
acaacctacttaccctagtcaggtaacagttaacctcttccacatgca

SEQ ID NO: 392106 - DNA, 97 bp, Homo sapiens
ggtgcgcagcagaaagcatttaaccagcatggctacttcatattttggaaagcagtttttaagacaagctgatcagctgaccgaagaacagattgct

SEQ ID NO: 392107 - DNA, 99 bp, Homo sapiens
gcaaggatggtggaggcgagaacactgaggaggtggccaagactaagcagcagattgaggagcagcgggtgcaggtgcaggtggtggagcgggcccagc

SEQ ID NO: 392108 - DNA, 100 bp, Homo sapiens
cgcacagtagaaccgatctcagccttgctgatcatctcgtacagcagcagaaaatgaccatgttacagatgagactgatcgtggggttgaccaacaagat

SEQ ID NO: 392109 - DNA, 50 bp, Homo sapiens
aagaccaaccatggccaagttaatgtcaagagaatccatcccattaaatg

SEQ ID NO: 392110 - DNA, 90 bp, Homo sapiens
gagaaagaagacagccatcatttgaaaggcttgcagatgggtcaagggttgtggagagtggtcagaaaccagcagctgcaacaagaaggc

SEQ ID NO: 392111 - DNA, 75 bp, Homo sapiens
gcaggggtgcagtgtgtctggtcttatgagattcaggtttactcacgtcatccagcagagaatggaaagtcaaat

SEQ ID NO: 392112 - DNA, 100 bp, Homo sapiens
ttcgaatccataacaagttccgatcagaggtgaaaccaacagccagtgatatgctatacatgggtgcaaaaatgcagagtaataaaacttttaacttgga

SEQ ID NO: 392113 - DNA, 97 bp, Homo sapiens
caaaacgcccgtgcggaccacggcctgtcagcacgtataagcatggattcctggttcattcttgttctgctcggcagtggtctgatatgtgtcagtg

SEQ ID NO: 392114 - DNA, 100 bp, Homo sapiens
atttccttgggtcttccggtaggagctgtaatcaattgtgctgacaacacaggtattctttaggtgatgctagaaggcctcttcatgaaacagcagtttt

SEQ ID NO: 392115 - DNA, 76 bp, Homo sapiens
gagcggccctgatgcaggccatcaagtgtgtggtggtgggagacgggaagagtctaacctgtctctgcaagctctt

SEQ ID NO: 392116 - DNA, 75 bp, Homo sapiens
tcagaggcaccccagacacacgagggcggcactgctcacaggacggctacccatccgcaatggcttctacaccac

SEQ ID NO: 392117 - DNA, 95 bp, Homo sapiens
gggtgatagtggagatgatccatttcaaggacttgctgctgcacgatgagtctgccaaaaaagaggtggttgctgaagtggtaaaagccccgcag

SEQ ID NO: 392118 - DNA, 100 bp, Homo sapiens
attgtcaatatcagccaatgttatttagcctatgatgaaacactcaatgtattgaagttctccgccattgcacaaaaagcacagatcttgagggatctgg

SEQ ID NO: 392119 - DNA, 97 bp, Homo sapiens
gtttgtatggggcaagaacatccgagggtgcctgggaatcggtcgcctggaggaccagtatttcccatggaggatacccagaaataatcgcttaatg

SEQ ID NO: 392120 - DNA, 100 bp, Homo sapiens
gagcagggagaggagctgtggataacgggaggtgaatttccatgtcaacatagtcctgcgccacgatcatgtctctcgaagactttgagcagcgcttgaa

SEQ ID NO: 392121 - DNA, 100 bp, Homo sapiens
gtgaaagtaatgtcacagcgacatatgatagatggacgatggtgtgactgcaaacttcctaattctaagggcatgagccagaaggagagctctaagtctg

SEQ ID NO: 392122 - DNA, 87 bp, Homo sapiens
gcttagcgcactggaggagcggcgggcttcagacagactgcagcgaggcaagaaacaacagattgaaaatggtagtggagcagaaga

SEQ ID NO: 392123 - DNA, 100 bp, Homo sapiens
ggaaaattacccggtatcgttagaggaattttggagagtaaaaggctgaaccttgttaaagagaaaaccattaatcagaccatcggcaacgtcgtctacc

SEQ ID NO: 392124 - DNA, 75 bp, Homo sapiens
gcagatgctgctgaattctggagaaagttttttggagacaacttttgttaggagtgataaacccaaactgttcag

SEQ ID NO: 392125 - DNA, 75 bp, Homo sapiens
acccctttgaattaattatggctggctgggtataagtaagcaagaagagggcctgggagaagagtctgacgagca

SEQ ID NO: 392126 - DNA, 50 bp, Homo sapiens
ctcccaggtagctgggattacagatggagtctcactctgttgcccaggct

SEQ ID NO: 392127 - DNA, 75 bp, Homo sapiens
ccgccgcagcttgggaggtgctgccaccacagatggaaatcatattatgtagaatacttgggtgacatctgcctg

SEQ ID NO: 392128 - DNA, 100 bp, Homo sapiens
ccccaccgaaggcggtgggaccagcggctgaggccaggatgccgtccaggcggcgcggcggctcctcactcatcccaggaggaaaaggcttctcttttac

SEQ ID NO: 392129 - DNA, 50 bp, Homo sapiens
ctgtgcgccctcaacctgctttacacccaaagagctcctgggaaggtgct

SEQ ID NO: 392130 - DNA, 89 bp, Homo sapiens
ggcagttctgcaagaggagctattctgatcttgggcactccacagaaggatgttattatcaagtcagatgcaccggacactttgttatt

SEQ ID NO: 392131 - DNA, 82 bp, Homo sapiens
gatgaaacagttcctggaaactgccattaacctccagctttttaagcagacactggccaaaagaagaccctagacaagaaag

SEQ ID NO: 392132 - DNA, 76 bp, Homo sapiens
ccgtatcaagccaagaacagcccaatctcctttctgggcaaacgttccaaggccttgctctattactgtgaagcac

SEQ ID NO: 392133 - DNA, 100 bp, Homo sapiens
gggacatggagcccgaggccggcgccggcgccggcgccgcggcctcttcggctgcggaccctgccattccggaggaggtctgctggagtttgctggaggt

SEQ ID NO: 392134 - DNA, 120 bp, Homo sapiens
aaggacgccctgaatctggcacagatgcaggagcagacgctgcagttggagcaacagtccaagctcaaacctggcaggagatcgcagatgctgcggatgcttctgagccccggtggtgtg

SEQ ID NO: 392135 - DNA, 50 bp, Homo sapiens
gggtgtcagtgtggaggagactgaggagctggccctcagcgcactcctga

SEQ ID NO: 392136 - DNA, 75 bp, Homo sapiens
gcggccgagttctccagcctgctgcgcaggataaaaggcaaactcttcacctgtttatgggaaaaacagatggag

SEQ ID NO: 392137 - DNA, 98 bp, Homo sapiens
cgcctccgccgccgcctgaggaggcgagctagccgggagttacaccgccaccgccagaagtgaattgtccattccagaagaggaggctggatggaaaa

SEQ ID NO: 392138 - DNA, 101 bp, Homo sapiens
tgttttttccttcccagaggagccttcatttataatacgcttacagatttcatacgagtgggaacatccagttgcaggaaaacaagcttaacacgcccact

SEQ ID NO: 392139 - DNA, 100 bp, Homo sapiens
ttggatcgaattgccaatgtctccatcctgaaggttcgcaattcagaccctaatgatccaaatagagaaatggttgttcaactactagatgactttaaaa

SEQ ID NO: 392140 - DNA, 75 bp, Homo sapiens
ctctccgctcgattttgtcaccgttatgtgggaagcgaatccaactttaagtttgccatgtacccaccgtcgatg

SEQ ID NO: 392141 - DNA, 100 bp, Homo sapiens
aagcgcccagcctgccgcctcgctgtccctgcggcttctggggtgctgggattacaagcgtgagctaccacacccagcgaggaagccaagtttaacgtgt

SEQ ID NO: 392142 - DNA, 75 bp, Homo sapiens
cagcatgaagtgcctggtcacgggcggcaacgtgaaggctccccgcagccaccgccacccattggaatggccaac

SEQ ID NO: 392143 - DNA, 100 bp, Homo sapiens
gttcgtcctagttactggctggttcttcacaatctcaccccacagatctatgggagtcgtcagattatactggagaaagaggaaacagaagagctaaaac

SEQ ID NO: 392144 - DNA, 100 bp, Homo sapiens
agggagaagtatcggaagaaagcagttccaagccatgaagctcatgactgctctggtgaatgttgccttaaacctcagtattcatcaggataatacccag

SEQ ID NO: 392145 - DNA, 100 bp, Homo sapiens
caagaacactttacctgagatataggccaaaagtgaagatggcttttccctgccgcaggtccctgactgccaagactctggcctgcctcctggtgggcgt

SEQ ID NO: 392146 - DNA, 139 bp, Homo sapiens
ctgatatttgctggcgatgatttcgatgtaacagaagattatagaagactaaaaagtcttcttattgacggggaagcggagccaacatgccagtggcccggagctgggtttgtcgcaaaacttatgtgaccccgcggag

SEQ ID NO: 392147 - DNA, 88 bp, Homo sapiens
ctgctggccctggctgcgctgctggcctttgtgagcctcagcctgcagttctgagatctataaggacaggcagaaattctcagaacag

SEQ ID NO: 392148 - DNA, 83 bp, Homo sapiens
aggtgccagagttccaggcctgcccacagacggtggtgcctcaaaacacctacccagccgcttacaaacacgcagatggcaag

SEQ ID NO: 392149 - DNA, 75 bp, Homo sapiens
aaccgatggaggctccgctgcaaactggaatgtgtcacatttgaagacgagcactgaggatgaggaaccaactga

SEQ ID NO: 392150 - DNA, 75 bp, Homo sapiens
agaacgcgctcctccgcctgctgcccgggctgggatgaccggaaagaagggatgaccgcgtttgtggaaaagaga

SEQ ID NO: 392151 - DNA, 109 bp, Homo sapiens
ttctacatggtggtgaagaagtgcttcaagtgttgctgcaaggagaaaaacatggagtcttctgtctgctgtgtcatggagaaactccagctgggcccagagattctgc

SEQ ID NO: 392152 - DNA, 82 bp, Homo sapiens
gcaagtattcctaccctgctctgtaccagtttcttgcagaacataaattattaggaaacattaaaaatgtggccaagacagc

SEQ ID NO: 392153 - DNA, 75 bp, Homo sapiens
gatgaaaatgagctaaaggaattcttcatgaaaatcttcccaaacatctggcacaaatgaacagtcttcagcaat

SEQ ID NO: 392154 - DNA, 100 bp, Homo sapiens
agagggcagctgaagagaaacataaagaattctttgtttcagagtgaaacaaagagtcctcttcgtggaaaagaaaaaaatacgctccctttaaacggtg

SEQ ID NO: 392155 - DNA, 75 bp, Homo sapiens
gaattagtgactggatccaaggaccatgaactggaccctcgaaggcataagattctcaacatgttgactaagaac

SEQ ID NO: 392156 - DNA, 74 bp, Homo sapiens
gggctacggactatgggcgaatagctctgaccacccggcgaagctgtggtcgccaggacccccccagagccaag

SEQ ID NO: 392157 - DNA, 100 bp, Homo sapiens
gtcaacctggaaaatggcctggaacccgctgaaacccacagctgtcaaagctcgaaaaacagcagcagaggaaagaaaagaccagagctaagggaccttc

SEQ ID NO: 392158 - DNA, 98 bp, Homo sapiens
gtcggggccgccggtggagtctcggcggccggggtgctttacaaggccaagtacggtccaatgtggatgtcctacttagggcctcagatgcacgtgaa

SEQ ID NO: 392159 - DNA, 98 bp, Homo sapiens
actggcaaacgtatgtttctggaacattgcgatttggaattgacactggtacagtagctccagaaaaatgcttatttggggcaatgctaaatattgcg

SEQ ID NO: 392160 - DNA, 90 bp, Homo sapiens
cgctgctcgagctgctgctggattgaactcagagaagccgggatcaggatcctcatgaccagccaaagagaagaagaattaggaagcata

SEQ ID NO: 392161 - DNA, 90 bp, Homo sapiens
gttataacgctacacgaagaactaagaatattattagcacaagagcaccatactttgaggatcttcgcaaatactgtggacaatgcccgc

SEQ ID NO: 392162 - DNA, 90 bp, Homo sapiens
tcaggatggacccaagctctgccggacatggtggtgtcccacctttttgggaaggtcagtttgctgagaacgaaaccaatgaggtcaatt

SEQ ID NO: 392163 - DNA, 100 bp, Homo sapiens
caagcaaaatgaagactttgactagggtccaaccagatgcacaccggctgcaccatgtcagcagcctggcctggctggacgagcacacgctggtcacgac

SEQ ID NO: 392164 - DNA, 75 bp, Homo sapiens
aagatgatgatgacattgacctctttggatctgatgatgaggaggtcaaggtcagcatctcctcgacgatcaaga

SEQ ID NO: 392165 - DNA, 74 bp, Homo sapiens
tgcagagttctctctctctggggaaccttctgaccagcctcatgggctcctcagagcaggaggatggggaggag

SEQ ID NO: 392166 - DNA, 75 bp, Homo sapiens
gccacaggaggctgtgcgggccccgctccgcttcgaatgggtgacttcatggtcatgacgattttcttcaatgtg

SEQ ID NO: 392167 - DNA, 100 bp, Homo sapiens
ggaaggtgcgcgagctggtggacaaagcatgccccttggtgtggccactgcaaggctctggcccctgagtatgccaaagccgctgggaagctgaaggcag

SEQ ID NO: 392168 - DNA, 100 bp, Homo sapiens
cttccgtatctgcctaggcattttgctgtctcctcctaatacgggtatgttagagcccaccaaggaaccactgaaaccactttctgctgcagaaaaaata

SEQ ID NO: 392169 - DNA, 73 bp, Homo sapiens
tccgccgctcaccccgcggccgcaccttcccgccttctcagtgccggtggtggtgtgcacattgagccccggt

SEQ ID NO: 392170 - DNA, 83 bp, Homo sapiens
gcgagtgggagcaccaggatctcgggctcggaacgagactgcacgtctttcccagggaactccgatgaagtgttccaacaaaa

SEQ ID NO: 392171 - DNA, 75 bp, Homo sapiens
aacaatgagactggtgacatcatcacagtggcagctggacttgatcgagaaatggagtctcattctgtcacccag

SEQ ID NO: 392172 - DNA, 74 bp, Homo sapiens
ttcttctgagatctatggcctaatggcagcctggcatcctcgctacaacctcattgttgtgggccgatacccag

SEQ ID NO: 392173 - DNA, 90 bp, Homo sapiens
acgccccctatcctatccgcaaacagaagcccagaacctcatggccctcaccaatgtggacaccccattgaaaggtggacttaatacccc

SEQ ID NO: 392174 - DNA, 75 bp, Homo sapiens
ggactgcgccgcgtcttcctcaaggaatactcccccagttgcaagaggcgcaggaccgtggaagacttcaacaaa

SEQ ID NO: 392175 - DNA, 51 bp, Homo sapiens
gtcccacttgttcgcggcctataggctccgtgcctgcagggcgggcgggcc

SEQ ID NO: 392176 - DNA, 100 bp, Homo sapiens
acgatacacctgtggttcttgtgggaaacaagtcagacctcaaacagctaagacagttccaagatgagatgggattctccaacatggaagatgatggccc

SEQ ID NO: 392177 - DNA, 50 bp, Homo sapiens
gtggcgaatggggctcacgtcgaatggatttgcagccgctgcaagtgtgt

SEQ ID NO: 392178 - DNA, 83 bp, Homo sapiens
gtgaaattgttaggcgtggagagggagtgatgtcttccagactcggtgctgtacccgcctattaaaggtggaagaaggtccat

SEQ ID NO: 392179 - DNA, 90 bp, Homo sapiens
ccagccgactggagcaggcagcagcccaggtctcctctgagcctccggcctccataagacccaaaacagatgacacctcttcccagtccc

SEQ ID NO: 392180 - DNA, 51 bp, Homo sapiens
tgaggaccatcttgcctggagcaagttaatgaagatgctgtttgaatgttc

SEQ ID NO: 392181 - DNA, 83 bp, Homo sapiens
cttgctttctcctacagcatatccaaaagctttacaagaacccagcttagactagaaagtctagaagacacacacataatgaa

SEQ ID NO: 392182 - DNA, 75 bp, Homo sapiens
tgaccgggagaaacgagatgggggtgaagctggagatatttcgggttctcccccatgggcgtcgatcacatgagc

SEQ ID NO: 392183 - DNA, 82 bp, Homo sapiens
gttccacatcattgacttactgctttgtgaggctggctacagcaaacatcattcaagatgtccagcaaagggagcagcacag

SEQ ID NO: 392184 - DNA, 101 bp, Homo sapiens
ggaaaatcatcttatcagacgaaggcaaaatgtatggtccagggcatgtccttcatagcagcagtgttgatcttgaacttagatactgcagatgcctttat

SEQ ID NO: 392185 - DNA, 75 bp, Homo sapiens
gcctattgtgggaccttgtgatcatttttgaggcagctgtgccatcaaatagccacattgtttcggaacctggaa

SEQ ID NO: 392186 - DNA, 100 bp, Homo sapiens
cggcgcagctgttgcggggccatggcggggaccgcgctcaagaggctgatggccgagtacaaacagacattttaaatcctaaggatgtgatcacaactcg

SEQ ID NO: 392187 - DNA, 90 bp, Homo sapiens
gccttggaaagtcaggaccgcgacggcagcagagcactgctggaacccaatgtgaatattggactggcggagccttgggaagtgaacctt

SEQ ID NO: 392188 - DNA, 90 bp, Homo sapiens
gactgggcacacaccggcagccacagctccgaagctggcaagaaggacaggaagatgtcacccaagcgcatagctaaaagaaggtccccc

SEQ ID NO: 392189 - DNA, 74 bp, Homo sapiens
ccaagagtgagcgagcggacccgcgatggaccctatcagatttggatatgtccttcatatttgattggatttac

SEQ ID NO: 392190 - DNA, 78 bp, Homo sapiens
gaatctggtctcaatgacagtagagggacctcctcccaaagatccatttgcaggaggtggctaccgccttggggcagc

SEQ ID NO: 392191 - DNA, 102 bp, Homo sapiens
gaggagctgcggaacctggggctgtatgttaaaacccgggatggctctgactatgagggctggtgctggccaggccacacactctgcatccgacacccaccc

SEQ ID NO: 392192 - DNA, 89 bp, Homo sapiens
ggtggttcggaaaaaagaggagagaagaaaactgcttgggcacacgtgtaaggaatgtgaaatttttttccagaaaggaggagtcaagg

SEQ ID NO: 392193 - DNA, 100 bp, Homo sapiens
ccatcatagtcaactgcgtggaagagaagaccagaatccgtagaagctagccctgtggtagttgagaaatccaacagttatccccaccagttatatacca

SEQ ID NO: 392194 - DNA, 50 bp, Homo sapiens
tttcaagagagtaccattggggcataaagatagggaggtggtgatggagc

SEQ ID NO: 392195 - DNA, 90 bp, Homo sapiens
tgtgtcaaaagagcttctctccagagtagaaagcaaatcgcagtcttctccaggctgacaaggcgaagggcatggcttcgaagtgcaaaa

SEQ ID NO: 392196 - DNA, 98 bp, Homo sapiens
gtccaggtggccgtgaagcacctgcacatccacactccgctgctcgacaggtcaactttgtagtgtgccaactctttgccttgctagcagccatttgg

SEQ ID NO: 392197 - DNA, 51 bp, Homo sapiens
acctgataacactgcatgaaatgttagagatggaagatggtaccccaaagc

SEQ ID NO: 392198 - DNA, 98 bp, Homo sapiens
cccgaagctaagagcccccttcagtcgcagcctcactctaggttttatgctgggggctcagagagaagtggacagcagattgttggccctcccaggaa

SEQ ID NO: 392199 - DNA, 75 bp, Homo sapiens
tccaaccctacatgcgcagaatggtggccacctggatgctggagggtgcaaaaatgcagagtaataaaactttta

SEQ ID NO: 392200 - DNA, 97 bp, Homo sapiens
ccctgtcttgggaaaaggagaactcctgactgattagcattcacaccaggtgtcatggagaaactccagctgggcccagagattctgcagcgggaaa

SEQ ID NO: 392201 - DNA, 100 bp, Homo sapiens
taatggttgccaaatgtcagatgcagttactgtagaagtcactcaatataatccaccttttcagattacctctctagtgacccttcagctgttaaccctg

SEQ ID NO: 392202 - DNA, 82 bp, Homo sapiens
cttcggcagtccacccaccgccgccgcctcccagccaagacaatgcaaactccagtgaacattcccgtgcctgtgctccggc

SEQ ID NO: 392203 - DNA, 100 bp, Homo sapiens
gcagaaggtggacagggtaaaagaaagagacttttttctaaagaatatccttcccgccagaagaaacttatgttgggagatcaacaccagctagtgggcg

SEQ ID NO: 392204 - DNA, 100 bp, Homo sapiens
ttcttcagatagctccccagctgtggaaaatgagcatcctcaaggagtctactcttcatcttgtgttgagacttcgtggtggtgctaagaaaaggaagaa

SEQ ID NO: 392205 - DNA, 58 bp, Homo sapiens
cagcaccagatgaaggagcattcctcttggtgaaacaaagagtcctcttcgtggaaaa

SEQ ID NO: 392206 - DNA, 82 bp, Homo sapiens
tccgtccagaggggctcgctggctgaggtagtgttggtgtaaaaggcaaacccgtgtcatgagggatggtcatcatcttgtg

SEQ ID NO: 392207 - DNA, 50 bp, Homo sapiens
cgcatgtatgccatctgccgcagacaatgccatccccatcaaatcctggt

SEQ ID NO: 392208 - DNA, 88 bp, Homo sapiens
ggccctgcaggaaggacggacttcaggggcagctgtcttgtcgacggtctcactgatgcctcttctgcattcaaagttcctcgacccg

SEQ ID NO: 392209 - DNA, 74 bp, Homo sapiens
tttcgcgagcgcgttggagcggcactcggagcttctacagaagacatttctcttgggaagttgtgcatctgaca

SEQ ID NO: 392210 - DNA, 80 bp, Homo sapiens
catccaggactccctgactcgatggtgacttaagagattaaaattaatttggttgctgttggttctgaacaaataatgag

SEQ ID NO: 392211 - DNA, 88 bp, Homo sapiens
cgaacccgcgatggaataatgcccagcggcccgccaggtcccggtatgttgagtcgatgggatgatagccagagatttttgtctgacc

SEQ ID NO: 392212 - DNA, 100 bp, Homo sapiens
tgcaacttacggcaagcctgtccatcatggtgttaaccagctaaagtttgctcgaagccttcagtccgttgcagaggagcttgaaatcgtcattggagat

SEQ ID NO: 392213 - DNA, 100 bp, Homo sapiens
tgcggtcatctgtatgcataatatggaatgttcttaacccagaagtagctgaatgtgttactccattgctgaggagtggcatggatcctgaaaaattaga

SEQ ID NO: 392214 - DNA, 100 bp, Homo sapiens
tatagaatggaacccttttgatcaagatgcggtgaacatgcaaatgcagccctgaggatttggctactgcatataacaacagggggcaaatcaagtactt

SEQ ID NO: 392215 - DNA, 134 bp, Homo sapiens
gcagccgatcatggcggatggcccccggtgcaagaggcgcaaacaagccaatcccaggaggaaaaacggtactaggttttgacaagcttgcatcatgcgtgagtataagctagtcgttcttggctcaggaggcg

SEQ ID NO: 392216 - DNA, 51 bp, Homo sapiens
ccgcttccagacattctcagctgtcaggtgggaatggaagtggccccacat

SEQ ID NO: 392217 - DNA, 82 bp, Homo sapiens
aatcttcgcatgaaatggaagagagggtggtgcggatagcttgaggaaggatattagaaatggctactccccagtcaatttt

SEQ ID NO: 392218 - DNA, 83 bp, Homo sapiens
acaagatccggcccatagccgagcagactggcatctgtaaggtgcggccgccgccgataacgaaggaggcccaacttcattca

SEQ ID NO: 392219 - DNA, 99 bp, Homo sapiens
gcttcccctttccagagagccagaaagaacagtagaagactcagaaagtggtgtttacatgcgattcatgaggtcacacaagtgttatgacatcgttcc

SEQ ID NO: 392220 - DNA, 100 bp, Homo sapiens
agctgccacctgcctttgacctttttgaagcctttgcaaaagaaatgtgagttcttctcccagatcttctgatttagtcaaattagcccaagagtgctgt

SEQ ID NO: 392221 - DNA, 76 bp, Homo sapiens
gtcggcttggtgtggtgtgcggaggagctccaggcccgtcggcgcggaggtgaagctcgtgtgtggagtgccacgg

SEQ ID NO: 392222 - DNA, 74 bp, Homo sapiens
cggatccctccttctcccggcgcctcaagcggaaggggagagaccattctaacacaggtaccgtccagacagtg

SEQ ID NO: 392223 - DNA, 106 bp, Homo sapiens
gcagtttgcaatatgactttggaggaattctcggctggagagcagaagaccgaaaggtgagaagccctaccactgcaactgggacggctgcggctggaagtttgcg

SEQ ID NO: 392224 - DNA, 90 bp, Homo sapiens
cgcgagcctccttcgccgcgccccacttgctcgtgcactttacacacatgaggtggagattcccaacatccagaagcagaggaagcagct

SEQ ID NO: 392225 - DNA, 87 bp, Homo sapiens
acttcggattatagtctctgaccatgtggaattcccagtacgacaggcagtttcaccagtgatcattaaagaatgggcagcttacaa

SEQ ID NO: 392226 - DNA, 111 bp, Homo sapiens
gaggcagagcgagggtgtgtggagggccggcggggaccgccgggagcgcgcggatgtcggtgttcctggggccagagtgctgcagcagctcccagtccagtgctaggaaac

SEQ ID NO: 392227 - DNA, 100 bp, Homo sapiens
cggaacccgtggtcctccgcttcatgtcgttccaggggtagaggaggcatgaaggatgaccgtcgggacagatactctgcgggcaaaaggggtggattta

SEQ ID NO: 392228 - DNA, 51 bp, Homo sapiens
ctccttcacagtaaagtggctggcctctgatgattgtcactcagaagatca

SEQ ID NO: 392229 - DNA, 100 bp, Homo sapiens
cgccgccacaccgccgctgcctcagtcatgccgcctaaattatacagatctgtgattgaagatgtcattaatgatgtgagagacatctttctggatgatg

SEQ ID NO: 392230 - DNA, 83 bp, Homo sapiens
ttcatccgaaccctcagcctcaagccgctgctcttcgggagcatcgagtacagctgtccggcctccaacgagtgtgagatcac

SEQ ID NO: 392231 - DNA, 100 bp, Homo sapiens
cattgctgagccagcggagctgcttgcctctaaggaaatggcttctggtgtttggcaacttaatcacagccgggtgctacatgctcttagggcctgtccc

SEQ ID NO: 392232 - DNA, 82 bp, Homo sapiens
tacccatcagcgcaggagaaggtgctccagagatcttctgttcttcagatctttgtggagttcacctctgtgtttgactgcc

SEQ ID NO: 392233 - DNA, 76 bp, Homo sapiens
agtttaaaaaactggcgaattggaaggatggccgggctggtgtggttgcaaatgatgccggtgaccgagttactcc

SEQ ID NO: 392234 - DNA, 88 bp, Homo sapiens
ttggaccctggaaaacctggccctcttcaatttctgacaaaagacctgcaatgcttcttttgccacccgagaccgtctgcgctcccac

SEQ ID NO: 392235 - DNA, 50 bp, Homo sapiens
tgtcagccagggctgaacccccgcagggtgatattcatgaggatttttgc

SEQ ID NO: 392236 - DNA, 101 bp, Homo sapiens
ggaaaggctggatacctcggttattagaggttcagcttgttggtttagatgaggagagttcagagtttatttgcagaaacacctttgaccacccatacccc

SEQ ID NO: 392237 - DNA, 75 bp, Homo sapiens
aaacagaatgagctgcgacagtcttaaggacaaacatttgtgggcggcgactggcggcgcgatggacctgaccgg

SEQ ID NO: 392238 - DNA, 60 bp, Homo sapiens
ggccaaccattgtgtcatctctaccctcttcccaaggttcattttccagacactgaaaga

SEQ ID NO: 392239 - DNA, 98 bp, Homo sapiens
ggttggagagctcatctggaattttgccgatttcatgactaaccagttccccagaagaccatgtctgtgttgagctgtatctgtgaagccaggcaaga

SEQ ID NO: 392240 - DNA, 90 bp, Homo sapiens
ccctcctgcccatggcggtggccgagctgtacacgcagatactccgtgagcacaaagcagtcatcattcagaagcgagtccggggctggc

SEQ ID NO: 392241 - DNA, 75 bp, Homo sapiens
accgcctccttcccagccgcgcggcttcctccagacctctcggcgcggtttcactcttgttgtccaggctggagt

SEQ ID NO: 392242 - DNA, 82 bp, Homo sapiens
ctgtcttcggtggactccttcggcagtccacccaccgccgccgcctcccaggattgacttctaaagactcttggtacgtgag

SEQ ID NO: 392243 - DNA, 100 bp, Homo sapiens
caacagaacctgacagaatggatagaaattttaaagactgttgtgaacagggatgtacctaatgagacggtggctcagggagtaaaggaaggccagttga

SEQ ID NO: 392244 - DNA, 100 bp, Homo sapiens
tggcgccagacgaggtggcagggggagcggagaccctgtgggtcatcgtcagggacggttttgaggagttttgcggcctccaggtggtggatccaatttt

SEQ ID NO: 392245 - DNA, 82 bp, Homo sapiens
cggacggattcgattcaacggggttccggaccgcgctgcgctatggagcagatttggagcaagaggtggtggtggccttccc

SEQ ID NO: 392246 - DNA, 51 bp, Homo sapiens
cgggtaagatggcggccccgcggcgaggtgtaaaaggaagagaatgtctcc

SEQ ID NO: 392247 - DNA, 138 bp, Homo sapiens
gccaaacccaacatctgtgatgggaactttaacactctagctattcttcgtcgtgagatgtttgttttcaaggttatcaatagtctggctgtctatcgtcatcgtgagactgactttggtgtaggagttcgagaccac

SEQ ID NO: 392248 - DNA, 82 bp, Homo sapiens
gaagacctattatcagatcaaccaccaaagtgggaaacattgaaatcaagataagtttataccatggatagcacaaaggaga

SEQ ID NO: 392249 - DNA, 100 bp, Homo sapiens
atccgtacccttccgaagagcagaagaaacagttagcgcaagacacaggacttacaattctccaagtaaacaactggactttctgaagaccttttccccc

SEQ ID NO: 392250 - DNA, 82 bp, Homo sapiens
gaccctggagcctcagttggaagcagccgatccagcctgcggagcctgtggggcagcatcgagagtaaacatgaggttacga

SEQ ID NO: 392251 - DNA, 83 bp, Homo sapiens
agtccgcatcgccacagctgaaggctgcgagggactaagagcagacttaaaggagctgctcctttgaagatactaaatatagg

SEQ ID NO: 392252 - DNA, 83 bp, Homo sapiens
aagaaatccaaaaagccgagtagagaagttatcaggccaaacgtaccaagaaagtcgggatcgtcggtaaatacgggacccgc

SEQ ID NO: 392253 - DNA, 87 bp, Homo sapiens
gaaagcggtgtccgggtgggtggcaggaggtggaaacagccgaaagaaaagcagccaggagactggagactgggtcttgctctgtta

SEQ ID NO: 392254 - DNA, 90 bp, Homo sapiens
gaacacagttggagaaaatcggcagctgagacggccttggccggtgcatggaggactgcaacagaggagtgggggactgaagattggaat

SEQ ID NO: 392255 - DNA, 100 bp, Homo sapiens
ggtccagctggtcaccgacagggatcacttcatccgaaccctcagcctcaagccgctgctcttcgtgactcccaaatcctttgggtcacctggatccctg

SEQ ID NO: 392256 - DNA, 130 bp, Homo sapiens
aggagctggctaaggtgtataattggattcaaagccagactgtcactcaagaaatcgacattcaaacgtggatgagtgtgcactgggtacccacaactgttccgaggctgagacctgccacaacatccag

SEQ ID NO: 392257 - DNA, 100 bp, Homo sapiens
cggtggtgcagctgggcctgaccaacccgaaaacattgctaggaacaacaacctgaccttcctgcggccgtactaccagacggaggagggcgaggagaac

SEQ ID NO: 392258 - DNA, 75 bp, Homo sapiens
ggattgtgtctgcttggtgtggagccatgaagtcaccttcaggccattcagaggaggaaagagaggggaatatga

SEQ ID NO: 392259 - DNA, 82 bp, Homo sapiens
gggacctcatctggttctgctcagccgcttacaaacacgcagatggcaagaagattgatggcaggagggtccttgtggacgt

SEQ ID NO: 392260 - DNA, 95 bp, Homo sapiens
cagagccgtgcatggggctgctccccaggacctgagcaggaacctggagttttcagccgttcttggaacacctcacagcttgccacatctgatga

SEQ ID NO: 392261 - DNA, 71 bp, Homo sapiens
cggctcacctgtgcgggatggaacaaaaggtaatctttagatggtggaagatctctctaaggagtgagtat

SEQ ID NO: 392262 - DNA, 82 bp, Homo sapiens
ctcagccagacttcccctatggtcagtatgccctgggcgctgcctatggcacagccaagagcggtaccggcattgcggccat

SEQ ID NO: 392263 - DNA, 50 bp, Homo sapiens
ctcagcctcctgagcagctgggattacagtacaagttcagggacctaact

SEQ ID NO: 392264 - DNA, 90 bp, Homo sapiens
atttgagtcatttccttcgtacccacagtgcttcatgagaggccatttatgccagtgttcttcctggagagttgatgagggggtacatga

SEQ ID NO: 392265 - DNA, 75 bp, Homo sapiens
attgcagctgcatgttcaagaagtggccggagagttctgcatgttgattcatttttgatgaaattgagtcatgaa

SEQ ID NO: 392266 - DNA, 75 bp, Homo sapiens
tccgcctaccaaatacttaccctaattcatcatcaccagcactggatgtgtgtgagaagtggggagaaatgccac

SEQ ID NO: 392267 - DNA, 100 bp, Homo sapiens
gtgttcagaagacaatggagaaaaaatggaaatactgtgctgtctattacatcatccagatacattttgtcaaggatcttagcaaagcaatgtctcaaga

SEQ ID NO: 392268 - DNA, 51 bp, Homo sapiens
atccaccagcggttccatcctacacttggtgaagtttagcaactgcaatgg

SEQ ID NO: 392269 - DNA, 90 bp, Homo sapiens
gtctccttgctctgggctgctccaggccaggccatgcgggagcgggacggtatgcgggccatcctggggtcctacgacagcgagctgacc

SEQ ID NO: 392270 - DNA, 75 bp, Homo sapiens
gtctccacggacgactcagagcaaggtgatgtgtccaatctagatcccaacttctcatttgaaggcaccaaactg

SEQ ID NO: 392271 - DNA, 98 bp, Homo sapiens
attcattgacttccgcctacttaacatgcctacaccaactaatgttacaattgaatcctataacatgaaccctatcgtatattgggagtaccagatca

SEQ ID NO: 392272 - DNA, 98 bp, Homo sapiens
acatggctggaggagcgtctctccgccactgcgcacattttgcagcctgcaccggccaacggctgtgggtgagcgtggaggatgctcagatgcacacc

SEQ ID NO: 392273 - DNA, 80 bp, Homo sapiens
ttgtctccttcgacttggagtctttgtccaggacgaaaccaaggtgtatgttggtaacctgggaactggcgctggcaaag

SEQ ID NO: 392274 - DNA, 96 bp, Homo sapiens
atcttcccttacaagggttatatatggaattatggtaccctccctcaggatattgtacctgtggatgcatcttatgaagtaaaagaactatatgtg

SEQ ID NO: 392275 - DNA, 82 bp, Homo sapiens
acaaggccaagttcatctcctccgtcaccagccacatctaccagcatacagtgaagttgttctctgaagttcctcatctgcc

SEQ ID NO: 392276 - DNA, 96 bp, Homo sapiens
gctgctttcttgagcccctccaaggttctcctatttggactctgctgcagatcccttgccctggaagctctggaggaatatgtgaaaaaagtaaac

SEQ ID NO: 392277 - DNA, 100 bp, Homo sapiens
tctgtttacgttattatcaacacaggaccaggtaagaagcgcaattccacactctacataaccatgttactcattgttccagtcatcgtcgcaggtgcaa

SEQ ID NO: 392278 - DNA, 101 bp, Homo sapiens
ctctcccaggccacaagacatttcctgctcggaaccttgtttactaattaatggcaacatacttgtttaacattgaattctgtgcaagaaagaaaaaattt

SEQ ID NO: 392279 - DNA, 50 bp, Homo sapiens
ttgaagttcaagagctcagaccctaaacctccacaaatgggaagtgttcc

SEQ ID NO: 392280 - DNA, 87 bp, Homo sapiens
tgcttggttggagatcatgaccaaatatgctgtgggagaagagtgtgacttcgaggaaattggatacactcacatgaaaatagcgga

SEQ ID NO: 392281 - DNA, 74 bp, Homo sapiens
attgactctccttattcctgagtgatgttgcacctgtaaccatctttttatgggtggagcagagagtcaatccc

SEQ ID NO: 392282 - DNA, 104 bp, Homo sapiens
cagcagttactcgcacaaccccagttaagctgcgctccgggagagagaagaagaaggaggttcctgctgtgccagaaacccttaagaaaaagcgaaggaatttc

SEQ ID NO: 392283 - DNA, 149 bp, Homo sapiens
agggttgaggcgattccagagagcggcggaaaggataagcctcgacttagaagctaccgagttaccctaagaaaggtatggcctcacaagtcttggtctacccaccatatgtttatcaaactcagtcaagtgccttttgtagtgtgaag

SEQ ID NO: 392284 - DNA, 100 bp, Homo sapiens
tttatgatgaatgcaataattctccattgagaagagagaagaacattctcgaatacctagaatggggaccgtataatagacgctggccccaaaggaaact

SEQ ID NO: 392285 - DNA, 134 bp, Homo sapiens
ccgtgatgtacaggaagtggaaagagagcaaggggaaggatcgggagtacacagacatcatccgggtggactccgacgaccagtggggagagtactcctgcgtcttcctccccgagcccatgggcacggccaac

SEQ ID NO: 392286 - DNA, 100 bp, Homo sapiens
gaggcgagggggcggcagcctcggcccgaagtgttacacataatattgcattacttcgagaggtgataatcaactcacgctttgtaaaaggagacatcag

SEQ ID NO: 392287 - DNA, 100 bp, Homo sapiens
gtaaacattgccactgctcagaatggcatcaaagtggttaaatggattcacaacaagcccccgcctcccaacactggaaaagacagagtctctaatacag

SEQ ID NO: 392288 - DNA, 75 bp, Homo sapiens
cagcctctgcttggcatccccttgctggacagtggctgtgccctgaccattgtggtcactgagtggagaaccaag

SEQ ID NO: 392289 - DNA, 95 bp, Homo sapiens
gggaatccggaagggacacgctgaacagtaattcgccaaaatgacgaacacaaagggaaagaggagaggcacccgatatatgttctctaggcctt

SEQ ID NO: 392290 - DNA, 129 bp, Homo sapiens
gaacagtacttggtgctggtagtattggaacagatattgcaaatgaaattctggatttacagagtgccgaagaaatggctctcacgcccacaaacctaaataacaaaatgtctctgcagatgaagatgg

SEQ ID NO: 392291 - DNA, 75 bp, Homo sapiens
cattatgaacccaccactgggcaaagaaagtatccctttgactggcgggagctgtgggtagacgatgccatctgg

SEQ ID NO: 392292 - DNA, 88 bp, Homo sapiens
ggcgcctgccttggcgctggccggctacatcgaggaaattcgaaatgagtcccatgactatcctcatagagtggccaagtttccagaa

SEQ ID NO: 392293 - DNA, 75 bp, Homo sapiens
cctgccggcacgcgactccccccgggcccaaacagaaaaatatggctcaggagactaaccagaccccggggccca

SEQ ID NO: 392294 - DNA, 74 bp, Homo sapiens
acccagtgaacaaatccgggggcaaggccaaaaagaaggttttttgcatgtctgacacccatgactccacctgg

SEQ ID NO: 392295 - DNA, 89 bp, Homo sapiens
tgtgctgagctccattgggaagattttcaaagaggaagggctgctgggattcttcgtgatttttttcccaggaagccatcccgtcagag

SEQ ID NO: 392296 - DNA, 75 bp, Homo sapiens
tcaagagacgggcgcagtccaacggaaagtggccacagggtgccttcaccagggatggaagaggcaggctgcagc

SEQ ID NO: 392297 - DNA, 100 bp, Homo sapiens
acagtttcaattcacagcgttttgctgagctcctttctacgaagttcaagtatagatactgtggcctcatgaataggaatgtctgcccatatgtcaggat

SEQ ID NO: 392298 - DNA, 75 bp, Homo sapiens
gctcgtcctggagcacctgcagctggcgcctctgcagtgggcaatttttccagctagtcaaattacgaaagcttg

SEQ ID NO: 392299 - DNA, 88 bp, Homo sapiens
gcccttagagtcttggttgccaaacaggggaaggtgtggctcattgactttaatccatttggtgaagtcacagattcactgctgttca

SEQ ID NO: 392300 - DNA, 88 bp, Homo sapiens
taatcttcaacaaccacgggaagccgcggctctccaagttctaccagccctacccggcctcagaaagtgtgtttgtgtccatttctcc

SEQ ID NO: 392301 - DNA, 49 bp, Homo sapiens
tttgaagtagaagaagctgatgagcccccctccatgcgcctgaaggccc

SEQ ID NO: 392302 - DNA, 145 bp, Homo sapiens
gctgacatcgctaccatggtctccggcagcagcggcctcgccgccgcccgtctcctgtcgcgcagcttcctccgttgccaatttggcctgttccatctccaacaatgaagaaggggtgaaattagttcggatggcagccacccag

SEQ ID NO: 392303 - DNA, 74 bp, Homo sapiens
cctcattccagacaggctgctttcagtagccccattgatctctcaccccgtcactcagggtggcgcaatcacga

SEQ ID NO: 392304 - DNA, 88 bp, Homo sapiens
gccgaacccgcctggctagccggcgagttgagtggcgagggttcggtccgagcccggtgggaggctcccggagcgcagcctgggccca

SEQ ID NO: 392305 - DNA, 51 bp, Homo sapiens
agaagaacaggctgagctgacacctgaaatcatcgagttccccatcctaaa

SEQ ID NO: 392306 - DNA, 96 bp, Homo sapiens
ttactagattttctctcaaactacgagggatcgcccggagcccacacccgtcctccgctctgcatttccctacgacgtccatcctaccccagacgg

SEQ ID NO: 392307 - DNA, 75 bp, Homo sapiens
tctcgcgcgggtgtcgctgggctgtcggcctggaccttgcagccgcaatgaatggcttcctttgggtggaagagg

SEQ ID NO: 392308 - DNA, 82 bp, Homo sapiens
tgctggctgcacccgcctccgcgctcgtcaggttaatttggagtggcccctggagtcagtttcctacaccatccgaggcccc

SEQ ID NO: 392309 - DNA, 50 bp, Homo sapiens
cagcgtggagagtatcatctcaccaaagtttggaaattttagcattcagg

SEQ ID NO: 392310 - DNA, 98 bp, Homo sapiens
ggacctctaccgagatgtgatgttggagaactacaggaacatggtcttgctgggcatcgactgggcccccgagagtaaccgtattgtgacctgcggca

SEQ ID NO: 392311 - DNA, 75 bp, Homo sapiens
ctggaagctgcctataccctgcagccccaggacatcctggagtggaagaccgcacgcaccttcctgtattggcgt

SEQ ID NO: 392312 - DNA, 82 bp, Homo sapiens
gttgctactcgggacgctgcacctcccgcgccgcacggtggacgagatggacacccgctccgggagccagtgttccgtcacc

SEQ ID NO: 392313 - DNA, 98 bp, Homo sapiens
tggtgaacctgcgggagctgtaccttagccacaatggcatcgaggtcatcgagggcctggagaacaatgtctacatccgcacgccttccggtgaggtg

SEQ ID NO: 392314 - DNA, 95 bp, Homo sapiens
gatgatgtcagctctgagtcaagtaaaggagagcctgacccactggaagataaacaggaaacccagcgtttgctggcagaaccagttcctggcat

SEQ ID NO: 392315 - DNA, 98 bp, Homo sapiens
cccaaggcatcgtctcacaagtcctgtgccaggacagactgtcctccacatttagctgtgggagactggtcgaaggtcgagtggtgggcatacttcag

SEQ ID NO: 392316 - DNA, 123 bp, Homo sapiens
acagaatgatgatgaattgacaatcaaagaaggagatatagtcactctcatcaataaggtgattgatatgcccgagcacaaccctggcaatttgggaggaacaatgagactgggaataagaag

SEQ ID NO: 392317 - DNA, 75 bp, Homo sapiens
cagtcgcctccaggccaagagggatccttcacccgtgtctggaatgaccatacctgaagaagacgctgatgtggg

SEQ ID NO: 392318 - DNA, 100 bp, Homo sapiens
cgacgtcttgcctgtgtcccacttgttcgcggcctatagggagaaacaaaggcagcgctgccctcgggggagcattggccctggcggaacgcagcagccg

SEQ ID NO: 392319 - DNA, 100 bp, Homo sapiens
ctacggaagaagaatgtgaatggaaaccagatgaagaagatgagatttcgttgttacagggtagatcacccaaacctgacaagtgggaacttcttcagct

SEQ ID NO: 392320 - DNA, 100 bp, Homo sapiens
gtgaagagaggcgtctacaagagcgattgctacacatggacagtgatgatgaaattcctatcaggtgagaagccctaccactgcaactgggacggctgcg

SEQ ID NO: 392321 - DNA, 90 bp, Homo sapiens
gtctgtatgatgaagcaatacggcatttttcaacaatgcttcagatgccacttcaaatgaacaacaagagcttttctgtcagaagttgca

SEQ ID NO: 392322 - DNA, 74 bp, Homo sapiens
tacgcctacgacatcgaggatgcttgcgcgatctctggcctcttcaactgcatcaccatccaccctctgaacat

SEQ ID NO: 392323 - DNA, 98 bp, Homo sapiens
agatagttttgcttttttgactgctgaagattctgcccagaaaacaggtagccaaggtgctttggtggtactatttctccaaatcagtagagttcctg

SEQ ID NO: 392324 - DNA, 101 bp, Homo sapiens
ctcttcctcctcctcccgcgacgggacaggagagagtggcaagagtacgtttatcaagcagatgagaatcatccatgggtcaggatactctgatgaagata

SEQ ID NO: 392325 - DNA, 75 bp, Homo sapiens
cgattatggattggcaacctggaccccaaaattaccgaatgctcagagtgtgtgcacaaggctggcacgcccagg

SEQ ID NO: 392326 - DNA, 50 bp, Homo sapiens
caggctcctgccctggactaccgagccctttctaaggcacaaaatgatgt

SEQ ID NO: 392327 - DNA, 80 bp, Homo sapiens
aagcggtggtgcttacggtagccaaatgctaggaggcatgggtttgtggtccccagccccaccccagccccaaaggaggc

SEQ ID NO: 392328 - DNA, 98 bp, Homo sapiens
gatgacagatgtgtggtgcacccagaggccggggaccttgccaaccctcccaagaagttcagagctcaaatagctataactgtaccaaagacatggaa

SEQ ID NO: 392329 - DNA, 74 bp, Homo sapiens
cctcatcctggttctggaatcctcagttcaagaactccgagctgcaactaaattaactgaggaaaagtatgaac

SEQ ID NO: 392330 - DNA, 111 bp, Homo sapiens
atatctgtcttcggtggactccttcggcagtccacccaccgccgccgcctcccagcacggggtcactctggtgcccattgaggagttcagcccggagttcgtggagccccg

SEQ ID NO: 392331 - DNA, 75 bp, Homo sapiens
ctagaggtgcccgtccgagaggcaggccctggccaacgtcaacattgggagcctcatctgcaatgtaggggccgg

SEQ ID NO: 392332 - DNA, 82 bp, Homo sapiens
ctctcttcgctctttgcatcttaactgcagaccctgtattcagtggatcagctggcaccacccaaatagataaattggccca

SEQ ID NO: 392333 - DNA, 89 bp, Homo sapiens
cttcctggcctgggcgctccggtggcggcggagtaagactttgaccccgacgcaggcttcagtgattgccgcggatcagaagcctgagc

SEQ ID NO: 392334 - DNA, 89 bp, Homo sapiens
gacaaaattaaagagctggaggcctcaaagatttccacaagacggcaccctatgtcgtcactggcagcgtagatcaaacagtaaaagtg

SEQ ID NO: 392335 - DNA, 95 bp, Homo sapiens
ttcgtggtggtccactgcacaggctacatcaaggcctggcccccagcagatgtcatcgcaacagataaagaagacgttgccttcaaagacctgga

SEQ ID NO: 392336 - DNA, 80 bp, Homo sapiens
ccccaccccaaccccggccgctggccctctggaactgtggctgcaccatctgtcttcatcttcccgccatctgatgagca

SEQ ID NO: 392337 - DNA, 100 bp, Homo sapiens
ccaactattcgcggagctggaatgactggcaacccaggaggaggtgcgccagtctgtaactcctgccgagccagtccagtactatttcacgctggctcag

SEQ ID NO: 392338 - DNA, 50 bp, Homo sapiens
gaattaggtcccctcaatggggacacagctcaactataaggactgtgaga

SEQ ID NO: 392339 - DNA, 100 bp, Homo sapiens
cgggaccataagggcttaactcatatatttaacccccctccaaaaattctaatacccgatttacaattacattgaactacaaggatcccctcactggaga

SEQ ID NO: 392340 - DNA, 101 bp, Homo sapiens
gacaacttgtgtaagagctataccagttgctgccatgactttgatgagctgtgtttgaagacaggatggtgccatgacaatggtgtgaactacaagattgg

SEQ ID NO: 392341 - DNA, 100 bp, Homo sapiens
ctggtgacttcacttttgagtgcaactgccttccagcccattttccttctttcgcaggtaaaaaacatgaagcagatgagttgagtggagatgcttctgt

SEQ ID NO: 392342 - DNA, 88 bp, Homo sapiens
aagccagtcacaagagctgctaatgggcccttatattctcaagaccgaatccttcaagccatgggaaacatcgcactggcctttcatt

SEQ ID NO: 392343 - DNA, 82 bp, Homo sapiens
tatagtgtctgcctcaagggataaaactataaaaatgtgggaagtgcaaactgggctcacttatctaaagaatatgaggagg

SEQ ID NO: 392344 - DNA, 150 bp, Homo sapiens
gaaattgttgaagagttcaactttcccagaagttgttctaacgctgcctttgctttaaaacagtattacttgcggaaacccttttccaaagagaaatgaagaagaaaactgtatgtaccctaaatatgggagataagaagtatgaagaca

SEQ ID NO: 392345 - DNA, 100 bp, Homo sapiens
acgagagaggcaccgggatcgtgaccgagaccgtgaccgagagcgtgaccgagagcgcgaatatcgtcatcgttagaagagcatgtcctttgcaacctga

SEQ ID NO: 392346 - DNA, 98 bp, Homo sapiens
cagcaaacagtcctagaagaattcttcgaaacattggtacaatgaatacatttaaggctctcatttcactcttcagtgttcctgttatttatgaacgg

SEQ ID NO: 392347 - DNA, 100 bp, Homo sapiens
gagcacgtcatcgccatcgaaggtacatgtcccagagcaagcacacggaggcccgggagctcatgtactcgggagccctgctcttcttcagccatggcca

SEQ ID NO: 392348 - DNA, 100 bp, Homo sapiens
aagtttgtcctgtcctggatcagtttctttgtcatgtagccaagactggagaaacaatgttgaaaatgaatatggcagctactttgcctgtgattttgac

SEQ ID NO: 392349 - DNA, 75 bp, Homo sapiens
cagagattcatctttcatgcagtgacatgttgataaaaaatgatgactcactgccacaacgacattgtcaacctt

SEQ ID NO: 392350 - DNA, 127 bp, Homo sapiens
gcattgaggactttccttacctgtttttccagctcacccactgccagcagagcaaacggggattcagcgtccgatcctttggaacagggactcacgtgaagcttccaggaccagctcccgacaagcc

SEQ ID NO: 392351 - DNA, 95 bp, Homo sapiens
tggaacagcccgagatacacacattcattcagctgaaactggagcgtgccacaccagctgagcgccagcttgtcttcaatgaaatcctccaggct

SEQ ID NO: 392352 - DNA, 102 bp, Homo sapiens
attttttatgaccccaccacggttacattatactcctcctctccagtcaccaattataaggcggccttagcaacatgctgttccagtgctccctacctgaca

SEQ ID NO: 392353 - DNA, 100 bp, Homo sapiens
caactcagatcttaagtagtgatatttctcttttgtctgcccctattgtaagtgcagatggaacacaacaggcatcagtgtcattccaggacgtgactgt

SEQ ID NO: 392354 - DNA, 101 bp, Homo sapiens
ctcgtggtggctcttctggttggattatcttggctatttttgtcttataggccaggcatggatcttagtgaagggcttccgttacaagatgaggtctgtgt

SEQ ID NO: 392355 - DNA, 50 bp, Homo sapiens
gacatcttctccctcccttgcctcagagagctattgcttaccttttccca

SEQ ID NO: 392356 - DNA, 75 bp, Homo sapiens
gaggctgcaccaagtggcgaaggagccggctccaaggggctgagcttggcgcgccatctccttgccttttgaagg

SEQ ID NO: 392357 - DNA, 82 bp, Homo sapiens
aagaggtgaagctcaaggcacaggtggcccgatcccagcaggacattgaaagccctagggtggtcccaaccatgtgatgtct

SEQ ID NO: 392358 - DNA, 97 bp, Homo sapiens
tttgctaaatacagaaggacatgcaaaacttgcagattttggggtagcaggtcaacttacagatcagtttgacaacttagaaaaacacacacagtgg

SEQ ID NO: 392359 - DNA, 97 bp, Homo sapiens
gacagcactctgaaagcagctggaatcgggaagcagctcgagagtgtcgtagaaagaagaaagaatatgtgaaatgtttagaaaacagagtggcagt

SEQ ID NO: 392360 - DNA, 100 bp, Homo sapiens
gaggagaaggggaagaacatccaggtggtggtgagatgcaggtcccgcggcagtgctggtggccatggttcccgtagccagaaggagttgcccacagagc

SEQ ID NO: 392361 - DNA, 83 bp, Homo sapiens
tttggattgaagccgcctctgtattacttaccaggtacaatgactcttcttgcttttcacctaagttgaataagcaccctgtg

SEQ ID NO: 392362 - DNA, 100 bp, Homo sapiens
gccacattggctgccgtgaccagaacccaccatggccccctttgagcccctggcttctggcatcctgttgttgctgtggctgatagcccccagcagggcc

SEQ ID NO: 392363 - DNA, 100 bp, Homo sapiens
attccagcactggactcatggaggctgagcatttattcagccagcagacttcataggaaagcaagcactgaaacagattaaagccaaggggctgaaacga

SEQ ID NO: 392364 - DNA, 88 bp, Homo sapiens
aaaaagctcaaaatgaggaaattctgtatgttcttcgccattatattcagaatgttcgcatcttaccacatacagttctttacatggc

SEQ ID NO: 392365 - DNA, 75 bp, Homo sapiens
ttggaagcagccgatccagcctgcggagcctgtggggcagagtttacagatgcttcctcagcaacggaaagccat

SEQ ID NO: 392366 - DNA, 76 bp, Homo sapiens
caagacataaactcaaccccttctcttccaaaagaccttcacggcatggtgcaactcccacctgcggaaggcaggc

SEQ ID NO: 392367 - DNA, 75 bp, Homo sapiens
cgggcgagcggctgtgtggatgtcggcgaagccgcgggcgagagcttacaagaccctatgaaaaaattagttgag

SEQ ID NO: 392368 - DNA, 82 bp, Homo sapiens
caatgcttgaggctccttacaagaaggagaatacttatctctggcgcacatcactatatttggctgcctctgccagtgctga

SEQ ID NO: 392369 - DNA, 100 bp, Homo sapiens
ggtctggaaagatgtgcagctgtccaccattgaactgtccatcacaacacggaataatcagcttgacccgacagatgccggaccagatctctgtctcgga

SEQ ID NO: 392370 - DNA, 100 bp, Homo sapiens
atcatcgctctgcccgtcgctgtcctgttgatcgtgggagggttggtgattatgctgtacgtcttccatagaaagaggttgccagaaagctttcctgaat

SEQ ID NO: 392371 - DNA, 75 bp, Homo sapiens
agatggggaaaccgaggcccggccggctgccgggaccgactgatgttcccacggatgctaatgaaactggtgagc

SEQ ID NO: 392372 - DNA, 132 bp, Homo sapiens
gaggtcccatcaggtggggaaagatgctgttccaggcgcacactagtctacaaggccagagctttctggaagggggcacgtgttgactgattttgaggggaaggatgtggccaccaaggtcggagaggcctg

SEQ ID NO: 392373 - DNA, 100 bp, Homo sapiens
atttatgcacaaagatggttcggtcccacttgcagcagaaattcttgctggaggctgcgttgcctgtgatttgcttcggaggattattcgtatcttgaat

SEQ ID NO: 392374 - DNA, 116 bp, Homo sapiens
cgcctggactcgcgggcggcggcgagcgcctttacaatggccctgaccctgtttggaactcttggtgtaataacagaagctacaataaaaatcagaccagtccctgaataccaaaa

SEQ ID NO: 392375 - DNA, 80 bp, Homo sapiens
cgcctcggtgctgctgccccgcgggtgctgaaaactgtcaagattagtgatgatgaaccaggttatgaccttgatttatt

SEQ ID NO: 392376 - DNA, 75 bp, Homo sapiens
gacggcgtcgggagagcgcgcctagccggctcgcgaaatgtcgtgtcctgaagtcatcttattctcgatcctcag

SEQ ID NO: 392377 - DNA, 80 bp, Homo sapiens
cgactgggagcagaggaagccttgaggacctactcacagataggaattgaaggagccggtgaaacctgaagaaggcagag

SEQ ID NO: 392378 - DNA, 75 bp, Homo sapiens
ctccctcttctcccgactatttggcaagaagcagatgcgcattttgatgggaggtatctttaaaatagcttcctg

SEQ ID NO: 392379 - DNA, 83 bp, Homo sapiens
cctcgtctgcctcaaggaggagtggatgaagatgcctaaatcaaaggaacttgtttcttcaagctcttctggcagtgattctg

SEQ ID NO: 392380 - DNA, 90 bp, Homo sapiens
atcggcagtgccggtttggactggcaatccctgggacagcataatgcagtgaagatgggtgaagagagatgtgtttcatctgaaatttga

SEQ ID NO: 392381 - DNA, 75 bp, Homo sapiens
cgggagaacctgcggcggccggagcgtggtagcaactgcccttgctaatcaccgtaacctcggctgagaaagaag

SEQ ID NO: 392382 - DNA, 74 bp, Homo sapiens
gaggaaaagagccctggatgattttgagggaagaaacacagttcacagggctcacctgaaacttcatgtaccat

SEQ ID NO: 392383 - DNA, 100 bp, Homo sapiens
ctgcacatctaccacgccgtcaaggaccggcacaaggacgttctcaagtggggcgatgaggtactgaaatttgatgcctatttccaagaagatgttccta

SEQ ID NO: 392384 - DNA, 100 bp, Homo sapiens
tggtgctcagcgccgcggggatgggggcctcgggcgccccgcagccccccaacatcctgctcctgctcatggacgacgttttgggatttgagattgacgc

SEQ ID NO: 392385 - DNA, 83 bp, Homo sapiens
tgcctctgtcactcctggtgaccagcattcaaggacttttccagatttctcagaataaagtagcagttcttcttctagctggt

SEQ ID NO: 392386 - DNA, 100 bp, Homo sapiens
cataggaggaaaattcatcatctggattgtcagtggcttcgccccgaggagagctgactgccctgggctgctgcctccggcagagctgagccaaaatgtc

SEQ ID NO: 392387 - DNA, 75 bp, Homo sapiens
tgggagagaggtacctctccttttccctctccctttccctaagggaccttaaaccggaaaacattttgttaaatg

SEQ ID NO: 392388 - DNA, 74 bp, Homo sapiens
aacagcacccgctcctagatggcgtagatggtgagcaacacagtcactcctggcggcaaaccaaacaaaaccag

SEQ ID NO: 392389 - DNA, 100 bp, Homo sapiens
tcagttcgtggattcctgaaaacatcaagaagaaagaatgcgtgtattttgtggaaagttccaaactgtctgatgctggataacttttaagtggtgaaga

SEQ ID NO: 392390 - DNA, 100 bp, Homo sapiens
caggcggtgacagagtggagccatggctagaggactccagaagacctttccagattcgtggttgagctgcagcagagggagcttgccttgaaggacaaga

SEQ ID NO: 392391 - DNA, 95 bp, Homo sapiens
ccgggggcttcccggaggccaaccgtatcgccagcaagtacggattcatcaacataggacagggttttgacccaccacatcagagtgacacaaga

SEQ ID NO: 392392 - DNA, 82 bp, Homo sapiens
gttgtcaggttgaaaatggaagagtaattgcctgctttgattccctaaagaataccaagctgctattttacacttgaagagg

SEQ ID NO: 392393 - DNA, 51 bp, Homo sapiens
cactgggatattagcgggagtgaagggtgctgcgagtatacagtatacaga

SEQ ID NO: 392394 - DNA, 50 bp, Homo sapiens
gagagtccacacaccctttgaaaggtagcccgggaccctcgctttgatga

SEQ ID NO: 392395 - DNA, 80 bp, Homo sapiens
gcttgccctggtcttgctcggccgatgaagtgcagaggtttttttctgggggcaaaggctacgggtcagagagcggggag

SEQ ID NO: 392396 - DNA, 102 bp, Homo sapiens
gaagcgcagggagaaggaagaggtgtttgaaaaggtgaagtggaggttctggatccgaacgaccctttaggaccccttgatgggcaggacggcccgattcca

SEQ ID NO: 392397 - DNA, 100 bp, Homo sapiens
cacctgattggtgatttttccaagccaaagaatttagaacgagtctacgtggacacgcaagtttcagcgagcggggatttcctgcgaggccgagcgcgag

SEQ ID NO: 392398 - DNA, 99 bp, Homo sapiens
agccggggggccgtgaaggcgtcggccggaggacaccccatcgtgcaggtgacttaagagattaaaattaatttggttgctgttggttctgaacaaata

SEQ ID NO: 392399 - DNA, 83 bp, Homo sapiens
gctgcaccgacctcgacgtcttgcctgtgtcccacttgttcgcggcctataggttaacacagaaatctgcctcctgggccatg

SEQ ID NO: 392400 - DNA, 100 bp, Homo sapiens
aactatggatatggacagggatatgcagactacagtggtgtaatcctgagagattcacatggtgttgcacaagtacgttttgtgacaggcaataaaattt

SEQ ID NO: 392401 - DNA, 148 bp, Homo sapiens
tgttggtctgctggtgggactcaatgttctcgatgccaatctctgcttgaaaggagaagacttggattctcaggtgtgcaactgaggaacatggctcaagaaactaatcacagccaagtgcctatgctttgttccactggctgtggat

SEQ ID NO: 392402 - DNA, 90 bp, Homo sapiens
tccggggcacctccgccgaccactgcgtccagctcatcgcggcctctgaagaacacctgaagcagcactacattgacctgaaagaccgac

SEQ ID NO: 392403 - DNA, 100 bp, Homo sapiens
cgacagccgacgcgcagatagcagagccatccttggggtatgtggagctggtgaacgctgcctgtaacttcgagccacacgagagcttcttcagcctctt

SEQ ID NO: 392404 - DNA, 100 bp, Homo sapiens
tgttcttctggaaggaaacccagacacgatacaaaagttgggactacaagcaagtgacataaaaagcttctcagctctcgcagagcttgttgctgctgcc

SEQ ID NO: 392405 - DNA, 75 bp, Homo sapiens
ctcaggatgtgcgaccttgtttctgactttgatggcttctctgagagaaagatcatcttcaagctctgagattct

SEQ ID NO: 392406 - DNA, 98 bp, Homo sapiens
gctcttgctcctctctccttggcctctcctgggatcggcccaaggccagttctccgcagaaaaggatgcgcctccacttagcaaggctgggcaggatg

SEQ ID NO: 392407 - DNA, 98 bp, Homo sapiens
gctgccgctgccgctgccggctccagggagccccgtgtcaagcaagggaggacccatccagaaccgcaagtctaagcgctgtctggagctgcaggaga

SEQ ID NO: 392408 - DNA, 75 bp, Homo sapiens
gaaaatgccatacaggacactgtgagggaacaagaccagagtttcacgttgcatttgctggtctggcctttgcgt

SEQ ID NO: 392409 - DNA, 83 bp, Homo sapiens
ctcggcctcctcccccgccgccttcctgcagacattgcctaagatactgagccatatcgccccagcattttgcatgagcagct

SEQ ID NO: 392410 - DNA, 99 bp, Homo sapiens
cagcgcccaggcccagctcgtccagagtctgcggacagcgcacgtccaggccctgggaggagcggggacactgaggacctctctccaaattggcctctc

SEQ ID NO: 392411 - DNA, 82 bp, Homo sapiens
aaccatttgcaaccatcagagccagcgcacctgtgcagccttctgcagttggaagatctgctctgagttcgtgggaagctat

SEQ ID NO: 392412 - DNA, 82 bp, Homo sapiens
ctgccacattgttcccttatatttcctgctaccacctggatcaggtgacagattgactgggatcccctcgcacatcctcaac

SEQ ID NO: 392413 - DNA, 101 bp, Homo sapiens
ctggctcaatatctaatcaatgtcagaatccaaaggcctggaacacaatggtactcaaaaacatagctgcctcggggaaattctccagtgaccgaacaatt

SEQ ID NO: 392414 - DNA, 90 bp, Homo sapiens
caagcatggagttggcaccccaaaagaaagaggatgttaagcaagtttttggacagaccacaattcatcaacatattccatttaactggg

SEQ ID NO: 392415 - DNA, 90 bp, Homo sapiens
cagccacatactatccgtttgttcaggaaccaccagtgacagattggtagctggcagtgttgtgatggcttttgaagaagtatgcccgga

SEQ ID NO: 392416 - DNA, 100 bp, Homo sapiens
gaagatcaaaaattaagtttgacatggaaaaaatgcactcggctgttgggcaaggatggccaggccatgttatgggatctcaacgaaggcaaacaccttt

SEQ ID NO: 392417 - DNA, 90 bp, Homo sapiens
aaaagaagatgttaaacttcatagaatcaggatggagatgaagatgaggaagctgagtcagctacgggcaagcgggcagctgaagatgat

SEQ ID NO: 392418 - DNA, 100 bp, Homo sapiens
attattctggcccttcagcaaacgtagtactactgaaaatttctttttgaaactaaaacaggatggagagcaatacatcatcatctttggagaatttagc

SEQ ID NO: 392419 - DNA, 75 bp, Homo sapiens
aggaagatagttcgagagaagaaaattttagaagttcatattgacaaaggtagaggggaagagattgaactttgc

SEQ ID NO: 392420 - DNA, 100 bp, Homo sapiens
cttaaagaagcctcctcaccaggttaaaaatgtgtctgcaggcacacaggacgtgccttcacccccatctgactatgtggaaagagttgacagtcccatg

SEQ ID NO: 392421 - DNA, 50 bp, Homo sapiens
cggtacatctgaaagccgggaaatgagctcttccccgcagctctgggaga

SEQ ID NO: 392422 - DNA, 98 bp, Homo sapiens
ggaagtccaccagctacaagaaaagttagcaatgatggaaagtggggtgagagactatagcaagcagttttgtttggctatgccaccacagtcatccc

SEQ ID NO: 392423 - DNA, 144 bp, Homo sapiens
gaaggcgccaccatggcggcgcccccgcagcccgtcacccacctcatctttgacatggacggacttcttctgggaaccaaccggtgagccctctcctaagagacccaggggaagacccaaaggcagcaaaaacaagagtccctc

SEQ ID NO: 392424 - DNA, 100 bp, Homo sapiens
tccatgtttctggacgcggatttttggcctcatactctgttatagataaacaaggttgggggccgtcccgctcctaaggcaggaagatggtggccgcaaa

SEQ ID NO: 392425 - DNA, 98 bp, Homo sapiens
ccagcagcagcaaagctgaaggccagcaggtttgcagagcatgccaggggactacgtttctcagggtggtcctatgggaatgagtatggcacagccaa

SEQ ID NO: 392426 - DNA, 80 bp, Homo sapiens
taatgaggacattgtggagagaaacatccgaattatatgctgggctcttgcactgtttggtggaaatggtgagacaggat

SEQ ID NO: 392427 - DNA, 80 bp, Homo sapiens
caaaccgagctcccgtctgccttgcagcatctgcaaacatagagaattctgggcttccacacaactccagtgctaactca

SEQ ID NO: 392428 - DNA, 75 bp, Homo sapiens
cctccatcttgcagcccagaaggttggtactaagaagtgcctttcctgacgtctctgctgcttggaaccgcttct

SEQ ID NO: 392429 - DNA, 76 bp, Homo sapiens
tgctctcgccccaacccgcgcgccagaatgttgtaccatctttgggtaggcagacttccctgacgacatcagtgat

SEQ ID NO: 392430 - DNA, 82 bp, Homo sapiens
atttaagaaacctggcaccaacctaacagagattgtccagaacatcgtgggcacagctctgatgattttagtggccattggt

SEQ ID NO: 392431 - DNA, 100 bp, Homo sapiens
caaatgtttgtccactgagctgatctcctctctggagcaccggggccaccaggagggaggtttctgggtgtctctggggagcccctgggccagattttcc

SEQ ID NO: 392432 - DNA, 90 bp, Homo sapiens
gcagcggcgggcctgaggcgaaggagcggccgggagcccgccgcgctggtagcggtacaaggaaatggtagaactagtgatctcacccag

SEQ ID NO: 392433 - DNA, 82 bp, Homo sapiens
gcgtttactgggcagctgttacgcacttctcagaacttctggatgagttttcccagaacgtcttgggtcagctcctgaatga

SEQ ID NO: 392434 - DNA, 100 bp, Homo sapiens
ggctgggaagaagcatatacttttgaaggtgcaagatactatataaagatgtttcgctcagatcgaatgtggagctgccattggaaatggaagcccagtc

SEQ ID NO: 392435 - DNA, 75 bp, Homo sapiens
ggcggagtcggggctcctgacgaaagaagcttccggttctgaggtcctggaggtgccatttccctctctgttgaa

SEQ ID NO: 392436 - DNA, 50 bp, Homo sapiens
ggctaaggaaaccctattacctccagaggcccagaaatctaaagatcttt

SEQ ID NO: 392437 - DNA, 98 bp, Homo sapiens
caaaaggcaaagtttgatgtatcaggttcctctatgacttctaccactacttctacatggtgaccaacgcactcttctacgtcagctccaccatcaac

SEQ ID NO: 392438 - DNA, 100 bp, Homo sapiens
cgagtttgccaccttccccaaggggtccgtccgagggatgacctggctcagagtcatagacacactttggctgatccccatcacattcctgaccatcggc

SEQ ID NO: 392439 - DNA, 75 bp, Homo sapiens
ccgctccgagcccgtccggactcccccgatcccagtttgtgaagtgtggatatgcaggctctaactttccagaac

SEQ ID NO: 392440 - DNA, 100 bp, Homo sapiens
gccgaggagcgggaagagttgctgggagctgagctcaatgtgcagcaatggatgacgacagcctggatgagcttgtggcccggagcccagggccggatgg

SEQ ID NO: 392441 - DNA, 75 bp, Homo sapiens
cctttggatccgcagaaatcgagctgacacagcccttggcactgatgatgtatatgatgaaaaaggatgccagtg

SEQ ID NO: 392442 - DNA, 100 bp, Homo sapiens
gcggccttcgggctgacgctgctgctcgccgcgctgcgcccttcggccgcctacttcggaggcagaagaggcctggaccttggcgcacacagacccagga

SEQ ID NO: 392443 - DNA, 74 bp, Homo sapiens
caccatctccatcacccaccaacaacaccacaataatccacagccaaggttcccgtgtcagtggctatgatgac

SEQ ID NO: 392444 - DNA, 51 bp, Homo sapiens
atcagttttacaggaaatatatgtgtagcatttgccaagcggcagcagcag

SEQ ID NO: 392445 - DNA, 74 bp, Homo sapiens
agagtccgcggccggggcgcgggaggattcagcaccatggcggaagacatggagaccaaaatcaagaactacaa

SEQ ID NO: 392446 - DNA, 90 bp, Homo sapiens
gatatactactaactttgaaatggaataaggtggatagatacttctcaagacatcacacagcgtgagtcaatcaaggagggaagccacaa

SEQ ID NO: 392447 - DNA, 82 bp, Homo sapiens
tcctcgtgtttgtcgtcttcttcatctgctttggcctgaccatcttcgttgggatcagagggccacactgcgttactgagca

SEQ ID NO: 392448 - DNA, 87 bp, Homo sapiens
cctagtagaaaaagttcttgggacaaacttcatttggtgtatactcttgatgtaccagatgcattctattactgttatagtccagac

SEQ ID NO: 392449 - DNA, 74 bp, Homo sapiens
ctcattccaagttccaggattaattctgatcttcctctgatggcgctgcctccatgccatgccctctgccagtt

SEQ ID NO: 392450 - DNA, 83 bp, Homo sapiens
gagggagctagcactggacgcagccctgggctgcagaatcgctgcatttgacattgtgcagcaaagaaatggttatggagaag

SEQ ID NO: 392451 - DNA, 82 bp, Homo sapiens
ggactctacctggggatatacatgcatgcaccaaaacgaggacaggatctgaagcttgttggaattagtcaacctaaatatg

SEQ ID NO: 392452 - DNA, 90 bp, Homo sapiens
gtgaaaattctatctgtgtgggtttcaagagagactactacctaataaggcctccacctcctggatgccctcccaatgctgctcagcttg

SEQ ID NO: 392453 - DNA, 100 bp, Homo sapiens
ggaatatatcctgactgattgttgaaatcacaaagattagacacctttttagataggtgttcttcagcaccactgacaacacggttctgacagtatttca

SEQ ID NO: 392454 - DNA, 83 bp, Homo sapiens
ctcgaatcattctttgtacagaaattgaaaggcttcaaagctagcagatcaaactgttgagggtccacaaacaggctgaagac

SEQ ID NO: 392455 - DNA, 83 bp, Homo sapiens
agcgggccacgcacctcgtcaccaaggccaaggctttcatgagaaggacaagaagccatattgccgaaaggatttcttagcca

SEQ ID NO: 392456 - DNA, 96 bp, Homo sapiens
gctaaacagagaatacaagaggattatcttagaattttaagatacttcaggtggagggagcaaagtcctgcacactggagtggtgtactagcggat

SEQ ID NO: 392457 - DNA, 93 bp, Homo sapiens
ggctggcattggaaccgtgtttggcagcttgatcattggctatgccagattcatgcattgatcacaggcccatttgacactccttatgaaggg

SEQ ID NO: 392458 - DNA, 100 bp, Homo sapiens
ccgtgtgcctggacctgcccaaggcctccgtgtaccagatcttcagtcgtgctggtgaagcctgcaaaaaggtgatacttaatgtaccttctaaactaga

SEQ ID NO: 392459 - DNA, 75 bp, Homo sapiens
aagagcactagtgtctagaaggcactaagggcctccggtgtggctgtctctgatggtgtcatcaaggtgttcaac

SEQ ID NO: 392460 - DNA, 117 bp, Homo sapiens
ttcattttaattttgccggaatatttcaagacaccgaaagggcttccgttacaagatgaggtctgtgtatgctcacttccccatcaacgttgttatccaggagaatgggtctcttgt

SEQ ID NO: 392461 - DNA, 107 bp, Homo sapiens
gcagggctctaggaaacatatgttacgatagccagagacaagagagacacctccaacttcgacaaagagttcaccagacagcctgtggaactgacccccactgataa

SEQ ID NO: 392462 - DNA, 101 bp, Homo sapiens
ccccccagtctcggagatctcagaggcaccgactgggagctgccactgcagagccccgccatggaagacacgccgttggtgatatcgaagcagaagacgga

SEQ ID NO: 392463 - DNA, 75 bp, Homo sapiens
cgggtttgtgtgaacaggcacgcagctgcagagttacatccatatgggagaatagtctccagatcactacaattt

SEQ ID NO: 392464 - DNA, 100 bp, Homo sapiens
ccgaacaccatcctttcttccagctgccacacagaaggtatatgctcgtatgtcagaagtcttaggaataacagatgacaaccacgttctagagacgttc

SEQ ID NO: 392465 - DNA, 99 bp, Homo sapiens
atttaatggaaaatcgcttggttaaaacctgacacttttaacagtctggagaggtgttggtgaatgttaaggagcactcccggcagatcaacgacatcc

SEQ ID NO: 392466 - DNA, 100 bp, Homo sapiens
cctgtctcttggatggagtaccagtagctttaaaaaaagtgcaggcattatggagaggctattcttggaggaagaaaaatgattgtacaaaaattaaagc

SEQ ID NO: 392467 - DNA, 100 bp, Homo sapiens
ggtggcaattcaccgaattcgaatcaccctaacaagccgcaacgtaaaatccttggaaaaggattgctgagctgaaaagaggtgctgaaattattgtttg

SEQ ID NO: 392468 - DNA, 101 bp, Homo sapiens
aaaacattagcctgaggaacaacttctcacctggggcgggtgggttctgcaccaccctcccaccctccttcctccgtgtggacgatagagccacatccagc

SEQ ID NO: 392469 - DNA, 80 bp, Homo sapiens
agacagagaagctgctgcagtttcagtccaagtggtaagaagttcagaagcaagcctcagttggcaaggtacctgggaaa

SEQ ID NO: 392470 - DNA, 90 bp, Homo sapiens
cctatattgatgtggcagttaaactgaaagatgtaaaaaaagattggtctgaccatgctctctggtgggaaaagaagagaacttggcttc

SEQ ID NO: 392471 - DNA, 100 bp, Homo sapiens
cagcgcctcggccgaacccctccgcagcaggaccacagccgctttgtcaactgtgtgcgattctctcctgatgggaacagatttgccacagccagtgctg

SEQ ID NO: 392472 - DNA, 75 bp, Homo sapiens
attggcaagaaagggcagaacctggccaaaatcactcagcagatgccaaagggggcagaccgggccgttccagtg

SEQ ID NO: 392473 - DNA, 103 bp, Homo sapiens
gggcgacctgggcaccagcaggacccgaggccaggagccaggggcccagaaggaccaagaatcgccttcagccctgtctggtgcatccttggcagaaagtgag

SEQ ID NO: 392474 - DNA, 50 bp, Homo sapiens
cccaacatgctggtgtacagaaagtgaagcagccgacacgagtcgttgtt

SEQ ID NO: 392475 - DNA, 83 bp, Homo sapiens
ctgtgtggttttaccgcccagagagcgtcatggacctgggtttccaatacttatctacaggaatcgccatgaccccagctctg

SEQ ID NO: 392476 - DNA, 101 bp, Homo sapiens
gagctgcccggctcggcagcgggaagaactgccattggatgtccagaatcccctgtagttgataatgttgggaataagctctgcaactttctttggcattc

SEQ ID NO: 392477 - DNA, 96 bp, Homo sapiens
ggctccaccgaggccatttaccggcgctacagcaagttttttgacctccagacagagcttgagaataaactacagcagcagttaacacaggcagcc

SEQ ID NO: 392478 - DNA, 88 bp, Homo sapiens
gtggcatcttctacaaacccatttcagaccaatgccagaggagcaacaggtcgtccttggtggaaggaaccatgaactggcatctccc

SEQ ID NO: 392479 - DNA, 89 bp, Homo sapiens
ccgcaaggccgcccgggaactgctgacgcttgatgagaaggacccacggcgtctgttcgaagggctggttcttgtgctgaaacaccacg

SEQ ID NO: 392480 - DNA, 50 bp, Homo sapiens
accgacatggcccggaggcagcagaagattgtggtggtctgggtgggcac

SEQ ID NO: 392481 - DNA, 89 bp, Homo sapiens
gattgctgtgtgaaaaccgagctgctgggagaaggtacggacattgctgcaggagaagaggttgccatcaagcttgaatgtgtcaaaac

SEQ ID NO: 392482 - DNA, 71 bp, Homo sapiens
ggaaggtgagatcttcgacacagaaaaagagaaaacattcctgagaagtggaccccagaggtgaagcactt

SEQ ID NO: 392483 - DNA, 99 bp, Homo sapiens
gctgctttgtggattggggagctccccattagcggaggcagcccaaatgtctgtgcccttcaacagattttgggcaccaaaaagaaatacttcagcact

SEQ ID NO: 392484 - DNA, 100 bp, Homo sapiens
cctatggctcaaagaaagatgattatgtaattcatttgcacacctgttagcaagaaacagaagttgaaggactggaacaagtgaactaggaaagagggaa

SEQ ID NO: 392485 - DNA, 90 bp, Homo sapiens
cagggatgtctacctggtaatagaggacttgaagcagaaagcaagtgaatacgagtcagaaggagtacaagcgcaagctagccagagttt

SEQ ID NO: 392486 - DNA, 82 bp, Homo sapiens
ctaaaatagaaaaatctccagctcctcaaaagatgatttcaagctttttagatcagcaagccatcctgtttgtggacactgc

SEQ ID NO: 392487 - DNA, 74 bp, Homo sapiens
cgagcaaccagaaccggagcatggaggcgcacaacatcctcagctccaattaaggaacagctatatcctgcttc

SEQ ID NO: 392488 - DNA, 100 bp, Homo sapiens
aggaatgttttccatcccgccacgcgcctcccgaagctcccagaccggaggctcagcccccatctcgttgtatcacggactgattcaccgagcccaaccg

SEQ ID NO: 392489 - DNA, 82 bp, Homo sapiens
tcctggccaccgactcctacaaggagcaggccgggctctcgccatgggtcactgtcgcctctgccacgggaagttttcctcg

SEQ ID NO: 392490 - DNA, 100 bp, Homo sapiens
tgagctggaggttggagcctgaagatggcacagctctgtggtgatgatgtccagcaactctgtgaagcaggagaagaggagtttttggaaatcatggcac

SEQ ID NO: 392491 - DNA, 96 bp, Homo sapiens
cggaggcgtgaggaggacgccaggtggacacgcccatccttggacttcctgaaaatgacccaggaatactcccccagttgcaagaggcgcaggacc

SEQ ID NO: 392492 - DNA, 50 bp, Homo sapiens
ggaaattaactatctgtacttataagtttgacaacttaaatgctgcgcat

SEQ ID NO: 392493 - DNA, 98 bp, Homo sapiens
ggatgacccttttgattctgacttttcttgtccagtcaaacttcatagagacagagatttgggattagaatctaccttaatatcgtcaaaacctcagt

SEQ ID NO: 392494 - DNA, 100 bp, Homo sapiens
acactgagagccgctttcatcaaggttattctcgttcaagttaatccaggtgagactttcacaataagagcagaggatggaacacttcagtgcattcaag

SEQ ID NO: 392495 - DNA, 100 bp, Homo sapiens
gccccatagatggccagctttcccccgagggtcaacgagaaagagatcggtaaagtcatgaagctgagccccaaagcagaggaagtagctacgttctttg

SEQ ID NO: 392496 - DNA, 98 bp, Homo sapiens
cttgtttttaacttttattctttcaaagaaaatagactgccattttccatcaagaaactaatctggattcactccctctggttgatacccactcaaaa

SEQ ID NO: 392497 - DNA, 51 bp, Homo sapiens
gaggaagaccgtggatggctacatgaattggaatgagaccgtggagctttt

SEQ ID NO: 392498 - DNA, 90 bp, Homo sapiens
gcttggcagtatcggtttgtcattgagttggaccttagcccatctactggcattgtgccaagacaatgcaaactccagtgaacattcccg

SEQ ID NO: 392499 - DNA, 97 bp, Homo sapiens
cttgctaacgctgccgtcggggaggattgatgtcccttcagcatcatgcagccgccgccgaggaaggctggtgagattggagagatgaaggatggag

SEQ ID NO: 392500 - DNA, 75 bp, Homo sapiens
gctggagaccgagctagatgggctcaggatgtgtctagtccgaatgaagcaggaaggccggagtgggaagtacat

SEQ ID NO: 392501 - DNA, 75 bp, Homo sapiens
ccagaggagatccggatgctcatccataaaactgaagatgtgaatactctgcttgtcaaaattcccaaaaatgat

SEQ ID NO: 392502 - DNA, 87 bp, Homo sapiens
ataatagaaggattcaaatgctagcagacacggtggctactctgcctcggggacgaaagcaggtactgaacgacacctgggtctcct

SEQ ID NO: 392503 - DNA, 75 bp, Homo sapiens
ccgccagtcagtgacttcattcccagatgctgacgctttccatcaccagatcatgtttgagaccttcaacacccc

SEQ ID NO: 392504 - DNA, 83 bp, Homo sapiens
cccgggccgttgatcttcggccccacacgattgctatgctatgccttgtatgactaagacctcttaccaagaatacgtgtcag

SEQ ID NO: 392505 - DNA, 100 bp, Homo sapiens
acggaaaaggaacagattgttcctaaaccagaagaggaggttgcccagaagaaaaagcttttaaaagcagtgcatcttcaaggccatgaaggacctgttt

SEQ ID NO: 392506 - DNA, 100 bp, Homo sapiens
atcacacagctgcctgggggccgtgtgatgcccaaggatcaatgtgactctaagaacaaatggatgaatgaatatccatatgaagagaaaaacaataaag

SEQ ID NO: 392507 - DNA, 100 bp, Homo sapiens
atgttgggtttagaaacgcatgaccgaaaatcagaagacaaacttgccaaagctacaagagacaggataacaaagccattgacctttgccgattgtgttg

SEQ ID NO: 392508 - DNA, 50 bp, Homo sapiens
cgctgacaagatcgagggcttctggaactctaatgatccaggacaaagaa

SEQ ID NO: 392509 - DNA, 88 bp, Homo sapiens
gaagaaaattccttcttggaacaatttatgatagaggaagggaaaaggccgaggcatcagcgtgtgaagaccgcaaagacgatcccga

SEQ ID NO: 392510 - DNA, 75 bp, Homo sapiens
atgccattgtagccagtgtgatggaggagctcgcccgtcagcgaggagtcctggagcgcacagagaagatggtgg

SEQ ID NO: 392511 - DNA, 100 bp, Homo sapiens
ggaatttccactgcatgctagctagtccttccctgtggcaggacctccacctgaaggagaacgtccctccttcccttttgctcctgtcccgcaccttcta

SEQ ID NO: 392512 - DNA, 75 bp, Homo sapiens
tgatgggcgccagttccccaaggtgctgaagggcctgaccatcactcattaagaacagaggaggctgcctgttac

SEQ ID NO: 392513 - DNA, 75 bp, Homo sapiens
cctacctcaagctgagacactggcagtggtggcggctgtttaccaaggtatcactaccattaaagttaacattcg

SEQ ID NO: 392514 - DNA, 76 bp, Homo sapiens
ggagcttcgccaaggctggcgcagtcggtgctgctgatgtagagaaggtggaggaaaagtcagcaatagatctgac

SEQ ID NO: 392515 - DNA, 99 bp, Homo sapiens
agcactgatgactattttcaccatcaagatgggtacagcccaccttgggacaccttgactccaagcccagcagtaagtccaacatgattcggggccgca

SEQ ID NO: 392516 - DNA, 98 bp, Homo sapiens
gcgcagcggcggcagcggagagcgagagaggggagcagactattgcccagaagaaaagatgtttggttttcacaagccaaagatgtaccgaagtatag

SEQ ID NO: 392517 - DNA, 100 bp, Homo sapiens
atataatccattctcggattctagaacaagttgtctgctggttctcagcttgaagaagattctgcagtccttattgatcctttttcttggcgttaccatt

SEQ ID NO: 392518 - DNA, 100 bp, Homo sapiens
gggagctgggcggccatttaccaggacatgatccacatcgcggacaccaaggtcgccaggcgttatggggatttcttcatccgtcagatccacaaatttg

SEQ ID NO: 392519 - DNA, 83 bp, Homo sapiens
accatgccgctcctaagcctgcacagccgcggcggcagcagcagtgagaggtctgtctcgttggaaaatccagaacataccct

SEQ ID NO: 392520 - DNA, 100 bp, Homo sapiens
tgaggaagcccaactcctatgagctcctctctggcaggtgggaaactttcagcgacaattggcagaagctaaagaagacaactgcaaagtcacaatcatg

SEQ ID NO: 392521 - DNA, 82 bp, Homo sapiens
cagctgcaccccaccttgatccagcggacttacggctccatctggctcctgctgaagaaccccacgttcatcctgctctgcc

SEQ ID NO: 392522 - DNA, 75 bp, Homo sapiens
aaggaaagcagctgagatccagaggagtggaaggctcccccttgactaaagctgtggagatgacccctgagaagt

SEQ ID NO: 392523 - DNA, 50 bp, Homo sapiens
gcactctcaggaacctggcaacaggctgcccaggctttgctgaggttctg

SEQ ID NO: 392524 - DNA, 104 bp, Homo sapiens
ggctttcaacccccacctcagcccagcaattcgattttaacctttgagaccaagaacccgtcggaattagcagaacgtttgcgctctgtttgtgggaatcagag

SEQ ID NO: 392525 - DNA, 74 bp, Homo sapiens
gaacatgcatatttgggtccaactgtgaagccagatgataagcacacactcacgggacacagtgggaaagtgct

SEQ ID NO: 392526 - DNA, 90 bp, Homo sapiens
ggcgcctccagggaaacgcggagtgtcctggagcttgacgcgctggagcttgagagtgcttcgtttgattctacggtgcgactgtgggac

SEQ ID NO: 392527 - DNA, 75 bp, Homo sapiens
agcgggtctccaggctggcgagcgcccaggcctccggtgtggctgtctctgatggtgtcatcaaggtgttcaacg

SEQ ID NO: 392528 - DNA, 109 bp, Homo sapiens
cagccactcggagctaatccacaatctccgcaacgccttcctgagtcctggatctttcttccttctggaaatctttgactgtgggtagttatttatttctgaataagag

SEQ ID NO: 392529 - DNA, 100 bp, Homo sapiens
ggaaccggggccgccttcagccaagcggcctaaactctcatctccggccctctcggcgtccgccagcgatggcacaggtctgagttcactgacaccatcc

SEQ ID NO: 392530 - DNA, 83 bp, Homo sapiens
cagggaccaggcggaggcgtcgcgggagcctttggggcaccacagagatgcgggattttttatcaagcagaaatgcatcgaac

SEQ ID NO: 392531 - DNA, 99 bp, Homo sapiens
cctccggaccatggccgacgacgacgtgctgttcgaggatgtgtacgagctgtgcgaggtgatcggaaagccatttcataattctgaatcatgtctgat

SEQ ID NO: 392532 - DNA, 51 bp, Homo sapiens
ccgtggcctcctggtatgagcagcccgtgggtgctggctgccaagtcttcg

SEQ ID NO: 392533 - DNA, 83 bp, Homo sapiens
ggaatacaagtgtcatgtctgtggagctggaagtcgagtgtgctactcaactcaggagatttggagacaaactgaacttccgg

SEQ ID NO: 392534 - DNA, 75 bp, Homo sapiens
cagcacccctcctcctggcaatgcaggccttccagaaacctttgccaaagggtgctggagatctagaagacccat

SEQ ID NO: 392535 - DNA, 82 bp, Homo sapiens
ggcactggccaagaagctcctggcaaaactgcgctttctggctgaggagagtgtgactccagctgtgtgggctgcacagggg

SEQ ID NO: 392536 - DNA, 100 bp, Homo sapiens
aaggaagccaagttggaccgttctgatgtgactgagagagaaggttaattggactcctgagattaacaaagaacacttgctacagggtctgcttcctgat

SEQ ID NO: 392537 - DNA, 50 bp, Homo sapiens
gctcaggaaattttccaagacaagtatgagttaatacagaaaggagtgac

SEQ ID NO: 392538 - DNA, 49 bp, Homo sapiens
tcccgagtacctgggactacagatcttggacatgatacctggatgtgca

SEQ ID NO: 392539 - DNA, 100 bp, Homo sapiens
attgggacctcatgtaagaatggagggtgttcaaagccagagactgctgctactttgaaacgtacgatagaggccctgatggacagaggagcaatagtga

SEQ ID NO: 392540 - DNA, 50 bp, Homo sapiens
gggagttacaccgccaccgccagtgcatttgcccagtataacatggatca

SEQ ID NO: 392541 - DNA, 100 bp, Homo sapiens
gaaggagggctctcctgtctgccaccatcctgggttgacaattctacacaaggagagatcctgcatattttgatgaaaattggctaaacagaatcaaaac

SEQ ID NO: 392542 - DNA, 82 bp, Homo sapiens
gagagaggctctttctaccccgggagcggcttcgccttctacagcctggactacatgtactaatggtcacttgatgtgcgct

SEQ ID NO: 392543 - DNA, 75 bp, Homo sapiens
cctggactcgccctcctatgtcctgtacaggatgcctaaatcaaaggaacttgtttcttcaagctcttctggcag

SEQ ID NO: 392544 - DNA, 100 bp, Homo sapiens
agccatcttcaaaatctacctctcttgtttggaagaactgatgaaggtggccctcatgacactgacgctcttcccggtccggctcctggttgccgctgcc

SEQ ID NO: 392545 - DNA, 71 bp, Homo sapiens
ggaccggtgccggagagccacgcatgcgcactgccaatggagatcttcgtggatgatgagacgaagttgac

SEQ ID NO: 392546 - DNA, 83 bp, Homo sapiens
tggagacagtggtggtgactgtgaccatgatgaccgctgggagacaaaagaaggggcagcatccccagcccctgagactccac

SEQ ID NO: 392547 - DNA, 96 bp, Homo sapiens
tggccttctggtatgggaccaccttggtcctctcaggggaatattctattggacaagtactcactattaacattgatgggcaggatattaggaact

SEQ ID NO: 392548 - DNA, 90 bp, Homo sapiens
cgggcggccgcttgagatcggcgctttgagaactgagcgcatgtggagttcggaggaaaagggctcagtcgcccatgtttgatggaaaag

SEQ ID NO: 392549 - DNA, 83 bp, Homo sapiens
tgtccagtaatggctttctactctaccaccccagtattaacattactgaaatgatcccgatgggacacttgggggaccctgag

SEQ ID NO: 392550 - DNA, 100 bp, Homo sapiens
ccgaccgaggccattataactcaaattcacaacctccggggatgcgaaaacacccggccttactgaggaacaaagggaagatgatccctatgatcttgaa

SEQ ID NO: 392551 - DNA, 100 bp, Homo sapiens
gaaaaagacaaatacaagtgaaaaaaatagactaatggattaacgtccctgtcgtgtgacattttctggggttcaactagatatagcttcacaatctctg

SEQ ID NO: 392552 - DNA, 76 bp, Homo sapiens
cggacttccaagacctgcggccggacgcttgcggaccgccaatggagatcttcgtggatgatgagacgaagttgac

SEQ ID NO: 392553 - DNA, 100 bp, Homo sapiens
tggacagcaggccccgcgccgggtactccaaagattcaggtttactcacgtcatccagcagagaatggaaagtcaaatttcctgaattgctatgtgtctg

SEQ ID NO: 392554 - DNA, 88 bp, Homo sapiens
ggctcaatgggaggagctgaaaaagaaagcggctggtcttcaggctgaggtggataagattgtggaccagctgcagcagttaatgcag

SEQ ID NO: 392555 - DNA, 75 bp, Homo sapiens
ctggaccagcaccatgagatgaagccctgtatgatgagattcgtcagtttcgcaaggcctgtggggaggctcatc

SEQ ID NO: 392556 - DNA, 75 bp, Homo sapiens
gagtgttggctgcatatttgcagaaatgtttcgtagaaagtgcctatcaagtggatggcattggaatcaatttta

SEQ ID NO: 392557 - DNA, 96 bp, Homo sapiens
ggaggagctaggagaactatcagagcagttttacaaatatgcagtacaaagtatctttagaagatctgtataatggcaagacaaccaaactacaac

SEQ ID NO: 392558 - DNA, 71 bp, Homo sapiens
agacttgctagttaggattttattactggcagcatgtatatcttttatggcgggtgaaaaagttgagaagc

SEQ ID NO: 392559 - DNA, 100 bp, Homo sapiens
cacgcagctgaagctcatcatgaccttccagaattacgggcaagcgctgttcaaacccatgaagaagctcttcgtgggcggtcttgactggagcacgacc

SEQ ID NO: 392560 - DNA, 98 bp, Homo sapiens
ccaaacctgtgataacctgtctcaaaaccctcctcatcatctactccttcgtcttctggctggagaatgctggaggagaccttaaggatggccaccac

SEQ ID NO: 392561 - DNA, 74 bp, Homo sapiens
tctttcttcactcctcttcacttcttcaatgctgagatgaatcgtcacctgtgtgtttggctttttagacatcc

SEQ ID NO: 392562 - DNA, 50 bp, Homo sapiens
gtacgcgaaggatatcggtttcattaagagacaggctcttgccatgttgc

SEQ ID NO: 392563 - DNA, 101 bp, Homo sapiens
tacaaatacccctttgaattaattatggctgccaggagtggtggctcacacctgtaatcccagctctgggaggccaaggccagtggattgcttgagcccag

SEQ ID NO: 392564 - DNA, 49 bp, Homo sapiens
agaaccggtacctggatggcatggctggtccagggaccctcatcatggc

SEQ ID NO: 392565 - DNA, 100 bp, Homo sapiens
aggagaccatagctgcacagccagatttgtattgaacgatgtcttgagaggggaaagagtagtggtaggagtgatgacaacagagagagcttggaaaaga

SEQ ID NO: 392566 - DNA, 51 bp, Homo sapiens
gcagaataattgcagaaaatcttcaaagcgggaacttcattgcaggccgtg

SEQ ID NO: 392567 - DNA, 51 bp, Homo sapiens
ggcctcagttttctttctaggacaggtatgacaaggcccaggccacagccc

SEQ ID NO: 392568 - DNA, 75 bp, Homo sapiens
gcagaaaatgaatccatacaagattgatataggcgcagtatattctcacagatgtgaagcctcagtttaggtcat

SEQ ID NO: 392569 - DNA, 95 bp, Homo sapiens
tggctataatgggtatggaggaggacctggaggtggcagctttggctatcgcaagtggcaatggcttgttactcaaaggagggaaggaggctgca

SEQ ID NO: 392570 - DNA, 100 bp, Homo sapiens
aacttataacatcgtatggggtcatcgcagaggctttgctcaggttgcaattgatgcaaaagtggtccttttggaataaatcatgggattgagcttcatt

SEQ ID NO: 392571 - DNA, 100 bp, Homo sapiens
tcggactcctgcgaccgcatcaaagacgaatttcagctactgcaagctcagtaccacaggttatgccaaggacgccctgaatctggcacagatgcaggag

SEQ ID NO: 392572 - DNA, 100 bp, Homo sapiens
tgaaagtgcgaactgcctatccgtcattgagacttattcatgctgtcagaggcaaacagtgacgaatctcagcttctgacaccaggaaagatgagtcagc

SEQ ID NO: 392573 - DNA, 100 bp, Homo sapiens
gtcaaggcactcagctcaaatacacacacctgttgccattatagagctggaattaggcaaatatggacagatattaaggctaagacatactgcatttgta

SEQ ID NO: 392574 - DNA, 50 bp, Homo sapiens
cttttcattagaaaccgcacaagaatggatcttggagaatgtctgaaagt

SEQ ID NO: 392575 - DNA, 100 bp, Homo sapiens
gggagagtgagagaaaggctggaagacgagctcagagtcaagatctccactgaagttggcatcacaaatgttgatctttccaccgtggataaggatcaga

SEQ ID NO: 392576 - DNA, 75 bp, Homo sapiens
gaagagggcctgaaaatcaggaagatgtgacctccacaaaaggaaatgagtttgaagattactgtttgaaacggg

SEQ ID NO: 392577 - DNA, 98 bp, Homo sapiens
ggctcggttcggtcgcgttacagggcaggcgccggggccaaggcagggagggatcttaggagagatcgtaggattctgaaaaagagttccacgtcctc

SEQ ID NO: 392578 - DNA, 89 bp, Homo sapiens
ctgaagggaggaaatagtggcaggtgacagtctgcatgtgcagttttcaggtacaatgccagggagtactacgaccacctgcccgagct

SEQ ID NO: 392579 - DNA, 51 bp, Homo sapiens
gaagttttccacctaccatgctctcgtttctgatgttctggaatcggttac

SEQ ID NO: 392580 - DNA, 100 bp, Homo sapiens
gggctccggctccggcttctgctgttgctcttctccgccgcggcactgatccccacagcttacaaaacactacacagcaaaataatgatctgctagactg

SEQ ID NO: 392581 - DNA, 95 bp, Homo sapiens
tgacttagtggaggaggtgcagctcaacttctaccagttcctcggggtgcagcagggtacatcagatgcctgggttgaccagttcacaagaccag

SEQ ID NO: 392582 - DNA, 100 bp, Homo sapiens
gtggacgcggcgagaaagcacggggtgaaactgaccacagtgctcaccacccaccaccactgaaaatgtggtgacctggaagaagaactcaagaatgtta

SEQ ID NO: 392583 - DNA, 100 bp, Homo sapiens
atgcctaatgcatttggacaagttgataggatatactttccaagatcgttgtctgttgcagaatttgccattttcagtggaaaacaagtggtcgttacta

SEQ ID NO: 392584 - DNA, 90 bp, Homo sapiens
gaaaccctccaaaccacgtcatctgattgaattgaatgatctggcacgggaccctccagcacagtgttcagcaggtcctgttggagatga

SEQ ID NO: 392585 - DNA, 100 bp, Homo sapiens
ctgctgatgtggggactgctcacgttcatcatggtgcctggctgccaggcagatgttcctcctgctgatcaagagaagctttttatccagaagttacgtc

SEQ ID NO: 392586 - DNA, 96 bp, Homo sapiens
acattttatgttatttctcaagtatttgaaataaaaatggatgcaagtttaggaaatctatttggtgcactaggccttccaatgagggggatgagc

SEQ ID NO: 392587 - DNA, 97 bp, Homo sapiens
taaaaccccagaggtcatcagattgtttgcaaagaaacaaccaggtcagcttcggacaaggttagcagaggcttgggcctggaacaggacaggcagg

SEQ ID NO: 392588 - DNA, 97 bp, Homo sapiens
ccgccggttgccgggaggtgaaccgaggtgctggagaatctggtaaaagcaccattgtgaagcagatgaggatcctgcatgttaatgggtttaatgg

SEQ ID NO: 392589 - DNA, 98 bp, Homo sapiens
gtaggctatgaccacgagaagccaggtgtggcagtgtggcgggagtgtggaggtcctgccctgctcacggattgcccacattgagcgagcccacaagc

SEQ ID NO: 392590 - DNA, 112 bp, Homo sapiens
atggccgccgccgccgccgccgcgccgagcggaggaggaggaggaggcgaggaggagagactttaccggtattgtaagaacaagccgtacccaaagtctcgcttctgccgag

SEQ ID NO: 392591 - DNA, 75 bp, Homo sapiens
gtgaccgagaccgcggccgggaccgaggaatctgcaaaatggctgataatttggatgaatttattgaagagcaaa

SEQ ID NO: 392592 - DNA, 90 bp, Homo sapiens
cattgggcaaaaacttgtgagggcgaaggtcgtattgaatggtgttgtagtgccggtggtggtgtgcacattgagccccggtatagacag

SEQ ID NO: 392593 - DNA, 100 bp, Homo sapiens
gaacctgaaaaattcaagaagttgaaaaacgcttttcacgtcacctggagagatgcacagatccatatcatagattttgacgatgaaaacaacattataa

SEQ ID NO: 392594 - DNA, 82 bp, Homo sapiens
acaggcacaaatacatttacaagagccctgagctgccacggatactgagaaacgcttcgttaagggactcaggcagtacggg

SEQ ID NO: 392595 - DNA, 75 bp, Homo sapiens
ggattccaagtaactcttatttgaggactattttaacaaagggaaaaatgagcctgaggacagtaagcttcgatt

SEQ ID NO: 392596 - DNA, 83 bp, Homo sapiens
gtggtgttttctatcccagttctttggcttttactaaaaatggacgcctggcaaccaagcgcattctacattctaaaggggag

SEQ ID NO: 392597 - DNA, 100 bp, Homo sapiens
cagttccccctgtacagcctgatcactccccagacgtggtcagcaacgcacagctatcttgacccacccttgggaaatcctcattgacgattcaatttgt

SEQ ID NO: 392598 - DNA, 74 bp, Homo sapiens
ctcctggacagaaataaaactggcttggatttacactgggcaacgtggttggaatgtatctggctcagaactat

SEQ ID NO: 392599 - DNA, 100 bp, Homo sapiens
tagaggacttccctttggatgtagcaaggaagaaattgttcagttcttctcaggtccccttcccctgagcccatctacaatagcgaggggaagcggctta

SEQ ID NO: 392600 - DNA, 75 bp, Homo sapiens
gggggatggttccatcatggcgtcaatgcaggagacagagctactggatctcagccttgtcaaagatgccagatg

SEQ ID NO: 392601 - DNA, 96 bp, Homo sapiens
gagaccaggaactcagcagagaaactttgtgagtgtgaacatggctacgcctcttcattcccgtccatgccgagcccccgactgcagcattcaaag

SEQ ID NO: 392602 - DNA, 100 bp, Homo sapiens
tgaaaattgagctgtccatgcagccatggaacccgggttacagcagtgagggggccacggctcaagatcccagtcacccaggcctgcctcatggaggaca

SEQ ID NO: 392603 - DNA, 100 bp, Homo sapiens
ctctggccaggaagatagctgagcagcagcgtcgccaggaaaagatccagaccaaacctggaccacccaaaaagccgaagaccccttcaagaccatcagc

SEQ ID NO: 392604 - DNA, 100 bp, Homo sapiens
agcggctgctgagccgggtggccgccctgttccccgcgctgcggcctggcggcttccaggcgcactaccgcgagctagagccggtgcaggccacgcagaa

SEQ ID NO: 392605 - DNA, 87 bp, Homo sapiens
caagagcactagtgtctagaaggcactaagggtactccaaagattcaggtttactcacgtcatccagcagagaatggaaagtcaaat

SEQ ID NO: 392606 - DNA, 100 bp, Homo sapiens
ccaggacagaaaagacagtgttctgctttcatggagttcacagaagagtcgaggagattctctaaccatggcacaggtagagaaacgtggaggtttgctc

SEQ ID NO: 392607 - DNA, 74 bp, Homo sapiens
gggaagtcgcctctgtgctcatacgaacctaaactttcaaaacctgtcagtgattgggttccgaatcctcctcc

SEQ ID NO: 392608 - DNA, 75 bp, Homo sapiens
agaagtacctgcttcagagacatgagaagattcatactgatggttcacaggcaccagccagaccccctaaaccac

SEQ ID NO: 392609 - DNA, 80 bp, Homo sapiens
ccggcggatagagaagagcgagtcgtcgtgagcgcggtcggcggttgaaggggcccggccaggactcggggaagggtggc

SEQ ID NO: 392610 - DNA, 100 bp, Homo sapiens
gaacatgggtccgtggtcgtttgtttctccaaggtttgaaaagcagctggcctgcaagaggttgacggatatattcagacgttacgacacggatcaggac

SEQ ID NO: 392611 - DNA, 101 bp, Homo sapiens
ctctggcaggatgaggcgtgcaggcctggggacaatgactcattcttcccaggacactggttcttgtggcattcaggaagatggaaagctttatgtggtgg

SEQ ID NO: 392612 - DNA, 107 bp, Homo sapiens
ctggaacgggactttgcagaaatgtgtgcagactacatggcatctaccatagggactgaatctatgcttaaaatagcagaagatctgggaggaccgtatgtatgggg

SEQ ID NO: 392613 - DNA, 114 bp, Homo sapiens
gaccctggagcctcagttggaagcagccgatccagcctgcggagcctgtggggcaggttaaagctgaagctcaacaaagatatagtgatctctgtgggcatttataatctggtc

SEQ ID NO: 392614 - DNA, 86 bp, Homo sapiens
gtgggaacccaggccccgccgaggcggccagtttttcagaagaagtgaagtcaagatgaagaaccatttgcttttctggggagtcc

SEQ ID NO: 392615 - DNA, 100 bp, Homo sapiens
cacctgttaacatctttaaggcaggagctgatgaagagagagcagagacagctcgtctgggtgttactatcgttaaaccaatagtttacggtaatgttgc

SEQ ID NO: 392616 - DNA, 100 bp, Homo sapiens
cgagagttcctggccgagttcatgagcacatatgtcatgatgatccgagtgaagcctgacaggaccggtgtggtcacggatggtgtgaagcactccatga

SEQ ID NO: 392617 - DNA, 100 bp, Homo sapiens
agcaacagtggcaatgagaccagtggaagcagcaccatcggggagacaagcaagcaaagggcctctgagggagtattacagccgcctcatccaccagaag

SEQ ID NO: 392618 - DNA, 75 bp, Homo sapiens
gcctggtctccattatttgagatgagttacatcttggaggctggagcattggatttgctaaaggagcttaagaat

SEQ ID NO: 392619 - DNA, 90 bp, Homo sapiens
aattctggacacattgtattggtttgatgctcctacctggaacaggacatgggcaagttttgcctcacatacgaggcctccatgacccgg

SEQ ID NO: 392620 - DNA, 100 bp, Homo sapiens
gaacatctctgtgccagcgagtttgtggagcagcgtgacttcattggagtggacagcacaggaaagaggctgctcttcatggctaatgaagcagacttgg

SEQ ID NO: 392621 - DNA, 75 bp, Homo sapiens
ccgaggggctgcgcttcctgcacaccacggatgcagcagcttttttatgagaattacgagcagaacaaaaagggg

SEQ ID NO: 392622 - DNA, 82 bp, Homo sapiens
gcagctggatgtaccgcatgtgatcactctgggactcgtggggctgcagcaccgtctggcgaaattgatattgtgaatcaca

SEQ ID NO: 392623 - DNA, 104 bp, Homo sapiens
cggcagcagcccgacgcaaaccaaggatctggggatcttcgcactatcccaaggaaagaccacagcaagattctttcattcgtctcctcctagcctgggggacc

SEQ ID NO: 392624 - DNA, 90 bp, Homo sapiens
tatacttacactactgaacaagattgaaaaacttctcagggtgcctgtggacatacgagatccagttctctcaggacggtaaggcgtaca

SEQ ID NO: 392625 - DNA, 82 bp, Homo sapiens
tggctctctgcaaccagttctctgcatcacgagaatttgcagccttcaagtagccaccatcatggcagcatctgctcttatt

SEQ ID NO: 392626 - DNA, 101 bp, Homo sapiens
gccgacagtggttctgttctaaaggaagctgtgctgaatggtttggtggccactgaggtgttgatgtggttttatgtcggagagattataggcaagcgggg

SEQ ID NO: 392627 - DNA, 100 bp, Homo sapiens
gaaattttgagccatttcgaatcacttaaaggagtggacattgctagcaatgagctcccaaagccatccagattcagtcccaagtccaagatccctgcaa

SEQ ID NO: 392628 - DNA, 80 bp, Homo sapiens
acctgtctgacgatagtccaaaaactgaagaagatggtggataagcccacccaggccaacatgcaaaagtcttctgtacc

SEQ ID NO: 392629 - DNA, 96 bp, Homo sapiens
ccccagcggcaaggaccagaccgtcgggaacagccatgcaaaggcaggggaggaagccacctcgagggcaggagcgatttggcaacatgacccgag

SEQ ID NO: 392630 - DNA, 100 bp, Homo sapiens
tccagagttgcatacagaccaatttctgcatcagtgttatctcgaccagaggctagtaggactggagaggaacagattatggcctttgcaagcaaatgag

SEQ ID NO: 392631 - DNA, 48 bp, Homo sapiens
ggggatggtatgctggatatacagtcgttccccatcaggaagtcctcg

SEQ ID NO: 392632 - DNA, 50 bp, Homo sapiens
gatcgcatcattcctggagaggaagacaatgcagatcttcgtgaagactc

SEQ ID NO: 392633 - DNA, 83 bp, Homo sapiens
ccgcgctaaagccaagcgtcgtcgtcacccaaggttaaacccatccagagtaatggctgcggccttacccaggaccctggggg

SEQ ID NO: 392634 - DNA, 100 bp, Homo sapiens
cctctccaagttcatgtcctgtgtctcaccttgggctacttcatcttcgacttgggctggaccccaaattacgtgaacttttggatgtggggaacatcgg

SEQ ID NO: 392635 - DNA, 97 bp, Homo sapiens
gccttcgccctggagctggagcatgccctcagcgccatcgggcaacataggagcccgactcccaggtttgctataactggcctgagtgtttcctgta

SEQ ID NO: 392636 - DNA, 74 bp, Homo sapiens
ccggagaccccgagaggctgcccaaggaagttgcttgccggaaggaggaagaggaacggaaagctcgggaaaag

SEQ ID NO: 392637 - DNA, 134 bp, Homo sapiens
cgggggattgtgggagtctccgcgtcccgctcgctgggagagaggtacctctccttttccctctccctttccctaagcagcctgccttggcctcccaaagtgccgagattgcagcctctgcccggccgccaccc

SEQ ID NO: 392638 - DNA, 51 bp, Homo sapiens
tgtgcgccctcaacctgctttacaccgtgctggagaatctggtaaaagcac

SEQ ID NO: 392639 - DNA, 82 bp, Homo sapiens
aatcaactcagaagccccgcaataggcttaaacaatctggacaaggcatatgtggaacgctttagccacagtagaagacttc

SEQ ID NO: 392640 - DNA, 51 bp, Homo sapiens
acactccttggaatgaagaaagggtctgggggtggtggcatctcccctaaa

SEQ ID NO: 392641 - DNA, 101 bp, Homo sapiens
cagcgctcctggcgctgctggctgcgctctgcccggcgagtcgggctctggaggaaaagaaaggtatctcttgggtcacagattgatttacagaagaagaa

SEQ ID NO: 392642 - DNA, 114 bp, Homo sapiens
ccgcaccatgccgctcctaagcctgcacagccgcggcggcagcagcagtgagaggctaccggctctctgaccagttccacgacatcctcattcgaaagtttgacaggcagggac

SEQ ID NO: 392643 - DNA, 75 bp, Homo sapiens
aggaagcccttccgcggaccgaaagatagattctgttgctgttaacatttcaaacttggtgcttgagaatcagcc

SEQ ID NO: 392644 - DNA, 82 bp, Homo sapiens
agtccctgagccgcccctacacccacagagtgaagacatttccacctggacacctgaccatgtgcctgccctgagcagcgag

SEQ ID NO: 392645 - DNA, 100 bp, Homo sapiens
ctcaaccttgtgggatgtgaaaactctgttactgaaggcttttgacctttatgaacaaagatatgctgctgtgaagatacatcagcttaataaaagctgg

SEQ ID NO: 392646 - DNA, 49 bp, Homo sapiens
gccaggcgtgtactgcctatgtgtgctctccagaaacatgacaaggagg

SEQ ID NO: 392647 - DNA, 75 bp, Homo sapiens
agatggtccaggagaagctttgaaggctgtgaaggatggtaaagtgattttcccagctcccacaccgaaaaatat

SEQ ID NO: 392648 - DNA, 100 bp, Homo sapiens
gcaccgcgcctgctgccgggttgcgctccgtgcacctcttgcgggatgctcgtcagaagttccgctctgttctggttgaagcaacggtgaaactggatga

SEQ ID NO: 392649 - DNA, 100 bp, Homo sapiens
gcatgacatgcagactaccactgcccacctgtctttaccagtttccaagactatgttactgggcttcagactttaatttccaatgttgtggatcatatta

SEQ ID NO: 392650 - DNA, 50 bp, Homo sapiens
tactgcttacctcattgaaacaaggtcaaaatgcagatcttcgtgaaaac

SEQ ID NO: 392651 - DNA, 50 bp, Homo sapiens
ctgtttcacctgtatcgactttccaaaagataattctgaaataatcagca

SEQ ID NO: 392652 - DNA, 100 bp, Homo sapiens
aacagcacgtaccagaggtggaagtccaagtcaaacgcagaaggactgcctcactgagcaaccaagattgacaacacttactacaaagaggcagaaaaag

SEQ ID NO: 392653 - DNA, 75 bp, Homo sapiens
ctggaacaacacggtgttcatcttttctacaggtacaggaaaaacaatggtgatggacatgttttatgcttatgt

SEQ ID NO: 392654 - DNA, 75 bp, Homo sapiens
acaatcaaagaaggagatatagtcactctcatcaataagatcagtgtgcgtgtgaccaccatggatgcagagctg

SEQ ID NO: 392655 - DNA, 100 bp, Homo sapiens
ctccgcacctcggggacattattgcgcgtggaacggctgcttttggaagctccccgcagccaccgccacccattggaatggccaacaggggacctgcata

SEQ ID NO: 392656 - DNA, 100 bp, Homo sapiens
cccactaacggggacttcacctttgtctcctcagcagacgcggaagtgggccacagttacatttcatcttcctcatcatgtgttgaagtccattgccagt

SEQ ID NO: 392657 - DNA, 75 bp, Homo sapiens
ggggcaggggcggaggcggaggcagaggtggaggcgctttgaaagtttctttcaagatggcttgaaaacagctga

SEQ ID NO: 392658 - DNA, 75 bp, Homo sapiens
ccccgacggcagtccatgacggtgaagaagggagagcagcccctgtcaaagggaacaggaagcagtccacggagg

SEQ ID NO: 392659 - DNA, 100 bp, Homo sapiens
gcgagcgaccgacgcgccacccgccgacgcctcagccgcttggggcccgcacggaccctctacttcaatcaacagtacaaattctgaagtttgtaaactt

SEQ ID NO: 392660 - DNA, 82 bp, Homo sapiens
tgctgaggagaggagcgtcaacagcagcaccatggggtggcccagttgaaatccttcccttcctctaccttggaagtgccta

SEQ ID NO: 392661 - DNA, 75 bp, Homo sapiens
agccagaagcagtatttgtcctgatctcacattcttgaaggtggcattgaagagcactaagatcggaagatgagt

SEQ ID NO: 392662 - DNA, 100 bp, Homo sapiens
atggacaccgtctccatgcccgagttcatggccaacctcaggctcaggttcatttatacagggagcagagaaatccatatccctgattcgaggtggaagg

SEQ ID NO: 392663 - DNA, 82 bp, Homo sapiens
gatctcggagacgagtggtgggagaaccagccgactggagcaggcagcagcccaggtatcaatataagtgatgaggattttc

SEQ ID NO: 392664 - DNA, 104 bp, Homo sapiens
ttttaagaagaataaattaaccttggtggttgtagaagatgatgatcagcatctggtcaatgtttccaatgaagacacacgtgttcatattttacccccgcaaa

SEQ ID NO: 392665 - DNA, 82 bp, Homo sapiens
ccgcccacagacctcaaattcaaagaaatctcccaagcctaagaagaagaagcacaggaaggagaaggaggagcggaccaaa

SEQ ID NO: 392666 - DNA, 98 bp, Homo sapiens
cagcaaaaacagttcctccacatcaaagcagaagaagaccgaagggaagacttccagtagctccaaggaggttaagatagaagaagtcagagatgcca

SEQ ID NO: 392667 - DNA, 98 bp, Homo sapiens
tttcccaagaccagtttctttcaaaggatgcagatggtgacacccacataaagaagatccctaatagtcatttctcaacaattatatagtcaactgat

SEQ ID NO: 392668 - DNA, 74 bp, Homo sapiens
gtcgacatgagtgatgtggaggaaaacaacttcgagggcagaattgtagaaggcatgaaacaaaaaatgtggag

SEQ ID NO: 392669 - DNA, 75 bp, Homo sapiens
ctgggatcttagtacaaaacgtgttaaaaacttcagaggacgaggaaacaatcgtggctacaaaaatcaatctca

SEQ ID NO: 392670 - DNA, 140 bp, Homo sapiens
gcgctgcagaagcagcgtcaggccgaggagacggcggccttcgaggaggtgatgatggacatcggctccacccggcaggtcaatggccagcaaggaggggggtccgagccggcggcggcggcggcagtggtggcagcggg

SEQ ID NO: 392671 - DNA, 100 bp, Homo sapiens
cggcacgatgccctttgacttcaggaggtcagcacttatcaccccgcacctgtctctccaggacattccacagccgtggtcagtctgcctggctcccagc

SEQ ID NO: 392672 - DNA, 100 bp, Homo sapiens
atcgacaagaccatgctggcaagtctgaaggtcaaattttgaagacattttggctacaatatattttttgatgcacaagaatcccaaggtccaattgtgg

SEQ ID NO: 392673 - DNA, 100 bp, Homo sapiens
ccctccccggcgcaacatggctgcggccgccgcctccgcctcccaggatgagctgaggtgaggatccacgacctccgcagtggtaacatcgccctgtcgc

SEQ ID NO: 392674 - DNA, 90 bp, Homo sapiens
gatccgcctgcctcagcctccaaagtagctgagactacagaccgcctggacattagggcagcccggattcttctggataatgaccattac

SEQ ID NO: 392675 - DNA, 51 bp, Homo sapiens
aagatcgtaacaacttatgacatgggctgtactatgggaccacactgtgct

SEQ ID NO: 392676 - DNA, 98 bp, Homo sapiens
cttcagccttttaaagtatgcaagcaagcgcaagctatttttatgattcccacaaatccaccaccaacattcagaaagccagaactttggtccgatga

SEQ ID NO: 392677 - DNA, 83 bp, Homo sapiens
ggaaggtctcacctgaggtgaaccttcgaccttggacttctcagcctccagaatggtgtgtgtggtttcagcgcagcatggct

SEQ ID NO: 392678 - DNA, 76 bp, Homo sapiens
tcagtcagcctcagaggttgacttctacattgataaggatgtgtgcccctgtgatggtggagctggagggggagac

SEQ ID NO: 392679 - DNA, 97 bp, Homo sapiens
gcaggaaagaattaccactaccaagaagggatctatcacctctgtacagcccaatcaacacaatacagtgaagctgggagctttccaggctcaggaa

SEQ ID NO: 392680 - DNA, 96 bp, Homo sapiens
ctgaccagctcggccaggcagtgggccagcagcctggtgcctcccaggacgcaaacatgcagatctttgtgaagaccctcactggcaaaaccatca

SEQ ID NO: 392681 - DNA, 101 bp, Homo sapiens
agcctctcagcttcggagaatggagtcttccatcaatcatatctcacagcctctacagctttacgttccagtccaataatgagaaaaaaagtatctttaaa

SEQ ID NO: 392682 - DNA, 82 bp, Homo sapiens
gaaaagtataataaatgtaaacaactcttgcagcgcatggatttaggagaatgtaccaaaatccacgacttggccctccgag

SEQ ID NO: 392683 - DNA, 90 bp, Homo sapiens
tcttgaggttcacagatgatacctttgatccagaacttgcagcaacaatagcctgactggctcatggagaaagcctacctaagaatgaag

SEQ ID NO: 392684 - DNA, 52 bp, Homo sapiens
cgtcgactgcctaccaggagcaggtcccaggtgtgacaccttcagcaggtct

SEQ ID NO: 392685 - DNA, 50 bp, Homo sapiens
cactgcaggactaaccagtttgatgggaccatctagttgcaggaaaacaa

SEQ ID NO: 392686 - DNA, 49 bp, Homo sapiens
agcaatgaatgagcgttccagcttctccatgtatgtccctgggaagctg

SEQ ID NO: 392687 - DNA, 75 bp, Homo sapiens
ccctcatcttccaacagttggagattgaccattatgtgggcagtggagtgggagtgaagaagctgtgtgaactgc

SEQ ID NO: 392688 - DNA, 100 bp, Homo sapiens
cagaagactctgagcccccgaactctgcaaagcctccagaggacataccacctccaggatcaggatgcagaggtgtcatggagaaactccagctgggccc

SEQ ID NO: 392689 - DNA, 100 bp, Homo sapiens
aggtgaccctagagtctgaacgcaacagaattcagatgcgtagcttgcagcagcagttctccaggaatgtatcctgtcaggtataatgtcagtgaatggc

SEQ ID NO: 392690 - DNA, 90 bp, Homo sapiens
agcagttgtatcaagtccagcttgcacagcaacaggaacagcgcttaaagtttttgaaacaacaagatcagcgacaacagcaacaagttg

SEQ ID NO: 392691 - DNA, 100 bp, Homo sapiens
caccattggcaatgagcggttccgctgccctgaggcactcttccagccttccttcctggttatctgccatgttgtgggtatcacttaccagcacattgac

SEQ ID NO: 392692 - DNA, 90 bp, Homo sapiens
cccgcaatccacgccacggaatccccgaggaaagaccacagcaagattctttcattcgtctcctcctagcctgggggaccaggctcgaac

SEQ ID NO: 392693 - DNA, 100 bp, Homo sapiens
cgccggcgccggcccagcagctgcagccgcagcctgtggctgtgcagggccccgagccggcccgggtcgaggaggctgtgacattcaaggatgtggctgt

SEQ ID NO: 392694 - DNA, 110 bp, Homo sapiens
gtgtctcgtgtgtgaacatcacagcgtggagattggtgaaagcgtgagaggggaagatgtctacatcatccagagcggctgcggggaaattaacgacaacctgatggaac

SEQ ID NO: 392695 - DNA, 116 bp, Homo sapiens
gcgggagtgggtgcggcggcagcggcggcggcgcccgcgggtggtataaaatggcggatttcgaagagttgagggtctcctctgagcctccggcctccataagacccaaaacagat

SEQ ID NO: 392696 - DNA, 100 bp, Homo sapiens
ttttccggcctgacaacttcatctttggaactaagcgtcttgtagaaggaactattaatccaggagaaacctgtttaatcattgaagatgttgtcaccag

SEQ ID NO: 392697 - DNA, 96 bp, Homo sapiens
gtttatcccggagaggagagtccctgagcccttgggagttgccttgaaacctctgccgggtcccaggtttacccaaggtccagcctagcccctagg

SEQ ID NO: 392698 - DNA, 83 bp, Homo sapiens
cgcacagccccacatccagtggctcaagcacgtggaggtgaatggcagcaagatgaggagcgggaaggcctcctgcaccctgg

SEQ ID NO: 392699 - DNA, 75 bp, Homo sapiens
tttgcatttcgttagctttctggattatatcaatgactgcaagcacctattatgctcctccatttacaacctaca

SEQ ID NO: 392700 - DNA, 100 bp, Homo sapiens
caaaatatacatctcaaattgtgggtagattcattaaggaccctgatgcttggtgtgacctgagtaaatttgacctccctgaggaaccatctgcagagga

SEQ ID NO: 392701 - DNA, 100 bp, Homo sapiens
ccaggaactgcgcagcctcttcgagcgccgcggacgcgtcatcgagtgtgacgtggtgaaagataacgaaggaggcccaacttcattcaataaggagcct

SEQ ID NO: 392702 - DNA, 82 bp, Homo sapiens
ggggacgagcccgcctccagctccaggccggtccgctgccagcccgagcgggaagaagttccgcagcaagccgcagctggcg

SEQ ID NO: 392703 - DNA, 100 bp, Homo sapiens
gtccgcggcatccgtaaccacaaggaggacgaggggtgagcccctccagactccgaataggagatcaagagtttgattcattgcctgctttactggaatt

SEQ ID NO: 392704 - DNA, 85 bp, Homo sapiens
atgcgatcatgtcacactgcagtggagttctcaaaagtctatggtcctgtgttcaccgtgtattttggcatgaatcccatagtgg

SEQ ID NO: 392705 - DNA, 82 bp, Homo sapiens
ctcttggaaggtgcatctgcagtacaggatatgaagaaattgagggttcttgccatggaggctctgtcggtggtgagcgacg

SEQ ID NO: 392706 - DNA, 83 bp, Homo sapiens
gcccgaccccgtcccgaccctggccgccccgagcggagcctggaggaggatacgaagcgttttcggcttcctgcccggagctg

SEQ ID NO: 392707 - DNA, 112 bp, Homo sapiens
cgccccccgcccgtgccctcccgctcggccccgccagcagcactgtggaggccgtcctcgggggatatgagactttctactcggaatatcctgagtgttgcgtggatgtaaa

SEQ ID NO: 392708 - DNA, 75 bp, Homo sapiens
gaacgggaccggcaccactgagaaaggaaactacaagatccccggatcatgaccactctcagcgtcctccttggg

SEQ ID NO: 392709 - DNA, 139 bp, Homo sapiens
caaacttcagtcatgatcctgaagccatggtttcttccctgccagaaatgaaggttcagttatgaggcaaccctctagatcaactcactatcctgaaggtccattctcccaagaagaggggacagaaagacagatctat

SEQ ID NO: 392710 - DNA, 82 bp, Homo sapiens
agaagttcatccggcaccagtcagaccgatatgtcaaaattaagttggctagagatttactacatccgtccttggaagagga

SEQ ID NO: 392711 - DNA, 74 bp, Homo sapiens
tcgaagacatggaccagggctacggagatgaagatgtgtgtgtctttaagtgctcagtgtcccgagagacagag

SEQ ID NO: 392712 - DNA, 82 bp, Homo sapiens
tttctcacgacgggccgagcctgccactaaggagaggacttgggtgaggagctgctgccacccgggctgggccaggacctga

SEQ ID NO: 392713 - DNA, 101 bp, Homo sapiens
gtgctgaagaggagggggcgttccccagaccatggcatctacggaagggttgaagtctgtacaaataccagcagtcctcatgctggcctctttcctaaaga

SEQ ID NO: 392714 - DNA, 80 bp, Homo sapiens
ttattcaccatcaacaaagaagaccacacactgggaaacatcattaaatcgtgttcttcagatgatgcagacgagaattg

SEQ ID NO: 392715 - DNA, 98 bp, Homo sapiens
tcgccgcgctcagcgacaaacaagctctgaacaagaaggaacacagagggtgcgacagcccagaccctgatacttcatatgtgctaactccacataca

SEQ ID NO: 392716 - DNA, 75 bp, Homo sapiens
ccaggcctcattggacagcattcgaggacacacacctcctctacgtactggcagctgccaacctgtatgcccaga

SEQ ID NO: 392717 - DNA, 75 bp, Homo sapiens
gaccacctggtagagaaataccgcattcttatcacaaagtgcttttttaggaccaaaggatatatttccttactc

SEQ ID NO: 392718 - DNA, 100 bp, Homo sapiens
aagcgggcggcgcgggggagatggagctcttacaggcaaaacaggatcttcaagatctgctgattgccaaagaggagcaagaagacctcttgagaaagcg

SEQ ID NO: 392719 - DNA, 43 bp, Homo sapiens
tatctgggggggacattcccagacattgggacctgtgcaatca

SEQ ID NO: 392720 - DNA, 100 bp, Homo sapiens
cgctggagcaacagctccccacactgcaccatgagctcagttggctgcaggagcagctagcacagggagaagagcaacctggcccacagcctgcaggtgg

SEQ ID NO: 392721 - DNA, 100 bp, Homo sapiens
ggcagctgcaggtcctggatttatttctcgattcgctgtcggaggagaatgagaccctggtggagtttgctattggtgtctgtgacctttgatgatgtgg

SEQ ID NO: 392722 - DNA, 74 bp, Homo sapiens
ccagccggatccagcatctctccaccatcgactacgtggaggacgatgctcccataatactctcagatagtgaa

SEQ ID NO: 392723 - DNA, 74 bp, Homo sapiens
acaaaatcaatggccggacgaaaattgagaggatccagaatccagatctctggaatagctaccaggcaaagaaa

SEQ ID NO: 392724 - DNA, 98 bp, Homo sapiens
agaaagacacagtctccatcatcccaggataccatacttgcagagctccttcagatacataaagaacacattgtaggataccatgaacatgattctct

SEQ ID NO: 392725 - DNA, 101 bp, Homo sapiens
caagcaatgaagaatctgagactgacagaagccctgcagcagctgcagaaggactctgaggccatccgcagccagtacgctcactactttgacctctcact

SEQ ID NO: 392726 - DNA, 100 bp, Homo sapiens
ccagattatgcttttggaaaatgagaacaaaaatttaaagaaagatttgaagcactacaaacaagcagctgaccatgaagatggacctacagctaaaaaa

SEQ ID NO: 392727 - DNA, 50 bp, Homo sapiens
ctcgagtgtccagacctgctcgatggccaacgcagacccgtcagtgataa

SEQ ID NO: 392728 - DNA, 132 bp, Homo sapiens
catttgttggggagaagaggattggaggtgtcagtgttaaaggaacctctacaacgaaggtgaagccacggaagataagagttgcatgctgagaatttgaaaaatgaagatgatgtagacactggactatta

SEQ ID NO: 392729 - DNA, 49 bp, Homo sapiens
aggagctgacagacaagctcgagcttgacaaaagtaagctgaagccagg

SEQ ID NO: 392730 - DNA, 75 bp, Homo sapiens
gctaaatattgcggcagttttatcgacgagtagaacagcccctctatggtttagatggcagtgctgcaaaggagg

SEQ ID NO: 392731 - DNA, 90 bp, Homo sapiens
aaatccctggcccgggtgacccacgcggaggccgtcaaggcattgggatcccgtggcagttgcagcactgaagtggagaaggagacccag

SEQ ID NO: 392732 - DNA, 74 bp, Homo sapiens
gaagagctgcagtctttgtgggacaagtcgtggcattcctggtggctttccatcagaacaagcagctcatcggt

SEQ ID NO: 392733 - DNA, 73 bp, Homo sapiens
cggacttggttcggagggacgtccgcttctggtggacagattgagcaaagggaactctaatgatccaggacaa

SEQ ID NO: 392734 - DNA, 50 bp, Homo sapiens
caagcctttctgctccaggtcaagtgcaaaatggcaactcttaaggaaaa

SEQ ID NO: 392735 - DNA, 111 bp, Homo sapiens
ggagaaggagcggcgactcagggtcgcccgcccctcctcaccgaggaaggccggcacaaatcctgaagagcccgtgggcgtggactgctcatctgtaaagaaagtggagac

SEQ ID NO: 392736 - DNA, 90 bp, Homo sapiens
cccagaggtcgtggaggtggccgtggaggcagaggtggcatggggctgtggtggaggagagaacagtctcattcaaacttggagatttgg

SEQ ID NO: 392737 - DNA, 100 bp, Homo sapiens
gtgtacgacctgtccaaaggcctggcccggcggctcagccccatcatgctgggtgccgtgagcgatgtggagatgcaggaacactatgatgagttttttg

SEQ ID NO: 392738 - DNA, 100 bp, Homo sapiens
gtcactgtccccccggcttccagggaccccgctgtcagtatgccactgaggcggctcccagctgcgttggcgacatggccgacacccccagagatgccgg

SEQ ID NO: 392739 - DNA, 50 bp, Homo sapiens
ctaccccactcctgggccgtccctgaagacccaacatgagtgaagtttcc

SEQ ID NO: 392740 - DNA, 82 bp, Homo sapiens
cctggcggtgcccgaggagtagtcgctggagtccgcgcctccctgggctactgcagcactggggtgtcagttgttggtccga

SEQ ID NO: 392741 - DNA, 98 bp, Homo sapiens
gctgacttggacttcagaggaaggcagctattctcaggatatgacaggggtaacacccttccagatgatttttgagtaccttaaggcaggttctatga

SEQ ID NO: 392742 - DNA, 83 bp, Homo sapiens
gcagcctccagcagggacctgtgacagaatctggtgggccctttattgaccaggtttacgtcctgcaaagttacgcagagggg

SEQ ID NO: 392743 - DNA, 100 bp, Homo sapiens
actgcctatgaatttgctaaacttaaaagcaagctggttctctgggatataaataaggtgtacatcggtgagctcccgcaggacttcctccgcatcacgc

SEQ ID NO: 392744 - DNA, 75 bp, Homo sapiens
cgagcgtcgccgccgccgccgccatgaacaactcgggcgccgacgagatcggcatcctggtggggaagaagtttt

SEQ ID NO: 392745 - DNA, 110 bp, Homo sapiens
atccactggctccacatatggctcatctcagaaggaggagagtgctgcttcaggaggagcagcctatacaaagaggcattattcagtggaagagagggaagaccaaattg

SEQ ID NO: 392746 - DNA, 54 bp, Homo sapiens
ctgcgcaaagccagcgtgaccatcgtgaagatgcaatgaccggggacacagaca

SEQ ID NO: 392747 - DNA, 75 bp, Homo sapiens
cacgcacctgcagctctgctgagagagtgcaagccgtgggggactttgaatccaaagcaaaccatcttggtgatt

SEQ ID NO: 392748 - DNA, 98 bp, Homo sapiens
gttccacagcaccatgcattatgatgggcatgtccgcttcgaccttcccccacaaggagccagtggggtgggtcgcagccacattaagaatgccctgc

SEQ ID NO: 392749 - DNA, 100 bp, Homo sapiens
ttccccaaccataagccaatgactcgcagggcaatgacattaaagtcactgctgagagcactggtgaacatgcctcctcactaccgctacctttgcatca

SEQ ID NO: 392750 - DNA, 100 bp, Homo sapiens
gagagacatttctggctctgaaggcgaacgcttcgctggccatttaggagctctgctcaaagccagacgaggctgacccgcggctgattgagtccctctc

SEQ ID NO: 392751 - DNA, 74 bp, Homo sapiens
cgctgctgagtttcttcatctacaacccgcgcttctggccgcgggaaggagagagacggggtttcaccatcttg

SEQ ID NO: 392752 - DNA, 75 bp, Homo sapiens
gatgaatacatgaaggagctaggtgctgctacccccgtatgatgatgccactgtgaatggtgctgccaaggagcc

SEQ ID NO: 392753 - DNA, 74 bp, Homo sapiens
cattggagtgtgtgaaaaaaaatatgcccgtggaagggcgcagtgctttcattggcattggcttcacagatcgg

SEQ ID NO: 392754 - DNA, 89 bp, Homo sapiens
aaagtgctgactctggtaccattaaggcaaaattgatcgctactcaaaaaagtaggttgtctgaaagtcaagaaaaagctgcgaacctg

SEQ ID NO: 392755 - DNA, 75 bp, Homo sapiens
aaatggtttggctgtgataggagtatttttaaagggatgcccgggtagttaaagacatggcaactggaaaatcca

SEQ ID NO: 392756 - DNA, 98 bp, Homo sapiens
tcgtgctcaccggtttctcccacatcgacctgctgctggagccagttctgcttctcggcaaggagcgatttgctggtgtagacatccgtgtccgtgta

SEQ ID NO: 392757 - DNA, 90 bp, Homo sapiens
cttatgagtggaacatggctagcaggaatgcttactgttgcgtggttcgttattaacaggcatttataagacgctgtttggcatatcgaa

SEQ ID NO: 392758 - DNA, 73 bp, Homo sapiens
tcagttgtccatgaccctgaaggtccaggagtacccgaccctcaaggctgctctttggcgtaaattgcaatcg

SEQ ID NO: 392759 - DNA, 100 bp, Homo sapiens
cgggctctgaggatgagctggaggaggggctttaccaacagggacgcttatgtcaactgggcagtgaattttgtgaattggaagtttttgctaaagtact

SEQ ID NO: 392760 - DNA, 82 bp, Homo sapiens
cttcgtgtgtacctcctgctccggcagcctgagcctcacagtctactcagagaaaaataaaagaaggcaaaatgagtcctcc

SEQ ID NO: 392761 - DNA, 101 bp, Homo sapiens
cttccgctagtgatcctttgcaccctgcttggagacggacttgcttccgatatgaccacattctgaagtgggaactcttccagctggctgacctggataca

SEQ ID NO: 392762 - DNA, 100 bp, Homo sapiens
taagagacaatgtatcgaaataattgaaaaccgggtggaatctgcagaaatagaagctgttcgctgctacgaatctttaatcttaaaagctgaaggaaaa

SEQ ID NO: 392763 - DNA, 88 bp, Homo sapiens
atgagaaggttcagttggcaaaccagatatatgacttggacccctatggtgtagccgtgggtggaactgtggggcactgcctgtgcac

SEQ ID NO: 392764 - DNA, 98 bp, Homo sapiens
ttatgattggaaggaactggaaaagacatggcaaatatgtacgtcttactccgtgctgtgtccactggtttacctcatatgattcaggagctgcaaaa

SEQ ID NO: 392765 - DNA, 100 bp, Homo sapiens
aaaggactgaccagtttttgcagttctaaaaccatggcccataagaagcctgagaagatgatgcacagatagagaggcaccaggacttgagaggcaccag

SEQ ID NO: 392766 - DNA, 82 bp, Homo sapiens
tcggataccagcgctcagcccacctgtgattatggtcagcccaaggccaaccccactgtcactctgttcccgccctcctctg

SEQ ID NO: 392767 - DNA, 100 bp, Homo sapiens
gcctctggttgggaagactatttggagtgcctgggggccccgcagaaaatgagaatggagccctaaagtccaggtcacggtctagatcacattctcgatc

SEQ ID NO: 392768 - DNA, 95 bp, Homo sapiens
ccaagaaggagaagcttctctcgcagccggagcaggagagtttggggaggtgtacaagggcatgctgaagacatcctcggggaagaaggaggtgc

SEQ ID NO: 392769 - DNA, 82 bp, Homo sapiens
cgaaaatgagcctcgcgaggccgacaagagccacccggagcagagacaagaggagcagcagcggcaccgcccctcaccctgg

SEQ ID NO: 392770 - DNA, 50 bp, Homo sapiens
tacagcgggagcaggagctggaggtgcgtgctctggaggaggccaacgcc

SEQ ID NO: 392771 - DNA, 75 bp, Homo sapiens
gcgcagggagagccccaggtccagttcaaaaactgataaatttcaaacggaagagagtggcagcatttagaaaga

SEQ ID NO: 392772 - DNA, 100 bp, Homo sapiens
gggcagatgctgtcatagctgcaggagaaacagattgtctcagtttacctagctttgaaaatgccatacccatgggagagaagaaggatgtgtataaggc

SEQ ID NO: 392773 - DNA, 83 bp, Homo sapiens
ctggaaattcctgacgttcattgatctggaagcggtgactttcaaggatgtgatagtggactttacccaggaagaatggaaac

SEQ ID NO: 392774 - DNA, 100 bp, Homo sapiens
gaaatcacattggaccctcctcccaactgtagggcctgctttcttccccgggcgatgtgcagagatctttgccaggggtcaaagcgtcgggaagcttggg

SEQ ID NO: 392775 - DNA, 100 bp, Homo sapiens
aggattccaagtaactcttatttggtatcatcagagagtcttatatattgatatagatattcatcatggtgatggtgttgaagaagctttttatacaaca

SEQ ID NO: 392776 - DNA, 50 bp, Homo sapiens
gtcagagagagacagctcacgttccgggccagtactaaagtggaagtgga

SEQ ID NO: 392777 - DNA, 106 bp, Homo sapiens
gcgataacctgcatctctgcaaactcaacttgctgggccggtgcaactattcgcagtccgagcgaagaagctcattcacacagaagacccatttaatgatgaacat

SEQ ID NO: 392778 - DNA, 75 bp, Homo sapiens
atgtgaggtgctgaagaaaaaagtagggcttctcaaggaggtcctactgctctgttggctcatgaaataggtttt

SEQ ID NO: 392779 - DNA, 100 bp, Homo sapiens
agcagttgtctgatgaagagaagttatagctgaggtggtaccagtttaagaagtgagaacttcttcactgactgaaatttgcatatcaatccaaatcatt

SEQ ID NO: 392780 - DNA, 108 bp, Homo sapiens
gagagactccttgggggtcgagcacataacggggttcgggtgtctcgtgtgtgaacatcacaggtgctggagaatctggtaaaagcaccattgtgaagcagatgagga

SEQ ID NO: 392781 - DNA, 101 bp, Homo sapiens
acagcctgaagaagggctccctcgtgaagaacctgaaggacacactaggtttgtcctggttgtggtcaagactggatgatgtaactggctctctaggaagc

SEQ ID NO: 392782 - DNA, 100 bp, Homo sapiens
ctgtgatgatgaagatggttgcgggggatcaggaagtggagaagtcaagaggacactgaagatcacagactgtgaaaagagatttgaatgcccggaatgt

SEQ ID NO: 392783 - DNA, 98 bp, Homo sapiens
caccctgacgccgtggcctgggccaacctcaccaacgccatccgcgagactgggatcatgcggccagatgatgccaacgtggccggcaatgtccacgg

SEQ ID NO: 392784 - DNA, 75 bp, Homo sapiens
gtggtgcatgggcaagcatgagggactttcagttaccttgatgatgtcccatttaagacaggagacaaattcaaa

SEQ ID NO: 392785 - DNA, 75 bp, Homo sapiens
gctacagatagatgttaaggacatctgcaaatctttcaccaatgttgaagccatccttgtcaatatatttggtgg

SEQ ID NO: 392786 - DNA, 90 bp, Homo sapiens
tatgaagaaaaactcattgtttctgcgtggtataataagcactttcatttggacccgtggatacccattgaacagatgcttgaaacctgc

SEQ ID NO: 392787 - DNA, 75 bp, Homo sapiens
ttgtggatcgctgtgatcgtcacttgacaacaagggaggtgtcacagttttccatttagatcaacaacttcaagt

SEQ ID NO: 392788 - DNA, 83 bp, Homo sapiens
ttccagagctctcatgttctgcacctcaggagggaattcagcctcagtgatgtccatgaggcggctatgagaggttttcctcc

SEQ ID NO: 392789 - DNA, 75 bp, Homo sapiens
caggaagcccttccgcggaccgaaagacctcaaaggaagaccttctgcaggctgattttgaaggtgctttaaagt

SEQ ID NO: 392790 - DNA, 75 bp, Homo sapiens
tgcagtgttgatggtggtggtgctggtcatcaatgttactcaggtagagcacttaaatatagatccggtggtatg

SEQ ID NO: 392791 - DNA, 86 bp, Homo sapiens
tgaacggaagcgtctttgctcaaggatcccagttttctctggatgacgtgggagtgcatccgccccaacccttttccccctcgtct

SEQ ID NO: 392792 - DNA, 50 bp, Homo sapiens
aagctggtgaccagaacaaccctgagttttggtatcaggatgatgctggc

SEQ ID NO: 392793 - DNA, 82 bp, Homo sapiens
ctgtcctggtacaaggatgaggagcggggatctgacgagcttttctctacttgtgtcactaacggaccgtttatcatgagca

SEQ ID NO: 392794 - DNA, 74 bp, Homo sapiens
cggtgtctgctcctgtcgccttcgcctcctaatccctagccactatgacctcctgccccccgaggtctgcagtc

SEQ ID NO: 392795 - DNA, 80 bp, Homo sapiens
ccagagaactacaagaacagagggattctttgactcagaaactacagaatcagtcggatttgtcagatgaagagctaaat

SEQ ID NO: 392796 - DNA, 75 bp, Homo sapiens
aaatacaaatcacacgcataatggatgaaaggaaccgacagtactaaggctcgtacgtctgcatcgattatctta

SEQ ID NO: 392797 - DNA, 90 bp, Homo sapiens
cgaaagggaccgaaatggagagcaaaggtgctggagaatctggtaaaagcaccattgtgaagcagatgaggatcctgcatgttaatgggt

SEQ ID NO: 392798 - DNA, 75 bp, Homo sapiens
aggggccagccgggagccgggtgacctggcagaaagggctgccatcctggaaaaaatgcctcttgtggagcgaga

SEQ ID NO: 392799 - DNA, 75 bp, Homo sapiens
aggacattaaggatctgggagggttacaacattaaagcctgaacttggaaagataatgtacagtgatttcaaaca

SEQ ID NO: 392800 - DNA, 83 bp, Homo sapiens
atcaaaaatagtgatagctttgataagaaacaacagttccaggccaggtgcgatggctcatgcctgtcatctcaacactttgg

SEQ ID NO: 392801 - DNA, 98 bp, Homo sapiens
gagcccatgaattgggcatgaaattgggtctcctatggacagaagtgcgggcaaggagctttgttcctccccgatgtcaccctcccacagcccacttg

SEQ ID NO: 392802 - DNA, 74 bp, Homo sapiens
atgccagcccagactttcatgttgtctgcattcaaaagagcattctattaaagctaccttaatttggcgcttat

SEQ ID NO: 392803 - DNA, 100 bp, Homo sapiens
tctatggaagataaagcatggagttggctaatggatgctgatctcaggaaattttctgatggaatttcaagtgaaaaatgttccttcagaaagaattgca

SEQ ID NO: 392804 - DNA, 100 bp, Homo sapiens
agacagtcctcgtcagcactgactttcagctatggaatcggtgctggagatcagaatttatttacctctgtttatccaacgctctctcagcagcttccaa

SEQ ID NO: 392805 - DNA, 83 bp, Homo sapiens
ctcatgcccgagtgcagacctgcatcaacctgatcaccagccaggagtacgccgtcaagctacgagttccagggagctctgtc

SEQ ID NO: 392806 - DNA, 90 bp, Homo sapiens
gcgagagcatccccaaggactcgctccggatggccatcatggtgcagcattgcagtgtcgagatggctatgaaccctgtgtaaatgaagg

SEQ ID NO: 392807 - DNA, 101 bp, Homo sapiens
ggcccagcgggagtcgcggaacagcaggcccgagcccaccgcgccgggccccggacgccgcgcggaaaaggtgaaaaattagacgatttcaagaattggag

SEQ ID NO: 392808 - DNA, 90 bp, Homo sapiens
cctccggttgcgggggcggtgcgggcaaacctcgcgaggagaagaggacggccctgagcaagggaacaagggggctgtgggcgtctcctt

SEQ ID NO: 392809 - DNA, 89 bp, Homo sapiens
cccccatggacgacgggtttgtgagcctggactcgccctcctatgtcctgtacaggccaagtcctgtatctgccatgtctgtggcgtcc

SEQ ID NO: 392810 - DNA, 75 bp, Homo sapiens
cgcgggccggggccgagggctctgggcgccgagatggagccaacccttaggagaaatcttgagagtggacagcaa

SEQ ID NO: 392811 - DNA, 123 bp, Homo sapiens
ccgagtcatacccccaggagtaagagcccatagcagtctgccagacaatagagcatatgggggaaagcaagatagtttcatttggatttggaagtagcacagggctctcatttgcagacttgg

SEQ ID NO: 392812 - DNA, 99 bp, Homo sapiens
aggagggaaaagaaagaatgtatgaggagaattctcagcctagaaatcgagctatagcagattatcttcgttcaaatggctatgaagaggcatattcag

SEQ ID NO: 392813 - DNA, 101 bp, Homo sapiens
gagcagccaagctgaagagaacataggtgcgttgtagaagacaagaactcaaaggtggcctggttgaaccgttctggcatcatttttgctggacatgacaa

SEQ ID NO: 392814 - DNA, 87 bp, Homo sapiens
agaagaacagctcgagagagcattacaagccagcctctgggaccgagatcagctgtttcatgtattagccttgcacatgcggcttta

SEQ ID NO: 392815 - DNA, 93 bp, Homo sapiens
ggaagaggcgttgcggcgaaaggaacggctgaaggccctacgggagaaaaccgggcgcaaggaggtatatcgaattccaaagaaaagtcaaac

SEQ ID NO: 392816 - DNA, 75 bp, Homo sapiens
cgccgccatcatggacaccagccgtgtgcagcctatcaagctggccaggattgaagtgttgaataaacacttatt

SEQ ID NO: 392817 - DNA, 100 bp, Homo sapiens
cttcccctctttccaaagagctgagacagaagtacaacgtgcgatccatgcccatccgaaaggatgatgaagttcaggtaattcagtaccaaactgttcg

SEQ ID NO: 392818 - DNA, 100 bp, Homo sapiens
aacattctgacagcaacaagaaaatgtttccgacacatagccctcgattatgtgcttcaggcacttcgtcttagtaacatggccatggggaagacaacca

SEQ ID NO: 392819 - DNA, 88 bp, Homo sapiens
taggctacatcgcggcatgagatgaagctgtgacagcagagtctccttggaggtgacatggatatgggcaacccaggaaccctttcgc

SEQ ID NO: 392820 - DNA, 75 bp, Homo sapiens
ggacacgaggcggcgggctggagacatggaccgcggcgagcaagcaaacttggaaatcatgtcttagagatcaag

SEQ ID NO: 392821 - DNA, 113 bp, Homo sapiens
atgaggctgagctctgcccggaccgctgcatccacagaatgatctctgcctttcacaaagaccacctttgtgcatccatgcctactcttcagaacaccactgcaagaaatccc

SEQ ID NO: 392822 - DNA, 100 bp, Homo sapiens
tgccagtgcctgggccgctgggagccgttattggctgccgttaaggaccgttacgtttcccgggtcccactctatgaccagtgggaggatgtgatgaaag

SEQ ID NO: 392823 - DNA, 50 bp, Homo sapiens
gtctgaactaggatgtcccgacatgaagatctattaatgagatgaagcgg

SEQ ID NO: 392824 - DNA, 98 bp, Homo sapiens
tattatggccctcacatttggatatgagttccatgccattgcagtgtcaactaggcctcagttacttttcagtttgcccaaattgagcccatctcaac

SEQ ID NO: 392825 - DNA, 90 bp, Homo sapiens
atgctgtgtcttggggccctttgggacgagtgctgtgactgtgttggtgctggagaatctggtaaaagcaccattgtgaagcagatgagg

SEQ ID NO: 392826 - DNA, 100 bp, Homo sapiens
tgccgtgtaagaagtgccttttgcctcccaccgtgattctgaggcctccccaaccatgtgcaattggtgttgaaagcagcaggggcctagaagacattaa

SEQ ID NO: 392827 - DNA, 75 bp, Homo sapiens
atgtacacagcacatccactaccaattggacgggataggggcccttctagcccaatccagagctgtaccatggca

SEQ ID NO: 392828 - DNA, 90 bp, Homo sapiens
ggggcgcccgaggtctggaaggcgcaggcaaaaatagacatcttattagttggagatgtcactgtgggctacctggctgatactgtacag

SEQ ID NO: 392829 - DNA, 75 bp, Homo sapiens
gcctaggcattttgctgtctcctcctaatacggtgtgtcacggggtcccagccctgtcagccttggaaatcagga

SEQ ID NO: 392830 - DNA, 75 bp, Homo sapiens
cgccggccgtctccttaacaccgaacaccaggcagaagaggcctggaccttggcgcacacagacccaggaacaga

SEQ ID NO: 392831 - DNA, 98 bp, Homo sapiens
atcaatgcggaaaacctgaagggccttgacgatctggacgccgatgccgatgatggctgggcaggaaattcggcgccttcatcagtatgtgaaatttg

SEQ ID NO: 392832 - DNA, 100 bp, Homo sapiens
tgaagaacatgacctcaaggagcttcctgtcaatgagaagaccaagctgacgcctggcaaaggctttccttaaagtttcccatgtctcaatggactcctg

SEQ ID NO: 392833 - DNA, 75 bp, Homo sapiens
agccagatgcggatccgggccaagcagtgggccgagcccgtggaccgggagcccgtggaccgggagccggtggtg

SEQ ID NO: 392834 - DNA, 82 bp, Homo sapiens
gaagagattgtagagaagctaaaaggagaacttgaaagttcggaccagagaaactccagaaaatcttgccaaacttctgacc

SEQ ID NO: 392835 - DNA, 98 bp, Homo sapiens
atgaagcagctgcagccgcagccgcctccgaagatgggggatttctacgacccggagcacccgacccctgactacccactgctgaaactccccttgcc

SEQ ID NO: 392836 - DNA, 98 bp, Homo sapiens
ttcgatagaccactgcctgtgtctcgtcttgtatctctaattggaagcactatttctgatgcacgattacacccatgtggttctgatgaaactgaaac

SEQ ID NO: 392837 - DNA, 80 bp, Homo sapiens
cttctagaatggaagaagctgagctggtgaagggaagactccaggccatcacaatctcaggatggacccaagctctgccg

SEQ ID NO: 392838 - DNA, 89 bp, Homo sapiens
gttgattactcagtctctaaaaagctaaggaatgtatcctgtcaggtataatgtcagtgaatggcaagaaagttcttcatatggatcga

SEQ ID NO: 392839 - DNA, 98 bp, Homo sapiens
ggggccgctctgggatcccggccaccagcaattgtccggtcgaatgagtgatttgagtgtaattggtcatccaatagattcagaatctaaagaagatg

SEQ ID NO: 392840 - DNA, 115 bp, Homo sapiens
agaccctggagcctcagttggaagcagccgatccagcctgcggagcctgtggggcaggaaacccttttccaaagagaaatgaagaagaaaactgtatgtaccctaaatatgggag

SEQ ID NO: 392841 - DNA, 74 bp, Homo sapiens
ttatcctgctgcgatccccagggaacaagcagcctcccgcgacgatgcccctcaacgttagcttcaccaacagg

SEQ ID NO: 392842 - DNA, 74 bp, Homo sapiens
tcagtgagcaaggcatcaacgagtttctcaggttgacatcatggacatatgtgagtccatcctggagaggaagc

SEQ ID NO: 392843 - DNA, 87 bp, Homo sapiens
ccctttcctgttaccctgtatgtaccaaatgttccagaaggttctgtgagaaacctttcaacgaagtctaaaaataggaagcttcca

SEQ ID NO: 392844 - DNA, 75 bp, Homo sapiens
tgtcagaccacgagatcctggcagggtgagggagcacacgtcgcatttggaggcagagctggaaaagcacatggc

SEQ ID NO: 392845 - DNA, 101 bp, Homo sapiens
aacagaaacacctaggaagggagaactggaaggcggagcgtgaagtaaaagcattggcaaaacttgatcatgtaaatattgttcactacaatggctgttgg

SEQ ID NO: 392846 - DNA, 76 bp, Homo sapiens
gcacatggagcctgaccttagtgccagggtcaccatctaccagaagccaagtacaagaagctggagaagcgatgag

SEQ ID NO: 392847 - DNA, 99 bp, Homo sapiens
caaaaagttaaacaagcaagcctgccataagtgagaagtttgtcactcaagccctatcagaaggttggtttgaattggctggcattggtacataaacat

SEQ ID NO: 392848 - DNA, 51 bp, Homo sapiens
tccggaagctcggccgacatttcctgatgatcctaccagacaatatgaagg

SEQ ID NO: 392849 - DNA, 110 bp, Homo sapiens
cccgcctcacctgcagaggggccgttccgggctcgaacccggcaccttccgggatggatagaatgacagaagatgctcttcgcttgaatctgttgaagcggagcttggac

SEQ ID NO: 392850 - DNA, 83 bp, Homo sapiens
ccgcaaccattgacgccatgtcgggttattcgagtgaccgagaccgcggccgggaccgaggacacatcatctcagagttggag

SEQ ID NO: 392851 - DNA, 101 bp, Homo sapiens
catggatcgctacaacgtcaccacctccaagcagctctacaccgtggccgtctcctgcctcctgcttgcaacagccatggcaatgacaggctcaacacctt

SEQ ID NO: 392852 - DNA, 82 bp, Homo sapiens
aagatgaagatgagaacattgagaacttagtgagcctgtgctgggtgacgtgagagaaagtacagccttctctcgatctctt

SEQ ID NO: 392853 - DNA, 100 bp, Homo sapiens
ccccaaagccaagccactcactctgctctggggtggattctccacagttttcctcgtgcgtactcacggtggaatccgatgtgcattgaagcgaatgtat

SEQ ID NO: 392854 - DNA, 74 bp, Homo sapiens
aagtagataatcagccagaagaattagtgcgtagtgctgaagatgaagccctacaggtggcaactactagccca

SEQ ID NO: 392855 - DNA, 83 bp, Homo sapiens
cttgtttgtggatcgctgtgatcgtcacttgtctgggttctgcccgcacacattcctcgccaccttcttggtgtctgagaacc

SEQ ID NO: 392856 - DNA, 51 bp, Homo sapiens
ttttgccagcgggagcacttcatcagacatagggtacctccaactttccgg

SEQ ID NO: 392857 - DNA, 98 bp, Homo sapiens
gaggaggaggggagaggcctggaggacaccaacatgatttcagagacaactgtctgaaccctgccaccccttccctcctcagccaggagttcctggag

SEQ ID NO: 392858 - DNA, 90 bp, Homo sapiens
tccctttcccatctgcaaaagtaattgttcagagattttcaatgatgggtataagctcagtggattttacaaaatcaaacctctccagag

SEQ ID NO: 392859 - DNA, 95 bp, Homo sapiens
gaatacattcctgattacctgccacccattgtgtcttctcaagaagtttcaccagtgatcattaaagaatgggcagcttacaaaggaaagtctcc

SEQ ID NO: 392860 - DNA, 98 bp, Homo sapiens
aaacagcaggcacccaagcgggcggcagaaagggctattgcaagacacgaagtccgagaaattgagcagcgacatacaatggatggccctcggcaaga

SEQ ID NO: 392861 - DNA, 89 bp, Homo sapiens
agatcttcgagttcaaagagaccctcggaacgctgactcttgcttgtggtggggtggccctgaattcttttgaggacctaagtcctgac

SEQ ID NO: 392862 - DNA, 100 bp, Homo sapiens
cactgcagcctcaacttcttgtcctcaagtgatcctcccaccttagcctcctaagtagctgggaccacagtgctgtaattacaacaattaaccatgatga

SEQ ID NO: 392863 - DNA, 74 bp, Homo sapiens
accacttctgtggctgctaccccactcctgggccgtccctgaaggatcttttgccagaaatgagggcatactgg

SEQ ID NO: 392864 - DNA, 75 bp, Homo sapiens
tttccttacctgtttttccagctcacccactgccagcagaggcttttatcttgagaacatggtgtctggagttaa

SEQ ID NO: 392865 - DNA, 97 bp, Homo sapiens
caggccagctccagttcccagagaatatggattgatttccagagacttatgttacttgaggaagacaccaagaaggcaaagaaaaggagccagggat

SEQ ID NO: 392866 - DNA, 100 bp, Homo sapiens
gctttttttctccagccgagaggacgcggctgtgatatacgaagcaacatggccaacgccctggccagcgccacttgcgagcgctgcaagggcggctttg

SEQ ID NO: 392867 - DNA, 74 bp, Homo sapiens
cagtatctgccgtcccagtcccagcagaggtaccagccgcagcaggtgtgtataggacaaattctacgaataat

SEQ ID NO: 392868 - DNA, 75 bp, Homo sapiens
gttaaatccgcagcacactcttctcaggatcctgtctacctttcatgaccaactacagttttcattgcaacgtct

SEQ ID NO: 392869 - DNA, 132 bp, Homo sapiens
ctatgccgcacagacaagctagactttcagcctgacactgtggccaacattcagcagcgtcagaagcaagcttgcgggttcgagtacacctctaaacttcagcgcatgtttcaagacattggcgtgagcaaa

SEQ ID NO: 392870 - DNA, 82 bp, Homo sapiens
tgcagtgcagacgaggtggatgaggccgagggcggcgacaagaaccgatgaaattgtgctccaagtgttttccaaggttccg

SEQ ID NO: 392871 - DNA, 75 bp, Homo sapiens
acagacctcagcttccccattatttcgaggaaggaagtcgagtcccagacaccagaagtctgaatttggagaagg

SEQ ID NO: 392872 - DNA, 80 bp, Homo sapiens
gccacctctgagaagggagacgacgctgctgggtccgctgagcggggcgacccgaggaaaatgaggacgaggcgggaact

SEQ ID NO: 392873 - DNA, 100 bp, Homo sapiens
cgttttgcagacaacactttctcaggatgctataaaatcaccacggtctttagccatgcacaaacggtagttttgtgtgttggctgctccactgtcctct

SEQ ID NO: 392874 - DNA, 83 bp, Homo sapiens
accatcttcaagcgcctccgctcggtgcccactaacaaggttttaaaatcaaagatgggaaaatcggagaaaattgcccttcc

SEQ ID NO: 392875 - DNA, 75 bp, Homo sapiens
ctgacacttgagcttttccccaatcatacagacaatcttaattcctcacagaggcaatctggagtgccgttagct

SEQ ID NO: 392876 - DNA, 82 bp, Homo sapiens
tcacgcacgggatccagagcgccgcgcacttcgtcatgttcttcgcgccctggcgagaaccactgtctctgatcaacgtgcg

SEQ ID NO: 392877 - DNA, 75 bp, Homo sapiens
atatgtactgtgtcagccatcatgtgtgtcagcatgagagattctggacaatcaggaagtccaagccacaatgat

SEQ ID NO: 392878 - DNA, 97 bp, Homo sapiens
ggcactcctggacaggatggattgccagggcttcctggcccgaaaggagagcctcaaacttagtgctacatcagactgtggagcgtattcatgtggg

SEQ ID NO: 392879 - DNA, 75 bp, Homo sapiens
tgcccatgctgggccggcgccctggggccccggagaggcgccaagcccatctttgtgtgcttgcatccaactgtg

SEQ ID NO: 392880 - DNA, 90 bp, Homo sapiens
ttaaaagagttcggcgaggaactccagaatacaagtgagatagatggaacgttttcttcctctggttgcctaaatggaagttttttagct

SEQ ID NO: 392881 - DNA, 98 bp, Homo sapiens
tattgttgatccttacggaagatgatggcttcaacagatccattcatgaagtggaatcatatgaagatggcccttgtactataacttcaaataagaat

SEQ ID NO: 392882 - DNA, 75 bp, Homo sapiens
agtagcttttctgagaatacttgctgaaaaggaagttttctggaatggctgccctatgatgactgtgtgtttgga

SEQ ID NO: 392883 - DNA, 100 bp, Homo sapiens
gagacgggaacacaccgggaaacactgggaaaaaaaaaaagtctcaagtgcgcccgaggcgcagggggcagattccaacaatgtctcacccatcttggct

SEQ ID NO: 392884 - DNA, 90 bp, Homo sapiens
ctcgcagagcaccaggcccaccgtgaaagagcgcatcagcgaggaggtggggctgctgcagctccttggggaccccccgccccagcaggt

SEQ ID NO: 392885 - DNA, 50 bp, Homo sapiens
tgggaaaagacttttttatagaatgccagtgacacctcacactcagtgcc

SEQ ID NO: 392886 - DNA, 83 bp, Homo sapiens
cagtggtcagcgacccgcagtccatctgactcctgcttcccgggtgttgctcgtgggaacgcccttttgcttgtgactggcag

SEQ ID NO: 392887 - DNA, 82 bp, Homo sapiens
gacgacgagtacgactacctattcaaagcagaatggggaaatggagagagaacctgaaagagccccaaactcgaggacctat

SEQ ID NO: 392888 - DNA, 100 bp, Homo sapiens
cgttagcaccgtgggcatcgacttcaaggtgaagacagtctaccgtcacgagaagcgggtgaaactgcagatctggggtgatgaccgcttctccgagagc

SEQ ID NO: 392889 - DNA, 101 bp, Homo sapiens
atcagttttgacgcccgagctcatccatccagtgggggtagcagcagaagcagagaccacgcagaggctgcctttggatcaagtccaggaagtgcttcccc

SEQ ID NO: 392890 - DNA, 83 bp, Homo sapiens
cagacgccaaggcccctccggccagggccgggagccgggccggcctagccaggttgggcccgaaggcatcctgcagaacgggg

SEQ ID NO: 392891 - DNA, 87 bp, Homo sapiens
tgatttttggatcctgagaattgatctatgttggatcaaggactactgagcccagccaggctgtatgccattgctgccaaagaaaaa

SEQ ID NO: 392892 - DNA, 83 bp, Homo sapiens
ctgaacaaagtctgctcaaatctcctgctgtgaaccagcagaatttttgaacaggaacggaaaacagttcttccttcaaagca

SEQ ID NO: 392893 - DNA, 99 bp, Homo sapiens
ggtatattttggaagtgtgccagaattgctgctgtaagtaaagatgattccattatttcaagtcttgatgtcactgatattgcaccaagtagaaaaagg

SEQ ID NO: 392894 - DNA, 97 bp, Homo sapiens
ggctccagcctccgccacgtagtctactggaactccagtaaccccagcttgacaaaagtaagctgaagccaggaacaagagttgctttggatatgac

SEQ ID NO: 392895 - DNA, 75 bp, Homo sapiens
atctgttgaaatagaatgacatattgagatggccatcctgcggttcccttacgagtcctgggggaccccgttcca

SEQ ID NO: 392896 - DNA, 100 bp, Homo sapiens
cagtggaagaccatctacatctcccacaggaagtgtcacacagcagtcaagtatgtcccaaacgtctcattcagcctgtatatggagcacagcatcctcc

SEQ ID NO: 392897 - DNA, 83 bp, Homo sapiens
ctgcggaacaggacgccctctgatcggagctggagtttgttcagatcatcatcatcgtggtggtgatgatggtgatggtggtg

SEQ ID NO: 392898 - DNA, 100 bp, Homo sapiens
cagcaacggcatctttgatcttcagaaaacttcccttggaggggatgcaccagaagagccagaggtgtttgtagccaatcctaacaagacgcagcccatc

SEQ ID NO: 392899 - DNA, 80 bp, Homo sapiens
caaagcctctggatggcttcgacgtgtggaaaaccatcaggcattcctgcatcgcatccggcagaacgtggccgactcag

SEQ ID NO: 392900 - DNA, 129 bp, Homo sapiens
cccgtctgtcgcccgaggcggccgccgctgcaccttcaccgcgtacccgggacccgcccgcccgcgggaggtgctggagaatctggtaaaagcaccattgtgaagcagatgaggatcctgcatgttaat

SEQ ID NO: 392901 - DNA, 135 bp, Homo sapiens
gaaaaagctgcttgaatgtctgccgaaatgttcaagtttaccaaaagagaggcaccgctggaacactaatgaggagtggaaatgaagaagatcactgacacccacacgccgtctggcctcaccgtgaacctgacg

SEQ ID NO: 392902 - DNA, 50 bp, Homo sapiens
gggcaagtgcgcttacatccgaggagtgattggggcagatgtgagagggc

SEQ ID NO: 392903 - DNA, 74 bp, Homo sapiens
tccaatgtattatttgttcagaatacttcattgagataggaaccaaggctttagccttctcaactcattgactg

SEQ ID NO: 392904 - DNA, 100 bp, Homo sapiens
gcccacctctgtgtcaatgcagcctgctcttaatgactccagctctctatgggaatgtaagacggacttagatattgcatacaaatttggaaaaactgtg

SEQ ID NO: 392905 - DNA, 100 bp, Homo sapiens
cacctgggcctgccccagtggcaatatgccttcaccagctatggcattagcccacaggccaagccagagcctaagcctggagacctgattgagatttttc

SEQ ID NO: 392906 - DNA, 113 bp, Homo sapiens
ggagcttatactcctcccagtgacgggtctggagtgcgtgggggaccggctgttggcggacaatgcagatcttcgtgaagactctgactggtaagaccatcaccctcgaggtt

SEQ ID NO: 392907 - DNA, 100 bp, Homo sapiens
tcggcatcacaggggtaaccaaggacagtcattttgtttactcattcagccctgttgcaggtcccaataaactcttcataaggttgacagaagcaccctc

SEQ ID NO: 392908 - DNA, 142 bp, Homo sapiens
gcccctggacgaccaggagaagctgcccttcaccgttgtgcatgaaagagagattcctctgaaatgcttcccgggcaactacagcaacaacctcacctgtcactggctgcttgaggctcctgagggccagcggctacacctg

SEQ ID NO: 392909 - DNA, 83 bp, Homo sapiens
aacctggagctctacgcctcctacgtttacctgtccatgatacctcggatctgcattttcaagtgagcaaagaccgctatgga

SEQ ID NO: 392910 - DNA, 51 bp, Homo sapiens
aagcgctgcgctcgcgcccggatccctcagatcattgagaagcagccaggc

SEQ ID NO: 392911 - DNA, 101 bp, Homo sapiens
aaacacccaaggttgtaccacagagggagacctgctgtttgcccagaaggagataggaacaggtggcacatgtcagtggaagatatgtggacttagtccca

SEQ ID NO: 392912 - DNA, 100 bp, Homo sapiens
gggcacagacagagcacctgtgggaggactaggaaaattaaagatgattatagccaaaaatggcccagacacagaaaggcctctagactcaggactcaac

SEQ ID NO: 392913 - DNA, 83 bp, Homo sapiens
ccctcctgctgtcaggctacatcagcaaagggatgtcatcttgcagtttagtaggaccagagctccatgggggcaggtacctg

SEQ ID NO: 392914 - DNA, 83 bp, Homo sapiens
gtgagcgagcagaggcttaaggtcttcagcggggcgctccaggaggcactcacagaaagaagcttccggttctgaggtcctgg

SEQ ID NO: 392915 - DNA, 107 bp, Homo sapiens
ctcttgattggacgtcaggatctttccaagcaggcctgcgaaggaaacttacccaaagggaagtctttgtgggttggagagaggatgcctttggcaacttccacgga

SEQ ID NO: 392916 - DNA, 80 bp, Homo sapiens
cctggttgctgaagaggaggcggaagccaaggtggaacgtgtgatcaccattatgcagaatccacgccagtacaagatcc

SEQ ID NO: 392917 - DNA, 100 bp, Homo sapiens
aaattttggaaaatgtgataaaaacaaggtggaagattcttccaaggaaccagtgcgaagggctatcattaagaaggcttccgatctagagtacaaaatc

SEQ ID NO: 392918 - DNA, 100 bp, Homo sapiens
agcagattgtcctgtaatcgctattgacagctttaggcatatgtatgtgtttggagacttcaaagatgtattctttgactctcccggatcttgcagagca

SEQ ID NO: 392919 - DNA, 101 bp, Homo sapiens
tcgctttcatggtcttgctgattccactcaacggagctgtggccgtgaagatgcgcgccttccagacgaagttatacggaagcgtctcctcattgatggag

SEQ ID NO: 392920 - DNA, 100 bp, Homo sapiens
accgtttccatcgtctcgtagtccgacgcctggggcgatggatccgtttacggaggtcactgggctgtggtgagagaaggcctcacgaacccttggattc

SEQ ID NO: 392921 - DNA, 87 bp, Homo sapiens
ctgcacgggcggctgctggcgaacgtgctggccaaagcgctctatgacaatgtggccgagtccccggatgagctctccttccgcaag

SEQ ID NO: 392922 - DNA, 75 bp, Homo sapiens
acgttcttcttaatcctgccatatggattcataccccagccaaggttaaagtattgcacaatcagctggtccttt

SEQ ID NO: 392923 - DNA, 98 bp, Homo sapiens
gccgaggcggccagttgggtaccgggaggggcgaaggcgggcggcagaggcgatcaggagggctccccgaggactttctgaactccctggagaagatg

SEQ ID NO: 392924 - DNA, 100 bp, Homo sapiens
cagttttcttcagaagaaggacttcggaatgcactacaacaggaaaatcatattatagatggagtaaagggagaccagtgtaaatttgatcatgatgcag

SEQ ID NO: 392925 - DNA, 101 bp, Homo sapiens
tgaagctgtggtgagccagatggaccaggagcagggcggcgacgacctggaccccaactacgtgctgagctcgcgggtgcgcacgggccgcagcatccgtg

SEQ ID NO: 392926 - DNA, 95 bp, Homo sapiens
atcagacagaacagttaatcctcaatttaagcctgatctaacccctagaaacagtcaccccagactatgtccctcctcttggaaactttgatgtg

SEQ ID NO: 392927 - DNA, 82 bp, Homo sapiens
gcttgcgctgccgcgcggtccccggccgaccaggacagtggccacagatgtctttaattccaaaaacctggccgttcaggca

SEQ ID NO: 392928 - DNA, 74 bp, Homo sapiens
gtctggagaaaagtggtgacttattgcgagtgatagacagccaagcagagaaactgaaggagcttgacaaggag

SEQ ID NO: 392929 - DNA, 50 bp, Homo sapiens
cacagggcagaatgtgaagctacgaatagtatgttctcctgttcctatgt

SEQ ID NO: 392930 - DNA, 100 bp, Homo sapiens
cacagatgaagtgtgcggagggctacggcttcaaggaggaatacgaggtatccgttacagcactgatgtgagtgtagatgaagtaaaagctttggcttct

SEQ ID NO: 392931 - DNA, 96 bp, Homo sapiens
attgcagaaccttccctgattacagaatcttgggggccaactcaccctatgcagcacagcccaccagctacgactatgatgccccactgagtgagg

SEQ ID NO: 392932 - DNA, 75 bp, Homo sapiens
cagccaagatggtgctgtcccagagacaacgagatgaactgtaaattgggatattcacaatgtatggaaacagag

SEQ ID NO: 392933 - DNA, 100 bp, Homo sapiens
tgaaaactttacaagaggttcactttctgctgcacccgagtgatcatgaaaatattcagagcttacgatgtgaagaacttcatcttcatgcagaaaatct

SEQ ID NO: 392934 - DNA, 74 bp, Homo sapiens
cgaaatgagacttttgaagtgcctttgatttctggtcctacaagattatcaattttgcccccagtttacttcgg

SEQ ID NO: 392935 - DNA, 75 bp, Homo sapiens
gggccagggaaccctggtcaccgtctcctcagggtcccctggaagtgacgctgactcagccagtgaggagcgggc

SEQ ID NO: 392936 - DNA, 75 bp, Homo sapiens
agaggagctgaaagtagatgaggtttttctatatgagtggagaagacagctgttaccagggaggtcatacaacat

SEQ ID NO: 392937 - DNA, 113 bp, Homo sapiens
ccgcgcgcagggcctgcagcgggagctggacggcgagcgcgagcggcgcgagaaaatctctggaaacatggctacagaacatgttaatggaaatggtactgaagagcccatgg

SEQ ID NO: 392938 - DNA, 97 bp, Homo sapiens
ggcgattatggacccggccgaggcggtgctgcaagagaaggcactcaagtttatggggaatcacttgcaaggtccacacaagtccgcctatgtactc

SEQ ID NO: 392939 - DNA, 82 bp, Homo sapiens
gaagatctatgctccacaaggcctcctcctgacagaccctattgagcgaggactgcgagttagcagattttgaagcagtggg

SEQ ID NO: 392940 - DNA, 74 bp, Homo sapiens
agagcctatttacccagaagtagtccatatggattggccatttgatgatggagctccaccccctaatcagatag

SEQ ID NO: 392941 - DNA, 100 bp, Homo sapiens
cgaagccttgggtttctttcttaaaggactgatttttagaactccacatttgagtcacatcgatcagacaacaacatggcaggaccccaggaaggccatg

SEQ ID NO: 392942 - DNA, 100 bp, Homo sapiens
gtgggttcagtgtatcgacggataacagagttcacatattcaaacctgtatctgtgcaggcaatgtggacagatgggagttttgtggttcatgatatacc

SEQ ID NO: 392943 - DNA, 101 bp, Homo sapiens
atggagctagccttcctgaccattgtctgcatggaagagtttgaggacatggagagaagtctgccactacttagcagtgtctgcaaaaacgaatcttttcc

SEQ ID NO: 392944 - DNA, 51 bp, Homo sapiens
ggagcaccaggagactgcctatgccactgttccatccctgacccatctttg

SEQ ID NO: 392945 - DNA, 78 bp, Homo sapiens
cagccaagatgagctgcagagcaagcagtccaaaggcctggaggagaggtaatggcaccattgacttccccgaatttt

SEQ ID NO: 392946 - DNA, 100 bp, Homo sapiens
atccgtttgttcaggaaccaccagtgacagaacatgaagccattattatatcaggaaccgaaatggccaagcatatccagaaagaaatacagcgaggtgt

SEQ ID NO: 392947 - DNA, 75 bp, Homo sapiens
tcagcctctcgagtagctgggattacaggagtcgttcacgcctactgaggagcatgtgttggtggtgcgcctgct

SEQ ID NO: 392948 - DNA, 101 bp, Homo sapiens
ccaccacctcctcttgggacatgggctcgacgacacaatccccatcactggtgcagtatggtacaggtttgcagattccgccagcagcacagcaagctcta

SEQ ID NO: 392949 - DNA, 100 bp, Homo sapiens
agtcatcatgagcgatgttaccattgtgaaagaaggttgggttcagaagaggggttatgatgtgattgctcaagcccaatctgggactgggaaaacggcc

SEQ ID NO: 392950 - DNA, 118 bp, Homo sapiens
gtcatcttctaaacagagcagcagcagcagagatgataacatgtttcagtttgcattgagactccttgcattccgccagatacacaaagttctaggcatggatccattaccgcaaatg

SEQ ID NO: 392951 - DNA, 90 bp, Homo sapiens
atccgggaacatttcattttctggcagagtctccgggaccattatggcagtcaagtggacgggtgggcattcttctcctgtcctctgcct

SEQ ID NO: 392952 - DNA, 74 bp, Homo sapiens
cgcagccccggcctctcggcctctgccggagaaacagggacccaaccagagcctggcctgggagccaggatggc

SEQ ID NO: 392953 - DNA, 127 bp, Homo sapiens
gttttgagaagccttccgctattcagcagagagctattattccctgtattaaagtgtaccacatgaaggaagatggttgggtgaaagtagaaagtacagatgtcagtgacctgctgcaccagtaccg

SEQ ID NO: 392954 - DNA, 80 bp, Homo sapiens
gagatcccaggcggtgacagagtggagccatggctagagccctgaccctctattctgcaccctgtgagccaccgagactg

SEQ ID NO: 392955 - DNA, 101 bp, Homo sapiens
ggagtccgcaccaggggccctcagggaagagaccctgcaaagatcctgggagaccaaggaaattcctggaacaccatttccttccacaccggggctgcact

SEQ ID NO: 392956 - DNA, 75 bp, Homo sapiens
taaaactgatctgataagacctcagatcagacagagagatcacaaaatggctcttcttcagatggcaacagtgga

SEQ ID NO: 392957 - DNA, 83 bp, Homo sapiens
tgaggaacctgctccgccgctacaaccagagcgaggctgccggtgtttgcccccatgcttcagagcaacccacgcatgctgac

SEQ ID NO: 392958 - DNA, 100 bp, Homo sapiens
ggacaggcagggccgggtcgcgggccgcgcgtcccccaggccggagacaccattcgcttttcacccaagatgatttgatgtcttataaaactctgatgaa

SEQ ID NO: 392959 - DNA, 98 bp, Homo sapiens
gcggatgccctgcagtacctgcagaaggtctctggagacatcttcagcaggagctcgtgtaaatgccaaggacaacatgtggctgactccactgcacc

SEQ ID NO: 392960 - DNA, 98 bp, Homo sapiens
gggcaggtgatccagctcgaggatgggaccaccgcatacattcaccaggtgacggtacagaaagaacaagcgagtgagcatcaataaagatgagctga

SEQ ID NO: 392961 - DNA, 87 bp, Homo sapiens
ggcggcggctgcggaggcgcaggcagcaactgaggcagcggcaggctcaggtgcagccgctggctggcctgctgtctgccttgggct

SEQ ID NO: 392962 - DNA, 105 bp, Homo sapiens
acaagccccggacccgggcagcacggagagcctgcaggagaagcccatggagatcggtgagaagccctaccactgcaactgggacggctgcggctggaagtttgc

SEQ ID NO: 392963 - DNA, 100 bp, Homo sapiens
ttgagcgcgtcgtatgcggccagcactaaggagccaaaaacctgtatatcatctccgtgaaggggatcaagggacggctgaacagacttcccgctgctgg

SEQ ID NO: 392964 - DNA, 82 bp, Homo sapiens
tgaacgggcctgtggcaggtgcctcccgccaggccatgcggaccctcagttggaagcacaccctgggcctggtgaccatgga

SEQ ID NO: 392965 - DNA, 117 bp, Homo sapiens
cctcagcgcgacgtcgtgtcgagttcccaaaaagctccgcaggggctgtagggagggaacaacctatcttcagcactcgagctcatgtcttccaaattgacccaaacacaaagaaga

SEQ ID NO: 392966 - DNA, 90 bp, Homo sapiens
ccaggaagggcctgtcccagtcggctttaccctatcgacgcagcgtccccactgtactatttcttgatcatccaaaaaagaagattcggg

SEQ ID NO: 392967 - DNA, 98 bp, Homo sapiens
gagtggcggcgtcccccagggcctcggcggccgctctgcctgcgcgctgctcctgctctgctacctggaaatttggtgagcggcctccacctaaacga

SEQ ID NO: 392968 - DNA, 83 bp, Homo sapiens
tgaaggagaaattcgactatggcaacaagtacaagcggcgggtgccccgggggatctgccaggagagcccagcaagatgacag

SEQ ID NO: 392969 - DNA, 74 bp, Homo sapiens
agtgatcttggtgccatagagagtctccgggtccctggaaagtcaggccttgaaaagaggatagaccaggctgt

SEQ ID NO: 392970 - DNA, 106 bp, Homo sapiens
ttttactgggggacaactggtttgcaaagtgctcagcaaagcaggctgtaggtttagttgagcaccggaaagaacagtgacaaaaagagtagtccccagaaagaag

SEQ ID NO: 392971 - DNA, 87 bp, Homo sapiens
ggacctaattgactgcttgtcccagaagcaatttaaggagcagagcactctgctatttggtcctgaagcagtacacagaagcagtga

SEQ ID NO: 392972 - DNA, 100 bp, Homo sapiens
gaagcaagaaggccctggacacagcaatatctctgggctttcacagggtcccaggccataaaacaacggagagctgtacttgcttgtcacttggaggaac

SEQ ID NO: 392973 - DNA, 75 bp, Homo sapiens
tctaggtgagtcgcggtgggtcctcgcttgcagttcagcgaccacgcccagacacatggccccaggccaagcacc

SEQ ID NO: 392974 - DNA, 50 bp, Homo sapiens
gccagacgtgcgaacagctccagctggttgtcgccgtgatcctgaaggcg

SEQ ID NO: 392975 - DNA, 95 bp, Homo sapiens
aaacaaagaaacatgtcagcagggcctatggtggttccatgtgtgctaaatgtgttcgtgacaggtactttgacccagccaacggcaagttcagc

SEQ ID NO: 392976 - DNA, 101 bp, Homo sapiens
gacttggctggacggcgcggccacggagaagggcgcggatattccccgagtccctccggtggctaatggccacccagcagtttgagtctgcaaagaggctg

SEQ ID NO: 392977 - DNA, 75 bp, Homo sapiens
ctcccggtgtggccacgagtcggttcaaaaggtgatgacctatcaacagccattctcaaacagaagaaccgtccc

SEQ ID NO: 392978 - DNA, 82 bp, Homo sapiens
tggtcccgggtctcgggcatcccctcccggcgccactggccggtgccctacaagttaaaaggactactgactcaaactctgc

SEQ ID NO: 392979 - DNA, 75 bp, Homo sapiens
agattgggctagaggcggaggcctgggccacggcggaggcgctggctagttcttctggagctcaacttcttgcca

SEQ ID NO: 392980 - DNA, 101 bp, Homo sapiens
ttataatgggagaggatgatgactcacacccctctgagatgagactgttggcagagtcagcatatatgattccaaaaggcaatccgggaagactaaggaga

SEQ ID NO: 392981 - DNA, 90 bp, Homo sapiens
gtggcaggtgacagtctgcatgtgcagttttcagctctggcaggctgccctgagcacgctcaaccccaaccccacggacagctgtcccct

SEQ ID NO: 392982 - DNA, 100 bp, Homo sapiens
tttttgtgcttggctgactaccttgttcccattctagcgcctagaatttttggctccaataaatgggtgatcagcccatgacctaaacctccagacaaaa

SEQ ID NO: 392983 - DNA, 75 bp, Homo sapiens
aagaaacagacattcaacatgattgcatttgaaattctgaaaaagagttccacgtcctcccttatcgagtctttg

SEQ ID NO: 392984 - DNA, 83 bp, Homo sapiens
acgctgccaacaacgggcactacaaggctgaattcggtcagaagagaatccatctgaatagccagtttccaggcacccagcgg

SEQ ID NO: 392985 - DNA, 75 bp, Homo sapiens
gggaggagccgatactgagcttcttcctatttgccatggatatgtgtcacaaagatgtctacacggaactgccag

SEQ ID NO: 392986 - DNA, 51 bp, Homo sapiens
gatcggacgctgcacaagatcaagagccgacagttagaatcagaaactggg

SEQ ID NO: 392987 - DNA, 50 bp, Homo sapiens
gtcctgtgctcaacattgcttatcgagataattgacgaccttgccaacct

SEQ ID NO: 392988 - DNA, 49 bp, Homo sapiens
gccgggatcacattctgattgtgtcttcagtgccctgggtttgcctgtg

SEQ ID NO: 392989 - DNA, 75 bp, Homo sapiens
caagatcaccgtgacatccgaggtgcctttctccaaaaggtcctggtccgcgccagagcccagcgcgcctcgtcg

SEQ ID NO: 392990 - DNA, 75 bp, Homo sapiens
ggtactgtccatcaaacatcttccaccacagcttagagctgagtcagtgctgattctctcaaatagagcttgaag

SEQ ID NO: 392991 - DNA, 50 bp, Homo sapiens
ggaagaaaccagagcctgggaggaccctgatgctcccataagacagaaaa

SEQ ID NO: 392992 - DNA, 98 bp, Homo sapiens
tctgatacacaccaaccaaccagtcaaccagccattgctgtttactggatacctgatggtgtcggacggcatgacaggcagcaatcctgtgtcccctg

SEQ ID NO: 392993 - DNA, 90 bp, Homo sapiens
cgcctttaagcgccggcgatgtggcgtctgtgagggactgaagggactcctgaatgtccgcgggacgtgtcgcggcggcgcccagcacgg

SEQ ID NO: 392994 - DNA, 82 bp, Homo sapiens
tctgcgtctctggagacaagggcactacacgcacttcagaatgaagagttgttgattcttcaccacactgaaaccattagga

SEQ ID NO: 392995 - DNA, 100 bp, Homo sapiens
gagctgcccgcgccatgtccgcgcacaatcggggcaccgagctcgataactgtgtccagaggacccccaggccatccgtggataatgtgcaccataaccc

SEQ ID NO: 392996 - DNA, 75 bp, Homo sapiens
cctgcacagtctgccaaagacccttcccaggggaggacattcgggtttgcatcgccagcttctatatattacggc

SEQ ID NO: 392997 - DNA, 100 bp, Homo sapiens
gccatcttgagtctactctgtcgctcttgtgccctagcaccccgagaaccgtcagtttgagccagatggaggacaatgaagatctgaagtgccagctgca

SEQ ID NO: 392998 - DNA, 50 bp, Homo sapiens
ggcagtttcgtgagcgacctcagcagaatcatttgctgtttcaaatagag

SEQ ID NO: 392999 - DNA, 100 bp, Homo sapiens
ggatcaccaaattgatgtgtctgacgtcatcaggcttgttcaagacacaccggaggcgacggccatggccacagtgaatttatggcagaagaaagtaatg

SEQ ID NO: 393000 - DNA, 75 bp, Homo sapiens
cccagacccggacgacccccattgctgagccagcggagctgcttgctcgtttgtggtggaaagacagccctgcat

SEQ ID NO: 393001 - DNA, 96 bp, Homo sapiens
gaccatgaagagaaatgagatgatagccaaaccctcaggaaatgggtcctgatgaatatgaagagatggaagaagaggaggaggaggaagaggagg

SEQ ID NO: 393002 - DNA, 100 bp, Homo sapiens
tcagagtcttgaaacagcaatcaaaaggactgaagtggggttaagagtccctggatggccggttgcaggtgtcccatcggaaggggctccctcatgtcat

SEQ ID NO: 393003 - DNA, 71 bp, Homo sapiens
ccttcggatgcaccgttacagagcacctggggagcaggatggcgatggggtctccttatgccagggaccag

SEQ ID NO: 393004 - DNA, 78 bp, Homo sapiens
atttctgtcctataaaactcagtgtccaacttgctgtgtgacgatcatccctcgttctgacctgaatggcctgccgtc

SEQ ID NO: 393005 - DNA, 82 bp, Homo sapiens
cggaggaggaggaggtggactctgccgacaccggagagagaccaaactagagtcagaacgaatactagcatcagtggggaag

SEQ ID NO: 393006 - DNA, 83 bp, Homo sapiens
gtcagccgatgcaccgagtccagcccaggaaaatggagaggatactggtatcgggatgacacaggaagagctggtgtccaacc

SEQ ID NO: 393007 - DNA, 100 bp, Homo sapiens
cgccacactgatgcccaggcacaggcatctgcaggtatcgaaggatgatcgcagtgatgtggagagcagctcagaggaagaagatgtgaccacctgcaca

SEQ ID NO: 393008 - DNA, 98 bp, Homo sapiens
agacatggaaggaaatgagggcaacttctgaagacttcaacaagtattctaccttgtaaatactgttatttgtatatactgtaaatgatgacatcggt

SEQ ID NO: 393009 - DNA, 80 bp, Homo sapiens
gccccgagcattgtgggcctcatcatcttcctcctgtgcaccctcttcatcaggaccaagaatcgccttcagccctgtct

SEQ ID NO: 393010 - DNA, 100 bp, Homo sapiens
ggacccccaggctgccatcccggaaatctgaaatagagtactatgctatgttggctaaaactggtgtccatcactacagtggcaataatattgaactggg

SEQ ID NO: 393011 - DNA, 101 bp, Homo sapiens
tgcaaaggttgcattgatgaaattaaagatgcatgctgatggcgataagtcattaccacagagatatcaaagacacgacggtgggcactctgtcccagcgg

SEQ ID NO: 393012 - DNA, 75 bp, Homo sapiens
caccagggtggacaaatcgccagagatgtggccttttctgatgccattaaaaaatggcaggagctatcaccagaa

SEQ ID NO: 393013 - DNA, 75 bp, Homo sapiens
cgctgcaagaggcctacgtgcgggtggtcaccgagaagtccccgaccgactgggtcctgaggacaccgtgagcca

SEQ ID NO: 393014 - DNA, 58 bp, Homo sapiens
cttacttccgacgcaacgcggccacgtggaagggcaggatggcagcagatgaaagctc

SEQ ID NO: 393015 - DNA, 101 bp, Homo sapiens
ctcatgacctagtcatattaatgagacaagaagcaacagttaactacctcaaagaattagaggctgctgagcttcgtgcttatctgaaatctaaaggagct

SEQ ID NO: 393016 - DNA, 100 bp, Homo sapiens
tgggaccaaccttgatgaatatgtggctttggtggatggggtattcttgaaccaggtcatgctccaaataactgataaatttcaaacggaagagagtggc

SEQ ID NO: 393017 - DNA, 83 bp, Homo sapiens
gttcaagcagagctattggaatcacagacatttctcttgggaagttgtgcatctgacaggaatatagtactgtacgatatgag

SEQ ID NO: 393018 - DNA, 96 bp, Homo sapiens
gatatggtacaaaactaaacctgaagggcgatcggttacatggacctcagaccagagtggcagctatggcattgctggttctaccaacgtgacagg

SEQ ID NO: 393019 - DNA, 100 bp, Homo sapiens
gggaatggaagcggagaacgcgggcagggcaccagtgtcttgtcacctggactccacataggactaattattatactggcaataatgatctataaaaagt

SEQ ID NO: 393020 - DNA, 97 bp, Homo sapiens
gagaggggagccggaggaggatgctcctgcctcccagagaggggagccggcgaggatcaaaatcttcgaaggaggtgtatttgcatgcccgagtctt

SEQ ID NO: 393021 - DNA, 74 bp, Homo sapiens
tgcgagatatctggccgcctctgccgcagctggagaccattactgggacttccacccccaccacgtgcacagcg

SEQ ID NO: 393022 - DNA, 75 bp, Homo sapiens
aacacagtattgaaatgcatttgccttatacagctaaagccatggaaaggtatagacacgtgtggccgtttacgc

SEQ ID NO: 393023 - DNA, 98 bp, Homo sapiens
atgaaatttagagttcaagcaagcaagatacgagagcttttagcagagaaggtcaatgagtggtcattgaagataagaaaggaaatgagagttgttga

SEQ ID NO: 393024 - DNA, 100 bp, Homo sapiens
tcctcggcctctccagccaacgatgaccagtccaggcccagcctctcgaatgggcacacctgtgtagagatgcccgagtggtaaaagacatggcaacagg

SEQ ID NO: 393025 - DNA, 75 bp, Homo sapiens
ccgacgcaagactgtcccggcccggcaattctgtggtgttcttggtcacacatttatggagtttctgaagggcag

SEQ ID NO: 393026 - DNA, 74 bp, Homo sapiens
cagcttcattttcgccttacattcttacgaggtatcgaatgataacagaaggcggagtcagcataaatcaccaa

SEQ ID NO: 393027 - DNA, 83 bp, Homo sapiens
ccaccgccgccgccgccgccgccgctgccgctgccgctgccgcacctccgtagctgactcggattttttatcaagcagaaatg

SEQ ID NO: 393028 - DNA, 75 bp, Homo sapiens
agtccctcaactctctacgctttgcctccaagtacctggagtagaacagaaaaattattatgtctgtgttccctt

SEQ ID NO: 393029 - DNA, 100 bp, Homo sapiens
ttccactggacgctcatcagagggaagatctttttcctcaattgtgattcgcctttgccagtctcatctcgtgtctgctttgttaagttccatgatccag

SEQ ID NO: 393030 - DNA, 98 bp, Homo sapiens
aacaacctaaacattaagcagtacagctgcctcaaacctttgggttatgtcacgcatctgatgaagcgaattcagagaggcccagtaagaggtatctc

SEQ ID NO: 393031 - DNA, 83 bp, Homo sapiens
atggccgtgatcgtgcccaaagaggagggcgtcatcagcgtctccgaggacaggtgatggcatcagctgagaagggaaggaag

SEQ ID NO: 393032 - DNA, 113 bp, Homo sapiens
tcgattgcagtcagagcctgaaagtatccgtaaatggagagaagaacaaatggaacgcttggaagcccttggtattcctgtaaattaccaagatgtggcatccattgatccag

SEQ ID NO: 393033 - DNA, 100 bp, Homo sapiens
gttccagtgggaccaacctgtgatgaatatgcccaaaagggctacttctacaagtccgaacagccagtccagcaaaatgaacagcattgtctaccagaag

SEQ ID NO: 393034 - DNA, 77 bp, Homo sapiens
ggcctccccagccatgtggaactgtggccataaaagtcattgataagaagagagccaaaaaggacacctatgtcacc

SEQ ID NO: 393035 - DNA, 75 bp, Homo sapiens
ttagcaaaagttcatctccttctgcatccttaactgagaatgagccaaaggcacgtccctgacagctgaaaatag

SEQ ID NO: 393036 - DNA, 75 bp, Homo sapiens
tagggatctaccagcctggaggcagtggggacagcatccccatcacaggctgcaaagaaaactcaggagctgctg

SEQ ID NO: 393037 - DNA, 100 bp, Homo sapiens
gctgcgcttccgacggggcggccgggggctcagagatccaagtgcgcgccctggcgggtccggaccaagagagcaacctcgatcctgagagagtccctgg

SEQ ID NO: 393038 - DNA, 50 bp, Homo sapiens
aaaaatcccaaggtctgcaaaggtcccatccggaagatggatcggcttct

SEQ ID NO: 393039 - DNA, 75 bp, Homo sapiens
ctcgcccagctcgcccagcgtccgccgcgcctcggccaagacctgcctagagctggaacgttacctccagagcga

SEQ ID NO: 393040 - DNA, 100 bp, Homo sapiens
ttggcagcttaaccctggaatgtatcagcaccggacagtcatcgctgaccaagtggaagttaaacgagctgagcctcgggacagcaagagccaagcgccg

SEQ ID NO: 393041 - DNA, 100 bp, Homo sapiens
ccgtctcgtactgtcgccgtcaccgccgcggctccggccctggccccgatggctctgtgcaacggagactccaagtagagacgggatttcaccatgttgg

SEQ ID NO: 393042 - DNA, 101 bp, Homo sapiens
gatttcattacctgtgtgttagacatggaagccaggaccatttcttttgggaaaaatggagagcaatcaatgggaaactctatgccaaccttaggggtctt

SEQ ID NO: 393043 - DNA, 83 bp, Homo sapiens
gtcatccttgtacagcaatctcctcctccactgccactacagggaagtgcatcacatgtcagattccagttcttcagacaaac

SEQ ID NO: 393044 - DNA, 100 bp, Homo sapiens
gcacacagaattctctacatttgtgaaagtcagtttctgaggaatttcatcagacgaaatctcacaaaactgtcccttatcttcagtcacatgctggcag

SEQ ID NO: 393045 - DNA, 75 bp, Homo sapiens
cagctgacagctaattcttaacaattgacatggtcagagcaaatcgaagaaatcatgaccaccccaggaaaagag

SEQ ID NO: 393046 - DNA, 100 bp, Homo sapiens
caaaaatagtgatagctttgataagacccagatgatgtggtaccagttggccaaagaagagcctggtgttggtgcatgtgctttggactagcatttatgc

SEQ ID NO: 393047 - DNA, 98 bp, Homo sapiens
tttgagccatttcgaatcacttaaaggagtggacattgctagcaatgagctcccaaagccatccaggtacaggtttgcagattccgccagcagcacag

SEQ ID NO: 393048 - DNA, 90 bp, Homo sapiens
aacaatagctcaaggaaacctttccaacacagatgtccaagctgccaacagcaagatggaacttattgatgataacaccgtagtcagggc

SEQ ID NO: 393049 - DNA, 83 bp, Homo sapiens
ctgcaggtggatcagaactgtgttcgcaattcttacgatgtcttctctttgctacgaccctgtttggcaataacaagcttact

SEQ ID NO: 393050 - DNA, 100 bp, Homo sapiens
aaaggagccagcctggacgatctcattgacagctgcattcaatcttttggccaatggccatgtgtctcaggatcaagaggaacccgtctacctggagagc

SEQ ID NO: 393051 - DNA, 100 bp, Homo sapiens
agctgcacatgttaccggaactgctgttccagaacaaccaggctttgtcaagactcactgtgacttctgccgtgttcaccgtgggagacaacgtggtttc

SEQ ID NO: 393052 - DNA, 100 bp, Homo sapiens
gaggacaacgcagatatagaacatttcttttatcacaattccacctgctcctacgaagcccgactttgatggtcctcgagagaagatgcagaaactggga

SEQ ID NO: 393053 - DNA, 74 bp, Homo sapiens
gattctggaactgggagaagatggctttaaagaatacacttcaaatatgaggccccaggattcctggcgaggtc

SEQ ID NO: 393054 - DNA, 98 bp, Homo sapiens
gagtttctctttgagatgattggactgctctatccagcatcattgaggctgaggaattaccaaggaggcaggaggtggagcaaaacacaccaagcctg

SEQ ID NO: 393055 - DNA, 51 bp, Homo sapiens
atcaccatcacagagagcgatcaaacggggattcagcgtccgatcctttgg

SEQ ID NO: 393056 - DNA, 100 bp, Homo sapiens
ttactgcggccgcccggctcttgggaaccaaggagattacctggggcaattgatgttatcggtcagactataactatcagccgagtagaaggcaggcgac

SEQ ID NO: 393057 - DNA, 100 bp, Homo sapiens
aagaacttgatcctgaagagagggacaacttcctccagcagctttataagtttatggaagacagagaagatgattgaagaatcactgaagattaaaataa

SEQ ID NO: 393058 - DNA, 90 bp, Homo sapiens
gcctgatgaactccaagggggagtatcagcccaggtgaccttcagaaagacattggagaaggaagcaaagggagaggagcccgacatcgc

SEQ ID NO: 393059 - DNA, 83 bp, Homo sapiens
cctgccctctcgctttccctctcgcgtctctggctgcagggagtgcatccgccccaacccttttccccctcgtctcctgtgag

SEQ ID NO: 393060 - DNA, 97 bp, Homo sapiens
atggacacaagagaatggtctgatggtgttttgacaaatagtgctcgtcaagtggttcgggaacctcaaggtgtgagttcttgatacgaatgaaagg

SEQ ID NO: 393061 - DNA, 74 bp, Homo sapiens
agcactatgtctgcggaagtccccgaggcagcctccgcggaggagcagaaggccctggccaacgtcaacattgg

SEQ ID NO: 393062 - DNA, 100 bp, Homo sapiens
atgaaggaaggcaaagctactgctagcgaggctgttgattgcaagtggtacatccgagcacctccacggtccaaggaatttcttcacatggctcctggag

SEQ ID NO: 393063 - DNA, 100 bp, Homo sapiens
tacatgaagtatcatgtttctgacacagagtctgggatctaataattcagtcattttggatggactaaaaagaagacagaattttctgcaaaatgtcgaa

SEQ ID NO: 393064 - DNA, 109 bp, Homo sapiens
accaattgcgctgcggcgggctgtgccactacctacaacaagcacattaacatcagcttccacagatgccatggacaatattaccaggcagaaccaattctacgatacc

SEQ ID NO: 393065 - DNA, 75 bp, Homo sapiens
caggaagctgagaattatccttggacttacataaagcattttggactttatgagcagtcgaactgtcccggcgcc

SEQ ID NO: 393066 - DNA, 100 bp, Homo sapiens
gccccccaaggttgccaaatgcacagccaagcctagcagctcgggcaaggatggtggaggcgagaacactgaggagcttctcacctggggcgggtgggtt

SEQ ID NO: 393067 - DNA, 100 bp, Homo sapiens
cacagctatggaggacttgcttttgttgaactggtttatcttgcagattatggactttcctacagatattgtcccaatgggaaccacaaacagtatcagg

SEQ ID NO: 393068 - DNA, 83 bp, Homo sapiens
atgaaacccccaagatgggcatctattacattccatttccagagtgtggattctttggcatgtatgacaaaattcttctcttt

SEQ ID NO: 393069 - DNA, 80 bp, Homo sapiens
tcttggtagcggaggcacccgaatgctgcccgggtgaggaatcaaagatcaactcccactgaggacaaatggacctgtaa

SEQ ID NO: 393070 - DNA, 90 bp, Homo sapiens
tatctcatacatgctggtacatgctggatgagacgtgcaggtaccatcaggaagcagcgggataagctgataaaggaaggaaagtacacc

SEQ ID NO: 393071 - DNA, 98 bp, Homo sapiens
ccagagttgtgggccgccgtcggcagcaagaacagagagagaggtggacagatctgagagatactgaggacgccaggaaagcatgtgcagatgcaact

SEQ ID NO: 393072 - DNA, 90 bp, Homo sapiens
cagcccgacgaaaggatgccaaatgctaaactgctcttttcagatggagaaaaagtaatacccagattgacccatgagcttccaggaata

SEQ ID NO: 393073 - DNA, 75 bp, Homo sapiens
ggggcaggggcggaggcggaggcagaggtggaggcgctttgaaagttaatgtgttaagagccattgacatttgaa

SEQ ID NO: 393074 - DNA, 100 bp, Homo sapiens
cgaaaactccaccgtagcccttgccaaaggtctttctgtggaatttggaacaattctagtttacacatgtgagaagagttgctggcccccaaatcatcag

SEQ ID NO: 393075 - DNA, 100 bp, Homo sapiens
cgatgtcatggagaaccgggttggcctgaacctgctttatgctcagatgcccttggaaatcacccgtagctttatccagaaccgagatgggacttatgag

SEQ ID NO: 393076 - DNA, 98 bp, Homo sapiens
cttaatgctgtcttaactagtgtaggaaaacggctcaacccaccgctgccgaaatgaagtataaggaaaccacacctctagctgaaaaccaagatgaa

SEQ ID NO: 393077 - DNA, 50 bp, Homo sapiens
ccaacatccgcatccgatgccatttagttcccagtgacctgacagcagag

SEQ ID NO: 393078 - DNA, 101 bp, Homo sapiens
atcggtggtaacgacggcctcagcaggcggggaagatgaaagggaggatgctgaggtgaccaaagcttttgaagaagatatagagaccccaccaacaagaa

SEQ ID NO: 393079 - DNA, 95 bp, Homo sapiens
ttatcaaaatcccaggctgtcggaagcaagggatgaattgtaaaagcaacatcagcttgaccagtataaaattacagtggattgctcatctcagt

SEQ ID NO: 393080 - DNA, 82 bp, Homo sapiens
tcagaaggatatcgacgtcgtgatccagaagtccagagctgaggactgcctgtttgcaggagaatggggtactaagagaaaa

SEQ ID NO: 393081 - DNA, 75 bp, Homo sapiens
cagagcctcagtttgtgcaggacaccgacatggaacagggactcactggggatgatgtgctgactaaagacgcgg

SEQ ID NO: 393082 - DNA, 101 bp, Homo sapiens
ctaacttcagcggtggcaccgggatcggttgccttgagcctggtcctgggaactccaacaagggagcaaatcagagaaatgaacccaaactacacagaatt

SEQ ID NO: 393083 - DNA, 98 bp, Homo sapiens
ctgtatgtgatgatgaccgtcaccaactggttcaagatgatcacggacgtgcagctcgccatcttcgccaacatgctgggcgtgtcgctcttcttgct

SEQ ID NO: 393084 - DNA, 151 bp, Homo sapiens
tgcacatgtgatcttggcctgcaggaacatggcaagggcgagtgaagcagtgtcacgcattttagaagaatggggtcaagctgtggctcagctgtgttccactgtccccaacgtgactgtctttggaacagcctctactttcaagcatgaa

SEQ ID NO: 393085 - DNA, 75 bp, Homo sapiens
gactccaaaatggcgtcagttgaatcatgtccctaaggaggaagctggagctccacgaggggaggggccggccat

SEQ ID NO: 393086 - DNA, 99 bp, Homo sapiens
cagcaccccgggctggcgtgagatacgaaaaccggtgaggtccaaacattgtggtgtgtgcaaccgctgtatagcaaaatttgatcatcattgcccatg

SEQ ID NO: 393087 - DNA, 100 bp, Homo sapiens
aagctggagcttcaccagaatgcactcacgagctttccacaacagctatgtgaaaatcaggaaacccaggcccaacggcaggtggatgcaagaagaaatg

SEQ ID NO: 393088 - DNA, 100 bp, Homo sapiens
cgcgcccaccgcgccgcatccatgttcgactatctgcatcatattggtgcatttactgatccgatacagattacatttcttgccagagagtgttgctgtt

SEQ ID NO: 393089 - DNA, 90 bp, Homo sapiens
cgggagggcctcgggggactgactgctgctcgactgatccaaaacatggatgccaccactgagccttgtacagactttttcaaatatgct

SEQ ID NO: 393090 - DNA, 97 bp, Homo sapiens
cttcgcggcgcggggcgcccggcaccgccaactgcgagctcaagccccaaaaggacagaataacgggctcccagattcacaagccccaccaagagga

SEQ ID NO: 393091 - DNA, 100 bp, Homo sapiens
agttgtgacaaatcaacacaaaccccaagtcctccttgccaggccttcaaccactatctcagtgcaatggattaaagagtctattgttggggaaatcaga

SEQ ID NO: 393092 - DNA, 75 bp, Homo sapiens
ccgggcactgttgctgctgcgggaggtgttcaagcagccctggccagggatcatgcgcacagtctatgggaacca

SEQ ID NO: 393093 - DNA, 129 bp, Homo sapiens
gtagctcaagatggaaccacgatgtacattcataacaaagttcacaaccggacaaggaccctcacatgtgcaggggctatagaaagcgcaattggtggtaacgcttatcaacacagcaaagtgaaccag

SEQ ID NO: 393094 - DNA, 80 bp, Homo sapiens
ggatctggtgtaccaggcgaagctggccgagcaggctgagcgatacgacggtcaaacgatcaaggagcaaaggcgggctg

SEQ ID NO: 393095 - DNA, 83 bp, Homo sapiens
cgggttctcctaggaagtttcaggatgaaacgaggaggaagagatagtgaccgtaattcatcagaagaaggaactgcagagaa

SEQ ID NO: 393096 - DNA, 101 bp, Homo sapiens
ccagggttcccactcccaggcaacatggactacaatggttatcatcaggccattcagcgagggaccatcaagtgcaactttgcgggggttgccttgggtga

SEQ ID NO: 393097 - DNA, 128 bp, Homo sapiens
cgaaaattcctagcatgtcgtctaaccccggacatggagactaaactcctcttcatgacatcccggatgccctcggccaccagccacagcgggagcggcagcaagtcgtccggaccgccaccgccgtc

SEQ ID NO: 393098 - DNA, 101 bp, Homo sapiens
ggcaatgccacgttgcaggtggacagctggccagtgatcgagcgctaccctgcaggggatatcattttcaatgcccaatacccagaactgcctcccgattt

SEQ ID NO: 393099 - DNA, 100 bp, Homo sapiens
tctcactcaaggggaccaaaagggacccccccgtgttcatcccttgtaagctctggattaatcgaattacagctgctagccaggaacatggactgaagta

SEQ ID NO: 393100 - DNA, 100 bp, Homo sapiens
aacaatggtccaagggggtttcccagattgaagataaaactttccaagtccttggtaatctttacagcgagggagactgcacttacctgaaatgttctgt

SEQ ID NO: 393101 - DNA, 82 bp, Homo sapiens
attccaagtaactcttatttgaatcatgaagaaggttgtaggaaaccgatctggctgcccaactgtaggagacagaattgtt

SEQ ID NO: 393102 - DNA, 74 bp, Homo sapiens
agtactccaagaagatggttcagttgactattgcaaaggaatactcccccagttgcaagaggcgcaggaccgtg

SEQ ID NO: 393103 - DNA, 98 bp, Homo sapiens
cgaagacaatgttctccaaagataaggctgttccccttgaagttcgtccagctctttgtccacgacaaaagccggtgtcagctcgaggtcaagttgaa

SEQ ID NO: 393104 - DNA, 51 bp, Homo sapiens
gcgcttatcagcgctatgagaactagagatgatcgctatggaaaatcctgc

SEQ ID NO: 393105 - DNA, 74 bp, Homo sapiens
gccgttgttcccgagacgttgttgagtcccctgtgtcctcttctgggtctatgttaacaatgaatgggcaacca

SEQ ID NO: 393106 - DNA, 138 bp, Homo sapiens
taggcgggttatctgcgaacacagtagtggaagatgtaaagcaatatttcgagcagtttggcaagagttttgcggcctccaggtggtggatccaatttttcattaggttttgatgaaccaacagaacaacctgtgagg

SEQ ID NO: 393107 - DNA, 98 bp, Homo sapiens
ctcatttaaggaaccgagaagctactaaagggtttggaaatcccttgtctccaggttgctgggattgacttcttgctcaattgaaacactcattcaat

SEQ ID NO: 393108 - DNA, 51 bp, Homo sapiens
aacatctctctccagagcatgaggaaccctaaggactctgcaatatgaata

SEQ ID NO: 393109 - DNA, 100 bp, Homo sapiens
cgaaccagcatggggagtcggaaggggacaaatccgcgatcccagtcatgcatgagtacgaccccagcaaagcgacctttgtgaaggtggtgccaacccc

SEQ ID NO: 393110 - DNA, 83 bp, Homo sapiens
aggaaacaagatggtccttaaaaccgaagaggaggacggtttggtgcacctcgatttggaggaagtagggcagggcccttatc

SEQ ID NO: 393111 - DNA, 88 bp, Homo sapiens
tgggattggagattccacccaaacttgctggtcactgggaggaggctgaaccgtctgagcccagaagtgctgaggtgacgaggaagcc

SEQ ID NO: 393112 - DNA, 102 bp, Homo sapiens
gcggagctgatcgagcaggcggcgcagtacaccaacgcggtgcgcgaccgggagctggacctccggggctcctggatttggatttggaattgcaatatctgg

SEQ ID NO: 393113 - DNA, 96 bp, Homo sapiens
gttcttcggtgccgagcactccggactctacgttcgagaacttgtcttggacaattgcaaatcaaatgatggaaaaattgagggcttaacagctga

SEQ ID NO: 393114 - DNA, 83 bp, Homo sapiens
tcaagaaggtgccggtggtgcgagtcttcggagcgaccccggcagagtcctgccaaatatcacaaaacctagatattatgaag

SEQ ID NO: 393115 - DNA, 100 bp, Homo sapiens
gcaagaagaggacctgtgcagggcagagcaggaggccccccgaggcctccccatggccacccatggaccagtcggcattcacttcctcccttctgcggcc

SEQ ID NO: 393116 - DNA, 100 bp, Homo sapiens
agaagtgcctttcgcctcccaccatgattctgagacctccccagcaatgtggaactaatgtcatacccaggctatcccccaacaggctacccacctttcc

SEQ ID NO: 393117 - DNA, 83 bp, Homo sapiens
tcctgtacagcctgcagaactgccagaagcggactcctagaagaggggagcagcaaggatggaatgacagccgtgggccggag

SEQ ID NO: 393118 - DNA, 75 bp, Homo sapiens
ggcgacgagctgaccctgggagacatcgacggtctaagagtgtaaccagttccagtagcagtagcagtgacagtt

SEQ ID NO: 393119 - DNA, 100 bp, Homo sapiens
aagaagatagaaaaggtggagagactctcaaagtgcatcttggaatagcaggcggggactgtgaaccgaggcagtgaggtgattgctgctgggatggtgg

SEQ ID NO: 393120 - DNA, 75 bp, Homo sapiens
atgaggcccagctcaagaacggcagccttgactccccagggaagcagctatcagttgagggatttgcagttgata

SEQ ID NO: 393121 - DNA, 100 bp, Homo sapiens
tgaagattacatttctatactatcaccaaaagaggaagttgaagaccatgtggcgtttctaataacagttccaactgccctggcgattttctttgcgata

SEQ ID NO: 393122 - DNA, 100 bp, Homo sapiens
caacggtggccaagaagtcactagaataatcaagctgggaaggtggaaccctctccccctcagttatgtgacagatgcacccgacgcgacagtggccgac

SEQ ID NO: 393123 - DNA, 82 bp, Homo sapiens
cgccagcccgtgccgcgagcgcggcctgcaggaggctggttgaactcatggacctgatacttttctcttgagaagcaaacca

SEQ ID NO: 393124 - DNA, 82 bp, Homo sapiens
gactaccccaggaacccgcgccgcgagggctccttccctcaggtattagaaaactactcggatgctccaatgacaccaaaac

SEQ ID NO: 393125 - DNA, 75 bp, Homo sapiens
cgagggcaagtgcgcttacatccgagggcagaaatttagcatctggagaggttggattttttccaagtgatgcag

SEQ ID NO: 393126 - DNA, 76 bp, Homo sapiens
cctgaagaccaagcagaacatgccacccaggcagctgctggagggagactcatgcatctgtatgccgtgtgcgtgg

SEQ ID NO: 393127 - DNA, 87 bp, Homo sapiens
tttctatggatattattgattccctgaggaactgcagatctgggacacggccggccaggagcggttccgcaccatcacccagagcta

SEQ ID NO: 393128 - DNA, 90 bp, Homo sapiens
gaacccacaggtgcatttcacagcactctgggcgaaaattggatgtgaaaatgaagccagaccgaggctttgaaatttctgaaaaccaga

SEQ ID NO: 393129 - DNA, 100 bp, Homo sapiens
cagttcaacgagaatgaagccatccaatggatgcaggaaaactgacaagttggatggcttgaggactggtactaaaaggaaacgtgactgggaggccatt

SEQ ID NO: 393130 - DNA, 87 bp, Homo sapiens
aaagtgtttggggaattggctattctttacaactgtacccggacagcgaccgtcaagaggtttcgaaaaaacgatgaaatgaaagct

SEQ ID NO: 393131 - DNA, 75 bp, Homo sapiens
agtgccgtgcgccgcagcccgggcccaggccccggcagcgcctgggacaaggcatgtactggcattgaaaacatt

SEQ ID NO: 393132 - DNA, 100 bp, Homo sapiens
caagttcctgaggaacatgcgctttgccaagaagcacaacaaaaagggcctaaagaagatgcaggccatggaagtgaacacatcagcaagtgaaatcctg

SEQ ID NO: 393133 - DNA, 83 bp, Homo sapiens
ggcggggctgaggcggccgcggggcccgagcgcagctgctcaagatgaggaggtgcgcggggccggggcggagcagtcgcgtt

SEQ ID NO: 393134 - DNA, 99 bp, Homo sapiens
gcgctttggagccggccccaggcagcgtgtgtcggtcgcctagtctggagaactagtcctcgactcacgatgtgtcaccggtggtggccggcctcatcg

SEQ ID NO: 393135 - DNA, 95 bp, Homo sapiens
tccaaggctatgtttgaatctcagagtgaagatgagttgacaccttttgacatgagcatccaggagagcctgtcccgcctcctgtccacctgtgg

SEQ ID NO: 393136 - DNA, 95 bp, Homo sapiens
tggcggttgcggggccagcccaccgtcctcctcacactggcccacatcttccatcactttgcaccgcttctgttacaggcccaaaaactgcgact

SEQ ID NO: 393137 - DNA, 100 bp, Homo sapiens
ttcggagcggccggtactgttgaaagcgacaagtggaggcgccgctctagcggccgggactctgaactatggcgtgccatcagacaagatcagttgatca

SEQ ID NO: 393138 - DNA, 100 bp, Homo sapiens
caggacttcaggaagagaggaactccgcaccgtttgatcaggattcccaggtgtgactttgcaggtcacttatacatctcaagaggatctggtggagaaa

SEQ ID NO: 393139 - DNA, 90 bp, Homo sapiens
cgaggtggcggtgctgaggcacctggagaccttcgagcaccccaacgtggtcaggctatgtggttgatgttgcagaatgatgagccggag

SEQ ID NO: 393140 - DNA, 100 bp, Homo sapiens
ctaaaactggggttcctataggtcattggcctgttccagagtctttttggccagatcaaaattcgccaacactagattactacagcatcccatttcccac

SEQ ID NO: 393141 - DNA, 100 bp, Homo sapiens
cgggagcgggtaccgggcgcgggcagagcgcggcggcgcggtcccacagaacaacgagaagcttcaggagagcccgtgcatcttcgcattgacgccaaga

SEQ ID NO: 393142 - DNA, 83 bp, Homo sapiens
gacttttcttatgctgggatgtgccttagaggattatggtttttggctttcacccccaaccagtgaccaaagacttgaccact

SEQ ID NO: 393143 - DNA, 83 bp, Homo sapiens
aagcatgctcagaccttcattgctctgtgtgccaccggacgagattgaggagctgcgggccgagatgctggagatgcgggacg

SEQ ID NO: 393144 - DNA, 100 bp, Homo sapiens
cggggctcccaggacctccactaatcaccagaacaaaatgtgcaggagagctggaggtgtttcagaaagatggggaacgaaaaattcagagtcgacagca

SEQ ID NO: 393145 - DNA, 74 bp, Homo sapiens
tcgcagtggtcgcttcttctccttggtgctactcttgccttgcggactaaattttcagccagccagttttggga

SEQ ID NO: 393146 - DNA, 100 bp, Homo sapiens
tgctcctctagaagaggcaaggcagtttgctgcacagattgggtttgtgctgttcccaccttttggaacacccgaatgggaccagaaggatgatgccaac

SEQ ID NO: 393147 - DNA, 75 bp, Homo sapiens
cacattcaaattgcatccactgccataaagactctggaaaatcccaagtatgaactgatcatcgaggctcaagat

SEQ ID NO: 393148 - DNA, 100 bp, Homo sapiens
gagtcggctgagggaaaagcgaggcaaggcaggcgggtcatgcaagacaagataatctgccttccgaaaagagtgcagcctgctcagaaccactcttccc

SEQ ID NO: 393149 - DNA, 100 bp, Homo sapiens
gacatgcaactaatagcccttgaacagctatgcatgctgcttttgatgtctgacaacgtggatcgttgttttgaaacaattctgcttggtcagaatcgtg

SEQ ID NO: 393150 - DNA, 98 bp, Homo sapiens
ggctgtgtgttttctgagcgagccttgaaagagataaaagcggaagtttgccacacggccatggttgcttgttatccgggcaatggaacgggttatgt

SEQ ID NO: 393151 - DNA, 96 bp, Homo sapiens
gcgccgcctggctttcgtattcgttgttctcggcgggctgtggggcctccgcgccgcggccgttagtcatgtcggatgaaggactgaaccatgaat

SEQ ID NO: 393152 - DNA, 75 bp, Homo sapiens
aaaactggtgtcctgaaatttaaaactaaggcatcggtgcttggagagtcccgtattctcagagtaaaagttgtt

SEQ ID NO: 393153 - DNA, 95 bp, Homo sapiens
tcggaccgcaaagacttcctgtgttccacctgtgggaagcaatttaagattttgtggaagtataatactttgtcattatgagatgtcgtctctcg

SEQ ID NO: 393154 - DNA, 100 bp, Homo sapiens
agagtcacctaaagttaggcggcactccagccccagctcgaataagaccacagcttgccaaagagaagattgaaggatgccatatttgtacatctgtcac

SEQ ID NO: 393155 - DNA, 75 bp, Homo sapiens
tgcgtacattcggggtgccagaaggaaagcatagattgggagtatgtatttaaaaacagtgaattttcatcaaag

SEQ ID NO: 393156 - DNA, 100 bp, Homo sapiens
cgaaaaatcagattgaaagactgacccgtcctggttcctcttacttcaatttgaacccatttgaggctgaccggttccctgatgtgttacctgcttctgc

SEQ ID NO: 393157 - DNA, 100 bp, Homo sapiens
aagttgttcattgtttgtcaccacaaaaaggacagggatcatagacggtatttctatgtaaacgaacagtcgggcgagtctcagtgggagtttccagatg

SEQ ID NO: 393158 - DNA, 100 bp, Homo sapiens
ttcctccagaagcacaaaatgattttcctgttgcaatgcaggtctatgttaacaatgaatgggcaaccagtgttggggaaggagggagctttggagaact

SEQ ID NO: 393159 - DNA, 74 bp, Homo sapiens
gaacatttccccagaggagctcaaaatggagttgccggagagacagcccagaacttggaccacgggaaggcctg

SEQ ID NO: 393160 - DNA, 82 bp, Homo sapiens
gtggcgccgcccggggcgaggcagggccagcagcaggcgggagcaaccatgtccaagggacctgcagttggtattgatcttg

SEQ ID NO: 393161 - DNA, 83 bp, Homo sapiens
caagggaccaaggtggaaatcaaacgagtgtatatgacaggaaaagaacttcgccagtgtatgctaccaaagtcagcagcttt

SEQ ID NO: 393162 - DNA, 100 bp, Homo sapiens
taaaataattgggcagaagagaagcagtgaaggagtgcagaggcatcacctgaaagagagcccactccagttctacgtgaactaccccaacagtggaagt

SEQ ID NO: 393163 - DNA, 78 bp, Homo sapiens
actatactttattgatcaacatccttcatagggtatatttacttctggcacatgggaagagaaatcagatgaaatttc

SEQ ID NO: 393164 - DNA, 100 bp, Homo sapiens
gtttgaggcattgacagttgtgattcagcacctgctgtctgaggctcttgcagccaatgccggaacaggatttgctgttgctgagcctcaaatcgcaatg

SEQ ID NO: 393165 - DNA, 85 bp, Homo sapiens
gaatcactgataatgacatccagtccctggtgctagagattgaagggacaaatgtaagtagccggatcgagctgggagatgtgac

SEQ ID NO: 393166 - DNA, 82 bp, Homo sapiens
ggtttcacacgtacctcgtcgcctccaacctgactactaatgaagacggttcacagagagtttcggagctgccaacatctcc

SEQ ID NO: 393167 - DNA, 100 bp, Homo sapiens
aagacagcattggtactaatggccaactcaagtctcgctctgtcgtccaggctggagtccaatgctgcgatcttggatcactgcaacctctgcctgctgg

SEQ ID NO: 393168 - DNA, 100 bp, Homo sapiens
aatgtgtgcggacacactcttggcagaatgagaaatttagaaaagaacatgtttacaaaagaagctttagctttggcttggcgatattttttacctccat

SEQ ID NO: 393169 - DNA, 75 bp, Homo sapiens
ccctgaccaccacacccaccagaaattcatcaaacctatcttcacggatgagtcctaccttgaactctataggaa

SEQ ID NO: 393170 - DNA, 75 bp, Homo sapiens
ggaaaggacactcccctaacatatttgggatcatagacggtatttctatgtaaacgaacagtcgggcgagtctca

SEQ ID NO: 393171 - DNA, 75 bp, Homo sapiens
gtggttgccactcacctgaggatgtacttaaacttcacccttgtttagcccctattaaggttgctttggatgtag

SEQ ID NO: 393172 - DNA, 87 bp, Homo sapiens
gaagagtgagagatggaacccgaagaagaaaggattcgttacagccagagattgatgtttcagagactccagaaagagagagaaagt

SEQ ID NO: 393173 - DNA, 100 bp, Homo sapiens
atggaagccagattgtcagccctctataaattggagagtgactatgagatccttgaaagcatggagatatggaccaaaaggaacgagacgtgattatgag

SEQ ID NO: 393174 - DNA, 90 bp, Homo sapiens
gtggaggttcgcggctctaacggggctttctacaaggggaatcccggaggcaagacacttgaggagaggcgctccagcctggacgctgag

SEQ ID NO: 393175 - DNA, 97 bp, Homo sapiens
tgtggctggagacatgagcaagaaaagcctctgggagcagaagggaggctccaagacctcatcaacaattaaggttgctacgatttctgcaaacgga

SEQ ID NO: 393176 - DNA, 90 bp, Homo sapiens
agactgtttgacttagaatcttcccttttttactccattcaagagcagcattcataaatttccaggacttgatgacacgtaccttcgctg

SEQ ID NO: 393177 - DNA, 87 bp, Homo sapiens
aaatagcacacttttactctacgcaactgttgctttttcatggccacagaaacactattcagaatgggtgtagcaagaggaaccatc

SEQ ID NO: 393178 - DNA, 100 bp, Homo sapiens
ggaaaggagaaggaataagacggcaggaggaagagagagagagggatgccgaggaatgtgacagggctgggagtgtggccacctgccaggccgtcatgcg

SEQ ID NO: 393179 - DNA, 75 bp, Homo sapiens
gccaaacaactggctggaatattgcaggtgcctttagagaaaactgtcgctgaaaagcaggagaagagaaatcag

SEQ ID NO: 393180 - DNA, 75 bp, Homo sapiens
gaggccgcaggatgacatccgcctggtatgcccaagaggacagagaacgaatgcacagaaatattgtcagccttg

SEQ ID NO: 393181 - DNA, 100 bp, Homo sapiens
gagaaggcgctgcgcaggcaggcggaggaggaagccttatcagttgtgagtgaggaccagtcgttgtttgagtgtgcctacggaacgccacacctggcta

SEQ ID NO: 393182 - DNA, 100 bp, Homo sapiens
gtggcgctcaagtaccagcagcaccaggagtccctctccgcccagttacaagcactcctgtaggaggcctgctgatggcatttcagaagtactctggtga

SEQ ID NO: 393183 - DNA, 75 bp, Homo sapiens
aatggggcagaagaagagcagaaaatagcagccaggaaccaagaaaacttgtgtctttggtgcaacactaacaag

SEQ ID NO: 393184 - DNA, 74 bp, Homo sapiens
aaagctgcttgcacgttatataccgcttattcaaggtaaggttgataacggcaaaacaaaggatctatatcgcg

SEQ ID NO: 393185 - DNA, 95 bp, Homo sapiens
actacctgctgtacaccctcaacaaacaccagcgctttggatgccttcaattaagttgcagagttctgatggagagatatttgaagttgatgtgg

SEQ ID NO: 393186 - DNA, 89 bp, Homo sapiens
tggaagcaagaataatgaaggcctgacgctccttgctcggattgaacgtatggaaaggcggatgcagctggtaaagaaggataacgaga

SEQ ID NO: 393187 - DNA, 99 bp, Homo sapiens
tgttagttattcactgattgtacttgtggatggttgagcacaaaaaaccacctctacatttctcttaaagccctttcccagtctgcctggagaacccac

SEQ ID NO: 393188 - DNA, 73 bp, Homo sapiens
ccgtttgttcaggaaccaccagtgacagatcatccgtccttggctcaggatttggagagcttgcaccaccaaa

SEQ ID NO: 393189 - DNA, 90 bp, Homo sapiens
gcactgggtgattcacgtgtgcccaggccctgaggtgggccggacctgggagtggcagatcaaccggagagcaagaagctggcttcccag

SEQ ID NO: 393190 - DNA, 75 bp, Homo sapiens
gccgcggagcgccagctcaatgaagttttttgcatgtctgacacccatgactccacctggaccttatggctccac

SEQ ID NO: 393191 - DNA, 95 bp, Homo sapiens
acatcaaccagctgccgccgtccatcctgctcaagtctctagtgatccctgaaaagttccagcatattttgcgagtactcaacaccaacatcgat

SEQ ID NO: 393192 - DNA, 83 bp, Homo sapiens
cgccacgacgtgggactgcccggggtgtctcgcgcacgggccctcaggaagacaatgcagatcttcgtgaagactctgactgg

SEQ ID NO: 393193 - DNA, 96 bp, Homo sapiens
catccggaatctggcccctgcaggcgtggggttccacgtgggaggtgctggagaatctggtaaaagcaccattgtgaagcagatgaggatcctgca

SEQ ID NO: 393194 - DNA, 100 bp, Homo sapiens
cggctgccacccgcgctccctccgccgccgccgccttgctgctgctcaaagctgctgccgccccttgggctaaaagtactactgctggattctaaagcac

SEQ ID NO: 393195 - DNA, 97 bp, Homo sapiens
ctcttttgtgctgattcctgaggactaggaaggtgccccgaaaagaattcagaaattaatttccaaagactcatgttacatgagaaagccaccaaga

SEQ ID NO: 393196 - DNA, 100 bp, Homo sapiens
ccggcagttgcaggagcggatggagttgctgcaggcagagggagccacagcgtccgtctccaagagagtatgaagagagtgcgtctgtagggcagggaag

SEQ ID NO: 393197 - DNA, 101 bp, Homo sapiens
cctcccctctgaggaccgaagatgagcttcctcttgtcaaaatgcagatcttcgtgaaaacccttaccggcaagaccatcacccttgaggtggagcccagt

SEQ ID NO: 393198 - DNA, 100 bp, Homo sapiens
cggcggtaggaagccggagacagcagggtgacaggtttaagggaaaccacaggctccgagagtgatgggggtgactcaagcagcaccaagtctgaaggtg

SEQ ID NO: 393199 - DNA, 119 bp, Homo sapiens
gcaggacatagcagatatgctcctcattgctggggttgacttaaacctgagagataaggggtcttcacggcttctctgcccaggggccagaaccgaggaggccaggagggctgctgggg

SEQ ID NO: 393200 - DNA, 96 bp, Homo sapiens
cggacatgcgcgggagggcgccgcggggcagccgccgctcctccgggtaatctatgccagcaattatgacaatgttagcagaccatgcagctcgtc

SEQ ID NO: 393201 - DNA, 100 bp, Homo sapiens
gttttagagaagaagactgaaggatgttgagaaagaactggagatgcagatcagcatgaggcaggagatggaattggctatgaagatgctggagaaggat

SEQ ID NO: 393202 - DNA, 75 bp, Homo sapiens
cgctctctgaagaacctccgagtacgagattgggaaaatgaggtacgttagtgttcgcgattttaaaggcaaagt

SEQ ID NO: 393203 - DNA, 82 bp, Homo sapiens
ctgctagatgttgtggttgaaaataatctagatattgatggctttggccaaagatgaagaggaagcctttctggattggagt

SEQ ID NO: 393204 - DNA, 75 bp, Homo sapiens
ctggatgacaaccaaatcatcaccagctctggggataccacctggtttcggtctaagtaccacccagatgaggtg

SEQ ID NO: 393205 - DNA, 99 bp, Homo sapiens
tgagcacctgtcccacttcggcatcgacatgctgaagatgcagaagcttgccgggattgctgtccttgccattggactatggctccgattcgactctca

SEQ ID NO: 393206 - DNA, 50 bp, Homo sapiens
caaagtgatgacctggatagtgaagggaggtggggaagacagggctccag

SEQ ID NO: 393207 - DNA, 76 bp, Homo sapiens
cctctcaagtaactgggactacagcttgcccaacagaaggtggaaaaaatcactgaaagtaaaaataaactggcct

SEQ ID NO: 393208 - DNA, 97 bp, Homo sapiens
gcagatggcggatgccctgcagtacctgcagaaggtctctggagacatcttcagcaggtttttagaacttcagccataaaaatgggcagaattttcc

SEQ ID NO: 393209 - DNA, 82 bp, Homo sapiens
ttccaccatgcccctggaaaaactgtcttctacattaagtccattgagccacagaaagtatcgacattagggaaaagcaacg

SEQ ID NO: 393210 - DNA, 80 bp, Homo sapiens
tccagctgtgccgcaccgaggcgagcaggagcagggaacagaggaattccagggaagaaatgtggtacaatcatacttac

SEQ ID NO: 393211 - DNA, 80 bp, Homo sapiens
gggtgggaaatggcggagtatctggcctccatcttcggcaccgagaaagacaagcaacatgagtgagaatgaggaagagg

SEQ ID NO: 393212 - DNA, 100 bp, Homo sapiens
agcattcgttcagtcagagagcataatagaagtactgcgttttgatgatggagggctactacagccaaaagaatgcaatggtgtaaagattccagttgat

SEQ ID NO: 393213 - DNA, 83 bp, Homo sapiens
gcagcccatcgtgcttaaagaaggctggtactcctggttaatcaacagcttcgtcaacggtgagtccatgtgcttccctgctt

SEQ ID NO: 393214 - DNA, 50 bp, Homo sapiens
ctctccttttccctctccctttccctaagatgccctccaaatccttggtt

SEQ ID NO: 393215 - DNA, 88 bp, Homo sapiens
gtgattccacaggcacaacctgtgagacctccaagagttaacagagcagtttcataaagttgaatctcaactgaataagctaaatcat

SEQ ID NO: 393216 - DNA, 75 bp, Homo sapiens
cgattttctgcaggccccacgagtgggaggtgctgagccgctcaggaacggaaaacagttcttccttcaaagcat

SEQ ID NO: 393217 - DNA, 74 bp, Homo sapiens
agctacgggaattcagtactctgtaacacccagctaccaggatgtctccaatacaacgacagcccagaagagga

SEQ ID NO: 393218 - DNA, 74 bp, Homo sapiens
cccatccagcagttccttcaccaagaaaaatgtaaggggtgaattcacttattatgaaatacaagataatacag

SEQ ID NO: 393219 - DNA, 95 bp, Homo sapiens
cgagcagaacgtgtagccgcgtcccctccagtccgctccgggcagacaatgcagatcttcgtgaagactctgactggtaagaccatcaccctcga

SEQ ID NO: 393220 - DNA, 76 bp, Homo sapiens
tcatcaatgttactcaggtagaggtaagaagacaagaggtttcttctcctagaaaagaaacttcagcaaggagtct

SEQ ID NO: 393221 - DNA, 75 bp, Homo sapiens
acgaatctgcccacccctcctgtaacccagcctgtttcacttcttgagttgctggagaatgtaaccctaatccat

SEQ ID NO: 393222 - DNA, 74 bp, Homo sapiens
cttcgactctcaaagcaataccaggatagctgttgtttcagagaaagcaccatatgaaggcggagtatggaaag

SEQ ID NO: 393223 - DNA, 50 bp, Homo sapiens
tgccgaggctgttgctgttgatctgtgtgatatggtttactgtggaattt

SEQ ID NO: 393224 - DNA, 75 bp, Homo sapiens
acgactcggtggaaacagtcacgtccatagaacagcattaaagggcagtatttaaagtcagttggcaagcagtgg

SEQ ID NO: 393225 - DNA, 50 bp, Homo sapiens
atttctttccaatcttcagacattgctaaaatagctgtggaagctcagaa

SEQ ID NO: 393226 - DNA, 100 bp, Homo sapiens
gcctccatcttcggcaccgagaaagacaagtgacttgatggagggtgagctctattctgctctcaaggaagaagaagcatccgaatcggtttctagtacc

SEQ ID NO: 393227 - DNA, 75 bp, Homo sapiens
agcctcctgactagctgggattacagcttttatcaaaatacaactcaaacctagctactccaatagcaattaaag

SEQ ID NO: 393228 - DNA, 96 bp, Homo sapiens
caacatgagatggtggatgaacccacagggaccattgacatttatggatgtggccatagaattctctgtggaggagtggcaatgcctggacactgc

SEQ ID NO: 393229 - DNA, 50 bp, Homo sapiens
tcccaaggaagatgctgtccagagggttatgtggtccgaatcagtggtgg

SEQ ID NO: 393230 - DNA, 100 bp, Homo sapiens
tccttcattggggagaactctaggacttgcatgctcaagacacagatgtggcagctcctcaagggccacgaccacctgcaggatgagttttctatcttct

SEQ ID NO: 393231 - DNA, 75 bp, Homo sapiens
caatgcgatgctttgcatcctaaatcagatatgaagagaaggctactaaagacttggaacgatacaatagtcaaa

SEQ ID NO: 393232 - DNA, 75 bp, Homo sapiens
agccgcgcggcttcctccagacctctcggcgcggatatgaggccccaggattcctggcgaggtcctcctcccctt

SEQ ID NO: 393233 - DNA, 107 bp, Homo sapiens
cagttcaagatgccccgggactgaggccgccctgcaccttcagcggatttggggattaggctcttttagattctttccaccatggccagacgcccccggaacagcag

SEQ ID NO: 393234 - DNA, 98 bp, Homo sapiens
aaaacaggtcataactcctggagaagggattgcccagtcagcaaaggttcagccctccaagcgctcctttaccctcatcgtggaggcctgggactggg

SEQ ID NO: 393235 - DNA, 101 bp, Homo sapiens
tggtggagtggcagcttagaggatatgaagattggttacggcataactcagataatgaagtaaatggagctcctgtttatgttgttcgaagtggtggcctt

SEQ ID NO: 393236 - DNA, 100 bp, Homo sapiens
aacagggctcgagtctacctggatgaaaactacaaatcccaggagcacttcacgatatctggggaagatgaagtagagtgctctgacaaggacgagcccg

SEQ ID NO: 393237 - DNA, 75 bp, Homo sapiens
ctgggctcggtattccccttcctgctagtcctggtggatctgcagtacgaaggtactccaaagattcaggtttac

SEQ ID NO: 393238 - DNA, 123 bp, Homo sapiens
ctcacagatacacccccaaagagcaactgaagattcatacgcagctggcagatattatcatagttgctgcaggtggattctccacagttttcctcgtgcgtactcacggtggaatccgatgtg

SEQ ID NO: 393239 - DNA, 75 bp, Homo sapiens
aacaactttccgaatctgcaaaagaaggtatatgaatgacctaaaggtacaaataaagacggagagagaacagtg

SEQ ID NO: 393240 - DNA, 90 bp, Homo sapiens
gagaacaaggccttctccatggatgaacacaatgcaggcctccccatggccacccatggaccagtcggcattcacttcctcccttctgcg

SEQ ID NO: 393241 - DNA, 90 bp, Homo sapiens
cgtttcttccattcactcactggaatattgacccttatttatccagaagattgatcatcatatgggttgattctggactctacttataat

SEQ ID NO: 393242 - DNA, 50 bp, Homo sapiens
cctgtacatcggcaacttcaaagaattaaatatgggtgatgttgagaaag

SEQ ID NO: 393243 - DNA, 82 bp, Homo sapiens
cggcggggcggacggtcgcgcggcggcaggcacagtttcagaggcggagcacagagagctgcggctgggacaaggagcaccc

SEQ ID NO: 393244 - DNA, 124 bp, Homo sapiens
tccaaagactgtggaacttttaagtggagtggtggatcagaccaaagatggatgatgattattctccaccgtctaagagaccaaaggccaatgagctaccgcagccaccagtcccggaacccgc

SEQ ID NO: 393245 - DNA, 105 bp, Homo sapiens
tcttcaaaacgcactcattcagtttgctactaggtgctggagaatctggtaaaagcaccattgtgaagcagatgaggatcctgcatgttaatgggtttaatggag

SEQ ID NO: 393246 - DNA, 99 bp, Homo sapiens
cgcggcactacagcggccccggcccggcccccgcccggccccggcgcaggcagttcagatgggcttctttcgccgaaggtacaaagaaattatcgaagc

SEQ ID NO: 393247 - DNA, 78 bp, Homo sapiens
gacccgagacgtgaaaaaaacaggcgtattctggtaatttcgaggaggaggtgagatggcagctgggcaaaatgggca

SEQ ID NO: 393248 - DNA, 97 bp, Homo sapiens
ggatcaggagattattgaagtagatcctgacactaaggaaatgctgaagcttttggtatcctccatgaaatgtgggatccttccaatttctcaagag

SEQ ID NO: 393249 - DNA, 100 bp, Homo sapiens
tctatgatgctgatggtgatggagattttgatgtggatgatgccaaagttttattaggtgctttgaagaagagtctcacagccaagcaggtccaggcgga

SEQ ID NO: 393250 - DNA, 82 bp, Homo sapiens
ttggaaatcgctctcgctttgccaatatttttcagtgctgtacaagcgtcttgaattactctggtagcttttccagaaagac

SEQ ID NO: 393251 - DNA, 90 bp, Homo sapiens
tgaaaggagatgcacacagtctgttttggcagggcaatccctacatgtgcaataatgagtgtgatgcgagtacccctgagctggcacacc

SEQ ID NO: 393252 - DNA, 83 bp, Homo sapiens
attgtcattttgactcagtagcaaactcaccagcccaagaagatgaaaggattgttcttgttgacaacaaatgtaagtgtgcc

SEQ ID NO: 393253 - DNA, 90 bp, Homo sapiens
tagggaggacctcacttccccggggtgtaataatgttaactgaggaagatgatccctatgatcttgaagatgtttctgcacagaaatgag

SEQ ID NO: 393254 - DNA, 90 bp, Homo sapiens
agcaggtttccaacaaggatgatatgaagacttccctgaagaaagttgtgaaggaggttcgctatcctgatcgcatcacactgatccggg

SEQ ID NO: 393255 - DNA, 100 bp, Homo sapiens
cgagaggaaaggctgcggcgcgcagagcgaggctgcgggaccccaggatgggggacaggaggctgcggggcctcaggtgcgggccagtgctattgcccag

SEQ ID NO: 393256 - DNA, 109 bp, Homo sapiens
cctccatttggcagccttaagcggcttttcagattgctgcagaaaacttctttcttcaggtttctgagtcccttcaacatgatcctgggaggaatcgtggtggtgctgg

SEQ ID NO: 393257 - DNA, 100 bp, Homo sapiens
agtcggacttcatctctgcttttcatgaggactccagagtctcttctccttcaagtccgtggttctggtggagcccgactgagcactaaggatcctctgc

SEQ ID NO: 393258 - DNA, 77 bp, Homo sapiens
aaggacgacgacaaacacgtcatgaggaaggagcagcgcaaggagaagaaggaagttgtggaagaggcagaaaatgg

SEQ ID NO: 393259 - DNA, 99 bp, Homo sapiens
ggatggtcatctatttcttcatagcggcttcctacgcaccctgggtgtccttctgtgctgaacatgtccgtaggaatgccctggcacttcatgctcaaa

SEQ ID NO: 393260 - DNA, 100 bp, Homo sapiens
ctttgatcttggctcccacaagagagttggctgtgcagatccagaagcgcaaatctgtccaaggctgcctggggagcattggagaagaatggcacccagc

SEQ ID NO: 393261 - DNA, 82 bp, Homo sapiens
gaagccgagttcaacatcctcctggccaccgactcctacaagagatgccctgtatccaagcccaatatgggacaccagcacc

SEQ ID NO: 393262 - DNA, 100 bp, Homo sapiens
cttgagtttggccgaatcaaacagggcattcagggagactggaataactgatgaggaacaagccattagcagagtcatcagaaattgggccttccctcgt

SEQ ID NO: 393263 - DNA, 80 bp, Homo sapiens
acttcgggcttcctttccacagtataatgcttcatcccagcagcaaagagaaataattaaaagtaggagcctggacaggc

SEQ ID NO: 393264 - DNA, 90 bp, Homo sapiens
cggagcggaacctgcggggcagaggcggcggccgcagcggcgcagctgatagcaggaacaggttcctggtagagttacacagttgtgccg

SEQ ID NO: 393265 - DNA, 100 bp, Homo sapiens
tgccgccatacgcgctctccctgtttaggtcacaaagctccttctcaaacttgttctggaggaagccagcagccatgtcataaggaagctcaagcagcca

SEQ ID NO: 393266 - DNA, 50 bp, Homo sapiens
tacgcgaaggatatcggtttcattaaggtttacaaaagatactgcaaggt

SEQ ID NO: 393267 - DNA, 100 bp, Homo sapiens
gcgccgcctccgggctccttcggccccgccatgggctgctgcagctccgcctcctccgccgcgcaggtggatgcagaccaagttatcctctctcacagcc

SEQ ID NO: 393268 - DNA, 98 bp, Homo sapiens
ctgatacccggatgtgaggcgatccgctggcgctagtctgaccctccgccaggcaaaaggaagggtttgaaattcctgatatagatgctgaaaagtta

SEQ ID NO: 393269 - DNA, 97 bp, Homo sapiens
ggaggcggcggccgcggcggctgctgctgctgcagtgggacaggtggcggcgaccggcggcgtccgaggagagctctctttacgagaaaaggaagat

SEQ ID NO: 393270 - DNA, 100 bp, Homo sapiens
cggactcgtggagttgtgaacgccgcggactccggagccgcacaaaccagggctcgccatgaagccagagaagtacaacttcctgggtatctccattgtt

SEQ ID NO: 393271 - DNA, 97 bp, Homo sapiens
tcctggaggaatacctggcattgacctctcagatcccaaacaactggcagaatttgctaggtcaggatccagacggagccaaagtacacaggcatct

SEQ ID NO: 393272 - DNA, 98 bp, Homo sapiens
gatcattggtttatgcaggaattaaatcaattgtaaagtcatcgttggaaaaccgtgaggacatactgaatgccggtgacaaattaacagaggtcctt

SEQ ID NO: 393273 - DNA, 78 bp, Homo sapiens
tgcgcggagggactgcaccttctccatcaggtgcagaagagcttgggactgctttgttcgctgcctggatcatgcttg

SEQ ID NO: 393274 - DNA, 75 bp, Homo sapiens
ggattccaagtaactcttatttggactggtaatgaggaacaaacacggattaatctgaattgtactcagaaggct

SEQ ID NO: 393275 - DNA, 100 bp, Homo sapiens
gggggctcagcctggacttctaccagggccacatcaccgccttcctgggccacaacggggccggcaagaccaccaccctcttcgccgacacgaggtgacc

SEQ ID NO: 393276 - DNA, 75 bp, Homo sapiens
cgcggcccctcctccccggcgcctcccaggccctgggaggagcggggacactgaggacctctctccaaattggcc

SEQ ID NO: 393277 - DNA, 75 bp, Homo sapiens
aagagctgggagctgctgaaggaaggtttgaagatgccgcatttggattggatgaattccaaattctgcttgctt

SEQ ID NO: 393278 - DNA, 101 bp, Homo sapiens
ggcggcaccatcacgggcattgccaggaagctgaaggagaagtgtcctggatgcaggacaagcttaccattgttcagaagcaaacagtttgcagtaaaaag

SEQ ID NO: 393279 - DNA, 75 bp, Homo sapiens
gaacagcatcttcgactccttcccgacctactcgccgaccttcatccgcggtactccaaagattcaggtttactc

SEQ ID NO: 393280 - DNA, 90 bp, Homo sapiens
tggagacagctgccccgagggtctcctccagtagacggtacagcgaaggcagagagttcagctacagagggccggagctggagatgtggt

SEQ ID NO: 393281 - DNA, 100 bp, Homo sapiens
ctctgcattttgtccacatgagaggattacctttccaagccaatgcccaagacattataaactcagaactaagacatggtccgttttactatatgaagca

SEQ ID NO: 393282 - DNA, 87 bp, Homo sapiens
cagcctcctcttccagaatgcctttgcgcagggccaaatccttgtagctgtcttcttgccccggtcagtgccagccgtactattcac

SEQ ID NO: 393283 - DNA, 101 bp, Homo sapiens
ctcgcaggcccccccgcgccgaccgcgttcctatggacagacgcacagacacctgcaggggcagtacgaataggaataattgatggagaatatgttgttaa

SEQ ID NO: 393284 - DNA, 74 bp, Homo sapiens
tggcaagatatggacaactaagtgagaagacacccatccaacctgatgctggaccgtctgagtgggaagatcct

SEQ ID NO: 393285 - DNA, 100 bp, Homo sapiens
gagcagcagccgcccgcttcaaccccaggggaccagaggaactcagccctgattgcggtggtccagcacatcatccagcaaaatcatgtcccagagtcaa

SEQ ID NO: 393286 - DNA, 98 bp, Homo sapiens
gccggcagaggatccagtgttcaccatcctggccccggaagcacttgcacctcctgcgccgccgccccccatccaaggatatgccttcaagcctccac

SEQ ID NO: 393287 - DNA, 75 bp, Homo sapiens
catggaaatgtctactgcacagttgcaccactgagaaggacaggtggaggcaatgcccagagctgtggcagccac

SEQ ID NO: 393288 - DNA, 87 bp, Homo sapiens
ggaggaggcagtggcgctcggcgtgggtctgtgcaacaatggcttcatgcaccacggcagaggtggaggagacactgaagcgactgc

SEQ ID NO: 393289 - DNA, 100 bp, Homo sapiens
ggaatatttctgtggagctgagggctgatgggttctgacggataatttccaagccaggtgctggagaatctggtaaaagcaccattgtgaagcagatgag

SEQ ID NO: 393290 - DNA, 98 bp, Homo sapiens
gttgacggaggaggaggtggtaccttctgcacctcccctgcctgtgaggcccccgaagacatcaccagggctcagagtccaggcagctgtgattcctg

SEQ ID NO: 393291 - DNA, 100 bp, Homo sapiens
caagatggcggaagcggaggagtctccaggagacccggggacagcatcgcccaggcccctgtgtgtgtgagcacagcaaagagaatcttatgaccccctc

SEQ ID NO: 393292 - DNA, 74 bp, Homo sapiens
gcaagatcggcaggcgagattgcctgacccaggcctgctcggccctcacaggtgccaccatggcaactgcacca

SEQ ID NO: 393293 - DNA, 100 bp, Homo sapiens
gctgatgaagccggacgggcgaggtggtccagctgctcacctgtgacctgctactgtcgctacggacagcgctctggcaaaaacaggccagtgccagcca

SEQ ID NO: 393294 - DNA, 100 bp, Homo sapiens
tgtgatgttggagaactacagaaacctcgtctccctggatgccatggacaatattaccaggcagaaccaattctacgatacccaagtcatcaaacaagaa

SEQ ID NO: 393295 - DNA, 74 bp, Homo sapiens
caaaatgtcaacaaattgatggactttgaagattatccaatgagaattttatatgaccttcattcagaagttca

SEQ ID NO: 393296 - DNA, 99 bp, Homo sapiens
aataatgaccgcaaactgcctccagagtacaaccttccccacacttacgttgaaatgcagctgtgtcagcgtgttatgatgccgtcccgtaccaacctg

SEQ ID NO: 393297 - DNA, 97 bp, Homo sapiens
atcagagtatagggaggacgtgggcccattcattgcaggaatcagagatcattgatttcttcctgggggcctctctcaaggatgaggttttgaagat

SEQ ID NO: 393298 - DNA, 75 bp, Homo sapiens
tttcgccagcccgtgccgcgagcgcggcctgcaggagcttcctcatcgtcctggtctgcctcatcttcagcgtgc

SEQ ID NO: 393299 - DNA, 75 bp, Homo sapiens
cacaggaggggcaggaaattctttgaagctcctacagaagaagggaaaaaagagctgctgttcctaagtaacgcg

SEQ ID NO: 393300 - DNA, 83 bp, Homo sapiens
cgggccctctgcgacctggggccctgggtgaagtgctccgtcgcccttgcctccagttgcaagaatgtagtaactctgatcag

SEQ ID NO: 393301 - DNA, 100 bp, Homo sapiens
gtcggccgccgccaactacctgctctgtaccaactgccggaaagtgctgcggaaggcagcaagctcattatgatgctatggataatgatatcgttcaggg

SEQ ID NO: 393302 - DNA, 51 bp, Homo sapiens
agcctggggaaattctgcagtgaggcaaaaagggcagctagctgtagaaag

SEQ ID NO: 393303 - DNA, 101 bp, Homo sapiens
aagagagcagctgcccatgccaaatagttacctcttttaaactcattctactggagcaaatggctctgcgaacatcaatagatgcttatgacaactttgac

SEQ ID NO: 393304 - DNA, 100 bp, Homo sapiens
ctggacatgtcagtgtcctttcacacccatgtgaaagagggtgatgaattagaagacaatggaaagaatttctacgaatctgatgatgatcagaaggaaa

SEQ ID NO: 393305 - DNA, 82 bp, Homo sapiens
agaaaccagccgaacttcagggtttccaccgttcgttcaagcttgaaaactatttttctagtctgaaaaacccaaaactcag

SEQ ID NO: 393306 - DNA, 100 bp, Homo sapiens
taataataataataagtattttcaatgtggagttctatgcagctgcatgaaagcggttacgatgctggcaaagccctgcagcgcctggtgaagaagcctg

SEQ ID NO: 393307 - DNA, 100 bp, Homo sapiens
gcaggagcgggtagtgccagctacggtccgcggctggggttccctcctccgtttctgtatccccacgagctacgagagtacaaggtagtgggtcgctgcc

SEQ ID NO: 393308 - DNA, 75 bp, Homo sapiens
tgcacatccagatgaatgatgtcatcaccgtcatcgagggaaggcaccatgactcctgtgaggatgcagcactcc

SEQ ID NO: 393309 - DNA, 82 bp, Homo sapiens
gccgccgcctgaggaggcgagctagccgggagttacaccgccaccgccagtgtggacaacagtgagtatatgcggaatggag

SEQ ID NO: 393310 - DNA, 83 bp, Homo sapiens
aatcgtgcacttgcaggccgggcagtgcggcaaccaaatcggcgccaagtttggtgccctggttgtcagatgttggaaagcag

SEQ ID NO: 393311 - DNA, 101 bp, Homo sapiens
gaccgattttctgcagaagatgaagctttgagtaacattgccagagaggacagaactgtaccgctctctttttggccagctccaccctcccgacgaaggcc

SEQ ID NO: 393312 - DNA, 100 bp, Homo sapiens
actgggacagagaaaacctggaaggactttacgataaaacgtgtcaattccttagcattggccgaagagttaaggatcttagaaatgaagttgaaaaatt

SEQ ID NO: 393313 - DNA, 82 bp, Homo sapiens
aagcaagggctgtatgagctctcagcaagcaactttgagctgcacgttgcacaagactatgaaattcagaggcaaatcaatg

SEQ ID NO: 393314 - DNA, 75 bp, Homo sapiens
ccagcgctttggatgccgagagcgagtatctggttcaatcaattctcctgcttcaacctcccgagtagctggaac

SEQ ID NO: 393315 - DNA, 100 bp, Homo sapiens
cggcgctgagaggggctgcggccggagcgggcggctgagacaaaggcgacgttgatattcactgatggactccaaagaatcattaactcctggtagagaa

SEQ ID NO: 393316 - DNA, 100 bp, Homo sapiens
gttaaggattccaagtaactcttatttgagactgtctcgctctgtcacccaggctagagtgcagtggtgctatcgtaactcactggagccctgatctagg

SEQ ID NO: 393317 - DNA, 98 bp, Homo sapiens
tccaaaaaccactacactcctgtgcgtacggccaagcagactccaggtgtcatggagaaactccagctgggcccagagattctgcagcgggaaaatcc

SEQ ID NO: 393318 - DNA, 101 bp, Homo sapiens
cacatttgacttggaagcaatgtttgaacaaactcgaagaacagctgtggaaagaagttgcaaaacactggattctgatgctcacagtaccacctcaagtg

SEQ ID NO: 393319 - DNA, 120 bp, Homo sapiens
ggaacagctgcggtgctctgccatattgtgtcttccccggccggtccctcgcctcccggccgagctgacgacctgtcatttactccatcctttatagtgatgctacaggacgaagaggaa

SEQ ID NO: 393320 - DNA, 116 bp, Homo sapiens
ccgggagcgccgagcgtcgccgccgccgccgccatgaacaactcgggcgccgacgagatcgggattatatctgtccaagatgcgagtctggttttatcgaggagcttccggaagag

SEQ ID NO: 393321 - DNA, 75 bp, Homo sapiens
aaggaagagatgggcattggcggggtcctcggcctcctctggttccagaaaagaccctgcgggagattgtgattg

SEQ ID NO: 393322 - DNA, 75 bp, Homo sapiens
cttcaggctggaatgaacctggaagaaggacagaataacgggctcccagattcacaagccccaccaagaggatca

SEQ ID NO: 393323 - DNA, 93 bp, Homo sapiens
agcgagctgagtggttgtgtggtcgcgtctcggaaaccggtagcgcttgcagcatggattatatctgtccaagatgcgagtctggttttatcg

SEQ ID NO: 393324 - DNA, 83 bp, Homo sapiens
cgaaaggctggatccttaatccaggccggagacaaagttccactcttgtcctggggacccagctttaactttagcatctggta

SEQ ID NO: 393325 - DNA, 51 bp, Homo sapiens
gccagccccagtggctctcaacttttgctgcgagcaagtcacaccagccta

SEQ ID NO: 393326 - DNA, 76 bp, Homo sapiens
cccggcgcccctgagccggccgagcggcgacggaccgcgagttctctcctgcgctatggtggaaacctgtccctcc

SEQ ID NO: 393327 - DNA, 51 bp, Homo sapiens
ggaatctgtcttggaggacatcagaagtgaccaaagacttgaccactcaaa

SEQ ID NO: 393328 - DNA, 74 bp, Homo sapiens
cgggaacaaatactactacatcccgcagtacaagaactggagagaaggacagaataacgggctcccagattcac

SEQ ID NO: 393329 - DNA, 100 bp, Homo sapiens
tctcagtggagtgtcagtttctcaaaaccagcatcgagatgtagttcctgagcatgaggctcccagcagtgagtggtttgatgataagaacccaatttgg

SEQ ID NO: 393330 - DNA, 82 bp, Homo sapiens
ccaaggatctggggatcttcgcactatcccaagtgtggacgaatgtggaacctcgctctgtggctgtgttcccttggcactc

SEQ ID NO: 393331 - DNA, 98 bp, Homo sapiens
cggcagaggatccagtgttcaccatcctggccccggaagacttaattcagtgcacaaatgagatgaatgtgaacatcccacagttggcagacagttta

SEQ ID NO: 393332 - DNA, 88 bp, Homo sapiens
tatcgctaccaacggtggaagtccaagctctactccattgaagccccagggccatcaaaagttaagacagggaagcctgaagaagcca

SEQ ID NO: 393333 - DNA, 87 bp, Homo sapiens
cggacgcgcggcggggcagaccgctggggactgcgggcggcgctgtgtccgtcgccatgacagtaagactttgaccccgacgcaggc

SEQ ID NO: 393334 - DNA, 50 bp, Homo sapiens
gttagtgaagcgcgcccggcgtcacggttggatccttggaacaagctatg

SEQ ID NO: 393335 - DNA, 100 bp, Homo sapiens
cgcgggtgctgaaggctgcagccgcgaatgccgtagagtgcctggtgaagaatgtgatgggatcactagcatgtctgcggagagcggccctgggacgaga

SEQ ID NO: 393336 - DNA, 100 bp, Homo sapiens
cgcagccgcagaggaggagcgcagcccggcctcgagtacaggggctcaggtccaggtggcaggggatatgctacccaactcaactgagcgggccatcact

SEQ ID NO: 393337 - DNA, 83 bp, Homo sapiens
cgccgcagcaacaccaggagaggccgggggcagccgccatcggcagcgccaggttttaaaatcaaagatgggaaaatcggaga

SEQ ID NO: 393338 - DNA, 82 bp, Homo sapiens
caatgtggagacctacgacccctttcacaactgctggtcagagattatttactggcaagatgagcaggattaccatgaaaga

SEQ ID NO: 393339 - DNA, 131 bp, Homo sapiens
gcgagcctcttctgataactcaggatttacttgaaacaaaaggagaccctaatcttcagatctcagaaaactgatcttcacaatgaaggctacatcttggaattagattgctgttcctccttagaccaccc

SEQ ID NO: 393340 - DNA, 75 bp, Homo sapiens
aacctggatctttgctagaaagagagattatgatgcatcattatcacagaagaaattcgtgtctatagcttttaa

SEQ ID NO: 393341 - DNA, 90 bp, Homo sapiens
gcagttgcgaccctgggctcctggggacctgagcgttatgtctttccgcgacctccgcagtcttgtggatgagcagcagaaagttcggac

SEQ ID NO: 393342 - DNA, 90 bp, Homo sapiens
tctgattggaatccccaagtagatcttcaggctatggtgattcgcaaggggtggctcaccatcagcaacattggcatcatgaaaggcggc

SEQ ID NO: 393343 - DNA, 100 bp, Homo sapiens
tggccgaaggggcgtctgcggctctccgccgtccccagccctgcctctccctgggctctgccaataggagctctgaacccaaaaagagcagcattcttcg

SEQ ID NO: 393344 - DNA, 99 bp, Homo sapiens
tttgcgttcgggctgggagcgtgctttccacgacggtgacacgcttccctggattgggtgaccaagaatatggcccaggtgaccaaagccctggacaag

SEQ ID NO: 393345 - DNA, 75 bp, Homo sapiens
atttcatccaggtcatgaaggagtacttgacaaagggcccgcactaagagcctaactgaaatcccgcgaggatca

SEQ ID NO: 393346 - DNA, 74 bp, Homo sapiens
gggagcgtcctggggctgtgctccatggcgagctgggatcacctgctgttaccagctaccacccataacaagac

SEQ ID NO: 393347 - DNA, 74 bp, Homo sapiens
aatgcagcagaacgcagggggcctctgtaaggcacatggaggggatggtggatccaggagagaagattagtgcc

SEQ ID NO: 393348 - DNA, 100 bp, Homo sapiens
cgctccgagtggaggcgactgggggctgaagagcgcgccgccctctcgtcccactttccagagaaaatattctctttggaatgggaaatcctctgcttga

SEQ ID NO: 393349 - DNA, 82 bp, Homo sapiens
tcctggccagcctgctcatcgcctactgcagtcaccgacgatgagggcgcacctgctgtcctggagcttccgatctctgttc

SEQ ID NO: 393350 - DNA, 100 bp, Homo sapiens
cggtgaagcagtgcttcgtggtgactgaaaaagacccccgccagcaactggccaccagctccttcctcctcttcttgctgacggggattgtgtctgtggc

SEQ ID NO: 393351 - DNA, 50 bp, Homo sapiens
aaaagcgagaccgcgtgcgaggaccggttgcagccccacccacgtcacgg

SEQ ID NO: 393352 - DNA, 133 bp, Homo sapiens
ctctgctgtgggcgctgctggcgctctggctgtgctgcgcgacccccgcgcatggtttacccaaggtccagcctagcccctaggcaccatgtcggacagtgatctaggtgaggacgaaggcctcctctccctg

SEQ ID NO: 393353 - DNA, 90 bp, Homo sapiens
gataattatccaaataaattgcaagcattctatccaaatgaacagagagtacctgattgagaagctgcttacaagaacaccagacatagc

SEQ ID NO: 393354 - DNA, 75 bp, Homo sapiens
agtgggacagccaggtcaccatgggccacctcttccagaagctgggtgtgggccgaagatatgctcatgtggtgt

SEQ ID NO: 393355 - DNA, 95 bp, Homo sapiens
cagcacattctcaagagcacacagaggatgttaagcaagtttttggacagaccacaattcatcaacatattccatttaactgggattcagaattt

SEQ ID NO: 393356 - DNA, 83 bp, Homo sapiens
caggaccagcgggcgggggcccacgacctcccaaagtgaaatgcctgaccaagatctggcaccccaacatcacagagacaggg

SEQ ID NO: 393357 - DNA, 100 bp, Homo sapiens
agaggaacgccttagaaaagaatttgagtgcttttttaggaccaaaggatatatttccttactcagaaaataaggaaaagtatggcaaaccaaataaaag

SEQ ID NO: 393358 - DNA, 129 bp, Homo sapiens
aaaaagtctaccatacaaaccagaccaccttcataattggagaaacaccaaaaggaatccgcagcattccagttggcttttgagtggatacgtgcagtgagatcattgacactggaaacactagttccc

SEQ ID NO: 393359 - DNA, 105 bp, Homo sapiens
ttgctgtgggtgctgggacttcccgtccgcggcgtggagggcattgatcaatatgacagagatagcatcataaatgactttaagaatgggacctgcaaacttctt

SEQ ID NO: 393360 - DNA, 100 bp, Homo sapiens
cggccgcggctccatggggctcctggggctcctgagcctgctgcactcggccttcttcggggaccaggatgggcgggatccccgctgtgaacggccgcgg

SEQ ID NO: 393361 - DNA, 100 bp, Homo sapiens
ggaggggccggggccgaggttcacctcacctctctggagctggagacacctcaatctctgaccgtaaatccaagcagtcctttgagaaacaaggttttca

SEQ ID NO: 393362 - DNA, 113 bp, Homo sapiens
agaaagagtggatttcagcctgcacggatggtcttgaaacacaaatggtttttgggatcgcttacacctgagacgaactacagaacagcacgtaccagaggtggaagtccaag

SEQ ID NO: 393363 - DNA, 98 bp, Homo sapiens
aagagactttccgttacatgacccttgaaggtagtggacccagatcatcccctcgcagcacttgttcgtaaggcacaggctgacagttccactcccac

SEQ ID NO: 393364 - DNA, 83 bp, Homo sapiens
cctcctaccactacctcaggtggacttatcatgacctcagactatcagtattctaccttgtaaatactgttatttgtatatac

SEQ ID NO: 393365 - DNA, 88 bp, Homo sapiens
cctcacggagctgggcgacgagctgaccctgggagacatcgacggttggctatagaattccagagtgagccttcagcccaggagaatc

SEQ ID NO: 393366 - DNA, 100 bp, Homo sapiens
attacatattccagtaatggtggatgaagttgttcattgtttgtcaccacaaaaaggacagagttttccttctgaaaaggcagaagattttacagcagca

SEQ ID NO: 393367 - DNA, 74 bp, Homo sapiens
atgaagaaagccatggtggagtatgagacagattatgagggacaagccaagaaactcctggaactgatggaaaa

SEQ ID NO: 393368 - DNA, 90 bp, Homo sapiens
gcgagctgagtggttgtgtggtcgcgtctcggaaaccggtagcgcttgcagcatgatgagcagcaccagcagtaagagggctccgaccac

SEQ ID NO: 393369 - DNA, 100 bp, Homo sapiens
gagcatggcttggagcacttcctattccactggattgggaaagaccatggcaggtggctctgtggaccctgggacagttggtggccagcactggctatgt

SEQ ID NO: 393370 - DNA, 48 bp, Homo sapiens
ctctcagagtgctgggattacagatggtgctccaagaggcagcttgtg

SEQ ID NO: 393371 - DNA, 83 bp, Homo sapiens
gccgccgcgcgcccgcgccctccgcgcgacgccagcaagagtgagccatggagctacgtgtggggaacaagtaccgcctggga

SEQ ID NO: 393372 - DNA, 101 bp, Homo sapiens
ccggaaaccaccccaagcactggcaaagcaggggtccttgtaccatgagatggatggagacctcacagacacggtcagtggtccccgctccacagcctccg

SEQ ID NO: 393373 - DNA, 100 bp, Homo sapiens
gaggaggcgagctagccgggagttacaccgccaccgccagggagcgagtcaaggccatgttctaccacgcctacgacagctacctggagaatgcctttcc

SEQ ID NO: 393374 - DNA, 90 bp, Homo sapiens
tgtgatgttaaattcaaaaactacctcatccccaagagggtcctccgcggaagggcagctgaatggactccagagcagccttaaccctgc

SEQ ID NO: 393375 - DNA, 100 bp, Homo sapiens
cggcggcaagaaaaatgccagccagaagaggcgttcgctgcgcgtgcacattccggaccgggccaaagccgaggcagtgaataagaggctccggaagcag

SEQ ID NO: 393376 - DNA, 118 bp, Homo sapiens
gtcgtctagaagaagtgatgggtatccggtcttagaatacattccagaaaatgtatcaaggtgcaacttcccgaccagataatggactccttaagtgaattatgaaattcagaagcat

SEQ ID NO: 393377 - DNA, 75 bp, Homo sapiens
ctgagtctcgctgctcggtgcgaggcggcggagagcgaggcctggtactacttagtgggcgtgcaggagcagcaa

SEQ ID NO: 393378 - DNA, 88 bp, Homo sapiens
aagacagcaccaggttccaaatcatcaatgaagcaagtaagtgatgatgatgatgattttgatgatgaggaagctgaagaaaaagcgc

SEQ ID NO: 393379 - DNA, 75 bp, Homo sapiens
caattactcagcgctgccattttatttcagttgttcctcaaagtcattcaagctgtactcgccgaaggagccccc

SEQ ID NO: 393380 - DNA, 96 bp, Homo sapiens
gcgaatgcaacccgacgagggagtggggccagcattgaaacaggggaccgtgtctggaggatgcctctcttcgaacattatacaagacaggttgta

SEQ ID NO: 393381 - DNA, 82 bp, Homo sapiens
gttcgagcactaatatttaagaaagaagatgttaactttcagtgctgggattacaagcgtgagctaccacacccagcgagga

SEQ ID NO: 393382 - DNA, 75 bp, Homo sapiens
gcctgcctgcccaaagcaccgggactggagcacggagacctaccaggaacaaaacagtaagttggtggacttgaa

SEQ ID NO: 393383 - DNA, 99 bp, Homo sapiens
cttggaagcctatactggaatcgtccagggattaaagggggatcaggagaacgtacaccagcacgaacttccaggagccggtgcagccgctgacacagc

SEQ ID NO: 393384 - DNA, 110 bp, Homo sapiens
ctttggaaccgcggctgggcaagaagctgatcgagcccctcaccaatctcatccacaggggaacgcccttttgcttgtgactggcagggctgcgacaagaagttcgcccg

SEQ ID NO: 393385 - DNA, 75 bp, Homo sapiens
cgttctcaaggagaaggcagacctggaatcgaagctgtaaaactacaaatggagcccaagatgcagtccaagact

SEQ ID NO: 393386 - DNA, 100 bp, Homo sapiens
gggagatggtgacaagctcaaggcctgcgagtggtgccaccgaacatcgcagaactgaagaatttggaggtgctcaacttttttaataaccaaatcgagg

SEQ ID NO: 393387 - DNA, 82 bp, Homo sapiens
ccactcctgtgatcgttgcggctggggctggaggggaggaaggtacttcgtactggatttcgaggctggcatcctgcagtat

SEQ ID NO: 393388 - DNA, 75 bp, Homo sapiens
ccataggacaggctgaggctgagtctcagtgttgccctgttcagtctgagggttctcatgtatcagccatcttct

SEQ ID NO: 393389 - DNA, 75 bp, Homo sapiens
tgatgcccccagtaaggatatctttgttaaattgacaacaatggccatgtatcctgccggtggtggtgtgcacat

SEQ ID NO: 393390 - DNA, 98 bp, Homo sapiens
tacactgtagcctagaactcctggcctcaagcgattttcctgtctcagcctacaaagttgctggaactctaggcaagagtacagcactgcatctgctc

SEQ ID NO: 393391 - DNA, 50 bp, Homo sapiens
ctttgttggtataaatcatgccagtgctatgtgtcgtggaggccgaatgt

SEQ ID NO: 393392 - DNA, 90 bp, Homo sapiens
ccactacagttcatcaacatcaactacgtccctctgaagggttacacatcattttggaatgactgtatatcatctggattacgtggctgt

SEQ ID NO: 393393 - DNA, 75 bp, Homo sapiens
ccgagccagccgctgttttgccggaggagcccctcaggccagctccacctggaggggaacttcctacaccgcctc

SEQ ID NO: 393394 - DNA, 82 bp, Homo sapiens
gggagaacatcactgtccccctccagacaggaattacatgaatgacagtcttcgaaccaatgtgtttgttcgatttcaacca

SEQ ID NO: 393395 - DNA, 75 bp, Homo sapiens
cggctgggcgttcatctaccacgcctacgtgtttacccaaggtccagcctagcccctaggcaccatgtcggacag

SEQ ID NO: 393396 - DNA, 98 bp, Homo sapiens
ctcaaccatggcacctccatccgcgaagacatcctgttactttgacgcgcacgcccttgctatggactatcggagtttgggatttcgggaatgcctgg

SEQ ID NO: 393397 - DNA, 90 bp, Homo sapiens
gttgaacctaaggtgaaatctaagaaaagggaagctggacagtcattttgtttactcattcagccctgttgcaggtcccaataaactctt

SEQ ID NO: 393398 - DNA, 90 bp, Homo sapiens
cagcaatgagaggacccgcgtgggcaccctgcaggtggtcagacatgtcatcaactcagctgaacccttaggagaaatcttgagagtgga

SEQ ID NO: 393399 - DNA, 74 bp, Homo sapiens
gagcgacagagacaagctgagcttgccgcacaaaaagctagagagttgctggaagtgcaggtgcgggaatctct

SEQ ID NO: 393400 - DNA, 100 bp, Homo sapiens
ctggaagacgcgctcctgcgccgtactttgccagacgtttatcaaaatggggctgctgtcttctttcacttgtagtgacgagtttagctcattgagacta

SEQ ID NO: 393401 - DNA, 90 bp, Homo sapiens
tatgcgactgctgcacaaaacaatacagctgtccgcaggcttgtccaaaaggaaacatcggaatgaccacttaacatctacaacttccag

SEQ ID NO: 393402 - DNA, 100 bp, Homo sapiens
caatccagaagttacgaagcaaaatccacaaaaaagtagataggaaagccagcaaaggcaggaaacttcggttgactatagtcaatggggccaatggagc

SEQ ID NO: 393403 - DNA, 90 bp, Homo sapiens
atcgacctcaaggacatcaacttccggccgcagatgtcccagccctgggcgctgcctatggcacagccaagagcggtaccggcattgcgg

SEQ ID NO: 393404 - DNA, 82 bp, Homo sapiens
accaccggatcaacttcgacaaatagttgcaaattcgtgaagaatcagcatcatgtttggcagctgagtattggagccagga

SEQ ID NO: 393405 - DNA, 100 bp, Homo sapiens
ccctcattctgcacgacgatgaggtgacagtcacggtttgcaaagattcatatcagtgtatctgaacctattattccattcagagaaacaatcacaaaac

SEQ ID NO: 393406 - DNA, 97 bp, Homo sapiens
atggcgttccctcggctaataactatcagggtggatttggaacaacactcatggctaaggttgctccttgagggcaggacagttcttatggctttat

SEQ ID NO: 393407 - DNA, 98 bp, Homo sapiens
caagagaagggaagtcaaaaggctacttgctgtcagctaaagccaggtggccagacaagcacaaacctctcaggagccctaccacgacaaggccagag

SEQ ID NO: 393408 - DNA, 83 bp, Homo sapiens
aggatctcagggcctgccgccccattatgatgatgtcgaggtctcgtcagcctatctcggcccctctcttttcatgtcctgac

SEQ ID NO: 393409 - DNA, 100 bp, Homo sapiens
cgagacagacagcatactgaagtggtttgcaacatccttcttctggataacactgtacaagctttcaaagtcaataaatacactttcgggaaatggcctc

SEQ ID NO: 393410 - DNA, 82 bp, Homo sapiens
caagggcggcggggagcacacggagcactgcaggcgccggtatccatatattcctgcacatattacaaagcctaaggaacat

SEQ ID NO: 393411 - DNA, 98 bp, Homo sapiens
tttttttttgcggaacctgaaaaattcaagaagttgaaaaacgcttttcacgtcacctggagagatgcacagatattgatgatgttaagaagttcaaa

SEQ ID NO: 393412 - DNA, 100 bp, Homo sapiens
atgacctgaaggatatgatgctctactgcaagttcaaagggcaggagtgcggccaccaagacttcaccacagcccagcgctggcgcagtgagaacttcga

SEQ ID NO: 393413 - DNA, 82 bp, Homo sapiens
agctgtcagagcccggggacggcgaggccctcatgtaccacacggtggatgaaaatactaggaaaagtttatttaagttacg

SEQ ID NO: 393414 - DNA, 100 bp, Homo sapiens
cattgaggaccccctagaggccaggcccatgagtgatgaagatcccgaggatgaagacgccttgccagccaggttatttggaaatagcggtgcttgcagc

SEQ ID NO: 393415 - DNA, 75 bp, Homo sapiens
ctgccccagctccgtctcggcggcggcggaggtcatggaagaagtgacaacatgctccttcaacagccctctgtt

SEQ ID NO: 393416 - DNA, 76 bp, Homo sapiens
gagtgaatgtatttcgagaacacaggcagactattcaggcagctgagtatgtcccagagaaggtgaagaaagcgga

SEQ ID NO: 393417 - DNA, 98 bp, Homo sapiens
agatctacagtgagtcattcaaacagcatgacataactgtgtcatccctcacgagcggagaatattaaccatattgcagtggctcaccctgccagatc

SEQ ID NO: 393418 - DNA, 109 bp, Homo sapiens
gctcccttccacctcgacctctggttctacttcacactgcagaactgggttctggactttgggcgtcccattgccatgggacaagaatccttcaagaaacaggaaaaaa

SEQ ID NO: 393419 - DNA, 99 bp, Homo sapiens
tcatgccggtgtggtggcggcggcggagactgcgggcccgtagctgggctctgcgaggaatacggttggacagaatgaactgaagattacaagtgatca

SEQ ID NO: 393420 - DNA, 88 bp, Homo sapiens
accagcagcatgtcaagtttggcaagtttcgagccagaggaagaggctggggcagaggcaactactctgggaacaataacaacaacag

SEQ ID NO: 393421 - DNA, 75 bp, Homo sapiens
catctttggaacaggcaccaggctgaaggttttagcaatgattcgcctttgccagtctcatctcgtgtctgcttt

SEQ ID NO: 393422 - DNA, 98 bp, Homo sapiens
caagacttgtttgaacccagcagtgccaacacggaggataaaatggaggtggacctgagtgaacgtgccaacatcgcctctggtgaggaagtcgccat

SEQ ID NO: 393423 - DNA, 90 bp, Homo sapiens
gttaaaaccatatgaaagcgtgatgaagatcatggaagggaagtggttgctgtgtatgttactggtgcttggaactgctattgttgaggc

SEQ ID NO: 393424 - DNA, 100 bp, Homo sapiens
acctcatgatccacccgactcagcctaccaaaatgctgggattacagggagaaactctggaaaccttgacaatggcaacagtgtgtctcttcagcgcaca

SEQ ID NO: 393425 - DNA, 75 bp, Homo sapiens
atcctcaatttaagcctgatctaacccctagaaacaggccaccaccacctatcatgacagatggtgaagatgcgg

SEQ ID NO: 393426 - DNA, 75 bp, Homo sapiens
gaacgtgatgggttttaacacagaccgcttagcatggactagaaatctcttcagtaggttacctgcaacatccag

SEQ ID NO: 393427 - DNA, 75 bp, Homo sapiens
ttggggcaccacagagatgcggggaatttgaagtactgccttgtaattcttaatcagcctttggacaactatttt

SEQ ID NO: 393428 - DNA, 82 bp, Homo sapiens
tggcggacggcgtggaccacatagacatttacgcggatgtcggcgaagagttcaaccaggtgatggtaatgcccgaaggagc

SEQ ID NO: 393429 - DNA, 75 bp, Homo sapiens
ttggcagctgcagagccagatgatccacaggatgctgtagtagcaaatcagaaaatatttacaccagcagctcca

SEQ ID NO: 393430 - DNA, 74 bp, Homo sapiens
gaacatgtatttaaccaagttccaacaaaagaatgctgccgcagaggctcatccaaaatagaggaagcatgcga

SEQ ID NO: 393431 - DNA, 83 bp, Homo sapiens
ccgcgcacttcgtcatgttcttcgcgccctgataacgaaggaggcccaacttcattcaataaggagcctgacggatttatccc

SEQ ID NO: 393432 - DNA, 98 bp, Homo sapiens
cggacggaggctccgggcacccccgagggccccgagcccgagcgccccagcccgggggacggcaaaacagaacagaaaggcggagataaaaagagggg

SEQ ID NO: 393433 - DNA, 74 bp, Homo sapiens
tccgactcgactcggagggtttctgtgagagacaaattgcttgttaaaggttgtgtcctacctggcaggctgtg

SEQ ID NO: 393434 - DNA, 96 bp, Homo sapiens
cagggacacttggggcctctcggatgagcacttccagcccagacctttctctgtggacattgactcggagctggtggaggagctgccggccgaaat

SEQ ID NO: 393435 - DNA, 90 bp, Homo sapiens
gtccacgaggacttccaggtcacggaggaggtgaaaggccagccagtgaccttcagtgaggaagtcttcttggcccagaagcctggggca

SEQ ID NO: 393436 - DNA, 100 bp, Homo sapiens
tcacagtttgctctgctcttccaacaccagtggaagatgatcacatcccaggtgtaccttgaaagacttttaacatacgcagagatagatatctgtccgg

SEQ ID NO: 393437 - DNA, 75 bp, Homo sapiens
acaaacagtatttctactggaaaaaccattttcagttaaagcaggggaacatagatggctggagacagaatctag

SEQ ID NO: 393438 - DNA, 100 bp, Homo sapiens
cctcagctggagctggccatggtgccccactatggtggcatcaaccgagttcgggttggccgttgtccaatgtgttgctgttatctggaactcctacctg

SEQ ID NO: 393439 - DNA, 100 bp, Homo sapiens
gacgtcatcatgctgaccaccaatcagatccgtaaggtctgtctgctatcagctatgccgctgcccgttgcgctgcagacccgcttggccaagagaggca

SEQ ID NO: 393440 - DNA, 103 bp, Homo sapiens
tcaagaagaagaagttgcgaaggatccccaacggggaggccaacgtgaagaaacgctgcaggagctgaagatggcgagctccgtggcgccctacgagcagctg

SEQ ID NO: 393441 - DNA, 74 bp, Homo sapiens
agaggttttgaattcacgcttatggtagtggaagaagaagaggacagtgctccagtgaaagtggaagaacaaag

SEQ ID NO: 393442 - DNA, 73 bp, Homo sapiens
ctgcaaaggccaatgttggtgctggcaaaaagcctctcatccatgtctttgcaaagaacctggtagcgtttgt

SEQ ID NO: 393443 - DNA, 98 bp, Homo sapiens
cgggatcgtgaccgagaccgtgaccgagagcgtgaccgagagcgcgaatatcgtcatcgttagaagaaaacagagtggctctgtctgaactgccaaac

SEQ ID NO: 393444 - DNA, 75 bp, Homo sapiens
gcccctccgagctggggttggacgctgccagtttgcacagcagcagagatggaatttcaccgtgttgcctaggct

SEQ ID NO: 393445 - DNA, 87 bp, Homo sapiens
aggttcgggctggttgttccgttgcgagctgcagctgcgatctctgtggtaggcccaggcacattcaggaccccgcgagccagcggc

SEQ ID NO: 393446 - DNA, 90 bp, Homo sapiens
gctctgtcggtatctttccaaggtcctagaactcaggaagagtgatgtggttttggataagtgcacagccagagaacaacacatcacaca

SEQ ID NO: 393447 - DNA, 98 bp, Homo sapiens
ggagctatactgacatcagtaatagaattttaccttcaatgatgacttcagtcccagcagtaccagttcagcagacctcagcggcttaggagcagaac

SEQ ID NO: 393448 - DNA, 101 bp, Homo sapiens
caacagactatgttactagggagtacttcccctaccctaacggcaagccaagctcaaatgtatctccgagctcaaatgaatgagtccctggaacgccagat

SEQ ID NO: 393449 - DNA, 75 bp, Homo sapiens
ggactgtgggctggtgtgtggaactggttttttgccctgacatctcttcgtcttgtgtttttacttgcatttggc

SEQ ID NO: 393450 - DNA, 100 bp, Homo sapiens
atctggaaagcatcatcagacccaagtgccaagttatttactttcccatcaggtttcctgatgtgagcagtcttcccaagggattgttgaagaaacttct

SEQ ID NO: 393451 - DNA, 100 bp, Homo sapiens
gtccgccccgcgtctccgcagcgcgcccaactgcatcctcctggccatgttcctcgtccactacgggcatcgcttatagtgatttaggatactacattat

SEQ ID NO: 393452 - DNA, 88 bp, Homo sapiens
taaaaaaccccaacaacagctcccttagacaggtgatttggcttctgcacagttaggaggagcaccaaaccgatgggaggttttgtca

SEQ ID NO: 393453 - DNA, 90 bp, Homo sapiens
acgagaattaaatgccgagaaggccagtacggttttgaagtacaggaagaaggttatctggcaaaaatcctggtccctgaaggcacaaga

SEQ ID NO: 393454 - DNA, 100 bp, Homo sapiens
atggaacctgtgcctcgagaggtattaggcagtgctacaagggatcaagatcagctccaggcctgggaaagtgaagatgaaggcattttcaaagctggag

SEQ ID NO: 393455 - DNA, 88 bp, Homo sapiens
cggcccaagcccctcgtcgaccccgcctgcatcacctccatccagcccggggcccccaagcatttggaagacgccaggacacgttaat

SEQ ID NO: 393456 - DNA, 80 bp, Homo sapiens
tatgccgccctggccacggggactctcttctggatgcagcgtcaccctttacaccagaaagctggcgggcactatgggga

SEQ ID NO: 393457 - DNA, 75 bp, Homo sapiens
cccagaatgcactgcacaatattaaaactttacctggggatcagttcgacagcttagacaagcatacacaatggg

SEQ ID NO: 393458 - DNA, 100 bp, Homo sapiens
gcctccccagccatgtggaactgtgaccaagtcagccatcggggtgctctaactgggggttattatgacacaaggaagtctcgacttgaattgcaaaaag

SEQ ID NO: 393459 - DNA, 75 bp, Homo sapiens
cccgcaggatcccgccattgttcagcaacgaagtaaacgaggaggttggtccaaaggaagaaagaggaagaaacc

SEQ ID NO: 393460 - DNA, 100 bp, Homo sapiens
agaaggtgttgtgagaaaagtgaatcagaaaattggaagctgtacacagcaagacgttgagttacatgttcagaaggatggtcttgttaatgtaggatgg

SEQ ID NO: 393461 - DNA, 100 bp, Homo sapiens
ctgggagcggctgtaaataatacccgagaggaaataggcccggcaggtcatcatcagatttgaaatatttaaagtggatacaaaactatttcagcaatgc

SEQ ID NO: 393462 - DNA, 75 bp, Homo sapiens
tatttttccccaattcagcagagaatattttcaagggggaatgttgtaccatctttgggtaggcagacttccctg

SEQ ID NO: 393463 - DNA, 106 bp, Homo sapiens
ccagaaacgaataattcaccttgatctaaaacttatagctgatgtaggcctagtagggatggcttggaagaaaaacaacttaaatttgtcaagaaactggtacagt

SEQ ID NO: 393464 - DNA, 82 bp, Homo sapiens
ctaatggtgcttaaattctcccaagaggttctcgcttttatttgaaggaggtgattgcctttctgggcctgacctcccatga

SEQ ID NO: 393465 - DNA, 95 bp, Homo sapiens
gatctatccatatgctgccatctcctatgaagaatggaatgaccctcctgctgtggagcatttcctccctctgctatttatacacggaaagactt

SEQ ID NO: 393466 - DNA, 90 bp, Homo sapiens
tggaaattaagcctttgcaatttgaaattatgattgacagacttgaaaaagccagttctaatcaggaattccagagacgctgtaacactc

SEQ ID NO: 393467 - DNA, 98 bp, Homo sapiens
ggctacaccccgacgccagggtcctggggcccggggtctcctacgtcgtgcggggggggccctcagcctcttggccttgaacgggctgttcatcttga

SEQ ID NO: 393468 - DNA, 100 bp, Homo sapiens
aggacatgttaagtgaagtaagtctggacagaaaaatactgcgtgttctcacccacagtcaaataaagtgcccgtggtgcagccatcccatgcggtccat

SEQ ID NO: 393469 - DNA, 75 bp, Homo sapiens
ctcctaatccctagccactatgggtttccaggcctgaggtgcccgccctggccccaggagaatgaaccagccgca

SEQ ID NO: 393470 - DNA, 75 bp, Homo sapiens
agcgcagtaccaccttccagagatgctgacgatatcagagctttgctgatagatgccatgcccccagaggcctta

SEQ ID NO: 393471 - DNA, 90 bp, Homo sapiens
gcttactgttgcgtggttcgttattaacagctttcctgctctgggaccctaccaaggtgcccccacgactgcaggctgtgactgatgacc

SEQ ID NO: 393472 - DNA, 119 bp, Homo sapiens
tgatggcaagaaggcccttgtgttggactgtcattatccagaggatgaggtggaacgtgtgatcaccattatgcagaatccacgccagtacaagatcccagactggttcttgaacagac

SEQ ID NO: 393473 - DNA, 52 bp, Homo sapiens
cgacagcttctcgggcaggtttgaaggtcacctccgcgaagccccctccccg

SEQ ID NO: 393474 - DNA, 73 bp, Homo sapiens
cgtttgttcaggaaccaccagtgacagaaaactggcgatggaatatgagaggagccctctggaaagaaaagga

SEQ ID NO: 393475 - DNA, 100 bp, Homo sapiens
gagacttacatcgatgaccttggacacctccatgttatggacacggtctttcttattcagcctcttagcaatgcataccacgagttagcacaagtgtatt

SEQ ID NO: 393476 - DNA, 150 bp, Homo sapiens
ggcatgacatcagtgacgagagggagagcaagaccatcatgctgcgcggccttcccatcaccatcacagagagcgatgtagagttggctttgtgggacacagctgggcaggaagattatgatcgcctgaggcccctctcctacccagata

SEQ ID NO: 393477 - DNA, 90 bp, Homo sapiens
gtcggtgctccggggaggtcacctgacgaggagacagctcagcagctcctcctcctatagtggggacatcagcaggcaccacaacagcac

SEQ ID NO: 393478 - DNA, 100 bp, Homo sapiens
cggtgaatgaggggctggaaatagtgagaggacgtctgcaaaatgctgatattgatgatgttaagaagttcaaaccgggttacctggaagctactcttaa

SEQ ID NO: 393479 - DNA, 74 bp, Homo sapiens
acaaaataaaagaagctggaggaatagatctttttgttggagctttcaccaacaatcaccagtggtttacacaa

SEQ ID NO: 393480 - DNA, 74 bp, Homo sapiens
cgcggccgtgcgacagcgacccagccacccccggagcgcagtccccgaagtgatgatgatgatgattttgatga

SEQ ID NO: 393481 - DNA, 90 bp, Homo sapiens
ggcccgggtgtcttccggcagctcctctgaggtctcctccatcaactccgacctggagatgtgggcgctatctccaactgtctttgcact

SEQ ID NO: 393482 - DNA, 98 bp, Homo sapiens
cattgacatttaattttagggtcctttatatagaagggagagtaggccagtactaaagtggaagtggacatggagaaagcagaaagcctgcaagtgac

SEQ ID NO: 393483 - DNA, 82 bp, Homo sapiens
tttgctggcagctgctgacaagctcggtgctgattatcacaactgtttggtgacctacttcactgacctgtgaggattcctt

SEQ ID NO: 393484 - DNA, 75 bp, Homo sapiens
ctggactcgggagtggtgaaacgcctgtacacgttggatgggaaacaggcctatggcatgtctgcgttaccttta

SEQ ID NO: 393485 - DNA, 75 bp, Homo sapiens
tgcatatgtagcctacaaagttacaacacagatagacgatcagctgaacactctcttgaaggagttccagctaac

SEQ ID NO: 393486 - DNA, 100 bp, Homo sapiens
atgatgagcaccgtgacggaagttcgagccctcagagtctccacagcctattggctcacttggacatgatgctgacttgaggcggcagcagcaggatacc

SEQ ID NO: 393487 - DNA, 98 bp, Homo sapiens
ttttatattcatctcaaaaacaaaattctgaactcaggacttggcaagtcagtttaggggctggtgcaaaggatgagttgcacattgttgaagcagag

SEQ ID NO: 393488 - DNA, 100 bp, Homo sapiens
cttcttttttgagaaaggaaggaatatatcctgactgattgttgaaaggattgttgacaaaaggaaaaataaaaaagggaagacagagtatttggttcgg

SEQ ID NO: 393489 - DNA, 75 bp, Homo sapiens
cgctatagcacctgctgttctcgagcttatgccaaccacatgatcaagcgatcattatttcgaagttctagtatt

SEQ ID NO: 393490 - DNA, 97 bp, Homo sapiens
ctaaaatggctgaggagagagtcgcgacggtccctccagctacaaggtgggcaccatggcggagaagtttgactgccactactgcagggatcccttg

SEQ ID NO: 393491 - DNA, 100 bp, Homo sapiens
ggcaagagcagtttactgttgcgttttgcagacaacactttctcagatttttacataccgttgctcaaaagagggctgcaagaagaaagagatgctgcag

SEQ ID NO: 393492 - DNA, 75 bp, Homo sapiens
tcatggatgttcttcttcgagtatttgtagaaggacaacactaagcagttgagatttgaagatgtagtaaaccag

SEQ ID NO: 393493 - DNA, 119 bp, Homo sapiens
ctatggaattctaatttgaaccatgtttggattgaagccgcctctgtattacttaccagggggatatgagactttctactcggaatatcctgagtgttgcgtggatgtaaaacccattt

SEQ ID NO: 393494 - DNA, 51 bp, Homo sapiens
agaccatcaccatgccccacgcggaaagttgtacaagggattgatttaaac

SEQ ID NO: 393495 - DNA, 100 bp, Homo sapiens
cagttcctgggaaggtggagccaccagcctctccttgggtctggaaagcaatcctccacagaaagaaagcagaatcttctgggcatttctgagcaagtgg

SEQ ID NO: 393496 - DNA, 75 bp, Homo sapiens
tggggacaaactcttagagcctgtggtttgcatgggccactcatacagtaatcggaagtacgagtctgacgaaga

SEQ ID NO: 393497 - DNA, 75 bp, Homo sapiens
cgaggagcgagcgctgcgaggtggcggcctgaggtacagcagggaagaactggaaactcagagaaagaaactgcc

SEQ ID NO: 393498 - DNA, 100 bp, Homo sapiens
gcctggtgtcggccacctccgtgtggacggcgggggccgagcccatgagtagggaggagaaacagaagcttgggttttgacacaagggcgcatatcttca

SEQ ID NO: 393499 - DNA, 74 bp, Homo sapiens
cgctcggcagccccggggagcctgggttaccagtggctttcagatgggctccgagctctgtccagtggtgggag

SEQ ID NO: 393500 - DNA, 50 bp, Homo sapiens
gagaacctgcggcggccggagcgtaacaatttggacaagacagcaaatgc

SEQ ID NO: 393501 - DNA, 75 bp, Homo sapiens
cccggatgagtacgataccgaagcgggctgtgtgccccttctccacccagaggttgtttgggcagatagttacaa

SEQ ID NO: 393502 - DNA, 82 bp, Homo sapiens
ctgacattgagacctggtgtcagccttacaggaactgtggctgcaccatctgtcttcatcttcccgccatctgatgagcagt

SEQ ID NO: 393503 - DNA, 76 bp, Homo sapiens
agaggttaaagagacccgttcagagtcctacagtggcaggtgcaagctggcccaggccaatggttggggcgtcatg

SEQ ID NO: 393504 - DNA, 75 bp, Homo sapiens
gaatgtgtttgctctcatgaacatgcaatgagaagactgatcaatctggcctaatgggattgtttgaaaaacgtc

SEQ ID NO: 393505 - DNA, 48 bp, Homo sapiens
gaatttatggtcgcctttttgaatgagctgactggaaataccggcatg

SEQ ID NO: 393506 - DNA, 100 bp, Homo sapiens
taccaaacagcacttcctggcaatgatagatacatcagtgtgggaagccaagcagatacaagccagaaatgtacacacaggagagctggctgcagtaaaa

SEQ ID NO: 393507 - DNA, 50 bp, Homo sapiens
gggatggagaaggaggaggaatcgggcatgctgttgaagcgaagtggcaa

SEQ ID NO: 393508 - DNA, 100 bp, Homo sapiens
atgactgagtacctgaaccggcacctgcacacctggatccaggataacggaggctggctcaatgtcaattgctgcaagcttagtgagtgaagatacaaag

SEQ ID NO: 393509 - DNA, 75 bp, Homo sapiens
acctggcctcagctgaatttttgtgggacctcctgaggtgacctgagcatctctgcagaccgcctgagtgagaag

SEQ ID NO: 393510 - DNA, 96 bp, Homo sapiens
gctggagcagtggcgtttggaggagactcggcatgggcaagaaggacgaccccaagctgatgcaggagtggttcaagctagtgcaggagaagaacg

SEQ ID NO: 393511 - DNA, 100 bp, Homo sapiens
tctgacaacgtggatcgttgttttgaaacgaattacatgaacgacagccttcgcaccgacgtcttcgtgcggttccagccagagagcatcgcctgtgcct

SEQ ID NO: 393512 - DNA, 74 bp, Homo sapiens
caagttaaaggcgaaacccatcagaactgctagtggggcatttcgtgtcctgtctgaaccaattggtccagaat

SEQ ID NO: 393513 - DNA, 100 bp, Homo sapiens
gtcaaacactccaacgattgagagcatttaaagatgaaggagctcattgccaagttagatcaggcagaaaaggagaaggtggatgctgctgagctggttc

SEQ ID NO: 393514 - DNA, 82 bp, Homo sapiens
attacaaggtgagatcagccgcccggccaagctatcttctcgctagcagatagcctgggctggaagctcttctacgtcacag

SEQ ID NO: 393515 - DNA, 75 bp, Homo sapiens
cccatttccccagggcatggagtgtactatgaggggctgcaggacaagctggcacagatccgcgatgcccggggg

SEQ ID NO: 393516 - DNA, 100 bp, Homo sapiens
ccgtgctttcccaagcctggaagaactcgtcatgctctttgtagcgtggtgcttctgttgctcacagttggttagtctgctgctaattggaattgctgcg

SEQ ID NO: 393517 - DNA, 75 bp, Homo sapiens
aaaaacctttggacagtccaatgtcaacattgcccagcaagtgatcagcttgaacgggtctttttacgacttggc

SEQ ID NO: 393518 - DNA, 88 bp, Homo sapiens
tggatttttgcatgagacgcttctggacaggaaccaatcttaaacatccatgacctaactcagatccactctgacatgaatctcccag

SEQ ID NO: 393519 - DNA, 71 bp, Homo sapiens
gtaaaagaaagaggagtacacattgtttccgagcactggcttttagatggttatgtggtccgaatcagtgg

SEQ ID NO: 393520 - DNA, 83 bp, Homo sapiens
gggagatcccaggcggtgacagagtggagccatggctagaggagcaggccgggctctcgccatgggtcactgtcgcctctgcc

SEQ ID NO: 393521 - DNA, 75 bp, Homo sapiens
aaagcctggtccacgccgtggccggagccgtgctcttccaccaaagccacctaagccaatgacttcagcagttcc

SEQ ID NO: 393522 - DNA, 88 bp, Homo sapiens
gaccaacaggaagttccgccatgacaaaagggtttacttgggaacaatcaaccatgacgaccgaatctggatcagactcggaatccaa

SEQ ID NO: 393523 - DNA, 76 bp, Homo sapiens
ccacaaacaagaggagcaccagacctcctcttggcttcgagatggcttcggtgaggtcgcaggagctggtgcagcc

SEQ ID NO: 393524 - DNA, 100 bp, Homo sapiens
ccaagagcgacgccgccgtgtgcccaacggtcggtgtccccggctgaggcagcgcggccgcagcagccctgagctggatggcctgttggaaatcaaccgc

SEQ ID NO: 393525 - DNA, 90 bp, Homo sapiens
cgatatgcaaaaaatcaaatctctcatgacccgacagtgcaagtatgacttttgctggatttgccttgaagagtggaaaaaacatagttc

SEQ ID NO: 393526 - DNA, 100 bp, Homo sapiens
aacgctctgctgcccgctgtgagggaaaagcgatgtgcattttgtaagcactttggagccactatcaaatgctgtgaagagaaatgtacccagatgtatc

SEQ ID NO: 393527 - DNA, 98 bp, Homo sapiens
tcgaatgtttgacatgggatttgagcacgaacttccaggagccggtgcagccgctgacacagcagcaggtggcgcagatgcagctgaagtactacaac

SEQ ID NO: 393528 - DNA, 75 bp, Homo sapiens
gatttcagtgtcctccttagctctgcaggaatgaccatacctgaagaagacgctgatgtgggacaaggcagtaaa

SEQ ID NO: 393529 - DNA, 100 bp, Homo sapiens
ccagcttcacgagtacaatgacatcaaggatgtggggcagatgctgatgggcaaactagcttttgcctctaatgacagagcagctacagtggatgccatt

SEQ ID NO: 393530 - DNA, 101 bp, Homo sapiens
cctggctaccgtatcccaacccaaacccccacttccagcttgggatttaaaacatctctgttgaaggcttttgatccttttgagaaataaagatctgaaag

SEQ ID NO: 393531 - DNA, 82 bp, Homo sapiens
ggatcatgtctgcgagccaggattcccgaataccctctaccatctgctttggtcagggtgccgctcgaggatttaaaagcaa

SEQ ID NO: 393532 - DNA, 131 bp, Homo sapiens
caaggacctgtggaatatgagtgatgacaaaccctttctatgtactgcgcctggatgtggccagaggtaccaatcttgggaaaaagaagcaacacatttgtcatataccaggatgtggtaaagtctatggg

SEQ ID NO: 393533 - DNA, 98 bp, Homo sapiens
tattcatctcaaaaacaaaattctgaactcaggacttggcaagtggtataagttgaaatccaaaccaggaaagaaggacaaggagcgaggagaaattg

SEQ ID NO: 393534 - DNA, 100 bp, Homo sapiens
aaacctcgtcattaattggacacagtgccagagtgtatgcactttactacaaagatggacttctctgtacaggaactcgctttgaacgcttgcttatgag

SEQ ID NO: 393535 - DNA, 82 bp, Homo sapiens
tgaagactgcctttacttaaacatctacgtgcccacggaagatgaacgcgtatcacaatgtgactgcagagcagctcttttt

SEQ ID NO: 393536 - DNA, 98 bp, Homo sapiens
cgcgacgcgcccggcccggagcccccagcgcagcggccgcgggctgccaggcgcccagctgtgcccagatggatgggacagagacccggcagcggagg

SEQ ID NO: 393537 - DNA, 83 bp, Homo sapiens
gccagatcaacctggagctctacgcctcctacgtttacctgtccatggtagttgatgtcacttggcgatattcctgcaaacat

SEQ ID NO: 393538 - DNA, 82 bp, Homo sapiens
tcattcagtggtgttaaggattccaacaacaattccgatggcaaagccgttgccaagttgctgatgtatattcaagatgagt

SEQ ID NO: 393539 - DNA, 75 bp, Homo sapiens
gagccggtgctgcagaaccagatccgggagcacgtcatcgccatcgaaggaaccatcactgttgctggaggcacc

SEQ ID NO: 393540 - DNA, 98 bp, Homo sapiens
cccagaggcaaattttagacaaatcttactatcttgggcttcttagacccagattgatcactatgttggcatcgcccgagatcagaccaagtcaattg

SEQ ID NO: 393541 - DNA, 83 bp, Homo sapiens
gcccgagacacaccaggccggcaggctgagaaaagcgagaccgcgtgcgaggaccggctgaccccgcactacatctacccacc

SEQ ID NO: 393542 - DNA, 100 bp, Homo sapiens
acatcaagtcttccttggtgaacgagtctgaaatcatcccggccagcaacggacacgagcggcagtacatacctgtgaaaatgaagagcaaagccttctg

SEQ ID NO: 393543 - DNA, 100 bp, Homo sapiens
ttcatcttcacggccacccacagaaatgaagcagagtggcctagttcttttcaggagaagcacatctctggctgccctcagtacactaagagaatcagac

SEQ ID NO: 393544 - DNA, 96 bp, Homo sapiens
ataaccaccccttgcactttgttttcaatgacaccaagttggacgctatgctggaagaatttaagaaagaaatcatgagtggaggatctcaagtcc

SEQ ID NO: 393545 - DNA, 75 bp, Homo sapiens
cggccgccgcctccgcctcccaggatgagctgaaggagcaggatgcaaccgacaggctgtggccggacagctgct

SEQ ID NO: 393546 - DNA, 75 bp, Homo sapiens
tgcctggcaggtcatcaaaggtgtgctgtttagtattggtaaaggttttcaaggtgtcatgaaaagatggggatt

SEQ ID NO: 393547 - DNA, 98 bp, Homo sapiens
aggtggacgtgtacaacccgacgaggaacgaatgggacaagatcccgtccatgaatcagcttggatttacactgggcaacgtggttggaatgtatctg

SEQ ID NO: 393548 - DNA, 82 bp, Homo sapiens
ttcaccaaggaactggtgctgcagcgagagggatcatagacggtatttctatgtaaacgaacagtcgggcgagtctcagtgg

SEQ ID NO: 393549 - DNA, 49 bp, Homo sapiens
gcgcgcctcgaggccgagtcaagtgtctaccatcagagggagatctctg

SEQ ID NO: 393550 - DNA, 100 bp, Homo sapiens
cgcgaccgcgccccggcccgacatggcgccggagctgaccccggaggaggagcaggctattttcaaaatgatcactcccgaggacgtgaagctccttcca

SEQ ID NO: 393551 - DNA, 75 bp, Homo sapiens
aatccattctcatgaagcagctgcagcagcagcagcacagcgacaagacgctgaaccttagccggccgatcgagg

SEQ ID NO: 393552 - DNA, 75 bp, Homo sapiens
caggtattaggacctgaagacctccagagacatgcaagaaagcacttcagccaagcagaagggagccagctggac

SEQ ID NO: 393553 - DNA, 75 bp, Homo sapiens
ggagaagagccatggacatcatttgcaggtcatacctgcttgggtctcacagatttcaagcctggctactggatt

SEQ ID NO: 393554 - DNA, 98 bp, Homo sapiens
cggaggacgcgcccggcgcccctgagccggccgagcggcgacggaccgcgagatgaggaaactgaggcttggtgaagttacgaaacttgtccaaaatc

SEQ ID NO: 393555 - DNA, 90 bp, Homo sapiens
cgcttatggtcaatggtgtcctcaaacagtaccagttttatggctacctgtcccagcagcagaacatgatgcaggactacgtgcggacag

SEQ ID NO: 393556 - DNA, 100 bp, Homo sapiens
agcttatctacacgactcagatcttgttgtcacccccattattgacaatccaaaggtgcagaaagcactctgacaacttttgtctggtcctctgagcccc

SEQ ID NO: 393557 - DNA, 100 bp, Homo sapiens
aagaagtccgagacacgcggtgaggcggcgacgggctccgggtggatgctctccgattgcgtttggaagagaaggaaaccatgttgaataaaaagacaaa

SEQ ID NO: 393558 - DNA, 82 bp, Homo sapiens
tactggagtaggtgttagtaagatgatccagatcctgatgatggatttaactataaacagatgatggttagagatgagcgga

SEQ ID NO: 393559 - DNA, 71 bp, Homo sapiens
cactagtgtggctctcctgttccagcaattgggactccctggaggaaaagcggaagcggcagcggtctgaa

SEQ ID NO: 393560 - DNA, 75 bp, Homo sapiens
ggaaacatgggatgcagggtaaaagcttcaagtcagatgaggtatcatatgtttcttacaaagtggaggtttgtg

SEQ ID NO: 393561 - DNA, 104 bp, Homo sapiens
tgttgtagcacagatttatgtaatgtcaactttactgagaattttccacctcctgacacaacaccactcagaacatcatttacagcgagcaatttcagcacagc

SEQ ID NO: 393562 - DNA, 71 bp, Homo sapiens
tttttcctgatcatctatatgggatccttcatgctgatgcttcttgaaaccacccctactcctaatccccc

SEQ ID NO: 393563 - DNA, 50 bp, Homo sapiens
gggaaggagacgctgcagcgcacgggagaattctcaccaaatgttcccaa

SEQ ID NO: 393564 - DNA, 95 bp, Homo sapiens
cagaagttcatggatgctgtcaacaagaagagcagttcccaggatctgcataaaggaatgggtaccacagaccatgtcatcgtcctggcgtccac

SEQ ID NO: 393565 - DNA, 100 bp, Homo sapiens
atccagaccaggactttgacaaagagtgtaaacaggaacatcgataagtagtgtaaaaacttgcacaatgaaatccgaagccaaggatggagaggaggag

SEQ ID NO: 393566 - DNA, 100 bp, Homo sapiens
agtggaaaatgcttatcacatggaagcagagagctggagataagatgggtagactgctacttcccttttacacatccttcctttgagatggagatcaact

SEQ ID NO: 393567 - DNA, 75 bp, Homo sapiens
gagctgagtggttgtgtggtcgcgtctcggaaaccggtagcgcttgcagcatgcgtcgagggcgaggcccccagc

SEQ ID NO: 393568 - DNA, 100 bp, Homo sapiens
gtgagccttctcgtggcggcggggaccgtccagcccagcgattctcagtcagcggtgcagaggggcaggatgccgccgacccagccgacccacgggcagt

SEQ ID NO: 393569 - DNA, 100 bp, Homo sapiens
ttatcgaagacaaaacacatttctacccaagtttaaatgacctgctatgcccacagagcttgatccagaagtgcacaggctaaactgtgaaaatgcagtc

SEQ ID NO: 393570 - DNA, 96 bp, Homo sapiens
tggtgagagcggtgtggaggccttcacccagatctcgagggagattggagctcattgccctgggactgtgcaattccattggctcactcttccaga

SEQ ID NO: 393571 - DNA, 75 bp, Homo sapiens
cctcggacccagggcagccgtgcccatttccccagggcatggaggcagaagagcactgatcgtactggctcactc

SEQ ID NO: 393572 - DNA, 83 bp, Homo sapiens
aaggacttcggcgcgggactcaagtacaactcccggcacgaggctttatcctgtggataaacgcagagtgaacgagtttgggg

SEQ ID NO: 393573 - DNA, 73 bp, Homo sapiens
tgcatttcaacttcaagaatgggtgatacaattctggagactggagaagtaattccaccaatgaaagaatttc

SEQ ID NO: 393574 - DNA, 100 bp, Homo sapiens
aaccacccgagcagacggagtacacggagcagcggccccggccccgccaacgctgccgccgggtcgccactgggacactgtgaaccaggagtgagtcgga

SEQ ID NO: 393575 - DNA, 127 bp, Homo sapiens
cggcgtccagggcagctagggcctgggccgcggttcggccgcgccggccgcggtcttgcgagtggctggttccctgcagaagagcacagaagtgatgaaggccatgcaaagtcttgtgaagattcca

SEQ ID NO: 393576 - DNA, 100 bp, Homo sapiens
tggctcagcccgttcgctggactgcaaaccgagctcccgtctgccttgcagtgcctctcatgacaaagacttgacaccaccaccttcctccaggggaaag

SEQ ID NO: 393577 - DNA, 75 bp, Homo sapiens
ccgtgggcagcattggcgaccagcgcttcacgggccgttgctccagggagaactgcaaatatcttcatccacccc

SEQ ID NO: 393578 - DNA, 98 bp, Homo sapiens
tttgtttggatatcctgaaagatcaatggtgcctatggttcatgcttgaagttttaatgacaaagaatgaaaacaatagccatgcctttatgaagaag

SEQ ID NO: 393579 - DNA, 83 bp, Homo sapiens
ctacgagctggctttaatcctgaaagccatgcagcgggtcgcaatggaagaagagatcgccgcgctggtcattgacaatggct

SEQ ID NO: 393580 - DNA, 100 bp, Homo sapiens
ctgctcggccgcccgggaccgccagctctgtccgctgcccacagcctagcagtcgggaccgtactgagcaccagtatgcatgagcgggtgaaccgaacag

SEQ ID NO: 393581 - DNA, 98 bp, Homo sapiens
gcagctccacgaaaggcagccgcggatcgccgcgctcagcgacaaacaagaaggtgctcgggtcttcggggcactgggtcccatcggtccctcctcac

SEQ ID NO: 393582 - DNA, 75 bp, Homo sapiens
tcagtgattctacatctcaagctcatattttgaagtgtttacgggtgatccgcaggggctggctgaccatcaaca

SEQ ID NO: 393583 - DNA, 98 bp, Homo sapiens
acggaagctgagctgcagagttagccggcatctgacagaaaaatccccccgtccagctccgacgccggcctgcggttcccggacagcaacggcctcct

SEQ ID NO: 393584 - DNA, 98 bp, Homo sapiens
gaacgcacaggccgtcgctatgagcgggaccaccctgggcacagcaggcatcggaggactgggccggggtctgcagggctcagctgagcccatgagct

SEQ ID NO: 393585 - DNA, 100 bp, Homo sapiens
gttgagtacttggatagacttatacctcagcggagcgtgctttggacaccatgaattttgatgttataaagggcaagccagtacgcatcatgtggtctca

SEQ ID NO: 393586 - DNA, 75 bp, Homo sapiens
tcctcctccactgccactacagggaagtgcatcacatgtcagggtaagcttgatgattaccaggaacgaatgaac

SEQ ID NO: 393587 - DNA, 98 bp, Homo sapiens
attgcttctatagttgattgaatgctcttaacacggagaggctcagtttatgaacctcttaaaagcattaatcttccaagacctgataatgaaactct

SEQ ID NO: 393588 - DNA, 113 bp, Homo sapiens
acattctctgccccccacccaccgcgccggcgctcccttgtcacgcctcgggaagcgcgcacctgccaagcagctgcagaaccttggcctgaaaatgctacattatatcagca

SEQ ID NO: 393589 - DNA, 83 bp, Homo sapiens
tttcattgtcttttccgcccgcttcgatcgcctcgcgccggctgctctttccggcaaaatgatgcttcaacacccaggccagg

SEQ ID NO: 393590 - DNA, 100 bp, Homo sapiens
gtggattaactcagtggctcaacaggctgaagggagttgaaacattgtagtcggtatatacatgacttatttccttcactcatcaagaatttggatcccg

SEQ ID NO: 393591 - DNA, 74 bp, Homo sapiens
tgaggaagcgggagtggaccatcgggcggagacgagggacagagcagaatgggctgatatagatccggtgccgc

SEQ ID NO: 393592 - DNA, 83 bp, Homo sapiens
gtaaagtatacgtttcccagcacccaccaccagcaggtgtgagttcttgatacgaatgaaaggccaagagtttgttgatgaga

SEQ ID NO: 393593 - DNA, 75 bp, Homo sapiens
tcgaggacggtcggactcccgcggcgggaggagcctgttcccctgagaatcaaaggcatgggaggttgatacctg

SEQ ID NO: 393594 - DNA, 90 bp, Homo sapiens
taaaggcccaggagctggaacacagtgactctgttaagcagctgaagggacagatttccacaagacggcaccctatgtcgtcactggcag

SEQ ID NO: 393595 - DNA, 101 bp, Homo sapiens
gcaggaggaggacggcagcaaccgcagcagcagccttcaggtgctggagaatctggtaaaagcaccattgtgaagcagatgaggatcctgcatgttaatgg

SEQ ID NO: 393596 - DNA, 101 bp, Homo sapiens
agagcttctctccagagtagaaagaatacctaaaggggcaggacctggatgctatcttgcaggatccttaacattgtcaaagactgaactaggaaagaaag

SEQ ID NO: 393597 - DNA, 85 bp, Homo sapiens
tgctggagaactacagcagcctggtctcactggatgtatcggcaagcagtgtaaacggaggacttggggaaaaaggaccacatag

SEQ ID NO: 393598 - DNA, 90 bp, Homo sapiens
gcttgaactcagcatacaggatgtacagttccaaatgaccttccacctgtttattgctgcatttgtgggggctgcagctacactggtttc

SEQ ID NO: 393599 - DNA, 100 bp, Homo sapiens
ggcgcgatcttggctcagcgcaacctgctggactcaagcaatcctcccacctcagccccccgagtagctgggactacaaacaaggtcttgctctgtcacc

SEQ ID NO: 393600 - DNA, 83 bp, Homo sapiens
gatctggaggacggagaggacctgttcaccagcactgtctccaccctagaggacttgcaattgtgaccaaatatattacaaag

SEQ ID NO: 393601 - DNA, 83 bp, Homo sapiens
ctctccatccagctccctgcgtcccggccttcgctgtgctccctcaggtgccagatgtgacatccagatgacccagtctccat

SEQ ID NO: 393602 - DNA, 75 bp, Homo sapiens
agtaatggtgcaaagcctgaacaacagccaactcagtttataaatccagaaacacctggctatgttggatttgca

SEQ ID NO: 393603 - DNA, 100 bp, Homo sapiens
gttgggatgcggatcgatgtcgccagcatagacatggtctccgaagtgaatatgctggacagtgccacatcgcttatccaggcagctaaaaacctgatga

SEQ ID NO: 393604 - DNA, 75 bp, Homo sapiens
gatggttctaagatgggatctgatttagtcagtcaactttgtgacaacagcagaggacagatctctgagaatctg

SEQ ID NO: 393605 - DNA, 129 bp, Homo sapiens
gcggggtgcggagctagggcggccgagagccatggcggcgctattggcggcggcggcagtgcgagcccggatcctgcagattatagcatttgatgagctgaagactgattacaagaatcctatagacca

SEQ ID NO: 393606 - DNA, 74 bp, Homo sapiens
cttcagaaagaaaaaagaagaagtccccgagttcaccaaaattcagacattcaggatgcctggtttgcttttat

SEQ ID NO: 393607 - DNA, 111 bp, Homo sapiens
aagactggtccacggagtgtatgaccacaaacagccatcaaggaattcctcctgatcagcagagactgatctttgctggcaagcagctggaagatggacgtactttgtctg

SEQ ID NO: 393608 - DNA, 75 bp, Homo sapiens
aagccgacgaagagaccgccgtccaggatcgtctttaatgagttacagaatgtctgaaggggacagtgtgggaga

SEQ ID NO: 393609 - DNA, 100 bp, Homo sapiens
gtggcaggggtcgagcaggtgccatcaggcacatgaacggtggagtcttcaaagagggaagtggaatcccgattgcttgatgattgatggactggtttct

SEQ ID NO: 393610 - DNA, 100 bp, Homo sapiens
cagatcttcacagcacagttcctgggaaggtggagccaccagcctctccctgcagacataaacgtgacccaaaaaagcttcaattttgccaagaagttct

SEQ ID NO: 393611 - DNA, 106 bp, Homo sapiens
gcaactcggcagcctccacccaccggcccaccctacatttagcgcatcatgtgatccggaatgttgtaccatctttgggtaggcagacttccctgacgacatcagt

SEQ ID NO: 393612 - DNA, 100 bp, Homo sapiens
agtttgtcggcccttgccttggcagagctgaggagaactacgatgacccgcacaaaacccctgcctccccagttgtccacatcaggggcctgattgacgg

SEQ ID NO: 393613 - DNA, 83 bp, Homo sapiens
ctcggggcgggcgccgcgggacctctccgggccatggacacgatgaggcgagtggtacgacagagcaagtttcggcatgtatt

SEQ ID NO: 393614 - DNA, 100 bp, Homo sapiens
gacttcccggcctcaaaggagattctggtcccaaaggtgaaaaggttgttcgccgcaggacccagcggaggaagtccaccatcactgctctgctcttcgg

SEQ ID NO: 393615 - DNA, 98 bp, Homo sapiens
caaagaatggataaattagagaaaaccaacagcagcttacgcaaacagaaccttgacctccttgaacagttgcagcattcgttcagtcagagagcata

SEQ ID NO: 393616 - DNA, 147 bp, Homo sapiens
ttggctgaagaggaaataaaaacagaacaggaggtggtagagggcatggatatctctactcgctccaaagttccctgacatcgtggagttctgcgaggccatggccaacgccgggaagaccgtaattgtggctgcactggatgggac

SEQ ID NO: 393617 - DNA, 100 bp, Homo sapiens
tgttgacgatgacatcaccactggcaaaatccatgtttggtgaccagagctgtatatattgatattctcttcctattgacttgctgcctcaacagatctg

SEQ ID NO: 393618 - DNA, 90 bp, Homo sapiens
ggaagatgtaccaggagaccaggtcaagcccgaccaatacactgaggccctggcccagagggacaatccctggccccacctcttctgcca

SEQ ID NO: 393619 - DNA, 100 bp, Homo sapiens
aaggctattggatcagctcagcaggaaggccaatgatgaggccaatcagagtgatacaagtgtctccttgtcagaacccaagagcaaaagcagccttcac

SEQ ID NO: 393620 - DNA, 74 bp, Homo sapiens
gttcgcgtctctctgctgcggcgcggggaccgctgtgctctcgagctgatgttcctggagaccagcgctctcac

SEQ ID NO: 393621 - DNA, 87 bp, Homo sapiens
gaagggtgcaagaagaatcagtgctcctcagagaaattttgaaattgccttcaagatgtttgatttgaatggagatggagaagtaga

SEQ ID NO: 393622 - DNA, 100 bp, Homo sapiens
ccctgtacgtgaacatgactagcggcccgggtgggccggcggcggccgcgggcggcaggaaggagaaccaccaggagaaccgcctggcccagcacaccct

SEQ ID NO: 393623 - DNA, 96 bp, Homo sapiens
tgcagcccttcaagaaagacttgatggtctggtagaaacaccaacaggatacattgaaagtgaaaaatgtgaggttttacaatattctgcaaggga

SEQ ID NO: 393624 - DNA, 100 bp, Homo sapiens
cggggctgtccaacgccttccagctccggctcccgctgcctgcaccatgtccgccagaggtccagcaagactatgaatctctgttccaaatgctttgctg

SEQ ID NO: 393625 - DNA, 100 bp, Homo sapiens
gagactgcaggaggacatgcagaatgtccttcagagactgcagaaactggaaacgctgactgctttgcagctggaagaagagttgaaggcacgaattgaa

SEQ ID NO: 393626 - DNA, 100 bp, Homo sapiens
ctggtgatggactcatccccacaggtgccacacctccctggatgatccaagatgaagaatacattgctgggaaccaagaaataggaccatcctatgaaga

SEQ ID NO: 393627 - DNA, 82 bp, Homo sapiens
tgtggtcgcgtctcggaaaccggtagcgcttgcagcatgggtgactatgaccagagcaggaccaaagtgctgcacatgagcc

SEQ ID NO: 393628 - DNA, 82 bp, Homo sapiens
ctccactttcgccagcccgtgccgcgagcgcggcctgcaggagtgctcatctcgctgtcctccggcatgcccaaccacagcg

SEQ ID NO: 393629 - DNA, 75 bp, Homo sapiens
ctcgggggccgctctgggatcccggccaccagcaattgtccgcaaaatcaccaggacagccaatacaagtggttt

SEQ ID NO: 393630 - DNA, 100 bp, Homo sapiens
ttccaagtcaagatttcaaatggaaatctaagaattctcccagtccttggctacatcagcccacccctgtgacctcagcagatggtattggattacttag

SEQ ID NO: 393631 - DNA, 74 bp, Homo sapiens
cttgaaccaggtcatgctccaaatatatattcgactttatgggagaaaatttagcaaagaagatcatgttcttt

SEQ ID NO: 393632 - DNA, 80 bp, Homo sapiens
ttcccgtgattgcgttacaagctttgtctccttcgacttggagtctttgtccaggacggagtacgagagggcctccaaag

SEQ ID NO: 393633 - DNA, 100 bp, Homo sapiens
ggcggagattcggagccgtcagcagtgccggtggtggtgtgcacattgagccccggtatagacagttcccccagctgaccagatcccaggtgttccagag

SEQ ID NO: 393634 - DNA, 100 bp, Homo sapiens
ggacaagaagattatgacagattacgccccctatcctatccgcaaacagtagcagcagcagcagcagcagcagcagcagcagcagcagcagcagcagcag

SEQ ID NO: 393635 - DNA, 90 bp, Homo sapiens
tcttgtcaagctgtgtcagccgaaatgcttccagactgcacacttttacttagaggacagtacatcccctagagttatatccacacctcc

SEQ ID NO: 393636 - DNA, 75 bp, Homo sapiens
ctcaagagcaatcagtaccatctggatttcaaatatgcgtgcattagagaatgattttttcaattctcccccaag

SEQ ID NO: 393637 - DNA, 152 bp, Homo sapiens
ttgagcttcattcagatgtggtggaatatgccaaggaaaaactggagagcttcatcaaaaatagtgatagctttgataagcaagaaagtgagagtgtgctgactctcaagggcctgactcccacaggcacactccctctgggcgtcctctca

SEQ ID NO: 393638 - DNA, 100 bp, Homo sapiens
acgagtattcagctcttcacagggggtagaacaagtggtactaggattatacattgtaagaggtgacaacgtgcaagcctgaaatagcatgtgaaaaccc

SEQ ID NO: 393639 - DNA, 83 bp, Homo sapiens
caagaagaagaggagaggaaaaaggaagagagcactgcagccagtgaaaccactgaggtttacccaaggtccagcctagcccc

SEQ ID NO: 393640 - DNA, 80 bp, Homo sapiens
ttggattctagccagcacgactgaaggaggatactgtaacactttgttcctaccctttcatctttgatgcccaagccaag

SEQ ID NO: 393641 - DNA, 100 bp, Homo sapiens
tggtgctgcgggtgttcttttggggtagtgtctgggatccagtacgagttgaatcattgttcaaataaggctccatctactctttgaagcttctgcccag

SEQ ID NO: 393642 - DNA, 103 bp, Homo sapiens
caaaggccagccctgcaggctccaagcaacccccttacccaggaatggaacaacctccacaccatccttactatcagcaccatgctccacctcctcaagctca

SEQ ID NO: 393643 - DNA, 100 bp, Homo sapiens
gtggctggtaacctggcagccgcggagagcggagctggagtttgttcagatcatcatcatcgtggtggtgatgatggtgatggtggtggtgatcacgtgc

SEQ ID NO: 393644 - DNA, 75 bp, Homo sapiens
gattcgcagtggtcgcttcttctccttgggagaagagcctgctgagtgcagtgaggccggtctcctgcaggaggg

SEQ ID NO: 393645 - DNA, 96 bp, Homo sapiens
tgtcttagcaaggctgtcatcacagtccttatgtcgtcagaagatcgagaagctcaggaggatgaattgctggccctggcaagtatttacgatgga

SEQ ID NO: 393646 - DNA, 100 bp, Homo sapiens
cagcatggcggtggaggacgaggggctccgggtcttccagagcgtgaagatcaagatcgccatccgggtgacctgcataggttcctgcggggtctccaac

SEQ ID NO: 393647 - DNA, 51 bp, Homo sapiens
taaagaggcaccattcgtacccgttgatcccctgtttttggagcacagctt

SEQ ID NO: 393648 - DNA, 50 bp, Homo sapiens
ccagtccattgctgcctgctacaaggccttcaagagggaattgaaaacta

SEQ ID NO: 393649 - DNA, 100 bp, Homo sapiens
tacaggtttgtctcttccagatcagaactgaggaacaaaaacccccatcctgggaaaaatggggaagctggaagcatcggagagcaagagacaggtccag

SEQ ID NO: 393650 - DNA, 98 bp, Homo sapiens
ccgcagccccccaatgcggccgcgagaagcagcgggggggcaggcgatcgaaggaagatgatccctatgatcttgaagatgtttctgcacagaaatga

SEQ ID NO: 393651 - DNA, 75 bp, Homo sapiens
gtttctggccacgtgcttcaacgctctgctgcccgctgtgagggaaaaggtgctggtgtttgtccactcccggaa

SEQ ID NO: 393652 - DNA, 100 bp, Homo sapiens
cgagagatggtcaggtctggagctcgaccgggccagattgtctaaagccccaggaaaaatggtggaaaattcaccgtcgccattgccagaaagagcgatt

SEQ ID NO: 393653 - DNA, 80 bp, Homo sapiens
tgatccagaacttgcagcaacaataggttacagttcctctgagtcatctcatcaatgccttccatacaccaaaaaacact

SEQ ID NO: 393654 - DNA, 99 bp, Homo sapiens
gcggctgtgaagccctagtcgacctgcgaccgcatcaagcagtccgccagcggaaccaagcggcgcgtgttcatcatcgagaccatgggcggctactgt

SEQ ID NO: 393655 - DNA, 74 bp, Homo sapiens
ctttacaagcttgtaaaatctcaggcattgccccaaatacaatgttagcaaaagtatgcagtgataagaataaa

SEQ ID NO: 393656 - DNA, 98 bp, Homo sapiens
gaaagacacacctaccaagaagccagtcaagcggccagggcccagtcctatgcggagagactgcgtctgggtttggccgtcattcacggggaagctca

SEQ ID NO: 393657 - DNA, 100 bp, Homo sapiens
agatggggagcgtcctggggctgtgctccatggcgagctggacttaattcagtgcacaaatgagatgaatgtgaacatcccacagttggcagacagttta

SEQ ID NO: 393658 - DNA, 100 bp, Homo sapiens
tcgctccacctcctcgccaggcctgttcctccctgggtcctgtcttgaatgagtctagacctgtcgtttgtgaaaggagatcatttggcatttagctgtg

SEQ ID NO: 393659 - DNA, 97 bp, Homo sapiens
cgggagcagctgcatagcatcagcgactctgtgttgtttctgcaggtccttgaatgggcaagagggcacatgaagtacggcgtcctccacattcacg

SEQ ID NO: 393660 - DNA, 113 bp, Homo sapiens
gaaaaacaaaaaaccagaaatggagaagtgttccctttccagacaatcatgttatgaagacagtatggagtttccagaccatagtagacatttgctacagtgtctgagcgagc

SEQ ID NO: 393661 - DNA, 100 bp, Homo sapiens
tccagcttcacccgtacaggtagccccgccgccgcgcacctgccttcgctcccgcaccgaccatgagaacattgctctgaactggtgttcctgtgaacac

SEQ ID NO: 393662 - DNA, 95 bp, Homo sapiens
gcgagtttccgatttaaagctgagctgcgaggaaaatggcggcgggagtgtatgtggtagaagaccaaagaagagatgagctaggaccatccacc

SEQ ID NO: 393663 - DNA, 101 bp, Homo sapiens
aaaagactcaggacggacaagcacagtcttcggaagcatggcctgtatgagaagaaaaagacctcaagaaagcaacgaaaggaacgcaagaacagaatgaa

SEQ ID NO: 393664 - DNA, 98 bp, Homo sapiens
ctttcacgctgcctcggcggcccggcccggctcgacgccaatgggtattctcagcctctgcacgaggagatagccctgcacaagtaccttaagcaccg

SEQ ID NO: 393665 - DNA, 100 bp, Homo sapiens
ctggccctgaggcatctgagtcaacaacggatgaaaatgaagacgacattcagtttgtcagtgcacctgaatggacagaagaggacctcagccaactgac

SEQ ID NO: 393666 - DNA, 100 bp, Homo sapiens
ccccggccgaggtggcggcggctcctcaggaaattcgaaatgagtcccatgactatcctcatagagtggccaagtttccagaaaacagaaatcgaaacag

SEQ ID NO: 393667 - DNA, 80 bp, Homo sapiens
caagcagctaagacaacatggtacatgtgcctttctgagaaaagtctacagcattctttctctgcaggttctcttaacta

SEQ ID NO: 393668 - DNA, 83 bp, Homo sapiens
gattcttttccgtacaaaaccatggcaatgtctgagtgtcagaataccctctaccatctgctttggtcagggtgccgctcgag

SEQ ID NO: 393669 - DNA, 100 bp, Homo sapiens
gaggattatcttagaattttaagatacttcaggactcatatgaacgagcaaaacatatcttgaaaactcatgcaaaggagcataagaatctcgcagaagc

SEQ ID NO: 393670 - DNA, 75 bp, Homo sapiens
ggacctcctgatggagaagctagagcaggacttcgtctcccgggctggagtgcagtgacgtgatctcggctcact

SEQ ID NO: 393671 - DNA, 49 bp, Homo sapiens
gcggcggagcggccggtccacggaggagtactatactggcaattgctgg

SEQ ID NO: 393672 - DNA, 100 bp, Homo sapiens
aaaatgctctgtgacacctggtgtatcgagctgtgatgaattccactggtggcagtagcagtggcggtggcattgggctgaccctcgggggaaccatggg

SEQ ID NO: 393673 - DNA, 75 bp, Homo sapiens
ctcggccgtgggccagttcgtgtccctggacgaagtccattggaatattaagcccaggagttgctttggggatgg

SEQ ID NO: 393674 - DNA, 75 bp, Homo sapiens
acacagacagtgaagaagaaattagagaagcattccgtgtgtttgataagtgtcttctcggaaaaaaccagcctt

SEQ ID NO: 393675 - DNA, 101 bp, Homo sapiens
taaaaaaactggctgtgaataatatagctggtattgaagagatgtgtcttgctgaatcagggctctcttatccctgccatcgacttacagtgggaagaaga

SEQ ID NO: 393676 - DNA, 107 bp, Homo sapiens
aaaggagcagggaagaaggaatcatcgaggcatgggggtccacactgcaatgtttttgtggaacatgttcttcagtgccctactccacagccaaaacacctcaccca

SEQ ID NO: 393677 - DNA, 88 bp, Homo sapiens
cgcttcttctggaagaccagccaacagagcagcccgacggccatggaggctgaagagacgatggaatgccttcaggagttccctgaac

SEQ ID NO: 393678 - DNA, 96 bp, Homo sapiens
cgcagtcatttatcatcagacctcagaaagaacattctagtatgccagtagaaaaaaatatcactttagaaaggccttctaatgtaaatctcacat

SEQ ID NO: 393679 - DNA, 82 bp, Homo sapiens
gcaccgactatgtcgcctgccaccgagccgggcccacctccccaccaaggaaggttacctaaccaaactcctgcaaaaccac

SEQ ID NO: 393680 - DNA, 100 bp, Homo sapiens
ggagtcagaggcatgccgggcagccctgtcccagggccatgatggggtgcccctgctgatgacgcccccaccaccaccgttccccccacctccactgttg

SEQ ID NO: 393681 - DNA, 100 bp, Homo sapiens
cggcgcgggagggtgctctggttcagactacgcgtttgttcacatggagaaggaagcagatgccaaagccgcaatcgcgcagctcaacggcaaagaagtg

SEQ ID NO: 393682 - DNA, 83 bp, Homo sapiens
cccccaaatgccgaaggccacgtaaaacaggctggtagctcagggatgtctcgtctgtgagttacagctgcacgctctccagg

SEQ ID NO: 393683 - DNA, 100 bp, Homo sapiens
cccctagaccggttacaagccccagaactggccaacgtggcagccagatcccgcacatccttgaaggcctatctttaaaaggcccgagagccctctcctg

SEQ ID NO: 393684 - DNA, 106 bp, Homo sapiens
aagctaaaattgcctttggacagtctatggatctacattataccaataacgagaaccatatttatttagagtcagaatggagcgatttgtagtaacagcaccacct

SEQ ID NO: 393685 - DNA, 101 bp, Homo sapiens
cagagagagaggccaaagagcagcaccagaagctgtgggaagaggagaaggcagagcccccccaggctatgaatgccctgatgcggttgaaccagctgaag

SEQ ID NO: 393686 - DNA, 75 bp, Homo sapiens
agaaaaaccagctggagattgagagactggaggagcaggtttctgaaggattgtcattcttgcatagcagtgtga

SEQ ID NO: 393687 - DNA, 74 bp, Homo sapiens
tggcatcctcctcactcgctacacagcccagcagttccgaaatgcatgaatgtcagcatcatcattcaaagaac

SEQ ID NO: 393688 - DNA, 101 bp, Homo sapiens
atgcagttcaagtaacaaagtaggaaaactcagtgaaaattcatctgaaattaaaaagggaaggataaccccatcacaggaggaggtgcgccagtctgtaa

SEQ ID NO: 393689 - DNA, 100 bp, Homo sapiens
cacgggcaaggcggagagtgacggagtcggcgagcccccgcggcgacaggatgaccagtgtcccagtgaaggaacgagtgaaggtgtctcagaactggag

SEQ ID NO: 393690 - DNA, 90 bp, Homo sapiens
cagaggccgccatcaaccgccagatcaacctggagctctacgcctcctacgtttacctgtccatggctcagtagatgaaggcgtttctga

SEQ ID NO: 393691 - DNA, 50 bp, Homo sapiens
taatctgggcctcttgtcatggtagctacagcaagctgggtagcaggcag

SEQ ID NO: 393692 - DNA, 80 bp, Homo sapiens
ggagagaagacgtaccattatgtgcccgaattccgaaaagagcccatggatttcagaaaattatctacattcagagaaag

SEQ ID NO: 393693 - DNA, 50 bp, Homo sapiens
caaggacgagccggggcgctgaaggatgaaagtcaaacttctgcatcctc

SEQ ID NO: 393694 - DNA, 82 bp, Homo sapiens
gggtgctgaaggctgcagccgcgaatgccgtagggagtgttcctgtgtggctcctgctcctgctgtgtgtcgggcttattat

SEQ ID NO: 393695 - DNA, 100 bp, Homo sapiens
atcacaataccaaacttgataataatctagattctgtgtctctgcttatagaccatgtttgtagtaggtggacattgaagtggacctaattcggttttcc

SEQ ID NO: 393696 - DNA, 100 bp, Homo sapiens
gaccatgccaggcatggcttcctcccaaggcacagacagcaccctgcttgtgacttcactggcccaactcatcctggaccccttgagcaagaccatggct

SEQ ID NO: 393697 - DNA, 90 bp, Homo sapiens
ctccatgatgagccatctccacttaatgactgtctcacattggccggcaacttgttccaggaagagagaagggcacagttacctaagtat

SEQ ID NO: 393698 - DNA, 83 bp, Homo sapiens
tcaacatcctcctggccaccgactcctacaagaattcagaaggagctggcggacatcactttagaccctccacctaattgcag

SEQ ID NO: 393699 - DNA, 75 bp, Homo sapiens
cctggcttcttactcagtccatcttctgcttagtatgtgtattcagacagcaagtgaacaatggcctcaccctca

SEQ ID NO: 393700 - DNA, 78 bp, Homo sapiens
aaaactcctctctatagtcaactccttcaagcatataagtggtcaaacaagggtcatgtaggtacaacagcaaccaag

SEQ ID NO: 393701 - DNA, 100 bp, Homo sapiens
cttctaccaactgcagttttagatacgttttgaaaatttcatcacctgagcaagccagggctgagcaggaagaagaattcattagtaacactttattcaa

SEQ ID NO: 393702 - DNA, 82 bp, Homo sapiens
ctctcagtcaacatctccttcgcagccgcgcaaaaaaatcttgtttctggcgctggagacatcaagcttactaaagacacag

SEQ ID NO: 393703 - DNA, 100 bp, Homo sapiens
cggcggtggcggcggcggcagctgcagtgacatgtccagcatgaatcccgaatagatattaatgcacacgcctgtgttactggtaaacccatcagccaag

SEQ ID NO: 393704 - DNA, 100 bp, Homo sapiens
tcttcccggcgctctcctggctcccttctgccccagctccgtctcggcggcggcgggttatcaatactctggctgaccatcatcatcgtgggactgactt

SEQ ID NO: 393705 - DNA, 74 bp, Homo sapiens
agtcactgtcctggtacaaggatgaggagccatccgggtgacctgcataggttcctgcggggtctccaacaagg

SEQ ID NO: 393706 - DNA, 83 bp, Homo sapiens
gctccaaccatgggaggccgcgtctttctcgtatttaaaagacccaactcagcccatcttagaggccttggacaaggacagct

SEQ ID NO: 393707 - DNA, 100 bp, Homo sapiens
ctaggattacctgaaggtgaaacagattgagccagaaggaagacaatgctgccacataaagaagatccctaatagtcatttctcaacaattatatagtca

SEQ ID NO: 393708 - DNA, 83 bp, Homo sapiens
cactgtacaagctttcaaagtcaatgaatgtgtttctgatcatctgaatcttaatcatgtccaactgcctgcaaaatttcctg

SEQ ID NO: 393709 - DNA, 75 bp, Homo sapiens
agttcttgtttgtggatcgctgtgatcgtcacttgaaaatgtttcgatgaaagatcctccggacttattggacag

SEQ ID NO: 393710 - DNA, 75 bp, Homo sapiens
gcacctcctcgccagcagccgtccggagccagccaacgagcgccactgaggcggctcccagctgcgttggcgaca

SEQ ID NO: 393711 - DNA, 50 bp, Homo sapiens
ggagttagcagtcacgacctccagcacagatatggggagattgttaacat

SEQ ID NO: 393712 - DNA, 87 bp, Homo sapiens
caggacggacaagcacagtcttcggaaggttactggagttggctataatcaatttggggaagtgattgttgatggtgatgttgttca

SEQ ID NO: 393713 - DNA, 75 bp, Homo sapiens
ggcgggatgtgtcagtcaaagcagcctctgaacttctcatgaaactctcaggtggaaaacgaagctcattcccaa

SEQ ID NO: 393714 - DNA, 100 bp, Homo sapiens
gccgtgagaggccggacccgcggcggggaccagcagcgggagaagctcggcaacgtggagtcggtttatgtcatcgaccctgaagatgtggcccttctct

SEQ ID NO: 393715 - DNA, 82 bp, Homo sapiens
ccgtgtggcgctgattggatttccctctgtgggtcagcccaaggccaaccccactgtcactctgttcccgccctcctctgag

SEQ ID NO: 393716 - DNA, 99 bp, Homo sapiens
ctgagatttccttcgtccctgacatcatctctgtgcactgataataaccctgcagctacgactaatagactggggtttggctgagttttatcatcctgg

SEQ ID NO: 393717 - DNA, 87 bp, Homo sapiens
cctcccctgcggctcgggcaacgcgctggccggagcagtgaaccagcacggggggactctgctgggccgctcagccatgcctgaggg

SEQ ID NO: 393718 - DNA, 150 bp, Homo sapiens
caggatgttagtgctgggtctttgcaggaattggctctgctgacaggaattataagtaaagcagcacttcctggttccatcttagcccacatccagaagcaaaagcacttcaatgagcgagaagccagccgagtggtgcgggacgttgct

SEQ ID NO: 393719 - DNA, 96 bp, Homo sapiens
ggcgacagcctggattataaggatgtcatccccatggctgatgcagcaggcatcatccgctatgcaattgggatactaatggaccatactaccaag

SEQ ID NO: 393720 - DNA, 90 bp, Homo sapiens
cgctagtcctaaagaggaaatgtctctacgctgcggggatgcagcccgcaccctggggccccgggaggaagataccaactagagataaaa

SEQ ID NO: 393721 - DNA, 100 bp, Homo sapiens
acctcctcagtcagattctgatggtcagcgtcgttctaaatgtatgacaacatgtccacaatggtgtacataaaggaagacaagttggagaagcttacac

SEQ ID NO: 393722 - DNA, 51 bp, Homo sapiens
catggtgcggctcatcttcgagaggaagaggcagaaatccaggcagaactt

SEQ ID NO: 393723 - DNA, 75 bp, Homo sapiens
ggcaggatggctgcgttgacacgtcttatttaatccacatcataggtacctggagtacaagagggtccctaacag

SEQ ID NO: 393724 - DNA, 96 bp, Homo sapiens
agatttttaccgcagaagagttggaggctgaaattggcagatacccatttaagtgtggcaaaggagcagagaactttgacaagttcttcacacgag

SEQ ID NO: 393725 - DNA, 101 bp, Homo sapiens
ggtgcaatgaccattgtgtccccaggaaccacagctgctcagaaggccagctcagagtcaagatctccactgaagttggcatcacaaatgttgatctttcc

SEQ ID NO: 393726 - DNA, 100 bp, Homo sapiens
tgcagacgcagtggtggccctggagcagtatgccagcaagaaactggcgatggaatatgagaggagccctctggaaagaaaaggacagaccctgtgcttt

SEQ ID NO: 393727 - DNA, 75 bp, Homo sapiens
cttgtacagagatgtgatgttggagaactatagcaatctggttttcttgggtactaggttttgacaagcttgcat

SEQ ID NO: 393728 - DNA, 98 bp, Homo sapiens
cctgaggcacccgaagaagagaccatccatatttccagattgagaggatccagaatccagatctctggaatagctaccaggcaaagaaaaaaactatg

SEQ ID NO: 393729 - DNA, 74 bp, Homo sapiens
cgaaggtcgccgaacccgcctggctagccggcgagttgagtggcgagattgtcagtggcttcgccccgaggaga

SEQ ID NO: 393730 - DNA, 51 bp, Homo sapiens
tctaggccttttagaaaacatggtgtatcagttcctatccctgtgattgga

SEQ ID NO: 393731 - DNA, 100 bp, Homo sapiens
cagtatgaagtggtgaaggagtgtgtgcagcggtcctggacattggcgagtgcctgacagtgccggacgagttctcaaagcaagagaagctgacgggcat

SEQ ID NO: 393732 - DNA, 100 bp, Homo sapiens
atgaactggaatctgacctaacctttaaaataggcagagaagaggcgatggcggcgatggcatctctcggcgccctggcgctgctcctgctgtccagcct

SEQ ID NO: 393733 - DNA, 80 bp, Homo sapiens
cgatccagcctgcggagcctgtggggcagttgccaccttccagagaagaggtacgagatgacaagacaaccataaagtgt

SEQ ID NO: 393734 - DNA, 100 bp, Homo sapiens
tcgacatgagtgatgtggaggaaaacaacttcgagggcagaactattgcccagaagaaaagatgtttggttttcacaagccaaagatgtaccgaagtata

SEQ ID NO: 393735 - DNA, 80 bp, Homo sapiens
tgagcccgaggtgctgacgtcgcaaaaaaattggataaatcaccatgatcgattacttctgctcatcataaacatctagt

SEQ ID NO: 393736 - DNA, 75 bp, Homo sapiens
tccagaagcatgttagttcgacatcatcatcttttcttgaagttaaaaatctgtaagagcctgattttagaattc

SEQ ID NO: 393737 - DNA, 75 bp, Homo sapiens
gcgagcgactccccggctcgaagcctggatgaaatagatctctcggctctgaggtccacaagaatcggaatgtca

SEQ ID NO: 393738 - DNA, 49 bp, Homo sapiens
ctcgcactgtggtatactaactgcaaagacattgccgagaatggctgcg

SEQ ID NO: 393739 - DNA, 101 bp, Homo sapiens
caagcaccgccccgtggaaccggaacgcaggtcggatcatgctaaaaggagataatattactctgctacaaagtgtctccaactagaaatgatcaatgaag

SEQ ID NO: 393740 - DNA, 100 bp, Homo sapiens
cttctttccaggtgatgtcaagagtttttctaatatgggcagtaacacatagcgtcaaagaggtgggatgcagatcttcgtgaagaccctgactggtaag

SEQ ID NO: 393741 - DNA, 100 bp, Homo sapiens
aggggcacaccgtccttttgtctctgcctttgaggttggcgggaactgaaactggaagaccaacactgtcatctgaagttggaatcatcatctgtgatat

SEQ ID NO: 393742 - DNA, 74 bp, Homo sapiens
tcaatactcacaccaaagtgttagccaaggtgtatggtccacgctccctgtaaatgagaagaaattaaatcttg

SEQ ID NO: 393743 - DNA, 50 bp, Homo sapiens
gagcagatgagaccgctactcacccggggaagccctatggggcggatgac

SEQ ID NO: 393744 - DNA, 75 bp, Homo sapiens
ttccgtgagctgatgcaccagaaagctgaaaaggtgaattcatgacacctttgactcttctactgtctcagacct

SEQ ID NO: 393745 - DNA, 99 bp, Homo sapiens
cttccccagagaaagccaagggtagacatactgtgccttgtatgccacctgcaaagctcgctttgctcaagtttacttggtgattgcgatacagccttg

SEQ ID NO: 393746 - DNA, 100 bp, Homo sapiens
gctctccagcaagaaggtggcaaggtttcgacacagccccaactgctggtacctgagaaactggactatccacacctggattaggcagtgtctaaaatat

SEQ ID NO: 393747 - DNA, 100 bp, Homo sapiens
gagtacaagctgatcctgtccacagtgacatcgatgtggcccagcagttcagcttgaatcagagtagagtggaagagataaccatgagagaagaagttgg

SEQ ID NO: 393748 - DNA, 75 bp, Homo sapiens
gaatttttcataactccatatggcttggttatgaagacagtatggagtttccagaccatagtagacatttgctac

SEQ ID NO: 393749 - DNA, 50 bp, Homo sapiens
ctacaacgaccccatgtcaggccatccgggtgacctgcataggttcctgc

SEQ ID NO: 393750 - DNA, 83 bp, Homo sapiens
cgcactttataccacctgcgattacttactatactggcaattgctggagaagattttgcaattgttgcttctgatactcgatt

SEQ ID NO: 393751 - DNA, 82 bp, Homo sapiens
aaccaacaagatggggaagaaaaggattgagaactttaagagtggtgtgttggactaaatgctcttccttcagaggattatc

SEQ ID NO: 393752 - DNA, 82 bp, Homo sapiens
ccttgggggtcgagcacataacggggttcgggtgtctcgtgtgtgaacatcacaggcagttgcagtggtgcagaatggctga

SEQ ID NO: 393753 - DNA, 75 bp, Homo sapiens
cgccgagccgcaggagagacacgctgggccgaccccagagcggcgctggacagtctcaggaggaggtctgcgatt

SEQ ID NO: 393754 - DNA, 100 bp, Homo sapiens
tggcaacctccagaggggcctcccggtgtcctcgggatatcgccaatgtgatgcagaggctgcaaggttttacagctctttaaaacactgcacaggacca

SEQ ID NO: 393755 - DNA, 74 bp, Homo sapiens
tgggaaaccacgcaggcaaacgagaattaaatgccgagaaggccagtacggtctagtgacggagcccgcgcgcg

SEQ ID NO: 393756 - DNA, 75 bp, Homo sapiens
cgtgaagctgctgctgtccaagggctctgacatcaacatccgagacaactgcacagccagagaacaacacatcac

SEQ ID NO: 393757 - DNA, 108 bp, Homo sapiens
ggttctgggaagatggcgaaggtctcagagctttacgatgtcacttgggaagaaatcaatgtggactgaacataaatcacctgatggaaggacttactactacaacac

SEQ ID NO: 393758 - DNA, 50 bp, Homo sapiens
tggggcaatccgggcttgcagacgagcatcgccctgagcaactggtggtt

SEQ ID NO: 393759 - DNA, 100 bp, Homo sapiens
ttgagctgtccatgcagccatggaacccgggttacagcagtgagggggccacggctcaagatactggtagacacagtctgggccctctcttaccttactg

SEQ ID NO: 393760 - DNA, 89 bp, Homo sapiens
ggccttcggaacgctcctctgcattgccattgttctgaggttatctacttttggaaatgcaggaagttcccaccttgactatcccaaag

SEQ ID NO: 393761 - DNA, 90 bp, Homo sapiens
gcgaatccgaggaccactgcttgctcagatggtagtgaaaacctttatggatatggatcaggactcagaagatgaaaaacagcagtatct

SEQ ID NO: 393762 - DNA, 100 bp, Homo sapiens
agatttagcaaagctgacacaataggaaccatctctttttgctgttgccaaattgttagaaactggtttagttaatatgcaccgaatagaaattctgtgg

SEQ ID NO: 393763 - DNA, 75 bp, Homo sapiens
ttgtcaacatggccatcaccgagcaccctgagaacttcaaacctgcctagagctggaacgttacctccagagcga

SEQ ID NO: 393764 - DNA, 74 bp, Homo sapiens
tgagccccggaagggtgatgtggctgcggcatcgccggcctcgctatgagatggtgaattgtctttgagtcggt

SEQ ID NO: 393765 - DNA, 75 bp, Homo sapiens
ttcagaacacagtagccatcaggaccccctgacagatagctgctgttattaacacggggatcaaagtctggtgta

SEQ ID NO: 393766 - DNA, 51 bp, Homo sapiens
cctacacggtctcctgggtcaaggaagtgaatactctggcaatgcctatgg

SEQ ID NO: 393767 - DNA, 50 bp, Homo sapiens
ctcccgagtagctgtgattacagggagcctgcacacatgatcctgaccgt

SEQ ID NO: 393768 - DNA, 75 bp, Homo sapiens
gggcccgtcattgctaaaagtctgacccctgataaaataatgttgagtttccatgaagaacaggaagtactgcca

SEQ ID NO: 393769 - DNA, 51 bp, Homo sapiens
ttcctgcatggattgggagatactgggattctttctactaatccagatact

SEQ ID NO: 393770 - DNA, 109 bp, Homo sapiens
tgcaatgacgagggcctggagtgtgtgcccactgaggagtccaacatcaccatgcagggagtctgaagatacagtattgctcgtcctcaaagagatctaccaaacccag

SEQ ID NO: 393771 - DNA, 74 bp, Homo sapiens
agcgggagtatcagaagcggagaccgccaaagatgacagggtccggggccgatgtaccaggtgagcggccagcg

SEQ ID NO: 393772 - DNA, 90 bp, Homo sapiens
acagaactgatattttatattgaaatggatcctccagttctaggtctcgttccagatcatattctccagctcataacagagaaagaaacc

SEQ ID NO: 393773 - DNA, 98 bp, Homo sapiens
aagattccagatgttcctgtggaccccagtccagaatccaactcaagtcggaacagctcttcaggttttctataatcttggaactttgaaggatacta

SEQ ID NO: 393774 - DNA, 96 bp, Homo sapiens
tttgaatcataatcttggagctggattatcaaggaaaagatagccgcttcccaaagatcctggagaacctaagactccaaaaacgtggtactggag

SEQ ID NO: 393775 - DNA, 75 bp, Homo sapiens
cttagcctctcagtggcctatcggatgtcccggagccgtatcaatgatgctttccgtctgaatgacaacagccta

SEQ ID NO: 393776 - DNA, 90 bp, Homo sapiens
tgcgggccctgctggaccagctcatgggcacggctcgggacggactccagaagacctttccagattcgtggttgagctgcagcagaggga

SEQ ID NO: 393777 - DNA, 75 bp, Homo sapiens
atgggagccaacgtctgtcagaagcccagtggtatcctcctcaagtactacagccttccagcagccttcccagac

SEQ ID NO: 393778 - DNA, 50 bp, Homo sapiens
agctgccatccactgactcgtaaagtgtacatcggtgagctcccgcagga

SEQ ID NO: 393779 - DNA, 98 bp, Homo sapiens
gaaccaaatgctgaccctcgaaaaaaagatggagccctgcatatgattggctctttagctgaaatacttctgaaggactcagaattcatgattgaaga

SEQ ID NO: 393780 - DNA, 75 bp, Homo sapiens
acatcaatcctcatcaaggaaatgctatacttgaaaaggagcctagtaataaacgggtcaaacccctttcccgag

SEQ ID NO: 393781 - DNA, 87 bp, Homo sapiens
gggggattgtgggagtctccgcgtcccgctcgctgggagagagcctcccgcgacgatgcccctcaacgttagcttcaccaacaggaa

SEQ ID NO: 393782 - DNA, 97 bp, Homo sapiens
agcctccttcgccgcgccccacttgctcgtgcactttacacacatgagcatggacaccacgttgctgaaaacatgctttgggactgccactgaattt

SEQ ID NO: 393783 - DNA, 100 bp, Homo sapiens
aaagacgttgaactctcagtggtcctacctggggatattatcaaatctactactgttcatggcagatgtcatcacaatggatcccaaagacaattggtca

SEQ ID NO: 393784 - DNA, 101 bp, Homo sapiens
gcatataagccaggcatgtctcccgaggagtgcaggcgcttcaccacagacgacatccacgacagcgatggcagttccagcagcagccaccagagcctcaa

SEQ ID NO: 393785 - DNA, 82 bp, Homo sapiens
gcgtgtctaggtgagtcgcggtgggtcctcgcttgcagttcagcgaccacggggaaaccctgtggaaccacagcagcagctt

SEQ ID NO: 393786 - DNA, 50 bp, Homo sapiens
cggggcaagatggaggcgctgattttggacctgaaggagaagaaggagaa

SEQ ID NO: 393787 - DNA, 51 bp, Homo sapiens
tcaggacttgagtaacagcaacatgaacagtaaatgtcctgagggaacaaa

SEQ ID NO: 393788 - DNA, 100 bp, Homo sapiens
caaatatcataaactgaagtttgggacagacctgaaccagggggagaagaaagcagatgtgtcagaacaagtatggctgtgacccgatccaaagacgctc

SEQ ID NO: 393789 - DNA, 82 bp, Homo sapiens
caggcggcacgatgccgaggaaacagtgaccctgagcgaagccaagccgggcggcagggtgtccggtggagagctgtttgac

SEQ ID NO: 393790 - DNA, 100 bp, Homo sapiens
cttttaccatcttattaattcactctggttgtccaagcaaacacagtggatgaacgtactaactttcttgtggaagaatactctacatccggtcgtctgg

SEQ ID NO: 393791 - DNA, 82 bp, Homo sapiens
tcccctccagtccgctccgggcagggtgctttcttctgcgacctggtactcatctacctcatcaaaaagagagagttttacc

SEQ ID NO: 393792 - DNA, 87 bp, Homo sapiens
gccgctgccccagggctgcggggacggacaggaagatgtcacccaagcgcatagctaaaagaaggtcccccccagcagatgccatcc

SEQ ID NO: 393793 - DNA, 75 bp, Homo sapiens
gctgataattatggcattagccatcctggtattcctggagtggagagccactctttttgacctgccctacatcag

SEQ ID NO: 393794 - DNA, 100 bp, Homo sapiens
ccttaaatatgcatgagtcttctcaacttgaaggtcatttaaccaacctcagctttacaaaccctgaatttataactgaaaccttctgataacttaagag

SEQ ID NO: 393795 - DNA, 88 bp, Homo sapiens
cctcgccagcagccgtccggagccagccaacgagcgctctgctgtgtgcgtgcaccagctgcctccaggccaactacacgtgtgagac

SEQ ID NO: 393796 - DNA, 114 bp, Homo sapiens
tctcccgaggagtgcaggcgcttcaccacagacggtggtttgggaacattccatgcccttctaaatacagctgtacatgtagtcatgtattcctactatggactttctgcattg

SEQ ID NO: 393797 - DNA, 74 bp, Homo sapiens
aaatcgggctgaagcgactgagtccgcgatggagctaaaccatttacacagctggtgaaagaaatgcagcttca

SEQ ID NO: 393798 - DNA, 104 bp, Homo sapiens
gctaaacagagaatacaagaggattatcttagaattttaagatacttcaggtgcactggtggaccaaggtgtctttgaggagctagcacgagactacgtcccac

SEQ ID NO: 393799 - DNA, 100 bp, Homo sapiens
tgcttttcgcaagaacaagactctcggctatggagtccccatgttgaaggtagaagatagcaccatgccgattcgtcgaactgtgaattctacccgggaa

SEQ ID NO: 393800 - DNA, 98 bp, Homo sapiens
ctgattcgagctggcagagctgggccatggaaccggtagagacctggacccccggaaaggtagagtacagagagatggatgaaagcttggccaacctc

SEQ ID NO: 393801 - DNA, 76 bp, Homo sapiens
agcctacagacttccagatggaatttcgtttccctctcaggactttgagcaggtggacagtagagcagaatccatt

SEQ ID NO: 393802 - DNA, 74 bp, Homo sapiens
atgaaattgtgcagcctggtcggcccatcctcatgggttctgtagccgttggatctggactgtcctggcatcga

SEQ ID NO: 393803 - DNA, 100 bp, Homo sapiens
gaagctgggctcacgtgggagctcagtgccctcctgctacagatctgtctcttccttacaatggtacaggtttgcagattccgccagcagcacagcaagc

SEQ ID NO: 393804 - DNA, 100 bp, Homo sapiens
ctggattatggcttccgtgggcaccatctatgtcttcttcttccatgagcggccatttatgccagtgttcttcctggagagttgatgagggggtacatga

SEQ ID NO: 393805 - DNA, 75 bp, Homo sapiens
cgcccccccttccacgagctcgggagcccacaggctgccatgtttcaggtggcacgcactacccttcttcctggc

SEQ ID NO: 393806 - DNA, 75 bp, Homo sapiens
agctaggcatcaagtacatcgggatgaggaatgagcaagcggagctagagttaatgccaaagacagcaaatggtt

SEQ ID NO: 393807 - DNA, 100 bp, Homo sapiens
tagaaaccaaaagagcccgcctgctctatgagagcagaaagaggggaatgttggaaaactgcattcttcttagcaaaccagtccagctacgggggcccag

SEQ ID NO: 393808 - DNA, 100 bp, Homo sapiens
gccgcgcgtgcgccagaaatccaatgacttgtcagccagagtaacggctgttgtcaggtcttcagggtctcgagggtcttgctctgtcacctaggctgga

SEQ ID NO: 393809 - DNA, 100 bp, Homo sapiens
catcgtgatcccggcgacatactacctctggccccgagatcagaatgccgtttccatagcaaggcgtgtacaagatccattagctgagctagtgaaaatt

SEQ ID NO: 393810 - DNA, 82 bp, Homo sapiens
tagagcacaggctgctttgtttggatcctacagagatgcactgagatacaaacctatgcagcagcttttttatgagaattac

SEQ ID NO: 393811 - DNA, 98 bp, Homo sapiens
gacttcctccaagccaaggccaaatccaagactttggacttcattgatgtactcctgctgagcaagagaaacttgcccaggccaaagaagagaacgtg

SEQ ID NO: 393812 - DNA, 75 bp, Homo sapiens
ctcgggagtggtgaaacgcctgtacacgttggatgggaaacagcgaacacttgccaagtatttcaatccttgcta

SEQ ID NO: 393813 - DNA, 50 bp, Homo sapiens
cggagagctgagcagtcaagatggccctggccaacgtcaacattgggagc

SEQ ID NO: 393814 - DNA, 100 bp, Homo sapiens
tggagagcggggtggatgtgaactcccaaaatgaggtcaacggctgttgctgttgctgatgcaaagaagtctctagaactcaatccaaataattccactg

SEQ ID NO: 393815 - DNA, 75 bp, Homo sapiens
cagaaagtgacttcctggccttcccttctttactgatcaggttcaaaatcaaaggaagcccagaagggaggtcat

SEQ ID NO: 393816 - DNA, 82 bp, Homo sapiens
caggacttgctttttctgctctgagccggacgccggaatggagtttgaggaagaggtcagcccaaggccaaccccactgtca

SEQ ID NO: 393817 - DNA, 100 bp, Homo sapiens
gctggataaatattccgaggacctgaaggacgcgcaggagaagctggagctcacggagaagaaggcctccgacttcgtgccctcgtgaggctggcatgca

SEQ ID NO: 393818 - DNA, 51 bp, Homo sapiens
gactgaccgctgccgcccagcacgtccagcctaatgcatggaaagctaaca

SEQ ID NO: 393819 - DNA, 83 bp, Homo sapiens
gacatctgctgccggaaggggtcccgaagccccctgcaggaactctacaacccaatccaggcaaaggaagcgtccagaatctg

SEQ ID NO: 393820 - DNA, 74 bp, Homo sapiens
agggagagagtggccgattgcatcactatcagtcaaataattggagtctggaagatgtgaccgcaagtgataaa

SEQ ID NO: 393821 - DNA, 90 bp, Homo sapiens
atccagcctgcggagcctgtggggcaggttgtctgcattcaaaagagcattctattaaagctaccttaatttggcgcttatttttcttaa

SEQ ID NO: 393822 - DNA, 98 bp, Homo sapiens
ccatggccatgtccgtgagcgccgaggacgacgactatgaatcggagccggaccaggtcgcaatggaagaagagatcgccgcgctggtcattgacaat

SEQ ID NO: 393823 - DNA, 75 bp, Homo sapiens
gtacctgcagaaggtctctggagacatcttcagcagtcaccgagacttggagccagaatctgagcctcagctgga

SEQ ID NO: 393824 - DNA, 75 bp, Homo sapiens
gaggagttgtacggcctggcactgcgcttcttcaaagcagagagagatcatcattgcctgaatttagctttgtga

SEQ ID NO: 393825 - DNA, 101 bp, Homo sapiens
ctctccggcccggtttccctcggcgtgctactgtgcgctcgatccagcaccatggggaagcgggacaatcgggtggtaaatggttgcagttttgtgatgag

SEQ ID NO: 393826 - DNA, 74 bp, Homo sapiens
cttcatcaaaaatagtgatagctttgataaaattctgcttggtcagaatcgtgatggcattgtgttcagcactg

SEQ ID NO: 393827 - DNA, 96 bp, Homo sapiens
aataaggaattgcagtgtgattttctttccccctttaacttagaggaacgaggattatacagaaatttgaacaggatgaagttaaaggaagtagat

SEQ ID NO: 393828 - DNA, 100 bp, Homo sapiens
agcagcatcaggtcaccggcatcgacgacgccttcgacgagctgcagcctatgctcagctgcagccacaccagctcctcccacagccatcctcaaagcac

SEQ ID NO: 393829 - DNA, 100 bp, Homo sapiens
attcgatttattggaggcctacttgcagcatattacctatcaggagaggagactacaattatttgggacgcacatactggtgaagccaagcaacagtttc

SEQ ID NO: 393830 - DNA, 100 bp, Homo sapiens
gctgccgtacgtggccctcgatgtgctctgcgtgttgctgggtgctggagaatctggtaaaagcaccattgtgaagcagatgaggatcctgcatgttaat

SEQ ID NO: 393831 - DNA, 90 bp, Homo sapiens
gtgaagcagttgagaaagaatttgagcctctgctgaattggatgaaagataaagcccttaaggacaagaccctgtacacgtatcctgaaa

SEQ ID NO: 393832 - DNA, 96 bp, Homo sapiens
agcaagaacagagagagaggtggacagatctgagagatactgagacaagagaacaatgccctggacatggctccagagatccacatgacaggccca

SEQ ID NO: 393833 - DNA, 100 bp, Homo sapiens
aaagaactcaagaaaatcttcgaagacttttcaacttgggaagatccccatgaaaaagataagagcacgaactgctttggagataatgatcctattgatg

SEQ ID NO: 393834 - DNA, 76 bp, Homo sapiens
cagaagaggaggatctcccacctttccaagcaaggccaggaggtgcgtgggactcatgaactcaccaatcccggga

SEQ ID NO: 393835 - DNA, 83 bp, Homo sapiens
ctcacttgcatgtatttggaacaaaaaaaggagatgcctggcagccccgctctctgcatgagaaagatcagtctaaagaaaag

SEQ ID NO: 393836 - DNA, 75 bp, Homo sapiens
gctttcctaccagaccctgaaattcacgcatcaggcgcgggaagcggctgtggaaaatctctgttctcacaaagt

SEQ ID NO: 393837 - DNA, 75 bp, Homo sapiens
aatcatgacttcacccctctggagcaggttcaggagaagtggcacctggtggaggacctgtcgcgactgctgccg

SEQ ID NO: 393838 - DNA, 100 bp, Homo sapiens
aggaggaggaggaggaggaagaggaggaggaggaagagcagccgcaggcagcacagcctcccaccctgcccgtggaggagaagaagaagattccagatcc

SEQ ID NO: 393839 - DNA, 100 bp, Homo sapiens
gcgtaatgttattgaagctgtttatagtagactgaatccacatagagaaagtgatggggatcttatggttggtgatgaggcaagtgaattacgatcaatg

SEQ ID NO: 393840 - DNA, 100 bp, Homo sapiens
aaccctcttgtcctctttgaagcagaaattgaaaagtactgcccagagaattttgtagacatcaaggggctgcttgctctcggtgactacatgaatgtcc

SEQ ID NO: 393841 - DNA, 98 bp, Homo sapiens
ccctatcctatccgcaaacaaaccacgaagctgccctgagacgctcactcacgctgtggggatgtcagagagccccatcggacccaaatccacgatgc

SEQ ID NO: 393842 - DNA, 90 bp, Homo sapiens
ctggaaaagaccctcttcagacttgaacaaggggcactatgaacgaagaggagcagtttgtaaacattgatttgaatgatgacaacattt

SEQ ID NO: 393843 - DNA, 90 bp, Homo sapiens
gaaacactggagatgttgctgttgaggtgcccttgctcgtgtgaatgaacagaggccagagaattgcagaaacccacctgtaatatgccc

SEQ ID NO: 393844 - DNA, 100 bp, Homo sapiens
gagatttccaaaggttgtattttccttctggttggagcctctcatccacattgtggtctctccaggtgacactggatgggatgtcttcagcctcgattat

SEQ ID NO: 393845 - DNA, 100 bp, Homo sapiens
gtcagatccttgagtgataaaggagtagaggatgggaaactattgtgggaacaagagctatacaataactttgtatataatagtcctagaggatattttc

SEQ ID NO: 393846 - DNA, 50 bp, Homo sapiens
tggcctggaggctatccagctttcccacagtcaaatcactcgcctctaca

SEQ ID NO: 393847 - DNA, 97 bp, Homo sapiens
gttggtgtgattagcttcgcagtctggaaagctttaggagttcacagttctctagtgatccctgaaaagttccagcatattttgcgagtactcaaca

SEQ ID NO: 393848 - DNA, 51 bp, Homo sapiens
cagcccccggccgcggcgggacccgagctcaactgagaagtcatttccttg

SEQ ID NO: 393849 - DNA, 75 bp, Homo sapiens
ggcctcgggaagagatgcgaggatgacaagacatggagattaagtagcttgcccaagatcacccagccagtaaag

SEQ ID NO: 393850 - DNA, 100 bp, Homo sapiens
aaaaggtgtcaagaagctcagaatggaatgtgcaagtaaagatgttctggtgaagaccctcagggctattgatgtgaaacttaactctgataattttcat

SEQ ID NO: 393851 - DNA, 100 bp, Homo sapiens
tggaattctaatttgaaccatgtttggattgaagccgcctctgtattacttaccagagctcccagctcctccagcagccgacaggaggcccgtcaagatg

SEQ ID NO: 393852 - DNA, 101 bp, Homo sapiens
tgctgaaggttactttgctgcttgcacaacagatacaactatgaatagttctttggctgttcttgccttagctgcatcttggacctcaagacaagtaggag

SEQ ID NO: 393853 - DNA, 110 bp, Homo sapiens
ctccgtcacaggcccccagcatccccggagagaagatagagccgccccacggccttcacaggagggggcaaggggagagccagttgcgcagagccctgcaaccagcagtc

SEQ ID NO: 393854 - DNA, 100 bp, Homo sapiens
aaagtggaagcgaagccgaaaaaggcagcagcgaaggatgaaaatttacaggaattcggaggaaaatatttcagtggtcattactaaaacgctcagagtc

SEQ ID NO: 393855 - DNA, 74 bp, Homo sapiens
cctgctcatcgcctactgcagggacggcaaaacagaacagaaaggcggagataaaaagaggggtgttaaaagac

SEQ ID NO: 393856 - DNA, 82 bp, Homo sapiens
ctgcttatggcggcgctggagagggggcgctgagctgttgggatggtcagtaggacagaaggtaacattgatgactcgctca

SEQ ID NO: 393857 - DNA, 87 bp, Homo sapiens
attttttgcctttgttgattaactggacaaattcaggcccacgaggactcggagaagctgcgggagatcgtactgcccatggaaaag

SEQ ID NO: 393858 - DNA, 100 bp, Homo sapiens
ggaccgcacgctcctcgcgcaaggagggtagagctcaagctccagaaacatgacaaggaggactttcctgcctcttggagatcagaggaggaaatggcag

SEQ ID NO: 393859 - DNA, 76 bp, Homo sapiens
ctgcctccaattatttttcatgctggatacagcttaaagaaggagaagcaacagtttcagcgccatctgacccgcc

SEQ ID NO: 393860 - DNA, 82 bp, Homo sapiens
cagaccctggagcctcagttggaagcagccgatccagcctgcggagcctgtggggcagataaactcaagccatggagggatt

SEQ ID NO: 393861 - DNA, 82 bp, Homo sapiens
caaggcccacctgagccgcgtctaccccgagcgtccggagtgcgtgatcagaatggtgtctggacggttctacttgtcctgc

SEQ ID NO: 393862 - DNA, 80 bp, Homo sapiens
gttggaagcagccgatccagcctgcggagcctgtggggcagaaaactgtggatttagttactccactctgccatgtcttt

SEQ ID NO: 393863 - DNA, 96 bp, Homo sapiens
ccagtacaacagccacaaggggtcttcctgtggccctcaaacaaaaaatcactgcattacatcagcagagtcaatgcatgtgttgatgtggtgctc

SEQ ID NO: 393864 - DNA, 95 bp, Homo sapiens
tcatattatagatggagtaaagccccgtgctgatcccattccaatatgtagcttctgtttggggactaaagaatcaaatcgtgaaaagaaaccag

SEQ ID NO: 393865 - DNA, 100 bp, Homo sapiens
cacccccggagcccccctcaacacggaccgcgcccgccgggcacacaagaatggtcactgctaccggctctctgaccagttccacgacatcctcattcga

SEQ ID NO: 393866 - DNA, 100 bp, Homo sapiens
cccctctgctgcaccacttcatgatgtccttcggccttctccgtgtgttctccattgtgatcccctttctctatgtcgggacactcattagcaagaactt

SEQ ID NO: 393867 - DNA, 74 bp, Homo sapiens
cgcagtggtcgcttcttctccttgggtcttactgaagtaacacaaagcttaaaaatggaaaatgaagagtttaa

SEQ ID NO: 393868 - DNA, 100 bp, Homo sapiens
ctgtccatgcttttcaatcatctggcaaaatctgaaggtggccttggaggaaactggtatgccatggacaactcaggggaacatgtcacgtggaggaaat

SEQ ID NO: 393869 - DNA, 83 bp, Homo sapiens
cccgcgcgcccggccggcccggagcaccgagctcgcggcacggtaggagaaagaagcttccggttctgaggtcctggaggtgc

SEQ ID NO: 393870 - DNA, 75 bp, Homo sapiens
cgacaagccgctggcagccgcggatctcaccgccgctcaggatgctgtgtgctgtggacccacctggggttcatg

SEQ ID NO: 393871 - DNA, 98 bp, Homo sapiens
cgtgccgcagatgcccaccggaatggagaaggaagaggagtcggtgaggaattttaaattggaacaagagcaagaaaaaaacaaaatcttgtcagaag

SEQ ID NO: 393872 - DNA, 75 bp, Homo sapiens
acttagactaccccaggaacccgcgccgcgagggctccttccctcaggccaagaataaggagacgggtgctttgg

SEQ ID NO: 393873 - DNA, 83 bp, Homo sapiens
cataccccgtaccaagccgagggcaactttggaggccccctggaaggctttaggatccaggttgtggttcaccttgaaactat

SEQ ID NO: 393874 - DNA, 90 bp, Homo sapiens
ctaaacttcgcctggtccaacttcaggtctggatattgagagcagcttgaagcagttggctgagcggcgtactgacatcttcggtgtaga

SEQ ID NO: 393875 - DNA, 75 bp, Homo sapiens
cgtctacaaggcgaggcggaaagatggatctctggaaacatggctacagaacatgttaatggaaatggtactgaa

SEQ ID NO: 393876 - DNA, 90 bp, Homo sapiens
gagatggaagccccttgctctgcaggaaagaccacagcaagattctttcattcgtctcctcctagcctgggggaccaggctcgaactgac

SEQ ID NO: 393877 - DNA, 90 bp, Homo sapiens
tcgggatggaaacctatggttatctgcagagggagtcatgctttcaaggacctcataaagatgtagcacttaagcctcaggaacgtgtgg

SEQ ID NO: 393878 - DNA, 50 bp, Homo sapiens
tgtgtacacagcatgccgccatggcaggtcagaagagatcaattctacag

SEQ ID NO: 393879 - DNA, 100 bp, Homo sapiens
cacccctccgcgctggcggtgtggacgcggaactcagcggagaaacgcgattgagatctgactgcagccatgagcagcaatgagtgcttcaagtgtggac

SEQ ID NO: 393880 - DNA, 101 bp, Homo sapiens
cggagggcgacgacgacgaagcgcagacgctatgtccagcaaaggctccgtggttctggcctacagtggcggcctggacacctcgtgcatcctcgtgtggc

SEQ ID NO: 393881 - DNA, 80 bp, Homo sapiens
atcactcccagctgcgcaaagcttgcgaggtggcgttagatgaaattgacagttcttcaatgtcagatgatgatagaaaa

SEQ ID NO: 393882 - DNA, 82 bp, Homo sapiens
tgcctgctccgccccagacctgtcggcgaaagggttttaaaatcaaagatgggaaaatcggagaaaattgcccttccccatg

SEQ ID NO: 393883 - DNA, 100 bp, Homo sapiens
cctgctcctgcctcccccgtcccaccactgaggctgttgggccaggccagtcatgctagaacgaacttgctactaccagcaccatgccctaccaatatcc

SEQ ID NO: 393884 - DNA, 100 bp, Homo sapiens
ggaattagaaggtgacgaggagggagaagacgaggatgatgcggaaattaaccccaagatgctggacgagaaccaccacctgatccagtgcatcctggag

SEQ ID NO: 393885 - DNA, 75 bp, Homo sapiens
ctttctggcttttgaaaggctccttcttcagattagcctgaggcctgctcagtcgttcctaatgaataaaaatca

SEQ ID NO: 393886 - DNA, 96 bp, Homo sapiens
tgacttccataagcagcagccactgttcgtctctggaggagatgactataagattaaggtttgaattcccagagcagttaccacttgatgaatttt

SEQ ID NO: 393887 - DNA, 73 bp, Homo sapiens
tcgaaagcatggcgtcggtggtgttggcgctgaggacccggacagccggctgtggaaaatctctgttctcaca

SEQ ID NO: 393888 - DNA, 100 bp, Homo sapiens
ccgctcctaagcctgcacagccgcggcggcagcagcagtgagaggtgaacttcacggtagaccagatccgcgccatcatggacaagaaggccaacatccg

SEQ ID NO: 393889 - DNA, 97 bp, Homo sapiens
ggccgaagctggccgcctgcggcatcgtcctcagcgcctggggagtgatcattgagaaagatcagtctaaagaaaaggagaagaaagtgaaaaaaac

SEQ ID NO: 393890 - DNA, 101 bp, Homo sapiens
cggaacgcaggagacacaagaagcggatccaggtgacagagttagtccttgataattgcctgtgtgtcaatggggaaattgaaggcctgaatgatactttc

SEQ ID NO: 393891 - DNA, 90 bp, Homo sapiens
aattcagaagggaaaagtgaagtctcacattatggtgtttcactgcctgaatgaaatcctagatctctgtcacagtttttgttcgctggt

SEQ ID NO: 393892 - DNA, 101 bp, Homo sapiens
cagacagaggtgtgctgacgacctgctacaacagaactctcaaaaatctatggccctgtgttcactctgtattttggcctggaacgcatggtggtgctgca

SEQ ID NO: 393893 - DNA, 97 bp, Homo sapiens
gaggaggatttcagatctagccagggtgaacgcccgactgcaagctgttgcagaggaaagtggtcgcttatggtcagaggagcagcctgctcaccct

SEQ ID NO: 393894 - DNA, 101 bp, Homo sapiens
gctggggcgcccactgggctcgggcggcagcttcgcggagaggcagacatctggtccctgggcataacagctattgaacttgcaagaggggaaccacctca

SEQ ID NO: 393895 - DNA, 94 bp, Homo sapiens
gttcggccaagggaccaaggtggaaatcaaacgtcagcccaaggccaaccccactgtcactctgttcccgccctcctctgaggagctccaagcc

SEQ ID NO: 393896 - DNA, 50 bp, Homo sapiens
gacagagatgagtttgcagtttggacccatcaacttgtgccagtacaggg

SEQ ID NO: 393897 - DNA, 100 bp, Homo sapiens
gtctcaagcactgtttgcaaaggttgcagcaaccaaaagccagtattccactgaactgaagaaactctactgccaaattgcaaagacatgccccatccag

SEQ ID NO: 393898 - DNA, 75 bp, Homo sapiens
ctgctttcaggaacattgctgtggattcccagatgaagaaaacctgcttgatatcacacagtcaggagtcaactg

SEQ ID NO: 393899 - DNA, 97 bp, Homo sapiens
caccgatcccaagttccagctagagaaggtgggcggcagcgccagcccggcgccccctcccagctcccagcgttttccaaagaaattagaccatttt

SEQ ID NO: 393900 - DNA, 97 bp, Homo sapiens
caagaggcaaaggggaggttacgcagcaaaccatccagaaggtgctggagaatctggtaaaagcaccattgtgaagcagatgaggatcctgcatgtt

SEQ ID NO: 393901 - DNA, 90 bp, Homo sapiens
gagaaatgttcatggtatcaattttgtcagtcctgttcgaaaccaagatcaggatcctcatgaccagccaaagagaagaagaattaggaa

SEQ ID NO: 393902 - DNA, 100 bp, Homo sapiens
aaaatgaaaggagagcaagaatctcatagtgacagccccaatgctgttcatgaggtggagaagtggctgccccggctgcatgctcttgtcgtaggacctg

SEQ ID NO: 393903 - DNA, 98 bp, Homo sapiens
gcacctgtgcacattgattcagaagccataagtaaggttcgtgatcctcgggccaattttgatcagtccctacgtgtactgaaacatgccaagaaggt

SEQ ID NO: 393904 - DNA, 100 bp, Homo sapiens
ccttttgggcagcttttccggcctgacaacttcatctttgttgtccaaccaaaatctagtactttgctattcaaaagtgtctggggaccagcagcatcag

SEQ ID NO: 393905 - DNA, 83 bp, Homo sapiens
ctaacattagaacacttgaagtattacatgaaacctttcctaaacatacatttctgatgaacggcttaattcaaggagtaaag

SEQ ID NO: 393906 - DNA, 83 bp, Homo sapiens
aacatattcatgtcaaagctttttccaaagatcaggttacaggaggttccagtggcatcgggaagtgcattgctatcgagtgc

SEQ ID NO: 393907 - DNA, 50 bp, Homo sapiens
cagcctccgcggctccggggagaagatttctcgaatgctggcagccaaaa

SEQ ID NO: 393908 - DNA, 100 bp, Homo sapiens
aagcattgcattgattgtcttatatttcaagttaaggtccaaaaaaactccagctgtgaaagcaacataaatgaatgtgacagtgatgataacatgggtg

SEQ ID NO: 393909 - DNA, 90 bp, Homo sapiens
cctgagtgactacattcgcctcctggccatagtccgcatgaggagcgggaaggcctcctgcaccctggagaccgtgtgggaagacaagca

SEQ ID NO: 393910 - DNA, 153 bp, Homo sapiens
gttgttgcaacttttttcgaaagctgggtttcccgggagatcccaggcggtgacagagtggagccatggctagaggtcggcttcttcaagcggaaccggccacccctggaagaagatgatgaagagggggagtgatggtgcagcctacactat

SEQ ID NO: 393911 - DNA, 80 bp, Homo sapiens
aggagatgcgtgataccaacggctttcttctagtcaagatgagtgataaaccagacttgtcggaagtggagaagtttgac

SEQ ID NO: 393912 - DNA, 100 bp, Homo sapiens
cgcagtttcagcagagccgctgcagccatggccccaatcaagctagccacagtgcagcctggccagaatttccacatgttcacaaaggaagaacttgaag

SEQ ID NO: 393913 - DNA, 101 bp, Homo sapiens
gagaagcctgaaaagtcgcagcgagctggagccgccggaggttgttggtgtagcccaggccatcaacaagaaatcaggaaacggtgggacatttactgaaa

SEQ ID NO: 393914 - DNA, 100 bp, Homo sapiens
gacgatgatgatgatgctctgtccgactggaatttgacaaaagcggcgccaggaaattgaacaaaaacttgaagttcaggcagaagaagagagaaagcag

SEQ ID NO: 393915 - DNA, 50 bp, Homo sapiens
ctcatcacccggctgctggagggactccagaagacctttccagattcgtg

SEQ ID NO: 393916 - DNA, 90 bp, Homo sapiens
gcctcctgttccgcttctcagaggacgccttcaacaccaccttcatctccaccatcggaatctagaaaactgtatctgaagttgttccta

SEQ ID NO: 393917 - DNA, 75 bp, Homo sapiens
gtgcacgttcagcaagcaaatcagcagctgtcaagggcagcagattatcaggaatcactggagaggcagttaaaa

SEQ ID NO: 393918 - DNA, 75 bp, Homo sapiens
tgtctcggcagcgcccgcggagacgtgaagaggacttggatgttgtgggtgatggtatgcagtgtcctccttcac

SEQ ID NO: 393919 - DNA, 83 bp, Homo sapiens
ctggagagcttcatcaaaaatagtgatagctttgataaatgctgagatgaatcgtcacctgtgtgtttggctttttagacatc

SEQ ID NO: 393920 - DNA, 100 bp, Homo sapiens
aaagctatggacaacgtgacggtccggcagggggagagcgccaccctcagatgatgtgatgccagccacttactgtgaaattgatttagataaagaaaag

SEQ ID NO: 393921 - DNA, 94 bp, Homo sapiens
ctcaatatctgtcttcggtggactccttcggcagtccacccaccgccgccgcctcccaggtcgcaatggaagaagagatcgccgcgctggtcat

SEQ ID NO: 393922 - DNA, 82 bp, Homo sapiens
agctcaccgacagtgccctgagggccttcgagagctaccgcgccagacagatctgactgcagccatgagcagcaatgagtgc

SEQ ID NO: 393923 - DNA, 100 bp, Homo sapiens
cgtcagcggctgaccactcggaggaggagaagaaggagctgaaggccccccgggcccggaccagctcgggttcatgacgctctcgatattcctgtgcaga

SEQ ID NO: 393924 - DNA, 90 bp, Homo sapiens
ctctagcagacaagatcagatccacaggtcacagaattttccacactccttgacagaggtgcttaacccttatccatcagcattctcaga

SEQ ID NO: 393925 - DNA, 89 bp, Homo sapiens
aaacccttccagctcgatctgctcttcgtctgcttcttcctcttcagtcaagtttcagctcctggcatcagctctattcaaatctggtt

SEQ ID NO: 393926 - DNA, 74 bp, Homo sapiens
atatcaagcccattcaaacagaggcatgggttgtatcagagtaagatggacggtagctttgattgtgattgtgg

SEQ ID NO: 393927 - DNA, 100 bp, Homo sapiens
gttgacatctgacgacgtgaaggagcagatttacaaactggccaagaagggccttactccttcacagatcgccagaagatcagctgccatgttacttgac

SEQ ID NO: 393928 - DNA, 96 bp, Homo sapiens
gccatgccttctctcaggagcagacagcacaagactttcctgccagaggcacagtccccagatctaaatcggaaggtagcacacagacatatgcca

SEQ ID NO: 393929 - DNA, 98 bp, Homo sapiens
ggagctcaggaaggaaggagcacccagaagcagggacagggagctggttggggaggaccagaaatcagaaaccagcctggacaccaagtctgtgtcag

SEQ ID NO: 393930 - DNA, 100 bp, Homo sapiens
atcttacagctaacatgttgtacctggaaaacaatgcccagactcaatttagtgaggaaactctgatgaggaagaaagtgcttcagaatctgaactttgg

SEQ ID NO: 393931 - DNA, 83 bp, Homo sapiens
ccgcgcgggcggacggcggaggcgcctcccaggaatgaaaggaattacccagccttctgcttttatacctacagctgaaagta

SEQ ID NO: 393932 - DNA, 75 bp, Homo sapiens
aggacaaggagggggccgtggtttctgcgccctctgtcaaggaagctcttcgtgggcggtcttgactggagcacg

SEQ ID NO: 393933 - DNA, 90 bp, Homo sapiens
gtggtttttgattcaagtcctgttctacctactgccaattggaaaggaaattggagaattattacaaacaaggggtagagagtttggtgt

SEQ ID NO: 393934 - DNA, 101 bp, Homo sapiens
ctgcgcgcccgggacccggccagccgtggagacaggtacatgctggtcacctacgacgaacccccgtactgcatcaagatgtattagacacagaaatgatt

SEQ ID NO: 393935 - DNA, 100 bp, Homo sapiens
gcgagctgcggctgcgggtgcggcgggtcctggccgaaggaacaagatcactcaaggtgaaggataatctactaataccagcactttgaatgaaaatttg

SEQ ID NO: 393936 - DNA, 82 bp, Homo sapiens
tcagattttgaccaagcattttgtaagaagccccatgtgccactcccctgatctgcagcttcggtaggccggtggacctgga

SEQ ID NO: 393937 - DNA, 90 bp, Homo sapiens
ggccttagctatttacatcccattccctgaagatgattctaattcaacaaatcataacttggatttgcgcaagcaggtagcgccgctgct

SEQ ID NO: 393938 - DNA, 87 bp, Homo sapiens
aaaattggcaaagctgtggaagactccaagccctactgggaggcacggagggtggcgaggcagatgtggaaatggaggcccagaaag

SEQ ID NO: 393939 - DNA, 83 bp, Homo sapiens
cccgctcaccatctacggcatccggtccatgccagtgacggtaacccgcaccaccatcacaaccaccacgacgtcatcttcgg

SEQ ID NO: 393940 - DNA, 75 bp, Homo sapiens
atgcctatgtattccctggggatggcgcatcacacaccaaaggattcatactcatatgtaaggtccacagctcct

SEQ ID NO: 393941 - DNA, 75 bp, Homo sapiens
ggaggttcgcggctctaacggggctttctacaaggaagccagttgagggaagttctccatgaatgtacgtcacaa

SEQ ID NO: 393942 - DNA, 98 bp, Homo sapiens
cgagcacagagcctcgcctttgccgatccgccgcccgtccacacccgccgccagacctgcctagagctggaacgttacctccagagcgagccctgcta

SEQ ID NO: 393943 - DNA, 50 bp, Homo sapiens
gctggacgtttgccgtccactctgagaccttcctggagcagtcgaaaacc

SEQ ID NO: 393944 - DNA, 95 bp, Homo sapiens
aggaagccctttctcctcggcactgtattctttacctgcttcccaatcccactgatgaggatcagcccatggagctcttgtccctggcaaagcga

SEQ ID NO: 393945 - DNA, 98 bp, Homo sapiens
ggagtgcaagaagaaattcccacctgtcaaagaggaagttggtgaaccatctaaagaagagaaggctgtggccaagtatcttcgattcaactgtccaa

SEQ ID NO: 393946 - DNA, 98 bp, Homo sapiens
aagagatgtggggggattctcgacctgctaacagaactggaccttttcggtacatcaggaacgtctctatcaagaatacaatttcagcaaggctgagg

SEQ ID NO: 393947 - DNA, 98 bp, Homo sapiens
acgccatcaccgacctcatcagtgagctgtccctgctggaggagcgcttccgggtaagaatgattgatgttggctgatattggagtgctcattcacat

SEQ ID NO: 393948 - DNA, 80 bp, Homo sapiens
tggaagcagccgatccagcctgcggagcctgtggggcagacggcaaatggatacatcttgttttttcatattacatctac

SEQ ID NO: 393949 - DNA, 76 bp, Homo sapiens
ctgagggcacgtgtttgcggttcagccctttgatgaccgcagcagggtaatcaatgagcttattggaaatctggtt

SEQ ID NO: 393950 - DNA, 100 bp, Homo sapiens
aaaaatcccaaggtctgcaaagatggactcaccctgtcacccaggttggactgcactggcctcaacctcctgagttcaagtgatcgtcccacctcagcct

SEQ ID NO: 393951 - DNA, 83 bp, Homo sapiens
ggtggaaaagcagaaccttagcaaagaggagctgatagcggagctgcagaattcagaaggagctggcggacatcactttagac

SEQ ID NO: 393952 - DNA, 82 bp, Homo sapiens
ccggctgctggatggaggggattttgtcagcttgtcgtcaagagctccacgcaggagatcggtgaggagctgatcaacggag

SEQ ID NO: 393953 - DNA, 83 bp, Homo sapiens
ggccgctgtgtggttgcaacggagataaattcccggaaccgcgattcggcgtgtcagccgaggtgctcggtggagtcatggca

SEQ ID NO: 393954 - DNA, 87 bp, Homo sapiens
gtggtctggggcaacgcggaagacggttgatgatgaagcgccggccgtgtaaatgaagatcgggtgaggagcaggacgatgcccaag

SEQ ID NO: 393955 - DNA, 75 bp, Homo sapiens
atgggtctccgtacaccaaaaactcaggcttcgccacctgcgtgcaaagactttctgaagaccttttcccccgat

SEQ ID NO: 393956 - DNA, 80 bp, Homo sapiens
gtctgcctgtgtccctgaccatggctccctgcagtaccctttaacgatctgtggtcctccgtggaaagagagccactacc

SEQ ID NO: 393957 - DNA, 75 bp, Homo sapiens
aatgagtcgaaggtctcgtagagcttccttaacaacgactgaaagacctttcattcagaagctgtttcgtcctgt

SEQ ID NO: 393958 - DNA, 100 bp, Homo sapiens
tccgcagtgattgaagctttgataaatgaaatcttcctaagtatagtaataagaaacctgactcagaagcaagtgctttgaagaaaaaggtcaacaaggg

SEQ ID NO: 393959 - DNA, 100 bp, Homo sapiens
gaaccaaggagacgctcctggcactgcagaatcagcatgattcttcagaggctcttcaggttctcctctgtcattcggtcagccgtctcagtccatttgc

SEQ ID NO: 393960 - DNA, 100 bp, Homo sapiens
agtggccgtagcggcttgttggataagcctgactggctcatggagaaagcctacctaagaatgaagccgggacccggcagaatggctcctgtgaagaagg

SEQ ID NO: 393961 - DNA, 51 bp, Homo sapiens
cagtattctacgcgacttgaaacaggttcggctttccagtttggcagcagc

SEQ ID NO: 393962 - DNA, 100 bp, Homo sapiens
aactgcctcctgcatgcagcctcccttggcagcagcaacagcaaacagaattggacatggtaccaggaagagatggactggccagctacaatcattccca

SEQ ID NO: 393963 - DNA, 100 bp, Homo sapiens
cgtggcgtcccccatggacgacgggtttgtgagcctggactcgccctcctatgtcctgtacagagatcctgcatattttgatgaaaattggctaaacaga

SEQ ID NO: 393964 - DNA, 75 bp, Homo sapiens
cggcacgctccggggcatcatcaagagcatgaacaatgctaaagtagctgtgctaggggcctctggaggcatcgg

SEQ ID NO: 393965 - DNA, 87 bp, Homo sapiens
ggctatgaacccagaggtcgtggaggtggccgtggaggcagaggtggcatggggtcatcgtattgaggaagttcctgaacttccttt

SEQ ID NO: 393966 - DNA, 100 bp, Homo sapiens
atgcaaaccaatgagggagaagtatcggaagaaagcagttccaaggtgaactccagaaagccattgacttattcacagatgccatcaagctgaatcctcg

SEQ ID NO: 393967 - DNA, 100 bp, Homo sapiens
ggactacaactcgcccaccacgtccagcttcaccacgcggctgcacaactgcaggaacaccgtcacgctgctggaggagccattgagacccagagcagca

SEQ ID NO: 393968 - DNA, 90 bp, Homo sapiens
ctatcatggacagagagaaagaagctgaagtgttttatctgacttacacccctgaagatgtcgaagggaacgttcagctggaaactggag

SEQ ID NO: 393969 - DNA, 83 bp, Homo sapiens
atgtctcgctccgtggccttagctgtgctcgcgctactctctctttctggcctggaggctgatctttgctggaaaacagctgg

SEQ ID NO: 393970 - DNA, 75 bp, Homo sapiens
cttgaaacacaaatggtttttggcattgaagttgatatcgatgtggagcacggagggaaaagaagccgcctgacc

SEQ ID NO: 393971 - DNA, 82 bp, Homo sapiens
gcggccgagcgggcggcttcctggcctgggcgctccggtggcggcggaggtggtgatgatgtccagcaactctgtgaagcag

SEQ ID NO: 393972 - DNA, 50 bp, Homo sapiens
gggactcacaagaccgacgtcaagatgttccctgacatcgtggagttctg

SEQ ID NO: 393973 - DNA, 101 bp, Homo sapiens
tgtccaaggctctgtcctatgccctgcgccatggggccttgaagctggggcttcccatgggagctggtgtgctgggcatcaaggtgaagatcatgctgccc

SEQ ID NO: 393974 - DNA, 73 bp, Homo sapiens
gaattcgcgaagctgccaaagccttagacaacctcctgctcttcatggatgaagcagacgccttccttcggaa

SEQ ID NO: 393975 - DNA, 100 bp, Homo sapiens
gagtgcccgcggggctggagaaacgactctgcgccgccgctgcctccatcctgggcaaacctgcggacgtgaccaagaatatggcccaggtgaccaaagc

SEQ ID NO: 393976 - DNA, 74 bp, Homo sapiens
aaatcttgcccaagtatgtccaacaagttcaggcctcgggggacacccccaccactccaaagcaccccaaagac

SEQ ID NO: 393977 - DNA, 111 bp, Homo sapiens
cagaccctggagcctcagttggaagcagccgatccagcctgcggagcctgtggggcagatgcccccctcggaagcctggagaacgggacaggaccagaggaccacgttctc

SEQ ID NO: 393978 - DNA, 75 bp, Homo sapiens
ctgtgtgatttcttccaaaatacatggtgaagtaccatgcaagcatttcttaaaggtacatccatcagtactaaa

SEQ ID NO: 393979 - DNA, 89 bp, Homo sapiens
cggggccgcactgccctccaccgcgggttacacaacagccaatgcggagtctgacaatgagcgggactctgacaaagaaagtgaggacg

SEQ ID NO: 393980 - DNA, 100 bp, Homo sapiens
gagttcaagaagaacactccagaggccctggccaacgtcaacattgggagcctcatctgcaatgtaggggccggtggacctgctccagcagctggtgctg

SEQ ID NO: 393981 - DNA, 90 bp, Homo sapiens
ggttattgtcatccattgtggaagaggactggttcgttgtaaacccaacaacaaccaaaagctttgaaaagctgatgaagataaagcagc

SEQ ID NO: 393982 - DNA, 51 bp, Homo sapiens
ctcccgagtggctgggactacagatcacacaaaagttgggaagagaaggat

SEQ ID NO: 393983 - DNA, 75 bp, Homo sapiens
cgatgcttgaactgtgaaactgacactgtaatttatgatcgactggcagagacgtcaaaatacaaagaaattacc

SEQ ID NO: 393984 - DNA, 75 bp, Homo sapiens
ctcagtgacagtgacattcctgggagctctgaggaatcgccgcaggtgatatttgaatggtggtacttccataag

SEQ ID NO: 393985 - DNA, 80 bp, Homo sapiens
acaagttcggctttgagcttcctcaggggccagagatcctcagcaggagcctatggaagagatagaaaatttgaagaaac

SEQ ID NO: 393986 - DNA, 114 bp, Homo sapiens
atgaagctgagaccacatccatggtttctatgcccctctatgcagtcatgtatcctgtgtttaatgagtttttcagttatgggacaaaaatattatatcaaaacactgaagctt

SEQ ID NO: 393987 - DNA, 83 bp, Homo sapiens
gtccacatgtgggtactgcattcctaccggtgtgacagcacaggaagtcctggagaacctgaaggaccgctggtaccaggcgg

SEQ ID NO: 393988 - DNA, 100 bp, Homo sapiens
tattttttgatgaaatagatggattagctccagttcgctctagcagacaagatcagatccacagatttcttccattggctcctgaacctggttggatgga

SEQ ID NO: 393989 - DNA, 97 bp, Homo sapiens
ccatcttcctcttgctgccagtggtagcgctcgtctggcggagctgggctatccactctgttgcttggcatcatgaaggaaaacaatttatttgcag

SEQ ID NO: 393990 - DNA, 100 bp, Homo sapiens
ctttcttctcctcctacttctccacagagttctccaaggaaaggaagcacaagcctatgcagacgacaacagtttgctgttcatggagacatcagcaaag

SEQ ID NO: 393991 - DNA, 100 bp, Homo sapiens
atatttttggacctgaaacagaaattctggaacacctatatgcggatagacatgggtcgatttgaccttattggcctggaaggtcgtgtctctcgatatg

SEQ ID NO: 393992 - DNA, 74 bp, Homo sapiens
agcgcccagaggcgagccctggtggaggaagaggcagcacgctggctcttctcctgaacttcctcgcctgcctg

SEQ ID NO: 393993 - DNA, 100 bp, Homo sapiens
cgcctccttcccagccgcgcggcttcctccagacctctcggcgcgggtcagccctgacaaaggtcagctagccccttgaggacatcagctttggcctcag

SEQ ID NO: 393994 - DNA, 98 bp, Homo sapiens
cgctgcctcgccgccacactttcctgggagcggcggccacggaggcaccatgaagaagtcttactcaggtcaatgagctgaaggagaaaggcaacaag

SEQ ID NO: 393995 - DNA, 100 bp, Homo sapiens
catgcccaaatcccggaaactccagcgtgtctccagccgtggactttccttatcccagttgattgtgcagaatacactgcctgtcgcttgtcttctattc

SEQ ID NO: 393996 - DNA, 100 bp, Homo sapiens
gacatggtaataaagatggaatctcactgatctctcccccagcgccattcttggtagatgctgtgaccagagtgtgaacatggctacgcctcttcattcc

SEQ ID NO: 393997 - DNA, 101 bp, Homo sapiens
aatacagaaccacagtttatcatcccttcctgaagaggatcacctagcccgggtagaagaggcaatcacccgtatgcttgtgtgtgccctgaaaactgcag

SEQ ID NO: 393998 - DNA, 75 bp, Homo sapiens
aaggaaatcccttcgaaagggtactatccttttctgggggatcctaggcagaagcgatggcaggacaaaggcaga

SEQ ID NO: 393999 - DNA, 83 bp, Homo sapiens
agaatttcctgcgctgttccacctcattcaacttcaggtttggtgcacctcgatttggaggaagtagggcagggcccttatct

SEQ ID NO: 394000 - DNA, 118 bp, Homo sapiens
agactttgttgtggtacagtttaaagatatggactccagttatgcaaaaagagccctaccacttatgtcttggatgaagatgaacctcgattccttgaagaagttgattacagtgcag

SEQ ID NO: 394001 - DNA, 96 bp, Homo sapiens
ggccggacttttgctaactgcggcgggcgagacgttctcaggagctctgccagtgccggccgggagaaggcaattgctcctgctgtaaggagtgca

SEQ ID NO: 394002 - DNA, 98 bp, Homo sapiens
ctcacctgaaacagttgacagtgtgattatgggcaatgtcctgcagggaactgctcgcagaaagaagaaggtggttcatagaacagccacagcagatg

SEQ ID NO: 394003 - DNA, 101 bp, Homo sapiens
gaaagagacagtggacagattgctcaaaggatatgacattcgcttgcggccggacttcggagacatccccccttgcctggactctgagctgaccgaattcc

SEQ ID NO: 394004 - DNA, 100 bp, Homo sapiens
tatgatgaaaggaaaaagaatgccaaaatcagcagtctcctggaggagcagttccagcagggcaagcttcttgctgactgcctgcatccacgggtctgcg

SEQ ID NO: 394005 - DNA, 75 bp, Homo sapiens
accatggaggcttattctagggttggacgtgataagtatgagcctgcagctgtttcagaacaaggtgataaaaag

SEQ ID NO: 394006 - DNA, 75 bp, Homo sapiens
cgcagtggtcgcttcttctccttgaaaggtggtggcgccctcctgcactcagtcaaggccaagacccaaccagcc

SEQ ID NO: 394007 - DNA, 75 bp, Homo sapiens
aacggccatctggaggctgtatggccgcagtttatctgcagggctgttgtttccagcaagacccaaagctagaaa

SEQ ID NO: 394008 - DNA, 117 bp, Homo sapiens
ctcatctttggcaggaaggcgaggcttccgcccggcacagggggctgaaatggctttgcttatgatggatgaggacgaggacagtaagaaacacttcaattacaacaagattgtgga

SEQ ID NO: 394009 - DNA, 100 bp, Homo sapiens
tgtggcggcttcggcggctcaggttgtggtagaggcggaggctcaggcagcttgagaattaaacaaccaccatgtcgagcaaaaaggcaaagaccaagac

SEQ ID NO: 394010 - DNA, 139 bp, Homo sapiens
tctgagcttgatgctgtggagaaccagctcaagtgggcatcctgggagctccattccctaaggcactgtggaccgaggtgatgagttcacatacactggaagcggtggtaaaaatcttgctggtaacaaaagaattggt

SEQ ID NO: 394011 - DNA, 75 bp, Homo sapiens
ctcacccagtacgagcgtgagaaggcgctgcgcaggcaggcggaggagctttgggacatccggaagaaagcagcc

SEQ ID NO: 394012 - DNA, 97 bp, Homo sapiens
cagagtgctggcaaaaacaagaataaatttgttccatatcgtgactcagttctcacttggctgctcaaactagagcatggactaggctatatgccat

SEQ ID NO: 394013 - DNA, 96 bp, Homo sapiens
caattgttcagttgcaaaaagaaactggagccaccatcaagctgtctaagtccaaagatttttacccagggcagatgattctggaccagatgaagc

SEQ ID NO: 394014 - DNA, 75 bp, Homo sapiens
tacaagaggagcaacgaattcatgaggagcgggaaggcctcctgcaccctggagaccgtgtgggaagacaagcac

SEQ ID NO: 394015 - DNA, 100 bp, Homo sapiens
tggaaaagcagcaggagctacttaggcagcgtctggaacgtgaagctcgagaagctgcagaacttgaaggcttgtctggagcgggaaagactactgtgag

SEQ ID NO: 394016 - DNA, 75 bp, Homo sapiens
gccacatctcctccaatcgagcgtatgattttctgtacggtcgagtctatgctgtcttgtcaaagagagaaggtc

SEQ ID NO: 394017 - DNA, 83 bp, Homo sapiens
attcatctgaaattaaaaagggaaggataaccccatcacaggtgtcttcagtgccctgggtttgcctgtgacccaatgcccac

SEQ ID NO: 394018 - DNA, 50 bp, Homo sapiens
gctgctttctttaggacgaaagaacaaaatccagtctcatagcagaggag

SEQ ID NO: 394019 - DNA, 90 bp, Homo sapiens
gctcttacttgtcctgctcctgctgctcgaggacgctggagcccagcaaggtagaacagaagtcccaggagtcagtatcatttaaagatg

SEQ ID NO: 394020 - DNA, 100 bp, Homo sapiens
cagcgagccacgggagcgagccagaaatgcgtgtactgccggaagcggatgaagaaggtgtcaggtgcctgtatccagtgctcctacgagcactgctcca

SEQ ID NO: 394021 - DNA, 100 bp, Homo sapiens
ctccgtttagtctcctcctcggcgggagccctcgcgacgcgcccggcccggagcccccagcgcagcggccgcggtgatggatgtggacacactgtactag

SEQ ID NO: 394022 - DNA, 95 bp, Homo sapiens
aagaatgcaacaaagctgaatgaactcattcaggttggaatctccgccacctccctactctcggctgtctcctcgcgacgagtacaagccactgg

SEQ ID NO: 394023 - DNA, 50 bp, Homo sapiens
tgactaagatgtttaaagcagaagggccgcgatgggcctcttggaacatt

SEQ ID NO: 394024 - DNA, 80 bp, Homo sapiens
gtgcatgcgtcgtcggcctctgggcagcagtttgaagaaaacaggtctgaaacaaggtcttacccccagctgcttctgaa

SEQ ID NO: 394025 - DNA, 88 bp, Homo sapiens
cgctctttgaaagcgccccggaatgacctgtcgcctgccagctctggtatggagatggtccacgtcctcccaagatggcccgatacga

SEQ ID NO: 394026 - DNA, 100 bp, Homo sapiens
gtggctaaagtatcaactatcaacttttcttgatgctggttctgtgaattgagtccagattacatcctaccctgcagtcctggatggcgcctccgacttg

SEQ ID NO: 394027 - DNA, 101 bp, Homo sapiens
ggccggcgatatgatgatcctgaagtacagaaagacatgtcagaaatgtgaattccaggatgcctatgttctgttgagtgaaaagaaaatttctagtatcc

SEQ ID NO: 394028 - DNA, 100 bp, Homo sapiens
aaacatcaggaatttgataaccatatcaactcctatgatcatgcacacaagcaggtagaagatgacagattattgaggttgtcccaaaagaagttctgtg

SEQ ID NO: 394029 - DNA, 97 bp, Homo sapiens
aggatttagaggaccactagttggaccccatcctcgtgctggaggaacaggtgttgacttcaaaatcaaaactgtagagctaagaggaaagaaaatt

SEQ ID NO: 394030 - DNA, 73 bp, Homo sapiens
ctcgggcatcagcatctaccggctgctggacaaggataacaaagccattgacctttgccgattgtgttgggga

SEQ ID NO: 394031 - DNA, 98 bp, Homo sapiens
ctaactcctgccaggcagtgcccttcccggagcgtgccctcgccgctgaggactacgggcactacgaagagctgccaggggagcctggggagcacctc

SEQ ID NO: 394032 - DNA, 96 bp, Homo sapiens
agaggttccttcaggaggatcagcagccagacccggtccgtttggaatgcctgggatggtgccgccgcatgttcctcctcagatgctcaacattcc

SEQ ID NO: 394033 - DNA, 75 bp, Homo sapiens
ctcaatgagcacatgaccagcttagcttctgtcctaaaggtttaaacttacacgaatcgctttctggaggaggag

SEQ ID NO: 394034 - DNA, 75 bp, Homo sapiens
ccatcgcctcacggacgtctcagaacacgctggacagcgataagcagcgtccgtctccaagagagtatgaagaga

SEQ ID NO: 394035 - DNA, 74 bp, Homo sapiens
ccaaggtcaaaggctatgacaacctctttgctatggcaacagcattattgagaaaagcccttacagaagagtgt

SEQ ID NO: 394036 - DNA, 100 bp, Homo sapiens
ctaccatagttgctattgatgaagaaagtcggaatgttggacagtgtcacatccctgatccaagcagccaaaaatttaatgaatgctgtagtgcaaacag

SEQ ID NO: 394037 - DNA, 100 bp, Homo sapiens
gtgggacagggacaagcatatctaagaggctgaacatgaatccacagatcagagctcgtccgcatggtgctgaatggctgaggaccttcccagtctcccc

SEQ ID NO: 394038 - DNA, 89 bp, Homo sapiens
ggggagagcggccgccgccgctgccgcttccaccacagatggcccactgcgtgaccttggttcagctgtccatttcctgtgaccatctc

SEQ ID NO: 394039 - DNA, 100 bp, Homo sapiens
tgatatgctaagaaagaatcttgtcactttagccactgctactacaggagaacgcttgttcccactcatccaaacaatgcattcaaatctggctgggaag

SEQ ID NO: 394040 - DNA, 75 bp, Homo sapiens
cctttccaagccaatgcccaagacattataaacattcaagatggaaaaggtgatgtaaccattacaaatgatggt

SEQ ID NO: 394041 - DNA, 90 bp, Homo sapiens
cggagctgggtctggagacgccgtggcagcctgaacggagtgtgcgacggattgggaggatatgtgatggcgtccagtttggagctggga

SEQ ID NO: 394042 - DNA, 100 bp, Homo sapiens
ctagcgccgctgggcctgcaggtctctgtcgagcagcggacgccggtctctgttccgcaggatgaacaactctgctcatggtgattacatgcaaaataac

SEQ ID NO: 394043 - DNA, 100 bp, Homo sapiens
gacttcctcagtgacaccccagaggccctcatcaacgcgggagacttccacggcctgcaggtaagaacaagagagttggaaagcagttagcctcacagaa

SEQ ID NO: 394044 - DNA, 50 bp, Homo sapiens
ctgcctggacccctactattgcaacaagcgctgctttacatttatggacc

SEQ ID NO: 394045 - DNA, 50 bp, Homo sapiens
ctccacttagtgagcggaagaatgggaatatccccggctcggctgtgctg

SEQ ID NO: 394046 - DNA, 101 bp, Homo sapiens
ggacccggcgccgaggcggccacccgagacgcggcgcgcacgctccggcctgcgggcgggcaggtccggacgcgctgggccctggtcccttcggccgcaaa

SEQ ID NO: 394047 - DNA, 74 bp, Homo sapiens
aaagcattgctggtatttcgaaggactctatccaacctattatatgatggctgcagctcctccaagttactgtt

SEQ ID NO: 394048 - DNA, 83 bp, Homo sapiens
cttcgtgcaactctccgggcggccgcacctgccaggttatgaagttcatggaatggaaaaaataccagaagatggaccagcac

SEQ ID NO: 394049 - DNA, 51 bp, Homo sapiens
gaaaaagggccagtgtctcccagatgtccagaaggcttcttgggggaatat

SEQ ID NO: 394050 - DNA, 86 bp, Homo sapiens
aggagttcggcgccgcttctgtggccacggcaggttaaaaagatcaagtggcatgagcagccttttggggaaaattggtgccaaga

SEQ ID NO: 394051 - DNA, 73 bp, Homo sapiens
cggcccggagcccccagcgcagcggccgcggaatgggaaaaggacagcacaggatgccctccaaggatgagct

SEQ ID NO: 394052 - DNA, 75 bp, Homo sapiens
aagcagtgcgccgtggccaagaactccgcggcctaccactccaagacactttttcaaaaatggcaatggtatcag

SEQ ID NO: 394053 - DNA, 111 bp, Homo sapiens
ctgcagccccagtgaccttgaacgattccgctctgcggcgggtgtccctaaactagcagtttagggtgtcagacagctcagcagctcctcctcctatagtggggacatcag

SEQ ID NO: 394054 - DNA, 130 bp, Homo sapiens
ggacagagcggtcggtgacagcctcaagggcttcagcaccgcgcccatggcagagccagaccatgccatggacaatattaccaggcagaaccaattctacgatacccaagtcatcaaacaagaaaacgag

SEQ ID NO: 394055 - DNA, 97 bp, Homo sapiens
cagaggggtgcgcacaacaaccttatttcgtgctgtgaatccagagctcttcattaaacctcttccagaggagattggaaaacttgaagataaagtg

SEQ ID NO: 394056 - DNA, 83 bp, Homo sapiens
aaatactcgtttgcaaagaaaaagtcttatgatgtaatcagcgcgatttcacttcctgaatttcgatgaattctaagacatgg

SEQ ID NO: 394057 - DNA, 100 bp, Homo sapiens
accattgtgaaagaaggttgggttcagaagagggacctgatggccaaaagaaaggaagaaaatttttcctctcctaaaaatgccaaaaggccaagacaag

SEQ ID NO: 394058 - DNA, 80 bp, Homo sapiens
gtttgtggatcgctgtgatcgtcacttgtgccaaatctttggagtgttgatggagaagttacagtagctgaacagaagcc

SEQ ID NO: 394059 - DNA, 75 bp, Homo sapiens
gctggcagtatacaagcgaaggacgggagccgaagctcaagaacaagtgtcattcaaggatgtatgtgtggactt

SEQ ID NO: 394060 - DNA, 75 bp, Homo sapiens
agagggcgggagaactcactgaggatgaggtggaatcgtcccaagaagccaatgctgaggtgatgcgagagatga

SEQ ID NO: 394061 - DNA, 88 bp, Homo sapiens
gctaatgtagctcacacttttgtggttgatgtagctcaggtagcgctggtatatggtcaaatgaatgaaccacctggtgctcgtgccc

SEQ ID NO: 394062 - DNA, 83 bp, Homo sapiens
tctacagtgctcagtctttgagatatggccgcgtggaaagtgtcaaaattcttcccaagaggggatctgaaggaggagtggct

SEQ ID NO: 394063 - DNA, 95 bp, Homo sapiens
gtccgctacagtatgtcaatcgcttgccccagcacagacaatgcagatcttcgtgaagactctgactggtaagaccatcaccctcgaggttgagc

SEQ ID NO: 394064 - DNA, 85 bp, Homo sapiens
gagtggacagattgctttccgtgccaggacaaaaaggctctcaaaattagagagatgtgtaattgtccaccactgtctaatccag

SEQ ID NO: 394065 - DNA, 74 bp, Homo sapiens
ttgagaagagcagcaagagctttacctatctataccacatcagcttcaaaaaggtgataaaagaaaatgtggct

SEQ ID NO: 394066 - DNA, 89 bp, Homo sapiens
tcgccgctggagaggggctcggcgcccggcggggactgcaggtgctgttcctataatcagatgttcaagaggaacagcagcagaaatgg

SEQ ID NO: 394067 - DNA, 75 bp, Homo sapiens
ctcctgctcgtggagtttgcacataagtggaacaagaactggttggtcaaagaaaaagtgatgtatgaaaaagag

SEQ ID NO: 394068 - DNA, 88 bp, Homo sapiens
ctgaaggagctgatccagaaggagctcaccattggctcgtgggcctttggagtgacgctgtgggaactcatgactctgggccagactc

SEQ ID NO: 394069 - DNA, 82 bp, Homo sapiens
tgagtgcggatttctgctatgatgacaggtgacagattgactgggatcccctcgcacatcctcaacagctccccatcagacc

SEQ ID NO: 394070 - DNA, 49 bp, Homo sapiens
atatgtgcctagaatcatgtttgtagacaccgtgtcctcttgcctggga

SEQ ID NO: 394071 - DNA, 96 bp, Homo sapiens
attcgcagtggtcgcttcttctccttggtaatggaactgctggtccatctgaataaacgtataaaaagccgccccaaaatacaacttccagtagag

SEQ ID NO: 394072 - DNA, 106 bp, Homo sapiens
cggcgagtttccgatttaaagctgagctgcgaggaaaatggcggcgggagcaaacggggattcagcgtccgatcctttggaacagggactcacgtgaagcttccag

SEQ ID NO: 394073 - DNA, 100 bp, Homo sapiens
cagagtccattaacttccgacgcttcacgacagccagtgacgtctggatgttcgatggtacctgcggatgctgcaatgttaccggtgcaggcagtggttc

SEQ ID NO: 394074 - DNA, 59 bp, Homo sapiens
tgcaacaggaagacccaatggatagatacaagttggcctttaccagagtttgatccaag

SEQ ID NO: 394075 - DNA, 121 bp, Homo sapiens
ggagcaagccaagaagcctcaggaagctgtgtttgtcccagagtgtggcgaggatggctcctttacccaggccttgaaccggggcattgctgctgtcaaggaggatgcagtcgagatgctg

SEQ ID NO: 394076 - DNA, 99 bp, Homo sapiens
gccgcttcaacgtctactgcttccgaggctctacacagagaacagagggagctggttgctgtgctgagggagcctgagtgaggagaccgccagccccag

SEQ ID NO: 394077 - DNA, 78 bp, Homo sapiens
aatgacatccagcgacaaggactttagcctgcctagggtagttaaaagacgagtgaatgctctcaaaaacctgcaagt

SEQ ID NO: 394078 - DNA, 75 bp, Homo sapiens
cacagtcacatacagagatggccgagtggcacagctggagcagagtatgctcaggtaatcaaaatgttgggaaat

SEQ ID NO: 394079 - DNA, 82 bp, Homo sapiens
tgataattgggcctccaagagttatcaatactctggctgaccatcatcatcgtgggactgactttggtggaagtccttggtt

SEQ ID NO: 394080 - DNA, 100 bp, Homo sapiens
gaaaccatctctgagcccaagacctagtgtaataatgtcctttatatcagaggtgtggaagaagaggaagaagatggggaaatgagagaatagcatcttt

SEQ ID NO: 394081 - DNA, 75 bp, Homo sapiens
gcagcccgtgccgccgccgcctcctgggaagaacatccatgatagcagtcttctgtaaatcgaacttttcaagaa

SEQ ID NO: 394082 - DNA, 118 bp, Homo sapiens
caggaagtactagttccccatctgtgtcctactacaggaaaataattgaaggcactgaagttgtccagggccgttgctccagggagaactgcaaatatcttcatccacccccacattt

SEQ ID NO: 394083 - DNA, 100 bp, Homo sapiens
ttcaaggaaggaatgaaattggaagctatagacccattaaatctttctacaatatgtgtcgcaaccattagaaagctggcgcctactatccagcccaagg

SEQ ID NO: 394084 - DNA, 100 bp, Homo sapiens
ctccagttcctgcacatctaccacgccgtcaaggaccggcacaaggacgttctcaagtggggcgatgagccaacatcccatgcaccatcgtggagactgg

SEQ ID NO: 394085 - DNA, 50 bp, Homo sapiens
ctggcccgctatggcggggaggaggtggttattaacttggtgatgctttt

SEQ ID NO: 394086 - DNA, 107 bp, Homo sapiens
ggacagagacccaacagcttatgcattagctgaacatctttcagagttgtatccgcggagaaatacgaagacagcgttcctcagagtaatggagagctcacagtccg

SEQ ID NO: 394087 - DNA, 100 bp, Homo sapiens
cccaagcaaagaaacagcccactggaagcctccaccttggaatgtctttctctaatacacagaattctaggaaggaggctgttcttttagccaaaatgaa

SEQ ID NO: 394088 - DNA, 75 bp, Homo sapiens
gaacctgatttgagatcaattcttggagaacacaaagaagtgtgatggttgatgataattagaagcatgctttcc

SEQ ID NO: 394089 - DNA, 83 bp, Homo sapiens
cgtgtccgagggcaccaaggcggtcaccaagtacaccagctcgaaagcaattgtatgatggctatgatgaagagtatgactgt

SEQ ID NO: 394090 - DNA, 80 bp, Homo sapiens
gaccgggtctgagcgcggctgcccaggttgacctttctgcgggaggagctctttgttcaatgcctagccacctattccta

SEQ ID NO: 394091 - DNA, 98 bp, Homo sapiens
tatcatcataggtcgtcatgcttatggggatcaaatcatagaagaagatgctgctcttgtagaaataggacctcgttttgtcttaaatctcataaaga

SEQ ID NO: 394092 - DNA, 83 bp, Homo sapiens
attagcttcgcagtctggaaagctttaggagttcacagttttggtgccctggttgtcagatgttggaaagcagtaggacggaa

SEQ ID NO: 394093 - DNA, 100 bp, Homo sapiens
attggtgtaagacatcacaatcccattattcagagcgcgtatggagtggaaacgcttgtagggcttcaccaggtttctactttccaggtccactggtgtt

SEQ ID NO: 394094 - DNA, 100 bp, Homo sapiens
gctggctgcaaaagggctaagggatccatggggccgccagtgagctcctccgacagcgaggcccccgaggccaaccccgccgacggcagtgacgctgacg

SEQ ID NO: 394095 - DNA, 75 bp, Homo sapiens
cggccctcattcctgggctccaccttcaacctgcgtgtatgctgatggtagcatatgtttagatatccttcagaa

SEQ ID NO: 394096 - DNA, 75 bp, Homo sapiens
gatccccacacctacatcaaaactccggttcttcacgtacggtaattttccattagaacagcatctgaaacaaat

SEQ ID NO: 394097 - DNA, 99 bp, Homo sapiens
ctcgagctgagccccctaccgggccggatcccgaggtggtgtttggactctagaccatgtgcctaggtagaagtttttcctttctccgcagctctgctc

SEQ ID NO: 394098 - DNA, 100 bp, Homo sapiens
tgggtctgtccttccctactgtttgtgagtgaaagaaaagatgttgtcccggttaagagtagtttccaccacttgtactttggcatgtcgacatttgcac

SEQ ID NO: 394099 - DNA, 90 bp, Homo sapiens
attctaggaaccccagactaccttgcacctgagctgttactaggcagggcccatggttgggataattcttcactattccacccttgccac

SEQ ID NO: 394100 - DNA, 90 bp, Homo sapiens
ctacgacacggatcaaggacgagtgttcgtgaaagtgaaccccaaggcggaggcacaaatatttaaacatggaaaacgtgaagactgttt

SEQ ID NO: 394101 - DNA, 100 bp, Homo sapiens
caggtggacttcttgcaacaggttaacgtgtatggcgtgtgcgtgccagatcaaagaaatcggctggacagatgtcgggggctggaccggccaaggaggc

SEQ ID NO: 394102 - DNA, 75 bp, Homo sapiens
gaaaggacagagattgaactcagctatgcaaagcaactcagggtttcctatcgctgaagtgttcacgctgaagcc

SEQ ID NO: 394103 - DNA, 75 bp, Homo sapiens
ctcagtttctggagctgttccgaggcaatggatcacttggagtcctttattgctgaatgtgatcggagaactgag

SEQ ID NO: 394104 - DNA, 100 bp, Homo sapiens
cgcctttctcattattataggctccctcctgctgtcaggctacatcagcaaaggggtttcagtgttgactggtgggctcttggagtgctcatgtttgaga

SEQ ID NO: 394105 - DNA, 100 bp, Homo sapiens
ggtcaaggagcttgacagagacacagtttttgctctggtgaattacatcttctttaaagtgtgtcttacccatttccatgtttctcttgctaatttcttt

SEQ ID NO: 394106 - DNA, 90 bp, Homo sapiens
ggtgaagcggcccaggtgaggtgtcttaaagacttttctacatgatcctcttgtggaatggagtaaaccagtgaaagggcattccaaagc

SEQ ID NO: 394107 - DNA, 115 bp, Homo sapiens
caaggtttcaagctctacatgccacggggtcggtactggcggcttcgtctctgtcctggtgttttcatgccgactagggaatgagcatgatacagctctttcaattgtggatccc

SEQ ID NO: 394108 - DNA, 83 bp, Homo sapiens
cgggacagcggcgagacgcgcgtgtgtgagcgcgccggaccaagcgggcccagaagcggggatgcccgctgtctgtagccccg

SEQ ID NO: 394109 - DNA, 75 bp, Homo sapiens
tcaaagttcaattttccaaaaaggtttgaggaactactggccaacctactaaatgaacaacatcagatagcgaag

SEQ ID NO: 394110 - DNA, 97 bp, Homo sapiens
gctggtgggtgttccagctggaagtaaccccttccgggagcctagatcctgtgctttactctgaagactcgccacatccacgtcctccgagcctaca

SEQ ID NO: 394111 - DNA, 83 bp, Homo sapiens
cttgcgtccgctacagtatgtcaatcgcttgccccagcacagtcgaggggagctgcagcgggagtcagacttcatggccagtg

SEQ ID NO: 394112 - DNA, 83 bp, Homo sapiens
aggtggaggaggagtccccaggaaagcgcctggacgcaggccactcttcacctccaccatgagcctggacatccagagcctgg

SEQ ID NO: 394113 - DNA, 99 bp, Homo sapiens
ctcaatctgctgtttcagaaactccccaaaaacgctcagatgctgtccagaagctccggaaccttctgttggaccctgcctctcacaagctactggtgt

SEQ ID NO: 394114 - DNA, 100 bp, Homo sapiens
ctcggtcctgcctctgcccggggctcaggatacggtcacctgtattcgctgtggcttcaacatcaacgttcggggtgctggagaatctggtaaaagcacc

SEQ ID NO: 394115 - DNA, 82 bp, Homo sapiens
ccgggagatcccaggcggtgacagagtggagccatggctagaggagtgtggccatctggggccgtgtggtatttgccactca

SEQ ID NO: 394116 - DNA, 101 bp, Homo sapiens
gcacaataaaccgacgtttagccagaccaagctcaagatgtaaagaagattgagaaattccacagtcaactaatgcgacttatggtagccaaggaagcccg

SEQ ID NO: 394117 - DNA, 51 bp, Homo sapiens
agaagtacaacaaccggtgtctggacggagactataaatattcaggaagag

SEQ ID NO: 394118 - DNA, 98 bp, Homo sapiens
tccttcgagaccatcgacaagatgcgccgcgccagctcctactcctccctcaactccctcatcgtttgctaatccagactttacacaacctatctcag

SEQ ID NO: 394119 - DNA, 98 bp, Homo sapiens
aaacactaagtggattagccaaaaatgccactgaccttcaggtcccagctagtccacagggaccagcagtgccatggaaggatttaacatgtctcaga

SEQ ID NO: 394120 - DNA, 82 bp, Homo sapiens
cacttcagtcctccgactctgtgtattcgtgtgccgtgagtcccactgactgcagtgctgttgagccggaggctgagaaagc

SEQ ID NO: 394121 - DNA, 98 bp, Homo sapiens
ttctttcccacctgggaaggcggcatctatgacttcattggggaattcaactgaaaaaggtgcaggagcagcgggagcaggaggccaagcgggagcca

SEQ ID NO: 394122 - DNA, 100 bp, Homo sapiens
gaagtcttggtgaagacatccttcagtaagcactatcctttgtactccctcaacgtggcctccatgtggttgaagctagggagactctacatgggcctgg

SEQ ID NO: 394123 - DNA, 75 bp, Homo sapiens
gccctgtggacatcttttccacaactctaagcgaaagacatgaggcctcagcctgaaatgaggttgttttgaggt

SEQ ID NO: 394124 - DNA, 75 bp, Homo sapiens
tgggatgatacaccttttccacagggaattgagttgtgacaaatggcctacagctgtgagagcaaatggacatct

SEQ ID NO: 394125 - DNA, 100 bp, Homo sapiens
cgagcattcactgcaccagaggttcttcaaaatcagtcactaacttctctctcagatgttgaaaaggaaaagaccagtgccctcagtctgagcaacgttg

SEQ ID NO: 394126 - DNA, 75 bp, Homo sapiens
ctcactcaaggatcagttggctttagcaattgatggaggtgacacgagcagtgatgaggataaagaagaacatga

SEQ ID NO: 394127 - DNA, 100 bp, Homo sapiens
ttcgacatgaacctattggatatgatagaagtcggaggaaatactggttcttgaaccgaagactcataattgagctgaagagacgcctgaaagctgagaa

SEQ ID NO: 394128 - DNA, 100 bp, Homo sapiens
agcgggcagcatgtgcatcacccaattcatgaagaagcgcaggcacgacggccagcacttctccaccgacccagtggccgcctccatcatgaagatctac

SEQ ID NO: 394129 - DNA, 82 bp, Homo sapiens
tccgtccgccgccaccacccactccggacacaggaaaaccaattctgtgtcctcggaggaccacagcccagttgggccccag

SEQ ID NO: 394130 - DNA, 104 bp, Homo sapiens
aagaaacatatatcccagatttctgtggcagaagatgatgatgaaagtgtctctagaagaaactgtcagtgccagtgaagaagaaaacgtgggacaccagcagg

SEQ ID NO: 394131 - DNA, 97 bp, Homo sapiens
ccaataccgtgacaaaccacaaggtcctggggccacctacaccactaatattgagaaatgatgatgaagatcgactttctagaagaaaaagcattgt

SEQ ID NO: 394132 - DNA, 74 bp, Homo sapiens
atgggaagccctgctactgctggattagcgccagaagtgacagtgtgttcgtgttcttctgaggtgtcagcaaa

SEQ ID NO: 394133 - DNA, 75 bp, Homo sapiens
atcgggtggagtgtaggtcatatcgccgcggactttccttatcccagttgattgtgcagaatacactgcctgtcg

SEQ ID NO: 394134 - DNA, 122 bp, Homo sapiens
ggggtcctcttctgcaaggtccggctgctggatggaggggattttgtcagcttgtcgtcaagacaatgcagatcttcgtgaagactctgactggtaagaccatcaccctcgaggttgagccc

SEQ ID NO: 394135 - DNA, 90 bp, Homo sapiens
gttccaggaggggcaccatcgaggctgccatgccggagtgtgaccgggacagcgggcagtgcaggggcattgacgttgtgaggaataaaa

SEQ ID NO: 394136 - DNA, 51 bp, Homo sapiens
cggacaccccccctcccttgacctacccgacccgaaaaatcctgtctgcct

SEQ ID NO: 394137 - DNA, 100 bp, Homo sapiens
cacacataaagtcattgcagtcgtcaacaagatggtgagcatgatggagggtgtcatccagaattggcagagggggtcgatttgggaggaaaggtgtggc

SEQ ID NO: 394138 - DNA, 74 bp, Homo sapiens
agtgcatgttggcctcttaccgggctgccactgcagagccccgccatggaagacacgccgttggtgatatcgaa

SEQ ID NO: 394139 - DNA, 74 bp, Homo sapiens
gtgcgaagcagcccctcgctggaccagatgttcgacgccgagtctttgagtgattgcagtatgactccatttcc

SEQ ID NO: 394140 - DNA, 100 bp, Homo sapiens
gggcctgcccttcaccctctacatgcctgcctgctccaggctgagctggtaaactatgaacgagtcaaggaatattgcctcaaagtcttgaagaaggaag

SEQ ID NO: 394141 - DNA, 100 bp, Homo sapiens
atcagaaaggtgcgaaaaaaggtgaaaggtattcttgtggatattgggcttgacagctgcaaggagttactgaagaaattacagaagacatccccgtgaa

SEQ ID NO: 394142 - DNA, 100 bp, Homo sapiens
gacgtctgatgaacctcatgcgggatgtggagcgggagggcctggactgggacctcatagatcgtggtggtggggactggagaccggaccgagaggctgc

SEQ ID NO: 394143 - DNA, 97 bp, Homo sapiens
aggaagaaatactaagggtgccttttaggagaaataaagaggaagtggcagtgaagctagaatctcagaaggccaggcatccccagttgctgtacga

SEQ ID NO: 394144 - DNA, 75 bp, Homo sapiens
gacagctcaggctgcccagatggtggctcccggagtccagactgctggagttaataccaccgacaaagagatgga

SEQ ID NO: 394145 - DNA, 75 bp, Homo sapiens
gcgaaatgatgggatagcgttgcaaatccttaaaagagtcttaacggtgtttcccattaaacactaccaggacaa

SEQ ID NO: 394146 - DNA, 100 bp, Homo sapiens
gtacattataaaccggggctgctgatgaggagtggggaactggctctctggaacgtgtgacagcaggcagaaggggctggagtgcagtggcgcaatctcg

SEQ ID NO: 394147 - DNA, 100 bp, Homo sapiens
ttccaacgacaggaatgacaatcacaaagcttgaggacagtgaaaatcatagaaatgcatttgaaatatcagaagccaggagaaaggccagactgaagtg

SEQ ID NO: 394148 - DNA, 96 bp, Homo sapiens
gtaaaaggaaagaagtgcattgttttggtgactgaacttatgacgtctggaacacttaaaactttttgtgtgtcctgggaccttgaaagcaattgt

SEQ ID NO: 394149 - DNA, 51 bp, Homo sapiens
cggagctcgtccagctgcgtgcctaggggaggaacaggaagagaagagtgt

SEQ ID NO: 394150 - DNA, 100 bp, Homo sapiens
ctgggccaaaaggaatgaccctagccagactcagggatcaaagagcaaacagattcagtggcctgcattgcctggaagctccgaccccaggagccagccc

SEQ ID NO: 394151 - DNA, 100 bp, Homo sapiens
cgctgcgggtggcggtggtgtgctcgagcaaccagaaccggagcatggaggcgcacaacatcctcaggttattcagcttctcaaggctggaaaagcgaag

SEQ ID NO: 394152 - DNA, 90 bp, Homo sapiens
ggtttacagcgaagtccacccagcgtttccgaggtgaaggcgccgcgccaggccggggggcggatgtctccccgttcaatgttgtggcct

SEQ ID NO: 394153 - DNA, 51 bp, Homo sapiens
gaaggcgcctgaagaggacgaagctggatctaccatgaaagacttgtgaat

SEQ ID NO: 394154 - DNA, 75 bp, Homo sapiens
taagacgccaggtaccccggaagcctagaaatgcaaaagctggcaggctgacagaggcggcctcaggacggacct

SEQ ID NO: 394155 - DNA, 50 bp, Homo sapiens
cggcccgaggacaccgactaccagcaggagctgacatggacccaaatcct

SEQ ID NO: 394156 - DNA, 73 bp, Homo sapiens
aacaaccagcagcgatacccagattcatgatgttgctatcaaaagttgagaaattgtcagaagaaatcatgga

SEQ ID NO: 394157 - DNA, 90 bp, Homo sapiens
tgggcttcggcggaacccgagcggggcctaccgcgctgtgcttcgccgtgagccgctcgctgctgctgacgtgcctggtgccggccgcgc

SEQ ID NO: 394158 - DNA, 75 bp, Homo sapiens
cacctaacgctggccgacaacagcctggcgtccgccacggtttggtgcacctcgatttggaggaagtagggcagg

SEQ ID NO: 394159 - DNA, 96 bp, Homo sapiens
cggagctgcagccaccggggagccaggtcttccaagatttaccagccaaccagaaccttcctcagtttatgctgggaacaatgcaattctgaattg

SEQ ID NO: 394160 - DNA, 98 bp, Homo sapiens
ccggatctgggatgtggcggattatgtgataccagctcagactcagattgatggacaacttttcttaattaagcaccttttgatacttcgtgaacaaa

SEQ ID NO: 394161 - DNA, 74 bp, Homo sapiens
cattgatggaaaacaaatcaaactgcaaatctgggatacggtaaaagagaacctgctttcatgcaagatgctgc

SEQ ID NO: 394162 - DNA, 75 bp, Homo sapiens
ctcatattaagtccatagaaattacttcgatccttaatggacttcaaggtccagctcttctatgaactaactgat

SEQ ID NO: 394163 - DNA, 75 bp, Homo sapiens
gacccacagtggaaaacagattcctgccaggcaaaatgtttagaaagtgagaaggatggagtgcttaataaagtc

SEQ ID NO: 394164 - DNA, 121 bp, Homo sapiens
aggacagcattcctgtgacctctgcctaccatccataaaatactcattcccctctcagcttgggcaatggtagatggtggttcaaatgtgaaagcccgctcttcctacaatgagaagaccc

SEQ ID NO: 394165 - DNA, 96 bp, Homo sapiens
agcctgcacagccgcggcggcagcagcagtgagagatgcagagcaaagcggcagtccccggacagggatgggctctgaccaggaggacagcaagcc

SEQ ID NO: 394166 - DNA, 51 bp, Homo sapiens
tgaacaactcgggcgccgacgagatcggcctgcctgctccgcttcagcgga

SEQ ID NO: 394167 - DNA, 100 bp, Homo sapiens
atgggcaggctattcaatatgaacttcagtcattgggggaatccaatgcacaaatgggtatgttagagcccaccaaggaaccactgaaaccactttctgc

SEQ ID NO: 394168 - DNA, 90 bp, Homo sapiens
caacttctttggcaagtggacattttactggctcaattttaaccatgctgaccaacgaaactggctttgaaatcagttcttctgatgcta

SEQ ID NO: 394169 - DNA, 50 bp, Homo sapiens
ggctccgcgggcggcccacggcgagggaaaagaagatctcccggagcagt

SEQ ID NO: 394170 - DNA, 90 bp, Homo sapiens
cccctagcaacgctcgccacacccttgttttgagatcctctctaaggctgcatgcagggcatggtgccctacctgcctgagctgatcccg

SEQ ID NO: 394171 - DNA, 83 bp, Homo sapiens
gcgctggggccggaggcgggcgaggaagggacccagacatggagctgcgggaagaagcctggtctccggggccgctggattct

SEQ ID NO: 394172 - DNA, 72 bp, Homo sapiens
cttccggaaggactttggcgagggttcgagaacttgtcttggacaattgcaaatcaaatgatggaaaaattg

SEQ ID NO: 394173 - DNA, 100 bp, Homo sapiens
caagactctcagcagagggcgtcgcatcctggacaggaaaattcagagcctgggagacagcaagaccattcccgggtctgcggaagagggagctgctgaa

SEQ ID NO: 394174 - DNA, 75 bp, Homo sapiens
gttgaacagtcctgtatcaaaactgaagatggtttgaaacagcttcacaaggagctggccaagaggactcccggc

SEQ ID NO: 394175 - DNA, 50 bp, Homo sapiens
gaagagggaagacacgcggaaacaggttggacacgagttgccgctggttg

SEQ ID NO: 394176 - DNA, 98 bp, Homo sapiens
tgatgttggagaactacagaaacctggtctccctagcaggaagaagatgagccttaggtctgaacgccgaggaattcatgtggatcctgtgcaagaaa

SEQ ID NO: 394177 - DNA, 99 bp, Homo sapiens
tgaagatgctccctggtttgatccagcaatattcactattggcaagcctgttcttggaatttgctatggtatgcaggtcgattcctcgggacccacagt

SEQ ID NO: 394178 - DNA, 75 bp, Homo sapiens
ctcataccttgtctacacagtttctgtacaggattcctgacctgtggatgttgcttcagagtgtgaagtcaaatg

SEQ ID NO: 394179 - DNA, 76 bp, Homo sapiens
gtcttggtgttctccacgctggttcgcaggttatgatgtgattgctcaagcccaatctgggactgggaaaacggcc

SEQ ID NO: 394180 - DNA, 50 bp, Homo sapiens
gaagtgctggaccgaggacgaagtgagtattgttacaatcacatttgacg

SEQ ID NO: 394181 - DNA, 75 bp, Homo sapiens
gcctggatccaaaaacttaatagctttggcaccacactgtaactcgaggcatcaccaaaggcgtgaaggaggact

SEQ ID NO: 394182 - DNA, 75 bp, Homo sapiens
caactggcataaatcgactggcctcaagccgcttacaaacacgcagatggcaagaagattgatggcaggagggtc

SEQ ID NO: 394183 - DNA, 98 bp, Homo sapiens
tctcccagtccctgaccccattcttctcaccaatagccatgatggactggatggtgcatgacagcaagcgctgtggcggctttgatcctcatgacgtc

SEQ ID NO: 394184 - DNA, 108 bp, Homo sapiens
cggaggccaagcctgcagcggtggctgctgaaaatgaagagcggggcattacgtcgctggaaagagaacaccatggcccgagtggatgaagccaaaaaaacctttcaa

SEQ ID NO: 394185 - DNA, 82 bp, Homo sapiens
gcttcttcatgctttttcttctcaccatttctggccaaaactacaaacaagacttcgcagttaccggtattgtaagaacaag

SEQ ID NO: 394186 - DNA, 75 bp, Homo sapiens
gcggggcaagatggcggcgcccagacaggcctggagcacgtatggtctctctggcagtgatgtcctggataatgt

SEQ ID NO: 394187 - DNA, 100 bp, Homo sapiens
agattctcataaatcgtgtgagcgtcgccgacacctctgagataaaagggcccctttcgactagcctctgctgaaaggaagatttcgatgtcgatcattt

SEQ ID NO: 394188 - DNA, 90 bp, Homo sapiens
gtttattaggggggcggggggaaagagccccagcaccgcccctcctggaagaaggaagaggtctctacagcggaacaatgtcgttcttcc

SEQ ID NO: 394189 - DNA, 96 bp, Homo sapiens
ctcgaaggcccgcggcgccccgtgctgcagagaatgggtccagcttggctttggctactgggaacagggatcctggcctctgtccactgtcagccc

SEQ ID NO: 394190 - DNA, 75 bp, Homo sapiens
tccagttttttaagaagggacaaaagattttgacattgggaaacaagagaaaatacatgtgacaagaaatactgg

SEQ ID NO: 394191 - DNA, 100 bp, Homo sapiens
cgaggcgttctcccgactctggaccgacgtgatgggtatcctgaatttggagttgtctgcttaatattttctgcaacactagcttatttcccaccccgac

SEQ ID NO: 394192 - DNA, 100 bp, Homo sapiens
ggttcggcggctgaacattactgaggaacagcaggccgtgcttaacaggaaaggacctaccaaagggaaatcctcattgacgattcaatttgttgaaggc

SEQ ID NO: 394193 - DNA, 75 bp, Homo sapiens
agtgttgcagagcctgcggggcaagatcttgctgaagctgctgaaagatggcagaagaagtggtggtagtagcca

SEQ ID NO: 394194 - DNA, 83 bp, Homo sapiens
ctcagccaggcagacagactgacagactcgctagatttttagactctgaggagcagttggagctaatccacattatggaaatg

SEQ ID NO: 394195 - DNA, 82 bp, Homo sapiens
gcgccttcctcaacgacgcggacatggtcatgagctttgtgaacctggattccagttcttcagacaaacaatggtccaagtc

SEQ ID NO: 394196 - DNA, 100 bp, Homo sapiens
gagaagcagcgtgtgcatctgttggaagaatgctggaacgagttataggaagatgtagtccaacccacatcagcagccggatcgagctgggagatgtgac

SEQ ID NO: 394197 - DNA, 86 bp, Homo sapiens
catctttgacaagtttgagtgttgctggaacggttcggatagtatcatcgagaaaggagaagaacactgtggacatctaattgagg

SEQ ID NO: 394198 - DNA, 75 bp, Homo sapiens
tcatttcacagctgattcctgggagcacatccatttcattggcaagtccacagatcctggtccctacaaataagc

SEQ ID NO: 394199 - DNA, 50 bp, Homo sapiens
ctcctgagtagctgggattgcagacatttcagaaattgggagaagtgcca

SEQ ID NO: 394200 - DNA, 101 bp, Homo sapiens
cttcctccctgtgtactttccatttgccttcctgggtgccttagctggaccaattattgtggagccacatgtcacagcagtatggggaaagaatgtttcat

SEQ ID NO: 394201 - DNA, 97 bp, Homo sapiens
gatccgcctgcctgcgcacctgcatgtagaggactcaagtcagagaccagatcagggaccccagagacctcctcctgaaggactcctacctagaccc

SEQ ID NO: 394202 - DNA, 100 bp, Homo sapiens
ctatggtgaaacaccactgaagcattgccaaggtggctggtcattgaccgcaaggtttacaacatcaccaaatggtccatccagcacccggggggccagc

SEQ ID NO: 394203 - DNA, 50 bp, Homo sapiens
atcgagagagaccggagaggtggagagacacgatgaggcgagtggtacga

SEQ ID NO: 394204 - DNA, 82 bp, Homo sapiens
gctccgggaccggccgaaaggcgaggaaccgacaggaattccaggcttggactggagtgaagccctcaagatccacaaagac

SEQ ID NO: 394205 - DNA, 90 bp, Homo sapiens
aatgcactacaacaggaaaatcatattatagatggagtaaaggttcgagaacttgtcttggacaattgcaaatcaaatgatggaaaaatt

SEQ ID NO: 394206 - DNA, 76 bp, Homo sapiens
gccggacggtggagaacatgaggtgcatctgcagacgcagcaggaggtgaagctgcgcatgacgggcatggcgctg

SEQ ID NO: 394207 - DNA, 75 bp, Homo sapiens
tctcagatgacttcgtctcccaccgactgcctgtttaaggcagcctggcatcctcgctacaacctcattgttgtg

SEQ ID NO: 394208 - DNA, 100 bp, Homo sapiens
ttaaattggagtcatatgaaatcactatgaatggtaatagcctgcagctggtgttttgagaagccctactgctgaaaacttaacaattttgtgtaataaa

SEQ ID NO: 394209 - DNA, 75 bp, Homo sapiens
ccgtgggggctgagcccgccgtctacccgtggccgctgccggtctacgatgcttaaatggcagaggccaagccca

SEQ ID NO: 394210 - DNA, 75 bp, Homo sapiens
gcaggccgttggggcggctcagagattgtctaaagccccaggaaaaatggtggaaaattcaccgtcgccattgcc

SEQ ID NO: 394211 - DNA, 87 bp, Homo sapiens
ctactgtgtcatcaggtcaagcaacacctacatcacctattaaaaaggtggggaccaaggcatactgaacacattttttagcagctg

SEQ ID NO: 394212 - DNA, 97 bp, Homo sapiens
agcatgcacatcttacagatacagagatcatgactttggtagatgagactaacatgtatgaaggtgtaggaagaatacgccagcatgtctccggacg

SEQ ID NO: 394213 - DNA, 100 bp, Homo sapiens
cgatggaacagacgagtacaacagcggcgtcatctgtgagaacacctgcaacacccattggccaggccatccaccgcctgctcctgatccaggctttccg

SEQ ID NO: 394214 - DNA, 82 bp, Homo sapiens
tggagttaaggaacagatccccggaggagcagggtttccaggcctgaggtgcccgccctggccccaggagaatgaaccagcc

SEQ ID NO: 394215 - DNA, 75 bp, Homo sapiens
gggacaccctggaagccaggaaatgagatcctgaaggagctagacgagtgctacgagcgcttcagtcgcgagaca

SEQ ID NO: 394216 - DNA, 100 bp, Homo sapiens
tcgagatctgcagaccagacaggccattccccgatttaaccagaaaggagaagtatataaggcacagataatgaatgtgagctggtcagctgatcacaga

SEQ ID NO: 394217 - DNA, 129 bp, Homo sapiens
accgccctcagccagaagggctacgccagcggcgtcgagaggaccatcctgggtgctggccctgtgctggaggaccgtataatagacgctggccccaaaggaaactactctcgatttatgaatcacagc

SEQ ID NO: 394218 - DNA, 75 bp, Homo sapiens
gcggacggggagctgaacgtggacagcctcatcacccggctgctggaggctcccggagccctgcctgttccctgt

SEQ ID NO: 394219 - DNA, 95 bp, Homo sapiens
cgtccccaccagtgcggggagccggaaggaggagccatagcttggagtaggctttccagagtgttgaatcttccaccagaaaacttgatcacatc

SEQ ID NO: 394220 - DNA, 75 bp, Homo sapiens
gctgcttccagtgggaatccacattaagaagtacaatagcattcgcgtacacattttggaactttatacccaaga

SEQ ID NO: 394221 - DNA, 100 bp, Homo sapiens
gtgctattttgacaacacttattcatcttgttcaggtcaaaatgcagatcttcgtgaaaacccttaccggcaagaccatcacccttgaggtggagcccag

SEQ ID NO: 394222 - DNA, 100 bp, Homo sapiens
cgcagacatggacaccaaacatttcctgccgctcggtgaccctggcaaagatgagagtgcacatttcgtcctgcctgaaggtccaggagcagatggccaa

SEQ ID NO: 394223 - DNA, 82 bp, Homo sapiens
gtcggggccccatcgagaaatggccgcgtcggcagacctcctgccccccgaggtctgcagtctcctgaacccagcagccatc

SEQ ID NO: 394224 - DNA, 73 bp, Homo sapiens
gtttcctgaaagaacaactgttactgaattacctcagaaaatctattgggagatgaaggaaaacctctgtttg

SEQ ID NO: 394225 - DNA, 100 bp, Homo sapiens
atcctttgtatgtgccccttgaaggtgaaattttccaaagttttaacaaaagaggtgccattcacatcaaatgtagccattttagaggtgtcaaaataaa

SEQ ID NO: 394226 - DNA, 90 bp, Homo sapiens
atccctcaacctacaatcaagtggttctggcacccctgtaaccataatcattccgaagcaaggagggaaacactccacttttgtttgcta

SEQ ID NO: 394227 - DNA, 100 bp, Homo sapiens
atcatcgaatctactcctgagctggatatggacaaagatctcagtggatataaaggttcaaggtcaaggtggccatgcatatcttaaggaatggttgtgg

SEQ ID NO: 394228 - DNA, 95 bp, Homo sapiens
ctcctagcggcctggcgccgaggcggcggtacgcaaggctggagccgcagcgggagcccccgataacaacgaacttgatgcaagtgataggtttg

SEQ ID NO: 394229 - DNA, 89 bp, Homo sapiens
aaactcttcttctctgatcagtgcccagaacaaggaaacaggaactgtctatcttgaccatgcaggtgccaccttgttctcccagagcc

SEQ ID NO: 394230 - DNA, 50 bp, Homo sapiens
tcgtcaagtgaagatctggcgcatgaatgtttctcaagcaagacctcccc

SEQ ID NO: 394231 - DNA, 96 bp, Homo sapiens
cttcgtctttatgcagaagaggggattgacttctaaggactcttggtacatgaggaagaaacccggaaggggaagaggaaagcaaaggcgtcagga

SEQ ID NO: 394232 - DNA, 90 bp, Homo sapiens
gatcgctctcgcccaccgcccgaaccaaaatgatccacagtctatttctcataaactgttccggtgacatatttctagagaagcactgga

SEQ ID NO: 394233 - DNA, 74 bp, Homo sapiens
gggaaggaccggaaggagaccatgacactgattctgaactcgggttcatgacgctctcgatattcctgtgcaga

SEQ ID NO: 394234 - DNA, 90 bp, Homo sapiens
cgaacgaccaagagggtgttcgactgctagagccgagcgaagcggtttccaggcctgaggtgcccgccctggccccaggagaatgaacca

SEQ ID NO: 394235 - DNA, 74 bp, Homo sapiens
ggatttgctgccatgaaggatgttcgtactggaagtcatgaggacagaattcagaaggagctggcggacatcac

SEQ ID NO: 394236 - DNA, 75 bp, Homo sapiens
gacaaccaggcaatgctggatagataccgaattcttatcacaaagattattcttggagaaaccctgtctgtttac

SEQ ID NO: 394237 - DNA, 97 bp, Homo sapiens
ttccgaacaggaagactctgaggatgaagatgccatctgcccagctgtgagctgcctgcagccagaaggagatgagcattttgaaagcgaagcagaa

SEQ ID NO: 394238 - DNA, 83 bp, Homo sapiens
gaatgacaagagcttccgcggtgtcattctgacctcgtattaaaggtggaagaaggtccatatctttttctgtgggtgcttca

SEQ ID NO: 394239 - DNA, 82 bp, Homo sapiens
agcacccggacggactacgagtaccagcactccaatttgtatgccatatcaggcttgttagcagtggcacaagatcttacag

SEQ ID NO: 394240 - DNA, 75 bp, Homo sapiens
gaataaacatgcaatgaacccaaaaggattgtgccttataacctgcctttgcctgggggagtggtgcctcgcatg

SEQ ID NO: 394241 - DNA, 90 bp, Homo sapiens
cgggcgtggcgggggaggggacgctgagggcccatgtgctgaaaatccgaagtgccgcggaaagtggagtttgatgaaggccggaacaac

SEQ ID NO: 394242 - DNA, 75 bp, Homo sapiens
aacccgagcacaccaaggagcgcgtcgcgcatattaaatttcctattgactacccctattcaccacctaccttca

SEQ ID NO: 394243 - DNA, 96 bp, Homo sapiens
aggatggcaagaaaagctggcaacttctatgtacctgcagaacccaaattggcgtttgtcatcagaatcagaggaaaaatcctcagatcatgtatc

SEQ ID NO: 394244 - DNA, 75 bp, Homo sapiens
gtgaagatgatacctttctaacagcccaagttcaagaacatgaagactcgggtgactcagaagtggagaatgaag

SEQ ID NO: 394245 - DNA, 100 bp, Homo sapiens
cgcttccagacggcgcgtttctatcgggacgtcctggggatgaagggtgaagaaggtgaatacagtgaagaggaaaactccaaagtggagctgaaatcag

SEQ ID NO: 394246 - DNA, 100 bp, Homo sapiens
agcctctctcctctgcaacctgataggatttggctacccagcctacatctcgaacgttcactcacagggtacgctcatggagagagggcgcagagcaaac

SEQ ID NO: 394247 - DNA, 74 bp, Homo sapiens
cgaatatcgtcatcgttagaaggtggtgaagcagtattttccaatttgaagattcatttgaaggtggctcctgc

SEQ ID NO: 394248 - DNA, 95 bp, Homo sapiens
cccccacgccctcagcaccctggacaccaaggagaatctggaggggacactgaggagacgttccctaagatgcttcctgaaacttggagagtggc

SEQ ID NO: 394249 - DNA, 78 bp, Homo sapiens
gaatgcattgtcaactctcttagaacaaaatgatggtcctggtgctgcccaggaacccacgtggctcacagatgtccc

SEQ ID NO: 394250 - DNA, 75 bp, Homo sapiens
agaagcagcgcctgttcccggggcagatccaggttcagactattgggaagaagttacctgcaactacagcaactc

SEQ ID NO: 394251 - DNA, 97 bp, Homo sapiens
ttgaaaatgtctgtacagccaacggagctggagtcagatggcagcactatggaggactattcacaggaggactggggaaaccacagtcaggatctcc

SEQ ID NO: 394252 - DNA, 100 bp, Homo sapiens
tggaaacgcttgtagggtttcaccagatgtgaatttcttcggagtaagaaatcctcagaggaaattacccagtatattcaaagctacaagggatttgttg

SEQ ID NO: 394253 - DNA, 100 bp, Homo sapiens
tgctgctatgcagaaggatgggacttcatctacaatttttagtggagttgccatctatgttaatggatacacaggttcatctctaacaagtatttagtga

SEQ ID NO: 394254 - DNA, 80 bp, Homo sapiens
cagtttctaatccagttcacagaaagttctgttcagaatagtgaacgtggcaaaaaaattggaaacgtcatggtcacaac

SEQ ID NO: 394255 - DNA, 100 bp, Homo sapiens
gcagtggcgatgacagctgtaaagcacgaacaggaatacatggaagtccgggagagaatacacagagccagtatatgaatgacctaaaggtacaaataaa

SEQ ID NO: 394256 - DNA, 83 bp, Homo sapiens
ctgcggacggcgctgcggtacatccaggttgtgaccgagattcccgacgagagagactgaggggaagagaggaaggaggggcg

SEQ ID NO: 394257 - DNA, 100 bp, Homo sapiens
gatgatcgagaggatctggtgtaccaggcgaagctggccgagcaggctgagcgatacgacgagttgtctgctggttctcagcttgaagaagattctgcag

SEQ ID NO: 394258 - DNA, 100 bp, Homo sapiens
gatcttcatcacggggagacatcagctggatattgagatggaaggatgactatgagtatgagctattatagaaaccatgatgatatcatcaagttgaatc

SEQ ID NO: 394259 - DNA, 75 bp, Homo sapiens
acgtccgtagaccagcgctccttgatcaactcaaatgtgggcccccctggtccccctggccctcctggacctcca

SEQ ID NO: 394260 - DNA, 50 bp, Homo sapiens
tgaacttcagttatcctgcaggcacaggtttaatagactacaacttccac

SEQ ID NO: 394261 - DNA, 111 bp, Homo sapiens
cagcggccgagcgggcggcttcctggcctgggcgctccggtggcggcggaggtactccaaagattcaggtttactcacgtcatccagcagagaatggaaagtcaaatttcc

SEQ ID NO: 394262 - DNA, 82 bp, Homo sapiens
gaagtcatcctgggtatgggctacaaagagaacgacatgcaagaaagcacttcagccaagcagaagggagccagctggacga

SEQ ID NO: 394263 - DNA, 75 bp, Homo sapiens
aatgtttgatggctgctttgaagaaatcaagttcagtactccttccctggttgaatacaaagacttccccaaaaa

SEQ ID NO: 394264 - DNA, 74 bp, Homo sapiens
gcctatttacccagaagtagtccatatgaataacatagctgatccagaagaactgttcacaaaattagagcgca

SEQ ID NO: 394265 - DNA, 103 bp, Homo sapiens
gaggagtcagctgtgtgtccagaacgtgccatggagacgcttaacggtaaattggcaggatgaggagcagcaaatcaaaagaggtgcctttaccaaatccaag

SEQ ID NO: 394266 - DNA, 73 bp, Homo sapiens
gcgagcccgaggacatggagatggaagaggattaccccaatggcacctggctgggcgacgagaacaaccccga

SEQ ID NO: 394267 - DNA, 87 bp, Homo sapiens
tgatcgactgaatgagatcaaaggtcacctggaaattgccttattggaaaaacatttcttacaggcagaggaggtggacacggtgga

SEQ ID NO: 394268 - DNA, 74 bp, Homo sapiens
ctgtctctcctcgaagtcttcagcgctcaagtggatccaaacttctacagcaaaaacttacttcttttaggaaa

SEQ ID NO: 394269 - DNA, 75 bp, Homo sapiens
gtcagcgggagccccgaggccccagggaccaacgtgattgaaaaggcccagcaggctccagaagggcagccacgt

SEQ ID NO: 394270 - DNA, 100 bp, Homo sapiens
cctgtatcaccagaggagattagacgtagcagattagagcatgtctgttcgatcctggcttccctcctgcggaacctgagagggcagcagcggacccggc

SEQ ID NO: 394271 - DNA, 90 bp, Homo sapiens
cggcgcgcgcctctcccggaccctgcaggaatgaaactagtgatcgagaagatggcctccccaaaggacatcatgtgacagactctgaga

SEQ ID NO: 394272 - DNA, 75 bp, Homo sapiens
tgctctgtcactaacaagctgcgtgatcttcggtggaattgagactggatctatcacagaaatgtttggagaatt

SEQ ID NO: 394273 - DNA, 90 bp, Homo sapiens
agatgatcagacaaggcaaagcgaaattggtcattctcgctaacaactgcccagctttgagttcaaatctgaacatcaatgatgtactag

SEQ ID NO: 394274 - DNA, 98 bp, Homo sapiens
cagaacatgatcaagggtgttacactggacattcggaaattctttggagtaataccaagtggaaagaaacttgtaagtgaaacagtaaagaagaatga

SEQ ID NO: 394275 - DNA, 82 bp, Homo sapiens
cacggagggacttctgcagagagagtgcgcagaaggattccgggagcacagttccgccgaaagcggatgaaatagactcaga

SEQ ID NO: 394276 - DNA, 100 bp, Homo sapiens
agccggccccaggcagcgtgtgtcggtcgcctagtctggagaactagtcctcgactcacgctttaatgaagcaccagttgagattcccagtccttctgaa

SEQ ID NO: 394277 - DNA, 75 bp, Homo sapiens
catgccaacattccagttttttaagaagggacaaaaggagaatgtcaaagaagtcctttatgtggattgcccgag

SEQ ID NO: 394278 - DNA, 75 bp, Homo sapiens
gacagattggattgctatttaccagaggaagttggtaggaggacagtttgatctggaaatgaatttcattatcca

SEQ ID NO: 394279 - DNA, 90 bp, Homo sapiens
ctgccgcttcagttctcccggtgtggccacgagtcgggcactactgcagtcttcagttaagcaacaagtagaagctattgaaaaacagta

SEQ ID NO: 394280 - DNA, 98 bp, Homo sapiens
attgagaagagagaagaacattctcgaatacctagaatgggaggtcatgacgccagtcagatcacactagccttgggcacagctgcctcctaccccag

SEQ ID NO: 394281 - DNA, 83 bp, Homo sapiens
ctggaagacgcgctcctgcgccggttgtgaccgagattcccgacgagagagactgaggggaagagaggaaggaggggcgggct

SEQ ID NO: 394282 - DNA, 90 bp, Homo sapiens
cgagttcgaccagaaggcgctgctggagttccgcgacaccatcttcgacaacatcctcaaggtgctggagaatctggtaaaagcaccatt

SEQ ID NO: 394283 - DNA, 50 bp, Homo sapiens
acaagactgccttggcattagaggtgtatggaatgattcggttctcaggc

SEQ ID NO: 394284 - DNA, 100 bp, Homo sapiens
cctgccgccgcccctcaccagacagatcgctgtcaaaaccctaggtattctttaggtgatgctagaaggcctcttcatgaaacagcagttttggtagaag

SEQ ID NO: 394285 - DNA, 87 bp, Homo sapiens
caggtcctcgggggcggcggccacgccaaggacgggaggaagaaggcacctacgatcaaactctggagttccgtaggggaggtgatg

SEQ ID NO: 394286 - DNA, 99 bp, Homo sapiens
gaacagacaaaccccacaagcactgcatacggatggccccagaagtaattttagccatggatgaaggacaatatgatggcaaagtagatgtgtggtctc

SEQ ID NO: 394287 - DNA, 90 bp, Homo sapiens
gcgtcctcagacgcagcgtctagtccctggccatagctccgccgctgcccgctgtccagaccaaaacgaagaagacgttagccaaaccca

SEQ ID NO: 394288 - DNA, 100 bp, Homo sapiens
cgccaacatccgaggggaaactttcttcttcaaaggtctcttcgagccaggggacatgcagtacgagctgaacaggaacaacgtgacggacccgtcactc

SEQ ID NO: 394289 - DNA, 100 bp, Homo sapiens
gctggaagatgtggcagccggccacggagcgcctgcaggaactttatattgctgttggaatatctggagccatccaacatttagctgggatgaaagacag

SEQ ID NO: 394290 - DNA, 85 bp, Homo sapiens
cgggcctgcgagggttgaagattgtgaagcaatagcctaaggggagctatccagtttgggaagatttcataaacaaagcaggaaa

SEQ ID NO: 394291 - DNA, 75 bp, Homo sapiens
aagatgagatttacctgtgagatgtttcatcccaacaattctggctgtgactcagtcactgacactgagcctgag

SEQ ID NO: 394292 - DNA, 73 bp, Homo sapiens
atgaaaagaaatacctgtgatttgctttctcggagcaaaagtacgctagtgtgagcccccatggcagatacga

SEQ ID NO: 394293 - DNA, 100 bp, Homo sapiens
gatcagaggactgctgaaattttggccaaaaacctgcagtcagaaagaggtgaatgaaaactttgccattgatttgatagcagagcagcccgtgagcgag

SEQ ID NO: 394294 - DNA, 99 bp, Homo sapiens
ttggcaggaataggaaagaacagctggagcctgtgagggccaaagtgacaggacggaaagacggcagaagatcttgctagatcggaacagcacgagcac

SEQ ID NO: 394295 - DNA, 96 bp, Homo sapiens
accaagtctgtgtcagaaggccacctcaagaggaacatcgtggtgaagaccgtggagatgcgggatggagaggcctgcgtaagtgaggaaacagct

SEQ ID NO: 394296 - DNA, 87 bp, Homo sapiens
ttggattaaggaacagcgagctgtttgacccctttgacctcttcgatgtgcgagactttggaaagggcgaagctgtgctcaggcccg

SEQ ID NO: 394297 - DNA, 100 bp, Homo sapiens
tagaccagaggactctcgtccctcaggaggagcttaacagagcgttccaaaaagaggactctccagctactttttattgcatcagtatgcagtggtttag

SEQ ID NO: 394298 - DNA, 100 bp, Homo sapiens
cgtcctactacaaagatgctctgcggtttttgggctgtgttgacatcaaggatctaccaggctcaggggagagagaaagcccagaaagaaagctactcca

SEQ ID NO: 394299 - DNA, 90 bp, Homo sapiens
gtgctagtgacctgactgatgccttcgtggaggtgctgcagctgctgcgcatcatcactcgccacgacctgctgccctacgtcaccctca

SEQ ID NO: 394300 - DNA, 95 bp, Homo sapiens
ataagggcgacagcaacagctctgccggctggaaggagtacgagagggcctccaaagtggaccagtttgtgacgcgcttcctgctgcgggagacg

SEQ ID NO: 394301 - DNA, 97 bp, Homo sapiens
tggccgtggacacctgtgtcagcatgtgggacctggttctctccatcgccttgtctgtggggtgcactggttgtgcccacgtgcctcagggccttgg

SEQ ID NO: 394302 - DNA, 100 bp, Homo sapiens
gtctcttagcagcgcgcggagaagaacggggagccaggtgacagacttcggtttcgccaagcgcgtgaagggccgcacttggaccttgtgcggcacccct

SEQ ID NO: 394303 - DNA, 100 bp, Homo sapiens
ctacagggactttctgcagtgcctctgagaacttacgcagatcagccgaatggcagaagattttttcatttaatgtctggggtaaaattgcaactttttg

SEQ ID NO: 394304 - DNA, 100 bp, Homo sapiens
tttcagaaagtggctgacatggccaccaacacacgtggacccccgcagcaaacacaagtttaagatccacacgtactccagccccacgttttgtgaccac

SEQ ID NO: 394305 - DNA, 100 bp, Homo sapiens
ggaaattgtcaagaggtgcaaaaatcttagctctctcaatctctgtctgaactggatcataaatgacagataacaactattccacaccaaatgagagagg

SEQ ID NO: 394306 - DNA, 49 bp, Homo sapiens
ccttagcagccttgatctgaaggcccaggagcttcaaattgtcttggga

SEQ ID NO: 394307 - DNA, 98 bp, Homo sapiens
attcgctacaaatacagccgggtggctgactacattgtgaagcttcagcgccagtcagcaaagtaaataaatactgtgcttcttccaactttcattcc

SEQ ID NO: 394308 - DNA, 74 bp, Homo sapiens
acaggtttggccctcaacatgaacttgatgtaacaaatgtggcaattattttggatctatcacctgtcatcata

SEQ ID NO: 394309 - DNA, 50 bp, Homo sapiens
tgtcccagagacaacgagatgaactatgctggctatgagtttgacatctg

SEQ ID NO: 394310 - DNA, 82 bp, Homo sapiens
ctcaaggtgacaggccagagcccaggtccccaggacagtgcaggcctctcggccccgactcagcatcccctgctcttctatc

SEQ ID NO: 394311 - DNA, 75 bp, Homo sapiens
ggattaacgtccctgtcgtgtgacattttctgcctgatgtaaatgctgacattgtgcattggctctcttggactg

SEQ ID NO: 394312 - DNA, 87 bp, Homo sapiens
tattgctgaaagactacccatgctatatccagaagtaattcaacaggcttgcagccaatttactggagcagggatgacgtagcccag

SEQ ID NO: 394313 - DNA, 75 bp, Homo sapiens
tttggccccatgagatttcatcaagatcaacttcagcccttgccagcatccagccatgggggatatgaaaacccc

SEQ ID NO: 394314 - DNA, 75 bp, Homo sapiens
gcgagggttatgctgactgcgccacctacctggcaggtggaaaggctgcagaggatcctggaaggggaagggaat

SEQ ID NO: 394315 - DNA, 100 bp, Homo sapiens
gcagagcatcaagagtgtgctggtgaagcagaccatcgcgcaccagcagcagcagctcaccaacctgcagccatgcccggacgtgtactggttcccactg

SEQ ID NO: 394316 - DNA, 95 bp, Homo sapiens
agaaggccagggaggacatctttatggagaccctgaaagacatcgtggagtattacaacgacagtaacgttatccaagcattaggtgaacatctt

SEQ ID NO: 394317 - DNA, 83 bp, Homo sapiens
ggtcagtccgccgctcaccccgcggccgcaccttcccgccttctcaggtgtttcccattaaacactaccaggacaaaatcagg

SEQ ID NO: 394318 - DNA, 100 bp, Homo sapiens
cccagattgatattgtgaacatcagcgacagctttgagatgacctatagatctgatgttctaatcatgtcagataaagatgatattgagactccactgct

SEQ ID NO: 394319 - DNA, 100 bp, Homo sapiens
acctgcatcatttggttagctttcatccccatcttttttggtacagcccagtcagcagaaaaggcggtatatattgcacccctaaaagccctagtacgtg

SEQ ID NO: 394320 - DNA, 98 bp, Homo sapiens
gaaaggctggcacgaacatgtcactcaggacctgcggagccatctagtgcataaacttggaactgtcaccgctgttcccagacacacttattctgggt

SEQ ID NO: 394321 - DNA, 90 bp, Homo sapiens
tagctgaaaacatcatcgttttgaagagttctgcgttttgccagtcacctctcaactgtgtgccaaagggctggcaaaacgagtcggtgc

SEQ ID NO: 394322 - DNA, 100 bp, Homo sapiens
gcagttgagatttttacatttgaatacagtgcagcttagtaaactgttgcaagagaatgtgccgtcatatgaaaaaggaccgtggcaaggaggtgtacag

SEQ ID NO: 394323 - DNA, 83 bp, Homo sapiens
ctttatgtgcctgtaaaagaatacccagatgagaatacttatctctggcgcacatcactatatttggctgcctctgccagtgc

SEQ ID NO: 394324 - DNA, 83 bp, Homo sapiens
gcgggcgagctgcggctcggacgccagcggacacgcgggcgagactcggtgaaatacctggagtgctcagctctcacccagag

SEQ ID NO: 394325 - DNA, 75 bp, Homo sapiens
tacaaatggaggaggaggaggacgacgacgatggggatatcggccatcgaagacggcaatttggaggaaatggaa

SEQ ID NO: 394326 - DNA, 100 bp, Homo sapiens
agagcagtccctgttcacccgggtcccagcctcgaccccgcacggacagcgaggttttccaaagaaattagaccattttcttcgtgagaaagaaatcgac

SEQ ID NO: 394327 - DNA, 83 bp, Homo sapiens
agaggctggggagtagctgctgagttccagggtctccctccactgctgtagtaacccgggtccggggcctcggtggtgctcct

SEQ ID NO: 394328 - DNA, 100 bp, Homo sapiens
gggctccctgtatgcatggtgtggggttggtgtgattagcttcgcagtctggaaagctttaggagttcacagtgagccaggtgagaatttcaaggattat

SEQ ID NO: 394329 - DNA, 100 bp, Homo sapiens
cgaggatatcgtgtctggagcagtggagcccaaagacccctggagacatgatctacggaatccagaggcagcattgtctccaaccttccgtagtgacagc

SEQ ID NO: 394330 - DNA, 75 bp, Homo sapiens
gccgaggcaccgaggcactcagaggaggtgtctgtgacctttgaggatgtggctgtgacattcacccaggaggag

SEQ ID NO: 394331 - DNA, 75 bp, Homo sapiens
gaggcccccctgaaccccaaggccaacagagagaagatgactcagctctggcaggctgccctgagcacgctcaac

SEQ ID NO: 394332 - DNA, 82 bp, Homo sapiens
tcttcctgaacgaagtggccaagaaggagaagcagctgcggaaaatgctagaaggttgtggcagcactgcctgaaggtatga

SEQ ID NO: 394333 - DNA, 123 bp, Homo sapiens
agcccgggaggggccgcgccgccaccgtctgaactaggatgtcccgacatgaaggttgtgtcaacgctgctcataaatataatcccagaggaccacatcccactgaacttatctggaaaggcg

SEQ ID NO: 394334 - DNA, 75 bp, Homo sapiens
gcacgacatgctggcctcgctgggcccagatgatcttcctcaactgtggccacgtctgctgctgccagcagtgct

SEQ ID NO: 394335 - DNA, 100 bp, Homo sapiens
taaagcaattatgaaagaagtcattccttttttgaaggctgtagaaaatctctgttcttacaagatttctgcaaacttgtacaaacagctgagacagatc

SEQ ID NO: 394336 - DNA, 75 bp, Homo sapiens
agtgatgtggaggaaaacaacttcgagggcagatcttaggaaaagtcctcagtgctgtgggcagtgcccagctac

SEQ ID NO: 394337 - DNA, 100 bp, Homo sapiens
cggcctcccgcgtctacaagtccaagaggaacatcattctgggcgcagggatcctgttcgtggcagcaggtctacgacgttcctccatcggtgagcaagg

SEQ ID NO: 394338 - DNA, 96 bp, Homo sapiens
aggcacaggggttgtccaccaagctccttacttcggtgctgttgttcctccaaaagagtggaagccacgagcatcctatgatgacattgatgattt

SEQ ID NO: 394339 - DNA, 97 bp, Homo sapiens
cgcacgtgtgaggaatgcaacttcaaggtcaagatggtggacgagcttaagagagactgattcttgctattccaaatcctcttccacgttgacagcc

SEQ ID NO: 394340 - DNA, 98 bp, Homo sapiens
ggcgcgacaccgggctccggaaccactgcacgacggggctggacctgtcggaaaaggtaacagaagatggaactcgaaatcccaatgaaaaacctacc

SEQ ID NO: 394341 - DNA, 75 bp, Homo sapiens
ttatgcaaagccagcgttacagtaatgttccaggaagtggatgctttggaagaattaagcaggcagctttttctg

SEQ ID NO: 394342 - DNA, 78 bp, Homo sapiens
ggaaacttaggggccacgtgagccacggccacggccgcatagaaggcccaggcacggaccagactgaggcagaggccc

SEQ ID NO: 394343 - DNA, 100 bp, Homo sapiens
caggaacactgaagggcaggtcgtccccgaccttctatgaggattgcccagctcaagttatgtgtctcggtaccacgtgaaagactcctcacgccacgtc

SEQ ID NO: 394344 - DNA, 75 bp, Homo sapiens
cctggaaaaatggcagaataatctgcttccatcccgccagtttggtttaagctatgaagaaggacatccctcaca

SEQ ID NO: 394345 - DNA, 83 bp, Homo sapiens
aaaagagctaatcctcaagtcggcgtggcttttcctcatatcaagcataactatgagagagagcaggagattcggatgggtca

SEQ ID NO: 394346 - DNA, 100 bp, Homo sapiens
cccaggactgcgcccccgggagcgggcgcccagagaatgtctaatttaatagggatatagacagttggtttaaaccaacatttttggacgaggagaggct

SEQ ID NO: 394347 - DNA, 83 bp, Homo sapiens
ctccttcggcagtccacccaccgccgccgcctcccagaggcctgtgggagcaaatctgtgtatgacggcccggagcaggagga

SEQ ID NO: 394348 - DNA, 100 bp, Homo sapiens
gcgggccgaggagccgggcgcaatggagcggaagaggaccatggccaacctggagcgcaccttcatcgccatcaagccggacggcgtgcagcgcggcctg

SEQ ID NO: 394349 - DNA, 97 bp, Homo sapiens
tttgttaaggattccaagtaactcttatttgctggttttccaagaattgatataaagcgggaagaacagaaaacagcagtcataagtatgctactca

SEQ ID NO: 394350 - DNA, 80 bp, Homo sapiens
ggagaggatgtgttcgaggtggagaagatcctggacatgaagaccgaggggacatgaagaggagcatcggcggcgtgagg

SEQ ID NO: 394351 - DNA, 90 bp, Homo sapiens
gacaagagtagttgaaaggagtagttctatgacttcaacaatgacaatagattcgggaactggagcctctcctctgtcacagtgacaatc

SEQ ID NO: 394352 - DNA, 98 bp, Homo sapiens
caagacgccctggagggcggcctcggccatgcagttcttcaccaagggctaccaggagaccatctcaggtcttcatcctccaggtccacctttagcaa

SEQ ID NO: 394353 - DNA, 100 bp, Homo sapiens
ccgccctgcccagcatgtcctcaactttctgggcgttcatgatcctggccagcctgctcatcgcctactgcagtaatcattaccaaatgaggaggaaagg

SEQ ID NO: 394354 - DNA, 80 bp, Homo sapiens
cccgcgcagccgcctgcgcctgcgggagccgcacacattctggcagttccgccatgagaacccccagacccgggttgggg

SEQ ID NO: 394355 - DNA, 75 bp, Homo sapiens
gtccggccgctctgcgggactctgaggaaaagctcgcaccaggtgacgcagctggaccagaggctggcactcatc

SEQ ID NO: 394356 - DNA, 80 bp, Homo sapiens
acttcccctgcaagcccaccacgccatggagaagatggaagagtttgtgtacaaggtcaaaatgcagatcttcgtgaaaa

SEQ ID NO: 394357 - DNA, 144 bp, Homo sapiens
ccaaaggctactttgacgccctggtgaagatgggggagctggccagcgagagccagggctccaaagaactcggtagtaagcattaataatgtctttcatctttgagtggatctacaatggcttcagcagtgtgctccagttcct

SEQ ID NO: 394358 - DNA, 75 bp, Homo sapiens
gtgaggcctccccagccacgtggaactacaatgcagatcttcgtgaagactctgactggtaagaccatcaccctc

SEQ ID NO: 394359 - DNA, 80 bp, Homo sapiens
gtggaaccgcaggactgcagggtctctccagcacttctcagaacttctggatgagttttcccagaacgtcttgggtcagc

SEQ ID NO: 394360 - DNA, 100 bp, Homo sapiens
ggacaatgacagcagctcggcccgcctctttgagaggtctcgcattaaggctctggcagcctcgtcacgtgttcaatatgctaaagaagtatgtccgcgc

SEQ ID NO: 394361 - DNA, 113 bp, Homo sapiens
cggacggcgtggaccacatagacatttacgcggatgtcggcgaagagttcaaccaggtgtccctggccagtgtccttccacctgtccacaagcatggggaacatcttcgccaa

SEQ ID NO: 394362 - DNA, 75 bp, Homo sapiens
tcgaaatgaagcggaaagcagatatgcgcgtcagcatactttggcgggtcagcgttgaagttttggtagagtatc

SEQ ID NO: 394363 - DNA, 75 bp, Homo sapiens
gcagaaggccgagaagctctacccactgccctcggcccgcgagccctatgagtttgtctctctggaatggctgca

SEQ ID NO: 394364 - DNA, 82 bp, Homo sapiens
aattggccttattaatgatatgctcgcaaaggatctccttcatccctctccagaagaggagaagaggaaacacaagaagaaa

SEQ ID NO: 394365 - DNA, 98 bp, Homo sapiens
gctggctccctggctggtgccacagcccaaaccatcatttaccctatggagttctttctaccacactcccgaggaagctcccatggacaaagccggat

SEQ ID NO: 394366 - DNA, 100 bp, Homo sapiens
gaaaatcatattatagatggagtaaaggaagaattgtatttgcaacgggtagcagaattggacaaaattacttatgaaagagacagttttagacaggcat

SEQ ID NO: 394367 - DNA, 100 bp, Homo sapiens
ggccgagatggctaagaagtccatgccaggaggtcgtctgcagtcagaaaccagcctggacaccaagtctgtgtcagaaggccacctcaagaggaacatc

SEQ ID NO: 394368 - DNA, 75 bp, Homo sapiens
ctttggaaaccctctgcacattgcccagaagcttttccgagtgcttatgaggtgatcaaactcaaaggctacaca

SEQ ID NO: 394369 - DNA, 96 bp, Homo sapiens
aaaggaagacttgtaacctggagaagaggatgcagaaaatgcgattgtgcatatgggcggtcagtggttgggtggtcgtcaaatccgaaccaattg

SEQ ID NO: 394370 - DNA, 71 bp, Homo sapiens
cggatcccagcttcctgcagccaggcggctatgagaggttttcctccgagtacccagaattctgttctaaa

SEQ ID NO: 394371 - DNA, 50 bp, Homo sapiens
gtacgatttgaccaaatttctggaagagggatacttcaaaaggagaacaa

SEQ ID NO: 394372 - DNA, 90 bp, Homo sapiens
ggaagcaaacggagtgtggaaatacgacctgacccttatggactctgtgggattcattatattgacgctggttaccttggtttcaaggcc

SEQ ID NO: 394373 - DNA, 90 bp, Homo sapiens
ctggtttctcctctgagccaccttaaggaatcccaccctgacccggcatgcatgtagggaataccggattcataaagagctggatcatcc

SEQ ID NO: 394374 - DNA, 89 bp, Homo sapiens
cctggaataggttcgccgaagagagagtttgtctttcctagatccagacacggggactgcagagaaaggctgtgtgcatccgctgtcta

SEQ ID NO: 394375 - DNA, 75 bp, Homo sapiens
cgggaggtccctgatcaagctgaacttttccaagaacagtgaggccatcgacgagtacaagccccaggatgctac

SEQ ID NO: 394376 - DNA, 82 bp, Homo sapiens
tcgacgcgctcaccggctgggtgggttcgagcaactaccgggacaatcatatcctgattcagcccttcctccacaaaggcaa

SEQ ID NO: 394377 - DNA, 98 bp, Homo sapiens
cgccttcgtgcgcttcgaggacccccgacagcaccagttgcccttgaagcagaaaacagaggtgaaatgaaactagctctccagtatgtcccagagcc

SEQ ID NO: 394378 - DNA, 98 bp, Homo sapiens
tgcaaatgtctttcgtggaagacataaggctatgtggttgatgttgcagaatgatgagccggaggacttcgttatagctactggggaggtccatagtg

SEQ ID NO: 394379 - DNA, 100 bp, Homo sapiens
tgtggctatcatcaaaatcaccaaccaaaagattcacctttggatttcatcgcttagatactggactaagcatgcccagtgatacttcactctctccagc

SEQ ID NO: 394380 - DNA, 100 bp, Homo sapiens
gtttacactacacacgctcttggctgtttcacatcctgggaatactgtattttcaatctgaggttggtggagtcgccggtagccacctaagataggaatg

SEQ ID NO: 394381 - DNA, 75 bp, Homo sapiens
agattggagaaaatttgcctcaaagcgagtctcaaaggtgttcctggatttggttcatgtgtgcccagctcccta

SEQ ID NO: 394382 - DNA, 75 bp, Homo sapiens
accagttgcgaaatggtctgaggcagagtgtggttcagtttgacatctacaggaaggtgcccaaggaccttacgc

SEQ ID NO: 394383 - DNA, 50 bp, Homo sapiens
agcgagaccgcgtgcgaggaccgattcatgatgttgctatcaaaagttga

SEQ ID NO: 394384 - DNA, 88 bp, Homo sapiens
tccgtcgtggaagcaggactgcgccgcgtcttcctcaagggtgaaggttgccgaactgtccccctggctggacatgtggggtttgaca

SEQ ID NO: 394385 - DNA, 90 bp, Homo sapiens
tctacttttgaggcgcttccctgaaacggtggtgcagcatggggcccggaggctgtttgatgtcctgcacgagcccttcttgaaagtacc

SEQ ID NO: 394386 - DNA, 100 bp, Homo sapiens
cagacggattcatttagagctgcggaacaggacgccctctgatgttttgggctggaggatagttgcaagtattgtttggtcagtgctatttctacccatc

SEQ ID NO: 394387 - DNA, 82 bp, Homo sapiens
cgccggttcgcgtctctctgctgcggcgcggggaccgctgtgctctcggcgggcgctaatattgacacctgctcagaagacc

SEQ ID NO: 394388 - DNA, 75 bp, Homo sapiens
cgttgtcgccccctcctcgtcgggaagaatcgtttggtctcctgccgtgcccgccatccagtccaatggatcaga

SEQ ID NO: 394389 - DNA, 97 bp, Homo sapiens
actcttgtcagacttaactaagcagatttcccgagactacggtgtgctgttagaaggttctggtcttgcactaagagatggagtttcaccatgttgg

SEQ ID NO: 394390 - DNA, 80 bp, Homo sapiens
attgacgcggtgaactctgtccagttttcaaaccacacagcttcctgcctgacacagctcacttcaagaagtgcacaatg

SEQ ID NO: 394391 - DNA, 87 bp, Homo sapiens
cttccaacagttggagattgaccattatgtggtcctcatcaccgggggcatcgtggccacagctgggcgcttcacccagtggtactt

SEQ ID NO: 394392 - DNA, 100 bp, Homo sapiens
ggcaagctgcgcgccagcgtcgagaagggcgactactacgaggcgcaccagatgtaccggaccctgttcttcagggcttcactccggacagactgtcttc

SEQ ID NO: 394393 - DNA, 74 bp, Homo sapiens
gacaaaacgccaggcggatctcagaaggccagttcaaaggcccgatgagagaaagggaaagttaaggatgctgg

SEQ ID NO: 394394 - DNA, 71 bp, Homo sapiens
aagggaaccattcttccatggacaggacaactatgaccagctgaactcgtttgagcagctgtgcatcaatt

SEQ ID NO: 394395 - DNA, 75 bp, Homo sapiens
acaagccccagttagatctcccatcactaggagttttgctcgagagtattgtccttcttgtaaaactgattccag

SEQ ID NO: 394396 - DNA, 75 bp, Homo sapiens
attgtccgccaggcctgtgtccggagcctgagctgtgagccttgaaaagatcttttgaggtcgaggaggtcgaga

SEQ ID NO: 394397 - DNA, 50 bp, Homo sapiens
caaaagccttccatgattacggtttcgaaaaaacgatgaaatgaaagcta

SEQ ID NO: 394398 - DNA, 100 bp, Homo sapiens
aggcggcaggacggccaagaccagcgcgagggccctgggcaaggcccgacaggttcaagaagacgtggaagctgcgggctctgaaggaaggcaagacaag

SEQ ID NO: 394399 - DNA, 82 bp, Homo sapiens
atcaagaaagtattgcaggacaagagatttaagatcaggcctttgtgacactaaccacaaacgatgcctacgccaaaggtgc

SEQ ID NO: 394400 - DNA, 90 bp, Homo sapiens
gggaaattgggtcacaagctgtttggtcactctcatcttgcaaaccaggcatggaagaggagatggttcgtgttacgcagtggccgttta

SEQ ID NO: 394401 - DNA, 89 bp, Homo sapiens
gtcaagtatgtcccaaacgtctttcatgtggctcacatccagattgcgccaggctgagcgaagccgccaatctgctgagttggacaacc

SEQ ID NO: 394402 - DNA, 51 bp, Homo sapiens
cttcgagttcaaagagaccctcggaacgtttcatatacactggagaagtcg

SEQ ID NO: 394403 - DNA, 82 bp, Homo sapiens
gttgagaaatataattcaaggaagaccgctgcctgctgatctgagggccaaagtttggaagagtaccgagtcgaatatgtca

SEQ ID NO: 394404 - DNA, 100 bp, Homo sapiens
ccgcgaaccgcagtatcatgctggccaagaagatcatcattaaggacggaggcacgttgattatggaagattcccacaagagtaccacgtcagagacagc

SEQ ID NO: 394405 - DNA, 100 bp, Homo sapiens
gcgcagcgggggtggcgctgggagcaacgggagtgtcctggacccagctgagcgggcggtcattcgcatcgcagcattgttggaaactgttactacattt

SEQ ID NO: 394406 - DNA, 75 bp, Homo sapiens
tgaagcggttggcaccactgaagtgaccgaatgaggtcatgatgatgggcagcgcccgagtggcggagctgctgc

SEQ ID NO: 394407 - DNA, 50 bp, Homo sapiens
gattgggaagaaactcttagcgcaatgacagagtcttgctttgttgccca

SEQ ID NO: 394408 - DNA, 87 bp, Homo sapiens
tatcaacaccaaaaagctttctgctagggaatcatattctaagaactcagccactcaggtatccaccatggtgctgggtcctgaaca

SEQ ID NO: 394409 - DNA, 95 bp, Homo sapiens
aaagcggggacccagaccctggagcctcagttggaagcagccgatccagcctgcggagcctgtggggcaggtcagaacgggaaacagccgtacgc

SEQ ID NO: 394410 - DNA, 78 bp, Homo sapiens
ggttttgaaagcaagaaagaaacaaaagttcacctctgcgaaggtgtgcctacaggggttgtggaaggagacgctgcc

SEQ ID NO: 394411 - DNA, 100 bp, Homo sapiens
gcgtccgaggagtgtgcggaaggacctcgtggagggatttactgatgcagagatccgaaggaagaaatagaaccatttccagaagaaagggagaactttc

SEQ ID NO: 394412 - DNA, 100 bp, Homo sapiens
aatatctggttttgtctctgctgggcctgtgtgcctggaaaggaattgttttggcctaggatcatccagtgttctaagaacggaagcatctgggctggat

SEQ ID NO: 394413 - DNA, 75 bp, Homo sapiens
ccatcgctgccagggcagaaattgagcaagcagcaagtcggctttcagatcagagtccctgtgaagcaggaagag

SEQ ID NO: 394414 - DNA, 101 bp, Homo sapiens
gggagttacaccgccaccgccaggagatacaactcgtcaacgaatcaaattcagtgatgacagagtatgcaagagtcaccttctcaactgttgtcctcatg

SEQ ID NO: 394415 - DNA, 83 bp, Homo sapiens
gaccccagtcggtgctccggggaggtcacctgacgaggagtacaagccagctgccatgttgtgagcacataccacatagctcc

SEQ ID NO: 394416 - DNA, 99 bp, Homo sapiens
cagacaccgagcttcagcaagctctctccaacgctatcagaggactcctgaaacctggagagctacctgctgtataaaggctggcctgagggcatttgc

SEQ ID NO: 394417 - DNA, 153 bp, Homo sapiens
gctgctgggctccggggacactttgcgttcgggctgggagcgtgctttccacgacggtgacacgcttccctggattggggctttgtgaaggatgtccatgaagactctgtcaccatcttctttgaaaacaagtaagaccttgggaatagagaa

SEQ ID NO: 394418 - DNA, 83 bp, Homo sapiens
gcctgggttacaagcagcaagtgcgcggttggggccactgcgaggccgttttagacatgggaaagcggaaccaccaaaaggag

SEQ ID NO: 394419 - DNA, 100 bp, Homo sapiens
aaggctgtcaccctgttacctccggaatgcccaggaaaaccatgggctggctgtgcccaccccctcggttccagatgattttgcagacaaagaagtgaca

SEQ ID NO: 394420 - DNA, 100 bp, Homo sapiens
tctgtgtcgcagcttggtctcagaggagcatcgctggggcaagaaactatattcagtctttgactcagatgccgaagatgaactttgcgaatgtatttat

SEQ ID NO: 394421 - DNA, 51 bp, Homo sapiens
aggatcaccggtttctcctgcttcattgctgggattacaagcgtgagctac

SEQ ID NO: 394422 - DNA, 50 bp, Homo sapiens
ggaacttgccctgtctcctcgcagatgagagattcagttgtggaaattct

SEQ ID NO: 394423 - DNA, 100 bp, Homo sapiens
cggggacccagaccctggagcctcagttggaagcagccgatccagcctgcggagcctgtggggcaggctctccgtgtgaaatggtcccatctcagactgc

SEQ ID NO: 394424 - DNA, 100 bp, Homo sapiens
ggaattttgcaaaagtaaaattggcaagacatatccttacaggcagagagggcttcaagatgggctgcgctccagttccaacagccgcagcgggagccgg

SEQ ID NO: 394425 - DNA, 100 bp, Homo sapiens
ttctcctggaatcccaatgaaccttgggtgatttgttctgtatcagaagacaatatcatgcaagtgtggcaaatggagtctctgagaacaagccagccag

SEQ ID NO: 394426 - DNA, 90 bp, Homo sapiens
cacagccaagatgccgggaccccttagaagcctagaaatgagacctttggccagagcaagacataaaagattcttttcaacaagtgatac

SEQ ID NO: 394427 - DNA, 75 bp, Homo sapiens
ttgtctgtgacagtaacagtacttgggatcccccagttccaaagtgtcttaaagcacttctaccctagccgggcc

SEQ ID NO: 394428 - DNA, 83 bp, Homo sapiens
tgctgagcttggcctcggcgtcctcgggtcctagcagaagatgtgactcagactgcctctgggtggggctggctggcccacag

SEQ ID NO: 394429 - DNA, 98 bp, Homo sapiens
gctatggatggctacaaaagacctctcccaaagctcctatccaggaaagaatacccacctcatgtccaaaaagttgaaattaatcctgtaaggttaag

SEQ ID NO: 394430 - DNA, 74 bp, Homo sapiens
cgctggtgaaatacctgctcttcttcttcaacatgctcttctgggtaaccaaggagcagtgaacagcagctact

SEQ ID NO: 394431 - DNA, 74 bp, Homo sapiens
ggctgctctgaagcgcacgacctccgactactttctccttcaaggttatgatgtgattgctcaagcccaatctg

SEQ ID NO: 394432 - DNA, 95 bp, Homo sapiens
ctgctcttttcgatccgggacggccggtcaggctcgccgccgagctgcttccttcaaaatgtctactgttcacgaaatcctgtgcaagctcagct

SEQ ID NO: 394433 - DNA, 100 bp, Homo sapiens
ctgacaacgtggatcgttgttttgaaactacataccgagcatcaaatattaaggcacccggagaacagacagtaccagccttgaaccttcagaatgcttt

SEQ ID NO: 394434 - DNA, 90 bp, Homo sapiens
ccgcctgcccgcccgggagctgtcggccccggcccgactctatcacaagaaggaagcactacagttcgtaaggagatcatcaggaataag

SEQ ID NO: 394435 - DNA, 50 bp, Homo sapiens
ggatgatttcggaacctggagaaaatgttccagttacagctatatcagag

SEQ ID NO: 394436 - DNA, 74 bp, Homo sapiens
caaggcactgctttttcatgacggatgccggctccaggagcagcagtggaggtcgggaacgcctcattgtggag

SEQ ID NO: 394437 - DNA, 75 bp, Homo sapiens
agcaagaggagcagtccagcggcatgaccattttcttcagcctccttgtcctagagaatggcatcatttcctggt

SEQ ID NO: 394438 - DNA, 100 bp, Homo sapiens
agaagattttcttacctttctctgccttcgagatgcctgtgaggagccaccaacatttgaagctatggagctcattggtaaaccaaaaccctactatgag

SEQ ID NO: 394439 - DNA, 100 bp, Homo sapiens
atgccttttccagtgactccattccactctttgaaggccgacaagggagataaattccgtaatgggagctgcggccctgctctcctgtcctggtggagct

SEQ ID NO: 394440 - DNA, 90 bp, Homo sapiens
gcttccgacggggcggccgggggctcagagatccaagtgcgcgccctggcgggtccggaccaagaaatcctaagtaatgcactgaagaga

SEQ ID NO: 394441 - DNA, 75 bp, Homo sapiens
taataatgctggcaaagtggaaaaatgtgcggaaatggagttgttttttccttcaagtggaggttgtgggccggc

SEQ ID NO: 394442 - DNA, 100 bp, Homo sapiens
gagcttggttaacttgggagaaagtttcatctgtggatggagtattggcaagtatatcgcgtcaacacagcgacctgacgggacctggcgcaagcagcgg

SEQ ID NO: 394443 - DNA, 112 bp, Homo sapiens
cggaggcggtgaagtgccatcttcggctaggtcgtcacaggctccggctcatggcatcaagtggcatccatcataagactgaggctgatgtgaatccaaaggcctatcccct

SEQ ID NO: 394444 - DNA, 80 bp, Homo sapiens
gctttggatcagacttttgtgttgcagttcggcttccccgggcgctgcctggacaggcctgcctgcgtgctgggacatgt

SEQ ID NO: 394445 - DNA, 88 bp, Homo sapiens
tcatgttgctttttgatggccatggcataaggaactctatcccaggaatacagctttgcattaggtagcctttccagtaaatatatga

SEQ ID NO: 394446 - DNA, 83 bp, Homo sapiens
gtgtcattacagtgatcatcataggcttatgtcttgctgcaggaaaggcagactacaagttactgagcacctccctgagaaaa

SEQ ID NO: 394447 - DNA, 100 bp, Homo sapiens
tttacatccacaatggcactgaggagaaggaggaggagatgagttggaaggatattgctgcatatcgagctaaaggaaagcctgatgcagcaaaaaaggg

SEQ ID NO: 394448 - DNA, 100 bp, Homo sapiens
cctatgatattcttctcctggttaatcaagaattctctatttctgctccgtcatccatgccactgtgtgatgaatgcagactctgctaccattttggctg

SEQ ID NO: 394449 - DNA, 101 bp, Homo sapiens
cggggacagctgagctggcatcagaagacctacgccttcagaaactggcgatggaatatgagaggagccctctggaaagaaaaggacagaccctgtgcttt

SEQ ID NO: 394450 - DNA, 90 bp, Homo sapiens
cgtaaatcctgccaggcttgccgcttcatgaagtgtttaaaagtgggcatgctgaaagaagctctcgtggcattatccttcagtggggct

SEQ ID NO: 394451 - DNA, 75 bp, Homo sapiens
gtcactttagccactgctactacagtaaaatgtttattggaggcttgagctgggatacaagcaaaaaagatctga

SEQ ID NO: 394452 - DNA, 89 bp, Homo sapiens
gcaaagggaccacggtcaccgtctcctcaggtgagaagccctaccactgcaactgggacggctgcggctggaagtttgcgcgctcagac

SEQ ID NO: 394453 - DNA, 100 bp, Homo sapiens
accggaggctctggatggaagccatggatggccgggaacctggaagccgtggcggacggagcagacggaggacctgaagcgagtgcttagggcagtggac

SEQ ID NO: 394454 - DNA, 100 bp, Homo sapiens
caaggttccaggaattactagagactccattatgaattattttaggactgacatgcacatgatggtgtccaagccagaacagtgggtaaagccaatggct

SEQ ID NO: 394455 - DNA, 100 bp, Homo sapiens
atactttctcttcaggatctgatctgaatgctgtgaaatcactaggaactccagaggtaatatttgaagctgaagtctcaggagggagaagtggttatat

SEQ ID NO: 394456 - DNA, 73 bp, Homo sapiens
tggggataacattcatgcagaacatcagagatggacagagacgtatgtgcgttggtctcctaagggcacctac

SEQ ID NO: 394457 - DNA, 100 bp, Homo sapiens
gggctatctggtatctgtagatggctacatgaacatgcaggcatcgttggcttcacagtatgactgatgatcctccaacaacaaaaccacttactgctcg

SEQ ID NO: 394458 - DNA, 100 bp, Homo sapiens
ggaaaacaaaggccgagagaccctgatgcccacagcccccaatacatactgccatgaaagaaagctcacctttatttgatgatgggcagccttggggaga

SEQ ID NO: 394459 - DNA, 75 bp, Homo sapiens
ctcgggcaagaccaccttcgtcaatgtcatcgcgtgactacctgtttaagctgcttttgattggcgactcaggcg

SEQ ID NO: 394460 - DNA, 134 bp, Homo sapiens
ttgctgagctggttggccctgtgatccctcaagactggtccacggagtgtatgaccacaaacagccatcaaggtgtcatggagaaactccagctgggcccagagattctgcagcgggaaaatccaaggcttatt

SEQ ID NO: 394461 - DNA, 80 bp, Homo sapiens
ggcggatgccctgcagtacctgcagaaggtctctggagacatcttcagcagtccacaggtcctggctaccctgggaagag

SEQ ID NO: 394462 - DNA, 100 bp, Homo sapiens
ctcgtccagagtctgcggacagcgcacgtccagggagctgcagtccatggctgaccaggagcaggtgtcaccagccgccatcaagaagaccatcctggac

SEQ ID NO: 394463 - DNA, 75 bp, Homo sapiens
ggcccaagaaatcaaaataaaggaaacacatttcatatactgcagtaactctcgaagtgataaaagctgtttctt

SEQ ID NO: 394464 - DNA, 50 bp, Homo sapiens
agctggctgagctatgttaccagggacagagcagaatgggctgatataga

SEQ ID NO: 394465 - DNA, 96 bp, Homo sapiens
ggtcatatcaatcatagcattttctggacaaacctcagccctaacggtggtggagaacccaaagcacccagtcagcttgaagagtttcaaatggac

SEQ ID NO: 394466 - DNA, 75 bp, Homo sapiens
cggagttgcgtcccggggacttggggccgcagggagaggagcagggacatggcatctctccggctgcacgcggcc

SEQ ID NO: 394467 - DNA, 50 bp, Homo sapiens
cgcctggtacaggagatatgcgatcaacaacccctccccgtcgtaaacgc

SEQ ID NO: 394468 - DNA, 83 bp, Homo sapiens
ctgagaacaggaccccccgcccccggactttgaacatgtcggggatcgccctcagcagactcgcccaggagaggaaagcatgg

SEQ ID NO: 394469 - DNA, 75 bp, Homo sapiens
gagagcaacgccattgcctactatgtgagcagaagtggagaggatgaatcacaagaggacgtgctgatggatgaa

SEQ ID NO: 394470 - DNA, 101 bp, Homo sapiens
aagatgttgtcctgtgctggggctgacaggctatgaactctccaaagtggaagggaaaacagggacccctgagaagcccctctcagaccttggcctcctat

SEQ ID NO: 394471 - DNA, 91 bp, Homo sapiens
gggttttagaaaaacaagaattacagcagccaacctatgttgccctgagttacataaataggtgtaggagctgcacgatctgggaacctca

SEQ ID NO: 394472 - DNA, 80 bp, Homo sapiens
gcttgaccttctctgtgacatccccctggattgctgtggaaactgcagcgacagcgaggaagagctccccacccgcctct

SEQ ID NO: 394473 - DNA, 100 bp, Homo sapiens
gaagtagttataaaagcaaacacaggattcaccacagtacttcacatcgtcgttcacatggggacttcactatgaccctgtacctgcggcattactggaa

SEQ ID NO: 394474 - DNA, 100 bp, Homo sapiens
cgtatgctgccgtggatctgatcagctgaggcctgagacacaggaccaggtgcactttacaggtccccgatgaaccaagagaaccctccaccatatccag

SEQ ID NO: 394475 - DNA, 100 bp, Homo sapiens
caggtctcccgaacctcacagccccgcagggaggaggagaaggggaggatttgactttggaagtctctgtgaccaggagggcgctacgacccctcgctga

SEQ ID NO: 394476 - DNA, 95 bp, Homo sapiens
gaaaagcaggggtgtcgtcatgctcaacagagtgatggagaaaggttcgctggtggaagttaaaggccccaatgatcgtctttcacataagcaga

SEQ ID NO: 394477 - DNA, 100 bp, Homo sapiens
cccatcatggctaaaagtgcggaggtcaaactggcaatatttgggagagcaggcgtgggcaagtcagagagtattatgagggaggccgaggacttcatgc

SEQ ID NO: 394478 - DNA, 100 bp, Homo sapiens
ccagcgtcgccaaggagagtatcccgctgttcacctacgggcctgatcaaacttgccttcctgttctccaagaccagccatgaagtcggggggcacgcag

SEQ ID NO: 394479 - DNA, 100 bp, Homo sapiens
caagacctgtatccaggaaaagagttcctggaataactattgctacagatattatctgtggttttcctggagaaacagatcaggattttcaagaaacagt

SEQ ID NO: 394480 - DNA, 100 bp, Homo sapiens
cctcccaccatggctctgaagagaatccacaaggtgtcatggagaaactccagctgggcccagagattctgcagcgggaaaatccaaggcttatttatgc

SEQ ID NO: 394481 - DNA, 90 bp, Homo sapiens
cctgtagccataaatgtctggctaatggcatttacaggagactgcttttcaggaagccttggacgctgcaggtgataaacttgtagtagt

SEQ ID NO: 394482 - DNA, 75 bp, Homo sapiens
acagcaagcccaggctcattatcagaactttacagactagcatggcaaagcttctctccgatcttagtgtggaca

SEQ ID NO: 394483 - DNA, 90 bp, Homo sapiens
atatggattaaaaagtgaacttttctctggacttccccagaagaagattgtggttgaattcagctctggacatcctgagcccaagtcccc

SEQ ID NO: 394484 - DNA, 100 bp, Homo sapiens
gggaacaattacagtggaggatatggtactcctgatggtttgggtggtgctcagattgatgacaacattccccgccgcaccacccagcgtatcgtggcgc

SEQ ID NO: 394485 - DNA, 50 bp, Homo sapiens
ccagaagatcacacagtgttaagccccatgtgccactcccctgatctgca

SEQ ID NO: 394486 - DNA, 80 bp, Homo sapiens
atcctggagcactcggtcatgtacccggtggactcggtgaagatttatcatagaatccccgactcagacccatcttctag

SEQ ID NO: 394487 - DNA, 98 bp, Homo sapiens
attgacatttaattttagggtcctttatatagaagggagagtagctgggcttcgctgacttgaacctggccgagtttgcgggctcgggctccacggtg

SEQ ID NO: 394488 - DNA, 101 bp, Homo sapiens
ggcattctggtgagcgcagcaggcaccactgtgaaggtctgggacgcagccaagcagcagcccctgacaggactcagaattcatgattgaagaaatgcagg

SEQ ID NO: 394489 - DNA, 75 bp, Homo sapiens
ccaccagcaaccatgagtggttccatgatgggaagtgacatggtttattcagtcaccatgaagctgctgctgctg

SEQ ID NO: 394490 - DNA, 90 bp, Homo sapiens
caacaaccctgacagagcagtggagtatcttttaatggatgttgcttcagagtgtgaagtcaaatgcatgccaacattccagttttttaa

SEQ ID NO: 394491 - DNA, 82 bp, Homo sapiens
cagcctgcggagcctgtggggcagcgtccagcctgcatgccgtgcggactgcacccaccagcaaggtgatcaagacccgcta

SEQ ID NO: 394492 - DNA, 50 bp, Homo sapiens
cccaaacaccctggagacgaattcctggatcagtgtcgtttagggatgtg

SEQ ID NO: 394493 - DNA, 100 bp, Homo sapiens
gaagacatctgcagtatcttctcccctgttggaccagcagaggagcagacattctgccttcaagttggaagttgaacagcagagcagcaggcaagatggc

SEQ ID NO: 394494 - DNA, 100 bp, Homo sapiens
gagtaggagactcagaatcgaatctcttctccctccccttcttgagtgttgcggagataggaacatgggagagaaacaatctgggtaacatgaaagtgat

SEQ ID NO: 394495 - DNA, 96 bp, Homo sapiens
aaaagaggcactgtgagaaaattgaaggctccaaatccttagctcagagctggaggatgaaggatcggatgttcctgcagcagccagctgtatccc

SEQ ID NO: 394496 - DNA, 82 bp, Homo sapiens
gcggctactgcgattccaaggagggcaaagcgtcctgcggtgtcgtgaaaactacccctaaaagccaaaatgggaaaggaaa

SEQ ID NO: 394497 - DNA, 131 bp, Homo sapiens
accaagatttgggctgagctgacaggaccagacgatggcttttacttgtcattgcaagtggctacagtttcagaaaagtcacgtataatggaactggagaaagacctagcattgagagtacaggaagtagc

SEQ ID NO: 394498 - DNA, 78 bp, Homo sapiens
cgaatgcatctaggtaccaatggagccaactgtggtggatatatttttgccatcatggatcagtttggagatatatta

SEQ ID NO: 394499 - DNA, 50 bp, Homo sapiens
cttcggcaagttcgatgaattagccacggcataatcaccagcaacacccg

SEQ ID NO: 394500 - DNA, 75 bp, Homo sapiens
gtttggaacttgcacggaagggaacagatgtgctggtggacggacagccatgtgaccgcgaggctgtggcggcct

SEQ ID NO: 394501 - DNA, 100 bp, Homo sapiens
aggagatgatctttcaaagagtccagaggaaaagaaaacagcaacacagttacatagtaaaaggaggcctaagtgaaaacttttggcccgtttggaagcg

SEQ ID NO: 394502 - DNA, 100 bp, Homo sapiens
tgcggaagatcgtcgccacctggatgctggagctgctggccaacgcagtcatcttcctgtgtgggaacctgacaggcgccttccacaagcaccaaatgca

SEQ ID NO: 394503 - DNA, 98 bp, Homo sapiens
gagggtgacgctcgctccgctcgtcccgctcgtcatggcctacccgggatacggaggaggggatgaaggtgaccaagcagcaagtgttgaagagctgg

SEQ ID NO: 394504 - DNA, 100 bp, Homo sapiens
ccatacttaagtagccagacaaatcaggacttaaagagagatctacttcagagccagcagtcccgccagaagaggctgagccacacactgagcccgagga

SEQ ID NO: 394505 - DNA, 80 bp, Homo sapiens
attcgcagtggtcgcttcttctccttggtcctggagtacaatgccattggaggcaagtataaccggggtttgacggtggt

SEQ ID NO: 394506 - DNA, 74 bp, Homo sapiens
ttcctcaccagaaactcctcttgcaaggtctgatggattctgtggagccgattacacctcaacaagaaggcaac

SEQ ID NO: 394507 - DNA, 100 bp, Homo sapiens
tctcaaactttactttgcctcatttgaggagtgggaacaggcttcggcgaacacaaagtttttacagagtcaagaggatcctatgaatttcccactgggt

SEQ ID NO: 394508 - DNA, 74 bp, Homo sapiens
gcagcatattacctatcaggagaggaggccaagaataaaatctttatgaactaacaagatgaattaaagatgga

SEQ ID NO: 394509 - DNA, 124 bp, Homo sapiens
aagggagatatgttgtgaaagaagcagtagcagtgaatctacagggacgccatcgaatccgtgggtaggagccaaacagcatgaattacaagtgaactcaatgcagctgctgtactaccaggct

SEQ ID NO: 394510 - DNA, 50 bp, Homo sapiens
gcgaggtcgcggcaggttcgaggccaagatgctgaattatcagggacact

SEQ ID NO: 394511 - DNA, 76 bp, Homo sapiens
gcttaataaagcttgatttgaaaacaaaatctgagaatggattggatttatgattggctacttgggctattgtaaa

SEQ ID NO: 394512 - DNA, 100 bp, Homo sapiens
aatttccagatccatcatgaaggaggggaaaatatcagtgcttcaccattaactagtaaagcagtacaagagtgtgctcactgatccgcctccagggcca

SEQ ID NO: 394513 - DNA, 82 bp, Homo sapiens
gtctggacctggactcacggctgcttggagcgtccgccatgaggagaagctccggaccaaaatttaacagtgccatccgagg

SEQ ID NO: 394514 - DNA, 100 bp, Homo sapiens
cctctgccctgaggattctgttttcttccctgatcctgatctcaaaattgttctatagtttaaactttcagtggctgagaggactactaactagtagaca

SEQ ID NO: 394515 - DNA, 114 bp, Homo sapiens
ctggacagcaaggcgtctcttattttgcgctcgaggttatggaacagcacatttctagagatgtttgatgttacagaaggagctcttgggactgtgagtcccacccacaatttt

SEQ ID NO: 394516 - DNA, 74 bp, Homo sapiens
gagaatttgaaaaatgaagatgatgtagacactggactattagttccagtctcatcagattttccatgtcctgg

SEQ ID NO: 394517 - DNA, 99 bp, Homo sapiens
ggagggcatgtcgggccgggagatcgctcagctggccgtgtcctggcaggtagtaagcattaataatgtctttcatctttgagtggatctacaatggct

SEQ ID NO: 394518 - DNA, 75 bp, Homo sapiens
ccaggatgtggagtggacttcctagcagaggtcactgaactgatgcaggagcagtcatacctgaagtctgaattg

SEQ ID NO: 394519 - DNA, 88 bp, Homo sapiens
agagaccaataaaaataaactgcttgaacatcctttgactggttagccagcattagtgccagcagtagttcccaagggctgtctcagc

SEQ ID NO: 394520 - DNA, 78 bp, Homo sapiens
gcgctcctgatctccgtgtgcagtacctccgccagatccacgccaaccacgagcaaaaagatggcacctttgcagcag

SEQ ID NO: 394521 - DNA, 80 bp, Homo sapiens
gcctgaggagcttgaatgtgacagggatttcttccagaaagcatgtatgaacgtattctcactggtcccgttgtgagaga

SEQ ID NO: 394522 - DNA, 100 bp, Homo sapiens
aaactgccccctgcccccggcgcgtcccccaggagccatcctgcccgcggggatcccgtcagccgagagcgaaatgtcatcagtgcagtcacaacaggag

SEQ ID NO: 394523 - DNA, 75 bp, Homo sapiens
ccccaggccttccctactcaacggtcaggaagtattaaggaaggttgaaacaagagagagagctggtgttaagtg

SEQ ID NO: 394524 - DNA, 83 bp, Homo sapiens
atgaaatttgctctgctaaaaggctccttcagtgagcaaggcatcaacgagtttctcaggtgccagatgtgacatccagatga

SEQ ID NO: 394525 - DNA, 76 bp, Homo sapiens
ggtactctttcctcgtggaatttgaagattctacagataaatcagaacgtgctggccaaagcgctctatgacaatg

SEQ ID NO: 394526 - DNA, 100 bp, Homo sapiens
tggaggaagcagaaaccagaaactttaaatcttgagaaaagaagattgtctatcatgaaggagggaactgtccaggtttattgctgccgggagactacac

SEQ ID NO: 394527 - DNA, 100 bp, Homo sapiens
cggcaaggagagacgtcgctgaggggcttgcctgaagcgaggggtgggcagtctcttctgttatgacgaggcaaaaccaaattcccacagaggatggttc

SEQ ID NO: 394528 - DNA, 108 bp, Homo sapiens
tgagtcggtctggaaatcaagtgtcagagtttatatcaaacacattcttaggaaagtaatggtccaacagacagttatgcagctatttcacaagtggatcgattgcag

SEQ ID NO: 394529 - DNA, 87 bp, Homo sapiens
ccttctctagaccttgccaagatggcacaggtttcagcaagcagatggtggaaattcttcacaaacataatattcagtttagcagtt

SEQ ID NO: 394530 - DNA, 82 bp, Homo sapiens
acgagcagatcctggtcctcgatccgcccacagacctcaaattcaaagatgtccagctcgccgctgtccaagaaacgtcgcg

SEQ ID NO: 394531 - DNA, 74 bp, Homo sapiens
atgaatttgttactttttcttgtccgggtgcggataagggacccgacactgattacatagtggaatgtcatggg

SEQ ID NO: 394532 - DNA, 100 bp, Homo sapiens
ttctaccctgaggaggaggcgcgtggtgagaggagaggtggaccaggtgctctgaggctggcgtacagacacagcacgtgcgacggagtggtgttggtcc

SEQ ID NO: 394533 - DNA, 90 bp, Homo sapiens
gaatgagaatgaatctgaaaaaagagaactggtattcaaagaggatggtcaggcatgtgacaaactttcaacatcaactatgagtttgcc

SEQ ID NO: 394534 - DNA, 100 bp, Homo sapiens
aaattaccgagccagccagcaggaaatacagcatcattcagagagaagaatcgacctgcactgccatccacacagatatcatggacgactggctggactg

SEQ ID NO: 394535 - DNA, 90 bp, Homo sapiens
ggccttttgggcagcttttccggcctgacaacttcatctttggtgggagctgctatttctatgacgtacatcacaagcaaacccatcgtc

SEQ ID NO: 394536 - DNA, 83 bp, Homo sapiens
ccaggatctcgggctcggaacgagactgcacgtgacagacatcacacctccagtgcaatccctgttcctaagagacaaagctc

SEQ ID NO: 394537 - DNA, 82 bp, Homo sapiens
ccgccgctgcgggcccgctccgacgcggaagatagcctgggctggaagctcttctacgtcacaggctgcctgtttgtggctg

SEQ ID NO: 394538 - DNA, 98 bp, Homo sapiens
ggaacagatggatggcaccgtcactctcaaggatctccgtgtagaactccttggagagctggtggaggccattgtcttgccaatgaaccacaaggaga

SEQ ID NO: 394539 - DNA, 97 bp, Homo sapiens
cctttatatagaagggagagtagcatacatcaagagagtgatcgcacacccatccttccataatatcaatttcaagcaagcagaaaagatgatggag

SEQ ID NO: 394540 - DNA, 73 bp, Homo sapiens
ccgacgaaaggatgccaaattataaccccgttttcacacgaatggccccttcacatatttgaagactaccgtc

SEQ ID NO: 394541 - DNA, 131 bp, Homo sapiens
caaaaatcttaaccttcaaccatctggggaaaaggcaaaaatcccatctaccgcaactctcagttcgagagtaaagtttggaaattttagcattcaggtgccaggaatgcagatgggacagccagtgccag

SEQ ID NO: 394542 - DNA, 100 bp, Homo sapiens
gacaagtcggtgacaatccaggctcccggggagcccctgctggacaatgagtccacacgaggggatgagcggaatcctcactatggatgggctcattgag

SEQ ID NO: 394543 - DNA, 87 bp, Homo sapiens
ttgagtcagacctgtaggcctgatagactgattaaaccacagggacagagcagaatgggctgatatagatccggtgccgcagaatga

SEQ ID NO: 394544 - DNA, 49 bp, Homo sapiens
caagtaatggtgcaaagcctgaagatggccaggccatgttatgggatct

SEQ ID NO: 394545 - DNA, 101 bp, Homo sapiens
cccgtgcccacatcaaggagtatttctacaccagtggcaagtgctccaacccagcagtcgtgagcaatttacagcaatgagggatttatacatgaaaaatg

SEQ ID NO: 394546 - DNA, 75 bp, Homo sapiens
gtttctgtcgctgcagtcgtccgcgggatacagttgatatattagttggatggcatatagatcatactcagaaac

SEQ ID NO: 394547 - DNA, 82 bp, Homo sapiens
tcagctttcctcagcaacatgaagtctcggccctgggaggagcggggacactgaggacctctctccaaattggcctctcaac

SEQ ID NO: 394548 - DNA, 50 bp, Homo sapiens
ggtttggacatactacatggatcagattctacttcaaagaaatcctgcca

SEQ ID NO: 394549 - DNA, 73 bp, Homo sapiens
acttcttgccacaatgttacagagattgtccccttggggcggaaagaagccaaggccaaggagctggtgcggc

SEQ ID NO: 394550 - DNA, 104 bp, Homo sapiens
agatcgagaagcagctgcggcgggacaagcgcgacgcccggcgcgagctcaagctgctgctgctcgcttcggaaccaaaaagaagcttcccagagccggggcca

SEQ ID NO: 394551 - DNA, 75 bp, Homo sapiens
cgcgtcccaggaggagcaggacgaggagattgttgtgtccactgtatcctggcttgcttgttctgcgaattcctg

SEQ ID NO: 394552 - DNA, 50 bp, Homo sapiens
tacatctgcaaaaagaccctttttccaacctgagcatcagcggggaaggg

SEQ ID NO: 394553 - DNA, 98 bp, Homo sapiens
gtgacagcacacccaccacaaaaccccagtggagtttggaacttgcacggaagggaacagtccaatatcagatggaaatgatgcggagccttcgccat

SEQ ID NO: 394554 - DNA, 82 bp, Homo sapiens
tgcaccagcaagatcggcaggcgagattgcctgacccaggcctgctcggccctcacaggggacccagacatggagctgcggg

SEQ ID NO: 394555 - DNA, 100 bp, Homo sapiens
cctgggggcacacaggtgctggatggtacctcggggttctctcctgcccccaagctgggccatcatctgtgcgatctctgcggtggacgaggtggactac

SEQ ID NO: 394556 - DNA, 75 bp, Homo sapiens
tgtgaagcggccaatggcacggaggcctgcgtgcggtgcgtctttctacgtgaataggattttgtggctggccag

SEQ ID NO: 394557 - DNA, 90 bp, Homo sapiens
tccgcgagatcctaggggaccaggacttcttccagtgcgaggatgaactggaagaggcaaatggaaacaatcccattgacattgaggttg

SEQ ID NO: 394558 - DNA, 82 bp, Homo sapiens
aattttggagaattacgattagaatttgccattttcagtggaaaacaagtggtcgttactagctaagatgtgtttgtacttt

SEQ ID NO: 394559 - DNA, 90 bp, Homo sapiens
gctgtgcagccgcgaggaggcgcgggaggtgttcgagaacgaccccgagacgttcaaaaggtgatgacctatcaacagccattctcaaac

SEQ ID NO: 394560 - DNA, 83 bp, Homo sapiens
acgggccacggccatttccttgatgcgcaagttcattgcctaccagttcacagacacgggcttcccacggcacgacatggaga

SEQ ID NO: 394561 - DNA, 74 bp, Homo sapiens
tgcaacatctgggatgccatgaagggcgaccgtgcaggacgcgtgaccaaaaccaaagacggccatgaagtgag

SEQ ID NO: 394562 - DNA, 100 bp, Homo sapiens
ttgttgcctccatgcgccaatccaaaccgaaagccagaagaatagcctaacatggcagaccagagacagcgctcactgtctacctctggggagtcattgt

SEQ ID NO: 394563 - DNA, 98 bp, Homo sapiens
tagactggaagctttactagaagctgcagatgtgagtatgcagtgctcacaggatatacttcgaatgctcctctctcttcagccagttcttcaggatg

SEQ ID NO: 394564 - DNA, 82 bp, Homo sapiens
gtgcttctgcctaagaagaccgagagtcaccacaaggccaagggcaagtgatttgacagccttcaaaacctcttacattcca

SEQ ID NO: 394565 - DNA, 144 bp, Homo sapiens
ggtttaataatgatagaatgaagaccacaataaaagagacctctacttagctcagcaattcttaccttgttgcaaaagcttctcatttcagagagatgccaggatcctaagtgcctgccaaacttaccaattctaaggaataag

SEQ ID NO: 394566 - DNA, 82 bp, Homo sapiens
attttgcaccccgagtacctgcagcccctgccttccacgccggtcagccccatcgagcctgcctgctccgcttcagcggact

SEQ ID NO: 394567 - DNA, 75 bp, Homo sapiens
atcccgaccccaaaagagtattcttggatcttgcacaggaaggaattaaagaaagctgacttcatgagaccgagg

SEQ ID NO: 394568 - DNA, 80 bp, Homo sapiens
gggcgccatttgccagtgatggaccgtgctagtgacctgactgatgccttcgtggagacaatgcagatcttcgtgaagac

SEQ ID NO: 394569 - DNA, 75 bp, Homo sapiens
cctggagcggccgccttccagcgtcgtgatatcattgggcttgcagaaactggctctggaaagacaggcgccttt

SEQ ID NO: 394570 - DNA, 112 bp, Homo sapiens
cgcgtctgcccggccaagaggcaaaggggaggttacgcagcaaaccatccagaaggtttggtgcacctcgatttggaggaagtagggcagggcccttatctggaaagaagtt

SEQ ID NO: 394571 - DNA, 100 bp, Homo sapiens
cctcagcctcccgggtagctgggactacagagtgatcagcagctggactgtgccttggacctaatgaggcgcctgcctccccagcaaatcgagaaaaacc

SEQ ID NO: 394572 - DNA, 75 bp, Homo sapiens
caaaccaaactggagctggtgcagcaggaattgggatcgtgtcgctgcgctgcggttggatttctcacgatgtcc

SEQ ID NO: 394573 - DNA, 100 bp, Homo sapiens
atatgatgcaagatgtggcagaagaacaagaagttgagaccgagaatgtggaaacagagagacaagagagacacctccaacttcgacaaagagttcacca

SEQ ID NO: 394574 - DNA, 82 bp, Homo sapiens
ggagcaggggctggaggaggaagaagaggtggatccccggatccaggttgaaatcacaaagattagacacctttttagatag

SEQ ID NO: 394575 - DNA, 76 bp, Homo sapiens
cgatgacgcgctcactgttcaagggaaacttttgggcaatctttggcagccagacactacctaactccaatttatg

SEQ ID NO: 394576 - DNA, 100 bp, Homo sapiens
ctcttctgcagaaaaagaggctcttcctcctcctcccgcgacgaaactgccaagttttggaccttatctggaacagcgcaagaaaatcatagcagaaaac

SEQ ID NO: 394577 - DNA, 75 bp, Homo sapiens
gaggcgaatggccgaatctctccgattcacaatgacatcctttcaagaagtcccattgcagacttccaactttgc

SEQ ID NO: 394578 - DNA, 100 bp, Homo sapiens
aagatggtgaagcagatcgagagcaagccgctgccatggcccagacactgcagatggagatcccgaacttcggcaacagcatcctggagtgcctcaatga

SEQ ID NO: 394579 - DNA, 74 bp, Homo sapiens
agtccctgaaagcattaccgggttcgctaggctcacaggtatccagctcacatagaagacattgactacgagga

SEQ ID NO: 394580 - DNA, 88 bp, Homo sapiens
gcagaggtcagatatcttcaggagagaagaagaaggaggttcctgctgtgccagaaacccttaagaaaaagcgaaggaatttcgcaga

SEQ ID NO: 394581 - DNA, 82 bp, Homo sapiens
aatcagcacttcctctgcgggagatcatccgtcggctggagacatactttgaagacaaccctagggacctccagctgctgcg

SEQ ID NO: 394582 - DNA, 98 bp, Homo sapiens
ttgtttgtctacctgggactaatcatggaagggaagtggttgctgtgtatgttactggtgcttggaactgctattgttgaggctcatgatggacatga

SEQ ID NO: 394583 - DNA, 100 bp, Homo sapiens
aacgatcagcacttcagtcggaaagttggaacctctgacaagaccaagtactaccttcaagggatacctcagacaatggcagcttttggattgaaatatt

SEQ ID NO: 394584 - DNA, 82 bp, Homo sapiens
ggaagctgagggcacgtgtttgcggttcagccctttgatgaccgcagcagggtggcccggtggaaatcctgccctttctgta

SEQ ID NO: 394585 - DNA, 50 bp, Homo sapiens
gaagatgatacctttctaacagcccaactgcagcttatcttctggtgtcc

SEQ ID NO: 394586 - DNA, 82 bp, Homo sapiens
cttgcagcttgctggagagaagagcagtgagaagatgtgaagttcatttccaatccgccctccatggtggcagcggggagcg

SEQ ID NO: 394587 - DNA, 100 bp, Homo sapiens
agccccttcgcccctgcaacaggcacttctccccaccgtccgtctccaagagagtatgaagagagtgcgtctgtagggcagggaagatggcggacaagcg

SEQ ID NO: 394588 - DNA, 98 bp, Homo sapiens
cgcagaatgcttctcagcagcaacatccccaaacagcggcgtttcacggtggcacatacatgctcccctcccacccggtcactccgtccagcaagcac

SEQ ID NO: 394589 - DNA, 74 bp, Homo sapiens
ggctgctgcagctccgcctcctccgccgcgcagcaataggagtgaaacatccacatctgataacacagaaactt

SEQ ID NO: 394590 - DNA, 75 bp, Homo sapiens
gaggcgcggaggcgcaaggaggatgaagttgaagagtggcagcacagggacaaggtccggcagagccttcagcag

SEQ ID NO: 394591 - DNA, 74 bp, Homo sapiens
tatgcgcccagcggattctacattgcctccggagactcaaaaaaatgcctcagtcaatgccagaatatgctctg

SEQ ID NO: 394592 - DNA, 50 bp, Homo sapiens
ggcagggcaggcagctccaggaggaactggacataagtgtgtgcttcact

SEQ ID NO: 394593 - DNA, 80 bp, Homo sapiens
cagctcatgaatagactctcccatcccaacatccttagttaagtgggcagaccaacatccacctcagcaaaaacttcttc

SEQ ID NO: 394594 - DNA, 100 bp, Homo sapiens
gttggatgaattaatgaaccttgacccacaccaagggcctgcttccgcgaggccaacatcccaacccacttcgggagaagaaccgacaggtgaacgagct

SEQ ID NO: 394595 - DNA, 89 bp, Homo sapiens
cgtcttcatcgtcgcggttctgctgccgcaggaacgaatgcaggaatttgggaactgagctgtgcaagtgctgaagaaggagatttgtt

SEQ ID NO: 394596 - DNA, 100 bp, Homo sapiens
aaggaatgcaagggccacctgttcctcagttccaaccacaggtctagtgacggagcccgcgcgcggcgccaccatgcggcagaaggcggtatcgcttttc

SEQ ID NO: 394597 - DNA, 100 bp, Homo sapiens
agccacagaagaaatgtcaagaatatgaaatgagtctggaaaactgggccaaagcagtgaaacgctccatgaattgttccgccatggagtcatagttgca

SEQ ID NO: 394598 - DNA, 100 bp, Homo sapiens
taaagaactacctgttaatgcacaaaactatgttcgatttattgaagatgagcttcaaattccaggtgtggccgacgacgatgccctcgctgaggagcgc

SEQ ID NO: 394599 - DNA, 95 bp, Homo sapiens
atgacacaaaatcccagatctacctgacgggcctgcgagggttgaagattgtgaagcaatagcctaaggttgcacgttttcaaaaaatacctaat

SEQ ID NO: 394600 - DNA, 75 bp, Homo sapiens
gacgaaggggcttcttccagagccaaggaggaagggttgtccgggcttgaaactgttacaatatggctttccttg

SEQ ID NO: 394601 - DNA, 83 bp, Homo sapiens
accacaattggaaggcatgaaaattcagaccttgttttacagggagaagatgtcaaccggacactagaaggtggaaggaaacc

SEQ ID NO: 394602 - DNA, 75 bp, Homo sapiens
gggagcacgtcatcgccatcgaagatcaatgagctgagcaatgttcctgttcctgtcatgctaatgccagatgac

SEQ ID NO: 394603 - DNA, 83 bp, Homo sapiens
cagaagcatgcggcccaggttcgccagcagcccaagagcctcaaacacggggtcactctggtgcccattgaggagttcagccc

SEQ ID NO: 394604 - DNA, 83 bp, Homo sapiens
ggacagtatgaggcaagcgcagggggacggggaccagcagctgtcgccgccgctctcaggttcgatacaagaggctgttttcc

SEQ ID NO: 394605 - DNA, 100 bp, Homo sapiens
agttaccgaaagattgcagacagcattgggtgctcaaccaacaacattttgtttctgacagatgttactcgaggcccgatgagagaaagggaaagttaag

SEQ ID NO: 394606 - DNA, 90 bp, Homo sapiens
caaaatgacagatcttctagaagaaggtcttcgatgccaagaacatgatggctgcctgtgacccccgccacggccgatacctcaccgtgg

SEQ ID NO: 394607 - DNA, 101 bp, Homo sapiens
cgagactataaggatgaacagggcagacttctctgtgagctcttcattagggcaccaaagcgaagatacttggcatatcgaaattttatgattgacacgta

SEQ ID NO: 394608 - DNA, 100 bp, Homo sapiens
gaccacaataaaagagacctctacttagctcagcaattcttaccttatcctattgatcatcgcttcagttattgggatcattgtctataggctctcggtg

SEQ ID NO: 394609 - DNA, 100 bp, Homo sapiens
tgaatgtgcgagtccatagctgaagaggagcgccagatggtggaggaatacacttatttatgaaatcctggtgtatagcctggaagcaggacgccgcctc

SEQ ID NO: 394610 - DNA, 87 bp, Homo sapiens
atgaaagttttcagcctcatccagcaggcggtgacccgctaccggaaggccatcgccaagagccctcaggactgcccccggaccctg

SEQ ID NO: 394611 - DNA, 51 bp, Homo sapiens
ccaaactcttcattttctctatgccttcaattaagttgcagagttctgatg

SEQ ID NO: 394612 - DNA, 100 bp, Homo sapiens
aggtccgctacgtaaatccctttgcggcggcttgctcacttccgacagagaaaaacaaaaggtgacagttcgcattcggagaaaaagacggcgaagagga

SEQ ID NO: 394613 - DNA, 82 bp, Homo sapiens
ctgtttgtattttggctgctgcaggagccattttagatgtggaagatgtcaagtttgtgatcaactatgactatccaaacag

SEQ ID NO: 394614 - DNA, 85 bp, Homo sapiens
ccctctagccccgctaccggactacatgtcggaggagaagctgcaggagaaaggtgcacagcgacttcaccgcggcagccaccag

SEQ ID NO: 394615 - DNA, 100 bp, Homo sapiens
ggccttcgagtacatctccattgccctgcgcatcgatgaggatgagaaaggtagaagagtcagcaatgatgggagtaagtggctatgtggagtatctccg

SEQ ID NO: 394616 - DNA, 101 bp, Homo sapiens
gaatccagaatagccctcagaagaaagattctggaggaaaggtttacaagcaggccacgattgaatctctgaagtgcatgcaagatatgggaaatactaaa

SEQ ID NO: 394617 - DNA, 75 bp, Homo sapiens
ttcctcatctgggacactgctggtcaggaacggccctggactttgtctcacaagatgaaatgttgacgcccctgg

SEQ ID NO: 394618 - DNA, 75 bp, Homo sapiens
gacggttttcgtacgggcggccgtgcgcgaggcgaggcaagaaaattggatgtatattttgaatatgaagaaaaa

SEQ ID NO: 394619 - DNA, 80 bp, Homo sapiens
tcagggatgagtcatgtggcagtggaaaatgcgctcgggctggaccagcagataacgaaggaggcccaacttcattcaat

SEQ ID NO: 394620 - DNA, 100 bp, Homo sapiens
tgattcttgtgggtggcatgactaggatgcccaaggaaatgactgttgaaaacagaattgctgaaactcacagcaagagctgtgttccagttagctttgc

SEQ ID NO: 394621 - DNA, 96 bp, Homo sapiens
cgatcatctctgagagtcctaagacatggacttgagtcggtcggtcggggtctgtgcccacagagacatgaggctgagctggttccgggtcctgac

SEQ ID NO: 394622 - DNA, 115 bp, Homo sapiens
cgggagcgcaaggtcgccctcaaggccatgatcaaaacgggctgaggaagctgccctcgaaaccctccagaagacatctgtcctgcagaggccctaccactgcgaggcctgcggg

SEQ ID NO: 394623 - DNA, 98 bp, Homo sapiens
gggcaacggcggggtggtcaccaaagtccagcacagaccctcgggcctcatcatggccaggaagctagctctacaaagctttgacactgtccagaaac

SEQ ID NO: 394624 - DNA, 76 bp, Homo sapiens
agatgcagatgagaaggttcagttggcaaaccagatatatgacttgactgacgacaacagtggagacttggaccca

SEQ ID NO: 394625 - DNA, 100 bp, Homo sapiens
aggatgtctccatcccacactgcccagctgggtggcggagtttgtggatcggatattccttcctcatggtgaccctggcagcaaccccaacaaacgccag

SEQ ID NO: 394626 - DNA, 75 bp, Homo sapiens
ggagttcagccaggacgtctacctgtccaccgtcgtgaccgagcttgactcatggtatgttattttaaacggcac

SEQ ID NO: 394627 - DNA, 98 bp, Homo sapiens
ggagcctactatcacgacgggaagctgtgggtcctagaccagaaggagcacaggctggatggccgtgtcattgaccctaaaaaggccatggctatgaa

SEQ ID NO: 394628 - DNA, 101 bp, Homo sapiens
ttgaaaagtagttaatggcagtggtggtatgaagctatgtgatgatgatgccatttaaacgacaggctctagtggaatttgaaaacatagatagtgccaaa

SEQ ID NO: 394629 - DNA, 89 bp, Homo sapiens
ccgccatgcaaggctggcgcgtctccatggaggtgaatgaaaactttgccattgatttgatagcagagcagcccgtgagcgaggtggag

SEQ ID NO: 394630 - DNA, 90 bp, Homo sapiens
attagaaattccgcgggcggtgtagaggcggcggacgggccggagggaggatgttaaagccccgcgaaatgcactcggtgatggaaagag

SEQ ID NO: 394631 - DNA, 95 bp, Homo sapiens
ccagtggccacagcatctttgtctagccccagtgcagatggtggtgtggtacctatttcagattgtttcagcagtgagctgcatccataaagctg

SEQ ID NO: 394632 - DNA, 100 bp, Homo sapiens
cggggaggcagcgcgggatcccagcctcaggcgtgcgcggacggtgtgcggaattagacctttacgagaagcacagttttgtcttcagtttcctctcccc

SEQ ID NO: 394633 - DNA, 75 bp, Homo sapiens
aatagacaatccatctccaactttcatgtgctgctcttacagactgaggctcttgcagccaatgccggaacagga

SEQ ID NO: 394634 - DNA, 100 bp, Homo sapiens
cgctccgggctccgacccacgggccggccggccctgcccgggctgggtgaggggcgcccgcctcaagctagaggtgtcgatcctggacaccaccaggctg

SEQ ID NO: 394635 - DNA, 100 bp, Homo sapiens
caggaagtggccgtcctgagcgccatggctcactccccggtgcagtcgggcctgcccggcatgcagacaatgcagatcttcgtgaagactctgactggta

SEQ ID NO: 394636 - DNA, 89 bp, Homo sapiens
cgccctgagtcactgcctgcgcagctccggccgcctggctccccatactagtcgccggttgtccttctattcaggccactcttcgtttt

SEQ ID NO: 394637 - DNA, 90 bp, Homo sapiens
gcagcgggggcagtcagagcggagccaagatgcgaatgggatcgaggagctgctagagctgctgatgactgagatcctgcaccccagcag

SEQ ID NO: 394638 - DNA, 75 bp, Homo sapiens
caaatcagagagaaggaatccaccttcttacgctatggcagaccaagatcactccatggatgaaatgacagctgt

SEQ ID NO: 394639 - DNA, 106 bp, Homo sapiens
accgagcagcccccactgccgcagcagacacagcctccagcaaagggcgagctgaggatcagtgtcctgcctgcctacctgtcctatgatgccccatggcctgtca

SEQ ID NO: 394640 - DNA, 74 bp, Homo sapiens
cccccaacaccctctacgaaggcggctacttcaaggttgagactgagctaaagttaatctgttgtgacattctg

SEQ ID NO: 394641 - DNA, 100 bp, Homo sapiens
tatttcttttctctcttcagcccccaacccagtggaggcagttatacttaagcatgaacattgacgacaaactggaaggattgtttcttaaatgtggcgg

SEQ ID NO: 394642 - DNA, 74 bp, Homo sapiens
ccgttttggcattgctgctaagtacatgctggattgtagaacttctctctctgaacttgatgggaaacctgctt

SEQ ID NO: 394643 - DNA, 75 bp, Homo sapiens
tcctcagccaccgctccctcttcccacgcacttttcaggattagaagaggctgtgtatagaaacatacaagcttg

SEQ ID NO: 394644 - DNA, 75 bp, Homo sapiens
tcctgcaccaaagggagccgccaccgtctggtgtctaaaccgcctcgggtttggtgcacctcgatttggaggaag

SEQ ID NO: 394645 - DNA, 88 bp, Homo sapiens
ttcgtctcttacgtctgcggaagtgcagctgcctcagttcttagcgcagctctgttgacattggctcttgaaggcaaacttcataatg

SEQ ID NO: 394646 - DNA, 90 bp, Homo sapiens
cggatcgggtggagtgtaggtcatatcgccgcgttgatcatggccttgccaggttggtgacagtatattgtgagcatggtcataaagctg

SEQ ID NO: 394647 - DNA, 100 bp, Homo sapiens
gtgagagagagctattagagattgtgaagaagaatttcgatctccgccctggggtcattgtcagctgtcccagaaaatacttgacaaattggaggactac

SEQ ID NO: 394648 - DNA, 100 bp, Homo sapiens
acgacaagcagtccctgaccttccagaacgtggtcttcaatgtcatttatcagagcgcggcggtcttcaagctctcaggcgagctgaggatcagtgtcct

SEQ ID NO: 394649 - DNA, 83 bp, Homo sapiens
ggaagaagtccgcggccaggacacagttccggaaagcacagccaggaactgtggctgcaccatctgtcttcatcttcccgcca

SEQ ID NO: 394650 - DNA, 75 bp, Homo sapiens
tgaaatgaagctggacttggagcttcacgttacagcatggaagctgttgccaagtttgatttcactgcttcaggt

SEQ ID NO: 394651 - DNA, 74 bp, Homo sapiens
ttgtctttatatcctgacactatgaatgctacttggatgcctcttaagaaagctggggccttggaaggtgtgcc

SEQ ID NO: 394652 - DNA, 100 bp, Homo sapiens
tggaggacgaggagagacagaagaagctggaggccggcaaagccaagactctaaaatagagctcaagcttgagaagagagaaccactaaagggcagagca

SEQ ID NO: 394653 - DNA, 100 bp, Homo sapiens
ccgggtttggtagagtgacttctattcactaaaaccatgtgtctgaactgaagaagcttgggctcacttccacaaatgacacaattggagaaactggtta

SEQ ID NO: 394654 - DNA, 98 bp, Homo sapiens
ggagcacggcttattgctcatgcaggttcccagtagctgcagcagtgaaagacagtgattggctccagtgctcccagaaggatttgggctgaagccag

SEQ ID NO: 394655 - DNA, 95 bp, Homo sapiens
ggcctgatggagagaagaaggcatatgttcgactggctcctgattacgatgctttggatgttgccaacaaaatctgctttaacgttggaagtgga

SEQ ID NO: 394656 - DNA, 74 bp, Homo sapiens
ttcaggaacctccgtgatcgatttggcattgatgaccaagattacttgcttaattggcttagtgtcgacttcaa

SEQ ID NO: 394657 - DNA, 88 bp, Homo sapiens
gggagcggctgggcaccggcggcttcgggaacgtctgtctgtaccagcatcggtttgaaattggcacaatggaagaagctggaatttg

SEQ ID NO: 394658 - DNA, 98 bp, Homo sapiens
accatggatgacttggggaccttgtatggacagaactggctcaatgaccaggcatggaagttgtaaaggttggaggtcccgtctacaggattggagtt

SEQ ID NO: 394659 - DNA, 75 bp, Homo sapiens
caagaaggcagtggctggacagcagcagaggccccacagtatcaaatatccgcctggctggattagagtatgttc

SEQ ID NO: 394660 - DNA, 90 bp, Homo sapiens
ataagaaaggtgatattgtagacatcaaggtcctggagctggactccatccgcagccaccactggtgcatccagggctgcagcgccgtca

SEQ ID NO: 394661 - DNA, 83 bp, Homo sapiens
gttgattctgaccatttctcatgaacagaaacacctaggaagggagaactgatagcctgggctggaagctcttctacgtcaca

SEQ ID NO: 394662 - DNA, 100 bp, Homo sapiens
tatcatcaccatggaaaaagtgacttgagcaggtactccaaagattcaggtttactcacgtcatccagcagagaatggaaagtcaaatttcctgaattgc

SEQ ID NO: 394663 - DNA, 75 bp, Homo sapiens
ggccgggggcgtctttcagagcattacggtggataattactgtaccttcctcatggaaaaagttttatttaaagt

SEQ ID NO: 394664 - DNA, 99 bp, Homo sapiens
tgggccgccgtcggcagcaagaacagagagagaggtggacagatctgagagatactgagttattttaccaagaaaatggtttgcacgactttgaacata

SEQ ID NO: 394665 - DNA, 90 bp, Homo sapiens
gagagaacaatgataaagaagaagaagagaagaaagatgaaacttcgagctcctctgcattgatatgaaccatggacaagtatattctgc

SEQ ID NO: 394666 - DNA, 75 bp, Homo sapiens
ttcagagagaggaagccgaaaacaccctgcaatctttcagacagtttggtgccctggttgtcagatgttggaaag

SEQ ID NO: 394667 - DNA, 87 bp, Homo sapiens
tttgacgaccatgactccgtggataagattgtcagagagcctgacaaggagctgaatcctaagaagaagatttgggagcagatccag

SEQ ID NO: 394668 - DNA, 74 bp, Homo sapiens
ggtagagaacgttgtccacgaggacttccaggtcacggaggaggtgaaagtttataacaaaatcgaccagatct

SEQ ID NO: 394669 - DNA, 87 bp, Homo sapiens
ggcaaagagtcacctaaagttaggcggcactccagccccagctcgggggaaatttgcagtggtgagaaaatgtataaagaaagattc

SEQ ID NO: 394670 - DNA, 124 bp, Homo sapiens
tacaggaacctgctttctctcgatgaggataacatccctccagaagatgacttaattcagtgcacaaatgagatgaatgtgaacatcccacagttggcagacagtttatttgaaagaactacta

SEQ ID NO: 394671 - DNA, 75 bp, Homo sapiens
ggcagaccttcaagtctcactttggccgggacttaaccaccaccatgtcgagcaaaagaacaaagaccaagacca

SEQ ID NO: 394672 - DNA, 90 bp, Homo sapiens
acaatgatgggtcttcgggattcagcgttctggttgtgtgttggatttgacatagatgaagacgcattggaaatatttaataggaatgca

SEQ ID NO: 394673 - DNA, 101 bp, Homo sapiens
agttcttcgggccagggacacggctcaccgtgctaggattgtcagtggcttcgccccgaggagagctgactgccctgggctgctgcctccggcagagctga

SEQ ID NO: 394674 - DNA, 50 bp, Homo sapiens
ttttattggtctacaaagacagcaattcagtccctgtcaggacgccctcg

SEQ ID NO: 394675 - DNA, 89 bp, Homo sapiens
aacaagtgtctttggttataaattatgatctacctaccaatcgtgaaaactatattcacagccctggtacctgacagtgtaaagaagga

SEQ ID NO: 394676 - DNA, 83 bp, Homo sapiens
caggactgcgccgcgtcttcctcaagcatcaagatggtgctcatgtggaccagtggtgacgccttcaagacggcctacttcct

SEQ ID NO: 394677 - DNA, 83 bp, Homo sapiens
tggacagcaacctagtcagtctgcatttggctctggaacaactcctaattctatgcctccggagccagcgtggtggccataga

SEQ ID NO: 394678 - DNA, 100 bp, Homo sapiens
cgggccctcggcagggaggatgacggagctgcagtcggcactgctactgcgaagacagctggcagtttctcttcagcaacgggtagcagaattggaaaaa

SEQ ID NO: 394679 - DNA, 83 bp, Homo sapiens
gtcgcgtgtctaggtgagtcgcggtgggtcctcgcttgcagttcagcgaccacgcaaaatgatgcttcaacacccaggccagg

SEQ ID NO: 394680 - DNA, 50 bp, Homo sapiens
cggcagagacaccttctggcccgataaacccactgccctacagccgcgtg

SEQ ID NO: 394681 - DNA, 97 bp, Homo sapiens
ggaggggagcggagcccggagcgtcgtggaaaggtaaaaaagctccagttttatttaataaagaaatgattgagtcaatgaaggaaggttcagttgt

SEQ ID NO: 394682 - DNA, 75 bp, Homo sapiens
tacaagcagcagtggggacgagctttgaaagaacttgccagacttaaacaggtggtcactaactgccaagagaga

SEQ ID NO: 394683 - DNA, 50 bp, Homo sapiens
cccgcttcggagagagaaatgctggggtgattgctggcttcaaccgcctt

SEQ ID NO: 394684 - DNA, 75 bp, Homo sapiens
tgaatgtgacgtgaatcacgctacactggcggagaacgggctcgcggacaaggcaaaatctcagcaagttcggac

SEQ ID NO: 394685 - DNA, 90 bp, Homo sapiens
agcgtgaccgagagcgcgaatatcgtcatcgttagaaggtctcggcgcggaagatggccggcggcgtggacggccccatcgggatcccgt

SEQ ID NO: 394686 - DNA, 50 bp, Homo sapiens
gcacaaaggagttacatcttaacacagaagaataactgtgtgatgcctga

SEQ ID NO: 394687 - DNA, 100 bp, Homo sapiens
atacccgcaacagccccttcgtcccaaaccatagtcttgagtttacttatgaggtcaattggaaataagaacaccattttactgggtctaggatttcaaa

SEQ ID NO: 394688 - DNA, 74 bp, Homo sapiens
gaagagctgcttctgtatcttaaggtatcaaggttacattggtgcagccctagttttagggggagtagatgtta

SEQ ID NO: 394689 - DNA, 90 bp, Homo sapiens
tcttcgaaatttcattcgaaatgagactcatacccctgaatggttggacagtgattcctgccaaaagtgtgatcagcctttcttctggaa

SEQ ID NO: 394690 - DNA, 75 bp, Homo sapiens
acttactcagatttccctgctcaccagggtttggcggcacctttggaagaagttgaagctttgatatgagtaaac

SEQ ID NO: 394691 - DNA, 90 bp, Homo sapiens
cgcaggcagcatggaccacggttgctgggcggatggggagcgtctatggtcagcttcctgcctgacacagctcacttcaagaagtgcaca

SEQ ID NO: 394692 - DNA, 75 bp, Homo sapiens
ctttggttcacatggatataaaacctaacatcccaggaacagcaacagcaacagtgactcagacgaggacgaaca

SEQ ID NO: 394693 - DNA, 100 bp, Homo sapiens
aggagagcatcttggacttgtccaagtacatcgacaagacgatccgggtaaagttccagggaggccgcgaagcacttcactacgcttagcagatgtcctc

SEQ ID NO: 394694 - DNA, 50 bp, Homo sapiens
ccatgcacttgttgcagaaacagccaaggagtcaggaatggagagaaggg

SEQ ID NO: 394695 - DNA, 96 bp, Homo sapiens
aagatatatctaaaaggattttatgagggtgtaccatttggcccttttgccttcatgccaggaaaacttgtccatactaatgaagtcactgtttta

SEQ ID NO: 394696 - DNA, 83 bp, Homo sapiens
cagactgagcgcgtccaggcctgacagctctgcggctcgggccctgagtcaaggagaagctgcgccttgatcctgacagcgag

SEQ ID NO: 394697 - DNA, 83 bp, Homo sapiens
ccctggccgccccgagcggagcctggaggactgaatgtgggcccagttggcgtcattctgctttgacctaaacattcccatct

SEQ ID NO: 394698 - DNA, 90 bp, Homo sapiens
gtttaagattctggtcagcttgttaggctgaccagtgcaccggtcttcagggcttcttggttttccacagctttggtgggggaactggtt

SEQ ID NO: 394699 - DNA, 50 bp, Homo sapiens
tcgagaactggaaggctatgataaggattactacagcatcccatttccca

SEQ ID NO: 394700 - DNA, 100 bp, Homo sapiens
ctttagaaaggatgacggcaccttcccattggataatgaagtgaaggcctttatgagaggacagaggctatatgaaaatgtttgaaagatgtatggtgat

SEQ ID NO: 394701 - DNA, 102 bp, Homo sapiens
agtctttaccatcacctcatccagttcgctattttgataactcaagtttaggcctttgtccagagagacaagagagacacctccaacttcgacaaagagttc

SEQ ID NO: 394702 - DNA, 82 bp, Homo sapiens
atatggcgcaactgcggcgcagtatcctgagctccagctggaccctaaattggatcctcttcctgctgagagtcccctaatg

SEQ ID NO: 394703 - DNA, 50 bp, Homo sapiens
aggcgactgcctcatcttcaagcacaaacatttcactgaagatattcaaa

SEQ ID NO: 394704 - DNA, 148 bp, Homo sapiens
ggaagccgctggaggaccgtagctgcacagacataccatggctgctgctcttcatcctcttctgcattgggatgggacttcagtactagtgctaataacatccagattgataaaaccaagcctttgtggcacaactatttcttatgtg

SEQ ID NO: 394705 - DNA, 81 bp, Homo sapiens
tccggcttcggagcgggagtgttcgttgtgccagcgactaaaaagagagcactacaaacaccactggtttcccgaaaagcc

SEQ ID NO: 394706 - DNA, 100 bp, Homo sapiens
acgcgtagcaggtggaaggagggagggagccgcaggcgcagacccacccgccatgaagccccccgcaggtctgggaggggctgaacgtggtgaagacagg

SEQ ID NO: 394707 - DNA, 90 bp, Homo sapiens
cccgggcagtgctttccccaagtagtccgatggctgcggctgcgccgaggcgccctactcagaaaatatttacaccagcagctccagttc

SEQ ID NO: 394708 - DNA, 100 bp, Homo sapiens
ctgtacagggatgtcatgctggagaactacaggaacctggtctcactggatcctaagtgtgaacgtgaagtccccagccctgctgctgagccagttgctg

SEQ ID NO: 394709 - DNA, 95 bp, Homo sapiens
cttcttgttaaatggggttgtagcatagaagatgtggactacaatggaaaccttccagttgaagaagtagttgtgactttgcagcttggaggtga

SEQ ID NO: 394710 - DNA, 100 bp, Homo sapiens
cacggccgggagaagcatgggaaggaggccgagccgggatctcaggtcctcgggggcggcggccacgccaaggacggagatggagtttcactgtgtcagc

SEQ ID NO: 394711 - DNA, 101 bp, Homo sapiens
ccaggtggcagggagtgcatcaaaggtgtgaacgcaggttgtctaccttcataacaacaatatctctgtagttggatcaagtgacttctgcccacctggac

SEQ ID NO: 394712 - DNA, 96 bp, Homo sapiens
aataatccaggcgactacaattagcagctttccccaactgaagaggcacaaagatatatttttgccatcatggatcagtttggagatatattagaa

SEQ ID NO: 394713 - DNA, 100 bp, Homo sapiens
cctgcaacaaagagttccttgctcatctaaaagaggcaatcaccgttcaggtaaaataccatgaagattttgaaaaaacaaaggggagaggctttactcc

SEQ ID NO: 394714 - DNA, 87 bp, Homo sapiens
ggacaccacgataacatttagcctggaacagagcggcactcggcctgagcgggtcctagcagaagatgtgactcagactgcctctgg

SEQ ID NO: 394715 - DNA, 82 bp, Homo sapiens
ctgctcatcatgctcaagtcagagggcttttactcctacctgtgtaccgagccaggttttggctacgggcctccacctccac

SEQ ID NO: 394716 - DNA, 100 bp, Homo sapiens
ccgaggtggagctgcggggccctggcatgaaagaaagaagcttccggttctgaggtcctggaggtgccatttccctctctgttgaagcaaaggccggggc

SEQ ID NO: 394717 - DNA, 100 bp, Homo sapiens
atctctacagagatgtgatgttggagaactacaagaatctcattatactaggtggtgactctcaaaaggaaataggatcatggcagcagatgatgacaat

SEQ ID NO: 394718 - DNA, 98 bp, Homo sapiens
tgaccctgggtcagaccctttgggttggcttcgtggctccacgacttactctctacccttggcaggtcaatgtgacggtggactacattagaccagcc

SEQ ID NO: 394719 - DNA, 89 bp, Homo sapiens
gcagtgaagattgctgtaaaaaatttcaggattggtactacaaggatgtaatccctgttcattactacttaatacctccaccaacaaag

SEQ ID NO: 394720 - DNA, 99 bp, Homo sapiens
ccaggagctggtgaaactcctcaatgagctcttcggcaagttcgatgaattagccacggatatcaaagcagactgcaatacctgcgtggaaatagaaga

SEQ ID NO: 394721 - DNA, 87 bp, Homo sapiens
atgcgctgagccctacaacacccccagcggccgccggctcccccacgaggtcagttcaccgggacctggaggcccagattgcgatcg

SEQ ID NO: 394722 - DNA, 83 bp, Homo sapiens
gcggacatggtcatgagctttgtgaacctggacaggccgacggtcgcaaggtcctacggtcaagcatccgggagtttctatgc

SEQ ID NO: 394723 - DNA, 75 bp, Homo sapiens
tcgcctgcccagcaaatgcgaaggaactttccgctgtactttttgccatacagaggtagaagaggatgaatcagc

SEQ ID NO: 394724 - DNA, 74 bp, Homo sapiens
tacgaccagccttgggagtggaaccgggtcaccatcccagccctggcagttcgtgccctcgtgaggctggcatg

SEQ ID NO: 394725 - DNA, 100 bp, Homo sapiens
gggtatattttggaagtgtgccagaattgtccaactgttacaaccactctaaaaaaccttggggcactttacagacgtcaaggcaaatttgaagctgcag

SEQ ID NO: 394726 - DNA, 105 bp, Homo sapiens
atcctgcccagcccttaggagtcctcatggaatgagctcagctcccgcgatgctcctgtttgtccactgaggtgcaatggatgagcttcatagtctggatccaag

SEQ ID NO: 394727 - DNA, 145 bp, Homo sapiens
ggtgatcactaggtgccaacattatgcgaagaactttacgtggacatcccatttaattctcagaagccgatcacaaggtactccaaagattcaggtttactcacgtcatccagcagagaatggaaagtcaaatttcctgaattgc

SEQ ID NO: 394728 - DNA, 75 bp, Homo sapiens
cggctggctgaggaaatcgcctcccgagaagaagttgaggcgctatgttcgagaacttgtcttggacaattgcaa

SEQ ID NO: 394729 - DNA, 96 bp, Homo sapiens
aacatttctcttgcagatgacatagtgcctacaccaactaatgttacaattgaatcctataacatgaaccctatcgtatattgggagtaccagatc

SEQ ID NO: 394730 - DNA, 100 bp, Homo sapiens
aaaaggcttattatatctgacagagctcatattgtattggatgaacgaatatacctcatccattggaattggagtttttcattcaggaattgaagtctat

SEQ ID NO: 394731 - DNA, 75 bp, Homo sapiens
gagctgctggctaagatcaccaacacagacgtgggagagtcccgtattctcagagtaaaagttgtttctggaatt

SEQ ID NO: 394732 - DNA, 83 bp, Homo sapiens
ccgggcacttcataagggatccgcagctgctcccgctctccagagtctccgggaccattatggcagtcaagtggacgggtggg

SEQ ID NO: 394733 - DNA, 80 bp, Homo sapiens
cttgggagtgatttgcgccatcatcctcatcatcatcatagtggttggaataaaaacagggttgaatgagttccagaaag

SEQ ID NO: 394734 - DNA, 51 bp, Homo sapiens
ggaggagcagttgtctgatgaagagaagacaatacaatggtgggtgaagag

SEQ ID NO: 394735 - DNA, 75 bp, Homo sapiens
gaactgtggtgtaaagcgcctgtaaaaccaggttaacacagaaatctgcctcctgggccatgccgcttctaaggc

SEQ ID NO: 394736 - DNA, 99 bp, Homo sapiens
atgcaccagcacgcctggctaaacaatttgctcaggattttgtgatgcacacagatgtcagaacctgctcgtcatctactagtgtcattgcggacctcc

SEQ ID NO: 394737 - DNA, 75 bp, Homo sapiens
ccacaagacatttcctgctcggaaccttgtttactaattcaaagccagtggttgttaatacaaccccagtgcgga

SEQ ID NO: 394738 - DNA, 88 bp, Homo sapiens
aatttgggttgcaacaactaagtctacagtaaataaatggtgtttacgaaaatggggttacagaagatgtgaagatatttgttggatt

SEQ ID NO: 394739 - DNA, 75 bp, Homo sapiens
actgaggcctggcgattaagtggcctgctgaaatcatccagctacaatggctgccatccggaagaaactggtgat

SEQ ID NO: 394740 - DNA, 96 bp, Homo sapiens
cggggattcctcacagcgtctggcaggatgcctggtgtgcaggagtatatacaacagcctattctcaatggtctgcgggataaggcttcatatgtc

SEQ ID NO: 394741 - DNA, 100 bp, Homo sapiens
agaaacatatctattatatcacaggtgtgatgaatgcagactctgctaccattttggctgtttggatcctcctttgaaaaagtctcctaaacagacaggc

SEQ ID NO: 394742 - DNA, 89 bp, Homo sapiens
caggaagatccatttcaactggctgcccccttctggcaagccaatggggtacaggattcaccaagagaacatgggacaggctctcagcc

SEQ ID NO: 394743 - DNA, 89 bp, Homo sapiens
cagtctccgcaagagaaggaagctctttatgccttaacgccgaatatgtgggagtccatgtcctgcagtgtggcctgatgtaatcaaac

SEQ ID NO: 394744 - DNA, 88 bp, Homo sapiens
gtcctgagatcaaatggcacttcattggccacctacagaaacaaaatgtcaacaaattgatgggcatagaatgtcaagctaaccaggc

SEQ ID NO: 394745 - DNA, 90 bp, Homo sapiens
gtttcgcttctacgacatcagctctggctgcatccgaatagatgggcaggacatttcacagtctgaccagtgcacaggacttcagggctt

SEQ ID NO: 394746 - DNA, 83 bp, Homo sapiens
ggaggctgagtacgacagcctcaaacaggagctggagcagctcaaagaggtgtcgtgaaaactacccctaaaagccaaaatgg

SEQ ID NO: 394747 - DNA, 100 bp, Homo sapiens
caagctatccaaatgcgattagttgatgtggcctgcaaggtcagaagagatcaattctacagaaatttccagtggttctgttgaggctttatggaattca

SEQ ID NO: 394748 - DNA, 100 bp, Homo sapiens
ctctttggaaaagttgtgcccaagacagtggaaaattttgttgctctagcaacaggagaggtagaagaagcagatgattggctcagatatggaaaccctt

SEQ ID NO: 394749 - DNA, 90 bp, Homo sapiens
ccgtgtctctggattcaagtcccaggagtcctgaccagagagcagtgagttggactatggatcaggtactgtgctcagcatcagaaaatg

SEQ ID NO: 394750 - DNA, 121 bp, Homo sapiens
tggaaacccccttcgatgacctccagagcctcccaaacgacgtggaggaggaagccaagaatctggtgagcgaagccatcgcagctggcatcttcaacgacctgggctccggaagcaacat

SEQ ID NO: 394751 - DNA, 100 bp, Homo sapiens
tttcaaacggcttagagcaggccgcttggttctgacccagctgaggcaccagttgttctgcaaactcaccctgcggcacatcaacaagtgcccagaacac

SEQ ID NO: 394752 - DNA, 90 bp, Homo sapiens
ctaaaaggaagcgcaatagacactgttcaagtcatcagtcacgttcgcttattggatcagattccagaaatgtttgcagacacaagggaa

SEQ ID NO: 394753 - DNA, 90 bp, Homo sapiens
cggagtcagtcattttactgtcaagacatttcttcggcattctgcaacagcttacgaggaaatatttcagtaaaagcagttaaaaaagaa

SEQ ID NO: 394754 - DNA, 101 bp, Homo sapiens
gctgaatcatatgtttccttcacaaccaaactggatattcctactgctgctaaatatgaggtagttctcactggaattggtgcagatgagcaacttgcagg

SEQ ID NO: 394755 - DNA, 74 bp, Homo sapiens
ttcggttcccacaacagcctggccaaagaactgccaactctgaaagataatgatttcattaatgagggccaaaa

SEQ ID NO: 394756 - DNA, 88 bp, Homo sapiens
tcccccagcccgtctcgccgccgccatggcggaccctaaatacgccgaccttcccggcattggagaactaatgccgacgtgatgaccg

SEQ ID NO: 394757 - DNA, 90 bp, Homo sapiens
aggcctgccgaggaggaactgaagacgaagaacatggatgataacacctttgccatggcccgagcagttcagtgatgaagtggaaccagc

SEQ ID NO: 394758 - DNA, 50 bp, Homo sapiens
tcatagtcaactgcgtggaagagaagtgaaaagaagagattggacctgga

SEQ ID NO: 394759 - DNA, 100 bp, Homo sapiens
ataggtgtttccttcattgatgatggaagtaatgcaacagaaacattaaccaggtggtatttgttggaaatttcttgagaattaatacgatcgccatgcg

SEQ ID NO: 394760 - DNA, 76 bp, Homo sapiens
tataaagttatccaggagccacaaagtgaggtcacggtctagatcacattctcgatccagaggaaggcgatactct

SEQ ID NO: 394761 - DNA, 75 bp, Homo sapiens
tctgtgggactggtttgaatccttccttgatgatgaagagttcttattgaaagttgtcagtgcagctgtccaggc

SEQ ID NO: 394762 - DNA, 100 bp, Homo sapiens
ttacatctcagctttgagggctcctgtggcaaattcccggattaaaaggattcaaaccatttgccaaaaatgagtctaagtgcatttactctcttcctgg

SEQ ID NO: 394763 - DNA, 51 bp, Homo sapiens
cagttgcagtgttggagctaaagttgaaacagttcctcaggctacagtgaa

SEQ ID NO: 394764 - DNA, 75 bp, Homo sapiens
tgacgccttttataataaagacacttatcttgcccaagagctgggcatcctctggtatcacgattccaaaacccc

SEQ ID NO: 394765 - DNA, 51 bp, Homo sapiens
taaagattgtggtagtagatgaagaatttttggaatttcgtaaggcaagaa

SEQ ID NO: 394766 - DNA, 75 bp, Homo sapiens
ccgggaggcgcttccacctctccaccaccgaccgcgtcatcaaaggtttattcagtcaccatgaagctgctgctg

SEQ ID NO: 394767 - DNA, 82 bp, Homo sapiens
cggcctccggcgcagcccggaaatgtccggcaagatcgagaaagcagccctgggcgctgcctatggcacagccaagagcggt

SEQ ID NO: 394768 - DNA, 83 bp, Homo sapiens
taacaagaaataccgtgccctgaggttggacgtggggaatttctcctggggctcagagtgcatgttatttgaaagcaattgag

SEQ ID NO: 394769 - DNA, 75 bp, Homo sapiens
agccaccctgcccccaagaaggaagtcatcatgggccggcctggaacaggtagagtacagagagatggatgaaag

SEQ ID NO: 394770 - DNA, 100 bp, Homo sapiens
tcaactacagatactttgaagtagaagaagctgatgggcaattgaaggaacagactaaaaatcgtgtcctggaaggaaactacaggtactaccagggatt

SEQ ID NO: 394771 - DNA, 97 bp, Homo sapiens
gcagaagttggctagtcaatacctgaagagagattggcctggagtaaaagctgatgatcggaatgattacagcattggaggcgttgtactggtaaac

SEQ ID NO: 394772 - DNA, 100 bp, Homo sapiens
aaaccggtagcgcttgcagcatggcctcgaaaaagcccaagacagcagaagcagacacctccagtgaactagcaaagaaaagcaaagaagtattcagaaa

SEQ ID NO: 394773 - DNA, 100 bp, Homo sapiens
tcaagcagctgcttgccggccccaacacggaccttggtgtcatggagaaactccagctgggcccagagattctgcagcgggaaaatccaaggcttattta

SEQ ID NO: 394774 - DNA, 95 bp, Homo sapiens
ccactccgtcccccgcgggtctgctctgtgtgccatggacgggactcctcctattttgaggacttctccaacatctccatcttctcctcgtccgt

SEQ ID NO: 394775 - DNA, 74 bp, Homo sapiens
ttaaaggactgatttttagaactccacatttgagaaatggtggagtcaatgaagaaagtagcagggatggatgt

SEQ ID NO: 394776 - DNA, 90 bp, Homo sapiens
cgatgtttcaatattggaagcgctttgatttacagcagctgcaggaaggaagcagccaccctcgccatggcctccccgcccgcctgcccc

SEQ ID NO: 394777 - DNA, 100 bp, Homo sapiens
ccgggggtattgccgagtgcttcgtgcagaggctgattgggcagaaagtggcccatgctctggcagagggactcggagtaatcgcctgcattggggagaa

SEQ ID NO: 394778 - DNA, 74 bp, Homo sapiens
cgggacccggttccccggcccacagtgggggtgtgcaaacccgagagaactggtgagtctgccaaaaaagaggt

SEQ ID NO: 394779 - DNA, 101 bp, Homo sapiens
ctgacctctccctctctcccatctaccctgctgcgcggggcctgcgtggtgatggtggatgaggcacacgaaaggaccctacacacagacattctctttgg

SEQ ID NO: 394780 - DNA, 100 bp, Homo sapiens
aagacagtgtgccagataccattgatgaaggaaatgctaaagcgattccaagagaagttgatgacgcctgagatgttttcagaaatcctctgtgacgatc

SEQ ID NO: 394781 - DNA, 75 bp, Homo sapiens
aaggagaaggatcgccaggtgctggaggacttcccaacgcagatataatttctacagtagaatttaatcattctg

SEQ ID NO: 394782 - DNA, 82 bp, Homo sapiens
cctaaagttcgtgaatctcaacttgtgaggcaggcgactaatcagattgtgatgaattgtgctgatattgatattattacag

SEQ ID NO: 394783 - DNA, 75 bp, Homo sapiens
gcccccgccatcgccttcggtggaagaccattactgggacttccacccccaccacgtgcacagcgagttcgagag

SEQ ID NO: 394784 - DNA, 97 bp, Homo sapiens
agaagacccgtgtgaagctgccctccggctccaagaaggttatctcctcagccaacagagctgtggttgattacagagtcacgggagacaccgttct

SEQ ID NO: 394785 - DNA, 74 bp, Homo sapiens
acgtgcagacatctacaaccttcgatctcctgacgaaaggcagacggtaacaagtactccttgctggattgaac

SEQ ID NO: 394786 - DNA, 101 bp, Homo sapiens
tccacctcttccaagcctgggatcctccctgcgccatccttctccactcccggacccctgccccagactggagcgctgctcagcgctttcgttcagctgtg

SEQ ID NO: 394787 - DNA, 74 bp, Homo sapiens
aatctccaagaaacatcattcacccatactgactagtttcacatctctttggccagaagcggactcctagaaga

SEQ ID NO: 394788 - DNA, 100 bp, Homo sapiens
tggcagttgagagactgttggagcctcttgttacacaggagtggagtcaacatatcaatggagcaagtcacagtcgtcgatgccagcttcttcttgaaat

SEQ ID NO: 394789 - DNA, 82 bp, Homo sapiens
tcgactgcatccacctaatcaatgaggagcacatggtgtccggcgcggacgatgggccgtggatccaggacatcgagggagc

SEQ ID NO: 394790 - DNA, 100 bp, Homo sapiens
gagcaagcagggaaagagagcgccaggtgcttagcaggaagcatctcaattctccctactatattgtacctcacaatcggggtcctcagagagactgctg

SEQ ID NO: 394791 - DNA, 119 bp, Homo sapiens
tttcaatgacaccaagttggacgctatgctggaagaatttaagaaagaaagtgaagtcactgcttttgctgtcttggatcaagaccagaaagaaattattgataccaatggagctggag

SEQ ID NO: 394792 - DNA, 100 bp, Homo sapiens
ggatgggagactgtatttaggcctgtaagtgagacatgcacagacagatctggcatctccactggacactggtcagtttgcctgagaatacagatcaacc

SEQ ID NO: 394793 - DNA, 82 bp, Homo sapiens
gggcggcgaccggggcctgggtccacgccgagggcaggacgaacttcaccaggcattgaagttgatatcgatgtggagcacg

SEQ ID NO: 394794 - DNA, 80 bp, Homo sapiens
atttcctgctcggaaccttgtttactaatttatggtttgaagtggtgaacatggatttttctcggcttcacatgtacagt

SEQ ID NO: 394795 - DNA, 124 bp, Homo sapiens
gggtcatcgacagctgcaaggaggccgtcaccttcaaggccgtcagacaagttcctacaacagcagccagtacccctgatgccgttgacaagtatctcgagacacctggggatgagaatgaaca

SEQ ID NO: 394796 - DNA, 90 bp, Homo sapiens
ctgggtgggggagggaagaagccggagccgccgcaagccacacggtctgccatcatggatgttctcgcagaagcaaatggcacctttgcc

SEQ ID NO: 394797 - DNA, 74 bp, Homo sapiens
gattactcagagattatagggagcatgggtattgggagagttgctgctacatctttaggaaatttgactaacca

SEQ ID NO: 394798 - DNA, 50 bp, Homo sapiens
gccccatcttcccttcacacctggtttgtcctgaatgagctggtacagac

SEQ ID NO: 394799 - DNA, 98 bp, Homo sapiens
tcccgggagtgccgtgcgccgcagcccgggcccaggccccggcagcgcctgggacaagaatcgcctaccatttggtgcaagcaaaaagcaatcagcaa

SEQ ID NO: 394800 - DNA, 74 bp, Homo sapiens
acagagcaacttgatgaaggtacacccaatagagaggtgaagatggagctggaaaaacaagcttaataagaaaa

SEQ ID NO: 394801 - DNA, 100 bp, Homo sapiens
cctgtcactccttcctccgcctctcgctaccaccgccgacggtcttcagggtcacgagatgagcgctatcggtcagttgttgacctcctgtactggagag

SEQ ID NO: 394802 - DNA, 50 bp, Homo sapiens
ttacccaaggaattccctaaagtaccttctccaggcaaattccgttcccc

SEQ ID NO: 394803 - DNA, 100 bp, Homo sapiens
ctcgtcagaggagagctgcgatagttttgactcactagagtcagggaaacaggtatatcaggattggagataaagaatgtgaatttaacaagaactttcg

SEQ ID NO: 394804 - DNA, 83 bp, Homo sapiens
tgcctccacacctaccactacccgtgtgccagcgatgcaggtgatgtgtccaatctagatcccaacttctcatttgaaggcac

SEQ ID NO: 394805 - DNA, 90 bp, Homo sapiens
gtccgagccagccgctgttttgccggaggagcccctcaggccctgagcgggctttggacaccatgaactttgatgtgattaagggaaagc

SEQ ID NO: 394806 - DNA, 100 bp, Homo sapiens
ggaagagctgatgagaatgctggcggaggacgagctccgggatgctgtactccttgtctttgcaaacaaacagatcttgatgtggaagaaatggaggact

SEQ ID NO: 394807 - DNA, 100 bp, Homo sapiens
taccaccaggactcagaggccgccatcaaccgccagatcaacctggagctctacgcctcctacgtttacctgtccatggaaagcagatggtggagctgaa

SEQ ID NO: 394808 - DNA, 100 bp, Homo sapiens
gctgctgtcacacattacctgtatctttgccagtttagctggatgctcattcaggacatatttgacagtgattggtacacttctcgaaatctaattgggg

SEQ ID NO: 394809 - DNA, 75 bp, Homo sapiens
ttctacgattccgtacaagagcttaccggagagcagctgaaaaggttaaatggaagctgatcggcgttcacatgg

SEQ ID NO: 394810 - DNA, 98 bp, Homo sapiens
tggagggggcggcgcggcaggagcgcgttgagggactactgtgccctgtccacggtgcctcctgcatgtcctgctgccctgagctgtcccgagctagg

SEQ ID NO: 394811 - DNA, 90 bp, Homo sapiens
tggcccacaagcagatctactactcggacaagtacttcgacgaacactacgagtaccggtgctggagaatctggtaaaagcaccattgtg

SEQ ID NO: 394812 - DNA, 98 bp, Homo sapiens
tgagaccaaaaaagcctatttcttgggattgcagaaaagctgaggcaggccctcagccgctttccagtgatgtaggacagaacgggccttgaagagaa

SEQ ID NO: 394813 - DNA, 75 bp, Homo sapiens
aagcttggttaccagcagtgcctcctagggtctgcccctgaaggaggaggagatattgccagagcctggaagtga

SEQ ID NO: 394814 - DNA, 100 bp, Homo sapiens
tcatctccaggacagtgggaagagtggctggaggaattcagtttcttggggaactccactttgacaattgaagaatttcattccaaactgcaagaagcta

SEQ ID NO: 394815 - DNA, 100 bp, Homo sapiens
ttcctgtgaaagtgatgaggaggatagagcctcacatgcaagctctagtgactggactccaaggccacggatagatcgatgctatagaagacaaacaagg

SEQ ID NO: 394816 - DNA, 97 bp, Homo sapiens
tttcttaaaggactgatttttagaactccacatttgaggtgtgtggcttttgaagaaaatgtgtcatggagaaactccagctgggcccagagattct

SEQ ID NO: 394817 - DNA, 96 bp, Homo sapiens
tggtaggagtgacccagcctcgaagagtggctgctgttacagatttaagcgagagcctcactggttcccaggacatcaacctgaactggatcctcc

SEQ ID NO: 394818 - DNA, 74 bp, Homo sapiens
tcaacccagaggatccccagtatgcatctcaagatgtggctgacaccaacagagatcgtattgatattgccaat

SEQ ID NO: 394819 - DNA, 74 bp, Homo sapiens
tcctctggaggctgtgcgcatgcagcacctgggagggacattgcttgggcctccagactctgtggttgatgtgg

SEQ ID NO: 394820 - DNA, 74 bp, Homo sapiens
gcagctgcctcatctgcagtccggactcatctagcctcggccagagactgctgctactttgaaacgtacgatag

SEQ ID NO: 394821 - DNA, 95 bp, Homo sapiens
ggagtctagcagtgagcagtacgtgcctgatgtgttttataaggtgtctttcctgaagactatcttcccgtctcaaaatggacatgatggatcca

SEQ ID NO: 394822 - DNA, 90 bp, Homo sapiens
acaccatctcgccaccgcagctacgaacggagcagttctgaatgcagtgatggggaatggtctgcttctttgcctcatcgattttctggt

SEQ ID NO: 394823 - DNA, 100 bp, Homo sapiens
aagcatttgtgcattcagatgctgctaaacaaagaatggggagaaggaacccccgacaacactactctgggttcagtatttcctggcacagcactttgat

SEQ ID NO: 394824 - DNA, 100 bp, Homo sapiens
ctgggatccggagcaagcgggcgagggcagcgccctaagcagacactttttcaaaaatggcaatggtatcagaattcctcaagcaggcctggtttattga

SEQ ID NO: 394825 - DNA, 75 bp, Homo sapiens
ttcttccactgatatctcaaaaggtgatctggacaaaggaacaggtatctcagctgatcactggagattccatcg

SEQ ID NO: 394826 - DNA, 80 bp, Homo sapiens
gctggcaaagtgggaaaaataaagtgttgagtaaacagaccaagttggatggagatcttataacaatttttgatagttct

SEQ ID NO: 394827 - DNA, 75 bp, Homo sapiens
ctaatatttggaattttcgtatacgtggattccagaggggtgacagcgaaataacgtccagttgcggataatgag

SEQ ID NO: 394828 - DNA, 75 bp, Homo sapiens
gcggtttgggtctctgaaggaaagcacttttctgtagaaggtcagttggaattcagggcattgctatttattcct

SEQ ID NO: 394829 - DNA, 97 bp, Homo sapiens
cggacggcgcgggcgccggcgaggagagcccgcggctgcagtctgcagatctccaggggagcccaccagcctagtcaacatggcctcggaagacatt

SEQ ID NO: 394830 - DNA, 100 bp, Homo sapiens
ggacacgcagtgacgagcggccgaagcagctttgcgcatctactgccgaggatgttccaagccgctgtgctgctcgtgcgcgctccttgacagcagccac

SEQ ID NO: 394831 - DNA, 95 bp, Homo sapiens
aggcagcgcaaaaaacagccaccgattttgctatgtctctgagctgcgaggatttgacgggatctgaactatacacccaggcggccagcctcctg

SEQ ID NO: 394832 - DNA, 97 bp, Homo sapiens
cgtcggccgccaggccggccaccgcctcggaatacataaccaccacttacaagctggctgttgaaatgagagcggtttcttacagtctacccggcgt

SEQ ID NO: 394833 - DNA, 83 bp, Homo sapiens
gagaaactggacaaccaacggctcaagaatttcaagaacaaaggccgcgacttggagggagactcatgcatctgtatgccgtg

SEQ ID NO: 394834 - DNA, 50 bp, Homo sapiens
tccacctcattttagagtatcaagcaggctggccagctaaactatgtgga

SEQ ID NO: 394835 - DNA, 49 bp, Homo sapiens
gggccggccgaaccatgggccgcggtagatgatgagctggagatcaagg

SEQ ID NO: 394836 - DNA, 83 bp, Homo sapiens
ggacctgagaatctgagaaactgcaggtgaccctggcaaagatgagagtgcacatttcgtcctgcctgaaggtccaggagcag

SEQ ID NO: 394837 - DNA, 90 bp, Homo sapiens
cagacttgcttcccagggccgagggcctgtggttgtccactgcagggaaaaaatgcatttttcaaagacctaacttcaattcagttatta

SEQ ID NO: 394838 - DNA, 100 bp, Homo sapiens
gtgaagcagctactcctccagtagcaaggaccagtccctcggggggaacgtggtcatcagtggtcagtggggcactggatgtgtgtgagaagtggggaga

SEQ ID NO: 394839 - DNA, 100 bp, Homo sapiens
taaatgggattatacatatgcaaacatgacctttcaagttcagtggctccatgttatagttttgccgctggactcttccctcccttcccccaccccatca

SEQ ID NO: 394840 - DNA, 100 bp, Homo sapiens
gcagtggcagtcgcagcggaatcagctccagggggccatgcagcacttcagccaaagattcctctaccaggaggagtctggcatggctcatgaatcagca

SEQ ID NO: 394841 - DNA, 71 bp, Homo sapiens
aaattgaaaaaatggttgacctcacccagtgagaatgagtccctttggaaggaggtgtcagaattacgagc

SEQ ID NO: 394842 - DNA, 83 bp, Homo sapiens
cgagtgactgcggccacgcctgaaaggcgactctcctctcaccatggatgatgatatcgccgcgctcgtcgtcgacaacggct

SEQ ID NO: 394843 - DNA, 75 bp, Homo sapiens
ggagttcgtctcttacgtctgcggaagtgcagctgcctcagttcttagcgcaggagtaaaatttcaagagactga

SEQ ID NO: 394844 - DNA, 75 bp, Homo sapiens
tattttccctcctcaaactgactttgcagccacggagaggtcttagtcctgggtaacaagcgagaccttccggga

SEQ ID NO: 394845 - DNA, 83 bp, Homo sapiens
cttggatgtaggacaatggaagagttagggtgatattcatgaggatttttgcagcgtttgcagaaaaagtggccagttactga

SEQ ID NO: 394846 - DNA, 101 bp, Homo sapiens
tagggtcctttatatagaagggagagtagatgtggcaaaatctggcaaaggcagagaccaaacttcatacctcaaactctggggggcggcgggagctgagc

SEQ ID NO: 394847 - DNA, 82 bp, Homo sapiens
gagaccgcggccgggaccgaggcctcctgcccgaaggccacctgaacctaacggctccctgcaacgctgcctgcagctgcca

SEQ ID NO: 394848 - DNA, 51 bp, Homo sapiens
gtgcccttggacaaagcctgaaaccagactctaaaatagagctcaagcttg

SEQ ID NO: 394849 - DNA, 100 bp, Homo sapiens
gatggccgagtggtctaaggcgccagactcaaggtggcttctatgcagtttattaatattgtagtccattcagtagaagatatgaatttcagagttcacc

SEQ ID NO: 394850 - DNA, 90 bp, Homo sapiens
ggactcctacccaggcctctgccagtccccgttcctggattctagcaacactgcccactcagcgaggaagcagccgcgacgcccacactt

SEQ ID NO: 394851 - DNA, 82 bp, Homo sapiens
cccgcagagcgcatccatcaaagctttgcgcaacgccaacctcaggcgagatgattacgctcgatttgaggccaaaatccat

SEQ ID NO: 394852 - DNA, 88 bp, Homo sapiens
attgctccaaactgtgttgtttcagctgtattaggatccaattctggtacagcagttgcgccggacatacaaatatttcaaagattat

SEQ ID NO: 394853 - DNA, 101 bp, Homo sapiens
agatcgggatttacgtggagatcaagcgcagcgatgagtgctgcagcagctcccagtccagtgctaggaaacattcccccaggagatggcatgccagtagg

SEQ ID NO: 394854 - DNA, 75 bp, Homo sapiens
tccggatcaatccagatggcagccagtcagtggtggaggcctccaggcccaaggtcagcatcccactgtcagcca

SEQ ID NO: 394855 - DNA, 89 bp, Homo sapiens
gctcgacagcctggactctgcaacacctgtcaactccatctgcagtgttcaagacagaatgttgctgcgggatgtaaaagctcttaccc

SEQ ID NO: 394856 - DNA, 88 bp, Homo sapiens
cccagcagagacctccgcctggcacacagggaatgctggagcaatacttaaataggacgtggcccagtggaacatcgggagcctccgg

SEQ ID NO: 394857 - DNA, 75 bp, Homo sapiens
catcggccctcatgttcctccaccagcatggagtcatctacaggtggtgatgatgtccagcaactctgtgaagca

SEQ ID NO: 394858 - DNA, 83 bp, Homo sapiens
aagcaggtgccccgaataacagctccaaacgagaatggaagccgctggaggaccgtagctgcacagacataccatggctgctg

SEQ ID NO: 394859 - DNA, 100 bp, Homo sapiens
ttgggccgggccggttgctaagacttggcgaagcgctgcgctcgcgcccggatccctcagtaagactttgaccccgacgcaggcttcagtgattgccgcg

SEQ ID NO: 394860 - DNA, 101 bp, Homo sapiens
ctaccttatgagctcggttttcttatgcttataagagtggaacaggtactaggttttgacaagcttgcatcatgcgtgagtataagctagtcgttcttggc

SEQ ID NO: 394861 - DNA, 87 bp, Homo sapiens
tcccttgacaggcggctttgcatcggaaatcagctctacagttcaggtggatattccatctattataaccaagaaactattaaaagc

SEQ ID NO: 394862 - DNA, 90 bp, Homo sapiens
gccgccgttgcctccgccgccaagagtgagcgagcggacccgcgatgggctggctgaaggcggtgcaggtcctcatggtgctctccctca

SEQ ID NO: 394863 - DNA, 100 bp, Homo sapiens
aacctccccagcagtcacttaagacctctatccgtggtcctgaaccagttatgtgtgttgcatgagaaaacgccagtaagtgacagagtcaccaaatgct

SEQ ID NO: 394864 - DNA, 100 bp, Homo sapiens
tgaggaccagaacacgctgacaagtatctgtgaaaaggttattgtgcctaacatggaatttagagagaagggataaaccgccaggttgaacctctggacc

SEQ ID NO: 394865 - DNA, 99 bp, Homo sapiens
tccagctcacccactgccagcagagctcttggtgctggacaggcatctttgtttgggaacaaccaacctaagattggagggcctcttggtacaggagcc

SEQ ID NO: 394866 - DNA, 100 bp, Homo sapiens
tgccaacctgggcctggtggataaccaacaagatggggaagaaaaggattgagaactttaagagtggtgtgactgtggatattcataaggagaaagtggc

SEQ ID NO: 394867 - DNA, 90 bp, Homo sapiens
catccccacggactccgagggccggtacttcatcgaccgagatggcacacactttgggcagggaagcccacgaggagataaacatcacct

SEQ ID NO: 394868 - DNA, 51 bp, Homo sapiens
tccacttctaccccaccttccggaacactcgtgaaactgctcaggccatca

SEQ ID NO: 394869 - DNA, 50 bp, Homo sapiens
ctcaaggagcacaacgggcaggtgacagatggagtcatcagaacccactg

SEQ ID NO: 394870 - DNA, 50 bp, Homo sapiens
gataaatatggaatgattctatatgaggctggagtgtagtggcgcaatct

SEQ ID NO: 394871 - DNA, 100 bp, Homo sapiens
tgttcaggtcacaatttctacagcagagaccttgagggatatctttcttcactcctcttcacttcttcagttatgatgtgattgctcaagcccaatctgg

SEQ ID NO: 394872 - DNA, 75 bp, Homo sapiens
acgactaccggcagctcgagaaggagctgcagggccaggagctagagttaatgccaaagacagcaaatggttgac

SEQ ID NO: 394873 - DNA, 83 bp, Homo sapiens
ccttggacattcagacttcagaatgggaccatcccgcggtcatcaagcgacgcttcaccagcgtcctggtggtgtccagtctc

SEQ ID NO: 394874 - DNA, 95 bp, Homo sapiens
ggaggacgagctccgggatgctgtactccttgtctttgcaaacaaacagatcaataagatggagtggtggagccgcttggtgtccagtgaccctg

SEQ ID NO: 394875 - DNA, 73 bp, Homo sapiens
tacaccctccccatcacctgccagctgtcactgaattacatgaacgacagccttcgcaccgacgtcttcgtgc

SEQ ID NO: 394876 - DNA, 100 bp, Homo sapiens
ggacaggaacacacctgtgttcagggatgacgtttgctttttcatcagccagtcagggatctgaaacttgcccacccttcgggatattgcaggacgctgc

SEQ ID NO: 394877 - DNA, 82 bp, Homo sapiens
caggtgcagagcactgcgctgtcagcgatagcccagtggatggccattccagttctcctgtgcctcctgttggctctctttg

SEQ ID NO: 394878 - DNA, 100 bp, Homo sapiens
aacacagcagagggtgtgtaataaaatacagatatcttaatgcaattcagacaatgtgtccacacattcttcgctatttgactacagcagtcataacaaa

SEQ ID NO: 394879 - DNA, 89 bp, Homo sapiens
ctgtgatcgaggacataaggaactagtcacagtgttgctgcaacatagagctgacattaactgtcagttacagatgaggacacagtaaa

SEQ ID NO: 394880 - DNA, 83 bp, Homo sapiens
cccgcgagcaccagagtcggcgtaactatcgcctgacagggtatctgaagtaaaaggggtggaagtatgcgagacttaagagc

SEQ ID NO: 394881 - DNA, 50 bp, Homo sapiens
aaacagcaagaactgcttcggcagcaactccattcgagcgtgagaacagg

SEQ ID NO: 394882 - DNA, 101 bp, Homo sapiens
gtctgattacaacaacttcaaggaaattggatcgagaacagcaggcagaacattttctggaggattctaacattttcagagaaccttttggaaagaacaag

SEQ ID NO: 394883 - DNA, 96 bp, Homo sapiens
gaagtcggcgacagcggccggggcgcaggcgcccgtgcggaatggcagaaacttgtggtggagaatgttgatgtgttaacacaaatgaggaccagc

SEQ ID NO: 394884 - DNA, 88 bp, Homo sapiens
cctggtcctcgatccgcccacagacctcaaattcaaaggtcatcatcagatttgaaatatttaaagtggatacaaaactatttcagca

SEQ ID NO: 394885 - DNA, 83 bp, Homo sapiens
cataagtggaattttggagatattcaaagatgaagtggccattctgcctgcccctcagaacctctctgtactctcaaccaaca

SEQ ID NO: 394886 - DNA, 51 bp, Homo sapiens
cagagggccgagaaggacaggatcaggatcatgcggccagatgatgccaac

SEQ ID NO: 394887 - DNA, 98 bp, Homo sapiens
gctccctctgctcttcctcccttcgctcgcaccatgtctatccttcactggagtctgatgatgatgaccctgctttgaaatctcgacccaagaaaaag

SEQ ID NO: 394888 - DNA, 98 bp, Homo sapiens
ggaacggggtgaaagagaagcacggctccgactactccaagatattctcccaggagtacatcaacctcctgctgtccatgtatttcttcgtgctggga

SEQ ID NO: 394889 - DNA, 50 bp, Homo sapiens
gtcaatcagagcgtcctgtgcgccccagtggacaggaaagctaaggcctc

SEQ ID NO: 394890 - DNA, 96 bp, Homo sapiens
aattgatgccagacatcatgagggccgttaccattacgatccatctccgattcctccattgcatattgcttagatgagtacgaagatgatgaagca

SEQ ID NO: 394891 - DNA, 95 bp, Homo sapiens
gaacgtgattgggaacctgctgacgtgcactgtgcccctggctgggggctcgcaggtaccgtacagagtggatttgcagggcagtggcatggagc

SEQ ID NO: 394892 - DNA, 100 bp, Homo sapiens
gctcctggaagatctccgcactctggagcataatgtggtttcatcaccttaaatggttttgaaccaatgaaggtgtattcccttaaaaagacggacagcc

SEQ ID NO: 394893 - DNA, 103 bp, Homo sapiens
atgccttcgcgtcttctcttccctcgggtgacttgaggctactggaacgtcaccgtgtacgggcgcaagcactgttaccggctctacaccaagctgctcaacg

SEQ ID NO: 394894 - DNA, 98 bp, Homo sapiens
gggtttcttttactggcaaatagtacttcaagagcacagtcttatgtaaggttattaatgctgcactggctttagcagcaaaaccacagagtaaactg

SEQ ID NO: 394895 - DNA, 75 bp, Homo sapiens
aaggtgaacgggcggcccctggagatgattgagccgcgcacgctacagtacaagaaagacctggtggaagaggag

SEQ ID NO: 394896 - DNA, 74 bp, Homo sapiens
caagatctggactactgttgaaaaaatttccagtgaggctgatcccaaagttgtcagatggagagtaaatacaa

SEQ ID NO: 394897 - DNA, 75 bp, Homo sapiens
agggcaagccccgctccggccaacaagatcatgtatatgaacttctcaacaccattgatgcctgccagtgccatt

SEQ ID NO: 394898 - DNA, 100 bp, Homo sapiens
gtggcctgggagtagatattgtcctagatgctggaggttattcacagtcctatggtggttatgagaatcaaaagcagagctcatatagccagcaaccata

SEQ ID NO: 394899 - DNA, 94 bp, Homo sapiens
ggcttgccctggtcttgctcggccgatgaagtgcagaggtttttttctgggtttttaatgaccacaacaagcaagcatgcagcttactgcttga

SEQ ID NO: 394900 - DNA, 50 bp, Homo sapiens
gcgctggccttttggcaagaagaacaagatcacacgccgctatgcagagt

SEQ ID NO: 394901 - DNA, 101 bp, Homo sapiens
aaaggagcaaaagaaaaaagaatgggtcaaccaagaacgtcaaacactccaacgattgagagcatttaaagatgtgctggagaatctggtaaaagcaccat

SEQ ID NO: 394902 - DNA, 100 bp, Homo sapiens
acaaggcggaggacagcctcctggccgccgaagaggccgccgccaagctcaatctgaaattgaagtgtctgtctctgcaaggaatatcagaaggctacta

SEQ ID NO: 394903 - DNA, 75 bp, Homo sapiens
ccggaacaccctggaagccgagaaatggatcctaagcacttcaagtcagagaagacaggacggggacagttgagg

SEQ ID NO: 394904 - DNA, 90 bp, Homo sapiens
gattcgcagtggtcgcttcttctccttggtgatggcatcagctgagaagggaaggaagcccatgtgaggacactgaagaaggagtgagca

SEQ ID NO: 394905 - DNA, 100 bp, Homo sapiens
tggatttcgaggagtgtctgaaggactcgccccgcttcaggagtcagtggatcggtggggaaaatgctgcttaccctgggccctgggctgtagaaagaag

SEQ ID NO: 394906 - DNA, 74 bp, Homo sapiens
tcatcctacatttttgtgcaagagatacgtggttgcagtaggattggagtgtggaaagatttgcttatatacct

SEQ ID NO: 394907 - DNA, 143 bp, Homo sapiens
ggctcaagagtttagccttgcgactggcccagtatccaggtcgaggttctgcagaaggttgtgactttagtatacagaccctaaggaacgattgggttgtcatcctcaaacaggatttgctgatattcagggacacccgttct

SEQ ID NO: 394908 - DNA, 83 bp, Homo sapiens
cgagacgcgcgtgtgtgagcgcgccggaccaagcgggcccagaagcgggtgatgtgtccaatctagatcccaacttctcattt

SEQ ID NO: 394909 - DNA, 75 bp, Homo sapiens
ccagcaacccatacctgatccggagaatcgaggagctcaacaagtctctgctttctatccgtcaagatgataaag

SEQ ID NO: 394910 - DNA, 75 bp, Homo sapiens
ttattgtacctttaattccaccacctttcataaagccaccagcaggtattatgactctgtccccctttgatcaaa

SEQ ID NO: 394911 - DNA, 101 bp, Homo sapiens
ctgactgtgtggagttacttctggaaaaaggagccgaggatgaagcctgctgggagcgtgaatgacatggccctggatgccttcgacttggaccggatgaa

SEQ ID NO: 394912 - DNA, 50 bp, Homo sapiens
cagaagacagagggttttcttttgaggtatcgtcagatcctggaaaaagc

SEQ ID NO: 394913 - DNA, 90 bp, Homo sapiens
agccaaagaaacaagccgtggaataggtgtatcaagtaatggtgcaaagcctgaatcccaccagcagtaccccccatcgcatgccacgcc

SEQ ID NO: 394914 - DNA, 100 bp, Homo sapiens
ctggaggcccactccgcagaggccagggctgctgccttccagcaccttctgctcctcgtgggcatccacctcctcaaggacccacgcagccacccagcct

SEQ ID NO: 394915 - DNA, 100 bp, Homo sapiens
ggccacggccgccagcaccagcaggtccctggccctcatgtacgagtccgagaaggttggggtcgcctcttccgaggaatgtttacccttgcggaagttg

SEQ ID NO: 394916 - DNA, 78 bp, Homo sapiens
aggactgcgccgcgtcttcctcaaggagtgtacctcacagccttctaggatctccagagtggacaggaatctcacttg

SEQ ID NO: 394917 - DNA, 99 bp, Homo sapiens
aggctgagatatagtgactgtaagctgtgatctcagtatacaaagattgaaaatcttcaagagcagcttagagacaaggaaaagcagatgagcagcttg

SEQ ID NO: 394918 - DNA, 90 bp, Homo sapiens
cggcacagagaaagggaccgctgtttgccctgcaattgtaactccaaaggtcttagtacccactgtgtctatggttggaaagcatttggg

SEQ ID NO: 394919 - DNA, 50 bp, Homo sapiens
aggattccaagtaactcttatttggcctgaggcccagccagcgcccaatg

SEQ ID NO: 394920 - DNA, 87 bp, Homo sapiens
agctgaagcagttggagtgaagattggcaatccagtgccctataatgaaggcttgtgcagacataagagccagttcagtgttttggc

SEQ ID NO: 394921 - DNA, 50 bp, Homo sapiens
gcggcacctacggggacgtctataagatggagtctcactctgtcgcccag

SEQ ID NO: 394922 - DNA, 100 bp, Homo sapiens
tttagtgcactcttctccttcagagtaaagtggttggcacgagatgtgcgtaccaatgaagtggtggccatcaagaaaatgtcttatagtggaaagcagt

SEQ ID NO: 394923 - DNA, 82 bp, Homo sapiens
cagaaggaacttgcagaaatcacattggaccctcctcccaactgtagtgctggtcccaaaggcgataacatctatgaatgga

SEQ ID NO: 394924 - DNA, 100 bp, Homo sapiens
attccttctgccctgtctgtgcatagaggccataggaaaaggatacagagtagagtttcatgaacctgaaacttggtggaaatttgatcctgaagaatta

SEQ ID NO: 394925 - DNA, 89 bp, Homo sapiens
tgcagggcctgggccgccgctgctacctgcagcgccgtgtggcacgacacaaaaatcaggtacatggccacctctggcctagaccacca

SEQ ID NO: 394926 - DNA, 80 bp, Homo sapiens
ggctggagagccgggagtcgctgggtgcgtggggctgcctcgccgcgtctcgccacgatgccacagggcccagtgggctc

SEQ ID NO: 394927 - DNA, 90 bp, Homo sapiens
tggtgcaagcatggtgcagcagttccccaatcttacaggaactgtccacctggaaagtctccaagccctcaatgtcaggctgcacctccc

SEQ ID NO: 394928 - DNA, 90 bp, Homo sapiens
gttcaccaaacatgtcaccagtgaatgtttggggtggatgaggcagcaaaggaacagcgagctcaagttagggtctggaaacaggaaggt

SEQ ID NO: 394929 - DNA, 112 bp, Homo sapiens
ttccagtcgctgctcctgcttctcgggctgctggtgctgtgcgcgaggctcctcactgcagcgaaggtgccgcgtatgatgctgtccttgacagaaatgtggccattaagaa

SEQ ID NO: 394930 - DNA, 96 bp, Homo sapiens
aagtttccaggactgttttgtgacttccggggtctggaatgtgacggagctggtgagagtatcacagacattatgccagtacatacaggcttctaa

SEQ ID NO: 394931 - DNA, 142 bp, Homo sapiens
cccagggggacctcgggtgcgggtccccgccccaccggcccccggcgccgtccagcccggagggacctgcttgagaattacattgtggaaaacatgaagtcggagatggcccagatacagcagaatgcagttcagaaccaca

SEQ ID NO: 394932 - DNA, 100 bp, Homo sapiens
ccgacaccgacctagctttctgggctgccgggagctcgcggcgagcgccccagccaggcctgcgccggcatcctccgagcttgatgtgtttgatgctgct

SEQ ID NO: 394933 - DNA, 97 bp, Homo sapiens
gctgcccctgggaaaccagagagtcggagggagtccatctggagcggccaaggtttggaatcacttgctaggagtcttgtctctctgccacccagga

SEQ ID NO: 394934 - DNA, 76 bp, Homo sapiens
tgtgttgctgcagattgccaaaaaatgcactcggtgatggaaagagagccactattctgaagaacacttggccaaa

SEQ ID NO: 394935 - DNA, 96 bp, Homo sapiens
gctgagacctccactggctgtttgtttgctggatcatcgcttggtaaacgagattctgccatgtaaatgtcagcttgagtggactccagctgagaa

SEQ ID NO: 394936 - DNA, 100 bp, Homo sapiens
tggcgacgcctttggcggtaaattcgggtatcattggaacatttcaagatcatcaaatcaaattccacagggattggtgaccaaccagaaggctcagaca

SEQ ID NO: 394937 - DNA, 100 bp, Homo sapiens
caggactccaaaatggcgtcagttggtgagtgtccggccccaggtgtaccttccggtttcccagcacggccatcaagatccagttcacgtcgctctatca

SEQ ID NO: 394938 - DNA, 73 bp, Homo sapiens
agatattaggtttggtcctttcacggggaatacaacacttatgaggtggtttcaacaagtttcaaacagagta

SEQ ID NO: 394939 - DNA, 75 bp, Homo sapiens
ggacaccaagaagcagggaaatggctgtaacagaagacaagtacgaaatactgcaatctgtcgacgatgctgcga

SEQ ID NO: 394940 - DNA, 100 bp, Homo sapiens
ggggaggcgccgcggactgtcctttcgtggctcactccctttcctctgctgccgctcggtcacgcttggttcttcatggagagcagtacttagagttata

SEQ ID NO: 394941 - DNA, 50 bp, Homo sapiens
cctgcctacagttttcacaaatctaaagtggatttcgataacaacataca

SEQ ID NO: 394942 - DNA, 100 bp, Homo sapiens
aatggaagttgttaatacagagagtgttcgacctacaccacaaaatgatgctataacggtacactttaaaccaattacattaaaagcatcagaaagtaaa

SEQ ID NO: 394943 - DNA, 50 bp, Homo sapiens
ctcattcccaacctgcctctccagaatcaggaaacccaggcccaacggca

SEQ ID NO: 394944 - DNA, 98 bp, Homo sapiens
aaaaaaagaggaagagaagatgaatcatacaatatttcagaggtcatgtcaaaagagtcagtgaaaggggatggagggatcacccactcagaagaaat

SEQ ID NO: 394945 - DNA, 90 bp, Homo sapiens
cgcccggagcggcccaggagcacgccgcggggagcgcgggcgtccggggctggagtcgcgcagggggattcccgaagtcttccgttttct

SEQ ID NO: 394946 - DNA, 100 bp, Homo sapiens
cagtaggttcaaactctttagaagatggccagaccttggggaccaagaaaagcagcagtacaggtgaacaaaggcagagtaaactgtcaccccagatgca

SEQ ID NO: 394947 - DNA, 90 bp, Homo sapiens
gatgccctgcagtacctgcagaaggtctctggagacatcttcagcaggagcggagtgctggtgatccctcccagcctcgtcccaacccgc

SEQ ID NO: 394948 - DNA, 101 bp, Homo sapiens
aggacctttttatagccagaatccaggtgttctttgacctaatgagagaaatcagaacaaagaagatgtcagaaaacaaagacaagaatggcaagaaaagc

SEQ ID NO: 394949 - DNA, 53 bp, Homo sapiens
gaggctcagagcttggagacagacggtgtcacaacataatgaaagttgctcaa

SEQ ID NO: 394950 - DNA, 83 bp, Homo sapiens
ctttttctcatagtcttgtgcatctccacagctccggagcaagccccagccccggcccggccataccagggcgtccgtgtgaa

SEQ ID NO: 394951 - DNA, 75 bp, Homo sapiens
aatgaaaaaaggggagacactgcgaaagcaaaccgaggaggcctccaagactgcagagaatgccaccagtgggga

SEQ ID NO: 394952 - DNA, 100 bp, Homo sapiens
ggattgcatccacattccagagagcatcatcaagaagctgccctctgtcgacagctccccatggaagctgagactcttgccccagttcaggctgctgtca

SEQ ID NO: 394953 - DNA, 75 bp, Homo sapiens
ggattccactctccagtgtaatgattattgacaacagacacttgtcatcctgtgtactctgctcacttgttgctg

SEQ ID NO: 394954 - DNA, 100 bp, Homo sapiens
tggaagaggatcttgggcgccgccaggtaaccaatggtcaaggtgaaaataagatgaaaaatttacctgtgcctgtctatctcagacctctggatgaaaa

SEQ ID NO: 394955 - DNA, 74 bp, Homo sapiens
ctaagggtgcggcagtgcctggtacatggaactgtggctgcaccatctgtcttcatcttcccgccatctgatga

SEQ ID NO: 394956 - DNA, 82 bp, Homo sapiens
ctctctttctggcctggaggctatccagcgaacgtcaaggtcgtgggaaataaaaggcagttctacacagactgcagcaacg

SEQ ID NO: 394957 - DNA, 82 bp, Homo sapiens
tctcactaaaatgaaagaaaccgctgaggcttatttgggaaagaagactgaggctgatgtgaatccaaaggcctatcccctt

SEQ ID NO: 394958 - DNA, 51 bp, Homo sapiens
caagcatgcagcttactgcttgaaagggaaaaagacctcgatgaagttctg

SEQ ID NO: 394959 - DNA, 100 bp, Homo sapiens
cacgctgggggtcggcaccttcggcaaagtgaaggtactatactggcaattgctggagaagattttgcaattgttgcttctgatactcgattgagtgaag

SEQ ID NO: 394960 - DNA, 74 bp, Homo sapiens
tgcagatgatgctgtgtatgagcttgatggaaaagaactctgtagtgaaagcacttttccagccattaactcca

SEQ ID NO: 394961 - DNA, 75 bp, Homo sapiens
cataacctgaggagccgggggaagctggccttgggcaattatattccagaagtgagaatcatgtcaattcccaac

SEQ ID NO: 394962 - DNA, 101 bp, Homo sapiens
gcgaaggcgtctccctggcagagaggggcagttttggagccatggcagttccggcgaggggggagcctcagcaggattgctgtgtgaaaaccgagctgctg

SEQ ID NO: 394963 - DNA, 75 bp, Homo sapiens
cggctctcgggagcgcaacactgcaggtcttcgccttgatcgtgttctcctgcatctatggtgagggctacagca

SEQ ID NO: 394964 - DNA, 100 bp, Homo sapiens
agttcctactggacctatggcaaaagacatcatttcagctttccatccatttttatttatggacatactgctagtggaaagacctatgtaacacaaacgt

SEQ ID NO: 394965 - DNA, 113 bp, Homo sapiens
cactgagacctgtcaccccgactcaacgtgagacgcaccgcccggactcaccatgacaatgcagatcttcgtgaagactctgactggtaagaccatcaccctcgaggttgagc

SEQ ID NO: 394966 - DNA, 73 bp, Homo sapiens
ggcacccagcctcctggacagaaataaaactggattcacagttaatagaaggatctctatagttggatttggc

SEQ ID NO: 394967 - DNA, 75 bp, Homo sapiens
gtttcccagcacctgccaccagcagaaaatgtgctctcactggccagagtaagtcctgtaaacacagaattaaat

SEQ ID NO: 394968 - DNA, 90 bp, Homo sapiens
cggaccgtcaaggagaagctacctcatatggtggaatgatctctttgcagagtccctgcagtgcaaggtggactgtgaggccaatttgac

SEQ ID NO: 394969 - DNA, 100 bp, Homo sapiens
ggcgccctacctggtggccctgtggatcctggtggccagtctggccaaaatcggtgaggagggtgaggctcaaagagcagagttcctggagcgcccccag

SEQ ID NO: 394970 - DNA, 75 bp, Homo sapiens
gagaaacaggacatacctttcgtagaggtcaattttgataaagatccaatggaaatgcgcctccctattcgtagc

SEQ ID NO: 394971 - DNA, 99 bp, Homo sapiens
agcagactcggacgtggacgcctttttccggacaggaaaaccaattctgtgtcctcggaggaccacagcccagttgggccccaggcgaaacccagcctg

SEQ ID NO: 394972 - DNA, 82 bp, Homo sapiens
cagaaagcaggcgaacccgcggcgcaataacgattctgaaggaagatttccattaggtaatttgtttaatcagtgcaagcga

SEQ ID NO: 394973 - DNA, 75 bp, Homo sapiens
gtttgttactggaacctgccgattgccagtaggaggatttgctgatctcatggctcaccatctgctacctggata

SEQ ID NO: 394974 - DNA, 100 bp, Homo sapiens
ggagaagctgctgctgccgccgttgccgggagccgcggaggagcttcaggatggttcgtactaagacatggaccctgaagaagcactttgttggctatcc

SEQ ID NO: 394975 - DNA, 90 bp, Homo sapiens
ggcctggatcccaatttccacgacccggagaccggaggtgctggagaatctggtaaaagcaccattgtgaagcagatgaggatcctgcat

SEQ ID NO: 394976 - DNA, 106 bp, Homo sapiens
ctggccagagaagacacgaataatctgttcagctatcatggtgaacttacttcagattgtgcgggaccactgggttcatgttcttgtccctatgggatttgtcatt

SEQ ID NO: 394977 - DNA, 83 bp, Homo sapiens
ctgaaacaattgaggattctagtaatcaagcagcagccagagaatgggaggtgcagcagtaccgcgtcgccatgactgccaag

SEQ ID NO: 394978 - DNA, 100 bp, Homo sapiens
ccacggccaagcatactccggaagaaacctgccacagatgggcaaaaactgattattccaagtggaagttgccctgttattctgaatacttacttttgtg

SEQ ID NO: 394979 - DNA, 150 bp, Homo sapiens
caacttgacctcggtcccagtgccccacaccaccgcactgtcgctgcccgcctgccctgaggagtccccgctgcttgcctgtggacagcgtggccccggcccccccaagcctcaggagggcaacacagtccctggcgagtggccctggca

SEQ ID NO: 394980 - DNA, 50 bp, Homo sapiens
gagagcccgtccgacagcgctgagctaccaagtcaggattgttaccccca

SEQ ID NO: 394981 - DNA, 89 bp, Homo sapiens
ctatatcagataagcttgacattacagccaagatggtgctgtcccagagacaacgagatgaacttgatgtccttgcattgcccattttt

SEQ ID NO: 394982 - DNA, 98 bp, Homo sapiens
ccagtccctagggctcagggagcaggagcttcaggttgtccgagcatctgggaatggtatgttttggagaaggtggacctgcacccccagctctgctt

SEQ ID NO: 394983 - DNA, 89 bp, Homo sapiens
atttcctgaaggggaagagcaagatgcagtcagtggagattcagaatggacagtttagaagaacctcagaaaaaagtctttaaggctcg

SEQ ID NO: 394984 - DNA, 100 bp, Homo sapiens
gcagggccagctgaccggccggggcctggtccgggcggtgcaggtgcgtatagcagcaaaattcatcattcatgcccctcctggagaatttaatgaggtt

SEQ ID NO: 394985 - DNA, 100 bp, Homo sapiens
ctttgcctatggtcagacgggctcagggaagacatacaccatgggggaggccagtgtggctatacctgcaggcccgcttcacttggcgaggagcccgcct

SEQ ID NO: 394986 - DNA, 85 bp, Homo sapiens
aaaacaggagtattaaatgaaaacacagtttctgcaggaaaagatctctctacttctcctaagaggcatggctattgcaccttgg

SEQ ID NO: 394987 - DNA, 117 bp, Homo sapiens
gtcgcctagtaaacggggctgctggtgggccgcgtcgaagacatggaccagggctacggagctttccccagacatggccaacaagggtccttcctatggcatgagccgcgaagtgca

SEQ ID NO: 394988 - DNA, 50 bp, Homo sapiens
caagggtgttcccgaactagagtggaaggtcatgcatacaaggaagaggc

SEQ ID NO: 394989 - DNA, 100 bp, Homo sapiens
ggggaaccatggctgccccgagagcctgattacatcaaccccagagccgtgcagctgggctcccttctcgtccgcggcctcaccactctggttttagtca

SEQ ID NO: 394990 - DNA, 100 bp, Homo sapiens
tttagacaaacactgggcgacggtggctccagcatgtatcagccgaggtggagctgcggggccctggcatgaaaggataaagataaagtttctctaacca

SEQ ID NO: 394991 - DNA, 83 bp, Homo sapiens
caaagtcatactgcagtgggacggaacggggagtctccggtggactgcagcgttagcaaatgcagcaagctggtgggcggagg

SEQ ID NO: 394992 - DNA, 100 bp, Homo sapiens
aagaccattcagatgggatctttccggatcaatccagatggcagccagtcagtggtggaggaagaggatcacctagcccgggtagaagaggcaatcaccc

SEQ ID NO: 394993 - DNA, 100 bp, Homo sapiens
ttcagctcttcgggattcagcctccaggtgtgatgaatgcagactctgctaccattttggctgtttggatcctcctttgaaaaagtctcctaaacagaca

SEQ ID NO: 394994 - DNA, 82 bp, Homo sapiens
atcgagaggatctggtgtaccaggcgaagctggccgagcaggctgagcgatacgacggaaatctggcattttttaaagtttg

SEQ ID NO: 394995 - DNA, 90 bp, Homo sapiens
gagaaccaaatcacaataagtctttagctgcaggtgtgtgggaagttcaccatgtctattctcaagatccatgccagggagatctttgac

SEQ ID NO: 394996 - DNA, 95 bp, Homo sapiens
ttgaagcttgagagaaaagcccccaaaagcagctattcagaaacctccacagctgttgagaaaaaggagaaacctcttccaagacttaatatcca

SEQ ID NO: 394997 - DNA, 75 bp, Homo sapiens
tgaagtcgccacagctgattttggtgaatatggccagcttcccagaggtagatgatgagctggagatcaaggcct

SEQ ID NO: 394998 - DNA, 100 bp, Homo sapiens
cagatttcccaagagcagcggaaaatgatccagtcacagcttgaacatgcgaaagtgacacagacagagttgatgcgtgagtcatttagacagaaacaag

SEQ ID NO: 394999 - DNA, 75 bp, Homo sapiens
gaagacagtccctggatcaccgacagcacagacagaatccctgctaccaattcgcttcaagctcagcttatcaat

SEQ ID NO: 395000 - DNA, 83 bp, Homo sapiens
ctgtgcagccgcgaggaggcgcgggaggtgttcgagaacgaccccgagacggctctgggcgtggggaggctgagacacgggag

SEQ ID NO: 395001 - DNA, 105 bp, Homo sapiens
gatctccagcggaggttgaggggatcgtcagtagagatgctgcagatatggaatgtgcagatgtcccactattaactccaagcagcaaagaaatgatgtctcaag

SEQ ID NO: 395002 - DNA, 96 bp, Homo sapiens
aagatcctggaggtggatctgaagaacggtgccctgtgggacatcgagaccggccagcagacgaccacgtttaccggacacactggagatgtcatg

SEQ ID NO: 395003 - DNA, 100 bp, Homo sapiens
cttggtctcaaggacactgcatcgtcaaactgatcccctggccgttggaggagcagttagaatggcatcatttcctggtggtcaacatgaagggcaatga

SEQ ID NO: 395004 - DNA, 99 bp, Homo sapiens
cgggtgccgctcatctccatcgtgaccaaggagaaggcatccatgagtatgttttctgatttcctgcagtcttttctgaagcactcttcgagtacagtt

SEQ ID NO: 395005 - DNA, 75 bp, Homo sapiens
gttgaccagaaagctccagaatacatcaggatggcagcatcattaaagagaccctcctgttcttaactgtgggcg

SEQ ID NO: 395006 - DNA, 100 bp, Homo sapiens
tgtaccatttccacttgatgtcatcacgcagaaggggtgaaagagactcggtgacagatacaggtcatttggatccaggattcctagcaagtgacaaaac

SEQ ID NO: 395007 - DNA, 83 bp, Homo sapiens
tgtttcaactctccgccgagggcgagcaggagcgagagtgtgtcgagtcagggaagtcaaagatgcatccctgagttcttcct

SEQ ID NO: 395008 - DNA, 101 bp, Homo sapiens
tgtgattacagcaggagattatgaccttaacatcagtggatcacagtcaccttctatatagcaccatccccaggatgcaggagccggggcagattgtggag

SEQ ID NO: 395009 - DNA, 85 bp, Homo sapiens
ggtggcagagagggggctaaagagcgtcgtgtggcagaggcaacgggcatgaggaggtagttgcatgcgcctgggatggacagac

SEQ ID NO: 395010 - DNA, 50 bp, Homo sapiens
ccaagaagctggtgtgcggagatgaaggcaggccagaaagcagacccagg

SEQ ID NO: 395011 - DNA, 83 bp, Homo sapiens
ctcccagccacctctgaagttgccaggcttcccaacattcttgtctgtggacgtggtgggtcctctggtgcgaaattccggat

SEQ ID NO: 395012 - DNA, 75 bp, Homo sapiens
ccctatcaggacatggagtatgaaagacgtttgttgcatattctaaggacccagacataggcttggtggcccgtc

SEQ ID NO: 395013 - DNA, 100 bp, Homo sapiens
tgctaacccgacccggattggcgctgaggtggcccgtggggcagatggtgatggaatttcctgataatgtgttaaatctcgatggacatcagaataatgg

SEQ ID NO: 395014 - DNA, 73 bp, Homo sapiens
tccttcaaagaagcagtatcggcaagcctgggttactaggtgtctttcagaagctgattgcatccaaagcaaa

SEQ ID NO: 395015 - DNA, 99 bp, Homo sapiens
ctccccagctcagacctggggcccctacctccctacagacagagccacaaggaatctggggtattggtgttgcaactcagaaggttaacttgaatcaga

SEQ ID NO: 395016 - DNA, 100 bp, Homo sapiens
aggaggtcccacaggctcctgccctggactaccgaggagctgtgactgatgagaattaaaggccatggatgaagatgggcttgaattacaacaagagcca

SEQ ID NO: 395017 - DNA, 83 bp, Homo sapiens
gcgagcccggacggcgcctctcgaacgagtgtgggcgcgagagagcgcctgctcgctgtgcccccgggttatgacgaccccca

SEQ ID NO: 395018 - DNA, 100 bp, Homo sapiens
gccgcatctgctgctgcagaagacacatgtgatgtaggcgtgagctccgatgatgacaagggggcccaggcagcacgtcaggacagctgaatgagtacac

SEQ ID NO: 395019 - DNA, 100 bp, Homo sapiens
ttcagttgcaaaaagaaactggagccaccatcaagctgtctaagtccaaagatttttacccagccatgctgtgacctacaagcaaactaaatagccaaca

SEQ ID NO: 395020 - DNA, 100 bp, Homo sapiens
taccgccagctgcggacccagggctttggagatgtggacgagtgctcactagcagaaaaaacctgtgtgaggaaaaacgaaaactgctacaatactccag

SEQ ID NO: 395021 - DNA, 100 bp, Homo sapiens
tataaactgcctggccgaatcagccttttcacgctcaaggaaggaaaacaggcttcgttggctgcagacttctccatcactcaatttaagcatcttggcc

SEQ ID NO: 395022 - DNA, 100 bp, Homo sapiens
ccccgggggtccgcggccggcaggaccatgctgctgaaagagtaccggatctgcatgccgctcaccgtagacgaggtccacgctgcttttatgagctgta

SEQ ID NO: 395023 - DNA, 83 bp, Homo sapiens
aatacctttggttttgggaagatctcaggaacggcctgcctcaccgtctatggagtcagtggatcggtggggaaaatgctgct

SEQ ID NO: 395024 - DNA, 75 bp, Homo sapiens
ccaggcgaactcggcctatcgctaccctccgaagtccgaaaattgtacaagctggagataaggaccttgatgggc

SEQ ID NO: 395025 - DNA, 98 bp, Homo sapiens
cctggtgtcacctatcagtaaaagatcagtcgcatcgaatacattcattcaaagaacttcatccaccgggatgtgaagccagacaacttcctcatggg

SEQ ID NO: 395026 - DNA, 117 bp, Homo sapiens
tggaggtgtcacaggcaatgacgtcattatgcacttcacgctcaactctttcccatttggaggagtggggttttcacaacatggtatgattggtgtaactcaaccacgaaaagtagc

SEQ ID NO: 395027 - DNA, 72 bp, Homo sapiens
tcttggacacctaatacccagggtcctccaggagctgacatggacccaaatcctcgggccgccctggagcgc

SEQ ID NO: 395028 - DNA, 90 bp, Homo sapiens
gcggctctgcgtacgctggttggcatttgctctgagcatcagtcacggggtcggcactcttcaccctcccgagccctgcccgtctcggcc

SEQ ID NO: 395029 - DNA, 110 bp, Homo sapiens
acatgcctctgacaatctctagtgtccagcccagaatcaaatgcaggttccatctggatatggattgcatcatcaaaactatattgctccctcaggacattactctcaag

SEQ ID NO: 395030 - DNA, 96 bp, Homo sapiens
ctctctcaagagaagctgcaagagcaacatctttcctcaccccaaggatattcatccgttctatgctgatttgatgaatattctctacgacaagga

SEQ ID NO: 395031 - DNA, 97 bp, Homo sapiens
gccagcaccatggccagcaccatttccggtcgggtcacaaatcttcgaagagtgacatatgttgttttagatgaagcagacagaatgtttgacatgg

SEQ ID NO: 395032 - DNA, 82 bp, Homo sapiens
ggtccttccttccagcctgatgctaccaaaggtggaaagtcctgaagaaatccagtggtcattttttgagaccagtactgtt

SEQ ID NO: 395033 - DNA, 74 bp, Homo sapiens
cccctatccagacggctgcccttcaagtaccagcgttggagaccagggccagccctggccacaccccaggctgt

SEQ ID NO: 395034 - DNA, 100 bp, Homo sapiens
ctcccgggtagctgggactacagactggtcgaattgacaaatcttaccctacagtatgtggccacacaggaccagtgctggacatagactggtgcccaca

SEQ ID NO: 395035 - DNA, 100 bp, Homo sapiens
aaactaacagggatcttgaaattaaagatcaggatgttggctctttcacccatcctggcatatgtgtatttataaaagaatgtttgaaagtgaaaacaaa

SEQ ID NO: 395036 - DNA, 101 bp, Homo sapiens
agtttttctgctgtttcttgttatttctgaagcagaccctgaggagaaatagcatggaaaagaccagtgccctcagtctgagcaacgttgctggagtattc

SEQ ID NO: 395037 - DNA, 100 bp, Homo sapiens
ctgctgtttccaggggctgcagagcatggactgttaaatcttgcacttcttctgagtgaggaataagacgagttggaagaagacctgatcaacaacttca

SEQ ID NO: 395038 - DNA, 100 bp, Homo sapiens
aaaacagtggatcgataccaagcacctccaatagacctcagttggatgaacccattccactgtatgaggcaaaagtttccatggaagctgttcagaaaaa

SEQ ID NO: 395039 - DNA, 100 bp, Homo sapiens
cgcagagggctcctccggcgccgccgagctgcgcccgctgccttcacaccccggacatccgcgccacacctgctacaggagctgagagaccctaccctca

SEQ ID NO: 395040 - DNA, 100 bp, Homo sapiens
gagaaaatcatgtactctcatctaattagctatttcccagaatacacagagctacagagacttctgaagtggagagtctgcgacctcctcggttcttcaa

SEQ ID NO: 395041 - DNA, 75 bp, Homo sapiens
accccagtcggtgctccggggaggtcacctgacgaggagcgtctgcttctgcgctttgcctgggagaggccctgg

SEQ ID NO: 395042 - DNA, 76 bp, Homo sapiens
cctggccttaaaattccaaaagaagcatttgaacaacctcagaccagttccaccggggatctgatgagcttctttc

SEQ ID NO: 395043 - DNA, 82 bp, Homo sapiens
aaggagctaaagcagcgtgcgttcagccctggggcctggtccagatccctgtgagcatgtaccagactgtggtgaccagcct

SEQ ID NO: 395044 - DNA, 90 bp, Homo sapiens
caagagtcagtattccggccagcttcacgaagtcagagagaatataacaccagcaatcctgacttgttgctagtcatatttcaagtgaca

SEQ ID NO: 395045 - DNA, 100 bp, Homo sapiens
ctggagtcactcaaattagaaaatcgtcatctttctgaaatggtgatgaaattggaattgggtttacatgagtctctggctgatgaacttgctcttgtgg

SEQ ID NO: 395046 - DNA, 100 bp, Homo sapiens
gctaagtggatcctctggccagctgactgcacttcttttttgagaaaggaaggaatatatcctgactgattatgagctttgatccaaaccttctccacaa

SEQ ID NO: 395047 - DNA, 99 bp, Homo sapiens
atcggctctcagaagaagtttagccgcccacttctgcctgccactacaacaaaactgtctcagaattcaagccaggaagaagcagcaatctgtcttctg

SEQ ID NO: 395048 - DNA, 75 bp, Homo sapiens
gagggctgcagcgcccaccctgcgccagagaccagataaaaagcatcagatggtgaaggagaaggagacacagaa

SEQ ID NO: 395049 - DNA, 75 bp, Homo sapiens
aaggcatcctgcagtattgccaagaagccaagtcctgtatctgccatgtctgtggcgtccacctcaacaggctgc

SEQ ID NO: 395050 - DNA, 100 bp, Homo sapiens
cctgaagacacacgggttcacactggagtcctgccgtagcatgattgcgctcatggatcggtatactttgaaaagggcgactacaataagtgccgggagc

SEQ ID NO: 395051 - DNA, 98 bp, Homo sapiens
ttgaaccagtcaaccagtctattgttgtcagtggagagagtggtgctggaaaggcagatcgggagcggtgccgagaaaaatttccttactagatgaca

SEQ ID NO: 395052 - DNA, 83 bp, Homo sapiens
caaaaagctgctttccccccacctgaacagaaaactgcatttgacaagatcagatccagactgtgaagacatgaaaagataat

SEQ ID NO: 395053 - DNA, 50 bp, Homo sapiens
caagaaccgagtcaaattatattccaggaggactgacaaatggtagtggt

SEQ ID NO: 395054 - DNA, 75 bp, Homo sapiens
tggcatggtcatattacatcggatatctgcggctgatcctgccagggaagatcagttttcctgccatccaggctg

SEQ ID NO: 395055 - DNA, 71 bp, Homo sapiens
ttggcagctgagtattggagccaggagcctgccatgaggtacttgaagctggtgtgtgtttcctttcagcg

SEQ ID NO: 395056 - DNA, 100 bp, Homo sapiens
ctcttccccaaatcgcagagggaagcttcaaatacacttctaatcatcctcagtacccagcagtatatgtctggctctgggagaggagtggacagcagct

SEQ ID NO: 395057 - DNA, 100 bp, Homo sapiens
cagaagacgttctgtatttcagcttcctgctatgtgccctctttgttcctaaaggcatagaatgtcaagctaaccaggcgtccgctacttcagaagagtg

SEQ ID NO: 395058 - DNA, 117 bp, Homo sapiens
cacagtgtcagaattacaaggtgagatcagccgcccggccaagctatcttctcgctagcaggtcatcatcagatttgaaatatttaaagtggatacaaaactatttcagcaatgcag

SEQ ID NO: 395059 - DNA, 75 bp, Homo sapiens
ctgcctggctagccggcgacttgagtgacgaacgcaaacatgcagatctttgtgaagaccctcactggcaaaacc

SEQ ID NO: 395060 - DNA, 75 bp, Homo sapiens
actcccggctgttcccccggagaggatgatgtggacctggaagccctggtgaacgatatgaatgcatccctggag

SEQ ID NO: 395061 - DNA, 75 bp, Homo sapiens
tctgattgcttgggccaataatatgggccatccaggagagcctcctcaccagcacagaaggcctgtgccccagcg

SEQ ID NO: 395062 - DNA, 144 bp, Homo sapiens
tcggacctggacggctggcccaacctcaatctggtctgcgccaccaacgccacctaccactgcatcaagcaataatgacgatgaggacctgacaccagagcagaaggcagagcgtgagaaggagcggaggatggccaacaatgc

SEQ ID NO: 395063 - DNA, 83 bp, Homo sapiens
ctaaagataaatgttaaactcggagggatcaataatattcttgtacctcatcaaagagatcctctttgtgctgtcgatggaaa

SEQ ID NO: 395064 - DNA, 51 bp, Homo sapiens
ggcggagtcggggctcctgacggtcctggcattgatgtgcctgctccagac

SEQ ID NO: 395065 - DNA, 82 bp, Homo sapiens
cgctgctcaagttccagatttgccacataaagaagatccctaatagtcatttctcaacaattatatagtcaactgatgtaac

SEQ ID NO: 395066 - DNA, 100 bp, Homo sapiens
ccgtgtgacagtaactgaacattggtctaaagtctttccaaaaggtcaaggttcacaagggaaatgatcttcattggttagcatgtgccttatatgtggc

SEQ ID NO: 395067 - DNA, 126 bp, Homo sapiens
gtctacagccccggggagccgttggctgggaccgtgcgcgtgcgcctgggggcaccgctgccgttccgagggggggccctcagcctcttggccttgaacgggctgttcatcttgattcacaaacac

SEQ ID NO: 395068 - DNA, 87 bp, Homo sapiens
caaaccaggagattgcgagggagcgatgcggtgcagcgcggtggttggaggcaaagtaaagaagcccggtaaacgtggtcggaagcc

SEQ ID NO: 395069 - DNA, 97 bp, Homo sapiens
ggaactggtgtaccctggtggacgtgcacccagaggaccaggcggcggtttattcactggatctctgaatacccaggccccctccaccatggccagc

SEQ ID NO: 395070 - DNA, 98 bp, Homo sapiens
gaagagagacacttggccattaagaactttggacagcagcccattttcgtttttctcctgagtactagggcaggtggaccggtatcggttgaagaatg

SEQ ID NO: 395071 - DNA, 95 bp, Homo sapiens
ccgggctggtggcctcgtgctggagcccggacgggcgccacattctcaacaccacggaattccatgtgaaagaacttgtcctggacaacagtcgg

SEQ ID NO: 395072 - DNA, 111 bp, Homo sapiens
atgaaatttgctctgctaaaaggctccttcagtgagcaaggcatcaacgagtttctcagggccggagttaagatgagtccagcgaagtgcctagagtaccaaattcatgga

SEQ ID NO: 395073 - DNA, 100 bp, Homo sapiens
gaaaagatgaaaaggaatatgcattgaagcaaattgaaggcacaggaatatccatgtcggcttgtagagagattgcagcaacgtgttggaccttccggag

SEQ ID NO: 395074 - DNA, 99 bp, Homo sapiens
cagaggtgaaaccaacagccagtgatatgctatacatgtgaaactggaacgccaagctgaagaagaacgaatacggaagcacaaagcagctgctgagaa

SEQ ID NO: 395075 - DNA, 74 bp, Homo sapiens
aaacattcgtctcggaaaccccgcctcttacagtcacgaggtccttgaatgggcaagagggcacatgaagtacg

SEQ ID NO: 395076 - DNA, 76 bp, Homo sapiens
cagcttttggcagcatgaaagttagcagctcgtcctttgacacgctacctgcctgtccggaaggaagactttgatt

SEQ ID NO: 395077 - DNA, 82 bp, Homo sapiens
accaacggctcaagaatttcaagaacaaaggccgcgacttggaggtgtgaacccacatccctgcccccagggccacctgcag

SEQ ID NO: 395078 - DNA, 83 bp, Homo sapiens
gccgcgcagccgccgcagagtccgcggcgccaccgctcgccctccagcaattctgtggtgttcttggtcacacatttatggag

SEQ ID NO: 395079 - DNA, 82 bp, Homo sapiens
gtaagaagtgtgctcaaaatgtgaagcaatttgggacggtggacccccaaaagtacaagggcatatttaacggattctcagt

SEQ ID NO: 395080 - DNA, 101 bp, Homo sapiens
gggcaatcggccaggcccaggcagttccctatgtggccaccaaggaattatgggcccaccgtgttagtgcaacaggaggcactcaagcggggctgtgaaca

SEQ ID NO: 395081 - DNA, 80 bp, Homo sapiens
aaccagttagtggtgctcaacgtgtacgacatgcttccatgcctatggctgttctaaaattgggccaaatatatccattt

SEQ ID NO: 395082 - DNA, 98 bp, Homo sapiens
acccagtctgagtgtctgtccccagagcctcagtttgtgcaggacaccgacatggaacagggactcactggggctcctctggtgcaagtgtggtagct

SEQ ID NO: 395083 - DNA, 82 bp, Homo sapiens
taaacatgcaatgaacccaaaaggaggaatgcaggcagtagttcagatggaaccgaagattccgatttttctacagatctcg

SEQ ID NO: 395084 - DNA, 75 bp, Homo sapiens
gtgcgtctggatgactactaaggaatactcccccagttgcaagaggcgcaggaccgtggaagacttcaacaaatt

SEQ ID NO: 395085 - DNA, 100 bp, Homo sapiens
tttcaggtgaacggccaggcccggtgacgtcacttcctgccagcttcggaaccaaaaagaagcttcccagagccggggccaggagccccaagcgccctct

SEQ ID NO: 395086 - DNA, 95 bp, Homo sapiens
ggcgcctgcagatcccggctagggcacggaccgcctaggccgagggaattgaaaattcggtttttactctaagtgaaggacattcagcccagatt

SEQ ID NO: 395087 - DNA, 75 bp, Homo sapiens
tctttcctgccagtgccgacaggacgggagctgagcacataacgacttacacgttcaatactcacaaagcccagc

SEQ ID NO: 395088 - DNA, 96 bp, Homo sapiens
cagagagagaggtggacagatctgagagatactgagtaagactttgaccccgacgcaggcttcagtgattgccgcggatcagaagcctgagcactt

SEQ ID NO: 395089 - DNA, 83 bp, Homo sapiens
gccgaatctccggccgaagagcggcggcggcagcggcggtgtcgtgaaaactacccctaaaagccaaaatgggaaaggaaaag

SEQ ID NO: 395090 - DNA, 100 bp, Homo sapiens
ctgctacgacgcgctggtgcacttcgcgctggaatatattcagatgctaatgcctccactgatccagaaatggaacatgttaaaggatgaagataaagat

SEQ ID NO: 395091 - DNA, 80 bp, Homo sapiens
caggagtgaagctgcagaccttcgcgtctgatgccaatgcaagttacttaagagcagctcgagctggacaccttgaaaag

SEQ ID NO: 395092 - DNA, 80 bp, Homo sapiens
aaaacaggactggctgatactacatattccagatgtccagcctagggtgaatgtttccccctccaagaaggggcccttgc

SEQ ID NO: 395093 - DNA, 90 bp, Homo sapiens
tggaaatctactctaaaaccactcgcttcgcccttgcttgtaatgcttcggataagatcatcggatgtttgatgagcgaattttcacagg

SEQ ID NO: 395094 - DNA, 100 bp, Homo sapiens
ttcgcttttcttccggagcctgaaggaacaccttccaccatgaccacctcagcaagttcccacttaaataaaggcatcaagcaggtgtacatgtccctgc

SEQ ID NO: 395095 - DNA, 141 bp, Homo sapiens
cctagaccctgcccaacagaatttatatagagatgtgatgttggagaactacagaaacctcgtctccctgggtgctggagaatctggtaaaagcaccattgtgaagcagatgaggatcctgcatgttaatgggtttaatgg

SEQ ID NO: 395096 - DNA, 99 bp, Homo sapiens
ctcatcttgtcctacctgaagtatgccattagttcccaggtgtaccaacagtaccgttattgccaccacaagtaaaccagtccctcacttctgtgccac

SEQ ID NO: 395097 - DNA, 82 bp, Homo sapiens
tcatgctggccaagaagatcatcattaaggacggaggcacgttacagaatgtctgaaggggacagtgtgggagaatccgtcc

SEQ ID NO: 395098 - DNA, 83 bp, Homo sapiens
cccgtcccgaccctggccgccccgagcggagcctggaggtactggctgtgatcgaacttctcaaccctcagagacttagatct

SEQ ID NO: 395099 - DNA, 100 bp, Homo sapiens
tgtggagaataacggctgcacctggagattgacgcagagtgggcggcggtggtgtgaagaactgaatgtcatcatgtctggaatcaagcgaaccatcaaa

SEQ ID NO: 395100 - DNA, 101 bp, Homo sapiens
aggctccgggcgcggggaagtcatgctcgcttcacggaggcaatagctagccgggctgcgtccaaagaggactctgcggctggtgctctggactgcagaag

SEQ ID NO: 395101 - DNA, 75 bp, Homo sapiens
ccccactcagacttggagccccgtaggagcaggaaatccacacgaagttatacggaagcgtctcctcattgatgg

SEQ ID NO: 395102 - DNA, 100 bp, Homo sapiens
catgggttatatttggaaccttcgggcaaacaggattccacagtgtcctctggaaaatgacgtttggaacagaacacaatcaaagtcatccctcctggag

SEQ ID NO: 395103 - DNA, 100 bp, Homo sapiens
gccggtcggtttccggatgaaacgaggagccaggtgctatggtctttagaattgggtcactggatttctgaggagccgttcgaactgtctcaccacttcc

SEQ ID NO: 395104 - DNA, 101 bp, Homo sapiens
aaaaaaaaacgtgaacgtcagcatcctctggggctcccaggacgccgtgacttcctggccgcggtgcttaccaggagtcttttagtcctgctatacagctg

SEQ ID NO: 395105 - DNA, 104 bp, Homo sapiens
gaaacacaaagccggctacgcgctgcgagtgccggtggtggtgtgcacattgagccccggtatagacagttcccccagctgaccagatcccaggtgttccagag

SEQ ID NO: 395106 - DNA, 96 bp, Homo sapiens
acagccctgggccccaggtgccagaccccaaggtccaggaactccaggccagcatggcgcagcacagagaacaagatcctgatcttcgggctgttt

SEQ ID NO: 395107 - DNA, 96 bp, Homo sapiens
gctgctggtggcccgggtcttccagaaggctgtagaccagagtatcgagaagggagagctggtgacggcctccaaggccatcattgaaaaggagta

SEQ ID NO: 395108 - DNA, 101 bp, Homo sapiens
tcagaaaagggatttaatggtgaagattttgaacggcttacgaaaatttgtgcaacacatcaagagttgcacgttttcaaaaaatacctaatggtgaaaat

SEQ ID NO: 395109 - DNA, 75 bp, Homo sapiens
ctggaatgccacaaatgcaaatacttgtgcactgggagaggatgagagagacctagagaaagatgatgaactgga

SEQ ID NO: 395110 - DNA, 98 bp, Homo sapiens
gtcaggccgcgacgagggcgctgaggttcaagggcagcaggaaagacgagatcctgggcatcgccaacaaccgactgatccgcatcgacttggccgtg

SEQ ID NO: 395111 - DNA, 100 bp, Homo sapiens
cttatgaagatatgatgaaagagaaggacgagctcaatgccaccctcaagatggggagtttgcagtgacccacatgaccaaggcccacctcttctccacg

SEQ ID NO: 395112 - DNA, 71 bp, Homo sapiens
tagaagctgtggatgaatttgcttttctggaaggagatgcatttagaagatactaccagattctgtcccaa

SEQ ID NO: 395113 - DNA, 99 bp, Homo sapiens
aattgttgataccaatggaatcacggtttttggaacaaggattttggatgaagaagtttttgaggtgtatgcccacgcaggcgcgacgctggaggggaa

SEQ ID NO: 395114 - DNA, 75 bp, Homo sapiens
tcttgtttgtggatcgctgtgatcgtcacttgataccatggcctgggagaccatcctgatggatacactggagga

SEQ ID NO: 395115 - DNA, 121 bp, Homo sapiens
agtggagggagcagggagcattgcagcagccactggctttgtcaaaaaggaccagttgggcaaggtaatgtgaatggcatgaagaggaaagaatgggaaaacaaatcagtgggaatagaag

SEQ ID NO: 395116 - DNA, 80 bp, Homo sapiens
caaccggcggccttgagcgctgagcaagcaaaggctgccccagtgctcagctgtgaagctgcaacacagactgaaaggag

SEQ ID NO: 395117 - DNA, 100 bp, Homo sapiens
cactccactgcatgccaatgcactttgccactttcatattgcagccagcatcaacccagccacaggagaatgagatcctgactgaacaggaggagctcct

SEQ ID NO: 395118 - DNA, 126 bp, Homo sapiens
aagagtctccgcggtggaggtctgcgttgctcttgcttttcctcgctggggtgtacgatcatcaatgctgtggtactgttgattttattgagtgccctggctgatccggatcagtataacttttca

SEQ ID NO: 395119 - DNA, 75 bp, Homo sapiens
tcatgcagctctttcaggaccatggcttcttcccgtcagcccaagttccgttctccatcagacgagggtcctggg

SEQ ID NO: 395120 - DNA, 51 bp, Homo sapiens
ccggagcgtcccagctgcgaggaggctttccttaaagtttcccatgtctca

SEQ ID NO: 395121 - DNA, 100 bp, Homo sapiens
ctgcacatctgcctcgctgctggtttgcgatgagcaaggtgtggaacgacctgaggcccaagctcagctgcctctttgcgggaccacacagcaccctgac

SEQ ID NO: 395122 - DNA, 129 bp, Homo sapiens
ctgcaatctatggagcagattcggagaattatgagacctactgatgtccctgatacagggcggcgactggcggcgcgatggacctgaccgggctcctgctggacgaagaaggcaccttctccctcgccg

SEQ ID NO: 395123 - DNA, 75 bp, Homo sapiens
gggcaaggtggcagagaaggaaggatggcctctggacatccgagtgggtctgtttctgtcgactgtggaccactt

SEQ ID NO: 395124 - DNA, 83 bp, Homo sapiens
ctgagtacggtctcacagacaacgttgaggacatcacacccctgcaggtggttctgcccaacactgccctccatctaaaggcg

SEQ ID NO: 395125 - DNA, 75 bp, Homo sapiens
caagcatgcagcttactgcttgaaagctccaaagacaacaggccctccctctgccctcccgtctgtgagctccct

SEQ ID NO: 395126 - DNA, 98 bp, Homo sapiens
aacagtctttatgtccttacaccagatttgccaccaccttcatcatctagtcatgctgggctgtattcatcaccaaagaaaaaacttacaccaatgca

SEQ ID NO: 395127 - DNA, 75 bp, Homo sapiens
aaaatcctcactctgagtacggtctcacagacaacgttgaggttaaaggactggatgcatttgttctgagcctgc

SEQ ID NO: 395128 - DNA, 75 bp, Homo sapiens
ctgggaactatgcctgggtcaaccgctcttccatgaccttcttaacccgtcagggagccttttggggactgatcc

SEQ ID NO: 395129 - DNA, 95 bp, Homo sapiens
ctttggttggtggaggctgtggcaatggaacaggcttgagaaacagccatcactggtgcaagctatatttaacggagatcctgatgaagttcgag

SEQ ID NO: 395130 - DNA, 83 bp, Homo sapiens
ggcgttatgacaggaagcagagtggctatggtgggcaaactaagccgattttccggaaaaagacaaagtctcccgttgagagt

SEQ ID NO: 395131 - DNA, 75 bp, Homo sapiens
ccggactctggggatctcttgctgcaactgacaagttacaatttcttctaacaagtctaccaatcatgaaaggaa

SEQ ID NO: 395132 - DNA, 83 bp, Homo sapiens
aaacaggagcacctgctggcgctaaaagtttggtgccctggttgtcagatgttggaaagcagtaggacggaacatactcttcg

SEQ ID NO: 395133 - DNA, 75 bp, Homo sapiens
ttgaagaaacacaaacctgacttcatctcattgttcaaaaatccggagatcacaaatcaacatctcacttccgaa

SEQ ID NO: 395134 - DNA, 87 bp, Homo sapiens
cacgcgtctatcgccggctgccgcatcatcgggcgcatgtgtgtggtcaccaggagactaaagtccatcaaaaacatccagaaaatt

SEQ ID NO: 395135 - DNA, 100 bp, Homo sapiens
ctgaccaaggcaatatactgttacgatccagttgaagattactggatgcacgtacagaatacattcagccgtcagggcaagtgtccagagaatggctggg

SEQ ID NO: 395136 - DNA, 100 bp, Homo sapiens
tcactaattatgaatcagaagaactggatcttaccttgcccaccaacttcagagatttgtccaaggagtctaccatggctcaagaatctcccaaaaattc

SEQ ID NO: 395137 - DNA, 125 bp, Homo sapiens
tcggaagcctgcgtaactttctcccttgatccgggagtctttccactggaaatgtagacaaccaatttcctgggcaagctgctccacctggattcccagtgtatcccgcgtttagcccactgcag

SEQ ID NO: 395138 - DNA, 83 bp, Homo sapiens
ccgccatcattggacccaatggctctggagaagatgtatggtcttatgcaaagggacttcctcacatgtttcagcagggtggt

SEQ ID NO: 395139 - DNA, 50 bp, Homo sapiens
aaaggatcccagaaagtttcagggaaatcctcattgacgattcaatttgt

SEQ ID NO: 395140 - DNA, 90 bp, Homo sapiens
cgcccagctccccttcggttgtgcctgttgccagggaccagctggaactggacaggctgaaacgttgcaggtggcgagctgtttgacttc

SEQ ID NO: 395141 - DNA, 83 bp, Homo sapiens
gaagcgaaatgtgctcattggccattcctacgggctcctctgctgaacagcccctgggcgggagactcaggaagctgagcctg

SEQ ID NO: 395142 - DNA, 100 bp, Homo sapiens
acacaaattcctgagaattgggaacatgctaaatacaaatggtatcttaagacttaattcagtgcacaaatgagatgaatgtgaacatcccacagttggc

SEQ ID NO: 395143 - DNA, 82 bp, Homo sapiens
tggacctggtcagagcgcggatggccgtaaccccgaaggaaataatgtgaaaccaagggagagagtcaaaatacagacttga

SEQ ID NO: 395144 - DNA, 82 bp, Homo sapiens
ttggactgagtcctgcaggacacagaatcaaagaatcttcaggatggcagcaagtgtttacgagcccatatttggattggac

SEQ ID NO: 395145 - DNA, 90 bp, Homo sapiens
gtcccgctcgtcatggcctacccgggatacggaggagggattgcagagggaatggcatacatcgagcggaagaactacattcaccgggac

SEQ ID NO: 395146 - DNA, 100 bp, Homo sapiens
agcgtccgggacgcggagcccggagctggggcgacgaggcgattgcgggggcctgggctagatggtcagtaggacagaaggtaacattgatgactcgctc

SEQ ID NO: 395147 - DNA, 98 bp, Homo sapiens
agcacttggagcgcagaaccggccgcgcccgcaagagtgagccatggagctacgtgtggggaacaagtaccgcctgggacggaagatcgggagcgggt

SEQ ID NO: 395148 - DNA, 98 bp, Homo sapiens
tggatgccatcatccgcgagcgggagcagcgcgagagaagctactctttgtccgtgcgagactacgaccctcggcagggagataccgtgaaacattac

SEQ ID NO: 395149 - DNA, 80 bp, Homo sapiens
actcgggcaagaccaccttcgtcaacgtgatcgcgtgaacacctacctcttcatgatgcaagcccaaggcattctgatcc

SEQ ID NO: 395150 - DNA, 100 bp, Homo sapiens
cgcagccgtagacaccagctccgaaatcaccaccaagaacccttaggagaaatcttgagagtggacagcaattgtgaagatcgccagagagttctgtgtt

SEQ ID NO: 395151 - DNA, 100 bp, Homo sapiens
gaaagagtcaacagcagtggcaacagatacgtaggtaacctttccagagatgtgacagaagtccttatacttcagttgttcagtcagattggaccctgta

SEQ ID NO: 395152 - DNA, 75 bp, Homo sapiens
aacttgcagcaaagccattcgggttggagtaattggaaaatgtttataggaggccttagctgggacactacaaag

SEQ ID NO: 395153 - DNA, 100 bp, Homo sapiens
aaccaagtgattcattccaaggacaggcagcccagtctggtgtttggaatgacgacagtatggccaagaagcttgagagaagaaaaatttcagaaaaatt

SEQ ID NO: 395154 - DNA, 75 bp, Homo sapiens
aagtgtcaagataaagtgagtcagctgtacatggtgagcactgtgggctatgggatggatgaggtggagcaggac

SEQ ID NO: 395155 - DNA, 75 bp, Homo sapiens
catccacgcacctgcagctctgctgagagagtgcaagccgtgggtctcaggaggaggtctgcgatttgctccatg

SEQ ID NO: 395156 - DNA, 82 bp, Homo sapiens
cgagggctacccgctctttgccgtgacaacaccgttcccccagccgggctggtctcggcgcggaagatggccggcggcgtgg

SEQ ID NO: 395157 - DNA, 90 bp, Homo sapiens
ctcagtggtggaggatggcttgaacagacagattctgtcttaactaataagattggaactgtattaggaattttggagagtaaaaggctg

SEQ ID NO: 395158 - DNA, 100 bp, Homo sapiens
tgacatgtctcgacctgtggaactgagtgacagagaaactttgttaaatagtgcaaccacttcactgaactcaaagctgacatcctggagccctctccac

SEQ ID NO: 395159 - DNA, 90 bp, Homo sapiens
cttccaagagggatgccagagccttctgttgtcggggccaaagtggtaacgaacgcccgcagcccgggggctcgatgctatggattcgtc

SEQ ID NO: 395160 - DNA, 79 bp, Homo sapiens
tccccactgcggtccacggccaggtgaacaatgaaatgtgatacctcaaagcacaaagtgctggtagtgtctgtgtgtc

SEQ ID NO: 395161 - DNA, 88 bp, Homo sapiens
gcctgagtagccggtaacaaacgagggttcccgggattggaccgacgcagccatgattttcgacaatgaagccaaagacgtggagaga

SEQ ID NO: 395162 - DNA, 100 bp, Homo sapiens
caggatatgaagagaaaaatggcacctgtcaagccacccaggctactttgggaaagttggtatgaagcattaccacttaaagaggaaccagagcttctgc

SEQ ID NO: 395163 - DNA, 82 bp, Homo sapiens
cctggccatgggcatgaagcgggaaggttgacatcatggacatatgtgagtccatcctggagaggaagcggcatgacagcga

SEQ ID NO: 395164 - DNA, 74 bp, Homo sapiens
gtctcttacgtctgcggaagtgcagctgcctcagttcttagcgcagactgcttttcaggaagccttggacgctg

SEQ ID NO: 395165 - DNA, 74 bp, Homo sapiens
cttcaccgaacagcacctcaggagcagggagaagagaagtttacctttattgagaaatgtaacaaccctcgttc

SEQ ID NO: 395166 - DNA, 100 bp, Homo sapiens
caggcgtgaagattggatttgggttgggactgggaagtctcgatgctgggctcttgcactgtttggtggaaatggtgagacaggatttgagcaaaattct

SEQ ID NO: 395167 - DNA, 75 bp, Homo sapiens
cctcaacacggaccgcgcccgccgggcacacaagaatggtcactgtttggctcagaagaaggcggccccaacaga

SEQ ID NO: 395168 - DNA, 100 bp, Homo sapiens
ttcacagtcccctggggactcagaggagtacttcgccacttactttaatgagaagatctccattcctgaggaggaggcctacaggattatgaagcggcac

SEQ ID NO: 395169 - DNA, 75 bp, Homo sapiens
ggattaaagctaaagacatagttcctggtgatattgtagaaattgctgaatctgaattatccagaacagaaagtt

SEQ ID NO: 395170 - DNA, 75 bp, Homo sapiens
aaaactttgggcttgcaacttttgttaccaaaggaatcagggcccttatattctcaagaccgaatccttcaagcc

SEQ ID NO: 395171 - DNA, 74 bp, Homo sapiens
cagagcaggagttgccgcagccccaggctgagacaggctctggaatgggcactctccttatcagcaagatccga

SEQ ID NO: 395172 - DNA, 100 bp, Homo sapiens
ttattgaaacattaaatgacagttcacataagaagttcttcgatgtatctaaacttggcaccaagtatggtaacgatgggggtccatcctcttcaagtaa

SEQ ID NO: 395173 - DNA, 75 bp, Homo sapiens
ggccactcagagtcgcccgagaaattgactcatatatttgccaagtatgctcccgtggggatgaagatgataagc

SEQ ID NO: 395174 - DNA, 95 bp, Homo sapiens
gcctcccgagtagctggtattacagagcaactaagaggtctttcttggctctatgagaacctggtgggattcctgaagataaagtccacaaaaat

SEQ ID NO: 395175 - DNA, 99 bp, Homo sapiens
cgcttgtcatcatggcgacgcggggccatgtgcaggaccctaacgacaggcgcctccggcccatttacggtcctcagaatggttggaatgaccctccag

SEQ ID NO: 395176 - DNA, 100 bp, Homo sapiens
gccgtttcaggcctgcggctgtcggctggtgcttggcggcagggacgatcacacacatgccctcttggttctgtttctttgaagaaccccaggaaaacac

SEQ ID NO: 395177 - DNA, 75 bp, Homo sapiens
tgatcctggctttggaatatataaggataaggagcacaagtgtcctttgatttgtgggaggaaactccgttgtgg

SEQ ID NO: 395178 - DNA, 100 bp, Homo sapiens
aagaaggaaaagacggccaagctgatccccaacgccatccagatctgcacggagagcgagaaggactccagtgggggtgactcatgtgcttctgaggagg

SEQ ID NO: 395179 - DNA, 100 bp, Homo sapiens
ggaagagggccactgttcagcccccacctcaggctgcagagcaacaagatatggatttggatatagaatttgatgtacaccttggaatagctcatacccg

SEQ ID NO: 395180 - DNA, 100 bp, Homo sapiens
gtcgtcgggcgctcatttcgagtgaccattccaacagatttgattgcctccagtggagatatcatcaaggaaccctaaggactctgcaatatgaataatt

SEQ ID NO: 395181 - DNA, 100 bp, Homo sapiens
gctaagacaccgggacctcctggaagccaaaaatgaaagcatgctctgaattgccatcggatgaagcctgctctgttcagcgtgctctgtgagatcaagg

SEQ ID NO: 395182 - DNA, 80 bp, Homo sapiens
acaaatgcacgcgacaggaaccaggatgaaggtttaaggctcagaaaggtagcacattcggataaacctggatcaacctc

SEQ ID NO: 395183 - DNA, 99 bp, Homo sapiens
gccactgggctcccagcagcccaggttcagatgccttcacctgaatgacatctacctccatcaggaccccagatgtctgacagccctgtgtgacaccaa

SEQ ID NO: 395184 - DNA, 100 bp, Homo sapiens
gttcaggaaccaccagtgacagagtcgatgaaacaggtgtagaagttaaggacattgaattggtcatgtcacaagcaaatgtgtcgagagcaaaggcagt

SEQ ID NO: 395185 - DNA, 100 bp, Homo sapiens
taagaaatgttctcgacagcaaggcaatgagaagcacgaccttcatgttacctcccagcagggcagcagtgaaccagttgtccaagacctggcccaggtt

SEQ ID NO: 395186 - DNA, 99 bp, Homo sapiens
tgtggatgaatttgcttttctggaagggggacctcgggggccggaagaccctccagcagagatggacgacgtttttgaaagctgacctgctctgtccag

SEQ ID NO: 395187 - DNA, 100 bp, Homo sapiens
cgggcgcactgggaggtggaacgggccgaactgcaggagtctactatgcaactgcatactggatgcctgctgaaaagacagtacaagtcaaaaatgtaat

SEQ ID NO: 395188 - DNA, 101 bp, Homo sapiens
gcctctccctcttcctctgctcccgcggggtctgtgctgagaataatggcccggttggcccgggacgagtggaatgcaaaccctcctggggcttgcccata

SEQ ID NO: 395189 - DNA, 102 bp, Homo sapiens
cccagggggccggagggccagggtctcccggagtaagactttgaccccgacgcaggcttcagtgattgccgcggatcagaagcctgagcactttggctcgag

SEQ ID NO: 395190 - DNA, 87 bp, Homo sapiens
actgcaccgcaccgagggcgagctccaggtgactctcctattccatctgtttcttcgggatcatcttcacctctttcagccacttct

SEQ ID NO: 395191 - DNA, 90 bp, Homo sapiens
aacccacaagtatgtatatgaatgatggctatgcaccacctgatatcaccaactctccggaccaaaatttaacagtgccatccgaggaaa

SEQ ID NO: 395192 - DNA, 74 bp, Homo sapiens
atgaaggggaggatcctgctcttgacagcctcagtcaggccatagcattccagtaattcgccaaaatgacgaac

SEQ ID NO: 395193 - DNA, 74 bp, Homo sapiens
tgcctgacacaggagagggccccagcagggccaccgggcggcaaggtcgcgtggggcaggcagtggcgctgcgg

SEQ ID NO: 395194 - DNA, 98 bp, Homo sapiens
tttccagatgttgagaaattagaaaaggggctaaatgatctacagccttggcctcttccaggtggttcacttatttttaacactctgcagcagcagca

SEQ ID NO: 395195 - DNA, 83 bp, Homo sapiens
cgcggccgtcggagacatgggagacccggggtcggagacaggggcaagtgtccgagtggtgaatcagctacttacagagatgg

SEQ ID NO: 395196 - DNA, 50 bp, Homo sapiens
gtacctttatgaaccagtgtatcccaacgatgaaatctacattgctcctt

SEQ ID NO: 395197 - DNA, 100 bp, Homo sapiens
catcagagagccctggcatgctgactaagctccaggttgttgatcattatgaaaatcctagaaacgtggggtcccttgacaagacatctaaaaatgttgg

SEQ ID NO: 395198 - DNA, 90 bp, Homo sapiens
ccgtggccatgcagagtgctctgtgagtcaccgttaatttcaggggcaagattcttgccaagagaattaatgtgcgtattgagcacatta

SEQ ID NO: 395199 - DNA, 101 bp, Homo sapiens
ggggccatggccggaatgcagtaccctcagcagcaggatgtgatcttcgtggtggaaagctaaattttaaaaccaccccaatggatgcagacagtgatgtt

SEQ ID NO: 395200 - DNA, 80 bp, Homo sapiens
aaaattatttatccaacagctcctcccaggtaaatcaacagactgggaagatgatggttggggagcatgggaagaaaatg

SEQ ID NO: 395201 - DNA, 82 bp, Homo sapiens
aaggaaataggatttaaccgctctctgcctcccaggggtgatccattcatgttgcagcagtctacaaatccagcaccaggaa

SEQ ID NO: 395202 - DNA, 76 bp, Homo sapiens
aacctcaaaccttcaggaggttacataacaggcatggctaatgtaaaagcagccccaaagataattgacacaggag

SEQ ID NO: 395203 - DNA, 83 bp, Homo sapiens
ccacctcctgacacaacaccactcaggctcaaaatctccttcgccaagaccaaacatgcctgttcgatacttcataatgaaga

SEQ ID NO: 395204 - DNA, 83 bp, Homo sapiens
gcaaagcctacagcaccaccagtattgccagcgtcgctggataaacatcacgatgctgctcatgaaatcatcgagaccatccg

SEQ ID NO: 395205 - DNA, 101 bp, Homo sapiens
tggtgcccagccgggaactccccatcgcgttttgccagcgataatacgcctcagaggctgacccgcggctgattgagtccctctcccagatgctgtccatg

SEQ ID NO: 395206 - DNA, 50 bp, Homo sapiens
gcagtgtgtctggtcttatgagaggcgtggagctatttcctatgacagtt

SEQ ID NO: 395207 - DNA, 74 bp, Homo sapiens
ccaaagtggatgaggtgaagtccacaatcaagttccaaatgaagaaggtgagtacaaagcaatttgcagttgtt

SEQ ID NO: 395208 - DNA, 76 bp, Homo sapiens
ctgatagcttttacagtgctcattcctaacagtggatttacttgttctctacttttagagtcgaaaataaatccta

SEQ ID NO: 395209 - DNA, 103 bp, Homo sapiens
agcccccgggcccactggtgccacctgaccagcaggacaaagtccagtgtgaaatgacaatggatgctctgttggctcgattgaaacttctgaatccagatga

SEQ ID NO: 395210 - DNA, 100 bp, Homo sapiens
gcgagggaagtcgtgcacgaacaccaagaaggacagaataacgggctcccagattcacaagccccaccaagaggatcaccccaggaacgcttggaggctg

SEQ ID NO: 395211 - DNA, 50 bp, Homo sapiens
ggaggttaatgccatcaagaaggggatcaagcatgaattgcaagcaaact

SEQ ID NO: 395212 - DNA, 87 bp, Homo sapiens
gagttcctgcagcgaaaacgggaagctatgcagaataaagctcgagccgaaggacatatggattttgacacttcatgacatgtcatt

SEQ ID NO: 395213 - DNA, 75 bp, Homo sapiens
ggagtgacgagctccaacggcatgctcgcacccacacaggcatttgaggagactcatctgacctcccttgaccca

SEQ ID NO: 395214 - DNA, 102 bp, Homo sapiens
aaaaatttggacattgaccccaaactgcaagaatacctcggcaaattccgacgtcttgaagacttccgagtagattgcctcagtgaaggagccctctctcct

SEQ ID NO: 395215 - DNA, 82 bp, Homo sapiens
caacttcagatttctatgacagaactaaagcgggcaaagttagaccttccagaacctgaagcctattgttctacattcaaga

SEQ ID NO: 395216 - DNA, 100 bp, Homo sapiens
cgctcacccaggcgcctcaacagtagcccccgggcccccgtcagcggccttgcaggccactcgagccctaatggtggtctccctggtgctgggcttcctg

SEQ ID NO: 395217 - DNA, 97 bp, Homo sapiens
ggattcgtggtgaaggtccggggcttgccctggtcttgctcggccgatgaagtgcagaggtttttttctggagaaacttgttgcacttggagacaag

SEQ ID NO: 395218 - DNA, 88 bp, Homo sapiens
catcctgtctatcctcctggccgtcctcctcacggtcctcctggctgtgctcatatacacctgacaacacaggcagttctacataccg

SEQ ID NO: 395219 - DNA, 82 bp, Homo sapiens
gaaccacattatggatctttttgggcagatgtacagagtcagctcaggcacatagaagcagcatttgaccaggaggctgcgg

SEQ ID NO: 395220 - DNA, 98 bp, Homo sapiens
ggagttcttccagatcgccaagaacatcaaaaaccataaaaaggaaatcttctagatctccgtcccccaggaggagtggaccactgtgcacagcagga

SEQ ID NO: 395221 - DNA, 100 bp, Homo sapiens
gagacaagccattttgtgcgcaccacttttgtgtccaggcataagaaatttgacgaatttctctgcaaagaatgtccaaaaattcatattcacattgatc

SEQ ID NO: 395222 - DNA, 125 bp, Homo sapiens
gaagaacaactgcagcagattctaaaaaggaagaataagcaggcttttttagatgagctggtgaaagaaaatggcccgaaccaagcagactgctcgtaagtccaccggtgggaaagccccccgca

SEQ ID NO: 395223 - DNA, 83 bp, Homo sapiens
ccggggagggtggttaccgctgaggagctgcagtctctgtcaaggaaacttccattttagaagaatacagtatcaattggact

SEQ ID NO: 395224 - DNA, 110 bp, Homo sapiens
ctgacggtggaggttcgcggctctaacggggctttctacaagcactcctgtaggaggcctgctgatggcatttcagaagtactctggtgagactgttcaggaaagaaaac

SEQ ID NO: 395225 - DNA, 75 bp, Homo sapiens
gaggagctgttcatcgaacagaaggttcttgctcagaactctggttttgaccttcaggaaacattagttaaaatt

SEQ ID NO: 395226 - DNA, 75 bp, Homo sapiens
aagttcattggatcaaacatgtcacaagagtcggacaatactctgtgcaaaaaacctggtgaaaaaggatttttt

SEQ ID NO: 395227 - DNA, 100 bp, Homo sapiens
gtgaggccagcgggggaggggccttcctggtgctgcccctgggcaaggccgccatggcatcagatgaaggcaaactttttgttggagggctgagttttga

SEQ ID NO: 395228 - DNA, 100 bp, Homo sapiens
gaatatcctcttgtaattaatgcagtaaaacgcttccatatttatccagaggaggagacatcacagctttcccagatcgggaggaaaaatatggaatgtg

SEQ ID NO: 395229 - DNA, 100 bp, Homo sapiens
cttgtagactactttaatgaattcctaagccttccagatcacacaagaggagtttgagccttggtgataaagaaataagccgttcttctccttctccagc

SEQ ID NO: 395230 - DNA, 87 bp, Homo sapiens
atattttgcctgctggaacctgctgtatctactcaagagtggaagttttcacaggtatgctccgtatagtgattgtagctgttcctc

SEQ ID NO: 395231 - DNA, 76 bp, Homo sapiens
cccgggtcgcgtacttgctgaggcaactgcaacgcgcagcgtgtgtatgtaatatagattgcagtggatacagttt

SEQ ID NO: 395232 - DNA, 51 bp, Homo sapiens
cccccgaagaagactcccccacatctggattattcagagctgggagagctt

SEQ ID NO: 395233 - DNA, 100 bp, Homo sapiens
gtccaaccccgaacggggggagattctgctcacggaactgcaggtccctatcactgttcagtccatcgtcattcagtctctaaataaaacgctcacccga

SEQ ID NO: 395234 - DNA, 100 bp, Homo sapiens
aggaactggcccggagactaaaaggttgctccggttgctaagaagactatgaacaagtcagagaacctgctgtttgctggttcatcattagcatcacaag

SEQ ID NO: 395235 - DNA, 100 bp, Homo sapiens
aatgtgcctttgcaggggagcctgagagccacagggtgaagttgaacaaattgctatgatgaaaccaaaaggccagactgaacacgatgagggtatgctt

SEQ ID NO: 395236 - DNA, 75 bp, Homo sapiens
gggtttccaccgttcgttcaaggtctccaccgggaaccttctggtcatcctgagtcgacactaccaggacgtctc

SEQ ID NO: 395237 - DNA, 50 bp, Homo sapiens
tttaaagatgtttctgcaacagaaccacgagaacctccatttctaccaga

SEQ ID NO: 395238 - DNA, 98 bp, Homo sapiens
agctacttaatcctactcagaagaacttgtacagagatgtgatgttggagaactatagcaatctggttttcttgggggatgtggagacgctggtagcg

SEQ ID NO: 395239 - DNA, 99 bp, Homo sapiens
cagatggcaaagcgtaggcctcacaaacatcctggccgtgaagaatgaactgacagatacacgtgcaaaattccacgtactttttcttttctttgtgtc

SEQ ID NO: 395240 - DNA, 134 bp, Homo sapiens
tcacgtcagtttctacgtctgcaacgggaagagaaagcgaagccagtaccagcgtttcacctaccttcccgccaacggtggacgacatccttggagaaggcagcgacgacagcgacagcgagaagaggaggcct

SEQ ID NO: 395241 - DNA, 90 bp, Homo sapiens
aaggggactatcctctggaggctgtgcgcatgcagcacctgaatctaggtcaacctattaagatacgtttccaggaatctgaagaacgac

SEQ ID NO: 395242 - DNA, 98 bp, Homo sapiens
ggagctggagcccgcgcagcgccccgcagggcgatggacggccgaaccccgcgcccgcaggacgccccagccaggagcttcagtttcagcgactcacc

SEQ ID NO: 395243 - DNA, 95 bp, Homo sapiens
cccctgtgcgacagcctcatgatctgggttatgcattagacccttcattagataatcatcaagtgtctgctaaatatattggttctgtagaagaa

SEQ ID NO: 395244 - DNA, 75 bp, Homo sapiens
cgcagtcgggaccatcgccggagcctgaggacacttctctgtcgtcacagttagtgcaccaggtggcggagcggg

SEQ ID NO: 395245 - DNA, 100 bp, Homo sapiens
tctcccctctctggagccgagagaggccggtttcccccaccgtggccaggagccccctgaaggagttcgacaaggagaaagcctggagagccgtcgtggt

SEQ ID NO: 395246 - DNA, 82 bp, Homo sapiens
atcaaatccgtgtcggagtccttacagagcaagaaagctttctgctcagccatggctacgagtccacgccttaatgcacccc

SEQ ID NO: 395247 - DNA, 72 bp, Homo sapiens
cgcgcggaggcggaggcttgggctgcaggtggagctggagcaagaataccaagacaaattcaaaagactgcc

SEQ ID NO: 395248 - DNA, 76 bp, Homo sapiens
tgggcctctgagatatgccgtttacgggcagcctttcgtccagcaaggcatcccaggaccgaaagctgacgtcgac

SEQ ID NO: 395249 - DNA, 100 bp, Homo sapiens
ctgggccgcttgcctcctgctcctcctcctcctcgccagcctgaccagtggctctgttttcccacaacagaacccggaaggcatcccggtcaagcaggac

SEQ ID NO: 395250 - DNA, 125 bp, Homo sapiens
tgaagaggaaagacaagagccgccctgcccagaaacgtccacatgtgggtactgcattcctaccggtgtgacagatgtgtatccgccttctatccagccggcaccctatgctctacagcttccag

SEQ ID NO: 395251 - DNA, 75 bp, Homo sapiens
cagcagccgggctgagaggagcgtggctgtctcctctctccgccatgggggcgacgatggccttctgaggggctg

SEQ ID NO: 395252 - DNA, 117 bp, Homo sapiens
accggcactgggacttctcgatctctggaggcacctgttgcaagtgacaggtgctggagaatctggtaaaagcaccattgtgaagcagatgaggatcctgcatgttaatgggtttaa

SEQ ID NO: 395253 - DNA, 80 bp, Homo sapiens
gccccctggaaggctttaggatccaggttttaaaatcaaagatgggaaaatcggagaaaattgcccttccccatggccag

SEQ ID NO: 395254 - DNA, 75 bp, Homo sapiens
ggcactccaactggaccgtcaccaacacccgcttctctgtggatgaaggaccctgctgggatctttgagcttgtg

SEQ ID NO: 395255 - DNA, 74 bp, Homo sapiens
cagcacttcacgttgcagctgctaaaggctatacggaagttttaaaatgatattggtgcccatatgaatgtagg

SEQ ID NO: 395256 - DNA, 101 bp, Homo sapiens
ggagaacctgagggaacagccaccgatcgctgatcattaagcagcttcgagtctggaaaatttgttgaatgtactgagcaattagaattgttaccaggaga

SEQ ID NO: 395257 - DNA, 75 bp, Homo sapiens
ctgatagagaccctagtaacatgaaactgccaagttttggaccttatctggaacagcgcaagaaaatcatagcag

SEQ ID NO: 395258 - DNA, 83 bp, Homo sapiens
gagaacagctctttgcatccggagagtggacaagaaaggaaatcctcattgacgattcaatttgttgaaggccaatttgtgga

SEQ ID NO: 395259 - DNA, 75 bp, Homo sapiens
gcggagggaagacgccctggtgctcaccaagcaaggtgaagactgatgagaagagtctgtgggtgaagacattga

SEQ ID NO: 395260 - DNA, 100 bp, Homo sapiens
gctgaagctgccgccgttgcctccgccgccaagagtgagcgagcggacccgcgatggccgctcctgacatcactggccataaacggagtgagaacaagaa

SEQ ID NO: 395261 - DNA, 96 bp, Homo sapiens
gccgcgatgttcgccccccggctgctggatttccagaagacgaaatacgcgaggcatggaggagtgacggcaggaactttctgtgctctgacaacc

SEQ ID NO: 395262 - DNA, 100 bp, Homo sapiens
ggcacctctgcagctgcagaagtgaaccggcaaatgctgcaggaactggtgaacgcaggatgcgaccaggtatgagaaagtgccagtcatcttggttggg

SEQ ID NO: 395263 - DNA, 73 bp, Homo sapiens
caggagagcctgctgcagcaggcccaggcacagttccgaatggcagcctggcatcctcgctacaacctcattg

SEQ ID NO: 395264 - DNA, 82 bp, Homo sapiens
caagtaccgcctgggacggaagatcgggagcgggtccttcggagatatctacctggggagtgcatccgccccaacccttttc

SEQ ID NO: 395265 - DNA, 100 bp, Homo sapiens
ggatgggcacactgtgggggtgtcctggtgcacccccagtgggtgctcacagctgcccattgcctaaagaagcatctgcaggaaccacaccacactttgg

SEQ ID NO: 395266 - DNA, 75 bp, Homo sapiens
caaaaataaggattaatttagaagataatgtacaatatgtgtccatgagaaaacaccttccaccatgaccacctc

SEQ ID NO: 395267 - DNA, 100 bp, Homo sapiens
cctgatcacctgtctggagcaaggcaaagagccctggaatatggagagacatgagatggtggccaaacccccaggagttgaactgaatgaccgactcttg

SEQ ID NO: 395268 - DNA, 100 bp, Homo sapiens
aaaaccggcatctgcaaaattcggccgcccaagtactgccaaatctgtcgaaagggagataatgaagaactgcttcttctttgtgatggctgtgacaaag

SEQ ID NO: 395269 - DNA, 82 bp, Homo sapiens
ccagcccgtgccgcgagcgcggcctgcaggagcccgtgtccaggagccccgccaggtgcccgcgccaggccctcagtcttcc

SEQ ID NO: 395270 - DNA, 101 bp, Homo sapiens
gttctagattgaagagtacttgtatttatggaggtgctcctaaaggtccccagattcgagacttggaaagagcaaaccagtccagctacgggggcccagcc

SEQ ID NO: 395271 - DNA, 75 bp, Homo sapiens
tcccacacctccggaccgagggacgcgggtggaggcctgaattttgatctatgttctacctacatccagctggct

SEQ ID NO: 395272 - DNA, 100 bp, Homo sapiens
cgcgcttcttccccactcccgagacagcagcaagatgaagagcgacgtcggcagctgagagagagagctcgtcagctaatagcagaagctcgatctggag

SEQ ID NO: 395273 - DNA, 51 bp, Homo sapiens
acgcttcgcccgttggtgctatgttatcaatactctggctgaccatcatca

SEQ ID NO: 395274 - DNA, 100 bp, Homo sapiens
gagtagcaagtggccatggggagcctcagcggtctgcgcctggcagcagacccttcgcaggtgttacagtcgggtgaaagaacatggtgttgggaaaaga

SEQ ID NO: 395275 - DNA, 95 bp, Homo sapiens
ggcagcttctctgtgaagcctttaaagcagaagcaaattgatgagacctgcacgcagtggctcacagcagcacgatttgtgacagcccgaggcgg

SEQ ID NO: 395276 - DNA, 100 bp, Homo sapiens
aagtgaaaaaattcacccttttatcagcttcttggacacttaatgattgttggcaagaaatgtgctgctgatctgggcctgaataagggttatcgaatgg

SEQ ID NO: 395277 - DNA, 80 bp, Homo sapiens
ccaggacgaagtgctcggcggcatggcaggcaatccatggaccttgtggaacttgtgtctctttttcccacgctggctgg

SEQ ID NO: 395278 - DNA, 137 bp, Homo sapiens
gaagcagaagctgagcagtgacgagaacagcaatccagacctctctggagacgagaatgaagatgaagtcctcagtacattctgaagaagatgattttgttccagagctacatagaaatgtacaccctcgagagcgg

SEQ ID NO: 395279 - DNA, 83 bp, Homo sapiens
aagcagccgatccagcctgcggagcctgtggggcaggaatgaaatggcttgggccataagaactgtttgttcgaccttttgag

SEQ ID NO: 395280 - DNA, 100 bp, Homo sapiens
aacagactggacttctcaactgccattctggattccagaagatttaactacgtggtccggtctttagaaagaaactggaagttaatccgagatgaaggcc

SEQ ID NO: 395281 - DNA, 75 bp, Homo sapiens
aagcagctgcttgccggccccaacacggaccttggggcagatgccattgccacaggtcactatgcaagaacttcc

SEQ ID NO: 395282 - DNA, 100 bp, Homo sapiens
agggagcaggcacagccccgcaggatcccaagccctgcagactaccgcagccagcggtggagcgcgtgtcgcacccgctgctgcagcagcagtatgagct

SEQ ID NO: 395283 - DNA, 87 bp, Homo sapiens
ggagagtattgccagagcaagagctggatctcgtctttctcaaagccttctagacaagctcagtggaatctgaagggcccaccccat

SEQ ID NO: 395284 - DNA, 100 bp, Homo sapiens
tgcaggtattgggagatccacagctaagacaccgggacctcctggaagccaaaaatgacaccatgccacaaggagagtgatctcttcccctgttttcaca

SEQ ID NO: 395285 - DNA, 100 bp, Homo sapiens
ttttaaggggccagagcatatgcagtcgggccagggaagaaatacaaggtgaaatttgacaacaaaggaaagagtctactgtcggggaaccatattgcct

SEQ ID NO: 395286 - DNA, 75 bp, Homo sapiens
tgcgcacccacattcgtgtgggtgttgtggatgccttattggaggaactggaacgctccacccttcaggacagtg

SEQ ID NO: 395287 - DNA, 90 bp, Homo sapiens
cagaagtcgcgtgtctaggtgagtcgcggtgggtcctcgcttgcagttcagcgaccacggtactccaaagattcaggtttactcacgtca

SEQ ID NO: 395288 - DNA, 51 bp, Homo sapiens
ggattccaagtaactcttatttgccggaaaactcaaatatatgtgaggtgt

SEQ ID NO: 395289 - DNA, 75 bp, Homo sapiens
aggatatcttgggcgggggatgtgagcgctgagcccttggcaggttcatcatgcctagtggcgtataagaagacc

SEQ ID NO: 395290 - DNA, 74 bp, Homo sapiens
aaattttgaacaacattaacactattatttgtgatcttcagcctcaacaggagtccttcaataatgttaaacag

SEQ ID NO: 395291 - DNA, 97 bp, Homo sapiens
cgggctcacgtgatggcctcccaccattccaagcggagaggccgggcgtcttctgagagtcagtgacttttttgaacgaaccattctgtgcaacagc

SEQ ID NO: 395292 - DNA, 75 bp, Homo sapiens
aatcccgaaaaggagaacttcttaagaagagtggtcagccccagttgatgctgacagcaggacccagtgttgccg

SEQ ID NO: 395293 - DNA, 74 bp, Homo sapiens
cggagcttgaagcaaagctgcaggttttaaagatgctatctgtgagcagcagttgataatgtgcataaaatctg

SEQ ID NO: 395294 - DNA, 75 bp, Homo sapiens
cgcaccttgatgaccagatcctgcagctcacagaaatgcttcggttacccacagtctttcgccagatgagaccgg

SEQ ID NO: 395295 - DNA, 76 bp, Homo sapiens
accagcatggctacttcatattttggaaagcagtttttaagacaaaattttcctgcatggagtgctacatcctctt

SEQ ID NO: 395296 - DNA, 83 bp, Homo sapiens
tgtagatctagaagtcactttggaagaagtatatgcaggaaattttgtggaaggttatgagagaatttacaatgaaattccgg

SEQ ID NO: 395297 - DNA, 100 bp, Homo sapiens
gtcagcagaggggccactgctgggccctgaggctgcaccaagtggcgaaggagccggctccaagtgtctttggtgcaacactaacaaggcttgtctggac

SEQ ID NO: 395298 - DNA, 106 bp, Homo sapiens
aggagaagaaactgaggcctggaatttgattaactcattcaaggttacccagttgaatggctattcaagtggacaagttcaactttgagagtttcccggagtcccc

SEQ ID NO: 395299 - DNA, 85 bp, Homo sapiens
cagcaactgtgctactcctcaccatctgcagccttgaagcgttcgtgctgtcagccttgcagccttctcctactcattccagctc

SEQ ID NO: 395300 - DNA, 83 bp, Homo sapiens
cgcggctcatgggcagagtcggccgggcgggccggacaatgcagatcttcgtgaagactctgactggtaagaccatcaccctc

SEQ ID NO: 395301 - DNA, 83 bp, Homo sapiens
gttgaagaccaggtacctgaagctgaacaccttccaccatgaccacctcagcaagttcccacttaaataaaggcatcaagcag

SEQ ID NO: 395302 - DNA, 90 bp, Homo sapiens
ggacgcgacgcgccccgcctcccccgtccggtccctctctccacggtaagggggatcatggcccaagttgcaatgtccaccctccccgtt

SEQ ID NO: 395303 - DNA, 100 bp, Homo sapiens
aggaccgtggagaagacttggaagctcatggacaaagtggtactaggttttgacaagcttgcatcatgcgtgagtataagctagtcgttcttggctcagg

SEQ ID NO: 395304 - DNA, 97 bp, Homo sapiens
gttgctcttgaagctggtgagagccctgccaggatgtggagtggacttcctagcagagggtatttgaagtataccatacaactgttttgaaaatcca

SEQ ID NO: 395305 - DNA, 75 bp, Homo sapiens
atggtagcccttgctcaacagaagatttgctctatgatcgtgataaaggaggtgaagtgaaatctgcaagagtcc

SEQ ID NO: 395306 - DNA, 74 bp, Homo sapiens
agaagatgatcttcaacatttgcaaatccccgtcgaggtcaagatcaagatccaggtctatttcacgaccaaga

SEQ ID NO: 395307 - DNA, 97 bp, Homo sapiens
ctaccctctggaactcaagatttgaccatatctgttttgaggattcattatgaacaaagaagtctcccaggagctggagtggctgctggagattaac

SEQ ID NO: 395308 - DNA, 93 bp, Homo sapiens
ggaatatgaagagacacagtatggtagccacacccccagatgactacattgcaattggagctgatgaggaagaattaggatctcaaattgaag

SEQ ID NO: 395309 - DNA, 90 bp, Homo sapiens
ctccattccagaaccatggcccaatttgtccgtaaccttgtggagaagaccccggcgctggtgaacgtgacatgaagtccgagaggagac

SEQ ID NO: 395310 - DNA, 101 bp, Homo sapiens
cgccgagccacccgcccgcccaaggtctctcgcgggcgggagaacggaaaactcccaacttcctgagcttcctgcggctgagggagggatgaaacaagtac

SEQ ID NO: 395311 - DNA, 94 bp, Homo sapiens
gattgcagccttactatttgaaacatccctcacattgaaatatgctacactctacctcacagaacatcaacctgggaccgtctggaaatcctca

SEQ ID NO: 395312 - DNA, 100 bp, Homo sapiens
ctacgacgctccccaagtaagcctacacttgcctatccagaaagcaacagcagagacttaattcagtgcacaaatgagatgaatgtgaacatcccacagt

SEQ ID NO: 395313 - DNA, 100 bp, Homo sapiens
gctgaaggctgcgagggactaagagcagattggcgtgcacagtgtcatgaagcacgatgccatcatggatggagccagcccagattatgtactggtggag

SEQ ID NO: 395314 - DNA, 100 bp, Homo sapiens
ttcaccttcagatgcgcggggcgtgcgcgtcctcctccccaggcccgccgcctccctgccaagagacctgtcggccatggagcctaatgatagtaccagt

SEQ ID NO: 395315 - DNA, 89 bp, Homo sapiens
cggggcgtgcgcgtcctcctccccaggcccgccgcctccctgccaagacaatgcagatcttcgtgaagactctgactggtaagaccatc

SEQ ID NO: 395316 - DNA, 90 bp, Homo sapiens
acgtcccccaaagaagaagtatcagaaagcagggctgtattctgacgtttacaaaactacagagggacagagcacaggaaagggaccccc

SEQ ID NO: 395317 - DNA, 82 bp, Homo sapiens
aggcagcgcaaaaaacagccaccgattttgctatgtctctgagctgcgagttcttcaccaaaggacatggatgaaaatgaaa

SEQ ID NO: 395318 - DNA, 50 bp, Homo sapiens
agtccatagcaagacagaatgggtgccagatagattggaaaaaaggaaag

SEQ ID NO: 395319 - DNA, 101 bp, Homo sapiens
caacttccagtcctgcaagctccattcatgagataattggttctacaaatcttataattctgctagaggatgaagtctttgccgattttttcaacacattt

SEQ ID NO: 395320 - DNA, 101 bp, Homo sapiens
agagaacttggcaggctctccccatggcagtcttattcctcctcctgttcctatgtggaactccccaggctgcaggcctcaggcccaggcccaaggccaag

SEQ ID NO: 395321 - DNA, 75 bp, Homo sapiens
agaagcaagcggaacttcctgaggggtgagcccctccagactccgaataggagatcaagagtttgattcattgcc

SEQ ID NO: 395322 - DNA, 100 bp, Homo sapiens
tgagggccgagcaacagtgtagtggcgtattccacatagcaaacaggttcgatctggggctaatgttctaatttgtggtccaaatggctgcggaaagagt

SEQ ID NO: 395323 - DNA, 100 bp, Homo sapiens
tcccattctttacagctcaccggatgtaaaagaactctggctagagaccctccaaggttggttgaatctggcgatgtggaacccatggatatggagggct

SEQ ID NO: 395324 - DNA, 90 bp, Homo sapiens
ggcgttcgggccgcacccgcgcggcctccggtgtggctgtctctgatggtgtcatcaaggtgttcaacgacatgaaggtgcgtaagtctt

SEQ ID NO: 395325 - DNA, 88 bp, Homo sapiens
gatcaataatattcttgtacctcatcaaagaacatctaaatatattgctgtttgggttagcacaaaacctgcagaaagctctttcaaa

SEQ ID NO: 395326 - DNA, 105 bp, Homo sapiens
ctgactgaggaccactggattttgaggaaactttggtcttaccaagatcactccatggatgaaatgacagctgtggtgaaaattgaaaaaggagttggtggcaat

SEQ ID NO: 395327 - DNA, 75 bp, Homo sapiens
gagggcactggtgcgactttcaggtcaaaatgcagatcttcgtgaaaacccttaccggcaagaccatcacccttg

SEQ ID NO: 395328 - DNA, 98 bp, Homo sapiens
tgggcgccccggacgagagctccgtgcgggtggctgtcaggtttaccgacaagactgtgaaactttcgggatggtggtgaaaatgctgattgaaaaag

SEQ ID NO: 395329 - DNA, 100 bp, Homo sapiens
acagccccgtgcagcctggggctccttatggcaaccctaagaacatggcctacacggaaataaactatcaatcttgcccagactggagaaaggactgcag

SEQ ID NO: 395330 - DNA, 60 bp, Homo sapiens
cgaaactttcaccgcgagcgggagcagcatttctttctattactactatctatgctgaga

SEQ ID NO: 395331 - DNA, 75 bp, Homo sapiens
ctggagcaccggggccaccaggagggagtattggtaaaggttttcaaggtgtcatgaaaagatggggatttaaag

SEQ ID NO: 395332 - DNA, 100 bp, Homo sapiens
ctggactatggcatctatgttatcaaccaggtgctggagaatctggtaaaagcaccattgtgaagcagatgaggatcctgcatgttaatgggtttaatgg

SEQ ID NO: 395333 - DNA, 71 bp, Homo sapiens
tcagcatcacagagttctccgagggagcgaagcagatgaagcattggatgatttaaaatcccagaggaaaa

SEQ ID NO: 395334 - DNA, 75 bp, Homo sapiens
ggcagagtaacatgcagatgactgtgttacaggactttgaagaatatcctgaacatagaacgaactttttcttac

SEQ ID NO: 395335 - DNA, 74 bp, Homo sapiens
gagaaggaaagtcaatcgtaggaagaacacagtacagatgctttgctgactaatgttgaccagattgtccagga

SEQ ID NO: 395336 - DNA, 90 bp, Homo sapiens
caggatttctacgtgcgcctcattgactccatgacaaaacaagtttattacccagaactctttgtctgggtcagtcaagaaccatttcca

SEQ ID NO: 395337 - DNA, 75 bp, Homo sapiens
cttagcgcggtcaggccgccctccttttccagctcattgctatggacagtgctatcaccctgtggcagttccttc

SEQ ID NO: 395338 - DNA, 98 bp, Homo sapiens
gaatgtccttgcagaaagtgacccgggctttaagcggaccaagacgctcatggagagaactgtttccttgtctcaggacttccaatagtagtcagaca

SEQ ID NO: 395339 - DNA, 52 bp, Homo sapiens
caagaaaggatgctatgcttgctctgtggtatggagtcttgctctgtcgccc

SEQ ID NO: 395340 - DNA, 74 bp, Homo sapiens
ttccatctcccaacttgtccataattgcggcgagcagtaagaagcagcgtgtggaaaagggagacgattgttca

SEQ ID NO: 395341 - DNA, 50 bp, Homo sapiens
agcaccttactatgcaacgagtgaacttcagtgaagatttcatacattgg

SEQ ID NO: 395342 - DNA, 100 bp, Homo sapiens
tctccactcgtgtacacccagacgggggctcgatggcacagaggaggagacccacccggtggacttgagctcgctctccagtaagctactcccaggcttc

SEQ ID NO: 395343 - DNA, 88 bp, Homo sapiens
tgaatggtcccaccaattgcagcaccgagctccgcctgttgtaccagctggtttttctgctctccgactatatcgagaagtttactga

SEQ ID NO: 395344 - DNA, 96 bp, Homo sapiens
cgactgggtggcgagactctcaaccccgtgtatgtgccctgcgtgaagtgactgtgaagtgctgaccacactcaccccagacactggccgtatcct

SEQ ID NO: 395345 - DNA, 74 bp, Homo sapiens
ctacgacgtccctcaaaccttgcttctaggagataaaaaggtgtccctggccagtgtccttccacctgtccaca

SEQ ID NO: 395346 - DNA, 82 bp, Homo sapiens
atttatggtcgcctttttgaatgaggaaactttgagggaaattttgagtcactggaccttgcggaatttgctaagaagcagc

SEQ ID NO: 395347 - DNA, 96 bp, Homo sapiens
cgctgaggcggccaccgcgactccggctctgcgctcggctgcctgacttcttcctgctgctgcttttcagggtgatcctgccatgaagcagtttct

SEQ ID NO: 395348 - DNA, 100 bp, Homo sapiens
atttgccgaagattaggaagaatccactgatagaaatcatttccatcaataccggtgccaccatggcaactgcaccatacaactactcttacatctttaa

SEQ ID NO: 395349 - DNA, 112 bp, Homo sapiens
cggcagactggtgacttcacttttgagtgcaactgccttccaggaaagcagatggtggagctgaatatgccacttaccagactaaatcaaccactccagcagagcagagagg

SEQ ID NO: 395350 - DNA, 97 bp, Homo sapiens
cggctgagccaccgggtgagctcaccgcccagcccaaaccaggagattgcgagggagcgatgcggtgcagcgcggtgtggcagagaagacacagctt

SEQ ID NO: 395351 - DNA, 96 bp, Homo sapiens
gcggggcagagccgggggagcccagcccagccagcctccagatcatccccccgaaggagtggaagccgcggcagacgtatgatgacatcgacgacg

SEQ ID NO: 395352 - DNA, 101 bp, Homo sapiens
aagaagatccacttcctctatctcaatgtggctcccagccggtactttaggtgactctcctattccatctgtttcttcgggatcatcttcacctctttcag

SEQ ID NO: 395353 - DNA, 75 bp, Homo sapiens
ccctttggatgtagcaaggaagaaattgttcagttcttctcaggttttttgcatgtctgacacccatgactccac

SEQ ID NO: 395354 - DNA, 83 bp, Homo sapiens
agatgctctctctggaccgatcccactgcatggagagtagaaaactgatttctgctacagacattcagtactctggcagtctg

SEQ ID NO: 395355 - DNA, 75 bp, Homo sapiens
gccccgggctcccagctgcccacctcatagtaagactttgaccccgacgcaggcttcagtgattgccgcggatca

SEQ ID NO: 395356 - DNA, 87 bp, Homo sapiens
ttggaatgttggcagctataacttacacactacttgaaggaaattttgccaaagaagtgagccatgaaatggatggacttatttttc

SEQ ID NO: 395357 - DNA, 99 bp, Homo sapiens
actttcattgtcttttccgcccgcttcgatcgcctcgcgccggctgctctttccggaaactggcgatggaatatgagaggagccctctggaaagaaaag

SEQ ID NO: 395358 - DNA, 75 bp, Homo sapiens
gcacgtacgcgggccggaagcggaggaggcccctgcagaaacatgcctgagattgtgagggagacccaggaccta

SEQ ID NO: 395359 - DNA, 75 bp, Homo sapiens
ctgtacggcatgatttggtatgcagaacactatggtcaccgagaaaagggtatgttagagcccaccaaggaacca

SEQ ID NO: 395360 - DNA, 100 bp, Homo sapiens
tacagttctcgggatccttctgtcatagaaactcacatgagacaaatgcgctcagcttcaattgctccatcaagtatgatggtgaaggatgaatatgtgc

SEQ ID NO: 395361 - DNA, 78 bp, Homo sapiens
cctcgtgtctgccaccatcttcgacttgagcgaagttttatgcaaggaaccctaaggactctgcaatatgaataattc

SEQ ID NO: 395362 - DNA, 99 bp, Homo sapiens
ctcctcgagaaaagattttctattacttcagcaacagtccttcaaagccggaagtcggtgcagcccacctcagaggagcgcatccccaagaccatcgag

SEQ ID NO: 395363 - DNA, 75 bp, Homo sapiens
caggggctgagcttctgcgctgtggagaagccaggtggtgaaggcatttgtgatcctggcctcgcagttcctatc

SEQ ID NO: 395364 - DNA, 100 bp, Homo sapiens
gcaccatcggcaagggcaacttcgcggtggtcaagcgggccacgcacctcgtcaccaaggccaagatccaatggatttgaacagaagcgctttgccaggc

SEQ ID NO: 395365 - DNA, 82 bp, Homo sapiens
ggacccttctcacaccggccgctgccgccgccgcgctccggaacagacaatgcagatcttcgtgaagactctgactggtaag

SEQ ID NO: 395366 - DNA, 100 bp, Homo sapiens
ctgccatagcttctgtcgcctgtgctgtgacccgcactggtcgtgggagtcacctgaaaggcaagaaatggtgaaggtgctaaaggagaagatagaagct

SEQ ID NO: 395367 - DNA, 101 bp, Homo sapiens
caccaccacagagtctgtggaagaggtggttcgaggttcctggtacagttcagacaggacaaagtatgtgtgaagtttattcagggaaaccagaaaaatgg

SEQ ID NO: 395368 - DNA, 75 bp, Homo sapiens
cctaaatgcactctttcgaaagaaagtattcatgtgattgaacggcgtgctcttcctgagttcttcaatggaaaa

SEQ ID NO: 395369 - DNA, 82 bp, Homo sapiens
ggattctcgacctgctaacagaactggaccttttcgctgtcgcctggttgggcccggaaatgggacgtcgcgctttctcagg

SEQ ID NO: 395370 - DNA, 97 bp, Homo sapiens
tgaaaatggaagagtaattgcctgctttgattccctaaaggtgaatctggattgggaaagtcgacattaatcaactcattattcctcacagatttgt

SEQ ID NO: 395371 - DNA, 75 bp, Homo sapiens
tcagcatgctgaggatcctcttcctcctggacatgggaaagcggaaccaccaaaaggagtgatgatcaacgatct

SEQ ID NO: 395372 - DNA, 101 bp, Homo sapiens
ccagcaacgtgtttgacgggctcctcaccgttgtcctgctggtctcctctgagcctccggcctccataagacccaaaacagatgacacctcttcccagtcc

SEQ ID NO: 395373 - DNA, 75 bp, Homo sapiens
ggaagttcagagttctaggagtggaagaggagatccaggccccagcctcagctgacattcgcgttttacgggggc

SEQ ID NO: 395374 - DNA, 98 bp, Homo sapiens
cgcgtctccttgaacgttgtcccgcctgggattgcgagagtggagactgctgcacggactctggaaccatgaacatatttgatcgaaagatcaacttt

SEQ ID NO: 395375 - DNA, 107 bp, Homo sapiens
gcggctgcagggtccggtcttcggtttgcacagctagaggccgcgcagcagcaaaggatgagcggaaccttggaaaagtcctgatcacccgagaggatgacttcaac

SEQ ID NO: 395376 - DNA, 100 bp, Homo sapiens
ctagactgggctgttctctgtgttaaaccaatcagttgcgaccttctcttaacagaatgatggtcgactgaggttgagccgtcagggcatcatcttcaag

SEQ ID NO: 395377 - DNA, 98 bp, Homo sapiens
taaactcaaaccagatattctggatcctgtcgaggacacactggaagtagaacttgaatcaggaaacccaggcccaacggcaggtggatgcaagaaga

SEQ ID NO: 395378 - DNA, 116 bp, Homo sapiens
aagagactggccagcccctcggaggagacctggatcacatgtgacagtactagagaaggacagactcgtctaatcagagatggggagaaagtcgaagcctatcagtggagtgttag

SEQ ID NO: 395379 - DNA, 100 bp, Homo sapiens
gtccactgtgtgcagaggcatgggagttgtcatgttgggaacatgctagacctcagtatccttgagaatttatccagttggcgaaggactttgaggattt

SEQ ID NO: 395380 - DNA, 74 bp, Homo sapiens
tatgcagttcgaaaactggataacactaagtttagatctcatgaggaggagatgttaaagtaacccatcttgca

SEQ ID NO: 395381 - DNA, 75 bp, Homo sapiens
atggctctcaaagaaccagcggacctgagtcttcaatgaaagacttcctgggaatgaaaatggttggtgagctgc

SEQ ID NO: 395382 - DNA, 96 bp, Homo sapiens
gggagcacgtcatcgccatcgaagatcctgcaaaagttccaggtgcccacactggaaacttggagatcctgcttcccagaccacagctgtggggaa

SEQ ID NO: 395383 - DNA, 96 bp, Homo sapiens
caatctctacatgtaaaaggccactgactcctacttcctctgtatagagcaactgttgaactcagctgcctgtagtcgcagatatggccagtacac

SEQ ID NO: 395384 - DNA, 75 bp, Homo sapiens
aactacaaactcgaccacatcatcaaggaacggaccccggaggccgcagcgtcctgctctccacctgcactcgag

SEQ ID NO: 395385 - DNA, 101 bp, Homo sapiens
ggaaaaaaatttgctggatattgatgcgccagtcactgtgcatgcaagatatgggaaatactaaagcaagactactctatgaagccaatcttccagagaac

SEQ ID NO: 395386 - DNA, 75 bp, Homo sapiens
tggcctgatgccttacacgaattacacatttgatttcaagttttacatgtggcacccataaaagatgaggctgag

SEQ ID NO: 395387 - DNA, 100 bp, Homo sapiens
cgggctaatcgagaaaaagtccaagaacagcatccagtggaagctggtgggaccaggaactctactattagagggacgactgccttcaagcatccctgca

SEQ ID NO: 395388 - DNA, 88 bp, Homo sapiens
gtaatctcacgacctccgcctgcggcctcctcgcaaaacaagggatctgtgaacaagaggaacctcagcagccaggacaggcaggagc

SEQ ID NO: 395389 - DNA, 82 bp, Homo sapiens
ctacaaccagctggaaggcagattcaagcagctgcaaggtcgaatcaaatattcggaacaggtgtatgatgcctgtatggag

SEQ ID NO: 395390 - DNA, 75 bp, Homo sapiens
tgatggcccagcactaaagaaagcagatgttggatttgcaatgctactgcttcttgggatacctttctcatgcta

SEQ ID NO: 395391 - DNA, 100 bp, Homo sapiens
agcgctttcccgagaccgtcctggcgcgatgcgtcaagtacactgaaattcatcctgagatgagatgagcagcaccagcagtaagagggctccgaccacg

SEQ ID NO: 395392 - DNA, 119 bp, Homo sapiens
catgttccttgagattatggctcctgtatacccaatctgtttcaccatgaccgtctccaccagcaacctagccaagcttcgtctcagtacaggacctcaagactcaccagcgtctccca

SEQ ID NO: 395393 - DNA, 100 bp, Homo sapiens
tgtcgcctgccgctcgctctggggctcgatgtgaatatatattatgtctgcctgttctcccctcgtcggtggctaagctttcccagtgcctccagcagcc

SEQ ID NO: 395394 - DNA, 90 bp, Homo sapiens
atcaagagacccggtttctaatccctgctctgtcactaacaagctgcgtgatcttcggtttatttcacagagcagtgtacattcttgtct

SEQ ID NO: 395395 - DNA, 101 bp, Homo sapiens
gtgacgcaggcgcttgctgtcctcctggagtgcctcgagagccccggctccagccccacgaaggagatccggttggcagctaaaccgcgctgggaacaggg

SEQ ID NO: 395396 - DNA, 82 bp, Homo sapiens
gcagaagaacaaggaagcggagaggcaagagatacacatttggaggagacgtaatccagcattggaacttctgatcttcaag

SEQ ID NO: 395397 - DNA, 97 bp, Homo sapiens
cgcgtcccgctcgctgggagagaggtacctctccttttccctctccctttccctaagggaccatcatctttagtgcagaggatggaaagttgatgcc

SEQ ID NO: 395398 - DNA, 90 bp, Homo sapiens
tccacctcctgacacaacaccactcaagagctcattaaatatgaattcttccctgaagccactcgaagtgaagaagacttaaagaaatac

SEQ ID NO: 395399 - DNA, 100 bp, Homo sapiens
gcaggagactgacccagactagtcccagagagatgcccactcattcgtcatcttctgttctccaagaaaattggccctgggaggagcggggacactgagg

SEQ ID NO: 395400 - DNA, 100 bp, Homo sapiens
cgttttgccagcgataatacgcctcagacagagtctcactcccatcgcccagacttgagtgtagtgatgtgatcactgctcactgcagtctcagccttcc

SEQ ID NO: 395401 - DNA, 74 bp, Homo sapiens
atcaccatgaccagctggacagaatattcaatgtaatgggatttcctgcagaatgggaacgaccagacccgccg

SEQ ID NO: 395402 - DNA, 98 bp, Homo sapiens
attgcacagctggaggagcagctggacaacgagaccaaggagaagcagcagccaaccccccggctcacactccgggacctgcagaataagagcagcag

SEQ ID NO: 395403 - DNA, 98 bp, Homo sapiens
gtcaagatgaagaaacggggggatttgcagacaggccaggagatatggaaactaaatatattttgccaactttggaaaaagaattattcttggcagag

SEQ ID NO: 395404 - DNA, 50 bp, Homo sapiens
cagagatacagcaaaagagtctacatagggcaaagcccaacaccttcccc

SEQ ID NO: 395405 - DNA, 100 bp, Homo sapiens
accctttggaccacagctgcagacacgggagtcgccccaccatcaaagctgggaatactcccccagttgcaagaggcgcaggaccgtggaagacttcaac

SEQ ID NO: 395406 - DNA, 100 bp, Homo sapiens
tcaagctgttagtgagtccacggttccgccaagacttaattcagtgcacaaatgagatgaatgtgaacatcccacagttggcagacagtttatttgaaag

SEQ ID NO: 395407 - DNA, 75 bp, Homo sapiens
gccacagatcatctttggattcttccccagaagcttcaaggtgccgtgagcgatgtggagatgcaggaacactat

SEQ ID NO: 395408 - DNA, 75 bp, Homo sapiens
gccaagggctccacacaccaagaccaaggatgaccggaaagaagggatgaccgcgtttgtggaaaagagaaaggc

SEQ ID NO: 395409 - DNA, 100 bp, Homo sapiens
ggaaaagccaaaactggacaaaggccaacggaaaggaatgcgcttcaaagttgggtacaccccagactggatctttctgctgaggggtgtaatgaagatc

SEQ ID NO: 395410 - DNA, 90 bp, Homo sapiens
ccttccttttaagaagaaatgctaatgtcaacctcaaaaaccaggtggcatacagactggggaccctggacatgcgggcctttctccgca

SEQ ID NO: 395411 - DNA, 89 bp, Homo sapiens
gcctccctaaatgttggaattacagacatgggccactacacctggcgatctgtgtcttatacgaattcggttccctcaaaattataaag

SEQ ID NO: 395412 - DNA, 101 bp, Homo sapiens
cgcggcggcagcagcagtgagaggaagagctgaggtttgccatccagaacaagcacctctgccaccggatgtcctctgcgctggaatcagtcactgtcagc

SEQ ID NO: 395413 - DNA, 101 bp, Homo sapiens
caagaataaaggcaggaatcaatccattcaatgggagtagattctgctatcttggcctcacagcccttcctgttgattacaaagcccgtggaagaaaacag

SEQ ID NO: 395414 - DNA, 100 bp, Homo sapiens
tgtggaggaaaacaacttcgagggcagaccagtaatgttaaagtagagactcagagtgatgaagagaatgggcgtgcctgtgaaatgaatggggaagaat

SEQ ID NO: 395415 - DNA, 74 bp, Homo sapiens
aaagcttgaaatgctacatttccaaggcctgaaacaaccagagagctacgggaaaggaagggcttggcttgcca

SEQ ID NO: 395416 - DNA, 73 bp, Homo sapiens
gttttagcaaaaggagcccggaggaacattccaaaggaaaaatttcaggtccttatgtcgtcagaagatcgag

SEQ ID NO: 395417 - DNA, 97 bp, Homo sapiens
aggcagatgtaatgaggcaatacttgacattgttttcagggcatttgttaacttgagaaagtggaatcgaattccgatgttgaattttccttctggc

SEQ ID NO: 395418 - DNA, 100 bp, Homo sapiens
atgaacagcaacgtcagcagcccggtcaacctgcccttgaaggtagtggacccagatcatcccctcgcagcacttgttcgtaaggcacaggctgacagtt

SEQ ID NO: 395419 - DNA, 75 bp, Homo sapiens
gaggcggtcctcctagcggcctggaaggaatcgtgtctcctagtgacctggaccttgtcatgtcagaagggttgg

SEQ ID NO: 395420 - DNA, 83 bp, Homo sapiens
cccgtccgtccgccgccaccacccactccggacacaggcctccggtgtggctgtctctgatggtgtcatcaaggtgttcaacg

SEQ ID NO: 395421 - DNA, 75 bp, Homo sapiens
cggacaggggccgcgccgctgccgctgctgctggtgttagcgctcagtcaagcttggattagaagaacaagaaag

SEQ ID NO: 395422 - DNA, 74 bp, Homo sapiens
cgccggagagcctggccgtggttgctaacgcgaaaccaatgtttgtggagaaggtgctgcagagactttttcct

SEQ ID NO: 395423 - DNA, 99 bp, Homo sapiens
caagccttacgttgatcaccaaggtatgagggtgctggttgatgctcgagagaagcttcatattccctggggagacaactcaaaccaacaacatggaga

SEQ ID NO: 395424 - DNA, 82 bp, Homo sapiens
cagccgatccagcctgcggagcctgtggggcagtaaggaagagcccaacactgctggaagtgagcatgccccatttcatgag

SEQ ID NO: 395425 - DNA, 99 bp, Homo sapiens
cccgaagcggcggcggccgaggacggggacagcgacgacgcggaggcagagaagggaacgcccggcccagcccccatcaacaaagagagcattgtggat

SEQ ID NO: 395426 - DNA, 100 bp, Homo sapiens
ccacccagaatctttaggtaaatgagacaatgcagatcttcgtgaagactctgactggtaagaccatcaccctcgaggttgagcccagtgacaccatcga

SEQ ID NO: 395427 - DNA, 95 bp, Homo sapiens
aagaaaatcaatctaaacatttgtgggaagttgtattcatcaataatgaaatgctgactaaggaacaagaagagttaccttgtacatgcccacta

SEQ ID NO: 395428 - DNA, 100 bp, Homo sapiens
ttccccttcaactcttttctctcgggcttcatctcttgtgtggggagtttcatcctagcggcaattctgtggtgttcttggtcacacatttatggagttt

SEQ ID NO: 395429 - DNA, 100 bp, Homo sapiens
aggggaagaggcccaccctggagtaaccctcactggagaatccagagaaaatgccaggaagccaatcagaaaatccaggaactccaggccagccaagaag

SEQ ID NO: 395430 - DNA, 95 bp, Homo sapiens
agcccgcactcgctgccgccgccactcacgctccactgcaacatcacgggaccctccattttccatatccaggaaaatgtgatgcgccacaggta

SEQ ID NO: 395431 - DNA, 100 bp, Homo sapiens
gagtggcctgatgccttacacgaattacacatttgatttcaagaaaagacagctttgatttctggctgcaaaaaagatatgaggaagagctcctcccctt

SEQ ID NO: 395432 - DNA, 87 bp, Homo sapiens
tgatgacagtctgcctctatcttacaatctgcacattcattgcaaccttcttctggtgatgaaatatctactaatgtatctgtccag

SEQ ID NO: 395433 - DNA, 50 bp, Homo sapiens
ctccaccactccctcccatcccgaggaaagagtttttaaaatctggaaga

SEQ ID NO: 395434 - DNA, 98 bp, Homo sapiens
attgcacatcaatgatatcatcccaggtgacaaacagcatgtttggtgcttcaagaaagaagtttgtagagggggtcgacagtgactaccatgacgaa

SEQ ID NO: 395435 - DNA, 90 bp, Homo sapiens
cgacgcagaagacgggtgatttctgcatttccatctgagatccacgtctccattagcaagacttcatggttcttctattttggagaggca

SEQ ID NO: 395436 - DNA, 95 bp, Homo sapiens
ctcagttggaagcagccgatccagcctgcggagcctgtggggcaggcctatgaaaggaggttccctacatgtcctttgattccgatgttcgtggg

SEQ ID NO: 395437 - DNA, 82 bp, Homo sapiens
caagtccatccgcgacctcatgccaaagaccatcatgcacctcatgatcaacaatgagtccattgagaccatgcggacccgg

SEQ ID NO: 395438 - DNA, 100 bp, Homo sapiens
ccggtcttggggggatggttccatcatggcgtcaatgcagatgaacaagagaactgggcaacccatgatccacatctacctggacaaggaaacaggaaag

SEQ ID NO: 395439 - DNA, 88 bp, Homo sapiens
aaatctccacaaagtgacagtgaatgatggagggggagttctcagagtcattacagtggacccccaaaagtacaagggcatatttaac

SEQ ID NO: 395440 - DNA, 75 bp, Homo sapiens
ctggggacgacttttacatcatcacggaggtcttgaggaccggcccagctcaggctcctggggcagcggcgacca

SEQ ID NO: 395441 - DNA, 75 bp, Homo sapiens
aaatgaacagttttgtggaatagatgaccaaatgtggatggagagagaaagaaaaagccagagaggagagctggg

SEQ ID NO: 395442 - DNA, 75 bp, Homo sapiens
tattttttctcatggatgttcttcttcgagtatttgtagaaggctatcatggtgaacttacttcagattgtgcgg

SEQ ID NO: 395443 - DNA, 82 bp, Homo sapiens
acacagaggagatcttcaatatgttaaccaaagaaacaccagagaccttctacattgatacacctatgaagattataagaac

SEQ ID NO: 395444 - DNA, 100 bp, Homo sapiens
caaaggtgaatcttttggttggtgattttgatgatagccacaaagcaagcagggtttccaatacttatctacaggaatcgccatgaccccagctctgagg

SEQ ID NO: 395445 - DNA, 100 bp, Homo sapiens
gttgctgatggccttcgagcagatgcactttacgaattagatgaaaatggaaactctagagcaccgtttattagaaagctgacttcatgagaccgaggat

SEQ ID NO: 395446 - DNA, 100 bp, Homo sapiens
ccgttacgttttgcaagccatgaagcatatggagcctcaagtaaaacaagtttttcaaagcctaccaaaatctttgtgcggtctgaaagtagaagtggat

SEQ ID NO: 395447 - DNA, 97 bp, Homo sapiens
cgatgaacttgagctgaaagttggcgacatcatagaggtggtaggagagttttagaaagagcgttttcgctacgtaaagcacattcgataaaggata

SEQ ID NO: 395448 - DNA, 100 bp, Homo sapiens
ggctgccaatagctacctgcgagaccagtggttccattctctgcaatggaagaaactggcgatggaatatgagaggagccctctggaaagaaaaggacag

SEQ ID NO: 395449 - DNA, 80 bp, Homo sapiens
ttcggcagtccacccaccgccgccgcctcccagatgatgataattccgaagaaggcttccacactattcattcaggaagg

SEQ ID NO: 395450 - DNA, 100 bp, Homo sapiens
cttttgcctgttgctgctatacctcatcggggcggtgattgccgggagagacagcgtctggagaccatcctcagtctctgtgctgaatacacaaagcctg

SEQ ID NO: 395451 - DNA, 100 bp, Homo sapiens
tgatgttttggggattccactctccagtgtaatgattattgacaacagggcctgctatggtgtgctgcggttcatcatggagagtggggccaaaggctgc

SEQ ID NO: 395452 - DNA, 133 bp, Homo sapiens
cgttgctggtgacagcaaaaatgacccaccaatggaagcagctggcttcactgctcagacctacaacaagaaaggggcctcccgaaggaaagaccacctgaaggaccaccagaatgggtccatggctgctgtg

SEQ ID NO: 395453 - DNA, 75 bp, Homo sapiens
caagacccacagtgcctggagaggacatggggaagaccatcagccgcgccttcatgaacgggagctcggtggagc

SEQ ID NO: 395454 - DNA, 98 bp, Homo sapiens
gaaaagcctctgggagcagaagggaggctccaagacctcatcaacaattaaggatcttttgccagaaatgagggcatactggcctgacgtaattcact

SEQ ID NO: 395455 - DNA, 100 bp, Homo sapiens
agagaacagcgtttcagttttggtcatcggaagtggtgccttcagcacagttcaacctggtgtgtgctgactcctggaagctggacctctttcagtcctg

SEQ ID NO: 395456 - DNA, 100 bp, Homo sapiens
cttgctgaaaaggaagttttctggaatgggatgaatgctatcaagtaagacaagtgtttgcccagaaacttcacaaaggcctttcccgtttacggcttcc

SEQ ID NO: 395457 - DNA, 100 bp, Homo sapiens
taaccctgcttctggtgaacttgtctggccggcattcatttaaggcctaaggatgaaggcgagcatggatcattttgatgacattggtcccagtgttgta

SEQ ID NO: 395458 - DNA, 100 bp, Homo sapiens
agaagtggaattgcttggtcaaacgatgcctttgagtaatggacagatgggccagcctctcaggcctcaggcaaattatagtcaaatacatcacccccct

SEQ ID NO: 395459 - DNA, 75 bp, Homo sapiens
cgggtggatgacctggacatccaccaggtgttatgtctggctgtagctgttggtcacgtgaagatgacagacgat

SEQ ID NO: 395460 - DNA, 103 bp, Homo sapiens
ctagaggtccgggcttggagttcgcctcagacgcggtggagccgccggagtctgagaagatagatggctccccaataccagaagtgagttcggcaaagagaag

SEQ ID NO: 395461 - DNA, 83 bp, Homo sapiens
cctggagttcacgactctgagtgctgggacatcgataaagttgatgagttaatgcaggacattgctgaccagcaagaacttgc

SEQ ID NO: 395462 - DNA, 100 bp, Homo sapiens
ctcctcctctaccctcaggacggcccccgcagcaagccccagccaaaggctacggaaaaacctgcgagccctggtggttgtccatgctacatggtatgtg

SEQ ID NO: 395463 - DNA, 90 bp, Homo sapiens
gtgggggccgccgggctgcggcaagaccacaggcacccaggataactcagtacacatgggttctcagcttcctgttcacagagaaacctc

SEQ ID NO: 395464 - DNA, 50 bp, Homo sapiens
ctctggatagcaccttatggacaggttaaaaagatcaagtggcatgagca

SEQ ID NO: 395465 - DNA, 83 bp, Homo sapiens
agaaagacgtgcggatcctgctggtgggagaaccaattctgtggtgttcttggtcacacatttatggagtttctgaagggcag

SEQ ID NO: 395466 - DNA, 90 bp, Homo sapiens
ctggccccgcgcgggcggacggcggaggcgcctcccaggtccggtgtctaaaagactatggagaatttgaagttgatgatggcacttcag

SEQ ID NO: 395467 - DNA, 75 bp, Homo sapiens
gcggggaccgctgtgctctcgcaacccaaggagatctgtgcgctggttgggttctgtgatgaggtgaaagagatg

SEQ ID NO: 395468 - DNA, 75 bp, Homo sapiens
ccccgcatttatcagaaagatgccaccttctataacagaacaggaatcagagatcattgatttcttcctgggggc

SEQ ID NO: 395469 - DNA, 83 bp, Homo sapiens
aggagccgccagacgtcctcttgagcgtgcacccccagctggtgaagctgtgcagtggcatggtggaagccggtaaggcctac

SEQ ID NO: 395470 - DNA, 100 bp, Homo sapiens
tgtttttccgtaagcatactcaggcagaaggtggtgaagggcagcctgacgcaccccttcaccctgacactctccggggacactctgcactggatggact

SEQ ID NO: 395471 - DNA, 98 bp, Homo sapiens
gtggaagcaggactgcgccgcgtcttcctcaaggttgaaatcacaaagattagacacctttttagataggtgttcttcagcaccactgacaacacggt

SEQ ID NO: 395472 - DNA, 74 bp, Homo sapiens
ggacgttcggccaagggaccaaggtggaaatcaaacaataaaatacagtgttggatccctttctcctgtttctg

SEQ ID NO: 395473 - DNA, 100 bp, Homo sapiens
ttcgttcggcgtgttgagcagcgaaagatcctactggacatgtcagtgtcctttcacacccatgtgaaagagggccagcaccttctctctaaagcccaag

SEQ ID NO: 395474 - DNA, 90 bp, Homo sapiens
ggctttgttgaccgggagaaacgagatgggggtgaagctggagatatttcggataatcagggaggctatggatcagttggaagaatggga

SEQ ID NO: 395475 - DNA, 96 bp, Homo sapiens
tcagacgcagccgtagacaccagctccgaaatcaccaccaagcacaggaagtcctggagaacctgaaggaccgctggtaccaggcggacagccccc

SEQ ID NO: 395476 - DNA, 100 bp, Homo sapiens
gtgggcccgggcgagcagccctgcctccggacgatctctcaaaggccttggttctgacagaaattggccccaaacgtgaccctgcgaccctgaagctgtt

SEQ ID NO: 395477 - DNA, 75 bp, Homo sapiens
atcgcttcatctgagccaagggtaaccctgatggtggcaggcttttctgggaaagtgaggccaccatggctctgg

SEQ ID NO: 395478 - DNA, 75 bp, Homo sapiens
aaagcctctgggagcagaagggaggctccaagacctcatcaacaattaaggcgacactaacaggtgaagatctcg

SEQ ID NO: 395479 - DNA, 97 bp, Homo sapiens
actagagcttccaagtcattgacaacaaaaacatcaaaacggcgatccaaaaattcagtggaaggacttccttcgctgggcatctggctgggattct

SEQ ID NO: 395480 - DNA, 100 bp, Homo sapiens
cagacgggctatgtgcacccagatgagttcttccagtcccctgaggtgatggcagagacgagttgtactgctgtcacaggaaatggacgctggattacaa

SEQ ID NO: 395481 - DNA, 75 bp, Homo sapiens
acactcaagctgttgaaaatgagcagctgtcctcatgtctctccagcaggacccagatgatgtggtaccagttgg

SEQ ID NO: 395482 - DNA, 74 bp, Homo sapiens
tcagccagtgcatgaccttactattggcagaagtcaattcatctggaaagactatctctgagtcagacttaaac

SEQ ID NO: 395483 - DNA, 107 bp, Homo sapiens
ttggacttggaaagcccgaaaaaccttgtcataaactgtgaagtcttcgaccctcaggtggtggctggattgaactttcgaattacctactcaattgtgcaaacgaa

SEQ ID NO: 395484 - DNA, 100 bp, Homo sapiens
cagaacatgatcaagggtgttacactgttccctgtattgaacactgatatacaaggaatgaatagaagtcaagaaaaacagacctggtgggaaaaagcct

SEQ ID NO: 395485 - DNA, 97 bp, Homo sapiens
gtgattcttgtgggtggcatgactaggatgcccaaggagattgggagtctgaacttggaagccaatgtgacagcagatggagccttggccatggaaa

SEQ ID NO: 395486 - DNA, 75 bp, Homo sapiens
atatttgagtcatttccttcgtacccacagtgcttcatgagagttgttgtggaattataagctgaacctaactac

SEQ ID NO: 395487 - DNA, 100 bp, Homo sapiens
gtgtgggaattacagaaactggagggtctgggcttcagcatcgttgggggaaaagacagcatttatggccccattgggatttacgtcaaaaccatttttg

SEQ ID NO: 395488 - DNA, 98 bp, Homo sapiens
aaatggaagcccagtcctctcctgttcttatttgctttatatatcatgtgtgttcctcactcagatggcagaaacggtggacacaagcgaaatggtca

SEQ ID NO: 395489 - DNA, 90 bp, Homo sapiens
actcgcctcccctcggcacccccggccccggagctgcctggaggcggccgcactcgggcaaataagggcgagactgaaaaatcaagtcac

SEQ ID NO: 395490 - DNA, 96 bp, Homo sapiens
cgaggtgaacctccggagccttggcacagctcgcttctaaagaaactctgtgaaggcatatttaaagtccttataaaggacatcccaacaacatgt

SEQ ID NO: 395491 - DNA, 100 bp, Homo sapiens
tacgtcttcgccatagtgtatgctgctgcagatgggaccctggaaacgtctccagatgtggtgatggctctactaccgctggaaacattgcccaaagaag

SEQ ID NO: 395492 - DNA, 100 bp, Homo sapiens
ttattttttctcatggatgttcttcttcgagtatttgtagaaggtcacaccgaggagaagactcagtgggaacatccaaaaactggaaaaagaaaacgag

SEQ ID NO: 395493 - DNA, 75 bp, Homo sapiens
aatacagcaagaaagaccatcaagtttaccattgattcgatgtcatcagtcccgtggtggagcctgtggagacaa

SEQ ID NO: 395494 - DNA, 83 bp, Homo sapiens
cgaagacagcggagaggagagcggtgcggaggactgaggcagatcgggagcggtgccgagaaaaatttccttactagatgaca

SEQ ID NO: 395495 - DNA, 100 bp, Homo sapiens
cttgcttttcctcgctggggtgtacgatgtgctggtggacggacagccatgtgaccgcgaggctgtggcggcctgccaggtgggcgaccccgtgcgcctg

SEQ ID NO: 395496 - DNA, 75 bp, Homo sapiens
acccacgaatctgcccacccctcctgtaacccagcctgtttcacttcttggctaaagaattacctccaaagccat

SEQ ID NO: 395497 - DNA, 74 bp, Homo sapiens
gtacctggtgggcaccctgagcctcagtgactgcacttctcttcaagatggaagaagccaacctggcgagccga

SEQ ID NO: 395498 - DNA, 82 bp, Homo sapiens
gtaagaagcggagcgtatacggaggaggcgggatgcatttctgcatcgagcgcacaaagacaatgcagatcttcgtgaagac

SEQ ID NO: 395499 - DNA, 83 bp, Homo sapiens
cagagacattacatcaggaagatactgcagagatattctactccatctcattcattgtacagttaatcccgtcatgtattgac

SEQ ID NO: 395500 - DNA, 100 bp, Homo sapiens
gcttcctagtgagtcggcggctgatttagaaggaggttcaggctacggtgagccgaaggttctactgtttctaaggcttatggtgcttcaaagacatttg

SEQ ID NO: 395501 - DNA, 75 bp, Homo sapiens
ttggttgcatctgctaaagaggatcctgccaacattttacaggtgttgttagagatacaaaaggaattattagac

SEQ ID NO: 395502 - DNA, 100 bp, Homo sapiens
atcaagcagaagattgagctgctgatgtcagttaactctgagaagtcgtcctcttcagaaaggagcatattaatgaaaagtgccataaactgaaaaacca

SEQ ID NO: 395503 - DNA, 50 bp, Homo sapiens
tcggcttcatcaaggtcctcgagtggccccagcatgagaccagatgtaag

SEQ ID NO: 395504 - DNA, 100 bp, Homo sapiens
gaaaaagtatcgtcgagaagcctatcatcgcatttaaatcaaacggtattgagatggattgggttatgaaacataatggtccaaatgacgctagtgatgg

SEQ ID NO: 395505 - DNA, 83 bp, Homo sapiens
cctgacatggcagtcccgaacacaggatgaacatccgaagacaatgttctccaaagataagggacgccagaccttccagcgtt

SEQ ID NO: 395506 - DNA, 88 bp, Homo sapiens
ggaaggtcaccattgacagcagctatgacattgccaagatatcccacaaagtacccacgtttgttcgaatgctggccccagagggagc

SEQ ID NO: 395507 - DNA, 90 bp, Homo sapiens
gccccactgcgcgaagctgctgactgaggtgcacgcagtgatgtttctgcccaagaaagcgaaggacaaggacgtggagtctaagagcca

SEQ ID NO: 395508 - DNA, 82 bp, Homo sapiens
agaaagagtcaacagcagtggcaacaggtagcagtagctgatgtgcagtttggccccatgagatttcatcaagatcaacttc

SEQ ID NO: 395509 - DNA, 90 bp, Homo sapiens
tgttgctgctcacgatgttggagaatatgtgcggcattatccacgaggcaaacgtcactgcttcaaccacctgtgagaaattagaaaaag

SEQ ID NO: 395510 - DNA, 75 bp, Homo sapiens
tcttgctcggccgatgaagtgcagaggtttttttctggaccttgcagatgcttcgggagaacctggaggaggagg

SEQ ID NO: 395511 - DNA, 50 bp, Homo sapiens
tagtgttggagtgcaccaagaaatgtgtggacgaatgtggaacctcgctc

SEQ ID NO: 395512 - DNA, 75 bp, Homo sapiens
ctatcccgcttcactgcatgcccagacacggcatcagcgaggagatacgcatcctctaaccttagatgaaatttt

SEQ ID NO: 395513 - DNA, 75 bp, Homo sapiens
acaaagagggtcatctcttctattgtacctgcagtgaaagatgtcatgtatatctgcccatttatgggagcagtg

SEQ ID NO: 395514 - DNA, 82 bp, Homo sapiens
caaggtgatccttttaacaatcgagttcaggaccttatcaggaagagagagaaaatccttcaaaacggagtagaattgaacg

SEQ ID NO: 395515 - DNA, 76 bp, Homo sapiens
ggctcgcctcgactccaaatggttgaaaacagatatacaggttaaaaatctgtaagagcctgattttagaattcac

SEQ ID NO: 395516 - DNA, 74 bp, Homo sapiens
gttgtgtggtcgcgtctcggaaaccggtagcgcttgcagcatggagtggagtcaacatatcaatggagcaagtc

SEQ ID NO: 395517 - DNA, 100 bp, Homo sapiens
acagtatttctactggaaaaaccattttcagttaaagcaggtctggctctgggagaggagtggacagcagctggttgagatacatccccatctggagaca

SEQ ID NO: 395518 - DNA, 91 bp, Homo sapiens
gagggcccgcgccgcatggaggccggctgaggagcgccgctgcctcgcctcggtgagaagccctaccactgcaactgggacggctgcggct

SEQ ID NO: 395519 - DNA, 115 bp, Homo sapiens
gtttcttctcaggctcagggaccggccgcggccccgtagggtttctggaactaatgcaactgaagtatcatgagaaagctgcagacaaaggggtttatatcattggaagcagcgg

SEQ ID NO: 395520 - DNA, 97 bp, Homo sapiens
ccccgattcaccaacgagccctagtggtgctgtgggtcggcctgggcgtcctggtggtgagcactgtcaccacactgtctgtgagcgaggaggtccc

SEQ ID NO: 395521 - DNA, 75 bp, Homo sapiens
cagcaatggatagatgccattgaacagcacaaggtgagacatggaatccattaaaattgcattatcagttaagaa

SEQ ID NO: 395522 - DNA, 98 bp, Homo sapiens
gctggcagccggggagctgcaggaaccagactgggggcgagctgagcacctgtagtcaatcacacgcaggcactgtggttggcgtggacgagagcact

SEQ ID NO: 395523 - DNA, 100 bp, Homo sapiens
caggactccaaaatggcgtcagttgttcaaaaggtgatgacctatcaacagccattctcaaacagaagaaccgtcccaatcggttaattgttgatgaagc

SEQ ID NO: 395524 - DNA, 100 bp, Homo sapiens
gagagaggccggtttcccccaccgtctatgctccatcagcaagcactgccgactacaatagggactcgccaggctatccttcctccaaaccagcaaccag

SEQ ID NO: 395525 - DNA, 83 bp, Homo sapiens
gcttaaagatcagtatttcatgcaaagacatcagctacttaagcgccacgagaagattatggattggatatgtctacttctgg

SEQ ID NO: 395526 - DNA, 100 bp, Homo sapiens
tagaacacctgccccaggaggtgccttacaatgtacagcagtgatagtagacaagaagatgcagaagaaaatgaagaaagctcataaaaagatgcacaag

SEQ ID NO: 395527 - DNA, 89 bp, Homo sapiens
caaaatattctagaaggggaaaagctacttcaagctcctgcccctcctaaagctgaagccaaagcgaaggctttaaaggccaagaaggc

SEQ ID NO: 395528 - DNA, 74 bp, Homo sapiens
tattgaggcagagagacgacgcattcaggagaagaaggatgaggtctagtgacggagcccgcgcgcggcgccac

SEQ ID NO: 395529 - DNA, 83 bp, Homo sapiens
ttgggttttttgtggcttccttcgttattggagccaggcctacaccccagtaaaatgtttattggaggcttgagctgggatac

SEQ ID NO: 395530 - DNA, 75 bp, Homo sapiens
ctggactcggattcgttgcctgagagagaaaaggaacagttccgtaagctctttattggtggcttaagctttgaa

SEQ ID NO: 395531 - DNA, 82 bp, Homo sapiens
ctcctgaacagttgcactgtaaaaaacccagctgaagaccactttagaaactcaattaagcccaggctgcaagcacaaagga

SEQ ID NO: 395532 - DNA, 105 bp, Homo sapiens
ctttaaggcaggagctgatgaagagagagcagagacagctcgtctggatgatgatgctgaagctatccttgctgcagacttcgaaattggtcactttttacgtga

SEQ ID NO: 395533 - DNA, 100 bp, Homo sapiens
gttacagtcttcagtaattacagtctacacaatgtatttgacatggtcagctatgaccaatgaaccagcttttcactagttctgtgcagatgaatcccac

SEQ ID NO: 395534 - DNA, 90 bp, Homo sapiens
agctgcccagttgcctgtcttttgtgaatgcaaaggcccagtttgatatctctgtggccagtgaaattatggctgtcctggctctcacca

SEQ ID NO: 395535 - DNA, 104 bp, Homo sapiens
agcctcagttggaagcagccgatccagcctgcggagcctgtggggcaggtgacttaagagattaaaattaatttggttgctgttggttctgaacaaataatgag

SEQ ID NO: 395536 - DNA, 83 bp, Homo sapiens
ggattgatgtcccttcagcatcatgcagccgccgccgaggaagggccgagaactactggtggcgtggccagaacacacggacg

SEQ ID NO: 395537 - DNA, 100 bp, Homo sapiens
cgtctacacaggcgcgggaatcagcacggatgctcgacatgcagcagaaggagaaatatataccaaactgaatcaaaaaattgatgaatttgttcagctt

SEQ ID NO: 395538 - DNA, 99 bp, Homo sapiens
tgccccggcgcaccgactggaccgggaaggagcatcccaggacctaccagaatctgatgccatggacaatattaccaggcagaaccaattctacgatac

SEQ ID NO: 395539 - DNA, 127 bp, Homo sapiens
agatgtctcgctccgtggccttagctgtgctcgcgctactctctctttctggcctggaggctatccagccatttaaatcaaacggtattgagatggattgggttatgaaacataatggtccaaatga

SEQ ID NO: 395540 - DNA, 100 bp, Homo sapiens
cagatcctgagacccggacagtggcagtgaaacaggacagtcattttgtttactcattcagccctgttgcaggtcccaataaactcttcataaggttgac

SEQ ID NO: 395541 - DNA, 121 bp, Homo sapiens
gatttactggagttgcaagtgggagcactggaagtacgggcagttgcagtgttggagctaaagtactaggttttgacaagcttgcatcatgcgtgagtataagctagtcgttcttggctca

SEQ ID NO: 395542 - DNA, 82 bp, Homo sapiens
cgaacgtgttgtgcctgctgaggatggccggaggctcgccgacgaccttggggctttgaccacgacctttgaagagcttcat

SEQ ID NO: 395543 - DNA, 83 bp, Homo sapiens
cccgtcgcaggtcgcaggcctctttgtcagctggagttgcgcggtcaaaatgcagatcttcgtgaaaacccttaccggcaaga

SEQ ID NO: 395544 - DNA, 118 bp, Homo sapiens
tccattgagaatgtcctgcaggacagcagccccgagcactgtggccgaggcccacctgctgacatctacctgccagggtcctcactgagcagcgagtcgtcccccgtgtcctctccgg

SEQ ID NO: 395545 - DNA, 75 bp, Homo sapiens
atcgaaaacacatcacgcattgccaggtaccattgttggatactggtgacatcatcattgacggaggaaattctg

SEQ ID NO: 395546 - DNA, 77 bp, Homo sapiens
catccgaggcgttctcccgactctggaccgacgtgatgggtatcctggatggaatggccgtatgcatgttcatgcaa

SEQ ID NO: 395547 - DNA, 100 bp, Homo sapiens
gctttccccccacctgaacagaaaactgcatttgacaagggagtgtacgacgttcggcaggcctacgttcagtttgctctctcctttttaattgcgggtg

SEQ ID NO: 395548 - DNA, 75 bp, Homo sapiens
ccggaggcagagcggctgccatgatatggccgcgtggaaagtgtcaaaattcttcccaagaggggatctgaagga

SEQ ID NO: 395549 - DNA, 100 bp, Homo sapiens
tgagacatggaagtctgcaagaatatctccaaacctgccctcaagtatgtgttgtatacattggttggctttgtgggttttgtaacccattatgtgctgc

SEQ ID NO: 395550 - DNA, 101 bp, Homo sapiens
ctcggagaagccgctggcggcagtcacttgtacagcgccggtcaacatcgcggtcatcaagtactggaactgtacctggggaatgaattgtaggtttatac

SEQ ID NO: 395551 - DNA, 51 bp, Homo sapiens
ctgccgagaatttgagatgggaaggattgaaagaatattgggcgtccgtct

SEQ ID NO: 395552 - DNA, 85 bp, Homo sapiens
gggtatccactgttgggggagaaggtgtgatgaatgcagactctgctaccattttggctgtttggatcctcctttgaaaaagtct

SEQ ID NO: 395553 - DNA, 83 bp, Homo sapiens
gtaaacctaattctgcccttgatgtcacaggatctcttgaaggtaattggtatgtgaaaaagtgtctaaacgacgttggaatt

SEQ ID NO: 395554 - DNA, 100 bp, Homo sapiens
gcaggaaacacagacacaaaattccaaaagctgcaatataaggatctctgtacactagagatgatcgctatggaaaatcctgcagacttgaagaagcagt

SEQ ID NO: 395555 - DNA, 90 bp, Homo sapiens
gtattactttgcttctgatgcaaggcaagtatatcgcgtcaacacagcgacctgacgggacctggcgcaagcagcggagggtgaaagaag

SEQ ID NO: 395556 - DNA, 50 bp, Homo sapiens
ggaggaggcgccggaccggggggtgaatgatgaacccacaacagccactg

SEQ ID NO: 395557 - DNA, 89 bp, Homo sapiens
gctgcctctctggtctccaactagtattatgagaggagtcaatcagaggtgaaattgccaaatacatggaaacagtgaaattactagac

SEQ ID NO: 395558 - DNA, 80 bp, Homo sapiens
cacccaccaacaacaccacaataatccacagccaaggtcatggaaaatggaagatttgcaaaatacaaatattttaccca

SEQ ID NO: 395559 - DNA, 83 bp, Homo sapiens
cctgtgggcacagacaaggagctcagtgacctcctggacttcagcatggaccctccgatatgttccagaggaatccaaagaca

SEQ ID NO: 395560 - DNA, 82 bp, Homo sapiens
tgcattcgcggggcatgttcccgaggctgtcaccaggtcccaggtcgctggccggctctgcacctgtcgccatccccggctc

SEQ ID NO: 395561 - DNA, 100 bp, Homo sapiens
aaagtgttgacaggaatataaactatactgaaagaggagtgttctttagtgtaaattcctggaccccgattcgggaactggagcctctcctctgtcacag

SEQ ID NO: 395562 - DNA, 75 bp, Homo sapiens
ccggactccactgcgcctctgaggggctcaaatacgaattcaagagagtcccacgaactggctgggtatacagaa

SEQ ID NO: 395563 - DNA, 137 bp, Homo sapiens
gaaccttctctctttcgctctttggactaatgggagttgcttttggaatgaatttggaatcttcccttgaagaggatctcccagccatccagccccggctagtggcggtcagcaaaaccaaacctgcagacatggtg

SEQ ID NO: 395564 - DNA, 100 bp, Homo sapiens
ctccaaagagcattgaagaattcttaaagtttcaaaattgggactgataattctatcaaaaatcattggaattctactatgcgaagaaaagtggaacagg

SEQ ID NO: 395565 - DNA, 76 bp, Homo sapiens
atacagttgataaaattgttggcaggaagaccaactgcatccattgtacactcttccagcggagacatttggacct

SEQ ID NO: 395566 - DNA, 82 bp, Homo sapiens
acagactgagcgcgtccaggcctgacagctctgcggctcgggccctgagagataattgacgaccttgccaacctagtggaga

SEQ ID NO: 395567 - DNA, 100 bp, Homo sapiens
cagcagaaggtggaggatgtggtgctgcccgagaaggtggacgtgctggtgtctgagtggatggggacctgcctgctgtgcggaaacatggctcgcgaag

SEQ ID NO: 395568 - DNA, 98 bp, Homo sapiens
tgtactatggaagttacaccaggtgcagagatccaagatggcagattcaatctttttaaggcagccttaagtgccttgaaacaattttctgaacaagg

SEQ ID NO: 395569 - DNA, 74 bp, Homo sapiens
ggtctcatgcttggtgcctggtgccagtttattgagagaacattcaattgatggcactggctgggctcccacaa

SEQ ID NO: 395570 - DNA, 83 bp, Homo sapiens
tgagagtggcgtgctcagtctagacagggcctgggccgaggccactggtgcatatgttcccgggagggataagccagacctgc

SEQ ID NO: 395571 - DNA, 83 bp, Homo sapiens
aactctgaacacatctgaacatcagaagggacagactccagacgcgccaccgacagagcgggatgccaccagcttgtccaaag

SEQ ID NO: 395572 - DNA, 82 bp, Homo sapiens
gtggagatctggaagatcaagaagctcattaagagcttggaggcggcccgcggagaggctggctgtggcagatgcaactgca

SEQ ID NO: 395573 - DNA, 75 bp, Homo sapiens
atcggaggcttcgcaggtctcacctcgacggtgatttgcaggtggacgattactgagagccaatcagattagttt

SEQ ID NO: 395574 - DNA, 97 bp, Homo sapiens
ctacctctatgaggtagatattaaaccagacaagtgtcctaggagagtgaacagtttcatctgtatggaaaaggagctctggtaactttggccaaga

SEQ ID NO: 395575 - DNA, 50 bp, Homo sapiens
cgccgccatgacagcgagcgaggcggagtactcttgatgaaagaccgtga

SEQ ID NO: 395576 - DNA, 100 bp, Homo sapiens
gtcaagtatcacatcaactccgtccatgctgagtttccaggagactgacaaggcgtggcatgggggatgtctggcgctggcagagctgggcaggagaggc

SEQ ID NO: 395577 - DNA, 83 bp, Homo sapiens
ccagcctatctggtttcaaagacctcttcagcatgaagccctcaccatggatgatgatatcgccgcgctcgtcgtcgacaacg

SEQ ID NO: 395578 - DNA, 82 bp, Homo sapiens
gctaaaagatgacagacttggacaacatgtcccaacattacatcccagaactgtggctgcaccatctgtcttcatcttcccg

SEQ ID NO: 395579 - DNA, 82 bp, Homo sapiens
gccatgacctccggtcacacagctccttccaggagattctacattgcattgactgggattccagtagcaattttcataactc

SEQ ID NO: 395580 - DNA, 80 bp, Homo sapiens
gcacctggccccgctacagcaaaccagtgcctccggagccagcgtggtggccatagacaacaagatcgaacaggccatgg

SEQ ID NO: 395581 - DNA, 50 bp, Homo sapiens
ggactgcatcaggccgcgtctcctcaggactccctgcgacaaggactgtg

SEQ ID NO: 395582 - DNA, 75 bp, Homo sapiens
cagcacagccaaggaacagaattagaagaaaaggaaccctggcctgaggatgctccagaccttgtatgattactt

SEQ ID NO: 395583 - DNA, 100 bp, Homo sapiens
atcttcttctctctttactaatgatcaaagtgaagagtagcagtgatcctagagctgcagtgcacaatgggtcgtttatacgcaatgcagactggaatga

SEQ ID NO: 395584 - DNA, 75 bp, Homo sapiens
agacctccaggagaagatcagtgggaagatatgaagagcattttaagaggtgcagcctctggaagtggatcaaac

SEQ ID NO: 395585 - DNA, 100 bp, Homo sapiens
ttctcgtctcaaactctatttgccaaaggaaacttgccttatcaccttcttgcttgcagaggccagtaatagtagccatgagtctcgtattggtctagct

SEQ ID NO: 395586 - DNA, 51 bp, Homo sapiens
tgtcaccttgccatgtggaagaaactggattccctcgttatgccacgacca

SEQ ID NO: 395587 - DNA, 100 bp, Homo sapiens
caaagaactaatttttgaagagactgctagattccagccaggatacagatcttaaatttgtcagtcctttcaggggagccagggacgcgcctacctcttc

SEQ ID NO: 395588 - DNA, 100 bp, Homo sapiens
gctgcccctgccatccctattggagattgtgaatcctgctgtctgtgcagggctcatagtgagtgttctgtgaggcctgtggaggctcaatccagaccag

SEQ ID NO: 395589 - DNA, 75 bp, Homo sapiens
gtctgcaaagtgtccccggcaagaaggtggtgatgatgtccagcaactctgtgaagcaggagaagaggagttttt

SEQ ID NO: 395590 - DNA, 100 bp, Homo sapiens
cttatctgcgccccctgctggttgtgcgaaccccgggcagcccgggaaatctccaagtcagaaaggaagcgtcccgtcgccgtcgggctcagtgccagga

SEQ ID NO: 395591 - DNA, 100 bp, Homo sapiens
ctgtatccggtttatcagcagacacggcaagtgaaccggagcaaacgacttccgatccagtctgcgctgttgcggctcccgtttgggatttgatttgcag

SEQ ID NO: 395592 - DNA, 90 bp, Homo sapiens
cggccgcccagcgtggactccttgtccagctccagggttccttgaaaagaaaacaggtagttaacctatctcctgccaacagcaagcgac

SEQ ID NO: 395593 - DNA, 108 bp, Homo sapiens
ccaggtgagactttcacaataagagcagaggatggaacacttcagtgcattcaagtatggaaatttcatcgataagctaagactcttcaccaggggaggatccggtgg

SEQ ID NO: 395594 - DNA, 100 bp, Homo sapiens
gggctggccggcctgcgctgcgaccccgactacctgcgcggcgcgctcggccgcctcaaggtcgcccaagtgattggagcctccctctttgctagtaaca

SEQ ID NO: 395595 - DNA, 75 bp, Homo sapiens
aaactttcgcctgagcctattttgaatccacattcatctcaatggaaggatcctgccttaagtcaacttatttgt

SEQ ID NO: 395596 - DNA, 100 bp, Homo sapiens
gcctgtcctgtgttggcgtgtgttccacatgcgcttgggcctggccacaggtccagtcgtcgaccatcgagctgctttgaagaccctgcggaggttccgt

SEQ ID NO: 395597 - DNA, 127 bp, Homo sapiens
aatggcagacgatattgatattgaagcaatgcttgaggctccttacaagaaggatcacctgctgttaccagctaccacccataacaagaccacaagaccaaaaatgtcaattgtgttaccagcaata

SEQ ID NO: 395598 - DNA, 75 bp, Homo sapiens
ccccgggcggcggtcgccaggtctcagggccgggggtacccgaggtctctaattaacagaagatggcaaagccca

SEQ ID NO: 395599 - DNA, 50 bp, Homo sapiens
ttgagtctttggaggcactcaagcagcagaatctacctgttactcgtatt

SEQ ID NO: 395600 - DNA, 90 bp, Homo sapiens
ccaagatgctgggcgccgagtggagcaagctgcagccaacggaaaagcaggtgctggagaatctggtaaaagcaccattgtgaagcagat

SEQ ID NO: 395601 - DNA, 83 bp, Homo sapiens
cagcgcggaatctgggtgcagttcctgcagtaccccactctacgatcaggtgttggataaatacaaccctccagaccacttcc

SEQ ID NO: 395602 - DNA, 75 bp, Homo sapiens
ctgcccaggctcgcctcgactccaaatggttgaaaacagatatacagccttatacaggatgctgtgttctttgct

SEQ ID NO: 395603 - DNA, 100 bp, Homo sapiens
gtctgttctggttcacagtcatcaccctcagctttggctactacacacacctgggaaagtggcagacaaagttataattgaaaacactagagattcaacc

SEQ ID NO: 395604 - DNA, 75 bp, Homo sapiens
catgtgaaaaatctgttacttgatgaacttcagaaggcttgtatggcaaacccttcctctctgcagatcggggtc

SEQ ID NO: 395605 - DNA, 87 bp, Homo sapiens
gtgtctcctacccaaggacagggggacagggctctgtctcgcacttcccagcctcccctggtgaagacacaaactgtcaccatctca

SEQ ID NO: 395606 - DNA, 98 bp, Homo sapiens
ctcggacgccgccggcaccatgggctgctgcaccggacgctgctcgctcatctgcctctgcgcgctgcagttgagacaaagcatggaggacacaagaa

SEQ ID NO: 395607 - DNA, 75 bp, Homo sapiens
tccaagcaaaccgggaaaggagaggatcccggagccgtgtgatggagagtctctgccgtgccatctgggatgcaa

SEQ ID NO: 395608 - DNA, 106 bp, Homo sapiens
gaagagcctcagaatttaatcaaacaaaattgtgagctttttgagcagcttggagagtacaaattccagaatgcgtttctcgttgcttacacaaagaaagcccccc

SEQ ID NO: 395609 - DNA, 50 bp, Homo sapiens
gtatgattgaagtttctaagccaggctgtcacccttgacccaaactttct

SEQ ID NO: 395610 - DNA, 75 bp, Homo sapiens
aaactattgccacttcgtatctgtgggggcaagattcttgccaagagaattaatgtgcgtattgagcacattaag

SEQ ID NO: 395611 - DNA, 95 bp, Homo sapiens
ctcgtcgggagtgatcacctaccctacagaatcaagccagggaggacttcaaccaggacatcggctggtgtgtctccctcatcaccgactacagg

SEQ ID NO: 395612 - DNA, 100 bp, Homo sapiens
gttggcaagtcagccctgacgcttcagttcatgtatgacgaggtcctggatgcctcatcccttagtttcaacaccagattgaaatggtttgccatctgct

SEQ ID NO: 395613 - DNA, 75 bp, Homo sapiens
tagttactggttaactgcttacttcagatataaagatgaagcgcagctgtataaagaagagcacctgaggaatcg

SEQ ID NO: 395614 - DNA, 111 bp, Homo sapiens
ttaagaatctggattgtttataatttgggcatttggggtgtcatggagaaactccagctgggcccagagattctgcagcgggaaaatccaaggcttatttatgccaggctg

SEQ ID NO: 395615 - DNA, 75 bp, Homo sapiens
agaactcggaaacatggtatcactcaggacagtcattttgtttactcattcagccctgttgcaggtcccaataaa

SEQ ID NO: 395616 - DNA, 89 bp, Homo sapiens
tctcctggttaatcaagaattctctatttctgctccgtcatccatgccactataaacaacttgatgcagatgtttcccccaagcccact

SEQ ID NO: 395617 - DNA, 90 bp, Homo sapiens
aagaattgatatcacattatagaagagaatgtttgctaggggcagaccgggccgttccagtgctgatcattggcattctggtgttcctac

SEQ ID NO: 395618 - DNA, 75 bp, Homo sapiens
tgctggacgaagagctctcctccttcttcctcaactatctcgctgacacgcagtcgtccctcatggaccttgctg

SEQ ID NO: 395619 - DNA, 100 bp, Homo sapiens
cagcgcaggagccgcgcccggacccaggcaccagcaggcagctggctccggttttggggtatctgggctccaggcagaagcacagcctccccgacctgcc

SEQ ID NO: 395620 - DNA, 100 bp, Homo sapiens
gttgattctccattgggaaaggcatttacaggtatgatctcgtgaaatcttgagagaaactgaatgacgaatgaaactattgttcctgtttcacacagaa

SEQ ID NO: 395621 - DNA, 50 bp, Homo sapiens
gagggtcaacgagaaagagatcgtggaagcatcagttcacagcagtaatg

SEQ ID NO: 395622 - DNA, 82 bp, Homo sapiens
tatcaacaccaaaaagctttctgctaggggcttgaagtagaaaatgccatgatgagaaaaactattaaaaaacaggatgacc

SEQ ID NO: 395623 - DNA, 90 bp, Homo sapiens
tggaaggattcggagagggttggggccgtcttcctcatccttccttttctcggggctcccgtggatagtccactgtgtgcagaggcatgg

SEQ ID NO: 395624 - DNA, 74 bp, Homo sapiens
agagatctacaaccttggagcccagagccacgtcaaagtaacatttgtcgatcacccattgcagaagcagtttt

SEQ ID NO: 395625 - DNA, 80 bp, Homo sapiens
ctctgctcctctagaagatttcacagcaatgctggactgcagtgactatgttctaggagttgatccctgaattttattat

SEQ ID NO: 395626 - DNA, 144 bp, Homo sapiens
catttgtgaggaaaaatatcgagatatcctaaaatttcctgaagaactggaacacgtagaaagtgcaagcaaagggtgagcctggtctgcctggatacccagggaaccctggtatcaaaggttctgtgggagatcctggtttgc

SEQ ID NO: 395627 - DNA, 100 bp, Homo sapiens
gtgccctacttcaaggataagggtgacagcaacagctcggcgggctggaagagatcctgaaggagctagacgagtgctacgagcgcttcagtcgcgagac

SEQ ID NO: 395628 - DNA, 50 bp, Homo sapiens
gacaacgtggatcgttgttttgaaacccattaacaggccagatatcacag

SEQ ID NO: 395629 - DNA, 100 bp, Homo sapiens
gccctccacagagcctgccttcaacccccaaagcaggcaagtgaaccggagcaaacgacttccgatccagtctgcgctgttgcggctcccgtttgggatt

SEQ ID NO: 395630 - DNA, 112 bp, Homo sapiens
cgagaccgagtcagaacccgagtgctgcttggcggcgagtactatactggcaattgctggagaagattttgcaattgttgcttctgatactcgattgagtgaagggttttca

SEQ ID NO: 395631 - DNA, 89 bp, Homo sapiens
cagaggttgtctgaaggccgaggccaagatggcggtgctgtcaggttacgggcaggacttgagtggcttcggacagggcttctcagacc

SEQ ID NO: 395632 - DNA, 75 bp, Homo sapiens
gaagtttctggtcactccccaggattatgcgcgagagaagaagaaggaggttcctgctgtgccagaaacccttaa

SEQ ID NO: 395633 - DNA, 100 bp, Homo sapiens
ctaccaccaattctaaatgccctggaagtgcaaggcagggagaccagactggttttggaggtggcccagcatttgggtgtgatgaatgcagactctgcta

SEQ ID NO: 395634 - DNA, 76 bp, Homo sapiens
ggcctctggatgaaacgtcaggaatttactacacagtaggcctggaaaatccccagagaggagtcacgtctcttcg

SEQ ID NO: 395635 - DNA, 74 bp, Homo sapiens
gtccgagtcaacaaccgcttcgagctgggccaattcctgtccccccagcagcatggcatcgtgtgctgaaccct

SEQ ID NO: 395636 - DNA, 98 bp, Homo sapiens
ctatgcagtgcttgctgctgaacctgagctgcaagttggaattgatataatgaagactagttttccagcagtccagagcgtgagtccattcacatcct

SEQ ID NO: 395637 - DNA, 82 bp, Homo sapiens
tcaccgccacatccaggactccttccacagagacctgcctagagctggaacgttacctccagagcgagccctgctatgtttc

SEQ ID NO: 395638 - DNA, 97 bp, Homo sapiens
agaactgggttctggactttgggcgtcccattgccatgatagaagaagtcagagatgccatggaaaatgaaatgagaacccagcttcgccgacaggc

SEQ ID NO: 395639 - DNA, 82 bp, Homo sapiens
cagaacagttggatcttgctcagtctctgtcagaggaagatcccttggtagtctgtagagaatgccaaatgagggaatcccc

SEQ ID NO: 395640 - DNA, 51 bp, Homo sapiens
ggaaggagactggatgatagaattcgcaaatctgtccaaggctgcctgggg

SEQ ID NO: 395641 - DNA, 75 bp, Homo sapiens
ggcctacagctctgccggggaggaggaggaggaggaagaggaggagaaggaatactcccccagttgcaagaggcg

SEQ ID NO: 395642 - DNA, 82 bp, Homo sapiens
cggcgtcccctgcctccagaacgcgacccaacatgagtgaagtttcctgcaagaaacgggacgactatttggaatggccaga

SEQ ID NO: 395643 - DNA, 90 bp, Homo sapiens
tctcgctgcggcagacgggctcccccgggatgatctacagaaaacagacacatgaccctcattgagaactgcagcctgcagtacacgctg

SEQ ID NO: 395644 - DNA, 51 bp, Homo sapiens
caccgaggctggagggggagaacacccagtgaacttgaagatgatttactt

SEQ ID NO: 395645 - DNA, 98 bp, Homo sapiens
ttcctgtgttctactgcacactgggcagaagatgcctctgattggtctgggtacctggaagagtgagcctggtcagaaacggaccaatggactgcgaa

SEQ ID NO: 395646 - DNA, 100 bp, Homo sapiens
tctatctcctgcttcaaaaaaatgtttaacccatttagagatacagacagaagctgctcagttgcttacaagtttcagtgagaagaattgagaacttttc

SEQ ID NO: 395647 - DNA, 83 bp, Homo sapiens
ctgactgttgtcattctggaggcaaagaacctgaagaagatggatgtgggtggcttatccgctgactacacagacttagtctt

SEQ ID NO: 395648 - DNA, 75 bp, Homo sapiens
gatgtttgggacccaggtgcactccatctgcacagatgagacggacgtggccgctttggagagtcagcctttatt

SEQ ID NO: 395649 - DNA, 75 bp, Homo sapiens
gtgaattttgagattgagctaatgaaggaccttggtgtaaaggcccaggctgcaagcacaaaggaagtttgctca

SEQ ID NO: 395650 - DNA, 50 bp, Homo sapiens
gtgagaagacgtctgtgtcgtgcgttggaaaatggatataccttatttga

SEQ ID NO: 395651 - DNA, 75 bp, Homo sapiens
cttttgcatttcccatgtgtatcctgtgaccattctatctggggacactgcccatctctaagataagaacctgga

SEQ ID NO: 395652 - DNA, 74 bp, Homo sapiens
ggactttgaacaggtggtggatcgcattcgcagcactgtggctgagttatttacagagtatggaagacttgcga

SEQ ID NO: 395653 - DNA, 100 bp, Homo sapiens
ccctgcctcccctgcgtcccgccaccggccgcttctgtcctcgagctattaagaatggcaaaggattgcatagcaagaaggaagtgcctatccaccgtgt

SEQ ID NO: 395654 - DNA, 51 bp, Homo sapiens
caacccctgcactgataacgtctgttacagtgcccagcagaggagcacgca

SEQ ID NO: 395655 - DNA, 51 bp, Homo sapiens
agcctcccgagtagctgggcttacaggaagtgacctcacaatgactcaagc

SEQ ID NO: 395656 - DNA, 100 bp, Homo sapiens
tcctgacgaaattgaaattacctccgagggaaacaagaaaacatcaaagaggtctagcaaagaaaagcctgccattgctccgcccgtctttgtgtttcag

SEQ ID NO: 395657 - DNA, 83 bp, Homo sapiens
cgacctgctgccgcacctggcgcgcaagcggcgccggccaggaccctccatgggttccagccccccacccaccggtcccatct

SEQ ID NO: 395658 - DNA, 98 bp, Homo sapiens
gtgtgtacagctacgttagcctggggtgtcaatcttcccgcccatgctgttattattaaggagttaaagttcctcgtaattttcgcttgttggaagaa

SEQ ID NO: 395659 - DNA, 148 bp, Homo sapiens
cctccgggccagcggctgcggtcgggccaaggttccgcgccgggcgtggacggtgtggggcggtcccggccccgcagattctggctacattggagattggttgctttctaaaactgaaggagaagcccatgaagagatggtggattct

SEQ ID NO: 395660 - DNA, 90 bp, Homo sapiens
aagaacccgtccctgctggggatcctctacgggaagaagtacgaggcggacatgtgcgtgagaccacagcaccgggaagtccagtcagcg

SEQ ID NO: 395661 - DNA, 75 bp, Homo sapiens
aggaatcttgtatcctgggaaaggtacaagttggggtcataattatcgagtctcttgatattatcacaattactg

SEQ ID NO: 395662 - DNA, 75 bp, Homo sapiens
gcccggagaggagcagaggccaggctgctgctctgggagcatttgacattgtgcagcaaagaaatggttatggag

SEQ ID NO: 395663 - DNA, 100 bp, Homo sapiens
ggtggctgcttcttggcagtgagcacttgtctatcgaaatcactacatcctgaatggcaacaagttctggatcactaatggccctgatgctgacgtcctg

SEQ ID NO: 395664 - DNA, 100 bp, Homo sapiens
atgagctcccaaagccatccaggaatagccaggccagaagaaggaaggcctgtggtgagtgggacaggaaatgacatcaccaccccaccgaacaaggagc

SEQ ID NO: 395665 - DNA, 100 bp, Homo sapiens
gcggccgcttccgactcagcctcttcagcgacctgcccgaggcctgcactgcccaaagtcttggaaacttgctggatatgatgtaccgggagccagcacg

SEQ ID NO: 395666 - DNA, 75 bp, Homo sapiens
agcgtcccagggcccaggccgagcaggtgctggagaatctggtaaaagcaccattgtgaagcagatgaggatcct

SEQ ID NO: 395667 - DNA, 97 bp, Homo sapiens
ggagacaccaaagaagagaaagacaaggatgaccaggaatgggaaagccccagttggctggggaacagaccagggaattggtggatttggagaagag

SEQ ID NO: 395668 - DNA, 97 bp, Homo sapiens
ccggccaacttccattgaacttcccagcactcgaaagggaccgaaatggagagcaaaggcaaacacagagcagcccaagctgagtagagatgagcag

SEQ ID NO: 395669 - DNA, 50 bp, Homo sapiens
attggtcaagttgctgaccttgaaacaaatggaatcctgtgctgaacccg

SEQ ID NO: 395670 - DNA, 101 bp, Homo sapiens
ccaccaacaacaccacaataatccacagccaagggctgaactgtatcgggcctcagggaagtttgagctgcttgatcgtattctgccaaaattgagagcga

SEQ ID NO: 395671 - DNA, 100 bp, Homo sapiens
ctgagatgagaagatcacttgaggccaggagttcgagaccagactggcaacatagtgagaccctgtctctacaaaataggcggggtttcaccatgttgcc

SEQ ID NO: 395672 - DNA, 83 bp, Homo sapiens
cagaaagatggatttttgcatgagacgcttctggacagccacaggacgaagtcttcaggctggccgcctccctcgggaacctg

SEQ ID NO: 395673 - DNA, 83 bp, Homo sapiens
agctagagcagactcagaatgagctcaccagggagctgaaactcaattgctctaggtcgtaaccagcctttgaaaaaggagaa

SEQ ID NO: 395674 - DNA, 76 bp, Homo sapiens
ttctttttagagatcgttttgatggatatatcttccttgacagcaaaggaggatttgacagctaaggatattgaag

SEQ ID NO: 395675 - DNA, 97 bp, Homo sapiens
gccagggaagcccaagcacctgggcgtccccaacgggcgcatgaccagccggttcctgctggaagctcctggtctgatctggggataccatgtccaa

SEQ ID NO: 395676 - DNA, 88 bp, Homo sapiens
ggcgtcctgaccagcggcggcgacgcgcaagttaattggccttggtcctcacagctccaaaaagaaacaggatctcgataagctctat

SEQ ID NO: 395677 - DNA, 100 bp, Homo sapiens
gaagggaggctccaagacctcatcaacaattaagatcattcccagtgaccccttctgggtgccaactactgaggaggaatacttgcactttggggagaag

SEQ ID NO: 395678 - DNA, 99 bp, Homo sapiens
tggggagcctcagcggtctgcgcctggcagcaggaagatgttaccgagtacttcagtgaattccttagtgcaggggaacggagtcttgaattccaggga

SEQ ID NO: 395679 - DNA, 100 bp, Homo sapiens
agaatttccccagccctgtggatgctgcattccgtcaaggtcacaacagtgtctttctgatcaagagagtccggagggctgtgctaccccaagaagagga

SEQ ID NO: 395680 - DNA, 96 bp, Homo sapiens
tatccctcttggtctgtggaggtagttgctgagtggcactgggtaaaagacactttcttcatgagcaacaaaccccaaagatacaaagacaagcta

SEQ ID NO: 395681 - DNA, 100 bp, Homo sapiens
cgatccactcccggctgttcccccggagaaaccaatagagccatggcgactccctctgctgccttcgaggcccttatgaatggtgtgacaagctgggatg

SEQ ID NO: 395682 - DNA, 75 bp, Homo sapiens
agctgcttcaaattggacttaagtctgaatttcggcagaatttaggcccactgctcagtggagcgtggaggacga

SEQ ID NO: 395683 - DNA, 83 bp, Homo sapiens
ctccgggtgaggttgccggggccgtgcgcgctgcaattctgtggtgttcttggtcacacatttatggagtttctgaagggcag

SEQ ID NO: 395684 - DNA, 98 bp, Homo sapiens
acgctatcaactgcagagattgttcctgctcattttccacaaggccgcggcaggggagctgcaggaggacagtgggctgatggcgctggcaaagcttt

SEQ ID NO: 395685 - DNA, 100 bp, Homo sapiens
cagaggaggatgtagtagcaacgaatgagaatgtggtaactttattcaggctgctgggcctttgcaacaacttctcttatgtggtgatgctgagtgccgc

SEQ ID NO: 395686 - DNA, 107 bp, Homo sapiens
gaaaaggcaaaaatcccatctaccgcaactctcagttcgagagtaaaggtactccaaagattcaggtttactcacgtcatccagcagagaatggaaagtcaaatttc

SEQ ID NO: 395687 - DNA, 100 bp, Homo sapiens
gctataaaagcacagttttaagagaggtggtattggaatgctatgtaagaaaggacttggtctacaccaaagccaatccaacgtttcatcactggaaggt

SEQ ID NO: 395688 - DNA, 100 bp, Homo sapiens
ctacttcctggaggagcgcatgcaacagaagtatgaggccagccgggaggacatctacaagcggatactaatggaccatactaccaaggaccagtccacc

SEQ ID NO: 395689 - DNA, 101 bp, Homo sapiens
cataaggggtctagatcaacaatcaaagacaatatcaatgacaaactgacggaaaaggagagagattttgatgtggacaatggcacatctgcgggacggag

SEQ ID NO: 395690 - DNA, 82 bp, Homo sapiens
tggaattttcaacacatgatgatgttttcaggaattacatgaatgacagtcttcgaaccaatgtgtttgttcgatttcaacc

SEQ ID NO: 395691 - DNA, 50 bp, Homo sapiens
cgcgggcctcgatttggggagcagaaaatataacctgttgggaaactgtt

SEQ ID NO: 395692 - DNA, 100 bp, Homo sapiens
cagactattagctgcttcttgaactggaccgtggggaaactaaaaacgcatctatctaacgtttaccctagcaaaccaagcacagcaatggaggaaacag

SEQ ID NO: 395693 - DNA, 95 bp, Homo sapiens
tagattacttcagattatagaacggtatccagaggagactttgagcctcatgacaaaagagatctcttccctgaagaacaggctgaaaaaggtct

SEQ ID NO: 395694 - DNA, 75 bp, Homo sapiens
tggccgagttgctgttgccgggtgatagttggagcggagactcttactgaaacaaatgcaggtatcaagtgcttg

SEQ ID NO: 395695 - DNA, 50 bp, Homo sapiens
cccaaccagcgtttttgagaaggttttgggatttgagattgacgcggtga

SEQ ID NO: 395696 - DNA, 100 bp, Homo sapiens
atcccacctctcagaggctgcttcctttggcaactactggagatgggaactgcctcctgcatgcagcctcccttggttgtgggagacaagtagccaacag

SEQ ID NO: 395697 - DNA, 100 bp, Homo sapiens
ctgcagcccccaccggccccgccaaagaagatcatgcctgaagtcagcttacccgctggccgcctcctgacaagcgggagggatccgccgtggacccagg

SEQ ID NO: 395698 - DNA, 82 bp, Homo sapiens
caggacatcaagcccatgcgggaccagatcatccgcgtgaagcggaagaagaccgaaaactgttagttggattcttagaaga

SEQ ID NO: 395699 - DNA, 83 bp, Homo sapiens
cttgtgcttcctgctggccgtgctgctgcaggttgttgaggcatcttcattaagctggagtaccaggataaaaggcttcattg

SEQ ID NO: 395700 - DNA, 71 bp, Homo sapiens
cagttcctcaaccgcttttctacagtttgtgaggaggtgttcatgaagtctgtgaagctggagtgggtgca

SEQ ID NO: 395701 - DNA, 50 bp, Homo sapiens
gaaaaggctttattgccaaactgttctcatgaacagcgagaagaagtgtg

SEQ ID NO: 395702 - DNA, 101 bp, Homo sapiens
cagcggtgttggaacttcgttgcttgcttgcctgtgcgcgcgtgcgcggacatggcctcaaacgcccgagcgggaagaagttccgcagcaagccgcagctg

SEQ ID NO: 395703 - DNA, 100 bp, Homo sapiens
agactactggccgaaggggcgtctgcggctctccgccgtccccagccctgcctctccctgggctctgaggaacgcgttgtggtgatcagcagctcggaag

SEQ ID NO: 395704 - DNA, 75 bp, Homo sapiens
ggggaggctgaagggacgctcgggtaggcaagactagacgcttgaagcaaagctgccatcccagaagacgacatg

SEQ ID NO: 395705 - DNA, 83 bp, Homo sapiens
cagcccgggtccccgcgttcacagccccagcgcagatcttcgtgaagactctgactggtaagaccatcaccctcgaggttgag

SEQ ID NO: 395706 - DNA, 96 bp, Homo sapiens
ggaggttcgaagctgagtatgtgacagtgatacctgcaatatatcagacagaagctgatccattagctcaggttcgtcaggtccagagggaagatg

SEQ ID NO: 395707 - DNA, 80 bp, Homo sapiens
ggcttgccgttcgttcgtttccagcctcaggaatttatggtcgcctttttgaatgaggaatagctattcagtcagacaga

SEQ ID NO: 395708 - DNA, 100 bp, Homo sapiens
ctcggtctctccctgaagcccaccggtccccaacgcatcatgccagggagccaagcgtcctgcccggccatgccatggacaatattaccaggcagaacca

SEQ ID NO: 395709 - DNA, 75 bp, Homo sapiens
atttgtggtaataacccttaccgggagtttcactgaagtaggataagttctgaacgtcgaaaagaaaagtctcga

SEQ ID NO: 395710 - DNA, 87 bp, Homo sapiens
gtggccggcagcgtcccggacgaggagacaggggcaagtgtccgagtggtgaatcagctacttacagagatggatggtctggaagca

SEQ ID NO: 395711 - DNA, 100 bp, Homo sapiens
aaactttttaccagcaggtgaagcagctgtcagaggctcctgtggatttggcctcgaagctgcaggtggccactaacacggacaccagccgaaatgccgg

SEQ ID NO: 395712 - DNA, 75 bp, Homo sapiens
cagcttcagaagaccgaagcgttcgtatctggaagtgcatcgtccagtcctacctgcaatggctccaagatagcg

SEQ ID NO: 395713 - DNA, 100 bp, Homo sapiens
caattgcttggatgacagtcaccgacagaaggtgagacggtttaagcggaagcatcttactgccattgactgccagcatttggctcggagtcacttggct

SEQ ID NO: 395714 - DNA, 90 bp, Homo sapiens
ccgagatggagggatccttctgagaagtgaagccatttggactttctgggcaacgcggtaaaaatattgcttcggtgggtgacgcggtac

SEQ ID NO: 395715 - DNA, 74 bp, Homo sapiens
aaggagccccactggctgtttgggaccatggagcgggcgacatggagtccaatgggaaatacatcaccaaatct

SEQ ID NO: 395716 - DNA, 75 bp, Homo sapiens
cagaacccagctattactggtccggatgaccaactcttggatgatggcaagacactgggcgagtgtggcttcacc

SEQ ID NO: 395717 - DNA, 87 bp, Homo sapiens
attgagccagagtctgttggggatgatctgaggcagcaggcaaaacaggtcctacttccaaaccaaatgggaaaattacctaaaact

SEQ ID NO: 395718 - DNA, 100 bp, Homo sapiens
gaaataaggacaaaagccaagaggaggacagttcgctacacagcaatgcatcgagccaatggtaatgatagtaaaaaatttaaaggagaagataaaatgg

SEQ ID NO: 395719 - DNA, 100 bp, Homo sapiens
atttgccacccctgaaccccacctcgtggtgggcagatctgagggctctggcaagaaagagctcactcctctacttgaaaaagaaagagatggattacgg

SEQ ID NO: 395720 - DNA, 50 bp, Homo sapiens
cgccaaccccttcgagcaagacgtggctccagtcagcccggtcaagcatg

SEQ ID NO: 395721 - DNA, 135 bp, Homo sapiens
ctccaacatgaagcttcttcatgttttcctgttatttctgtgcttccacttaaggttttgcaagtctgacagcaatgcaagcttcctccgtgctgccagagcaggcaacctggacaaagttgtggaatatctgaa

SEQ ID NO: 395722 - DNA, 75 bp, Homo sapiens
ggactggcagacccgtagctaagacgccaggatttcctggaagcagagaaatgcttagaccatgctcagcctcca

SEQ ID NO: 395723 - DNA, 82 bp, Homo sapiens
agctttcatcatccagcacttcgcagggaaggtgaaatatcagatcaaggatccagtttgtgtgttctctgtgcaaataccg

SEQ ID NO: 395724 - DNA, 99 bp, Homo sapiens
gagttctacagagtcaccactgaacaatatcagaaagctgctgaagaggtggaagcaaagttcaatcctggaagttgccgtactcagtacagaaggaca

SEQ ID NO: 395725 - DNA, 100 bp, Homo sapiens
gaaaacggacggaagaaaaggtctggccgaatggagatttacagacagtcatctgggtggaggacacccttttgggatcagcactgaaagtgacgccata

SEQ ID NO: 395726 - DNA, 75 bp, Homo sapiens
gttggaccttccggagcttctcagaagacagagggttttcttttgagctttagccagggccctctgaaggatgca

SEQ ID NO: 395727 - DNA, 75 bp, Homo sapiens
gacggggaataaagcggagcgaggacagcaaggcctctgtgtcctttgtcccaatagtaacaactccctcctggc

SEQ ID NO: 395728 - DNA, 96 bp, Homo sapiens
gcaaaactaaagcaggccacttcaaaggaggaagccagtgaaggtggaggaaatgatcgtgtgcggaacctgcaaagtgaggtggagggagttaag

SEQ ID NO: 395729 - DNA, 90 bp, Homo sapiens
cggccttagcaagatttcgccaggctcagctggaagagggaaaagtgaaggtgcggctctatgagtggacaacagagaaggagctgcgca

SEQ ID NO: 395730 - DNA, 51 bp, Homo sapiens
atgtgattggcagctcctatgaaaatgagagacgagttgtactgctgtcac

SEQ ID NO: 395731 - DNA, 80 bp, Homo sapiens
ccagggacacccccgtttcgaggtattttcaaccaccaggaacttggatacagtgtgctttagaatccagggaacttctt

SEQ ID NO: 395732 - DNA, 88 bp, Homo sapiens
tgcccttgtggcgaatggggctcacgtcgaagatggagtttcactgtgtcagccaggatggtctcgatctcctgacctcgtgatccgc

SEQ ID NO: 395733 - DNA, 90 bp, Homo sapiens
gctgatgtcagtgttatatcctccaggaatactggccaggggctttgaccacgacctttgaagagcttcattttgagatcaagccccacg

SEQ ID NO: 395734 - DNA, 104 bp, Homo sapiens
cgacgcgggaatgaagcgggcgctgggcaggtccggtgtctaaaagactatggagaatttgaagttgatgatggcacttcagtcctattaaaaaaaaatagcca

SEQ ID NO: 395735 - DNA, 101 bp, Homo sapiens
tgagggggttccgggaagatggtgctgatcaaggaattggcgtctctggccgagcctctttttgtggaaaacgacagcagcagcagtggcctggaagacgc

SEQ ID NO: 395736 - DNA, 51 bp, Homo sapiens
gagctgtaatcaattgtgctgacaacacagacagaccccgtgcggctgaca

SEQ ID NO: 395737 - DNA, 82 bp, Homo sapiens
gccgggaccctggcccctgtcgaggtggctatggaccgccccctgcaggaagaggagcccccccgccacccccaccgttcac

SEQ ID NO: 395738 - DNA, 80 bp, Homo sapiens
agcctcagcaggagcctgttctcatcaccatggcaacagggagcgggaacgccgagagaaggagagagaagagtgggaac

SEQ ID NO: 395739 - DNA, 100 bp, Homo sapiens
ccggtgctcttcatcaccttcgtggtcgtctggtcctactacgcgtacgtggtggagctctgcgtgtgggcaagattcttgccaagagaattaatgtgcg

SEQ ID NO: 395740 - DNA, 83 bp, Homo sapiens
tgagagtcggagccgaataccaagctcggatccctgaatttgatccagattgacgagatgcctgaggctgccgtgaaatcaac

SEQ ID NO: 395741 - DNA, 50 bp, Homo sapiens
caaccacaagacgactcaataggaggaagcaaaatgcattgatcactaca

SEQ ID NO: 395742 - DNA, 78 bp, Homo sapiens
tatggaactggccgggctgagctgtgctacagccatcgccaagaaacaccatctgattcagatcacaagaagaagaaa

SEQ ID NO: 395743 - DNA, 50 bp, Homo sapiens
agcctgcagagcgcgcagtacctccgatttcaacactacacttgcacaat

SEQ ID NO: 395744 - DNA, 74 bp, Homo sapiens
atggcggatttcgaagagttgaggcctctgaagagccaatccattcaggatgggaaaccacgcaggcaaacgag

SEQ ID NO: 395745 - DNA, 80 bp, Homo sapiens
ggcacccgatatatgttctctaggccttttagaaaacatggtgtgatgaatgcagactctgctaccattttggctgtttg

SEQ ID NO: 395746 - DNA, 98 bp, Homo sapiens
ttagttgtaataaaataaaagataatgacaaagaagatggctgcttctatttcaggctacccacctttctgttctgagacccctcaagagacatataa

SEQ ID NO: 395747 - DNA, 75 bp, Homo sapiens
cgggacaccccggaagctgggaaatggccacaattccgagccctgggctgctgagctcaggtcagaggactatga

SEQ ID NO: 395748 - DNA, 51 bp, Homo sapiens
gtggagcgctgcggggtcctcagtaagaatgaaactttgctacctgttgcc

SEQ ID NO: 395749 - DNA, 75 bp, Homo sapiens
cgtcttgatccttttgcagatggatttggtgctatggagaaatttttggtagaatataagagtgcagtggagaag

SEQ ID NO: 395750 - DNA, 100 bp, Homo sapiens
agctggtggagccaaggaaacaggatgctgatagtctccagcgggcctggactgtgggctggtgtgtggaactggttggctttagtccacttcgaattct

SEQ ID NO: 395751 - DNA, 90 bp, Homo sapiens
gttctccctgcagcagtcagcccaaaggaagacttgggaagatccccatgaaaaagataagagcacgaactgctttggagataatgatcc

SEQ ID NO: 395752 - DNA, 74 bp, Homo sapiens
aggagaatctagatacctttggacccatgggaatattggtataatagcatatatgttgttaactcacacatcac

SEQ ID NO: 395753 - DNA, 83 bp, Homo sapiens
atctgaaaaggaaaaggagagtattgccagagcaagagctggatctcgtctttctatcttgaaaaagccactaccgcctgagc

SEQ ID NO: 395754 - DNA, 98 bp, Homo sapiens
caaaagccaagaggaggacagttcgctacacagcaatgcatcgaggtaacagtacttcaatttctaccttaaggacttcctgtctactgggttgtgca

SEQ ID NO: 395755 - DNA, 100 bp, Homo sapiens
ccatacagacatcgacagccagggtatcttcttcacagacctcaatggctttcaggctgtctgcggacctggtttcagcgctggtgggactgcagccgga

SEQ ID NO: 395756 - DNA, 75 bp, Homo sapiens
cacaggacacgaagtttgtcggcccttgccttggcagagctgagatcatcaatgctgtggtactgttgattttat

SEQ ID NO: 395757 - DNA, 75 bp, Homo sapiens
gcgctcttcaagcggatcttggaaacttggctgtaacttcaaaagaagatttgattctttatttctggactgcat

SEQ ID NO: 395758 - DNA, 75 bp, Homo sapiens
cgcagtgccacttcgacatcgagatcaaccgggagccggaaaccactcagattgaggatcctcgagtacaatggc

SEQ ID NO: 395759 - DNA, 75 bp, Homo sapiens
ggatttcttaaaggatagccaattgcagtttgaggctctgcagaagaaagatcagcaactggagcctaaaaaaag

SEQ ID NO: 395760 - DNA, 99 bp, Homo sapiens
cgatctggtggagctactggcgtggtagttaaaggcccagatgataggaatcccatctcatttagagagaaacaggcggccaccaagtcgctgaagcag

SEQ ID NO: 395761 - DNA, 101 bp, Homo sapiens
gtggagaaagattgaaaagtagttaatggcagtggtggtatgaagcggagtttaagagagctgtgaaagtagcaacaggacaagaactctcaaacaatatt

SEQ ID NO: 395762 - DNA, 82 bp, Homo sapiens
gtgaggcgacaagcaacaacaatcatagctggtggcacatttagaacgaacagggcattacttaactgtgaaagataaccag

SEQ ID NO: 395763 - DNA, 90 bp, Homo sapiens
ccccatcaccctgttcatggacctgcaggcggtgctgccgcgcgagctctacccagtcgagatggtcaaactactcttgtctagaggtgc

SEQ ID NO: 395764 - DNA, 83 bp, Homo sapiens
tgcgggcaccgcagtcgccgtgaagatggcgtctaccagccgggccggatcgtggcacccagaggctgccaggactttggctg

SEQ ID NO: 395765 - DNA, 75 bp, Homo sapiens
ctgggcacaccccacccacctgtggccaggtagttttggatgttgggtgtggaactggaattctctctatgtttg

SEQ ID NO: 395766 - DNA, 100 bp, Homo sapiens
tgggtcgtgacactgggcctgagctttgtctacatgattcgagtttacctgctgcagggcctactgcagtgcatgaaggtggtatggactcagaactctg

SEQ ID NO: 395767 - DNA, 74 bp, Homo sapiens
ccgaaagttgtgctaaaaagcaccaccaagatgtctctaaatgagcgtgtgaaatggcctttccccgggtcaag

SEQ ID NO: 395768 - DNA, 90 bp, Homo sapiens
atttgtcttgatgggctacagttagagtctgaagttgttaccaatggtgaaactacatgttcagaaaacttaattcagtgcacaaatgag

SEQ ID NO: 395769 - DNA, 100 bp, Homo sapiens
cacaattgtctgtgacagtaacagtacttgggatcccccagttccaaagtgtcttaaaggagggaaaacccctgatcctaaaatgaatgctaggacttac

SEQ ID NO: 395770 - DNA, 100 bp, Homo sapiens
gattaccctgtgtataagagtatgtgtctcactgcaccttcaatggcattgagtagaacaagttgaaatcatcgcagaaggataaagttcgtcagtttat

SEQ ID NO: 395771 - DNA, 100 bp, Homo sapiens
ggtacgagagctgctggtggtgttgtcgtggccggagcggcccgcgcctgggctgccggcacttcgcggcagccctgggcgctgcctatggcacagccaa

SEQ ID NO: 395772 - DNA, 97 bp, Homo sapiens
gttacttcctgtctagagttgtagcttccacctggtggatgggttggagctgagatagggaacaccattgaacgatttgatcctgatgaaaataaat

SEQ ID NO: 395773 - DNA, 96 bp, Homo sapiens
gctgagcagtcctcggggagagcgcgccaagaccgctgcagccgctggctgagatcagattttattaagacctctactggaaaagaaacagtaaat

SEQ ID NO: 395774 - DNA, 82 bp, Homo sapiens
gaggaatcagctttgaagtgggagcccagttggaagcccgggaccgtttaaaaaactgatgccgcatcctcgaaggtaccac

SEQ ID NO: 395775 - DNA, 74 bp, Homo sapiens
tctgtctcgactgcactttgagaagctgcagatctgggacacggccggccaggagcggttccgcaccatcaccc

SEQ ID NO: 395776 - DNA, 75 bp, Homo sapiens
ttactgctgaagctttacttcgagctcatgctcaaggatctaaatttacttgatcgctgtataaaagaaacatta

SEQ ID NO: 395777 - DNA, 98 bp, Homo sapiens
agagagcgagctgagtggttgtgtggtcgcgtctcggaaaccggtagcgcttgcagcatgatcttcagtgtctattggatttttccaagagaaagttt

SEQ ID NO: 395778 - DNA, 105 bp, Homo sapiens
gctctggctctggctgtgcgcgctggcgctgagcctgcagccggccctgccgcccgtggaccgggagcccgtggaccgggagccggtggtgtgccaccccgacct

SEQ ID NO: 395779 - DNA, 83 bp, Homo sapiens
cacatcagccggcagcccgggcgggtcccggggtgcgagcagcgcacttccggtggaatgaatcttacttgttgaatatcttc

SEQ ID NO: 395780 - DNA, 100 bp, Homo sapiens
ccactgctcccgggccgtgcttccccaagtagtccgatggcagcggctgtgccgaggcgcccaactcagacctattcaacgaattgcttgaaaactgaac

SEQ ID NO: 395781 - DNA, 81 bp, Homo sapiens
ggatgcttcagctcatcttaggctgtgctgtgaactgtgaacagaagcaaggtaaattggcaggatgaggagcagcaaatc

SEQ ID NO: 395782 - DNA, 75 bp, Homo sapiens
gagcccctggagaaggaagcttgtgagaagtggaagaggcccttcagagcatttgaagatgagaagaaggctcgg

SEQ ID NO: 395783 - DNA, 50 bp, Homo sapiens
cctttttgaagcctttgcaaaagtaaatgagctggatggtatcccgttga

SEQ ID NO: 395784 - DNA, 75 bp, Homo sapiens
gcagcctgcaagattgtggtgcacacgccctgcatcgagcagctggagaagctttgtgtccctggtgatgttgga

SEQ ID NO: 395785 - DNA, 100 bp, Homo sapiens
aacctttgagggagaaggacatcatcatcaagagggagatggtgtcccaatacttgtacacctccaaggctatacagcatcatgcaggcctgctgggcct

SEQ ID NO: 395786 - DNA, 102 bp, Homo sapiens
attccttctcacttggcctatggaaaacggggatttccaccatctgtcccaggaactgtggctgcaccatctgtcttcatcttcccgccatctgatgagcag

SEQ ID NO: 395787 - DNA, 83 bp, Homo sapiens
tgcttggaaaaacgtgtgggtacgaccttggcggctatgagaggttttcctccgagtacccagaattctgttctaaaaccaag

SEQ ID NO: 395788 - DNA, 100 bp, Homo sapiens
agcccctgcagcccgagccgccccccgagcccgccttctccgaggcgcagaagtggattgagaaaatatttacaccagcagctccagttcataccaataa

SEQ ID NO: 395789 - DNA, 102 bp, Homo sapiens
cagtgttgatggtggtggtgctggtcatcaatgttactcaggtagagttgagccccatatgggggttggcaggcagcagagaggcccctttcaaggtgttcg

SEQ ID NO: 395790 - DNA, 98 bp, Homo sapiens
ctgaagcctggaaacgaggcactcagttggaagagtccagcaagttttaaccatgctgaccaacgaaactggctttgaaatcagttcttctgatgcta

SEQ ID NO: 395791 - DNA, 100 bp, Homo sapiens
tggaggggtggtgaccatcgaaaggagcaagagcaagatcaccgtgacatccgaggtgcctttctccaaaaggcagagaagaggcgatggcggcgatggc

SEQ ID NO: 395792 - DNA, 74 bp, Homo sapiens
cagaactgagcccaggccacagtaccctattcacgctctgtgcttgtgccaagccttccttgaatccagaagct

SEQ ID NO: 395793 - DNA, 141 bp, Homo sapiens
tgtatgaagacagcttgctggatcattgtattactcatcacagatcggaacggaggcctgtggaaactcaaggtcccatgagcccccttggtgatgagctctaccactgtctggaaggaaatcacaagaaacagccttttg

SEQ ID NO: 395794 - DNA, 100 bp, Homo sapiens
agcaagtcttgagggatgcacctatggattccattgaatgggctgaagtggtgatcaatgtgaacaatattctcaaggtggttgtgtcaaaccgattggt

SEQ ID NO: 395795 - DNA, 82 bp, Homo sapiens
cagaccctggagcctcagttggaagcagccgatccagcctgcggagcctgtggggcaggtccacctgggcttgcgaaggcac

SEQ ID NO: 395796 - DNA, 82 bp, Homo sapiens
agtaggagaatgactccgattcgtgaccctcagcgccggtgcatgtcgatggccggtgcataaacttctcccgagttccatc

SEQ ID NO: 395797 - DNA, 100 bp, Homo sapiens
aagaaaaaaaagagcaagaaacagaaatatgaaaaaaacaatgagtcatctgatagctcatcatcctgcagtatgctgtttgactttggcactgaccacc

SEQ ID NO: 395798 - DNA, 75 bp, Homo sapiens
gtggcagcgcctgaaaggaatgattaaagcaaggagagccaatcatgactggcaaaacacagaccagcaacgtca

SEQ ID NO: 395799 - DNA, 100 bp, Homo sapiens
aaattaactacccttgcagatctattccggccacccattgatttgatgcataaaggcagctttgaaacatgttccttgcctgtatctccccttggttcaa

SEQ ID NO: 395800 - DNA, 75 bp, Homo sapiens
aactggtcgaatgaggcacctaaaaattgtataccgcagattcagatacaaactggactctcaggacaaaacgac

SEQ ID NO: 395801 - DNA, 75 bp, Homo sapiens
ccgggcctccaaggaacttaagcaaagaagacgatcaccttctccttattatagtcgatatagatcacgatcaag

SEQ ID NO: 395802 - DNA, 101 bp, Homo sapiens
tattttggacatctggtttgatagcggaacttcatggtcttatgttcttccaggtaaatcaacagactgggaagatgatggttggggagcatgggaagaaa

SEQ ID NO: 395803 - DNA, 100 bp, Homo sapiens
attactttaaagatactggaggagatggtcaagaatcgctctataagatctgcaagggtgcctgtgcagcagtattcactgtgataggaagtgagaagca

SEQ ID NO: 395804 - DNA, 90 bp, Homo sapiens
gacctctcagatcccaaacaactggcagaatttgctagagctgaagaagcaggtggagagtgccgagctgaagaaccagcggctcaagga

SEQ ID NO: 395805 - DNA, 82 bp, Homo sapiens
tgggcgtcgccggccgcgctgggcagtaagccgaaaggatgaagagttagaccccatggaccctagctcatactcagacgcc

SEQ ID NO: 395806 - DNA, 100 bp, Homo sapiens
ctgcactatttccggaaccggcgcccgggagcttccattcaggagacctgcatctaactttgaggtggaggctgatgacttggtgaccatctcagaactg

SEQ ID NO: 395807 - DNA, 100 bp, Homo sapiens
ccccaaccagaaccagactagaaactgctggcagaactacctgggtcctggtgcttgatggtcgaggccatctcctgggccgcctggcggccatcgtggc

SEQ ID NO: 395808 - DNA, 83 bp, Homo sapiens
cgacaagccgctggcagccgcggatctcaccgccgctcaggtgagagggtccaagcctggtaagaatgtccagcttcaggaga

SEQ ID NO: 395809 - DNA, 51 bp, Homo sapiens
acagaaacaaaatgtcaacaaattgatggatggagtcttgctctgtcgccc

SEQ ID NO: 395810 - DNA, 90 bp, Homo sapiens
caagttcctcatctgggacactgctggtcaggaacggtgaattttgaagattgcaccggtcgacaaaggacagcctatttttccctcgac

SEQ ID NO: 395811 - DNA, 100 bp, Homo sapiens
agaagaggacgccgggcgcgcagccggaaaactcaaatatatgtgaggtgtgcaacaaatggggacggctgttctgctgcgacacttgtccaagatcctt

SEQ ID NO: 395812 - DNA, 87 bp, Homo sapiens
atccccaggccccctccacccagtcggctagccctcgcctctgccatccggcaatcctttatcacaggatattctcaacttatacca

SEQ ID NO: 395813 - DNA, 100 bp, Homo sapiens
ggcgagtgaagcagtgtcacgcattttagaagaatggtttgacggtgagaacatgtatatgagcatgacagagccgagccaggactatgtgccagccagc

SEQ ID NO: 395814 - DNA, 75 bp, Homo sapiens
acagatactttgaagtagaagaagctgatggagtgaaaaggctctcagtgtctgagttaaatgaaatcctggaag

SEQ ID NO: 395815 - DNA, 96 bp, Homo sapiens
ccctgctgtgcacctgggggtacagacttcatcacctgattcttccaatgagaattccgtagcaactcctcctccagaggaacaagggcaaggtga

SEQ ID NO: 395816 - DNA, 83 bp, Homo sapiens
cgccaccctgtggacatcagcgccatccccgagcagcggtggaagctggtttggtgcacctcgatttggaggaagtagggcag

SEQ ID NO: 395817 - DNA, 100 bp, Homo sapiens
cagaccggctggaggctcgcaagaaagccaagaacaagcagctgggccatgaggaagagacgagttgtactgctgtcacaggaaatggacgctggattac

SEQ ID NO: 395818 - DNA, 90 bp, Homo sapiens
ttgccacttcttcacggaccagtttcagttcgccgatgggaaacccggagaccaaatccttggggccagctggagatcagcagcctggtg

SEQ ID NO: 395819 - DNA, 100 bp, Homo sapiens
ggggagatgaacccaacctagtgggtgtaatacatcatgaactgcaggtatctggagtccatctttcaccatcttctcctgagattgtactggaccgtga

SEQ ID NO: 395820 - DNA, 82 bp, Homo sapiens
aatgaccctgaactggaccagcagcttgatggaccagacaaataggatgatggctgcccccacacaataaatggtaacatag

SEQ ID NO: 395821 - DNA, 89 bp, Homo sapiens
cctaaacagtggactcaacttcaaagacgttctcaaggagaaggcagacctgggtaagaatgattgatgttggctgatattggagtgct

SEQ ID NO: 395822 - DNA, 75 bp, Homo sapiens
ctggacctggactcacggctgcttggagcgtccgccatgaggagaaggtgacacaactggcaagctattttgagc

SEQ ID NO: 395823 - DNA, 96 bp, Homo sapiens
aagctgggacacccgggagtcaggaaatggaagctggagacaacagccagttctgctggaggaacctcttttcctgcatcaacctcctgaggctgc

SEQ ID NO: 395824 - DNA, 100 bp, Homo sapiens
aaaacagatgcagctagcaaaccgtttgcggaggtacggatactcagttgtggagagctgattcccaaatctaaagttggcaaacatgaattgactgggc

SEQ ID NO: 395825 - DNA, 75 bp, Homo sapiens
ctcctatcgtgcagtataatgactggctggaagaggaggtgatcggtgtctttggtgagtctgttaaaggctatg

SEQ ID NO: 395826 - DNA, 100 bp, Homo sapiens
agaggccgaactcgggttctgacaagatggccgggctgccccgcaggatcatcaagaattaaacaaccaccatgtcgagcaaaaaggcaaagaccaagac

SEQ ID NO: 395827 - DNA, 76 bp, Homo sapiens
tggaactgtacatccattggaacccttaagagacgctctcctggtctgtgttctgactctttggaaaagagcttaa

SEQ ID NO: 395828 - DNA, 100 bp, Homo sapiens
tctgctgtctgcccgaaggccaggactgatctgttaaccttgcaccactggctgggaggccgctgcagctcatggaatgctgtctctgcaatttgagagg

SEQ ID NO: 395829 - DNA, 100 bp, Homo sapiens
ctccaaagaagatgactatgaaagtgacgcagctacaattgtccagaaatgtaagctggattatatcacatacctgtccatctttgaccaattatttgac

SEQ ID NO: 395830 - DNA, 75 bp, Homo sapiens
ggcatttgctctgagcatcagtcacgggacacatgacggaagtgtgtatttttgggccactccacggcaggtccc

SEQ ID NO: 395831 - DNA, 98 bp, Homo sapiens
ggcagcacgagcagctctcccggcagcacgaggcgcagctccacgagcacatcaagtctttcttctgagaacacccgatgtgtgtggatcggaagctc

SEQ ID NO: 395832 - DNA, 98 bp, Homo sapiens
tcatccagccttagcaaaccagagcctcttgttgctgtaccacatagaattcactcaacaagtagaaacgtgagagaagaaaaaacacgctcagagat

SEQ ID NO: 395833 - DNA, 83 bp, Homo sapiens
ttcagttatcaagctttagagcctggctactcacagttgaagcctgattgcaggttttaaaatcaaagatgggaaaatcggag

SEQ ID NO: 395834 - DNA, 82 bp, Homo sapiens
gatcctcttcaccaaggctgaggacaaatcgagacatgtaagcagcatcatggaggtaagtttttgaccttgagaaaatgtt

SEQ ID NO: 395835 - DNA, 75 bp, Homo sapiens
tcttccaaaaccacaaacttgcctacgtcagtaacagccaccaagcctttgtagacctgcctgatttaatgcagc

SEQ ID NO: 395836 - DNA, 50 bp, Homo sapiens
ggaatctggaattttattaaacatgtgctgaagctgctgaaagatggcag

SEQ ID NO: 395837 - DNA, 101 bp, Homo sapiens
ttgaaaatcaacgacaacttgagcacagggagaagatgtcaaccggacactagaaggtggaaggaaacctcttcattatgcagcagattgtgggcagcttg

SEQ ID NO: 395838 - DNA, 100 bp, Homo sapiens
caggaccttgcccagcctttctggacaactggaagacagttacgcttcgtcctccacctctccctccaacgaacgagtctttgggaacgtggtccaccca

SEQ ID NO: 395839 - DNA, 100 bp, Homo sapiens
tctgccacggtctgcccacccaacgcgaagacggtaacccgtgtgactttgactggctgaggaggatgaggacaaggaagatgatttccgagctcccctt

SEQ ID NO: 395840 - DNA, 74 bp, Homo sapiens
tttgaccttctgccatgattgtgaggcctccccagccacgtgaaactgtattggcatactccacacatctgtac

SEQ ID NO: 395841 - DNA, 83 bp, Homo sapiens
gtgtttaacagccacagaccctcactgcggttggtgccattcgctacaaaggtggacccccaaaagtacaagggcatatttaa

SEQ ID NO: 395842 - DNA, 74 bp, Homo sapiens
tgatcttcgatgagctctcggattccttatgcagagtggccgacttgatggactcaccctgtcacccaggttgg

SEQ ID NO: 395843 - DNA, 100 bp, Homo sapiens
ccgccctcagccccggcgcagacatggacccctcgcgagccatccagaacgagatcagctccctcaaaggcaagtatatcgcgtcaacacagcgacctga

SEQ ID NO: 395844 - DNA, 114 bp, Homo sapiens
cgagagtggcagaggagctggcggagagcggcctgcgggcgatcgggccgagggatggagtctgctggcatccatgaaaccacctacaacagcatcatgaagtgtgatattgac

SEQ ID NO: 395845 - DNA, 84 bp, Homo sapiens
ggggaaacgcagctgcggtcgctcgggaaccacgcctggcagctgatgaagagactagcagctcgctgctttgctggcttgtta

SEQ ID NO: 395846 - DNA, 95 bp, Homo sapiens
gtgtggccttagctatttacatcccattccctgaagatgattctaattcaacaaatcataacttggttaatccagcacgtatggggccaagtgta

SEQ ID NO: 395847 - DNA, 98 bp, Homo sapiens
tgaaggaggcgaattttcagttgataggaaagctgaactagaagcagctgtgagaaagaagattgaatttgagagaaaagctctacatattgttgaac

SEQ ID NO: 395848 - DNA, 100 bp, Homo sapiens
gctgaccaggaagacctactattgctgctaaaattgattcaattcctcacttgaataattccacacctctagtggacccctcagtatatggatacggagt

SEQ ID NO: 395849 - DNA, 100 bp, Homo sapiens
gtgaataaagaagtggagcgtgtcctgaaggagttccaccaggccgggaagcccatcggctattactataacaagcgcattctgcacaagaccaagggga

SEQ ID NO: 395850 - DNA, 82 bp, Homo sapiens
ctgacttcccgtccgtgccgagcccactcgagccgcagccatgtctggggacgagggcgccctgcgtccggcagaggaggcg

SEQ ID NO: 395851 - DNA, 100 bp, Homo sapiens
cacacatcccagccggtgactgcagtgagatacagtaccaatgaaggggagacctggaaaacattcatcttctctgagaagccagtgtttgtgtatggcc

SEQ ID NO: 395852 - DNA, 82 bp, Homo sapiens
gacctatggcgtggtggcccagtactaccggcccctgcatcacttgcacctcctgcgccgccgccccccatccaaggatatg

SEQ ID NO: 395853 - DNA, 82 bp, Homo sapiens
tcggatccgactacagtggtctcgaatatggcatgtgattggagatcacttcaataaggaaaatcctgccttgcttcgttgg

SEQ ID NO: 395854 - DNA, 96 bp, Homo sapiens
caacatcgtgctgtgaaacttcatgacaacctcattatttctgatctagagagatccatgttctcacaagctatgaagaaatgggtgcaaggaaat

SEQ ID NO: 395855 - DNA, 100 bp, Homo sapiens
agaaaggtgcgaaaaaaggtgaaaggtattcttgtggatattgggcttgacagctgcaaggagttactgaaggtaagaatcaggccttattggagacatt

SEQ ID NO: 395856 - DNA, 88 bp, Homo sapiens
tgtactggcctgctgctggcccgcagggtttccttgggtcttctcaggaccgtagtgcctaccagacgattgactcagcagaggcgcc

SEQ ID NO: 395857 - DNA, 83 bp, Homo sapiens
cgtggacctcgtgaagctgctgctgtccaagggctctgacatcaacatccgagacaacgaaaaccaattctgtgtcctcggag

SEQ ID NO: 395858 - DNA, 90 bp, Homo sapiens
ttcggaccctggcctcttgggatgcaaagccaaacaatcatgatagcatgtgtcagcccttcagacagagactttatggaaacgttaaac

SEQ ID NO: 395859 - DNA, 98 bp, Homo sapiens
caagttcattggatcaaacatgtcacaagagtcggacaaaataccctctaccatctgctttggtcagggtgccgctcgaggatttaaaagcaacaaga

SEQ ID NO: 395860 - DNA, 83 bp, Homo sapiens
cgaccgaccataagtttcctgaggccaccccagacctgcagaattgccacggaaaggtatgatatatttgatccaagacagtc

SEQ ID NO: 395861 - DNA, 51 bp, Homo sapiens
ctcactttccagctgaggacacgggaactctattcccagctgaaagccaag

SEQ ID NO: 395862 - DNA, 76 bp, Homo sapiens
ctggattggtggatctgaagtacaaaatattttccagtcagaaattggctttggaaaaatggaaacctacatcaaa

SEQ ID NO: 395863 - DNA, 98 bp, Homo sapiens
ctggggcagcgcgagcgaggaggagccgagccgcgggcacaggactcacaccacccggcaagaactgctcactacggctccctgccccagaagtcaca

SEQ ID NO: 395864 - DNA, 74 bp, Homo sapiens
gccaaagcctgcccagacggctcacctgtgcgggatggaacaaaaggtgtgggcccatcgctggatggatctgt

SEQ ID NO: 395865 - DNA, 87 bp, Homo sapiens
aaaacgtgtcaactctgcttaattaagcactttgatgatttaagaaatcttggacatctctgggcttcaggaccatgagtttcagat

SEQ ID NO: 395866 - DNA, 100 bp, Homo sapiens
cgggacctgctgaatcggaacctgcaatttaccaagacctgtacacacattacatgtggcagatatgctgttggagctctgtgtcaccgagttggaggat

SEQ ID NO: 395867 - DNA, 100 bp, Homo sapiens
ctcgcggcctggcccttggcctcctcctgctgctactgtgtccagcgcaggtgtaatggataggtaacagagaagacctcgtcccttcctagtcagggca

SEQ ID NO: 395868 - DNA, 99 bp, Homo sapiens
tctacagatgtgggggttgctgcaatagtgaggggctgcagtgcatgaacaccagcacgagctacctcagcaagacggattcatttcggaatgaaaggc

SEQ ID NO: 395869 - DNA, 89 bp, Homo sapiens
cctgcagtggcgcctaaagtctgagagagggaagtcgcctctgtgctcggctccaaggtcctggccaagaaagagctggcctatgtccc

SEQ ID NO: 395870 - DNA, 98 bp, Homo sapiens
ttcaaggtcaagatggtggacgagcttaagagagtgaattgccagtttcctatctggaaccgaagctccaagacactatcaaggccaagtatggagaa

SEQ ID NO: 395871 - DNA, 74 bp, Homo sapiens
gcaccgcaggttttggactcgctgaagcgttctcttgcaactagcaagtgaagccttgccaaatgacatgacct

SEQ ID NO: 395872 - DNA, 90 bp, Homo sapiens
gaccagccagttagacaatggcatgagggcagctgcaatgactctccgcacggtattattgtcattgcaagcactattggcagctgcaga

SEQ ID NO: 395873 - DNA, 90 bp, Homo sapiens
cgagagcctaactttgcaaccattggtctgcaggacatcactttagatgatgcccctacctcacaggattggtatgaagaattaaatgaa

SEQ ID NO: 395874 - DNA, 80 bp, Homo sapiens
caccatgccgctcctaagcctgcacagccgcggcggcagcagcagtgagagcattggggctttccagctctcacagaacc

SEQ ID NO: 395875 - DNA, 100 bp, Homo sapiens
ttgatcagctgcggaaggaccatgtgcgccggtttctgctcaccttccagagagaggatcttgagaagaagacagtcatgttcacggccaccatgccccc

SEQ ID NO: 395876 - DNA, 51 bp, Homo sapiens
ttcgcagtggtcgcttcttctccttggagtcaaattgactttatcagcttt

SEQ ID NO: 395877 - DNA, 100 bp, Homo sapiens
gactcgctactacagagcacccgaggtcatccttggcatgggctacaaggaaaacgagattttgcacaaaaactggccagtgctctagcacataatccca

SEQ ID NO: 395878 - DNA, 90 bp, Homo sapiens
gtggttgcattgtggatgcaaatctgagcgttctcaacttggttattgtaaaaaaaggaggagaaggagaagcggcgcctcgaccagctg

SEQ ID NO: 395879 - DNA, 100 bp, Homo sapiens
agaagacgatctgcacttcgcattttggcattgacatttaattttagggtcctttatatagaagggagagtattgacctgatggacatggcttcggacat

SEQ ID NO: 395880 - DNA, 83 bp, Homo sapiens
agagaggagcggggagcaatgcaggtttggtgcacctcgatttggaggaagtagggcagggcccttatctggaaagaagtttg

SEQ ID NO: 395881 - DNA, 87 bp, Homo sapiens
cctcccaaagtgctaagattacagatgtacaggtggatcatctgaatctcctgaaacagtttgaacacctggaccctcagaaccagc

SEQ ID NO: 395882 - DNA, 82 bp, Homo sapiens
tcatcgtcatgaccacccgagaggtggagaaaggccgggtcaaagtggagatggcagaacccatcttaatgacaagtatggc

SEQ ID NO: 395883 - DNA, 100 bp, Homo sapiens
tccggcagctggagatgtccgagcccaaggcaattgatcccaagttgtcgacgaccgacagggtggtgaaagggaccagttactctccacaagaaaattc

SEQ ID NO: 395884 - DNA, 100 bp, Homo sapiens
gccctgctgctgccccagctagagcaaggcctctttgatgacctttggagaatcagttttttgctccactcaagcctgttagaatcaccatggaatacag

SEQ ID NO: 395885 - DNA, 95 bp, Homo sapiens
ggccagtcatttcttgctgctgtgctccttctccatgaaagatcgtcctacttggagtaccaaaaagtaatgagagaaatagaacatttgagtcg

SEQ ID NO: 395886 - DNA, 90 bp, Homo sapiens
gagttgcagatcagcttgaagaactatgatccccagaaggacaagcgcttctcgggcaccgtcagctcgactccgcgctctcctcgccgg

SEQ ID NO: 395887 - DNA, 98 bp, Homo sapiens
cagatgaccacgccatcgtccagtatgagtgggcactgctgcagggggacccgtcagtggacatgaagcggagcgtgctttggacaccatgaattttg

SEQ ID NO: 395888 - DNA, 49 bp, Homo sapiens
gtggttctgctgaacaaaggcattctttgataggataaagctcttctgg

SEQ ID NO: 395889 - DNA, 90 bp, Homo sapiens
aatgggccatgagctcttcaaattggcccagatctttttcaacggcagcagccgctcttctaaaacattcaaaccaaagaagaatatccc

SEQ ID NO: 395890 - DNA, 74 bp, Homo sapiens
ctcttgcttttcctcgctggggtgtacgacttgtgcaccatggacaattttgctgagggagatttcactgtggc

SEQ ID NO: 395891 - DNA, 90 bp, Homo sapiens
cctcctggggaacccgttcagcacaccagtggggcagtgcctcgggtgtctgatgccatcaagtgttgcaggagaaacttcagtcttggc

SEQ ID NO: 395892 - DNA, 75 bp, Homo sapiens
ctttcagtagctgttatatcgaaaatgtggacacagacttgccaggcagcctggggcagagtgaagagaagcccg

SEQ ID NO: 395893 - DNA, 82 bp, Homo sapiens
ggtacctccaggacctggagtgtactggaagaaatggtgcagtccaggacactcatgaggaccatgatacttccactgagaa

SEQ ID NO: 395894 - DNA, 96 bp, Homo sapiens
tcctgatacccggatgtgaggcgatccgctggcgctagtctgaccctccgccaggcaaaaggaagggcggattcctgggcaagatgaagtgggtgt

SEQ ID NO: 395895 - DNA, 100 bp, Homo sapiens
gaaaaatatcgagcgaacgctttacttccttccccgtgaaatggttgaggagatgagggagaagcagcaagccgcccgggagcaagaaagacaaaaacgc

SEQ ID NO: 395896 - DNA, 51 bp, Homo sapiens
tcctagagaagaacaatcctcatgtactgaagtttcttcatgacaagggat

SEQ ID NO: 395897 - DNA, 100 bp, Homo sapiens
ggagcagctgccacaatgggacatgtgcaatacataccgagcatcaaatattaaggcacccggagaacagacagtaccagccttgaaccttcagaatgct

SEQ ID NO: 395898 - DNA, 100 bp, Homo sapiens
tatgtccaaaaacatgcaaaaacttcctttgcttgtgctcaggtctgatgttgtggtcctctgtttttcgattgctaatcccaattccctaaatcatgtg

SEQ ID NO: 395899 - DNA, 100 bp, Homo sapiens
ctggtgctggaggaatggatcgtggagcagctgggtcagctctacggctgcgagcctgattacatcaaccccagagccgtgcagctgggctcccttctcg

SEQ ID NO: 395900 - DNA, 100 bp, Homo sapiens
gcggccgccctgagggaccccgctcagacattgccaatctagctgatgaattcaaggatcacttggtgcctgaccctggctgccattatgaccaactaat

SEQ ID NO: 395901 - DNA, 75 bp, Homo sapiens
ttggcatcactgcagctagtaatttgccttctggattctaaaagatggcggcaaggcagcccaggcaaatgtaag

SEQ ID NO: 395902 - DNA, 90 bp, Homo sapiens
agaggatccagtgttcaccatcctggccccggaagatgaggagcgggaaggcctcctgcaccctggagaccgtgtgggaagacaagcaca

SEQ ID NO: 395903 - DNA, 88 bp, Homo sapiens
gacctggggaggccattggctctatggaaaacactgacagtaaggattgtatcctggagccgctttccctgccagaaagtccaggtgg

SEQ ID NO: 395904 - DNA, 82 bp, Homo sapiens
catcatctacactcaggacttcacggtgcccgaatgaggaaaatggggagcaggaggctgacaatgaggtagacgaagaaga

SEQ ID NO: 395905 - DNA, 101 bp, Homo sapiens
cttcagtctacaaaggactcttctaaaaggatatgtgttgctaatacccatctttactggcatcctaaagtttctaagctgactaaacaactaatgctcct

SEQ ID NO: 395906 - DNA, 101 bp, Homo sapiens
cagaagccatgcccctcaggctggaacttgccctgtctcctcgcagatgagttgacgaaggatcagagattggtgtattcgggcagactgcttcccgatca

SEQ ID NO: 395907 - DNA, 83 bp, Homo sapiens
ttttccgcccgcttcgatcgcctcgcgccggctgctctttccgggcaccatgactcctgtgaggatgcagcactccctggcag

SEQ ID NO: 395908 - DNA, 90 bp, Homo sapiens
cgttgcccgaccgctttccgggagactggagtcgaaggccgtgagaagtggcaatgcattgaggatacatctggcaagcttcgaattcac

SEQ ID NO: 395909 - DNA, 82 bp, Homo sapiens
aaggagccccagagctcaatgggggaccacagcatgcacttccttccagcagctacacagctgtttgatgaagacaatccag

SEQ ID NO: 395910 - DNA, 52 bp, Homo sapiens
agatatcgaggtggatggaaagcaggtgaatatgaccatctcccagaacagg

SEQ ID NO: 395911 - DNA, 75 bp, Homo sapiens
gccacgcaccgcctgctgctgctgggttcgtgctggccgtgggcagcgccgtctttgatgccatgttcaacgggg

SEQ ID NO: 395912 - DNA, 75 bp, Homo sapiens
cgcagatcggagacggggcctggaggcagcacacttctgcttttgttccttcatcaggacgaatttactcttttg

SEQ ID NO: 395913 - DNA, 75 bp, Homo sapiens
gcagcaagcgtggttgagacctggaagaagagagaaaaggaacagttccgtaagctctttattggtggcttaagc

SEQ ID NO: 395914 - DNA, 98 bp, Homo sapiens
tgcggcagaagggctacgaagaagtgcttcagcgggccaggaagcgcatccaggagatgttttctggcaaaggccttcctgcatttatgaattctctc

SEQ ID NO: 395915 - DNA, 98 bp, Homo sapiens
ctctgccacgaaggtgccaccggtctcggcgcggaagatggccggcggcgtggacggccccatcgggatcccgttccccgaccacagcagcgacatcc

SEQ ID NO: 395916 - DNA, 100 bp, Homo sapiens
cggcacctacggggacgtctataaggccagtactgatgcaggcactgcaggagccctgactccacagcatgttcgagctcattcctctccagcttctctg

SEQ ID NO: 395917 - DNA, 74 bp, Homo sapiens
ccctcatgagcatggtggccaacctcttgtatgagaaacgtgaccaggctgaggcccgcaggtctaagaccaag

SEQ ID NO: 395918 - DNA, 82 bp, Homo sapiens
tgaattagaaaaggtattcattaaagaaaataatgggaaggaagaagtatccaagtttaattggttggggtcagataagaag

SEQ ID NO: 395919 - DNA, 74 bp, Homo sapiens
tgctatcaatgcgaatgatcctgaagcctcaaagtttcatggatctggggataccgaaagtgggtcatgtgaag

SEQ ID NO: 395920 - DNA, 97 bp, Homo sapiens
ttcaagacaggtgtttaagcccaacctgcccccgacgctggccaaatcgcaggtgagcagtgtgcgtaagaatctgaagctgcacctgttgagtgtg

SEQ ID NO: 395921 - DNA, 49 bp, Homo sapiens
tttgattctccatatcacctacagattctctgcaatgactgtaatggac

SEQ ID NO: 395922 - DNA, 75 bp, Homo sapiens
cactctccttctgccacatttgttttgagctaaatattgaggaaagcatatgcttacgcagatgaagatgaagga

SEQ ID NO: 395923 - DNA, 100 bp, Homo sapiens
gctttatcaaaacatttcattccctataatgcaaagcaggatgaagttaaaggaagtagatcgtacagccatgcaggcatggagccctgcccagaatcac

SEQ ID NO: 395924 - DNA, 100 bp, Homo sapiens
agatactgtctgcgacatgtggaaaatgacggttataagaccatttatttctttggagacaaaactatgccagccaaggtggaaatgcttgacaacctgc

SEQ ID NO: 395925 - DNA, 74 bp, Homo sapiens
tagacatatcctgaataagaatgggttgcctgtggctggagaaaggaatgtgctcatcaccagtgccctccctt

SEQ ID NO: 395926 - DNA, 100 bp, Homo sapiens
cacagttctggatgatgtgggccatggtgtcaagatatggagttaccagtaaggagctccaccgtgactctcctccctgctccgttgccccgacgaggaa

SEQ ID NO: 395927 - DNA, 100 bp, Homo sapiens
cctgcggcgaggatggagggcctggcagtgcggttgctgcgcggcagcaggctgttcctctgtgacgagggtgcaggtatctctggggactacatcgatc

SEQ ID NO: 395928 - DNA, 83 bp, Homo sapiens
caccaggttccgcacggccgtcagggtggtcattgcaatattaaggtgacatcactcaaaaaggatatgaaaagaaaagggca

SEQ ID NO: 395929 - DNA, 75 bp, Homo sapiens
aggacgcacttgtcttagcagttctcgctgaccgcgctagctgaattaaacaaccaccatgtcgagcaaaaaggc

SEQ ID NO: 395930 - DNA, 90 bp, Homo sapiens
gcttcggccttggtcccagcgccttcccacggagcagcactcttcaccctgcacagccttgttagataaacaacccagacatgcgagtgc

SEQ ID NO: 395931 - DNA, 98 bp, Homo sapiens
gtcgcctgggtccctctgagccccggggcatctatgccagtgagaggcccaagtccctaggtccacctgggcttgcgaaggcacagattccccgtcca

SEQ ID NO: 395932 - DNA, 100 bp, Homo sapiens
tattaccccgtctttaagcagctctccatggagaagaacctgtgtgcagacacattagaaaaggattggaacaaggtaatttgaaaaaggctttagtgaa

SEQ ID NO: 395933 - DNA, 100 bp, Homo sapiens
caatgtggacggactcactgccctgcaccagggtgtgattaggcccactgggggatacgctgtcatgctacactggtcaatgtcttccatatacggactt

SEQ ID NO: 395934 - DNA, 101 bp, Homo sapiens
aagacaatatcatgcaagtgtggcaaatggtaaaggccgaggggcaaagaaaaggaaagcatctggctctgaaaatgaaggcgattataaccctggcagga

SEQ ID NO: 395935 - DNA, 83 bp, Homo sapiens
cttcggtggactccttcggcagtccacccaccgccgccgcctcccagaacccagtgacttgattgtaaaaatttacagagcgg

SEQ ID NO: 395936 - DNA, 51 bp, Homo sapiens
atggcggagaagactcaaaagagaaatgagccgtcagactgctacagcatt

SEQ ID NO: 395937 - DNA, 75 bp, Homo sapiens
ggatattgaaatggacagtggagatgaagcctaagaatatgatcaggtgtgtgtggtttcagcgcagcatggctg

SEQ ID NO: 395938 - DNA, 100 bp, Homo sapiens
tcggagcgggagtagacagtggccggcagggcagccgggggacagctgtagtgaagggcaagtgtccagagaatggctgggatgaaagtacacttgaact

SEQ ID NO: 395939 - DNA, 130 bp, Homo sapiens
ctgagctaaacatctaactagaagggatacccttccatttcaaagaacagaatgctaaggaagctgtggcaagaaaagaccagtgccctcagtctgagcaacgttgctggagtattctacatccttgtcg

SEQ ID NO: 395940 - DNA, 83 bp, Homo sapiens
atttggaatttcagctccatgaaccatttcttctgtatagaaatgcaagctgttagaatggctgaggagcactctgaatttgt

SEQ ID NO: 395941 - DNA, 97 bp, Homo sapiens
tccctctgcagacagctcccacaggagtcatgcccagtgtgtgaaggtgagaagccttataagtgctcatgggagggatgtgagtggcgttttgcac

SEQ ID NO: 395942 - DNA, 90 bp, Homo sapiens
aagcctcaaatgtccatggaactatccttgccaatgccaatattgatgttgtggctccaagccaaccaccagcaaacattgcctggaagc

SEQ ID NO: 395943 - DNA, 97 bp, Homo sapiens
ttcagtgacatcagtccccagaccatgagaagattacttaatattgtttctgtgacagccagcagccagcttcgggtgtagcctattctcatccaac

SEQ ID NO: 395944 - DNA, 100 bp, Homo sapiens
ggtccgcgcggcctccgcggagccagtaagactttgaccccgacgcaggcttcagtgattgccgcggatcagaagcctgagcactttggctcgagacaat

SEQ ID NO: 395945 - DNA, 50 bp, Homo sapiens
taccagccctgggcagcgagctgcaaaaatctcccagctgatgacagaga

SEQ ID NO: 395946 - DNA, 100 bp, Homo sapiens
ctctcccttcgcccagttccctgcatcctaagactcgaaggcagcacaggacctggaaaaattacatgcaagaggcgcagatgttccagagattcctgga

SEQ ID NO: 395947 - DNA, 74 bp, Homo sapiens
cgcccctccgagctggggttggacgctgccagtttgcacagcagcaggaaacctatgagaatatcccaggccag

SEQ ID NO: 395948 - DNA, 100 bp, Homo sapiens
gtgaagcaagagaatctgaacctcgtctgtattcccacttccttccagaggcggccttagcaacatgctgttccagtgctccctacctgacaccacagcc

SEQ ID NO: 395949 - DNA, 100 bp, Homo sapiens
gggaggcctgagaggctgctgttctaactcgctcccagttctctctttccagacgtagtgaactgtatgcagactgacaatctggaactaaagaagcttg

SEQ ID NO: 395950 - DNA, 100 bp, Homo sapiens
cggagcaacttgctaatggcaggcattttacaagggtgcagagcctccagctccaccatgagctgcacgccgcccacctcctctccagcacagacctgaa

SEQ ID NO: 395951 - DNA, 139 bp, Homo sapiens
tgaagatcccccggaccaggggcgagggctacccgctctttgccgtgacaacaccgttcccccagccgggctgtgtcaacagcatctccaccctggagcctgtgagccggtgccagcgcctgagtgagctgtacctgcg

SEQ ID NO: 395952 - DNA, 90 bp, Homo sapiens
ctgagacctccactggctgtttgtttgctggatcatcgcttggtaaacgagctgcagtgttctgaatagcagtccagctatgaggggagg

SEQ ID NO: 395953 - DNA, 83 bp, Homo sapiens
gggactgaggccgccctgcaccttcagcggatttggggattaggctcttttaggattttttatcaagcagaaatgcatcgaac

SEQ ID NO: 395954 - DNA, 87 bp, Homo sapiens
tcctcggcagataaactggactgtcctctacagaaggaagcacaaaaagggacagtcgaaaaagcttgtggtgaaggggggcaaaaa

SEQ ID NO: 395955 - DNA, 105 bp, Homo sapiens
acagatgaacgaagttatggcagagttagctaaagaactccctcaagtttcatttgtgaagtcaggccttgaaaagaggatagaccaggctgtggaggagtggaa

SEQ ID NO: 395956 - DNA, 76 bp, Homo sapiens
gagcctcatctctctcctcaccctgctgtgactccaccacaggttcttctgtgtggcagttcagaatgatggatca

SEQ ID NO: 395957 - DNA, 74 bp, Homo sapiens
gacgaacatttctgggtgacactcaacaggattcccgtacaaatggtgatgatcatcaggtcaaggatagtctg

SEQ ID NO: 395958 - DNA, 75 bp, Homo sapiens
aggaccaggatgctgccttcttcaagattgagcagctgtatgtccggcaactggcagaagaggctgggaagagct

SEQ ID NO: 395959 - DNA, 75 bp, Homo sapiens
gcagtaccttcttcaagagaaatggagcccttctccaaggaagctcttcgtgggcggtcttgactggagcacgac

SEQ ID NO: 395960 - DNA, 100 bp, Homo sapiens
cttggttcttccacctctgccactaattcgacatcagtttcatcgaggaaaggctttccttaaagtttcccatgtctcaatggactcctgaatataacga

SEQ ID NO: 395961 - DNA, 83 bp, Homo sapiens
ccgggaggggcgcttcccgacgccaagacaatgcagatcttcgtgaagactctgactggtaagaccatcaccctcgaggttga

SEQ ID NO: 395962 - DNA, 100 bp, Homo sapiens
ccgatctgcccgttgtgtttgtgaaacagagaaagataggcggccatggtccaaccttgaaggtcagcccaaggccaaccccactgtcactctgttcccg

SEQ ID NO: 395963 - DNA, 75 bp, Homo sapiens
gaagacatgacacttacaagatggacagggatgataattgggcctccaagattgtggacatcggatacccaagga

SEQ ID NO: 395964 - DNA, 96 bp, Homo sapiens
gagctggcgtgggagaccgacggccgattaacctccatttcagctaatcatgggagagattaaagtctctcctgattataactggtttagaggtac

SEQ ID NO: 395965 - DNA, 102 bp, Homo sapiens
aaacatcagcatatgcatgaccgagatgacctctatgctgagcaggtcaactgcaacttggcctcttgatccaccaaaggatgagaaacaagggtggagaca

SEQ ID NO: 395966 - DNA, 75 bp, Homo sapiens
agcccaagaaacattatattcatacaacccatttgttgagattaaaacaccaaaaaaatcgtcactgaaattgtt

SEQ ID NO: 395967 - DNA, 98 bp, Homo sapiens
ccgtctccatgcccgagttcatggccaacctcaggctcagctccttcgagaactcatagaacggaagaccagctccttggatcccaacgatcaggtgg

SEQ ID NO: 395968 - DNA, 90 bp, Homo sapiens
ggcagattctggagcgcacgcccaatgggatcattgttgctgggaagcatttgcctcagataaactgtgtgacgttccctcacccagaca

SEQ ID NO: 395969 - DNA, 73 bp, Homo sapiens
ttcctcctccttggtcgccgcgtccttggctggcgtgatgctttggagtctgcaatgaagaatggcctgtggg

SEQ ID NO: 395970 - DNA, 100 bp, Homo sapiens
gcaaggtcaagctggcacctgagaggattgccgatggcaccatggaactttccgctgtactttttgccatacagaggtagaagaggatgaatcagcaatg

SEQ ID NO: 395971 - DNA, 90 bp, Homo sapiens
ggccgtcttaaagttacgttgttagaatgtagcagtttccaaggcaggaaaggtaaagagacaaagaaagtgccttgtacagatgcaaac

SEQ ID NO: 395972 - DNA, 100 bp, Homo sapiens
tccaggacattcacttacgccaccgccatcactttcatcacatggatcctcatccagtttgcatttaggtcatttaggaaatcgtaaatcatgtgaagat

SEQ ID NO: 395973 - DNA, 125 bp, Homo sapiens
gacagtcttctagaagagagaaggaggaaaagaagcagttcctgatgttacaaatgaacaaggatctcccaggctgtgaagcttcatggaggtatcgatatcctagtctccaatgctgctgtcaa

SEQ ID NO: 395974 - DNA, 50 bp, Homo sapiens
ccaacattttgcggatactcttctggctggagtgcaatggtgtgatctca

SEQ ID NO: 395975 - DNA, 74 bp, Homo sapiens
gccctcatcctggttctggaatcctcagttcaaggtgcagttttgccaaggagtgctaaagaacttagatgtca

SEQ ID NO: 395976 - DNA, 75 bp, Homo sapiens
tacctgaaggactacgagaggaaggttatcttggagaaggcaggctatcatggtgaacttacttcagattgtgcg

SEQ ID NO: 395977 - DNA, 83 bp, Homo sapiens
ttaaggctcatcatgcaagtggctctgccacaagagcatctttgctggattatcttcaatgaaaaagcttgtggtgaaggggg

SEQ ID NO: 395978 - DNA, 82 bp, Homo sapiens
ccctgctgaatcacacgccgccatccgggaggcccagggaagtgggaatgtaagacggacttagatattgcatacaaatttg

SEQ ID NO: 395979 - DNA, 76 bp, Homo sapiens
catgtgaggacgtgcttcctgcttcatagataagagatggcgtcccatgtagagtgccgtcctctgggagtgtttg

SEQ ID NO: 395980 - DNA, 125 bp, Homo sapiens
gtcagagacccctggggccccggtgcggagagggaccacctatgtggagcaggtccaggaggagctgggggagtcctcctccgcctcctcctctctgcatgcgcgtcagagcccgtgccaagaac

SEQ ID NO: 395981 - DNA, 76 bp, Homo sapiens
cgccgccatccgggaggcccagggaagttcaagaacaagcagggaaggcagagcaagatggctgaatagaaccctc

SEQ ID NO: 395982 - DNA, 75 bp, Homo sapiens
tggaggctgccaaggcatcactgggcatctacttaacactgaccagtgctactgtaaacaaccttcaggcaaaag

SEQ ID NO: 395983 - DNA, 100 bp, Homo sapiens
acaatgcgttgcctggctccacgccctgctgggtcctacctgtcagagccccaaggcccaagattcctaccaaactcctcagaatcctggaattgtaccc

SEQ ID NO: 395984 - DNA, 99 bp, Homo sapiens
aggacaaaagccaagaggaggacagttcgctacacagcaatgcatcgaggaatcccttggcaccatgtcctgtgtgcattataaattttcctctaaact

SEQ ID NO: 395985 - DNA, 97 bp, Homo sapiens
gcgtttcgtgcccctcggacccggccacgcagtccccaggggcccggcccggggcgcgttgaaggcaaccacacctccaaatcaaggaaggccagat

SEQ ID NO: 395986 - DNA, 98 bp, Homo sapiens
ggaactgggcgagctgcggctgcgggtgcggcgggtcctggccgaaggggctgggcctgtatgctgctcgagacattgagaaacacaccatggtcatt

SEQ ID NO: 395987 - DNA, 75 bp, Homo sapiens
ggccaacaaccagtgcatggctacagagagcgtggaccatgaagacgacacggagccctatttcatcgggatctt

SEQ ID NO: 395988 - DNA, 96 bp, Homo sapiens
atgagatttacctgtgagatgtttcatcccaacagaatcctgtatggcacgatgaccctggagctgggtgggaaggtcaccatcgagtgtgcgaag

SEQ ID NO: 395989 - DNA, 75 bp, Homo sapiens
tataatttctctgtttttcaaatcgatgctccttcctttggtattatgactctgtccccctttgatcaaatgaag

SEQ ID NO: 395990 - DNA, 75 bp, Homo sapiens
ctgtcgacctaaagcctgactggggcaaggtgtaatcctgagagattcacatggtgttgcacaagtacgttttgt

SEQ ID NO: 395991 - DNA, 82 bp, Homo sapiens
atcgacgtcgtgatccagaagtccagagctgaggactgcctgtttgcagcgagccatccagcaggctgtgggaagctccctg

SEQ ID NO: 395992 - DNA, 89 bp, Homo sapiens
ttcaaaatgctgcagaaatgctcactgcaaaagtgaaagagaggatctgacgaactactctcaggcagtgttctcagtagtccgaactc

SEQ ID NO: 395993 - DNA, 100 bp, Homo sapiens
cgatgatggaaataagtcaccctgacacatctcagttcatcttcctcaaaactatgcgaggtgtgcctagattgatcggtataaggctcactctcccgcc

SEQ ID NO: 395994 - DNA, 114 bp, Homo sapiens
cctcgggctctggctgctgggcgcgatgatgctgcctgacctgcctagagctggaacgttacctccagagcgagccctgctatgtttcagcctcagaaatcaaatttgacagcc

SEQ ID NO: 395995 - DNA, 106 bp, Homo sapiens
ctactcaatacgcgccacaacgtccgactgcactcacacgacgtgcgctatgggtcagggggctgttgtggttccgactataaacagtacgtgtttggcggctggg

SEQ ID NO: 395996 - DNA, 51 bp, Homo sapiens
cgggaggctgtcggctaataacggaatcccgttctgcttccagaagtggaa

SEQ ID NO: 395997 - DNA, 80 bp, Homo sapiens
gaagaagaagaaccggaagaaactgtccgagaagcccaaagaagaagagtgacaggaccaccctagattcacaggaaggg

SEQ ID NO: 395998 - DNA, 82 bp, Homo sapiens
accagctcacctctcaccgcgcatgtttggagttgatattcactgatggactccaaagaatcattaactcctggtagagaag

SEQ ID NO: 395999 - DNA, 100 bp, Homo sapiens
ggaaagcagataaccctgaatgacatggaatctgtgcctttcatccgctgtagtttacaatgcagggatctggttgatgaagcaaagaagtttcatctga

SEQ ID NO: 396000 - DNA, 97 bp, Homo sapiens
gacaaatcaaattagtggttttggaatcctgttcacgatgctggtatttggaccagcctgcgggtttatcctgggctctttctgtaccaaaatctac

SEQ ID NO: 396001 - DNA, 82 bp, Homo sapiens
ccgggtcctcctagaaattccccccgaagaagactcccccacatctggggacttaagtcacaacagattatctttcatcaag

SEQ ID NO: 396002 - DNA, 75 bp, Homo sapiens
aaaaaactgggaggctacttacagttatttttgcaggacactgcccatctctaagataagaacctggaaagggga

SEQ ID NO: 396003 - DNA, 90 bp, Homo sapiens
cggagaggcgccccccgcagcaggtgtctcccagtctgctaaagccctaaggccatcaccatggacttccagcatcgccccgggggcaag

SEQ ID NO: 396004 - DNA, 83 bp, Homo sapiens
tacaagacgattcacctgtccagcatccgaccaccgaggctggagggggagaacacccagaggactgctgtccaggtctgttt

SEQ ID NO: 396005 - DNA, 98 bp, Homo sapiens
ttcgatgcacaggagtggccgttatggaacgcaggtctttactcacctggagacctgtggcccactccgccagtgtgtgtgacaagcagcttaaactg

SEQ ID NO: 396006 - DNA, 100 bp, Homo sapiens
ggccccgagggcacctgtgacgtgcatcacagcctcgtggagtttcacttgaaggaactgagaaacaaggacaccaacatcgaggttaccttccttagca

SEQ ID NO: 396007 - DNA, 80 bp, Homo sapiens
ggggctccgggtcttccagagcgtgaagatcaagatcgttttttgtagcatcagatccaacagttaaaacagatcgactg

SEQ ID NO: 396008 - DNA, 80 bp, Homo sapiens
ccggagccgtggagcggcggcggagcgggcgccgcggggggtgtggcgcggaggccagattacctgtccctaatactgag

SEQ ID NO: 396009 - DNA, 101 bp, Homo sapiens
cactttttggctgttctgaagagtgttactgtgaacattcatgcacaaatttttatgtggagggaggtggggaagacagggctccagctaccacaggacgg

SEQ ID NO: 396010 - DNA, 87 bp, Homo sapiens
ggccagacagggatgtgcggaggggtcaaaatgcagatcttcgtgaaaacccttaccggcaagaccatcacccttgaggtggagccc

SEQ ID NO: 396011 - DNA, 90 bp, Homo sapiens
gtgctggctgccgcgcggccgagggaacaacctatcttcagcactcgagctcatgtcttccaaattgacccaaacacaaagaagaactgg

SEQ ID NO: 396012 - DNA, 49 bp, Homo sapiens
aaaacagtcctttctactatgatgcacccacctgcccaaagcagtgccg

SEQ ID NO: 396013 - DNA, 82 bp, Homo sapiens
cgcggatgtcggcgaagagttcaaccaggactcaagcacagagggttcggaaaccgcgttgctgcacggggccccaggggct

SEQ ID NO: 396014 - DNA, 75 bp, Homo sapiens
cctgggatccgcaggttccctacacggtctcctgggtcaaggaattgaatgatctggcacgggaccctccagcac

SEQ ID NO: 396015 - DNA, 58 bp, Homo sapiens
gcgctgtctccctgaagaaccgagcggccagaggtcctcaaagagggcagcgggctgt

SEQ ID NO: 396016 - DNA, 98 bp, Homo sapiens
gacaggacagaaagagtgtgcagcggattaaagctaaagacatagttcctggtgatattgtagaaattgctgcctgcctagggtagttaaaagacgag

SEQ ID NO: 396017 - DNA, 75 bp, Homo sapiens
gctgctgccaaattgaaaaggctgtgctccattgaagtgacttgtgaatcagccagtgtgatggctgcgacactg

SEQ ID NO: 396018 - DNA, 100 bp, Homo sapiens
tttggaacagactcccgtttacaggtccttggctggaagaggctggataaaatactgcattgttctcaccagaaaatacagagcttcttacaactttagg

SEQ ID NO: 396019 - DNA, 74 bp, Homo sapiens
tgctgcgggcagaacaggacagtgaggtgggaaacttgaagattgtgacagaaaagccgttcaccaaatcgacc

SEQ ID NO: 396020 - DNA, 83 bp, Homo sapiens
cgagaagtccggaagcttgtggcgctgaaaacgaacgaggctgaggctgcagtggccacccaggagacatccaccgtcaggct

SEQ ID NO: 396021 - DNA, 82 bp, Homo sapiens
agattaaatgcggtttccaagcacacggcaattctgtggtgttcttggtcacacatttatggagtttctgaagggcagtgga

SEQ ID NO: 396022 - DNA, 98 bp, Homo sapiens
tacggtccctgcagtgcctgctgctgaggaggccaccgaagctcggggacgcgaggagccggcgtggccctgggagaactacgatgacccgcacaaaa

SEQ ID NO: 396023 - DNA, 99 bp, Homo sapiens
ctttattatctcattgaagcttggaattacatagctggaaaggatcttacaggacacattcagctaacgtattttagcaggtggagtgaggttgaagat

SEQ ID NO: 396024 - DNA, 83 bp, Homo sapiens
accagacctgcaagctctttgacacacagcagttcttgtcaggttggtggttctgtcagatgaaagcaaagcgaggctggatc

SEQ ID NO: 396025 - DNA, 75 bp, Homo sapiens
ctcagttggaagcagccgatccagcctgcggagcctgtggggcagcctgcaagtattcctgccacaagaaatgtg

SEQ ID NO: 396026 - DNA, 98 bp, Homo sapiens
ctgacctgggtaaccataccacatgcaggcctgagggaagacatgctggagaccctggttcccaaggcagagggtgaccgtgtgatggtggtgctggg

SEQ ID NO: 396027 - DNA, 89 bp, Homo sapiens
ggcccccagaagtgatcgctcagctggagaacgcggctaaagttctgatgggttacattccgaaaagcaaatgggagatggacacatct

SEQ ID NO: 396028 - DNA, 98 bp, Homo sapiens
cctattcctggagccaccctccttgatgacctcataacgccagcaaacacctgtgattacagaggaaaccacccttcaactggaagatatcattaaac

SEQ ID NO: 396029 - DNA, 97 bp, Homo sapiens
tgatcaagcacgtaattttttcctacaatcaggtctgccggcccctgttttagctgaaatatgcagccaactcttcctgccaaataaatagagtcat

SEQ ID NO: 396030 - DNA, 98 bp, Homo sapiens
tgaagagtgttactgtgaacattcatgcacaaatttttatgtggagggaccagttactctccacaagaaaattcacacaaccacagtgctcttcatag

SEQ ID NO: 396031 - DNA, 98 bp, Homo sapiens
acgcggcctacaggaaggccttggacctggcgagagagtttttacctcagtatggctgtgacccgatccaaagacgctcctcctttcggcccccccat

SEQ ID NO: 396032 - DNA, 75 bp, Homo sapiens
ggcagtctctccctgccaggctcttcatccaaggtcgtcaaagtcctacattttagctttcagtgctgaacttcc

SEQ ID NO: 396033 - DNA, 75 bp, Homo sapiens
gttactgcaatggcatgaaaaggttaatttggagtggcccctggagtcagtttcctacaccatccgaggccccac

SEQ ID NO: 396034 - DNA, 100 bp, Homo sapiens
ctcgggtctcgggggccgctctgggatcccggccaccagcaattgtccgattctggctacattggagattggttgctttctaaaactgaaggagaagccc

SEQ ID NO: 396035 - DNA, 90 bp, Homo sapiens
taccgagagtttgaaagtgcgattgtggaagctgctcggcatggcggacaccgacctgttcatggaatgtgaggaggaggagttggagcc

SEQ ID NO: 396036 - DNA, 51 bp, Homo sapiens
tccaccaagagtaagaccattcaggaggtggtataacagacagaaatctac

SEQ ID NO: 396037 - DNA, 100 bp, Homo sapiens
tgaagattttgacagtcgtagatacaaatttttggatgatgatggatccatttctcctattgaggagtcaacagatacaatcttgcttgaccgtttggga

SEQ ID NO: 396038 - DNA, 106 bp, Homo sapiens
tctgcaagcgtcttcaaaggagccccacatgagatgaggacggggacttggttgccttttccagtgacgaggaattgacaatggccatgtcctacgtgaaggatga

SEQ ID NO: 396039 - DNA, 75 bp, Homo sapiens
cggctggcgcttcctgcgcatcgtctgcaagaccgcgaggcgagacctcttctgccgcagcgggaaccgcaagag

SEQ ID NO: 396040 - DNA, 137 bp, Homo sapiens
agcggtcggtcgagtgtggcctgtgtggactcgcatcttgcccgaagccgggcggaggagagctcaagctaagggtcgaccccatcccatatgacactccaaaaccagcgggccacacgcggtttgtctgcatctca

SEQ ID NO: 396041 - DNA, 76 bp, Homo sapiens
ggaaaaggctaatggcacaactgtccacgtaggcattcaccccagcaaggtgttacaggattggtgggtatacctg

SEQ ID NO: 396042 - DNA, 74 bp, Homo sapiens
gtcttcaatgacttccttatgctctctaatacccagttcatagagaatattgaaatcatggcaggtccagaaag

SEQ ID NO: 396043 - DNA, 90 bp, Homo sapiens
ggggccttcactcctctgtggctctggaagagcccgatttcctcaggaggaacttgctactaccagcaccatgccctaccaatatccagc

SEQ ID NO: 396044 - DNA, 50 bp, Homo sapiens
cacaggggccactcagagtcgcccgagaaccagttgtttggggaagaaga

SEQ ID NO: 396045 - DNA, 100 bp, Homo sapiens
tggcatgcaaggtcttgaagatgctgtgctttcctgcagccaaattctactgtatagccacaagcttcataccagtattaaagagggacagctattgaag

SEQ ID NO: 396046 - DNA, 101 bp, Homo sapiens
aaagccactgcattttggcatgatttgttatgcagtcgtagataaccagaaaacatcggatttacattttaaggtttaccgacaagactgtgaaactttcg

SEQ ID NO: 396047 - DNA, 100 bp, Homo sapiens
gcagtcctgaaggaatacgagctcaagtgccggttggggttagacttggaggaactcgaggagatagaagaagatgctggccttgggaatggaggcctgg

SEQ ID NO: 396048 - DNA, 134 bp, Homo sapiens
gccgtctttgtgggcactggggacctgtttgctgccatgctcctggcgtggacacacaagcaccccaataacctcaaggagggtgtgaagacagagaatgaccacatcaacctgaaggtggccgggcaggacgg

SEQ ID NO: 396049 - DNA, 107 bp, Homo sapiens
gtttgagcggctgcagagagagagagaagagaggagattgcagcagcgaaccaatcccaagcaaacggggattcagcgtccgatcctttggaacagggactcacgtg

SEQ ID NO: 396050 - DNA, 100 bp, Homo sapiens
gcggactcgggcgccgctgtagccgcccaccggtttttctgccacttttgcaagggcgaggtcagccccaaactaccggctggagtgcaatggcgtgatc

SEQ ID NO: 396051 - DNA, 95 bp, Homo sapiens
cgtggagatatggcgcaactgcggcgcgatctcattttgcccaacggtggtactccagcaggtacttcaagtccagcttcttcatcttcccttct

SEQ ID NO: 396052 - DNA, 82 bp, Homo sapiens
ggcctatcgctaccctccgaagtccgtcctggatcagtgacattcgagcaggaaccgccccttcatgcaggaaccacatcaa

SEQ ID NO: 396053 - DNA, 75 bp, Homo sapiens
gaacagttggcagctttgcagatagaatatgaagcaatgcttggaagaggatatcagtcattaaaagtgtatttt

SEQ ID NO: 396054 - DNA, 101 bp, Homo sapiens
ggccttcgtacccgtcttgattgagctattgtggacgatgaaaggctctctgcagaggagatggatgagaggaggcggcagaacattgcttatgaatatct

SEQ ID NO: 396055 - DNA, 87 bp, Homo sapiens
ggccggggcggagggttcggctgcgcggcggggctgaggcggccgcggggcccgagcgcaggcccagtgacgagcaccatccggaag

SEQ ID NO: 396056 - DNA, 96 bp, Homo sapiens
gaggcaccgggatcgtgaccgagaccgtgaccgagagcgtgaccgagagcgcgaatatcgtcatcgttagaagtgacaacactgcagctgaaggag

SEQ ID NO: 396057 - DNA, 97 bp, Homo sapiens
caagagagtccagttcggagtcctgagtccggatgaactggtggcaaagaaacacagcatgatgtttggaaatataattcttcgatcaacaagtgga

SEQ ID NO: 396058 - DNA, 100 bp, Homo sapiens
tcgtcgaaaggattggattggcatctttagagatgatcctcatactaacttagtaactgaagctataaaaaatgatcacctcaggcaaatggaacgtgaa

SEQ ID NO: 396059 - DNA, 88 bp, Homo sapiens
tgctggagaagtccccttatgaccagcactattcctgatcagagaactccagttgcttcaacacacagtatcagtagtgcagccaccc

SEQ ID NO: 396060 - DNA, 74 bp, Homo sapiens
tcgggttattcgagtgaccgagaccgcggccgggaccgagggctatgcccactggaagggccaagtgctgaatt

SEQ ID NO: 396061 - DNA, 100 bp, Homo sapiens
agctaatcctggcgttccaccagcaaccatgagtggttccatgatgggaagtgacatgtggtatgtgtgcaacagagagaaattatgcgaatcactccag

SEQ ID NO: 396062 - DNA, 75 bp, Homo sapiens
ccgggcccaggccccggcagcgcctgggacaaggagtcagtggatcggtggggaaaatgctgcttaccctgggcc

SEQ ID NO: 396063 - DNA, 100 bp, Homo sapiens
agctcagaacagctggatcttgctcacactctttcaagagaagcttccttgttcccagtgacctgacagcagaggagcgtcaagaactggagaacatccg

SEQ ID NO: 396064 - DNA, 100 bp, Homo sapiens
ggtgctgtcatggctggagtaaggcccctggctcccagaggtgcaccaaacgggttccaatttcatctgctgttgcaggcgtagcaataggattggtcac

SEQ ID NO: 396065 - DNA, 90 bp, Homo sapiens
ttcgcagtgacctggggaacctgctcaaagccctgggtcgcttggaagaagccaagaaccactggttcacctacaatgagacaatgacag

SEQ ID NO: 396066 - DNA, 90 bp, Homo sapiens
tcgtcgagaactcattactccaaagggtggtggtggtggaggtccaggagaaggagccaggtgagaatttcaaggattatcgacttcata

SEQ ID NO: 396067 - DNA, 95 bp, Homo sapiens
tgagattgcactgctgcagtccaggctgaagacagagggctctgatctgtgcgacagagacacctgctccacttcaccttttgccatgagtaaaa

SEQ ID NO: 396068 - DNA, 82 bp, Homo sapiens
ggagctggacggcgagcgcgagcggcgcgagaaatcgaccgtgtgtgagaagatcatggagttgctgggacagaacgaggtg

SEQ ID NO: 396069 - DNA, 83 bp, Homo sapiens
cctgacagcccccacctcgcaagagcagccgcggcgccactgtgtcgtgaaaactacccctaaaagccaaaatgggaaaggaa

SEQ ID NO: 396070 - DNA, 101 bp, Homo sapiens
gaacaagagagtgagaaaccaagccaaggaaggaaatctcagatggaggaagtgcaagatgaactcatccacagactgaccattggtcggagtgccgctca

SEQ ID NO: 396071 - DNA, 100 bp, Homo sapiens
ctgcttttccaggaatgaaagacattcaggatcaacttgaacgaatatttctgtgccggtggtggtgtgcacattgagccccggtatagacagttccccc

SEQ ID NO: 396072 - DNA, 50 bp, Homo sapiens
gtttattctcccatagcatgtggtatgcaaccactcatgtattcggttca

SEQ ID NO: 396073 - DNA, 98 bp, Homo sapiens
cgggtacagcttttcgctgactacattcagatccatatcatagattttgacgatgaaaacaacattataaataaaaatgtcctcctccatcaagcggg

SEQ ID NO: 396074 - DNA, 75 bp, Homo sapiens
gtgggattaggcttcgccggctacgattgcgaattccgttgatgcagcaaagccgctgctgcggaaggcgatcca

SEQ ID NO: 396075 - DNA, 97 bp, Homo sapiens
aaatgcagaaaaaagatcacaagcaactctggatgggattgcaaaatggcataaaggcatcacaagtggtcgggctcagctactctggttcctacag

SEQ ID NO: 396076 - DNA, 82 bp, Homo sapiens
acttcacttttattggaagagttgctggtctggccgtatttcatgggaagctcttagatgaaagcgatagatctggctagca

SEQ ID NO: 396077 - DNA, 100 bp, Homo sapiens
ggaaattaaggaatgcaattctgccaccatgatggaagtgtgcaggatgacagaattcgagtcgaaaggatggataacatttattttgaatacagccatg

SEQ ID NO: 396078 - DNA, 75 bp, Homo sapiens
ggaggaacgcgctaaggcaaagcacctggaaactaaatatattttgccaactttggaaaaagaattattcttggc

SEQ ID NO: 396079 - DNA, 80 bp, Homo sapiens
tggcgtcttccgtgggcaacgtggccgacagcacaggtccctgtgcgttttattgcgacctgccggtgggaactttgtct

SEQ ID NO: 396080 - DNA, 100 bp, Homo sapiens
atcccaagtagtacccgtcttccaggatgagttccacccgttcatcgaggccctgctgcctcacgtccgcgccttcgcctacacctggttcaacctgcag

SEQ ID NO: 396081 - DNA, 60 bp, Homo sapiens
aacaacaccagaagaaattgccaacccttgcagatatgggaaaatagtctccacaaaggc

SEQ ID NO: 396082 - DNA, 98 bp, Homo sapiens
ctcggctccctgcctccgcgtcgcagcccccgccgtagccgcctccgagcccgccgccacatcctctgaggccagcaggaagaccaagaagaaggaag

SEQ ID NO: 396083 - DNA, 98 bp, Homo sapiens
gttcaagaggcagctgcgtatttaaaagcaccatactggacataccttttatgtgcactgggactttttatttaccagtcactggatgctattgatgg

SEQ ID NO: 396084 - DNA, 75 bp, Homo sapiens
gtccttcgggaaacaggaggagcaagttcgactccagcgagggaaaacggagacgcatcttctctccagactgcc

SEQ ID NO: 396085 - DNA, 76 bp, Homo sapiens
aaaatacaactgtgacaagcaacgggcaggtcctacaacgtgactttaaaaagacagcagaaagcaaaaatgtccc

SEQ ID NO: 396086 - DNA, 98 bp, Homo sapiens
cgccatcggcctgctgctccttggtctcctgctgctgctgtattcgatcagactgcgaatcgaaccagaagataacataccggatttctggagtaggg

SEQ ID NO: 396087 - DNA, 75 bp, Homo sapiens
tggaaatcctaatgacagtctccaaattcgcctccatctgtaccatggtgaagccaaaaaccttccctcttaccc

SEQ ID NO: 396088 - DNA, 75 bp, Homo sapiens
agtgactgctattgaaccaccaaaagtccattatgaaactggctacattattggaattttgaagtcatgaaaaca

SEQ ID NO: 396089 - DNA, 101 bp, Homo sapiens
gactcttgtgttcatcctgttctagcatttccagatgagtgtgaacatggctacgcctcttcattcccgtccatgccgagcccccgactgcagcattcaaa

SEQ ID NO: 396090 - DNA, 80 bp, Homo sapiens
gttactcgtcaaactccaagaaggcaagcattttggccagacttcaggaactgtggctgcaccatctgtcttcatcttcc

SEQ ID NO: 396091 - DNA, 78 bp, Homo sapiens
ggggaagaagctgctctctgagaaaaagctggttctcttaactacagtgacttcaacagtttttttatactttgagtc

SEQ ID NO: 396092 - DNA, 92 bp, Homo sapiens
cgagcaccagatctcccctggggacttcccgagcctccgcaagatgcaggaagtggtctcccactgcaagaagctgaccaagaggaataagg

SEQ ID NO: 396093 - DNA, 50 bp, Homo sapiens
cggggcggtccgttgccaaagccaggaccgagcacatagaattgggcaga

SEQ ID NO: 396094 - DNA, 88 bp, Homo sapiens
gagctcagaaatcagctcaaacatttttatcagaggaaggatatggagtaatagtactaaatcccaatgaaaactatattgaagtaga

SEQ ID NO: 396095 - DNA, 83 bp, Homo sapiens
cttggatatcttcggggacctgaagaagatgaacaagcgccagggaactctaatgatccaggacaaagaagttaccctggagt

SEQ ID NO: 396096 - DNA, 131 bp, Homo sapiens
agcggcgcccgccaccggctccctcgggagctcatcttcgtggggcgtgaggagtgtgagctcatgctacagctgcatcttcctcccgtgaggctggccgagctccacgctgatctgaagatacaggagag

SEQ ID NO: 396097 - DNA, 75 bp, Homo sapiens
agttttgccaggtgtttgttaccttggcctgtttaaagaagaaaacccgtatgctagatttgaaaacaactaaag

SEQ ID NO: 396098 - DNA, 93 bp, Homo sapiens
tccagttcctggccaagtttgagatcgccctgcccgtcgccaatgacagtaaggatggggatgataagaagagacctgtgatcattcatcgag

SEQ ID NO: 396099 - DNA, 75 bp, Homo sapiens
gcgagctgggagggagccgcgcgcctttgtgcgcgcgccgagatgacgtccggttgtttgccttcgtgcgcttca

SEQ ID NO: 396100 - DNA, 136 bp, Homo sapiens
cggaggaaagcgggaagactcatcggagcgtgtggatttgagccgccgcattttttaaccctagatctcggaaagaacgcgctttgagaatttggggccccagttaacgggaaagtcaaatgaagatggaaaactg

SEQ ID NO: 396101 - DNA, 82 bp, Homo sapiens
tggctttacttctggtgggaagtccacaatgactatgatgaattcaactgattgaaaatagtccccaggattttgctcttca

SEQ ID NO: 396102 - DNA, 75 bp, Homo sapiens
aaagagaagtttctggtcactccccaggattatgcgcgggagaagtgaattcaaacggtgctggaagggtcaagg

SEQ ID NO: 396103 - DNA, 74 bp, Homo sapiens
acgcggtgaggcggcgacgggctccgggtgtctgcttttggggcagagttttcatcggaggcatgcagagagtt

SEQ ID NO: 396104 - DNA, 98 bp, Homo sapiens
gtccacggagtgtatgaccacaaacagccatcaagattactccaaaggtttcggcggcaaatacggtatcgacaaggacaaagtggataagagcgccg

SEQ ID NO: 396105 - DNA, 74 bp, Homo sapiens
cgctctggagggactctccttctcaccgttccgggaacaaatgctagatacgaagctgaagagggaactaccct

SEQ ID NO: 396106 - DNA, 100 bp, Homo sapiens
tttcaggttcagtgacatcagaaaatgtgtccagagattacaagggtattttaagcctggaatattgtgtgggtattattggtggcaaacctaaacagtc

SEQ ID NO: 396107 - DNA, 75 bp, Homo sapiens
aactgacggaaaaggagagagagtcctgagggagtctaacaagttagcagaaatggaagaaccacccttgcttcc

SEQ ID NO: 396108 - DNA, 83 bp, Homo sapiens
gtgcgatcctgcgcgcgggggaactagctggagggcaaggcgggaacacggctgttttgctgcagcttctgaagtgttaaagc

SEQ ID NO: 396109 - DNA, 75 bp, Homo sapiens
gagcagccctggtgtcacctatcagtaaaagatgatgtgcgaggtgatgccgaccatcagcgaagcagaaggccc

SEQ ID NO: 396110 - DNA, 75 bp, Homo sapiens
cctcactgcagaggtgctggagctggcagacatatctgaagagatggattaagaatgctttggattaaggattgt

SEQ ID NO: 396111 - DNA, 90 bp, Homo sapiens
gatttttctggactcacagaggacaatggtctgaaactttccaatgcacagactgccaaggctgggggcaacatatctgtatcaaaagag

SEQ ID NO: 396112 - DNA, 100 bp, Homo sapiens
aatgtatgaaggttctcaacttgaaacttgtcatggatgcactggtagaagatgatatctgtattctgaatcatgaaaaagcccataagagagatacagt

SEQ ID NO: 396113 - DNA, 98 bp, Homo sapiens
ggccagcctgacctccccaaggagatggcctctctgttgattcagggattggatgagtctctatggtttgttttgccctgaagagcagaaggcttctg

SEQ ID NO: 396114 - DNA, 98 bp, Homo sapiens
gacaagatgcagatgaatacaaaccagctgacctcaatacatgctgatctctgccagaaaacgccaggtcttcaagggtgtctgccaccaccatgcct

SEQ ID NO: 396115 - DNA, 82 bp, Homo sapiens
tcaaaatcagacctctgtggcagcattttttccagaacacaaaaggcacaattccaccttcctttgtgctccattactcaag

SEQ ID NO: 396116 - DNA, 98 bp, Homo sapiens
cacaggggctatttgtttggatatcctgaaagatcaatggcaagctgatgaagaattccagatcctggcaaactcctggcgatactccagtgcattca

SEQ ID NO: 396117 - DNA, 80 bp, Homo sapiens
ctcaagtcctggctcagcaagactctcgagcccatgtgctggagaatctggtaaaagcaccattgtgaagcagatgagga

SEQ ID NO: 396118 - DNA, 101 bp, Homo sapiens
gtaccagctcaaggttgtcaacccccaggagtattccagcaactgcaccgaggttttcctttggaatatggataaatacaccatgatacggaaactagaag

SEQ ID NO: 396119 - DNA, 75 bp, Homo sapiens
ccaaaatcagtgattctacatctcaagctcatattttgaagtgtttacgggacacattcagctaacgtattttag

SEQ ID NO: 396120 - DNA, 75 bp, Homo sapiens
cctgcacagcctgcccaagagccaggtgaagcggcaggaggtcatcagcggcatccgtgtcattctggaccttac

SEQ ID NO: 396121 - DNA, 98 bp, Homo sapiens
gcctgcctcagcctccaaagtagctgagactacaggatattaatgcacacgcctgtgttactggtaaacccatcagccaagggggaatccatggacgc

SEQ ID NO: 396122 - DNA, 99 bp, Homo sapiens
tcccggaattaagaaaacagagcgacgagcaagaagcagcccaaagtcgaatgattcagacttgcaagatcaattctctccattttcgtctagcagtgg

SEQ ID NO: 396123 - DNA, 100 bp, Homo sapiens
ccagacccaggactcccaggtctactggacagtggcgtgtggttggagtaatagatttttccctctaccttaaggatgtgcaggatcttgatggtggcaa

SEQ ID NO: 396124 - DNA, 50 bp, Homo sapiens
ctgtgtactttccatttgccttcctggatctgtgccatcattggcgggac

SEQ ID NO: 396125 - DNA, 100 bp, Homo sapiens
gaaagtctcagcatagaaaatacattgtgggcaagcaccattgttgcatcaggcagaactggggctcccttgcatcttccagttacaaattcagtgcctt

SEQ ID NO: 396126 - DNA, 90 bp, Homo sapiens
gtagcaagtggccatggggagcctcagcggtctgcgcctggcagcagactataatgtaactgcaaactccaagctggtcattatcacggc

SEQ ID NO: 396127 - DNA, 83 bp, Homo sapiens
caccgagcgtgctgagcaaccgcagcctccgcggccgagagtgcagcgaacgagatcatcagatgttcattcatctggatctt

SEQ ID NO: 396128 - DNA, 83 bp, Homo sapiens
catgctgcgacttttgctagtgaaaaagccatcgttggtgacatcgtgaaagtcacaaggatgaatataaatggccagtggga

SEQ ID NO: 396129 - DNA, 101 bp, Homo sapiens
tgaggatgtgaaacttaaatttgaagagtctctgctggatgaaccgaatcctaacagtccagccaatagccaggcagcacagctttatcaggaaaacaaac

SEQ ID NO: 396130 - DNA, 98 bp, Homo sapiens
gccggctccaggatgccatacacgagcgggaccagctccagcgccaccttaactccgccctcccccagacttgatcctgctccctcggtgtctgcatt

SEQ ID NO: 396131 - DNA, 101 bp, Homo sapiens
ccggagggacaaaaagcaatgcaagagtcgctttgttacacctttcaagtgtctcgccatgaaccagagaatcagtcagagtgctccagtgaaacagccac

SEQ ID NO: 396132 - DNA, 90 bp, Homo sapiens
ctcagatgatgttccctaacccagagccccctccagaggcctgcaagaccccccaaagccagcagtcagcctacttcctgttaacactgt

SEQ ID NO: 396133 - DNA, 52 bp, Homo sapiens
tcccagctactcgggaggctgaggtgctgccagaccgcgacggaaagcgctg

SEQ ID NO: 396134 - DNA, 100 bp, Homo sapiens
ctgcaaaaatgtctctctatccatctctcgaagacttgaagctggttgtcttcttgcctgccctgtgtcgtaaaatgggggtcccttactgcattatcaa

SEQ ID NO: 396135 - DNA, 75 bp, Homo sapiens
gctcaaatctcctgctgtgaaccagcagaatttttgaacagctctctattggaggcatcatcattctgaaggata

SEQ ID NO: 396136 - DNA, 51 bp, Homo sapiens
cgcggactacaacctctcccagggagacatgagacatcaatcaatatatgt

SEQ ID NO: 396137 - DNA, 75 bp, Homo sapiens
actacatggacgtctggggcaaagggaccacggtcaccgtctcctcaggtgaaacctaaacatttgtcttgcatt

SEQ ID NO: 396138 - DNA, 83 bp, Homo sapiens
gccagcggccgagcgggcggcttcctggcctgggcgctccggtggcggcggagatttcaacactacacttgcacaatgtcttt

SEQ ID NO: 396139 - DNA, 89 bp, Homo sapiens
ccgggggaggcgacgctaagttgctgatcgtggcgtgagttgggaacagcttacgtttctgcaacaactggtgccgtagcaacagctct

SEQ ID NO: 396140 - DNA, 100 bp, Homo sapiens
accagaatggaaacgaccttcggacccgccttttcagccgtcaccaccatcacaaaagtgacacagccctagaggaggcagtagcagaggtgctagacca

SEQ ID NO: 396141 - DNA, 100 bp, Homo sapiens
ctgctggggacctgtttgacatcatccctccccaggttcgagaacttgtcttggacaattgcaaatcaaatgatggaaaaattgagggcttaacagctga

SEQ ID NO: 396142 - DNA, 76 bp, Homo sapiens
ggatgtgtggctgcgatcctcggggaaaccgagcaaacttaaactatttccagaagcttcaaaaggtcaatgcaac

SEQ ID NO: 396143 - DNA, 80 bp, Homo sapiens
agaacctcctgctggatggcaacatggacatcaagctggcaggtgtttcccattaaacactaccaggacaaaatcaggcc

SEQ ID NO: 396144 - DNA, 75 bp, Homo sapiens
tgacaacagggagaaccccatctccagctggaacgtgaagattgtgaataagtggaatacagctctcattggcct

SEQ ID NO: 396145 - DNA, 100 bp, Homo sapiens
agctggagcaggaagctgggaaaccacaaaggaatgaccctgagacagggaagacctgtctgctgaaagccatgctcaacctgcacgacggacagaacac

SEQ ID NO: 396146 - DNA, 75 bp, Homo sapiens
ccagaaactaacccaacagcagaaagcggtatcgtgaagagcgcttccgactgacgagcgagagcaccaaccaga

SEQ ID NO: 396147 - DNA, 75 bp, Homo sapiens
ggaacatggcagtgggcaggacatggtacctatccttaccagcataccataaagtctccaaaggatggcacagta

SEQ ID NO: 396148 - DNA, 89 bp, Homo sapiens
cgagatgatggagatgaagattattataagcagcggttaaggaaggatgataaagactatgctttaaaacaaatagaaggaactgggat

SEQ ID NO: 396149 - DNA, 75 bp, Homo sapiens
atgagctcctgacaagctggctacgggaaaccacccctactcctaatcccccgactacagaagaggagaaaacgg

SEQ ID NO: 396150 - DNA, 100 bp, Homo sapiens
ggtgcttatgatggacctaggactgctggcatgaaagatggccagaagataacattccatggtgaaggagaccaagaaccaggactggagccaggcgata

SEQ ID NO: 396151 - DNA, 100 bp, Homo sapiens
agtctcggagatctcagaggcaccgactgggagagctagagccggtgcaggccacgcagaacaagacagggaagtatgtgccgccgagcctgcgcgacgg

SEQ ID NO: 396152 - DNA, 101 bp, Homo sapiens
cgataaaggaactcaggcgcctcttcttagttgatgatttagttgattctctgaagccaagtacatcgtgcaagtggatggtaagatagggctgttccgag

SEQ ID NO: 396153 - DNA, 75 bp, Homo sapiens
tgccaggggggacagccagccagcagcaggaggtttgtgaatagcacaatggaagaagctggactttgtgggtta

SEQ ID NO: 396154 - DNA, 97 bp, Homo sapiens
gacacatctttacgattccaggacaagcttttgtccccaaaccagagaactacacgcagtacatccctctgtccatatatgacctgcagacgtggat

SEQ ID NO: 396155 - DNA, 51 bp, Homo sapiens
actttctatgaatttggagaactgaataccactagaaacatacctgtaacc

SEQ ID NO: 396156 - DNA, 99 bp, Homo sapiens
ccatgcagtggctcagggtccgtgagtcgcctggggaggccacaggacacagggtcctagcagaagatgtgactcagactgcctctgggtggggctggc

SEQ ID NO: 396157 - DNA, 82 bp, Homo sapiens
gcttacgcagaaggacctggccacgatcagcttgaacgggtctttttacgacttggccatgctgaaacagatgaacaattac

SEQ ID NO: 396158 - DNA, 90 bp, Homo sapiens
ccaagatgcagcaggtcggaggaaacagccagaccgagagcagcctgccggggcggaggttgcctgcggacacgctgggcctctgtcctg

SEQ ID NO: 396159 - DNA, 100 bp, Homo sapiens
ctgcaaccacccatatatgtttcagcacattgagtgtgtctgcaggagcattcgagaatgccagcgaggatgcatttcctatcatctgttcttaatggag

SEQ ID NO: 396160 - DNA, 75 bp, Homo sapiens
aaacctggatctgcgatctgtttgtggacgatgttcaactttggctctcctatgtggctttttgtaagaagtggg

SEQ ID NO: 396161 - DNA, 90 bp, Homo sapiens
gcagtttcctgggactgctaggagatggtcctagaacaattggagattcatacgcacacaaagaacctcaacccttacctcacaccagac

SEQ ID NO: 396162 - DNA, 90 bp, Homo sapiens
gaaagaaaaggagtcaggaatgcctcttaggatcatgcggccagatgatgccaacgtggccggcaatgtccacggggggaccatcctgaa

SEQ ID NO: 396163 - DNA, 82 bp, Homo sapiens
gaaggtggaggcagcgcggctctcaggcgatcagtgggtgaccgcggctgcgagggactttgtcatccgtcctccaggatct

SEQ ID NO: 396164 - DNA, 100 bp, Homo sapiens
taacacaagtgcagcctccagctagcactggacagggaaagaatatggcaaagctgatgcaagatgggtttattttgatccaaccattgtgtctgtggaa

SEQ ID NO: 396165 - DNA, 75 bp, Homo sapiens
gatgatgaacgtgaacaccagaggcacctaccttgcaaatgcactcggtgatggaaagagagccactattctgaa

SEQ ID NO: 396166 - DNA, 92 bp, Homo sapiens
ttgatcaattcaatgatgatacatttgggtcaggtgcagttgcttgacaaaagtaagctgaagccaggaacaagagttgctttggatatgac

SEQ ID NO: 396167 - DNA, 82 bp, Homo sapiens
cgcctgtcagcctcactcaagaatggagctggtggctgcatccccagtgacggtacaccaggggttggaaaaaccacactag

SEQ ID NO: 396168 - DNA, 75 bp, Homo sapiens
ccatttgaggtctgtcggagctgcccttcagtgtgagccatcatcaaccactttaaccccaaaattgagtcctac

SEQ ID NO: 396169 - DNA, 100 bp, Homo sapiens
cgagaccaacgtggaggagctgtgggtggaagcccacacatcttgctgacttcactcaagtgcaaaccattcagtattcaaacagtgaagacaaggacag

SEQ ID NO: 396170 - DNA, 133 bp, Homo sapiens
gcggtagtactatgatttggtatgtggccactttcatagcaagtgtgatcggcacccgagggcttgcggctgaagggggggccctcagcctcttggccttgaacgggctgttcatcttgattcacaaacacaa

SEQ ID NO: 396171 - DNA, 100 bp, Homo sapiens
agaggcggctaaggaaaggtgccacagcagagacgcgaaggagaggccctagaacctgccggtggtggtgtgcacattgagccccggtatagacagttcc

SEQ ID NO: 396172 - DNA, 83 bp, Homo sapiens
cgtccttctccactttcgccagcccgtgccgcgagcgcggcctgcaggagtttggcaatgaggagcagcagctggcgtgggcc

SEQ ID NO: 396173 - DNA, 83 bp, Homo sapiens
tgtatccgcagggcagacatccggaggatacgaagcgttttcggcttcctgcccggagctgtgcagcaaacagtcgaccccca

SEQ ID NO: 396174 - DNA, 100 bp, Homo sapiens
caggaggcaaccacactagtttagttaccgaagtgcatgtttgggattttgttgaagaaagctggatacagtaaacggaaagaatcttggaagatgcttg

SEQ ID NO: 396175 - DNA, 100 bp, Homo sapiens
gggagacgagccggccgtcccgggccgggggacccgcccgccatggccaccaagcattgatgttgatgggacaatgacagtggactggaatgaatggaga

SEQ ID NO: 396176 - DNA, 83 bp, Homo sapiens
cctcagcagccgcggcgcgcagggcacttgggtgacctccttcagcacaccccccaccccagaacggaacaaccggcctgcct

SEQ ID NO: 396177 - DNA, 75 bp, Homo sapiens
cctgcctttgacctttttgaagcctttgcaaaagtagtaaacctattgatggcaattttgctgactgtggaagtg

SEQ ID NO: 396178 - DNA, 100 bp, Homo sapiens
tcgaagaaccattgggtctgccgggagagtcacaccgggacagctcatgtcctatattcagctcttcaagaacaacctcaaagctctaatgaatcattgt

SEQ ID NO: 396179 - DNA, 75 bp, Homo sapiens
aacaactagaagatctcagttattgtcgagaagagaggtatcatccatgcccgggccctagtcagagagtgcctg

SEQ ID NO: 396180 - DNA, 75 bp, Homo sapiens
actccaggatttctgaagactattgtggaagaagcatccattaaggccctccctatcctgaagacattagctgag

SEQ ID NO: 396181 - DNA, 74 bp, Homo sapiens
aaactccaggctcagatgtcacaggtatacagaagatgggtgtccacataagaaattctttcacacacgttttc

SEQ ID NO: 396182 - DNA, 83 bp, Homo sapiens
ctggggtagcggcggcgggagtcctggcgctctgcaggtctgccatcatggatgttctcgcagaagcaaatggcacctttgcc

SEQ ID NO: 396183 - DNA, 101 bp, Homo sapiens
cccctgaagactccattcctttggtctttccagaattagaccagcagctacaggtccatgaaagacctcctcctccttctccacctccctctacaatatat

SEQ ID NO: 396184 - DNA, 101 bp, Homo sapiens
tggtgatggagattttgatgtggatgatgccaaagttttattagacccaagcgtgctgagccacgtcctggagggccacggggacgccgtgtggggcctgg

SEQ ID NO: 396185 - DNA, 100 bp, Homo sapiens
aaaactaccattcgcctgatgaactctcagagagtattatgagggaggccgaggacttcatgctccggacagagaaacggcgctgggattagggattgcc

SEQ ID NO: 396186 - DNA, 110 bp, Homo sapiens
aaaattgtatctgtttttctcagaagagaattccacaaggtgacaaacagcatgtttggtgcttcaagaaagaagtttgtagagggggtcgacagtgactaccatgacga

SEQ ID NO: 396187 - DNA, 99 bp, Homo sapiens
cgcttggttttccttgcagtcgcctgctgctgtcgtcgggagtcacaccgaggagaagactcagtgggaacatccaaaaactggaaaaagaaaacgagt

SEQ ID NO: 396188 - DNA, 83 bp, Homo sapiens
aagcccgatttgagaactgtaacaaagctctgttggacatgattgaagagctatgtttccagtgtcctctgggtgtttccaag

SEQ ID NO: 396189 - DNA, 100 bp, Homo sapiens
gtgagaccaggactgagaacagggagaggcgacccgacccccagggcccggtgctcaggacaggctctccaagagattctaactcagtcacagtttgaac

SEQ ID NO: 396190 - DNA, 75 bp, Homo sapiens
ggggaccgcgcccgcctcatttgcgccttgcagcactgctggaccagtgggaccctgaagatgtgaacctcgaag

SEQ ID NO: 396191 - DNA, 101 bp, Homo sapiens
agcgggtgctgcaggcgccgccgccggacgtcggcaacggagaaggtaatctgtaagtcagatgctccaacaggggatgttcttcttgatgaagctctgaa

SEQ ID NO: 396192 - DNA, 90 bp, Homo sapiens
gaaactcagcctccagaaacggtccagaactggattgaattacttagtggtgaaagaaaagatgttgtcccggttaagagtagtttccac

SEQ ID NO: 396193 - DNA, 100 bp, Homo sapiens
ggggcaggatggctgcgttgacacgtcttatttaatccacatcatagccctacggtgcctccccgggttttggaaaggagccggcgccccctgtggcggt

SEQ ID NO: 396194 - DNA, 83 bp, Homo sapiens
aaaggccaatttcatgaatttcaagagagtaccattgggggctttatcctgtggataaacgcagagtgaacgagtttggggag

SEQ ID NO: 396195 - DNA, 75 bp, Homo sapiens
ggaaccgctctcgcttcgtcctacacttgcgcaaatgtctccggttttatgaatgaagctatggctacagattcc

SEQ ID NO: 396196 - DNA, 96 bp, Homo sapiens
aagaagaagaagctgcggaagcccagacaccaggaaggtgagatcttcgacacagaaaaagagagcaagtcatgtgacccctcagccagaagatag

SEQ ID NO: 396197 - DNA, 75 bp, Homo sapiens
cttgaatatagccagttccattgaggtcgctacgcatttcggatctggaaacctctagaacaagttatcacagaa

SEQ ID NO: 396198 - DNA, 98 bp, Homo sapiens
ggaaatggctgaagaatatgacgagaagacgagtgaactacttggtgaaatgcctcagctcgtaaaaggaatgaaactgttaaaccaggctgatccct

SEQ ID NO: 396199 - DNA, 98 bp, Homo sapiens
gacgcaccgctccagccgcccgcgggccagcgcaccggtcccccagcggcagccgagcccgcccgcgcgccggaactcagcgagatgctgtacacaga

SEQ ID NO: 396200 - DNA, 50 bp, Homo sapiens
ctgagcctgccacgccgaggacgtggtccttcagctcctacttaatggaa

SEQ ID NO: 396201 - DNA, 75 bp, Homo sapiens
cgtgcatggatgaagcacagattgctgctgtatgcagagaggaggagatgttaaagtaacccatcttgcaggacg

SEQ ID NO: 396202 - DNA, 95 bp, Homo sapiens
ttttggatgatgatggatccatttctcctattgaggagtcaacgttgactatagtcaatggggccaatggagccaagtgtatggaaacccacaac

SEQ ID NO: 396203 - DNA, 75 bp, Homo sapiens
acttggacttccatgagaagtataatgatttatataagttccagcaggtagcagatggggcaaatgcaattgtgc

SEQ ID NO: 396204 - DNA, 83 bp, Homo sapiens
gttcagctgatgaagcttctgaaccatccacacatcataaagctttaccaggattatgttgacaaagagaaggcaattgccaa

SEQ ID NO: 396205 - DNA, 100 bp, Homo sapiens
ccgggctcgcgcaggacgcagaagggcagtggagccaggccagaacacaaagcgtgaatccggaagaaaagttcaatctggaaacatcaatgctgccaag

SEQ ID NO: 396206 - DNA, 100 bp, Homo sapiens
atcaaaagaaaatctctaaatgcagattccagaaaaattacagcacatctcagtgaatttgcaagtgcatacacaagctgagggagaatgtctttcaaga

SEQ ID NO: 396207 - DNA, 100 bp, Homo sapiens
caggaagatgggagcctctgccttgtacagttcccatcaccaaaccagtccagctacgggggcccagccagccagcagctgagtgggggttacggaggcg

SEQ ID NO: 396208 - DNA, 95 bp, Homo sapiens
gccgcgcccccctccaccccggccgcgcccaagcgcaggggctcctcgggctcagtggctgacatagcccagagatacaggataagcaaataccc

SEQ ID NO: 396209 - DNA, 98 bp, Homo sapiens
gctgctgtcccgggcctaccccctggactccctggagaagcagatggaaaaggtggtggaggtggatacagcagtcggagaacatctggcagagacaa

SEQ ID NO: 396210 - DNA, 100 bp, Homo sapiens
tgccagtcataatagatttcgagacaacagtggccttctgatgaatactttaagttggatttggtctagggagtcccagaaagaagtagaaaaagagaga

SEQ ID NO: 396211 - DNA, 75 bp, Homo sapiens
caggagactagacctcgtaattacattctctcggccagcgcctccgcggtaccgaggagaaggcattgtatatgg

SEQ ID NO: 396212 - DNA, 100 bp, Homo sapiens
agggcggaaaccacatccccgaaagcccacaccagttatcctattgaaagaggggactgatagctcccaaggcatcccccagcttgtgagtaacatcagt

SEQ ID NO: 396213 - DNA, 100 bp, Homo sapiens
taaaaactcagctgagttcacaggagagaagaccaagaggtcggagaagaggtagaaaatgtggcagaggccataaaggagaaaggcaaagaggaacccg

SEQ ID NO: 396214 - DNA, 87 bp, Homo sapiens
gcgctcctgctcctccaggcgctgcccagccccttgtcagccagggctgaacccccgcagggaggctgagaagacaaaactccttat

SEQ ID NO: 396215 - DNA, 50 bp, Homo sapiens
gaggaggatgatgcagcatccaacttggctgctgaacagttcaagaaaac

SEQ ID NO: 396216 - DNA, 88 bp, Homo sapiens
cctcctgttccgcttctcagaggacgccttcaacaccaccttcatctccaccatcggtttggtgcacctcgatttggaggaagtaggg

SEQ ID NO: 396217 - DNA, 75 bp, Homo sapiens
aggaagccttgaggacctactcacagataggaattgaaggtccgcgggagagctgtggggcttggtgagtgtttc

SEQ ID NO: 396218 - DNA, 98 bp, Homo sapiens
cgtccgttgagggcccgcgccgcatggaggccggctgaggagcgccgctgcctcgcctcgggtgcggggggcaatggcactgcagctctgggccctga

SEQ ID NO: 396219 - DNA, 87 bp, Homo sapiens
tcccgggctgcgttcggacccctgtcggagagtaaatccgaagtaaattcgaaccaccattatttcacccgaatgtgtacccttcgg

SEQ ID NO: 396220 - DNA, 99 bp, Homo sapiens
ggtggtctaccctacctggctccatgaagatgccacagggatcctaaaatctaatcaagctatagaagtggtctggagtcaccagcctgcattcttgag

SEQ ID NO: 396221 - DNA, 103 bp, Homo sapiens
atgtcagacgcagccgtagacaccagctccgaaatcaccaccaaggtgcgcgcggagccatggttatcatgtcggagttcagcgcggaccccgcgggccaggg

SEQ ID NO: 396222 - DNA, 90 bp, Homo sapiens
cggtcctcagcgactcttctgacctccgcgcgacgtacccgccgccgccgttggctggagtgccggtggtggtgtgcacattgagccccg

SEQ ID NO: 396223 - DNA, 100 bp, Homo sapiens
gtgacatcaagaggaagcggaaaccagtggccacagcatctttgtctagccccagtgcaggatgaagatgagctggattcccacaccatggtgaagacta

SEQ ID NO: 396224 - DNA, 87 bp, Homo sapiens
gcgaagtgtgctggctgtcatcgcctttatcaccctggtcctcaggcttggcaactcttgtgaaatttcatagatctcgtcgcttac

SEQ ID NO: 396225 - DNA, 100 bp, Homo sapiens
aaaaggagtggactttgttctgaattactccaaagctgttccttgcctgtatctccccttggttcaatagctaccagatttttggaagaggaggaactga

SEQ ID NO: 396226 - DNA, 100 bp, Homo sapiens
atgttcttgaagtaccatggcgtggattaaaagttcatcagagaagatatgaaatataaagatgctactaataaacacagccatctgcacagagaagata

SEQ ID NO: 396227 - DNA, 90 bp, Homo sapiens
tcatggtcttttggtaaagttcctttgaacacatgccttcaggaactcggaccattggagccagaatggcagaagattttcaagtcccgg

SEQ ID NO: 396228 - DNA, 74 bp, Homo sapiens
gattgctgtgaaagtcaacccggagcgtgaggacagtgagactcgaacaacccttcgcaggtgttacagtcggg

SEQ ID NO: 396229 - DNA, 90 bp, Homo sapiens
tgggagatccacagctaagacaccgggacctcctggaagccaaaaatgacaacctcaaatatgaccacactacagcctgtacacaacaag

SEQ ID NO: 396230 - DNA, 98 bp, Homo sapiens
ctccagggagaccctctgtgggtggacccaagtggagagattgtggaactggcgaaaggtgcatgtccctggaaggagcatctctaccacctggaatc

SEQ ID NO: 396231 - DNA, 100 bp, Homo sapiens
ggaccgagcgcctcgacctcggtctgagataaaccgagaaaactggtgtacaatagagccatgccctgatgcagcatctcttctggcttccaagcagagc

SEQ ID NO: 396232 - DNA, 100 bp, Homo sapiens
gctcagtacctctgcaatgttcgacacatctttacgattccaggacaagcttttgtccccaaaccagagctagagagattgcaagctgaaaatacctcgg

SEQ ID NO: 396233 - DNA, 88 bp, Homo sapiens
ggaatcctacgatgaacaaaaaccagttgcgaaatggtctgaggcagagtgtggttcagtgttctttgacctaatgagagaaatcaga

SEQ ID NO: 396234 - DNA, 100 bp, Homo sapiens
ctgcggtagcagcgactcatgagagcgcggccggaggacagcagggagaaggttttaaggtgaaaacgaagaaagaaatccggcatgtggaaaagaagag

SEQ ID NO: 396235 - DNA, 98 bp, Homo sapiens
agctgtcagtgttttcctgagaaaggagcgagagtattatacctgaagaaccttagccctcgggtgactgaaagagatcttgtgtcattgttcgctcg

SEQ ID NO: 396236 - DNA, 97 bp, Homo sapiens
tcacagtcaccgctgtcattgtgggtgaccaagaatatggcccaggtgaccaaagccctggacaaggccctgagcaccatggacctgcagaaggtct

SEQ ID NO: 396237 - DNA, 100 bp, Homo sapiens
tcagcggctctttgtatgatgacttctccaaggagaagtacatcctggactcatcgccagagaaactccacaaggaattggaggaggagctcaaactcag

SEQ ID NO: 396238 - DNA, 100 bp, Homo sapiens
cgggatattctcttctgtgctgtcaaggcaccaaatcagatgaaagccaaggaagggaggaatgtgtacagttcttcacgctatgatgattatgacagat

SEQ ID NO: 396239 - DNA, 100 bp, Homo sapiens
agagtcaagggcacgagcatcgggatttcaaatatgcgtgcattagagaatgattttttcaattctcccccaagaaaaactgttcggtttggtggaactg

SEQ ID NO: 396240 - DNA, 75 bp, Homo sapiens
cacatagacatttacgcggatgtcggcgaagagttcaaccagtgttctaagaacggaagcatctgggctggatgg

SEQ ID NO: 396241 - DNA, 100 bp, Homo sapiens
gcggaggagagctcaagctaagaggaagaacttgtcgcttttcctaagcattagtttgttaattttctggggttcctcccttttgggtgcccggttatac

SEQ ID NO: 396242 - DNA, 100 bp, Homo sapiens
ccgtctatcagctaactagaatgtgcaccataagaatgagttttgtgaaagggtggggagcagaataccggaagtttctaaaacatcatttgcgaggaaa

SEQ ID NO: 396243 - DNA, 101 bp, Homo sapiens
ggcagtgccacctgccagctgtcagcaagactttgagaatcactacaagaaaaactccttgtggtgaaggttctaagacgtgggatcgtttccagatgaga

SEQ ID NO: 396244 - DNA, 75 bp, Homo sapiens
aggaaaaaaagccagtctcaacgttttacttatacaccagcactagggcgcaagagaagccgtactggaatatta

SEQ ID NO: 396245 - DNA, 100 bp, Homo sapiens
cgcgggtgtttactccaacatgggcaactacaagtcctttggtgacaccaagtttgttcccaacttgcccaaggaaggacacgtctgccacatcccagtc

SEQ ID NO: 396246 - DNA, 98 bp, Homo sapiens
aaggggacgtggtagcggcggcgggggcacagccaggcccttgccagcatccagccatgggggatatgaaaaccccagattttgatgaccttctggct

SEQ ID NO: 396247 - DNA, 100 bp, Homo sapiens
caactacacctgcctgttcgtcacgttcccgcagggcagcaggagcgtggatatctggctccgagtgcttggcctttccgttccgaacgtccacggcgcc

SEQ ID NO: 396248 - DNA, 74 bp, Homo sapiens
ccaagggacaatggtcaccgtctcttcagagtttatgtggccgaggcagacaagtggaattaggccttgctgca

SEQ ID NO: 396249 - DNA, 90 bp, Homo sapiens
caaggccacgacccacgagatcatggggcccaagaaaaagcacctggactcttccatgaggcaggctgaacctgcagatatgcgcccaga

SEQ ID NO: 396250 - DNA, 90 bp, Homo sapiens
gttgtggcgaggcagatcctgccccgtggccgcggccgtctcgtaggaaatctgaaatagagtactatgctatgttggctaaaactggtg

SEQ ID NO: 396251 - DNA, 50 bp, Homo sapiens
tcaagacgatcatagtcactgatatctcttccaaacgcatgatgaaggag

SEQ ID NO: 396252 - DNA, 100 bp, Homo sapiens
ggggaggctgctgcgacgaagagttccctcagcctccggccttgtgtgtccgactcggcagcagtgatcaggatcctcatgaccagccaaagagaagaag

SEQ ID NO: 396253 - DNA, 80 bp, Homo sapiens
ggacttcgagctgattcagcgcatcggcagcggcacctacggcgacgtctacaagacaatgcagatcttcgtgaagactc

SEQ ID NO: 396254 - DNA, 87 bp, Homo sapiens
aacggcggtacccgggtggttaaacttcgcaaaatgagggcttccctggaggccgccattgcagatgccgagcagcgtggagagctg

SEQ ID NO: 396255 - DNA, 100 bp, Homo sapiens
caggccttgtgcctccaaggaaaatccacctcgcagcttgtaaatctacagggagaagatgaatcagttatcctcaaatcctgcacacggcggaaaacag

SEQ ID NO: 396256 - DNA, 50 bp, Homo sapiens
tgacgagctgctagccagcaaatctgtcaataccagcaaatatgcagaaa

SEQ ID NO: 396257 - DNA, 90 bp, Homo sapiens
gacatggttaatacagtttcatttaaaaggaaaccacataccaatggagctcaaagcattcagcaaaccagggttccaaggtgaatgtat

SEQ ID NO: 396258 - DNA, 100 bp, Homo sapiens
ctacgtggcggcgctggaagggatgtcgtctcagcagtgctcgggcgcaggtgagcgccgcgagggggtcaacgcctccgtcagctctgatgtgcagtcg

SEQ ID NO: 396259 - DNA, 76 bp, Homo sapiens
agtaccaccctgttgtacatccactggacctaaaatatgaccctgatccaggtcacagggattatggacccagaac

SEQ ID NO: 396260 - DNA, 83 bp, Homo sapiens
ggacgaggagtcggaggagccgcgggcggcgcggcccagctcgttccagcaaacggggattcagcgtccgatcctttggaaca

SEQ ID NO: 396261 - DNA, 74 bp, Homo sapiens
agaaaacctgcagaagaactggcttcgggaattttaccagacctgcctagagctggaacgttacctccagagcg

SEQ ID NO: 396262 - DNA, 82 bp, Homo sapiens
ccggaagctggtggaacagctacgcatagaagccgggattgagcgcatcaaggaaataatgaagatgtttcattttcaagac

SEQ ID NO: 396263 - DNA, 75 bp, Homo sapiens
cccagagactgctgagcccgtccgtccgccgccaccacccactccggacacagattgaggacgagacgcaggtgt

SEQ ID NO: 396264 - DNA, 74 bp, Homo sapiens
gactgtcttgggcagcatgcagtgctttctggatgcttgtggttggtggcatcgaccgggtttatgaaattgga

SEQ ID NO: 396265 - DNA, 87 bp, Homo sapiens
aatcatgtcaagcgaagccttgaaaaagctgccctgagacggtgtcccgccgaaaggccatttcataattctgaatcatgtctgata

SEQ ID NO: 396266 - DNA, 100 bp, Homo sapiens
agatggagccctgcatatgattggctctttagctgaaatacttctgaagaattatatccagatcgagagacagaagattctgaaagggttcaatgaaatg

SEQ ID NO: 396267 - DNA, 88 bp, Homo sapiens
atgaaaagggaggaaactcagaaaagcgtaagcttgctcagtgtttgattgcatcgaggtctatgcccctggcttcaaggactctgtg

SEQ ID NO: 396268 - DNA, 50 bp, Homo sapiens
cagaagcagatggattcgtccttttagcttgcaagtagaagtctcaggca

SEQ ID NO: 396269 - DNA, 75 bp, Homo sapiens
gtggctgagaactgtgtcttcctggagactaggctggcattttgactttgggaaacctgctaatattttagttat

SEQ ID NO: 396270 - DNA, 71 bp, Homo sapiens
tgaaacaaaaggagaccctaatcttcaggaagctgagctgaacacattacgatggatgatggaaacataag

SEQ ID NO: 396271 - DNA, 98 bp, Homo sapiens
cgggaataacacaccggagacttttggggggaaactaggtcgatggtcggcggcgcccggatgggcagctgaggtcaggcagttcctgctccgactgg

SEQ ID NO: 396272 - DNA, 100 bp, Homo sapiens
gggcttcgatcccttctctgatttgctgtcagccatgaacggatggatgtgatgcctgctagccaaaaggattttgagaagagggggaaaaaggaagttt

SEQ ID NO: 396273 - DNA, 75 bp, Homo sapiens
gcaacatccgcgagttcctgcgcggctgcggggcttccctgcggctggaggtgttcccttcccaaagaacttcct

SEQ ID NO: 396274 - DNA, 74 bp, Homo sapiens
agtggaatatgccattgaggctatcaagggctgtggcagtctgtccacatcgatgacctccggagatccaccct

SEQ ID NO: 396275 - DNA, 100 bp, Homo sapiens
tacttgaaaccataatgctacaaactctagtatggtggtgatattacccgaaaaatgaagcttttgaagagacaagcagaagggaaaaaaaagctgagga

SEQ ID NO: 396276 - DNA, 100 bp, Homo sapiens
aaaacctggacagaacttcatgtgtctgtggcagtcttgtaaaaagaacctctggcgggaggtgacccgatacctgcggctgggggacattgacgcagcc

SEQ ID NO: 396277 - DNA, 100 bp, Homo sapiens
catgaccttccagaattacgggcaagcgctgttcaaacccatgaagtcaccgacgatgagggcgcacctgctgtcctggagcttccgatctctgttcggg

SEQ ID NO: 396278 - DNA, 75 bp, Homo sapiens
catcctgggtgctggccctgtgctggagacacatcatctcagagttggagcacctgacgtttgtcaacacggatg

SEQ ID NO: 396279 - DNA, 82 bp, Homo sapiens
gagggtcccacggtggaagcgagagaggaggttggaatcgaagcctcttaaaatggcagatgacttggacttcgagacagga

SEQ ID NO: 396280 - DNA, 100 bp, Homo sapiens
tgggcggcggtcggctcctgctgcccctgtgccgagaccccgcgcacctggccaggtgacccttgaggatgctggaactgtcagtttccacgtgggcacg

SEQ ID NO: 396281 - DNA, 74 bp, Homo sapiens
gtggttaccgctgaggagctgcagtctctgtcaagacattccacttcttccatctattacatctctgagtctaa

SEQ ID NO: 396282 - DNA, 98 bp, Homo sapiens
gggaaccctgccctctctgtcagacacctgtccttccttctacagaccatgctggacttcttgtcggatcagggtccaactggcccaccttcaacact

SEQ ID NO: 396283 - DNA, 88 bp, Homo sapiens
gagagccaaaatcattgagaagtggatcaacatcgctcatatggcagatgatcagggctgtattgaagagcagggggttgaggattca

SEQ ID NO: 396284 - DNA, 90 bp, Homo sapiens
ggaccttcaagactgtctttgctgagcacatcagtgatgaatgcaagaggcgtttctataagaattggtgggagacctccacagaaccct

SEQ ID NO: 396285 - DNA, 100 bp, Homo sapiens
agagagtgaggagccagacgacaagcacacactatggcgctgaaacggattaataagcctacttctgcttcctcctggccgctctgggtgtgacagctgg

SEQ ID NO: 396286 - DNA, 75 bp, Homo sapiens
cggcggaggggagccagggcgccccagcaggagacgcaggtcagaatggaaatgggctgcagaccgggcagctat

SEQ ID NO: 396287 - DNA, 89 bp, Homo sapiens
ccggaatatcaagattcatctttttcactaattgtggcattcacacctttctgagaaaagtctacagcattctttctctgcaggttctc

SEQ ID NO: 396288 - DNA, 100 bp, Homo sapiens
ggcgcgggcggcggcgccggcaggaagaaactcagccacctgtgacaaatttgagtgtctctgttgaaaacctctgcacagtaatatggacatggaatcc

SEQ ID NO: 396289 - DNA, 83 bp, Homo sapiens
cagcttgatcttctagactccatggcaccgggctgagcggggttctccaaaaaatgtggaatcctttgcatctatgctgagac

SEQ ID NO: 396290 - DNA, 80 bp, Homo sapiens
cggacgcaggcctggtatggagaacgagaggaaagaagtcccttatcacgggtcggcactcttcaccctcccgagccctg

SEQ ID NO: 396291 - DNA, 50 bp, Homo sapiens
tcgcagaacgccatcaaccagctcacgaaagcaagagattatcaaagtca

SEQ ID NO: 396292 - DNA, 83 bp, Homo sapiens
ggaccgcctgcctggccattgcgagcggcatctacctactgccgccaagctgagccaccaaagaaggaggctgccaccacggg

SEQ ID NO: 396293 - DNA, 111 bp, Homo sapiens
ctgagtgatgggcagcccccaccacccgcccaggccagccccagcagcaacagcagcacagttttccaagagataacttcaccaagatgtccagtgataggcaaaggtccg

SEQ ID NO: 396294 - DNA, 95 bp, Homo sapiens
aagaatgtgcagaaaaaattcttgaaacatggggagaactgttgtcaaaatggtctgccaaaatgtctgaaagatcagatctccttcacttcaag

SEQ ID NO: 396295 - DNA, 75 bp, Homo sapiens
agccctggaggcttactgcaagaagtatgagcagctcaagatgaagatctccttcaacgacaaaagcctgcagac

SEQ ID NO: 396296 - DNA, 99 bp, Homo sapiens
gtttcctactgacgacaggtgattacacgtgtgcttctgatggagggatcaggaaagggtgtcaaattgagaaccaggtagatccccaccacctacagt

SEQ ID NO: 396297 - DNA, 82 bp, Homo sapiens
agttctctggagccccagattcaacccgtgtacgtgcctgtgcctaaattggtagctggcagtgttgtgatggcttttgaag

SEQ ID NO: 396298 - DNA, 83 bp, Homo sapiens
atcctttctcatcagggtcagtcacagccatgtgggctacacactctcctacaaactcatggagagatttctcatggatggct

SEQ ID NO: 396299 - DNA, 76 bp, Homo sapiens
cgagtccccgaccctccccaagcaaggtgtgatgaatgcagactctgctaccattttggctgtttggatcctcctt

SEQ ID NO: 396300 - DNA, 50 bp, Homo sapiens
gcggcccggaggacctgcctctcgtcagatgcctccagcccagtccctgt

SEQ ID NO: 396301 - DNA, 80 bp, Homo sapiens
ctcgcatcaagaagatttatgaggagaaggtatagtcgtctccccctccaccacggcaagtcctgcagagggaaccagct

SEQ ID NO: 396302 - DNA, 80 bp, Homo sapiens
ggaagcagccgatccagcctgcggagcctgtggggcagctcgtttgatcccttccaactgataccttgtaatttttttag

SEQ ID NO: 396303 - DNA, 75 bp, Homo sapiens
catgtatcctgtgtttaatgaggattacggggcgctgaaagacatcgtgatcaacgcaaacccggcctcccctcc

SEQ ID NO: 396304 - DNA, 100 bp, Homo sapiens
tgacctggatgaactcatccttcaaaccgacgcatactcaggagcagagtttgcagctcaccttgtgaagatgaaatatccaagaatctgtattctagat

SEQ ID NO: 396305 - DNA, 113 bp, Homo sapiens
cggggacaatgaggaggagacggagcacgccaaaggatcacagttgaaaactttggtgcaacagaagtgaaagagctggttctaaatggtgcagacacagctgttaacaaaca

SEQ ID NO: 396306 - DNA, 80 bp, Homo sapiens
aaggaaaatatcccaaggactaatctgatcgggtcttccttcatggtggattacaggaggtggcagaacagttagagctg

SEQ ID NO: 396307 - DNA, 83 bp, Homo sapiens
cgtcgggtcggcccgggccctgcgcagactgtgatgactgggagagcgggctgaatgcaatggagtgtgcattacatttggaa

SEQ ID NO: 396308 - DNA, 74 bp, Homo sapiens
gaaggcgcgagtgaggaaaggaggtactgtagtgcacagccagaggacaacacatcacacacaagaaacagttg

SEQ ID NO: 396309 - DNA, 96 bp, Homo sapiens
gctcaagggactgtgtccaccctcagctccagcagtacccgcggctacgggaggagatggagcgcatcgtgaccacccacatccgggagcgcgagg

SEQ ID NO: 396310 - DNA, 82 bp, Homo sapiens
gataccagcagggaaatggaggagtgacggaaagaaccagactcctctctgaggtcgttccaggggtagaggaggcatgaag

SEQ ID NO: 396311 - DNA, 82 bp, Homo sapiens
agaaaaccagctgagacagggcgccacttactaggccccagcacccgcagagcagacactgcgatgacaacggacgacacag

SEQ ID NO: 396312 - DNA, 50 bp, Homo sapiens
tagcctattggaggaaaacacaccaaggtggaggtggaggaagcgtccct

SEQ ID NO: 396313 - DNA, 57 bp, Homo sapiens
tgcagagagcggacttccgcgacgcgggtggtcttcgagggatagcacgaggtggtc

SEQ ID NO: 396314 - DNA, 82 bp, Homo sapiens
cgcgtgggcaccctgcaggtggtcagacatgtcatcaactcagctggacacattcagctaacgtattttagcaggtggagtg

SEQ ID NO: 396315 - DNA, 90 bp, Homo sapiens
ctcatgaacagaaacacctaggaagggagaactgatgccgaaagttcagtataaatcgaactgtaaaccatccacatttgcatatcctgc

SEQ ID NO: 396316 - DNA, 89 bp, Homo sapiens
ttgccaaggcacgggctggctctgtgcggctcatcaaggttgtgattgaggacgctggaagagcctgtattgtcctcacaatagtatag

SEQ ID NO: 396317 - DNA, 98 bp, Homo sapiens
cgcggccatggcgacgggcggccagcagaaggagaacacgctgcttcacctcttcgccggcgggcaccgttcacctctggaaaaggattcttcacctg

SEQ ID NO: 396318 - DNA, 100 bp, Homo sapiens
gtgcgccgcgcgggacccggaggaccgtatccccagcccactgggctacgcagaggagaaggcagagcccccccaggctatgaatgccctgatgcggttg

SEQ ID NO: 396319 - DNA, 100 bp, Homo sapiens
cttgagtgtgtatctctacatgcgctctttgaaagcgccccggaatgacctgtcgcctgccagctctgcttagcagtgtctgcaaaaacgaatcttttcc

SEQ ID NO: 396320 - DNA, 90 bp, Homo sapiens
ctttaagacggtctacaaaggtctggacactgaaaccaccgtggaagtcgcctggtgtgaactgcagctcccgttctctgtcatcggttc

SEQ ID NO: 396321 - DNA, 100 bp, Homo sapiens
gtcacagtgttgctgcaacatagagctgacattaactgtcagacccctgtaaaagagcccaacagtgaaaatgtagatatcagcagtggaggaggcgtga

SEQ ID NO: 396322 - DNA, 96 bp, Homo sapiens
atgtattttgtgatcgcagcgatgaaaggtgtgatgaatgcagactctgctaccattttggctgtttggatcctcctttgaaaaagtctcctaaac

SEQ ID NO: 396323 - DNA, 74 bp, Homo sapiens
caaaagtgaaattttacgaactcaggcttcctgtttgatgaagatagcaacggaaaactcaaaatggtggcagt

SEQ ID NO: 396324 - DNA, 98 bp, Homo sapiens
acttcacggatcccctgaagctcatccatggacttccatggactacaggttgaatcaagggattctttgaatagcatagccctgaagtttgatacaac

SEQ ID NO: 396325 - DNA, 83 bp, Homo sapiens
gcgggccctgctggaccagctcatgggcacggctcgggacggagccttcacgtaaatgggtccagtcatgcctcccagtaaga

SEQ ID NO: 396326 - DNA, 50 bp, Homo sapiens
caataatcgacttgcagaacatgtaacaaaggccctagtgctcagatacc

SEQ ID NO: 396327 - DNA, 99 bp, Homo sapiens
ttctcgttcaagttaatccaggtgagactttcacaataagagcagaggatggaacacttcagtgcattcaagtgaaagagtttctagccaaagccaaag

SEQ ID NO: 396328 - DNA, 96 bp, Homo sapiens
gcggcggcggcggcggcggcggcgctgctcccgggggcgacgggctgctttgaatgctgcatcaagtgtctgggaggagtcccctacgcctccctg

SEQ ID NO: 396329 - DNA, 75 bp, Homo sapiens
cgagctggctttaatcctgaaagccatgcagcgggacatccataaaaattcatcagagagcattttactactgag

SEQ ID NO: 396330 - DNA, 100 bp, Homo sapiens
cacttgttgcagaaacagccaaggagcccaggtgcggcccggagcccactgaagtcttcactgtcggacccaagaccttttcctggacaccctttccgcc

SEQ ID NO: 396331 - DNA, 51 bp, Homo sapiens
ccgctgccgcccagcacgtccaggctgccctgaggatctgtgtttggtgaa

SEQ ID NO: 396332 - DNA, 83 bp, Homo sapiens
cactctgccctgttgctgtcgcgccgctgctggttgctgtccctggtcagcccaaggccaaccccactgtcactctgttcccg

SEQ ID NO: 396333 - DNA, 50 bp, Homo sapiens
gcggaggagcccgaccgacccggtcttattagtaggtaagaaacagctgc

SEQ ID NO: 396334 - DNA, 75 bp, Homo sapiens
actgactttcagctatggaatcgcttctgggctggctggctgagaaactacctactcttcgttccacccctacag

SEQ ID NO: 396335 - DNA, 100 bp, Homo sapiens
agcatctgaaaaagctgtggaaggctctggataaggaccagtacctgcccaggaaactggtggaggagcatgtcagccgcatccgggaggagctggaccg

SEQ ID NO: 396336 - DNA, 74 bp, Homo sapiens
gagctggaggaggagtattactcgtccaggggcggccggcgagtcccagtgagagcggagggtgccagaggtag

SEQ ID NO: 396337 - DNA, 82 bp, Homo sapiens
ctggattggtgaaactgaatcacaggagatatttccaggtcctggcctggcaatcagagtaatatgtgctgaagaaccttat

SEQ ID NO: 396338 - DNA, 100 bp, Homo sapiens
gctctctctccctggaggcgaacccttgtgctcgagatggcagccaccctgctcatggctgggtcccaggtctgccatcatggatgttctcgcagaagca

SEQ ID NO: 396339 - DNA, 90 bp, Homo sapiens
tctaacgttttagaaaatcataacaagcggttctctaccctgtaaagccatgttcactgcccacttcccatgagatttctccagtgcccg

SEQ ID NO: 396340 - DNA, 75 bp, Homo sapiens
ttgctcccggagcgcttgaaggagctgcggataacggcaaaagcttctatcatttttgttactcttcagtacaat

SEQ ID NO: 396341 - DNA, 100 bp, Homo sapiens
gcctggcccagcgctctgcctcttcgacgtggatgggaccctcaccgccccgcggcagccctaccggatcttcaacacctggctgggggacccgtccaag

SEQ ID NO: 396342 - DNA, 60 bp, Homo sapiens
gcataatggatgaaaggaaccgacagacagctcagcagctcctcctcctatagtggggac

SEQ ID NO: 396343 - DNA, 93 bp, Homo sapiens
actttgtggagaaagtcgtcttccacttgcacgaaagctttcctaggccaaaaagaggaaggatctgagtctctccctgcggagacagccctg

SEQ ID NO: 396344 - DNA, 90 bp, Homo sapiens
agcccctacttcaagtactccgtcatgatcaacaaggccacgccctacaactacccaggtgtggatgaggtcaccattgtcaacattttg

SEQ ID NO: 396345 - DNA, 98 bp, Homo sapiens
taaactagcagtttagggtgtcaggaagcgagcagctgcaaagcatctaatagaacgctactaccaccagttaactgagggctgtggaaatgaagcct

SEQ ID NO: 396346 - DNA, 78 bp, Homo sapiens
agcggacacaggcaggagcgccccatcatttgacggccaccagcccctcgggttccaagatgcagctactggagacag

SEQ ID NO: 396347 - DNA, 75 bp, Homo sapiens
gggaagagaagatcatcgagcatttcaaacgggaggaaataatgctggccatacagttgttgtggattctgtgga

SEQ ID NO: 396348 - DNA, 100 bp, Homo sapiens
ccaaatacatcagcttgtaggagacagaggttttgatgatgatggttcagaatttcatgaacatatatttctggagaaacacctggagagctttccaaaa

SEQ ID NO: 396349 - DNA, 75 bp, Homo sapiens
ccaacatggcggcgccgagcctgagccgagagttctctacttaaaagacaatgactactgatgaaggtgccaaga

SEQ ID NO: 396350 - DNA, 98 bp, Homo sapiens
ggtggagtaggaggcaggtctccgcgacttccttgccgtccaggaagggatttcgacaccagaccaccaagtttttgtatcgcttggtaggatcagaa

SEQ ID NO: 396351 - DNA, 83 bp, Homo sapiens
cgttacggccatcacggcggccgcagtggcgtcctggagccctcctcaggttgttgatgagcgtgaattttttgagatcatgc

SEQ ID NO: 396352 - DNA, 101 bp, Homo sapiens
ctttctccacccatcccgagaacaaactcccccactggaaaggattctgaaagaaatgaagtcagccctcagaaatgaagttgactgcctgctggctttct

SEQ ID NO: 396353 - DNA, 82 bp, Homo sapiens
aacagggcagacgttagcgtgagtgatcactctcaatcccggttgattatggaagattcccacaagagtaccacgtcagaga

SEQ ID NO: 396354 - DNA, 74 bp, Homo sapiens
gagaaatcaacatggcaacttctggtaatggtcaggatcaaatctaaatcgctgtggtttccgaggctcttcat

SEQ ID NO: 396355 - DNA, 74 bp, Homo sapiens
caagagccaacaagcatctgttatatgactttgctataaaacacgtgaccctagggaaacttttgaagttagcg

SEQ ID NO: 396356 - DNA, 98 bp, Homo sapiens
accgtttgtgtgcaatgccccgggctgtggacagtcgtccctggggatgagcccagggagaagatggacttggtcacctactttggaaagagaccccc

SEQ ID NO: 396357 - DNA, 100 bp, Homo sapiens
cgctgctgctcgccgcgctgcgcccttcggccgcctacttcgggtcaaaatgcagatcttcgtgaaaacccttaccggcaagaccatcacccttgaggtg

SEQ ID NO: 396358 - DNA, 83 bp, Homo sapiens
cggagacacggccagtaacggagatccccagatccacgtgggactcctgtgtcgtgaaaactacccctaaaagccaaaatggg

SEQ ID NO: 396359 - DNA, 87 bp, Homo sapiens
cgcacagctgcctgtcaccccagatgtcctcatcatcccgtcagagctgaggtacttcgtgaagggctatggcgtgtgctcggtggg

SEQ ID NO: 396360 - DNA, 100 bp, Homo sapiens
gcggggtttgccgaggggcctcgccccgggtctcacgccgcgggccatgcgggctggatgccgacctgggaaaggtacttcgtactggatttcgaggctg

SEQ ID NO: 396361 - DNA, 83 bp, Homo sapiens
tcccagagctttcacgaaggcaccgacgtcatcatgctgaccaccaatcagatccgtaaggctgaccccgcactacatctacc

SEQ ID NO: 396362 - DNA, 101 bp, Homo sapiens
aggaaagctgtgggaagaaaagcagggtgctggtttctaggacactaaacctcatggctgacaaacgggctcatcataatgcactggaacgaaaacgtagg

SEQ ID NO: 396363 - DNA, 51 bp, Homo sapiens
ggtgacagtctgcatgtgcagttttcaggttacgagaagtttctgagaagc

SEQ ID NO: 396364 - DNA, 75 bp, Homo sapiens
cagtggagcagctctgaagatgcaaaggagccaaaaacctgtatatcatctccgtgaaggggatcaagggacggc

SEQ ID NO: 396365 - DNA, 98 bp, Homo sapiens
ggtacctctgcccgcggtcctcgctctcgggcggggcggcggcgacgcggacctgcggactagcgaacccggaggtactccaaagattcaggtttact

SEQ ID NO: 396366 - DNA, 75 bp, Homo sapiens
cagagctacccttcttggagcccacagggttgtcatttacgtgctgaagcatattgacttgaggaaaacgccttc

SEQ ID NO: 396367 - DNA, 97 bp, Homo sapiens
aatttcaagacaattttggagtgggaacccaaacccgtcaatcaagtctacactgttcaaataaggcaccttctaaaaatgaacaagagcagctctg

SEQ ID NO: 396368 - DNA, 83 bp, Homo sapiens
ggtgcctgtccccgggggcgccatggcgaccggagcgaacgccacgccgttgggtgagaagccctaccactgcaactgggacg

SEQ ID NO: 396369 - DNA, 82 bp, Homo sapiens
cgcgccccgccgctgagccgtcgcggagccgcgcagccctcggagcacggctgaagctcagggccctgtctgctctgtggac

SEQ ID NO: 396370 - DNA, 75 bp, Homo sapiens
ctttcttaatagaacatcactgttaaccctagaggtgctggttgccgaggagaacgtggacttccgcatccacgt

SEQ ID NO: 396371 - DNA, 96 bp, Homo sapiens
ggatggtggaggaatgaaaacgccggagattctctctcccttgctgtctttgaaaaagcaagttgccatgtgaagagggccatatagcataggagc

SEQ ID NO: 396372 - DNA, 112 bp, Homo sapiens
acttctggttgccaccaccttcactcacagctaccctttttgctggaggattgacatgtacgtggaggggacactggatctgctggaactgcttatcatgcatcctttctta

SEQ ID NO: 396373 - DNA, 74 bp, Homo sapiens
cagtccgaatcgtgcgatgacaatggaaaatgtttataggaggccttagctgggacactacaaagaaagatctg

SEQ ID NO: 396374 - DNA, 95 bp, Homo sapiens
ctgacttgagcctgcagtgtgctgtgagagatctaccactagaacaaattggagctctggcagatcagcatatcattcatgtggcatgtggcgag

SEQ ID NO: 396375 - DNA, 100 bp, Homo sapiens
gaaatggatttgcatcttgtaatgtgtttaacaaagccacgaataacctataatgcggaagatccatccaaaagctatgtgaaattacgagactttgtgc

SEQ ID NO: 396376 - DNA, 83 bp, Homo sapiens
ttgtcctggctcttgccctcatcctggttctggaatcctcagttcaaggtggacccaagagccatatcagtgctagcaaaatg

SEQ ID NO: 396377 - DNA, 50 bp, Homo sapiens
ggccgtggccgtggggagaccgtctgtttgaacttgttctggaagctgtg

SEQ ID NO: 396378 - DNA, 90 bp, Homo sapiens
tatatcaagcattcaaattgctcacagctgatcctaagttggattggatgctgctggcaagacaaccattctgtataaactgaagttagg

SEQ ID NO: 396379 - DNA, 100 bp, Homo sapiens
caagaggaggtggcggcggtggtagtggtgggctcctgcatgaccgacctggtcagctccgacagttagttaatatgtgcatcaacccagatccagagaa

SEQ ID NO: 396380 - DNA, 75 bp, Homo sapiens
tcgtttgctttctccaacgactcacggagggagaagaagtgggtgactgtgggtgacacgtccctgaggatattt

SEQ ID NO: 396381 - DNA, 75 bp, Homo sapiens
ctcaatgacagtagagggacctcctcccaaagatgctccacataaacacggtttccttgaaggccgccatgcaga

SEQ ID NO: 396382 - DNA, 98 bp, Homo sapiens
acgcggcgcgcgaggacccgagccaggcggggacaggacggcggggcgagccaggtgcatacattcagagggccacactggtgtgaatactgtgccaa

SEQ ID NO: 396383 - DNA, 113 bp, Homo sapiens
ggtgatccagcaaggtcggcagagcaaggggcttacgcagaaggacctggccacggtctcggcgcggaagatggccggcggcgtggacggccccatcgggatcccgttccccg

SEQ ID NO: 396384 - DNA, 75 bp, Homo sapiens
agcacatcagtgatgaatgcaagaggcgtttctataagaattgaccctacgtccgctccaagggccggaagttcg

SEQ ID NO: 396385 - DNA, 137 bp, Homo sapiens
tttaaatcaagatttaacattccaacacataaaaattatttatccaacagctcctcccaggtactaggttttgacaagcttgcatcatgcgtgagtataagctagtcgttcttggctcaggaggcgttggaaagtct

SEQ ID NO: 396386 - DNA, 100 bp, Homo sapiens
tggaggctgagcatttattcagcaaactgactcgggaaagtggtaccgacttccccatccctgctgtcccaccagggacagatccagaaactgagaagct

SEQ ID NO: 396387 - DNA, 82 bp, Homo sapiens
ctgacgtggagcggtacatcgcctcggtgcagggctccaccccgtcgcctcgacaggtgggaggaggagctcgccaagcgca

SEQ ID NO: 396388 - DNA, 100 bp, Homo sapiens
tcgctgtctgggatgttggcagccacttcaaaatcagacctctgtggcagcattttttccagaacacaaaaggctatggtgaactaaacggtaatgctgg

SEQ ID NO: 396389 - DNA, 100 bp, Homo sapiens
tgaaagtggactactacctcatggcatgttttgaggatgaaatgagctaataaacacagtcttcagccctacattaggttccagcaacagatagaaatgc

SEQ ID NO: 396390 - DNA, 75 bp, Homo sapiens
tgcttgccttgggactaatgacatgcttgtcaggaccaaaatgtctttgactccaagaagaaagtgaaattaacc

SEQ ID NO: 396391 - DNA, 100 bp, Homo sapiens
aaatcaaatctggatggaacaaatcgcaaagtgtgggatgctgtctcaggagatgaattgatgaccctggctcataaacacattgtcaagactgtggatt

SEQ ID NO: 396392 - DNA, 101 bp, Homo sapiens
ctggattctaaggcaacacttccttgaagaaacaagcttacaggtcatatatcagttatgtgcatgctctgatacatctggtcctactatgaggtacttga

SEQ ID NO: 396393 - DNA, 50 bp, Homo sapiens
ccgaccgcgaggacgacttctccgcaggagggtgtgaagacagagaatga

SEQ ID NO: 396394 - DNA, 101 bp, Homo sapiens
ccgggagccgggtgagggcgccgagaggctcggtgggcgcgggcggcgagatgtctgctccaatgaggatctccctgaagttgagctggtgagtctgctag

SEQ ID NO: 396395 - DNA, 83 bp, Homo sapiens
aagaaattctgtgtggcttcaagagactgatcaaattgtgagaggaaaacagcctacccggatatatcccctggggcagctgg

SEQ ID NO: 396396 - DNA, 73 bp, Homo sapiens
ggtcttgtagcagcgcctcctcggacttcaaacaagtgtgaagaggctgtgtggcgagattgtggaactgaag

SEQ ID NO: 396397 - DNA, 82 bp, Homo sapiens
attaccaaagacagaccaatcaacttcacacagagctcagaaccatcaagagctgatgagagagacaaatgctccttaaagg

SEQ ID NO: 396398 - DNA, 100 bp, Homo sapiens
gggaagacacattttatgttgtctctttccgaaggccgtgttgccgcccgctgtgctatgagcagtcagagcgccgtctccacaagagtttacaaatgaa

SEQ ID NO: 396399 - DNA, 101 bp, Homo sapiens
cacctgtattttagcgtactatgcagcaacatggccaacgccctggccagcgccacttgcgagcgctgcaagggcggctttgcgcccgctgagaagatcgt

SEQ ID NO: 396400 - DNA, 100 bp, Homo sapiens
ctaccaccaactcgtccaactgacaagcccttgcgcctgcctctccaggatgtctacaaaattggtggatgggcattttggacattgaagtgtggggaaa

SEQ ID NO: 396401 - DNA, 50 bp, Homo sapiens
atgtcccaacattacatcccagcaaagtgaaatgtgatttacagaaacca

SEQ ID NO: 396402 - DNA, 100 bp, Homo sapiens
gaccaattgcagaaatacatcagagagctggagcaagcaaatgacgacctggaaagagccaagcggtacctgtttcccaggcaactactgatcaggcatt

SEQ ID NO: 396403 - DNA, 100 bp, Homo sapiens
gttctcaatgcatcatgtcaggcagcttatgatgccaatttgtcccatggttaattccaccatccccatcacagcagaagttttcaagaagcatggagtg

SEQ ID NO: 396404 - DNA, 82 bp, Homo sapiens
aagagaccggcaaagttcacgtgactgtggatctcaagtactaccggccaactgaagtggcattggaggtgatccttttaat

SEQ ID NO: 396405 - DNA, 138 bp, Homo sapiens
ttaataatgatagaatgaagaccacaataaaagagacctctacttagctcagcaattcttaccttgtggatcatccatgccatggagtatgaacttcagatccgtggcggagacaagccagccttggacttgtatcag

SEQ ID NO: 396406 - DNA, 82 bp, Homo sapiens
ccttctcccaggaggggaggcacatggtcagtaggacagaaggtaacattgatgactcgctcattggtggaaatgcctccgc

SEQ ID NO: 396407 - DNA, 100 bp, Homo sapiens
atcgtctgcaaaatgggaatcatggtagcacctgtctgatgacgttattacaagatggtgtgggcatcctccaatcggctgggctgtgccatccacacct

SEQ ID NO: 396408 - DNA, 74 bp, Homo sapiens
tccataggtctagacaatggtacaatctcagctcctgtgacgtttgatgacatcactgtgtacttactccagga

SEQ ID NO: 396409 - DNA, 90 bp, Homo sapiens
gcacacattgaatgggccaaggaaaaatcgagcagaaagaatgtctttcagagcgtctctacagccaacttgagcgaaaccgcctgcttt

SEQ ID NO: 396410 - DNA, 82 bp, Homo sapiens
cgagtcgggcagccgctccaatgcttcctgcctgacacagctcacttcaagaagtgcacaatgtcagaacgtggaattaagt

SEQ ID NO: 396411 - DNA, 74 bp, Homo sapiens
tggagaatttgcaactcatcatagtcctgttatggctgattgtcctcacacaattggtgttgaatttggtacaa

SEQ ID NO: 396412 - DNA, 75 bp, Homo sapiens
ttcataatggagaccaagctcaaacccctccggaaggaagcaagaggctactatgagcagactggagttggacct

SEQ ID NO: 396413 - DNA, 100 bp, Homo sapiens
ccgcgggggagccccgggagccgcacgggtggagagattcaaccagttagcgtgaaagttggagataaagttcttctcccagaatatggaggcaccaaag

SEQ ID NO: 396414 - DNA, 97 bp, Homo sapiens
gtgatggcatctttcatctaacacgtttggctccagcagctgctgttgccaccaccactagttcaagcaccatgcagtttacctcaatatcaaattc

SEQ ID NO: 396415 - DNA, 100 bp, Homo sapiens
tgtggtggaatatgccaaggaaaaactggagagcttcatcaaaaatagtgatagctttgataaatgtcttatgtctccagaaaattcagatccacaattc

SEQ ID NO: 396416 - DNA, 74 bp, Homo sapiens
ataaactgacagaggctgaagacaaaattaaagagctggaggcctcaaaggaagccccttcttcacaggacatc

SEQ ID NO: 396417 - DNA, 83 bp, Homo sapiens
cctgctggttcattctggctgccatctaccacctgggggctgcgggagccaccaaaggtgaccatggaggaagaagatgagtc

SEQ ID NO: 396418 - DNA, 100 bp, Homo sapiens
cggccctgagcgcactctggagggattctggcatcagggaggctttcagccggagaagcgagtttcagctgcgggtatttctgtgggacttggatgaaac

SEQ ID NO: 396419 - DNA, 75 bp, Homo sapiens
tccaatgtcaccccaggatgatgaagcagaagaggaatctgtcactgcgaaggggatgaagagagccccctcatc

SEQ ID NO: 396420 - DNA, 74 bp, Homo sapiens
cgtggcaatgttttgaaactggcaaaatcaggtatctccatacagccaagaataaagaaagaaagggatagatg

SEQ ID NO: 396421 - DNA, 75 bp, Homo sapiens
acattttggatccaagtttgttactgcagtggctacaggtgtcagctgacaggggctctggccacagcttgtggg

SEQ ID NO: 396422 - DNA, 50 bp, Homo sapiens
acctggccctgaagaactacagtgtgaattggggcttgttgatggacaag

SEQ ID NO: 396423 - DNA, 75 bp, Homo sapiens
ctggagactcgcaacaagatcccctatgagagtcccatcttcagcagagcacccaccaaggctccggatgtgttc

SEQ ID NO: 396424 - DNA, 82 bp, Homo sapiens
cgcccggatcgtggcctctcgagagcaagacctgcctagagctggaacgttacctccagagcgagccctgctatgtttcagc

SEQ ID NO: 396425 - DNA, 75 bp, Homo sapiens
ccggttgggccggtgtactttcccgagcagaaagaccatgggtttgaggtggcctccacttcccctgaagacgag

SEQ ID NO: 396426 - DNA, 88 bp, Homo sapiens
gcagccgcagcctgtggctgtgcagggccccgagccggcccgggtcgagtttctggcccccaaagacaaaccaagtggagacacagca

SEQ ID NO: 396427 - DNA, 100 bp, Homo sapiens
gaacctacgctgaaattttgggggcaggttctcttgctaggtgtgtatgtaatatagattgcagtggatacagttttaatcctgtgtgtgcttctgatgg

SEQ ID NO: 396428 - DNA, 75 bp, Homo sapiens
ctggccttctgctgcctggtcttgagcaccactgggggcccttccccagccgcttacaaacacgcagatggcaag

SEQ ID NO: 396429 - DNA, 90 bp, Homo sapiens
aaaccgaaggggagccatggcggctgacagtcgggaggagaaaggcagttacaattcatgatacagaaaaatgccaagcatgggatctag

SEQ ID NO: 396430 - DNA, 75 bp, Homo sapiens
gccagtggaagcgggaggcagttgcagctttcaggttgacatcatggacatatgtgagtccatcctggagaggaa

SEQ ID NO: 396431 - DNA, 75 bp, Homo sapiens
tactaatggacagttagtcacccacctacatgttgaggcatctggccatctgaagaggttttggcttactactgc

SEQ ID NO: 396432 - DNA, 82 bp, Homo sapiens
caagttcacgcccaagtacatcctgcgcgccggccagatggtcacggtcaaaatgcagatcttcgtgaaaacccttaccggc

SEQ ID NO: 396433 - DNA, 74 bp, Homo sapiens
cgtgggtgaaagaaacttccacgccttctaccaataagcgatacgaatcccagcttcgggatcttgagcggcag

SEQ ID NO: 396434 - DNA, 100 bp, Homo sapiens
ggaaaaatggaccaacttctttggcaagtggacattttactggctcaagtgaatgaaaactttgccattgatttgatagcagagcagcccgtgagcgagg

SEQ ID NO: 396435 - DNA, 76 bp, Homo sapiens
aaccggatttgtggaccagtaaagttctcccacaagtgtgccccctaccaccggagccagagaatggtggctacat

SEQ ID NO: 396436 - DNA, 99 bp, Homo sapiens
attacccccgggatgaaaatggagaaattgctgctatcatccatcctaatctgcagaattgcggcgagcagtaagaagcagcgtgtggaaaagggagac

SEQ ID NO: 396437 - DNA, 83 bp, Homo sapiens
gcaagacaatattttgttcagtggtgtgcagacagaaatttcaccaagccgcagtatgactatgaatatgatgaaaatggtga

SEQ ID NO: 396438 - DNA, 75 bp, Homo sapiens
cctccagggtgggcgcctttcgccgtggacgccgaccgtccgggacgaggtgctggagaatctggtaaaagcacc

SEQ ID NO: 396439 - DNA, 100 bp, Homo sapiens
gggcggacgcgcgcagcccgcccgcccggcgaccagcaaggattaagcatgaaaatattgttgccctggaagacatttatgaaagcccaaatcacctgta

SEQ ID NO: 396440 - DNA, 75 bp, Homo sapiens
cggcttcttcctcacttcgccgcctgtgatgctacaggacgaagaggaatggataaaaacattggcgagcaactc

SEQ ID NO: 396441 - DNA, 100 bp, Homo sapiens
cggaagaccaagatcatcgagatggcagtccagaacgtgggcaacatggacacgccggcttccagggccaaggaggcttggatggagccgctgcagccca

SEQ ID NO: 396442 - DNA, 100 bp, Homo sapiens
cgagccgggatctcaggtcctcgggggcggcggccacgccaaggacggccccatctgctttgatatgattgaagaagcatacatgacaaaatgtggccac

SEQ ID NO: 396443 - DNA, 82 bp, Homo sapiens
gcagccgatccagcctgcggagcctgtggggcagggcgaactttctgaccaagtatacaactacccagagggcctaggagaa

SEQ ID NO: 396444 - DNA, 100 bp, Homo sapiens
tgctgctcaaaatcagcctacatgccatctttgataacaacgaacttgatgcaagtgataggtttgccaaggtcagacctctcatcatccggatgaactg

SEQ ID NO: 396445 - DNA, 80 bp, Homo sapiens
ccaaagaagagaaagacaaggatgaccaggaatgggaaagccccaggttgcgaggggcggtgttgaagaatgtgtgggcg

SEQ ID NO: 396446 - DNA, 100 bp, Homo sapiens
gcggaaggagcaagagtgggaggcgcgcgcggaggccgcgacggacgcaagatggcgacggcgaccatagctctccattgtcccagatatagccgttggt

SEQ ID NO: 396447 - DNA, 82 bp, Homo sapiens
aggagaccttggcagccgcggaaccgccttcagagccagaggccaagaagagtaagacggccgcaaagaaaaatgacaaaga

SEQ ID NO: 396448 - DNA, 74 bp, Homo sapiens
ccgacagaggcagacacagaaggccgacaccctgcacctggaatctgtgccatccaaattgcttgatccagtga

SEQ ID NO: 396449 - DNA, 75 bp, Homo sapiens
gcctggaatttgattaactcattcaaggttacccagttgaacccttaggagaaatcttgagagtggacagcaatt

SEQ ID NO: 396450 - DNA, 50 bp, Homo sapiens
agcgattcttctgcttcagcctcccgaggtctcattctgttgcccaggct

SEQ ID NO: 396451 - DNA, 74 bp, Homo sapiens
ggctagggcacggaccgcctaggccgaggggaacgcccttttgcttgtgactggcagggctgcgacaagaagtt

SEQ ID NO: 396452 - DNA, 75 bp, Homo sapiens
aaggattccaagtaactcttatttggcagcttgaaatccactctccagatgctaagcacacggtgatcctaagga

SEQ ID NO: 396453 - DNA, 75 bp, Homo sapiens
gaccccaggaatggttacatggagccccactaccaaactggcgatggaatatgagaggagccctctggaaagaaa

SEQ ID NO: 396454 - DNA, 98 bp, Homo sapiens
ccctgttcgagctgtgcgggcgggcggtgagcgcccatatgggggttctggagagcggggtgtggggagacactttgagactccgaacaattctggaa

SEQ ID NO: 396455 - DNA, 75 bp, Homo sapiens
ctgggacagcgttctgtcatctcagcaaagaatggtaaatggtcttaaaatggttgatgagccaatggaagaggg

SEQ ID NO: 396456 - DNA, 83 bp, Homo sapiens
cgggactctgaggaaaagctcgcaccaggattttttatcaagcagaaatgcatcgaacaacgagaatcaagatcactgagcta

SEQ ID NO: 396457 - DNA, 75 bp, Homo sapiens
gacaagcccttgcgcctgcctctccaggatgtctacaaaattggtggtgagaccaaggaccaggtagctaactca

SEQ ID NO: 396458 - DNA, 75 bp, Homo sapiens
gccacctttaggctgaaggatggggttctggcctatgcccggaatccgtctcttgctcaagtgaaaattgaagaa

SEQ ID NO: 396459 - DNA, 83 bp, Homo sapiens
atttcttcggcattctgcaacaggcagaagctcctcctggggtagagacagatcttattgatgttggattcacagatgatgtg

SEQ ID NO: 396460 - DNA, 90 bp, Homo sapiens
cagcaatcaaaaggactgaagtggggttaagaggcaaatcataccccttcagggggccattcccacctgtatggaatccaattacctact

SEQ ID NO: 396461 - DNA, 90 bp, Homo sapiens
tggtcattctgcttcccgatgacaacacggacctcgccgtggaagcagctcttgaagctcaccttgtccctgtcttgcactctctctggc

SEQ ID NO: 396462 - DNA, 82 bp, Homo sapiens
cacacatccccgaccacttgcggcctgagtatggattttttatcaagcagaaatgcatcgaacaacgagaatcaagatcact

SEQ ID NO: 396463 - DNA, 102 bp, Homo sapiens
acaggtttagaaaatggaatcctcctctgcgaatggtagtgaaaacctttatggatatggatcaggactcagaagatgaaaaacagcagtatctcccactag

SEQ ID NO: 396464 - DNA, 82 bp, Homo sapiens
gttactcgcacaaccccagttaagctgcgctccgggaggtcatccatgcctggcttattatatcatctctattgttgctgtt

SEQ ID NO: 396465 - DNA, 80 bp, Homo sapiens
ggaggccggactcaaccgcgtaaaaatgggaatgatgaacaaccccaatccttatggttcaccatatactcagaatcctg

SEQ ID NO: 396466 - DNA, 100 bp, Homo sapiens
tgatattcagaagaatgcagcaaaagccattactaaagcagcttatgatcgttagcatggcctcattgaaagaactagatcaaagactctttgaaaatta

SEQ ID NO: 396467 - DNA, 50 bp, Homo sapiens
ttcttcgtgaggctgctcttcgagcggcctctgtgtcctttgtcccaata

SEQ ID NO: 396468 - DNA, 100 bp, Homo sapiens
gcctgctgctgagcagcgccgcggttctgctaagccaatattctctagaatgagcacaaaacaaatcgaataacagctaaacaaatcgaataacagctaa

SEQ ID NO: 396469 - DNA, 82 bp, Homo sapiens
tctttttcttcaatgggcagcatatgaaagtggattatggatgaagtggctgtaattgatgaaattcaaatgattagagatc

SEQ ID NO: 396470 - DNA, 75 bp, Homo sapiens
agcggagctcccccaagagccggaaagaaaacaacagttttgttggcatgtgaagctccagtttcctcaaagtca

SEQ ID NO: 396471 - DNA, 100 bp, Homo sapiens
cacaggtgatcgcggactatgagagcggacgggccatacccaataaccaggtgcttggcaaaatcgagcgggccattggggccaaaccagtgctcctgcc

SEQ ID NO: 396472 - DNA, 74 bp, Homo sapiens
cggaccccaggagccggcgcccccgccctgtagcataagctgtggccatgactactgaagtaggctctgtgtct

SEQ ID NO: 396473 - DNA, 73 bp, Homo sapiens
aagtcatttgcactgaaatacgacttggcgaatcaggaccatatggtgtgttgtgctctccgaccccttgaag

SEQ ID NO: 396474 - DNA, 82 bp, Homo sapiens
tttgtcattaaacccatcgacaagaaggcacctgtagttcttccaacgtttattcttgaaagaagatctcttttagaaatgt

SEQ ID NO: 396475 - DNA, 50 bp, Homo sapiens
tgctaatgagatgattgaggcagccaagatggtggatgcttccaaaagca

SEQ ID NO: 396476 - DNA, 100 bp, Homo sapiens
cggctcccctctcaggacaacccagatgtgcaacaaagtgcgatggtgggtcctacgtgtatgaactcagcgcagtcctcatacacagaggagtgagtgc

SEQ ID NO: 396477 - DNA, 87 bp, Homo sapiens
actgctggtgaagaaaatgctttatttttgtggcaggcatctgtgggatctgtaatagaaataaatgcactcggtgatggaaagaga

SEQ ID NO: 396478 - DNA, 80 bp, Homo sapiens
ccaaatcatcaatgaagcaagtaaggtagaaacgttgaagcacaatgatccttttgctcctggtggaacagttgttgcag

SEQ ID NO: 396479 - DNA, 83 bp, Homo sapiens
atcttcgaacttttgacacggctttggaaacgacgtcatgtgttaggggatgttcgtctaaccccagaagactttgctagagc

SEQ ID NO: 396480 - DNA, 98 bp, Homo sapiens
cagtactccgagtcggtcgcgggccgacaggcatcccctgagcgcctgctggttccctgtattgaacactgatatacaaggaatgaatagaagtcaag

SEQ ID NO: 396481 - DNA, 100 bp, Homo sapiens
gccaagcacaaagagcttgctccctacgatgagaactggttctacacgcgagctggccatctggctgctgtgcacaggcgctcgtgaggctgccttccgg

SEQ ID NO: 396482 - DNA, 100 bp, Homo sapiens
caagttctttatcttctttgtcaattgctggggttggacttgatagctcaaatttgaaaacaacctttcaggtcggtggatttcctcctggactccagcc

SEQ ID NO: 396483 - DNA, 83 bp, Homo sapiens
ttctcagggattgatcgcctcttcaggagccttcacgtaaatgggtccagtcatgcctcccagtaagaagccagaaagctcag

SEQ ID NO: 396484 - DNA, 51 bp, Homo sapiens
ttctgcaatcctggacatgaaatgtcaggatctggtgattttgaagagaaa

SEQ ID NO: 396485 - DNA, 100 bp, Homo sapiens
gtgcagggaagcaactgcagaggctggaggacacacctaaacatgtggaatcccaatgccggtaggtgtttgggggttctgttccacccctaaccctttt

SEQ ID NO: 396486 - DNA, 75 bp, Homo sapiens
gacgacgacgacgaggaagaggaggtttctgaggatgtacagttacccagcacgtgtacctcctcctcctcctat

SEQ ID NO: 396487 - DNA, 100 bp, Homo sapiens
gaagatggcggccgtgcaggcggccgaggtgaaagtggatggcagcgagccgaaactgagcaagaagatgatcgtggagctacatcgaaaggtctccagc

SEQ ID NO: 396488 - DNA, 58 bp, Homo sapiens
ccctggggatggcgcatcacacaccaaaggacatggatttgattgacatactttggag

SEQ ID NO: 396489 - DNA, 99 bp, Homo sapiens
ctaagtactccggttcccagcttctgcaaaagcagcagcagttgcaagctcagcatctttctcatggccacggacccccagttccccttacgcctcacc

SEQ ID NO: 396490 - DNA, 97 bp, Homo sapiens
gccatgtcgggttattcgagtgaccgagaccgcggccgggaccgagggtacctgcaccagtcaggggccctgaccatggaggccctggaggaccctt

SEQ ID NO: 396491 - DNA, 100 bp, Homo sapiens
accttccccactgtcgcacaatgaagaatgtcctaaaccacatgacacactgccagtcaggcaagtcttgccaaggcatagaatgtcaagctaaccaggc

SEQ ID NO: 396492 - DNA, 100 bp, Homo sapiens
ctggaaccgggatggcgacgtctacactgagtcggaggcgaaggcaatagccctctggaacaagacaattcatgtgagataagaaagaagagcccacaag

SEQ ID NO: 396493 - DNA, 100 bp, Homo sapiens
ccgactccaccctggctggaggaactgggtgctcctgcccgctggcccctcgcgcgtgaggatctatctcaggtcatgatgatgggcagcgcccgagtgg

SEQ ID NO: 396494 - DNA, 100 bp, Homo sapiens
atggcaaggtttatttacttgatgtccaggggaacatcactcagaagtttgatgtaaatcgcatcgccaagcgcagcaggaagctagtggactatgacag

SEQ ID NO: 396495 - DNA, 131 bp, Homo sapiens
caggtggtgactcggctgattcatctcttgggtgagaagatcctgggcagcctccagcagggacctgtgacagggggggccctcagcctcttggccttgaacgggctgttcatcttgattcacaaacacaa

SEQ ID NO: 396496 - DNA, 82 bp, Homo sapiens
cccgcactcgctgccgccgccactcacgctccactgcaacatcacggtcaaaatgcagatcttcgtgaaaacccttaccggc

SEQ ID NO: 396497 - DNA, 50 bp, Homo sapiens
cagcccccttctcagttttcctggcaacgtgttggaccttccggagcttc

SEQ ID NO: 396498 - DNA, 100 bp, Homo sapiens
aagtacagctgtgtgcatctgagtggatgtggggggttctgaacacattgtaatagaagccctagaaaacaatctcctggtccaaggtgcttgagtgggc

SEQ ID NO: 396499 - DNA, 75 bp, Homo sapiens
ctttactgccgtcttcacagcctctacaccccggtgatcaagcaaactctgtttgctagtgctgacactgcttat

SEQ ID NO: 396500 - DNA, 89 bp, Homo sapiens
agtgacacgttttttccagaaattgatttggagaaatataaacttctgccagatgagaaagatcagtctaaagaaaaggagaagaaagt

SEQ ID NO: 396501 - DNA, 74 bp, Homo sapiens
cggcatcctgtgctgtgggggctacgaggaaagcaccatatgaaggcggagtatggaaagttagagtggaccta

SEQ ID NO: 396502 - DNA, 75 bp, Homo sapiens
ggcaggtcgagcgcgagagtatcagccgcctcatgcagaactatgaaaaggaatacggggtgctttgcattcagg

SEQ ID NO: 396503 - DNA, 95 bp, Homo sapiens
ggccagatgggtttgtatggacaggcttgtccatctgtaacttcattaaggcgccaagcccatctttgtgtgcttgcatccaactgtgatgagcc

SEQ ID NO: 396504 - DNA, 82 bp, Homo sapiens
ctttatcctggtcatcttctatttccaaagtatgttgcacccagggaacggcaggagcagctgatgggatatcggaagagag

SEQ ID NO: 396505 - DNA, 83 bp, Homo sapiens
caccagcagcgcctatgagtttgtcacctggctcgatggcattaagtgctccatctcgaaaagcgagaaaggcctccagacca

SEQ ID NO: 396506 - DNA, 50 bp, Homo sapiens
gcccggcaccgagttctctctgattccgttcagtgtggcctgaaaacacc

SEQ ID NO: 396507 - DNA, 75 bp, Homo sapiens
ggatgattcgtatctaagactctgggacactcctgaagtcgggaaatggtgaccagcgccatgtccagccaggtg

SEQ ID NO: 396508 - DNA, 100 bp, Homo sapiens
ggagattctggggcagtatcaacggagtctccgggctatcttaatgacttggaccgcgtagctgaccctgcctacctgcctacgcaacaagatgtgctta

SEQ ID NO: 396509 - DNA, 100 bp, Homo sapiens
ggtgaacactctcctagctatggcagaacggctgaaaggaattcagtgtttcctggtagtggttgcactactgtgtgtaccttggatgctgctgtttaaa

SEQ ID NO: 396510 - DNA, 76 bp, Homo sapiens
tcggcgagtgaagagactgtacagcaattggcgggttgaagatgaaatccactgaggagggaagtccagcaccctg

SEQ ID NO: 396511 - DNA, 100 bp, Homo sapiens
ctcagcggtgttggaacttcgttgcttgcttgcctgtgcgcgcgtgcgcggacatggcctcaaacgggtgaatttggaagtgaaaagaaaactgctttgc

SEQ ID NO: 396512 - DNA, 71 bp, Homo sapiens
agggtggagatcgtggctgccatgcgccggatacggttttgagtatccgaggagcccaggaggaggaaccc

SEQ ID NO: 396513 - DNA, 90 bp, Homo sapiens
cggggagagacgagccccgagcccggctggacgccgctgcctcaggcagcgtctatcccagactaccggggccctaatggagtgtggaca

SEQ ID NO: 396514 - DNA, 50 bp, Homo sapiens
acggccaagaggcagacctaggaaatggggtgaccatcgggatgaggagg

SEQ ID NO: 396515 - DNA, 87 bp, Homo sapiens
atggtcgactacaagaagagggcggagcggagacgggagtattatgaaaagatcctatcatggtgaacttacttcagattgtgcggg

SEQ ID NO: 396516 - DNA, 100 bp, Homo sapiens
atacaaaacatccttctaaaccagaagcctttgggtctgaagtgtctgtgagacctcacagaagagcacccctgggctccacttacctgccccctgctcc

SEQ ID NO: 396517 - DNA, 75 bp, Homo sapiens
gaaacattaccgtcatattccacccattactaaggcccctttgtgtgactaaatttggcaagaatatggatctga

SEQ ID NO: 396518 - DNA, 101 bp, Homo sapiens
gggctgtgctccatggcgagctgggatgtgatcttcgtggtggaaagctaaattttaaaaccaccccaatggatgcagacagtgatgttgcattggacatt

SEQ ID NO: 396519 - DNA, 100 bp, Homo sapiens
atatctcgaaggttgtttggcttgtttaacagcatataccatcttcctatgcatggaaactcattatgagaagattttaggacagcaaattaatgacttt

SEQ ID NO: 396520 - DNA, 100 bp, Homo sapiens
gtgtgctacatacgggctgaatgtggagagggtcttccaggacggtcaaaatgcagatcttcgtgaaaacccttaccggcaagaccatcacccttgaggt

SEQ ID NO: 396521 - DNA, 80 bp, Homo sapiens
aagttgattactcagtctctaaaaagctaaggcagcagtacctgtccaaagatcgctttagttccaccttgctccacaag

SEQ ID NO: 396522 - DNA, 97 bp, Homo sapiens
tgctcttttaccgatgctttaacatacagccactagaatgaaactagtgatcgagaagatggcctccccaaaggacatcatgtgacagactctgaga

SEQ ID NO: 396523 - DNA, 58 bp, Homo sapiens
aagaaagagacttttttctaaagaataatagcctaacatggcagaccagagacagcgc

SEQ ID NO: 396524 - DNA, 83 bp, Homo sapiens
aagacaataaggttctgggaacacataaaggtggaacacctgcagcaggagactgctgctctgaaaaagcaaatgcaaaaaat

SEQ ID NO: 396525 - DNA, 75 bp, Homo sapiens
cacataaaaattatttatccaacagctcctcccaggtggctataacagagaggaatgtcttcgaacagtcgaatg

SEQ ID NO: 396526 - DNA, 100 bp, Homo sapiens
cgcgtccggagtccccgtggccagcttagaccatgctcagcctccaagcagccttgtcatcgacaaagaatctgaagtttacaagatgcttcaggagaaa

SEQ ID NO: 396527 - DNA, 90 bp, Homo sapiens
cgcgcagcagggccgcctcagcgtgggcagcgtgtaccggcccaaccagaacggccgcggaaagagcatctacggtgagcgcttccccga

SEQ ID NO: 396528 - DNA, 113 bp, Homo sapiens
cccagaccctggagcctcagttggaagcagccgatccagcctgcggagcctgtggggcagccgttggacataccagatggtcgaagagctccacttcctgctcattaccggag

SEQ ID NO: 396529 - DNA, 137 bp, Homo sapiens
ccgcggggacgcgaactgcgcagccagaaatccaaggccaagagcaaggcccggcgtgaggaggaggaggagggaaagtagtagatcatccaaaaaggcgatttggtatccccatggatcggattggtagaaaccgg

SEQ ID NO: 396530 - DNA, 101 bp, Homo sapiens
acccgcttccgcagcccgctcgtgcccggcttctggtcctggttcgagaacttgtcttggacaattgcaaatcaaatgatggaaaaattgagggcttaaca

SEQ ID NO: 396531 - DNA, 82 bp, Homo sapiens
caacaagaggacccaggagaaattcgccctcaaagcctctctctggaacgcctacccaactccatcgcctcccgcttccgcc

SEQ ID NO: 396532 - DNA, 75 bp, Homo sapiens
tggggcttaagatgtcctgcctgaaagaaatgcactcggtgatggaaagagagccactattctgaagaacacttg

SEQ ID NO: 396533 - DNA, 83 bp, Homo sapiens
atccgaccggaccgggctcgggggagcgtgagttgcagatggagaacttaatgttctggatgatattttaactgaagtaccag

SEQ ID NO: 396534 - DNA, 83 bp, Homo sapiens
gccagacccggagccggagcaggaggccccagcttcccccacgccacgagccagaccctgctggccaagttcaaacagcaaca

SEQ ID NO: 396535 - DNA, 75 bp, Homo sapiens
catgaatctttccttgatttgtccctcccagttttagatgatcagtttctattccaaggacaatgaaggcagctg

SEQ ID NO: 396536 - DNA, 75 bp, Homo sapiens
cttgctttcagaatttcacccaggttctgacagagtccttttatgacacattccatactgtggctgacatgatgt

SEQ ID NO: 396537 - DNA, 83 bp, Homo sapiens
ccgcggtcttcccaggcgtcgcggagagcaggaaatctgaaatagagtactatgctatgttggctaaaactggtgtccatcac

SEQ ID NO: 396538 - DNA, 83 bp, Homo sapiens
atcgacaagtccgggagctgggcggccatttaccaggcaatagccctctggaacaagacaattcatgtgagataagaaagaag

SEQ ID NO: 396539 - DNA, 75 bp, Homo sapiens
agcccccctcaacacggaccgcgcccgccgggcacacaagaatggtcactgtctcctctgagcctccggcctcca

SEQ ID NO: 396540 - DNA, 80 bp, Homo sapiens
ccgccgagccggcggccgctcccttccccgcgcagccccgcacggcccgggcccacatcatggaagggaagtggttgctg

SEQ ID NO: 396541 - DNA, 97 bp, Homo sapiens
ccaacatggacttcagagaaattctcatgatagcttccaagggacaaggtgtcaacaatgtgccgaaaaagcttgtggtgaaggggggcaaaaaaaa

SEQ ID NO: 396542 - DNA, 90 bp, Homo sapiens
cgccatgtcgggttattcgagtgaccgagaccgcggccgggaccgagggtggacgacatccttggagaaggcagcgacgacagcgacagc

SEQ ID NO: 396543 - DNA, 75 bp, Homo sapiens
gttttaagagaatgggtgttgacaaaggcaaactctttgattctacaatagctgatgagggaacatggactttgg

SEQ ID NO: 396544 - DNA, 87 bp, Homo sapiens
aaatcaagatttaacattccaacacataaaaattatttatccaacagctcctcccaggtgatgttcctgcctccaggaggccttttc

SEQ ID NO: 396545 - DNA, 82 bp, Homo sapiens
catgcccgctcacctgcgctgtgatgcctgcagagctgtggcttaccagtgcgtcagcatttatcccgtttgccaaccattg

SEQ ID NO: 396546 - DNA, 90 bp, Homo sapiens
caacagatgcagtctgtgtgctctgattgtaatggagaaggagagaaggatattcctggactgactgatactacagtgcctcgccgcctg

SEQ ID NO: 396547 - DNA, 82 bp, Homo sapiens
gaagggaaggcgcgagtgaggaaaggaggtactgtagttgcttctgcaggaagcctttttggtggcatggtcctcaagaagt

SEQ ID NO: 396548 - DNA, 76 bp, Homo sapiens
gggctgacaggaatcttctggtgtactctttttatgaaaaggaagaaggtagataatgactataatgcccttcgag

SEQ ID NO: 396549 - DNA, 74 bp, Homo sapiens
caccgtcactctgacccagcatgagcacgagcggctccgcaaataccactgaagaggacacactctgcaccccc

SEQ ID NO: 396550 - DNA, 75 bp, Homo sapiens
caggtgtaagcgcagaaagcaggcgaacccgcggcgcaataacggtatggacctgtctgccaatcaggacgagga

SEQ ID NO: 396551 - DNA, 75 bp, Homo sapiens
agagcaagcagctttacaaggagctaggcttcaagcgcattccctattacaactccagaacccctggtgctggtc

SEQ ID NO: 396552 - DNA, 98 bp, Homo sapiens
gtggatttccgaggcaagaaggtgatcgaactgggtgcggggacaggcatcgtggggatcttggcagcgctgcagggcctggtctccaagtcctctcc

SEQ ID NO: 396553 - DNA, 100 bp, Homo sapiens
cgactccgagacctccgaaaagcgtttccgcagacagaagtggggagaagcggaggatctatcttgggatcccatggctttctttactgggctctggggc

SEQ ID NO: 396554 - DNA, 98 bp, Homo sapiens
cggccgggggctcagagatccaagtgcgcgccctggcgggtccggaccaagttggaatgccaagatgccttggaaacagcagcccgagccgagggcct

SEQ ID NO: 396555 - DNA, 90 bp, Homo sapiens
cggctgcagcgtcgcggtgcatcaaggtgtgctgggcatcaaggtgaagatcatgctgccctgggacccaactggtaagattggccctaa

SEQ ID NO: 396556 - DNA, 73 bp, Homo sapiens
ggcgccataaacgcccccaatttcccagctgctaaaggaagaggaagtttgtcgctgatggcatcttcaaagc

SEQ ID NO: 396557 - DNA, 82 bp, Homo sapiens
ccgccgccgccgccgccgcccggaccccggcgcgctgaatgcagcatgttgacatagcggctttattgataaaatacaacac

SEQ ID NO: 396558 - DNA, 100 bp, Homo sapiens
cttagttgcaatgtaattacagaactcagctttggaacatttcaggcctggcacggaatgcagtttttacataagttgccagtactaaagtggaagtgga

SEQ ID NO: 396559 - DNA, 100 bp, Homo sapiens
cagtctgttggttcatcattaacacagccagtgatgtctcaagctacaaatttaccaattccacaaggcatgtcccagggctacttctacaagtccgaac

SEQ ID NO: 396560 - DNA, 102 bp, Homo sapiens
gtggtgaaggtccggggcttgccctggtcttgctcggccgatgaagtgcagaggtttttttctgagacgagttgtactgctgtcacaggaaatggacgctgg

SEQ ID NO: 396561 - DNA, 98 bp, Homo sapiens
ctcattgccatgaaggaactcaaacgccacagccatggccatgatggtgtttccgcgggaggagaagctgagccaggatgagatcgtgctgggcacca

SEQ ID NO: 396562 - DNA, 51 bp, Homo sapiens
cggatttctgctatgatgacaggcttggccggtacaggtgtgagaaaggga

SEQ ID NO: 396563 - DNA, 89 bp, Homo sapiens
gttgaccgcttgtgcctggggattccccctggtgagctagtccctgagcacgtcgtcatgaccaaggaggaggtgacagagctgctggc

SEQ ID NO: 396564 - DNA, 90 bp, Homo sapiens
gaccttcaagcagcgccgcaccttcgtaattcgccaaaatgacgaacacaaagggaaagaggagaggcacccgatatatgttctctaggc

SEQ ID NO: 396565 - DNA, 139 bp, Homo sapiens
gcttctctcgggctttgtccccttgctggctgcccctcaggacccctgctacgtggagaaaacctcggataagtcctgtgcctcctgattgctgagtgttcacctggaccttctgactaccttccctgtgctattccat

SEQ ID NO: 396566 - DNA, 90 bp, Homo sapiens
tcctttatatagaagggagagtaggtggcaggttttaagaagcaaatggcagatactggaaaactgaacacactgttgcagagagccccc

SEQ ID NO: 396567 - DNA, 98 bp, Homo sapiens
tttcaactatatttgagcatacccagtggctggaagtgctccaagtgtgacatgagagagaacctgtggctcaacctgactgatggctccatcctctg

SEQ ID NO: 396568 - DNA, 50 bp, Homo sapiens
atgcacactgcaactacttccagatgagctgagctggacaactaaaagca

SEQ ID NO: 396569 - DNA, 100 bp, Homo sapiens
ttcggattaaatctggaaatgaaaatggagagttctacctacgactgctgaatcgagtgttcaacatcatgagggaaaagaatccagatatggttgctgg

SEQ ID NO: 396570 - DNA, 99 bp, Homo sapiens
agaaccctggctggggaaaagggaagtgaaaagagatctgttttcaggagaaccaggtgcatcagcgcattgcggagctgaggaaagcaggtctgtggt

SEQ ID NO: 396571 - DNA, 83 bp, Homo sapiens
gccccggccgcctgcgcacccggcagcaccatgacagacaatgcagatcttcgtgaagactctgactggtaagaccatcaccc

SEQ ID NO: 396572 - DNA, 100 bp, Homo sapiens
tgtcagtcagcttgcattcagtcgtgatcttttagcaagtcagaatgaagatttgaatcttccacaatctgtaattgaaaatgttggaggaaaaattttt

SEQ ID NO: 396573 - DNA, 75 bp, Homo sapiens
ctccaatctggataggcttctgtcagatgtcacagtaaggctgttagggatatctgcttcaatactgcaggaaca

SEQ ID NO: 396574 - DNA, 90 bp, Homo sapiens
gtggctgctaaacttgaaccgaaaagctaagaacgtggctgcagacattgccgtccagctctgtgaatctgttgccaacaagttggaagg

SEQ ID NO: 396575 - DNA, 75 bp, Homo sapiens
ctttgaactactgccggagcttctgccagatctgtgtgccaatgtcagtggaatttgaggaactcctgaaggctc

SEQ ID NO: 396576 - DNA, 75 bp, Homo sapiens
cctcgctgtggggcaatccgggcttgcagacgagaacccagcttagactagaaagtctagaagacacacacataa

SEQ ID NO: 396577 - DNA, 100 bp, Homo sapiens
gaatttgtgcttagctcttttcttgtaccttgcgactcgtgaccaacatgctgtgatgtgtgccgagggaggaattggagcatattaatgaaaagtgcca

SEQ ID NO: 396578 - DNA, 100 bp, Homo sapiens
gatccgaggctgggaagaaggggttgcccagagtgacatatctgcaggccattttggggtaaacaataagcaaaataataccaacgcaaataaaccgaag

SEQ ID NO: 396579 - DNA, 75 bp, Homo sapiens
tttggaggcttatttttagcatctggtgttaatgtgacaatgaaagatgaggcaacgtgttatgatgatgggaag

SEQ ID NO: 396580 - DNA, 74 bp, Homo sapiens
tgaactacgacaccaagagtggccctaagctttcaccaacaatcaccagtggtttacacaacattgcaaggagc

SEQ ID NO: 396581 - DNA, 75 bp, Homo sapiens
actcggggactctgccttttaccggtctcggcgcggaagatggccggcggcgtggacggccccatcgggatcccg

SEQ ID NO: 396582 - DNA, 82 bp, Homo sapiens
gactgtctgctatcagtttttaagttgggagctgaaagtgccgacagcattggtgccgtgttaaatagcaaagatgagcaga

SEQ ID NO: 396583 - DNA, 96 bp, Homo sapiens
gcagatgctgatgggcaaactagcgcgagcccagcattgacctgctgcaggccttcgtggagcactggaagggcatcacgcactactacatcgaga

SEQ ID NO: 396584 - DNA, 100 bp, Homo sapiens
tttcagaaagtggctgacatggccaccaacacacgtgctctaagcgaaagacatgaggcctcagcctgaaatgaggttgttttgaggtcatctgatttct

SEQ ID NO: 396585 - DNA, 74 bp, Homo sapiens
ataagaagaagaaacaggagtggattcaaggaacttgtaatagctggcatcgttgagaatgaatggaaaagaac

SEQ ID NO: 396586 - DNA, 95 bp, Homo sapiens
agaggtgtcggaggtctcatctttgaactactgccggagcttctgccagctcaggtaacggaggccttggaaagagactctgcgtcaggtcaccc

SEQ ID NO: 396587 - DNA, 50 bp, Homo sapiens
atggaggcctatttgcctaagaagaatggtctcgtggtggaacatctgac

SEQ ID NO: 396588 - DNA, 89 bp, Homo sapiens
agttcatggatgctgtcaacaagaagagcagttcccaggatctgcataaagctggggccacaactttggtgaagaaggatatattcgga

SEQ ID NO: 396589 - DNA, 100 bp, Homo sapiens
ccaacacaagtaaaacatatgatgcaagtgatagaaccccagtttcaacgagacttcatttcattgctccctaaagagtctttgagagttcaggccctgg

SEQ ID NO: 396590 - DNA, 100 bp, Homo sapiens
ggagtttctctgccttgctgatctgagctcagacctgccaatttaccagagataattgataacaccctgtaacagctgaccaaaagaatgcaatggtgta

SEQ ID NO: 396591 - DNA, 74 bp, Homo sapiens
tctgagtcaggtttctccagggaaagaaacagatgaatttgttaagatttccaagtggaatgatgtcagcttct

SEQ ID NO: 396592 - DNA, 75 bp, Homo sapiens
cggaggaggagcccgaataccaccccgacgcctcagcccaagaaatctccttccgagtgtggatgtgcgggggca

SEQ ID NO: 396593 - DNA, 83 bp, Homo sapiens
gaaaggaattgttttggcctaggatcatccaggtggttgtgtcaaaccgattggtgacatctccatgctgtattgtcacaagc

SEQ ID NO: 396594 - DNA, 139 bp, Homo sapiens
tgccagaccgtggaagatttaacgaatggggttgtgatggcccaggttcttcaaaagatgaactctaatgaatcattgattgaccagcactattttaccagttggaatgaatgatcagaaatgggcatagtgcttttag

SEQ ID NO: 396595 - DNA, 100 bp, Homo sapiens
tggggctgctccccaggacctgagcaggaacctggagttttcaggccagaacacaaagcgtgaatccggaagaaaagttcaatctggaaacatcaatgct

SEQ ID NO: 396596 - DNA, 100 bp, Homo sapiens
atccaagcctctcagcttcggagaatggagtcttccatcaatcatatctcacagctaaaagatggcggcaaggcagcccaggcaaatgtaagaataggcg

SEQ ID NO: 396597 - DNA, 101 bp, Homo sapiens
cgcgcccgggctccctgctgatcccaggacactggggttgggaaatcaagcatcgtgtgtcgatttgtccaggatcactttgaccacaacatcagccctac

SEQ ID NO: 396598 - DNA, 100 bp, Homo sapiens
agtattgtctgaaaaagctcaaaatgaggaaattctgtatgttcttcgccattatattcaggaaggtgtcttgctgcaggtaactaatgaagaagtggtc

SEQ ID NO: 396599 - DNA, 75 bp, Homo sapiens
ctcactctacaacacgtgtatgaaggatgattgccgccgtggacacagactccccccgagaggtctttttccgag

SEQ ID NO: 396600 - DNA, 75 bp, Homo sapiens
ggcggaacccgtgggcctgtggactgcagcctcggcggtcagcagctcttcagtgggtcatctgtgtgtcacagc

SEQ ID NO: 396601 - DNA, 100 bp, Homo sapiens
aaagattgcaaggtgaataaagaagtggagcgtgtcctgaaggagttccaccaggccgggaagcccatcggaaaactttagaaactgttcctttggagag

SEQ ID NO: 396602 - DNA, 96 bp, Homo sapiens
ccttccacctgggagcgtcctctaacacattcagactacaagtccagacccaggagagcaaggcccagaaagagattgggctaatggatactacag

SEQ ID NO: 396603 - DNA, 75 bp, Homo sapiens
ctcagatgctgccagggtccctgaagagggaagacacgcggaaacagggccggatcgtggcacccagaggctgcc

SEQ ID NO: 396604 - DNA, 100 bp, Homo sapiens
tgctacgtctttgcccaggagtacgcacctgctggggacctgtttgacatcatccctccccagatgccatggacaatattaccaggcagaaccaattcta

SEQ ID NO: 396605 - DNA, 89 bp, Homo sapiens
gctcggccggcgtgggagcgccaaggccgcaggattttttatcaagcagaaatgcatcgaacaacgagaatcaagatcactgagctaaa

SEQ ID NO: 396606 - DNA, 51 bp, Homo sapiens
gccctcaactcccaactcggctggcacacaaaccaatggtctggactttca

SEQ ID NO: 396607 - DNA, 100 bp, Homo sapiens
ctgacctgtaaatcatcctttagatactgagccttcataagggttgactacctcagatttgctgcactcattgtggacttcatgtggatcacaacttctg

SEQ ID NO: 396608 - DNA, 82 bp, Homo sapiens
gcagctccagagcgacgggaaacgaaaggttttaaaatcaaagatgggaaaatcggagaaaattgcccttccccatggccag

SEQ ID NO: 396609 - DNA, 100 bp, Homo sapiens
gcagccttaaacgacttgttctctatcgaacaaaagtagaggcctggcatgcgtgggcagtgatgaacttcgaagctgtgctacactacaaacatcagaa

SEQ ID NO: 396610 - DNA, 96 bp, Homo sapiens
ccgcggctgcgcttccgacggggcggccgggggctcagagatccaagtgcgcgccctggcgggtccggaccaaggagtgtgaggaagaggctgtct

SEQ ID NO: 396611 - DNA, 83 bp, Homo sapiens
gtttgtagcctattggaggaaaacacaccaaggtttctctggaaacccccctggtaagtgtggaggaggcgggacactctgac

SEQ ID NO: 396612 - DNA, 101 bp, Homo sapiens
tccaatcaagtgcccttggacaaagcctgaaaccagctaaaagatggcggcaaggcagcccaggcaaatgtaagaataggcgatgtggttctcagcattga

SEQ ID NO: 396613 - DNA, 96 bp, Homo sapiens
cgcgcggtgatgctcctgaaaacgtctgcccggcgtagcgggaacccagcatgattttcaggggcgaactttctgaccaagtatacaactacccag

SEQ ID NO: 396614 - DNA, 51 bp, Homo sapiens
gtttctaggaaaggccggacaccaggcttgcagccaatttactggagcagg

SEQ ID NO: 396615 - DNA, 74 bp, Homo sapiens
aaatgttggagcgattctgtcggagccgtgggaacctggtggtgcagggcatgcgacagggggaatggctcgct

SEQ ID NO: 396616 - DNA, 86 bp, Homo sapiens
ctagaatcaactgagagagatgcttaaaaatcaccagttactttaatgagtagaagaccatgatggagaaggtgatgtggctggag

SEQ ID NO: 396617 - DNA, 100 bp, Homo sapiens
ggcggaggcgacggtggcggctctcggagccggcgcgaatccggcccccgcagcgggacccgggacctcagcagccatgtcgaagccccatagtgaagcc

SEQ ID NO: 396618 - DNA, 75 bp, Homo sapiens
atggttaagagctctacaacttctgtgagtctcctttagcattggaaacaccaaatcgggtatccttgggacagt

SEQ ID NO: 396619 - DNA, 98 bp, Homo sapiens
atgcctgaagctcaagggactgtgtccaccctcagaggcatttcatccttcatgaagccattcaggattttgaattgcatatgagtgcttggctcttc

SEQ ID NO: 396620 - DNA, 100 bp, Homo sapiens
tgtactcatagattgtgtaggcgttggtcttctgatagcaactttaatgtgctgcaggtggagctggagcaagaataccaagacaaattcaaaagactgc

SEQ ID NO: 396621 - DNA, 100 bp, Homo sapiens
agttcacggatcagcgaaccaaagctgaacaaggcaactgttcaaccaggagaaaagacagcaatggaccgaggaaactttgagggaaattttgagtcac

SEQ ID NO: 396622 - DNA, 98 bp, Homo sapiens
ctcagcccccggccgcggcgggacccgaggcatgtggagaccccaaggcaaaaccatcctatcttatcgacaaaaacctggaatctgctgtgaaattc

SEQ ID NO: 396623 - DNA, 51 bp, Homo sapiens
atcagccgccttcatcaaatcaaacaggtggagtgttatgattatgacaat

SEQ ID NO: 396624 - DNA, 100 bp, Homo sapiens
agcgggcgcctatcctctccgagcaagatggcaaccccggcggcggtcaaccctccgggttgaagccatccttgtcaatatatttggtggtatcgtcaac

SEQ ID NO: 396625 - DNA, 100 bp, Homo sapiens
gaaattcctgacgttcattgatctgctcatcctaatgtccaaaaggtggtgctagtatcatctgcgtcagatattcctgttcagtctcatcgtacttcgg

SEQ ID NO: 396626 - DNA, 74 bp, Homo sapiens
agcttggttaacttgggagaaagtttcatctgtggatggagtattggtgagtcctgcaaatgttaagtgatttg

SEQ ID NO: 396627 - DNA, 100 bp, Homo sapiens
ctttgtgtgtctctccctttctaggtatttgcataggaatcagaggagttaatcttggaagacgagcacgccctcatccagcagtattgccaaacactcg

SEQ ID NO: 396628 - DNA, 98 bp, Homo sapiens
ccagagtcccagctttctactacatcccccaggccaacgactgcctgaggacaaccacagctattatgtgtcccgtctctatggccccagcgagcccc

SEQ ID NO: 396629 - DNA, 89 bp, Homo sapiens
actgtcttcgtgatgaataaaaacatttcaactccctacagttgtgccatgcgcaaggcactgacgtttcttctgctacagcctccaag

SEQ ID NO: 396630 - DNA, 97 bp, Homo sapiens
ctgctgggcgaagcacgctactacctggtgcagggcctgattgaggactgccagctggcgctgcaggttgtacatcctggagacctgaagaattctg

SEQ ID NO: 396631 - DNA, 75 bp, Homo sapiens
tctagatgatattggacatggagtaaagtatcaccttttgccatgatagcatttctttcattggacagttcctta

SEQ ID NO: 396632 - DNA, 75 bp, Homo sapiens
aagaactacttcttttggaaatgatacttggagatgaagttcaacttttttcacttgatgaagaatttgattatg

SEQ ID NO: 396633 - DNA, 82 bp, Homo sapiens
agagaagaggattccggcgggaactcgactcttggcgccaccgcctcatgcactgtgtagggtcctgaggacaccgtgagcc

SEQ ID NO: 396634 - DNA, 100 bp, Homo sapiens
tgtaggaggacgccagttactgcacggaaagcagcgtcaggagccatagtacctacagcagcactccagataagctccgaagaagtatgcctaacctagc

SEQ ID NO: 396635 - DNA, 75 bp, Homo sapiens
gggaaatgggtttccagatagacttgcgtctacagaacaaacagaggaggaggaagccaagaatctggtgagcga

SEQ ID NO: 396636 - DNA, 50 bp, Homo sapiens
cctgtcaccaacaaagatttcagccatggcaatgacaggctcaacacctt

SEQ ID NO: 396637 - DNA, 82 bp, Homo sapiens
ggaagaaaaaggaagccccttaaatgccgcaccctacggcatcgaaagtaatagctcttcaagtctgcaataaaaaatggcc

SEQ ID NO: 396638 - DNA, 100 bp, Homo sapiens
gctgtctggacaagaagtcgtagggggtgagggtggaagctgggaaacccacaggaggcaaccacactagtttaggtggagattctggacgcaaagacaa

SEQ ID NO: 396639 - DNA, 74 bp, Homo sapiens
cagtggtcgcttcttctccttggtgctccatacttgcttgcagtgcctacgtggctctggctttgggtgataac

SEQ ID NO: 396640 - DNA, 87 bp, Homo sapiens
agggcttaggaccaaatgtgctacctccaacgacctcacacaaaaagaaatccggaccctggagtttgagttcctgagatctagttg

SEQ ID NO: 396641 - DNA, 98 bp, Homo sapiens
ggagcctcccgagcccggccttctgcctaacggcaccgttaccctattgctgactttgggctttccaacctgtaccagaaggataagttcttacaaac

SEQ ID NO: 396642 - DNA, 83 bp, Homo sapiens
gccggactccgggccgcaggcagtcccgcggcagcaggatcacagcagtcctgcgttaactgcggccgggaggctatgagcga

SEQ ID NO: 396643 - DNA, 100 bp, Homo sapiens
aggcgagaatgtccacaagcactcccgcctggcagaggtatgtgtacattccagtgggcgggtcccagcatggcctgctggggacactgttttccacggc

SEQ ID NO: 396644 - DNA, 100 bp, Homo sapiens
gctcgagatggtgccagcaatatcttcaggtgtaacgtctttaaatccaagaagaaggccttagaaaatttacgtgtatacctgtgtgagaaaatcatag

SEQ ID NO: 396645 - DNA, 88 bp, Homo sapiens
gatatgcagaaactggttccaaaggatgagaaggcaggtacgacccagggcggaaaaagatcagggactgctgagatgtcctctattc

SEQ ID NO: 396646 - DNA, 76 bp, Homo sapiens
ccggagaaggaggatcaaaagaggtggtggggacttttaagatggagtcccctgtttccacaccagcagtgctgcc

SEQ ID NO: 396647 - DNA, 50 bp, Homo sapiens
gaatacctctgtttggacaatagtgcaagtctcagaccagtatccttcag

SEQ ID NO: 396648 - DNA, 51 bp, Homo sapiens
atttcatccaccacattacttagatcctgataacttaagtgactctctctt

SEQ ID NO: 396649 - DNA, 100 bp, Homo sapiens
ctcaacgagctggtggagtgtgtggggagcacccggggtgtcctcatcgagcccgtctacccagacatcatccgcatgctaacaggcctcacctcttcca

SEQ ID NO: 396650 - DNA, 90 bp, Homo sapiens
cccacggaggtcagaggggaggaggactctggagctgacagcgcgcacttcacccgcagttggttcgttccaccagtcataaaccagatg

SEQ ID NO: 396651 - DNA, 82 bp, Homo sapiens
cccagaggcgcctcctccacaccccccgccgcagcagcaccggcgacagccgccaccggcacggccaggccagcatggtgga

SEQ ID NO: 396652 - DNA, 85 bp, Homo sapiens
gccaagcagccaaccatgctcaacttcggtgcctctctccagcagactgcgatgaggacggggacttggttgccttttccagtga

SEQ ID NO: 396653 - DNA, 100 bp, Homo sapiens
ctgagctccggcagagcgtgtctgaggccgtgcggggctccgtggtgctgtgaactttgaggcgctgatcatcaccatgtcggtagtcgggggaaccctc

SEQ ID NO: 396654 - DNA, 100 bp, Homo sapiens
cggaaggcgcgggcaggagcctggcgaggatgcaccttcccctgccttggaaagggtcctgcagttctgagcttgggttccctttgcctggacaccaacc

SEQ ID NO: 396655 - DNA, 83 bp, Homo sapiens
tctcagcccccgcaggatggctgcccgggtcttctacctgctcctggacgccacaggtcatcatctggatcatcccattctgg

SEQ ID NO: 396656 - DNA, 76 bp, Homo sapiens
gggcacccggttggagcccctgaagccacttaagggacgtccagatcggtgacatcgtcacagtgggcgagtgccg

SEQ ID NO: 396657 - DNA, 74 bp, Homo sapiens
caccacaccactgcaccgggacaagacacccctgcaccagaaacatgctgcctgacacttcctccatggcccat

SEQ ID NO: 396658 - DNA, 100 bp, Homo sapiens
ttctgttcaggccagaccctctgggagcttctcagccattttccacagatcagggccaattcctgtccccccagcagcatggcatcgtgtgctgaaccct

SEQ ID NO: 396659 - DNA, 82 bp, Homo sapiens
ctaaacgaaagcctccttctggtccgaaccgactggatcccttggccaggggaggaaaagacagccctcagcgcctttttcc

SEQ ID NO: 396660 - DNA, 109 bp, Homo sapiens
ggatcgtgaccgagaccgtgaccgagagcgtgaccgagagcgcgaatatcgtcatcgttagaagtgacagtggtgctgtttgcagctctgaggcggcagcgaaaaaaag

SEQ ID NO: 396661 - DNA, 90 bp, Homo sapiens
ggagactacaatatggatggctatccagacgctctggtcatactaaagaacacatctggaagaaaaggacaggggcggcccgactgggcg

SEQ ID NO: 396662 - DNA, 75 bp, Homo sapiens
cgtcgccgctgtccaacaaccaggagctggagtgccttcaggaccatctggatgacttggtggtggagtgtagag

SEQ ID NO: 396663 - DNA, 83 bp, Homo sapiens
agatattaaagtggcaatgtgtgctgacaaggtaccattgttggatactggtgacatcatcattgacggaggaaattctgaat

SEQ ID NO: 396664 - DNA, 98 bp, Homo sapiens
aagtgggaagattggggccttctgattattttggtaaacgcaaagcactgaagttgaattttgcaaatccacctttcaaatctacagcaaggtttact

SEQ ID NO: 396665 - DNA, 50 bp, Homo sapiens
gcagcatgatgttctgaagcttgaggttcacagagtgtttccaaatgggc

SEQ ID NO: 396666 - DNA, 100 bp, Homo sapiens
ctgtggtccatcttcaacttcgtctacctcaacttctgctgcctgggcttcatcgccttggcctactccctcaaaatctcaggatggacccaagctctgc

SEQ ID NO: 396667 - DNA, 83 bp, Homo sapiens
gcgggagccagcgagccacgggagcgagccaggaaggaagcagccaccctcgccatggcctccccgcccgcctgcccctcgga

SEQ ID NO: 396668 - DNA, 100 bp, Homo sapiens
cactattccttggagatgtatcaaaaaatgcagtcccctcatgccaaggtttatgatgataaagactacaggagaattcggtttgtaggtcgtcagaaag

SEQ ID NO: 396669 - DNA, 88 bp, Homo sapiens
tttggacagtccaatgtcaacattgcccagcaagtggtacatgtcccagagcaagcacacggaggcccgggagctcatgtactcggga

SEQ ID NO: 396670 - DNA, 100 bp, Homo sapiens
aggccgccgccctccctgaggagatccgttggctcctggaagagatgacctgatcagagccatcaagaaactaaaggcacttggcactggcttcggcatc

SEQ ID NO: 396671 - DNA, 83 bp, Homo sapiens
cgcgtctctctgctgcggcgcggggaccgctgtgctctcggttttatgggagaattgtagacaaacctggtgaccatgatcct

SEQ ID NO: 396672 - DNA, 87 bp, Homo sapiens
ctttgttcccaatgacatgcaagttggacagacgggaaaaatagtagcaccagtccatccagaaccacccactgcatgcagagaaaa

SEQ ID NO: 396673 - DNA, 90 bp, Homo sapiens
gtgcccggccccgcgtcgtctggcgccgccgccgccagcgcggttaagaaggcttttttgctctgtagcctggacgtactttgaagcccc

SEQ ID NO: 396674 - DNA, 83 bp, Homo sapiens
aaaaaaactcaaccgactggggtaggatgcagaaaatctcatcactacataaatcatttggtggacccccaaaagtacaaggg

SEQ ID NO: 396675 - DNA, 100 bp, Homo sapiens
gggagcgccgagcgtcgccgccgccgccgccatgaacaactcgggcgccgacgagatcggcgagcagctgatgcagctgtacagtgcgcgccagcggcgg

SEQ ID NO: 396676 - DNA, 94 bp, Homo sapiens
ctgggcgacttgcgaggatgagagcgacgaagccaactgtccaggtcagcccaaggccaaccccactgtcactctgttcccgccctcctctgag

SEQ ID NO: 396677 - DNA, 75 bp, Homo sapiens
ggcagagcgtgtctgaggccgtgcggggctccgtggtgctgagtttccaggatggcttctgcatcaacttctaaa

SEQ ID NO: 396678 - DNA, 100 bp, Homo sapiens
ttctttactcagctgagtgtgccacacaggtagccctggacggcattcagtgttttgcatacttccacaggctgcactcgaggagatccacaaattctca

SEQ ID NO: 396679 - DNA, 100 bp, Homo sapiens
caactttggtggaccacccgataattttgcagtggggccagtgaaccagtttgactatcaggttggccacattcgtgcggagcgtgacattctagtggag

SEQ ID NO: 396680 - DNA, 100 bp, Homo sapiens
cccgaggccaggagccaggggcccagaagggccaattcctgtccccccagcagcatggcatcgtgtgctgaaccctctgagccctctgccccactgcccg

SEQ ID NO: 396681 - DNA, 100 bp, Homo sapiens
ccagatctctcagggccatctcagctataaacacaaggtaataattctgatggaattgaaaaccggaatggcactgcaagtgccctcttgcacatagatg

SEQ ID NO: 396682 - DNA, 50 bp, Homo sapiens
ctggcaatatggcccgagcagtgtttggccagctggaggtgatcttggac

SEQ ID NO: 396683 - DNA, 75 bp, Homo sapiens
gaaagccaggagaacaaggcttgatggttactcactataaacaatatccacccaacacaagcaaagtttattcct

SEQ ID NO: 396684 - DNA, 90 bp, Homo sapiens
gttgaaggtgatcatcatggacacagttttgacagtaattcttttgggccgaatattccaacccgggaccggctagagggcatggcagcc

SEQ ID NO: 396685 - DNA, 83 bp, Homo sapiens
catagagtggccaagtttccagaaaacagaaatcgaaacagatacagagatgtaagcccatatcctgaggaggatgaaggggc

SEQ ID NO: 396686 - DNA, 90 bp, Homo sapiens
ttcgagtgaccgagaccgcggccgggaccgagggccagattacctgtccctaatactgagcagaagctggtgaatgaaacaggagatccc

SEQ ID NO: 396687 - DNA, 90 bp, Homo sapiens
acagaactgagtaaaagaatagctccgtgttatcaagatagggtctctctctctgccacccaggccagagtgcagttgacgcagggcagg

SEQ ID NO: 396688 - DNA, 75 bp, Homo sapiens
ccgcctaccaaatacttaccctaattcatcatcaccagagtttgaattgatgcatgttgatgagtttattgatga

SEQ ID NO: 396689 - DNA, 80 bp, Homo sapiens
ccagaagacactccccagggcagaaatagcgaccatggcgaggtcagcccaaggccaaccccactgtcactctgttcccg

SEQ ID NO: 396690 - DNA, 83 bp, Homo sapiens
cggagaagaccttcaagcagcgccgcaccttcggccgccatggcatcagatgaaggcaaactttttgttggagggctgagttt

SEQ ID NO: 396691 - DNA, 50 bp, Homo sapiens
gctgcagccaccgcggcccccgcggaatcttcagctacttggagcaacag

SEQ ID NO: 396692 - DNA, 106 bp, Homo sapiens
gacaatttcagcacttctggcattgagacaacatgtgcatcaaatatgctgaaaggtctgtaaactgcagcaaaaagttcaaaactcaaagatgagtgaagcttca

SEQ ID NO: 396693 - DNA, 83 bp, Homo sapiens
caccagtacagggataagagatgaagagacaggccaggtcaggctcaccaagcagcaaaatgatgcttcaacacccaggccag

SEQ ID NO: 396694 - DNA, 74 bp, Homo sapiens
cctcaatgtgggtgtagagtctaaactcatccttaaaggggtcatactgctgacatactttgaagacaacccta

SEQ ID NO: 396695 - DNA, 103 bp, Homo sapiens
gcggctcgcggactacttcgtgctggtggcgttcgggccgcacccgcgcgggcagctggtggaatttttgaagaaaatggaatctcgaggccccctttcgtgc

SEQ ID NO: 396696 - DNA, 98 bp, Homo sapiens
cacaagcggagacacgggaagcacgcgaggctgcccggagtccggataagccgggcgggagcccctcggccaggtcgccacccagttcaagatgagcc

SEQ ID NO: 396697 - DNA, 83 bp, Homo sapiens
gtcggactcccgcggcgggaggagcctgttcccctgagggaaccctactctggaaactgtcagtcccagggcactggggaggg

SEQ ID NO: 396698 - DNA, 100 bp, Homo sapiens
agcgaagcccaagagctggcctcgccacgaaggccatcgaagacggcaatttggaggaaatggaagaggaagtacggcttaagaagcgaaaaagacgaag

SEQ ID NO: 396699 - DNA, 50 bp, Homo sapiens
tttgctttttcatcagccagtcagattgcttccaagtatgatcatcaggc

SEQ ID NO: 396700 - DNA, 97 bp, Homo sapiens
cagaatgccttaatcatcatcagagtatcctacacaaagttgtctctgaccaaggaactcatttaatggtgaccaagaatatggcccaggtgaccaa

SEQ ID NO: 396701 - DNA, 75 bp, Homo sapiens
ttcagggatgagtcatgtggtggtgaaaaatgaccctgaactggaccagcagcaaaatgatgcttcaacacccag

SEQ ID NO: 396702 - DNA, 116 bp, Homo sapiens
agctgtctgaggatccctatggcatcttctgcctcgtcctgacacccaccaggggagtgaatgcccaaaccaagaacggtgccacgcccctgtacctggcgtgccaggagggccac

SEQ ID NO: 396703 - DNA, 124 bp, Homo sapiens
agcgtccgactcgactcggagggtttctgtgagagacaaattgcttgttaaagcacgtcagctaactgttcagatgatgcaaaatcctcagattcttgcagcccttcaagaaagacttgatggt

SEQ ID NO: 396704 - DNA, 100 bp, Homo sapiens
gccgtcggagacatgggagacccggggtcggagagaggaggttcagatgagcccctgctgacttgagagagacagagagaccacgccgattgctgagagg

SEQ ID NO: 396705 - DNA, 83 bp, Homo sapiens
cgactgggatgatgaaacagccaaggacacacacctcctctacgtactggcagctgccaacctgtatgcccagatgcatgggc

SEQ ID NO: 396706 - DNA, 80 bp, Homo sapiens
caaaaaacaccacagtactatcgtctatcattggatgaagtggctccggagatattatggtgacaagctgaacatggagc

SEQ ID NO: 396707 - DNA, 100 bp, Homo sapiens
ggaaaggctcggctcatgttctgggacttaggagggcaggaagagctgcagtctttgtgggacaagctggtcagtgagaaggtcggaggggccgagggga

SEQ ID NO: 396708 - DNA, 51 bp, Homo sapiens
tggggctgcctcgccgcgtctcgccacgaggaattacggaggttgagctgg

SEQ ID NO: 396709 - DNA, 87 bp, Homo sapiens
ggtgatgccgccacctccggcctcagcataagccgtggcttggcggccgagctgcaccccaagtgagtgatagttgcttcaggaatc

SEQ ID NO: 396710 - DNA, 100 bp, Homo sapiens
cagcaacagatgataccaaacctaaaaccacatgtgcatctaaagacagttggcacggaatatcctccgaatcctaaatctagagctccaaggatgctgg

SEQ ID NO: 396711 - DNA, 75 bp, Homo sapiens
attctgcccactctgcggagttagcagtcacgacctccagcacaggtgaggggaagtggcttcgaaacattgact

SEQ ID NO: 396712 - DNA, 82 bp, Homo sapiens
cgccgaggcaccgaggcactcagaggaggtgaaagaaaatggcccgaaccaagcagactgctcgtaagtccaccggtgggaa

SEQ ID NO: 396713 - DNA, 73 bp, Homo sapiens
gcgcttctgcatctgtgggccgagatgatggatggcccaggagagaatgatcctgatttgaaacctgcagacc

SEQ ID NO: 396714 - DNA, 99 bp, Homo sapiens
ttggaatgtcaccacaagtgaatgcagtctttccagaatcaaaagcagacctcattttgattgtagtagcagtggaggacagtcggcccaatatgtcaa

SEQ ID NO: 396715 - DNA, 83 bp, Homo sapiens
agggaccacggtcaccgtctcctcaggctgccctctagccgggcttcaccttccagtctccatgatggagaaggctggaggcg

SEQ ID NO: 396716 - DNA, 107 bp, Homo sapiens
ctagagaccttggctggtcagagggctgtgaagacgcacggtgccaggaccaagtatctgttcctgttcccgacatccggacgtgccacttctgcctcgtagaagac

SEQ ID NO: 396717 - DNA, 100 bp, Homo sapiens
ctcatcaggacggaagcacaggggccactcagagtcgcccgagaagacatggatttgattgacatactttggaggcaagatatagatcttggagtaagtc

SEQ ID NO: 396718 - DNA, 100 bp, Homo sapiens
ggaccagtttgcaatgccaccagccacgtatgacactgccggtctcaccatgcccacagcaacactgggtttttcgttggaatatacgttgcacatttat

SEQ ID NO: 396719 - DNA, 51 bp, Homo sapiens
ttggagtctttgtccaggacggcatgttatgttacccagagaactttccaa

SEQ ID NO: 396720 - DNA, 82 bp, Homo sapiens
tgcctccggggacaagaaactagagcaaataaccgttttgaaattggcttcctactatgagatttcagttgatgatggtcca

SEQ ID NO: 396721 - DNA, 100 bp, Homo sapiens
tgacagggcatgccagagctgggcttttgaacacttgcagcaattagaattaataaagcccatggaaagaacttcaggaaattcacagagagagtaccag

SEQ ID NO: 396722 - DNA, 98 bp, Homo sapiens
ttggagcaagttgggctggggaccactgttgccttttaagatgccatggacaatattaccaggcagaaccaattctacgatacccaagtcatcaaaca

SEQ ID NO: 396723 - DNA, 100 bp, Homo sapiens
cccggaccaagacagctgctcagatctggcagtgtggtggggttctggaaacacacccatgttcccatgttggccatgttttccccaagcaagctcccta

SEQ ID NO: 396724 - DNA, 97 bp, Homo sapiens
tttggaaccatggttggtggcatccttatccccaacgggaacaggcacggtctcctggtacccaacaataccaccgaccaggagctgcaacacattc

SEQ ID NO: 396725 - DNA, 75 bp, Homo sapiens
caggggccccgaagaactcccacaatgccacaggaggaggcagcaggtaatgctatgggctatgtacgaatgata

SEQ ID NO: 396726 - DNA, 101 bp, Homo sapiens
ccgaggccgtcgcgggccactggccctctgcagccatgaagacaaagcccgtttcccacaagaccgagaacacctaccggccaggaggaagaagaggagga

SEQ ID NO: 396727 - DNA, 100 bp, Homo sapiens
catggagcttggccccctggacagcttcctcagggtacatcaggaacgtctctatcaagaatacaatttcagcaaggctgagggccatctgaaacagatg

SEQ ID NO: 396728 - DNA, 83 bp, Homo sapiens
cgggcctgaggcgaaggagcggccgggagcccgccgcgctggtagcgggaaccctactctggaaactgtcagtcccagggcac

SEQ ID NO: 396729 - DNA, 98 bp, Homo sapiens
caagaagaaggagagtaaagtcagcatgagcaaaaactccaaactcctctccaccagcgccaagagactctttttgatcagaacaatgctgcaaaaaa

SEQ ID NO: 396730 - DNA, 90 bp, Homo sapiens
gtgtatggattcatctcactgactgaaacctgagttttgattcaccagttcctacaacagcagccagtacccctgatgccgttgacaagt

SEQ ID NO: 396731 - DNA, 100 bp, Homo sapiens
ctcatccacaatgatttctccagtgctcatcttgttctcgagttttctctgccatgttgctattgcaggacggagcccagccccagcccaggggacccca

SEQ ID NO: 396732 - DNA, 75 bp, Homo sapiens
gaacagaggcttgcacaggtggaggtttttcacgactgaaaacaacatagcaaaataagccaagatgtctgtgga

SEQ ID NO: 396733 - DNA, 50 bp, Homo sapiens
cggaggacagctctgatgaggagatgggggctccggaggtggcgcccagg

SEQ ID NO: 396734 - DNA, 100 bp, Homo sapiens
acacaaattgcctccttatgtctccaacatggaccgcctgggggactcggaactccaaggccacctttgatgccatttctaagacctacagctacctgac

SEQ ID NO: 396735 - DNA, 100 bp, Homo sapiens
gggcttctctgaggcggcgagagatggtcaggtctggagctcgaccgggccaggcagtccagaacgtgggcaacatggacacgccggcttccagggccaa

SEQ ID NO: 396736 - DNA, 100 bp, Homo sapiens
cagtgacatcaccgagtacctcaggaagctcagcaagactggagtccctgatggaattatgcagtttattaaggccacggaaaggtatgatatatttgat

SEQ ID NO: 396737 - DNA, 75 bp, Homo sapiens
agcaggaattgggatcgtgtcgctgcgcatctactacaagccttagtgggtctgatagtgagaccgaggggaaac

SEQ ID NO: 396738 - DNA, 98 bp, Homo sapiens
atcaatctcactgctgcagacacaagcatcctggccagaacaagccaaggagccaagacgagagggacacacggacaaacaacagacagaagacgtac

SEQ ID NO: 396739 - DNA, 90 bp, Homo sapiens
cccaagagcagcggaaaatgatccagtcacaggaccaagaatcgccttcagccctgtctggtgcatccttggcagaaagtgaggaggaaa

SEQ ID NO: 396740 - DNA, 100 bp, Homo sapiens
gtgagggtgtcaagggggccaagagcttctttgaggccaagcctccagctgtggggtgcccagcttcccgcccaacctatccgcccgagtggtgggagga

SEQ ID NO: 396741 - DNA, 74 bp, Homo sapiens
atatgctgaaatcagttcagatgaagataatgatagtgatgaagcttttgaatattgaatcagcagaagtatct

SEQ ID NO: 396742 - DNA, 100 bp, Homo sapiens
tgtccagcttcctctacataggggacatcgtgtccctgtacgcggagggctcggtcaacggcttcatcagcaccttgggtctcagaccagtatccttcag

SEQ ID NO: 396743 - DNA, 75 bp, Homo sapiens
agaccttagaaaggatcaggactggcgggttgatgaaaaaaccgtaggagaacctggttggctttatggtagttt

SEQ ID NO: 396744 - DNA, 82 bp, Homo sapiens
tccgacgcaagactgtcccggcccgggttttttattggcacctcagtctcaacattttcttttcggattcatgaggaaagag

SEQ ID NO: 396745 - DNA, 95 bp, Homo sapiens
ggaaaatggcggacgggaaggcgggagacgagaagcctgaaaagtcgcagcgagctggagccgccggaggtttctaccatgaatgaaatgaagag

SEQ ID NO: 396746 - DNA, 88 bp, Homo sapiens
agcttttggatggtgtgtggccctgccaacctttacattttggacttccagcctccgaaatgttccaggaatggatggaggtgcttta

SEQ ID NO: 396747 - DNA, 105 bp, Homo sapiens
gtgccatccaccctggcagaggagtttacctacaaccccttcatgagagtgagagccactccatccccaaattcaagattagaaagatccctgactgcttctcaa

SEQ ID NO: 396748 - DNA, 75 bp, Homo sapiens
ttcgtgaacggcgcttcccttggtgcacctgtggccgccatgtttgagcgaggcaagaattgtcagacagtattg

SEQ ID NO: 396749 - DNA, 89 bp, Homo sapiens
gggccagggaaccctggtcaccgtctcctcaggtcatcatcagatttgaaatatttaaagtggatacaaaactatttcagcaatgcaga

SEQ ID NO: 396750 - DNA, 100 bp, Homo sapiens
cgttaaagtctctcttcaccctgccgtcatgtctaagtcagaggctcatcatatgcccgaagctcagtggttacggctgtgaaatttacaatttctgacc

SEQ ID NO: 396751 - DNA, 100 bp, Homo sapiens
cttcctcattatcagaaattaaagtgaacagcagagaatttcaaaggaccttgctaatatctgtaagacggcagctacagcaggcatcattggctgggtg

SEQ ID NO: 396752 - DNA, 115 bp, Homo sapiens
cttgaactctgcacagcaagcccaggctcattatcaggagttggcatcctttggaagagttcgtgaaagctttctgcccagagctcctggaccaatgcatcttcccaccacctta

SEQ ID NO: 396753 - DNA, 100 bp, Homo sapiens
gtcagcacggagagaagctaagaagtctttcaatgatgatgctatgctgatcgagaagtttgtagacacaccgaggaatcatgggtaaagaaggaagaca

SEQ ID NO: 396754 - DNA, 74 bp, Homo sapiens
ggaaaacatatattggagctacatggatgttgtatctcccacttcacccttctagaccatcccagaagatctat

SEQ ID NO: 396755 - DNA, 95 bp, Homo sapiens
tctccccacccttgccctacttggactcttgattggaatgttctccctgcagcagtcagcccaaaggaagatgctgtgagagaagtaaggaaata

SEQ ID NO: 396756 - DNA, 129 bp, Homo sapiens
ggcagcggcttcgatctctcaagagcctagtttagcagacataaaagcccggattcaggattcagatgaaccagctctactgagatgaagaaagaaaaagaatacctgctcagctccagagacacgtaa

SEQ ID NO: 396757 - DNA, 82 bp, Homo sapiens
gctgccctcagctccgagtccagggcgagtgcagggctcgcggcctggcaagaatgtacagctgacagagaacgagatccgc

SEQ ID NO: 396758 - DNA, 98 bp, Homo sapiens
tgggagcagacagtaatattaccaacaaagcaggggagagacccagtgatgtggcaaagaggtggatgaaaatactaggaaaagtttatttaagttac

SEQ ID NO: 396759 - DNA, 100 bp, Homo sapiens
gaatgaagatttaaggaaacttgcagagaatgaaatcactttgtgtcaaaaagaaataactcagctgaagcatcagtgtctgcagtaaaacccactgttg

SEQ ID NO: 396760 - DNA, 74 bp, Homo sapiens
ccctgatgggcagtcaacagctaaaaccttcctcaccgtgtactgtgccaagactggctagaggccctgcactg

SEQ ID NO: 396761 - DNA, 100 bp, Homo sapiens
cgagcctacgacacggacgcaggcccagtgttcgtcaaagtcaaccgcaggacgcaggtatcatgatattagctggtttgacatcaagtcatttgtgagt

SEQ ID NO: 396762 - DNA, 80 bp, Homo sapiens
caggcgctcaccatgttccctggaggttttttattggcacctcagtctcaacattttcttttcggattcatgaggaaaga

SEQ ID NO: 396763 - DNA, 97 bp, Homo sapiens
ttagacatagaaaggctggttttccatcttgtcatacagaatgccgggtctaagttgtagattttatcaacacaaatttcctgaggtggaagatgta

SEQ ID NO: 396764 - DNA, 83 bp, Homo sapiens
gggacacggaccaggaacctgagctaggtcaaagacgcccgggccaggtgagaagccctaccactgcaactgggacggctgcg

SEQ ID NO: 396765 - DNA, 100 bp, Homo sapiens
gtgagccaaggaattttgtgtttcttgccatcttacaagagtgcctggaagagctgggatgtctggttgagtcctatggcatgaatgtttgccaaccaac

SEQ ID NO: 396766 - DNA, 73 bp, Homo sapiens
gctgcccgagagatggctccaaatatggcagagtgggaccagaaggtctcggtccagctcgacttccagctca

SEQ ID NO: 396767 - DNA, 90 bp, Homo sapiens
cccgcataaacagcacggaagcgcggacggcgcacgacgagtactggcatgcgcacgtggacaagaacctgtctccagagaagattttcc

SEQ ID NO: 396768 - DNA, 75 bp, Homo sapiens
gaaaaataaagtgttgagtaaacagaccaagttgggttgcactgctgtgatccatcctcatctcctaaagatgca

SEQ ID NO: 396769 - DNA, 75 bp, Homo sapiens
gcaaggagaggaaggagcttttctccacaaccacttcccaggcaaacttttttggtaccaagtgcattttgatat

SEQ ID NO: 396770 - DNA, 100 bp, Homo sapiens
tcagaattaccagtgttacagtgattttacaacgagatgctgctctccatagggatgctcatgctgtcagccacacaagtctacaccatcttgactgtcc

SEQ ID NO: 396771 - DNA, 90 bp, Homo sapiens
tccccgtcttcgacctcagttacttcatcgtctccatcctctacctcaagtatgagccaggtgaagtggagctggaggagtactacccgg

SEQ ID NO: 396772 - DNA, 100 bp, Homo sapiens
tctgcacgacgatgaggtgacagtcacggcttgccgctgttccgtaacccagtgattccagtcttggctgtggtatgaatcacttagggatcctattaaa

SEQ ID NO: 396773 - DNA, 100 bp, Homo sapiens
tacgcgaagtccacccagcgtttctgaggctaaaataaatgaagctgtagaatgcttactgtccctgaaggctcagtataaagaaaaaactgggaaggag

SEQ ID NO: 396774 - DNA, 83 bp, Homo sapiens
gggtgttttgctaccgtgaccgtttagattcgggaactggagcctctcctctgtcacagtgacaatccatctcagctcatctg

SEQ ID NO: 396775 - DNA, 100 bp, Homo sapiens
tgtaattccaaactttgaggacgatagagatcagtgggctttgactgcccagcatgcagtctccattcttagatcctgtcttccattgagctgctccaac

SEQ ID NO: 396776 - DNA, 97 bp, Homo sapiens
ctggccatgtgcgcaggggcagaagtggtgcacaggtactaccgaccggacctgggagtgaactactttatgtccaagggtatcctggatgattcgc

SEQ ID NO: 396777 - DNA, 92 bp, Homo sapiens
ggtcattatgaccagagtattgccgcggtggaaatggagtgaagctgtggtctaccaatctagacaactcagtggcaagcattgaggcaaag

SEQ ID NO: 396778 - DNA, 100 bp, Homo sapiens
gggagtccctgccagcaagccggagcctgccagagccaaggccaagctctccaagttcagcatccccaagcagggggagttctggacatggcaagacatg

SEQ ID NO: 396779 - DNA, 75 bp, Homo sapiens
tccatcatccccaacaaggtggcccctgttgtgatcacctcgttcgaccagtcaccatggtgcctagtgttccag

SEQ ID NO: 396780 - DNA, 97 bp, Homo sapiens
gggagttgcggagcccgcccgccggcagcgccgctccccagggagggagtccgcagcctgaggataccgaagtgtataaagctacagtaaaagatga

SEQ ID NO: 396781 - DNA, 99 bp, Homo sapiens
cgccgctgaacggatggctgagggagccccgcggatcgtttaggaaagccggccaggctggcatggctctatataagattgtccccaaaaatccctact

SEQ ID NO: 396782 - DNA, 83 bp, Homo sapiens
gaaaaccaagccgaggactgcggggtccggtgtccacgcagatgtactaatggtcacttgatgtgcgctggctgttttatcca

SEQ ID NO: 396783 - DNA, 100 bp, Homo sapiens
cacaaaccctgtgaaagtgcctggggagtgttgccctgtgtgcgaagctgagaaagtggaactccagagacactcctgaaattgtcctaagtcaaaggag

SEQ ID NO: 396784 - DNA, 130 bp, Homo sapiens
cggcgctggggacgcgcgcggccgagactctggcctgcagtcgccgccgccgccgccagctgatcttgcatctttaatggataaaacatttgagagaaagttgcctgttagttctttaacaatatcacgg

SEQ ID NO: 396785 - DNA, 74 bp, Homo sapiens
cctggagatgattgagccgcgcacgctacagtacaaggtgacacccctgcgctttgggaaggacgtcgatggga

SEQ ID NO: 396786 - DNA, 100 bp, Homo sapiens
cctgcctcaaggagctgtgcaccagcccccgaggcttcgtgacggagttatcagagacattgagaggcaaattcggaaaaaagaaaacattcgtcttttg

SEQ ID NO: 396787 - DNA, 82 bp, Homo sapiens
gtaggatctgatgaaaattctcttcattctcttggactgaacttaaatactgatagatatttggagttcttacaacatggca

SEQ ID NO: 396788 - DNA, 108 bp, Homo sapiens
cagtggcacctgcgcgaagctggccaaagcctgcccagacggctcacctgtgcgggatggaacaaaaggaaaatgttggggcttttcaggaagcataataagattcct

SEQ ID NO: 396789 - DNA, 75 bp, Homo sapiens
ctcctgctgctcatcccggtggccgccgcgcaggagcctcccggagctggtgaaaggtgtagcagtcactcggcc

SEQ ID NO: 396790 - DNA, 83 bp, Homo sapiens
gctatttgggtgatacccagtgcagtgaactgcaggtaggcgaaaaccaagagtacatcggcctcgttctcctatattggaag

SEQ ID NO: 396791 - DNA, 100 bp, Homo sapiens
acagaattagcccaagcagattcctcccagggagatgcacttatttacatggaaccagagaaacaagtgatgtccaggtcgtcagatgaatgtgttgtgg

SEQ ID NO: 396792 - DNA, 99 bp, Homo sapiens
gggcggtcttccccggctcgccaactcggctgctctgggggattcgtgcgcggggaagcctgtgggaacaccagatgctggcgcttatttccgtgtgct

SEQ ID NO: 396793 - DNA, 86 bp, Homo sapiens
ctcgggccctgcccctacatttggagcctggacacgcagtacagcaaggtatttgaaatatctcaccaaaaaatatttgaagaaga

SEQ ID NO: 396794 - DNA, 101 bp, Homo sapiens
gctggccctgaggcatctgagtcaacaacggatgaaaatgaagacgacattcagtttgtcagtgtgtgtgccctcttcctgattctggagaaaaatgccgg

SEQ ID NO: 396795 - DNA, 50 bp, Homo sapiens
cggaaccgcgattcggcgtgtcagggagaagaaatgggtgaccgttggtg

SEQ ID NO: 396796 - DNA, 100 bp, Homo sapiens
ggcgcggggtcggcgctgggctggaggcggcggagcgcgagagcttcgagcggactcagaatcctcactatggatgggctcattgaggacattaagcatc

SEQ ID NO: 396797 - DNA, 74 bp, Homo sapiens
tcatcttgtcctacctgaagtatgccattagttcccaggtctctagcatcaattcacgctttgccaaagtacac

SEQ ID NO: 396798 - DNA, 90 bp, Homo sapiens
gcgcccacttggcgggccctggctggggatgtgcgagatgacagatttgaagatctggaagaggcaaatccattctcttttagagagttt

SEQ ID NO: 396799 - DNA, 75 bp, Homo sapiens
gccatgagcggcggcgtgtacgggggagtgtcttaaagacttttctacatgatcctcttgtggaatggagtaaac

SEQ ID NO: 396800 - DNA, 101 bp, Homo sapiens
gccagcagcccaagagcctcaaagccaaacgtaccaagaaagtcgggatcgtcggtaaatacgggacccgctatggggcctccctccggaaaatggtgaag

SEQ ID NO: 396801 - DNA, 80 bp, Homo sapiens
cttctatggataaaactttcaagcatttaaatcaaacggtattgagatggattgggttatgaaacataatggtccaaatg

SEQ ID NO: 396802 - DNA, 88 bp, Homo sapiens
tttgctctcatgaacatgcaatgagaagactgatcaatctgatgctgggctcttgcactgtttggtggaaatggtgagacaggatttg

SEQ ID NO: 396803 - DNA, 83 bp, Homo sapiens
cagaagtacaacgtgcgatccatgcccatccgaaaggatgatgaagttcagcatccagtcctggatgagccaatagctgaagc

SEQ ID NO: 396804 - DNA, 75 bp, Homo sapiens
ggacggggacagagagctgatgaaggaaggagtcaagactgagaacaacgatcatattaatttgaaggtggcggg

SEQ ID NO: 396805 - DNA, 87 bp, Homo sapiens
cattgctctttggcgactcttattggaggaatttgtgaaatggaagggctccctgttcttccgatttgtcagcactctgatcgattc

SEQ ID NO: 396806 - DNA, 95 bp, Homo sapiens
ctagtgtggctctcctgttccagcaattggatgtgtatatctcatgattgatatggagaaactagtcatgggccaaaggtcaagatacttctctg

SEQ ID NO: 396807 - DNA, 100 bp, Homo sapiens
ctttcttatactctagaatatacaaagacaaaaggagattctgatgaagaagttattcaagatgagatgtagcctcgggacagcgtgtggttctagcctg

SEQ ID NO: 396808 - DNA, 98 bp, Homo sapiens
tcctgggaggcgaggacggtctctgccagtataaatgcagtgacggaggagatgaccgccgggttctgctatggcacatggaacaagccatccactcc

SEQ ID NO: 396809 - DNA, 75 bp, Homo sapiens
gaggataacatccctccagaagatggtttattttcttgaaaaggctccaggcttcggcttggaaaatcccaccgc

SEQ ID NO: 396810 - DNA, 75 bp, Homo sapiens
ctccgcaaggggatcgttttctccaggaggaatgttttgggaacaactcgatttgctcacttgaagaaatccaag

SEQ ID NO: 396811 - DNA, 75 bp, Homo sapiens
ctctcatcgctctcggcctcggcctcggcctccgacacggaccagaggagcgagagcagcaagaaccacacccag

SEQ ID NO: 396812 - DNA, 87 bp, Homo sapiens
tctggagcagtggagcccaaagacccctggagacatggttcttcacacacccccattcggcgtagtacccagagagctcaagatgtg

SEQ ID NO: 396813 - DNA, 97 bp, Homo sapiens
cccagctggtggctggagcgaccccttgttctttggtggcgctggcctcaggagtgcaagtagctgatgaagtatgtcgcattttttatgacatgaa

SEQ ID NO: 396814 - DNA, 75 bp, Homo sapiens
tgcttcgggcctctggaatttagcgctcgcccagctagccgcaggaagtgggaaaactcttgcctttgccatccc

SEQ ID NO: 396815 - DNA, 99 bp, Homo sapiens
cagacctggtgtctccagctgatgatttgtccctgtctgaaggtttccttaatgacaacaaaaaagggagtaatcctacccactgtaagagtcatgact

SEQ ID NO: 396816 - DNA, 90 bp, Homo sapiens
attcctactctgtggatgagcgcgtggactccgacagcaaggtgaaccagtgtgttattggtactgctcaggccaacaggaagtgaagac

SEQ ID NO: 396817 - DNA, 97 bp, Homo sapiens
tggacagggggcaaaagcacctgctcgttccagaaacgccgctggactgcgaggtctccctgtggtcgtcctggggactgtgcggaggccactgtgg

SEQ ID NO: 396818 - DNA, 90 bp, Homo sapiens
cccaaagcgctggaattacaggcagttggaatggaaactgtctgaatctggagcaattatgacagacctggaggaaaaccctaagaagcc

SEQ ID NO: 396819 - DNA, 50 bp, Homo sapiens
ctggggcttcctgctccagctgggatgatccaccaacacattctcagcca

SEQ ID NO: 396820 - DNA, 90 bp, Homo sapiens
ataaaagttgatggagattacctttggcccccaaatacatcaagatgtttgtactggatgaagctgacgaaatgttaagccgtggattca

SEQ ID NO: 396821 - DNA, 88 bp, Homo sapiens
agttcctgagtcaatttgaaatgcagtccaggaaaagaccaggaagaaacaggctcctgccagcaccgacagcaacgaaaatgttccc

SEQ ID NO: 396822 - DNA, 90 bp, Homo sapiens
atcgcttacatctccagagaaatcctgaggacatcggtaatattcgatatcaagttacggggagagtttgacggctccgttaccttccac

SEQ ID NO: 396823 - DNA, 75 bp, Homo sapiens
tcgaagtgcgcaaacttgacactcaccctgaccgattcgggaactggagcctctcctctgtcacagtgacaatcc

SEQ ID NO: 396824 - DNA, 100 bp, Homo sapiens
gccgagatgtccggctgcagcagcaagtcccatcggaggacctccctgccctgtataccgagggaacagttttcggctttgtgagaaaccttaccatcaa

SEQ ID NO: 396825 - DNA, 90 bp, Homo sapiens
ttgtatttgactgagagaaacccactgaagacgtctgcgtgagaatagagaccaccgaggaagctcttcgtgggcggtcttgactggagc

SEQ ID NO: 396826 - DNA, 50 bp, Homo sapiens
ctcaatgatcgtgtcatgagaggaagacatgtaaggaatttgcataagac

SEQ ID NO: 396827 - DNA, 95 bp, Homo sapiens
aggacctcatccccaagctgcctcggccgagggacctgcagcccttccccacgtgccaggccctggaaattgatgaagcctgtaagagaataaag

SEQ ID NO: 396828 - DNA, 90 bp, Homo sapiens
gcgcccctcggcctcggagcaacgagcgcagcgccggttctagtaaataccgcttgctgtgttttgatgttggtggctaagctcatccag

SEQ ID NO: 396829 - DNA, 82 bp, Homo sapiens
gcacctggccaggctgcggctggaggatttttagactctgaggagcagttggagctaatccacattatggaaatggaaacca

SEQ ID NO: 396830 - DNA, 75 bp, Homo sapiens
ccgggagtcgctgggtgcgtggggctgcctcgccgcgtctcgccacgtaaaatgtttattggaggcttgagctgg

SEQ ID NO: 396831 - DNA, 98 bp, Homo sapiens
cctatggtcgcctgggtccctctgagccccggggcatctatgccagtgagaggcccaagtccctagatatcagttttagagaatgtggcgtggagaaa

SEQ ID NO: 396832 - DNA, 100 bp, Homo sapiens
attgctttaagttttctcatttattttatatctgcactctttgggtacctcactttttatggtttccaatacttatctacaggaatcgccatgaccccag

SEQ ID NO: 396833 - DNA, 83 bp, Homo sapiens
tgcctgcagttcagacccttctctcccctccactttctcccggatctctgttgaggagctggcgcggaatctggtcatcaagg

SEQ ID NO: 396834 - DNA, 80 bp, Homo sapiens
tctcctggagcttccagccagagggggccgacactactgtgtcggaaagaccggcagagaccaatgccaatgtggacaac

SEQ ID NO: 396835 - DNA, 75 bp, Homo sapiens
atcctagtggaggacgcccctgtggacccttcagaagacatatttacagttttgacagctgaagaaaagcagcga

SEQ ID NO: 396836 - DNA, 82 bp, Homo sapiens
cagagctctccgggttccccggctcgcggggcccggcgaagggcaggtatcatgatattagctggtttgacatcaagtcatt

SEQ ID NO: 396837 - DNA, 75 bp, Homo sapiens
cgtcatccgcggctacgtgggcaaccgggcggccacgttcccgctgcagcctcccgcgacgatgcccctcaacgt

SEQ ID NO: 396838 - DNA, 98 bp, Homo sapiens
ctgactgcacttcttttttgagaaaggaaggaatatatcctgactgattaagcagcaatcctggagagtcatgggatagatgtgcagagtccaggagg

SEQ ID NO: 396839 - DNA, 100 bp, Homo sapiens
ggagagtaaaccaagaagaaatccacagatttagttctacctgcctagagctggaacgttacctccagagcgagccctgctatgtttcagcctcagaaat

SEQ ID NO: 396840 - DNA, 100 bp, Homo sapiens
gaggagcaatggtcacccgggatcgagctgagaatagggacggccccaaggcatggaagaggagatggttcgtgttacgcagtggccgtttaactggaga

SEQ ID NO: 396841 - DNA, 50 bp, Homo sapiens
cgcgagacgaggagcgggcgcccagctgctggaaacgcgttctgccaggc

SEQ ID NO: 396842 - DNA, 100 bp, Homo sapiens
tctcctggggtcggcgccgagtgggaggatggcggaaattcccaacttcttctggagcctggggatcggtcacactggtgcgtggtggcatactgggagg

SEQ ID NO: 396843 - DNA, 101 bp, Homo sapiens
cttggaatcaaagataaatccaaatactgcatatcagaaacaacaggggatcatcgtcttgctcttcttttatctcagtttgtgggtagccagtcagtccg

SEQ ID NO: 396844 - DNA, 74 bp, Homo sapiens
ggtgaatccaacaagatcccccgtctgaggactgacctttttcccagcgctggagagcgaggtggcttcaataa

SEQ ID NO: 396845 - DNA, 90 bp, Homo sapiens
aggaaggaacgaggcaaggagctaaagcagcgtgcgttcagccctggggtggagccatcgaagcccccacccacaggctgacagaggcac

SEQ ID NO: 396846 - DNA, 90 bp, Homo sapiens
gcgctgcctggtcgctggtgaagcccgcggcgcgcgcctctcccggaccctgcaggatgaccgcacctcgagcaggagtggggatgccac

SEQ ID NO: 396847 - DNA, 100 bp, Homo sapiens
cgccctctgggaggcttaccgagagtttgaaagtgcgattgtggaagctgctcggagagcagaaattatccatcatctggctgatctgttgacggaccag

SEQ ID NO: 396848 - DNA, 100 bp, Homo sapiens
tcagagattgcgccctcagcgaacccctaatctttctgggtgactctggacactctactacagtaatatgaatatggcagcccctcggaagccatgcaat

SEQ ID NO: 396849 - DNA, 100 bp, Homo sapiens
acatggcggacggcagcggctggcagataatcttgtgccgtggaaatcagaagggcaaaacgaagcagtcatgatgagaagcacacctcagaaatcagga

SEQ ID NO: 396850 - DNA, 74 bp, Homo sapiens
atcttcgggcaaaaaccattgtcaagttctcagtctacaaataagaaacctcgaaaatctccaggtgagaagag

SEQ ID NO: 396851 - DNA, 122 bp, Homo sapiens
gtcaagatcctcaagaagaagaagttgcgaaggatccccaacggggaggccaacgtgaagaaacatgcaagaaagcacttcagccaagcagaagggagccagctggacgaggtgcgccaggc

SEQ ID NO: 396852 - DNA, 109 bp, Homo sapiens
ccgccccctgggatccgcaggttccctacacggtctcctgggtcaaggttgaaaggattgttgacaaaaggaaaaataaaaaagggaagacagagtatttggttcggtg

SEQ ID NO: 396853 - DNA, 74 bp, Homo sapiens
cactgggactttaccttctcatactttgttagaaaagccaccaggttatgaagacagtatggagtttccagacc

SEQ ID NO: 396854 - DNA, 80 bp, Homo sapiens
gcgccttccagaccctggagaagtatgacctggagagggatctactggaggatgaaggagaagatgactaaatagaacac

SEQ ID NO: 396855 - DNA, 50 bp, Homo sapiens
gttggtgtagaagccaaaatcaggatttgtactgtgttcgcagtgacctg

SEQ ID NO: 396856 - DNA, 75 bp, Homo sapiens
tgagtaccgcgagagcaacaatatggtttgaagtggtgaacatggatttttctcggcttcacatgtacagtcctc

SEQ ID NO: 396857 - DNA, 100 bp, Homo sapiens
ggctactacctggagatgctgatcgggacccccccgcagaagggttgattacattttaaatgttaccagagaaatcgataatttttttcctggcttattt

SEQ ID NO: 396858 - DNA, 100 bp, Homo sapiens
accatgcagagcagcccctcccctgctcaccctcagctcccagtcctacagacacagctgcaagctttcttcctggtggcagatgacatcatggattcat

SEQ ID NO: 396859 - DNA, 100 bp, Homo sapiens
cagtgaatcggagctcagagcgttgcttcggtttccctccagacaggaactcagcgagatgctgtacacagaccggcccgactggcagagtgtgatgcag

SEQ ID NO: 396860 - DNA, 75 bp, Homo sapiens
agcagtacagctgggatcagcgcgagaaggaatgtatcctgtcaggtataatgtcagtgaatggcaagaaagttc

SEQ ID NO: 396861 - DNA, 100 bp, Homo sapiens
tcgagaccgccaacctggatggagagaccaacctgaagcggcggcaggtggtccgcggcttctcggagcttgacatggatttgattgacatactttggag

SEQ ID NO: 396862 - DNA, 51 bp, Homo sapiens
agaggagcggggagcaatgcaggtagcaatgtacagataaagagtacttta

SEQ ID NO: 396863 - DNA, 101 bp, Homo sapiens
atgaaatcctccccacttatgtttgtaaatgtgagtggaagccatgaggccaaaggcagttgtattggcttgtacagcatatgtggattttatgatttctg

SEQ ID NO: 396864 - DNA, 100 bp, Homo sapiens
ccgcggagcagtagccgccgtgggagggagccatgaagcattacgagaccctacagcttggggcctgggctcctctgaccatcctcattgagaaaggaaa

SEQ ID NO: 396865 - DNA, 75 bp, Homo sapiens
aatttctgtgagcaggtgaacactgaccccaatgggcaccgcatgcgtggggagaccaccctgtggaaccctggc

SEQ ID NO: 396866 - DNA, 90 bp, Homo sapiens
aaaaattctgcagcaaaaattggaaaggagcaagaaccacctgagaaaagtgatcctaaacaagaagagtctcagatatctgggaaggag

SEQ ID NO: 396867 - DNA, 75 bp, Homo sapiens
agtaagaagaattccagtcttataaaggaaattatcgtttcatgaaactcttacttacacgcagagcaaactgga

SEQ ID NO: 396868 - DNA, 100 bp, Homo sapiens
cctgggaggagttcagccgcgctgccgagaagctttacctcgctgaccctatgaaggatggtccagcagtttggggtggattttgagaagaggatcgagg

SEQ ID NO: 396869 - DNA, 80 bp, Homo sapiens
tggagcctcagttggaagcagccgatccagcctgcggagcctgtggggcagcgtacacagactttactaaaagagtacaa

SEQ ID NO: 396870 - DNA, 88 bp, Homo sapiens
ctccttttccctctccctttccctaagggagtgaagagcaaggccagcctacccaactttcttgaccacatcattgcctcagtggtag

SEQ ID NO: 396871 - DNA, 78 bp, Homo sapiens
aaaagaggactggagtggtttgtctgtgatggctggaagttcctctgtaccagagcagtgtgacctttgaagacgtgg

SEQ ID NO: 396872 - DNA, 50 bp, Homo sapiens
caaatcctgagtccaaacactcaagatgatttcccatcagatatcgctaa

SEQ ID NO: 396873 - DNA, 75 bp, Homo sapiens
ccaccaatgccagcctgtccttcctgcagagcggggtttggaggaccacgagtccgtggtggaagtgcaggctgc

SEQ ID NO: 396874 - DNA, 97 bp, Homo sapiens
acccttgtgctcgttgtcgccgcggtcctgctgttgttggatatgtcaagtgaccagatagctgccaatctgcaagcagttattaatgaagtttgta

SEQ ID NO: 396875 - DNA, 97 bp, Homo sapiens
cctgctgagtctgctcttcctggtccaagaaaatggagctggcgctggtgcctgtgagcgcccacggcaacttctatgagggggactgctacgtcat

SEQ ID NO: 396876 - DNA, 82 bp, Homo sapiens
cgtccttctccactttcgccagcccgtgccgcgagcgcggcctgcaggagaaatgcgtgtactgccggaagcggatgaagaa

SEQ ID NO: 396877 - DNA, 83 bp, Homo sapiens
ggaccatggaatccagagctgagtctggcaccttccacgctctgtagtttcatttcttcttcgtcgggggtctcaggagttgg

SEQ ID NO: 396878 - DNA, 78 bp, Homo sapiens
gaaatgagggcaacttctgaagacttcaacaagatcctggtgtatagcctggaagcaggacgccgcctcttgaagctg

SEQ ID NO: 396879 - DNA, 82 bp, Homo sapiens
cagcggccgagcgggcggcttcctggcctgggcgctccggtggcggcggagatggcatgatcaacattgacatgactggaga

SEQ ID NO: 396880 - DNA, 99 bp, Homo sapiens
acatgcctgaggtcctcaagtccctgctggagcactctctgccttggccagagaagagaacagaggctgtggccaggccagctgggctcggggagcgcc

SEQ ID NO: 396881 - DNA, 101 bp, Homo sapiens
ggcgggggtggtgctggctcagtacatattcaccttgaagaggaagacggggcggaagaccaagatcatcgagatggaaagaaaccttgactggttcccca

SEQ ID NO: 396882 - DNA, 100 bp, Homo sapiens
cacaggaatatccatgtcggcttgtagagagattgcaattatagcatttgatgagctgaagactgattacaagaatcctatagaccagtgtaataccctg

SEQ ID NO: 396883 - DNA, 82 bp, Homo sapiens
aaaaactggagccagtccttttgccagatcttgatgtggaagaaatggaggactcagaaccaaggatttccaagtgatttct

SEQ ID NO: 396884 - DNA, 75 bp, Homo sapiens
ggggagacccctcgggtggaagaagtggggccatacacctacaggagcttgaaaaatcacatttgagaagaggat

SEQ ID NO: 396885 - DNA, 82 bp, Homo sapiens
cagtcccttgcccagcagttatccgggaaaaacacaccagtggcagttcgcagcctccaggacttggctcgcatcgccatcc

SEQ ID NO: 396886 - DNA, 100 bp, Homo sapiens
tccttggctcactgaggaggtttggtgaatgacgtgccattccagaacctgacacgggaggaggcagtgcagttcctgctggggctgccaccaggcgagg

SEQ ID NO: 396887 - DNA, 112 bp, Homo sapiens
aacggggtcatctttaactgcttggccgtgcttgccctgtcatcccacctgagaaccatgctcaccgaccctatgacgtccggttgtttgccttcgtgcgcttcaccaccgg

SEQ ID NO: 396888 - DNA, 75 bp, Homo sapiens
cgcaaacagaatcgcgtttggctgtgctgcctgtcaggattggagctgctttccgagcacctggaccccaaactc

SEQ ID NO: 396889 - DNA, 100 bp, Homo sapiens
ccggaacccgagctggagctgaagcgcaggctgcggggcgcggagtcgggagccaatggagatcttcgtggatgatgagacgaagttgacgctgcatggg

SEQ ID NO: 396890 - DNA, 75 bp, Homo sapiens
ggagaacatcgccaagcagcaacagctggcagcatcacccccggacagcaaggcagaatccagagaccacatttg

SEQ ID NO: 396891 - DNA, 100 bp, Homo sapiens
gttggaaaaagaaatggaacagaaacatagagaggaactggagcaattgaagctgactactaaggagaataagtggaaggagaacatgaatctctcagag

SEQ ID NO: 396892 - DNA, 90 bp, Homo sapiens
ttcccggcccctcagggccacggctttagcggtgtcttttgcgatggcttgttcaatcagtatatcagtcaacaggaatataagccacga

SEQ ID NO: 396893 - DNA, 100 bp, Homo sapiens
agatgcttgtggaagccacccgggagtttgaggaggttgtgatgtggtatggtgtattcctgtgggcactggtgtcttctctcttctttcatgtccctgc

SEQ ID NO: 396894 - DNA, 83 bp, Homo sapiens
acgggctcctcaccgttgtcctgctgggggggctgtcggggggctgttaggtgcctggatgacaagtggacagtttaagccgg

SEQ ID NO: 396895 - DNA, 89 bp, Homo sapiens
atgatgtcactgtttggagcccccaggtaaaagtgcagttttaaagtgtctcctggatattcacaaaatttttcaggaaaatgacccag

SEQ ID NO: 396896 - DNA, 82 bp, Homo sapiens
caggctgcggcagacggcgacagtggcggcggcgccatggcagggcttgcaggccgacgcctccccccagggtcagctgcgg

SEQ ID NO: 396897 - DNA, 75 bp, Homo sapiens
cgggcctgcggccgcttcttccagaagggccaagggacttgcttttatttcggaaaactaggtgtctgtgttcac

SEQ ID NO: 396898 - DNA, 101 bp, Homo sapiens
ggatcatggccgcagccgctctggggcagggtttccaggcctgaggtgcccgccctggccccaggagaatgaaccagccgcagaggatggcgcctgtgggc

SEQ ID NO: 396899 - DNA, 90 bp, Homo sapiens
tggctatgcaccacctgatatcaccaacttatgccaccacgggctgttccctgaccctgcaccatacggagaaaccagaacatgaagaca

SEQ ID NO: 396900 - DNA, 83 bp, Homo sapiens
atcatcacggcctttgacctcactgacgtgcagaccctggagcataccagataagcatggattcctggttcattcttgttctg

SEQ ID NO: 396901 - DNA, 74 bp, Homo sapiens
acaggctgaggatcggcacgggagcatggcagccaacgtctcggctgtggaggaagatgcagagtcagaagatg

SEQ ID NO: 396902 - DNA, 100 bp, Homo sapiens
gtgaatcctgctgtctgtgcagggctcatagtgagtgttctgtgaggtgagtggagtgctgccaagaatatgcccgactccccatgacaagacagaactt

SEQ ID NO: 396903 - DNA, 95 bp, Homo sapiens
cgagttccagaggctgctcggcttccagctcaatcctgccggttgcgccttcttcctggacatgaccaactgatggagtttccctcttgttgccc

SEQ ID NO: 396904 - DNA, 74 bp, Homo sapiens
ccgttgcgagctgcagctgcgatctctgtggtaggcccagtctgtgtctgtgtggagtgttgcaggacgagtgg

SEQ ID NO: 396905 - DNA, 98 bp, Homo sapiens
acgctgctcaaaacctcgctccggaaaggggacacctggtagaacgtcatgacatgaataccttaagcctgcccctgaacatacgccgaggggggtca

SEQ ID NO: 396906 - DNA, 86 bp, Homo sapiens
aagccggaggcctgcgtggaggaggcgccccgcgcagctggctggcggagcatgagcgccccaggcctgtagtggtggagacacgc

SEQ ID NO: 396907 - DNA, 100 bp, Homo sapiens
gattctgccaagtgcactgaggaaggaaaatggagcccggagcttcctgtctgtgctcgaaaaccgtcttcagatacagtccctaagcccaagagagccc

SEQ ID NO: 396908 - DNA, 100 bp, Homo sapiens
gacagttcgctacacagcaatgcatcgaggtaatctgctgtcttccagtgtctctgcattagataccattactacagtagcacttggatctctcacatct

SEQ ID NO: 396909 - DNA, 100 bp, Homo sapiens
tttacgatgatccacttccatctaatgattgtgctgcattcttacaaccctaaaatccatctgctcttaacacaccgtcaaaaagagggggaaatgcatc

SEQ ID NO: 396910 - DNA, 100 bp, Homo sapiens
tgggcacactgtgggggtgtcctggtgcacccccagtgggtgctcacagctgcccattgcctaaagaagcccgtgaaggtggagcggacccggaagcggt

SEQ ID NO: 396911 - DNA, 83 bp, Homo sapiens
cagcgccgacaccaacaagcgcaagagagacgaaggcccagctgagagccagcctggaggttacccagcagcaggccacccag

SEQ ID NO: 396912 - DNA, 100 bp, Homo sapiens
tcttccaaggacctaggtctctcgcccatcggaaaggaattactctgcttaatgtaagcaagctgaacattttgaagcttgctcctggtgggcatgtggg

SEQ ID NO: 396913 - DNA, 98 bp, Homo sapiens
ttgaatctgcaaaacttattcgggataaagtagcagggaaatcctcattgacgattcaatttgttgaaggccaatttgtggactcctacgatccaacc

SEQ ID NO: 396914 - DNA, 95 bp, Homo sapiens
gtcagaacgaggttccggtgtgtccaattttgctcaacttattgtgagagggagactcatgcatctgtatgccgtgtgcgtggactgcctggaag

SEQ ID NO: 396915 - DNA, 75 bp, Homo sapiens
gcaccccaccttgatccagcggacttacgggcttctgggaacttggcagacgcagcttagagagactcaccagcg

SEQ ID NO: 396916 - DNA, 83 bp, Homo sapiens
ctaatgacagtctccaaattcgcctccatctgtaccatggtaaggctggcctctctgcagtcagaggtctgagctctgccatg

SEQ ID NO: 396917 - DNA, 83 bp, Homo sapiens
gtccttccaccggaagtgtccgatcggaatcagccctgtccgagaggtgtctgcttttggggcagagttttcatcggaggcat

SEQ ID NO: 396918 - DNA, 83 bp, Homo sapiens
gctgtggtccagcctgcgcggcgggaagcggcggcggcggctccagcgtcctaagagcaattctgtggtgttcttggtcacac

SEQ ID NO: 396919 - DNA, 100 bp, Homo sapiens
tggaacccaagcagtggcgaagggaatcgcaaggctcttccctgaccattttctactgtccctgcgcgaggactctgtctactagtgacgatgtcgaaga

SEQ ID NO: 396920 - DNA, 75 bp, Homo sapiens
tccttgtctcccacatcactcggaagccccccatcaagggatcagtgtccttcagtgatgtggctgtgggcttca

SEQ ID NO: 396921 - DNA, 100 bp, Homo sapiens
cttcaaattacctaatgattctcgagtagagagacgattccacttttcacagtctctaacagaattgaatgatctggcacgggaccctccagcacagtgt

SEQ ID NO: 396922 - DNA, 100 bp, Homo sapiens
ggcgctgcccatcgtagccatcgagaacatcctcagctttatgtcctacgacgaaattagccagctccgcctggccttccagcaggaaatttcactgaac

SEQ ID NO: 396923 - DNA, 51 bp, Homo sapiens
cccgctacatcgccagtctgaagcagacttcacagagaatgcagttgtctt

SEQ ID NO: 396924 - DNA, 85 bp, Homo sapiens
ttcggtggactccttcggcagtccacccaccgccgccgcctcccaggagcggtggtgccccccccgggcacggggccatgtacaa

SEQ ID NO: 396925 - DNA, 152 bp, Homo sapiens
cccatgtgaactgctggcaggctgccttccctgacccccagttacgcctggaatatgaaggcttccccgtcccgttatttctcaaactctgaggctgcggagttcacacattgaaatctgtcatctttttcagagagaaactttcggtaatg

SEQ ID NO: 396926 - DNA, 75 bp, Homo sapiens
gcgcccggcgcccctgagccggccgagcggcgacggaccgcgagggccatgaagcccccaggaggagaatcgagc

SEQ ID NO: 396927 - DNA, 96 bp, Homo sapiens
cagcgatggcagacagaccacatataccacgaggatccatctcgtctgctccaggggcaggctgatgtgagcgacatcaggcgcttcctcagtgca

SEQ ID NO: 396928 - DNA, 75 bp, Homo sapiens
ggaaggagtttggggacaccggggagggctgggagatgcaagtgctgctggaccaggcgggctgctgtatcgtgg

SEQ ID NO: 396929 - DNA, 98 bp, Homo sapiens
ggcgacggtggcggctctcggagccggcgcgaatccggcccccgcagcgggacccgggttctggaggacacgtgccggcggcaggacttcaacccctg

SEQ ID NO: 396930 - DNA, 50 bp, Homo sapiens
gtggtgcttctgttgctcacaggaggagatgaccgccgggttctgctatg

SEQ ID NO: 396931 - DNA, 95 bp, Homo sapiens
gaacattcctcataaagcgagtcgtcaaggagttgcagtgaactttgaggcgctgatcatcaccatgtcggtagtcgggggaaccctcctcctgg

SEQ ID NO: 396932 - DNA, 75 bp, Homo sapiens
ggccgtgtctccggcatcatgtgtggtaactgcgtcattgattggctggtatccaaccagtctgttaggaatcgc

SEQ ID NO: 396933 - DNA, 50 bp, Homo sapiens
gaataaatcctgcacagactgctgtttcagagactcctccactctctggg

SEQ ID NO: 396934 - DNA, 75 bp, Homo sapiens
gtgagggaaagaaaacaatttctcctgctctgcagcttctgttcaggacacgcactggcactaaatccacactgc

SEQ ID NO: 396935 - DNA, 100 bp, Homo sapiens
gaatgctgccgtggtgaagcatgaagtcacagggctactgttttccaatcctcagccgagcctcttgaagccattcttacagatgatgaaccagaccacg

SEQ ID NO: 396936 - DNA, 95 bp, Homo sapiens
ccttgagtcagtgcgccgctctccagcccgcttgaacggtgaaatgacaatggatgctctgttggctcgattgaaacttctgaatccagatgacc

SEQ ID NO: 396937 - DNA, 89 bp, Homo sapiens
gtcaattcctgatctcacaccaaagcaagttgacatgtggcaaacacgtcttagtacacatttggctctagaccaagatagaacagccc

SEQ ID NO: 396938 - DNA, 74 bp, Homo sapiens
tgctgtcatcgagctcctcacgaccaagaagagggtgacgttggattaattggaaaatggatataccttatttg

SEQ ID NO: 396939 - DNA, 82 bp, Homo sapiens
gaaggtgaccatgtttctcagacacattcatttttacaccccaggtatgatctcgtgaaatcttgagagaaactgaatgacg

SEQ ID NO: 396940 - DNA, 88 bp, Homo sapiens
cccaagtggcggggactactggtgcctgcgctgaaaaaggataccttcttctactcattggtctatgacccctcattgaaaacactat

SEQ ID NO: 396941 - DNA, 75 bp, Homo sapiens
gcaaaccctctctctaccacgagcagcgccctgggagccctcacgagtcccgagttacactgttagaccttatga

SEQ ID NO: 396942 - DNA, 75 bp, Homo sapiens
ttctgaagtttctcagaaccgaagcccgcaccaagagatgttgcttcagagtgtgaagtcaaatgcatgccaaca

SEQ ID NO: 396943 - DNA, 100 bp, Homo sapiens
caaataagaagaaagctgagagaggggggaaacgtttttggatgacaaaggatggcctcaaggaataggttctcctagtgtctatcatgcagttatcgtc

SEQ ID NO: 396944 - DNA, 96 bp, Homo sapiens
tcattttgccattaactttgatgatagtattactacctaccacaccaacaggagtccatagaggccactgtattctattgaagaacatgtctaaca

SEQ ID NO: 396945 - DNA, 98 bp, Homo sapiens
catctgtaaacctgataacactgcatgaaatgttagagtttggtaactctcattcgacatccatctgaactaatgaatgttcctcttcagcaacaaaa

SEQ ID NO: 396946 - DNA, 83 bp, Homo sapiens
cctgcttcaccgacacaagttctcctacgacacctttgtggttaacacagaaatctgcctcctgggccatgccgcttctaagg

SEQ ID NO: 396947 - DNA, 98 bp, Homo sapiens
gctgcgctgggcgctgccgctgctgctgctgctgctgcgcctgggccagctgtgccgaagcgagtgccacttgtctgcagggccgtaccgcggaaccc

SEQ ID NO: 396948 - DNA, 90 bp, Homo sapiens
cctctccacgacctcggtcgagcatgttcaccagggcccaggcagcttccgatgatttaagggacgtgccaggagctgttggtggtgcaa

SEQ ID NO: 396949 - DNA, 98 bp, Homo sapiens
ctcgcaaagcgtcgagatcccgggcgggggcaccgagggctaccacgttctgcgggacagaactgtaccgctctctttttggccagctccaccctccc

SEQ ID NO: 396950 - DNA, 82 bp, Homo sapiens
cggaggcggaggcagaggtggaggcgctttgaaagctggagaatgctggaggagaccttaaggatggccaccaccactatga

SEQ ID NO: 396951 - DNA, 83 bp, Homo sapiens
gaagagccaaggaataaacatgcaatgaacccaaaaggaaaaaggtagcagcactgcctaaacaagaggttatacaagaagag

SEQ ID NO: 396952 - DNA, 83 bp, Homo sapiens
ctcaaggacaacctcggcctgagacaccggaggaccgggtgtcgtgaaaactacccctaaaagccaaaatgggaaaggaaaag

SEQ ID NO: 396953 - DNA, 102 bp, Homo sapiens
cagtagaagagaaagaaaccaaaaacagcaagcgcagagccaaacagccaggcaggaatccaaggcattgtagaggcgtatcggtcttgtcttcctcagata

SEQ ID NO: 396954 - DNA, 89 bp, Homo sapiens
gtccaggcacagatggaggaggaatacctccgctcccctctctcaggggttgcccccaagtttcctggcagtgtgtgatactgaggagg

SEQ ID NO: 396955 - DNA, 75 bp, Homo sapiens
tctgggcttggcttccggctccccccatctggctggaacacacatcagtcacgaaagaccacagcaagattcttt

SEQ ID NO: 396956 - DNA, 100 bp, Homo sapiens
ccaggatctcgggctcggaacgagactgcacgggttcagaatctcccatgatgattggtgagttgagaagtgaccttgatgatgttgatccctagaggaa

SEQ ID NO: 396957 - DNA, 115 bp, Homo sapiens
cagaccctggagcctcagttggaagcagccgatccagcctgcggagcctgtggggcagaaagcataacccctactgtagaactaaatgcactgtgcatgaaacttggaaaaaaac

SEQ ID NO: 396958 - DNA, 96 bp, Homo sapiens
tgcccctgcgttgtaccatccgcctgtgggacacctaccagatctcacattcttgaaggtggcattgaagagcactaagatcggaagatgagtgag

SEQ ID NO: 396959 - DNA, 100 bp, Homo sapiens
cagggccaaggctctaggaagtgggatttctggaaataatgcaaagagagctggaccattcatccttgggcaagaagactatgaccggctgcggcccctg

SEQ ID NO: 396960 - DNA, 50 bp, Homo sapiens
tcaggcctgcacggacggtgttggttgggctttgtgcctcactcttctct

SEQ ID NO: 396961 - DNA, 100 bp, Homo sapiens
ggggatggcgtcccccgggggcccgtactgcacatcgtggtggtcggatttcaccacaagaagggctgccagttgcagagtgggcaggatcttaagaccc

SEQ ID NO: 396962 - DNA, 73 bp, Homo sapiens
ttacatgtaaagctgtcctcatttgtgactatggacctatggagttggtctcacacaggtcccacagcacaga

SEQ ID NO: 396963 - DNA, 75 bp, Homo sapiens
cacgcatcaggcgcgggaagcgaatggacagcaaattatggatgaacctatgggagaggaggagattaacccaca

SEQ ID NO: 396964 - DNA, 75 bp, Homo sapiens
gaacgacgcgggcgagcggggctttggacgccggtggagacgcaggcgagcaccgacagtaaatggttcacggcc

SEQ ID NO: 396965 - DNA, 75 bp, Homo sapiens
gtcgctttgagaaggagcagcaacaactcaactggaagcaggagctacctgtgcaccctgcctccggctctcctg

SEQ ID NO: 396966 - DNA, 98 bp, Homo sapiens
tggctatgaacccagaggtcgtggaggtggccgtggaggcagaggtggcatggggtaaaagagaacctgctttcatgcaagatgctgctgcactgcaa

SEQ ID NO: 396967 - DNA, 99 bp, Homo sapiens
gtacgagcgtaggacgatgcttctcttctgtcagcctgcaactgagccaggattgaatacttggaccccaggttgatgccggcccaggatggatcagac

SEQ ID NO: 396968 - DNA, 75 bp, Homo sapiens
cacaagtgtgaggagttgctaaatgctcaggtgattaaaaattctggccatctcccaagagacagaatagctgag

SEQ ID NO: 396969 - DNA, 100 bp, Homo sapiens
gtagaattgaatttaatcatctcctgacaaaagaatgcaatttcaactgaccctttttttgcaccttgcctgcaatgtgtggtacttgaactctgtggag

SEQ ID NO: 396970 - DNA, 50 bp, Homo sapiens
gtcgtctcagcagtgctcgggcgcagatgcagatctgtggatccagcgta

SEQ ID NO: 396971 - DNA, 75 bp, Homo sapiens
cagtagatcctggagatgtggttacacagcttgaatgaaatcatcgagttccccatcctaaagctaaatggccgg

SEQ ID NO: 396972 - DNA, 100 bp, Homo sapiens
tgcgcatgtatactagctgtgtggagaaaactgacttcgaggaattctttctaaagagcatcagtgatgtcacgtttggagcaggggtcagttacatcgg

SEQ ID NO: 396973 - DNA, 75 bp, Homo sapiens
gcctgctccaagtttgtctccactccctccttgctctcatttcactcttcagtgttcctgttatttatgaacggc

SEQ ID NO: 396974 - DNA, 50 bp, Homo sapiens
cccggacagtggcagtgaaacagggacaacgaggtgcacatggtatgcct

SEQ ID NO: 396975 - DNA, 117 bp, Homo sapiens
cagaccctggagcctcagttggaagcagccgatccagcctgcggagcctgtggggcagcggagctggagtttgttcagatcatcatcatcgtggtggtgatgatggtgatggtggtg

SEQ ID NO: 396976 - DNA, 76 bp, Homo sapiens
agcgccggcctcctcagtgcgaagaagctgcagccgcacctggccaaggtcaccaggagactaaagtccatcaaaa

SEQ ID NO: 396977 - DNA, 80 bp, Homo sapiens
gaagaacctcctcgcgactttccaagacaatgcagatcttcgtgaagactctgactggtaagaccatcaccctcgaggtt

SEQ ID NO: 396978 - DNA, 74 bp, Homo sapiens
ttaaggaccttgaagaacagcttactgaagataggtgaaaatggtgatcccaaagccttcttaatagagatttc

SEQ ID NO: 396979 - DNA, 49 bp, Homo sapiens
tttgttcaggaaccaccagtgacagacttttgcctctaatgacagagca

SEQ ID NO: 396980 - DNA, 78 bp, Homo sapiens
tccgggagaagcacccacaaaactagcatcctcctggaggagctcgggcatccgtgtcattctggaccttactcccaa

SEQ ID NO: 396981 - DNA, 115 bp, Homo sapiens
attcgcggctcttcccgcccgccttccgccgtctcttcgagttcttcgtgctgctcaaggttacgggcaggacttgagtggcttcggacagggcttctcagaccccagccagcag

SEQ ID NO: 396982 - DNA, 90 bp, Homo sapiens
gcaggtttaaaattttacataagaagttacctttttcaggcctcccgaggagcccagacagctgcagccacagctccccgtatcaagaaa

SEQ ID NO: 396983 - DNA, 75 bp, Homo sapiens
aaacgcaaaaggacagtaaactgtggaccttgaagttagcagggcagagcggcttgggtaaatccaccttaatca

SEQ ID NO: 396984 - DNA, 50 bp, Homo sapiens
cagcatatgaaagtggattatggatgggaacagcgagagctgcccaacgg

SEQ ID NO: 396985 - DNA, 50 bp, Homo sapiens
cgaggaggtgcgcgagaagtacaaagcaatgcatgagagctggaagtgga

SEQ ID NO: 396986 - DNA, 100 bp, Homo sapiens
ttggggagaagaggattggaggtgtcagtgttaaaggaacctctacaacgaaggtgaagccacggaagataaggagacaccgtggtgaagaggaagcctg

SEQ ID NO: 396987 - DNA, 100 bp, Homo sapiens
gaccctcgaaaaaaagatggagccctgcatatgattggctctttagctgaaatacttctgaagatggagaagtgtacccaggacctgggcaacagcacca

SEQ ID NO: 396988 - DNA, 98 bp, Homo sapiens
agctgcaatgtggggtatcttcatgtttaaggaaataaagtgcattgaagtaatgggagatggatgccttaataatgaacactttgaagaactgggag

SEQ ID NO: 396989 - DNA, 100 bp, Homo sapiens
cgcgcgcctttgtgcgcgcgccgagatatggagttaccagtaaggagctccaccgtgactctcctccctgctccgttgccccgacgaggaagtgtgaaaa

SEQ ID NO: 396990 - DNA, 73 bp, Homo sapiens
ctaagatgcccggacatcctggaagctgggaaatggtcctggcattgatgtgcctgctccagacatgagcaca

SEQ ID NO: 396991 - DNA, 100 bp, Homo sapiens
cagtccttagtaaccacgcgaatgagaaagtggagatgctactaggagctgagacgcaaattcagaaggaacttgcagaaatcacattggaccctcctcc

SEQ ID NO: 396992 - DNA, 100 bp, Homo sapiens
tcccagagcacccccattgggttggaccgtgtgggacgccggcggcagatgagagcatccaacggtactccacatcagcattctcaagactggagaagtt

SEQ ID NO: 396993 - DNA, 82 bp, Homo sapiens
cggcaccaacggcaccaactattcgcggagctggaatgactggcaacccaggccagctgcgggccgtccagcggctgtgcca

SEQ ID NO: 396994 - DNA, 88 bp, Homo sapiens
cggagctgttcctgttcggccatcttggctcctccctgccagatagctcttattttgagggatggattgataactttaatggaccaag

SEQ ID NO: 396995 - DNA, 74 bp, Homo sapiens
ttttcttgtccagtcaaacttcatagaggaaatgctgtctatgatttcttcattggccgtgaattaaaccctcg

SEQ ID NO: 396996 - DNA, 75 bp, Homo sapiens
agggacctgcccgcctgcggctgctccggggtgaagaagctgaaggagacctttgcttttattcagcagttggac

SEQ ID NO: 396997 - DNA, 51 bp, Homo sapiens
ctttcgggaaagctctctggggcagggggtgagcccctccagactccgaat

SEQ ID NO: 396998 - DNA, 89 bp, Homo sapiens
gaaagctgtatggacctctgtgtgggtaattattcgaggtggaggacatattttaccctatgaccagcctctgagagcttttgacatga

SEQ ID NO: 396999 - DNA, 100 bp, Homo sapiens
cgcccatcttccacaccatgtcggacggcgagggcccctccgccgactttgaataatgagatgagtacagatgaagacaatgaatatgcagaagaaaagg

SEQ ID NO: 397000 - DNA, 82 bp, Homo sapiens
tttccagtcaccgcttctttggacccaatgctgaaataagccgtactatgccacgagggtgaatgcggctgacattgagaac

SEQ ID NO: 397001 - DNA, 97 bp, Homo sapiens
aagccattcatgggccggttttatgagtgggaaccatttgcagaagttgttgagatcatgacctcttctggaatggtgttctcagaagtccttggac

SEQ ID NO: 397002 - DNA, 123 bp, Homo sapiens
cagccccagtgaccttgaacgattccgctctgcggcgggtgtccctaaactagcagtttagggtgtcagacgccaaggacttattgttgtgctaacactgaagacttggagacagttattcac

SEQ ID NO: 397003 - DNA, 83 bp, Homo sapiens
gctggcggtgacggcgcggggtccgcgcccggagcgccccgccgcgcacacctacagacctggtacctggatttttgcccgag

SEQ ID NO: 397004 - DNA, 83 bp, Homo sapiens
cgcctatctcttcaagtacatcataatcggcgacacaggttttaaaatcaaagatgggaaaatcggagaaaattgcccttccc

SEQ ID NO: 397005 - DNA, 90 bp, Homo sapiens
gtggggagacagcgccgggagaggccggcagccccgggacacccccgcaagcgagcagcccgctgaatatggactccaacggtgccctag

SEQ ID NO: 397006 - DNA, 85 bp, Homo sapiens
ttgcagctgcatgttcaagaagtggccggagagttctgcatgttgattcgtgccgctacctggctgttcagctgtctcctgccat

SEQ ID NO: 397007 - DNA, 100 bp, Homo sapiens
tcttccacaaacaggccttcgagtacatctccattgccctgcgcatcgatgaggatgagaaaggttgcatatggccaagtccttggagttataggatatt

SEQ ID NO: 397008 - DNA, 100 bp, Homo sapiens
gcagatggctctatgcagtcttatctccagctgggcatctgggttcaggtcagacgatgaccaggaaaggaggggtgggaaatatgagtgagcatgtgag

SEQ ID NO: 397009 - DNA, 100 bp, Homo sapiens
ctattacaactccctcaaggactgcctttcctgacagtactactggtatgacgagcgggggaagaaggtcaagtgcacggccccacagtacgttgacttc

SEQ ID NO: 397010 - DNA, 100 bp, Homo sapiens
gcctgccgggcctttctggaagaggccgtgcggtgtcccccagaccacccaccccgggctgaagactcttcctgaggaggcgctgcaaggctccgtgctc

SEQ ID NO: 397011 - DNA, 100 bp, Homo sapiens
tactgaagccggcgctgctctgtggggctctggccgcgcctggcctggccgggaccatggtgctggagaatctggtaaaagcaccattgtgaagcagatg

SEQ ID NO: 397012 - DNA, 75 bp, Homo sapiens
tggggtggcctctaagccttgaatgtacccccaaaagacatccgcacttccactaatagccaagtagacaagctg

SEQ ID NO: 397013 - DNA, 98 bp, Homo sapiens
agggaagatgaacgggacgcggaactggtgtaccctggtggacgtgcacccagaggaccaggcggcgggtatatgagtgtaacaaacgctgcaaatgt

SEQ ID NO: 397014 - DNA, 75 bp, Homo sapiens
ctggcggacatcactttagaccctccacctaattgcaggatccaaggagctggttctgctggttggaccaaacct

SEQ ID NO: 397015 - DNA, 100 bp, Homo sapiens
aaaagagatggaaacttacttgaagaaggtacactcacgtggaagctgagtgtcctttcctgacttttgacgacctcctgaaccggttggaggacttggt

SEQ ID NO: 397016 - DNA, 96 bp, Homo sapiens
taagagcagcttattccaagctttgctagctgagcagagtaaagacagagaaaatggggcaaaggaaagctgggtgaataatgtcaacaaagatgc

SEQ ID NO: 397017 - DNA, 80 bp, Homo sapiens
ccccggagaactctaccctggaggagattctggggcagtatcaacggagtctccggggagccttgattatagtaggaagc

SEQ ID NO: 397018 - DNA, 100 bp, Homo sapiens
ggcgaactggaacccactcggggactctgccttttaccggggttggccggagacctacgacatgaatacctcggagcccaagacggagcaggaaagcatc

SEQ ID NO: 397019 - DNA, 74 bp, Homo sapiens
gtgaattggatttgatcttccatatggataagcggaagccctgaccaggcatggagtatctcacaaagtagacg

SEQ ID NO: 397020 - DNA, 82 bp, Homo sapiens
gcacaacaggagctacgaggagttgggggatatgagactttctactcggaatatcctgagtgttgcgtggatgtaaaaccca

SEQ ID NO: 397021 - DNA, 75 bp, Homo sapiens
ggataaaccagcacatatgaagcatagtggtttatatcctggaacctggagatcctcctttgttacagcaaccac

SEQ ID NO: 397022 - DNA, 100 bp, Homo sapiens
gctgatgcccgttccatctatgttggcaatgctcttgcagaccaatttgaagataaaactacatctgtattggaacgcctgaagattttctattgctgtc

SEQ ID NO: 397023 - DNA, 98 bp, Homo sapiens
agcaaaggcaaacttggaaagagcaagatcggcagccctaaagtcgggaaagaggttaaagaagacacgcaagtatgatatcatcaccactccagcag

SEQ ID NO: 397024 - DNA, 82 bp, Homo sapiens
aaggagcagaacgtgagggtgtaacttacaaaaagatcttcgtgaagactctgactggtaagaccatcaccctcgaggttga

SEQ ID NO: 397025 - DNA, 100 bp, Homo sapiens
agaccaagctaccctctgaagaaatactcactgcatgaacagagatatttttaagaagacccttttgaggacttctttgggaatcgaaggggtccccgag

SEQ ID NO: 397026 - DNA, 100 bp, Homo sapiens
ttctgctggaggtttgtaagcttgctcctgctaaccacttcattgtctgagagagaaacagctgcatgcttctgggaggccggaagaccacggacatccc

SEQ ID NO: 397027 - DNA, 100 bp, Homo sapiens
ccaatttacgtgtcattatggaactacttatgagtctgagggaaaaggccataccaatgctggagatgcaatatatgaggtggtgagtctacagcgagag

SEQ ID NO: 397028 - DNA, 88 bp, Homo sapiens
ctgctggtggggctcacggcgcctgccttggcgctggccggctacatcgaggcacttcctggacctcactactacacatggggagacc

SEQ ID NO: 397029 - DNA, 100 bp, Homo sapiens
attttagggtcctttatatagaagggagagtaggacatccaggcctgctcggccgcctggaaggctgacggcgtgtgctccaccgtggccggcagtcggc

SEQ ID NO: 397030 - DNA, 83 bp, Homo sapiens
taatgcccacgggtgcaaaatggccatgagactacttcttggacacttaatgattgttggcaagaaatgtgctgctgatctgg

SEQ ID NO: 397031 - DNA, 100 bp, Homo sapiens
accgtggagaaggaggagaggcatggcggccttgaccagccagtggatgatcctttcaaaaataaagccttgttatttagcaacaacacgcaagagttgc

SEQ ID NO: 397032 - DNA, 90 bp, Homo sapiens
ctactcaggaggaaattacagagacaattatgacaactgaaatgagacatgcacataatataggtgattatttacctgaaacaacaagac

SEQ ID NO: 397033 - DNA, 100 bp, Homo sapiens
acgagggcaccccaaccctgtcgagcagcccgacggccatggaggctgaagagacgatggaatgccttcaggagttccctgaacatcataaaatgatcct

SEQ ID NO: 397034 - DNA, 98 bp, Homo sapiens
gccttcccagtagctgggaccacaggctcttgatggaaatgtgtatgatcatctcaaggattatttaatagccttcagccggactgagctagaaacat

SEQ ID NO: 397035 - DNA, 97 bp, Homo sapiens
agggtgttcccgaactagagtgggtataaaggatcttcatgcagatcatgctgcaagtcatattggaaaagcacaaggcattgtcacttgcttgaga

SEQ ID NO: 397036 - DNA, 97 bp, Homo sapiens
aagttcacgaaagcctacaaaagtgtggagaggttccttcaggaggatcagtgcaagagaagcctgagccagtgccgctggagagccgctcctgcgt

SEQ ID NO: 397037 - DNA, 78 bp, Homo sapiens
gaagcccgagcgagaccgggcgacaggcaggttgctagaacacatcacgtccaagcagaaagctacctggtgtacaac

SEQ ID NO: 397038 - DNA, 74 bp, Homo sapiens
tgtcgagcagcggacgccggtctctgttccgcaggatgatcatcagaaaagcccttactgaggaaaaacgtgtc

SEQ ID NO: 397039 - DNA, 74 bp, Homo sapiens
gaagtcgtggaggtggcgaaacgaggaggagataacgcggccttgggctctggaattgaatgatctggcacggg

SEQ ID NO: 397040 - DNA, 75 bp, Homo sapiens
ccataatctatgtcagaaacaagttaaagcacaactcccaagggacgattactttgccaaaaaaaatgaagaaag

SEQ ID NO: 397041 - DNA, 100 bp, Homo sapiens
atcgttgctgccttcttcgtcaagattaccacccatagtgcgaggaggagccatcgacagatactggcccaccgccgacgggcgcctggttgaatatgac

SEQ ID NO: 397042 - DNA, 99 bp, Homo sapiens
gcactgtgacggtgcccacctcgtggggtgtgtgagggccgagtgaaatcgtgcatttgcgattcatgatgttgctatcaaaagttgagaaattgtcag

SEQ ID NO: 397043 - DNA, 83 bp, Homo sapiens
tagagccaaaggatggtgagattgttggcctttcaggaagagtgcttaagatgtgcctggcatcagaagggatgaaaatggaa

SEQ ID NO: 397044 - DNA, 90 bp, Homo sapiens
aaaggaaatgcttcgaaataatgaatccaaaatccttcatttacaggttccccctactgagacagttcctcaggtcaaaaaagaaaaaca

SEQ ID NO: 397045 - DNA, 82 bp, Homo sapiens
gttgacagcgtctgggtttcagaggagccagcgcctccgagtggcaaagaaacacagcatgatgtttggaaatataattctt

SEQ ID NO: 397046 - DNA, 100 bp, Homo sapiens
tccaccctgcccgcgatcacactgaagctgggaggcaaaggctacaagctgtccccagaggactacacgctcaagctgacggcctccaaccacgtgagca

SEQ ID NO: 397047 - DNA, 87 bp, Homo sapiens
gacgtcgtgatccagaagtccagagctgaggactgcctgtttgcaggacgagattgaggagctgcgggccgagatgctggagatgcg

SEQ ID NO: 397048 - DNA, 82 bp, Homo sapiens
gcctactgggcttctgcaaccgctttccacgggtcacggagctgctggacgtctccatggagctgggctgtttcctggctgg

SEQ ID NO: 397049 - DNA, 48 bp, Homo sapiens
tatcgttggacccagaattgagagtgcacggcctggagatagagggca

SEQ ID NO: 397050 - DNA, 51 bp, Homo sapiens
cccaaacaagtggtggactggactagagagctccactggttcaacagcctc

SEQ ID NO: 397051 - DNA, 82 bp, Homo sapiens
tattacatctacaagaggggacaagtacctttatgaaccagtgtatcccaacggacaaggcaaaatctcagcaagttcggac

SEQ ID NO: 397052 - DNA, 74 bp, Homo sapiens
ggattgtcacctttgctgcaaaaaattacggtcgacagaggtacgttcttggagacacagcaatgcagaagatg

SEQ ID NO: 397053 - DNA, 101 bp, Homo sapiens
aagaaaccatgtgctgaaatgtttgacgacactgatggtttggttcgagaacttgtcttggacaattgcaaatcaaatgatggaaaaattgagggcttaac

SEQ ID NO: 397054 - DNA, 76 bp, Homo sapiens
ggaagaacggattcacacaggatggcttgcagaagacgctatttctcctcagagaaattttgaaattgccttcaag

SEQ ID NO: 397055 - DNA, 83 bp, Homo sapiens
gaggctggactcggattcgttgcctgaggaggatacgaagcgttttcggcttcctgcccggagctgtgcagcaaacagtcgac

SEQ ID NO: 397056 - DNA, 75 bp, Homo sapiens
aaagacttgaaggcgtatacaggaacaatattgatgatgtagtaaggttggaatgttgcatcagcaggtagaaga

SEQ ID NO: 397057 - DNA, 101 bp, Homo sapiens
gcctgcgtgacctccccgccggcgggatgtggcgactacgtcgggccgctgtggcctgatggcgtttaatgattgcttcagtttgaactaccctggcaacc

SEQ ID NO: 397058 - DNA, 90 bp, Homo sapiens
atgatgatatcgccgcgctcgtcgtcgacaacggctccggcatgtgcaaggcccgactgtccgctgcgtcctgcccgaccctcctgtacc

SEQ ID NO: 397059 - DNA, 74 bp, Homo sapiens
ccttttagcccgggactctttcacaggctggatgaagattgggaaggacagaataacgggctcccagattcaca

SEQ ID NO: 397060 - DNA, 75 bp, Homo sapiens
gtgacatgatctcactggaccgcagcgtcaatgacttacgccaagaagaagaacattacgtggtagaggtcaagc

SEQ ID NO: 397061 - DNA, 90 bp, Homo sapiens
cggaggcgcgcgggccagcctgggccccagcccacaccttcaccagctttgtgacaacaaactgtgctctgcagttttcatcccgtggaa

SEQ ID NO: 397062 - DNA, 90 bp, Homo sapiens
ccgtaaccacaaggaggacgaggtgtctcccagtctgctaaagccctaaggccatcaccatggacttccagcatcgccccgggggcaaga

SEQ ID NO: 397063 - DNA, 83 bp, Homo sapiens
cagagatccaagtgcgcgccctggcgggtccggaccaagactcggtgaaatacctggagtgctcagctctcacccagagaggc

SEQ ID NO: 397064 - DNA, 82 bp, Homo sapiens
gcgccgcgcacttcgtcatgttcttcgcgccctgccactgaggcggctcccagctgcgttggcgacatggccgacaccccca

SEQ ID NO: 397065 - DNA, 100 bp, Homo sapiens
cgtgatgtgacgctggagaacctggcacttatgtcctccctgggaaagtgggaggtagaggaaatgaaggagtcaaagcttccaggtgataaaggacttg

SEQ ID NO: 397066 - DNA, 129 bp, Homo sapiens
aagaaattcctcaaacagaatttcacacagggtattccatggagaatgaggtttttcgttggaatatacgttgcacatttatggcgattctgagtgtgagggcagacttctgccaggctcagcacagca

SEQ ID NO: 397067 - DNA, 75 bp, Homo sapiens
accctggactttgtgaagttgttagagtacatgagcattacttgggtcaaaggccctttcagaagcaactccatt

SEQ ID NO: 397068 - DNA, 74 bp, Homo sapiens
ccctgtacagaatgggtgcccagagagtgccatggagatgaatggtagaagaccatgatggagaaggtgatgtg

SEQ ID NO: 397069 - DNA, 83 bp, Homo sapiens
atgcttcgtttttcgccgtcatgggcgcctcggccgccatggtcttcagcggctgaccccgcactacatctacccaccagcca

SEQ ID NO: 397070 - DNA, 80 bp, Homo sapiens
acattgacctcaccaagagggcgggagaactcactgaggatgaggtggtatgcagatcttcgtgaagaccctgaccggca

SEQ ID NO: 397071 - DNA, 100 bp, Homo sapiens
atgacaacaagcacgactgcaaagaagggtctcgctcttgtgcaggctggagtgcagtggtgcaatcatagcttgttgcagcctcaaactcctgggttca

SEQ ID NO: 397072 - DNA, 75 bp, Homo sapiens
agccgatccagcctgcggagcctgtggggcagacataaatgagcatattctgatgtactctttggatctgaactc

SEQ ID NO: 397073 - DNA, 80 bp, Homo sapiens
ggactggagcagaaccccaggactgcgcccccgggagcgggcgcccagagtttttcagaagaagtgaagtcaagatgaag

SEQ ID NO: 397074 - DNA, 83 bp, Homo sapiens
agtggctatggtgggcaaactaagccgattttccggaaaaagagagaagaagaaggaggttcctgctgtgccagaaaccctta

SEQ ID NO: 397075 - DNA, 100 bp, Homo sapiens
gatcgtccaccgctcccggcccgctccgcccagagtccgatggcggcggcactgagggccccgacccaggtcacgactgctgaatatgagacgatctgca

SEQ ID NO: 397076 - DNA, 100 bp, Homo sapiens
gaaaatggagcccttcaccaatgatagaagcagatttgggatatcctggaggtaaagcaagaattattcataaggaatctgatatcattactgcgtttgc

SEQ ID NO: 397077 - DNA, 101 bp, Homo sapiens
ggagcagaagactctgagcccccgaactctgcaaagcctccagaggacataccacctccaggatcaggatgcagagcgttacagtgtttctgccacctctg

SEQ ID NO: 397078 - DNA, 100 bp, Homo sapiens
gcccccctcaacacggaccgcgcccgccgggcacacaagaatggtcactcttgctgagcgagagcgagaagcggcccttcgtggaggaggcagagcgcct

SEQ ID NO: 397079 - DNA, 100 bp, Homo sapiens
tggagtctggacatctgaaacttggaatgaatctgaagtctgctgcagtaaaacacagaaggctttaaaatgttttcttgcataaaattcaaaactttta

SEQ ID NO: 397080 - DNA, 100 bp, Homo sapiens
cagctgcctcagttcttagcgcaggaaagaccggcagagaccaatgccaatgtggacaactcggcgtccccctcggtggcccagctggccgggcggttta

SEQ ID NO: 397081 - DNA, 90 bp, Homo sapiens
aagaagtggatgatgtgcttggtggagcagctgcctgggagaatgttgactctactgcaggtaaaacttccttttcctgtagatcaaatc

SEQ ID NO: 397082 - DNA, 96 bp, Homo sapiens
ggaacctgggcgagcagcggcgggggcccgaggggtgctggagaatctggtaaaagcaccattgtgaagcagatgaggatcctgcatgttaatggg

SEQ ID NO: 397083 - DNA, 105 bp, Homo sapiens
gaggcgcagggctctcccacacttcgcgccgccaatggcaagttggagggagagatgcaaataccagccacttccggctcctgcgtcgctccggaagcctgcgag

SEQ ID NO: 397084 - DNA, 90 bp, Homo sapiens
tgccccagtgaggctgatgtcaacagtgaaaacaataatccagaatggctactctgatctatgttgataaggaaaatggagaaccaggca

SEQ ID NO: 397085 - DNA, 100 bp, Homo sapiens
ttttctctgccttgcttgcttgagcttcagcggaattcgaaatgataatctcaggagacactgaagaagggaggctctgtggacagaggagcagtaacaa

SEQ ID NO: 397086 - DNA, 75 bp, Homo sapiens
agcgaaattggtcattctcgctaacaactgcccagctttgaggtcaagagcaatctgaatccaaatgcaaaggag

SEQ ID NO: 397087 - DNA, 75 bp, Homo sapiens
ggtgtcagtgtggaggagactgagatgcacagtctctgacatcagctctcctgggaccctccaagagcactagtg

SEQ ID NO: 397088 - DNA, 125 bp, Homo sapiens
ttctcccccaccgcatgctgccaatctgatggtggagacagaacagcagtcccggatggactgggaggtgctggtcctagggaagctcaagtgggacctggctgctgtgattgcacatgatttcc

SEQ ID NO: 397089 - DNA, 90 bp, Homo sapiens
aattacaaacgggtcacaggtactagtgagggccccaaggctgttgcagctcctcgacctgatcggttggtcaatcgcttgaagaatatc

SEQ ID NO: 397090 - DNA, 100 bp, Homo sapiens
agataaaacttgcagactttggacttgctcgattgtatagctcagaagaaaggcttttaaaaccaaggatggctatattgtagttggagcaggaaataac

SEQ ID NO: 397091 - DNA, 83 bp, Homo sapiens
cgctgacaggggggcctggccgcgcagccgatcaccgaagtggccttggagtacaacaactgtcatggggaccaggtggtgga

SEQ ID NO: 397092 - DNA, 100 bp, Homo sapiens
ccccgggagtcaccctcaaccctctggggccacgtgggttccttcaatggtgccttagctgctgttcctgtccaggacctgggctccactgtcatcaaag

SEQ ID NO: 397093 - DNA, 87 bp, Homo sapiens
gaaagaacatgccaagatgtatctactgtatccatgcactcagtgccggtggtggtgtgcacattgagccccggtatagacagttcc

SEQ ID NO: 397094 - DNA, 50 bp, Homo sapiens
cgaaggttcaattatgtggtcaaaggcagagcatcaaccccaagttggcg

SEQ ID NO: 397095 - DNA, 95 bp, Homo sapiens
gggaaatcgggctgaagcgactgagtccgcgatggagacaatgagttacaaggcactaatagttctggatccttgggtggtcttgatgttcgcag

SEQ ID NO: 397096 - DNA, 100 bp, Homo sapiens
aggacaaaggtgccttctgtagacactcctgctctcttccatccccatcttacagatgtattaagaagcctcaggctcatcagattcaagagatgtttcc

SEQ ID NO: 397097 - DNA, 100 bp, Homo sapiens
tgaagaagcatgatattgagctttacatgcacttgaacagactagaaattgcaccacagatatatgggttgtgtgtggaggtcattgcaaaggaaggaca

SEQ ID NO: 397098 - DNA, 100 bp, Homo sapiens
gtgactccgtgagcggcgagtgtgggaagcggtgtcctgctggcttccagggagaggactgtggccaaggaattacatgaacgacagccttcgcaccgac

SEQ ID NO: 397099 - DNA, 100 bp, Homo sapiens
tgccgttactgccctgtggggcaaggtgaacgtggatgaagttggtggtgaggaagaggatggagatgaagatgaggaagctgagtcagctacgggcaag

SEQ ID NO: 397100 - DNA, 82 bp, Homo sapiens
ggaaggtgcgacaggctgcatgcggtggcacgggctgtgcagtgttaaacgggctgaaggcctttcggcagcagctgaggaa

SEQ ID NO: 397101 - DNA, 48 bp, Homo sapiens
ggcgcgcgagctggagcactcgcgcatccgtgtcattctggaccttac

SEQ ID NO: 397102 - DNA, 90 bp, Homo sapiens
tacctgccggacacgcttctcttggagaatcatgtccctaaggaggaagctggagctccacgaggggaggggccggccatcccaggagac

SEQ ID NO: 397103 - DNA, 74 bp, Homo sapiens
ctgtgctttactctgaagactcgtaattattcgaggtggaggacatattttaccctatgaccagcctctgagag

SEQ ID NO: 397104 - DNA, 90 bp, Homo sapiens
ctttggtcataatcgctgaagatgttgatggagaagctctaagtacactcgtcttgaataggagtgagtccgtgctgctgcacatgcccc

SEQ ID NO: 397105 - DNA, 90 bp, Homo sapiens
atgaagacaaggactcacagtggctgcaagtatggtttgaagtggtgaacatggatttttctcggcttcacatgtacagtcctccccagt

SEQ ID NO: 397106 - DNA, 104 bp, Homo sapiens
gccggcgtcgtcggatgttgtgttgcccgccaccatgagctacacagagtgcctggtgaagaatgtgatgggatcactagcatgtctgcggagagcggccctgg

SEQ ID NO: 397107 - DNA, 75 bp, Homo sapiens
agagactacagtaacccgacacgaagcagatagcagtcctaggggtgacccagtcatggcagcctccagcatcag

SEQ ID NO: 397108 - DNA, 83 bp, Homo sapiens
tacacttcgactctcaaagcaataccaggatagctgttgtttcagagaaaggtttcattgaaaacagatcctgcaaaagttcc

SEQ ID NO: 397109 - DNA, 96 bp, Homo sapiens
gacatcgatggacgcattcagaagtcctggaaggtgggaatgatctggagaccaggagtaagaagacctgagtttagatccccagcctggattcag

SEQ ID NO: 397110 - DNA, 75 bp, Homo sapiens
atgccaatcagcatttcacattcctcatggttggttcaaagatggacttcagcagaaatctttatgatattgggg

SEQ ID NO: 397111 - DNA, 141 bp, Homo sapiens
cgatttcttcaatgattaccaccttcaaaatggagatgttgttgggcagcattcatttcctggcagggctacttctacaagtccgaacagccagtccagcaaaatgaacagcattgtctaccagaagcagttccagtcagc

SEQ ID NO: 397112 - DNA, 100 bp, Homo sapiens
ttgtgcattcaaacatagcaactgagctgcaagctttcttcctggtggcagatgacatcatggattcatcccttacccgccggggacagatctgctggta

SEQ ID NO: 397113 - DNA, 90 bp, Homo sapiens
tcagatcatccaagtggaggttcctacagagattcatatgagagttatggaacagtaagaggaccttgtgcatgaataatttgtttccac

SEQ ID NO: 397114 - DNA, 74 bp, Homo sapiens
tcgagttcctggaccgcgagagcatcaaactggtgtccatcgggtttgccttcccggattgggcctacaagcca

SEQ ID NO: 397115 - DNA, 90 bp, Homo sapiens
ttatgtcatcaagaagaatgacgatgcttttggaaagaacaaacagtggatttgaagaatcagattctggtgctactaagagtccactcc

SEQ ID NO: 397116 - DNA, 90 bp, Homo sapiens
gttctccatacccgtgacctggggatcgctacggaccttaaaatacccgcaacagccccttcgtcccaaactcattctgatgaaggaaag

SEQ ID NO: 397117 - DNA, 101 bp, Homo sapiens
ctgttgttgcagagttattttctgagtcagtttcaggcaaaagctgtgcctcacttctgcgggttgaaccctttgtatgtgcccagtgccgcacagatttc

SEQ ID NO: 397118 - DNA, 78 bp, Homo sapiens
aatgggcggatctcatatcttcacttggcaaactcaacaaggtgaattatgtaacctcattacgctggatgtagctca

SEQ ID NO: 397119 - DNA, 96 bp, Homo sapiens
agccccacggagcgctgcggagcgaacctcacctttccagggcgcaaggaagaattttaaatcgtttctccaaagacattggacacttggatgatt

SEQ ID NO: 397120 - DNA, 83 bp, Homo sapiens
aaccactatctcagtgcaatggctttatttgaaggtagacgcatcgaatttgcagaacaaataaataaaatggaggctaggcc

SEQ ID NO: 397121 - DNA, 82 bp, Homo sapiens
atggagaccctcacggagctgggcgacgagctgaccctgggagacatcgacgatcaggatcctcatgaccagccaaagagaa

SEQ ID NO: 397122 - DNA, 75 bp, Homo sapiens
tatttatggagcatatattatggaacacagttgttggaaaggacaccaatgtcatgttggtggctttggcagcaa

SEQ ID NO: 397123 - DNA, 80 bp, Homo sapiens
gagcacgacgagcgcggaggaccgggaggctcccgggcttgcgtggttccagggtctccctccactgctgtagtaacccg

SEQ ID NO: 397124 - DNA, 75 bp, Homo sapiens
cctgtcggcagactggtgacttcacttttgagtgcaactgccttccaggttgttcctcaaagtcattcaagctgt

SEQ ID NO: 397125 - DNA, 75 bp, Homo sapiens
ttttagagcaggtgtatgatcttttggaggaggaggatgaatttgatagagagatagtcatttttacttgaagga

SEQ ID NO: 397126 - DNA, 75 bp, Homo sapiens
ggctccttgcgtcccgcctccctgggagctccgcacggcacgtcagctaactgttcagatgatgcaaaatcctca

SEQ ID NO: 397127 - DNA, 50 bp, Homo sapiens
cctggatccacgtcttctacaagagttgatcacagccgagttaaattgac

SEQ ID NO: 397128 - DNA, 100 bp, Homo sapiens
ccgggacgatcatcctggggacctggtacatggcattaactgaacgtctggatgctcttcttctggaaaaagcagagactgagcaacagtgtctttctct

SEQ ID NO: 397129 - DNA, 74 bp, Homo sapiens
tattgatgtgttcagccctgtggagttcaacaaggtcctttgaggtctataatgaaagatctgcattctgatga

SEQ ID NO: 397130 - DNA, 100 bp, Homo sapiens
cgaagccctgtttcagacagacctcatctataacctccttgaaaaactgggatacatggatctggcctcaagactggtgatgtgatgactgaagcccacc

SEQ ID NO: 397131 - DNA, 75 bp, Homo sapiens
taccacgtggcatgttaccactgtgagtgagagggtccaagcctggtaagaatgtccagcttcaggagaatgaaa

SEQ ID NO: 397132 - DNA, 74 bp, Homo sapiens
agggacctagtggcccagtggaagaagctggttcctgtggaacggacttaaccaccaccatgtcgagcaaaaga

SEQ ID NO: 397133 - DNA, 80 bp, Homo sapiens
gaacagcgtgaaccctgtatggaatgagtgccttatatttgtccatgaaagacactgaaaaaggaataaaagaactgaat

SEQ ID NO: 397134 - DNA, 74 bp, Homo sapiens
gggtgatgactcaagacctggtccttggagaccattagtcaagccaggcaattactaaagatatgtttgaagaa

SEQ ID NO: 397135 - DNA, 114 bp, Homo sapiens
gcagcgggcagtgtcggaggccagcggggccggaagcggcggcgcagatccgggtggatggacccaggggcaacgccctccagtatgagacggtgcaggtggtggaccccggcc

SEQ ID NO: 397136 - DNA, 83 bp, Homo sapiens
gttccatctcttctataaaaaacttatgtttgaacagcaaaaatcggtcagcccaaggccaaccccactgtcactctgttccc

SEQ ID NO: 397137 - DNA, 100 bp, Homo sapiens
gaagagctggggaaggagatcagacccacgtacgcagggagcaagagtgccatggagaggctgaagcgcggccatcagcatcagcaaagccatcaacacc

SEQ ID NO: 397138 - DNA, 75 bp, Homo sapiens
cagaatttgattgctgaggtttcaaccaaggtccgtaaaagccctgggctcagccagagcagggcagaggatgac

SEQ ID NO: 397139 - DNA, 100 bp, Homo sapiens
ggcgagcagaactacggcgagcggagataattgacgaccttgccaacctagtggagaacacagatgaaaaacttcgcaatgaaaccaggcgggtaaacat

SEQ ID NO: 397140 - DNA, 100 bp, Homo sapiens
cttcagaggacgaggaaacaatcgtggctacaaaaatcaatctcagggctacaaccagtggcagcagggttgagatggaagattttcgaggtatagcaga

SEQ ID NO: 397141 - DNA, 83 bp, Homo sapiens
ctctaacacagtggaaaggaaccgttctggatcagttttctggatatgccgcagaaggatccgtgccagaagcaagcctgtga

SEQ ID NO: 397142 - DNA, 50 bp, Homo sapiens
ggcgtcatgaataacatgcggaaacagagcctgtgtggtgcccctatctc

SEQ ID NO: 397143 - DNA, 87 bp, Homo sapiens
atggatgctgcccagagatcgcagcatatcaaagattatattccatcacaacaagatattctgcttgccagaagacccaccaaaggc

SEQ ID NO: 397144 - DNA, 100 bp, Homo sapiens
tacactgtacatgctttttattacaagactacggagcataggaggaaaattcatcatctggatgaaaactttcggaagagaaagttgcctgtggtaagtt

SEQ ID NO: 397145 - DNA, 89 bp, Homo sapiens
cttcggcagtccacccaccgccgccgcctcccagcggagcccatcgtggtgaggcttaaggaggtccgactgcagagggacgacttcga

SEQ ID NO: 397146 - DNA, 100 bp, Homo sapiens
tgtccaggaccacctacaggaggcgcaaccctgctccgccgcatgcaagagatgattgcaaggatgcaggcgcagatgcagatgcagatgcagggcgggg

SEQ ID NO: 397147 - DNA, 83 bp, Homo sapiens
cagccacagcctcccgcgcctcgctcagctccaacatgcaatggctgccatccggaagaaactggtgattgttggtgatggag

SEQ ID NO: 397148 - DNA, 80 bp, Homo sapiens
atggttctgtgcctcctatctatgtgcctcctggatatgccccacaggctaggtcctttcacaaaactgttcctgtgaaa

SEQ ID NO: 397149 - DNA, 90 bp, Homo sapiens
actaagaagaatgagaactataagagcctggtgagacggagctatcggcgccgcggcaagagccagtttccaggagactgacaaggcgtg

SEQ ID NO: 397150 - DNA, 75 bp, Homo sapiens
ggacatatcaagcattggtgcacgatgtactgatgtcctcctcgcactttcttaccagccctttgcaaaattttt

SEQ ID NO: 397151 - DNA, 97 bp, Homo sapiens
caaggagaaggccgtaacgtcactgacccaacatgcccttccctgagtcctggcgtatctgccgtataactggagagacctgctgctcgttatataa

SEQ ID NO: 397152 - DNA, 76 bp, Homo sapiens
aggaaatgttcccctatgaagcatctacaccaacaggaattaggtggacccccaaaagtacaagggcatatttaac

SEQ ID NO: 397153 - DNA, 51 bp, Homo sapiens
gactcggagtcttagtgtgtcctgaagcccattatctctgaccctgagtac

SEQ ID NO: 397154 - DNA, 98 bp, Homo sapiens
gggcctggtcgagacaactatttttgaggtatctgaggctaccccacagcactctctggcattgattcgacagaagctgcagactaaacaggctgcca

SEQ ID NO: 397155 - DNA, 95 bp, Homo sapiens
gtcctctgaaatgaacagcatacaagccagggctgagcaggaagaagaattcattagtaacactttattcaagaaaattcaggctttgcagaagg

SEQ ID NO: 397156 - DNA, 83 bp, Homo sapiens
ctgcggaacgaaagtgaacaggagccgctcttaggcgacacacctggaagcagtgttatagttttgccgctggactcttccct

SEQ ID NO: 397157 - DNA, 89 bp, Homo sapiens
ttgcagggtgcgggcgagcgtcgacccgggccgctcctggaggaggaggtgggaggtaagaatgattgatgttggctgatattggagtg

SEQ ID NO: 397158 - DNA, 83 bp, Homo sapiens
cgggagaacctgcggcggccggagcgaaatgcttcggttacccacagtctttcgccagatgagaccggtgtccagggtactgg

SEQ ID NO: 397159 - DNA, 100 bp, Homo sapiens
gacagctgttccttggccatcccaaagctattctgggggcaacagagaggaatgcagtagcatggatagttgatggtgaatttggagcagacgacttctg

SEQ ID NO: 397160 - DNA, 100 bp, Homo sapiens
gacaggcgaacaggatatctgaagtttgtgaatgctctcgtccccatcctcatccatggcgaaatcttcgcccccagcctcgtgaagatctagcacgtcc

SEQ ID NO: 397161 - DNA, 100 bp, Homo sapiens
ccgctcctgcatgtgcacagccggctatagcctccggagtggccagcaggcctgcgaggatccgcaaggatgctctccgggcgctcaactttgcgtacac

SEQ ID NO: 397162 - DNA, 109 bp, Homo sapiens
atcgaaagcgttggagaggtgttaccggaacggcggcgacaagggtgttcccgaactagagtgggaaaaccagtagattcccagacatcgcgaagtgaatctgaaattg

SEQ ID NO: 397163 - DNA, 82 bp, Homo sapiens
ggtgtgactcctgttcagcagatattaacaaattcaggttcaaaccttgtactactcagctgatcacaagctgcttgatggg

SEQ ID NO: 397164 - DNA, 95 bp, Homo sapiens
cgggccgagaagaaggctgctggcaaaggggacgtcccaacgaagagaccacctgtccttcgagcaggagcagatccggggtagagggaaaagag

SEQ ID NO: 397165 - DNA, 74 bp, Homo sapiens
tcctgatgctgccagagccattgtggatgcttttgagatgctgacgggctccctgcccttccaggggaaggacc

SEQ ID NO: 397166 - DNA, 76 bp, Homo sapiens
ggcggaagccttcgtctcccagattgcaggtggtcgtcggttttctgagggtacttcagctgacagagagattcag

SEQ ID NO: 397167 - DNA, 100 bp, Homo sapiens
cggcacagaggtgcttctgccagggcattcttagcagggttacagaatctgttaagaatattgtgccagggtggctacaaagatacttcaacaagaatga

SEQ ID NO: 397168 - DNA, 85 bp, Homo sapiens
tcagaaggatatcgacgtcgtgatccagaagtccagagctgaggactgcctgtttgcagctgatgtttgagccagcatgtcgcgg

SEQ ID NO: 397169 - DNA, 75 bp, Homo sapiens
cttgcagaagacgccgtacgaggtttttggtgtgaagcagaacatgaggcaccttctgagcagagcgtttctgta

SEQ ID NO: 397170 - DNA, 100 bp, Homo sapiens
ggacacacctccattggatttaaaagacagtcctcgtcagcactgactttcagctatggaatcgattgcagcttcatatggtaatgctgtttgtatattt

SEQ ID NO: 397171 - DNA, 75 bp, Homo sapiens
caggcagcaaccctgggaagtgcccttgatgagctggagtgatgtgaaatttgaaagtaaagaacgaacagcatg

SEQ ID NO: 397172 - DNA, 100 bp, Homo sapiens
aagaacgcgccagagcaaaatgggacacatggtatcctgaggtgcggcaccactgtcccaacactcccatcatcctagtgggaactaaacttgatcttag

SEQ ID NO: 397173 - DNA, 80 bp, Homo sapiens
gggagatcccaggcggtgacagagtggagccatggctagagatggtggatgcttccaaaagcatcgaagctgtccatgag

SEQ ID NO: 397174 - DNA, 100 bp, Homo sapiens
ctcagacctaccagggcagagaccttgtcttgtttgctgctagaacccaggatcgctggaaaatcacctagcagcaggaactctgcgaccttcaagtcgt

SEQ ID NO: 397175 - DNA, 76 bp, Homo sapiens
accctaccatcgccgagggcccatcccctaccagcgagggcgcctccgagttatgaagacagtatggagtttccag

SEQ ID NO: 397176 - DNA, 98 bp, Homo sapiens
tatctgtatggatgggcgggctgacctcatcctgccttgtgctcacagcttttgtcagaagtgtattgataaatggctaggaattatctgtgaatgta

SEQ ID NO: 397177 - DNA, 80 bp, Homo sapiens
cagttgtggtcagtttcgctttgattgctaccctggtatatgcacttttcagaaaagcagcatctgttatagcaaaatac

SEQ ID NO: 397178 - DNA, 75 bp, Homo sapiens
ggtactctacacttgcttccaatccatacaggcccaaaagagttcagataggcctggaaaatccccagagaggag

SEQ ID NO: 397179 - DNA, 100 bp, Homo sapiens
actacattgacctgaaagaccgaccattcttccctgggctggtgaagtacatgaactcagggccggttgtggccatgatttaatccagagactgacttca

SEQ ID NO: 397180 - DNA, 100 bp, Homo sapiens
aagtcactaactgcctggtcccggtgccttgctttccatgacatttcccctcaagcaccaacacattttctggtgatacccaagaaacatatatcccaga

SEQ ID NO: 397181 - DNA, 75 bp, Homo sapiens
gtcctttttatcctggaccaggacctggggacttccccaatgcttatgatggtagagaagaccgtggatcacctg

SEQ ID NO: 397182 - DNA, 87 bp, Homo sapiens
cacaactcgggcctccccagcgacaacccaacatgagtgaagtttcctgcaagaaacgggacgactatttggaatggccagagtatt

SEQ ID NO: 397183 - DNA, 96 bp, Homo sapiens
cagccgcaacccctgctgcctgtgctggtgctgctgctgtagctgctcctggccagtacacaacaggccggggctcctcaggagtggggcttacgg

SEQ ID NO: 397184 - DNA, 100 bp, Homo sapiens
gcagcacttggagcgcagaaccggccgcgcccggttgaaatcacaaagattagacacctttttagataggtgttcttcagcaccactgacaacacggttc

SEQ ID NO: 397185 - DNA, 98 bp, Homo sapiens
aaagaaacagaaaaagttaaaatcaccaaggtgtttgattttgctggtgaagaagtaagttctgggattaccgccagcctcggaaatacctcaatatt

SEQ ID NO: 397186 - DNA, 100 bp, Homo sapiens
ttcgcctattattgggatgacaacttcgacccagatgagatcgtggggctcaccagcgtcccccatggcttctgagtagcgtgggagtggagtcagcacc

SEQ ID NO: 397187 - DNA, 122 bp, Homo sapiens
ttgagacaagttcatccagaaagctttactgatttgcttgtcataaggcagacatcatctgctctaataggaagacccactacattatctgagacaatggggaaagctgacgtatggcttat

SEQ ID NO: 397188 - DNA, 100 bp, Homo sapiens
tcccgttccaccgcggagccggatgtttgccgagccttgacaggcgtggcagagggagcagtgcccgagcgcgcaaccatgtccaagggacctgcagttg

SEQ ID NO: 397189 - DNA, 90 bp, Homo sapiens
tggagtcaagatggaggagtacgcgcgagagccttggacagtcattttgtttactcattcagccctgttgcaggtcccaataaactcttc

SEQ ID NO: 397190 - DNA, 112 bp, Homo sapiens
aagctcaccgagacggcgatccgggcgctcgagacttaccagagccacaaggtgtcgtgaaaactacccctaaaagccaaaatgggaaaggaaaagactcatatcaacattg

SEQ ID NO: 397191 - DNA, 100 bp, Homo sapiens
agaaaattgaaccaagcaccgtggtgccagctcagacaccctgggacaagcctctggttgtcttcttgcctgccctgtgtcgtaaaatgggggtccctta

SEQ ID NO: 397192 - DNA, 75 bp, Homo sapiens
tagtgcctttcagccctaccaggaacgtcaaggtcgtgggaaataaaaggcagttctacacagactgcagcaacg

SEQ ID NO: 397193 - DNA, 90 bp, Homo sapiens
ctgcattgtggtgggttttacttcaggttatgtacgcttctacactgagctttggacatcagacagtgcaggagaagaatgtgatgcggc

SEQ ID NO: 397194 - DNA, 100 bp, Homo sapiens
cgcggaggctcgcgagatccgcatgaaggagctggagcggcagcagaaggaggtcaagagacaactgcctttgaaagagagtgagtgactgtttccaaaa

SEQ ID NO: 397195 - DNA, 100 bp, Homo sapiens
gcacttcgcattttggcattgacatttaattttagggtcctttatatagaagggagagtagagcccagttcctctgacacccccaggctgtgtggccctg

SEQ ID NO: 397196 - DNA, 100 bp, Homo sapiens
cagaatagagggtatgcatttatcaccttctgtggaaaggaagctgcacaggaagccgtgaaactgttgttgaagtccgaagaggattcctcatataaac

SEQ ID NO: 397197 - DNA, 88 bp, Homo sapiens
gtttatgatgataaagactacaggagaattcggtttgtaggtcgtcagaaagagttggaggctggcagcgaagaagatcgaaaattaa

SEQ ID NO: 397198 - DNA, 97 bp, Homo sapiens
ttcagctcttcacagggggtagaacaagtggtactaggattatacattgtaagaggtgacaacgttgagggccccaaggctgttgcagctcctcgac

SEQ ID NO: 397199 - DNA, 100 bp, Homo sapiens
gtgcagctgcctcagttcttagcgcaggcgtgctggtcaccatgacaacagagacaggccccgactctgaggtgaagaaagctcaggaggaggccccgca

SEQ ID NO: 397200 - DNA, 100 bp, Homo sapiens
attacccttggacatccagattttctattgtgccagacctgacgaagagccttttgtgaagagagtcccacgaactggctgggtatacagaaatgtccag

SEQ ID NO: 397201 - DNA, 88 bp, Homo sapiens
gactgaaaatggggcggaagaaaatacaaatcacacgcataatggatgaaaggaaccgacagccggccaagagccactgcacaatgag

SEQ ID NO: 397202 - DNA, 143 bp, Homo sapiens
cgaaactcttggatctaaagaaacagttggctgtagctgaggggaaaccccctgaagcccctaaaggagagaagatgactgaggaggaggtggagaccgttctggcaggacacgaggacagcaacggctgcatcaactacgag

SEQ ID NO: 397203 - DNA, 100 bp, Homo sapiens
caatgatggggcagcaagtggccaaagtccagcctctgatgaagcaggagagaaagaagccaagtctgattaataaccatataccatgtcttatcagtgg

SEQ ID NO: 397204 - DNA, 83 bp, Homo sapiens
tttgttaaggattccaagtaactcttatttggcaattcaaaatcccaatgacattcagcttcaagaaaaagcttggaatgcgg

SEQ ID NO: 397205 - DNA, 100 bp, Homo sapiens
cttgtgtattaaggagagtaaatatgcggggtatagaacaggctatgcttacaggcatcctctcattcgagagaagcctaggcacaagagtgatgtggaa

SEQ ID NO: 397206 - DNA, 100 bp, Homo sapiens
caaaagaacaaattcagtcccttctccatgaaatggtacacgcagaacatggtagcctttccagtaaatatatgactcagggaaaagcctcagcgaagag

SEQ ID NO: 397207 - DNA, 109 bp, Homo sapiens
caaaaatcaagcaaacccttctagacagccggggagtgttcctcgacatgtttctccagtgacacctcccagagaagttattttacaatcaggcgttgaatgtaggccg

SEQ ID NO: 397208 - DNA, 82 bp, Homo sapiens
cctattgagttaacacctctgccgctgctaaaaggattttttatcaagcagaaatgcatcgaacaacgagaatcaagatcac

SEQ ID NO: 397209 - DNA, 83 bp, Homo sapiens
cagggaccctgtgcaggcctgctcctccgtttgcaaggtcctctccacccggatcctggccatgaaggcctcgctctgcaagc

SEQ ID NO: 397210 - DNA, 83 bp, Homo sapiens
ccccttggaccgagccgatcgccgcggggcagttcgggccggctgtcctggcgcgaataccaagctgctattttacacttgaa

SEQ ID NO: 397211 - DNA, 83 bp, Homo sapiens
cgagttcttcgtgctgctcaagagagttaagaaagacgtggacaagggcacacggcactcagacatgttcctgctgaagccag

SEQ ID NO: 397212 - DNA, 90 bp, Homo sapiens
caagagaatgtgtcagccgatgcaccgagtccagcccaggaaaatggagagctggtggaggccattgtcttgccaatgaaccacaaggag

SEQ ID NO: 397213 - DNA, 100 bp, Homo sapiens
gtggactgcagcctcggcggtcagcaggactcgctcagcagcagcctgaaaacttgctacaagtatctcaatcagaccagtcgcagtttcgcagctgtta

SEQ ID NO: 397214 - DNA, 98 bp, Homo sapiens
cttcctgaccccattcagctttgagaactttcagtcccaagttactcaggtgatagagggtaaaggtatcgggaagatatcaggagtaaatcttactc

SEQ ID NO: 397215 - DNA, 83 bp, Homo sapiens
aggatatcgacgtcgtgatccagaagtccagagctgaggactgcctgtttgcagagagtaaaacttgtctcggcacagagtca

SEQ ID NO: 397216 - DNA, 100 bp, Homo sapiens
gccaggtgctggaggacttcccaacggtgcggattgatgagtacgattactccaagcccatccaggggcaacagaagaagccctttgaggagcactggag

SEQ ID NO: 397217 - DNA, 97 bp, Homo sapiens
gcggcggcggcgagcggttccttgtgggctagcattgatgcatatagatctcaaagattcaaagaaacagaacgtccatcaataaagcaggtgattg

SEQ ID NO: 397218 - DNA, 74 bp, Homo sapiens
tgaacattactcttccagaagagcctggatgtgtaaatacaactgaagtggacattaagaagtcatccagaatg

SEQ ID NO: 397219 - DNA, 75 bp, Homo sapiens
gaaagtctctggtgttcttcgtgggaactgggccatgctggaagcagaaagatgaaggtcttagaatcattgatt

SEQ ID NO: 397220 - DNA, 100 bp, Homo sapiens
cggggtcggcgccccgcgcctgccgctgccctacggcttctccgccatgcaaggctggcgcgtctccatggagggaaggatggagacgctgaaggataag

SEQ ID NO: 397221 - DNA, 96 bp, Homo sapiens
ggcccgcggagctgctgcagtccttcgcgccctcctcgccctccccaccgacatcatgctccagttcctggatgacacgtacacagagagctacat

SEQ ID NO: 397222 - DNA, 106 bp, Homo sapiens
ccatcctgccgtccttctccactttcgccagcccgtgccgcgagcgcggcctgcaggaggagggtgtgaagacagagaatgaccacatcaacctgaaggtggccgg

SEQ ID NO: 397223 - DNA, 75 bp, Homo sapiens
cggcaagatcgtgtatcccacggagaaggtgaactgtctggataaggaggaggttcgagtgaagatcaaagactt

SEQ ID NO: 397224 - DNA, 82 bp, Homo sapiens
gctggcgttaactgtgcggaggcagacaatgcagatcttcgtgaagactctgactggtaagaccatcaccctcgaggttgag

SEQ ID NO: 397225 - DNA, 100 bp, Homo sapiens
tcatgactcctgagtcctcgctggagttctacagcccggaggcctgccggtgatgctggcaataggaagagatgcttgcacaagaaaaattggcttagaa

SEQ ID NO: 397226 - DNA, 75 bp, Homo sapiens
cgggctacggggcagatggactcggagcgccccgccggaatgtatcctgtcaggtataatgtcagtgaatggcaa

SEQ ID NO: 397227 - DNA, 111 bp, Homo sapiens
cgagtgccatggcggccgccctgggagcgagcggaggagcaggcgccggagaagacccttttgaggacttctttgggaatcgaaggggtccccgaggaagcagaagccgag

SEQ ID NO: 397228 - DNA, 90 bp, Homo sapiens
ggggacggtaggagcctccgtgcggagaccactgttcaaggccacaggtattgacctgatggacatggcttcggacatcctgcagcccaa

SEQ ID NO: 397229 - DNA, 100 bp, Homo sapiens
cttgatgtctactgttttgaagcgttcgatcttttaacatcacatcacatgctgacagcacaagaaggtgcaaactctacagcggctctgcagactgcac

SEQ ID NO: 397230 - DNA, 100 bp, Homo sapiens
ctcccgcccacgtcccatttcgcccctcgcgtccggagtccccgtggccaggcagaatatgaagttactccagatgaaaaactgggagagaaagggaagg

SEQ ID NO: 397231 - DNA, 100 bp, Homo sapiens
ctgagcccgtgcctgtcttcagatcttcacagcacagttcctgggaaggtggagccaccagcctctccctggttaaatggaagctgatcggcgttcacat

SEQ ID NO: 397232 - DNA, 74 bp, Homo sapiens
gttctggagaaaaagttccatactgtcagtggaagcaagctggttgtcttcttgcctgccctgtgtcgtaaaat

SEQ ID NO: 397233 - DNA, 48 bp, Homo sapiens
ctcatggaggctgagcatttattcagacagtgtgctcaggggcgttgc

SEQ ID NO: 397234 - DNA, 96 bp, Homo sapiens
gcgctgggggccggggcgcgtcgcaggaacttgcttgctagaaaacaaagtgcaaggcttgacaaacacaatgacttgggatggaagttatttggg

SEQ ID NO: 397235 - DNA, 75 bp, Homo sapiens
accatgtcagacgcagccgtagacaccagctccgaaatcaccaccaaggagatggtaacctgcacctcaatgtga

SEQ ID NO: 397236 - DNA, 83 bp, Homo sapiens
ccccgctctgctgtgggcgctgctggcgctctggctgtgctgcgcgacccccgcgcatggagaggagaggcagcagcatggcg

SEQ ID NO: 397237 - DNA, 75 bp, Homo sapiens
ctaggctccaagacgccgtcgcttgagatttttgatgaaattgagtcatgaaactgtaaccattgaattgaagaa

SEQ ID NO: 397238 - DNA, 75 bp, Homo sapiens
tcttcattttgggagaaataactaaagggagcagatagcagggacttacagatgaaccaggccctgcgatttttg

SEQ ID NO: 397239 - DNA, 73 bp, Homo sapiens
tgagagaaaggctggaagacgaggaatgtatcctgtcaggtataatgtcagtgaatggcaagaaagttcttca

SEQ ID NO: 397240 - DNA, 100 bp, Homo sapiens
tgaagccctacgagattcacaccgtcttcggtctcctggggtcggcgccgagtgggaggatggcggaaaaacgcttcgttaagggactcaggcagtacgg

SEQ ID NO: 397241 - DNA, 100 bp, Homo sapiens
tggagcaggccggctgccaccttctgggctcctggggccctgcccaccacaagtgtatgaaatctgaagagaagtcccttggtgtgggattacatacatt

SEQ ID NO: 397242 - DNA, 75 bp, Homo sapiens
ttggggttggtagaaggtgttattgggaaaattcaacttcattcaggagagttcatggagagcctgcaggaccca

SEQ ID NO: 397243 - DNA, 75 bp, Homo sapiens
ccgcggtgcggacccagcacgcctgggccgggggctgcagcatggagtacgagagggcctccaaagtggaccagt

SEQ ID NO: 397244 - DNA, 100 bp, Homo sapiens
ggaagaggtgcttttggtgaagtgcagttgtatttgactacagtcattccttatgagaaaaaaaacggaccaccgtctgttgaagatcttcaaatattaa

SEQ ID NO: 397245 - DNA, 98 bp, Homo sapiens
atggcttacgctgcacttccatcccacggtcagactgtgaaggggatgttggacaatcctaatgaacctgttagtgacctctcttactttgactgcat

SEQ ID NO: 397246 - DNA, 100 bp, Homo sapiens
caagactcaccatcatacccatgtggaagccagctctccaggccacggaagtcctctgagcagcctgttaccttctgcctcagtgccagagtccatgaca

SEQ ID NO: 397247 - DNA, 100 bp, Homo sapiens
ttcgttacatcagaaggatacagttcatgacaatgactttgagccctaccttactggacagtcaaatcagttacagaatgtctgaaggggacagtgtggg

SEQ ID NO: 397248 - DNA, 100 bp, Homo sapiens
atgacttttgaattatctgctttggaagattatccatgacactgttctgccctgctctgctctaacaacatttgacaactacacctttgcccaacctggg

SEQ ID NO: 397249 - DNA, 82 bp, Homo sapiens
tttcgccagcccgtgccgcgagcgcggcctgcaggaggtgaccaagaatatggcccaggtgaccaaagccctggacaaggcc

SEQ ID NO: 397250 - DNA, 100 bp, Homo sapiens
ggaaggctacctgttgtctccgatccagaggatctgcaagtacccgctcctccttaagttgtgctgaaagacattatgacaccgccaaatttaattgcag

SEQ ID NO: 397251 - DNA, 91 bp, Homo sapiens
ggaaaatcaagctaagcgcctactagagcagggtttggagactcagtcactatgaacaagaccgtagtgcacttaaaaaaagggaatggga

SEQ ID NO: 397252 - DNA, 75 bp, Homo sapiens
gttactccattttggccagaaattcaagtgtctgtgtttcactgatggcaagactgtggcccccatgcccccagc

SEQ ID NO: 397253 - DNA, 80 bp, Homo sapiens
gccgatccagcctgcggagcctgtggggcaggttgtctttctactcgggacactcttcctttgggatgtactgcatggtg

SEQ ID NO: 397254 - DNA, 51 bp, Homo sapiens
gttgacagcacttttcaaaaacctgaccagattacagaggggtattgattt

SEQ ID NO: 397255 - DNA, 88 bp, Homo sapiens
acccagatgcttcagtcaacttctcagagttttctaagaagtgctcagagaggtggaagatctatagcatgatgctgcgattatctgc

SEQ ID NO: 397256 - DNA, 100 bp, Homo sapiens
agtgaattctaaaggtgacagatttggcaattgtggtttctctggcaatgaatacaagaagtgtgccactgggtctggctattttagttgccacagcatg

SEQ ID NO: 397257 - DNA, 100 bp, Homo sapiens
gaatgcggccctcatgcatcggagacacacagacccagtgcagctccaggcggcagggaaaattggagcctgcccctcggcccataagcccttgttggga

SEQ ID NO: 397258 - DNA, 75 bp, Homo sapiens
atctgaagatcaggtatccaaaacaagaaaaccgcctgattcccactgagttacgccgagaggctctggccttac

SEQ ID NO: 397259 - DNA, 82 bp, Homo sapiens
gcgccaagctgcagatcgagctgggcaagtgcaaggcggaacacgaccagctgctcctcaatctttcccagggaactccgat

SEQ ID NO: 397260 - DNA, 75 bp, Homo sapiens
aagaaacacttcctataaatctcgcccaaacaggaaaggccatccatgagcagatgaactgcaaggagtatcagg

SEQ ID NO: 397261 - DNA, 99 bp, Homo sapiens
caagcttcccagcaacctgccgcagttacagaatctaatcaagcgagacccgccggcctacatcgaggagttggctggggaacagaccagggaattggt

SEQ ID NO: 397262 - DNA, 100 bp, Homo sapiens
caaaggaattccgcccttgtccttacgtcctgctaacccgcttggcattgagattgaaaagtatggcccatctcctgtacgcttggagcgacctttggct

SEQ ID NO: 397263 - DNA, 100 bp, Homo sapiens
gcagtgtggggaatttcccaccaggatgagtatgattggctgtgattttaggctgttcgctgctatgaatctctaatcttaaaagctgaaggaaaagtgg

SEQ ID NO: 397264 - DNA, 82 bp, Homo sapiens
agccagtggagctgctgaatcctgcccgcgtgaaccacatgcccagcacggcaattctgtggtgttcttggtcacacattta

SEQ ID NO: 397265 - DNA, 100 bp, Homo sapiens
cgccgattcctcctccttggtcgccgcgtccttggctggcgtgttctgcgttagacctgcatcttagcaatgtgaatattgcatccctagagaaggacct

SEQ ID NO: 397266 - DNA, 78 bp, Homo sapiens
cacaccatcagcttcagagaatggcagccatttatttgtcccgtggccgccatggcatcagatgaaggcaaacttttt

SEQ ID NO: 397267 - DNA, 90 bp, Homo sapiens
gcgacaacatggaggccgtgaagaccttcaatagcgaggtagtcagatgcctccgcagccacccgggagccagtcagaatccagttccca

SEQ ID NO: 397268 - DNA, 74 bp, Homo sapiens
ggaggctccgtacacgcttgtgacacagcaggatgccaatgcctcttccctcttagacatctatagcttctggc

SEQ ID NO: 397269 - DNA, 74 bp, Homo sapiens
ttcacatccagcagaggaggcgggggcagccgctgagacggtttttcacaagatggaggagatgtataagaaag

SEQ ID NO: 397270 - DNA, 49 bp, Homo sapiens
tgtgcaaacccgagagaactggaatcccaaggactgcagcaaagccaaa

SEQ ID NO: 397271 - DNA, 90 bp, Homo sapiens
gttcagttgtggcggttgctggtcagtaacagccaagatgctgcggaatctgctgtatttaaaccgaggctgcactagatactttgctaa

SEQ ID NO: 397272 - DNA, 96 bp, Homo sapiens
ccggctgcatgctcttgtcgtaggacctggcttgggtagagatgatgcgcttctcagaaatgtccagatggactcaccctgtcacccaggttggac

SEQ ID NO: 397273 - DNA, 100 bp, Homo sapiens
aattcctaggccactggctggacaaattacgaagggaatgggtactgttcaaaaaggaatgccccacaagtgttaccatggcaaaactggaagagtctac

SEQ ID NO: 397274 - DNA, 88 bp, Homo sapiens
aatgatgatggcaagaaggcccttgtgttggactgtcattatccagaggatgagagagccttctccatggacgaccgcattgcctgga

SEQ ID NO: 397275 - DNA, 74 bp, Homo sapiens
ggcgtaactatcgcctgacaggacatttgaagacagtgatttgttccatttgattggtgttatctgtggcttag

SEQ ID NO: 397276 - DNA, 100 bp, Homo sapiens
gagcgatgcccagtgccgagatcgagcatagcggcctgaccacaggggtggccttcgggcatcacgccaagttcatcgcttcaacaggcatggacagaag

SEQ ID NO: 397277 - DNA, 74 bp, Homo sapiens
ctacctggaacccttgaaggatgcaggtgatggtgttcgatacttgctcagatgatgtgatgccagccacttac

SEQ ID NO: 397278 - DNA, 73 bp, Homo sapiens
acaggactaaactgaagaagacacctactgaggctgggtcccttcagtgttgtacgacgatgtatcaacagag

SEQ ID NO: 397279 - DNA, 75 bp, Homo sapiens
tgcatctgcagtacaggatatgaagaaattgagggttcttgccatgatgcttcctgaaacttggagagtggcagc

SEQ ID NO: 397280 - DNA, 100 bp, Homo sapiens
tctctctgtcccttggcttctgtgtggtcccagaagatatgcctcctccagtttcaagatacacatggtctacagtaagcggtcaggaaagccccgtggc

SEQ ID NO: 397281 - DNA, 74 bp, Homo sapiens
gaaatgatttcctcaggactccagattatctacaacactgatgagggaaatgatcttcattggttagcatgtgc

SEQ ID NO: 397282 - DNA, 82 bp, Homo sapiens
caccgcagccttgggcctcgcgccggctatggccgtgccctggggctgagccctcaggggcggaccgcggaacccgaggcca

SEQ ID NO: 397283 - DNA, 51 bp, Homo sapiens
aagcccagcggcaaaaatctcaggtgtctttcaggttgcagaaaagatgga

SEQ ID NO: 397284 - DNA, 83 bp, Homo sapiens
ctgctgcagatggggcaggtgtggaggaagatgtctcaggagccatatcacatctgtcccttggggagatcccagctatggca

SEQ ID NO: 397285 - DNA, 98 bp, Homo sapiens
gtgcaggcgcttcaccacagacggccataggaaaaggatacagagtagagtttcatgaacctgaaacttggtggaaatttgatcctgaagaattagaa

SEQ ID NO: 397286 - DNA, 75 bp, Homo sapiens
ggcgcccgggccagcagcgattgcatcctgaggttagcattacacttctcccagtggagcccatgacttctgatc

SEQ ID NO: 397287 - DNA, 100 bp, Homo sapiens
agacagattgggagtccattttgcagatctgcgacctgatccgccaaggggacacacacatggaggagcaggacttggagcgaaggttcgagctgctgag

SEQ ID NO: 397288 - DNA, 75 bp, Homo sapiens
agagcctggatttcctcaaggtcccggaccagggagctgcaggttctgcctcctgggggcattgctggcccccat

SEQ ID NO: 397289 - DNA, 75 bp, Homo sapiens
caaggagcacggtttcgtaggatggtttgaaacatcagcaaagaggctgcctaccacaaggactttagcttactt

SEQ ID NO: 397290 - DNA, 75 bp, Homo sapiens
acatgcaggtcctctataccgcactgcagcacagctcagagctggcgcccaagaaaaagcttgtggtgaaggggg

SEQ ID NO: 397291 - DNA, 51 bp, Homo sapiens
tgagatgggcctggggaagacctgccagcctccaggatcactaagttcaag

SEQ ID NO: 397292 - DNA, 75 bp, Homo sapiens
gtgcgccagaagaagcggatggacagcaggccccgcgccggaaactatgttccaacttcctgtcaacaatcttgg

SEQ ID NO: 397293 - DNA, 98 bp, Homo sapiens
cggtgttcatctccgacatccggaactcaggagcattggtttgaaaaggccctacgagacaagaagggcttcatcatcaagcagatgaaggaggatgg

SEQ ID NO: 397294 - DNA, 100 bp, Homo sapiens
agatgctcttggctcaaggactcatactacactttcttggtagagaggattccacagatgttggtgaggaggacagcttccttggtcagacttctattca

SEQ ID NO: 397295 - DNA, 50 bp, Homo sapiens
cctcgtgggcatccacctcctcaaggaatcagagatcattgatttcttcc

SEQ ID NO: 397296 - DNA, 82 bp, Homo sapiens
aaggcctgtgtgctgcagaacccccagaccatcatgtcagcccaaggccaaccccactgtcactctgttcccgccctcctct

SEQ ID NO: 397297 - DNA, 82 bp, Homo sapiens
ctaccaaaagacttccattctttatcgactctggtggcacatttagaacgaacagggcattacttaactgtgaaagataacc

SEQ ID NO: 397298 - DNA, 73 bp, Homo sapiens
ggctctgcggctggtccaggccttccagtacacagacgagcatggggaagagtcacaccaagcctaggctggt

SEQ ID NO: 397299 - DNA, 97 bp, Homo sapiens
ggaacaggtgctggcagctgtgcgccgcctccgctacaagggggggaacacgttcacaggcccagcgcttgagaagtcggaggccaaggccgggccg

SEQ ID NO: 397300 - DNA, 83 bp, Homo sapiens
cacatatttacttcagatggtctgcatgctgaggctaatggtcgatttgaagtgggcaagaaaatctgtttgagcatctcagg

SEQ ID NO: 397301 - DNA, 98 bp, Homo sapiens
cactggatatcagttgcctgtatataattatcaggaagctgaatatggtgggcatgatcagatagatttgtatgacgatgtcatatctccatctgcaa

SEQ ID NO: 397302 - DNA, 100 bp, Homo sapiens
ccagttgggatggacaaaacccaccaagatccagattgaagctattcctttggccttacaagctggacctgtgatctgcagaatgctgagttatccccca

SEQ ID NO: 397303 - DNA, 100 bp, Homo sapiens
ttacccacagggaacttggcagaaggtgatacaggtggttcagtcagcaacaggaacaagatcctaccaacctctacatttctaatttgccactctccat

SEQ ID NO: 397304 - DNA, 75 bp, Homo sapiens
tccagtggaggcattttggggcagaatacagagatatggaatcagatgcaaattgtattcatatggtagacaatg

SEQ ID NO: 397305 - DNA, 75 bp, Homo sapiens
tgaaggcacagaaatggaagtaccagcagaagcatcagaagagctaacaattgctggaatgacctttacaacttt

SEQ ID NO: 397306 - DNA, 98 bp, Homo sapiens
gcacctggatgagacatttgctacagcatcccacattaagtcaacggtgctggagaatctggtaaaagcaccattgtgaagcagatgaggatcctgca

SEQ ID NO: 397307 - DNA, 100 bp, Homo sapiens
tgctgcccggcgagctggccaagcacgccgtgtccgagggcaccaaggcggtcaccaagtacaccagctcgaagcgatcattatttcgaagttctagtat

SEQ ID NO: 397308 - DNA, 50 bp, Homo sapiens
cctcctgagtggctgggactacagaactttttaacaacagtggctattct

SEQ ID NO: 397309 - DNA, 100 bp, Homo sapiens
cctggtccggattgtggtcactcgaagtgaggtggcaggtgtcacagctttagcctgtggaatgatagcagtagggtcctgcaatggagatgtaacttcc

SEQ ID NO: 397310 - DNA, 82 bp, Homo sapiens
gaaacaggggagcaaggtgcaagagtccacaaagggacctgatgaagcgaagatcaagatagtttctaatggtgatgaacaa

SEQ ID NO: 397311 - DNA, 83 bp, Homo sapiens
aggaggatggccacatccccccgggctacatctcacaggtaatggagagtgaagagttcatgttgcttccagccaatcaactc

SEQ ID NO: 397312 - DNA, 75 bp, Homo sapiens
ccctctacctggagcccacggaggacctggcccccgcccaggaggtcctgcacataggaagcgcccacaaccgaa

SEQ ID NO: 397313 - DNA, 90 bp, Homo sapiens
ggcgggacccggcggggcgcaccacagagaccggcttcaatatcttcacccagcatgtactatactggcaattgctggagaagattttgc

SEQ ID NO: 397314 - DNA, 100 bp, Homo sapiens
aacacataccttatagggaacacaaaagtttaactggaactgcaagatatatgtctatcaacacgcatcttggcaaagaaatacctcagggactttttca

SEQ ID NO: 397315 - DNA, 83 bp, Homo sapiens
cccagggtatcttccttgatcagcctttacagtaaaaatgacccatctatggctgcttaatgaacttaaaaggagtctagaaa

SEQ ID NO: 397316 - DNA, 75 bp, Homo sapiens
gagagaggaaatgccagctcttctcagaaagaaaaggtgaaatgacaatggatgctctgttggctcgattgaaac

SEQ ID NO: 397317 - DNA, 96 bp, Homo sapiens
ggccctgctgcgggggggagagccactgacgccgggaccgggaccgccgccgccgccgccaccatggctgccgcgggcggacacgccagaggagga

SEQ ID NO: 397318 - DNA, 83 bp, Homo sapiens
gcccggtgcccgaggaggcagccaagctcgtagcctgccactccgtgcgaggaggcctcggtggtaccagaagaggaggggct

SEQ ID NO: 397319 - DNA, 103 bp, Homo sapiens
ctccggcgtgttcatgcccccgggatgaaggatttgggggcagagcacttggcaggtcatgaaggggtccaacttctcgggttgttgaacgtctacctggaac

SEQ ID NO: 397320 - DNA, 100 bp, Homo sapiens
ggccggtgccagcacctttcggcttctgagacggcggcagcagcggcattcaggtggtataagttgaaatccaaaccaggaaagaaggacaaggagcgag

SEQ ID NO: 397321 - DNA, 91 bp, Homo sapiens
ccgcagaacattgaccgagttaaagcccttatcgctgagcatcagcctgtgcccctgtaggatgcagtgaagaccttggaagagacagcac

SEQ ID NO: 397322 - DNA, 100 bp, Homo sapiens
tgagaggggcgcatgcaacaacaacttttggaaggcagaagatggctgtgccacccacgtatgccgatcttggcaaatctgccagggatgtcttcaccaa

SEQ ID NO: 397323 - DNA, 74 bp, Homo sapiens
tctgactccacctttacttttacctacgttggcggccccagaagaatgccgggacattctgcttcctgtcatca

SEQ ID NO: 397324 - DNA, 100 bp, Homo sapiens
gaagctttggatcagacttttgtgttgcagttcggtctgcgggccaggcatcgacatccgcaacgactatcagcagctgaagcgcctggagaactgcacg

SEQ ID NO: 397325 - DNA, 78 bp, Homo sapiens
tcattggcaagaaagggcagaacctggccaaaatcactcagcagatgccaaaggatgaaattgattctgcagtaaaga

SEQ ID NO: 397326 - DNA, 99 bp, Homo sapiens
acaagtagcaaatgagatgaaccatcttcctgcacacagccaaagtctgcaaagcactggcctgtgtttgtggaggtgaaagaccttttgacattggtg

SEQ ID NO: 397327 - DNA, 75 bp, Homo sapiens
gtggaggttcctacagagattcatatgagagttatgaataccctctaccatctgctttggtcagggtgccgctcg

SEQ ID NO: 397328 - DNA, 75 bp, Homo sapiens
gaagcgttcagcctccccagacgacgatgtttattttcttgaaaaggctccaggcttcggcttggaaaatcccac

SEQ ID NO: 397329 - DNA, 100 bp, Homo sapiens
cctacttcatcgacagagagagcacgctgcgacggctgcaccatatccagatagccacgggggccatcaagggaccagttactctccacaagaaaattca

SEQ ID NO: 397330 - DNA, 82 bp, Homo sapiens
aaggaatcaaaagaatatttagaatgcaggatggagaggagcggtggtgccccccccgggcacggggccatgtacaacggga

SEQ ID NO: 397331 - DNA, 75 bp, Homo sapiens
cagagaatcaagctatccaaatgcgattagttgatgtggcctgcaagatccctgaatattgccgagccttagaag

SEQ ID NO: 397332 - DNA, 100 bp, Homo sapiens
ggagccccagagctcaatgggggaccacagcatgcacttccttccagcagctacacaggcaaaatttggtttctctaatattactggaattgattactct

SEQ ID NO: 397333 - DNA, 90 bp, Homo sapiens
caagaagaacgctctcatccggaggcaggaccagctgcagctgctgttcctggatgcctatgctgagcacaagttacagttctgggcagt

SEQ ID NO: 397334 - DNA, 90 bp, Homo sapiens
gaagcgggcctggcgttgatccccgataagcctgccactcagtgtatttcagacggcaaggttaaaggttattgaaaatgaattgataca

SEQ ID NO: 397335 - DNA, 75 bp, Homo sapiens
cttggagagcccaggagcaggggagacatgccacctcctaagctgcccaacggtgtgttcacccccgacttccag

SEQ ID NO: 397336 - DNA, 73 bp, Homo sapiens
tgacagtctgcatgtgcagttttcaggttggatggcaagcatgtggtgtttggcaaagtgaaagaaggcatga

SEQ ID NO: 397337 - DNA, 82 bp, Homo sapiens
tcggcggctcagttgtccatgaccctgaaggtccaggagtacccgaccctcaagaaatgagccgtcagactgctacagcatt

SEQ ID NO: 397338 - DNA, 75 bp, Homo sapiens
ccggggtctgcgcgcaccacgcggccggcagaaagggaatatgcactttctggttggaatttgaataacatgcct

SEQ ID NO: 397339 - DNA, 97 bp, Homo sapiens
ccggatcaatccagatggcagccagtcagtggtggaggaacttgatgggaaacctgcttctcctactccggttattgtggcctcccacacagccaac

SEQ ID NO: 397340 - DNA, 95 bp, Homo sapiens
ccaaatccaagatggcggccagcaggaggctgatgaagggcgccctgcgtccggcagaggaggcgagcatcccgctcaggtgatgaggaacccct

SEQ ID NO: 397341 - DNA, 90 bp, Homo sapiens
caactgcagagcatcccggctgagatcgagaacttgcagaggagacaaggacggcagcaaggtgacaacagtggtggcaactcctgggca

SEQ ID NO: 397342 - DNA, 116 bp, Homo sapiens
agggatctttgaattggtggaacttgttggaaatggaacatacgggcaagtttataaggtgctgttacactaccaaactgtcagtgaacccgccgttattaaacgattgattagtg

SEQ ID NO: 397343 - DNA, 97 bp, Homo sapiens
tcacccgcagggcgatcaaatggtcccggctgctgcagggcgggggcgtccccaggagccggacagaattcagcttagagaactatcaacacaggac

SEQ ID NO: 397344 - DNA, 111 bp, Homo sapiens
aagaactcgagcgacagagacaagctgagcttgccgcacaaaaagctagagaggctcaggccacagggtcaccacatacatcgcccacccatggaggcggccggccaatgc

SEQ ID NO: 397345 - DNA, 75 bp, Homo sapiens
aacgaacatcttctggacctttgtccagctgctggagccagttctgcttctcggcaaggagcgatttgctggtgt

SEQ ID NO: 397346 - DNA, 50 bp, Homo sapiens
cccactcgcctcacctgagcctgggtatttattacagtatcaggagccaa

SEQ ID NO: 397347 - DNA, 75 bp, Homo sapiens
ctcttcctctcggagctcaccggatttataacgacagaagtgaaagattctgaagcttggcggagaggggtgtgt

SEQ ID NO: 397348 - DNA, 82 bp, Homo sapiens
gtccccagtccccgggccacggatccaccttcccatctggagcagatccgcagggacatccgagacttccggtctagcgcgg

SEQ ID NO: 397349 - DNA, 90 bp, Homo sapiens
atgttcaccagcaccggctccagtgggctctgatggatagaatgacagaagatgctcttcgcttgaatctgttgaagcggagcttggacc

SEQ ID NO: 397350 - DNA, 98 bp, Homo sapiens
atcattactcctccaacaccaatcatcccagacggaagccctcctatgacactgaaacagatcctagtgagggattgatgaatgttctaaagaaaatt

SEQ ID NO: 397351 - DNA, 90 bp, Homo sapiens
ctgggtgatcatggttcagcgctttagcctcaggaggcagctatccaaggatttggaactagctctggttttggatgcagcaccacaggg

SEQ ID NO: 397352 - DNA, 99 bp, Homo sapiens
gccagaaacagatctcagccccgggctcccagctgcccacctcataggtgaccaagaatatggcccaggtgaccaaagccctggacaaggccctgagca

SEQ ID NO: 397353 - DNA, 50 bp, Homo sapiens
cgagaagtcatctgcacgtccaggaactcgatccgccacaacctgtccct

SEQ ID NO: 397354 - DNA, 97 bp, Homo sapiens
gcttgaggtttctgcttgtaaaaaaaagggctttcatccacacaccaaggagcccaggctgttcagttgccggtggtggtgtgcacattgagccccg

SEQ ID NO: 397355 - DNA, 95 bp, Homo sapiens
actcaacagtacctgaagatgcagagcacaaggcagaaaatttactggttaaggaggtatggcatttcaaatatagatacaaccattgaaggaac

SEQ ID NO: 397356 - DNA, 75 bp, Homo sapiens
ctggatgacgagggcctgctcactcgcttgggccgccggacacatcatctcagagttggagcacctgacgtttgt

SEQ ID NO: 397357 - DNA, 76 bp, Homo sapiens
cgaggccctggaggctgccgagcgtgaggagactcagcagaaggtgcaggttcgggtctggcggtacttgaagggc

SEQ ID NO: 397358 - DNA, 90 bp, Homo sapiens
ccctcccgcacttgagggactgaagccatgcaggacccctgggcagacctcttcagaaatagcagacagacggtgccctatggactgtcc

SEQ ID NO: 397359 - DNA, 75 bp, Homo sapiens
ccagataccattgatgaaggaaatgctaaagcgattccaaggaaattggatacactcacatgaaaatagcggaag

SEQ ID NO: 397360 - DNA, 88 bp, Homo sapiens
cgtccaggcctgacagctctgcggctcgggccctgaggaacaaggaaaagttttgatcacttgatatcagacacaaaggctcctaaaa

SEQ ID NO: 397361 - DNA, 102 bp, Homo sapiens
ggaatatctagaggaggtacctccaggaaatgtgctagtcaggttttccttgttcccgcatgttcagccaatcgtgtttaaggagaaactaacaatgaaaac

SEQ ID NO: 397362 - DNA, 100 bp, Homo sapiens
ctgtggcaaggcttttgcttccaaatacaagctgtataggtgaatttactcatgagatgcaagtcaggatacgacaggaaatggagaaggaaaagaaggt

SEQ ID NO: 397363 - DNA, 96 bp, Homo sapiens
tagcgggcgcggcgggcggcgcgcagagaggtcaatgtgacggtggactacattagaccagccagcccagccacagagacagtgcctgccttttca

SEQ ID NO: 397364 - DNA, 50 bp, Homo sapiens
cagaaggtctctggagacatcttcagcagagtctcactctgtcacccagg

SEQ ID NO: 397365 - DNA, 100 bp, Homo sapiens
acgctcgtcaccaggacccaaggaaccaatgtatttccactacacaaaattttccacctctgggataccttactacttgggaattcctctttcccattct

SEQ ID NO: 397366 - DNA, 95 bp, Homo sapiens
agggccctgcaggcagagttctgattatgtttgagaccttcaacaccccggccatgtacgtggccatccaggccgtgctgtccctctacgcctct

SEQ ID NO: 397367 - DNA, 100 bp, Homo sapiens
aggacctgcctaattaccttcaaacctgctgaataccactagaaacatacctgtaaccagagacagctgattatagctttctgcagcaaggaagcccacg

SEQ ID NO: 397368 - DNA, 100 bp, Homo sapiens
tcccatctcagcctcctgagtagctaaggactacaggattatatgcgtcaggcaggagaagtgacttatgcagatgctcacaagggacgcaaaaatgaag

SEQ ID NO: 397369 - DNA, 100 bp, Homo sapiens
gttgtagaagacatgtggtgtatataaagtttgtgatcgttggcggacattttggtcactctgtgagactgctgggtcagaaaaaggataatggaaggcg

SEQ ID NO: 397370 - DNA, 100 bp, Homo sapiens
cccatctcttggacagatgatgccagttaattactttgaataatccttgcgtgaatatgttctacaaaggcatccagtttcagtctgaagctacaaaaag

SEQ ID NO: 397371 - DNA, 75 bp, Homo sapiens
tgtttatataactcaagttgtttggctaaattcttcaggttccattacagcttatagaaagtgttgaatgccgag

SEQ ID NO: 397372 - DNA, 98 bp, Homo sapiens
aattggcaccaggagtttactagatttgttcctaaatttaagaccaatgatgcgagctcagagtcaatagcatccttctctaaacaggaggtcatgag

SEQ ID NO: 397373 - DNA, 48 bp, Homo sapiens
tgaacccgggaggcggaggttgcggttcttccgagggcacaagcttac

SEQ ID NO: 397374 - DNA, 98 bp, Homo sapiens
gaaggaacttggttccccctccctcagcttccgccccaaaaggaaacatgccctgaactgtcacagaatgaaaccagcgctcttcagcgtcctgtgtg

SEQ ID NO: 397375 - DNA, 75 bp, Homo sapiens
actcctctaaatgtgaattgccatgcaagtgatgggcgaaaggtgccaacctggattcactggagcaagatgtac

SEQ ID NO: 397376 - DNA, 90 bp, Homo sapiens
cgggagactagcttggccacaggagacaacgttgaggtacagacagttcaggacctcaaggggctcggctatgagaaggggaagcctgtg

SEQ ID NO: 397377 - DNA, 96 bp, Homo sapiens
tgcccctcaggctggaacttgccctgtctcctcgcagatgaggtgaacctccaaaatcaggggatcgcagcggctacagcagccccggctccccag

SEQ ID NO: 397378 - DNA, 74 bp, Homo sapiens
ctcagatgctgccagggtccctgaagagggaagacacgcggaaacagtggacgtgatgctgaatccaggcagtg

SEQ ID NO: 397379 - DNA, 90 bp, Homo sapiens
gttcccagtggtgtgagtgacgggcggtggcactctgtgcaggtgcagtactacaacaaggtctccaccagctcctggccgggttcgagg

SEQ ID NO: 397380 - DNA, 75 bp, Homo sapiens
gggacacagtacggtagtcaaacccccagattcgttgggcttttgccagctctttttagattgtcctcttgagac

SEQ ID NO: 397381 - DNA, 96 bp, Homo sapiens
ctgtgcaagagctaccagaagctggtctctgaggtctggcataagaaacgaccccaccaacaactgaacgctttggtcaggctgctacaatggaag

SEQ ID NO: 397382 - DNA, 83 bp, Homo sapiens
ccacggagaaggtgaactgtctggataaggttgaaccatgattccggtgacagagctccgctactttgcggacacgcagccag

SEQ ID NO: 397383 - DNA, 75 bp, Homo sapiens
gctctttgcatcttaactgcagatctgcaactatgtgggaccagcaaaggttattgttcagttggtcacaaatgg

SEQ ID NO: 397384 - DNA, 100 bp, Homo sapiens
agcgtgcctcagcaaaatggaaagtaaaaatgcatttgcaaagggagaaaatgaaggccaaacagaagcaggctccagcttctgcaaaaacttggattca

SEQ ID NO: 397385 - DNA, 98 bp, Homo sapiens
agcgcagggagaaggaagaggtgtttgaaaagttcacagccatgaatgaaccacagtgcttctacaacgagtccattgccttcttttataaccgaagt

SEQ ID NO: 397386 - DNA, 80 bp, Homo sapiens
gcctgcaccatgagcgtcccggccttcatcgacatcagtgaagaagatcagcttttcctccgcaaccatgtctgacaaac

SEQ ID NO: 397387 - DNA, 75 bp, Homo sapiens
cacccgtaccttacccaactctactgctgcttccagaccaagtttcaccagtgatcattaaagaatgggcagctt

SEQ ID NO: 397388 - DNA, 119 bp, Homo sapiens
tgatgaggtggtctaccctacctggctccatgaagatgccacagggatcctaaaatctttatatcaacatgccccctttcctgttgctggaagccgtctgtgttttcctgttttccaga

SEQ ID NO: 397389 - DNA, 97 bp, Homo sapiens
ctgcaaacatagagaattctgggcttccacacaactccagtgctaactcaacagatgagctccttcaggagcagcgtgcagatatggaccagttcac

SEQ ID NO: 397390 - DNA, 100 bp, Homo sapiens
aatcgtggctacaaaaatcaatctcagggctacaaccagtggcagcagggtagagtttcattctgtcgcccaggctggagtgcaatggcgcgatctcggc

SEQ ID NO: 397391 - DNA, 82 bp, Homo sapiens
gataacaccctgtaacagctgactatatgttctcctttcagccaagacctttcaccagtgcaggggatagaagattcattcc

SEQ ID NO: 397392 - DNA, 100 bp, Homo sapiens
cctcgatctcctcgtctcccgctccgccctcccttttccctggtcatcatcagatttgaaatatttaaagtggatacaaaactatttcagcaatgcagac

SEQ ID NO: 397393 - DNA, 82 bp, Homo sapiens
tgcagctgggcctgaccaacccgaaaacattgctagacaatgcagatcttcgtgaagactctgactggtaagaccatcaccc

SEQ ID NO: 397394 - DNA, 100 bp, Homo sapiens
accttctgaacaaggccaacacctatgcagagatcctgcagatcattcagctggacctagacctgaagtttaagaccaacatccgggagttgtttgagga

SEQ ID NO: 397395 - DNA, 100 bp, Homo sapiens
ccagaaatacaaagagtgccattggaacagctgtgtctaagacagatacattgataactccatttgtgggtttaatagaccacaacttccaggcccagcc

SEQ ID NO: 397396 - DNA, 75 bp, Homo sapiens
caacttattcccttcaattcaagtaacaggtctatggtaccgttgcttcaggtgatatccaggggttctcctatg

SEQ ID NO: 397397 - DNA, 88 bp, Homo sapiens
gccatggacaagaactgcttatagaaggaacaagtgagagttacgtgtgtgcatccaatgaaccatttcgtaaagtcgattacaccaa

SEQ ID NO: 397398 - DNA, 97 bp, Homo sapiens
tcgaggtgccctgctctgaggactacgacagtcaccgcaggttcgaagccttgaaaagatcttttgaggtcgaggaggtcgagacacccaactccac

SEQ ID NO: 397399 - DNA, 100 bp, Homo sapiens
ctggagttggtgctgggaaacccggggctaatgttgacaacaggctcgaggacagtgccttggtaatgaccagggctccaggaagagatgtccttgtggc

SEQ ID NO: 397400 - DNA, 75 bp, Homo sapiens
caacttgcctggaccagcttaatggttctgagccatttacacgtccagtgctgagagccagctccttccagccca

SEQ ID NO: 397401 - DNA, 75 bp, Homo sapiens
acgagctccgggatgctgtactccttgtctttgcaaacaaacaggcaggcccccagcccctcatgtcagagcccc

SEQ ID NO: 397402 - DNA, 100 bp, Homo sapiens
atgatcagcacagccagggtacctgctgacaagcctgtacgcatcgcctttagcctcaatgacgcctcagcacgtctccttcctgccatcttgtgaagaa

SEQ ID NO: 397403 - DNA, 50 bp, Homo sapiens
ccgagggcaggacgaacttcaccagcatgaacaggctgaacactttgcca

SEQ ID NO: 397404 - DNA, 99 bp, Homo sapiens
gaggaggcgcgggaggtgttcgagaacgaccccgagacgggtggcccagttgaaatccttcccttcctctaccttggaagtgcctaccatgcatccaag

SEQ ID NO: 397405 - DNA, 90 bp, Homo sapiens
gttcgtgtcctctatggcgctgtcaataaagaacggcagtttgaatcggtgctgaacagcacacagcaagaaggaggccatcagcaaact

SEQ ID NO: 397406 - DNA, 122 bp, Homo sapiens
agaagacgatctgcacttcgcattttggcattgacatttaattttagggtcctttatatagaagggagagtaggcggcttcaatgatccatcctaaagaggtgccccctgaggccatcttgc

SEQ ID NO: 397407 - DNA, 120 bp, Homo sapiens
gcggcgtcagggggcggagcctgccgaagcgccctttgtctgcggaggatgaacttactgctgtgaatgtaaagcaaggcttcaataatcagccagccttcactggagatgaacatggct

SEQ ID NO: 397408 - DNA, 74 bp, Homo sapiens
aaaacaagaagcttatgcccaaaacagagcaagggcaaaagaattccataagagtgtgaacatggctacgcctc

SEQ ID NO: 397409 - DNA, 50 bp, Homo sapiens
gggccgcacaacttctcctccctcagctcacctatgaaccccgtcagcag

SEQ ID NO: 397410 - DNA, 100 bp, Homo sapiens
aaggaaaatatcccaaggactaatctgatcgggtcttccttcatgtgatgggcagaatctgtttacgaaagacgtgacagtgatcgagggagaggttgcg

SEQ ID NO: 397411 - DNA, 98 bp, Homo sapiens
agccatgatttaaatatcggcgttaagggccgcgatgggcctcttggaacattggtgtgttcatctgcattcgatgtgctggaatccacaggaatctg

SEQ ID NO: 397412 - DNA, 100 bp, Homo sapiens
catcaagctgctggctgccattctccacctggggaatgtggggttcatgggagaccagtatgatgtctgtgccatttgcctggatgaatatgaggatggg

SEQ ID NO: 397413 - DNA, 100 bp, Homo sapiens
tgagtacgacagcctcaaacaggagctggagcagctcaaagaggagcagatccggggtagagggaaaagagctccgggccaggggctgccgtcgccgccg

SEQ ID NO: 397414 - DNA, 98 bp, Homo sapiens
gcgaaaccaagggccgaaggccagagattggacatatctttctcttggacagagggctgctggtggcctactgccacaggtttgacatccaggtacag

SEQ ID NO: 397415 - DNA, 104 bp, Homo sapiens
acacgcacatgcagttccccttcatgggctcgcggtccatcgacgacttccaccagggcaccaagaattagacccagtgaccaagcaacttatgctccaaacag

SEQ ID NO: 397416 - DNA, 75 bp, Homo sapiens
cttcgaggtggagtcggagctgggacgcttccagctgatcttaccaagatgcatctcacagaaaaccctcatcca

SEQ ID NO: 397417 - DNA, 50 bp, Homo sapiens
gttccactccctgccagatgtgctggagcaatccctctgtgagagcgagc

SEQ ID NO: 397418 - DNA, 88 bp, Homo sapiens
ggccgaggcggtgctgcaagagaaggcactcaagtttatggtatgcagtgccattcagaatcaggatttcactgtgatcgaagactac

SEQ ID NO: 397419 - DNA, 100 bp, Homo sapiens
tgagaagactttgggacatttcatgagtcattcaagcaacatttctaaggctgctggcaaaggggacgtcccaacgaagagaccacctgtccttcgagca

SEQ ID NO: 397420 - DNA, 90 bp, Homo sapiens
ggagtttgacagctattaaaaccagggctccacagttaggagaacctcaagaaggcatgaagccagcccctgcagtgccgtccacccgcc

SEQ ID NO: 397421 - DNA, 100 bp, Homo sapiens
gtttgctttattgatattgcctgcgatgaaattccagagcgctactacaaagaatctgaggaccccaggagcaagcacaagttcaaaatccacacttacg

SEQ ID NO: 397422 - DNA, 83 bp, Homo sapiens
gccgagcgggcggcttcctggcctgggcgctccggtggcggcggagctgcatcttcctcccgtgaggctggccgagctccacg

SEQ ID NO: 397423 - DNA, 75 bp, Homo sapiens
ccgggacctgctgctggacccggcctgggagaagcagcagcgcaagtccaagtggtaagaagttcagaagcaagc

SEQ ID NO: 397424 - DNA, 100 bp, Homo sapiens
ccgaagggaagaagctgccacgcaccttctgccagctgatcctggaccccatcttcaaggtgttacagcacatgaaggccgtgcaggcagatcaggagcg

SEQ ID NO: 397425 - DNA, 76 bp, Homo sapiens
gaatggagtgctgtatgcctctgtgaacccggagtacttcagcgctgctgatggacagagcgggatgccaccagct

SEQ ID NO: 397426 - DNA, 100 bp, Homo sapiens
gtttgagaaaaggcctaagaattttggcattggtggcacaagaatggctcaactctccaaatagagagaatttctatcagttgcaagtacgaaaatttcc

SEQ ID NO: 397427 - DNA, 98 bp, Homo sapiens
agatcaacgaacctggacattgaggagctcaagacacgaatgcagagtttgagtccagatcccaaagcccagtacacaagtatctacggagccctcaa

SEQ ID NO: 397428 - DNA, 97 bp, Homo sapiens
gcaagcagttcagaagagccaaggaataaacatgcaatgaacccaaaaggtggagtgctggttccaggaggatttggtgttcgaggaacagaaggaa

SEQ ID NO: 397429 - DNA, 99 bp, Homo sapiens
ccaccatgttcacgtgacatcaagaggaagcggaaaccagtggccacagcatctttgtctagccccagtgcaggcagaagctcctcctggggtagagac

SEQ ID NO: 397430 - DNA, 83 bp, Homo sapiens
gtggagctcttcagaaccgcctacttctgcagaggtcatcgtgatgtcaggtcatgagaccatccgagtgctggaagtcggag

SEQ ID NO: 397431 - DNA, 90 bp, Homo sapiens
accagctcgtcctggagcacctgcagctggcgcctctgcagtgggatggactctgtgactacatgactaataaaatatggcagaaatgac

SEQ ID NO: 397432 - DNA, 82 bp, Homo sapiens
accgcacgcctcttctaccgggcgccccacgggccgaagccggacggcggctccctggaccaggtgctgaaagaggccaaga

SEQ ID NO: 397433 - DNA, 87 bp, Homo sapiens
cttcctggcctgggcgctccggtggcggcggaggtaactaggatttctacctcaaccgcgagacctatgcaaggacggtgtggacca

SEQ ID NO: 397434 - DNA, 100 bp, Homo sapiens
gtgcgaccccaaggacgggcacctactcatggatggcggctacatcaacaatctgccaggccgcctgatcttcgacaacctaaagaagtccattgcctac

SEQ ID NO: 397435 - DNA, 49 bp, Homo sapiens
ctgacattaaggaccagccagaaaatggaggcaagtgaggcctatctgg

SEQ ID NO: 397436 - DNA, 75 bp, Homo sapiens
cgcggacgcccgctgagcttggcgcacgggccgaccaggccctcagtctccgaggaggatctcaaggtcctgttt

SEQ ID NO: 397437 - DNA, 50 bp, Homo sapiens
attctaactccaatggcccaaaagtagacgttacatccaagaggaaataa

SEQ ID NO: 397438 - DNA, 75 bp, Homo sapiens
gcgacagcggccggggcgcaggcgcccgtgcggaatggcagatccatccttttacaatccctgctattattcgtc

SEQ ID NO: 397439 - DNA, 75 bp, Homo sapiens
ctttcttcaaaatagcagccaccttaaagggaccatggctaaacctcctggatcattagccagaagcagcagcct

SEQ ID NO: 397440 - DNA, 100 bp, Homo sapiens
aaattgtgaactaaggccccctgcccccttttcctggtgcatgtgaagttatcaaaaacaggtgatgatgaacagtctacacagatggctgcaagttggg

SEQ ID NO: 397441 - DNA, 75 bp, Homo sapiens
ggtgaatcccctgtttgagaaaaggcctaagaattttggcattggtaaagtgttgagagaggagaaccagtgcat

SEQ ID NO: 397442 - DNA, 75 bp, Homo sapiens
aaccgggctcagtcctgtccaacagcttattgtgtaacagaacctggagcaggctctgatgtagctggtataaag

SEQ ID NO: 397443 - DNA, 75 bp, Homo sapiens
aaccgtttccgcctcctgctagagcggcgaaccgtgggcagtgaggtgctggagaatctggtaaaagcaccattg

SEQ ID NO: 397444 - DNA, 100 bp, Homo sapiens
cttccttcagggtttaggagaagcactgttgttttccacacagatggggcgcctacccttcttcagcaagatgggaacagctgagtctgaaggaagagaa

SEQ ID NO: 397445 - DNA, 106 bp, Homo sapiens
agaccgcgcgcagggcctgcagcgggagctggacggcgagcgcgagcggcgcgagaaaatgcctgaggaaacccagacccaagaccaaccgatggaggaggaggag

SEQ ID NO: 397446 - DNA, 75 bp, Homo sapiens
cctgctaacagaactggaccttttcggcaaggggagagccagttgcgcagagccctgcaaccagcagtccaggga

SEQ ID NO: 397447 - DNA, 75 bp, Homo sapiens
ctcggtcccgcgctgcgcatccccgcggacgccacagcgctcggcgtcttcgacatcttcggaacattgctgccc

SEQ ID NO: 397448 - DNA, 82 bp, Homo sapiens
ggaaaatgcccaggaggaagcaggagcagcccaagcgccttccctcacgtcgcaatggaagaagagatcgccgcgctggtca

SEQ ID NO: 397449 - DNA, 100 bp, Homo sapiens
cagggcgtgtctcgagcccagtgtcggagcaacggccagtggagtagccctctgcccacgtgtcgagggtctccaactgaattccttgaagagaaaatgg

SEQ ID NO: 397450 - DNA, 100 bp, Homo sapiens
gcgggagatgctggagaagctgagttatcaatactctggctgaccatcatcatcgtgggactgactttggtggaagtccttggttacatgtcattattgc

SEQ ID NO: 397451 - DNA, 119 bp, Homo sapiens
gtggctgctgctggggacagtgaccgtggggttcctcgcccagagcgtcttggcggcctcatgcattgtgcgtcagcagcaatgtttatggtgaaaaatggcaacgggaccgcgtgcat

SEQ ID NO: 397452 - DNA, 100 bp, Homo sapiens
cgctagaactcagttgtgcgttgcggccagtcgccactgctataagctgtcattggaaggaatagtggtacaaagagctgaatgccgaccagctgccagt

SEQ ID NO: 397453 - DNA, 75 bp, Homo sapiens
catttagaacgatgtgaacatcgaatcatggaatcccttgcatggctctcagaggctgaaccgtctgagcccaga

SEQ ID NO: 397454 - DNA, 126 bp, Homo sapiens
tccatagccattatcccacctccacaaagtaccaaaccaggaagaggcagaaggactgctaaggtttgagtttttggaagatggaaaaggaaatatgaattgtgcttattttcataatgggaaaat

SEQ ID NO: 397455 - DNA, 75 bp, Homo sapiens
cctcgacctcagttgccacgtgcacatgctggtgccttccagatcgcctcaggcatggcgtacgtggagcggatg

SEQ ID NO: 397456 - DNA, 75 bp, Homo sapiens
agagcccaaaacctattacgaactcaaaagtcaaccgctgaagagcaggagtcagccagcctgaaagagcaggat

SEQ ID NO: 397457 - DNA, 85 bp, Homo sapiens
ctgcagaaaaatgttagagctcagttggttgatatgaaacgactggaggcgctcctatgatgtcccaccacctccgatggagccc

SEQ ID NO: 397458 - DNA, 100 bp, Homo sapiens
gttgattctgccattgacactatatctccattgaatcagaagagctcttcagtatccccatcagccagtttccgaggtgctgagaagcacagaaactccg

SEQ ID NO: 397459 - DNA, 82 bp, Homo sapiens
aaagaagcattacttcgagacactattaatgggcttaataagcagtgctggacccaaaggagacaacatttatgaatggagg

SEQ ID NO: 397460 - DNA, 75 bp, Homo sapiens
tttcccacaaaagctaattgagtacacgttcctgttgagtacacgttcctgttattgaccgactcatcagtcacg

SEQ ID NO: 397461 - DNA, 75 bp, Homo sapiens
ccgggagcgagctgggagggagccgcgcgcctttgtgcgcgcgccgagtttggcaatgaggagcagcagctggcg

SEQ ID NO: 397462 - DNA, 75 bp, Homo sapiens
ggcgatggagctgttatttttagatacttttaaacacccgagcgctgagactttgagaatcactacaagaaaaac

SEQ ID NO: 397463 - DNA, 87 bp, Homo sapiens
ccgcccgacttcggaaggaccgggaggcaaagtgagatggaagattttcgaggtatagcagaagaatcatttccaagctttctcacc

SEQ ID NO: 397464 - DNA, 100 bp, Homo sapiens
aggatattctttactaacatggttacctgcagccaggtgcatttcaagtgaagtgtgctgatgaagtcctctataaggagaatcgcttgaacctgggagg

SEQ ID NO: 397465 - DNA, 50 bp, Homo sapiens
gcatgcctcaccaagtcacatgacaagcacccgtgttcccaagaaaatcc

SEQ ID NO: 397466 - DNA, 100 bp, Homo sapiens
gctgctgacgctgctgctgcccggcctcggggatttggccctggaagaggctgttctggaggagctgacccagaaggtagcccaagaacacaaagcccac

SEQ ID NO: 397467 - DNA, 100 bp, Homo sapiens
ccggctttgcttttgttgaatttgaagatccccgagatgcagctgatgcagtccgagagctagatggaaggtatgaaaatgaaagtcttcagaatggaag

SEQ ID NO: 397468 - DNA, 74 bp, Homo sapiens
aagttttcacttatctcgaaagcctatcagcatagttaaggcttgtccagccggaagccctgagggcagctgtt

SEQ ID NO: 397469 - DNA, 100 bp, Homo sapiens
agatgatgtgcggggcgccctccgccacgcagccggccaccgccgagacccagcacatcgccgaccagacttttcccaggtccctcgtatcaaaacatta

SEQ ID NO: 397470 - DNA, 100 bp, Homo sapiens
cttcacctttgtctcctcagcagacgcggaagcctgcctcatctggagatgatagagccatgtgttttacttgtagtgtatgcctcgtttgttgggaacc

SEQ ID NO: 397471 - DNA, 100 bp, Homo sapiens
aatggtcctatatctcaaaccacttctcagacaagttccatcccacctttgagtcaggaaggaaaatcacctcggcagtgtttgaaggaaggatactgca

SEQ ID NO: 397472 - DNA, 100 bp, Homo sapiens
aaggatctctttggcaagtttggtatgtgaaagcaagaacagagctaacatgggattatggctatgaagctgggactgtgcctgagaaggaaatcttctg

SEQ ID NO: 397473 - DNA, 75 bp, Homo sapiens
tatcaccatacccaaaaacatgcattggtatagcccaccagaaaggacagcaatctgcagagcgctgtgtaagca

SEQ ID NO: 397474 - DNA, 98 bp, Homo sapiens
gcaacaggaggaactcgaggccgagcatgggactggggacaagcccgcggcgccgcgggaacgcaccacgcggctggcctcgctcaaggagcaccccc

SEQ ID NO: 397475 - DNA, 75 bp, Homo sapiens
cggggcccaaccacaagacgactcaataggaggaagcaatatgttaaggatacctgtaagaaaggccttagtagg

SEQ ID NO: 397476 - DNA, 51 bp, Homo sapiens
ggaggaggtgaccacgcgcgagcttcggaaccaaaaagaagcttcccagag

SEQ ID NO: 397477 - DNA, 80 bp, Homo sapiens
cggcgagcgcgagcggcgcgagaaagagagagcaagccacatcagtgctcctggcagatccctgcttccagctacgctca

SEQ ID NO: 397478 - DNA, 101 bp, Homo sapiens
tgtgattccagatcactccaagaagaacatcggcaatgggattatttcctccccactgactggaaaggtgggagctgaatgccatgaccaccaacagcaat

SEQ ID NO: 397479 - DNA, 100 bp, Homo sapiens
attggtgacatggaaaaggagccaggaattcccagtttgacaccacaggctgagctccctgaaccaggtggtccacaattagtgaaaatctgtttgcaac

SEQ ID NO: 397480 - DNA, 75 bp, Homo sapiens
tgatctcaccaccctggtggcctttccctccagctctgtctatcctaccaagatgcttgtggttggtggcatcga

SEQ ID NO: 397481 - DNA, 100 bp, Homo sapiens
gaaggagaatctgatgatcctgaaaaaaagaaactacagaatcaacttcaagacactttttcaaaaatggcaatggtatcagaattcctcaagcaggcct

SEQ ID NO: 397482 - DNA, 100 bp, Homo sapiens
cagtcctcggttctccatacccgtgacctggggatcgctacggaccttaaaatacccgcaacagccccttcgtcccaactcagagtcaagatctccactg

SEQ ID NO: 397483 - DNA, 50 bp, Homo sapiens
cggctccctaggcgtcccatctcgcggaagtgaccgtggtggcttcaata

SEQ ID NO: 397484 - DNA, 50 bp, Homo sapiens
gagcgctggacggagaggaaagcgattgtagaaggcatgaaacaaaaaat

SEQ ID NO: 397485 - DNA, 100 bp, Homo sapiens
cagagaatggagagctgtgtctgaggagccttggaacattcacccagaacatacatatgatagttgagaaagacacatattctgatcatgaagaaataaa

SEQ ID NO: 397486 - DNA, 100 bp, Homo sapiens
tcttgaaaagaaatgagatcgtgtttcatttcaggaagatatatgcgtcagaaatgagccgtcagactgctacagcattacctaccggtacctcgaagtg

SEQ ID NO: 397487 - DNA, 96 bp, Homo sapiens
gctcatcaacaatgagctttcccatttcttagagggtaagatgatcatgcaggataaactggagaaggagcggaatgatgctaagaacgcagtgga

SEQ ID NO: 397488 - DNA, 98 bp, Homo sapiens
gaacgatgtgaacatcgaatcatggaatcccttgcatggctctcagacatggatttgattgacatactttggaggcaagatatagatcttggagtaag

SEQ ID NO: 397489 - DNA, 76 bp, Homo sapiens
gagcggagggagccccagacacgcgtcactggtgtaccgcctgccccagtcgtgggtggggcccaaactgccctgg

SEQ ID NO: 397490 - DNA, 51 bp, Homo sapiens
gccagcgcctcttctaccggggcaagcagaaatgacatcagatgtaccatc

SEQ ID NO: 397491 - DNA, 96 bp, Homo sapiens
catcttctgatgcttaacaagaaataaaaatagtcaccttaatcatcaaaaagggactttgaacatgtcggggatcgccctcagcagactcgccca

SEQ ID NO: 397492 - DNA, 87 bp, Homo sapiens
aatactactacatcccgcagtacaagaactggagaggaggtcccaggtgattgaaaagtttgaggccttggacattgagaaggcaga

SEQ ID NO: 397493 - DNA, 100 bp, Homo sapiens
gagagcgccctgagagaacagggtggccgcttggtccagatgtcaagccctccaacatcctagtcaactcccgtggggagatcaagctctgtgactttgg

SEQ ID NO: 397494 - DNA, 100 bp, Homo sapiens
agcctcgccgcccgtccccggcacacgcgcagccccggcctctcggcctctgccggagaaacagggtggctgtgctggctctggctgtggcaaatgtgac

SEQ ID NO: 397495 - DNA, 100 bp, Homo sapiens
ctgatccggaaatatggcctcaatatgtgccgccagtgtttccgtcagtacgcgaaggatatcggtttcattaagattttgaaaagccatggtaaagatg

SEQ ID NO: 397496 - DNA, 82 bp, Homo sapiens
aaggacttcatgcccgccagcaaagaggtggggctggtgtccgagcacttctcgcaggccccgcagaggctgtccttctaca

SEQ ID NO: 397497 - DNA, 83 bp, Homo sapiens
tcatattatacagtgcgacagctagaattggaaaaccttacaactgtttattccatggctccgttccctttcccacaattggc

SEQ ID NO: 397498 - DNA, 100 bp, Homo sapiens
agtatgaccgggtttctttgatgcgacctcaggaaggagatgagataacgaaggaggcccaacttcattcaataaggagcctgacggatttatcccagac

SEQ ID NO: 397499 - DNA, 75 bp, Homo sapiens
ttcagatgatgctccatggagtcctaaaggaggtagattgggaagtggagctggccgtggtcattggaaagaaag

SEQ ID NO: 397500 - DNA, 90 bp, Homo sapiens
gctctactaaccattccaatgagaaatcaagtgaatttaggaggacttttactccaagcactcctggaatattggcctagaacacatgtg

SEQ ID NO: 397501 - DNA, 50 bp, Homo sapiens
aaaatgtgaagcaatttgggacgttcacagaagaaaagcttggccaggct

SEQ ID NO: 397502 - DNA, 50 bp, Homo sapiens
ctggaagccctgcagatgtgcacagggccaagccacagacattgccatcc

SEQ ID NO: 397503 - DNA, 48 bp, Homo sapiens
agcctcccaagtagctggtactacagagtcttactctgtcacccaggc

SEQ ID NO: 397504 - DNA, 48 bp, Homo sapiens
tgtgagatgtttcatcccaacaacaatacaatggtgggtgaagagaag

SEQ ID NO: 397505 - DNA, 96 bp, Homo sapiens
agacctccatgatgagccatctccacttaatgactgtctcacattggccggcaacttgttccaggaatagcgggttttgcagcaattgttgcatat

SEQ ID NO: 397506 - DNA, 83 bp, Homo sapiens
ggggaaagcgtcttggatgatgtaatagcctgcagctggtgttttgagaagccctactgctgaaaacttaacaattttgtgta

SEQ ID NO: 397507 - DNA, 90 bp, Homo sapiens
gggagccgcaccacctaacgctggccgacaacagcctggcgtccgccacggactccagaagacctttccagattcgtggttgagctgcag

SEQ ID NO: 397508 - DNA, 51 bp, Homo sapiens
ctcacacagacttttgatggacaggaggagtggaagctggacacactatgt

SEQ ID NO: 397509 - DNA, 75 bp, Homo sapiens
actaggatatgctggaaatacagaaccacagtttatcatcccttccttttgcagaaaaaacttcagcatgtgcca

SEQ ID NO: 397510 - DNA, 90 bp, Homo sapiens
ggtgtgtgagggccgagtgaaatcgtgcatttgcggtgtggtgtcagcacagcggcaggtcaccgttcaggaaggacccttgtaccgcac

SEQ ID NO: 397511 - DNA, 80 bp, Homo sapiens
ccccacttggtgaatggagatgcagctcagcagatcctgaggaggatgaaggggctggccctggaggccgagagtgagct

SEQ ID NO: 397512 - DNA, 100 bp, Homo sapiens
acaaagcaagatagaactcctcttaccaaagatgtttcacttctagatctggatgattgtcccgcccagctgcagaccctccaggctggaggaccagccg

SEQ ID NO: 397513 - DNA, 95 bp, Homo sapiens
gacgcaggccttaaggagaaagtttcagaaaaatccagttacactcttaaaggaattgtcagtgataaagtctcgatatcaaactttgtatgccc

SEQ ID NO: 397514 - DNA, 100 bp, Homo sapiens
aaacagagcaagggcaaaagaattccataaggtctatgttaacaatgaatgggcaaccagtgttggggaaggagggagctttggagaacttgctttgatt

SEQ ID NO: 397515 - DNA, 75 bp, Homo sapiens
gcagagctgggggggcggtggccggcaccgcatctcggaagggtgctgacctggaccgggagaagaaggctgccg

SEQ ID NO: 397516 - DNA, 75 bp, Homo sapiens
ccagcatttagagctgtttatgaagcactgagaaatgagatcatgaatcagacagataaaaatcaacaagaaatc

SEQ ID NO: 397517 - DNA, 50 bp, Homo sapiens
cccgcgcgtactcggccgcctgagcggttcctacctgatcccgctcccag

SEQ ID NO: 397518 - DNA, 90 bp, Homo sapiens
ggatggcggaggcgcctcctgtctcaggtatccacaaattacccattatcaaaaacaaatagttcatcaaatgatttggaagttgaagat

SEQ ID NO: 397519 - DNA, 80 bp, Homo sapiens
agaccagacctgcaagctctttgacacacagcagttcttgtcaggccaagtttcttcctaacagtggtgattctactctg

SEQ ID NO: 397520 - DNA, 60 bp, Homo sapiens
ggaaattgggaatgaattggatgaacaaaatgtcaggatttgcatgaagatgtcgaagaa

SEQ ID NO: 397521 - DNA, 90 bp, Homo sapiens
aaagcaccagagtgttgccttcacaaaattgaataatgcttccagtagaaggttgggataattcttcactattccacccttgccacagta

SEQ ID NO: 397522 - DNA, 82 bp, Homo sapiens
gacggacaagcacagtcttcggaagagccaatggccaaaggccctgccaagaattcagaaccagaggaggtcatcccatccc

SEQ ID NO: 397523 - DNA, 100 bp, Homo sapiens
tcaatcgcatcttccacgagcggttcccatttgagctggtgaagagcaagctataccagagaatcagatagcaagccctccctcagaggccaagggagca

SEQ ID NO: 397524 - DNA, 96 bp, Homo sapiens
agaagcatcgaaagcgttggagaggtgttaccggaacggcggcgacaagggtgttcccgaactagagtgggcatagacgtgccagagatcaatgag

SEQ ID NO: 397525 - DNA, 98 bp, Homo sapiens
aaaagaaagaagccaaagagaaaggtacctgggttcaactaaagcgccaggctatggaaagggcaaatggaatggagctggatggtagaagaattcgg

SEQ ID NO: 397526 - DNA, 50 bp, Homo sapiens
accgagaccgcggccgggaccgaggatcggcttcagctccccaggaatat

SEQ ID NO: 397527 - DNA, 75 bp, Homo sapiens
ggcctcagcaggcggggaagatgaaaggctgaataccaagagatatctcctgatatctgcacctctgtggataaa

SEQ ID NO: 397528 - DNA, 82 bp, Homo sapiens
ccgggtgccgaggagcgggaagagttgctggggagggagccatggatttgctgcgggagctgaaggccatgcctatcacgct

SEQ ID NO: 397529 - DNA, 76 bp, Homo sapiens
caaagataagaagatagctgagttggaaaggaatagacccatctctgcaagcagagaatagaattcctgggccctc

SEQ ID NO: 397530 - DNA, 75 bp, Homo sapiens
gactccttcggcagtccacccaccgccgccgcctcccaggaggagacatcacagctttcccagatcgggaggaaa

SEQ ID NO: 397531 - DNA, 83 bp, Homo sapiens
gggaaaacacggccttcctgtgtgagcccagtactgccaaatctgtcgaaagggagataatgaagaactgcttcttctttgtg

SEQ ID NO: 397532 - DNA, 82 bp, Homo sapiens
ggtagccagaagaagcagaataactaaaaatgtgcctaaacaaagctctcagcttgatgagaatgtggagaattgaaggaag

SEQ ID NO: 397533 - DNA, 90 bp, Homo sapiens
agcttggatccttgtgggcatgatccataatcggtttcaagacaagttcaccgattcagccattgccatgaactcgaaagtgaatgggga

SEQ ID NO: 397534 - DNA, 80 bp, Homo sapiens
cggagctgcagtcggcactgctactgcgaagacagctggcaggctctgacgcccgctctgcggcttcggtgtttgaacag

SEQ ID NO: 397535 - DNA, 100 bp, Homo sapiens
atgagttctaccagacgacttatgggggtttcacagagtccgggaccatgtctggagaactaccaccaaacattaacatcaaggaacctcgatgggatca

SEQ ID NO: 397536 - DNA, 100 bp, Homo sapiens
atcttcctctggctctacagcgaaactgccagaggcatgcagcattggtgatggaaagccctttgtcatgaatctgcaggatctgtatatggcagtcacc

SEQ ID NO: 397537 - DNA, 82 bp, Homo sapiens
cctgcaggaactctacaacccaatccagcaattctgtggtgttcttggtcacacatttatggagtttctgaagggcagtgga

SEQ ID NO: 397538 - DNA, 101 bp, Homo sapiens
ttttaggagtctcctcccagtcgttgaaggtttggggagcagctgatacagcaaggagggctcttgcaaggattcaagagtttcttaatgtcacgagcgtt

SEQ ID NO: 397539 - DNA, 97 bp, Homo sapiens
cagagaggagcagctggaagccgtggctgcgctctcttccctctgctgggcgtcctgttcttccaggctacaagcctatcgtggaattcatcgatgc

SEQ ID NO: 397540 - DNA, 74 bp, Homo sapiens
cgactccatccggctgcccctggagcacctggtggaagaacaagtggcagtatccggagttactcgtggcttcc

SEQ ID NO: 397541 - DNA, 75 bp, Homo sapiens
aggagctccttttcgagcttttccaccagccatgaaccagagaatcagtcagagtgctccagtgaaacagccacc

SEQ ID NO: 397542 - DNA, 75 bp, Homo sapiens
gggggctccctggacaactccgagcaggttctgcggggagtgtctccagccctgcctgcaggtgccatccccgct

SEQ ID NO: 397543 - DNA, 50 bp, Homo sapiens
tctgaagcgagcgtcttcgatggttcccaacattgttaaagctcttcaca

SEQ ID NO: 397544 - DNA, 82 bp, Homo sapiens
ctgtgggacctgcagcagctgagaaaggagctcggggactcccccaaagacaagaggctttctcagaaatggcaagttatca

SEQ ID NO: 397545 - DNA, 50 bp, Homo sapiens
aaggagtcagggatggctcttcctcagcttctagtgaacaataaaatcat

SEQ ID NO: 397546 - DNA, 50 bp, Homo sapiens
ctttccggggtgcacagcaagtggatgatcttgaagaccttatagttaat

SEQ ID NO: 397547 - DNA, 75 bp, Homo sapiens
ctacaccatctgtggtcatgtcaacagtagcacaagggggaaaggagattctccagaggctcgagccttggccaa

SEQ ID NO: 397548 - DNA, 100 bp, Homo sapiens
gtgctattcctggtctacatcctgcgggtgcctttgaaaatcaacgacaacttgagcacagagctcagagttctacagagtcaccactgaacaatatcag

SEQ ID NO: 397549 - DNA, 96 bp, Homo sapiens
ccggccccaggcagcgtgtgtcggtcgcctagtctggagaactagtcctcgactcacggacttgtttacactgggcatgtaaacgaaaccatggtc

SEQ ID NO: 397550 - DNA, 75 bp, Homo sapiens
gtggagagcgcgcccatgttctccgctaaggtggctgtgacagtgcaagattctgctctctttgctgaactcggt

SEQ ID NO: 397551 - DNA, 83 bp, Homo sapiens
gaagtctactcaacgtttccaagatcaacaagttggagaaagctgttgctgcagcacacaccttcttcgtgggcaatcctgag

SEQ ID NO: 397552 - DNA, 90 bp, Homo sapiens
gggagccacgcagaggacgccggaacaccctggaagccgagaaatggttgggcccgaaggcatcctgcagaacggggctgtggacgacag

SEQ ID NO: 397553 - DNA, 100 bp, Homo sapiens
ggctcaaagaaagatgattatgtgatcatggagctcagcttggtctccatggggctggtggtgatggaatacatgatgacacagcaggtggagaggaagg

SEQ ID NO: 397554 - DNA, 101 bp, Homo sapiens
aggaggacttgcagaagtaccacaacagggacacctggttccagctgcagcacgtggacgctgactcggaagtgcaggctgaagatggaaacattgaatat

SEQ ID NO: 397555 - DNA, 82 bp, Homo sapiens
gcaccagctggagattgacaagttcgagtttggggagaagctgaaacgccagaaatatgactggcatttctgttaacatcca

SEQ ID NO: 397556 - DNA, 75 bp, Homo sapiens
aagagttgtggatcctgaacagcatggggtcctgtcccagcaattcgtggagctcatcaacaagtgcaattcaat

SEQ ID NO: 397557 - DNA, 100 bp, Homo sapiens
acctgaaagccatctcaagactcctcagatgccaccaacaaccccatccagcagttccttcaccaagatgctaggtgttcaaggagcatgcaaagataat

SEQ ID NO: 397558 - DNA, 100 bp, Homo sapiens
tgttacaacagatgatgctttgcaagaacttgtggaactcatctatcaacagattctgtttctggcgtctgcatacgcaagtccccaactcgctgaggag

SEQ ID NO: 397559 - DNA, 100 bp, Homo sapiens
agagcgcgaatatcgtcatcgttagaagagtattgggaaagggtcgttgtggtgcatagacccagagtatagacaaaatctaattcaggctttgaaaaag

SEQ ID NO: 397560 - DNA, 50 bp, Homo sapiens
gctgatccctgaagaccaaatagttgctgtggttggctgataaatatttg

SEQ ID NO: 397561 - DNA, 75 bp, Homo sapiens
gcagccgcggcgcgcccaccccccgcgccgtttggaaattttagcattcaggtgccaggaatgcagatgggacag

SEQ ID NO: 397562 - DNA, 100 bp, Homo sapiens
tccggagggggaaaaaatcccaaggtctgcaaagggtttggaaatcccttgtctccaggttgctgggattgacttcttgctcaattgaaacactcattca

SEQ ID NO: 397563 - DNA, 90 bp, Homo sapiens
ccatgagcaaagctcaccctcccgagttgaaaaaatacgaggaggaaagctcatgatcacttacacccgtaaaagtgacgctggcaaata

SEQ ID NO: 397564 - DNA, 135 bp, Homo sapiens
gtggcgagctgaggtggaggcaggctgcggcagacggcgacagtggcggcggcgccatggcagggcttgcagggaaaagaagatctcccggagcagtgccctgaaagtgctggaccatgccatgattggccccga

SEQ ID NO: 397565 - DNA, 75 bp, Homo sapiens
agagagccagcaatgcctccatgaacaatctcacccaattactctgctcagatatttacagaaagccttctgtgc

SEQ ID NO: 397566 - DNA, 100 bp, Homo sapiens
ctgcaaaagaagagaagcagaattatacctagaagtctactaatggacagttagtcacccacctacatgttgaggtatcgaatgataacagaaggcggag

SEQ ID NO: 397567 - DNA, 74 bp, Homo sapiens
cctgttactgctgctacttcctcgtttgacaccttcctggtatcctagaaggaaaacatcaccatggctacaga

SEQ ID NO: 397568 - DNA, 82 bp, Homo sapiens
gcccgccgccgccgccgcccctgcctgcgcctcccgcctcctgccgcagcccgtttggtgccctggttgtcagatgttggaa

SEQ ID NO: 397569 - DNA, 75 bp, Homo sapiens
gaaatgagactccatcggacccagtcataattgacaggcatctccttggaaacaatgccatctttgaatgtgaga

SEQ ID NO: 397570 - DNA, 100 bp, Homo sapiens
atcaggagcaggcgactatttttgaagaggttcaggttctgagatgcagtaaaatcgctggtgtgaaagtagcagaaattacagagctaatattgaaagc

SEQ ID NO: 397571 - DNA, 74 bp, Homo sapiens
cttcagaatcagatgaatggaggacctttttatagccagaatccaggtatcacctcttctgggctcaagatgga

SEQ ID NO: 397572 - DNA, 100 bp, Homo sapiens
ttttggagattttagccctgatgaattcaatcaattctttgtgactcctcgatcttcagttgagtggttagcaggaagaagatgagccttaagtctgaac

SEQ ID NO: 397573 - DNA, 75 bp, Homo sapiens
gcctgcgcgcctaccaggctcgaccccaggttgggggccgtcccgctcctaaggcaggaagatggtggccgcaaa

SEQ ID NO: 397574 - DNA, 90 bp, Homo sapiens
ggagcccgcgtcggctgagagcccacaggcccccacagaaatggctcagggaactgttggaggcgtgttcatcacgacggcaggttccac

SEQ ID NO: 397575 - DNA, 98 bp, Homo sapiens
tcgctcccgccgggcgagcatggggcgcctggcctcgaggccgctgctgctggcgctcctgtcgttggactgtgccctgtccacggtgcctcctgcat

SEQ ID NO: 397576 - DNA, 98 bp, Homo sapiens
tggaggcagcccctaagggcccttcgcgggagagcgtcgtgcacgcgggccagaggcgtttgaaggatgacctctaggaagaaagtgttgctgaaggt

SEQ ID NO: 397577 - DNA, 74 bp, Homo sapiens
atgacatccgagcgaaagagaaagaggaacaggagtacagctgtgtagtaaagatgccttctggtgaatttgca

SEQ ID NO: 397578 - DNA, 144 bp, Homo sapiens
gcccagccgggccctcaagcccagtcgggactcgagcctagggaggcgaggttcccgcaccggatagcttcatcgctgtggagaacattgacagctactgcgtgctcatctcctccaaagctgtttacttcctgaaaagtggag

SEQ ID NO: 397579 - DNA, 90 bp, Homo sapiens
gagggggccggagaagagagctctggggtcgacacggatggttcgtggagacccaagggccattgtggaatatcgggacctggatgcccc

SEQ ID NO: 397580 - DNA, 75 bp, Homo sapiens
attccaagtaactcttatttgggacttccttccccgcggttcaggaatcgtcacccggcggcctctcattctgca

SEQ ID NO: 397581 - DNA, 93 bp, Homo sapiens
agccagagcctggacgacctcacctgcaaggcggaggctggcccgatttctcacattggcaaactgagagattttcttctggaacacaggaaa

SEQ ID NO: 397582 - DNA, 75 bp, Homo sapiens
ggtggctttcgtggttgcacagtttggctaacagattatggtgacaagctgaacatggagctgagtgagaaatac

SEQ ID NO: 397583 - DNA, 80 bp, Homo sapiens
ggtgcagctgagggatggagacagcaactgtgatgtttccattcctgaaaaacccaagcttagatttattgaaagggcac

SEQ ID NO: 397584 - DNA, 100 bp, Homo sapiens
cgcgccagggcccgcgccggaaaccgaggagtggcggggaggctgagcccggggatggcgcgccaggctgaagccgacgtagcttctctgaacagacgca

SEQ ID NO: 397585 - DNA, 98 bp, Homo sapiens
atggaacccacctttccccaggggttgctttttgtgaccaacattgatagctcagaccccgaccagctggtgtataaaactttggaccctgctgaccg

SEQ ID NO: 397586 - DNA, 101 bp, Homo sapiens
agatgcccagatagtgcggttgctcatccatcaagggccttcacacaccagagtcaatgaacaggctgacaaacgggctcatcataatgcactggaacgaa

SEQ ID NO: 397587 - DNA, 83 bp, Homo sapiens
ccgagggcggcctgagcccggcgcaggtgaccggcgcgcgggagcgctacggccccaacgatgacttgtggggggaccacagt

SEQ ID NO: 397588 - DNA, 73 bp, Homo sapiens
gttggtagaaggtgttattgggaaaattcaacttcattcagaattaaacaaccaccatgtcgagcaaaaaggc

SEQ ID NO: 397589 - DNA, 83 bp, Homo sapiens
acctgaagttgaatatgagagtacgtagagaatacaggaaattcttcagagccaatgctggaaagaaaatctatgagtttacg

SEQ ID NO: 397590 - DNA, 100 bp, Homo sapiens
cgagagagaccggagaggtggagaggtgtggtcactcacctgtctaccactcccgtgaaatggcagctcgtgccttggtcccatttgttatgatagatca

SEQ ID NO: 397591 - DNA, 80 bp, Homo sapiens
cggtggagtctccgcactgtcggcggggttgacatcatggacatatgtgagtccatcctggagaggaagcggcatgacag

SEQ ID NO: 397592 - DNA, 75 bp, Homo sapiens
tggtcagcgtttccctggagaggaagaggcaaggggtatgatatcagctttctgatcaccaacttccacacagag

SEQ ID NO: 397593 - DNA, 100 bp, Homo sapiens
aagatgtggacttgccctgcaccgccccctgggatccgcaggttccctacacggtctcctgggtcaaggaggagagacttcagcatgcaaaccttcatct

SEQ ID NO: 397594 - DNA, 100 bp, Homo sapiens
gcattttttccagaacacaaaaggttttgcactgattgcaaaaataaagtcctccgagcatacaatatccttattggtgaacttgactgcagcaaagaaa

SEQ ID NO: 397595 - DNA, 75 bp, Homo sapiens
ctcagccactagctgcgatgcatgtgatcaagcgaggacactgcccatctctaagataagaacctggaaagggga

SEQ ID NO: 397596 - DNA, 100 bp, Homo sapiens
ctggtgcctgtcggagaacatcgccaagcagcaacagctggcagcatcacccccggacagcaaggtgatgcagcatcctaatgaaggcgcactggtgctt

SEQ ID NO: 397597 - DNA, 82 bp, Homo sapiens
tggcgtgcagcgcaaccacgagacggccttccaaggtggagtttgtccatatgctcaatgctaccatgtgcgccactacccg

SEQ ID NO: 397598 - DNA, 100 bp, Homo sapiens
cctttcttatactctagaatatacaaagacaaaaggagattctgatgaagaagttattcaagatgtttttcagtttccaagatggaatagttatagtgca

SEQ ID NO: 397599 - DNA, 102 bp, Homo sapiens
cgcccggggctccggggacggcgagatgggcaagcccaggaacgtggcgctcatcaccggtatcacaggccaggcccgccatgttcatagaggataaagcag

SEQ ID NO: 397600 - DNA, 100 bp, Homo sapiens
gtgttcgcaattcttacgatgtcttctctttgctacggaagcagttcaggtacttttgaagcattctgcagatgttaatgctcgagacaaaaattggcaa

SEQ ID NO: 397601 - DNA, 99 bp, Homo sapiens
gcgcgcggggcccgccatggctgcgtcggagctctacacaaaggaatgtatacaaagactatcgcttccttgagctggcatgtgattcccaggaggatg

SEQ ID NO: 397602 - DNA, 50 bp, Homo sapiens
gcgtcggacctgcacgagctgtctggtggactgcctggaaagtactctag

SEQ ID NO: 397603 - DNA, 100 bp, Homo sapiens
caagtaccaagtgaagactttgaacgcactcctcagagtccgactctcccacctgctaaggcatattggcgttcctgtgctatgatgatgggctgtgtga

SEQ ID NO: 397604 - DNA, 100 bp, Homo sapiens
tttgatgaaactagaaagaccacgaacttcaaaggggaaagcaaggccaaagacagggagaagaaacctctgtagaggagcaggatgcaaccgacaggct

SEQ ID NO: 397605 - DNA, 82 bp, Homo sapiens
ccgcagtcgccactggctgcctgagggtctcgctctgttactcaggctggagtgcagtggcacactgcagcctcaacctccc

SEQ ID NO: 397606 - DNA, 52 bp, Homo sapiens
aaggttgatgcatctctctcagaggtaaaagtgctgtttgtacgcaaccttg

SEQ ID NO: 397607 - DNA, 75 bp, Homo sapiens
gctgataggctgcgctaccggaatgtcatccagcgagtgattaggtgagcgaagcaggtgttcacagaccccatg

SEQ ID NO: 397608 - DNA, 83 bp, Homo sapiens
gctgacaccactcagggcaagggtgtccgacggctggagcggtgcagagcattgtagaccaaggagccatggataggagaagt

SEQ ID NO: 397609 - DNA, 50 bp, Homo sapiens
gcaggccgagaagaaggccactgatacctttccaaagtgaaactgatgag

SEQ ID NO: 397610 - DNA, 97 bp, Homo sapiens
cgctatggatgatcgagaggatctggtgtaccaggcgaagctggccgagcaggctgagcgatacgacgatttcagccttccaagttctgatgtaaca

SEQ ID NO: 397611 - DNA, 51 bp, Homo sapiens
cccaactatggcattgtcacaggtctcagccaatttcttctccagtcatcc

SEQ ID NO: 397612 - DNA, 88 bp, Homo sapiens
atgcactttgaatcatttattacagaaaagaagcaaaatattcaggaacatcttggatttttacagatggctgtatgggcgaaaaaga

SEQ ID NO: 397613 - DNA, 50 bp, Homo sapiens
tgtgcagcatcaaagaggcaggaggccctggccaacgtcaacattgggag

SEQ ID NO: 397614 - DNA, 100 bp, Homo sapiens
atgccaacagtgtaccagcagggcgttggctatgtgcccatcacagacgagccaaactcaggctgtaccttgagcagctcaagcaactggtgcccctggg

SEQ ID NO: 397615 - DNA, 90 bp, Homo sapiens
ggcttctaagaagttgggtgcagattttcatggggtttgttaaagttgttaagaataaggcctactttaagagataccaagtgaaattta

SEQ ID NO: 397616 - DNA, 100 bp, Homo sapiens
ctttctttaaggtgatatggagcaactgctttcacaggggcaccaggggtgatccattcatgttgcagcagtctacaaatccagcaccaggaattctggg

SEQ ID NO: 397617 - DNA, 100 bp, Homo sapiens
ctgggaccttaacagggagccatggttgaggaagaatttgaaatcattcatcattgttcatccatcttggttcatcagaacaatccttgctgtgacacga

SEQ ID NO: 397618 - DNA, 100 bp, Homo sapiens
ccaagctggccgtggctctcttggcagccttcctgatttctgcagctctgtgtgaaggacctgctgaagttcccatgatgtcacccaatggatccattcc

SEQ ID NO: 397619 - DNA, 80 bp, Homo sapiens
cagcgtcgctggcagccgctgtacttgatcatggaagggaagtggttgctgtgtatgttactggtgcttggaactgctat

SEQ ID NO: 397620 - DNA, 117 bp, Homo sapiens
ggaggtgggaaggtgtgtccggaggtttgcaggggtgcagtgtgtctggtcttatgagatatctcttccaaacacatgatgaaggaggtcttgtcaacagggcaaggcaatagagaa

SEQ ID NO: 397621 - DNA, 80 bp, Homo sapiens
cgaggaagaggaggtttctgaggacaaagcagttccaattccagagaaaatgagtgaatgggcacctcgacctcccccag

SEQ ID NO: 397622 - DNA, 78 bp, Homo sapiens
tcgccggagccgcgccccaccccgccagctccagagccacgtacggtgctggagaatctggtaaaagcaccattgtga

SEQ ID NO: 397623 - DNA, 101 bp, Homo sapiens
gggttctgacacgttctcacctcgcgggatggcagctgctgatttgtcccatggatggtgccatgacaatggtgtgaactacaagattggagagaagtggg

SEQ ID NO: 397624 - DNA, 100 bp, Homo sapiens
gagtcatcatgagcgatgttaccattgtgaaagaaggttgggttcagaagagggggaagaactgctaaagctttgaggtcattacaatttacgaatccag

SEQ ID NO: 397625 - DNA, 121 bp, Homo sapiens
cccaggtggaccccaagaagaccattcagatgggatctttccggatcaatccagatggcagccagtcagtggtggaggccctggccaacgtcaacattgggagcctcatctgcaatgtagg

SEQ ID NO: 397626 - DNA, 82 bp, Homo sapiens
agctatggtgaaacaccactgaagcattgccaaggttgaaatcacaaagattagacacctttttagataggtgttcttcagc

SEQ ID NO: 397627 - DNA, 83 bp, Homo sapiens
ataatggtatcatcaaggccttcagaaacatccctggtggagccgccaccaaaatgcagattttcgtgaaaacccttacgggg

SEQ ID NO: 397628 - DNA, 83 bp, Homo sapiens
cgctgttcacctacgggcctgatcaaacttgccttcctgttctccaagaccagcagaagatggctgtgccacccacgtatgcc

SEQ ID NO: 397629 - DNA, 49 bp, Homo sapiens
tctgatacaaagtcagatactgcaacagccttcagtttggaaacctgca

SEQ ID NO: 397630 - DNA, 100 bp, Homo sapiens
aatgccctcacaccagacctacggagggagctggaaattcctgacgttcattgatctgataccatgtttgtgtggaagtgccccgtgtttgctatgccga

SEQ ID NO: 397631 - DNA, 83 bp, Homo sapiens
tggtagagggtttgagtccgcatcgccacagctgaaggctgcgagggactaagagcagagagtggctgtaaggtgaagaagca

SEQ ID NO: 397632 - DNA, 100 bp, Homo sapiens
gattgatttccatgctctgaaagacatccttgggcccccgatgtatgaaatggaggtctcttttattcaaaaccttgtattttgtgtggaaagagtttac

SEQ ID NO: 397633 - DNA, 83 bp, Homo sapiens
atccggtcctggtccctgctggttggagggtgaggacaaaatcttcttaatcaacaagcttcactccatctacgagaggaagg

SEQ ID NO: 397634 - DNA, 75 bp, Homo sapiens
gccagtgctggtcgtgtccttcgtcgtcgggggcctcgctctccccaaagctcccgggactcccatggtgactga

SEQ ID NO: 397635 - DNA, 75 bp, Homo sapiens
gtcgcgcggaggcggaggcttgggttttcggctttgtgagaaaccttaccatcaaacacgatggccagcaacgtt

SEQ ID NO: 397636 - DNA, 100 bp, Homo sapiens
tcagatgggatctttccggatcaatccagatggcagccagtcagtggtggagaagcctcagtgtaaagtctgccgatcatgccctgtggtgcagtcgagc

SEQ ID NO: 397637 - DNA, 83 bp, Homo sapiens
cgagcggaccccgtcccagtgccgggagcgcatcaagagtgcagcagctgccccgagccccgtgcttggcaacattcccccca

SEQ ID NO: 397638 - DNA, 87 bp, Homo sapiens
gagggatactcccatgctgccaaaggccatattttatgctgtgacaccactgccctggtgtccccatttggtggcagtatgccccat

SEQ ID NO: 397639 - DNA, 75 bp, Homo sapiens
caaggatcagacacaaaggttagagagtggtgcacgtatcaacatctcagaagggaattgtcctgagagaattat

SEQ ID NO: 397640 - DNA, 89 bp, Homo sapiens
caagaatctcgtgctcaccggtttctcccacatcgacctgagttgctagaccgcttcctgcagaagaacctgaaagagcaaaatcagga

SEQ ID NO: 397641 - DNA, 80 bp, Homo sapiens
atggcggcgcagaggaggagcttgctgcagagtgagcttgaagaaatccgcaaatgtgggatgaaaaacttccgtaacat

SEQ ID NO: 397642 - DNA, 118 bp, Homo sapiens
cgcaacctcaaggactcggagcgcatgcagctgctgctgaccctggccttcaaccccgagccgctggtgctacaggatgaagcagcaaaggaatttcaggagaaacacaagaaggaag

SEQ ID NO: 397643 - DNA, 100 bp, Homo sapiens
ggcagactctactggagcgacctccaggccatgttcctgcagttcctgggggaggggcgcctggaggacaccatcagacacgaagggcctgtatttccag

SEQ ID NO: 397644 - DNA, 83 bp, Homo sapiens
ccccgcggagacccttcgagaaatctcgtctcgaccaagagctgaagctgatcggataatttcttgagaggagataactcccg

SEQ ID NO: 397645 - DNA, 98 bp, Homo sapiens
gaggctacaccccggagccaggaggctgtgagtaccagagtgcccactggttccaacagttcttctcagaccacagagtgtcttacacctgaatcctg

SEQ ID NO: 397646 - DNA, 100 bp, Homo sapiens
cgggcactgggcgactctgtgcctcgctgagggtgatgcagaagatggggaagaatatgatgacccttttgctgggcctccagacactatttcattagcc

SEQ ID NO: 397647 - DNA, 71 bp, Homo sapiens
ggtgtccccgcggcgcaggaggcggtggagcgcagagcgggcgagcgcgcatcctgaggttagcattacac

SEQ ID NO: 397648 - DNA, 74 bp, Homo sapiens
ggccgcgggcggcgcgggagcctggatggacaagtgaaacctcacctgctatccagctgcccacacctgcagtc

SEQ ID NO: 397649 - DNA, 82 bp, Homo sapiens
cgggggctctggtcccctcctcgtgtggggtgatcagccccagatttgacgtgcaactcaaagacctggaaaaatggcagaa

SEQ ID NO: 397650 - DNA, 82 bp, Homo sapiens
cttcggcagtccacccaccgccgccgcctcccagctgcctcaagggctacgtcaaccacagcctgtccgtcttccacaccaa

SEQ ID NO: 397651 - DNA, 90 bp, Homo sapiens
caaagctgtggaagactccaagccctactgggaggcacggagggtggcgaggcaggtcagcagcaaggacaagatggagtaaaagtccag

SEQ ID NO: 397652 - DNA, 75 bp, Homo sapiens
tgcttctcgaaaaaaaccttcaggcggcccatgggtatactctgaaactaatgattgataaagcaagtttaggtc

SEQ ID NO: 397653 - DNA, 98 bp, Homo sapiens
cagaatacagagatatggaatcaggtcagaatggcggcagtggagcatcgtcattcttcaggattgccctactggccctacctcacagctgaaacttt

SEQ ID NO: 397654 - DNA, 100 bp, Homo sapiens
atcatagaagtgatgagtgcctccaagttcaccttcaagatctccacaatggaagttcgaagcaagcaaaagccacgcaaaccacaggccgatctgtctg

SEQ ID NO: 397655 - DNA, 75 bp, Homo sapiens
cttgtccttgctggtgcatgcgtcgtcggcctctgggcagcaggcccagacatgtccgtccttgtaagttaaaag

SEQ ID NO: 397656 - DNA, 75 bp, Homo sapiens
cttggttaacttgggagaaagtttcatctgtggatggagtattggttattctggtacaagttaacccaggagaag

SEQ ID NO: 397657 - DNA, 78 bp, Homo sapiens
aggaggtggcggaattgaagaggaaggaggaagaggagcgaaggcggcgtgaagaggaagaaagagaacgtctgcaaa

SEQ ID NO: 397658 - DNA, 101 bp, Homo sapiens
catggcaatgtgggtgtcaacagaggctggttctgtgagaagggtatgttagagcccaccaaggaaccactgaaaccactttctgctgcagaaaaaatagc

SEQ ID NO: 397659 - DNA, 83 bp, Homo sapiens
gtaaatgtcagctacaggccagcttatgaccagaacatccagtcatggataaaaatgagctggttcagaaggccaaactggcc

SEQ ID NO: 397660 - DNA, 50 bp, Homo sapiens
tgtgggctgtgttccacaagttcaaaggtgcagattcactttataggaac

SEQ ID NO: 397661 - DNA, 101 bp, Homo sapiens
catttccggcgacacctcgcagtcattcctgcggcttgcgcgcccttgtagacagccggggccttcgtgagaccggagccggtgaaacctgaagaaggcag

SEQ ID NO: 397662 - DNA, 100 bp, Homo sapiens
atgcggggcctggcggtcttcatctcggatatccgcaactgtgtccaggactaagcctgtatgtgtcacctgcagtgcccatctacaatgcaattatgtt

SEQ ID NO: 397663 - DNA, 103 bp, Homo sapiens
aatcctcagaagtactcggacaaggagctgcagggcgcaccctacgacgcgcacaccaccggcatgaccggcgccatcagctaccacccgtacggcagcgcgg

SEQ ID NO: 397664 - DNA, 75 bp, Homo sapiens
gcatcaccagtggcttcgtgaagcccaagctgggactgcaggatcctcctgtctgtcgagcccacggaccaaggc

SEQ ID NO: 397665 - DNA, 100 bp, Homo sapiens
ccatgtctccatccccgaccgccctcttctgtcttggaatgaatctgaagtctgctgcagtaaaacacagaaggctttaaaatgttttcttgcataaaat

SEQ ID NO: 397666 - DNA, 74 bp, Homo sapiens
cagaatgtcagcatggaggctgctgggcaggtcatgagtcaccatgccaaaactggacaagccaaggcatctgt

SEQ ID NO: 397667 - DNA, 50 bp, Homo sapiens
gcaaacactggaatcctactttttctgatccggagtgttggaacagcagc

SEQ ID NO: 397668 - DNA, 100 bp, Homo sapiens
gccagagccaccagcgcagcgctgccatggagcccagcagcaaggtcacacatcccgggtcctgagtctgaccatgagcccagatggggccacagtggca

SEQ ID NO: 397669 - DNA, 100 bp, Homo sapiens
acgtgcagacatctacaaccttcgatctcctgacgagcctgaggtcctttcgagactgctggggaacctggtggtgaagaacaagaaggcccagtttgtg

SEQ ID NO: 397670 - DNA, 100 bp, Homo sapiens
gttgaaccagaacaaaaccgagtcaacagggaagcagaggagaaccgggagccattcagaaaagttgaaaacaatcctcgaacaggaaatcttggtgcac

SEQ ID NO: 397671 - DNA, 98 bp, Homo sapiens
ttcagtgttcaaattaaattcccagacagagaggagaacgcagaggcatttcatccttcatgaagccattcaggattttgaattgcatatgagtgctt

SEQ ID NO: 397672 - DNA, 100 bp, Homo sapiens
atccacaaaccagagaaagctttccagcagtcagttgaacaagacaacttatttgatgcctgtgatacttgggctgtgatcctctagagccagcttggac

SEQ ID NO: 397673 - DNA, 87 bp, Homo sapiens
aggagagacgtcgctgaggggcttgcctgaagcgaggggctttttctcctccgtgacagccagagtaatccaaaggcatttgtactc

SEQ ID NO: 397674 - DNA, 75 bp, Homo sapiens
attccaagtaactcttatttggtgatgaccccacaaggaagaggtactgttgcagccgctgcagctgctgccaca

SEQ ID NO: 397675 - DNA, 75 bp, Homo sapiens
ggtacctgcggccaattcggtggaacgaggacgcggactgcgaaggcaggtggattctccacagttttcctcgtg

SEQ ID NO: 397676 - DNA, 75 bp, Homo sapiens
acagcatcaccatgtccctgacagagatcagcaaggttatccaagcccagaagtgttaccagaaaggggaccgga

SEQ ID NO: 397677 - DNA, 75 bp, Homo sapiens
ctttgtgctcgctgttacccagagaatcaagatcacatgaagtgcagagctgtactgttgacttaggtattacag

SEQ ID NO: 397678 - DNA, 101 bp, Homo sapiens
caagaaaaagagccctggaatatgaagatatgtgagatggtggatgaatccccaggtactaggttttgacaagcttgcatcatgcgtgagtataagctagt

SEQ ID NO: 397679 - DNA, 102 bp, Homo sapiens
ctggagagtgggaaccccgccatctttgcctctgggatggattaccgggccttggtgcatgagcgagatgaggcagcctatggggagctcagggccatggtg

SEQ ID NO: 397680 - DNA, 100 bp, Homo sapiens
gtgaatctccgcggggaggctcttccaaccaggggctgagcttctgcgctgtggagaagccagtaagactttgaccccgacgcaggcttcagtgattgcc

SEQ ID NO: 397681 - DNA, 82 bp, Homo sapiens
gcactggtggcatccagtggtggccagtagaggaggaggtgaacaaggaggaggcaggacaagctgaaggtgcacatgcgga

SEQ ID NO: 397682 - DNA, 75 bp, Homo sapiens
gatcggaatggtggagaacttcaaccaggcactcaaggttcaagtgctggattgtgtcatgtgaccatcccaaaa

SEQ ID NO: 397683 - DNA, 82 bp, Homo sapiens
ggaggactctggagctgacagcgcgcacttcacccgcagttgatgccatggacaatattaccaggcagaaccaattctacga

SEQ ID NO: 397684 - DNA, 83 bp, Homo sapiens
gaggccggacgcacctctgtttgggggtcctcagggcacacgtgtttcacgttgacaggtttgcttgggacgctagtaaccat

SEQ ID NO: 397685 - DNA, 50 bp, Homo sapiens
gcgggaggcagacctggactttgcaaggtcagcagcaaggacaagatgga

SEQ ID NO: 397686 - DNA, 98 bp, Homo sapiens
agagcgctcccaggagaaacaagataaggaagcctgtgtgggtaccaacaatcaaagctacatctgtgacacaggacactgctgtggacagtctcagt

SEQ ID NO: 397687 - DNA, 111 bp, Homo sapiens
ccgcagagtggacctgcaggtacttggatctccagtgggagctgccctctcgaaggcaggacagcggtggcggcagatgccgatagacaagattccattaatctcttcctg

SEQ ID NO: 397688 - DNA, 97 bp, Homo sapiens
gtgaaggcagacagcgagtggcgacgatgccagaagcggactcctagaagaggggagcagcaaggatggaatgacagccgtgggccggaggggatgc

SEQ ID NO: 397689 - DNA, 75 bp, Homo sapiens
acacatccatattggggagatgaagcagcacttgctctgaaatttggggactgagtacaccaaatacgatagatc

SEQ ID NO: 397690 - DNA, 83 bp, Homo sapiens
gccggcgcctcctcggagtccttggggacggagcagcgcgtcgtggggcgagcggcaggaagctcttcgtgggcggtcttgac

SEQ ID NO: 397691 - DNA, 96 bp, Homo sapiens
ccgatgccccccggagctctgtgcacctccactgaaacgcaaggagcagacagaacctacaccatccgtgagagacggagtttcgccatgttgccc

SEQ ID NO: 397692 - DNA, 82 bp, Homo sapiens
ggctggccgagcaggcggagcgctacgacgacatggcctccgctatgaaggcggtgatgatgaacagtctacacagatggct

SEQ ID NO: 397693 - DNA, 98 bp, Homo sapiens
gccgcggggccttccgatcccctagtttattaaccacttaacctctcagaactgaacaaagacaacattgttcctggaacgccctctttttaaaaaag

SEQ ID NO: 397694 - DNA, 90 bp, Homo sapiens
ctacaaccagagtgaggcctgcccagcttcccgatcagtggagacgttgaaggagatgattaagtctggaatgaatgtggctcgtctgaa

SEQ ID NO: 397695 - DNA, 129 bp, Homo sapiens
atttatgatgttacggtggtttatgaagggaaagacgatggagggcagcgaagagagtcaccgaccatgacggatgctattccaagttcagatcaaattcgagtagcaccatctttaaaaagccaaaga

SEQ ID NO: 397696 - DNA, 100 bp, Homo sapiens
cacagaattaccaaaaacttctgcatccatattctggtgtaactgtggacatcaccattcaggaagggatccaagtgaaggcgaagccagtggcagaacc

SEQ ID NO: 397697 - DNA, 80 bp, Homo sapiens
actcacacatgcccaccgtgcccagcaacctgacagccttccctgggggcgccaaggagctactactaagagacctagac

SEQ ID NO: 397698 - DNA, 90 bp, Homo sapiens
gttgcgacgctcggcggcatagggggcggctccaccgacactacgcggacgcctcctgccgcagcaaacggggattcagcgtccgatcct

SEQ ID NO: 397699 - DNA, 75 bp, Homo sapiens
aggacctgcccccagagagactgatggtgagaccattctaaaaggcctccagtccattttccaggagcaggggat

SEQ ID NO: 397700 - DNA, 70 bp, Homo sapiens
gccgtgaacgaaagcagtgacggaggagcttgtaccaccgctgcagaaccttggcctgaaaatgctacat

SEQ ID NO: 397701 - DNA, 102 bp, Homo sapiens
agctttacgttcatgtaaacagcatgatgtgaggccatggatgcaggcagtaagtctgtgatcaaaacagggcgactgctaatcagtcacgaggctcccttg

SEQ ID NO: 397702 - DNA, 100 bp, Homo sapiens
gcggagttctcattccttctccagggagagtcgctgcagagtcagatgtaatgggaagaggccatgcacgcctggtgcatgttgaagagcctcacacgga

SEQ ID NO: 397703 - DNA, 86 bp, Homo sapiens
cagggagtggagcttggtttcgggatctcggtgctgcagacggcgagacctcctgcacaggctgatcagctgaccgaagaacagat

SEQ ID NO: 397704 - DNA, 50 bp, Homo sapiens
tgcttatctgagacaacttgagctgcaggacaagttcgagcatcttaaaa

SEQ ID NO: 397705 - DNA, 75 bp, Homo sapiens
ccgggccgcgctgcgagactacgagacgttgccatctaccttgggatcaaacggaaaccgccccccggctgctcc

SEQ ID NO: 397706 - DNA, 74 bp, Homo sapiens
cgtggtgtccagcctcctgggcagccccttgcccttggacagctggtcagtgagaaggtcggaggggccgaggg

SEQ ID NO: 397707 - DNA, 83 bp, Homo sapiens
cggaaatgtccggcaagatcgagaaagcaggtgtttcccattaaacactaccaggacaaaatcaggccttacatccagctgcc

SEQ ID NO: 397708 - DNA, 75 bp, Homo sapiens
tgggagccgcctccgtcgccgccgtcagagccgccctatcaggtgctggagaatctggtaaaagcaccattgtga

SEQ ID NO: 397709 - DNA, 100 bp, Homo sapiens
gcacatcccgtaccgcgagcacaagagcctgacgggcacggcgcgctacatgagcatcaacacgcacctgggcaagggaaactggtcaaagaactcatgc

SEQ ID NO: 397710 - DNA, 100 bp, Homo sapiens
gggccttcgagagctaccgcgccagacaggtctctaattaacagaagatggcaaagcccagccacagcagctatgtccttcagcagctaaacaaccaaag

SEQ ID NO: 397711 - DNA, 83 bp, Homo sapiens
tggacggcgagcgcgagcggcgcgagaaagttgaagaagcctcagcggaggcgatacggcctcctcgccaacactgaggaccc

SEQ ID NO: 397712 - DNA, 98 bp, Homo sapiens
aagtggtggcgaacatagaagaagaattctccagatggaaaaccagcattggaatcagctgattcaggatgctcagaagcgtggtgccattattaaga

SEQ ID NO: 397713 - DNA, 75 bp, Homo sapiens
aggccatgggcaagatatctcagtgttctccgctctcataggtcagggaacatttacggatgagaagtcaaaagc

SEQ ID NO: 397714 - DNA, 97 bp, Homo sapiens
acctgtccaccattgtgaccgaggaggactcagagagagtaatgataattaccggaccaaacatgggtggaaagagctcctacataaaacaagttgc

SEQ ID NO: 397715 - DNA, 75 bp, Homo sapiens
tccaaggaagaatttcctctgaagcaccggttttgggatttgagattgacgcggtgaactctgtccagttttcaa

SEQ ID NO: 397716 - DNA, 98 bp, Homo sapiens
acgagctgagcttcaacgtgaacgaggtcattgagatcctcatggaaggcctccccaaagccagtcctgtgtcaccaatcaaaggaaaggaagccgtc

SEQ ID NO: 397717 - DNA, 50 bp, Homo sapiens
ccttacccttcgctcccagcccagatgtccagctcgccgctgtccaagaa

SEQ ID NO: 397718 - DNA, 90 bp, Homo sapiens
gcgctacatgcactcgcgtgtggtggccaactcggaggagatcgccttctatgggggccatgagcggaatcccgactgtgcctgggaagg

SEQ ID NO: 397719 - DNA, 110 bp, Homo sapiens
gctgagcctttctggacagaccaacctgtcagtgctgcaagttatcaatactctggctgaccatcatcatcgtgggactgactttggtggaagtccttggttacatgtca

SEQ ID NO: 397720 - DNA, 100 bp, Homo sapiens
gaaagcatgttgtggctgttccaatcgctcctgtttgtcttctgctttggcccaggtgccgtgagcgatgtggagatgcaggaacactatgatgagtttt

SEQ ID NO: 397721 - DNA, 83 bp, Homo sapiens
ctcctgcgaaaccaggcaatgggtgctggagaatctggtaaaagcaccattgtgaagcagatgaggatcctgcatgttaatgg

SEQ ID NO: 397722 - DNA, 100 bp, Homo sapiens
gggctccacagtgtgcacagatgaacgaagttatggcagagttagctaaagaactccctcaagtttcatttgtgaaggctgagtcatcactagagagtgg

SEQ ID NO: 397723 - DNA, 74 bp, Homo sapiens
ggagagttctgcatgttgattcgttgcagattttaaagatgcccttgccagagtatatggagtgatacccaaaa

SEQ ID NO: 397724 - DNA, 100 bp, Homo sapiens
gtggtgaacttaacccaggagaagatgaagttgaaggactaaaacgcttaatgacagaggtggctgaatccacagaggagcctgctggttctaatcgggg

SEQ ID NO: 397725 - DNA, 83 bp, Homo sapiens
cccactattcagccattgggtcacaagcgatgaaaagagcaccttgaaggatttttagactctgaggagcagttggagctaat

SEQ ID NO: 397726 - DNA, 100 bp, Homo sapiens
cttcagcaagctgaaggaggaccagatcaagaaggtacatttgaagaatacagaaatagaaaataccaagcttatgtcagaggtccagactttaaaaaat

SEQ ID NO: 397727 - DNA, 100 bp, Homo sapiens
ccaacacccatcatggctaaaagtgcggaggtcaaactggcaatatttgggagagcaggcgtgggcaagtcagatttacagccagttacttactcagaac

SEQ ID NO: 397728 - DNA, 100 bp, Homo sapiens
gacgtcgtgatccagaagtccagagctgaggactgcctgtttgcagaaatgggacgtcggtcatcagatactgaagaagaaagcagaagcaagagaaaaa

SEQ ID NO: 397729 - DNA, 51 bp, Homo sapiens
cactagaggctggacaggaccccccgagtggatgatgctggcaaaatagaa

SEQ ID NO: 397730 - DNA, 98 bp, Homo sapiens
cggaaagctgcccagccaccagcaaccccccaggctttatgaaggcaaagaacagatggagtttgaagaatccatgagacggctctttgaatccatca

SEQ ID NO: 397731 - DNA, 100 bp, Homo sapiens
gctgcacagcgagggcaccaccgtcctgctcttccagttcgggatgtctcacaccattttgctggtacagcctaccaagaggccagaaggcagaacttat

SEQ ID NO: 397732 - DNA, 100 bp, Homo sapiens
gcgcggacgcgcagcatggcggtggaggacgaggggctccgggtcttccagagcgtgaagatcaagatcggaccggccagccttgcagctgtatgatcca

SEQ ID NO: 397733 - DNA, 98 bp, Homo sapiens
cctaggattgctgcaggtcagcagtctccactggaaaaaaagatcttggaagaagaccagctacaaggaaatacttctgaaaaatcactctgaacccc

SEQ ID NO: 397734 - DNA, 74 bp, Homo sapiens
cgaggacgccttcaactccacttttatctccaccataggttccaaataagtttcgctatccattctactatgag

SEQ ID NO: 397735 - DNA, 74 bp, Homo sapiens
tttaattacatcattgcatttttccttggaacagcagcctgcctttaccagagattgctttgcataaatccacc

SEQ ID NO: 397736 - DNA, 80 bp, Homo sapiens
ggccgaactcgggttctgacaagatggccgggctgccccgcaggatcatcaaggtgctggagaatctggtaaaagcacca

SEQ ID NO: 397737 - DNA, 96 bp, Homo sapiens
caagatccagatcgggatttacgtggagatcaagcgcagcgatgggacttgccatgaggtgttgaagccttgtttcactgagttggagagactgga

SEQ ID NO: 397738 - DNA, 101 bp, Homo sapiens
gaggaaccggcagctctccacgcccctgcccgaagcctgacccgactgcctctctcagtgagctggagaatgctggaggagaccttaaggatggccaccac

SEQ ID NO: 397739 - DNA, 95 bp, Homo sapiens
aggcattgaggactttccttacctgtttttccagctcacccactgccagcagaggatgatcacggacgtgcagctcgccatcttcgccaacatgc

SEQ ID NO: 397740 - DNA, 118 bp, Homo sapiens
ccaacatggcggaacgcaggagacacaagaagcggatccagatgaggcctgcctgtgttaatacacctagtgaggagtggagctgaatttgaatgcaagccttggcaccttaattgag

SEQ ID NO: 397741 - DNA, 83 bp, Homo sapiens
aaagtcgcctttgagttttggcaggtgtccaaggaaggtatcatgatattagctggtttgacatcaagtcatttgtgagtcat

SEQ ID NO: 397742 - DNA, 100 bp, Homo sapiens
ctaccaggaggccaggggtgtcgccatgttgaggagctcaagcttgggaaaatggtgtgcattccttgtatcgtcattccagttctgctctggatctaca

SEQ ID NO: 397743 - DNA, 75 bp, Homo sapiens
cccagccacctctgaagttgccaggcttcccaacattcttgtctgtggcatccgagatgtttccaaatggagtga

SEQ ID NO: 397744 - DNA, 90 bp, Homo sapiens
agaggcccagcatatacaaaggcatggaagtatgaaaatgaacatggtccaagacaattcctgggaaagttcagttcttctcaagtgagg

SEQ ID NO: 397745 - DNA, 50 bp, Homo sapiens
cgcggcttcctccagacctctcggcgcggtctgaggacacagacctgccc

SEQ ID NO: 397746 - DNA, 75 bp, Homo sapiens
ggcgggcctgaggcgaaggagcggccgggagcccgccgcgctggtagcgggtaacaagatgctcaactatagtgc

SEQ ID NO: 397747 - DNA, 85 bp, Homo sapiens
agagatgtggggggattctcgacctgctaacagaactggaccttttcggttcgacgaggtgctttataaatcatctcaggacttt

SEQ ID NO: 397748 - DNA, 82 bp, Homo sapiens
caggagcagttccgccgggtttcactgtccgtgacttccttcggggcacctcagaaatgcatcattggaacgcgtcctcccg

SEQ ID NO: 397749 - DNA, 50 bp, Homo sapiens
cactattccaaccaagaagagccaggacccacgcagccacccagcctcag

SEQ ID NO: 397750 - DNA, 90 bp, Homo sapiens
tgtgaggcctcctcagccacgtggaactgtgtcagttgtacccgaggcgttctcagcagcagcaagtacctgtggtggatttccaggctg

SEQ ID NO: 397751 - DNA, 100 bp, Homo sapiens
gtggcacattttacagaataagtcagatgactttctgtcatgggcctcctacatgaccaactccccgactctgatcgttatgattggtttgccagcccgg

SEQ ID NO: 397752 - DNA, 75 bp, Homo sapiens
cgcgcacttccaggtgcacagcgcgggagccgtcacggtgctcaaggaagccgagatcccccgcgaggtgatcga

SEQ ID NO: 397753 - DNA, 50 bp, Homo sapiens
ccattgcaaggagaagacgcagccgtcagtagagatgaggtttcaccatg

SEQ ID NO: 397754 - DNA, 100 bp, Homo sapiens
gactacctctccgatcctgcagctgctgctgcggctctcactgtgcgggctgctgctccagagggcggagtgccggtggtggtgtgcacattgagccccg

SEQ ID NO: 397755 - DNA, 100 bp, Homo sapiens
tgccttcatcctctataacaagtatatcacagtccgaatgtcattcagaatttgaaaatactacccgttctgtcttcaggtcagcaaagttttacattca

SEQ ID NO: 397756 - DNA, 100 bp, Homo sapiens
agcgtctcctggttaagtttgggtcagccattccaatcccttctcttccagacaaacaagtcacagaagttaaaatgcattttgctaatcagtcaataga

SEQ ID NO: 397757 - DNA, 98 bp, Homo sapiens
gacaatgtagaggatgacttctctaatcagttacgattcatgatgagatttcagtgtcaagcatggatgcttctagacaactaatgttgaatgaagaa

SEQ ID NO: 397758 - DNA, 120 bp, Homo sapiens
caagaagcagccgccaaagtccttgaggagtatggagctggagtgtgcagtactcggcaggaaattggataacaaagccattgacctttgccgattgtgttggggacgaacttcctttag

SEQ ID NO: 397759 - DNA, 75 bp, Homo sapiens
agacgccacacagccaccagccgcagcaccaggatcagtgtacatcggtgagctcccgcaggacttcctccgcat

SEQ ID NO: 397760 - DNA, 80 bp, Homo sapiens
tggatatggagcctttggtgttgtctggctcttgtcaggatggtgaagctgttcatcggaaacctgccccgggaggctac

SEQ ID NO: 397761 - DNA, 98 bp, Homo sapiens
agccatcaggtaggctgcgttgaggatctttgctcttccatccgcctttgatcgtcttcctcttcagccatccaggtattgttgcagcatctggcagt

SEQ ID NO: 397762 - DNA, 82 bp, Homo sapiens
tcttcgctctttgcatcttaactgcagtacttcctcctgtgctggttccaagacacagcgaatataatcctcagcacagcct

SEQ ID NO: 397763 - DNA, 82 bp, Homo sapiens
ttgccctttgatggtggccctcttgatccccggcttgctgaagtcaaaattacctaaaacctcgggcagaagaggagaggag

SEQ ID NO: 397764 - DNA, 82 bp, Homo sapiens
atcggcttctgcctggtgctctgcgtcctcatcgggcttatgttcgaggttacaggaggttccagtggcatcgggaagtgca

SEQ ID NO: 397765 - DNA, 100 bp, Homo sapiens
gctgttcgtgctgctgggattcgcgctgctgggcacccacggagcctccggggctgccacacccactcgcccgggtctatggccacggtcggagagtggt

SEQ ID NO: 397766 - DNA, 82 bp, Homo sapiens
tccctctgctcttcctcccttcgctcgcaccatggcctcaggcccaggcccaaggccaagtgagagagcccaggccacagga

SEQ ID NO: 397767 - DNA, 74 bp, Homo sapiens
tagaaggacaaatgaacttcaatgcagattctagccaacataaagcatcacagaacacatagattttgccaccc

SEQ ID NO: 397768 - DNA, 74 bp, Homo sapiens
gggagcaggagctgggcctaggtctgcgccctgccagcagaaaactgagcttccggtcacagagaacgtgcaga

SEQ ID NO: 397769 - DNA, 99 bp, Homo sapiens
attgagaagtatgaacccaacaacagcctcgccagaaaaggtgtggatgaggtcaccattgtcaacattttgaccaaccgcagcaatgcacagagacag

SEQ ID NO: 397770 - DNA, 100 bp, Homo sapiens
gctgtttgtattttggctgctgcaggagccattttagtggccgatacgacatggaatcattgaagactgggatcttatggaaaggttcatggagcaagtg

SEQ ID NO: 397771 - DNA, 96 bp, Homo sapiens
aaaagccgaaataccctcccaacaaagcctctccccaccggtcactgttagcctcgagtttgaccctcaacatccccagaggatgcctcctaggac

SEQ ID NO: 397772 - DNA, 80 bp, Homo sapiens
caagatgaaaactacttcaactaaaagccaaccacttgaacaagtgtttctaagacctcagagaaatttggaatctatag

SEQ ID NO: 397773 - DNA, 100 bp, Homo sapiens
gatctatcacagaaatgtttggagaattccgaactgggaagacccagatctgtcatacgctagctgtcacctgccagcttaatcgaaccctgaagaagat

SEQ ID NO: 397774 - DNA, 100 bp, Homo sapiens
gccgggaccgaaacctagccccggacgagaagcgcagcaacgtgcggtgggaccacgagagcgagacgcaggtcagaatggaaatgggctgcagaccggg

SEQ ID NO: 397775 - DNA, 51 bp, Homo sapiens
ttttggcatactacgtgcaggagcaaggttaaaaagatcaagtggcatgag

SEQ ID NO: 397776 - DNA, 76 bp, Homo sapiens
tgtctgacatttcttttgtgcaagatgagcctcaagtgcttctgcattacagagacggtggctcagggagtaaagg

SEQ ID NO: 397777 - DNA, 129 bp, Homo sapiens
gtccaaagccacaccaggtgctcctgccctgaccagcatgactccgacagctgtggaaaggatgaccagtgtcccagtgaaggaacgagtgaaggtgtctcagaactggagactggggcgctgccgaga

SEQ ID NO: 397778 - DNA, 100 bp, Homo sapiens
acaacccgttcttgcctcaggccagtcgcctccaggccaagagggatccttcacccgtgtctgggtctccgtctctccaccgggggcttcatccttccag

SEQ ID NO: 397779 - DNA, 100 bp, Homo sapiens
tcggccttggagaaggcaggtggtgggcgcaccaggacattcgcagattgcatccagacgcctgtgtgagcacaagtatggcaatgcgccccgtgtccgc

SEQ ID NO: 397780 - DNA, 100 bp, Homo sapiens
ggccgggacccggttccccggcccacagtgggggtgtgcaaacccgagagaactggatctttctcctggcctgccctccatgtcggggagctatcgtcgt

SEQ ID NO: 397781 - DNA, 83 bp, Homo sapiens
cttggaagaagtcgcctccccagatctctaagcaggccgcgcgaccctcgagtctcaggctttccatctgatggtcccctggt

SEQ ID NO: 397782 - DNA, 75 bp, Homo sapiens
gcctgtgatgaaaacccagatgccacatatgatttcaaggatcagaattcaggctataaatgaaattggagctgg

SEQ ID NO: 397783 - DNA, 100 bp, Homo sapiens
ccgtggaataggtgtatcaagtaatggtgcaaagcctgaagaaatcaaagagcaggaggttgtggacaaagtcatggaaacactggacaatgatggagac

SEQ ID NO: 397784 - DNA, 96 bp, Homo sapiens
acgatttggttatgatgatgacctggatttgacacctgaatatttgttccccctccctgccataggacaggctgaggctgagtctcagtgttgccc

SEQ ID NO: 397785 - DNA, 121 bp, Homo sapiens
cgcgcaccgtggccaccctgtgggcctggcgctggaggcagcggtgcacgtgcagaactcacttgaaagcagtggggtccggacaaccaaaaatgaagaggagaatgaaaaggaaaaggag

SEQ ID NO: 397786 - DNA, 74 bp, Homo sapiens
tcaagagcaagtgtataatgactgtgcaaagaagattgttaaaggaaacttggatttaactggccagaagcagg

SEQ ID NO: 397787 - DNA, 99 bp, Homo sapiens
aaaattgaatcagaagaatttaaggagaagagaactgtccagcagcaccagatggttaatcaggcaaaggatttgaggacctgatgactgtgaatctag

SEQ ID NO: 397788 - DNA, 75 bp, Homo sapiens
cagattcgcagtggtcgcttcttctccttggaatctacttatgggacccatatccatgagaaacgtgaagagcga

SEQ ID NO: 397789 - DNA, 48 bp, Homo sapiens
attggaccctcctcccaactgtagatgttcagcctgttgcctatgaag

SEQ ID NO: 397790 - DNA, 98 bp, Homo sapiens
cctaaaataatgagagaaaaggccaaagagaggtgttctgaacaagttcaagcagtcctatgcaccagctccccaccccatggctcctcccagcccca

SEQ ID NO: 397791 - DNA, 75 bp, Homo sapiens
attccaagtaactcttatttgtattgaatttgaccgggattgtgactattttgcgattgctggagttacaaagaa

SEQ ID NO: 397792 - DNA, 101 bp, Homo sapiens
cttctgcctgggctccctcctctatcagctcagcgggggaccccctcgcttcctgctcgacctgcggcagtacttggaatgctgcctttttatatggtctt

SEQ ID NO: 397793 - DNA, 75 bp, Homo sapiens
gcaaatggtggctttcattgggtgctccttgtcttctgagatgttgggcccctcttgggatggagatgaagcaga

SEQ ID NO: 397794 - DNA, 83 bp, Homo sapiens
agagacaagccattttgtgcgcaccacttttgtgtccaggcataagaaatttgacgtttttcagaagaagtgaagtcaagatg

SEQ ID NO: 397795 - DNA, 75 bp, Homo sapiens
cgcaagttcattgcctaccagttcacagacacgagacgagttgtactgctgtcacaggaaatggacgctggatta

SEQ ID NO: 397796 - DNA, 100 bp, Homo sapiens
gtcatcctatggatgattcaattagagaggtggagaagagcgagtacttgagaaagaagaggaagaagatgatgatgaagatgaagatgaagaagatgat

SEQ ID NO: 397797 - DNA, 100 bp, Homo sapiens
cattcctgaaatacatccaggaaagacatggagattctcttaaaaagcactgttgcaagaattcaattccgtcttcctgatggttcttcctttacaaatc

SEQ ID NO: 397798 - DNA, 100 bp, Homo sapiens
gactgcgggtggtgcagcaggaggagggctggttccggctgcagcccgaccagtccaagagccggcggcatgacgagtatgccgagcagacagctggagg

SEQ ID NO: 397799 - DNA, 100 bp, Homo sapiens
aaagcatgtagattataagaatgtacaggatctagtttgaagcactaagaagaataagacatcagtttgaaaagaggctctatcagaacaacacgaattc

SEQ ID NO: 397800 - DNA, 75 bp, Homo sapiens
ctcagctttaccatccctggaggagacctggcagcaggtctatcagccacagtctctgcaagtttccaagagcag

SEQ ID NO: 397801 - DNA, 100 bp, Homo sapiens
aagaatgagagcgagaacacctgtcaaggtggcaattttggaggtagccccggttatggaggaggaagaggaggatatggtggtggaggacctggatatg

SEQ ID NO: 397802 - DNA, 82 bp, Homo sapiens
cgaccctggccgccccgagcggagcctggagcattgggaatggtaccacctcccgaaaatgtcagaatgaattctgttaatt

SEQ ID NO: 397803 - DNA, 100 bp, Homo sapiens
ttcagatcatcctcgggccagcacaatattcctcagtaaatctcagacggacggtagacttgggccttctgcgctttgtcacggctgtcgggacacaggg

SEQ ID NO: 397804 - DNA, 100 bp, Homo sapiens
tgctggatacttcaatactgttggctcaaaagaagctgcccgaaaccatgttaatagaatgtgcctggcagctgatgttcctcttattgaaagtggaaca

SEQ ID NO: 397805 - DNA, 90 bp, Homo sapiens
ctcagtgacacacacaactcgggcctccccagcgacaaagtgtgtatctcatgtccaagtggatagcagagaacttgatcgaagaaaaac

SEQ ID NO: 397806 - DNA, 74 bp, Homo sapiens
gcgctgattggatttccctctgtgggtaagacaatgcagatcttcgtgaagactctgactggtaagaccatcac

SEQ ID NO: 397807 - DNA, 88 bp, Homo sapiens
cggccacctcttccaagccaagcgctttaacaggtcacccttggtgccctgtacttcactgtggtcctgaactgaagagctgtgtttt

SEQ ID NO: 397808 - DNA, 90 bp, Homo sapiens
aacatggaaaggatcttcagttttctgcttaacacacttcaagaaaatgtaaacaagtatcagcaagtgctggtgccgacaagaaagccg

SEQ ID NO: 397809 - DNA, 76 bp, Homo sapiens
ctcaacaatgcaaggaggtagacatccttatcagcacagcacttattccaggttaatcactgttctgaagatggtg

SEQ ID NO: 397810 - DNA, 98 bp, Homo sapiens
ccacagataccctcgtgattagaggtcttttgctggaggttgactgtgctgtctggtatctactgtgcgtttcagtcaacaatacagcttgtgttcga

SEQ ID NO: 397811 - DNA, 97 bp, Homo sapiens
catataccgaaatgtttttgataaggtgaacctgtgttttgatcagtttgtctacaagctggcagaccagatctttgcttactacaaagccatggct

SEQ ID NO: 397812 - DNA, 100 bp, Homo sapiens
agtcctgtactggactgcatcaggccgcgtctcctcaggaggccacaagaggaagctgaatgaagaggacgccgccagcgagtccagcagggagtccagc

SEQ ID NO: 397813 - DNA, 101 bp, Homo sapiens
ggagagagaggcttccctggtcttcctggcccctctggagctgacggcgagccggggcctcggggccagcagggccttttcgggcagaaaggtgatgaagg

SEQ ID NO: 397814 - DNA, 97 bp, Homo sapiens
agcaaagaagagttgagcacaatcaggtcgtcagtgaggccacacagcagcagcatgaagtgctctaaagacagagaccctctgccaccagagaccg

SEQ ID NO: 397815 - DNA, 50 bp, Homo sapiens
ctgactttcagctatggaatcgaaggtgcctaccagtaacacagagggag

SEQ ID NO: 397816 - DNA, 51 bp, Homo sapiens
gcgcgagtgaggaaaggaggtactgtaggtgatgaagggagtatgccagca

SEQ ID NO: 397817 - DNA, 100 bp, Homo sapiens
gtatcctcccttcaggacagcgagctctccactggcccaagagactctgacctgtttttgttggacacccgtgtagtatgggcctcagaagaaggctggc

SEQ ID NO: 397818 - DNA, 75 bp, Homo sapiens
gttcgggggatggcacagaatgggcaataacaattggtcgtcttggttacgtttgtcctcaagaggtggccccca

SEQ ID NO: 397819 - DNA, 75 bp, Homo sapiens
tgccttgcttgcctaaagccaaactcagaaccgtgctgcatactatcctcctagccaaattgctcaactaagacc

SEQ ID NO: 397820 - DNA, 101 bp, Homo sapiens
ttgccatgtggaagaaactgggcccatgaagcttcccatcaccaacagcaggcagcacagaacagcttgctgcccctcctgagctctgccgtggagccccc

SEQ ID NO: 397821 - DNA, 100 bp, Homo sapiens
ggctctgtaggaaggaacttggttccccctccctcagcttccgccccaaaaggaaagaccacagcaagattctttcattcgtctcctcctagcctggggg

SEQ ID NO: 397822 - DNA, 98 bp, Homo sapiens
gatggctgctgcggaggcgttggagcgcggaaatctggaaccgggatggcgacgtctacactgagtcggaggcgaagatctctggaaacatggctaca

SEQ ID NO: 397823 - DNA, 100 bp, Homo sapiens
ccaccaggcatctggccatcccacaaaaggtctgactcccagcaccgcttctggaagcccagcgaggtggaggaggaagtggtcaatgccgacatctccg

SEQ ID NO: 397824 - DNA, 82 bp, Homo sapiens
gcaggaattattggaggccaggtttactggagtaggtgttagtaaggtcagcccaaggccaaccccactgtcactctgttcc

SEQ ID NO: 397825 - DNA, 75 bp, Homo sapiens
ttcataatgctgctgtggattggctgagcagatgaagccaagtacaagaagctggagaagcgatgagaaacttat

SEQ ID NO: 397826 - DNA, 60 bp, Homo sapiens
taccaagaattattatactgtggtaaaataccatgaagattttgaaaaaacaaaggggag

SEQ ID NO: 397827 - DNA, 75 bp, Homo sapiens
cagatgccagccagagctctcctgtatcaggtgtctgtcggtccaagctagaagcacgtttcttggagcaggcta

SEQ ID NO: 397828 - DNA, 82 bp, Homo sapiens
cgccggcgggcagaagccgcccgctctccgggtttgaagactgcttcattctgcctctagtaccagcggtttctctgttctg

SEQ ID NO: 397829 - DNA, 80 bp, Homo sapiens
gccaaagaccacaccacttcctgcgcagaggcatcttcttctcacacaggtgctacctttttacccacacttaagtgacg

SEQ ID NO: 397830 - DNA, 83 bp, Homo sapiens
tccggacaaaccagtacctgtgtcttccctacaggtgaatctggattgggaaagtcgacattaatcaactcattattcctcac

SEQ ID NO: 397831 - DNA, 90 bp, Homo sapiens
aaaatgaaaagatgggaacagcagaaaatcaaaacaagctctttatgagaatggcatctaaggttctaaatgagaagaaacttcaagagg

SEQ ID NO: 397832 - DNA, 99 bp, Homo sapiens
ttggccggaggaagctcaccttcgacgaggaagcttataaaaatgtgatgagtgtgggtcagagagccaaactgactatatctccagattatgcctatg

SEQ ID NO: 397833 - DNA, 75 bp, Homo sapiens
atcgccgccaacctgcagtggatctgcgccaaggcctacggccgaggagaagacagactgctgctttggacctgt

SEQ ID NO: 397834 - DNA, 83 bp, Homo sapiens
ctacgagaagctgatccagttctgtgccattgacgagcttggcaccaactacccaaaggacatgaacaagctgagtggaggcg

SEQ ID NO: 397835 - DNA, 50 bp, Homo sapiens
cagtgtggttgcacgagctgaaggcttggtggagccagtgaacgtggtgg

SEQ ID NO: 397836 - DNA, 98 bp, Homo sapiens
tggccaatcatcaagacaagccagcagctcgctcagtacaagagctcaaatctaatccaagtgaaaatgaagaaaaggaagcacagtctcaacttata

SEQ ID NO: 397837 - DNA, 103 bp, Homo sapiens
ccaaaacttcccagtcagtctcaggagaagaaatagatgcaatggatgttcagcagctttcacaaatagtaccaaagctttgaaagctgtatttgatgagaaa

SEQ ID NO: 397838 - DNA, 73 bp, Homo sapiens
aatggtaaccgaaactcaaagttaatggagccaaatttaataaagataacaacgaacttgatgcaagtgatag

SEQ ID NO: 397839 - DNA, 75 bp, Homo sapiens
ctctgctgatagaacagttattccaaatgaccctgtgactaacatctgtcaggcagctgacaaacagctattcac

SEQ ID NO: 397840 - DNA, 100 bp, Homo sapiens
cgcggctttcggcaagaactggattcgtggcgccacaagctcattcactgtgtaggtccctccttgtggtccatttctgggcaccatgggctccacagtg

SEQ ID NO: 397841 - DNA, 100 bp, Homo sapiens
gaaagagaagctcttcctgtgagaaacttgaggagaggctggagttctggatggagaaatacgataaggacacagaaatgaaacagaatgaactaaatgc

SEQ ID NO: 397842 - DNA, 90 bp, Homo sapiens
atttggagcacggcatgcatgacttttggaacagcgatcgtaatcaatcctgagaaagacaaagacatggtccaagacctgttggacttc

SEQ ID NO: 397843 - DNA, 89 bp, Homo sapiens
ccccacttccctgcactctcatcgctctcggcctcggcctcggcctccgacacgcttcagtatcagacacagcacagcagccatctgaa

SEQ ID NO: 397844 - DNA, 74 bp, Homo sapiens
ccgctgctgaccgcctgtcctactcaggccgccctggaagccgacagctctggattaatcgaattacagctgct

SEQ ID NO: 397845 - DNA, 73 bp, Homo sapiens
ttgatcaggtggaacagattcagaaggagcaggattaccaaaggggtatgttagagcccaccaaggaaccact

SEQ ID NO: 397846 - DNA, 75 bp, Homo sapiens
caccttaccttaaaccttttaagcaaggaaattgaactaagaaatggagagaaaactgtcgctgaaaagcaggag

SEQ ID NO: 397847 - DNA, 82 bp, Homo sapiens
cgggctcctgcgagaagcaagcggaacttcctgagacaatgcagatcttcgtgaagactctgactggtaagaccatcaccct

SEQ ID NO: 397848 - DNA, 75 bp, Homo sapiens
caagaagaagacctgcacgacgttcatagttgactccacagatccgggaacagcctgcttggacacagctcggtg

SEQ ID NO: 397849 - DNA, 100 bp, Homo sapiens
ggggcagcgtccctgtgacctggccgatgaggaagtactgagcctgttggaggaactggcccggaaacaggaggacgctggtgtgcaatggcgtgatctc

SEQ ID NO: 397850 - DNA, 75 bp, Homo sapiens
ccggtggaatgggtccaggccgtggtcagccgcttcgacgagcagtgggaaagaagcctaaggaataaagtcatc

SEQ ID NO: 397851 - DNA, 90 bp, Homo sapiens
tggaacatggacgtggagaggcaggaggttcccgatatggatgatgaagaaggagaaggagaagaagatgatgatgatgatgaagaggag

SEQ ID NO: 397852 - DNA, 50 bp, Homo sapiens
cagctccgaaatcaccaccaaggcctggcgcaagcgctggtttgtcctcc

SEQ ID NO: 397853 - DNA, 100 bp, Homo sapiens
cgtcggtgctcgggaagaggaagtgacgtacgtccggtgtaatggcggcgcggtggagctctaggggccagatggcttacccatgcctggctgttggcaa

SEQ ID NO: 397854 - DNA, 75 bp, Homo sapiens
aaatgtttcagttcagcgcttttgcctgcagttgaggctttatgaaaacccgcctagtgccaagcaaccctccaa

SEQ ID NO: 397855 - DNA, 95 bp, Homo sapiens
tcctgggctcaagtgatcctcctgcctcagcctcccgagtacctgagattagcccagaatagcctaacatggcagaccagagacagcgctcactg

SEQ ID NO: 397856 - DNA, 101 bp, Homo sapiens
ggagaggagtctccaccaggactgaccgctgccgcccagcacgtccaggtgagagaacgccgagccgtcgccgcagcctccgccgccgagaagcccttgtt

SEQ ID NO: 397857 - DNA, 75 bp, Homo sapiens
gatcctgaggaggcagctgcggtggcagctgctgagttctcggtgaaggccctttctggttactgtggctttatg

SEQ ID NO: 397858 - DNA, 50 bp, Homo sapiens
cgcagtggtcgcttcttctccttgcaatttgcaacccaaaatgtctttat

SEQ ID NO: 397859 - DNA, 154 bp, Homo sapiens
tccagcttcctctacataggggacatcgtgtccctgtacgcggagggctcggtcaacggcttcatcagcaccttggggcactactgcagtcttcagttaagcaacaagtagaagctattgaaaaacagtacatttctgcaattgagaaacaggc

SEQ ID NO: 397860 - DNA, 51 bp, Homo sapiens
atgcagaagaagccaaaaacattctggtcaccttcaggccattcagaggag

SEQ ID NO: 397861 - DNA, 90 bp, Homo sapiens
ggactgcagcgaggacggcgaggcgctcaacggcgagccagagctggacctcaccagcaaggcagcagagaccacactggctgtgcgcag

SEQ ID NO: 397862 - DNA, 82 bp, Homo sapiens
ccggcgccgaggcggccacccgagacgcggcgcgcacgctccggcctgcgatggactcaccctgtcacccaggttggactgc

SEQ ID NO: 397863 - DNA, 50 bp, Homo sapiens
accggccagaggacgagtgtgacttggtcaggtactttcagggcctgggc

SEQ ID NO: 397864 - DNA, 90 bp, Homo sapiens
cgcgccccaagcccgggcgccaccgctgccacctccgcgagccccagtggacaggaaagctaaggcctcagcgatgccggactccccagc

SEQ ID NO: 397865 - DNA, 82 bp, Homo sapiens
ctgtccagatgctgaaaagagaaggtcaaacagctgaaggtaacctggatggagaggaccatgccgcagagcgaacggtgga

SEQ ID NO: 397866 - DNA, 74 bp, Homo sapiens
gctgcccacatctcatccaaacagttctgatacaacaccccttttaaatggatcaagccaagacagaatgtttg

SEQ ID NO: 397867 - DNA, 107 bp, Homo sapiens
gagcctcagttggaagcagccgatccagcctgcggagcctgtggggcaggtagctacagcaagctgggtagcaggcagatccaaaggatatcatgaagtttccaggg

SEQ ID NO: 397868 - DNA, 100 bp, Homo sapiens
ctggagcactctctgccttggccagagaagagaacagacctagctcctggaggtggggacgattggatctatgatttgggcatcaaatattcgtttacaa

SEQ ID NO: 397869 - DNA, 80 bp, Homo sapiens
ctgggaacctatagaggctcccttaatgcggagaaagggttgaatctccagtgatctgtaaaatcttagatacagcagat

SEQ ID NO: 397870 - DNA, 75 bp, Homo sapiens
gctcttctcgttttactgaaaaaggcacctcctcaggcttatgataggtatcaatcaggattgagcactgaattc

SEQ ID NO: 397871 - DNA, 51 bp, Homo sapiens
tgtgcatctgactgtgctttccgattactctcgtggctttggtggccggta

SEQ ID NO: 397872 - DNA, 75 bp, Homo sapiens
gccagggtccctgaagagggaagacacgcggaaacaggatcatggggttgacagcagcattttccagaatcctaa

SEQ ID NO: 397873 - DNA, 95 bp, Homo sapiens
ttgctgtatccaggccttattcttatagactatggacattttcaagctgttgaaggatttattcgagacaaatatgagaagaagaaatacatgga

SEQ ID NO: 397874 - DNA, 100 bp, Homo sapiens
tcaagaagttgaaaaacgcttttcacgtcacctggagagatgcacagtttcctccttatgcaactaatgaaattggcaaagtcactggtttaaatagaag

SEQ ID NO: 397875 - DNA, 114 bp, Homo sapiens
gaaagctgcggcctgtatcaccagaggagattagacgtagcagattagatgatcttagctatcgctggcttctaaatgaatttcctgtatttatcacaatggataaacggcgat

SEQ ID NO: 397876 - DNA, 50 bp, Homo sapiens
gttcaacctcagcgctctgaagttatcaatactctggctgaccatcatca

SEQ ID NO: 397877 - DNA, 75 bp, Homo sapiens
tctacatgaaaagtctgttaaaaatctttgcgccggcagcaaaagtggaccaagaaaccttgacagaaatggtga

SEQ ID NO: 397878 - DNA, 83 bp, Homo sapiens
cgcacagtccatcggcatacggagacaggtatcatgatattagctggtttgacatcaagtcatttgtgagtcatcagatcttc

SEQ ID NO: 397879 - DNA, 100 bp, Homo sapiens
ggactgttgcgggccccgggacctgggctgggaacccgcggtggagcgggacacgaacgtgcccgtggaccgggagcccgtggaccgggagccggtggtg

SEQ ID NO: 397880 - DNA, 97 bp, Homo sapiens
gatggattgccagggcttcctggcccgaaaggagagcctgctgggttgcggcccatttgtgaatttatgaccttcaatttctccatgcaagccattg

SEQ ID NO: 397881 - DNA, 85 bp, Homo sapiens
atgagttgcttttaggcttgctggcccgcggggctgtccaggcacgcgaggcccctcagtcttatgatgtaatcagcgcgatttc

SEQ ID NO: 397882 - DNA, 75 bp, Homo sapiens
gtcctcctagaaattccccccgaagaagactcccccacatctgggatctcattttgcccaacggtggtactccag

SEQ ID NO: 397883 - DNA, 100 bp, Homo sapiens
atggccgcggttcccgagttgctgcagcagcaggaggaggaccgcagcaagggaaaagaagatctcccggagcagtgccctgaaagtgctggaccatgcc

SEQ ID NO: 397884 - DNA, 76 bp, Homo sapiens
atgggatgaataaaattggactcagagtttccattgacactgatatgacagaaccaagttgtattgttagacacac

SEQ ID NO: 397885 - DNA, 100 bp, Homo sapiens
ttttcataccaagccattttatggtggcaaactgcatcggtgatcctagaccttgaggaagaaaggcagcggcatgcacaggatacggctgaaggagatg

SEQ ID NO: 397886 - DNA, 82 bp, Homo sapiens
tggtactcagcaagctcgagttaaagttggatgtgctggaacagctctttcagtctcacatggcaacgaaaacaacttgtat

SEQ ID NO: 397887 - DNA, 100 bp, Homo sapiens
cggggccggaactggagccgaggcgcaggtggcgctggggcgccctgcgtccggcagaggaggcgagcatcccgctcaggtgatgaggaacccctcgcgc

SEQ ID NO: 397888 - DNA, 51 bp, Homo sapiens
gcgagcgctggacggagaggaaagcggactccctggaggaaaagcggaagc

SEQ ID NO: 397889 - DNA, 51 bp, Homo sapiens
aggtggttcagctcgcatagtgacaccagttggcgctccgaggcaaccttt

SEQ ID NO: 397890 - DNA, 100 bp, Homo sapiens
ttttcaagaactgccgtcttctttgcctgcactaatgggcgccaatgcttcggcattagagaaagagattggtccagaacagtttccggtcaatgagcac

SEQ ID NO: 397891 - DNA, 51 bp, Homo sapiens
ctcagcctcccaaagtgttaggattacaggcatgagccaccgtgcccggcc

SEQ ID NO: 397892 - DNA, 100 bp, Homo sapiens
ttgaaggacgtgtctgcttccactcctgccgtgattgtcagcttcctgaggtctcctcagccatgctgaactggcctgctttcttccccgggcgatgtgc

SEQ ID NO: 397893 - DNA, 75 bp, Homo sapiens
caagtgcgacagccacatggagacattcttgcgctgcatcgaagcctcaggtggccttggataagggctgctccc

SEQ ID NO: 397894 - DNA, 74 bp, Homo sapiens
tattgctgcaaaaaatgcagaactagaacaggagcttatgggaaattgcaaagaagattctttggcaagttatg

SEQ ID NO: 397895 - DNA, 100 bp, Homo sapiens
atgtcagctcagtgctgtgcgggccaggtgggcaaacgcagaggcgggaacaaactagccctcaagacgggaatagtagccaagaagcagaagacggagg

SEQ ID NO: 397896 - DNA, 102 bp, Homo sapiens
ccaccacaagcaacgaagcctgcaagctgttcgatgccacgctgacccagaggaattacggaggttgagctggtccggaatccctaagccagtgcgtccaat

SEQ ID NO: 397897 - DNA, 100 bp, Homo sapiens
ttctaatcatcagcatttacatgacagaaatcacctatgtttacagcgacaggatggcatagtcaatccaacaataagaaaagatttgaaaactggaccg

SEQ ID NO: 397898 - DNA, 85 bp, Homo sapiens
cggatggaaatcctaatgacagtctccaaattcgcctccatctgtaccatggcgcacggcggccctacaggagggtctgaggcgg

SEQ ID NO: 397899 - DNA, 96 bp, Homo sapiens
gcctcagggcattcatttcaggctccttctaaatggccaagcttttaatctagacaacgagcaaccagattatgatatggattcagaagatgagac

SEQ ID NO: 397900 - DNA, 60 bp, Homo sapiens
atgcaattctgccaccatgatggaagctacaatgagctactgtttattattgatacttgc

SEQ ID NO: 397901 - DNA, 100 bp, Homo sapiens
gaggatctcttctaacatccagaagatcacacagtgttgggaccaacaaggcaccatggcgcagaagggccaactcagtgacgatgagaagttcctcttt

SEQ ID NO: 397902 - DNA, 75 bp, Homo sapiens
cctcggagcaacgagcgcagcgccggccaaatttgagtttcatcatggtgactatgaaaaacagtttctgcatgt

SEQ ID NO: 397903 - DNA, 75 bp, Homo sapiens
ctcccaagatgtcgcagacggccatgtccgaaacctacgaaaatggacccaagtggggtcaaagtgctggaaaca

SEQ ID NO: 397904 - DNA, 89 bp, Homo sapiens
ggagatactgcctaatggactggctttcattagctctgtgtgtagaccacactccaaaactgaaactgtggatggcagccatgaaggaa

SEQ ID NO: 397905 - DNA, 140 bp, Homo sapiens
agaaggcagccacagtgaaatcagacatctacagcttttctatgatcatgcaggagattttaacagaactcttgatgtttcagtgagctttaatggaggaaaatctgtcatttcaggatcattaattgtcacagccacag

SEQ ID NO: 397906 - DNA, 90 bp, Homo sapiens
cgaaatgttgatttggatttggcagcatctcacagaaagagaggaaaatcctgccttgcttcgttgggcctatgcaagaacaataaatgt

SEQ ID NO: 397907 - DNA, 99 bp, Homo sapiens
gaaattattcacaatctattgttcaaagaagacagttgattatgggacggaaggccaaaaagcaaatggatttccacctgacaaatcttcgggatccaa

SEQ ID NO: 397908 - DNA, 90 bp, Homo sapiens
tcatcatgatggacttggagctgccgccgccgggactcccgtcccagcaggggaattagtgacccactgaccgtatttgaacaaactgag

SEQ ID NO: 397909 - DNA, 75 bp, Homo sapiens
ggcgaaggtctcagagctttacgatgtcacttgggaagaacccttaggagaaatcttgagagtggacagcaattg

SEQ ID NO: 397910 - DNA, 90 bp, Homo sapiens
gagcgggtcaccgactatgcagaggagaaggagatccagagttccaatctggagacgcctccttttagaggactcagaagaagaagaagg

SEQ ID NO: 397911 - DNA, 100 bp, Homo sapiens
agctccgatccctgcgcgggctcgagagctcgccccgaacgggggtcttcctcctccgccgttgacagacctgcctagagctggaacgttacctccagag

SEQ ID NO: 397912 - DNA, 97 bp, Homo sapiens
tggcttccagtggaggcattttggggcagaatacagagatatggaatcaggtcctcgatgggcttcctggaatattggtgtgtttatttgcatcaga

SEQ ID NO: 397913 - DNA, 101 bp, Homo sapiens
taaaagttgtttctggaattgatctcgccaaaaaggacatctttggagccagctctattaccaggttttaaacttcgccatgatcgtgtcttctgcactca

SEQ ID NO: 397914 - DNA, 50 bp, Homo sapiens
cgccctcaaggccatgatcaaaacgttttgagcaaaattttggactgtga

SEQ ID NO: 397915 - DNA, 100 bp, Homo sapiens
tgtgcctcctcctcctgtggtggaggagaaggaaagtcatcagtgagttctgcctcagtcagctcccaagtgaggacgcagtcacctttgaagactccgg

SEQ ID NO: 397916 - DNA, 50 bp, Homo sapiens
tgcaattatgagttatgtgttgacatgttatggaggttttgatgactatg

SEQ ID NO: 397917 - DNA, 100 bp, Homo sapiens
tggcaacggccaacttcggcaagatccagatcgggatttacgtggagatcaagcgcagcgatggttaaagcggcaactggggaagaagtatctgctgagg

SEQ ID NO: 397918 - DNA, 82 bp, Homo sapiens
gcagtctctctgtgtggctgtaacttacgtgtactttaccaacgagctgaagcagcggacaaggcaaaatctcagcaagttc

SEQ ID NO: 397919 - DNA, 83 bp, Homo sapiens
gcacatgctgggctaccctgctcactttggacaggcagaagctcctcctggggtagagacagatcttattgatgttggattca

SEQ ID NO: 397920 - DNA, 90 bp, Homo sapiens
tgctaaggccattggacacagaatccgagtgttactgaatcaaatggatggatttgatactctgcatagagttaaaatgatcatggctac

SEQ ID NO: 397921 - DNA, 100 bp, Homo sapiens
ggaagctgagggctttcaggtcacctacctcccagtgcagaagagtgggatcattgacctaaaggacgggctctacgagtgcattctctgtgcctgctgt

SEQ ID NO: 397922 - DNA, 95 bp, Homo sapiens
ttcgacaaccccgccacggtcttcttctctgtcttcatggccctctggggactgcctccgggcctgccaggagcagatcgaagccctgctggagt

SEQ ID NO: 397923 - DNA, 51 bp, Homo sapiens
ccacaaaccgctgccagaaaatacctggagtagaacagaaaaattattatg

SEQ ID NO: 397924 - DNA, 100 bp, Homo sapiens
tccgccggctacagcgggaagagcgtgatgaacggcagcagccactcaccaacagccatcaatggtgcaccgtgcacacccaacggcttcagcaatggcc

SEQ ID NO: 397925 - DNA, 100 bp, Homo sapiens
cagactacatggcatctaccataggggaggcaagtgaggcctatctggttggcctttttgaagacaccaacctgtgtgctatccatgccaaacgtgtaac

SEQ ID NO: 397926 - DNA, 98 bp, Homo sapiens
accctacttgcctaaatgaggaatgtctttcctaccatctaaaatacgaaggtttctggctggggcagacctccttatgctgcttcagcagaagaagt

SEQ ID NO: 397927 - DNA, 50 bp, Homo sapiens
cctttgcagaaatgactacattagacctgcctagagctggaacgttacct

SEQ ID NO: 397928 - DNA, 101 bp, Homo sapiens
tggggctacaggcgtgtgtcactgcgcccagagtcaatacagatttgtatgtgaagctattttgaaagtttatgaagaaggctttgttaaacccttaacaa

SEQ ID NO: 397929 - DNA, 95 bp, Homo sapiens
ccgggggcccgtactgcacatcgtggtggtcggatttcaccacaagaagggctgccaggagccctctggcacaaatggaagaagaaagaagggag

SEQ ID NO: 397930 - DNA, 100 bp, Homo sapiens
aacagacaaaaggtcccctgggtatagatcctcagaaaggaataggaacagcatatgaaggtcatgtcaggccagactgttgatctcctcatgcaagagt

SEQ ID NO: 397931 - DNA, 100 bp, Homo sapiens
agcctttaccaacgccatcaccgacctcatcagtgagctgtccctgctggaggagcgcttccggatcaccagaagctggagagagaggctcggatctgcc

SEQ ID NO: 397932 - DNA, 100 bp, Homo sapiens
tgcccgggcggggagggcatgttccgtggcctcgcccaggccgacgggttacaagcctgatgaagggaaacgaggggatgcctgtgaaggtgacagtggg

SEQ ID NO: 397933 - DNA, 99 bp, Homo sapiens
gccccggatgtggcgcggctgcgcgaggagcaggaaaagggtcagtttgaaaaggaggatcgagctcactgtggagtatccatggagatgtggagcctt

SEQ ID NO: 397934 - DNA, 113 bp, Homo sapiens
gcccaatctggtccctctgaacggccaggacctccgcagagggccctgctggcacgaggcactaaggaagtggccatgcgcaagctggtgcgctcagtgactgtggttgagga

SEQ ID NO: 397935 - DNA, 100 bp, Homo sapiens
aagcaaactctcctgaggagctatccagcccagaaactaatctggattcactccctctggttgatacccactcaaaaaggacacttctgattaagacggt

SEQ ID NO: 397936 - DNA, 82 bp, Homo sapiens
gccagtagcttggatccttgtgggcatgatccataatcggtttcaagacccccagggtggccagcggcagagccagcagaca

SEQ ID NO: 397937 - DNA, 75 bp, Homo sapiens
gaccagtagccgccctggatccatccggaggaagctgcagccctcgggtgacaaccagggcatccccatcatgtc

SEQ ID NO: 397938 - DNA, 83 bp, Homo sapiens
cagattcgcagtggtcgcttcttctccttggacaccatatctcagaagacggtagagattgcatctcctgcaaatatggacag

SEQ ID NO: 397939 - DNA, 97 bp, Homo sapiens
ttagaggacttccctttggatgtagcaaggaagaaattgttcagttcttctcaggggtacgtcagcttgaaattatgtgctgctttggctgcatgtc

SEQ ID NO: 397940 - DNA, 90 bp, Homo sapiens
ctgctgtatgcaagttttcacttatctcgaaagcctatcagcatagttaagatggacgacgaagacacgttgttacctaggaagttacag

SEQ ID NO: 397941 - DNA, 82 bp, Homo sapiens
tatggacagccgtatgcagctggccaaactctgctatgacccagattttgaaaacgtggagagaagggtgatccaggagaag

SEQ ID NO: 397942 - DNA, 59 bp, Homo sapiens
aagggcatcatctcgattttggatgaggatgaagatgacgctgatctctcaaaatataa

SEQ ID NO: 397943 - DNA, 82 bp, Homo sapiens
aataccacgacaaaaccaccctacttcgcagaatcaagaacggctatgtgcgtttaaagatccgtatcagcaagaccttggg

SEQ ID NO: 397944 - DNA, 50 bp, Homo sapiens
ccccaatccccggcagctctctcagatggcccactgcgtgaccttggttc

SEQ ID NO: 397945 - DNA, 75 bp, Homo sapiens
cctcccttctagagattactatgaatgcactggaatctataaagaggttgtggcagcactgcctgaaggtatgag

SEQ ID NO: 397946 - DNA, 74 bp, Homo sapiens
gactgctattgaaggaaattctttggggcatctggtccagggaatttcttttttcaatttggctaatgaagggc

SEQ ID NO: 397947 - DNA, 100 bp, Homo sapiens
caatgaggccaagtgcgacagccacatggagacattcttgcgctgcatcgaagcctcaggccctaggcgagcccctttaccgggtgagcaccggcaacta

SEQ ID NO: 397948 - DNA, 90 bp, Homo sapiens
gccaagttgaaaatggacgagtaatcgcctgctttgattcattgaaatgagtctgccaaaaaagaggtggttgctgaagtggtaaaagcc

SEQ ID NO: 397949 - DNA, 97 bp, Homo sapiens
ctgtcccgggcctaccccctggactccctggagaagcagatggaaaagctgcattaatactacattgtcaaagacaaagacgaacatgagacatgcg

SEQ ID NO: 397950 - DNA, 74 bp, Homo sapiens
ggtgcccgaggagtagtcgctggagtccgcgcctccctggtatccatatattcctgcacatattacaaagccta

SEQ ID NO: 397951 - DNA, 116 bp, Homo sapiens
gaagaaatggacatgattgcctaaatcagccaaacacagggcgggctggtccgagtctctgttttggaagctcaaccagtggctgatgattcacatgtttcactgccgcatggttc

SEQ ID NO: 397952 - DNA, 100 bp, Homo sapiens
caggatttggatgaagtaatggatcactaatgaactacagtgctggtgagatgtgtaagaggctggaagatggcagcccccggactgggcagatcttcaa

SEQ ID NO: 397953 - DNA, 100 bp, Homo sapiens
ggctcggggcctccgcagcgacaacatggaggccgtgaagaccttcaatagcgaggcatattctcaagatgcctacctgaaaggcaacgaagcttatagc

SEQ ID NO: 397954 - DNA, 100 bp, Homo sapiens
caagaatgggattctgaccatctcacatgccacaatttcacctgtgtacacgatggcgagagtgaggctgaattaatacctgatgactttgaagaaaaac

SEQ ID NO: 397955 - DNA, 100 bp, Homo sapiens
ctcctgcagtctctctgtgtggctgtaacttacgtgtactttaccaacgagctgaagcagccgggggccattgagactgccatggaagacttgaaaggtc

SEQ ID NO: 397956 - DNA, 50 bp, Homo sapiens
ggctgcgccgcgggagttcgaggttttgagcaaaattttggactgtgaag

SEQ ID NO: 397957 - DNA, 90 bp, Homo sapiens
acggcctggctttctgcgccatcctgcaccgccaccggcccgacctcattggcttttcatggcctgccactgaaaatcaagaaagaaccc

SEQ ID NO: 397958 - DNA, 75 bp, Homo sapiens
ctctctgctgcggcgcggggaccgctgtgctctcggtcggccctcctccacgctgacttccgggtctcactctcc

SEQ ID NO: 397959 - DNA, 100 bp, Homo sapiens
ggaagaggggctggagcccacctgctttgagaagagcaatgacattgggggcctgtggaaattttcagttcaatacttcttcaagatcttggataattag

SEQ ID NO: 397960 - DNA, 130 bp, Homo sapiens
ggggaatttccttgtgcctccattcccgggaggggggagcggcgttggaggccaccgtttccaggaagccagttgagggaagttctccatgaatgtacgtcacaatgatgatgaccgaccaaatccctct

SEQ ID NO: 397961 - DNA, 100 bp, Homo sapiens
gcaattgcaaaggaaaagcatggctacaatgtggaacagggttgctcatcacccatggtggtaaaatttgctgatacacagaaggacaaagaacagaaga

SEQ ID NO: 397962 - DNA, 90 bp, Homo sapiens
acttgattacccgttaagtcccccaaagatgagatttacctgtgagatgtttcatcccaacagtgagcgagtgctgtgctttcatgggcc

SEQ ID NO: 397963 - DNA, 75 bp, Homo sapiens
gtccagcacggccaagtcagccacctggacggtgttcaggcgcttcgtggaggttggccgggtggcctatgtctc

SEQ ID NO: 397964 - DNA, 75 bp, Homo sapiens
tttcaatgctgcgaaagctgccaaaagtgacatgcagcaaaagcgaaagcttcggatctacatttccaatacgtt

SEQ ID NO: 397965 - DNA, 99 bp, Homo sapiens
ttgcttcaaaaaggaagcacaaagattgcgctatatggtttaggagcttctaagtaggacatccttagaaactcagaagttggatctgatggctgaaat

SEQ ID NO: 397966 - DNA, 82 bp, Homo sapiens
ctcagagaagtgaagcaacttgcccagctatgagagacagagccaggatttgaaaccaggatcaggtcatccagctgatgaa

SEQ ID NO: 397967 - DNA, 90 bp, Homo sapiens
gacccacttgcagcatggagtcgcccgcctcgagccagcccgccagcatgccccagtccaaagggacccagacatggagctgcgggaaga

SEQ ID NO: 397968 - DNA, 89 bp, Homo sapiens
ttcacactactatgagagctttctagagaagaaggggccctgtgaccgggtggagtttgaggacgggtcccagctgacggtgaagcgtg

SEQ ID NO: 397969 - DNA, 83 bp, Homo sapiens
acctatggctttattgacctcgactcccatgcgatatgtgttgagacggattctccgccgagctgtccgatacgcccatgaaa

SEQ ID NO: 397970 - DNA, 85 bp, Homo sapiens
ccaagtccagaatccgcgcgcaccgcgcttggaagctcgaagtctggctgtggccatgggagatacagtagtggagcctgccccc

SEQ ID NO: 397971 - DNA, 109 bp, Homo sapiens
cgcaaccattgacgccatgtcgggttattcgagtgaccgagaccgcggccgggaccgagggttgagaacttgttgcttagtaaccaagggaccattaagctgtgtgact

SEQ ID NO: 397972 - DNA, 82 bp, Homo sapiens
agatgtaccggaccctgttcttcagacctcgaagtagggggaaaactgcagtggaagatgaggacagcatggatgggctgga

SEQ ID NO: 397973 - DNA, 83 bp, Homo sapiens
gtgtctggaaggacaccaggtgaaactcaatgctgctgaagagatgcttcaacaggactcattaccagagaagctggctgtgc

SEQ ID NO: 397974 - DNA, 100 bp, Homo sapiens
ccatgccatcaacctgcgtgaggtcaacctgcgcccccagatgtcccagaatcagtcggatttgtcagatgaagagctaaatgatgatcttttgcagagt

SEQ ID NO: 397975 - DNA, 124 bp, Homo sapiens
ctcgcggttagcccgtcagtccctgctctgtgcgcgcctccatctgggccatggatggagttgtggaaagtaaaaatgtagccctaccaaaaggaactattgtactggcttctccaggctggac

SEQ ID NO: 397976 - DNA, 101 bp, Homo sapiens
gaccggctcacagagaccatggaggcaaaaacttgcccaactagaagaggcgaagcaggcttccatccaacacatccagaatgcaattgatacggagaagt

SEQ ID NO: 397977 - DNA, 98 bp, Homo sapiens
acctctgagaagggagacgacgctgctgggtccgctgagcggggcgacccgaggccaaatgtgtgtggaaacacccacctggtgatgagatatatcgc

SEQ ID NO: 397978 - DNA, 100 bp, Homo sapiens
taaaagagacctctacttagctcagcaattcttaccttgtggtcctgggcggtggtcaggaagccatggatgtaaccacaacctccaccaggattggcaa

SEQ ID NO: 397979 - DNA, 100 bp, Homo sapiens
gataaaacagctcgcagggaagatgaaagttacggggcgtctgcctgagcccgcttttctacaagatgtggggatttttgaagcgccctgtagtggtgac

SEQ ID NO: 397980 - DNA, 100 bp, Homo sapiens
gccgtgaatgtgacgaaggacgaaaaggaatatatgaaatctattcgatgcgacctaaagtcatgtggcacctccttcgaaggtacatggcatcccggct

SEQ ID NO: 397981 - DNA, 98 bp, Homo sapiens
gatctgaccgtagtttgccaaattaagaaaacgtctattatcctcccagtccacaacgctgaaccgtggctggacgaatgtttgaggtctgttttgca

SEQ ID NO: 397982 - DNA, 75 bp, Homo sapiens
ggaggaatccgagaagagcagagcggagggagccccagacacggcactatgtcgtccgaggcccagagatgaccc

SEQ ID NO: 397983 - DNA, 83 bp, Homo sapiens
aaggatcatgtctgcgagccaggattcccgaacccagcgggtgccgcttctccacccgaggcttccacctccaacgagccatg

SEQ ID NO: 397984 - DNA, 90 bp, Homo sapiens
gcggcgaaccgtgggcagtgagactcccagctgcaggaggagctgcggggcctgagagagacgttcagcaacttcacagcgagcacggag

SEQ ID NO: 397985 - DNA, 98 bp, Homo sapiens
gccgacttcgatgatcgtgtgtcggatgaggagaagtcggatacttctggagactatgaaatcacactcttaaaaatctgtggtggagatgactgaac

SEQ ID NO: 397986 - DNA, 83 bp, Homo sapiens
gtatgattaggccacaatcttcaatgagtaaacatattcctggtcggcactcttcaccctcccgagccctgcccgtctcggcc

SEQ ID NO: 397987 - DNA, 97 bp, Homo sapiens
ccttcagcaacctctgggaacacaaccaagcaatcatcaagcacctcctcgccactgaggcggctcccagctgcgttggcgacatggccgacacccc

SEQ ID NO: 397988 - DNA, 83 bp, Homo sapiens
cctaccagctaactgaagagggcacctttaaggtggtggatgaagaggccatggagaagctggccatgggcaagatgatggag

SEQ ID NO: 397989 - DNA, 75 bp, Homo sapiens
gagcgaacgccacgccgttgggcggtaaccagcgtgagctcgcccgccagaagaatatgaaaaagcagagcgact

SEQ ID NO: 397990 - DNA, 97 bp, Homo sapiens
ggggacaatgaggaggagacggagcacgccaaagggtgctgatgtatggacagccgtatcgtgttaccttagagcttgagctgccagagtcccctgt

SEQ ID NO: 397991 - DNA, 49 bp, Homo sapiens
tatttatggaagacactgcctggatttctctgcctcttccaaacttttc

SEQ ID NO: 397992 - DNA, 83 bp, Homo sapiens
cagctgcagaaggacaagcaggtctaccgggccacgcaccgcctgctgctgctggatcatgtttgagaccttcaacaccccag

SEQ ID NO: 397993 - DNA, 100 bp, Homo sapiens
ctattgattgggtgcgagaaaaatgtaaagacagagaaaggcatagacggcgagaaaatgtcattgaatataaacactgtttgattacaaaaaatgagaa

SEQ ID NO: 397994 - DNA, 75 bp, Homo sapiens
tgatgcaagaagtttctaggaaaggccggacaccagacctaatctgggagcctgcaagtgacaacagcctttgcg

SEQ ID NO: 397995 - DNA, 105 bp, Homo sapiens
tggggaggcgaggccggacgcacctctgtttgggggtcctcaggtgctggagaatctggtaaaagcaccattgtgaagcagatgaggatcctgcatgttaatggg

SEQ ID NO: 397996 - DNA, 82 bp, Homo sapiens
acctactgggattccttgggcaatggtgaatttgaaaagcccctggaggaacgcgcatagatgatggtgacaagaccaagat

SEQ ID NO: 397997 - DNA, 87 bp, Homo sapiens
attccggcgggaactcgactcttggcgccaccgcctcatgcactgtgtagcctagaacattccatattctgcttcacacacggtgac

SEQ ID NO: 397998 - DNA, 75 bp, Homo sapiens
tgagacccggaggaggttcgaagctgagtatgtgacagagaatttggatggagagacccggaactgccggaagtg

SEQ ID NO: 397999 - DNA, 98 bp, Homo sapiens
gaacaccttgctgctggggaagaaggtggtccttgtaccctacacctcggagcatgtgcccagcagctaccaagggggtgccagctggaaacagtgac

SEQ ID NO: 398000 - DNA, 90 bp, Homo sapiens
tttcctgtcatcccgctgctacccacctgcatggcatcagcagagcagccaatacaagagttgcggaaagttgttcttaatatcttgcaa

SEQ ID NO: 398001 - DNA, 74 bp, Homo sapiens
tttcatgaaatatgtggattccaatctctgttgcttcatcccaggaaagggtgcttattggttctccgttagtt

SEQ ID NO: 398002 - DNA, 100 bp, Homo sapiens
ggaagcgtttttgaagactgttgcccaaaactacagttctgtcactcacttacacagtattgggaaatctgtgaaagggagtagagctgtggtaatggag

SEQ ID NO: 398003 - DNA, 100 bp, Homo sapiens
gacaaccttttcaaatgggtagggaccatccatggagcagctggaacaggttgatccattttctaagaaagattggtatgatgtgaaagcacctgctatg

SEQ ID NO: 398004 - DNA, 98 bp, Homo sapiens
gaaagcagatccgtggttccctgcagactggcaggagcagattccaaaggcacaggaagaagcttgcaggctggagtgcagtgacgtgatctcggctc

SEQ ID NO: 398005 - DNA, 83 bp, Homo sapiens
cgtatcggggcctttatttctcgtcggcggcgccctgcaccgcgcctcgcaaaggtcggcactcttcaccctcccgagccctg

SEQ ID NO: 398006 - DNA, 85 bp, Homo sapiens
ccgcaccgcggcttaaatgatgtattttgtgatcgcagcgatgaaagagtcaagggtccagagaaggaggagaagttgagacagg

SEQ ID NO: 398007 - DNA, 98 bp, Homo sapiens
cgggatcctctgctgcatagtttcggtcatctaaaggaggttttaaacagtataacaggaaattgagagtcagattgacagaatctgtgaaatgggag

SEQ ID NO: 398008 - DNA, 75 bp, Homo sapiens
ttaatcagaaggtgaagtttcagatgcttcaggactgccccaaggcccgcagggaggtggagctgcactggcggg

SEQ ID NO: 398009 - DNA, 97 bp, Homo sapiens
ccttcacccaacattgattatatctccatccaactggacctcacagataccaggagcaaaattgtgtacaagtttaccaagtactggacagaatcaa

SEQ ID NO: 398010 - DNA, 74 bp, Homo sapiens
ggaaatgtgtcatcgaaagccaggtggactggcagaggaagtggacgacaaagttcttcatgctgcgttcattc

SEQ ID NO: 398011 - DNA, 80 bp, Homo sapiens
aaaagacagccagcatttccatcgcaggtgcggccgggtgtgtggcaacattacttcatgatgcagccatgaaccctgcg

SEQ ID NO: 398012 - DNA, 90 bp, Homo sapiens
ggccggcgcctcctcggagtccttggggacggagcagcgcgtcgtggggcgagcggcagtgctgtgatcttggctaccatgcaagtctga

SEQ ID NO: 398013 - DNA, 121 bp, Homo sapiens
cagaaatcaaagactttgaatgtgcctaaagagcatgaagacaatatatttacacctaaaccaacactcttttctgaattggagaagcctagaggcaggaaaaaaacgcccgtcacagaac

SEQ ID NO: 398014 - DNA, 101 bp, Homo sapiens
cactggtgtctcctgcggaagggcagctgggcacgccttccagaccgagcttgttctcagaacacaaacaaaacctgtgaagagtgcctgaagaacgtctc

SEQ ID NO: 398015 - DNA, 100 bp, Homo sapiens
gtccctgggaataactgccatagaaatggctgaaggaaagcccccttatgctgatatccatccaatgaggacaacactaagcagttgagatttgaagatg

SEQ ID NO: 398016 - DNA, 48 bp, Homo sapiens
caacatgcctctgacaatctctagtgttttgcgtgtgaagctgtgtgg

SEQ ID NO: 398017 - DNA, 100 bp, Homo sapiens
ccactggaagatgactgtcaagttttagaagagattacaggctgtgccagccctggaaaaacagttacaattgttgttcgtggttctaacaaactggtga

SEQ ID NO: 398018 - DNA, 74 bp, Homo sapiens
tgtaaaagagctctggaaatccgagaaaaggtcgggtcggcagcggttctggtcggaacctgtgggtcagcggg

SEQ ID NO: 398019 - DNA, 100 bp, Homo sapiens
cagcaaaaatgacccaccaatggaagcagctggcttcactgctcagggcatgaccattcggcccctggtagacctgttggctgtgaagaaaaagcaagag

SEQ ID NO: 398020 - DNA, 100 bp, Homo sapiens
gttcccaagagccaggtagcagacacaagctctttggtgtaacgggaaactgcgctgcctgtagtaagctcatccctgcctttgagatggtgatgcgtgc

SEQ ID NO: 398021 - DNA, 100 bp, Homo sapiens
cgggcgccgctgtagccgcccaccggtttttctgccacttttgcaagggcgaggtcagccccaaactaccggctctggaatctccagctatggaaataac

SEQ ID NO: 398022 - DNA, 75 bp, Homo sapiens
gttaaggattccaagtaactcttatttggttcaaaccttgtactactcagctgatcacaagctgcttgatgggaa

SEQ ID NO: 398023 - DNA, 75 bp, Homo sapiens
ggattcttatgtggctagtttgcagatcttgatgtggaagaaatggaggactcagaaccaaggatttccaagtga

SEQ ID NO: 398024 - DNA, 118 bp, Homo sapiens
aaagaacccacaggtgcatttcacagcactctgggcgaaaattggatgtgaaaatgaagccagaccgagtattgtgtatggatgcaaagatcaattttgactctaattcagcctatcg

SEQ ID NO: 398025 - DNA, 100 bp, Homo sapiens
gcaccgcacgccctgcaagggagattgtctacaaagcctggctctgttcccagtattttgaagtcacacagtttaactgcagaaagacaattccttgcaa

SEQ ID NO: 398026 - DNA, 97 bp, Homo sapiens
atggactggaccccaacaggtttaaccccaagaccttcttcatactgcatggccgccatggcatcagatgaaggcaaactttttgttggagggctga

SEQ ID NO: 398027 - DNA, 97 bp, Homo sapiens
tgaagtagcaaaggcaagaaggcaacgacgttccatctgtggaaggacctaccaaccaggtcaaaatgcagatcttcgtgaaaacccttaccggcaa

SEQ ID NO: 398028 - DNA, 90 bp, Homo sapiens
cctccgccgccaagagtgagcgagcggacccgcgatggactggcgatggcgtgaacgatgctcctgctctgaagaaagccgagattggca

SEQ ID NO: 398029 - DNA, 100 bp, Homo sapiens
acatccactaccaattggacgggataggaccccatatcatgtgaacctcctcctggctggctatgatgagcatgaagggccagcgctgtattacatggac

SEQ ID NO: 398030 - DNA, 98 bp, Homo sapiens
ctcaaggccagccgcggcaacgaccgcaaccgcatcgtgctgcctttcagtttcgcctggccggaggaaaaggcttctcttttacatcgtactcagga

SEQ ID NO: 398031 - DNA, 75 bp, Homo sapiens
ggaaggactgcctgcctccaacagtgacagctggagtatcagccttggaagtatatacgccaaaagaaatcttcg

SEQ ID NO: 398032 - DNA, 100 bp, Homo sapiens
gcgccggtctccgcggaaatgttgtccaaagttcttccagtcctcctaggcatcttattgatcctccagtcgaggctcttgggaaagctggtgctgctgc

SEQ ID NO: 398033 - DNA, 101 bp, Homo sapiens
gtacagatgaacccatttttggaaagaagcccaggatagaagagtcaataactgaagacttaagggtgttgaaagcagcaggggcctagaagacattaaac

SEQ ID NO: 398034 - DNA, 83 bp, Homo sapiens
caccgcggcttaaatgatgtattttgtgatcgcagcgatgaaaggtccgcgggagagctgtggggcttggtgagtgtttcgtg

SEQ ID NO: 398035 - DNA, 75 bp, Homo sapiens
cttcacccagcatttcatccctcgtcgaaaggattggattggcatctttagaggcgtctgtgaggaaatgaccta

SEQ ID NO: 398036 - DNA, 77 bp, Homo sapiens
cagaagaaaatacactactcatcaaggaagaaccaggattaaagcaaggagagccaatcatgactggcaaaacacag

SEQ ID NO: 398037 - DNA, 76 bp, Homo sapiens
tgacgttcctgacgaagcaggagatcctcctgactgaccgatgatcagattgaagaattgaaattgaaggatgaat

SEQ ID NO: 398038 - DNA, 75 bp, Homo sapiens
cgagacctcaactcccacaactgcctggtccgcgagaggcaccttccactagcaacagtctccccaggcacaaca

SEQ ID NO: 398039 - DNA, 50 bp, Homo sapiens
ctgagatccatctgcaccacggtgctgctacgtcaaaagctacctcctcc

SEQ ID NO: 398040 - DNA, 75 bp, Homo sapiens
cagccagagaaggggccagtcggaaagaggaatgcaggctcaggttggaatgccaggaagtggaccagtgtccat

SEQ ID NO: 398041 - DNA, 100 bp, Homo sapiens
acatactatccgtttgttcaggaaccaccagtgacagacttggatatataagcagagtgacagcaggaaaagatagctatttagccttggtggataaaaa

SEQ ID NO: 398042 - DNA, 82 bp, Homo sapiens
cccttccccacgcaaccccagatccatttacactttacacttcagtatcagacacagcacagcagccatctgaagagcaaag

SEQ ID NO: 398043 - DNA, 75 bp, Homo sapiens
gctcacctgcgctgtgatgcctgcagagctgtggcttaccagctctgagcccagaggaagccgagtcagccctgg

SEQ ID NO: 398044 - DNA, 82 bp, Homo sapiens
ctgtggatgattatcgattacgggttgggcccgaaggcatcctgcagaacggggctgtggacgacagtgtagccaagaccag

SEQ ID NO: 398045 - DNA, 87 bp, Homo sapiens
ctccctctgcccccccttccccacgcaaccccagatccatttacactttacagatgacagtgatgggattccgtggtcagaagaacg

SEQ ID NO: 398046 - DNA, 100 bp, Homo sapiens
cttccggagcttctcagaagacagagggttttcttttgagccttgcagtctcatcctactcaagtgtggctctgtatccaacaacagtcttggagatctc

SEQ ID NO: 398047 - DNA, 100 bp, Homo sapiens
gacttgagttgccttgtctggtatccttatgcagaatgaactgaaataatcatcaatctgaaaagctactcttaaacagtagtttatgccaacgtgactt

SEQ ID NO: 398048 - DNA, 96 bp, Homo sapiens
gccagggcgtggtggagcacgaggaggacgaggagagccggcggcgggaggccaaggctgaccccgcactacatctacccaccagccatcgtgcag

SEQ ID NO: 398049 - DNA, 100 bp, Homo sapiens
ccagcagggacaatgagattgtagacagcgcctcagtccagcatgagtgcattccccaggccatcctgggcatggacgtcctgtgccaggccaagtccgg

SEQ ID NO: 398050 - DNA, 100 bp, Homo sapiens
attaagttcaatgtatgggacacagccggccaggagaaattcggtggactgagagatggctattatatccaaggaacacctcatcaaaatgcagaagcag

SEQ ID NO: 398051 - DNA, 50 bp, Homo sapiens
atgtcaaggataagtctcatgacaccatcatcacgaagtatgtatatgag

SEQ ID NO: 398052 - DNA, 99 bp, Homo sapiens
cgcctttccttcgaggagctcaaggcatttttcaaaatctgacagtttttctcacaacaaccctgtgaggtggtgaagcagtattttccaatttgaaga

SEQ ID NO: 398053 - DNA, 100 bp, Homo sapiens
aggctgtggtggatgcaggaatcactaccaagcttctgaccaatctgtgtttgtggatatcctcgacaacatgtaagaaaatataaaggtataagtagca

SEQ ID NO: 398054 - DNA, 83 bp, Homo sapiens
cgacggcagccggcacctgacggcgtgaccgacccgagccgggaaagcaggcaggatgggagagtcgccgatagaaccacctc

SEQ ID NO: 398055 - DNA, 104 bp, Homo sapiens
ctcgctgggagagaggtacctctccttttccctctccctttccctaagcctctatccggctgtggaggtcacgtctgggccgggtgatgtactccatggcaaac

SEQ ID NO: 398056 - DNA, 88 bp, Homo sapiens
aaggatgacatatttttggacctgaaacagaaattctggaacacctatatggttgttattgatgccttcagattgatcaatgctaata

SEQ ID NO: 398057 - DNA, 75 bp, Homo sapiens
cccgcgttcacagccccagcgcagtggacatcctcatcatggatgatgacgacgtccccagctggcctcccacca

SEQ ID NO: 398058 - DNA, 75 bp, Homo sapiens
cggacatgatcctctccgcctctcgaggtatccttagtctgttggagcatggagaagagtacacattttctctac

SEQ ID NO: 398059 - DNA, 50 bp, Homo sapiens
catgagttaagaaacatatttctacaggtgcttttgaagatgatgatatc

SEQ ID NO: 398060 - DNA, 75 bp, Homo sapiens
agaagatgtggactacaatggaaaccttccaggtctcctctgagcctccggcctccataagacccaaaacagatg

SEQ ID NO: 398061 - DNA, 90 bp, Homo sapiens
gaagaagagttcctggtcaatgtcaatgggtcacctgagcctgtgaaactgaccattaggtgttatttggaagatggagcttcaaagggt

SEQ ID NO: 398062 - DNA, 89 bp, Homo sapiens
tgggcggctttgaccgagaggctgctggagctcgtgtttggacgcatcatcaatgctgtggtactgttgattttattgagtgccctggc

SEQ ID NO: 398063 - DNA, 75 bp, Homo sapiens
tgtgtgagcgcgccggaccaagcgggcccagaagcggttactccacaggatccgctgaacataggatgttgccac

SEQ ID NO: 398064 - DNA, 87 bp, Homo sapiens
aaggtgtcatctgtgtgggtgcggagtggcatgacctacaagaacagtgaggagcttcggtctcgtattgtgtctggaatcatcaca

SEQ ID NO: 398065 - DNA, 83 bp, Homo sapiens
aggcggaggcatccttaccaaggaatctgcttttcaagtatgccaccaacagtgaagaggcagaagctcctcctggggtagag

SEQ ID NO: 398066 - DNA, 83 bp, Homo sapiens
cgcacagctgctcccttcgccttcgccctttccacctcgcggcagttcgcagaaaaagtcctacctggagcgaagcgttaagg

SEQ ID NO: 398067 - DNA, 100 bp, Homo sapiens
aagatattcaaggagacgacagatggatatctcagcacaacagatttgtcctggatggtgacagagctgaatgaacctctctccaatgaagatcgaaatc

SEQ ID NO: 398068 - DNA, 90 bp, Homo sapiens
tctccagtgactttggaagttgaagtaacaggatttccagagcctacactgacatggatggagtggttcttgttcattgtaatgcaggcg

SEQ ID NO: 398069 - DNA, 100 bp, Homo sapiens
ttatgcttataagagtggaacaggtcatttgattgcccgcctcagaacgatggatctgcatctcttcgactactcagagccagggaacttctcggacatc

SEQ ID NO: 398070 - DNA, 51 bp, Homo sapiens
gggtccgcatgtttaaagatgggaatgacgttggccggagctcctatggcg

SEQ ID NO: 398071 - DNA, 102 bp, Homo sapiens
atcttagcaagtgcggggaagagctgggtcgactcaaggaccgcctgtatttcgtgatggagtacgtcaccgggggagacttgatgtaccacattcaacagc

SEQ ID NO: 398072 - DNA, 50 bp, Homo sapiens
aaggtgtacatcgtgcatggcgtccagtgaattagtgccatcttacgatt

SEQ ID NO: 398073 - DNA, 75 bp, Homo sapiens
tggagcttggtttcgggatctcggtgctgcagacggcgagacctcctgcacagatggagtctcgctctgtggccc

SEQ ID NO: 398074 - DNA, 100 bp, Homo sapiens
gttgaaaatgagcagctgtcctcatgtctctccagcaggaaaaggccaaagttgttgagcccctggactatgagaatgttattgcccaaagaaaaaccca

SEQ ID NO: 398075 - DNA, 76 bp, Homo sapiens
ccccacctcaacaaccagcagctaatcacattttctcacaggagtatgcccctttagtggtgcaaccactggcaca

SEQ ID NO: 398076 - DNA, 51 bp, Homo sapiens
cgagaggagagcgcggccgactgcttcagaaatggagcagttaaggatcag

SEQ ID NO: 398077 - DNA, 116 bp, Homo sapiens
cctatgagatccagtttgggcacctgcagcgacctacccactacaatacctcttgggactgggctcgatttgagattatgtttgagaccttcaacaccccggccatgtacgtggcc

SEQ ID NO: 398078 - DNA, 75 bp, Homo sapiens
cagatggcagccagtcagtggtggaggttggactcttcacagaaattgggcccatgtcttgcttcatctctcgac

SEQ ID NO: 398079 - DNA, 100 bp, Homo sapiens
tggaaacatgggttcttgtggctaccagcctggtactcctctatatgtttttgccaatccagaagactgtgtagcatttggcaaaggagaaaatgccaag

SEQ ID NO: 398080 - DNA, 101 bp, Homo sapiens
tgcccgattgaagacagtgaagtttaatgccaaacctggagtgattgattcgaaaggggcaattgctggctactttgatatatattttgagaagaattgcc

SEQ ID NO: 398081 - DNA, 100 bp, Homo sapiens
ggccctcagcggccgcgaccgagtcatggctgagacctacggaggtggtccaggccacgctggtggtcctggccttggccatggtgcccatcctgctgct

SEQ ID NO: 398082 - DNA, 90 bp, Homo sapiens
cagcgccgcgcccggggccgtgcgctctcgggccactcggccgcaggctcttcgtcagattgggcagaggacgataagcactgcttcccg

SEQ ID NO: 398083 - DNA, 98 bp, Homo sapiens
gaaggaacttgcagaaatcacattggaccctcctcccaactgtaggtattttggcctctccccagtctgctcctggaaacttggacaatagtaaaagt

SEQ ID NO: 398084 - DNA, 75 bp, Homo sapiens
gaaagagagagagctgctgcaagagagaaaaatagggatcgtccaacccgaggagtaaacatggaagtactaact

SEQ ID NO: 398085 - DNA, 100 bp, Homo sapiens
tttgctacatgctctgatgacggcactgttagaatctgggactttcttcgttgccatgaggaaagaattctccgaggccaagctataacatcagaaatgg

SEQ ID NO: 398086 - DNA, 82 bp, Homo sapiens
agggaatggaggaggcgaccgttgttatcgagcattgatggtcctagaacaattggagattcatacgcacacaaagaacctc

SEQ ID NO: 398087 - DNA, 82 bp, Homo sapiens
gtctgaggtcatcggggatgtggacgaaggggccgacctcctaggctttatcctgtggataaacgcagagtgaacgagtttg

SEQ ID NO: 398088 - DNA, 83 bp, Homo sapiens
ggctgagactcggggcgccagtccgggcaggggcagcgggagccggccgggaagtggccatgcgcaagctggtgcgctcagtg

SEQ ID NO: 398089 - DNA, 90 bp, Homo sapiens
caaagacgtagaaagaaatcttagcaggaagccctcctatgacactgaaacagatcctagtgagggattgatgaatgttctaaagaaaat

SEQ ID NO: 398090 - DNA, 100 bp, Homo sapiens
gtctctctgctgcggcgcggggaccgctgtgctctcgagcccgcagcttcatctcccagctcaaacaacacagcggccacaacagcagctattgtcccgg

SEQ ID NO: 398091 - DNA, 100 bp, Homo sapiens
aacgttgctggtgacagcaaaaatgacccaccaatggaagcagctggcttcactgctcagtgaagttattgccagtggactgtgagagaaaaacagatga

SEQ ID NO: 398092 - DNA, 74 bp, Homo sapiens
cgggacggaggacgcgctagttcctcctccgcctcctcctctctgcatgcgcgtcagagcccgtgccaagaaca

SEQ ID NO: 398093 - DNA, 83 bp, Homo sapiens
gccgcacttacctatgaggccagcaagcggaggtgctgggagcgagttggctgccctgggcgctgcctatggcacagccaaga

SEQ ID NO: 398094 - DNA, 100 bp, Homo sapiens
gactgccgctgtgtgagccgaatcagaactctctttatctctcctacaggtaacctccgaggctatggcatggcatccccaggcctcgcagcccccagcc

SEQ ID NO: 398095 - DNA, 100 bp, Homo sapiens
ccggaatacctcggaagccgggaaatgggccatgtttatgagtggactaagtgaaagcaaacaaacccatgtacacctgaggaatgtcgatgctgccacc

SEQ ID NO: 398096 - DNA, 98 bp, Homo sapiens
ccgcgtgtgtccctgcgtgtccgcgaggatgcgtgttcgcgggtgtgtgctgcgttcacaggtgtttctgcggcagaggctgacccgcggctgattga

SEQ ID NO: 398097 - DNA, 99 bp, Homo sapiens
gactgttcagccgacttccgcacgcagtcggagcaggtctacagctttgtgccgggaagaagtccctgacctacttccaccgtgaccccagggctgcct

SEQ ID NO: 398098 - DNA, 88 bp, Homo sapiens
gggcgagcggctgtgtggatgtcggcgaagccgcgggcgaggcccctgtcccagctggccctgccccaggtactggggctgatcctga

SEQ ID NO: 398099 - DNA, 74 bp, Homo sapiens
gggcctgaagtgagtgagaggcacatgaagttttcggctttgtgagaaaccttaccatcaaacacgatggccag

SEQ ID NO: 398100 - DNA, 90 bp, Homo sapiens
cttggtttggaaaaatttcattagagaaggatgccctgcagtggtctcgccatccagctacagtggagggagaggagccagaggacacgg

SEQ ID NO: 398101 - DNA, 88 bp, Homo sapiens
aaggagttcacccctgaatacaaaggctgacagtgaccgcaggacccatccgactctgggccctcgggggccaatcctggggagcccc

SEQ ID NO: 398102 - DNA, 101 bp, Homo sapiens
ttcgtcatgatcaacaaatatggtcgacggtccaaatttggaatgaaggtgttgacctaaccaatgaagaaacaactgattccaccacttctaaaatcagc

SEQ ID NO: 398103 - DNA, 100 bp, Homo sapiens
gtgtacctgccgcgacaccgaggtgaaatgacaatggatgctctgttggctcgattgaaacttctgaatccagatgaccttagagaagaaatcgtcaaag

SEQ ID NO: 398104 - DNA, 90 bp, Homo sapiens
ttcatttagattggattctgaatatcaggcttcagggatgacttcttagggggcaggggaggtagtcgcccaggcgaccggcgaacaggc

SEQ ID NO: 398105 - DNA, 75 bp, Homo sapiens
gcaggttcaaatggctggtataattataggcaccagatgtggccgtcttgtatatcatcttggtttgcctttttc

SEQ ID NO: 398106 - DNA, 96 bp, Homo sapiens
ggaacaggagttccgatcgacccggtaccaagaaggggagtgcccgcggcaggtgtcccgacccaggctaagcttgagcatggctgagcaggagcc

SEQ ID NO: 398107 - DNA, 98 bp, Homo sapiens
gcaacaaaggcagactgagcgccagagaggacgtttccaactcaaagtgcttacactccagagcccctcagcagtttccggtgggctcttctctcaac

SEQ ID NO: 398108 - DNA, 100 bp, Homo sapiens
ttcgttttcatgttgctggtggaccagattggtaactcccatgtgcattctactgacggtgtcatggagaaactccagctgggcccagagattctgcagc

SEQ ID NO: 398109 - DNA, 100 bp, Homo sapiens
tgactactacagtattttttggtttgactgtgtatactctacaatctaagaaggatttcagcaaatttggagcagggggtagtaaaaagaatcattcctg

SEQ ID NO: 398110 - DNA, 128 bp, Homo sapiens
cctggaggacctcttcaacttctgctccaggaaattcagcctcaaaaccgtcctgctgcttgctgaccaaatgggtgaggtggctttgaccccgggttgcccggccagcacgaccgaggaggtggctg

SEQ ID NO: 398111 - DNA, 100 bp, Homo sapiens
acgtcaaagtgctgcccttcaatgcagagacttgtaacgcaacagattgatgagtgtgaaaagaaaaagagggaagactatgaaagtcaaagcaatcctg

SEQ ID NO: 398112 - DNA, 74 bp, Homo sapiens
gaggctgaagggagtggatcagagcactgcctgagtccactgcttttaaggccctgcactgaaaatgcaagctc

SEQ ID NO: 398113 - DNA, 111 bp, Homo sapiens
ggagagaagacgatctgcacttcgcattttggcattgacatttaattttagggtcctttatatagaagggagagtaggccatcgaggagggcacgctggaggagatcgaag

SEQ ID NO: 398114 - DNA, 100 bp, Homo sapiens
gctggaatggtgagaccaacatccgtgacacctggactctttcaggttctgaaacctgagatccaagctggaaagaggcagtgcctgcagcaaccgctcc

SEQ ID NO: 398115 - DNA, 95 bp, Homo sapiens
cgatggatgtggataccccgagcggcaccaacagcggcgcgggcaagaagcgctttgaagtgaaaaagctctccctgtgcaggccccagccaacg

SEQ ID NO: 398116 - DNA, 98 bp, Homo sapiens
agttgatgaatcaagaggaatgcacatctgtgaagatgctgtaaaaagattgaaagctgtgggatgtgtgtgggctgaaattccgagctgcggttgtg

SEQ ID NO: 398117 - DNA, 98 bp, Homo sapiens
agaatatttaatggaaaatcgcttggttaaaacctgacacttttaacaggatccactagttcctggactatgggaactgatgactcgcccaatgtcac

SEQ ID NO: 398118 - DNA, 74 bp, Homo sapiens
tgatcaggtggaacagattcagaaggagcaggattaccaaagggatattatcaactcactggtaacaacagtat

SEQ ID NO: 398119 - DNA, 75 bp, Homo sapiens
gcaaataggaaaattaagtttagtagtgctcctattaaggttacttgtctgcaagacttttttggtgatgacgat

SEQ ID NO: 398120 - DNA, 100 bp, Homo sapiens
tggccacgctgatcaatgcatacctgttcatggcttcagacctgtcaaggccccaggaacattccacatggtcatcatcagatttgaaatatttaaagtg

SEQ ID NO: 398121 - DNA, 74 bp, Homo sapiens
gccatgacagcgagcgaggcggaggagcccaagaagaggccgaaaccgagaccatgccagggaagctgaaggtg

SEQ ID NO: 398122 - DNA, 100 bp, Homo sapiens
aaccattactgatgatgtggaggttaacagctatctttctgaattgaatgatctggcacgggaccctccagcacagtgttcagcaggtcctgttggagat

SEQ ID NO: 398123 - DNA, 101 bp, Homo sapiens
gaaaacaccgaagggacattctgtcttcatggacatttttgaacttgtgttcagcctgagaaaactcctgagcatgtgcgaaaaagaaaagaagaaaagaa

SEQ ID NO: 398124 - DNA, 100 bp, Homo sapiens
cggggtcacttagactaccccaggaacccgcgccgcgagggctccttccctcagcatcacaggacatggccccctcagccacctagctggggcccatcta

SEQ ID NO: 398125 - DNA, 82 bp, Homo sapiens
tatgtcggaagacgacgaggactgctatggcaatgcaagtgaaccggagcaaacgacttccgatccagtctgcgctgttgcg

SEQ ID NO: 398126 - DNA, 100 bp, Homo sapiens
aagagatggatattgaaatggacagtggagatgaagcctaagaatatgatcaggtgatctgtgaaaatggttcgctattcacttgacccggagaacccca

SEQ ID NO: 398127 - DNA, 100 bp, Homo sapiens
agcgcggccgtcggagacatgggagacccggggtcggaacctccttttagaggactcagaagaagaagaaggtgacttatgtagaatttgtcaaatggca

SEQ ID NO: 398128 - DNA, 51 bp, Homo sapiens
gcaaggctggcgcgtctccatggagatattatgcctggtgatcctgatctg

SEQ ID NO: 398129 - DNA, 101 bp, Homo sapiens
acaaatctggaacgggtggccgattactgcgagaacaactacatacagtggtgaactatgacaatgtagtggacacaggttctgaaacagatgaggaagac

SEQ ID NO: 398130 - DNA, 50 bp, Homo sapiens
ctcggctacctggtactgagtgaaggcaaagaacagagcagttcaccatt

SEQ ID NO: 398131 - DNA, 75 bp, Homo sapiens
cgcttccgaagtgctgaccatgaccggtggacccaagtggagagattgtggaactggcgaaaggtgcatgtccct

SEQ ID NO: 398132 - DNA, 74 bp, Homo sapiens
tggcgagcaaaaaatgcttgagccaggagattagcagaggcatttcatatcagtgaggattctgatcctttcaa

SEQ ID NO: 398133 - DNA, 95 bp, Homo sapiens
tcaacaagatgttgtcctgtgctggggctgacaggtcactctggaatatagacccgtgatcgacaaaactttgaacgaggctgactgtgccaccg

SEQ ID NO: 398134 - DNA, 100 bp, Homo sapiens
cagaagaacaagaagtaggcattgaccccttgtccagttactctaacaagtctggaggattgccccctgtgggtcactttctcagtcattttgagctcag

SEQ ID NO: 398135 - DNA, 90 bp, Homo sapiens
gaaggcacaggaatatccatgtcggcttgtagagagattgcagttgatgaaaagcccagaaccttgatgacagattgtctggttataaag

SEQ ID NO: 398136 - DNA, 75 bp, Homo sapiens
gagggcggtggcgcccgcgggacctgcggcatcacgttgggtggtttccatttagaccgaggccggttcagaact

SEQ ID NO: 398137 - DNA, 100 bp, Homo sapiens
tgttctataatactttgtgctgggcaagagggatctaaggggaagccatatgtttttgaccgtgtattccccccaaacacgactcaagagcaagtttatc

SEQ ID NO: 398138 - DNA, 138 bp, Homo sapiens
tccaaagaggactggtgatctacgtgtgctttttcaagggagctgataaagaacttcttcccaaaatggatgtcctcctcgcactttcttaccagccctttgcaaaatttttcttgatgaaagtgctccagacaatgt

SEQ ID NO: 398139 - DNA, 50 bp, Homo sapiens
cagaaggaccatgctgtttttactcgatgaggtttatataactttccaag

SEQ ID NO: 398140 - DNA, 83 bp, Homo sapiens
gccgtgcaacgcggagtggagctcagccaggggcagccggctctggtgctcccagaagagccaataatttctgaagatcagac

SEQ ID NO: 398141 - DNA, 75 bp, Homo sapiens
gacgtagttaaagcccactagcctaaagccgggcggactgcggatggaactgcaggatccaaagatgaatggagc

SEQ ID NO: 398142 - DNA, 82 bp, Homo sapiens
cttcgctgaaattgctgccctgcgatttctctcccagttggaagatggaggtacaggtttgcagattccgccagcagcacag

SEQ ID NO: 398143 - DNA, 101 bp, Homo sapiens
tgcgctttcccctgagcatgcttcccatgatgatctcctccatgctccagattagcctgaggcctgctcagtcgttcctaatgaataaaaatcaagtgcca

SEQ ID NO: 398144 - DNA, 100 bp, Homo sapiens
gcatgctgctgcccgccagggcccagatgatcacaatgaggacctagggcatctgtctgctgacgccccctggcctgcagtgaccatggccccccgcaag

SEQ ID NO: 398145 - DNA, 75 bp, Homo sapiens
caggccggcgcccctcgggcctctgcggagcagggctccaaggtgggcaaactgaccctcaagaccacagagatg

SEQ ID NO: 398146 - DNA, 73 bp, Homo sapiens
cgagtgaggaaaggaggtactgtaggtggataaattagatgcttcagaatcactgagaaaagaagaagaacaa

SEQ ID NO: 398147 - DNA, 101 bp, Homo sapiens
gaaatctgacacctgctctcccggcaaggaaacttcgcaggctgcaccatatgaaggcggagtatggaaagttagagtggacctacctgataaataccctt

SEQ ID NO: 398148 - DNA, 95 bp, Homo sapiens
cgcccacgtcccatttcgcccctcgcgtccggagtccccgtggccagtgggtaattccagaattgattggccataccattgtcactgtattactg

SEQ ID NO: 398149 - DNA, 75 bp, Homo sapiens
ccagcctgccgcgtgccctaggatggaagcttcctggcgccaggtggccggtggccgaggccgatcccggggacg

SEQ ID NO: 398150 - DNA, 74 bp, Homo sapiens
gcgcgcggacccaggcgcggatggcgaggccagcagccaccaaccgctaaaatgcacgccatcatcgagcgcac

SEQ ID NO: 398151 - DNA, 90 bp, Homo sapiens
ggaagatcagggatcaaaactcattcgaaaagctaaagaggcaccattcgtacccgttggtgattttctatgatagcgactggaacccca

SEQ ID NO: 398152 - DNA, 90 bp, Homo sapiens
ctttactctggggtcccggctgccctgtggcctcgctcctcggaggacttgcacacctacccctgtggagcgtgcaccctataagggaga

SEQ ID NO: 398153 - DNA, 71 bp, Homo sapiens
gccgcagcctccggagaggaacagaccctcactctctctgtcagaaaaatccgagccacatcgctcagaca

SEQ ID NO: 398154 - DNA, 96 bp, Homo sapiens
cttgccgcgtcgaggactgtcggtgaaagccctgtgtaaggaatgtgtagtagaacgttgtcgcatattgcgtctgaagaaccaactaaatgaaga

SEQ ID NO: 398155 - DNA, 75 bp, Homo sapiens
tctctctcgaccccttctgcccggcgcttcggcccgggccgctcaggtgcaggtccgggcccaccagctggtctt

SEQ ID NO: 398156 - DNA, 73 bp, Homo sapiens
actacttgtggatgttgaacctaaggtgaaatctaagaaaagggaagctgagtccttataggacagttcttcg

SEQ ID NO: 398157 - DNA, 100 bp, Homo sapiens
caccattgacctcacctgcagcgggcacgtgtccatcttcgagttcgacgtcttcaccaggctctttcagatgcccaggcggaggtgcgcttgtctgtac

SEQ ID NO: 398158 - DNA, 100 bp, Homo sapiens
ccacctccggcttttgggggatcactgtcctctctcggcagcaggcctgaggtcctttcgagactgctggggaacctggtggtgaagaacaagaaggccc

SEQ ID NO: 398159 - DNA, 75 bp, Homo sapiens
tctgctgcggcgcggggaccgctgtgctctcgtggtgaccatcatcaaggggaaggtggaggaggtggagctccc

SEQ ID NO: 398160 - DNA, 50 bp, Homo sapiens
gcgagcaaggccgccagatgtgcagaacctgcaaccatggtcgtgccact

SEQ ID NO: 398161 - DNA, 100 bp, Homo sapiens
tcctgagctgcattgcactcaacctgcagggaacaagaattgcaactgcatccgagaaagaatttgctgattcccttggaattccgtttttggaaaccag

SEQ ID NO: 398162 - DNA, 100 bp, Homo sapiens
gaggatatcagggcagccctggaggcttactgcaagaagtatgagcagctcaaggcgggggccggccccagcccagactggaagatgagattgacttcct

SEQ ID NO: 398163 - DNA, 100 bp, Homo sapiens
tgaagagagaagatggcgcttgacggaccagagcaggtctgaatttcctgctgctgttcacaaagatgctttttatctttaactttttgttttccccact

SEQ ID NO: 398164 - DNA, 101 bp, Homo sapiens
cttgggtgcagatcatgatgtttaagaacatgacgccgtcacccttcctgcgattctacttaggccagcactccttgcccgaggacagagatggcgagcgc

SEQ ID NO: 398165 - DNA, 100 bp, Homo sapiens
aatctccttagtgaggctcagagatgcctgtaccgtgatgtgacgctggagaacctggcacttatgtcctccctggggtgtgaccgagtgttatgagtgt

SEQ ID NO: 398166 - DNA, 90 bp, Homo sapiens
cacattaatcgcaaatatgcttttaaggaagaggatcacctagcccgggtagaagaggcaatcacccgtatgcttgtgtgtgccctgaaa

SEQ ID NO: 398167 - DNA, 90 bp, Homo sapiens
cccggacccagcagctcatatcaaggacggctgtcctcagcgaggggccgtgcacccgctcctgagcagcgccatgggcctgctggcctt

SEQ ID NO: 398168 - DNA, 75 bp, Homo sapiens
ggagagggtgcctatccctgtaaaggagagcattgaggaacccagtgctaagggcagggtgccatttgccgtgcc

SEQ ID NO: 398169 - DNA, 114 bp, Homo sapiens
ctggttgccggggcaggggcggaggcggaggcagaggtggaggcgctttgaaaggtttggtgcacctcgatttggaggaagtagggcagggcccttatctggaaagaagtttgg

SEQ ID NO: 398170 - DNA, 75 bp, Homo sapiens
ataaaagcacagttttaagagagacataaatgagcatattctgatgtactctttggatctgaactcatcttcaca

SEQ ID NO: 398171 - DNA, 76 bp, Homo sapiens
caatgttctttgcatgttactgtgcactccggactaacgtgaaggaatctacttgaaaatggatcggtttatgttg

SEQ ID NO: 398172 - DNA, 75 bp, Homo sapiens
agcctgcggagcctgtggggcagtggtgtccatgggctctggagaccatcagttcaacctcgcagagatcctgtc

SEQ ID NO: 398173 - DNA, 90 bp, Homo sapiens
agaagattgtggttgaattcagtgcctccacttctcattcagagaattcagtgcatacaaaatcagcttctgttgtatcatcagattcca

SEQ ID NO: 398174 - DNA, 49 bp, Homo sapiens
tgggaattgtgcaccgagatctgaagcatttctggattaaaagtggtgg

SEQ ID NO: 398175 - DNA, 75 bp, Homo sapiens
accacctcacagattccagcttcggaacaagagaccctgacaatgcagatcttcgtgaagactctgactggtaag

SEQ ID NO: 398176 - DNA, 83 bp, Homo sapiens
attttggctgctgcaggagccattttagaaaatcgagagccttggttacaaccgacttatcctgcaaattggtagaggaacgg

SEQ ID NO: 398177 - DNA, 90 bp, Homo sapiens
aggggtgaaacttctaagagaagcaatgggaatttacatcagcaccctcaaaacagcactggatgtgtgtgagaagtggggagaaatgcc

SEQ ID NO: 398178 - DNA, 75 bp, Homo sapiens
tgagtggaaagttccgcatcccattttttatgtccacagcttcctacatgccaggcatgccaggtggaatctctc

SEQ ID NO: 398179 - DNA, 100 bp, Homo sapiens
gatggaagaaaagtaaccttttttgaacctggctctggggatgaaaatgggactacaaaacctggaaatccaccggaagataaaacagtctgagcaggag

SEQ ID NO: 398180 - DNA, 106 bp, Homo sapiens
ctgagcccgaggtgctgacgtcgcaaaaaaattggatagtactccaaagattcaggtttactcacgtcatccagcagagaatggaaagtcaaatttcctgaattgc

SEQ ID NO: 398181 - DNA, 75 bp, Homo sapiens
ctgctgtggaggctgaggaggcggcggcggagatctgggaggaagaggaggtagaacgggaaatcattaaacagg

SEQ ID NO: 398182 - DNA, 75 bp, Homo sapiens
ccccatcggttgttgtctgggcggattctgatagttggtggtggtgttgctgggcttgcttctgcaggcgcagca

SEQ ID NO: 398183 - DNA, 75 bp, Homo sapiens
ccctggagcacatctttagagccatcctgatcaagaaaaccgacagatgcctgtgaggagccaccaacatttgaa

SEQ ID NO: 398184 - DNA, 100 bp, Homo sapiens
gacctggagtatgtgaggagtggctgggacaactacgagtttgacatcaatgaaggactcagtggcctctgaggatgtggctgtgaacttcacacttgag

SEQ ID NO: 398185 - DNA, 51 bp, Homo sapiens
cagagcgtggttgctgaccagttgaaagggtctcactgtcacccaggctgg

SEQ ID NO: 398186 - DNA, 74 bp, Homo sapiens
ggatgctgaaccagtcctgaaagctcaccagtctcactctgcaaagaagcgtgtggagggccctggctccctgg

SEQ ID NO: 398187 - DNA, 95 bp, Homo sapiens
catctttgcttctaaaggggcacaccttttatagaagtacgtccaggaatagaagtgacctgctttttcgcaagggccacctacagatgctcctg

SEQ ID NO: 398188 - DNA, 83 bp, Homo sapiens
ccgctccagcctgaggacgtcaacctgcgggtcatctcggtagctacagcaagctgggtagcaggcagatccaaaggatatca

SEQ ID NO: 398189 - DNA, 97 bp, Homo sapiens
ggaggaaagatggaagactaccaggctgcggaggagtcgccctggcagcatacaagtggctggtttgctacctgctccgagagacttatcaaaaatt

SEQ ID NO: 398190 - DNA, 152 bp, Homo sapiens
cagagcgcgaggtggagggtggaacgcgggcgcctgaaggagttgttgtctcggcagcgcccgcggagacgtgaagaggctgaaaatgatgagaatggacaagcagaaaacttttccatggacccacaattggagaggcaagtggagaccat

SEQ ID NO: 398191 - DNA, 100 bp, Homo sapiens
aagctcagaagcagtattgggtctgcaactcatccgatgcaagtatttcatacacctactgtgtcagccataatggcaggtgaagaaattaatgaagact

SEQ ID NO: 398192 - DNA, 87 bp, Homo sapiens
ggaagcagccgatccagcctgcggagcctgtggggcaggttgatctcctatcaagagtttttggcatttgaatctgttttatgtgct

SEQ ID NO: 398193 - DNA, 100 bp, Homo sapiens
gaaaggaggcctagcatgttcgagaaggaggcagttcattgtctgagatcagttgataacttatttgtggtggttcaggagtttcaagattaccagttca

SEQ ID NO: 398194 - DNA, 100 bp, Homo sapiens
caaatcacacgcataatggatgaaaggaaccgacagcttgaagtacaatcttgttgtgtgtttattccaaatgatagcctgccttccccaagtacaattg

SEQ ID NO: 398195 - DNA, 83 bp, Homo sapiens
cgagcgctgttctcgctccggagccgctgcacatttcgggcgccctgcgtccggcagaggaggcgagcatcccgctcaggtga

SEQ ID NO: 398196 - DNA, 82 bp, Homo sapiens
cgcctcggtacgccgcgcggcgcggacggcgcgtgcgtgagaagccctaccactgcaactgggacggctgcggctggaagtt

SEQ ID NO: 398197 - DNA, 104 bp, Homo sapiens
gagaccgtgaccgagagcgtgaccgagagcgcgaatatcgtcatcgttagaaggtgacactgtttatggaccgtaagagctgaccgctgtctgaaggcttgccc

SEQ ID NO: 398198 - DNA, 74 bp, Homo sapiens
ctctgccgcctgccaccgctgcccgagcccggttctgcggggagtgtctccagccctgcctgcaggtgccatcc

SEQ ID NO: 398199 - DNA, 101 bp, Homo sapiens
acagggctgaggaaccatgtctccatccccgaccgccctcttctgtcttggcatagaatgtcaagctaaccaggcgtccgctacttcagaagagtgtactg

SEQ ID NO: 398200 - DNA, 100 bp, Homo sapiens
tccaactacttccttaagatcatcacaatattgactcacgcctactccagagtggtcctgagagtcctggaagcagccgtggcggccaagaagcgattta

SEQ ID NO: 398201 - DNA, 99 bp, Homo sapiens
atcagcgactggttgaattcgtggatgcaaaacctgtggatacagagggacagaggcctactgtacatggcacatgagccttttgaatggactgatgtg

SEQ ID NO: 398202 - DNA, 100 bp, Homo sapiens
gtttttgcagaaaaaagtcaagagcggcctgggaatttctacgtttcctcagagagcatcaggaaaggaaaagaattccatggcaacatcattaaagtgt

SEQ ID NO: 398203 - DNA, 97 bp, Homo sapiens
aagatggtcttcagagagcaactatcctccccagcatgtgcagtctttgccaacaaaaaaaattaccaagaaacctattccagatgagcacctcatt

SEQ ID NO: 398204 - DNA, 95 bp, Homo sapiens
caggacctgcggagccatctagtgcataaactgactggtaccatcagtcctatgactgcgtctgtgtcatgtttgcctccgtgccggacttcaaa

SEQ ID NO: 398205 - DNA, 100 bp, Homo sapiens
caaagccgaggaggagctggatgccgaagtcctggaggtgttccacccgacgcatgagtggcaggcccttcagccagcacaaagacattagcaggctgct

SEQ ID NO: 398206 - DNA, 100 bp, Homo sapiens
tccagtgaagctgcaataatgaataattcccaaggggatggtgaacattttgcacacccaccctcaggtagaatcactgtggactgagacccacctttct

SEQ ID NO: 398207 - DNA, 75 bp, Homo sapiens
ccctgaagagggaagacacgcggaaacaggtattttcaaccaccaggaacttggatacagtgtgctttagaatcc

SEQ ID NO: 398208 - DNA, 75 bp, Homo sapiens
ctggctgtggcggaggagcataagaagtcatcagtgagttctgcctcagtcagctcccaagtgaggacgcagtca

SEQ ID NO: 398209 - DNA, 75 bp, Homo sapiens
caatgataagactcgctatatggggaaggcctgtttctggaccagtacagagccagccttgttgatgcaataaag

SEQ ID NO: 398210 - DNA, 50 bp, Homo sapiens
gacggcggcagcagcggcattcagtttcagagactcctccactctctggg

SEQ ID NO: 398211 - DNA, 75 bp, Homo sapiens
ggaatgcacagaacctgctgtggaagatgtttgagacggaggcagatgagaagagggagatggccttggaggaag

SEQ ID NO: 398212 - DNA, 101 bp, Homo sapiens
cgaaggggagccatggcggctgacagtcgggaggagaaaggtctccgtggtcaatcagctggatatgcaagtcattgtttccaatgtgcctcctactctag

SEQ ID NO: 398213 - DNA, 75 bp, Homo sapiens
ggacctgcctgggcatagacttccttaagaatgacagcccatatcaaggcggtgtattctttttgacaattcatt

SEQ ID NO: 398214 - DNA, 82 bp, Homo sapiens
gatgtgattaatgtattccaccacctccgccagttaagaggaaaaagcccactgatgatattgtcctaatggcacaaacgct

SEQ ID NO: 398215 - DNA, 80 bp, Homo sapiens
ggatgatggggccttgcagtaagcaggttctgctccagacgagcccttaccacgttgactcactcctgcagctcagcgat

SEQ ID NO: 398216 - DNA, 85 bp, Homo sapiens
cttccgaactgtgggcaaaaatggcgatccaaaggggctattctgaacatttcatctggcagtggcatgctccctgtcccactct

SEQ ID NO: 398217 - DNA, 74 bp, Homo sapiens
atcccatgaggatctgcccgcttcccaggaaaggtccgaggtgaagctgtacttcacaaaaacagtagaggagc

SEQ ID NO: 398218 - DNA, 90 bp, Homo sapiens
gtggatttcagcctgcacggatggtcttgaaacacaaatggtttttggtatctactgtgcgtttcagtcaacaatacagcttgtgttcga

SEQ ID NO: 398219 - DNA, 98 bp, Homo sapiens
aagacttggatttccaactccaggaccctttccttctctacagaaatgccagataaacctctgtagaggagcaggatgcaaccgacaggctgtggccg

SEQ ID NO: 398220 - DNA, 75 bp, Homo sapiens
gccgcctcgctgtccctgcggcttctgggggatttctctctgatcaaacggacagttcaggactcagaatctaag

SEQ ID NO: 398221 - DNA, 76 bp, Homo sapiens
ggaagaacaagaagagaaccttgaagcaagtggttcgtggtttacagctacaagtacgtgcatgacgatggccgag

SEQ ID NO: 398222 - DNA, 99 bp, Homo sapiens
ttaagaaacgatcttcgtccagctaacaaacttgctaaaggaaataggttattcatgagatttgctacaaaagaacatccagtcatggataaaaatgag

SEQ ID NO: 398223 - DNA, 75 bp, Homo sapiens
ccaaaccacaggtcatctgctaagggcttccgagtggacctgccaatcaagtcggcccgctaccgtggccagtac

SEQ ID NO: 398224 - DNA, 80 bp, Homo sapiens
actgaggcggctgcagtgctgacaccactcagggcaagggtgtccgacggctggagcgatgccatggacaatattaccag

SEQ ID NO: 398225 - DNA, 75 bp, Homo sapiens
ttttgtgcagattgccagtctaaagtattctaccttgtaaatactgttatttgtatatactgtaaatgatgacat

SEQ ID NO: 398226 - DNA, 101 bp, Homo sapiens
aaaacgcatctatctaacgtttaccctagcaaaccaacactttttcaaaaatggcaatggtatcagaattcctcaagcaggcctggtttattgaaaatgaa

SEQ ID NO: 398227 - DNA, 82 bp, Homo sapiens
cttgcaagcgacggcgccatgagtctgacttccagttccagcgtacgaggaagatgatccctatgatcttgaagatgtttct

SEQ ID NO: 398228 - DNA, 100 bp, Homo sapiens
cttcactatgggtgtcatcggtggcggagtcttccaggccatcaagggtttccgcaatgcccctgttggagatgcgctggaacaagggcaccatcctgaa

SEQ ID NO: 398229 - DNA, 98 bp, Homo sapiens
cttggatttcagcctgtgagattctcagcagagaacccagtcaagtgtgtccagacgtccaacctacagaactggaaacttcgtggcttgcatgacag

SEQ ID NO: 398230 - DNA, 100 bp, Homo sapiens
ttttcacccatctgtacatcctatgtcaactgcttctcaggtagcaagtacatggggaggtaggtgatgctctgatgctgctgcctcttatgaattgacg

SEQ ID NO: 398231 - DNA, 100 bp, Homo sapiens
cgtggacgacgtgctttcccattttgctcagcgactgtttgatgacgtcccgcagggctcaagggttcttgttgatgcacgagataagcttggcattcct

SEQ ID NO: 398232 - DNA, 75 bp, Homo sapiens
gcaggagcagattccaaaggcacaggaagaagcttgcaggtggagccgccaccaaaatgcagattttcgtgaaaa

SEQ ID NO: 398233 - DNA, 100 bp, Homo sapiens
gccgaagacttcaccattttcataaagaaccacatccgtttccccaaattcaacttctccaaatccagagacaatggccccgatgggatggagcccgaag

SEQ ID NO: 398234 - DNA, 100 bp, Homo sapiens
actgctcagaagaacctgtaccgggatgtgatggtggagaactataaccacctagtatcactggagcgtcatgaacaggatgcacgtggtcagcgtcccc

SEQ ID NO: 398235 - DNA, 75 bp, Homo sapiens
cggttaagcgcgacccaggcactgcagcacccctacgtgcagaggcagcgggcggagctggaagagctgaggcag

SEQ ID NO: 398236 - DNA, 75 bp, Homo sapiens
gggcaaagaaagtatcccttttttcgagaggcccgtgccatgagaccgcctggggtgagcaaggcgacctgggct

SEQ ID NO: 398237 - DNA, 83 bp, Homo sapiens
cgcaagaccatgccgaagtccgtcgtgggcctgaaaagacaactggcagtgcagagtttagcatttaatttgaaagataaagt

SEQ ID NO: 398238 - DNA, 51 bp, Homo sapiens
gtccggtgccatctgaagcccccttcccagatcagtgtgcgtgtgaccacc

SEQ ID NO: 398239 - DNA, 75 bp, Homo sapiens
aatcccccactctttccgccctaatggaggtctccagtttcgaagaggatgtggagaactttgacgtgaccaact

SEQ ID NO: 398240 - DNA, 101 bp, Homo sapiens
gcttccgcagcccgctcgtgcccggcttctggtcctggtgctggagaatctggtaaaagcaccattgtgaagcagatgaggatcctgcatgttaatgggtt

SEQ ID NO: 398241 - DNA, 100 bp, Homo sapiens
cgaagcactcgttccgggggtgaagcctcctgcgccggccttgcctcggaacaatcaaccatgacgaccgaatctggatcagactcggaatccaagccgg

SEQ ID NO: 398242 - DNA, 108 bp, Homo sapiens
cgggaccggcggcgcgcggcggccgaggccaggctgaaggtgatgtggccgccctcaaccgacgcatccagctcgttgaggaggagttggacagggctcaggaacgac

SEQ ID NO: 398243 - DNA, 90 bp, Homo sapiens
agaacagcaagtgcaccaaacttagaaattgcatctgatggtctcaagggtcgtgtgtttgaagtgagtcttgctgatttgcagaatgat

SEQ ID NO: 398244 - DNA, 100 bp, Homo sapiens
gagaagtaccaggaggcgttggccaaggatgccatggacaatattaccaggcagaaccaattctacgatacccaagtcatcaaacaagaaaacgagtcag

SEQ ID NO: 398245 - DNA, 82 bp, Homo sapiens
catcccagcctcagggctgcccggacggtgttggttggggattttttatcaagcagaaatgcatcgaacaacgagaatcaag

SEQ ID NO: 398246 - DNA, 96 bp, Homo sapiens
ctataatcaagtaaaaacaatagctcaaggaaacctttccaacacagatgtccaagctgccaaggacggggttgctaccaaatccatcagaccacg

SEQ ID NO: 398247 - DNA, 118 bp, Homo sapiens
ctgatgccaacagtgtaccagcagggcgttggctatgtgcccatcacagaatcaagccagggaggacttcaaccaggacatcggctggtgtgtctccctcatcaccgactacagggtc

SEQ ID NO: 398248 - DNA, 50 bp, Homo sapiens
tcctggacatgaagaccgagggggtatgcttcagaagtgtccttctgttg

SEQ ID NO: 398249 - DNA, 100 bp, Homo sapiens
agaaaatattgtatgggtgatcggcctgtccagtttgaaattctcagtgatcagtcagtcaactttggttttagtaagactcctcacaaatcccaggccg

SEQ ID NO: 398250 - DNA, 98 bp, Homo sapiens
ggagtcaccactggacctccaaggaagccacgtgcagacatctacaaccttcgatctcctgacgaaaaattgatctaaatacggggaaagaaacagga

SEQ ID NO: 398251 - DNA, 100 bp, Homo sapiens
tcagggccggttgtggccatgttaagtgggcagaccaacatccacctcagcaaaaacttcttcctgacgaatcgcgccagggagcgctcagacaccttca

SEQ ID NO: 398252 - DNA, 98 bp, Homo sapiens
tggagcagggtggccgtggcagcgtcctgcagttcatgcccttcaccaccagaatctcgatgctggcctggagcagaaactgagctggaccactggag

SEQ ID NO: 398253 - DNA, 96 bp, Homo sapiens
cggcgctggccgagagccgcggctccgtgtttctggaaagtgacagcagcgctgtgcttcgccgtgagccgctcgctgctgctgacgtgcctggtg

SEQ ID NO: 398254 - DNA, 75 bp, Homo sapiens
gtgtggagctcagcggctacgacctgaaactctacgaggataaccagacagctgtcgacggacttcaggaagtgc

SEQ ID NO: 398255 - DNA, 75 bp, Homo sapiens
atcttgaaaataaaacttgccaggttccagactctatgacatctgctgcctggttaattggactcctgagattaa

SEQ ID NO: 398256 - DNA, 100 bp, Homo sapiens
ctcaaagccgtagtgtacgtgagcctggacaacgcagtgctgggagatgccaaggaacttgccaacatcctgaaataccacattggtgatgaaatcctgg

SEQ ID NO: 398257 - DNA, 100 bp, Homo sapiens
tcatcgggagaatgctcttcaggatagtatcttggccagggaactcaaacagcagatgcagtgattcgcctttgccagtctcatctcgtgtctgctttgt

SEQ ID NO: 398258 - DNA, 75 bp, Homo sapiens
aatacttcagaagtggggaaatggcctccggtgtggctgtctctgatggtgtcatcaaggtgttcaacgacatga

SEQ ID NO: 398259 - DNA, 80 bp, Homo sapiens
cacgaccgacaagtgaagctcacctttcgagattcttggtgccaccattgagaactccaggattgtcctgcagatcgaca

SEQ ID NO: 398260 - DNA, 118 bp, Homo sapiens
gggagctgatttcagactcagaagccgacgttcgagaggaagattcttacctctttgatctcgacaataagacaaacgatgcggccggcaacacctggaactggctctacttcatccc

SEQ ID NO: 398261 - DNA, 100 bp, Homo sapiens
cctggggatcgctacggaccttaaaatacccgcaacagccccttcgtcccaaacatggagattaagtagcttgcccaagatcacccagccagtaaagtgg

SEQ ID NO: 398262 - DNA, 100 bp, Homo sapiens
caagaggccccagagggaaaagaagcccaaagttttaaaggtacttgaagaaacagaagctcaacatttatatcagtccatcttgcctgatatggtgaaa

SEQ ID NO: 398263 - DNA, 131 bp, Homo sapiens
ttctactttccaggtccactggtgtttggtgtacccatgtgactaatttgtccaaagagagagagacaagagagacacctccaacttcgacaaagagttcaccagacagcctgtggaactgacccccactg

SEQ ID NO: 398264 - DNA, 100 bp, Homo sapiens
gaccatctcgcactaccctgactacagctggagcgcccagaggcgagccctggtggaggaagagatcaatgagctgagcaatgttcctgttcctgtcatg

SEQ ID NO: 398265 - DNA, 98 bp, Homo sapiens
tggccagagaactctcggatgagatccaagtccaggctctgcagagggacctggagctgcaggcggcctccagccgggaactcatccggaagtacttc

SEQ ID NO: 398266 - DNA, 83 bp, Homo sapiens
cgatttattggaggcctacttgcagcatattacctatcaggagaggagggtacagctcgcagaaagaagaaggtggtacatag

SEQ ID NO: 398267 - DNA, 100 bp, Homo sapiens
atagaagatttggccttctactctagtacagtagtatctctattgataattctgaaataatcagcagaaacggaatggaatgccaagaatctgcattgag

SEQ ID NO: 398268 - DNA, 101 bp, Homo sapiens
tctcgtcggcagtgaagctcaagttgctactcgggacgctgcacctcccgcgccgcacggtggacgaggttgagaacttgttgcttagtaaccaagggacc

SEQ ID NO: 398269 - DNA, 82 bp, Homo sapiens
cgaggcctggatgagcacaagaggacgcacactggagaaaagccttttcagtgtgataggcaaaatcagtaaaggcttggag

SEQ ID NO: 398270 - DNA, 75 bp, Homo sapiens
atgagccacccctacaccatgacaacgccttacccttcgctcccagcccaggtcagcccaaggctgccccctcgg

SEQ ID NO: 398271 - DNA, 75 bp, Homo sapiens
gcccccgagccgccgccgctgtccggagccccacagttgttgcgaagctctttggtgaataatagaactcaggcc

SEQ ID NO: 398272 - DNA, 82 bp, Homo sapiens
caagattcttctgaattgtgctgccttggccaaaagaggtgtggacactgccagcggctgcagccgacttggaatgacctgg

SEQ ID NO: 398273 - DNA, 82 bp, Homo sapiens
cgacaagccgctggcagccgcggatctcaccgccgctcaggtgtcaacagcatctccaccctggagcctgtgagccggtgcc

SEQ ID NO: 398274 - DNA, 75 bp, Homo sapiens
ctggagtgcaatggcacagtcatagctcactgcaacctcagccttccacatttgatctgggttggaatttgcccc

SEQ ID NO: 398275 - DNA, 78 bp, Homo sapiens
gcctcttgatgcccagtaggggcctcaggcccaggcccaaggccaagtgagagagcccaggccacaggacatgctgcc

SEQ ID NO: 398276 - DNA, 101 bp, Homo sapiens
aatgagtctggaaaactgggccaaagcagtgaaacgctccatgaattggtgggcagtgtcaaaccgggaaatgcttatagctcaaaacagctccttggaat

SEQ ID NO: 398277 - DNA, 90 bp, Homo sapiens
gcaaggctggcgcgtctccatggagatgaagactggcccatttgcagagcactccaaccagctgtggaacatcagcgccgtcccttcctg

SEQ ID NO: 398278 - DNA, 100 bp, Homo sapiens
tgaatggacaccttgaagcagaggagcagcaggaccagaccattgtgatgaatgactgtattatccgaggggatctggcaaatgtaagagttggacgtca

SEQ ID NO: 398279 - DNA, 100 bp, Homo sapiens
gtgttgccctgttcagtctgagaaagaagatgctgatatgctacaacacggatgaacctggaggacgtggtgcagtgaaataagctggtcacagagagac

SEQ ID NO: 398280 - DNA, 100 bp, Homo sapiens
tcgggttattcgagtgaccgagaccgcggccgggaccgaggaatagcctaacatggcagaccagagacagcgctcactgtctacctctggggagtcattg

SEQ ID NO: 398281 - DNA, 101 bp, Homo sapiens
aggaggccgagttcctgcagaagctgctccctggctactacatgacagccgatcgccagtacatggagggcttcaacgacgagctggaagccttcaaggag

SEQ ID NO: 398282 - DNA, 83 bp, Homo sapiens
cccagcaaagcagtggccgcccgggcggcgggatccactgtccggcagaggctgaaaagcattattggcatgggaacaggagc

SEQ ID NO: 398283 - DNA, 74 bp, Homo sapiens
tgcccgctaacaggccatctgtgtgagctggagaatgctggaggagaccttaaggatggccaccaccactatga

SEQ ID NO: 398284 - DNA, 75 bp, Homo sapiens
tcagcgggggaacagctagcggcaagtaactgggacgtgtgcgcagacatggtgggcaccttcacagacaccgag

SEQ ID NO: 398285 - DNA, 97 bp, Homo sapiens
cccggcccacagtgggggtgtgcaaacccgagagaactgggtcacttaactgggatggttggcactgctctctatgtaagcccagaggtccaaggaa

SEQ ID NO: 398286 - DNA, 75 bp, Homo sapiens
gaggtacctctccttttccctctccctttccctaaggtaggtgagctcgtgaaacaatatgaagaggagaaaata

SEQ ID NO: 398287 - DNA, 90 bp, Homo sapiens
gttttgaggattcattatgaacaaagaagtctcccaggaagaattcagggaacttcgagaacagccaagtgaccctcaagctgaacaaga

SEQ ID NO: 398288 - DNA, 100 bp, Homo sapiens
cagaagagctgccaagaggagccagcaccccttcggaaaaactttaccgccctactgccaataaagggaaaataagagatgctcatcgacgaattatgct

SEQ ID NO: 398289 - DNA, 100 bp, Homo sapiens
gaagccggagacagcagggtgacagaataccctctaccatctgctttggtcagggtgccgctcgaggatttaaaagcaacaagaagaaaaccaaacaatg

SEQ ID NO: 398290 - DNA, 75 bp, Homo sapiens
aaggtctatgctgacaagaggctggacgcacaagtttcccatatggaagaccagccacactgtcaagtgggaagg

SEQ ID NO: 398291 - DNA, 98 bp, Homo sapiens
atgtcgggacaccccggaagctgggaaatgaaaatgtgccagaggaacttcaagaaccattttacacagatcagtatgaccaggaacacatcaaacca

SEQ ID NO: 398292 - DNA, 49 bp, Homo sapiens
cacagattgccacattagcccaggagcgggacggtatgcgggccatcct

SEQ ID NO: 398293 - DNA, 75 bp, Homo sapiens
tgaagaggagcttagtgccgttctacagcagtgcttgctgggtggacccaagtggagagattgtggaactggcga

SEQ ID NO: 398294 - DNA, 75 bp, Homo sapiens
ggagcttatatttggaaccgaccatattacaacaggtggtggaagatggatatgaattttttgctaaacgacagt

SEQ ID NO: 398295 - DNA, 103 bp, Homo sapiens
gccccccggctcgcggggatcgcccccgagcgctgcgtcctgcgggccccctcagaccgtgccatgggtgacagtgatgacgagtacgatcgaaggcgcaggg

SEQ ID NO: 398296 - DNA, 90 bp, Homo sapiens
gctcggacggcgctcggagggtcctcgcccccggcctgcctacctgatacactgcctctaggactgggacagatagccactgagtacctg

SEQ ID NO: 398297 - DNA, 100 bp, Homo sapiens
ccttcagcgccctggtcaagacgctgcagcgggactgcctgacctcctgccccccgaggtctgcagtctcctgaacccagcagccatctacgccaacaac

SEQ ID NO: 398298 - DNA, 100 bp, Homo sapiens
tgtggcaggaggtcttccagctgcctcgagcccagaggagtggctaagcaggttcggttacctgcccccggctgaccccacaacagggcagctgcagacg

SEQ ID NO: 398299 - DNA, 82 bp, Homo sapiens
aaatttccaaaggaaaaccacgaagtcttcaagtatgtcatctctcacctaaacaactgaataccactagaaacatacctgt

SEQ ID NO: 398300 - DNA, 90 bp, Homo sapiens
cgaaaaaccttgtcataaactgtgaagtcttcgaccctcaggccactggagaatgcacggcaaccgtggggaagaggagcagtacgaaat

SEQ ID NO: 398301 - DNA, 74 bp, Homo sapiens
tcttcgttgccatgaggaaagaattctccgaggtgctggagaatctggtaaaagcaccattgtgaagcagatga

SEQ ID NO: 398302 - DNA, 75 bp, Homo sapiens
gaaaaatatggcaaagacttcaatgacatacggcaagattttatccatatcatagattttgacgatgaaaacaac

SEQ ID NO: 398303 - DNA, 90 bp, Homo sapiens
gccgaggcctgggttacaagcagcaagtgcgcggttggggccactgcgaggccgttttaggtgccctcaccaccaatggcatcaaccctg

SEQ ID NO: 398304 - DNA, 131 bp, Homo sapiens
ctcagaggccgccatcaaccgccagatcaacctggagctctacgcctcctacgtttacctgtccatgaccctgtttgggaagatgatggactacctgcagggctctggggagaccccacagacagatgttc

SEQ ID NO: 398305 - DNA, 75 bp, Homo sapiens
tgtgcggtgctgctgagcttggcctcggcgtcctcgggtagtgggcagcagtcagtgacaggtgtaacctctgtg

SEQ ID NO: 398306 - DNA, 75 bp, Homo sapiens
cagattatatcgcatcctatggctcaaagaaagatgattatgagacggtggctcagggagtaaaggaaggccagt

SEQ ID NO: 398307 - DNA, 100 bp, Homo sapiens
ctgctgaagaacagattaaggtgctggaggtgacggagggtttgaggaactactggccaacctactaaatgaacaacatcagatagcgaaggaactattt

SEQ ID NO: 398308 - DNA, 92 bp, Homo sapiens
cacgaaggcaccgacgtcatcatgctgaccaccaatcagatccgtaaggctgttactgaggcggagacacgggtgatgattggctttctggg

SEQ ID NO: 398309 - DNA, 90 bp, Homo sapiens
atcctgtgtcacccggcaactcagaaacatcaggtccaagatcagcacttgactgtttattttcaaatctcacgaacctcaccccaagat

SEQ ID NO: 398310 - DNA, 75 bp, Homo sapiens
aaaaaagtctgctactactacgacgggcccatttggaggccagcgctgagaagtggaacaggttgctgatgtcct

SEQ ID NO: 398311 - DNA, 100 bp, Homo sapiens
ctgaccagagctgatcccgagcagcgtcatgtacccctgggactcagaagaagatccttgacattgccaacatgctgggcttgtccaacacagtgatgcg

SEQ ID NO: 398312 - DNA, 100 bp, Homo sapiens
gaatgctggcctgctggccttggcagatgttttctcagaggattcatcctcctctctctgtcagctggacatcaggaggaatttttatgatgataagaaa

SEQ ID NO: 398313 - DNA, 75 bp, Homo sapiens
ctttctgtctctaggaatttcactactctagaaagtgaagtcactgcttttgctgtcttggatcaagaccagaaa

SEQ ID NO: 398314 - DNA, 90 bp, Homo sapiens
gacgaggatatcgtgtctggagcagtggagcccaaagacccctggagacatggtgccctacgagacgctgaacaaacgctttcgcgccgc

SEQ ID NO: 398315 - DNA, 100 bp, Homo sapiens
ctatcctggctacaccttaaatgaggacaagaaaacatgttcaggtcagttcaccgggacctggaggcccagattgcgatcgtgacggagaaccaggccc

SEQ ID NO: 398316 - DNA, 100 bp, Homo sapiens
cccaccctgggcctcaccaataaccagctcttcttcctgggctttgcacaggcttacccagatgccacaatgcacagacaactcctggctccggtggaag

SEQ ID NO: 398317 - DNA, 75 bp, Homo sapiens
gccgagtgtgagcggaaaggggcccggcgtctgcctcgagactgaagaccggcctgtttaaagaagaaaacccgt

SEQ ID NO: 398318 - DNA, 75 bp, Homo sapiens
gaaaaaaccaacaccttcctgtgcagtcctgttggaatttgtcacaaggcacttaaagcattgttgaggtcattg

SEQ ID NO: 398319 - DNA, 82 bp, Homo sapiens
ccgcgagcacagagcctcgcctttgccgatccgccgcccgtccacacccgccgccagagttctctgtggcccatgaccttcg

SEQ ID NO: 398320 - DNA, 73 bp, Homo sapiens
tggtggatgaagttgttcattgtttgtcaccacaaaaaggacagtttgaaattggcacaatggaagaagctgg

SEQ ID NO: 398321 - DNA, 85 bp, Homo sapiens
cgagaagtacggaggccccaaccaccacctgccccttccagacaactggaaaagtcagcacaagttgaccccggaatatctggag

SEQ ID NO: 398322 - DNA, 51 bp, Homo sapiens
ggcacctatggacaagtctataaggtgtcccgacccaggctaagcttgagc

SEQ ID NO: 398323 - DNA, 98 bp, Homo sapiens
tgaggatgcagcactggaagaaaatggtttggctgtgataggagtatttttaaagaatgtgacagagctgaagctttctgataatcctgcctgggaag

SEQ ID NO: 398324 - DNA, 100 bp, Homo sapiens
cccggggggcagcaacggcgacatccagcaagtattttcatctcagcctagtgacgatgaatcaagtagtgatgaaaccagtaatcagcccagtcctgcc

SEQ ID NO: 398325 - DNA, 90 bp, Homo sapiens
gagccacacatccccgaccacttgcggcctgagtatggtggtggtgaagtttattaagaaggagaaggtcttggaggattgttggattga

SEQ ID NO: 398326 - DNA, 120 bp, Homo sapiens
cagacgggccggcccagagctcccgggtcgtctttcgtgtggccgcgagcgtggagattggtgaaagcgtgagaggggaagatgtctacatcatccagagcggctgcggggaaattaacg

SEQ ID NO: 398327 - DNA, 100 bp, Homo sapiens
ccccttctgcccggcgcttcggcccgggccgctcaggtgcagtgtttgtcaggttcaactccagccatggtttcccagtggaggtcgattctgacaccag

SEQ ID NO: 398328 - DNA, 90 bp, Homo sapiens
cagggcgcggcctctccgccgggtgtaccacctgtcgcggcgcgagacctctgtgctctacggaaacgtattcgagaggacagaaaggcc

SEQ ID NO: 398329 - DNA, 75 bp, Homo sapiens
gtggaaggtgcgcgagctggtggacaaagcgtggaatatgtgatcaagtgtgacatgtcagctctgcagaagatt

SEQ ID NO: 398330 - DNA, 80 bp, Homo sapiens
ctgtgccatgttcactagtgagtgagacggtttaagcggaagcatcttactgccattgactgccagcatttggctcggag

SEQ ID NO: 398331 - DNA, 96 bp, Homo sapiens
gggatctcgctgttcctcgctctgctcctggggagcccggcggcagcgctggagcgagcattgcagtgtcgagatggctatgaaccctgtgtaaat

SEQ ID NO: 398332 - DNA, 97 bp, Homo sapiens
gtccaagtcaaacgcagaaggactgcctcactgagcaaccaagactatcatggtgaacttacttcagattgtgcgggaccactgggttcatgttctt

SEQ ID NO: 398333 - DNA, 95 bp, Homo sapiens
ggcagcggcgcgcgggaccaacgcaagaccttcacggcatggtgcaactcccacctgcggaaggcaggcacacagatcgagaacattgatgagga

SEQ ID NO: 398334 - DNA, 88 bp, Homo sapiens
ttgctgccgagcaggcggcgccgtcttggggcctagcggcgaggcgacccgcacaggggcccagaagacacctgctttgagtttggtg

SEQ ID NO: 398335 - DNA, 100 bp, Homo sapiens
ccgaaataaagtgagaaagacctttgttggcaccccttgttggatggcacctgaagttatggaacaggagcttggtgttggtggcacgagtcagtggaaa

SEQ ID NO: 398336 - DNA, 74 bp, Homo sapiens
cgggaaggaagatccggcgcggggcacaggatccggagctggagcccccagagccgaacactgtcagctacagc

SEQ ID NO: 398337 - DNA, 100 bp, Homo sapiens
ctgtctctctgcagctggacctggacaggagattccagcttcaagaagtcatgatggagttccagatagtgattatagagcacaaatccatcatctgccc

SEQ ID NO: 398338 - DNA, 128 bp, Homo sapiens
ctggattatttcagtggaactggcaatcggcccagaagaaggaatcagttacctaacggacaagggctgcaatcacttgcacctcctgcgccgccgccccccatccaaggatatgccttcaagcctcc

SEQ ID NO: 398339 - DNA, 82 bp, Homo sapiens
gaagcagacttggatgaagagctggtcattaagggatccatcctacagaagtatctctcctctttgtcacaacctctttgcc

SEQ ID NO: 398340 - DNA, 102 bp, Homo sapiens
gcagatcatctctggaaaggatattgatccgcctcatgtaaagtatgcttagttcctttccagtggtgtgcagctcagtggaagatgatgacaaccagaaga

SEQ ID NO: 398341 - DNA, 100 bp, Homo sapiens
gaactgtgtgataagcaatatcagaaacatcaggaatttgataaccatatcaactcctatgatcatgcacacaagcagtaacaaatgtggcaattatttt

SEQ ID NO: 398342 - DNA, 89 bp, Homo sapiens
ggccatgtcggtgggcgagctctacagccaggtcaaaatgcagatcttcgtgaaaacccttaccggcaagaccatcacccttgaggtgg

SEQ ID NO: 398343 - DNA, 100 bp, Homo sapiens
tcttccttttatagcattgagaaggatgatggagtctcccaggcgggaatgcaatggtgcgatctcgacttcactgcaatcttcacctcccgggttcgag

SEQ ID NO: 398344 - DNA, 75 bp, Homo sapiens
cagcacttccggtcacgccatcgttgctgccttcttcgtcaagagtcgacttcaatgttcctatgaagaacaacc

SEQ ID NO: 398345 - DNA, 146 bp, Homo sapiens
tttggattgtgagctatttcagaactgttctcaggactcattattttaacatttgggagaaacacagccagaaggctatgcccactggaagggccaagtgctgaattcagatgagctccaggagttgtacgaaggcctgaggctga

SEQ ID NO: 398346 - DNA, 82 bp, Homo sapiens
tttgctcaaggatcccagttttctctggatgacgtggcccagctgagagccagcctggaggttacccagcagcaggccaccc

SEQ ID NO: 398347 - DNA, 98 bp, Homo sapiens
ttacaccagtgaagatgaggaagtctgggggccgagaccacacaggggaatgaattggaaataaccattatgatggtggtagaagcactatgtgaact

SEQ ID NO: 398348 - DNA, 100 bp, Homo sapiens
accctgttcctgaacggcagccccaagaacggaaaggctgagtcatcactagagagtgggaagggcagcagcagcagagaatccaaaccctaaagctgat

SEQ ID NO: 398349 - DNA, 74 bp, Homo sapiens
ctcgacctgctaacagaactggaccttttcggatgaagccccacccgcccttcaggatgccagccttggcaaca

SEQ ID NO: 398350 - DNA, 134 bp, Homo sapiens
ccatgttgcaggcccacagctgcctacagaaccgtcccaaaatatggcaaagaaacctattctgaggtcccaggtgtgacaccttcagcaggtctcagggaagatggcagccctaggggacattcaggagtccc

SEQ ID NO: 398351 - DNA, 90 bp, Homo sapiens
gaggcgccccgcgcagctggctggcggagcatgagcgccccaggtgctgaaggtcgccatcctggctgagaagtacgcggtggactacac

SEQ ID NO: 398352 - DNA, 100 bp, Homo sapiens
tgcaacctacggggtgtacttgggaacgaggggtgaagcggcccaggtgaggtgggtaattccagaattgattggccataccattgtcactgtattactg

SEQ ID NO: 398353 - DNA, 75 bp, Homo sapiens
gaggagcccctggcctgcccggacgagttcgatgacttcgtcacctatgagggtgcaacaccggaggatttcagc

SEQ ID NO: 398354 - DNA, 96 bp, Homo sapiens
tgcattagctgaacatctttcagagttgtatcctgaggctggaccgactgtcggaggcagccaaggtgaacacagacgctatgcgctcagcgcagg

SEQ ID NO: 398355 - DNA, 75 bp, Homo sapiens
tggagcgatgtcattctgctgagcttgcacttaacgtaatcacgttatttcttatgagggtcatggatatcccct

SEQ ID NO: 398356 - DNA, 100 bp, Homo sapiens
gccatggaagaaatgatgatggaaatgaagtataataccaagaaagccccacttgctaacaacctgagagaagattacaaatttcaccacactttcagca

SEQ ID NO: 398357 - DNA, 90 bp, Homo sapiens
gccgcgggacctctccgggccatggccatggctctaaaaggacaagaagattatatttatcttttcaaggattcaacacatccagtggat

SEQ ID NO: 398358 - DNA, 100 bp, Homo sapiens
acccagccgaagcatttaaaagctccctcgtgaaagatgcttctgttcctctgattgatgttacaaacctccctactcctcgaaaattccttgatacctc

SEQ ID NO: 398359 - DNA, 80 bp, Homo sapiens
taccttcttgctggcgttggtgggagccgtgctctacctctatccggattttttatcaagcagaaatgcatcgaacaacg

SEQ ID NO: 398360 - DNA, 50 bp, Homo sapiens
ctccgagcggcgggccgcagagctcagcaaaacccagcagctcagattcc

SEQ ID NO: 398361 - DNA, 80 bp, Homo sapiens
ggaacacgcagaagtcacgtacagggtttcagggcagaaagcaggctggcgccttcctctgttgggccagcggtacctgg

SEQ ID NO: 398362 - DNA, 100 bp, Homo sapiens
aatccagttaacaaccaaatctttcttcaggaatatgtggctaatctccttaagtcggccttccctcacctacaagactaccgagtctattgcttgctgg

SEQ ID NO: 398363 - DNA, 82 bp, Homo sapiens
tcttctaatactcctcctctaacatgtcagcgttattgtaatgcaagtgtcagctgtgatgcatgtttaaaaggaaattttc

SEQ ID NO: 398364 - DNA, 74 bp, Homo sapiens
aggagtatttctacaccagtggcaagtgctccaacccagcagtcgtgattcaagatgaccaacgaagaacctct

SEQ ID NO: 398365 - DNA, 74 bp, Homo sapiens
aaagatgcgcctctgcgatttgcagacgcaaacatgcagatctttgtgaagaccctcactggcaaaaccatcac

SEQ ID NO: 398366 - DNA, 90 bp, Homo sapiens
atgccgtcggccatgactgtgtatgctctggtggtggtgtcttacttcctcatcaccggagctccaaagacaacaggccctccctctgcc

SEQ ID NO: 398367 - DNA, 100 bp, Homo sapiens
gaaggaacttggttccccctccctcagcttccgccccaaaagttccacttacttacatgatcatttcgagagatgtaatgttgattgctgctgtttttta

SEQ ID NO: 398368 - DNA, 51 bp, Homo sapiens
acccttcctgcgattctacttaggtcaagagcaatctgaatccaaatgcaa

SEQ ID NO: 398369 - DNA, 100 bp, Homo sapiens
tgtacatcgtgcatggcgtccagtgatgagccctcctcttcagctaggaaaatgacggtgttcagaaagttaaaacttcttcgctggaaggatttcatct

SEQ ID NO: 398370 - DNA, 82 bp, Homo sapiens
tcaaagaggccaagcacattgcggaagaggctgaccgcaaatacgaggagctgacacttcctccatggcccatctatcgccg

SEQ ID NO: 398371 - DNA, 100 bp, Homo sapiens
aacatgagatggtggatgaacccacagtgagaaagatcagtctaaagaaaaggagaagaaagtgaaaaaaacaattccttcctgggctaccctttctgcc

SEQ ID NO: 398372 - DNA, 75 bp, Homo sapiens
aacctcctttacacagtatcagaacgagccaaaaacctgtatatcatctccgtgaaggggatcaagggacggctg

SEQ ID NO: 398373 - DNA, 100 bp, Homo sapiens
cctggacgtggtcatgaggcacttgccatccatgagccagctcgctgatgtgcttctcctgcttgaaccagaagagcaatctgtactgcctgaagccgac

SEQ ID NO: 398374 - DNA, 83 bp, Homo sapiens
atggactctgactcttgcgccgccgccttccacccggaggcgccatgtcagaaccggctggggatgtccgtcagaacccatgc

SEQ ID NO: 398375 - DNA, 90 bp, Homo sapiens
agaaaaatgcagtgataatgatggcattgttcacattgcagtagacaaaaattcacgtgagcattgtggaacccaaagatgagatactgc

SEQ ID NO: 398376 - DNA, 110 bp, Homo sapiens
aaaagattcagattacgaggattatggatgaacgtaacagacaggaaatgggtcctgatgaatatgaagagatggaagaagaggaggaggaggaagaggaggaagacgag

SEQ ID NO: 398377 - DNA, 75 bp, Homo sapiens
ctactcctggcagtgcgtcaatcagagcgtcctgtgcgtgacatattcgatgccatgttccctgtcactcacatc

SEQ ID NO: 398378 - DNA, 100 bp, Homo sapiens
gatttactctggaaagaagctggtttggatcttcggaagatgttaccgagtacttcagtgaattccttagtgcaggggaacggagtcttgaattccaggg

SEQ ID NO: 398379 - DNA, 90 bp, Homo sapiens
aataaaagagacctctacttagctcagcaattcttacctttttgacaagtatgcgcccaagctggacagcccctacttccgacattccag

SEQ ID NO: 398380 - DNA, 49 bp, Homo sapiens
aaaggacctgcccccagagagaaacggccggtttgtgggcgatgctgac

SEQ ID NO: 398381 - DNA, 99 bp, Homo sapiens
cttcacaggaattgccatttaactgtctgaagtgctctggactatggtgatgaacagcggccttcagacgcgaggctggggaggaatcgtcggggtttt

SEQ ID NO: 398382 - DNA, 90 bp, Homo sapiens
atggctaaagagatgctcaccaagaagtccacgtgtggccagactccactgatgatagctgccgaacaaggcaatctggaaatagtgaag

SEQ ID NO: 398383 - DNA, 96 bp, Homo sapiens
atttgaggaagcaccagtacagggataagagatgaagagacaggccaggtcaggctcaccaagcaggtatttgacaacaccccagcagccttggac

SEQ ID NO: 398384 - DNA, 99 bp, Homo sapiens
ctgatacagaagagatggatattgaaatggacagtggagatgaagcctaagaatatgatcaggaagaagaagcagacgttgaaggcattcagtataaaa

SEQ ID NO: 398385 - DNA, 88 bp, Homo sapiens
tcgagcgccgcggacgcgtcatcgagtgtgacgtggtgaaagagttgcatgctgagaatttgaaaaatgaagatgatgtagacactgg

SEQ ID NO: 398386 - DNA, 100 bp, Homo sapiens
cggccggcacttcggctgcagagttttgcccacgcttcgagacttagggagcagattctgtttctggcgtctgcatacgcaagtccccaactcgctgagg

SEQ ID NO: 398387 - DNA, 75 bp, Homo sapiens
tccgcccagaagacaacatcaggctggtctgggaggggctgaacgtggtgaagacaggccgagtgatgcttgggg

SEQ ID NO: 398388 - DNA, 75 bp, Homo sapiens
gtttgtggatcgctgtgatcgtcacttggtaagaatgattgatgttggctgatattggagtgctcattcacatga

SEQ ID NO: 398389 - DNA, 97 bp, Homo sapiens
acgaaagcctacaaaagtgtggagaggttccttcaggaggatcaggcaagttgctccctgagctgctccaaccttatacagaacgtgtggaacatct

SEQ ID NO: 398390 - DNA, 75 bp, Homo sapiens
cttttaccagttgttatctggagcaggagaacacctaaagtaaggcagacggtaacaagtactccttgctggatt

SEQ ID NO: 398391 - DNA, 83 bp, Homo sapiens
cttcccgcgtccgccgattcctcctccttggtcgccgcgtccttggctggcgtgatcgaatcatcaatttagttgttggcagc

SEQ ID NO: 398392 - DNA, 75 bp, Homo sapiens
catgaccctctcaaccctctgtgtcctggggccatccgagccaacggagagcaccccagccctatccctttacgt

SEQ ID NO: 398393 - DNA, 99 bp, Homo sapiens
tattggtggtttttgggagactatctttggcaacagaagaagactgcataaactgggcgtgtcaaaggtcacccaagtggatttcctgccaagggaagt

SEQ ID NO: 398394 - DNA, 88 bp, Homo sapiens
gccggggtccgcaaggccggagaaggccgccgggcccgggcatggtggtctggggcaacgcggaagatctattaatgagatgaagcgg

SEQ ID NO: 398395 - DNA, 152 bp, Homo sapiens
ctacatcatggacttccaggttgggaaggagtttgaggaggatctgacaggcatagatgaccgcaagtgcatggtctttgcaaaaacagaagcacagaagggagcctatatagaactaacactgcagacttatcaagaagcactcagtcgcc

SEQ ID NO: 398396 - DNA, 83 bp, Homo sapiens
aagaaaacagagagatgagcagcttctgagaactgtggctgcaccatctgtcttcatcttcccgccatctgatgagcagttga

SEQ ID NO: 398397 - DNA, 98 bp, Homo sapiens
tacactcagtatacagtgatagtgggatttgaacacctgaagctccccatcaagggaatgaacttcacaatgatcaagcggtgctgattcacgagagt

SEQ ID NO: 398398 - DNA, 75 bp, Homo sapiens
agtccccagtgagggtgtacaaatacccctttgaattaattatggctgctatgactttgcagccgtcctggagtg

SEQ ID NO: 398399 - DNA, 82 bp, Homo sapiens
acccaaagatcgtgcagctcttggcaggagtagctgatcaaaccaaggatggagtcctgtgtatggaaactcacatgagtca

SEQ ID NO: 398400 - DNA, 83 bp, Homo sapiens
tttgggtcgcagttcttgtttgtggatcgctgtgatcgtcacttgggtgtgctggaccggttttctcaaattcagccaaagct

SEQ ID NO: 398401 - DNA, 76 bp, Homo sapiens
agaggatgaattatcattgataaaggggacaaaggtacatcaggaacgtctctatcaagaatacaatttcagcaag

SEQ ID NO: 398402 - DNA, 143 bp, Homo sapiens
ggtatattcaagagcaaatgaccaagagccatgtgggtggtggttggctaaagttcggatgatgaaaggagaaatttctctatgaatcatcatcaagaactctgggagaacttttgaattcataaccaagccaacatctccag

SEQ ID NO: 398403 - DNA, 100 bp, Homo sapiens
ctgggtcttcgcccaggtggccggcgcttcagcttcttggacacttaatgattgttggcaagaaatgtgctgctgatctgggcctgaataagggttatcg

SEQ ID NO: 398404 - DNA, 100 bp, Homo sapiens
tctgcgtttgcaatgcatgctggtccgtgtagttctcagcctgacaccgtcgttcccagaacccagcgcgctctgctttacaggaagtatggtgctggca

SEQ ID NO: 398405 - DNA, 98 bp, Homo sapiens
ccattagtactgtgagcatgaaccttgagacactcctagaatatgcagagaaatggaaaacttcagaagatcctttacctttattggaggtatacaca

SEQ ID NO: 398406 - DNA, 101 bp, Homo sapiens
aggttggtgtcttttccacgtggtagaagctggctaacctccacttccacattccagcccaagggaaagtccaagtggagaacatgcagctgaccctgaac

SEQ ID NO: 398407 - DNA, 90 bp, Homo sapiens
gctcgcgctactctctctttctggcctggaggctatccagcctcagaagtgtcatactctgcaaagcatgaataatcatttggaagcagt

SEQ ID NO: 398408 - DNA, 90 bp, Homo sapiens
cgatccgctggcgctagtctgaccctccgccaggcaaaaggaagtattctaccttgtaaatactgttatttgtatatactgtaaatgatg

SEQ ID NO: 398409 - DNA, 82 bp, Homo sapiens
taggggaacccgtgcggctggagagaggactgaaaactggatatttggtccccatggactttctggtcaccctgtgaagtgg

SEQ ID NO: 398410 - DNA, 97 bp, Homo sapiens
gaagatgacgaagacatgacacttacaagatggacagggatgataattgggcctccaagagtcgagtttgagtggctgaggcagttttggtttcaag

SEQ ID NO: 398411 - DNA, 100 bp, Homo sapiens
gtgtctgaggtggtgcgcggctccgtgctcctgcgggtattcccctacatctcagccatggtgaacaacggctccctcagctatgatcatgagcgggatg

SEQ ID NO: 398412 - DNA, 87 bp, Homo sapiens
gtccagtcaagtgcattagacccagtgttcttggtcctcttaaaagaaaagctgatttagaagaaagttttaatgaacatgaactgg

SEQ ID NO: 398413 - DNA, 78 bp, Homo sapiens
atcacagcgtcgcagatgtctttgtttggaaattttagcattcaggtgccaggaatgcagatgggacagccagtgcca

SEQ ID NO: 398414 - DNA, 75 bp, Homo sapiens
actcggaaggtcagttctgatacattggagaccattgctcctgattgcaagactggaggaagataaagaagaact

SEQ ID NO: 398415 - DNA, 134 bp, Homo sapiens
gctgctgatgctgaagctgtgcaccgaggtccgtgtggccaacgagctcaacgccaggcgccgctcctttacagaggccacaagaggaagctgaatgaagaggacgccgccagcgagtccagcagggagtccag

SEQ ID NO: 398416 - DNA, 100 bp, Homo sapiens
agccaagaacagcattactgattcccaaatggatgatgttgaagttgtttatacaattggtgaagcagactgtggtgaatttagcaacacttatgaagtt

SEQ ID NO: 398417 - DNA, 74 bp, Homo sapiens
ttgacatttaattttagggtcctttatatagaagggagagtagcaaagtggaagatgctttctacaaaggtgaa

SEQ ID NO: 398418 - DNA, 83 bp, Homo sapiens
gcaactggttcaagaaccgccggcagcgcgacaggaacccctccgagacccagtccaaaagactcggagccgtgggtcccgac

SEQ ID NO: 398419 - DNA, 82 bp, Homo sapiens
agtctaaatgatgggcagtcatggtcccagaaacgtcactatcaagaagcccaagccttgtcagtactgtaacataattgca

SEQ ID NO: 398420 - DNA, 90 bp, Homo sapiens
cggtccgcgagccaccgaggcccagaccaagatcactccatggatgaaatgacagctgtggtgaaaattgaaaaaggagttggtggcaat

SEQ ID NO: 398421 - DNA, 100 bp, Homo sapiens
gtcatggggctgtttggaaagacccaggagaagccgcccaaagaactgtgtggaggaatgaacgtaattaactttgaacatcttgatacagaaagacctg

SEQ ID NO: 398422 - DNA, 74 bp, Homo sapiens
gcggggagctgcgcgaagccggggcggagcacgcgagctatgatgagttttgatcatcctgagaaaaatgggcc

SEQ ID NO: 398423 - DNA, 90 bp, Homo sapiens
ggcgctatctctgccctcagtatcaacaatgattgctcaagacttctttgtggctttgctaaaggacagtctctggaacttaaaagaaag

SEQ ID NO: 398424 - DNA, 100 bp, Homo sapiens
ctcggggcgtctagcccgtgttgagaatgtccttagcggccttggtgaagatgccagtaatgaagaaaggagaggagtctgcaatgccgagtggaggaag

SEQ ID NO: 398425 - DNA, 74 bp, Homo sapiens
cccctggctggagtgccctgcctggagggagccctcctggctgggggcaaggagagattaaacagattctagaa

SEQ ID NO: 398426 - DNA, 75 bp, Homo sapiens
gagctgggggagctgatccgaaaccaccgagaacaggatgtggcggagcccatcgtggtgaggcttaaggaggtc

SEQ ID NO: 398427 - DNA, 74 bp, Homo sapiens
taccattgattacatgtgaatctgtacaggaatctttgtctgaagtggaagaaaaatacaagaaagccatggtt

SEQ ID NO: 398428 - DNA, 74 bp, Homo sapiens
cggaggtcgcggagatggaattggagcagagagaaggactcggtgaaatacctggagtgctcagctctcaccca

SEQ ID NO: 398429 - DNA, 100 bp, Homo sapiens
ctgagccaggtgaagggccccgtaaattggaaggatgcacaagttccaaggttacgtttcacaacccttctgtggggctcaattttggaaatcttggaag

SEQ ID NO: 398430 - DNA, 75 bp, Homo sapiens
tttctccaaggatctgctgaaagccccttcacagatgtagtcactacaaatcttaaattgcgaaatccatcggat

SEQ ID NO: 398431 - DNA, 73 bp, Homo sapiens
tgtatagagatgtgatgttggagaactacagaaacctggtctccctagagtacagttgtgaatttggctccgc

SEQ ID NO: 398432 - DNA, 80 bp, Homo sapiens
ggccaagggaccaaggtggaaatcaaacctccgccgcatgcaagagatgattgcaaggatgcaggcgcagatgcagatgc

SEQ ID NO: 398433 - DNA, 74 bp, Homo sapiens
gtcagacgcagccgtagacaccagctccgaaatcaccaccaaggcagcctggcatcctcgctacaacctcattg

SEQ ID NO: 398434 - DNA, 87 bp, Homo sapiens
ggagatgagcgaggtgacggcggagctgcaccacacacacaaggagctggtgcggattgatgagtacgattactccaagcccatcca

SEQ ID NO: 398435 - DNA, 77 bp, Homo sapiens
gccatgaggccaaaggcagttgtattggtacatccaagcagaagtccagttccctccaggtagcagatcaggaccta

SEQ ID NO: 398436 - DNA, 90 bp, Homo sapiens
cattcctccaaacctggcaggaatccctggggggaaacccctttgaagaagatggtggagagaattcgcaagttccagattctcaatgat

SEQ ID NO: 398437 - DNA, 95 bp, Homo sapiens
gaagcaggactgcgccgcgtcttcctcaaggtggggttcggggggccaccgaatcgctgtcacgccggcagctgcatcttcctcccgtgaggctg

SEQ ID NO: 398438 - DNA, 74 bp, Homo sapiens
tgaagtgtcctgccaacaatatggagtacctgaccaatgatgcgagctcagagtcaatagcatccttctctaaa

SEQ ID NO: 398439 - DNA, 100 bp, Homo sapiens
ctggcaatggcctacgtcgtcataccgggcttccttgccctgtccggggctgtgggtgagcgtggaggatgctcagatgcacaccgtcaccatctggctc

SEQ ID NO: 398440 - DNA, 101 bp, Homo sapiens
cggcatgacagctacgccccaccccggcctgggaccttggcccggtgggacatcaaagacgtcagactggatggcgagtcccagtgaggcgatgtgggcag

SEQ ID NO: 398441 - DNA, 75 bp, Homo sapiens
accaaatgtgctacctccaacgacctcacacaaaaagaaatccggaccctggagttgctgagacaaaggaaaacc

SEQ ID NO: 398442 - DNA, 74 bp, Homo sapiens
ctgtacaagtccttcatcaaggactacccagtggatatcttgacctacgtggcttggaagataagtggttttcc

SEQ ID NO: 398443 - DNA, 75 bp, Homo sapiens
gtcatcaagcccttctgtgtcatcctgccggaaattcagaagccagagaggaagtgctgaagctgctgaaagatg

SEQ ID NO: 398444 - DNA, 74 bp, Homo sapiens
ttcaaggaggccttccagctgtttgaccgaacagctgagtcagtgctgattctctcaaatagagcttgaaggat

SEQ ID NO: 398445 - DNA, 98 bp, Homo sapiens
gcttggagacaacacccactgcaccatggagagactttgagaatcactacaagaaaaactccttgtggtgaaggttctaagacgtgggatcgtttcca

SEQ ID NO: 398446 - DNA, 75 bp, Homo sapiens
tcccaggcggtgacagagtggagccatggctagagacaaatttacatgtattggagaccagaccagaagcccttc

SEQ ID NO: 398447 - DNA, 100 bp, Homo sapiens
cagcacaggtcacagtaaggccaaaaatgtgcatactcacagagttagagagagggatggtgccagtagacaagatttgactctggaggtgacgtctgag

SEQ ID NO: 398448 - DNA, 90 bp, Homo sapiens
aatggcaagtggagcagccaacgtggtgggacccaaaatctgcctggaagataatgtatttggagcaagaggtggtggtggccttccccc

SEQ ID NO: 398449 - DNA, 75 bp, Homo sapiens
cacccgaggggcttactgccacagccgctgcctgagatagccatccgagcttgtttcctggggtttgtgttcggc

SEQ ID NO: 398450 - DNA, 88 bp, Homo sapiens
agaaaattgaccacctgaaggaacagctgcagccccttgaacaggttatcaatagtctggctgtctatcgtcatcgtgagactgactt

SEQ ID NO: 398451 - DNA, 48 bp, Homo sapiens
ggggctccagtggagagttcttacgggactttgaacatgtcggggatc

SEQ ID NO: 398452 - DNA, 82 bp, Homo sapiens
cagtatgttgccatctctaacctaccagctgccactttccaggacgtggccgctttggagagtcagcctttattaggattca

SEQ ID NO: 398453 - DNA, 142 bp, Homo sapiens
ctacaagtggcagaagcatagaaataaaagatgaactaaagaaaaagaagaatctcaaccgatctgttgcagaggaaagtggtcgcttatggtcagaggagcagcctgctcaccctctccaggtgggggctgtgtacctggg

SEQ ID NO: 398454 - DNA, 50 bp, Homo sapiens
tgaacaatgaggtcatgatgaaggaatactcccccagttgcaagaggcgc

SEQ ID NO: 398455 - DNA, 90 bp, Homo sapiens
ggcaaaagcacaaggattctcgctgtgacagagacaacaccgagtatgagaaaggcgtagaggctccggtgttttttgtgccaattgcct

SEQ ID NO: 398456 - DNA, 100 bp, Homo sapiens
cactatgtcgtccgaggcccagagatgaccccttatgaaggtggagagtgtgactgcaggatccccactcaccaaccagttctatctggctgctccccga

SEQ ID NO: 398457 - DNA, 75 bp, Homo sapiens
caggagcctttgagctcatctataagcagggtgatctggaccctctggcatctctcaaatcgctgacttacctaa

SEQ ID NO: 398458 - DNA, 101 bp, Homo sapiens
ggcgagtttccgatttaaagctgagctgcgaggaaaatggcggcgggaggagctgctgctcttcctccagaacctgcccacagcccactgggatgatgagg

SEQ ID NO: 398459 - DNA, 74 bp, Homo sapiens
gtccttgtcagctatgtcccatcctcccagcgacagcagggtgtttgaaggcgtctacaacaattccagaatgc

SEQ ID NO: 398460 - DNA, 98 bp, Homo sapiens
cagcacaggtcacagtaaggccaaaaatgtgcatactcacagagttagagagagggatggtgcttgcattcacaagagatgggctctgtggtctgtgg

SEQ ID NO: 398461 - DNA, 95 bp, Homo sapiens
actacaactttgaattcctggattcaagcaatcctcccatctcagcctcctgagtagctaaggactacagttgcaggcagaggcaccaaggctgg

SEQ ID NO: 398462 - DNA, 107 bp, Homo sapiens
caacatttataaaacagtgtggtggtatccttacaatcatcctgcttcttgtacatcactgtgaagcctgcctacagttttcacaaatctgtatcctttcagtaaag

SEQ ID NO: 398463 - DNA, 90 bp, Homo sapiens
ctgaagcattgcttcaaagcatggggctaactccagaatcccccattgcaccagcagacgtttttgaatcaactgagagaaattacgggg

SEQ ID NO: 398464 - DNA, 100 bp, Homo sapiens
taaagaagccaaactgtcggcttcaaagagaaaaggcaacatcctgtcacaggccatgctctggcaaaaacattcagtaagctgtgaggtccgtaatgtc

SEQ ID NO: 398465 - DNA, 100 bp, Homo sapiens
atgcccgttcagtttacagttcattttttgcttggtttggaaaaatttcattagaggttcaaaccttgtactactcagctgatcacaagctgcttgatgg

SEQ ID NO: 398466 - DNA, 75 bp, Homo sapiens
ctcaattctctgagtaggaacaatgaagaccctgatgctcccataagacagaaaatgccccttgatgatctggat

SEQ ID NO: 398467 - DNA, 98 bp, Homo sapiens
cagagagcccaacgcctggtgctcaagactttctccgaggttggtctccctggactgaagagagggagaatagaagcccaagactaagattctcaaaa

SEQ ID NO: 398468 - DNA, 89 bp, Homo sapiens
tgacgaagacatgacacttacaagatggacagggatgataattgggcctccaagagctcaggccacagggtcaccacatacatcgccca

SEQ ID NO: 398469 - DNA, 75 bp, Homo sapiens
tctacatctcaagctcatattttgaagtgtttacgggagcattgggctcaggatctgaacaaagtccgtgagcgg

SEQ ID NO: 398470 - DNA, 87 bp, Homo sapiens
acagggacatggccacctgggacgaaaagattatggtgacaagctgaacatggagctgagtgagaaatacaagctggacaaagagag

SEQ ID NO: 398471 - DNA, 100 bp, Homo sapiens
catgtcaagcgaagccttgaaaaagctgccctgagacggtgtcccgccgaaagagtgccagtcttccgaagagtccatggggtctaattccatgcgttct

SEQ ID NO: 398472 - DNA, 80 bp, Homo sapiens
cacatcagctccaaggtcagggtgattaagctgtcaggtgggatgaggtggaaagtgagaaatggtacctgtctacagac

SEQ ID NO: 398473 - DNA, 82 bp, Homo sapiens
caagactctcttcgctctttgcatcttaactgcaggcttgggcactgtttaaaggaaagttccgagaaggcatcgacaagcc

SEQ ID NO: 398474 - DNA, 98 bp, Homo sapiens
acggaatttacactgacagaagcagtggtcgaatccagtagaaaactggtcaaggaagctacctgatggccaaaagaaaggaagaaaatttttcctct

SEQ ID NO: 398475 - DNA, 74 bp, Homo sapiens
gcctgaagtggcactgaaatgaggcatagatgaggtcatagcaaatgacagaagtcccttggtgggcaaaattc

SEQ ID NO: 398476 - DNA, 98 bp, Homo sapiens
tatgtatgtcatagaccagtacatgctacacttactgcaggatttggcaaacaaggtgttacagcacatgaaggccgtgcaggcagatcaggagcggg

SEQ ID NO: 398477 - DNA, 101 bp, Homo sapiens
gggcggaggcggaggcagaggtggaggcgctttgaaaggtatcctccatgaaatgtgggatccttccaatttctcaagagtctcttcttctgggagatgtt

SEQ ID NO: 398478 - DNA, 100 bp, Homo sapiens
tggatcctacagccaagctccaagtcaatatagccaacagagcagcagctacgggcagcagaatcaaatgtttcctagatttcaaagcgggaggctcctt

SEQ ID NO: 398479 - DNA, 100 bp, Homo sapiens
attatccaaataaattgcaagcattctatccaaatggtgcacttacagagtgctacgatgaactggggaacagatatcagcttccagtgtattgcttggc

SEQ ID NO: 398480 - DNA, 75 bp, Homo sapiens
gtctgcactcgctttcctcggattcccggatgtggacacgatgaggcgagtggtacgacagagcaagtttcggca

SEQ ID NO: 398481 - DNA, 74 bp, Homo sapiens
gaaaatgttcatagtccctatgaatctactagtctgggatctgccgatatgggggatatgaagacccctgattt

SEQ ID NO: 398482 - DNA, 115 bp, Homo sapiens
cggcaccaacaacttcctgcgcttccagcttaccatgcggctgcgctccataaaggcagacgacaagtggaaggagcctgggagaggccaggcctccccggactgctagcctgct

SEQ ID NO: 398483 - DNA, 74 bp, Homo sapiens
aggaaattgtgatctgcgatcgagcctcggtcaaggagatgatgaggagtctgatgaggaagctgtgaagaaaa

SEQ ID NO: 398484 - DNA, 90 bp, Homo sapiens
gagaactacagaaacctcgtctccctgggaaaatcctgccttgcttcgttgggcctatgcaagaacaataaatgtctatcctaatttcag

SEQ ID NO: 398485 - DNA, 88 bp, Homo sapiens
caaagcgtcggtctgggaggaactcattgagttggatgcactaggtgatgagcttctggctgatgaagacagttcttatttggatgag

SEQ ID NO: 398486 - DNA, 83 bp, Homo sapiens
tgaagtcagtgagaccaagaacccaccaattccggacacggactcagtgacctttgaagatgtggctgtgaacttcacccagg

SEQ ID NO: 398487 - DNA, 100 bp, Homo sapiens
cattttaccagtgtgcagaagttctcgaatcattctttgtacagaaattgaaaggcttcaaagctagcaggttcgatacaagaggctgttttcctagcgt

SEQ ID NO: 398488 - DNA, 100 bp, Homo sapiens
gcatcaaacagatgactacccagggagaggaattacgggaacagaaagaaaagtccgaaagagctggtcttccgaccccgaactccaccggaggcaattg

SEQ ID NO: 398489 - DNA, 50 bp, Homo sapiens
ccctccaacccctttgcctatggagagtctcgctctgttgcccgggctgg

SEQ ID NO: 398490 - DNA, 142 bp, Homo sapiens
ggtgaaggaggcggagcttgctcctggagacctggacgcagaggcccgtcatctggcggatgaggctaagaatcttaacatggtccaagacaattcctgggaaagttcagttcttctcaagtgagggttctgacacatctgt

SEQ ID NO: 398491 - DNA, 83 bp, Homo sapiens
ccctactgcggtctcggatattgccggtcaccaggagactaaagtccatcaaaaacatccagaaaattaccaagtctatgaaa

SEQ ID NO: 398492 - DNA, 83 bp, Homo sapiens
tccctgaccatggctccctgcagtaccctttaacggtgtttcccattaaacactaccaggacaaaatcaggccttacatccag

SEQ ID NO: 398493 - DNA, 100 bp, Homo sapiens
ccggctctcgtcagcctcccgccggccgtctccttaacaccgaacaccaataactgtgtagaatacattgaggatgatgaggagcacgtggacattgaga

SEQ ID NO: 398494 - DNA, 100 bp, Homo sapiens
caataaaacatctgaacttgatatgtctgaaagcaaaacaagaagtggaaaagtctttcagaataaaatgagcagcccgacggccatggaggctgaagag

SEQ ID NO: 398495 - DNA, 83 bp, Homo sapiens
ctttctcattattataggctccctcctgctgtcaggctacatcagcaaagggatgcatcaaattgcaatttggaggagaggca

SEQ ID NO: 398496 - DNA, 100 bp, Homo sapiens
gggagcatgaaggaccgaacccaggagctccgcacggctgcgggcctctcgggtgcttcttgtcggcttgaaaggacttggggctgaaattgccaagaat

SEQ ID NO: 398497 - DNA, 74 bp, Homo sapiens
tcccgagtggctgggattacagggaacttctacttcctggagggctccaacgatgccctgctctgtgggaacag

SEQ ID NO: 398498 - DNA, 75 bp, Homo sapiens
tcagttgttctgctgctttcagaccccctctccagagaatacagagggcaaagatggatccaaagtaactaaaca

SEQ ID NO: 398499 - DNA, 74 bp, Homo sapiens
tgcacagcctctgccttcgtggagtgggcattttcaggttgaattgaccaaagcaatggtgatggagaagccta

SEQ ID NO: 398500 - DNA, 75 bp, Homo sapiens
agtgcctggaagtttacgcctgatagtgagaaagatcagtctaaagaaaaggagaagaaagtgaaaaaaacaatt

SEQ ID NO: 398501 - DNA, 90 bp, Homo sapiens
cttgacacttatatcctccctggtgggagctggtgaggtggccaacttcgctgcgtatgcgtttgcaccagccactctagtgactccact

SEQ ID NO: 398502 - DNA, 101 bp, Homo sapiens
gttcagtttagaagagatcaagcaggcaactggaatagaggatggagatgaagatgaggaagctgagtcagctacgggcaagcgggcagctgaagatgatg

SEQ ID NO: 398503 - DNA, 100 bp, Homo sapiens
ggtgctgatagggatggtcttcatgcactctcccctcccgcagtgatgaatcaccaacaccagcagcagatggcccccagtaccctgagccagcagaacc

SEQ ID NO: 398504 - DNA, 82 bp, Homo sapiens
ttctttctcgctgatcgcctaacttctactgacgaagcttggaagttgcagaaggtttccaatacttatctacaggaatcgc

SEQ ID NO: 398505 - DNA, 100 bp, Homo sapiens
tgagcggcactgatttgtccctggggcggcagcgcggacccgcccggagatgagctcttcttcaagtgacaatttcacttagcaaagtagagcttagtgt

SEQ ID NO: 398506 - DNA, 101 bp, Homo sapiens
ggggtggtgctggctcagtacatattcaccttgaagaggaagacggggcggaagaccaagatcatcgagatgttgttgacctcctgtactggagagacatt

SEQ ID NO: 398507 - DNA, 100 bp, Homo sapiens
gatgatgatgatgaacgagctgatgatactctcttcatgatgaaggaattggctggtgccaaggtagaagaatacatgttcacttccagtgaacaagagc

SEQ ID NO: 398508 - DNA, 97 bp, Homo sapiens
gtcgccgccgccgcggggcgaggtcgccgccatggcccgctggatcccgaccaagaggcagaagtacggggttgagactgacttgcataccaaatgt

SEQ ID NO: 398509 - DNA, 100 bp, Homo sapiens
ttattggaggcctacttgcagcatattacctatcaggagaggagagaattcggtcaacagtggatgaaaaagaacaaaaacaacttcttatggatttgga

SEQ ID NO: 398510 - DNA, 98 bp, Homo sapiens
cagaaggtctctggagacatcttcagcaggacccttgaacatctgtgaagaaatgactattctgcatggaggcttcttgctggccgagcagctgttcc

SEQ ID NO: 398511 - DNA, 100 bp, Homo sapiens
gttcgtcctcttcttggtgctgtggctgatgcatttcatggctatcatctacacatcagtgtgcgtgtgaccaccatggatgcagagctggagtttgcca

SEQ ID NO: 398512 - DNA, 75 bp, Homo sapiens
gtccttacaaaagaatttggatgccacagtcaccgcacttaaagaacaggtgaatatgaccatctcccagaacag

SEQ ID NO: 398513 - DNA, 100 bp, Homo sapiens
gcggtggtggcttgtggtgcggcctcaccatacaggaacagggcagacgttagcgtgagtgatcactctcaatcccggatcccataaaaactgcccaagg

SEQ ID NO: 398514 - DNA, 51 bp, Homo sapiens
agttagaagccctctgtcctcagtgttcagaaaactcattagcttccaacc

SEQ ID NO: 398515 - DNA, 50 bp, Homo sapiens
ggcaccggccttgatgaggcaatggaatgaatgtgaaagatgttgcagaa

SEQ ID NO: 398516 - DNA, 90 bp, Homo sapiens
gctgtgaacaacaagaatgaaattgtagtaacggacttccataaccattcagtgaagcacttttcaggattagaagaggctgtgtataga

SEQ ID NO: 398517 - DNA, 83 bp, Homo sapiens
cttggctctcacctgatagatgactatgggagagatggagccatctcagtgtgtggaggagctggaggatgatgtgttccaac

SEQ ID NO: 398518 - DNA, 100 bp, Homo sapiens
cccaagcagtggcgaagggaatcgcaaggctcttccctgaccattttctactgtccctgcgcgaggtcctcagaatggttggaatgaccctccagctttg

SEQ ID NO: 398519 - DNA, 101 bp, Homo sapiens
tgtgacaccaagataagtaacgtttctaagcatgaattgaggaacagaagaagcagagcagatgatcggagcagcatttgtttctccccaaatctagaaat

SEQ ID NO: 398520 - DNA, 100 bp, Homo sapiens
ccgctgcggctcatcgaccgggagaccatgctcgacagctgaccaaggccatgatgcgaaaggccacggccagccgcctggtcacgcagcgcgatgcgga

SEQ ID NO: 398521 - DNA, 83 bp, Homo sapiens
ctgtccttccacctgcacgtggcaggattttttatcaagcagaaatgcatcgaacaacgagaatcaagatcactgagctaaat

SEQ ID NO: 398522 - DNA, 100 bp, Homo sapiens
gaaggaatgaccctaggagagctgctgaaggtgcagtagacattgttgcaatcatgatcggcaatctgaaaggcacaaaaattctgcaatctattcaaag

SEQ ID NO: 398523 - DNA, 98 bp, Homo sapiens
ctgcgtggggatgaacatcgacatcgccagcatcgacatggtttccgaagtcaacatgtgatgtccttgcattgcccatttttaagcaagaagagtcg

SEQ ID NO: 398524 - DNA, 82 bp, Homo sapiens
gtttcacagaggatcaggcccaggatatccagcggagcctagagagaggccccttcagcacgccggtgcccttcctgcagag

SEQ ID NO: 398525 - DNA, 100 bp, Homo sapiens
cgggacccggttccccggcccacagtgggggtgtgcaaacccgagagaactgggcatggagtcctgtggcatccacgaaactaccttcaactccatcatg

SEQ ID NO: 398526 - DNA, 83 bp, Homo sapiens
gtttcagatacttcctcaatgagtcgcatgaatgatattataggaactgtggctgcaccatctgtcttcatcttcccgccatc

SEQ ID NO: 398527 - DNA, 100 bp, Homo sapiens
attcaagcaactttgcgagagcaaaggtactgggaacagcttttgatcctttcttaggaggaaaaaacttcgatgaaaagttagtggaacatttttgtgc

SEQ ID NO: 398528 - DNA, 51 bp, Homo sapiens
agcgcgggccgcggaggaggtctcagggatcacagaagaactgcagcttcc

SEQ ID NO: 398529 - DNA, 100 bp, Homo sapiens
ggccccagcttgaaggcctggagagccgcccagcagcacaacacagggaagcttggggagggaaaggggcgcagggagtctgaaagctccaggagcagca

SEQ ID NO: 398530 - DNA, 74 bp, Homo sapiens
tcgtgatccagaagtccagagctgaggactgcctgtttgcagggaacctcagggcatcatagcttgctgcaacc

SEQ ID NO: 398531 - DNA, 75 bp, Homo sapiens
ggaaaagacatttagaggctgccgctctgctgagtgaaagaaacgcagatggcaaaacaagggttcctccagttt

SEQ ID NO: 398532 - DNA, 75 bp, Homo sapiens
aggactttcttccagcttctgctgtccttctttgtggagagcaaggtacttccggaacctgtgctcagatgacac

SEQ ID NO: 398533 - DNA, 101 bp, Homo sapiens
ccgccgcgcccgcggcccgcggccgcccatgctggactatgatacagagaacctgaactctgaagaaatctatagttctctacgtggagttacagaagcca

SEQ ID NO: 398534 - DNA, 108 bp, Homo sapiens
cacgtgcttcaacgctctgctgcccgctgtgagggaaaagagagacaagagagacacctccaacttcgacaaagagttcaccagacagcctgtggaactgacccccac

SEQ ID NO: 398535 - DNA, 90 bp, Homo sapiens
cgtttgaaggcttccacaccctctactccagggagtcatggccggcttcaacatggggggcgacctcagggagcctgccgccagcattcc

SEQ ID NO: 398536 - DNA, 100 bp, Homo sapiens
gagagaggcaccgggatcgtgaccgagaccgtgaccgagagcgtgaccgagagcgcgaatatcgtcatcgttagaaggctgctttgactctcccgcgaag

SEQ ID NO: 398537 - DNA, 100 bp, Homo sapiens
cgttgtaacatcagtcacagcatggtatgaaagtgccagtatgtctagcacatgtgaaccttgcaaaagtaggaacagacattcagcccagactgaagag

SEQ ID NO: 398538 - DNA, 50 bp, Homo sapiens
ccgcagaagaatcgcattctggaggatgacatctgaactggagagcagcc

SEQ ID NO: 398539 - DNA, 84 bp, Homo sapiens
gggcgcagtttctcacgacgggccgagcctgccactcaaattgtggctactaatttgccccctgaagatcaagatggctctggg

SEQ ID NO: 398540 - DNA, 83 bp, Homo sapiens
ccccgccgcagcggctgggacgtacggagcccgcaagtcccggcccgaggtactggctgtgatcgaacttctcaaccctcaga

SEQ ID NO: 398541 - DNA, 98 bp, Homo sapiens
ctcccaaagtgccgggattacaggatcaactcactatcctgaaggtccattctcccaagaagaggggacagaaagacagatctatttgtaagaaaggc

SEQ ID NO: 398542 - DNA, 83 bp, Homo sapiens
cacacctccattggatttaaaagacagtcctcgtcagcactgactttcagctatggaatcgactgcctctgtcaccgggtccc

SEQ ID NO: 398543 - DNA, 75 bp, Homo sapiens
tgttttccagagctttgccaagttcagcaaatttggagatggacagtcattttgtttactcattcagccctgttg

SEQ ID NO: 398544 - DNA, 98 bp, Homo sapiens
ggcaaaagcacaaggattctcgctgtgacagagacaacaccgagtatgagaattgctgagacaaaggaaaacccactcccttggaggagcatgacctt

SEQ ID NO: 398545 - DNA, 100 bp, Homo sapiens
ggctgccacctacaagctcatggatcatgtggggactgagccatccattaaggaggtggacatcttcaataaggagctactgctaatccccatccacctg

SEQ ID NO: 398546 - DNA, 90 bp, Homo sapiens
gtgcattttgtgaaagtgataaaacctgtttcaaattgggaagtgcacttcttattagagacactatatcagtgtactgttacccggaca

SEQ ID NO: 398547 - DNA, 100 bp, Homo sapiens
cagacccggacgacccccattgctgagccagcggagctgcttgatgccatggacaatattaccaggcagaaccaattctacgatacccaagtcatcaaac

SEQ ID NO: 398548 - DNA, 100 bp, Homo sapiens
caagctctgccgtgatgaactgtgccgctgtgctgaggatcaaagccatcggccagacagagttgaatgcaagcaatccagaagaagtgttacagctggc

SEQ ID NO: 398549 - DNA, 100 bp, Homo sapiens
tttggtcacattccgcctccattcaaagagcctattttagaaaggccttatggtgtacaaagatcatccaattatgatgggttttgaaccccttgtgaac

SEQ ID NO: 398550 - DNA, 100 bp, Homo sapiens
gagacgaagtgatcttcggggagttctcctggcccaagaatgtgaagaccaactatgttgtttggggcaaaatgatgcttcaacacccaggccaggtctc

SEQ ID NO: 398551 - DNA, 101 bp, Homo sapiens
ggaatccagtataccctcagaccttgcatcttcctcaggctccaccctataccgatgctccacctgcctactcagagggccaagaccagcttcaagtctcc

SEQ ID NO: 398552 - DNA, 87 bp, Homo sapiens
caactcctatgatcatgcacacaagcagtgagaaagatcagtctaaagaaaaggagaagaaagtgaaaaaaacaattccttcctggg

SEQ ID NO: 398553 - DNA, 100 bp, Homo sapiens
atgatggaagtgtcttggcaagttatggcaatgtgatcgtcatcacagtcaactatcgacttggagtactcggtgccagcgagatttcagattcctgtaa

SEQ ID NO: 398554 - DNA, 100 bp, Homo sapiens
accggaagaaactgtccgagaagcccaaagctatttttatgattcccacaaatccaccaccaacattcagaaagccagaactttggtccgatgatttcac

SEQ ID NO: 398555 - DNA, 75 bp, Homo sapiens
gacaccatttctaagcaacttacattagaacaggtgaatgaaaactttgccattgatttgatagcagagcagccc

SEQ ID NO: 398556 - DNA, 96 bp, Homo sapiens
attaggaaacatgctagaattacctggaacttcatcatcatctacttcacaggaattgccatttggcttctgtatgtaatgtactgttgacttgct

SEQ ID NO: 398557 - DNA, 90 bp, Homo sapiens
ccagcaatcacagaagccgacaaggcgttcaagcgaaaacatgaccgctgagcccatgaggtaaaggtagtggtatttgataagactgga

SEQ ID NO: 398558 - DNA, 76 bp, Homo sapiens
ggatataagtgatttggccaccaaactcctggacagttggaaagacctaaagggaagagtgacccattttgcttgt

SEQ ID NO: 398559 - DNA, 82 bp, Homo sapiens
ctcggcctcggcgtgctgcgcctccgcggctgccctgcgccagatgaggacggggacttggttgccttttccagtgacgagg

SEQ ID NO: 398560 - DNA, 75 bp, Homo sapiens
ggcagccggaaggacaccaagatgcggatccgggcctttccggtgtcatccttgaaggatagaataaatcagctg

SEQ ID NO: 398561 - DNA, 82 bp, Homo sapiens
cccaccttctttcttcagccgaggccgccgccgcctctccttgctgcagccatggagagtcctggcaaaataagcatgcagg

SEQ ID NO: 398562 - DNA, 107 bp, Homo sapiens
cctctggctcccttcacctcatttgtctacaccatcaaggaggaaggcctggttcttcaagatgagctcacagtgcctgcactttaccccagtagccctgaagtgtg

SEQ ID NO: 398563 - DNA, 90 bp, Homo sapiens
ccttctgatgtaccagaaaagcccagcaggatgaagttaaaggaagtagatcgtacagccatgcaggcatggagccctgcccagaatcac

SEQ ID NO: 398564 - DNA, 82 bp, Homo sapiens
cctgctcttcgctctcttcctggctgcgtccctaggttcgtgctggccgtgggcagcgccgtctttgatgccatgttcaacg

SEQ ID NO: 398565 - DNA, 75 bp, Homo sapiens
ccagcagcccccgaaggccctatcaggacatggagtatgaaagacggatttgttaaggattccaagtaactctta

SEQ ID NO: 398566 - DNA, 98 bp, Homo sapiens
gatctctcagggtcgtcgggtgaagctacaaggctttggccgaccaagtgtgtaccatgctgctattgtcatcttccttgaattctttgcgtggggcc

SEQ ID NO: 398567 - DNA, 82 bp, Homo sapiens
cgaacgcggagagcacgccatgaaggcctcgggcacgggagtgcatccgccccaacccttttccccctcgtctcctgtgaga

SEQ ID NO: 398568 - DNA, 100 bp, Homo sapiens
attgaccctccacgggcggccgttcctgatgccgtgggcaaatgtcgaagtgctggaattaaggtgattgaagcctccgatgttgtcctagaggtgttgg

SEQ ID NO: 398569 - DNA, 114 bp, Homo sapiens
caacgacctgtttgagagtgggaacatgacgcaggtgcaggtgtctcttctcgccctggcggggaagggtcctggcggcagagaccacgtcccagcaggagcggctgcaggcca

SEQ ID NO: 398570 - DNA, 82 bp, Homo sapiens
tctgacagagaatgagatgaccacaattcactatgatagaattacttctctacaggaggaagaacgtgcaaaacgtgaggag

SEQ ID NO: 398571 - DNA, 100 bp, Homo sapiens
cgcggcggggaaaatggcggacgggaaggcgggagacgagaagcctgaaaagtcgcagcgagctggagccgccggagaaaagactgtatcttcaccattg

SEQ ID NO: 398572 - DNA, 101 bp, Homo sapiens
caaaacgtgaaaaaaaagacctgctttgccctgggaaatagtaaccctgccaaatacatcagcttgtaggagacagaggtcctgcatgccagtaaaactac

SEQ ID NO: 398573 - DNA, 75 bp, Homo sapiens
ggacgaggagtcggaggagccgcgggcggcgcggcccagctcgttccagggctggatcttcaacgtggttccttg

SEQ ID NO: 398574 - DNA, 100 bp, Homo sapiens
gagcagaggagtggctggcacaagggtcagctgtccaacggggaaccagggctggctcggtgggacagggcctcagagcaaatggacaatgccgtgtata

SEQ ID NO: 398575 - DNA, 82 bp, Homo sapiens
atggtgacaggcctgatgaccaaggctgagaagacctggaatcatttttctgataatgaggcagagcgggttaaaatgatgg

SEQ ID NO: 398576 - DNA, 83 bp, Homo sapiens
gaaggaacgaggcaaggagctaaagcagcgtgcgttcagccctgggatgacttcaaacctgcttctattgacacttcttctga

SEQ ID NO: 398577 - DNA, 100 bp, Homo sapiens
gccgtcctgaggagcctcctggcctgcagcttctgtgtgctcctgagagttgttggaattggaagcggaacaaaaatgttgaccagtatgttgtcagggt

SEQ ID NO: 398578 - DNA, 75 bp, Homo sapiens
attgaacctgtacagtggatggaatctgctttgttgggagtgatggatggacagtagagacggggtttcgccatg

SEQ ID NO: 398579 - DNA, 100 bp, Homo sapiens
cggacacgctctgcttcgacaaggacgagttcatgaaggcctaagatctggcaaacttggtgaacagtgtgaagcagttgttcgctttcccagacttttt

SEQ ID NO: 398580 - DNA, 90 bp, Homo sapiens
cttcaacgccagttggtggaatatgagagaaccaagttccaggaaattttggaagaaactccaagtgaatcaggtctaggaaaatcgact

SEQ ID NO: 398581 - DNA, 100 bp, Homo sapiens
tgggctcaaaccatcctcccacctcagccttgttcttggagtactaagtcaagatggtattatgagatttatcaatatgcagacttgtaaacttctcttt

SEQ ID NO: 398582 - DNA, 83 bp, Homo sapiens
gaccatgtggctgccttgggctctgttgcttctctgggtcccagggagtgcatccgccccaacccttttccccctcgtctcct

SEQ ID NO: 398583 - DNA, 100 bp, Homo sapiens
ccagtcggtgctccggggaggtcacctgacgaggagattgagatggcacagaagctattgaactctgacctgggtgagctcatcaacaagatgaaactgg

SEQ ID NO: 398584 - DNA, 100 bp, Homo sapiens
cttggggagctgcgctcggcgggcggacgcgggcatcagttttgaatgtcaaggaatccaaagctcctgaaagaacggttgtagttgctggtcttccagt

SEQ ID NO: 398585 - DNA, 100 bp, Homo sapiens
ctcaccaacctcattcacaacatggagctcgaggccatgagcagatataccagcccagtgaacccagctgtcttcccccatctgaccgtggtgcttttgg

SEQ ID NO: 398586 - DNA, 74 bp, Homo sapiens
tgctgcacgtgtttgttctgggcgaatggcagcccatcgaggtggacccccaaaagtacaagggcatatttaac

SEQ ID NO: 398587 - DNA, 100 bp, Homo sapiens
ccggggcttgccctggtcttgctcggccgatgaagtgcagaggtttttttctggaacacatgattctgtgcagatttgcagaccagacagctgtccagct

SEQ ID NO: 398588 - DNA, 100 bp, Homo sapiens
gggccccaatgagtggcacacagtctactatcaccgacaggtcaaaatgcagatcttcgtgaaaacccttaccggcaagaccatcacccttgaggtggag

SEQ ID NO: 398589 - DNA, 75 bp, Homo sapiens
aattcctgtgccacctcctcctttagaaaactgatcttaatacaggttaccaacatcaagaagacactcaaagcc

SEQ ID NO: 398590 - DNA, 121 bp, Homo sapiens
ggctgaccgaggggcggacgcgcggcggggcagaccgctggggactgcgggcggcgctgtgtccgtcgccatgacagccatatcagcgggaacaagattggctgggagaagacgggaagcc

SEQ ID NO: 398591 - DNA, 98 bp, Homo sapiens
aaatgggccatgagctcttcaaattggcccagatctttttcaacggaatggtcagtctgtagacgttgaagagacattgccatctgaaccagaaaatg

SEQ ID NO: 398592 - DNA, 100 bp, Homo sapiens
cctgggcctgccggcccgcgccgtaagcaccacgttcgggtgcagggtcaacgtggccatctgcctccaggccagaaatgatagacaccgcaagaaacaa

SEQ ID NO: 398593 - DNA, 80 bp, Homo sapiens
ccttcctcaacgacgcggacatggtcatgagctttgtgaacctgggaagctcttcgtgggcggtcttgactggagcacga

SEQ ID NO: 398594 - DNA, 83 bp, Homo sapiens
gcgttcgatcttttaacatcacatcacatgctgacagcacaagaagctccagaaagcagtggggcctgagatcaccaagacag

SEQ ID NO: 398595 - DNA, 75 bp, Homo sapiens
cagatccgcagacatcctacaggaaccacccctccagttaagactatagaccagtttgaatatgatggttgtgac

SEQ ID NO: 398596 - DNA, 74 bp, Homo sapiens
tcttctccagcgccctggcctccctcaccttggacacctcgcttggggtgctgacggagcttgtgtccaagatg

SEQ ID NO: 398597 - DNA, 100 bp, Homo sapiens
tagaaggccagagtcacacacggtcctaagagctgggcaccaggaagcgaaggctggtatgatctcgtgaaaccttgagagaaactgaatgacgaatgaa

SEQ ID NO: 398598 - DNA, 83 bp, Homo sapiens
ctccgcgccccgaggtctccgcggcccgaggtctccgcccgcaccatgcggctgggcagaacatccagtcatggataaaaatg

SEQ ID NO: 398599 - DNA, 100 bp, Homo sapiens
agcacctaatgcagatctaatctttaagactggtgggagtggccattctggagaagaagtacagttatgcagtaaagccattaaaacatcagatatcgac

SEQ ID NO: 398600 - DNA, 74 bp, Homo sapiens
cacgttggagggcttcgcgtctgcttcggagaccgtaagggagagcgaagaggaactttactcctcctgtcgcc

SEQ ID NO: 398601 - DNA, 100 bp, Homo sapiens
ggcggaagaatatcaggtcctgagatcacccacccggcgcggcaacagtgcaggaacggaaaacagttcttccttcaaagcatgcagtacctgaagtaat

SEQ ID NO: 398602 - DNA, 100 bp, Homo sapiens
acacagttccggaaagcacagccagactctcttgagcctgagggatccattacagtttcaatgggtattgacttttgtgattctactcagactgccagtt

SEQ ID NO: 398603 - DNA, 51 bp, Homo sapiens
ggagagaatgctgacagtcctgcaggcaagaagttatgaaatggaatggat

SEQ ID NO: 398604 - DNA, 131 bp, Homo sapiens
gtcgcctagtaaacggggctgctggtgggccgcgtcgaagacatggaccagggctacggagacaatgcagatcttcgtgaagactctgactggtaagaccatcaccctcgaggttgagcccagtgacacca

SEQ ID NO: 398605 - DNA, 82 bp, Homo sapiens
gccactgtttagtgagaacaccctgcagttctacaatgagaggtgtcagttgtacccgaggcgttctcagcagcagcaagta

SEQ ID NO: 398606 - DNA, 75 bp, Homo sapiens
caagatcgcaagcccacccagtgactttgggaggcttcagttttccgaggctccctggaggctgcccacatgtgc

SEQ ID NO: 398607 - DNA, 100 bp, Homo sapiens
ggcgcgcaccgtggccaccctgtgggcctggcgctggaggcagcggtgcacgtgcaggaatatattaaaggaatctgtgaacctgaactagaagaaagag

SEQ ID NO: 398608 - DNA, 96 bp, Homo sapiens
ggactatgcagagaccgtgcatcagctctccaagaccagccgggccctggtggccgacagccatcctgaaagccactgttccatccctgacccatc

SEQ ID NO: 398609 - DNA, 83 bp, Homo sapiens
attgaccccaaagttgcatttcctcgtcgagcgcaacccaaggcagttgtgaaaaacttcaggacaaaaatgtttcatttaag

SEQ ID NO: 398610 - DNA, 98 bp, Homo sapiens
gcagtgtgaaggccaatggccaagtgtctctacctcatttcccggaacatgcttttgaaagcagccagaaatataaagaaggcaaatacatcattgaa

SEQ ID NO: 398611 - DNA, 50 bp, Homo sapiens
caggattctgacagggatgttgcgaagcgccatcatgaccgggtcctata

SEQ ID NO: 398612 - DNA, 141 bp, Homo sapiens
ttcaggcaatcttcagcggtgatccagaggagatccggatgctcatccataaaactgaagatgtgaatactctggttgactttggcagaatatcatgaacaggaagaaattttcaaacttagactaggacatctcaaaaag

SEQ ID NO: 398613 - DNA, 98 bp, Homo sapiens
tggaacaccccctttctgctgacatcgccatggccacccgtgcagatgaggacggagacacgaatgggtaccacagaccatgtcatcgtcctggcgtc

SEQ ID NO: 398614 - DNA, 96 bp, Homo sapiens
aaagatttactttcccatccgtgactcctggaatgcagcatcccagccatcactcttccacctgctccttagagaagggaagatgagtgagtcgag

SEQ ID NO: 398615 - DNA, 98 bp, Homo sapiens
gccgctcatgactatacgctaagagaacttaaactttcaaaggttggacaaggaacgcagcccaccccggctctggagccacggaaccccggcggcga

SEQ ID NO: 398616 - DNA, 50 bp, Homo sapiens
cttgacacttatatcctccctggccaaggccacctttgatgccatttcta

SEQ ID NO: 398617 - DNA, 75 bp, Homo sapiens
tgacgggctttctgctgccgcccgcaagcagaggtgcctgtagtggctgtgttgggttccgggggtggaacccga

SEQ ID NO: 398618 - DNA, 100 bp, Homo sapiens
gaagggaagggtggaatgtgttccatccgtctcagcgaaccccttttgaagttgaggccaagaaaggatcttgtagaggctggagtgcagtggcgcaatc

SEQ ID NO: 398619 - DNA, 159 bp, Homo sapiens
caaaatcagaggaaagactcaagattgtaaaagagttcaacagtacacaagatgttaacatttgccttgtctctacaatattgttttcagagggaggcaacttttctcctaaagaaatcaattcactgtgttcccgactggagaaggaagctgcccgga

SEQ ID NO: 398620 - DNA, 83 bp, Homo sapiens
ttcatctatggccactacaaacaagcaactgtgggcgacataaatacaggttttgagagattacctgaagttgcactcaaaag

SEQ ID NO: 398621 - DNA, 80 bp, Homo sapiens
attcattttaattttgccggaatatttcaagacaccgaaagaagagcacctctttctgatgaggagtcaacgacaggcga

SEQ ID NO: 398622 - DNA, 74 bp, Homo sapiens
tgggagcagaggaagccttgaggacctactcacagataggaattgaagctttcatccatcccaggggaatcact

SEQ ID NO: 398623 - DNA, 100 bp, Homo sapiens
actacaactcgcccaccacgtccagcttcaccacgcggctgcacaactgcaggaacaccgtcacgctgctggaggagaaaactgcatcagcagtttgaaa

SEQ ID NO: 398624 - DNA, 95 bp, Homo sapiens
acggggccttccagagacgcggcgcgcccgccctgcagctgcccaagcagggccagtgtcattcaaagatgtggctgtggatttcacccaggagg

SEQ ID NO: 398625 - DNA, 100 bp, Homo sapiens
gagggattctggcatcagggaggctttcagccggagaagcgagtttcagctggttttcctttggaatatggataaatacaccatgatacggaaactagaa

SEQ ID NO: 398626 - DNA, 50 bp, Homo sapiens
aaagaagattactctgcaacagctaaagtgggagctggtgaggtggccaa

SEQ ID NO: 398627 - DNA, 101 bp, Homo sapiens
gtcgggctggtgcagccccgggccaggccgcggccggggcaggagcgcagttggtgagtttgtaagtgatgcccttctcgttcctgacaagtgcaaattct

SEQ ID NO: 398628 - DNA, 98 bp, Homo sapiens
ctgttcgatgccacgctgacccagagatggacagagacgtatgtgcgttggtctcctaagggcacctacctggctacctttcatcaaagaggcattgc

SEQ ID NO: 398629 - DNA, 100 bp, Homo sapiens
agagtcttcgcagaatgcaatgatgaaagcttctggttcagatgatatgctgcaggctgctagtcattatcgccaaaatagaaactctttgtatagaaga

SEQ ID NO: 398630 - DNA, 100 bp, Homo sapiens
caagatggcggccaatgtgggatcgatgtttcaatattggaagcgctttgatttacagcagctgcagggtttgtggatgcacttagatgtttgcaatgag

SEQ ID NO: 398631 - DNA, 75 bp, Homo sapiens
agaatggcagccatttatttgtcccgtgggaggagtctgctactagtcttatcagctcttaaaaacagaaactca

SEQ ID NO: 398632 - DNA, 100 bp, Homo sapiens
tttcaccggcgccgcggtggtcgaggcccagaagattaacaatggctcaagccaggcggatggcactctcaaaccagtggatgaaaaagaggaggcagtg

SEQ ID NO: 398633 - DNA, 97 bp, Homo sapiens
cctgactgatgccttcgtggaggaggaattttgttgtcagagaataaaaggaggttgtccataattgactttaagcagcaatcagtaaaacattgag

SEQ ID NO: 398634 - DNA, 110 bp, Homo sapiens
attggaaattaattgctatcaatgcgaatgatcctgaagcctcaaagtttcatggttatacattggctcttcaaagacgttcacctcatcagagaaatccctgactcctt

SEQ ID NO: 398635 - DNA, 100 bp, Homo sapiens
agctgcggaacaggacgccctctgatctgcatcttcctcccgtgaggctggccgagctccacgctgatctgaagatacaggagagggacgaactcgcctg

SEQ ID NO: 398636 - DNA, 83 bp, Homo sapiens
tggcaagagggatgtctgtgtggatggcagctgccgggtgccagaaccctgtggagcatcatgaactgggaagagtagctgag

SEQ ID NO: 398637 - DNA, 101 bp, Homo sapiens
cagaacagcacgtaccagaggtggaagtccaagtcaaacgcagaaggactgcctcactgagcaaccaagatgtctcctcagaaacaatcggcccagaaggt

SEQ ID NO: 398638 - DNA, 80 bp, Homo sapiens
cagcctctggagtagcggggaccacaggcttcatcgcctcagacatgacctcccgcaactcgagcacgcagctgtggctc

SEQ ID NO: 398639 - DNA, 82 bp, Homo sapiens
cgcgcgcagggcctgcagcgggagctggacggcgagcgcgagcggcgcgagaaagactccatccccgtgtctacctccctcc

SEQ ID NO: 398640 - DNA, 85 bp, Homo sapiens
tgcagcatattacctatcaggagaggaggtgttacctcattttgaaagtcttgggaaacaggaaaaaattcctaacaaaatgtca

SEQ ID NO: 398641 - DNA, 75 bp, Homo sapiens
acacttacaagatggacagggatgataattgggcctccaagagctggagtaaaagggacattgggaagattagtt

SEQ ID NO: 398642 - DNA, 98 bp, Homo sapiens
aagtgaaccggcaaatgctgcaggaactggtgaacgcaggatgcgaccagataagctgtcattggaaggaatagtggtacaaagagctgaatgccgac

SEQ ID NO: 398643 - DNA, 98 bp, Homo sapiens
gtccacgtggccagagggcggccacccggagccagcggagggacagaccccccaaagacacacgtgacccaccaccccatctctgaccatgaggccac

SEQ ID NO: 398644 - DNA, 89 bp, Homo sapiens
gctaaatgtagacaatggttagagaagaattttccaaatgaatttgcaaaacttactgtagaatgatctctgcctttcacaaagaccac

SEQ ID NO: 398645 - DNA, 74 bp, Homo sapiens
gcctgcaaagctgtacaagagatcatgcagatgctttgggaaaatggaattaatggcattttagcagatgaaat

SEQ ID NO: 398646 - DNA, 90 bp, Homo sapiens
catcactcagcttacacagaagctattagctgttagtaaggtgaaggtggtgagcctgaagcctgaggtggcccaggtcgacctgtacat

SEQ ID NO: 398647 - DNA, 100 bp, Homo sapiens
aggtggagtggacaggagcattaccacctcagccaccctgaccactatcatcaccatggaaaaagtgacttgagcaggtcctatggcagcgtatacaaag

SEQ ID NO: 398648 - DNA, 100 bp, Homo sapiens
gaatcactgagctgtaacaaagcactctgtgctagtgatgtgagcaaatgcctcattcaggcctgttacatgaacagaatatggcaaaaatgagactact

SEQ ID NO: 398649 - DNA, 100 bp, Homo sapiens
ccactagtagtgcgctggtaaatgctacggaatgggatgtacagttacccagcacgtgtacctcctcctcctcctattgctcgggctgtagtgccctcga

SEQ ID NO: 398650 - DNA, 50 bp, Homo sapiens
gaaaaacaacacacacgtctctgaaggaatgttactgggatgctttactg

SEQ ID NO: 398651 - DNA, 74 bp, Homo sapiens
gaaggaccatttctggactacagctgagattgagaactgcttcataatcctcatggagatggggtttcaccatg

SEQ ID NO: 398652 - DNA, 100 bp, Homo sapiens
ccgagctggacccggaccggttttggggaaccttctgaccagcctcatgggctcctcagagcaggaggatggggaggagagccccagcgacggcagcccc

SEQ ID NO: 398653 - DNA, 101 bp, Homo sapiens
ctctgcaggttggcactcacacccagcgcgcaggatggcaggtgtttgagaagtcccccctgcgggtgaagaacttcgggatctggctgcgctatgactcc

SEQ ID NO: 398654 - DNA, 86 bp, Homo sapiens
ccggagctgggcgcggattcgccgaggcaccgaggcactcagaggagactcggtgaaatacctggagtgctcagctctcacccaga

SEQ ID NO: 398655 - DNA, 100 bp, Homo sapiens
cagatggcgggactaagagatacctacaaggattccatcaaagcatttgcagagcccccatcacctcaggcttctcagttcccttagccgtcttactcaa

SEQ ID NO: 398656 - DNA, 95 bp, Homo sapiens
tgtgtggcattaagcacctccattctgctggaattattcacaggaagtggtacaccatccccaaaacgaacatctgtaggctccaggccaccagc

SEQ ID NO: 398657 - DNA, 83 bp, Homo sapiens
gaacaagaagtaggcattgaccccttgtccagttactctaacaagtctggagatttcgggcagacaacttgaacaagctgaag

SEQ ID NO: 398658 - DNA, 100 bp, Homo sapiens
ccagctctggcgccctgacccacatcctcgtgcctgtgagcagagatggcacctttgatgctggctggctcacagttggaccaacgcttacaaatagcaa

SEQ ID NO: 398659 - DNA, 74 bp, Homo sapiens
atggcagaaagggggcatctttaagtggttctatagatggtaataaccaacttgtaatcaaaggaagattccaa

SEQ ID NO: 398660 - DNA, 98 bp, Homo sapiens
acctgattatcaacggtgtgcctctgcctgaggctgaccggttccctgatgtgttacctgcttctgctactgatccaaactgcagaacttctcattca

SEQ ID NO: 398661 - DNA, 90 bp, Homo sapiens
gaggacctcacttccccggggtgtaataatgttaactgaggtgaatgaaaactttgccattgatttgatagcagagcagcccgtgagcga

SEQ ID NO: 398662 - DNA, 110 bp, Homo sapiens
tttctgtctagctccgaccggctgaggcggcgcggcagcggagggacggcagtctcgcgcgacaatgcagatcttcgtgaagactctgactggtaagaccatcaccctcg

SEQ ID NO: 398663 - DNA, 100 bp, Homo sapiens
cctggttgcctgcagcggcccggacccgagagtgtcttcgagagaactctgacgtgaagacgcacgggccttttgaggccgtgatgcgcactctctgtga

SEQ ID NO: 398664 - DNA, 75 bp, Homo sapiens
tgctgctgctgcccgcgtccgaggctcgcgggcggcgggcccggatggaatcgccacttatatatgtttcagttt

SEQ ID NO: 398665 - DNA, 83 bp, Homo sapiens
tgtaaatgggaaggacaggcagagctaaacaaggaaagatgaatgggagggctgattttcgagagccgaatgcagaggttcca

SEQ ID NO: 398666 - DNA, 75 bp, Homo sapiens
gggagcctctgccttgtacagttcccatcacagctagcgctgaacacagcccagtttgcaaagagtctagccatg

SEQ ID NO: 398667 - DNA, 75 bp, Homo sapiens
cgggcgcgggcgctgcggcgggacagctcgacgcgcagacaatgcagatcttcgtgaagactctgactggtaaga

SEQ ID NO: 398668 - DNA, 100 bp, Homo sapiens
cagcgggggggcccgggggccctggtggccctgggatggggaaccgcggtggcttccgcggagccaggcgttgtggggcagatgatcgaggcagctgaag

SEQ ID NO: 398669 - DNA, 100 bp, Homo sapiens
gagcggctgcggagccgggcgctctccgccttcaagttgcggggcttgctgctccgtggcgtgttcctgccatccagtaggatcagctgtccttcctgcc

SEQ ID NO: 398670 - DNA, 96 bp, Homo sapiens
gtcagacggcagtggtggaaaagatccatgccaaggggaacgcccttttgcttgtgactggcagggctgcgacaagaagttcgcccgctccgacga

SEQ ID NO: 398671 - DNA, 87 bp, Homo sapiens
aacagcagcgtcctccccaccccacctgccaccgaggccccctcttcgcctcctccagatggaatcagtgtgagtggctttcccctg

SEQ ID NO: 398672 - DNA, 100 bp, Homo sapiens
ccagcgtccttccaggctgttcagacctcagcgttgacactgaaactggcccctccgcggagcactcactgaaaatgaccgagacagccagtcgccgttg

SEQ ID NO: 398673 - DNA, 101 bp, Homo sapiens
ccgggtttctttgatgcgacctcaggaaggagatgaggtacaatgactcttcttgcttttcacctaagttgaataagcaccctgtgcactttaatctcctg

SEQ ID NO: 398674 - DNA, 95 bp, Homo sapiens
gtggcaagaagatccatatgagtatataaggatgaaatttgggacgtccagatcggtgacatcgtcacagtgggcgagtgccggcctctgagcaa

SEQ ID NO: 398675 - DNA, 100 bp, Homo sapiens
cggactgcctggctctgggcagatccgaggtggataggacaaggcaaaaggtagccctggagaggcgtggagctatttcctatgacagttctgatcagac

SEQ ID NO: 398676 - DNA, 76 bp, Homo sapiens
ctctctcctgatacagcaggcgctcaccatgttccctggagctgataccccaatgtccttctttgactttgtggtt

SEQ ID NO: 398677 - DNA, 83 bp, Homo sapiens
atgccaacagtgtaccagcagggcgttggctatgtgcccatcacagtgcagagcagagcgggcggaggaccccgggcgcgggc

SEQ ID NO: 398678 - DNA, 96 bp, Homo sapiens
atgttagttcttcagattttgaagaagggccgtcgaggaaaagaactcccccactggaaaggattctgaaagaaatgaagtcagccctcagaaatg

SEQ ID NO: 398679 - DNA, 75 bp, Homo sapiens
cctggtcatcttctatttccaaatcatctgcaagcagcagaccccggagctggagccagccgccaccatgccacc

SEQ ID NO: 398680 - DNA, 75 bp, Homo sapiens
attgacatttaattttagggtcctttatatagaagggagagtaggttcttcacgtacggtaattttccattagaa

SEQ ID NO: 398681 - DNA, 101 bp, Homo sapiens
cttggttgtacttctgttatctgctcagacaagactggtacacttacaacaaaccagatgtcagtctgcaggtccaaatccttgggtgacagtaagaaccg

SEQ ID NO: 398682 - DNA, 74 bp, Homo sapiens
atcgcactgctcatcttggccatcactatacacaacgttccagatcatacatctgtcggtggcctgggagacag

SEQ ID NO: 398683 - DNA, 98 bp, Homo sapiens
aaacaaccagctcctgagcctcccaaaccttacagagttgaagtattgataacaccaaggaactctatcacaatttgaaaagataagcaaaagtttga

SEQ ID NO: 398684 - DNA, 83 bp, Homo sapiens
ttctcaagtaccatctgctgctgcaggcgcagacggggaagcggagccaacatgccagtggcccggagctgggtttgtcgcaa

SEQ ID NO: 398685 - DNA, 96 bp, Homo sapiens
tctgcactcccggccgggtggtgggcgcatatcctgggtagcctctaggaagcgctagacacatgaagttggtgaaccatctaaagaagagaaggc

SEQ ID NO: 398686 - DNA, 82 bp, Homo sapiens
aaaaaaggagatgcctggcagccccgctctctgcactggagctctcaaacactgctgtcctgcaccagatgcggcgggacca

SEQ ID NO: 398687 - DNA, 75 bp, Homo sapiens
ggagctatcggcgccgcggcaagagccaggactccagaagacctttccagattcgtggttgagctgcagcagagg

SEQ ID NO: 398688 - DNA, 102 bp, Homo sapiens
ttatttcaaagatgaagatgaaaccaagcccttggtggtgaagcagtattttccaatttgaagattcatttgaaggtggctcctgccacctgctaatagcag

SEQ ID NO: 398689 - DNA, 75 bp, Homo sapiens
agctatcattgaacacctgtatagtgatggtggcctgcgttttggagaaatggaacgagattgtcagattgccca

SEQ ID NO: 398690 - DNA, 74 bp, Homo sapiens
tgacatttaattttagggtcctttatatagaagggagagtaggaacgagttgaagcagttaatatggctgaagg

SEQ ID NO: 398691 - DNA, 75 bp, Homo sapiens
aaagcctacgggatccgctttgacgtgatggtgaacggcaaggttaatttggagtggcccctggagtcagtttcc

SEQ ID NO: 398692 - DNA, 100 bp, Homo sapiens
gttggagattctccggggacccttccgtatctgcctaggcattttgctgtctcctcctaatacgagctgggatgtttgtgtctaagttctttgggggcta

SEQ ID NO: 398693 - DNA, 100 bp, Homo sapiens
tttgtggccttagctacaggagaggtctatgttaacaatgaatgggcaaccagtgttggggaaggagggagctttggagaacttgctttgatttatggaa

SEQ ID NO: 398694 - DNA, 80 bp, Homo sapiens
gggactgagctggattttccttttggctattttaaaagatgatgataattccgaagaaggcttccacactattcattcag

SEQ ID NO: 398695 - DNA, 89 bp, Homo sapiens
ggtgaccaagcccaaagaggagaaagatgcttctaaggaatccgaatcttgaactgcctatgttattgtcctacaagcatactgacagt

SEQ ID NO: 398696 - DNA, 101 bp, Homo sapiens
cagagatccaatcagcagatgtgtacggatgaaaatacaggactcacaccacccggcaagaactgctcactacggctccctgccccagaagtcacacggcc

SEQ ID NO: 398697 - DNA, 50 bp, Homo sapiens
gacaggcttttgctttgattccagagtctgaagcaagagcactggccaaa

SEQ ID NO: 398698 - DNA, 100 bp, Homo sapiens
cagtactcgggcaagaccaccttcgtcaatgtcatcgcgataatgggaaattcatccgagttccagaaagccgtcaagttagtgatcaacacagtttcat

SEQ ID NO: 398699 - DNA, 82 bp, Homo sapiens
ttccgatttaaagctgagctgcgaggaaaatggcggcgggaggaagccagcagacctgcagaacttggctcccgggacccac

SEQ ID NO: 398700 - DNA, 100 bp, Homo sapiens
ggaatttttgatgataccttttctatatggattacaatttgatcgctgggaattctccaccttaaagaagaaaatgcatccgatgcagatttatggctcc

SEQ ID NO: 398701 - DNA, 75 bp, Homo sapiens
tggagagccatgttttcctgaaggccaagacccgggtggagctggccctgctacagcgctcctaccaggacctgg

SEQ ID NO: 398702 - DNA, 83 bp, Homo sapiens
ctctggtcggcctcaccttttgtacctgctacctggcttcttacctcacgaacaagattgtctttggctatagagtttttttt

SEQ ID NO: 398703 - DNA, 82 bp, Homo sapiens
aaggaagccgcccgccccccaccgccgccccctccggcgtgttcatgcccccgggggcgtgatggtgggcatgggtcagaag

SEQ ID NO: 398704 - DNA, 87 bp, Homo sapiens
aggatggtgcagattttggcagattatggctttgtccccacccagcactgatgatattataaacgagtaaccagctcataaatcaca

SEQ ID NO: 398705 - DNA, 90 bp, Homo sapiens
agcaacgggagtgtcctggacccagctgagcgggcggtcattcgcatcgcagaacctgcaaccatggtcgtgccactagccagctcggaa

SEQ ID NO: 398706 - DNA, 50 bp, Homo sapiens
atgtcaactcccagtctgcaacagaccctctccagtggagagccgcctgg

SEQ ID NO: 398707 - DNA, 83 bp, Homo sapiens
cgagtcctagatgtcaataaccagtccttcagagaacaagaggttgaaaggattgttgacaaaaggaaaaataaaaaagggaa

SEQ ID NO: 398708 - DNA, 98 bp, Homo sapiens
gaacaaagacacaggtcactcaaataggcaggtgaaatgacaatggatgctctgttggctcgattgaaacttctgaatccagatgaccttagagaaga

SEQ ID NO: 398709 - DNA, 90 bp, Homo sapiens
aaagaacaatacgagcagatccttgcatttgtccaaggagcggcattgcccccgaatgtccagattatccctgtttttgtgaccaaagag

SEQ ID NO: 398710 - DNA, 101 bp, Homo sapiens
catccaggttgatgaagctaatttattgacttggcaagggcttattgttcctcactattcctgatcagagaactccagttgcttcaacacacagtatcagt

SEQ ID NO: 398711 - DNA, 98 bp, Homo sapiens
ccgggctcgagagcccgcgcccatgccagtgcccatgcggggccgccgccagtgacgccggagagaatttttccctagattggtgtaaacagccagac

SEQ ID NO: 398712 - DNA, 75 bp, Homo sapiens
cagatgaatggacaccttgaagcagaggagcagcaggaccagctggcgtgcggccaggatgggcagctgaagggc

SEQ ID NO: 398713 - DNA, 99 bp, Homo sapiens
gaaggcatcctggcagtgtactccctggccccccataacctgggcgaaatgctctacaccaagcgatttgagctccgagaggccttcagagaattcgac

SEQ ID NO: 398714 - DNA, 96 bp, Homo sapiens
ctccaagtttaaaagaactacgtgttttatccaacaggctttccttaaagtttcccatgtctcaatggactcctgaatataacgagctctacacct

SEQ ID NO: 398715 - DNA, 100 bp, Homo sapiens
gaactgggtgcggggacaggcatcgtggggatcttggcagcgctgcagggtctgtttctgtcgactgtggaccacttatgtgcgatccgtggaccacttg

SEQ ID NO: 398716 - DNA, 75 bp, Homo sapiens
gggtactacacaaccgtctccagccttggtctgagtggactgtcctgcagccatggccatgcagaaaatctttgc

SEQ ID NO: 398717 - DNA, 83 bp, Homo sapiens
caccggtccccaacgcatcatgccagggagccaagcgtcctgcccggccgtgcgcgcggagccatggttatcatgtcggagtt

SEQ ID NO: 398718 - DNA, 82 bp, Homo sapiens
caacaataagaaactcctgggccgcgtgaaggccttcgatagtttgctgacctctctgaggctgccaaccggaacaatgacg

SEQ ID NO: 398719 - DNA, 100 bp, Homo sapiens
acagtaactgaacattggtctaaagtctttccaaaaggtcaaggttcacaagatccatttgaaccacagcgacgtctccccgcgaagaaaagtcgacaac

SEQ ID NO: 398720 - DNA, 100 bp, Homo sapiens
ccggaaatggttgtggactacgtctgtgcggctgcgtggggctcggccgcgcggactgaaggagactgaagatagcagactccttgaaagcagggtcctt

SEQ ID NO: 398721 - DNA, 75 bp, Homo sapiens
ccgatgtcgtgttcgcaagcatcctagcagccttctccaaagccacatggaccaaagcagtatccttacaataat

SEQ ID NO: 398722 - DNA, 73 bp, Homo sapiens
tatgtcggaacagctggatttacctgtgagacaggcagattacgtgtgaaaatgaacttgtgcaaacccaacc

SEQ ID NO: 398723 - DNA, 98 bp, Homo sapiens
atgccttacactttcttgtacaaagtggaatttcctactgtatcatgatcatcataggagtggagaacatgcacaatgtggccagactccactgatga

SEQ ID NO: 398724 - DNA, 75 bp, Homo sapiens
tcgctacaaaaaatacaagaattagccatgtgcacctgtggtcccagatatcccgttgttacagcaccgtttgta

SEQ ID NO: 398725 - DNA, 100 bp, Homo sapiens
tggaaaaccagttattgaatatcaagaggaggagttgttggactcctagaagtaccccaccccacccctgctccttggaggacaacgtgatcactgtatt

SEQ ID NO: 398726 - DNA, 80 bp, Homo sapiens
gtgcaacgcggagcgtgagaggaaggtgtcgtgaaaactacccctaaaagccaaaatgggaaaggaaaagactcatatca

SEQ ID NO: 398727 - DNA, 100 bp, Homo sapiens
tgagggcttcgatcccttctctgatttgctgtcagccatgaacggatggatgtgatgcctgctagccaaaagggattgatctgaagttaaacaaaaaacc

SEQ ID NO: 398728 - DNA, 72 bp, Homo sapiens
cgcgggagcctttggggcaccacagagatgcggaaaccctgaacattgtccttgtggggagaagcgggactg

SEQ ID NO: 398729 - DNA, 96 bp, Homo sapiens
ggccccaggtgtaagcgcagaaagcaggcgaacccgcggcgcaataacggtaagaatgattgatgttggctgatattggagtgctcattcacatga

SEQ ID NO: 398730 - DNA, 98 bp, Homo sapiens
ctcaaggttgaagcagaagaataaggagaaggataagtcgaaggggaaggcgcctgaagaggacgaagggaaatgtttcaacgtgcgcaagcgttgcg

SEQ ID NO: 398731 - DNA, 74 bp, Homo sapiens
tttgtgtaaaacaaaaatattatggtctttgtgcacatttacatcaaggaagctgtagagaaatatgaagaagt

SEQ ID NO: 398732 - DNA, 152 bp, Homo sapiens
tagtccgagtggagagagcgagctgagtggttgtgtggtcgcgtctcggaaaccggtagcgcttgcagcatgatgactatgctcagctgtgtaacatccccgtgacgggacgccggcagccatatggacgggacgccttggttgacttcagt

SEQ ID NO: 398733 - DNA, 90 bp, Homo sapiens
gtgagcggtatagctccagcgggtccccggcaaactccttccacttcaagttccagaaagctgagtctgatctggattacattcaataca

SEQ ID NO: 398734 - DNA, 97 bp, Homo sapiens
gccctggtggagctgaaggttgcagcaagtgaactgcacaaactcttgcagccatttctgctgaggcgagtgaaagctgaggtagctacagagcttc

SEQ ID NO: 398735 - DNA, 97 bp, Homo sapiens
tggtgcccgggcagtcccatgcccaggtcacgtggcacaagcgtgggggcagcctccctgtccggcaccaggtggtctgtttttctggggggccacc

SEQ ID NO: 398736 - DNA, 101 bp, Homo sapiens
cttgtcgcagtcagtttcatcatcagatagaaacagtgttacagtacttgaaaagggttatgtggtccgaatcagtggtgggaacgacaaacaaggtttcc

SEQ ID NO: 398737 - DNA, 80 bp, Homo sapiens
gctctccagcccgcttgaacggtgagaagccctaccactgcaactgggacggctgcggctggaagtttgcgcgctcagac

SEQ ID NO: 398738 - DNA, 101 bp, Homo sapiens
tggcaatggcacaaagttctctcgatcagggcatacatctttcttcgacaaaggaatggctgcagtctgtccaggccaccatgatcctgtcgatcatcttc

SEQ ID NO: 398739 - DNA, 90 bp, Homo sapiens
gattgccacttgatgccgccaaaccttcttggactgccatcgagcattctctcttgaaacttggagagatcctggccaatctcagcaacc

SEQ ID NO: 398740 - DNA, 90 bp, Homo sapiens
ccggtgtggtggcggcggcggagactgcgggcccgtagctgggctctgcgaggcacgcacagaggctgggctgcggtccagatgcgtttg

SEQ ID NO: 398741 - DNA, 78 bp, Homo sapiens
tcgggaccatcgccggagcctgaggacacttctctgtcgtcacagttagttggtgttggtattaggagatctgcacat

SEQ ID NO: 398742 - DNA, 96 bp, Homo sapiens
accatccccctccggggtcaggaaagaaactgctgtgccagcaaccaaaagttcctccaggagtgatccaaaatggagcgcgggtcctgagccgag

SEQ ID NO: 398743 - DNA, 97 bp, Homo sapiens
cgcagtgccggaacactgtggcggccatcgaggagcatgatgccttcttctgtagagtgggcgctttgcagaatacgtgttgaatgaaatcactgat

SEQ ID NO: 398744 - DNA, 75 bp, Homo sapiens
cgagcaaattgaagagacgttaaaatacttccgttatacattggctcttcaaagacgttcacctcatcagagaaa

SEQ ID NO: 398745 - DNA, 75 bp, Homo sapiens
aggacctggtgcaggaagcttcatctgaagatgtcctgggcgttcatatgaaggcagacggtaacaagtactcct

SEQ ID NO: 398746 - DNA, 83 bp, Homo sapiens
ttgtcgtaggacctggcttgggtagagatgatgcgcttctcagaaatgtccaggtttggtgcacctcgatttggaggaagtag

SEQ ID NO: 398747 - DNA, 100 bp, Homo sapiens
ctccgatccctgcgcgggctcgagagctcgccccgaacgggggtcttcctcctccgccgttgacagggcatatcgatgcatttacttcaaaactttttct

SEQ ID NO: 398748 - DNA, 75 bp, Homo sapiens
cgcctggcctcactcaaacagtaaacgaggcacaacagcaacgccatgaaagagacttggccctcttgaaactaa

SEQ ID NO: 398749 - DNA, 100 bp, Homo sapiens
ccaagaagtggtggttaatcttttacaagaaaccaaacaagcctttgaaagatgtcatagggtttgcctgcaatgagatttcattctctacatttaaagg

SEQ ID NO: 398750 - DNA, 75 bp, Homo sapiens
gaattttactgggataattatccaaataaattgcaagcattctatccaaatgatgcacacttgactgaaggagga

SEQ ID NO: 398751 - DNA, 101 bp, Homo sapiens
cgaggaagccgccgggcgccgcgcctttgggtgtggccgacgacgatgccctcgctgaggagcgcatgcggagaggccagaacgccctgccagcccagcct

SEQ ID NO: 398752 - DNA, 93 bp, Homo sapiens
ctcagcctgacaccgtcgttcccagaacccagcgcgctctgttcagcagctggacatggagaaccaacgctcatcacctctgtcgttccccag

SEQ ID NO: 398753 - DNA, 100 bp, Homo sapiens
ccgatggttctcgaaggcccgcggcgccccgtgctgcaggagccaaaaacctgtatatcatctccgtgaaggggatcaagggacggctgaacagacttcc

SEQ ID NO: 398754 - DNA, 100 bp, Homo sapiens
tatcttagagaaaatagatggcaaaataatcattgggcaattgaaggaacagactaaaaatcgtgtcctggaaggaaactacaggtactaccagggattt

SEQ ID NO: 398755 - DNA, 100 bp, Homo sapiens
cttgctcggccgatgaagtgcagaggtttttttctgaaaccagcctggacaccaagtctgtgtcagaaggccacctcaagaggaacatcgtggtgaagac

SEQ ID NO: 398756 - DNA, 100 bp, Homo sapiens
gggggagtgctgatcaactaaaagaggatcctgttcccagtgggttttctgcaggggaagttctgattcccttagctgacgaatatgaccctatgtttcc

SEQ ID NO: 398757 - DNA, 75 bp, Homo sapiens
gcaaagttagaccttccagaacctgaaatggttcaccaaaccaccagccagagccaccccctccagtcacagatg

SEQ ID NO: 398758 - DNA, 100 bp, Homo sapiens
gaacgatgttttgaatcatagtttgtgtggccggggagaaccccttagaatacttggtgttcctttctgccgaaattctccattcatatagaaaccaagt

SEQ ID NO: 398759 - DNA, 83 bp, Homo sapiens
gagagatcctgtttctcacatttgtttcattgaagaaatagttaagttccaagatgagatgggattctccaacatggaagatg

SEQ ID NO: 398760 - DNA, 49 bp, Homo sapiens
ggcagcatatgaaagtggattatgggttgaatcaagggattctttgaat

SEQ ID NO: 398761 - DNA, 98 bp, Homo sapiens
tttgatgacataagtggctacacttgccactgtgtgctgccatacacaggttctagcaagaggagaagaaaggaggaaaccacagggaaaaatgttaa

SEQ ID NO: 398762 - DNA, 90 bp, Homo sapiens
tacaagttagaactctttatctttctgtggatccttacatggaaaagaccagtgccctcagtctgagcaacgttgctggagtattctaca

SEQ ID NO: 398763 - DNA, 50 bp, Homo sapiens
gtcagaaaaggggacacggcggtgcttagtttgcagctcaccttgtgaag

SEQ ID NO: 398764 - DNA, 100 bp, Homo sapiens
atttctgcctatcctccaggaggaaccccttccaccattggctctggtaccctttacagaagaagaacagccaccaattaccctagttatgggcccatca

SEQ ID NO: 398765 - DNA, 100 bp, Homo sapiens
gccgggaccgaaacctagccccggacgagaagcgcagcaacgtgcggtgggaccacgagagcccttccttgaatccagaagctggcaaacagcatcagcc

SEQ ID NO: 398766 - DNA, 78 bp, Homo sapiens
agctcattaaggacggctctctgctcattggggcgttgaggagatgatgaggatgataatgcaggcacggagatgaag

SEQ ID NO: 398767 - DNA, 75 bp, Homo sapiens
agcgcggcaggacttggctggacggcgcggccacggagaagggcgcgcattgttggaaactgttactacattttt

SEQ ID NO: 398768 - DNA, 100 bp, Homo sapiens
ggctggaggacagagaagccttttccgttgccggtgccggcctagcgtcctggaattacttcaatcaaggaccatctggacttcctttggagatgtctta

SEQ ID NO: 398769 - DNA, 98 bp, Homo sapiens
ttctacgagaccctccctgctgagatgcgcaaattcactccccagtacaaaggtatctcaggagattacatttcagcttgaaaaagggtcggtggaat

SEQ ID NO: 398770 - DNA, 100 bp, Homo sapiens
ctgcgctgttcgtgctgctgggattcgcgctgctgggcacccacggagcctccggggctgtcactcaagactgcttgcaactgattgcagacagtgaaac

SEQ ID NO: 398771 - DNA, 117 bp, Homo sapiens
ttcgccagttagcccttagggtaggagtcgcgccggcagcagccatgagcggcggcgtgtacgggggaggtatgtcttactgaaagaaagaaacatgcttctaaccctagagcagga

SEQ ID NO: 398772 - DNA, 83 bp, Homo sapiens
gtcagaagtcactcgcagtcccgtcagcccagacaatgcagatcttcgtgaagactctgactggtaagaccatcaccctcgag

SEQ ID NO: 398773 - DNA, 74 bp, Homo sapiens
cgcagggggacggggaccagcagctgtcgccgccgctctcagcagaaccttctaagtctcagacacgtaaaccc

SEQ ID NO: 398774 - DNA, 100 bp, Homo sapiens
aagagttcagagagcatctggagctaattgtgaaaaatagtgcaacctacaatgagccatgtccattggagcccgttcccaatcagctcgtacttacttg

SEQ ID NO: 398775 - DNA, 95 bp, Homo sapiens
caaaatttaaggagttatatttggctaaagaggatcagcttgaacgggtctttttacgacttggccatgctgaaacagatgaacaattacagaat

SEQ ID NO: 398776 - DNA, 100 bp, Homo sapiens
ccgcagctaccaaaacgtctatgtctgcacagggccactcttcctgcccaggttgaaccatgattccggtgacagagctccgctactttgcggacacgca

SEQ ID NO: 398777 - DNA, 97 bp, Homo sapiens
ctccttttcctccacctaccttcccgaattgttgtgtccactgtatcctggcttgcttgttctgcgaattcctgaccctttgcaacattgtcctggg

SEQ ID NO: 398778 - DNA, 50 bp, Homo sapiens
gcgaggatcaaaatcttcgaaggagggctggagtgcaatggcgtgatctc

SEQ ID NO: 398779 - DNA, 75 bp, Homo sapiens
ccctgaagagggaagacacgcggaaacagcatcgtcatcagacagtgaggaggacccagaagccttggagaagca

SEQ ID NO: 398780 - DNA, 100 bp, Homo sapiens
tgaaccccgaagacttttgggagattataggagaactgggcgacggagcctttgggaaagtgtacaaggatagcattgggcagctggagaatgatctgag

SEQ ID NO: 398781 - DNA, 100 bp, Homo sapiens
ctgaccctcaaacagcagtatgatgaactggaggctgagtacgacagcctcaaacaggagctggagcagctcaaagaggaatatattaaaggaatctgtg

SEQ ID NO: 398782 - DNA, 82 bp, Homo sapiens
gcttaccgtgtctccaatgacaaacgagatgtaaaagtgtcactgtgacgcgctccaggagatatataatcagaagggcatg

SEQ ID NO: 398783 - DNA, 100 bp, Homo sapiens
gaggagtactacgaggtgctggaccactgctcttccatcctcaacaaggaggcatggatcccgagtccctgctggagggggacgacgggaagacctactt

SEQ ID NO: 398784 - DNA, 98 bp, Homo sapiens
tgctgggatttaaagcttcagaggcagaaaggcagaagtggaagcaacttctatttagtgatcatgttctggagagtcttggcttctgggaggaagtc

SEQ ID NO: 398785 - DNA, 75 bp, Homo sapiens
tgaaatttcttcagactgcaatcattttttcagaagaagtgaagtcaagatgaagaaccatttgcttttctgggg

SEQ ID NO: 398786 - DNA, 88 bp, Homo sapiens
cttacagtgtgaatgacggtgcgcaactctacatgattgacccatcaggtgtttcatacgtgtgtttccattgtagaaaacctggtca

SEQ ID NO: 398787 - DNA, 82 bp, Homo sapiens
aacaggaggacattgaaaataagatggaacccatccacataagacgaatctagaacatgatgtctatgaaagacttactaac

SEQ ID NO: 398788 - DNA, 51 bp, Homo sapiens
ggttccagaagatgagagggatgcagagtcttctgaagaggagtctgatga

SEQ ID NO: 398789 - DNA, 82 bp, Homo sapiens
cctggacccagctgagcgggcggtcattcgcatcgcaggcccctggccccaacatggcccgtcgctctcagagctcctcgca

SEQ ID NO: 398790 - DNA, 75 bp, Homo sapiens
gctatatccagaagtaattcaacaggaatggatataaatttctctactgttctgcccgtgccatcgggatggcgg

SEQ ID NO: 398791 - DNA, 100 bp, Homo sapiens
tgctctgccctggctgggccactacagacgaagttatacggaagcgtctcctcattgatggagatggtgctggagatgatcggagaattaatctgctagt

SEQ ID NO: 398792 - DNA, 90 bp, Homo sapiens
gaaacgacagaatataactaaccaactggaaaaatggatgaaactcaatgtagagtctacttccccagcaggacagcatcattctcctat

SEQ ID NO: 398793 - DNA, 75 bp, Homo sapiens
ggcatggacaagcttattgtagatggcagaggcaaagtactagctctgtgattagattgaattctccaacaacaa

SEQ ID NO: 398794 - DNA, 100 bp, Homo sapiens
ggaggcggcgggacagagcgcctgcgaccccagtcggtgctccggggaggtcacctgacgaggagagcccataggcagcatgtcatccatggaagtgaac

SEQ ID NO: 398795 - DNA, 100 bp, Homo sapiens
gaaggtgatgaggttgaagatctctatgagcttttgaaacttgttaagatcactttgggaagcagtgacatccaacctgtatcaagtcttctaatctgtg

SEQ ID NO: 398796 - DNA, 92 bp, Homo sapiens
gttcttgtttgtggatcgctgtgatcgtcacttgaacatccagtcatggataaaaatgagctggttcagaaggccaaactggccgagcaggc

SEQ ID NO: 398797 - DNA, 100 bp, Homo sapiens
cttgggcctcgcgccggctatggccgtgccctggggctgagccctcagggagtgcatccgccccaacccttttccccctcgtctcctgtgagaattcccc

SEQ ID NO: 398798 - DNA, 100 bp, Homo sapiens
ctggctctccggtctccatcgccctggcccagtacctcatcactgcctggtcctgtatggtggaagagtcggggaccctcgaatcccagcttgaagctac

SEQ ID NO: 398799 - DNA, 75 bp, Homo sapiens
tcggcaccttcggcaaagtgaaggttgaagattcctgtctctggatccaaatcagagggccttctctacgtccac

SEQ ID NO: 398800 - DNA, 109 bp, Homo sapiens
agaaatgccccttcactggtaatgtgtccattcgagggcggatcctctctggaggtacagcatgtgtactgaccgggcagccctttgacacaatgaaagtgaagatgca

SEQ ID NO: 398801 - DNA, 120 bp, Homo sapiens
atcaacggcaaagttttgcagatcttcaacaagaggacccaggagaaattcgccctcaaactcattgctatggacagtgctatcaccctgtggcagttccttcttcagctcctgcagaag

SEQ ID NO: 398802 - DNA, 53 bp, Homo sapiens
aaagtctcagatgagctcatgagtgaaagagaatttggatggagagacccgga

SEQ ID NO: 398803 - DNA, 76 bp, Homo sapiens
ttctccctgcctggacccctactattgcaacaagattgataggcagcagtttgaagaaacagttcgaactctaaat

SEQ ID NO: 398804 - DNA, 96 bp, Homo sapiens
ctctaggctgccgggcgctggtcgtcagcgccgaggctgggctgaggcgccgcggtaccatgaggcgccggggtatcatcttatttcgtccttcac

SEQ ID NO: 398805 - DNA, 100 bp, Homo sapiens
cggacgggaaggcgggagacgagaagcctgaaaagtcgcagcgagctggagccgccggaggtcatgcttcaccccttcctccatctgctgcacctaccac

SEQ ID NO: 398806 - DNA, 88 bp, Homo sapiens
gaatttgagcctctgctgaattggatgaaagataaagcccttaaggacaaggtagatgacattaatgctgataagaatatctcttctg

SEQ ID NO: 398807 - DNA, 89 bp, Homo sapiens
agaacctgaaaatgaaggtggagaaggagtacggtgtccgagagatggctgctgcatctgaagccccccaggatgtgacctacgcccag

SEQ ID NO: 398808 - DNA, 100 bp, Homo sapiens
gagagcaccgagaggggcaggatgaaggaccacagacctgcgctgcttcctacacagcctcctgtcgtggtgaatacagcagtccagttaatcttggtgg

SEQ ID NO: 398809 - DNA, 74 bp, Homo sapiens
ctcctgtgtgcagctaatggtcgtcgtcggcatcctcctggcctacctggcagcacccaccaaggctccggatg

SEQ ID NO: 398810 - DNA, 98 bp, Homo sapiens
gagcaaggaaaagagccctggatggtgaagaaggagggaacaagaggcccatgccctgatgatcccagccctagactcagtgcacaagctcaggtggc

SEQ ID NO: 398811 - DNA, 74 bp, Homo sapiens
aactgggttttgcagtatgaccctcccagcaatgcaagttgagagcgtggagttaagaggagaatcagctttca

SEQ ID NO: 398812 - DNA, 75 bp, Homo sapiens
agcgtcaacagcagcaccatgggtagtatcttccccagcagatgttgctgaaaaagctgacagaattattacaat

SEQ ID NO: 398813 - DNA, 100 bp, Homo sapiens
cttgagaggtcacttctgcctttccagtgacaaaatggtgtggctggacggcagtctggaaacgaccaatgagatcttggactctgcctctcacgactgc

SEQ ID NO: 398814 - DNA, 83 bp, Homo sapiens
gtgctgctgggattcgcgctgctgggcacccacggagcctccggggctgggcgaccattgacgaggtggagacggacgtggtg

SEQ ID NO: 398815 - DNA, 75 bp, Homo sapiens
gtgtatcaagtaatggtgcaaagcctgaaatttcatctgctgcttgcggctatggattcacactgctgtcctcta

SEQ ID NO: 398816 - DNA, 111 bp, Homo sapiens
tctcactaaaatgaaagaaaccgctgaggcttatttgggaaagaaggtattctctactgccgctgatggtcaaacgcaagtggaaattaaagtgtgtcagggtgaaagaga

SEQ ID NO: 398817 - DNA, 107 bp, Homo sapiens
cacgacagaaggcgtctcatggcgttggaataccggctctcagcggctgccccttcacagatgtagtcactacaaatcttaaattgcgaaatccatcggatagaaaa

SEQ ID NO: 398818 - DNA, 100 bp, Homo sapiens
cgccgctctagcggccgggactctgaactatggcggtggacatcgagcagctggatccccgcggccggactcccctgcacctggccaccacgctggggca

SEQ ID NO: 398819 - DNA, 95 bp, Homo sapiens
taccacctcaatctttgatgactttgcacattatgaaaagcgtcaagaagaggaggaagccatgcgtagggaggaagacaatggtcctataatgc

SEQ ID NO: 398820 - DNA, 76 bp, Homo sapiens
tcctgattacctgccacccattgtgtcttctcaagaaggtaatttcatctgtgccaaagcctccagaggacaagcc

SEQ ID NO: 398821 - DNA, 50 bp, Homo sapiens
ggggcctgggccccctgcccagacaggtgaggccgcagcgtttgatgacg

SEQ ID NO: 398822 - DNA, 50 bp, Homo sapiens
cctgagcagcctccacccaatgggaggtcagaatggcggcagtggagcat

SEQ ID NO: 398823 - DNA, 100 bp, Homo sapiens
ggggaaagcccaggggtacaggaggcctctgggtgaaggcagaggctaacatggggccgcctgatcttcgacaacctaaagaagtccattgcctacaccc

SEQ ID NO: 398824 - DNA, 98 bp, Homo sapiens
taaatgttctgaatgtggagaaagcttctctcggagttcccgtcttatgagtcatcagagaactcacacagcattgtttgtgctccccaaacctaaag

SEQ ID NO: 398825 - DNA, 144 bp, Homo sapiens
gtctgggcgcggaggagggcgagccgcacgtcctcctgaggaagcgggagtggaccatcgggcggagacgagacaatgactgatgtggtgggtaacccagaggaggagcgccgagctgagttctacttccagccctgggctcag

SEQ ID NO: 398826 - DNA, 82 bp, Homo sapiens
gcagccgagcccgcccgcgcgccggtgcgcgcggagccatggttatcatgtcggagttcagcgcggaccccgcgggccaggg

SEQ ID NO: 398827 - DNA, 75 bp, Homo sapiens
atttctggctgtcgccaactccatggctttccagggatcagtgtccttcagtgatgtggctgtgggcttcaccca

SEQ ID NO: 398828 - DNA, 75 bp, Homo sapiens
gaaatggtgtcccaccgcaaggactggagaaggaactgtaaaaagctactactggagaacaataaaaacccaacg

SEQ ID NO: 398829 - DNA, 80 bp, Homo sapiens
gggcttacgcagaaggacctggccacggacactcatgaggaccatgatacttccactgagaatacagacgagtccaacca

SEQ ID NO: 398830 - DNA, 88 bp, Homo sapiens
tgaaggagctcatgcagtggtacaaggaccagaagaaactgcaccggaaatgtgcctaccagagaagagcgttcctctttgcatcctc

SEQ ID NO: 398831 - DNA, 74 bp, Homo sapiens
aggacatcctggaagctgggaaaggcattctgtgtctggctgactctgccgggagctgaaacccaggactccag

SEQ ID NO: 398832 - DNA, 97 bp, Homo sapiens
tggtcctgacgcccccctcccgcccggaaagctgcccagccaccagcaaccccccagagaagaggacgttgtcacagataaagagccaggctcacca

SEQ ID NO: 398833 - DNA, 101 bp, Homo sapiens
aacttgtttacctatagctctttcaacaatgggcagttagcaccagggataaccatgactgaaatcgctcgagaggagaatgtggccactttccgaggctc

SEQ ID NO: 398834 - DNA, 90 bp, Homo sapiens
attacagtcagccactgcaccggaaatgttttcaaccgtgacccataaaggcaagaaaattggatgtatattttgaatatgaagaaaaaa

SEQ ID NO: 398835 - DNA, 98 bp, Homo sapiens
tgaatacaaccatgatctcttccaaagaatgccacagaatcaggggaggcatgcttcaggcccctccagccagcgtcaggtgcagaatggcccctctc

SEQ ID NO: 398836 - DNA, 100 bp, Homo sapiens
caccgtggagctgtttttcctgaatgcaaaggcctgtgtgcacaaggtgaccatcttggtgctgcagggccggctggatgaggcccgacagatgctctcc

SEQ ID NO: 398837 - DNA, 101 bp, Homo sapiens
tcgagggccctggctgaacttcaccttttggctttcttggcctgatgctgaactctcgagggctgtggagtttgaaggctgggctgacaccctctttcttc

SEQ ID NO: 398838 - DNA, 100 bp, Homo sapiens
gttccaggctacatgcaggacttggaggtggagcaggccctgactccagtctctgctggatgaaccgaatcctaacagtccagccaatagccaggcagca

SEQ ID NO: 398839 - DNA, 90 bp, Homo sapiens
ctactgtccaattctgtttactctgaattaccatcagctgaagggaaaatgaaggttgaattgaccaaagcaatggtgatggagaagcct

SEQ ID NO: 398840 - DNA, 50 bp, Homo sapiens
ggtagacctgcccaagtctcccaaggaaaagaagatttttcagatcccct

SEQ ID NO: 398841 - DNA, 51 bp, Homo sapiens
gccggcagcgtcccggacgaggagggcagtcagggcgacagcaagaatgcc

SEQ ID NO: 398842 - DNA, 90 bp, Homo sapiens
cgctgtagccgcccaccggtttttctgccacttttgcaagggcgaggtcagccccaaactaccgaaaggcctaaagaatgtatttgacga

SEQ ID NO: 398843 - DNA, 88 bp, Homo sapiens
gacgccgactcggaggtgggtccggggagcccgactcggaccgcggagtcacaccgaggagaagactcagtgggaacatccaaaaact

SEQ ID NO: 398844 - DNA, 100 bp, Homo sapiens
tttcccgcctgagcgcaactagcggcgggtcgtgggcacctccaggaatgaattcagggcatggacggacatcaagcctgtgaaaccaataaaggccaag

SEQ ID NO: 398845 - DNA, 51 bp, Homo sapiens
tcacaaccgagatgagatatggtggaaccgtcccaaaatgtcccttgctca

SEQ ID NO: 398846 - DNA, 75 bp, Homo sapiens
ctgagtatgccgtgtgggtggagaggaagcctcggggaaatcgcccagaaccagacgtcctgggtcctctccagc

SEQ ID NO: 398847 - DNA, 75 bp, Homo sapiens
ccctgcgctgccgccgctctgaggagttaaaggattctgagaaacgaacccctcttcatgtggccgcatttctgg

SEQ ID NO: 398848 - DNA, 108 bp, Homo sapiens
tgtcttcagatcttcacagcacagttcctgggaaggtggagccaccagcctctccttgacaatgcagatcttcgtgaagactctgactggtaagaccatcaccctcga

SEQ ID NO: 398849 - DNA, 100 bp, Homo sapiens
ctggtgatccgcgtggtcatccatgacctgcagcagacgatgccttcaattaagttgcagagttctgatggagagatatttgaagttgatgtggaaattg

SEQ ID NO: 398850 - DNA, 75 bp, Homo sapiens
ctgaatttccaggccttcgccgagctgtgcaggtattgttgcagcatctggcagtgagactgaggatgaggacag

SEQ ID NO: 398851 - DNA, 75 bp, Homo sapiens
atccttagcgaggacgagttctatgatgcgctgtcaggaatgtgcaagtaaagatgttctggtgaagaccctcag

SEQ ID NO: 398852 - DNA, 100 bp, Homo sapiens
ccatcttcgaacttagacttccggaaggactttggcgagggtcccgcggcagtgctggtggccatggttcccgtagccagaaggagttgcccacagagcc

SEQ ID NO: 398853 - DNA, 100 bp, Homo sapiens
gcatcgcctactacatgtactcggggggcggctctgcgctggccgggggcgcgggcggcggcgccggcaggaaggccaactgagctgcatttccttccca

SEQ ID NO: 398854 - DNA, 75 bp, Homo sapiens
ggggaaactaaaaacgcatctatctaacgtttaccctagcaaaccactctcaaaggtctatggccctgtgttcac

SEQ ID NO: 398855 - DNA, 75 bp, Homo sapiens
taacaatgaccacctggtagagaaataccgcattcttatcacaaagatgagtgccaaaccaaatatggaaatgct

SEQ ID NO: 398856 - DNA, 75 bp, Homo sapiens
ggacgacgtgcagggctacgcggccaagactgtgttcgagagatgccctgtatccaagcccaatatgggacacca

SEQ ID NO: 398857 - DNA, 101 bp, Homo sapiens
acagcctcagccaggttctccagagatgaactaccactgctggaatgaagcatggatgacaaggcctgaccttcctgttggatttggaggctggcaagctg

SEQ ID NO: 398858 - DNA, 73 bp, Homo sapiens
gaggaggaggaggaggaggcttgggcttgcgccgttgaagacgttggtgatcaaagtgtccggtgtgatcctg

SEQ ID NO: 398859 - DNA, 75 bp, Homo sapiens
gcagctgacttcccagcagcatgcgattcttattgaccttgtgcaggcctgagtgttccttccagcatgtcggag

SEQ ID NO: 398860 - DNA, 74 bp, Homo sapiens
ttcagtgggaagcatgtcgtctttatcgctcagatgtacctgtgtggtctaagctggaatctggtcaccttcca

SEQ ID NO: 398861 - DNA, 100 bp, Homo sapiens
ggccagcttcacgaagtcagagagatcagggagcagagaaacatgaaggcacaggtcagtcctctgggatcactgatcaagagaaggagttatccaccaa

SEQ ID NO: 398862 - DNA, 82 bp, Homo sapiens
gaagtgcaaggaagcgcagcccgttgtggtgatacgagccggagatgccttctgcagctctacaagtttcacgctgtttaag

SEQ ID NO: 398863 - DNA, 50 bp, Homo sapiens
tgaggacactgtattatacggttactataaaaccaaggtgtatgttggta

SEQ ID NO: 398864 - DNA, 83 bp, Homo sapiens
ggctgacatcagcggctctttgtatgatgacacctgcctagagctggaacgttacctccagagcgagccctgctatgtttcag

SEQ ID NO: 398865 - DNA, 110 bp, Homo sapiens
aaccactcaagagtcataggattagatgatccaagtcaccaagaaattactgtctcaagtgatacgcatgactatatgaaggaagaggaaggttttcctgaagatgaggc

SEQ ID NO: 398866 - DNA, 98 bp, Homo sapiens
cgaaaaattgcagaagcacaagccaaactgcaaagagctcctgggaaggtgctgctggatgcagtttgcaaccacctcaacctcgtggaaggtgacta

SEQ ID NO: 398867 - DNA, 73 bp, Homo sapiens
tggcaccgatgccgagaggagacacaatatgtttcgacagcaacaaaagattcttcaacaatctagaattgtt

SEQ ID NO: 398868 - DNA, 82 bp, Homo sapiens
cgctttctgatttcagagactctccgcaacagaaccatctcaattatttctcaaactctgaggctgcggagttcacacattg

SEQ ID NO: 398869 - DNA, 50 bp, Homo sapiens
ccccagcagtagcctctgcgaccagctaccgcctgtgtgatccttctgag

SEQ ID NO: 398870 - DNA, 100 bp, Homo sapiens
gacgagaatgagaacatcaccgtggtgaagggcatccgggttatcaggacaccccatgggagagacttcgatgactctttagaaaaatgtgaagagtatt

SEQ ID NO: 398871 - DNA, 75 bp, Homo sapiens
ttgtttgtggatcgctgtgatcgtcacttggtcagccagagcagcctccccatgctgtcctcgccgtcaccgggc

SEQ ID NO: 398872 - DNA, 100 bp, Homo sapiens
attcaggacactcatccagacttctgaagcaaaaagccaatcagcatgaagctgctagcatattggttttgtgaaaaacttacagcctatttagatctta

SEQ ID NO: 398873 - DNA, 50 bp, Homo sapiens
gtctgggatggtgtgggaccgggcaatgaatcgctccctggctaatgtga

SEQ ID NO: 398874 - DNA, 100 bp, Homo sapiens
cgatgctttggatgttgccaacaaaatgaggtttatataactttccaagacaaggaagttgtgcaaagcctcacagctactaagaggctgggctgggact

SEQ ID NO: 398875 - DNA, 75 bp, Homo sapiens
aaagccagattcttaagcaccttctgaaaaatcttttcaagatattctgcctagcatccaggatattgcagtcct

SEQ ID NO: 398876 - DNA, 88 bp, Homo sapiens
agaatatgccaagtatctaaaggactccgcaaagctgaaagaggtagacaaagccaacctcacagtaaaagcagagtgcagcagacaa

SEQ ID NO: 398877 - DNA, 90 bp, Homo sapiens
tggagaatgaatgctgttctgaatttgatggaagaactggagcaaggcctgttgatgcagccatgggcgtggctacagcttgcagagaac

SEQ ID NO: 398878 - DNA, 100 bp, Homo sapiens
atgtgccggctctagttctgaatctgatctccagtctcacaccattttgctggtacagcctaccaagaggccagaaggcagaacttatgctgactacgaa

SEQ ID NO: 398879 - DNA, 75 bp, Homo sapiens
cagtcatgaccactagacccacagctgttaaagcaacaggcgcagttgtgtagcagttgagtaatgctggttagc

SEQ ID NO: 398880 - DNA, 98 bp, Homo sapiens
ctcaccttccctggttgctcctggcttccagactgggccttggtgtttgctggaggcatcggccagcttgatgaagaaatctctggaattgtggaagt

SEQ ID NO: 398881 - DNA, 51 bp, Homo sapiens
tgccagttgggttgctggttctttcagtcttgctctgttgccccggctgga

SEQ ID NO: 398882 - DNA, 74 bp, Homo sapiens
aaactcaagatgtttaccatgacaagtcccctcctggtatcttgggtctttttggagttcctgagctgagtgcc

SEQ ID NO: 398883 - DNA, 100 bp, Homo sapiens
gaaagaagataaaattggaaaagtgttgcccgttatgcatgagagtcaccatgctcaaagtgaatatattaagctctcatttcactcttcagtgttcctg

SEQ ID NO: 398884 - DNA, 82 bp, Homo sapiens
caagtcccaggagtcctgaccagagagcaggctggatctccagaactgttctctggaggaccctggtccaaactttcatcag

SEQ ID NO: 398885 - DNA, 100 bp, Homo sapiens
ccatcccatggtggactacctggtgcctctagtgaaaagaacaagaagtcttaccctcaggtcaaaagctttatggatattggaacattgatatgggatg

SEQ ID NO: 398886 - DNA, 90 bp, Homo sapiens
ccagatggcagccagtcagtggtggaggttttctgtctcaactggtctctgacaagcctctgactgaatgtatccgtgctggccactatg

SEQ ID NO: 398887 - DNA, 90 bp, Homo sapiens
ggcgccgaggacagtgcagccgagttgcgtctccctcgcgcgagtggatccggattggtgccaatgtctccaacttcacttttgctccta

SEQ ID NO: 398888 - DNA, 98 bp, Homo sapiens
acagcagcacccgagcaaaccccagcaagatgcggaggctgcctcggcggagcagaggaaccacacgctgatcatggctgggtttgaccaaagaagag

SEQ ID NO: 398889 - DNA, 75 bp, Homo sapiens
ggccactgtgtgtcatggctctgcaaccaccagggaggcagaggaggctgaacgtgaggagcggaaacgactcga

SEQ ID NO: 398890 - DNA, 74 bp, Homo sapiens
catcagtgactcacaaatcagcaacacagaatttctgcaagtaattggccgtcatgattggggacgatatcgtg

SEQ ID NO: 398891 - DNA, 83 bp, Homo sapiens
agccgtagacaccagctccgaaatcaccaccaagtgtatcccctactccgtgttgctgaaagacctggagatgcggaatctcc

SEQ ID NO: 398892 - DNA, 50 bp, Homo sapiens
gcttcaagattttgtgccaaccagaaacctttcaacgaagtctaaaaata

SEQ ID NO: 398893 - DNA, 100 bp, Homo sapiens
tcctggaggccaacatggacatcgtctacaaagatatggtcaccaagatgcagcagaatccacgccagtacaagatcccagactggttcttgaacagaca

SEQ ID NO: 398894 - DNA, 100 bp, Homo sapiens
agctccgacttatttctgtgggcagacattaacattcaggatcttttgccagaaatgagggcatactggcctgacgtaattcactcgtttcccaatcgca

SEQ ID NO: 398895 - DNA, 80 bp, Homo sapiens
gatgcgtgttcgcgggtgtgtgctgcgttcacaggtgtttctgcggcagcaaattgtggctactaatttgccccctgaag

SEQ ID NO: 398896 - DNA, 98 bp, Homo sapiens
ttctttggggccaatgacagtgcactaaaagagctgacctgtcctggacgcagcataactaacgaagctgctgcaggatgagaagatggcagcgcggc

SEQ ID NO: 398897 - DNA, 74 bp, Homo sapiens
actcggtatgggagtcccaaaagacagctccagttttacaggaagccctcaatctagaagagtagaggtccaaa

SEQ ID NO: 398898 - DNA, 82 bp, Homo sapiens
agcgcgcgaacgtgggcgtggggatggccaccagtttccggacagcttcgtgctggtactgccaaatctgtcgaaagggaga

SEQ ID NO: 398899 - DNA, 90 bp, Homo sapiens
ggatgaagattcaccaaataagctatatactttggttacctatgtacctgttaccactttcaaaaaacaggacgcaggccttgatgccct

SEQ ID NO: 398900 - DNA, 74 bp, Homo sapiens
acacagaccctgccagtgagagaggaaatgccagctcttctcagaaagaaaagagcacgaacttccaggagccg

SEQ ID NO: 398901 - DNA, 101 bp, Homo sapiens
gcggttctctctcgaccccttctgcccggcgcttcggcccgggccgctcaggtgcagggtgaggtggctttgaccccgggttgcccggccagcacgaccga

SEQ ID NO: 398902 - DNA, 100 bp, Homo sapiens
cgcaaattcagatgcaaagccgtggccaacgggaagggttcctgaggacatcatgtccaaccgaggcaatgacctcctgctgaagctcctgcagcatcgg

SEQ ID NO: 398903 - DNA, 83 bp, Homo sapiens
cccgaggtcatccttggcatgggctacaaggaaaacggagtagatcccataatagatcacgttcaagacagaaagacagacgt

SEQ ID NO: 398904 - DNA, 74 bp, Homo sapiens
gtttggtgcagttaccatcaccctcaactcaaaacttcttggagggaacatatggtctgtcttctgctgatccc

SEQ ID NO: 398905 - DNA, 100 bp, Homo sapiens
tacaagacgattcacctgtccagcatccgaccaccgaggctggagggggagaacacccagtgttttgtagagcacaactggtttcacttgattggtataa

SEQ ID NO: 398906 - DNA, 83 bp, Homo sapiens
aagaaggcaacgacgttccatctgtggaaggacctaccaaccagtttccaacatggctagatccatcagaaactgaagccgtg

SEQ ID NO: 398907 - DNA, 101 bp, Homo sapiens
tgtcattcacaaccccctgaaagcgagcacatctacaagctgatgaagagtgacagctatgcccgcttcctccggtcaaatgcttaccaggatttgctgct

SEQ ID NO: 398908 - DNA, 100 bp, Homo sapiens
ggccactgggcgagcgtctggcaggaatcttctgcggcttgtccatagtgtgaataaaaactaaatcacatctataattctactgaactggtcacacaga

SEQ ID NO: 398909 - DNA, 90 bp, Homo sapiens
ctcacccgtggaccctggcgctaggcaggcgttgaggaagaagccacccgagcggactcccgagttgtatcacggactgattcaccgagc

SEQ ID NO: 398910 - DNA, 100 bp, Homo sapiens
gatttgcttggcctggaagacggatacttggctttggttaagaatcttcctcactgatatgatcatctatcagggtccgcaagcaggtggtgaacatccc

SEQ ID NO: 398911 - DNA, 75 bp, Homo sapiens
acaggaattgtggatggttcggggagcattggagctgcagtgggccaggatagatcactgcgaccagaggaaatt

SEQ ID NO: 398912 - DNA, 123 bp, Homo sapiens
gaggtgtcagtgttaaaggaacctctacaacgaaggtgaagccacggaagataagcaatggctgccatccggaagaaactggtgattgttggtgatggagcctgtggaaagacatgcttgctc

SEQ ID NO: 398913 - DNA, 98 bp, Homo sapiens
ctgaacgctttcaccgcaacttttgagctaagtgatgatggccgctttgaggtgtggaatgcgatgactcgggaaatgtttcaacgtgcgcaagcgtt

SEQ ID NO: 398914 - DNA, 103 bp, Homo sapiens
atatcttgataaaaaattctgtaaaacagaatttgataggtttaaaaacatgacaggtgatgggcagaatctgtttacgaaagacgtgacagtgatcgaggga

SEQ ID NO: 398915 - DNA, 74 bp, Homo sapiens
aggccttaaggagaaagtttcagggcaattgaaggaacagactaaaaatcgtgtcctggaaggaaactacaggt

SEQ ID NO: 398916 - DNA, 75 bp, Homo sapiens
atatttaagaaagaagatgttaactttcaggtgtccctggccagtgtccttccacctgtccacaagcatggggaa

SEQ ID NO: 398917 - DNA, 100 bp, Homo sapiens
gctgcgcaccccagcggagccaagccccacgctggccggacagggccgcctgtcgccgggctgaagccgacgtagcttctctgaacagacgcatccagct

SEQ ID NO: 398918 - DNA, 90 bp, Homo sapiens
cgggcggctgcggtggcggcgggtggaccgattgtcgctcggcggcgggagtcggtgtcctcatgacttctcttgtggaccatgtccgtg

SEQ ID NO: 398919 - DNA, 88 bp, Homo sapiens
ttcaattaaaaggaatcctaatgcaccggttgtcagacgaggttggctttataaacaggttccttgtaatggcttcagtgacattgag

SEQ ID NO: 398920 - DNA, 95 bp, Homo sapiens
ctctccactcacaatgggaacatgtacacctcatccctgtacgggtgcctggcctcgcttctgtcccagtgtatggctgctgctttaaaagatgc

SEQ ID NO: 398921 - DNA, 83 bp, Homo sapiens
gagcgcgctcgctccggcgccggcctcgcctcctcgcagcagcgccatgactgtgccctgtccacggtgcctcctgcatgtcc

SEQ ID NO: 398922 - DNA, 82 bp, Homo sapiens
tcaaagtgattccccggaatcgtgtgctgggctggtcccccttgcccgatctgctcaacttcaagaagggatggatgtcgat

SEQ ID NO: 398923 - DNA, 100 bp, Homo sapiens
gtgaagctcaaggcacaggtggcccgatcccagcaggacattgaaagctttgcccgaagtttttacatacaaattctactagtcacacctggccattcag

SEQ ID NO: 398924 - DNA, 82 bp, Homo sapiens
gccgcggcggggtgggtgcaagatgccgctgccggttcaggtgtttaacttgcaggtcgtgtccccagccttctctgcagtc

SEQ ID NO: 398925 - DNA, 75 bp, Homo sapiens
cgcggacgggttgtgcctggaggtggaggggaagaagcccagggtgatggcaggcaccttgaagctggaggataa

SEQ ID NO: 398926 - DNA, 75 bp, Homo sapiens
gggaagaaaaggattgagaactttaagagtggtgtgggtcctcctggccccgtcggtccctctggcaaagatggt

SEQ ID NO: 398927 - DNA, 101 bp, Homo sapiens
acagctgtcccgccctacaggctgcgggtgatcgcagaagcctacgctaccaaagtcactcaagactgcttgcaactgattgcagacagtgaaacaccaac

SEQ ID NO: 398928 - DNA, 100 bp, Homo sapiens
ctggatctgctgccagcattagcctggctcaatatctaatcaatgtcagtgaaacaaagagtcctcttcgtggaaaagaaaaaaatacgctccctttaaa

SEQ ID NO: 398929 - DNA, 83 bp, Homo sapiens
ttctactgctggattgaaagtcaaaaccgaagaaatgcagtgccaggaccgaggtgatgagttcacatacactggaagcggtg

SEQ ID NO: 398930 - DNA, 83 bp, Homo sapiens
attgaagccgcctctgtattacttaccagtgtactaatggtcacttgatgtgcgctggctgttttatccacctactagcagat

SEQ ID NO: 398931 - DNA, 74 bp, Homo sapiens
aggaacatcgtctgcttcatggtcaataactgggagatggacaaactagagatggaagatgcagtcacattttt

SEQ ID NO: 398932 - DNA, 100 bp, Homo sapiens
cagcgcgtggccgaggcgggcggcggccagctgggctccacagcccagggcctatatgaacccaatagcaatggcgagatcaaggggtccaatccagtct

SEQ ID NO: 398933 - DNA, 99 bp, Homo sapiens
ttccgacatcgaaggtggaactgcagcactgtggataacacctctgtttttggcagggtgatgcagataggttaccttttcgacaaaatgattcatcta

SEQ ID NO: 398934 - DNA, 74 bp, Homo sapiens
gtgcttggcttcgccgagttggaagttatttacagagtatggaagacttgcgatggaagaaatctaccagaaac

SEQ ID NO: 398935 - DNA, 96 bp, Homo sapiens
ggctcagaggagagggaggaaggatctcatgagcaggatgaattgcatcatagagacaccgaggtgtccgcaaatatggtaaagattttcaagcta

SEQ ID NO: 398936 - DNA, 90 bp, Homo sapiens
ggccaggaagcaattctggaagcgcagcaacagcaagctcccgggcaggatgaatttttagatgtgatctactggttccgacagatcatt

SEQ ID NO: 398937 - DNA, 100 bp, Homo sapiens
aacagcagctgtggaggtggaatcagtagcagcagcagcagccgcggtggcagtgcaaaaggctggcagtacagaccacggtgtgaacacatgaacagaa

SEQ ID NO: 398938 - DNA, 54 bp, Homo sapiens
tgcagccaaagaagatgcagatggacggtggggaacacagccttgattgtgttt

SEQ ID NO: 398939 - DNA, 75 bp, Homo sapiens
aggtgaatttccatgtcaacatagtccaggtaaaattcccccagaaagtacactgatatttaatattgatctcct

SEQ ID NO: 398940 - DNA, 48 bp, Homo sapiens
tcctgtacagcctgcagaactgaattgaatgatctggcacgggaccct

SEQ ID NO: 398941 - DNA, 100 bp, Homo sapiens
catgcccacgatccgcgtgcccaggtccggcgacagggtctacaagaacgagtgcgccttctcctacgactctcccaagcggagggtgctgctcaaccaa

SEQ ID NO: 398942 - DNA, 90 bp, Homo sapiens
ggaaaatgcaagaagactgatggagcaggcttgcaatattaaaaaatgttgctgaagtgctgctgaaagggccagagatgcaaggatttg

SEQ ID NO: 398943 - DNA, 83 bp, Homo sapiens
agatcgggagcgcaaggtcgccctcaaggccatgatcaaaacggttgtgagtcccggcccagcccctccacccccctgccccc

SEQ ID NO: 398944 - DNA, 100 bp, Homo sapiens
tgattagcaatttaaagatcctctccaaggacacattcagctaacgtattttagcaggtggagtgaggttgaagattcctgtgacagcgatgccatagag

SEQ ID NO: 398945 - DNA, 100 bp, Homo sapiens
cttcttttcagtgccagtccatccatcacgaccacatttgtcatgatgacagtgacaagatggcaggatggtggctggcaaagtgttgatggcaaagcaa

SEQ ID NO: 398946 - DNA, 75 bp, Homo sapiens
agagaacttgccggtgccagctgaggacccgctggggcccagcccctactcatggtgcccagaagacctggctat

SEQ ID NO: 398947 - DNA, 50 bp, Homo sapiens
gcgagcggcgcggtgagaccctcgtgcagagacagagtttcaccatgttg

SEQ ID NO: 398948 - DNA, 75 bp, Homo sapiens
gacgccgccgctgcctcccgcgccgccatggcatcagatgaaggcaaactttttgttggagggctgagttttgac

SEQ ID NO: 398949 - DNA, 104 bp, Homo sapiens
ggccagtggagcgagtggagccagcctgtgtgcttccaggctccccagagacaagatggcaccaaaagcgaaggaagctcctgctcatcctaaagccgaagcca

SEQ ID NO: 398950 - DNA, 88 bp, Homo sapiens
ccactggagaaaaacggccaagaggcagacctaggaaatggtaacaacatgctgtaccccaaggaagacaaggagaaccgcattctgc

SEQ ID NO: 398951 - DNA, 100 bp, Homo sapiens
caagaatctcgtgctcaccggtttctcccacatcgacctgtgacatgggctcgagggttggctaccccgctcaggtttacaaaactgccagtgcagagac

SEQ ID NO: 398952 - DNA, 90 bp, Homo sapiens
gccggacccaggatgaagaggttggagatgggaccacatcagtaattattcttgggttaaagcacgaattgggagctctcagcgacatca

SEQ ID NO: 398953 - DNA, 100 bp, Homo sapiens
agagccgcgggacctgcagccgccgccgtccccggagcacggggtggtgtgtgggggaagccgcccccggcagcaggttttgaaagtgacacagattcgg

SEQ ID NO: 398954 - DNA, 75 bp, Homo sapiens
ggcccatggaaaagattttgcatctagaggaattgaaagccagagcctgggaacctctcagagaaggtctctcac

SEQ ID NO: 398955 - DNA, 98 bp, Homo sapiens
agtttgaaaataaggaagacttgtcgggaacacaggtattgatgaagatgaagtggcagcagaggaacccaatgctgcagttcctgatgagatccccc

SEQ ID NO: 398956 - DNA, 75 bp, Homo sapiens
ctacatagaccacacgaaccgcaccaccagctggatcgacccgcgggacagagctcttcagaaaccaggctgctt

SEQ ID NO: 398957 - DNA, 82 bp, Homo sapiens
cgaatttcatgctttgcacaaaaagtgacgccaatgccccctttgcccagtggagcacagagcgtgtgtgtgcatggctgga

SEQ ID NO: 398958 - DNA, 75 bp, Homo sapiens
tagggaaagatttatcttttctccactcatataaaatttggttgaatctggcgatgtggaacccatggatatgga

SEQ ID NO: 398959 - DNA, 100 bp, Homo sapiens
tcagtaacagcaaaagtcagaaaagtggcaacagcaccacctgctccagcatataaagaaatttctgaataaattggcagaagaacgcagacagaagaag

SEQ ID NO: 398960 - DNA, 100 bp, Homo sapiens
gtcagcagggcctatggtggttccatgtgtgctaaatgtgttcgtgacagaatcagtcgcaaacccagccattactgaagactcctcctgctgtacttca

SEQ ID NO: 398961 - DNA, 80 bp, Homo sapiens
agctccagcagccttgttagggcgtggcctgaggcttggataagtgggattgtcctgggtcacataatgccagctgagcg

SEQ ID NO: 398962 - DNA, 145 bp, Homo sapiens
gtatctctgtttcaggagtggtgacgcctaagctatcactggacatatcaaggacttcactaaattagcaggtccacaaaaggtggctccgattcctccctttctgagccagggccaggtcggtccggccgcggcttcctgttca

SEQ ID NO: 398963 - DNA, 96 bp, Homo sapiens
ccttagcatggtaccaagaccagtctgtgcagtcttacttctctttcctattacagaaaaggctttcaactggcttctgtgtaatgtcatccaaac

SEQ ID NO: 398964 - DNA, 112 bp, Homo sapiens
atctatgaagactacatttctatactttctcctaaggaggataccatacttgcagagctccttcagatacataaagaacacattgtaggataccatgaacatgattctcttt

SEQ ID NO: 398965 - DNA, 82 bp, Homo sapiens
accgaagcggctcaggaaggcagctgtcactgagcccctggaacagagcgagagtatcgtggatcagtacaagggaaagcgg

SEQ ID NO: 398966 - DNA, 75 bp, Homo sapiens
ccgcaggagaacgagtccctcttcactttcctcggcaagaaatgtgtgaaccctgccatcagcatcactgaaaac

SEQ ID NO: 398967 - DNA, 75 bp, Homo sapiens
ggcaagccaatcaccaaccagaagagctcaggaaaagaagtgatgatcacttgatacctattagctaaagttctg

SEQ ID NO: 398968 - DNA, 99 bp, Homo sapiens
tacaaaaccatggcaatgtctgagtgtcaggagctgcgggcgtctttggagacacagcgtgctcagagcagtcgactctgcgtggcactgaaacacgag

SEQ ID NO: 398969 - DNA, 100 bp, Homo sapiens
cccggatcagcctgcctctggggcagcctatgacattccccccagaggccctgtgggtgaccgtggggctgtctgtctgtctcattgcactgctggtggc

SEQ ID NO: 398970 - DNA, 75 bp, Homo sapiens
tgaagatgcgacaggctaagctggattatcagacttcagattttcctgtccttgatcccagctggactgctcaag

SEQ ID NO: 398971 - DNA, 100 bp, Homo sapiens
atgggaaggacaggcagagctaaacaagtgagatgagtcagaaaccggccaaggagggtcccagactctccaaaaaccagaagtactccgaacacttcag

SEQ ID NO: 398972 - DNA, 100 bp, Homo sapiens
cctgagtttcccacttgattacccgttaagtcccccaaagatgagatttacctgtgagatgtttcatcccaacagtgtccaggaggctgtggtgagctgc

SEQ ID NO: 398973 - DNA, 100 bp, Homo sapiens
gccgcagggcctgggcgccttcacccccgtggtgcggcagcgcacgctgcagtccaaaggaggcccaagttgcagcccgggtttggagggagtttgagat

SEQ ID NO: 398974 - DNA, 100 bp, Homo sapiens
gaagcatctacaccaacaggaattaggttacacgcatggggagatactctggaggaagcatttgagcaatgtgcaatggccatgtttggttacatgacag

SEQ ID NO: 398975 - DNA, 100 bp, Homo sapiens
agattgatctcctattaattagtcatgaaactgcttttggttacaagggtctaaagatcctgttatactatattgctggtagcctgtcaacaatgttccg

SEQ ID NO: 398976 - DNA, 100 bp, Homo sapiens
ctgaagaaggctctgtgcaatcctcacattcaagctgataggctgcgctaccggaatgtcatccagcgagtgattagatgttgcctttatcaccaccgtg

SEQ ID NO: 398977 - DNA, 107 bp, Homo sapiens
cagaatgccaccaagtatggcaacatgacagaggaccatgtgatgcacctgctccaggatgagaacaagttgagcagtgccaacggccatgaagaacgtagcaaaaa

SEQ ID NO: 398978 - DNA, 122 bp, Homo sapiens
gaagccttactccccccgtgaccccacccatcaccccctcctcttcattccgcagcagcactccgacagattcacaatgacatcctttcaagaagtcccattgcagacttccaactttgccc

SEQ ID NO: 398979 - DNA, 96 bp, Homo sapiens
gagtccgatggcggcggcactgagggccccgacccaggccatttcataattctgaatcatgtctgataacggagaactggaagataagcctccagc

SEQ ID NO: 398980 - DNA, 95 bp, Homo sapiens
tataatcaagtaaaaacaatagctcaaggaaacctttccaacacagatgtccaagctgccaaggaaatgtttcaacgtgcgcaagcgttgcggcg

SEQ ID NO: 398981 - DNA, 83 bp, Homo sapiens
gtctatcttcttccttaggaaaccagctaccggctctctgaccagttccacgacatcctcattcgaaagtttgacaggcaggg

SEQ ID NO: 398982 - DNA, 100 bp, Homo sapiens
aagggggctgctgaccgagagagctcactcagccaggtatgagtcgtcatccgaggactccagcacagcagagaacatctcagacaacgacagcacagag

SEQ ID NO: 398983 - DNA, 96 bp, Homo sapiens
tttttggacgatgtgcggcggatgaacaagcggcaggctcatgctgaagattcggttatggaccatcatttccggaagccagcaaatgatataacg

SEQ ID NO: 398984 - DNA, 75 bp, Homo sapiens
tgcaggacgtggccagcgccttggactttctgcataacaaaggtctcattcaggaacgtcgcctgataacactgc

SEQ ID NO: 398985 - DNA, 101 bp, Homo sapiens
ctcctgtcgccttcgcctcctaatccctagccactatgactcggtgaaatacctggagtgctcagctctcacccagagaggcctgaaaaccgtgttcgacg

SEQ ID NO: 398986 - DNA, 100 bp, Homo sapiens
gtgaaatcctgtcctgaagactgtaagggcttcataaacttcacttaccaaatacttcaagggattcagaaacagccaagccttctgtaaatgggcatca

SEQ ID NO: 398987 - DNA, 50 bp, Homo sapiens
tgatcgtgtgtcggatgaggagaagagggagcactatgtctgcggaagtc

SEQ ID NO: 398988 - DNA, 75 bp, Homo sapiens
gcattacctgtgacctcgcttcacttctccatacatggctgttatagcaggacacagagtctgggatctaataat

SEQ ID NO: 398989 - DNA, 87 bp, Homo sapiens
gacattcaggatcaacttgaacgaatatttctggtgttgacttcaaaatcaaaactgtagagctaagaggaaagaaaattagattac

SEQ ID NO: 398990 - DNA, 99 bp, Homo sapiens
gcagctaggggcgacgaggcgggacgtcatggaagttggttagcaggaagaagatgagccttaagtctgaacgccgaggaattcatgtggatcaatcgg

SEQ ID NO: 398991 - DNA, 90 bp, Homo sapiens
gcctgggagaatgttgactctactgcagattcaggcttcttcaggagaaagcaagtacactggtaccttggactgtgcaaagaagctgta

SEQ ID NO: 398992 - DNA, 83 bp, Homo sapiens
aaggaccagcggtagctcccggggtgctggagaatctggtaaaagcaccattgtgaagcagatgaggatcctgcatgttaatg

SEQ ID NO: 398993 - DNA, 84 bp, Homo sapiens
caacgacgttccatctgtggaaggacctaccaaccagttttcggctttgtgagaaaccttaccatcaaacacgatggccagcaa

SEQ ID NO: 398994 - DNA, 100 bp, Homo sapiens
aagatattcaaactctaaaccatctgaattggctcaatgatgaggttcactaccttatggttctgtctgccaactgggcctatgtgaaagacgcctgccg

SEQ ID NO: 398995 - DNA, 101 bp, Homo sapiens
ggcacgcaagaccatgccgaagtccgtcgtgggcctgtatccatatattcctgcacatattacaaagcctaaggaacataagaagttgtttctggttcagc

SEQ ID NO: 398996 - DNA, 75 bp, Homo sapiens
ttcaagctgataggctgcgctaccggaatgtcatccagcgagtgattagaccccttatccctctggacagaatgc

SEQ ID NO: 398997 - DNA, 95 bp, Homo sapiens
ctgtgactgccacccctccccccacccgggctcggcgggggagcgactcatggagctgccgtaaggctcctgttctggatgtcagatatgcatct

SEQ ID NO: 398998 - DNA, 75 bp, Homo sapiens
atcgtgtgcctgatgatcacgcagctggctggcttcagtggaccagtacatcaggaacgtctctatcaagaatac

SEQ ID NO: 398999 - DNA, 78 bp, Homo sapiens
cgctttgttttcccacgctaggagctaccacaacagccctgggcgctgcctatggcacagccaagagcggtaccggca

SEQ ID NO: 399000 - DNA, 50 bp, Homo sapiens
gttgtgcgttgcggccagtcgccactgcttacaaacctccagggaacctg

SEQ ID NO: 399001 - DNA, 74 bp, Homo sapiens
acattggaccctcctcccaactgtaggtacaccaggggttggaaaaaccacactaggcaaagaacttgcgtcaa

SEQ ID NO: 399002 - DNA, 90 bp, Homo sapiens
gcggccttgcctctatcgtggctgagtttgcagcatttccatttcccaaaccggctctgatttcccagctggagcgaggggaaacaccct

SEQ ID NO: 399003 - DNA, 82 bp, Homo sapiens
ttctcctcatcaactggggatgattacagttcttcctaaaaaaggttctaaatggcttctaagaagttgggtgcagattttc

SEQ ID NO: 399004 - DNA, 75 bp, Homo sapiens
cggaagtccccgaggcagcctccgcggaggagcagaagtgcgtaagagacgagttgaaggagatcaccagtaagt

SEQ ID NO: 399005 - DNA, 97 bp, Homo sapiens
gggcgggccgcgggagccgcacgcggcgatatggaagaggagggcaagaagggcaagaagatgatatcatcaagttgaatcgaaaggaagggaagaa

SEQ ID NO: 399006 - DNA, 100 bp, Homo sapiens
gaaagaaaggaagaaaaaacttgatttggtgactgcaggaagcaacacgttgctgcttttattctacagataatggatgttgacaatgcgtctctggcac

SEQ ID NO: 399007 - DNA, 76 bp, Homo sapiens
atgaacagaaacacctaggaagggagaactggtagctacagcaagctgggtagcaggcagatccaaaggatatcat

SEQ ID NO: 399008 - DNA, 75 bp, Homo sapiens
aggcccgtggccgctgtccaggagctctgctctcccctccagccaagacaatgcaaactccagtgaacattcccg

SEQ ID NO: 399009 - DNA, 98 bp, Homo sapiens
catcccacgaaattttgcctctggaaagtgacgatgaaatgaatagacccagaaccctcatcataatggtaaagattatagttcccaacagcacagca

SEQ ID NO: 399010 - DNA, 88 bp, Homo sapiens
aacgaggcgacgatggtgctggtgtcctggattatgtgcaggctctccccggaggctcagccccctctgctccccatgggcaactgcc

SEQ ID NO: 399011 - DNA, 100 bp, Homo sapiens
gctaaagcagcgtgcgttcagccctgggttttctttttaaaagcggaaggagagttttacatggaagtggcttacagaaacttggcgctgaggtgcaggg

SEQ ID NO: 399012 - DNA, 51 bp, Homo sapiens
ctgcaccactgtcgccttcacacaggtgtcgtgaaaactacccctaaaagc

SEQ ID NO: 399013 - DNA, 75 bp, Homo sapiens
cctgcagaagaaaatggatttcgttatatcccctttagaatatatcaggcaccccctgtaatggcctatcctgct

SEQ ID NO: 399014 - DNA, 82 bp, Homo sapiens
caggggcctcaattaatgtatctggagccttcacgtaaatgggtccagtcatgcctcccagtaagaagccagaaagctcagg

SEQ ID NO: 399015 - DNA, 100 bp, Homo sapiens
gataccttaggatacaacatagaacctattatgctctatcaggctccggtagattgcaaatgacctgctttctttctgttcccgggcgtttggacccctg

SEQ ID NO: 399016 - DNA, 98 bp, Homo sapiens
aacacttcaccctctcgcctcgggtctcgggggccgctctgggatcccggccaccagcaattgtccgggaaatgaggcaagttatcctttggaaatgt

SEQ ID NO: 399017 - DNA, 100 bp, Homo sapiens
gatggagaagtacaggacctctttggaaaaagccctggggatttcttcagattccaacaaatcggcttcactgtataaataggagaggatgagagcccag

SEQ ID NO: 399018 - DNA, 136 bp, Homo sapiens
agagactctgcgtcaggtcacccagcagagatcagcaatccttggctcactgaggaggtttgggaccacttaaaccctgtctaggaaccagctcagttaatcttcacagcagccttatgaagtgggtaaagccggg

SEQ ID NO: 399019 - DNA, 82 bp, Homo sapiens
cccgggacccgctcagcgatgtgaaatgacaatggatgctctgttggctcgattgaaacttctgaatccagatgaccttaga

SEQ ID NO: 399020 - DNA, 75 bp, Homo sapiens
atgatcacccagggaggacaaatgcatttctagtggctacaaatgcccctcagtataccaacagatgttttaaag

SEQ ID NO: 399021 - DNA, 82 bp, Homo sapiens
tgcagaaatatcagctagaaccatgcagtcaagtttgaagatgccgcatttggattggatgaattccaaattctgcttgctt

SEQ ID NO: 399022 - DNA, 75 bp, Homo sapiens
ttcactatctcttctatactggcaaacagtcatactattcattaatgcatgttagcagaggagccggacacagag

SEQ ID NO: 399023 - DNA, 100 bp, Homo sapiens
tgggatgggagaactccgctgagaccctgcaggaacacgaaacagatgccaaccgagagggaattacatgaacgacagccttcgcaccgacgtcttcgtg

SEQ ID NO: 399024 - DNA, 75 bp, Homo sapiens
cagaggtgtgctgacgacctgctacaacagaaccgtactctgacagctgtgcacgatgccatccttgaggacttg

SEQ ID NO: 399025 - DNA, 91 bp, Homo sapiens
ctacactgttcacttacacagtatttaaatggcccagagcatccgggcatcgggccttatcctgttggaaacgatcctttttggatctctg

SEQ ID NO: 399026 - DNA, 98 bp, Homo sapiens
ggcggctcgggctcgggctccgcaaggaccagactggcttgagctctctgagatgaccgagcagccagactatgacctggagacctttgtgaacaaag

SEQ ID NO: 399027 - DNA, 101 bp, Homo sapiens
aagggacatgggagctactgcaggctggaggcagcacccagggtcattcctggagcataaacgatccctgcagaacatgggctagaagaccccacagtggg

SEQ ID NO: 399028 - DNA, 90 bp, Homo sapiens
ggcgtccctggagcggccgccttccagcaaatgggcaagttcatgaaacctgggaaggtggtgcttgtcctggctggacgctactccgga

SEQ ID NO: 399029 - DNA, 90 bp, Homo sapiens
attttccttccagtgtcaaaccgactatcacttggtatatggcaatggtggcttgctatccgggaaatggaacaggttatgttcgccacg

SEQ ID NO: 399030 - DNA, 100 bp, Homo sapiens
tctcattaggtagcgtggaaggagccttcggatgggctccttcgagagcagtggatccgggccaagtacgagcgacaggagttcatctacccggagaagc

SEQ ID NO: 399031 - DNA, 83 bp, Homo sapiens
ctccacgccgctccgactccaggggagccgtggcctcctctccgccctagcgctgagatgcggcattccaaaagaactcactg

SEQ ID NO: 399032 - DNA, 90 bp, Homo sapiens
gggaactctagtctcgcctcgggttgcaatggaccccaactgctcctgtgccgctggctgctgttcctgctgccccgtgggctgtgccaa

SEQ ID NO: 399033 - DNA, 74 bp, Homo sapiens
tcagtcctggaggaggcgaggagttgctggagaatgtaaccctaatccataaaccagtgtcgttgcaaccccgt

SEQ ID NO: 399034 - DNA, 75 bp, Homo sapiens
atcagtggggaagtcatcatcatatcccatggaagaggatttgacaacttgacttctgtccatcttgcacggcat

SEQ ID NO: 399035 - DNA, 83 bp, Homo sapiens
tggcattcgggtggttgataatagatctattccagaggggagcttcaccacttcattgacggctttaatgaagagaaaagcaa

SEQ ID NO: 399036 - DNA, 100 bp, Homo sapiens
cccgctgcagccgagatgccgggggagcggggccttccacaccccctccgtgggtgtgtggtctcctctgagcctccggcctccataagacccaaaacag

SEQ ID NO: 399037 - DNA, 100 bp, Homo sapiens
cccacttggtgaatggagatgcagctcagcagtctgcagatgcctccaaggagtccgaaaccaagtccgaagtcaacgacaagcaatgatggcgatggcg

SEQ ID NO: 399038 - DNA, 100 bp, Homo sapiens
gcgcagctgccaggccagctcgaagaaggcgagcagggtgcgggagagccccttgcagaagacgccgtacgaggaatggaaactgaaagtggaaatcagg

SEQ ID NO: 399039 - DNA, 102 bp, Homo sapiens
agcgacggatgaaaggagtgctcagacacaggatgcaaagccggaataagagcaatgaccaccatgcctgacagacctgttgctgcgcacacctgtactctc

SEQ ID NO: 399040 - DNA, 89 bp, Homo sapiens
tgaaatgatgtccccaaggactaggccacgcagggattacatggatcgtcttctagacgaaagtgaaagtgctgcatctagtcgagcac

SEQ ID NO: 399041 - DNA, 75 bp, Homo sapiens
aggccccagaactatcttttcgggaaatcctcattgacgattcaatttgttgaaggccaatttgtggactcctac

SEQ ID NO: 399042 - DNA, 100 bp, Homo sapiens
caaaagccaagaggaggacagttcgctacacagcaatgcatcgaggtgcaagaagtggggtgtcccaattgagaagatttacaacaaaacccagcgggag

SEQ ID NO: 399043 - DNA, 82 bp, Homo sapiens
cggaggaggctcatgcgggatttcaagcgcatctgggctgatgggccgtaccctgcaccgtgagccacccgcaggagaccag

SEQ ID NO: 399044 - DNA, 80 bp, Homo sapiens
tcatcatcatctacttcacaggaattgccatttggttacacatcattttggaatgactgtatatcatctggattacgtgg

SEQ ID NO: 399045 - DNA, 96 bp, Homo sapiens
gcaaaaactccaaactcctctccaccagcgccaagaggttccgccacacttcaccactggcagcagttggcccaacctcaccttgggggcatcctg

SEQ ID NO: 399046 - DNA, 98 bp, Homo sapiens
tgctttggcgggtatgccggggaaatgtgttcctgcgacaggctgaaatcgagaaccccctggaggatcctgtgacttgtggaatttgtaaaggccag

SEQ ID NO: 399047 - DNA, 100 bp, Homo sapiens
gacggccatgtgtccaacttcgtggagacagagcagtgtgtgaaggctctggtttactacgacgtggagtcgtgcagacttgacattggcaatgagaaag

SEQ ID NO: 399048 - DNA, 100 bp, Homo sapiens
gacacttctctgtcgtcacagttaggggttgcagatggtgtaggaggctggagagactatggagttgatccatctcaattctcagggactttaatgcgga

SEQ ID NO: 399049 - DNA, 50 bp, Homo sapiens
ttcgcttaaattttgcagagaaagctccagatggataaactgccttcccg

SEQ ID NO: 399050 - DNA, 83 bp, Homo sapiens
ccaagactctgaggctgatatgcaatgtcacttacaacattaatcagatactgcatttaagctcaaagatcctctcaagacag

SEQ ID NO: 399051 - DNA, 100 bp, Homo sapiens
gagaaataccgcattcttatcacaaagggaattgaaaattcggtttttactctaagtgaaggacattcagcccagatttgtactgcacagttgggtaaag

SEQ ID NO: 399052 - DNA, 50 bp, Homo sapiens
cgccaccgccgtctgctgttacctcttagcgccgccctgtgctgggctgc

SEQ ID NO: 399053 - DNA, 100 bp, Homo sapiens
cctggcatggatgtatacggaggagaaaatattgaactgggaatcaaggattatatgcgtcaggcaggagaagtgacttatgcagatgctcacaagggac

SEQ ID NO: 399054 - DNA, 82 bp, Homo sapiens
gccgcgccgccgctacgggaccgcctgagctttctacaccggatcagtcgcatcgaatacattcattcaaagaacttcatcc

SEQ ID NO: 399055 - DNA, 99 bp, Homo sapiens
cagaaaataaggagcagctcgaggccaggagggtggtattaaagataatcaaacattatcaagaagaaggacaaggaactgaagttgttcaaggagtgc

SEQ ID NO: 399056 - DNA, 50 bp, Homo sapiens
cttcgccaaggctggcgcagtcgggctcttccgtgggcggcggcttcgcg

SEQ ID NO: 399057 - DNA, 83 bp, Homo sapiens
tgaagatgaagctgtagataaaaacattttcagagactgtaacaagatcgcattttacagatcttcttcagcagtatcgttct

SEQ ID NO: 399058 - DNA, 74 bp, Homo sapiens
gatgatttcgtagagtgtttgcttcggcagaaaacggaggatgtcctcaacacccagtgtggctacgacgtccg

SEQ ID NO: 399059 - DNA, 82 bp, Homo sapiens
cctgagggccttcgagagctaccgcgccagacaggagaacgtatttaccgggcagtcaaagatctattcctacatgagcccg

SEQ ID NO: 399060 - DNA, 114 bp, Homo sapiens
agaccctggagcctcagttggaagcagccgatccagcctgcggagcctgtggggcagaactcctctttcctaaaatggagtcgagtaaaaagatggactctcctggcgcgctgc

SEQ ID NO: 399061 - DNA, 100 bp, Homo sapiens
tggagacaggctgttccttaagcagagaatgagcttactctctcagatgacttcgtctcccaccgactgcctgtttaagctttcaggatgccaacccgcc

SEQ ID NO: 399062 - DNA, 90 bp, Homo sapiens
ccgccagatcatcggtcaggccaagaagcatccgagcgttaccactacaacgacctggtgtctccacagtacctgaacctcatcgcaaac

SEQ ID NO: 399063 - DNA, 75 bp, Homo sapiens
gtttggatgttggatctacactttctcaagcactgtgatcttcaaatgggtgacagtccaaagattgacttggcc

SEQ ID NO: 399064 - DNA, 82 bp, Homo sapiens
ttggactgagtcctgcaggacacagccttcagcttcagcaccatgataccacccatgaagcagctacttacggttccatgag

SEQ ID NO: 399065 - DNA, 100 bp, Homo sapiens
gttgtgaagaatgtggccagtaaaaatattgagattgccacggcagtgaagtttctacagaattcccgggtccgccagagcccacttgcaaccaggagag

SEQ ID NO: 399066 - DNA, 76 bp, Homo sapiens
ctcaactatgctctccgctgtgtccacagcgttcaagaacctagaagtcggaatccggaagaagatcgaacatgac

SEQ ID NO: 399067 - DNA, 82 bp, Homo sapiens
cttctttcggttctacctgggagaatccaccgccatccgccaccatgactttgtgcccattgacctagacgagtggtgggcg

SEQ ID NO: 399068 - DNA, 90 bp, Homo sapiens
tgcaaacaaggttattcttaatcctgtaaatacgaatctttccaaaggagatgcccggctgaccggttccctgatgtgttacctgcttct

SEQ ID NO: 399069 - DNA, 100 bp, Homo sapiens
aacgtgatagtgtgggatctggcaagaggagtcaaaatacgatcttatttcaatatgatggagtctcacactgtcacccgggctggaatgcagtggtgtg

SEQ ID NO: 399070 - DNA, 87 bp, Homo sapiens
agtcatgagcgacagcggcgagcagaactacggcgagcggccgtgcttcctcaaagactgggaaatgcacgtccacttcaaagtcca

SEQ ID NO: 399071 - DNA, 54 bp, Homo sapiens
aaagagggctctatctggaaccaccagcctgccgcaccaacccgtgcctccatg

SEQ ID NO: 399072 - DNA, 82 bp, Homo sapiens
ggctctcctgtaggaagcaaccagtctcgatctggcccaatctctcctgcaagtatcccagcggccctccaggcactgaagc

SEQ ID NO: 399073 - DNA, 99 bp, Homo sapiens
ggaagagacaagccattttgtgcgcaccacttttgtgtccaggcataagaaatttgacggtgttacacataatattgcattacttcgagaggtgataat

SEQ ID NO: 399074 - DNA, 117 bp, Homo sapiens
gggttatatttggaaccttcgggcaaacaggattccacagtgtcctctggaaaatgggaccatggctaaacctcctggatcattagccagaagcagcagcctgtgccgttcacgccg

SEQ ID NO: 399075 - DNA, 75 bp, Homo sapiens
cgagcttccctcgtggccgacggaacaatgaagaaatgcactcggtgatggaaagagagccactattctgaagaa

SEQ ID NO: 399076 - DNA, 100 bp, Homo sapiens
gaacacagatgaaaaacttcgcaatgaaaccaggcgggtaaacatggtggacagaaagtcagcctcttgtgtgccatggaaagccattcactcctcaatc

SEQ ID NO: 399077 - DNA, 75 bp, Homo sapiens
ttggcaaaagctgctaagaagaaacttcaatctgccatcgaggagggcacgctggaggagatcgaagaggaggtc

SEQ ID NO: 399078 - DNA, 100 bp, Homo sapiens
agcattaccatgacgctctgaacatcatcgacatggccctgagtgaatacccagaaaatttcattatttgattttcatcaagcagctgatggtatccagg

SEQ ID NO: 399079 - DNA, 82 bp, Homo sapiens
gtttgacttagtggaggaggtgcagctcaacttctaccagttcctcggggtgcagcaggctggagcattggatttgctaaag

SEQ ID NO: 399080 - DNA, 97 bp, Homo sapiens
agatcaacctggagctctacgcctcctacgtttacctgtccatggtcccagtagggatggcacaatcagcgaggacaccatccgagcctctctcatc

SEQ ID NO: 399081 - DNA, 72 bp, Homo sapiens
agaaagttcgaaaagttcctccaggtttgccatcttcaatcctcagtttgtggtctgccagctaaaggtgaa

SEQ ID NO: 399082 - DNA, 50 bp, Homo sapiens
aaaaaaacatgtcggatgaagagaaacagcttcgggctcagaatcaggtt

SEQ ID NO: 399083 - DNA, 149 bp, Homo sapiens
ggtggaagatggcgctggccggatggaaatcctaatgacagtctccaaattcgcctccatctgtaccatggtcaaaatgcagatcttcgtgaaaacccttaccggcaagaccatcacccttgaggtggagcccagtgacaccatcgaaa

SEQ ID NO: 399084 - DNA, 83 bp, Homo sapiens
gctgatgcctgagaaggtgactcggttctgccccctcgagggtctgctgagaacagacccagtccctgaggaaggagaagatg

SEQ ID NO: 399085 - DNA, 89 bp, Homo sapiens
ctactttatagtcctgattcaagtgttggcggatggaagggaggagactcctgaccctcagaatggaatttggataaagagagggcagt

SEQ ID NO: 399086 - DNA, 90 bp, Homo sapiens
ggcggctttgcatcggaaatcagctctacagttcagggacactccggacgcaggcccggccaggagagttcgtctgcatcgagtgcggaa

SEQ ID NO: 399087 - DNA, 100 bp, Homo sapiens
ggggaagaggcccaccctggagtaaccctcactggagaatccagaggtgccagatgtgacatccagatgacccagtctccatcctccctgtctgcatctg

SEQ ID NO: 399088 - DNA, 97 bp, Homo sapiens
ctgagatcaaatggcacttcattggccacctacagaaacaaaatgtcaacaaattgatggcgtctcgcccttttgcccaggctagagtgcagtggtg

SEQ ID NO: 399089 - DNA, 80 bp, Homo sapiens
cgttggaggccaccgtttccagacaacaatatgcacaggttttggcccaacagcagaaagcagcactgtcttcccagcag

SEQ ID NO: 399090 - DNA, 100 bp, Homo sapiens
ctgaatgttcaataggcagctgagcctccacccagaccgaaaaccccagagatcttcagatctcttctataggattcaccttggctgataaagtggatgg

SEQ ID NO: 399091 - DNA, 74 bp, Homo sapiens
aaagagaagatgaagaaacccagcttgatatgttgggagaaacaaaggcagcgctgccctcgggggagcattgg

SEQ ID NO: 399092 - DNA, 99 bp, Homo sapiens
atctcctctccgccatgagccaggagacgtacctttaccacatagacaaagcacatggattaattgatgtatgttgagtttatggagctgccttttggt

SEQ ID NO: 399093 - DNA, 100 bp, Homo sapiens
agtccgagctacgacctcacgggcaaggcctccccatggccacccatggaccagtcggcattcacttcctcccttctgcggcccataaaagccctgggtt

SEQ ID NO: 399094 - DNA, 75 bp, Homo sapiens
ctgctgttcgagtacctgcccagaggggcccactcgctgtcccttgtcgccgtgatcctgaaggcgctgacctac

SEQ ID NO: 399095 - DNA, 50 bp, Homo sapiens
agacagggcacaccaaactccatctgcttctcagatgaccaagatggtgc

SEQ ID NO: 399096 - DNA, 75 bp, Homo sapiens
cgaggtcttcgggaattccagcgaggattgattataccggaacagagccttccagtccctgtaataaatgtttat

SEQ ID NO: 399097 - DNA, 111 bp, Homo sapiens
gaccgggaggtaagaggtttgggactgccccggcaactccagggtgtctggtccacgacctatcctaggcgccatgatacactgcctctaggactgggacagatagccact

SEQ ID NO: 399098 - DNA, 98 bp, Homo sapiens
ggcgggccggacgctgagcggagcagctgcgccacggattttatgcgacaagcaggtgaagtaacctatgcggatgcccacaaggaacgaacaaatga

SEQ ID NO: 399099 - DNA, 82 bp, Homo sapiens
cacaagatgttgtccctgcccccagccaaaatgttgtaccatctttgggtaggcagacttccctgacgacatcagtgatacc

SEQ ID NO: 399100 - DNA, 83 bp, Homo sapiens
ggttctctgtcccaggctgttccctaagaaggtctgcccaggactcaggcttgggcactgtttaaaggaaagttccgagaagg

SEQ ID NO: 399101 - DNA, 82 bp, Homo sapiens
gaggaggcgcgggaggtgttcgagaacgaccccgagacgagcctggaaacctggccggcgtcaggcacatcatcctggtcct

SEQ ID NO: 399102 - DNA, 51 bp, Homo sapiens
gcgcgcatctgtggaaacaattaagacctgaaggagaagaaggagaaggtg

SEQ ID NO: 399103 - DNA, 90 bp, Homo sapiens
ggacgaagccggagtgtaggcggcagaggattcgctcccagagcagctgcggccagggttacgactcactgattaaaaagagggactttt

SEQ ID NO: 399104 - DNA, 74 bp, Homo sapiens
tccaatctgagcgtgctgcggacggcgctgcggtacatccaggccgccatggcatcagatgaaggcaaactttt

SEQ ID NO: 399105 - DNA, 113 bp, Homo sapiens
cgcagtcggcaaggagagacgtcgctgaggggcttgcctgaagcgaggggtctgtcgagttgcttatgaaattatgcaaacactacatcctgatgcctctgcaaacttccatt

SEQ ID NO: 399106 - DNA, 94 bp, Homo sapiens
ccagcggggcggaggaaagctagtgccagccctaccagggagtgcatccgccccaacccttttccccctcgtctcctgtgagaattccccgtcg

SEQ ID NO: 399107 - DNA, 100 bp, Homo sapiens
ccctttgaggaccctcaccatggcaatgggcagttcaccgagaagcgggtgtatctcaacaggatcaagagaaatatggattattaaatgtaacaaaaat

SEQ ID NO: 399108 - DNA, 75 bp, Homo sapiens
agactctgatgaagacattcgagagacatatggctacgacatgaaggtttggtgcacctcgatttggaggaagta

SEQ ID NO: 399109 - DNA, 75 bp, Homo sapiens
aattgatattttgatgaacaatattgaacgctatcttaagacaatgagttacaaggcactaatagttctggatcc

SEQ ID NO: 399110 - DNA, 100 bp, Homo sapiens
caacgatgcgtctcctggatgggtacaatggacccaacctggttctgaagtatgaccgggcccagaagcggctggtgaacatcgcggtcgatgagcgcag

SEQ ID NO: 399111 - DNA, 50 bp, Homo sapiens
cggagagcaatcgccgggacagctgcaagcggagatccagcactgtttgg

SEQ ID NO: 399112 - DNA, 89 bp, Homo sapiens
gaagataacaatcaagatgaatatgaccctatggaagcagaagaagctgaggatgaagaagatgatatcacacttcagtggcttattca

SEQ ID NO: 399113 - DNA, 100 bp, Homo sapiens
caagattgagccttgtgggcatttgatgtgcacctcttgccttacggcatggcaggtttctccaacaactaacagaagagaattttgagttaattagtaa

SEQ ID NO: 399114 - DNA, 100 bp, Homo sapiens
ttggcatcatgggatggtattttagacttgccagaacagaacactattcacaaagattgcctgcagtttattgaagcatcagatggtgaaggagaaggag

SEQ ID NO: 399115 - DNA, 50 bp, Homo sapiens
caggagaagaggaacctgcaaagggtcagccagcagccggcccggggtgt

SEQ ID NO: 399116 - DNA, 98 bp, Homo sapiens
gggcttatgggatacagctggacaagaagattatgacagattacgccccctatcctatccgcaaacagttcgatacagaggaggaggctatagcaatc

SEQ ID NO: 399117 - DNA, 82 bp, Homo sapiens
gacagactgtatgaactggacatctcgttccctcccagatgtggacgagtgctcactagcagaaaaaacctgtgtgaggaaa

SEQ ID NO: 399118 - DNA, 82 bp, Homo sapiens
ggggcggagccgagagccacactttcaagtaaaccagatctggtggctggacccagagctgacctatggctgcgccaagccc

SEQ ID NO: 399119 - DNA, 100 bp, Homo sapiens
cagaaagaagcaccgaaggaagaaaagcactagcaacttcaaagccgacggcctgtccggcactgctgaagcttctgaaagtacagagaagcttaacaac

SEQ ID NO: 399120 - DNA, 82 bp, Homo sapiens
gaatcggggcgcttcgccccgggccccccagcatgaagaccccggcggacacagggcaaaataacatggcagccagacgaat

SEQ ID NO: 399121 - DNA, 75 bp, Homo sapiens
aaaccctgaaggacagtgacttattattgctcaaagatccagacagcaatccatacagcttacttgataatacag

SEQ ID NO: 399122 - DNA, 100 bp, Homo sapiens
cgtcacttccgcttaggggcggacacgtcccaaacctgtggcgggagttggagattctgcggcgaatacgccagaattaacactgaatcctccggaagga

SEQ ID NO: 399123 - DNA, 75 bp, Homo sapiens
gtcagtcagaggggcgagcaggagcgattccgtcgccaaacaggcatgtactggcattgaaaacattgacgaagc

SEQ ID NO: 399124 - DNA, 101 bp, Homo sapiens
ggaggggccttcctcatccgggagagccagaccaggagagataattcatcaccttcgactgagcattcacaaggccttgagaagcaaggagtgcacgcagc

SEQ ID NO: 399125 - DNA, 96 bp, Homo sapiens
taccagagctgcgcagcctgcctgggctccggggacccgcactgtggttggtgtgtgctgcgacacagttaccggtattgtaagaacaagccgtac

SEQ ID NO: 399126 - DNA, 73 bp, Homo sapiens
tctggtctcggccgcagaagcgagatgacttagaaatggctgttgcgtattggaaattagtgttatctggaag

SEQ ID NO: 399127 - DNA, 100 bp, Homo sapiens
tcctttggccacatatatgcgaatctataagaaaggtgatattgtagacatcaaggtggaagcagggaaaggcctggagatgaggaagctggttctctcg

SEQ ID NO: 399128 - DNA, 74 bp, Homo sapiens
aacctgcggcctgacccagagccacttctcaccgagatgattcatgaaatctcagtgaatatcttccggactct

SEQ ID NO: 399129 - DNA, 73 bp, Homo sapiens
ccagtaccaaaaacgtcaacaacagttttacgggtaattgggatacttctggcagcgaactgagtgaagggga

SEQ ID NO: 399130 - DNA, 90 bp, Homo sapiens
aaccactcaggacggcccgaggatccggaaccaggtcaaaatgcagatcttcgtgaaaacccttaccggcaagaccatcacccttgaggt

SEQ ID NO: 399131 - DNA, 82 bp, Homo sapiens
cccgacgcaaaccaaggatctggggatcttcgcactatcccaagggtgagaactctgtctcagtcgacgggaagtgcagtga

SEQ ID NO: 399132 - DNA, 83 bp, Homo sapiens
gttaaggattccaagtaactcttatttgagacagcctggagctgttgcccaaagaattggaagtcatttagttccaactgcta

SEQ ID NO: 399133 - DNA, 100 bp, Homo sapiens
gctgtacagacatggcggcggcttttcggaaggcggctaagtcccggcagcgggaacacagagagcgaagccagattgtcacagccctggccattgcggg

SEQ ID NO: 399134 - DNA, 99 bp, Homo sapiens
ctgcaaacactaacagaatatttaaagaaaacacttgatcctgatcctgccatccgacgtccagaccctccgcctgtgttacgtgttgatgaccggcag

SEQ ID NO: 399135 - DNA, 123 bp, Homo sapiens
ctctgccttgctgatctgagctcagacctgccaatttaccagagataattgataacaccctgtaacagctgacaccatatgaaggcggagtatggaaagttagagtggacctacctgataaat

SEQ ID NO: 399136 - DNA, 97 bp, Homo sapiens
cccaggcgcctggcgtccgcgtcggcgatccggggtctgggcgcggcgaggttcgtgctggccgtgggcagcgccgtctttgatgccatgttcaacg

SEQ ID NO: 399137 - DNA, 75 bp, Homo sapiens
gagggttggctgcacaaacgagacacagccgccagcccaaacagcagcggcatgggcagcgccagcccgggtctg

SEQ ID NO: 399138 - DNA, 82 bp, Homo sapiens
acagaaccccagtgcccaggcactgggcctgggcaaacataattactgccggtgtggatgaggtcaccattgtcaacatttt

SEQ ID NO: 399139 - DNA, 50 bp, Homo sapiens
ggcggaggcgcctcctgtctcaggtgtccctggccagtgtccttccacct

SEQ ID NO: 399140 - DNA, 100 bp, Homo sapiens
tggtgacttctacgaaaaagccctggtggagctgaaggttgcagctcagcaaaacccagcagctcagattcctgccaggcagcgggagattgaaatgaac

SEQ ID NO: 399141 - DNA, 75 bp, Homo sapiens
ccacgaatctgcccacccctcctgtaacccagcctgtttcacttcttgggatatctgcattacctccacctcctc

SEQ ID NO: 399142 - DNA, 75 bp, Homo sapiens
cttccagttagtggatatagcacaccatccccagccaggtctgtgatgggaatccggttacctgctccttccaaa

SEQ ID NO: 399143 - DNA, 87 bp, Homo sapiens
catgacagaggaccatgtgatgcacctgctccaggttggatggcaagcatgtggtgtttggcaaagtgaaagaaggcatgaatattg

SEQ ID NO: 399144 - DNA, 50 bp, Homo sapiens
taacttttcactagagatcaatgggaagcgttggggccttcgtgaagacc

SEQ ID NO: 399145 - DNA, 98 bp, Homo sapiens
ggcgagactggagcagagccgctgggcgccggagccgaggcgagcgccgcgcgcaccactggactgcctccgggcctgccaggagcagatcgaagccc

SEQ ID NO: 399146 - DNA, 50 bp, Homo sapiens
ccctgaagagggaagacacgcggaaacagtgaaggagaacgacctgctca

SEQ ID NO: 399147 - DNA, 100 bp, Homo sapiens
aaacccaaagaaaccaagtctgaagagaccctggatgaggtttctgtggatcccttctgaagttctatctgaaaattgcgcttaagtgaattttctgtta

SEQ ID NO: 399148 - DNA, 74 bp, Homo sapiens
ggaatccgagaagagcagagcggagggagccccagacacgttattaccccattcaagttgacaactgaggcaac

SEQ ID NO: 399149 - DNA, 100 bp, Homo sapiens
gaagctacttaatgcccggcgacgcgttgtcttggttaacaacattctacagaatgctcagttggccgtaaaccaaagacccagcaatcaccaatttcca

SEQ ID NO: 399150 - DNA, 99 bp, Homo sapiens
cgacggggcgcgcgcgaagcgagcgagaaggcacggagtcgccgcggagcgcagaaccacgaagctgccctgagacgctcactcacgctgtggggatgt

SEQ ID NO: 399151 - DNA, 88 bp, Homo sapiens
cagggtccctgaagagggaagacacgcggaaacagatgtgttcagagcaacattgttttgttgacacaagcatttagaagaaagtttg

SEQ ID NO: 399152 - DNA, 75 bp, Homo sapiens
gaccgagagcgtgaccgagagcgcgaatatcgtcatcgttagaagtacgagctcaactggaggcagtcctgtgcg

SEQ ID NO: 399153 - DNA, 75 bp, Homo sapiens
ggtcctttttggccccaggtgactcttaactcccaggacagaggaatccagacgctctgcagtgtcccatcgtct

SEQ ID NO: 399154 - DNA, 74 bp, Homo sapiens
ggaaaacattatttctaaagatcaactttacttagatcccagatggattttttgcccatttttatgccatttgt

SEQ ID NO: 399155 - DNA, 93 bp, Homo sapiens
ggcggacgcgcccgggacgcgcggcggcaccgggaggccgggccgagcgattgcaaatagaagagtcttccaaaccagtgaggctatcacaac

SEQ ID NO: 399156 - DNA, 71 bp, Homo sapiens
catctcagcctccaaaagtgctggcattacagcccctcaagaccctctcccgagaacggcccctgcccaac

SEQ ID NO: 399157 - DNA, 75 bp, Homo sapiens
attttggtgatgctttcaaacagtgtcaatacaaagatactctccccaagtttgctaatccagactttacacaac

SEQ ID NO: 399158 - DNA, 82 bp, Homo sapiens
catggtttccagtgcagcgcggagtgggcgatgccagcgtgccagttaattggccttggtcctcacagctccaaaaagaaac

SEQ ID NO: 399159 - DNA, 75 bp, Homo sapiens
tgcagccgagcgggcccgttccgccggagctgaggaccaggtacaccagaggatcgcttcctggcagaatttggg

SEQ ID NO: 399160 - DNA, 100 bp, Homo sapiens
gggaaactgaggcccccgcctgtggccggtgacctccctcctccgagggaggggggttgtgaccccaggtgattatcctgaaccatccaggccaaataag

SEQ ID NO: 399161 - DNA, 100 bp, Homo sapiens
tgactacctgaaccgcatctttcctcttctgaccatgcacccccagcagccaccggcaggtgtagcccatcagtgttatcatggtttcatgaaggctgtc

SEQ ID NO: 399162 - DNA, 90 bp, Homo sapiens
agactggtgaaactgtgcacccagaaacatcagttggacactgatctgtttccccatttagctgcagaaccttggcctgaaaatgctaca

SEQ ID NO: 399163 - DNA, 125 bp, Homo sapiens
tctttcccacacaggaagtcagctagagagccgtctcccctctctggagccgagagaggccggtttcccccaccgcagaggtggaggagacactgaagcgactgcagagccagaagggagtgcag

SEQ ID NO: 399164 - DNA, 118 bp, Homo sapiens
ccgagaccgtgaccgagagcgtgaccgagagcgcgaatatcgtcatcgttagaagagtgttgcggagataggaacatgggagagaaacaatctgggtaacatgaaagtgatgctggtt

SEQ ID NO: 399165 - DNA, 75 bp, Homo sapiens
ctgagagagatgcttaaaaatcaccagttactttaatgaacatgcgaggattcatgacagcgcatggacagccag

SEQ ID NO: 399166 - DNA, 75 bp, Homo sapiens
cgtacgcggtgctgcgagggcagaacctggggactgctgagatgtcctctattcttgaagagcgtattcttggag

SEQ ID NO: 399167 - DNA, 100 bp, Homo sapiens
cagaagaagctgaacgagtatcggctggatgaagctcccaaggacattaagggttattactacaatggaaccctaaggactctgcaatatgaataattcc

SEQ ID NO: 399168 - DNA, 82 bp, Homo sapiens
ggatcatgtctgcgagccaggattcccgacccctttgctgatgcaagtaagggtgatgacctgcttcctgctggcactgagg

SEQ ID NO: 399169 - DNA, 75 bp, Homo sapiens
acggatggtcttgaaacacaaatggtttttgggaactgctcgcagaaagaagaaggtggttcatagaacagccac

SEQ ID NO: 399170 - DNA, 101 bp, Homo sapiens
aatgcagaagtaagaaaggctttgtctagacaagaaatgcaggaagttcagagttctaggagtggaagaggaggagctggaatatcagaagtctcagcccc

SEQ ID NO: 399171 - DNA, 100 bp, Homo sapiens
acattagaggtcatccaaagcagccgtcccctctgcagcctctctgacaagtggtctattctggataagcaggttttgtgaagacatttattctttcttg

SEQ ID NO: 399172 - DNA, 75 bp, Homo sapiens
gaatctggattttgggattccttcaaatgaccctcaaactgacacaagacctacagagaaaaccctttgccaaat

SEQ ID NO: 399173 - DNA, 82 bp, Homo sapiens
cacccgcagactccttctccagcatgggctcgcctgtcaacgcgcagagcggagaagcatccttgtttgaggtgaacatccg

SEQ ID NO: 399174 - DNA, 75 bp, Homo sapiens
ctccactaggttctccaaggctggccaagggcctgtgaagccaagactcaggatcagtggcccctctggacatgc

SEQ ID NO: 399175 - DNA, 100 bp, Homo sapiens
cttggactgggccattggcagcagaattcctgccaaagcattaattccagactctgatcacacgccagctccagcccttctctgagacggggaccagggg

SEQ ID NO: 399176 - DNA, 97 bp, Homo sapiens
cctctctgatcttcctgcatggctcagagtgtaccatggcttccagtaacactgtgttgatgcggttggtagcctccgcatattctattgctcaaaa

SEQ ID NO: 399177 - DNA, 100 bp, Homo sapiens
ccggcgagaggcggcgccgctcccaagatgtcgcagacggccatgtccgaaacctacgatcgtcagtatttaaacagatcacatcatgcgtgagtacaag

SEQ ID NO: 399178 - DNA, 73 bp, Homo sapiens
cagctgcggcggccggaggaccggcctgccggcccccagaacaaggctccttctcctgaaaaagccgaggagg

SEQ ID NO: 399179 - DNA, 100 bp, Homo sapiens
ctcgggccccggagacgggcgaggagcacggcagcagccaggatttaagtgccctgtatgctcaaaatttgtatcctcagatgaaatggatttgcatctt

SEQ ID NO: 399180 - DNA, 73 bp, Homo sapiens
gagtcttgtctacctctggttcctgtgcaggggccctcctcgccaaagacagcctagagaggacggcaatgaa

SEQ ID NO: 399181 - DNA, 75 bp, Homo sapiens
caaaaaacacaataccaggcatacatttggcagaataaatgaaccaggcgtttaaatgcagaattgcaggcaaaa

SEQ ID NO: 399182 - DNA, 73 bp, Homo sapiens
tcggcaatattgattttagacaggtgatgacaatgggaagaaggccaacaaccccaaccactgcaactgcatc

SEQ ID NO: 399183 - DNA, 100 bp, Homo sapiens
agaagactcaaaaccagataccactgctcctccttcatctcccaagccacaagtatatggttatgatgacttgcagatgcttcagacaagatttccattg

SEQ ID NO: 399184 - DNA, 80 bp, Homo sapiens
agcagcattggtgtccagtcagatgaaattgatttatcagatgtcctttcaggtccttaaaattctagtcagggcagtga

SEQ ID NO: 399185 - DNA, 100 bp, Homo sapiens
gcctttcaggctttggaaaaattgaataatagacagctcaactatgtgcagttggtcagttgctccgattaaaaatgtttcgagaagatcatgggtcgtg

SEQ ID NO: 399186 - DNA, 75 bp, Homo sapiens
gaagtctgtgtcaaacatccatatcataagtggaattttggagatattcaaagcatttctggattaaaagtggtg

SEQ ID NO: 399187 - DNA, 101 bp, Homo sapiens
ctcagccttccgagtagctgggattacaggtccccttcaaaggttacaacacttgtctggggccaccccatgtccggcatggagcagcacccctgcatccc

SEQ ID NO: 399188 - DNA, 74 bp, Homo sapiens
gcacacatgggtcctggagatggaatacagatcctgaaagatctgcccatgttccagaagaaggcttcttattg

SEQ ID NO: 399189 - DNA, 90 bp, Homo sapiens
cggacctccatgcctttgagaacctagaaatcatacgcggcaggaccaagcaacagtccagcaagactatgaatctctgttccaaatgct

SEQ ID NO: 399190 - DNA, 75 bp, Homo sapiens
caagaatcctatagaccagtgtaataccctgaatccctatttgactacagtcattccttatgagaaaaaaaacgg

SEQ ID NO: 399191 - DNA, 98 bp, Homo sapiens
caggatgattgcctcgcatctgcttgcctacttcttcacggagctcaaccatgaccaagtgcagaagcaacccaaggagatctgtgcgctggttgggt

SEQ ID NO: 399192 - DNA, 90 bp, Homo sapiens
acagccagtcttctatgtttccacatcggtcagaaaaagatgaagctcataaaatggtgagagaagcaaatatcaagcaggcaacagcag

SEQ ID NO: 399193 - DNA, 100 bp, Homo sapiens
aggagctccaccaaaggtctcgtacctctcagagaaatgtgatacctcaaagcacaaagtgctggtagtgtctgtgtgtcctcaatctttgccttatttt

SEQ ID NO: 399194 - DNA, 82 bp, Homo sapiens
gtccgcggccggggcgcgggagcatggagatatggaccaaaaggaacgagacgtgattatgagggagtttcgttctggctct

SEQ ID NO: 399195 - DNA, 98 bp, Homo sapiens
gcgacacgtggatccaagatggcgacggcgatggaaacccagcgtttgctggcagaaccagttcctggcatcaaagccgaaccagatgagagcaacgc

SEQ ID NO: 399196 - DNA, 90 bp, Homo sapiens
cgacgggttggggatggcgtgcagcgcaaccacgagacggccttccaaggattttttatcaagcagaaatgcatcgaacaacgagaatca

SEQ ID NO: 399197 - DNA, 75 bp, Homo sapiens
cgcgacgctatggcgcactggagtaccctgttcctggcagttccagcaacagatagaaatgctttaagttcactc

SEQ ID NO: 399198 - DNA, 100 bp, Homo sapiens
gggtccagacccacgcggcgccagttctccggcgggaaggaaaaccgcgcagagaggaagattcttacctctgaagacaatgttaggaccaagatatgat

SEQ ID NO: 399199 - DNA, 80 bp, Homo sapiens
ttagcggcccggcgttgaattccgggaagtgggagcttcaggctcgctccgtgcgggcatcctgtcggctcacaagataa

SEQ ID NO: 399200 - DNA, 96 bp, Homo sapiens
gcaaagctcaccctcccgagttgaaaaaggcttttttccagacttcaagctcccattccaacagtaagagcttcttccacatcacagcccttggat

SEQ ID NO: 399201 - DNA, 98 bp, Homo sapiens
caatatcatgcaagtgtggcaaatgattgtctacaaagcctggctctgttcccagtattttgaagtcacacagtttaactgcagaaagacaattcctt

SEQ ID NO: 399202 - DNA, 100 bp, Homo sapiens
gaaaaagcatccccgaggaggaagacgaatcgttaaacatctgaaagggtcagctgcatcttcctcccgtgaggctggccgagctccacgctgatctgaa

SEQ ID NO: 399203 - DNA, 100 bp, Homo sapiens
gagaacttgctggtgaaaatcggggactttgggatgtcccgggacgtgtacagcactgactactacaggatatcatggaaatcaggacagtggcagttgg

SEQ ID NO: 399204 - DNA, 75 bp, Homo sapiens
attgcccggccgctgctgcacttaagctccgagagaaccagctgcccaggatccaggcgggggaccctgtggcgc

SEQ ID NO: 399205 - DNA, 100 bp, Homo sapiens
gaaacaaaaagaggagcagaagaaactcgaggagctaaaagcgaaggccgcggggaaggggcccttggatcagcggtttgagtgctacgtttgcagaaat

SEQ ID NO: 399206 - DNA, 78 bp, Homo sapiens
tggactgaaacgatcctctcatctcagcctccaaaagtgctggcattacagctgcccctgagcctggacctgcccagc

SEQ ID NO: 399207 - DNA, 100 bp, Homo sapiens
gaactgtccagcgtcacgctcagcacttgccgaggaattaggttatatcttaagtgtggtgctgctaacattgcccaggcagcatctggttcagctttat

SEQ ID NO: 399208 - DNA, 75 bp, Homo sapiens
cgccccttcgcgtcccctgcaccatgagctggggcaccgagctctgggtgtaccaacagtaccgttattgccacc

SEQ ID NO: 399209 - DNA, 96 bp, Homo sapiens
attgccagggcttcctggcccgaaaggagagcctctccagaagaaaaggaagtcattaaaggacagtatggcaagctcacggacgcgtacggctgc

SEQ ID NO: 399210 - DNA, 100 bp, Homo sapiens
aagaaagtgctctggatgccacagggtggtaatttgtgcatggaaaatggctggggtgaagaggagactaggggtaacaagatgctcaactatagtgctc

SEQ ID NO: 399211 - DNA, 100 bp, Homo sapiens
gcagagctagttcctctccagctcagccgcgtaggaatccgcaggcggggatcttcagtctcctttaacaccggaaagtatcaacgggacagatgatgaa

SEQ ID NO: 399212 - DNA, 82 bp, Homo sapiens
ggcagtccacccaccgccgccgcctcccagtgcccatgacgcttccggagacaaccctggaaacactgaagcataaaatcaa

SEQ ID NO: 399213 - DNA, 100 bp, Homo sapiens
cctgtgatctgcaggtccggagagacgcacagctaagatgtcaggacatcctggaagctgggaaaggtatggctgtgacccgatccaaagacgctcctcc

SEQ ID NO: 399214 - DNA, 75 bp, Homo sapiens
aatggatgttcagcagctttcacaaatagtaccaaagattacgtgtgaaaatgaacttgtgcaaacccaacccca

SEQ ID NO: 399215 - DNA, 75 bp, Homo sapiens
cagaaacagaggactaattttggcagttctaaatttgaatttgagccccatgttatagtacattgtgcagcagag

SEQ ID NO: 399216 - DNA, 101 bp, Homo sapiens
tccagatcgggatttacgtggagatcaagcgcagcgatggctcacagaacatttcctgcctgttgctcacactctgttgtccacagcatacccgcacccta

SEQ ID NO: 399217 - DNA, 83 bp, Homo sapiens
ggctatgtcgagatcccctgtgtggccaagaagctggtgtgcggagatgaagcctggtggagttgacagaagagatcctgaag

SEQ ID NO: 399218 - DNA, 75 bp, Homo sapiens
cccgaccccgtcccgaccctggccgccccgagcggagcctggagtcttcccaagggattgttgaagaaacttctg

SEQ ID NO: 399219 - DNA, 100 bp, Homo sapiens
aaggtgcaaggggtgtttttccgtaagcatactcagtttacaggagagccgaccattttcagttgactttttcaggaaaatgattcagtttgaaaaggag

SEQ ID NO: 399220 - DNA, 95 bp, Homo sapiens
cggagctgcgcgcggaaccgtgctgccccgccccgctccacccgtgaggtgggtgtataacattctcgacaagaaggctgaagcggaccggattg

SEQ ID NO: 399221 - DNA, 100 bp, Homo sapiens
atctggcatattagcgctagccctgcagacagaggtgtgctgacgacctgctacaacagaaacctgaagattatcggctataagagaataagaattgcag

SEQ ID NO: 399222 - DNA, 100 bp, Homo sapiens
accccttgttctttggtggcgctgtggatggctgtattcatagagcagccggcccctgtttgctagctgaatgtcgtaacctgaatggctgtgatactgg

SEQ ID NO: 399223 - DNA, 95 bp, Homo sapiens
cagatgaaaaagtgtgacttggcagctggtccaagccttgtcatcggccagtaagtttgaagcagagttgaaagctgagcaagatgagcggaagc

SEQ ID NO: 399224 - DNA, 100 bp, Homo sapiens
gaggcgcttctgcatctgtgggccgagaaaaggtcacggatcgcctacagtgacgaagtacggaatgagctcctgggggatgatgggaattcctcagaga

SEQ ID NO: 399225 - DNA, 100 bp, Homo sapiens
agaagctcggcgggagagctgagcgctcggaagaaccaaggaagacaactgttagttttgtggcttactgctgctccacccagtgtctgcagacttttga

SEQ ID NO: 399226 - DNA, 100 bp, Homo sapiens
tgccagcatcagccagtgtgtgagccttgcagtgcatcccagcagcatctcagtatctgagcacagccggttgcttcaggatgtgctgagttggatgcag

SEQ ID NO: 399227 - DNA, 75 bp, Homo sapiens
tcacttaggccaagaagtcaccttgtgtggatggattcagtaccgaagatttgcttgtaaatgcatcacgaagag

SEQ ID NO: 399228 - DNA, 82 bp, Homo sapiens
gcgggcggcttcctggcctgggcgctccggtggcggcggaggtggacgcggatctgtcaacatgggtaaaggagaccccaac

SEQ ID NO: 399229 - DNA, 98 bp, Homo sapiens
gatctgacagacatccctgaatcttggtgtttggacataggaggatttcaaatatgcgtgcattagagaatgattttttcaattctcccccaagaaaa

SEQ ID NO: 399230 - DNA, 90 bp, Homo sapiens
cgcgggctgggccccgccccactgcgcgaagctgctgactgaggtgcacgcaggctgctgcatctgaagccccccaggatgtgacctacg

SEQ ID NO: 399231 - DNA, 100 bp, Homo sapiens
gtaagaaacactaaaacttcctggagaaattagatatgatgaagatcacagtggtgatgataaagtcttcctggactgcttctgtaaaatagctgctggc

SEQ ID NO: 399232 - DNA, 100 bp, Homo sapiens
aaatgtttatctccggatgtgacaccttgcttttgtaccattaacttcacactggaaaagtcatttgaggtggaagtgggctaactggagctaaacttca

SEQ ID NO: 399233 - DNA, 50 bp, Homo sapiens
ctcaccttggacacctcgcttggtccaacgtggagcacctgacggagaaa

SEQ ID NO: 399234 - DNA, 82 bp, Homo sapiens
ctacgtcgtgatcggcgacttggggtccaacttctttgcccggctgttcgggtttcaggcttgggcactgtttaaaggaaag

SEQ ID NO: 399235 - DNA, 90 bp, Homo sapiens
acgtgttggaccttccggagcttctcagaagacagagggttttcttttgaggattccagtggaatgacactggtgatgcttgccgccgcc

SEQ ID NO: 399236 - DNA, 75 bp, Homo sapiens
gaactggttctacacgcgagctgactgtgccctgtccacggtgcctcctgcatgtcctgctgccctgagctgtcc

SEQ ID NO: 399237 - DNA, 96 bp, Homo sapiens
gatggcgagagggggcaccggaggtgacaacaataacaagactgtccttcggacaagttttagaatctccctggaaaaggagacatgaatgtctgc

SEQ ID NO: 399238 - DNA, 100 bp, Homo sapiens
ggggaggcgccgcggactgtcctttcgtggctcactccctttcctctgctgccgctcggtcacgcttggcattcaaaagtgcggcagaagagtgaggtgg

SEQ ID NO: 399239 - DNA, 74 bp, Homo sapiens
ggtgcagttctactaatagtataggaagttccatttctaagccagatgtgattacattactagagcaagagaaa

SEQ ID NO: 399240 - DNA, 102 bp, Homo sapiens
tatctgggaattgccaaggagaagagtaccaaggctgctagtgaacagcgacgtgggtatcagctttcccagcctgacgctgcctccaggctggacactgag

SEQ ID NO: 399241 - DNA, 75 bp, Homo sapiens
ggccggcagggtggacggtgggctcgcatctccttggaaacaatgccatctttgaatgtgagagataaacctagt

SEQ ID NO: 399242 - DNA, 101 bp, Homo sapiens
gcagcactgccttgagaagatactagaattccatcagaagcacgtggtctacacggacgtgcagcaggtggccagcagcctcacccacccgcgcttcaccc

SEQ ID NO: 399243 - DNA, 75 bp, Homo sapiens
ctacagagattcaagatgtatgttcagcagttggacttaacgtatttcttgagtgtggcttcctgttgtggtgca

SEQ ID NO: 399244 - DNA, 50 bp, Homo sapiens
gtgtttgaggcacgagagcagaaggaactggagaagatgatgactatgtt

SEQ ID NO: 399245 - DNA, 101 bp, Homo sapiens
tgcattgactggaaacaatggcatttacagaaagagtcaacagcagtggcaacagttacggctagatgaggctcaagaagcagaatgccaggccttgaggc

SEQ ID NO: 399246 - DNA, 89 bp, Homo sapiens
cgagcgggcggcttcctggcctgggcgctccggtggcggcggagggaacggcaggagcagctgatgggatatcggaagagagggccgaa

SEQ ID NO: 399247 - DNA, 87 bp, Homo sapiens
cttccgctctctgctcatcaatgcagttgaggcctcctgtatccgaacacggcacgtgtggttctcaaatataggcattctgatggg

SEQ ID NO: 399248 - DNA, 75 bp, Homo sapiens
catttgactagacggtatgaatttctaagtaagagactgacttgcataccaaatgtgtggtggatgtggatgcaa

SEQ ID NO: 399249 - DNA, 100 bp, Homo sapiens
gtggagcgcgccagccggggtcctcggatctggcccaggaagccttatcagttgtgagtgaggaccagtcgttgtttgagtgtgcctacggaacgccaca

SEQ ID NO: 399250 - DNA, 100 bp, Homo sapiens
tgaatacagagacagaaatgttgatgtggtacttgaagacacctgtactgttggtgcttttgaagatgatgatatcacgcacgttgaaggaagtgtagat

SEQ ID NO: 399251 - DNA, 102 bp, Homo sapiens
ttggttacctatgtacctgttaccactttcaaaagcattggccgctggaccaacccccagtaccggcagttcatcaccatcttggaagcaacacatcggaac

SEQ ID NO: 399252 - DNA, 98 bp, Homo sapiens
ggaaggcgattggcatcgatctctccatcccttccgaggcccgacttcggagatgagtatgatgtatgtgccatttgtttggatgagtatgaagatgg

SEQ ID NO: 399253 - DNA, 101 bp, Homo sapiens
ttctaccgctgcggctactgcaagaacgagtcgggcagccgctccaatggttcttgggtgtctctggggagtccctgggccagaccttcctccagactcca

SEQ ID NO: 399254 - DNA, 100 bp, Homo sapiens
cacaatcacagcaacagactctcctgcagaccttcccaggaagccagagccacacacaccatcatggtcctggtgacagagctgaatgaacctctctcca

SEQ ID NO: 399255 - DNA, 90 bp, Homo sapiens
cgcctcgctgggcagcctcaacatcccctacaagatcgaggccgtgcagagtctcacagggatactgggtttgggcattgcggctcccaa

SEQ ID NO: 399256 - DNA, 100 bp, Homo sapiens
gaagccttgaaaaagctgccctgagacggtgtcccgccgaaagggtcctggatatgcccacccaagaactgggcctccccgcctaccgcaagtttgacat

SEQ ID NO: 399257 - DNA, 119 bp, Homo sapiens
gcgcggacgcgcagcatggcggtggaggacgaggggctccgggtcttccagagcgtgaagatcaagatcgatctctgttgaggagctggcgcggaatctggtcatcaaggtcaacaggg

SEQ ID NO: 399258 - DNA, 82 bp, Homo sapiens
ttattattggccctccagatacactttaaagagccgaatgcacataaggtcgccagcccaccctccggacccgcataccccg

SEQ ID NO: 399259 - DNA, 101 bp, Homo sapiens
ggttgtgagtgcttatggccacattcctgcatcagctcagccatcgcggcatagaatgtcaagctaaccaggcgtccgctacttcagaagagtgtactgtc

SEQ ID NO: 399260 - DNA, 82 bp, Homo sapiens
gaagatagtgcctttcagccctaccagctttgggacatccggaagaaagcagccatccagacatttcagaacacgtaccagg

SEQ ID NO: 399261 - DNA, 110 bp, Homo sapiens
gaggaggaggcggagaccgaggagcagcagcgattctcttaccaacagagctgacatcgcgctgatcggattggccgtcatgggccagaacttaattctgaacatgaatg

SEQ ID NO: 399262 - DNA, 98 bp, Homo sapiens
gcatttgccttatacagctaaagccatggaaaggactgactgcattgcacagatgatggatatttacgtatgtttgaaacgaccatcctggatggtgg

SEQ ID NO: 399263 - DNA, 118 bp, Homo sapiens
cggaggcggtgaagtgccatcttcggctaggtcgtcacaggctccggctcatggcatcaagtggcatccatcataagctgtgaaagttgtgtagatttactgtttgtgagaggagctg

SEQ ID NO: 399264 - DNA, 100 bp, Homo sapiens
cggggcgcctgcgggacggtgaggccctgctgaggactccggtgtcacgtcttgaaattttaaatgtcctcagtgactctctacctctggcagatgatgt

SEQ ID NO: 399265 - DNA, 100 bp, Homo sapiens
agcttcccggaggaagtggtgcctaagctgtgctctgattcacgtttagaagctgaccagacaaagagaggtgaccatggaggaagaagatgagtctcga

SEQ ID NO: 399266 - DNA, 60 bp, Homo sapiens
cttaagttctcttcattacactttgggaaaggaatctactttgctgacatgtcttccaag

SEQ ID NO: 399267 - DNA, 80 bp, Homo sapiens
ccatccaaactcttgccctttgagggaccaggcaacgcggtaaaaatattgcttcggtgggtgacgcggtacagctgccc

SEQ ID NO: 399268 - DNA, 82 bp, Homo sapiens
cagcaccgcagccttgggcctcgcgccggctatggccgtgccctggggctgagccctcagatccagagacaatggccccgat

SEQ ID NO: 399269 - DNA, 82 bp, Homo sapiens
cgagaataccaagaatacaatccttatgaagtattaaatttggatcctgatgtaaagcaggagttaataaagttggttaagg

SEQ ID NO: 399270 - DNA, 99 bp, Homo sapiens
gcggcggctgcggcgcgcgcgagccgagtgtgagcggaaaggggcccggcgtctgcctcgagactgaagaccgaaatgcactcggtgatggaaagagag

SEQ ID NO: 399271 - DNA, 100 bp, Homo sapiens
ttggtgccaagccgaaccgagccggggcgccgggagctattgggacctgcggagtgtgacaagtttaaccaatgtgggacatgcaatgaattcaaagagt

SEQ ID NO: 399272 - DNA, 82 bp, Homo sapiens
agcctcgtggctgcgtcaccgccgcccccccagacaagatggacaccgcggaggaagacacgatgaggcgagtggtacgaca

SEQ ID NO: 399273 - DNA, 100 bp, Homo sapiens
aaagcagcgcccgtctgcttcgggcctctggaatttagcgctcgcccagctagccgcagctctcatgggaggttgaatggagcagctgaacttggctgac

SEQ ID NO: 399274 - DNA, 50 bp, Homo sapiens
ttttgatccgagaccttaattttgaagtccccagacagtcccggtgtgca

SEQ ID NO: 399275 - DNA, 101 bp, Homo sapiens
ccaaaggggacagcgagtcggaggaggacgaggacttggaagcagagcatcctggccagaacaagccaaggagccaagacgagagggacacacggacaaac

SEQ ID NO: 399276 - DNA, 100 bp, Homo sapiens
gctcgctgcagctctgggacactgccaaagctgcagggccactgcaagtctataaagaacacgctcaggaggaaccttttgaggatggctttgcaaatgg

SEQ ID NO: 399277 - DNA, 147 bp, Homo sapiens
gttgatgaatttgtgactcacaatctgtcttttgatgaaatcaacaaagcctttgaactgatgcattctggaaagagacatatctgaagagatggattaagaatgctttggattaaggattgtggagcacatttcaatcattttagg

SEQ ID NO: 399278 - DNA, 96 bp, Homo sapiens
gaagtctcagctcactttgaaaggctttaaaggagatagatgaagttggggacctattgcagctgaagtattcccgtcatcggttggtacctctac

SEQ ID NO: 399279 - DNA, 82 bp, Homo sapiens
gactacaaggtcgcctacgtgcagctgttacagaatgtctgaaggggacagtgtgggagaatccgtccatgggaaaccttcg

SEQ ID NO: 399280 - DNA, 98 bp, Homo sapiens
cgacctccgtgggccacctcatagccactgaggcggctcccagctgcgttggcgacatggccgacacccccagagatgccgggctcaagcaggcgcct

SEQ ID NO: 399281 - DNA, 82 bp, Homo sapiens
tgaaggggaagaggcccaccctggagtaaccctcactggagaatccagagtctgcagatgcctccaaggagtccgaaaccaa

SEQ ID NO: 399282 - DNA, 100 bp, Homo sapiens
catcacctgcagtcagtccagagctgcccaatggagacgagagatctggacttctgaacatctaccggaaaagataaaatgtgcaagcccttcagaacgc

SEQ ID NO: 399283 - DNA, 75 bp, Homo sapiens
ccagatggcagccagtcagtggtggagataggtgatcttcagctttgcaaactggatgaactagattgcttgatc

SEQ ID NO: 399284 - DNA, 90 bp, Homo sapiens
caaactctctgagattgaccctgctggttttgaggacttgccgaacctacaggaagtccatgcaggatatacgtactgtgggtcttgtgc

SEQ ID NO: 399285 - DNA, 76 bp, Homo sapiens
tggaagatgtaaagcaatatttcgagcagtttggcaagagatagaatctcactatgttgaccaggctggtcttgaa

SEQ ID NO: 399286 - DNA, 75 bp, Homo sapiens
cagaacttcaccacacttgaagctggaagttggtgaaccatctaaagaagagaaggctgtggccaagtatcttcg

SEQ ID NO: 399287 - DNA, 100 bp, Homo sapiens
tagggactcactggcggtgcgcgacctgggctggctccgggggtggcgggcgcagctgctgtgacagggctaccagggcatggtggacggaggctcaaac

SEQ ID NO: 399288 - DNA, 75 bp, Homo sapiens
gtacgccctcatggggaaaatctccccggtgactttcagctagcatatttggcagcttattgcttcgaaacccag

SEQ ID NO: 399289 - DNA, 100 bp, Homo sapiens
gacgtgtttggagggaaatgggaatgtacacgataattaaagagtaaagttgtgctcaacgtactgtaaaaccatgcctagatcttttggttaactggct

SEQ ID NO: 399290 - DNA, 110 bp, Homo sapiens
gcctcccaaagtgctgtgattacaggccacgacatcaacggtgccctggagccctccaacatagacaccagcatcctggaggagtacatcagcaaggaggatgcctccga

SEQ ID NO: 399291 - DNA, 99 bp, Homo sapiens
gtaacctggcctgggcctgaagtgagtgagaggcacatgaagatatgaggccccaggattcctggcgaggtcctcctccccttttccagcagcaaaggt

SEQ ID NO: 399292 - DNA, 100 bp, Homo sapiens
gctgtgtggaatcaagcaccttcattctgctggaattattcatcggggacagtatggaaattaccagcagtgaaaaagtacttacattccagtagccagt

SEQ ID NO: 399293 - DNA, 73 bp, Homo sapiens
gagtctttggctggctatgcagacatctttctggaaggaaaatcacctcggcagtgtttgaaggaaggatact

SEQ ID NO: 399294 - DNA, 75 bp, Homo sapiens
cgcggagccatggattgcactttcgaagaactgataaatttcaaacggaagagagtggcagcatttagaaagaat

SEQ ID NO: 399295 - DNA, 100 bp, Homo sapiens
gggggaccacaagatcctcatcgacaggtctttcactaccattcctacagtgattggcaagataccgtttctacctcactctccatgtaccatgccagtg

SEQ ID NO: 399296 - DNA, 80 bp, Homo sapiens
ccgctctatggggacgtgtttggaaccaatgctgctgaatttcaggagaaccggagccttaccatcaaacttcggaaacg

SEQ ID NO: 399297 - DNA, 90 bp, Homo sapiens
atccactgccgcggccgtgggcccgaccgcggggacccattttaccaaatgttgcaagaactctggagttcttatggtagtaaaatgccg

SEQ ID NO: 399298 - DNA, 98 bp, Homo sapiens
tagtggagcagatcatcacctccatgaagtgcatcatggggcaggatggcaccagccttggacctctttgtttttagacatgaattggccataatgag

SEQ ID NO: 399299 - DNA, 75 bp, Homo sapiens
accccccagcccacacaccaccaccccagttttgggtggggagaaggcaaagagcaatacttcaagtcagctgca

SEQ ID NO: 399300 - DNA, 100 bp, Homo sapiens
tgcacatggtagacaccgtgacatggcacaagatgcgaggacttgaactgccatgtcctctgaagaaggaaagctcttcgtgggagggctcaactttaac

SEQ ID NO: 399301 - DNA, 50 bp, Homo sapiens
gcccatacacctaccagatgcacgatattaataaggcagcggaaagaaga

SEQ ID NO: 399302 - DNA, 90 bp, Homo sapiens
cagaagccaaacaggaggaggaagtggagggtacatgtcccagagcaagcacacggaggcccgggagctcatgtactcgggagccctgct

SEQ ID NO: 399303 - DNA, 82 bp, Homo sapiens
cactgacgccgggaccgggaccgccgccgccgccgccaccatggtgggaggaggagctcgccaagcgcatgaaccttcagac

SEQ ID NO: 399304 - DNA, 83 bp, Homo sapiens
cccgagtccgcgggaagatggcggcgccgctcatccccctctcccagcaggtgaaatgacaatggatgctctgttggctcgat

SEQ ID NO: 399305 - DNA, 76 bp, Homo sapiens
ccagttccggcccgaggacaccgactaccagcagggagggacattgcttgggcctccagactctgtggttgatgtg

SEQ ID NO: 399306 - DNA, 75 bp, Homo sapiens
caaggctgaggcggcaaaggaatcgtctaagtctcaggtgaatgaactggtgcaggtagaaacgtacctccgcag

SEQ ID NO: 399307 - DNA, 90 bp, Homo sapiens
gtcccctgctagaagtgggggactcggcgggaattaagaaatcagtctcttgaaagcgaacaggacatgagggatagatgggattatgtg

SEQ ID NO: 399308 - DNA, 100 bp, Homo sapiens
gattccatgctttgatagtgtaaactcagcacgagccattttgcaggactcaggtacttctgccctccctttggtctccctgttcttctatgtggtgaca

SEQ ID NO: 399309 - DNA, 100 bp, Homo sapiens
gtacctggatctcatcaaaaaggacaccagcaagctgttcaatgaggaggaagcccagagctgcggttcgcaggcctgctaagcagccggcggccggaag

SEQ ID NO: 399310 - DNA, 98 bp, Homo sapiens
tttctcctaccccttgtcatgcagggtgtgagcagggctgagatgggcaccgcggatctggggccgtcctcagaaattgcttcccaagaagaaggtgc

SEQ ID NO: 399311 - DNA, 75 bp, Homo sapiens
cttgtggaaatgatttcctcaggactccagattatctacaacactgatgaggacactttcttcatgagcaacaaa

SEQ ID NO: 399312 - DNA, 100 bp, Homo sapiens
aaatagtgatgaagctgtaatcaataaaaaacttcccaaagaactcctgttacgatacttggcatatcgaaattttatgattgacacgtatcgtctaaac

SEQ ID NO: 399313 - DNA, 82 bp, Homo sapiens
cggggtgcgagcagcgcacttccggtactggctgtgatcgaacttctcaaccctcagagacttagatcttccacctcactcc

SEQ ID NO: 399314 - DNA, 92 bp, Homo sapiens
caagagtaacagcagcgccgtcccgtccgacagccaggcccgggagaaatgatatcatcaagttgaatcgaaaggaagggaagaagcagaat

SEQ ID NO: 399315 - DNA, 50 bp, Homo sapiens
gtggagccccagcaccaagtggcacaacttatacctgaggtgcaccggag

SEQ ID NO: 399316 - DNA, 90 bp, Homo sapiens
acatcctggaagctgggaaatggcagtggccagatccagctttggcagttcctcctggagctcctgtcggacagctccaactccagctgc

SEQ ID NO: 399317 - DNA, 101 bp, Homo sapiens
tacctcaatagcactggctaccggacaggtgctggagaatctggtaaaagcaccattgtgaagcagatgaggatcctgcatgttaatgggtttaatggaga

SEQ ID NO: 399318 - DNA, 127 bp, Homo sapiens
gcctggcagacagccaccaccaccctcaatgcctccaacctcatctaccccatctttgtcactgtattctggaggtcgaatggtcacatatgaacatctccgagaggttgtgtttggcaaaagtgaa

SEQ ID NO: 399319 - DNA, 82 bp, Homo sapiens
cggggtgtaataatgttaactgagccgatacggaagatgtgtgcattgtagagagattgttctccagcagcctagtggccat

SEQ ID NO: 399320 - DNA, 100 bp, Homo sapiens
ggatgttcatgggcagcaccatcgagccagaagcagtatttgtcctgacctcctgacagtgagtgagactgccaatgagccccctcaagatgaaggtaat

SEQ ID NO: 399321 - DNA, 101 bp, Homo sapiens
tccagtggaagaccatctacatctcccacaggaagtgtcacacagcagtcaagtatgtcccaaacgtctggtcgtcatgtcaaaacgggccagcttgcagc

SEQ ID NO: 399322 - DNA, 100 bp, Homo sapiens
ccaagaactttccagtatttgtctttctatgtttatgataagaatgttttacaaagagatctccgtatagccaatgttttcagttgcaccaagcttagcc

SEQ ID NO: 399323 - DNA, 100 bp, Homo sapiens
cggagaaggtgaaattctgtgtgctccctccggcgagagactttgtcagctcccgcacagtaacgatttccatttaaacagggttaatttggaagaatct

SEQ ID NO: 399324 - DNA, 75 bp, Homo sapiens
tgaagacgttccttgaggaggtttgaaaaagttcggtgatgctgtgaaaggtaatttggtggtaggcaccttatc

SEQ ID NO: 399325 - DNA, 100 bp, Homo sapiens
ccacgacctatcctaggcgccatgaaaaggcgacggcggattgacagaagtatgattggagagcccacaaactttgtgcatacagctcatgttggatcag

SEQ ID NO: 399326 - DNA, 100 bp, Homo sapiens
cccaaaccagaagtctcacgcaaaacacctggattcttatctagctgactgctacgatgccattgctgtttttctctgtatccacattgttctccggttc

SEQ ID NO: 399327 - DNA, 95 bp, Homo sapiens
ctgggatatatttttgagaccaaattaatcagcacattgatttataaggatgaaaactttcggaagagaaagttgcctgtggtaagttcagttgt

SEQ ID NO: 399328 - DNA, 100 bp, Homo sapiens
aactgcttgttgaggctcgagttcagcctaatccatcaaaacatgatgctggatgagtactttgaggagcagatgaaggagatcatccgaatgtgttccc

SEQ ID NO: 399329 - DNA, 90 bp, Homo sapiens
ccgccaagctcctggccctggccctgatcatcctgctgggcttcgtccagatcgggaaggcaaattgtggctactaatttgccccctgaa

SEQ ID NO: 399330 - DNA, 82 bp, Homo sapiens
gaaacatgctagaattacctggaacttcatcatcatctacttcacaggaattgccatttgtgcgagtactccagaaggaact

SEQ ID NO: 399331 - DNA, 100 bp, Homo sapiens
cagagtatggctgcagaggatccatctgtcttagcaaggctgtcatcacattcctgcgatgataacatcctatccaaatactaccctggccacgcagggg

SEQ ID NO: 399332 - DNA, 100 bp, Homo sapiens
agaaggagctggcggacatcactttagaccctccacctaattgcaggtaaatgagctggatggtatcccgttgatcctggacaactgcaacatcagtgac

SEQ ID NO: 399333 - DNA, 75 bp, Homo sapiens
atctatgccatgcactgggggaccgactcaaggtggctttggctgaagcctaattccacagctccttgttttttg

SEQ ID NO: 399334 - DNA, 75 bp, Homo sapiens
aacctacagcagcggggagtcctacgataagaaaatcttggaactgataatgggagagaagcaattgaaagtggg

SEQ ID NO: 399335 - DNA, 83 bp, Homo sapiens
gatgcttctgtcagtaagaaagcagctgatagcacatcacagtggactaaagaggatggacatagaacttccacctctgctgt

SEQ ID NO: 399336 - DNA, 100 bp, Homo sapiens
cgatctcttgagaaaggaaagacttctgtgctcccgagaacttcctatcaggctttattttaaaggcaagtgagactgcttcaaataaaacaacttcaag

SEQ ID NO: 399337 - DNA, 82 bp, Homo sapiens
gatccagcaaggtcggcagagcaaggggcttacgcagaaggacctggccacggtgcgagacaagaagcttctcaatgacctg

SEQ ID NO: 399338 - DNA, 100 bp, Homo sapiens
tggattttaagaagaataaattaaccttggtggttgtagaagatgatgatcaggaaggaaaatcacctcggcagtgtttgaaggaaggatactgcaactc

SEQ ID NO: 399339 - DNA, 98 bp, Homo sapiens
ggcgacccggtgtgtggcgcgcccagagccccgcgtttcagccctagggaagattacacagatgaatcttgcactttcaagatatcattgcgaaattt

SEQ ID NO: 399340 - DNA, 75 bp, Homo sapiens
cgtctctctgctgcggcgcggggaccgctgtgctctcgttccagagtcacggttcgaccgagattccggggagag

SEQ ID NO: 399341 - DNA, 75 bp, Homo sapiens
atttacctgtgagatgtttcatcccaacagtgatgcagaagatggggaagaatatgatgacccttttgctgggcc

SEQ ID NO: 399342 - DNA, 75 bp, Homo sapiens
gaatacatgatttaaacaagagatttccacagaagccatctccccagaagtctgagcctctgctaccttctgctt

SEQ ID NO: 399343 - DNA, 75 bp, Homo sapiens
gtccagagctgaggactgcctgtttgcaggtgaagctttgttctaagaatatttgtttcatctagtttatgagtc

SEQ ID NO: 399344 - DNA, 83 bp, Homo sapiens
gctccgtggagatcgtcccgcgcctgccggcgtccgagctgggccacagcctgaacgagaacgtcctcaagcctgcgcaggag

SEQ ID NO: 399345 - DNA, 147 bp, Homo sapiens
ttggccctctttaaaaagaaataataaaatgggagagaatgaagcaagtttacctaacacgtctttgcaagtgacccaaatcaaccagtccctcaagacacgaaattcattcataccaaacccaaccgttttgaagaagtagcatgg

SEQ ID NO: 399346 - DNA, 98 bp, Homo sapiens
gggagctcatcttcgtggggcgtgaggagtgtgagctcatgctacagatgttcagcgatgcaggtagcggggacgatgccttggatggagacgatgac

SEQ ID NO: 399347 - DNA, 82 bp, Homo sapiens
cctgtctgtgagcaaacaacccatgacgctttagcgtcacctccctcactgggcagcatgggggagaagtcagagaactgtg

SEQ ID NO: 399348 - DNA, 101 bp, Homo sapiens
gacttcctcactagtctggtggccatcagcaagcccaggtctatggtcaaaagaaggaggagcggttaaactgtgggatcaggaactgaggcggtgccgtg

SEQ ID NO: 399349 - DNA, 83 bp, Homo sapiens
cgaggcggccagttgggtaccgggaggggcgaaggcgggcggcagaggcgatcagtcaccaggagactaaagtccatcaaaaa

SEQ ID NO: 399350 - DNA, 112 bp, Homo sapiens
gcagccggtaacgttgctggaccgggacgcacgctcagctgaggaggacccccaaaggaacaagatcactcaaggtgaaggataatctactaataccagcactttgaatgaa

SEQ ID NO: 399351 - DNA, 50 bp, Homo sapiens
gcactggccttatgcctttgaaactctccatccaaccgtctctcaacgcc

SEQ ID NO: 399352 - DNA, 87 bp, Homo sapiens
cgagaacagctattccacgagaggatccgcgagtgtattacaatgcagatcttcgtgaagactctgactggtaagaccatcaccctc

SEQ ID NO: 399353 - DNA, 50 bp, Homo sapiens
attagatctgggtgactgtgatctgatttatgtgatcagtttggctgaac

SEQ ID NO: 399354 - DNA, 100 bp, Homo sapiens
ataaagtcttggttgctgccaacaagagtggagactgctgcacggactctggaaccatgaacatatttgatcgaaagatcaactttgatgcgcttttaaa

SEQ ID NO: 399355 - DNA, 97 bp, Homo sapiens
taacggaggacaattcaccatagttttctttaagattttatttggagagaagcaagcatctttgcctctttggagtaggaaattcagacttgaaaaa

SEQ ID NO: 399356 - DNA, 98 bp, Homo sapiens
ccagccacccccagctcttcagcattgtccgccaggcctgtgtccggagcctgagctgtgaggcctcagcaactgttgccattcccaaagaacaccat

SEQ ID NO: 399357 - DNA, 83 bp, Homo sapiens
ccgcaacgccgagcgcaccgacatctgcctgctcaaagataacgaaggaggcccaacttcattcaataaggagcctgacggat

SEQ ID NO: 399358 - DNA, 90 bp, Homo sapiens
cgtctcctgtggctgggacaagctggtcaagctggcaaaaactcaggggaatgtgtttgccactgatgccatcctggccacgctgatgag

SEQ ID NO: 399359 - DNA, 87 bp, Homo sapiens
gcgctcaggaatcatgggctatcaaagaggaagctcaccagtgtgggaaggggcttctcatccactgccaggctggggtgtcccgct

SEQ ID NO: 399360 - DNA, 75 bp, Homo sapiens
tcgatatatacagagacagtaggatgagggaattggggcttggagtgcaagcattgggaagaatttcccaggaag

SEQ ID NO: 399361 - DNA, 100 bp, Homo sapiens
ctgtattggcctgccaggacagagtgctcagagttttacagagtctgccccaaattctccaagaattggaagcccattgagcccaaagaaaaacagtgaa

SEQ ID NO: 399362 - DNA, 100 bp, Homo sapiens
gggaagatggcggctgggttcaagacgtggtgggtcctctggtgcgaaattccggatttccttgggtcttccggtaggagctgtaatcaattgtgctgac

SEQ ID NO: 399363 - DNA, 75 bp, Homo sapiens
taccgcttatgccaggccgatcccgacctggactcagacaaggtgaaaccagcccagagaagttacgggatttgc

SEQ ID NO: 399364 - DNA, 90 bp, Homo sapiens
aagatgatgtggaacatctcgctggcaatcctttggtccagcaaggtggacagccactcatcctgacccagaatccagccccaggtctgg

SEQ ID NO: 399365 - DNA, 100 bp, Homo sapiens
gaatgtgaaagaaaccacagagtacttaaaaacatcatggatcaatctcaaacaaagctctgcttatgataatgtcaacaaagttcgagtagctatcaag

SEQ ID NO: 399366 - DNA, 100 bp, Homo sapiens
gtgacgacacccctgatggggcaggaggggcctttgcagctcagatcatggaagggaagtggttgctgtgtatgttactggtgcttggaactgctattgt

SEQ ID NO: 399367 - DNA, 100 bp, Homo sapiens
gccggggggcactgcccgcccgggctctggggaacgcccttttgcttgtgactggcagggctgcgacaagaagttcgcccgctccgacgagctggcccgc

SEQ ID NO: 399368 - DNA, 90 bp, Homo sapiens
gcggctcagttgtccatgaccctgaaggtccaggagtacccgaccctcaagctccagtggctgttggataattatgaaacagcggaaggt

SEQ ID NO: 399369 - DNA, 48 bp, Homo sapiens
gacagatcgctgtcaaaaccctaggtgtcatggagaaactccagctgg

SEQ ID NO: 399370 - DNA, 76 bp, Homo sapiens
cgacctgctaacagaactggaccttttcgatttacactgactgggccaaccactacctagcaaaatcaggccacaa

SEQ ID NO: 399371 - DNA, 100 bp, Homo sapiens
gcttgtgggaccgtggtgaccaggtgactccgtgcgtgggccaaggagagacagcgtctggagaccatcctcagtctctgtgctgaatacacaaagcctg

SEQ ID NO: 399372 - DNA, 99 bp, Homo sapiens
atttgaagtggtgtctacacttataaaatctctagtgatccctgaaaagttccagcatattttgcgagtactcaacaccaacatcgatgggcggcggaa

SEQ ID NO: 399373 - DNA, 100 bp, Homo sapiens
tcaacgcccgcgaggtggcccccaggctggcctttgccaccatgttcaacagctcggagcagtcccagaaggaaatgcctccacggctgtgtacgcctgt

SEQ ID NO: 399374 - DNA, 80 bp, Homo sapiens
aatatgccaaggaaaaactggagagcttcatcaaaaatagtgatagctttgataagtcagacatatttccaacatttggg

SEQ ID NO: 399375 - DNA, 115 bp, Homo sapiens
agcagtccagaaagcggcttatcgaacagagccgggagttcaagaagaacactccagagacgaagttatacggaagcgtctcctcattgatggagatggtgctggagatgatcgg

SEQ ID NO: 399376 - DNA, 82 bp, Homo sapiens
agtccccgtacgcctacagtaacgatagcagaccccacgttagctgaaatgggaaaaaacttgaaggaggcagtgaagatgc

SEQ ID NO: 399377 - DNA, 100 bp, Homo sapiens
gttccacaagaaggactgcggggacctggtggccatcggtgccagcgagatttcagattcctgtaaacctctaaagaaaaggagtcgcgcctcaactgat

SEQ ID NO: 399378 - DNA, 96 bp, Homo sapiens
cttcaggactaaatagtattaagacacgatgaggcgagtggtacgacagagcaagtttcggcatgtatttgggcaagcggtgaaaaatgaccagtg

SEQ ID NO: 399379 - DNA, 100 bp, Homo sapiens
taattaaagagtaaagttgtgctcaacgagcagcggaaagagctcagtgctagaaagcctggtggggagggacctgcttcccagaggtactggaattgtc

SEQ ID NO: 399380 - DNA, 100 bp, Homo sapiens
atgtcctgttgtggggcttttacagcctttggttcgatcctttggtacagaagacagaccgacagatcgtccaataccacctcgagatgaagtctttgaa

SEQ ID NO: 399381 - DNA, 100 bp, Homo sapiens
tgcaactcacagctgaaaacagccctgtcacacctgttggagcccagaaaacagcactgcgaatttcacagagcagctgaagactttaagtgacaagtca

SEQ ID NO: 399382 - DNA, 51 bp, Homo sapiens
ggttcccgggattggaccgacgcagccatgttttccaagagataacttcac

SEQ ID NO: 399383 - DNA, 75 bp, Homo sapiens
cttccacgagcacgtgcttggagccctgtgcagggtgtccgcaatgttgccagtgtctgtctgcagattggctac

SEQ ID NO: 399384 - DNA, 74 bp, Homo sapiens
cagggatggagccctctggcggaagccatcagctatggagataggcagatgaggatgttcacggaacgccagcc

SEQ ID NO: 399385 - DNA, 100 bp, Homo sapiens
aagaggattggaggtgtcagtgttaaaggaacctctacaacgaaggtgaagccacggaagataaggaatgtatcctgtcaggtataatgtcagtgaatgg

SEQ ID NO: 399386 - DNA, 99 bp, Homo sapiens
ccgagagcgtgaccgagagcgcgaatatcgtcatcgttagaaggtactactgagcgagtgtgcttgatccagggaacggttgaagcactgaatgcagtt

SEQ ID NO: 399387 - DNA, 88 bp, Homo sapiens
cttatggcggcgctggagagggggcgctgagctgttgggacaaagaaacagccttggtataatagcacgttagcatcaagacgaaaac

SEQ ID NO: 399388 - DNA, 75 bp, Homo sapiens
gacaaaactcacacatgcccaccgtgcccaggatgtggagtcagagaacgtcaacgtggtgaagcggctgttcaa

SEQ ID NO: 399389 - DNA, 98 bp, Homo sapiens
agaccattcagatgggatctttccggatcaatccagatggcagccagtcagtggtggaggttaacttggataagctgaaggaaagagctcaaagattt

SEQ ID NO: 399390 - DNA, 49 bp, Homo sapiens
ttgtcacctggctcgatggcattaagcagcctggcatcctcgctacaac

SEQ ID NO: 399391 - DNA, 89 bp, Homo sapiens
ctcttccctggctggacttgcggagtccccgccgaagaacccgagagttgtcaggggagtgtccattggcagcacctgcctcctgagtg

SEQ ID NO: 399392 - DNA, 75 bp, Homo sapiens
ctgagtgtcttgtcatgctagcactgcattaagtgatgcatacagacaccattcgcttttcacccaagatgattt

SEQ ID NO: 399393 - DNA, 98 bp, Homo sapiens
ggggattctcgacctgctaacagaactggaccttttcgctggacccacaaaccgtggagaccaagaactggcacacggacgtgattgagatgaacggg

SEQ ID NO: 399394 - DNA, 100 bp, Homo sapiens
cgcaaactttgagaagaacgtgagccaagctatccacaagtacaatgcttacagttacagacacaactgaggccccctttcaaggggatcagaggtccct

SEQ ID NO: 399395 - DNA, 100 bp, Homo sapiens
agtacaagggctatctggtatctgtagatggctacatgaacatgcagtggtatactgatgaagaccatggaatagctagcagcacagcacaccaacatat

SEQ ID NO: 399396 - DNA, 75 bp, Homo sapiens
ttcacagcaagagcatttcgtgggaatcctgctgctgtttgcctcctagaaaatagcaggttgttgccctggatg

SEQ ID NO: 399397 - DNA, 100 bp, Homo sapiens
cttcatgctgggctcgctgctgcggacgttcaagcaggttatatttcacactatgtgctgactgtatctacagaagatatttaaaaaaaaaaaagataaa

SEQ ID NO: 399398 - DNA, 76 bp, Homo sapiens
ggattccagactcgtgggggaaaggctgttacagatttatggtaatggaaagactaggaatagatttacagaagat

SEQ ID NO: 399399 - DNA, 100 bp, Homo sapiens
caccttcctggacaccatcgccacccgttttgacggaacactacccggcagtgtcacctgctcctggatgtcttcaactccaccgagcatgagctgaccg

SEQ ID NO: 399400 - DNA, 100 bp, Homo sapiens
ttaactcagtggtcatcgctgtgaagctgcaggtgttgccacatctgcaaacttcctgggagagtaatggggattcgagtgcttcgattatctttggtgg

SEQ ID NO: 399401 - DNA, 100 bp, Homo sapiens
caccattgctggtgaaatagaatcaaaggctgcaaacctcaataatttggtagtggaagcctatcaggctatggaaagggcaaatggaatggagctggat

SEQ ID NO: 399402 - DNA, 73 bp, Homo sapiens
agaaatgaaccagtattcttaaattgatttcaagtttgaacaagggcttttgttgtaacaccctgactttaaa

SEQ ID NO: 399403 - DNA, 50 bp, Homo sapiens
ccgccgacccgccgagcaaaatgtctgacggttccatcctggccatcgcc

SEQ ID NO: 399404 - DNA, 80 bp, Homo sapiens
aaagaaaactaatttatcagactttgagctggaatcaccaggagactaaagtccatcaaaaacatccagaaaattaccaa

SEQ ID NO: 399405 - DNA, 50 bp, Homo sapiens
ggaggaggaagaagaaggtgatgaggaggagtatgatgaagatgctcagg

SEQ ID NO: 399406 - DNA, 100 bp, Homo sapiens
ggcaccgggatcgtgaccgagaccgtgaccgagagcgtgaccgagagcgcgaatatcgtcatcgttagaaggccttctttcaaggcaaattgaaaatcac

SEQ ID NO: 399407 - DNA, 75 bp, Homo sapiens
ggcctcgcgccggctatggccgtgccctggggctgagccctcaggttggcagcctcgatggttccttctctgtgg

SEQ ID NO: 399408 - DNA, 51 bp, Homo sapiens
agtggacgaggtgttggcggaagtgagaaatgttttagatgaagataatga

SEQ ID NO: 399409 - DNA, 75 bp, Homo sapiens
ggtgattttcctgcatggattgggagatactggcacaagtgcatacaccttgatagcaccaaatataaaccggag

SEQ ID NO: 399410 - DNA, 82 bp, Homo sapiens
agggaattcagcctcagtgatgtccatgagaattaaacaaccaccatgtcgagcaaaaaggcaaagaccaagaccaccaaga

SEQ ID NO: 399411 - DNA, 75 bp, Homo sapiens
cggctctctacgtccctgcggagcagccgctgcagaaccttggcctgaaaatgctacattatatcagcaattgaa

SEQ ID NO: 399412 - DNA, 96 bp, Homo sapiens
gattataatcttcgccgaggggctgcggccatgcgggaggaggtccgccagctcatgtgcctcctaactcgaaaccagcctggacaccaagtctgt

SEQ ID NO: 399413 - DNA, 82 bp, Homo sapiens
ggttattcgagtgaccgagaccgcggccgggaccgagggtctcaccaacggctttgggggtgcgaggagcgagcaggagccg

SEQ ID NO: 399414 - DNA, 100 bp, Homo sapiens
tattccaccttcctttataacactacagattaaagactttctgaatggaccagcatccggaggggtttccaggtatataagcaggtgtgcgcctcctgcc

SEQ ID NO: 399415 - DNA, 75 bp, Homo sapiens
gacagaggatgaggcttacctgcggcgaattaagactggactgggcagcctttggggtcatgacccttccctcca

SEQ ID NO: 399416 - DNA, 100 bp, Homo sapiens
agaaacacatggagaagtctgcccagcgaactggacaccggattctcctacgtggtcgtttttcaatgagctagagaagttaccaagtctacgggctttg

SEQ ID NO: 399417 - DNA, 50 bp, Homo sapiens
ctcatcaacagttgtggaatatgattcgccatgaagtcagcgtaaataat

SEQ ID NO: 399418 - DNA, 83 bp, Homo sapiens
cagggacccggtgacagcgtgagaggttcgcagagtgtgaacccacatccctgcccccagggccacctgcaggacgccgacac

SEQ ID NO: 399419 - DNA, 100 bp, Homo sapiens
gtaagacgttcatcgccgtgttatccttgagtaaaggttcatctgcgttgctctaaatgggactgtttcattattttgatggctgaagaatatttcctag

SEQ ID NO: 399420 - DNA, 75 bp, Homo sapiens
ggacgagccactgaaggagtcccgcaggaaggaggccttctttcctcatcaccgggggcatcgtggccacagctg

SEQ ID NO: 399421 - DNA, 75 bp, Homo sapiens
gaggccccaaatgaaaaactcttcttcgtggacactggctccaaggaaaaagctggactgggcagcctttggggt

SEQ ID NO: 399422 - DNA, 75 bp, Homo sapiens
ccggcatgctggagaagctggagttcgaggacgaagattctgtcatgacctgcctggcgatcattaccgtgattt

SEQ ID NO: 399423 - DNA, 90 bp, Homo sapiens
agccggtgtggtggaggctgctgtgtcggaggagtgtgagaagtgtaacctgcatttccgtcacaaaagccagctgcgacttcacttgcg

SEQ ID NO: 399424 - DNA, 51 bp, Homo sapiens
caatgtcacaaaagcggatgttgaaaagtctcattctgtcgcccaggctgg

SEQ ID NO: 399425 - DNA, 74 bp, Homo sapiens
gtgtgagcactggccagagtgaccaggctgaccagcaccagccctgatccaggcgcttgaagaggctcagaaag

SEQ ID NO: 399426 - DNA, 100 bp, Homo sapiens
ccccctcccctggcagtgtgacggctgggcgacttgcgaggatgagagcgacgaagccaactgtccagattaacgtgacagtgtcaggtggacccacagc

SEQ ID NO: 399427 - DNA, 83 bp, Homo sapiens
agcgcaggagccgcgcccggacccaggatgtgaagttcatttccaatccgccctccatggtggcagcggggagcgtggtggcc

SEQ ID NO: 399428 - DNA, 82 bp, Homo sapiens
ggcgagcgcgagcggcgcgagaaaatctgagtgggacatacttttgaaggatgtgcaatgttcaatcataagtgtgacaaaa

SEQ ID NO: 399429 - DNA, 90 bp, Homo sapiens
cctcggcctccggcgcagcccggaaatgtccggcaagatcgagaaagcaggaaaaccagcattggaatcagctgattcaggatgctcaga

SEQ ID NO: 399430 - DNA, 98 bp, Homo sapiens
gcattccagaatatctcagatgagcagatgccaacgtccggcggtacctccagctgacacagtcagaactcagcagctaccatagaaaagagaagcag

SEQ ID NO: 399431 - DNA, 98 bp, Homo sapiens
ggagtgtgggaagcccatcggctgtgactgcaagcctcccctggtgaagacacaaactgtcaccatctcagataatgccaatgctgtgaaaagtgaaa

SEQ ID NO: 399432 - DNA, 82 bp, Homo sapiens
ctcctgcctgcgcgcggccaagccatgctcggccccaggtatcgagaaccttccctgcgaacttcagaggaacttccagctg

SEQ ID NO: 399433 - DNA, 89 bp, Homo sapiens
ccagtcgcctccaggccaagagggatccttcacccgtgtctggtgctacaaagtacacagataaagacaatggagggatgcttgtatgg

SEQ ID NO: 399434 - DNA, 78 bp, Homo sapiens
aaccagcctgtcgtgatcgacaacgccggctgtgaacgtagttcctgagagatagcaaacatgcccaacagtgagccc

SEQ ID NO: 399435 - DNA, 83 bp, Homo sapiens
gatgttggatatttgcttggaaaaacgtgtgggtacgaccttggatctggtgaagaatcatctgatgtatgctgtgagagagg

SEQ ID NO: 399436 - DNA, 74 bp, Homo sapiens
gttcaagagttggagagagtgccccacaacacccctgtggagtaccaagttcgatccatagcaagtcatgttcg

SEQ ID NO: 399437 - DNA, 100 bp, Homo sapiens
agcaaagcgcccagcctgccgcctcgctgtccctgcggcttctggggatttcagagacaactgtctgaaccctgccaccccttccctcctcagccaggag

SEQ ID NO: 399438 - DNA, 101 bp, Homo sapiens
cccaagcagtggcgaagggaatcgcaaggctcttccctgaccattttctactgtccctgcgcgagatatttggagttcttacaacatggcagacattgaca

SEQ ID NO: 399439 - DNA, 75 bp, Homo sapiens
ctcgactcttggcgccaccgcctcatgcactgtatgccatggacaatattaccaggcagaaccaattctacgata

SEQ ID NO: 399440 - DNA, 87 bp, Homo sapiens
gttgacctgaccatggacgacattcgaaggatggaagaagagacgaagagacagctggatgaaggcttgctctcaattttgcgcaag

SEQ ID NO: 399441 - DNA, 101 bp, Homo sapiens
tgcgctgtgacgagcgtggcagcatggggacctccggggaggcctgccgctgtaaggtgtgggcccatcgctggatggatctgtcagaacacggctttggg

SEQ ID NO: 399442 - DNA, 83 bp, Homo sapiens
gaatatggaagatacagcaatgagttatatgagttacaagttttaaaatcaaagatgggaaaatcggagaaaattgcccttcc

SEQ ID NO: 399443 - DNA, 100 bp, Homo sapiens
ttgcagtgtatgaacccagggcactgtggggacagggcgacgtgtgtccaggcgtttgccggaggaagagcaagcaggccctgagggactataagaaggt

SEQ ID NO: 399444 - DNA, 90 bp, Homo sapiens
cccgaaagccgctgggaaaaggacccagacatggagctgcgggaagaagcctggtctccggggccgctggattctgaggaccagcagatg

SEQ ID NO: 399445 - DNA, 82 bp, Homo sapiens
tcggcagtccacccaccgccgccgcctcccaggtctatcagccacagtctctgcaagtttccaagagcagcagaaaatgaac

SEQ ID NO: 399446 - DNA, 100 bp, Homo sapiens
tgtaaactcagcacgagccattttgcaggttggacaccgaggaacagtaagagattatccagactttagcccatcagtggatgctgaagctattcagaaa

SEQ ID NO: 399447 - DNA, 98 bp, Homo sapiens
ttacattaggaagtgttcatggcttgcattgatgacaatgttgatatggtgaagtttctggtagaaaatggagcaaatattaatcaacctgataatga

SEQ ID NO: 399448 - DNA, 93 bp, Homo sapiens
ctggctcagccgcaagtacccgtccatcatagtcaactgcgtggaagagaaggactttgtgttttatgccccacgtctgagaatcaacaagcg

SEQ ID NO: 399449 - DNA, 99 bp, Homo sapiens
gccggaaggaacagacccctgtagcgggtcagagccctagagaataagagaagcttgctgctggtgagggggtatggccaggattcctggagtcggaag

SEQ ID NO: 399450 - DNA, 74 bp, Homo sapiens
aaatgcaagaagactgatggagcaggcttgcaatattaaagtcaaaatgcagatcttcgtgaaaacccttaccg

SEQ ID NO: 399451 - DNA, 48 bp, Homo sapiens
aatgggaagaggcccagtccagagagcctccgaaagccgccaggactc

SEQ ID NO: 399452 - DNA, 99 bp, Homo sapiens
ctggggagcagttgggaatcaggtctggaatactcctaaccaagaagttgcccagtgccctgtactctgtggggatgacggcagtgggcctggccatcc

SEQ ID NO: 399453 - DNA, 100 bp, Homo sapiens
gatcgggttctcctaggaagtttcagacagaaggtggagcacagacagacggccagcagtcacagacacaaagtagtgaaaattcagagagtaaatctac

SEQ ID NO: 399454 - DNA, 100 bp, Homo sapiens
ccttgatgttcctgacccttttgtgcctgaccctactggggagtggttttcagagacatttcagaaagtgaaggagaaactcaagattgactcatgagga

SEQ ID NO: 399455 - DNA, 100 bp, Homo sapiens
aggcgaacgcttcgctggccatttaggagctctgctcaaagccagacgatgtctttggtggacttgggaaagaggttgctagaagcagcaagaaaaggcc

SEQ ID NO: 399456 - DNA, 90 bp, Homo sapiens
acatcccaaagagaaagattatttctccacgatctataaaagatggtggtgttcccactgatgaagagcaggcgactgggttggagaggg

SEQ ID NO: 399457 - DNA, 100 bp, Homo sapiens
atttgccaagcaagccatgttttcaaggttgatccaaagctggtcatggagcaggccgaccgtgagagcagcagagggaagaacacctttctctaccagc

SEQ ID NO: 399458 - DNA, 74 bp, Homo sapiens
cggagaagaagctgcggccgcacctggccaagcaagacactaagggcgactaccagaaagcgctgctgtacctg

SEQ ID NO: 399459 - DNA, 82 bp, Homo sapiens
agctgagtggttgtgtggtcgcgtctcggaaaccggtagcgcttgcagcatggtgctggggagtcagggaagagcaccatcg

SEQ ID NO: 399460 - DNA, 96 bp, Homo sapiens
tgtcattatggaactacttatgaggatttgtacacacagatatgacgaaagacttgaaagaagaacatttaaagaaaaatattcctcttgggaggt

SEQ ID NO: 399461 - DNA, 100 bp, Homo sapiens
cccctgataaaggatacgttggtcccccccgcctccagccagcctgtgcagacttgctgcctgctgtgtcaccgggaacgcaaaggctgggaagaaggcc

SEQ ID NO: 399462 - DNA, 100 bp, Homo sapiens
aagtcaatgttccgggaagttcttccaaagcaagagaaaaaagagtgccggcgggaccaccgcccaccgtgtgctcaggaggcgccccgcaacatggtgc

SEQ ID NO: 399463 - DNA, 49 bp, Homo sapiens
caagagggatgccagagccttcttgcccaccagaagtatgtccgacaag

SEQ ID NO: 399464 - DNA, 82 bp, Homo sapiens
tgcagatcgggagcgcaaggtcgccctcaaggccatgatcaaaacctattactataacaagcgcattctgcacaagaccaag

SEQ ID NO: 399465 - DNA, 50 bp, Homo sapiens
cggcgcccggatgggcagctgaggttggtactaagaagtgcctttcctga

SEQ ID NO: 399466 - DNA, 87 bp, Homo sapiens
caaactggaacaagcccaaaatgaactgagtgcctggaagtttacgcctgatagatgaaacgactacaaagtgccatgacagaaggt

SEQ ID NO: 399467 - DNA, 90 bp, Homo sapiens
cccgctatcagcggccagcgcgggcgcggccggagaccgtggggcccccggttgccgccccctcggatgtggacgagtgccaccgcgtgc

SEQ ID NO: 399468 - DNA, 100 bp, Homo sapiens
cggttccccggcccacagtgggggtgtgcaaacccgagagaactggaaaggccatcattctcactcgagaagccacaggccacttccaggagtccgaacc

SEQ ID NO: 399469 - DNA, 83 bp, Homo sapiens
cggcggcggtggcggcttggacgactcggagagccggggtcgggccccggctcagtggtcccaggcagctcgggtgtcggaac

SEQ ID NO: 399470 - DNA, 75 bp, Homo sapiens
agaaaaagaggctcttcctcctcctcccgcgacggccacatgtgaccaacgtggctgttgctggaatccccaggg

SEQ ID NO: 399471 - DNA, 74 bp, Homo sapiens
gaaggtactcgcagcacttggagcgcagaaccggccgcgcccggaagctcttcgtgggcggtcttgactggagc

SEQ ID NO: 399472 - DNA, 100 bp, Homo sapiens
ctctcaagaagtgtgtaccacctctttttccacctccccaccatcccaggccctgtttgtcttctgcggcctcctcacgtgctgctactgctgctgctgt

SEQ ID NO: 399473 - DNA, 82 bp, Homo sapiens
ggagggccagcacttctgggagatcaagatgacctctcccgtctacggcaccgacatgaaaaccagtctatccaagaccagg

SEQ ID NO: 399474 - DNA, 75 bp, Homo sapiens
taagcgcagaaagcaggcgaacccgcggcgcaataacgcatttaaatcaaacggtattgagatggattgggttat

SEQ ID NO: 399475 - DNA, 49 bp, Homo sapiens
cggaaatgtgtcatcgaaagccagaccaagatcactccatggatgaaat

SEQ ID NO: 399476 - DNA, 90 bp, Homo sapiens
aagaggcaggccctgaggttgctcctcccggggcccttcccgggcaaggaggaacagcacagcatgctgggctctggatttaaagctgag

SEQ ID NO: 399477 - DNA, 90 bp, Homo sapiens
cggtcggtgacagcctcaagggcttcagcaccgcgcccatggcagagccagacctctctcagcaaacctgctgggcgacagcggactcag

SEQ ID NO: 399478 - DNA, 100 bp, Homo sapiens
gcttttagctgaactaaggagaaagtcctacaacagtttggcgtgcaacatggggcttgagaaaggtacaagccagctgccatgttgtgagcacatacca

SEQ ID NO: 399479 - DNA, 100 bp, Homo sapiens
gagtccaacactatgctggtttgaggcactggtgaggtggattgatgatgaatcttctggcacacctggagcaactccagaacacagtcgtgaggataat

SEQ ID NO: 399480 - DNA, 100 bp, Homo sapiens
gcggtggctcccaagaagtccgagacacgcggtgaggcggcgacgggctccggccacccacacagaatatgcctatgggtcctggagggatgaatcagag

SEQ ID NO: 399481 - DNA, 75 bp, Homo sapiens
ccgctgcctcttcggccatggaagctgccggcagccctgcggctacggagacagaaactgcgtggtagcggtgtt

SEQ ID NO: 399482 - DNA, 93 bp, Homo sapiens
cgaattcagaaggatatcgacgtcgtgatccagaagtccagagctgaggactgcctgtttgcagggagtgcatccgccccaacccttttcccc

SEQ ID NO: 399483 - DNA, 50 bp, Homo sapiens
cagcaatatctctgggctttcacaggttgctgctgactcagccattctag

SEQ ID NO: 399484 - DNA, 100 bp, Homo sapiens
aaaggagactaccagaaggcttatgaggatggctgcaagactgtcgacctaaagcctgactggggcaagttatcaggaactgttgccgttattacatcag

SEQ ID NO: 399485 - DNA, 75 bp, Homo sapiens
cgatgtcagctcagtgctgtgcgggccagcttcaaggttactgactttttatgatgtttggtggctatgagacta

SEQ ID NO: 399486 - DNA, 74 bp, Homo sapiens
acctcatcccctggatgggggaccacaagatcctcatcgacaggcgtccgagctgggccacagcctgaacgaga

SEQ ID NO: 399487 - DNA, 98 bp, Homo sapiens
atcttgctggaagtgaaagaactaaccggaccagagcagaagggaacagattacgtgaagctggtacccggaaattaaagaggagctggaggagctgg

SEQ ID NO: 399488 - DNA, 90 bp, Homo sapiens
gcctcgtgccgttacggccatcacggcggccgcagtggcgtcctggagccctcctcaggtgtttcaggcctcacctgaagatcatgaaaa

SEQ ID NO: 399489 - DNA, 74 bp, Homo sapiens
ggcatcagggaggctttcagccggagaagcgagtttcagctgtatttaaaagacccaactcagcccatcttaga

SEQ ID NO: 399490 - DNA, 100 bp, Homo sapiens
ggaccgtcccgcgcggggcacgatgttgaacatgtggaaggtgcgcgagctggtggacaaagcgtaacttgggtttttactcctgtaacaactgaaataa

SEQ ID NO: 399491 - DNA, 87 bp, Homo sapiens
aagatgtctgctgatgatggcatccgaaatctatacttggattttggtggtcccgagggagaactgtcgtcattgaattttgagaag

SEQ ID NO: 399492 - DNA, 75 bp, Homo sapiens
ggaggaggaaaagaggatgctggaggcacagctggagcggcgagctctgcagagctacatggaccccatgaacga

SEQ ID NO: 399493 - DNA, 98 bp, Homo sapiens
gtggcagtggaaaatgcgctcgggctggaccagcagtcttctcacaagactttcaggattaagcgattcctggccaagaaacaaaagcaaaatcgtcc

SEQ ID NO: 399494 - DNA, 100 bp, Homo sapiens
tgaagatcctttagaggcagagactcagcacaagtttgaaatgtcaggtttacatccccaccagacaccagctcctctgcccaatccaggcctctatccc

SEQ ID NO: 399495 - DNA, 75 bp, Homo sapiens
gagagggtgctggctgccgcgcggccgaggagtatgctgctgctgttccgctttgcgtcctcgctacaaacgcct

SEQ ID NO: 399496 - DNA, 80 bp, Homo sapiens
ctgtccaggaactgtcggaacagaaccaaaggctattggatcagctcagcaggtgtgtgctgtatttatggagtttaaag

SEQ ID NO: 399497 - DNA, 75 bp, Homo sapiens
cagacttcgctcgtactcgtgcgcctcgcttcgcatactggagcatagtgaaagagtctattttgaagcttcaaa

SEQ ID NO: 399498 - DNA, 90 bp, Homo sapiens
aacaacaaggagttatctattgctatccgtggatatggactttttgcaggagatgggtcatcagttaaggaagttgaaacctaccaccgg

SEQ ID NO: 399499 - DNA, 75 bp, Homo sapiens
ccctctcggaggtggaaccgccgtgcatcccgtacctcctgaagcaggacattctaaatgaaaagactgaattgg

SEQ ID NO: 399500 - DNA, 100 bp, Homo sapiens
ggtgaagctgtgggtgaagatggtgactccactgatcaagaacttcttctgaggacagacaggagaacatattgtgatgttcgtgcctcagagctaaaac

SEQ ID NO: 399501 - DNA, 100 bp, Homo sapiens
ctgagggaaaagcgaggcaaggcaggcggagctcagagttctacagagtcaccactgaacaatatcagaaagctgctgaagaggtggaagcaaagttcaa

SEQ ID NO: 399502 - DNA, 124 bp, Homo sapiens
tgcaatcatggtgcagaaataccagtccccagtgagggtgtacaaatacccctttgaattaattatggctaagtgaacatccacttgcccagctttactgccattcaatcatggaacaccatca

SEQ ID NO: 399503 - DNA, 100 bp, Homo sapiens
gattctgaagagggtctggaggagccttctcaagaacagaggcatagaatgtcaagctaaccaggcgtccgctacttcagaagagtgtactgtcgcatgg

SEQ ID NO: 399504 - DNA, 100 bp, Homo sapiens
cgggccaccgcgccgaactgctccggttcccgggtcatctctgaatttgagcaatggtgaaacggaatctgtgaaaaccatgattgtccatgatgatgta

SEQ ID NO: 399505 - DNA, 51 bp, Homo sapiens
gtgcaagcaaatgcttttattcaggttcaaaccttgtactactcagctgat

SEQ ID NO: 399506 - DNA, 98 bp, Homo sapiens
ctggggctgcacatcgcttcgcctcccaatttcagctgcagtgagaagaggagtttgttactttaaacagaggctgaagaaactatagaattagcaga

SEQ ID NO: 399507 - DNA, 100 bp, Homo sapiens
cgaagatgccaaatcatccgagacatgattggaccggaaaagactttgtgggtaattccagaattgattggccataccattgtcactgtattactgctca

SEQ ID NO: 399508 - DNA, 96 bp, Homo sapiens
ttcccgtcatccagcggggcgatgagtgtgggcatggggcagccgccagcccaaacaggcgtgtcacagggggtgctcaaaggatttaaaggagaa

SEQ ID NO: 399509 - DNA, 83 bp, Homo sapiens
gataaattcccggaaccgcgattcggcgtgtcagagtgtcaacctggggctgaatcttcaacctgtcaaagccttcttaatta

SEQ ID NO: 399510 - DNA, 100 bp, Homo sapiens
gaaggaacgaggcaaggagctaaagcagcgtgcgttcagccctggggatgaccgagtgggagacagcagcaccagcggtggcagagaccccagacatcaa

SEQ ID NO: 399511 - DNA, 82 bp, Homo sapiens
ctgaggtgtccgtaaagattccagagaagcctgtgaacaaagccctgggaggagcggggacactgaggacctctctccaaat

SEQ ID NO: 399512 - DNA, 51 bp, Homo sapiens
aaaccaagttggacttacagagaggcaaaaactgattattccaagtggaag

SEQ ID NO: 399513 - DNA, 75 bp, Homo sapiens
cgctgcagcgtggatgagcctcggggacactgtgccgaatgaagctaaaggttggtcttcaggttgtggcagtca

SEQ ID NO: 399514 - DNA, 100 bp, Homo sapiens
cgcgcaggagtcgggcaccatcccaaagaagcgacctgtcatttactccatcctttatagtgatgctacaggacgaagaggaatggataaaaacattggc

SEQ ID NO: 399515 - DNA, 75 bp, Homo sapiens
gagagaccagacctgcaagctctttgacacacagcagttcttgtcaggtctagatccagaagaagctcccgaagg

SEQ ID NO: 399516 - DNA, 96 bp, Homo sapiens
gtttgatatcaccaaactggaggatgcctatgtattccctggggatggcgcatcacacaccaaagagggaatctggaaaaattgcaatcaaaacat

SEQ ID NO: 399517 - DNA, 83 bp, Homo sapiens
gattttgatagaagactttcgagagtgtatacaaatgacagatacagtggaaggtcttgatgcccaggttgtaaatggttaca

SEQ ID NO: 399518 - DNA, 82 bp, Homo sapiens
catgacagaaatcacctatgtttacagcgacagttctttatagctccaagctctacagattcttcaaatatattgagaatag

SEQ ID NO: 399519 - DNA, 100 bp, Homo sapiens
attatggctcattgtagcctcaaactcccaggctcaagcagtcctaccatgtcagccttcccagtagctgggaccacagccaaagacagcagcattccca

SEQ ID NO: 399520 - DNA, 100 bp, Homo sapiens
gatttggtcgcgagcggcgacggttctaagctggtctatgtccatcaccttcttggagaaggagcctttgcccaggtgtacgaagctacccagggagatc

SEQ ID NO: 399521 - DNA, 51 bp, Homo sapiens
catgctggaggtggctctcaccctgaccgatttgggatgttgcccctggat

SEQ ID NO: 399522 - DNA, 99 bp, Homo sapiens
acctgacatcccctgttgtcagagaagaaatggagaaagtattagctggaggaatatttcactgctacatggagtactcccgactgcgtggtgaggccg

SEQ ID NO: 399523 - DNA, 50 bp, Homo sapiens
catacattacagtggttggaataaaaacattagtgccagcagtagttccc

SEQ ID NO: 399524 - DNA, 99 bp, Homo sapiens
tgcggcccgcgtcggcgctggggacaaaggtggggtggaagacaacccgtgagtattacaccttcatgtgggttactttgcccattgacctaaacaaca

SEQ ID NO: 399525 - DNA, 101 bp, Homo sapiens
atggcacttaccaaaaatccgaaaaaaagacctactgctgaaaaattattacagtgaagaacagtccagactggcagcaagaaaatatgctagagttgtac

SEQ ID NO: 399526 - DNA, 88 bp, Homo sapiens
aaagatctatagcactctggctggcaccaggaaagatgttgaagtgactaagggtaacctggatgaggacatcattgcagaagagaac

SEQ ID NO: 399527 - DNA, 83 bp, Homo sapiens
ccgggtctgagcgcggctgcccaggttgacctttctgcgggagcattccccgtcggagccctttctagagaaaccagtgccgg

SEQ ID NO: 399528 - DNA, 100 bp, Homo sapiens
cagttctgcaacatcaccacctgcctggctgtgggacccctaccatggaggagaccatcaaagatccccccacatcagctgtcttgctggatcactgtca

SEQ ID NO: 399529 - DNA, 50 bp, Homo sapiens
ccgaaggctccgctcacgcccggtactatactggcaattgctggagaaga

SEQ ID NO: 399530 - DNA, 97 bp, Homo sapiens
caggtctcagggccgggggtacccgaggaagtttatctcgacaatgctagttgcagtctgtgtgaccctgaccaagttattttaatgtctgtgctgc

SEQ ID NO: 399531 - DNA, 74 bp, Homo sapiens
cgagggcgaccagatcaacgccagcaagaacgaggaggacgcgggggtttggaaatcccttgtctccaggttgc

SEQ ID NO: 399532 - DNA, 96 bp, Homo sapiens
ggctcatcgagactgagctggctaagcaggtgctgcagacggagctggagcgaccgagagaggaactgtggaaggtgcatcagtgaagaaatggac

SEQ ID NO: 399533 - DNA, 97 bp, Homo sapiens
ctggatatcagcatacaattcttacatattcctggtgtagaatctgcaaacaggtgaccaagaatatggcccaggtgaccaaagccctggacaaggc

SEQ ID NO: 399534 - DNA, 50 bp, Homo sapiens
agaggatctcctcctatgatgacagacagtgctgaagtaaccccgcctgt

SEQ ID NO: 399535 - DNA, 98 bp, Homo sapiens
gggaccatgggctccaggatcaacattagtgccagcagtagttcccaagggctgtctcagccatccacccagacgactcagtatctgagagcagacac

SEQ ID NO: 399536 - DNA, 50 bp, Homo sapiens
atccaggcctcattggacagcattcgaggatgcttaaatggcagaggcca

SEQ ID NO: 399537 - DNA, 99 bp, Homo sapiens
ctgcaccttctcttactgctggcctgtatccatatattcctgcacatattacaaagcctaaggaacataagaagttgtttctggttcagcttcaagaaa

SEQ ID NO: 399538 - DNA, 74 bp, Homo sapiens
agctatggtgatgattagagacatactaatgtacatggtggatgcccggagcataccagtgttagcaaaatggc

SEQ ID NO: 399539 - DNA, 76 bp, Homo sapiens
tttcacacagggtattccatggagaatgagcattggggctttccagctctcacagaaccttcagcatccccagctg

SEQ ID NO: 399540 - DNA, 97 bp, Homo sapiens
aggctacagagccggcggcaggggatggcaagatagcggcgcgggagcgtaccgcatgtcagagcgggagcgacaggtgatgaagaagctgaaggag

SEQ ID NO: 399541 - DNA, 90 bp, Homo sapiens
ctggatctgctgccagcattagcctggctcaatatctaatcaatgtcaggtgctgctgttttttcaaacgaaggaaaaggaaaaccatac

SEQ ID NO: 399542 - DNA, 100 bp, Homo sapiens
acgtggccccggaaatcagggagctcttaacccagtttgaaacgtaactggttccctgaccagggcgtctctggccgagcctctttttgtggaaaacgac

SEQ ID NO: 399543 - DNA, 97 bp, Homo sapiens
gtggaccctgaggtccttcacagcctgcagtatggtttgaagtggtgaacatggatttttctcggcttcacatgtacagtcctccccagtgtgtgcc

SEQ ID NO: 399544 - DNA, 100 bp, Homo sapiens
agtgaatcaacctggaccttatatcatgtatacaactgtagatgcaaatgggtatctgaaaaatggatcagacatcgctattgcggttccgaggcagtgg

SEQ ID NO: 399545 - DNA, 100 bp, Homo sapiens
ggacacattcaaaaagactgcaccaaagtgaagtgctataggtgtggtggctggaggtggccgaattgacaaacccatcttgaaggctggccgggcgtac

SEQ ID NO: 399546 - DNA, 87 bp, Homo sapiens
ggagaagccacagcttctgcaaagacaggaggagtgggccctttgtgaggtgttcctggggagatggcggaacagcacggagcaccc

SEQ ID NO: 399547 - DNA, 98 bp, Homo sapiens
ggatggcgacgtctacactgagtcggaggcgaagggtgatattcatgaggatttttgcagcgtttgcagaaaaagtggccagttactgatgtgcgaca

SEQ ID NO: 399548 - DNA, 100 bp, Homo sapiens
aagcagttgctcgaagaactcgagcgacagagacaagctgagcttgccgcacaaaaagctagagagtgtgtcatagctaccatagcttttggaatgggca

SEQ ID NO: 399549 - DNA, 100 bp, Homo sapiens
ctccggtcactttcacaggcatcccaggcagaaccatacacttttcctcctacttctactaagcacctatccatcccttcaaagtctactgtgggcactc

SEQ ID NO: 399550 - DNA, 75 bp, Homo sapiens
tcggattaaatctggaaatgaaaatggagagttctacctacgagtctctgggtgtgacactttgggagctttttg

SEQ ID NO: 399551 - DNA, 80 bp, Homo sapiens
aagaccccagaagaggaagggacagaggagtgacaaggtgaaccgggattccgtgcgctccatccagaagagcatcttca

SEQ ID NO: 399552 - DNA, 75 bp, Homo sapiens
ggaaaacctgatcccaaaattattgaaaacactcgaaggtttgtgaagtgtggatatgcaggctctaactttcca

SEQ ID NO: 399553 - DNA, 80 bp, Homo sapiens
agtcatgagcgacagcggcgagcagaactacggcgagcgggtggaatgcaagctttaggacttcacctgacagatccaag

SEQ ID NO: 399554 - DNA, 100 bp, Homo sapiens
gttagctggggtctagaagatgacgaagacatgacacttacaagatggacagggatgataattgggcctccaagacaccagtatgcatgagcgggtgaac

SEQ ID NO: 399555 - DNA, 83 bp, Homo sapiens
gcggcgggagtcctggcgctctgcagaggagcaggagcggcttcgcttggagcaggagcgagagcaggaacagaagaaggcca

SEQ ID NO: 399556 - DNA, 96 bp, Homo sapiens
atttgtcaacttcaccactcaggctgaacgcaagattcgtatcattatggcagagcccctggtgatgtgccttcaggacttttttggtgatgatga

SEQ ID NO: 399557 - DNA, 100 bp, Homo sapiens
gcggcctttcggcagccgaacggccgcggcagtcacggacaagttcactgagagcgtctacgtcctggccaacgagccatccgtggccctgtaccggctg

SEQ ID NO: 399558 - DNA, 98 bp, Homo sapiens
aggatgcagagctgcagttggatgaaggtactatgtggagatgcaggagaagatgcagagtgtcatgcagctaaacttctggaagtcatcattcttca

SEQ ID NO: 399559 - DNA, 96 bp, Homo sapiens
atttcaccaacatgttaggctatactgatcatcagttcactgagctcacgcgcctgtacctcaccatccacagatttaaattccaggttgtcatca

SEQ ID NO: 399560 - DNA, 89 bp, Homo sapiens
atcgacgtagttaaagcccactagcctaaagccgggcggactgcgaattaaacaaccaccatgtcgagcaaaaaggcaaagaccaagac

SEQ ID NO: 399561 - DNA, 98 bp, Homo sapiens
gggaacctactacagtgactccatcttcttcctctcggtcgccatgcatcagatcatgcccaaaggtctgaatttcctgctgctgttcacaaagatgc

SEQ ID NO: 399562 - DNA, 98 bp, Homo sapiens
gcctcctcctgctgctactgtgtccagcgcaggactcacaccacccggcaagaactgctcactacggctccctgccccagaagtcacacggccggacc

SEQ ID NO: 399563 - DNA, 100 bp, Homo sapiens
gggagaaaaatcgtattgccgcccagaagagccgacagaggcagacacagaaggccgacaccctgcacctggttgtgatcaattattcaatcgtgaaagg

SEQ ID NO: 399564 - DNA, 83 bp, Homo sapiens
cgcggaggcgcctccgctgcagtcgctgcgtctccaagacccctttgctgatgcaactaagggtgacgacttactcccggcag

SEQ ID NO: 399565 - DNA, 122 bp, Homo sapiens
ccgagatcgagacaaggatgggcacagacgggacaaggaccgtaaacgatccagatcattaagcagcttcgagtctggaaaatttgttgaatgtactgagcaattagaattgttaccaggag

SEQ ID NO: 399566 - DNA, 75 bp, Homo sapiens
ggccaagcagcaccagcgtgcctttgggtgataaggggtgaacacacagtgttcatcccctcaggaggacacagc

SEQ ID NO: 399567 - DNA, 98 bp, Homo sapiens
ggcgttggaggccaccgtttccaggtagtggatgttgaactccatcgccattctctcggagaagactgtatctatcctcagtcctcggagtctgacat

SEQ ID NO: 399568 - DNA, 90 bp, Homo sapiens
cggctatcccaccatcaagttcttcaggaatggagacacggcttcccccaaggaatatacaggtatgtctggcgataaagggatttctgc

SEQ ID NO: 399569 - DNA, 51 bp, Homo sapiens
ccggagctaacctcggggaccgagatgcagtgaagatagtgatccggggag

SEQ ID NO: 399570 - DNA, 75 bp, Homo sapiens
gaatagtctacaaaggaagacttgtaacctggagaagagggtgatcagcccatgacctaaacctccagacaaaat

SEQ ID NO: 399571 - DNA, 100 bp, Homo sapiens
tttcaaccataaagacatcttaattgggcacgaaagaggtgtaatcctgagagattcacatggtgttgcacaagtacgttttgtgacaggcaataaaatt

SEQ ID NO: 399572 - DNA, 98 bp, Homo sapiens
gagcccaacgtcgtggctcggatctcgcagtgggcagacgaccacctgcgcctagtccgggtgcctctgtcccagctggcctatggcccagccgtccc

SEQ ID NO: 399573 - DNA, 99 bp, Homo sapiens
cgacaccccgaatagccaaggcagaacagcataattatcctggtatcaaattacagattggtccaatccctagaggaggctgcggaggaggaggaggaa

SEQ ID NO: 399574 - DNA, 75 bp, Homo sapiens
ccctcgatgtgctctgcgtgttgctggttcaaggagcagggacaagttacaggaatgttctccaagcagcaatcc

SEQ ID NO: 399575 - DNA, 75 bp, Homo sapiens
caagaaaccaacattcccaacagccaccaccaccaccagatgatctgcagcctcctccgtggtggcatcgccgag

SEQ ID NO: 399576 - DNA, 100 bp, Homo sapiens
gggcaagcgctgttcaaacccatgaagcggaaggtgctctaccagcgtgcacccaggaatatccaccgccatgtgatcctctctgagatcaaggaagccg

SEQ ID NO: 399577 - DNA, 75 bp, Homo sapiens
cttcttggtgctgtggctgatgcatttcatggctatcatctacacaccaaacctggaccacccaaaaagccgaag

SEQ ID NO: 399578 - DNA, 128 bp, Homo sapiens
gacagttcaaacaaagaggccgcggaggagaagccggaggaggacaacgactaccaccgcagcgacgagcaggggccaccaaggacatggggaagatgctggggggtgacgaggagaaggacccagac

SEQ ID NO: 399579 - DNA, 100 bp, Homo sapiens
cagcaagaacaggactccagagcgataaacactcgctggagagggagacgcaggaagcgatgaaagagatgtctgcccagtgccaatatctgcaatgtgg

SEQ ID NO: 399580 - DNA, 74 bp, Homo sapiens
cctctcatctcagcctccaaaagtgctggcattacagggttaaagcacgaattgggagctctcagcgacatcac

SEQ ID NO: 399581 - DNA, 51 bp, Homo sapiens
tcaactacaacatcgtttcaggcttagaccatgctcagcctccaagcagcc

SEQ ID NO: 399582 - DNA, 86 bp, Homo sapiens
ccgccatggagcccgactcggtgattgaggacaagaccatcgagctcatgagtcactttgtggcatgtatgacagccatcttaaac

SEQ ID NO: 399583 - DNA, 100 bp, Homo sapiens
ctcctgacgcacggccaagaggaaggccaagtcgagggccaagacgaagacaatgtggacgagtgtgaggctggggacgtgtgtgacaatggcatctgca

SEQ ID NO: 399584 - DNA, 79 bp, Homo sapiens
gccagggtccctgaagagggaagacacgcggaaacaggtgctggagaatctggtaaaagcaccattgtgaagcagatga

SEQ ID NO: 399585 - DNA, 100 bp, Homo sapiens
ctgctgctggagcaccagcgtccgagctgcatccaggggctgcgctggtggattatcaaacagttttgcgggaaagtcaaaccatcactgccatgtatct

SEQ ID NO: 399586 - DNA, 75 bp, Homo sapiens
ctgaggttcagattaagaaatctgccccaaagtcttagaactggttaaaaagatcaagtggcatgagcagccttt

SEQ ID NO: 399587 - DNA, 100 bp, Homo sapiens
ggggagctgggctggatctcttatccatcacatggggctgagtcatcactagagagtgggaagggcagcagcagcagagaatccaaaccctaaagctgat

SEQ ID NO: 399588 - DNA, 75 bp, Homo sapiens
cacccttcattcgcagcgacaccactttccctggagggaggtggggaagacagggctccagctaccacaggacgg

SEQ ID NO: 399589 - DNA, 97 bp, Homo sapiens
ccccccgatctcccactcaaggctaccgggtgacccccgatgctgtgcattcagtgattgatcactacaccagtcagatcgtcttcaatggggtccg

SEQ ID NO: 399590 - DNA, 75 bp, Homo sapiens
ccgcccagggccacctaaggagcggaccccgcatcttcgccgtctggaaaggaatactcccccagttgcaagagg

SEQ ID NO: 399591 - DNA, 75 bp, Homo sapiens
aacaaccatgctgggcatctggaccctcctacctctggttatcctgaatacatgtctaacaattttccttgcaac

SEQ ID NO: 399592 - DNA, 113 bp, Homo sapiens
gaaagaaacatatttgaccagcgtgccatagagaatgagctactggccagatcctgctcatctctgattacttctatgccttcctgcggcgggagtactacctcacacatggc

SEQ ID NO: 399593 - DNA, 151 bp, Homo sapiens
aagagagcaacgccagagcccaggtgcccagaggactttcttccagcttctgctgtccttctttgtggagagcaaggaagttggaaatctgtatgacatgttccacactcgcaactctttacaccgtagagcttatcaacacaaagttggc

SEQ ID NO: 399594 - DNA, 90 bp, Homo sapiens
gcgcctaaagtctgcgaggaggaagtcgcctctgtgctcgagagaacattgaaagtattctctaagctatttgaagagagtgactaaatg

SEQ ID NO: 399595 - DNA, 96 bp, Homo sapiens
ttaagagtggcctaagaggctgctgcactgaaattataaggcagacactctcaaggtcgcgcagactggacaagacctcaaagaggagcatccgtg

SEQ ID NO: 399596 - DNA, 100 bp, Homo sapiens
ttgcatttcctcgtcgagcgcaacccaaggtcaaaatgcagatcttcgtgaaaacccttaccggcaagaccatcacccttgaggtggagcccagtgacac

SEQ ID NO: 399597 - DNA, 51 bp, Homo sapiens
atcgcgatcctgggctaccggtctgtggaaacaggaccttgccctgtcact

SEQ ID NO: 399598 - DNA, 50 bp, Homo sapiens
aagttctctcaagctgccaaatcaggatctggtgattttgaagagaaacc

SEQ ID NO: 399599 - DNA, 75 bp, Homo sapiens
cccttttctgggaacgtgagtatcaaccaagtaacgaatccagaaaactctggagagcccttcagagcatacaca

SEQ ID NO: 399600 - DNA, 98 bp, Homo sapiens
cgcgctggaccagctcaagcagttcaccaccgtggtggccgacacgggcgacttccacgagacgtctcccacaacctgctccgggcgctggacgttgg

SEQ ID NO: 399601 - DNA, 82 bp, Homo sapiens
ttacgtgtactttaccaacgagctgaagcaggattctcagcaagttacagaagtatctttgacaactcttgtgaactttgtg

SEQ ID NO: 399602 - DNA, 101 bp, Homo sapiens
aaggtggatttgatccctgtgaatgtgtttgctctcatgaacatgcaatgagaagactgatcaatctgcatgaactggaaaatattgaacctactcaaggc

SEQ ID NO: 399603 - DNA, 100 bp, Homo sapiens
aaaaacctcagcctggaggccattcagctgtgcgaccgggacgggaccagttactctccacaagaaaattcacacaaccacagtgctcttcatagttcaa

SEQ ID NO: 399604 - DNA, 98 bp, Homo sapiens
aaggtggcccctttggccaccaccgaagactctctggcttccatcccctttattgatgtctctgctatctccaacctcatcaggaagcatgtgtctga

SEQ ID NO: 399605 - DNA, 50 bp, Homo sapiens
tttctacaaggggaagaacactgcagtcagtcccctcttctgcaggtctg

SEQ ID NO: 399606 - DNA, 83 bp, Homo sapiens
aagagtctggagtttatctggagtgaggtggccggttcttggtgggatctgagcaggtcacccgccatgtcgaccttgctgga

SEQ ID NO: 399607 - DNA, 51 bp, Homo sapiens
ctatgtttgcaacccctccccagttccggaaccccaaggcatccttgcgtg

SEQ ID NO: 399608 - DNA, 96 bp, Homo sapiens
agctggaaggcatctctactaagagctggggtctatcctgacaaatctgtaatgaccagctgaactcagaagaaaaaaagaagagaaagcagcgaa

SEQ ID NO: 399609 - DNA, 98 bp, Homo sapiens
cgagttccgagagcctctgattctcctgtgccagcccagcgatctgctcacgagctgcccatggttgaaagacaagacacagacagctgcctggtcta

SEQ ID NO: 399610 - DNA, 75 bp, Homo sapiens
tatgaggccagcaagcggaggtgctgggagcgagttggctggttttgggatttgagattgacgcggtgaactctg

SEQ ID NO: 399611 - DNA, 90 bp, Homo sapiens
cggcagcggtggcggctgcgctggcgcggcttttggcggcctttctgctcctcgcggcccagggatgattctctgaacgactgtcggatc

SEQ ID NO: 399612 - DNA, 100 bp, Homo sapiens
atgctgacgaggagttcaaccagtttggcctgtcactgctcctcatcctcctgagccgtggtgaagacctacagagttcagaccctgctacagaatcaac

SEQ ID NO: 399613 - DNA, 50 bp, Homo sapiens
ggccagggtgcttttggaaacctatgttcaatgggcagtttttatttgat

SEQ ID NO: 399614 - DNA, 100 bp, Homo sapiens
cgccagcacgcgcctgcttcccgtctgcgcgagtccacgcagctccccaggtctcctctgagcctccggcctccataagacccaaaacagatgacacctc

SEQ ID NO: 399615 - DNA, 100 bp, Homo sapiens
ctccatcgccctggcccagtacctcatcactgcctggaacagatggagtcggataactgttcaggaggagatgatgactggacccatctgtcttcaaaag

SEQ ID NO: 399616 - DNA, 75 bp, Homo sapiens
acaacagaataagcagcaggccatttcagagaaagatcggttgtcactcagcccagtccatcagtttctcagccc

SEQ ID NO: 399617 - DNA, 82 bp, Homo sapiens
ggcgtggagatatggcgcaactgcggcgcggtgaggtggctttgaccccgggttgcccggccagcacgaccgaggaggtggc

SEQ ID NO: 399618 - DNA, 83 bp, Homo sapiens
cctggagaagctggagaatgacaagagcttccgcggtgtcattctgacctcgtgtactaatggtcacttgatgtgcgctggct

SEQ ID NO: 399619 - DNA, 76 bp, Homo sapiens
tggggacctccggggaggcctgccgctgtaagcgttggggccttcgtgaagacctggctgcccttcatccttctcc

SEQ ID NO: 399620 - DNA, 82 bp, Homo sapiens
cttaagcaaacgggaattctcgcccctccagaatacccatcatatagcccctgaggtggcatggtgatgtctccatgaggga

SEQ ID NO: 399621 - DNA, 51 bp, Homo sapiens
agtcaacaaccgcttcgagctgggatgctgagaacttgctggagtcacagc

SEQ ID NO: 399622 - DNA, 127 bp, Homo sapiens
acccctggacgtggtgaaggttcgcctgcagtctcagcggccctccatggccagcgagcatcactttgggtcctcaggaatgacattacatgaacgctttactaaatacctaaagagaggaactgag

SEQ ID NO: 399623 - DNA, 100 bp, Homo sapiens
gaacttcaaagggaaggtcattgtcatcgtggggcatgtggcaaaacacacagctgaggttgaaatcacaaagattagacacctttttagataggtgttc

SEQ ID NO: 399624 - DNA, 98 bp, Homo sapiens
ggggactggcctggcgtgcactccgcacctcggggacattattgcgcgtggaacggctgcttttggaaggaggttccagccttggcaagaggagtgtg

SEQ ID NO: 399625 - DNA, 75 bp, Homo sapiens
cgagcgaggaggatggcggagtcggggctcctgacgatcaatgaactgagccatgttcaaatccctgttatgttg

SEQ ID NO: 399626 - DNA, 100 bp, Homo sapiens
accctgcagctgctgaggactgcacagctcccagaacagggcggcgactggcggcgcgatggacctgaccgggctcctgctggacgaagaaggcaccttc

SEQ ID NO: 399627 - DNA, 82 bp, Homo sapiens
ccagttctccggcgggaaggaaaaccgcgcagagaggttatgaagacagtatggagtttccagaccatagtagacatttgct

SEQ ID NO: 399628 - DNA, 98 bp, Homo sapiens
agcccaaggctgatggccgtgtgttgattatgtttgagaccttcaacaccccggccatgtacgtggccatccaggccgtgctgtccctctacgcctct

SEQ ID NO: 399629 - DNA, 75 bp, Homo sapiens
ggcggtggctgagcagaggacccggcgggcggcctcgcgggtcagcactctcgagtggaccctgaggagctcttc

SEQ ID NO: 399630 - DNA, 83 bp, Homo sapiens
cgcggattcgccgaggcaccgaggcactcagaggaggttttgtagtgcatccctgagcatgagcacagaatgaagcggcgttt

SEQ ID NO: 399631 - DNA, 75 bp, Homo sapiens
cagtaggagtaatggaaatgagatcacctttacttgcaggtataattgaaatcctcaaaggaatgcaagaattgg

SEQ ID NO: 399632 - DNA, 100 bp, Homo sapiens
gattcttacaaagctgccaggagaaatggaaaaacaaaaatgaatgaatcaagagtgatttgttaatataaagcctagccatggctgctgtttattctgg

SEQ ID NO: 399633 - DNA, 100 bp, Homo sapiens
ctcttgctggtttctttgctggagcacttgagccacgtgcatgaaccaaacccacttcgttcaagacaggtgtttaagccccgtggaacacagagcattc

SEQ ID NO: 399634 - DNA, 80 bp, Homo sapiens
cgcccgtccccctgccccgttcacaattagtttatgccaacgtgacttcattcatacagatgaaccaaggatcgggatag

SEQ ID NO: 399635 - DNA, 82 bp, Homo sapiens
aacaagaagaagaggagaggaaaaaggaagagagcactgcagccagtgaaaccactgagtgaagatagtgatccggggagac

SEQ ID NO: 399636 - DNA, 100 bp, Homo sapiens
tgaaagatgtctgaaaattccagtgacagtgattcatcttgtggttggactgtcatcagtcatgagacacggaatcgatttgaaggaacaaggtcagaag

SEQ ID NO: 399637 - DNA, 82 bp, Homo sapiens
cgccaggccccgggggcggcggccaagatgtccgtgcctaaggatatggccctgaagccacatgagcggaaggagaagtggg

SEQ ID NO: 399638 - DNA, 49 bp, Homo sapiens
agcatggtggccgtgatggatacctacatcggctctgtgctcatctctg

SEQ ID NO: 399639 - DNA, 51 bp, Homo sapiens
gttaagtatgcggcgccaggagctattggaaagaagactgatgaagaaaaa

SEQ ID NO: 399640 - DNA, 98 bp, Homo sapiens
gatccagtgttcaccatcctggccccggaagatgtggtagtgttaaagatggctccttggcggcatgtgcattttctcctaatggaagcttctttgtc

SEQ ID NO: 399641 - DNA, 100 bp, Homo sapiens
gacttctcctggcggcgctgcggatccagggggtcggctgccaggtacaggaataatgtatttgtggccttggacatgaggcagtcagtcctctgttgct

SEQ ID NO: 399642 - DNA, 82 bp, Homo sapiens
ctggttcagctcatacaacagcttcttaggtcaccatcagaaaagctaagtttgctgtatagtgaggatcaggagatctgat

SEQ ID NO: 399643 - DNA, 100 bp, Homo sapiens
catcccagagcgcactcaccaactccacgggaggcaaggcctgacaggctgaagtcacctggaaggggaccgactccagcagtacccgcggctacgggag

SEQ ID NO: 399644 - DNA, 100 bp, Homo sapiens
ggatccgttaagagaaattgccctagaaacagccatgactcaaagaaaactgaggattctgaaaaagagttccacgtcctcccttatcgagtctttgttc

SEQ ID NO: 399645 - DNA, 100 bp, Homo sapiens
ctgggaaagaagattccattatggaggaagagagatgacttcaaacctgcttctattgacacttcttctgaaggataccttgaggttggtgaaggtgaac

SEQ ID NO: 399646 - DNA, 100 bp, Homo sapiens
accattcatgcctacattgcctttaccatggacaaactgatccagagcattgtcagacagaccacacctgtgacaatgcaggttggagaaggtcagcagg

SEQ ID NO: 399647 - DNA, 96 bp, Homo sapiens
acaagaaactagagcaaataaccgttttgaaattctgctaaaaggagtgaccatcgccagtggaggcgtcctgcccagaattcaccccgaactgct

SEQ ID NO: 399648 - DNA, 100 bp, Homo sapiens
ccagggagcctgcaggaccccagcaccccactcctgaacctgaatgagcccctgggctttggaactgcgacataactagcgatggctgctgcgatctcac

SEQ ID NO: 399649 - DNA, 75 bp, Homo sapiens
gtctctggagacatcttcagcaggcagtgtgccctggcagccctccgtgacgtccggcggttccttagtgaggag

SEQ ID NO: 399650 - DNA, 75 bp, Homo sapiens
tgcagcgaagcccaagagctggcctcgccacgaaggtgatgacaatgggaagaaggccaacaaccccaaccactg

SEQ ID NO: 399651 - DNA, 100 bp, Homo sapiens
gaaaagcgagcctcttctgataactcaggatttacttgaaatgaaaggagattccaacctacttcagtcatggctccgatcttcatcttgaagaagagtg

SEQ ID NO: 399652 - DNA, 75 bp, Homo sapiens
gagggtgccctcaatgagcacatgaccagcttagcttctgtcctaaagggttggggtctgctaggtccccggaat

SEQ ID NO: 399653 - DNA, 89 bp, Homo sapiens
aaaattttggtggagaattatccaacaagaaaaagacctgtggctattaagatagctctcagatctggctcgagaccaccatggctaag

SEQ ID NO: 399654 - DNA, 114 bp, Homo sapiens
tgagtttcttactcgggagctggctgaagatggctactctggagttgagatcccagatgcagtgactggttactacctgaaccgtgctggctttgaggcctcagacccacgcat

SEQ ID NO: 399655 - DNA, 103 bp, Homo sapiens
gtcctctctggacagggacagtgggcagtgctcccggaacacaagctgtgaaacactagtgcctccggagccagcgtggtggccatagacaacaagatcgaac

SEQ ID NO: 399656 - DNA, 98 bp, Homo sapiens
gcaccacaagccatggaagggtgggtgccactgctgccgtgtacagtgctgcgattctggagtacctcactgcagagctgtttgcagacaaggtccca

SEQ ID NO: 399657 - DNA, 100 bp, Homo sapiens
gacttcttgcatggatccgagaagccttgatgacttacaagccctcaaggggaagcattttctcctggactccttgatgccggagctgctggtgtttccc

SEQ ID NO: 399658 - DNA, 75 bp, Homo sapiens
ggccccgcaggtcttcacccaggccctggagtgcatgcgcagagccgctcccgaggccccggcgcggcgcgaggg

SEQ ID NO: 399659 - DNA, 82 bp, Homo sapiens
cggtacagcgaaggcagagagttcagcaaacggggattcagcgtccgatcctttggaacagggactcacgtgaagcttccag

SEQ ID NO: 399660 - DNA, 75 bp, Homo sapiens
gatcaggcaaatgataaaaaagtggctgctattgaagccctaaatgatgccaccaaaaccctcaacaggggcatc

SEQ ID NO: 399661 - DNA, 90 bp, Homo sapiens
gtacgagctttcgccaaagagcttttcctaggcaaaatcaagaagctcatcatgtcactacagtgaacagtacaaattgtaagaagacac

SEQ ID NO: 399662 - DNA, 100 bp, Homo sapiens
cagaatttcttttggcacctcctctccgcgcgttcttgggaaaatttttactactggagatgtcaacaaagatgggaagctggattttgaagaatttatg

SEQ ID NO: 399663 - DNA, 50 bp, Homo sapiens
ggaacttctgcccagctctccttgtgccctataaggactgccaggcaata

SEQ ID NO: 399664 - DNA, 101 bp, Homo sapiens
cctgaaaccactcaagagtcataggattagatgatccaagtcaccaagaaattactgtctcaagtgatacgggcagctgcaatgactctccgcacggtatt

SEQ ID NO: 399665 - DNA, 90 bp, Homo sapiens
cgatggtggtgaagtagtgaagacatccagctctgtcacccaagctgcagtgtggtggcatgattgtagctcactgtaactttgaactcc

SEQ ID NO: 399666 - DNA, 75 bp, Homo sapiens
gcaggtcttcacccaggccctggagtgcatgcgcagattcagaaggtttgtaacaagaaactatgggaaagatac

SEQ ID NO: 399667 - DNA, 50 bp, Homo sapiens
ggcagacagcgagtggcgacgatatgcaaccttaaaatcagtgacaagaa

SEQ ID NO: 399668 - DNA, 74 bp, Homo sapiens
gaagacagtgtgccagataccattgatgaaggaaatgctaaagcgattccaagagaatagtgacagtggtacag

SEQ ID NO: 399669 - DNA, 74 bp, Homo sapiens
ttacaacctctctacgccaaagaaatccagtcccgaccaatggagtatgagcgccaagtggcttcattaaaagc

SEQ ID NO: 399670 - DNA, 131 bp, Homo sapiens
gcagcggaagtgggaaacctgtagggtatggtccagctgtgccgcaccgaggcgagcaggagcagggaacagtaacggcacagccaacaagatgaacggagctttggatcactcagaccaaccagacccag

SEQ ID NO: 399671 - DNA, 100 bp, Homo sapiens
agggagcctgccctcgcatggtggccagggcacgtcactgcaggccaggggatcctcttggtgtatgacatcaccaaccgctggtcctttgacggcatcg

SEQ ID NO: 399672 - DNA, 88 bp, Homo sapiens
agatggcacagaaaccgctgcgcctttttaacttctagtcatggcgaatgatcgcaggagagcacagactggaccctgctacgatctc

SEQ ID NO: 399673 - DNA, 75 bp, Homo sapiens
gattttggtagagaagaatgaacattgtattgagaacaatatagatttgcagaaaataaagcagttggagtgatg

SEQ ID NO: 399674 - DNA, 120 bp, Homo sapiens
tcccaacttcgtggcgacctatggccgtggctaccccggatttgctccaagctatggctatcagttcccaggtcctcagaatggttggaatgaccctccagctttgaacagagtacccaa

SEQ ID NO: 399675 - DNA, 100 bp, Homo sapiens
gccaggatcctgcaccgggtggtggctgggggaactgactcttttttggagtaaactgcaaagaagaattgacccttctttagatacttttttggagcgc

SEQ ID NO: 399676 - DNA, 88 bp, Homo sapiens
acggttagacacacagctgaagaataagcttataacactgatggggctgcaagtggaattcatcaaccccatcttcgagttctccagg

SEQ ID NO: 399677 - DNA, 75 bp, Homo sapiens
tgaggtgagcctggacttgaatgcagagaggtggagaagagcgagtacttgagaaagaagaggaagaagatgatg

SEQ ID NO: 399678 - DNA, 100 bp, Homo sapiens
actcagcctcactctgtacaagaagagctgaagagagacctgaaaattaagaaagaaaaagacctgatgcagttggctcaggccacagcagtagctgcac

SEQ ID NO: 399679 - DNA, 75 bp, Homo sapiens
tttctagtggctacaaatgcccctcagcttttaatctagacaacgagcaaccagattatgatatggattcagaag

SEQ ID NO: 399680 - DNA, 75 bp, Homo sapiens
gcgcgctgctggtgatgggcgtgagcggctcggggaagttttagctaaagaagatactgaggcagctattcaatc

SEQ ID NO: 399681 - DNA, 75 bp, Homo sapiens
tttctggtgtcctgaacctggaagttgtgctttttaaggctatttgcatattcagatgcatcttgtcaaagggga

SEQ ID NO: 399682 - DNA, 100 bp, Homo sapiens
cgggagggctcggcccaggtcaccggcagcccaggcgcagaatcatgtcaaccctgccatggacttcacgcagactccacctgggatgttggctctggac

SEQ ID NO: 399683 - DNA, 82 bp, Homo sapiens
atgcaatagaagctgtggatgaatttgcttttctggaagataagaatgtgccttttgatgaaagaactttatctttctacaa

SEQ ID NO: 399684 - DNA, 100 bp, Homo sapiens
gataatgcagttcttattactagaatcatgcagacatttgttacacagcagtggaaacagagcaaagaaaaatccaattgcctgcacaataaaaagttgt

SEQ ID NO: 399685 - DNA, 75 bp, Homo sapiens
cttccagccaggctgtggactcaacgatgtcttgggatcaattgcatatggaactggcagcgatcgacccttcac

SEQ ID NO: 399686 - DNA, 74 bp, Homo sapiens
agcgaggttggtcatgtgctcggacacgatgaggcgagtggtacgacagagcaagtttcggcatgtatttgggc

SEQ ID NO: 399687 - DNA, 60 bp, Homo sapiens
aggacctgttcaccagcactgtctccaccctagaggttgaccccctgtttacagtgccag

SEQ ID NO: 399688 - DNA, 100 bp, Homo sapiens
agactaaatgaagattttaggcggtatcaaatggaaagtttttccaaatattcatctgtacaggcttatctaattaactgtgtttggaactgctataaat

SEQ ID NO: 399689 - DNA, 50 bp, Homo sapiens
cttcaattgatgaattcctaggacttccgacagagtctcgctctgtcgcc

SEQ ID NO: 399690 - DNA, 75 bp, Homo sapiens
gaatttgcagcaccatcaacagatgcccctgataaaggatacgttgaatttctacagacagttcaaggaaattgc

SEQ ID NO: 399691 - DNA, 100 bp, Homo sapiens
agacacagtgtcagaattacaaggtacagagtgaagacagtgtcctcctgtttgttattgcatggacgatcacggaaatcatccgttactccttttatac

SEQ ID NO: 399692 - DNA, 100 bp, Homo sapiens
gcggagaagctcaccatcctcaacgaccggggcgtcggcatgctcacccgcctctacaacatcaagaagagtgttgccagggacggcagtatctctttgt

SEQ ID NO: 399693 - DNA, 50 bp, Homo sapiens
ccgggattggaccgacgcagccatggtcacggagctgctggacgtctcca

SEQ ID NO: 399694 - DNA, 74 bp, Homo sapiens
ccaggatgtctacaaaattggtggatcatcaggctgcccggctggggctggggctggggctgtggctctgggga

SEQ ID NO: 399695 - DNA, 82 bp, Homo sapiens
gcaggtggtgcggaaagtggctggattggacaagcaggcaaagctgagatgctgagatgaatcgtcacctgtgtgtttggct

SEQ ID NO: 399696 - DNA, 100 bp, Homo sapiens
ctgacaagcccttgcgcctgcctctccaggatgtctacaaaattggtgcttactgcagagtgggtctgggcatctgctacgacatgcggtttgcagagct

SEQ ID NO: 399697 - DNA, 100 bp, Homo sapiens
gaggaagcagggacggagctgtgcagctacggagccgagatggctctgagtacctgatccagcacgactcggaggccatcatcagcacctggcataaggc

SEQ ID NO: 399698 - DNA, 76 bp, Homo sapiens
gaatctgaatccagaagagtcactaagtgtgcaggatgacagaattcgagtcgaaaggatggataacatttatttt

SEQ ID NO: 399699 - DNA, 75 bp, Homo sapiens
aaaaaagaggagctggccaggctacggagagaactgttctgagaagctgctggccaagaagcccccaagcgaggc

SEQ ID NO: 399700 - DNA, 50 bp, Homo sapiens
gagctgtgccagcctgacatggcacatgattaagtaccggtacatcccgt

SEQ ID NO: 399701 - DNA, 82 bp, Homo sapiens
gttgtacgagacgtggcctgtggcgctaaccacacggatgagatggccttctgctacacccaggctccccacaagacaacgt

SEQ ID NO: 399702 - DNA, 51 bp, Homo sapiens
agagagagaggcgcaggacgctcagtgaagacctaggaaaggacgttgaat

SEQ ID NO: 399703 - DNA, 74 bp, Homo sapiens
ctttctctaattttcccatatctgaagaaactattaaacttctcaaagtgatgctattgctgagattagagcca

SEQ ID NO: 399704 - DNA, 78 bp, Homo sapiens
aagcaggaggcaagaaaggggcccggaaatccaagatgttgctaaatttgcataagaagagttggatggaaggtttga

SEQ ID NO: 399705 - DNA, 90 bp, Homo sapiens
aaatgcgttaggaaaatgtgatgcatgtctcagtgattctgaaaaagagttccacgtcctcccttatcgagtctttgttccccttcctgg

SEQ ID NO: 399706 - DNA, 82 bp, Homo sapiens
gagacgagaagcctgaaaagtcgcagcgagctggagccgccggagccccagcatgagaccagatgtaagctctcctccatcc

SEQ ID NO: 399707 - DNA, 82 bp, Homo sapiens
gcaggcgcccgtgcggaatggcagacaggtgatttggcttctgcacagttaggaggagcaccaaaccgatgggaggttttgt

SEQ ID NO: 399708 - DNA, 75 bp, Homo sapiens
attccagaagggccaccccgacctccaagggcagcctggactgttccctgatgtgggtggaggttatttcttgcc

SEQ ID NO: 399709 - DNA, 51 bp, Homo sapiens
ttgtgcttcctgctggccgtgctgctgcagtgacaaagctgcaggtgagca

SEQ ID NO: 399710 - DNA, 75 bp, Homo sapiens
ctcgctgctgcagcgcggaggagtcgggaagacgtctctgattacgaggttcatgtacgacagcttcgacaacac

SEQ ID NO: 399711 - DNA, 90 bp, Homo sapiens
ggacaacgagaagaaccggaagctctttgaccttctggatgtccttgagttcaaccaggtgagcacatacgttgtcgacaggaggcggag

SEQ ID NO: 399712 - DNA, 75 bp, Homo sapiens
gcttcttctggttggaaacttgtcaaatttcatcagctggcagagatggaggaggagctacgttatgcacccctg

SEQ ID NO: 399713 - DNA, 75 bp, Homo sapiens
acttcctcactaatatcagggcttattttgagcatgctgtcaaggtcctttaattccaattttactactgtaagc

SEQ ID NO: 399714 - DNA, 100 bp, Homo sapiens
acactcccgatggcaccttcctagtccgagatgcttctagcaagatccagggcgagtacacgctgaccctcaggaaaggccacgccagcctggtgcagga

SEQ ID NO: 399715 - DNA, 100 bp, Homo sapiens
acatggccaacatcgcggtgcagcgaatcaagcgggagttcaaggaggtgctgaagagcgaggaggctgtattcatcaccaaagaaaaaacttacaccaa

SEQ ID NO: 399716 - DNA, 75 bp, Homo sapiens
aaagattcctgatacaaaaggctgccacaaatgttgcataggttccataccccatgaagtgcctcagatattaat

SEQ ID NO: 399717 - DNA, 80 bp, Homo sapiens
atcagtaaagaaggaaaaagcagtaaagccagaggaagttacaggtcggttcacccagaagccagggggcatctcagtga

SEQ ID NO: 399718 - DNA, 51 bp, Homo sapiens
ccttcctctacttctcacagttcagctggattcactcctgcttgcgaaaag

SEQ ID NO: 399719 - DNA, 75 bp, Homo sapiens
gctagtttggatgtggaggggaatagactccatctatccatatgaggaagtgtttggattgtgagctatttcaga

SEQ ID NO: 399720 - DNA, 75 bp, Homo sapiens
tgaggtccagatgaaagagaagtttctggtcactccccaggattatgcgcgattacctgagactgggtcatttat

SEQ ID NO: 399721 - DNA, 82 bp, Homo sapiens
gccctccacatggtttactggacagggtcataacaaatggcactgaaggatagcacagaagtagaaattgtggatgagaaaa

SEQ ID NO: 399722 - DNA, 100 bp, Homo sapiens
atgccaacagtgtaccagcagggcgttggctatgtgcccatcacagccatcgacgagtacaagccccaggatgctaccaccaacccgtccctgatcctgg

SEQ ID NO: 399723 - DNA, 100 bp, Homo sapiens
cgccgcccaggagacccctctgctgcaccacttcatgtatgatgagctgccgcactacccaggcatcgtggatggccccgcagccctggctagcttccca

SEQ ID NO: 399724 - DNA, 83 bp, Homo sapiens
cttcctggcctgggcgctccggtggcggcggagacccgtgcctgtatattccacgctttgcgcacctgctggaattcggggag

SEQ ID NO: 399725 - DNA, 100 bp, Homo sapiens
acaatgtgatcttcaccttggattctttgttaaaaggagacctaaagggagtcaaaggagctacccacctttctgttctgagacccctcaagagacatat

SEQ ID NO: 399726 - DNA, 74 bp, Homo sapiens
gagcgcggaatcggggagcgtccggagctagctggatcctctaggcagggagtaatgtggtcattgcatcccgt

SEQ ID NO: 399727 - DNA, 82 bp, Homo sapiens
ccccgccccgccccggcctcggcccgccgggcccgcagtgtggtgagaagccctaccactgcaactgggacggctgcggctg

SEQ ID NO: 399728 - DNA, 100 bp, Homo sapiens
cggcgcgaggacagcgcgtgcccgcgaggagccgccgcgcgcccgcgccctccgcgcgacgccagtgaagatagtgatccggggagacaggaacacgggc

SEQ ID NO: 399729 - DNA, 100 bp, Homo sapiens
gtatcctgcaggaggaggaggaagaagagaagctggacgctctgcaggggatcctctctgctttcctggtgctcaaaaatgtgataactttgctgaaaaa

SEQ ID NO: 399730 - DNA, 76 bp, Homo sapiens
tcagacgtgcacaccatggatctggaaagttactgtggcccatgtcctaaaaactggatatgttacaaaaataact

SEQ ID NO: 399731 - DNA, 99 bp, Homo sapiens
gagtgggcttccctgaatatcaggttattattgcagcagaactcctaaaaaatgcagatgaattagtcaaacagaaaattcatcccacatcagttatta

SEQ ID NO: 399732 - DNA, 100 bp, Homo sapiens
tatgaatatgggtcgaccattccaaaaaaatcggttgttttggaaaccgaaataacaaataagtccgctttgaaactttatgaaaatcttggttttgttc

SEQ ID NO: 399733 - DNA, 75 bp, Homo sapiens
agcatccccaccatcaacatggagaacaagaccacgtggccaagcaggttgagtatctggtcaatgaaaagcaca

SEQ ID NO: 399734 - DNA, 75 bp, Homo sapiens
gaagatggtgtcctggatgatctccagagccgtggtgtcatgcttcaccccttcctccatctgctgcacctacca

SEQ ID NO: 399735 - DNA, 97 bp, Homo sapiens
acgttcagggcttggtctcagcattgtgggaggaaaagacacacccttgatatctcccggggccaattcagcatctctacctggccatcctaacaag

SEQ ID NO: 399736 - DNA, 82 bp, Homo sapiens
gatgtgaatgactggctgactgaactctcttatgtccctgatgccaaaaatgcacctactctttcctctaactctggtgagg

SEQ ID NO: 399737 - DNA, 101 bp, Homo sapiens
cgccaagacaggcataaagaatggcgtgggcggcgactggcggcgcgatggacctgaccgggctcctgctggacgaagaaggcaccttctccctcgccggc

SEQ ID NO: 399738 - DNA, 100 bp, Homo sapiens
ggcggctgcagcgagtaggcggcggcggaggcacgaaagcaagagattatcaaagtcactgaacaactgatcgaagctatcaacaatggggactttgaag

SEQ ID NO: 399739 - DNA, 80 bp, Homo sapiens
gccggagctgggcgcggattcgccgaggcaccgaggcactcagaggagaagtcccgggcccagagcccggccagcaggag

SEQ ID NO: 399740 - DNA, 75 bp, Homo sapiens
aagatcaatgagttccagtgcgagtgccccacggctccactgccgcctcccaaggaggtcatcaacggaaacata

SEQ ID NO: 399741 - DNA, 100 bp, Homo sapiens
caccctggtgaagaacatgatctctggcctcagctatggagcacttaatgccagctaccagaaacttttgcagagtttggacaggcaaaggaaaacgtgc

SEQ ID NO: 399742 - DNA, 87 bp, Homo sapiens
gtgaccgagagcgcgaatatcgtcatcgttagaagataatccaggcacatggcggcactgttgaccccaccttcacgagtcgatgca

SEQ ID NO: 399743 - DNA, 100 bp, Homo sapiens
aaatacaggatgcctctcagctgccacctgcctttgacctttttgaagcctttgcaaaagtaaaagaaaggtggcttaatcctttaaaagagctggtaga

SEQ ID NO: 399744 - DNA, 110 bp, Homo sapiens
gtgctaatccagtggaaatcaggagaggaatgtttctccagtgggttctttgtgctgccatatggttggttgccttggttgtcaatctgatattacattgtccaaagttt

SEQ ID NO: 399745 - DNA, 82 bp, Homo sapiens
agcaccgcagatgttgtcaaggtggcctaccaggaggccaggggtgtcgccatggaaatggtgttcacactggccctgaatc

SEQ ID NO: 399746 - DNA, 75 bp, Homo sapiens
ctatgatgttgtaaaagttattggaagaggtgcttttggtgaagtgcagttggtccaagggcagccattaatggt

SEQ ID NO: 399747 - DNA, 90 bp, Homo sapiens
tgcttcattatggattatacagtcatccgtccttggctcaggatttggagagcttgcaccaccaaaaatggcaaacatcaccagctccca

SEQ ID NO: 399748 - DNA, 76 bp, Homo sapiens
cataaattaaaagatgattctattgtggatgtacaagttcgttttaaaaatttagcatccagaccgtattctctac

SEQ ID NO: 399749 - DNA, 51 bp, Homo sapiens
cgggcctgtcgaagtgcgcctgacagatgcggcattccaaaagaactcact

SEQ ID NO: 399750 - DNA, 82 bp, Homo sapiens
gtacgagagtggccctgacggaggggaggaattttgccgacggatggggcaaaagaagcagcgaccagctagagcagggcag

SEQ ID NO: 399751 - DNA, 100 bp, Homo sapiens
gctgtaggtgcccaccaagcccatgacgacgctgctggccagggtccagattacatcgtcagcccaaacatctccttgcatttttgttggctgaattggg

SEQ ID NO: 399752 - DNA, 100 bp, Homo sapiens
taaattatgcatggcccagccaaggactgttcaagatgtagagatcgggcccgggacacccagacagatgagattgtcgcactgaagaaggtgcggatgg

SEQ ID NO: 399753 - DNA, 101 bp, Homo sapiens
tgattccactcaacggagctgtggccgtgaagatgcgcgccttccagcatttcagatcccccagaccagatgacctatcttccttccagctctgagtcact

SEQ ID NO: 399754 - DNA, 100 bp, Homo sapiens
acctcctgtatctggagctgggagacaagcccgcgcccaacaccttctatgtaggaatccctttgcccacgtccagctgaagccgacagtgaccaacgac

SEQ ID NO: 399755 - DNA, 101 bp, Homo sapiens
ctacatcacaaagtaaagaatttgatcctcttggtccattgccacctggatgggatattgttacggaactttatcaaaggaagccgcatgccacagagcag

SEQ ID NO: 399756 - DNA, 98 bp, Homo sapiens
taccgcgacctccggaggccggcgtgacaggctctgtcactaaaataggaatttgtaagtgtctgggttcgagatcctaggattcagaaggaggactt

SEQ ID NO: 399757 - DNA, 101 bp, Homo sapiens
gatgtcatccccatggctgatgcagcaggcatcatccgctatgcaattgggaacatttccccagaggagctcaaaatggagttgccggagagacagcccag

SEQ ID NO: 399758 - DNA, 99 bp, Homo sapiens
gtccacggtgtgttgaaagtacacggagccccgaggacggtgacctgaaaaaaatgtctggatttctagagggcttgagatgctcagaatgcattgact

SEQ ID NO: 399759 - DNA, 75 bp, Homo sapiens
aatacatttgaacaacttttggggtacttagaaggcggccttctgatctgtttaccacgtgagcaagcagctcgg

SEQ ID NO: 399760 - DNA, 100 bp, Homo sapiens
gtcccaggactgtgcaggggactctgtcacaggtgctgtgccgttcctggtcagtgccacctctggcaccactgtgctaggggcctttgaccccctggag

SEQ ID NO: 399761 - DNA, 100 bp, Homo sapiens
gaaatatccaagggacgttcagggcttggtctcagcattgtgggaggaaaagacacacccttgattataagcgccatggctatggctagtgttaaattgc

SEQ ID NO: 399762 - DNA, 100 bp, Homo sapiens
ataatgcggctgcgcagtcagcattgttacagcaggtgtcaacaataaacggcttggtgtatgtggctggatcctgttttccctctctttcctgttggtg

SEQ ID NO: 399763 - DNA, 75 bp, Homo sapiens
agagattggactgggagggcaacgagcacaacaggagctacgaggagttgatgccagaccagtttgaccaggcgg

SEQ ID NO: 399764 - DNA, 106 bp, Homo sapiens
agctgtgcagccgcgaggaggcgcgggaggtgttcgagaacgaccccgagacggctcacagaacatttcctgcctgttgctcacactctgttgtccacagcatacc

SEQ ID NO: 399765 - DNA, 75 bp, Homo sapiens
gcaacagaaggactcacctgtgttttgccgcttctttcacttcaggaggacatggatttgattgacatactttgg

SEQ ID NO: 399766 - DNA, 73 bp, Homo sapiens
ttatgttgattgtgtgcgatggttaggcgatttgatactttctaaggagaaggaagccaacatccttttggag

SEQ ID NO: 399767 - DNA, 75 bp, Homo sapiens
cgcgtctctctgctgcggcgcggggaccgctgtgctctcgcggtttgctgtgtttcaaagaagggtgctgaccac

SEQ ID NO: 399768 - DNA, 143 bp, Homo sapiens
gggacttgggcccagtttatggcttccagtggaggcattttggggcagaatacagagatatggaatcagagcccccctccatgcgcctgaaggcccgacccagcagccctggcttttccgtgcttacctgcagcgccttctcc

SEQ ID NO: 399769 - DNA, 85 bp, Homo sapiens
agtggcacagtggagcagctctgaagatgcaaagcacttgcacctcctgcgccgccgccccccatccaaggatatgccttcaagc

SEQ ID NO: 399770 - DNA, 70 bp, Homo sapiens
gcgggtcttcttcctgtttgaccaccagatggtcctctgcaagaagcaatcaatgggaaactctatgcca

SEQ ID NO: 399771 - DNA, 100 bp, Homo sapiens
cacagctgcccactcctcctggggaggctgccgtggaggccatggagatccctgccccggagcccgagaagacagatatgtcacagatctaagcagcagg

SEQ ID NO: 399772 - DNA, 90 bp, Homo sapiens
ccccagcacccactctctgggggcaggtgggcccggtgacagaaaataaacagagttgtctttgttggaaactttttacgtgtcaatacc

SEQ ID NO: 399773 - DNA, 75 bp, Homo sapiens
ctcctgagtagctgcgattacaggatgctttcattggatttggaggaaatgtgatcaggcaacaagtcaaggata

SEQ ID NO: 399774 - DNA, 82 bp, Homo sapiens
agagcgtccaccggcggctccgcaagaagtaccgagaaggtatctaaaaaagtggcagatttaatccttgaaaaacagcctg

SEQ ID NO: 399775 - DNA, 75 bp, Homo sapiens
gaggcttcgcatttgtgcagctgtcctctgcaatggacgagcctgtggagtgggagacacctgacctttctcaag

SEQ ID NO: 399776 - DNA, 82 bp, Homo sapiens
ggagagcggagcccggagcccgccgccccaggaaattcgaaatgagtcccatgactatcctcatagagtggccaagtttcca

SEQ ID NO: 399777 - DNA, 82 bp, Homo sapiens
ccgggccctgggaccccctcgcgtccgcagcagggggatatgagactttctactcggaatatcctgagtgttgcgtggatgt

SEQ ID NO: 399778 - DNA, 130 bp, Homo sapiens
cggagttctttaatacccgtgagcagcagcccaggccccttgaagagtgcagactcccacctggcctggacctgcaggctgggacaatgaaaagaaaatagctattttacatgaaaattttacaaccgtg

SEQ ID NO: 399779 - DNA, 83 bp, Homo sapiens
gttgcaagtcagcgggagagtagaatatgtttttggtgatcatccactaattcagttccaggctgaagaaaatcttggtatgg

SEQ ID NO: 399780 - DNA, 83 bp, Homo sapiens
gaaaacaaaggtagaacatggaggatcgtcaggctctaaacaaaattctgctgaataccactagaaacatacctgtaaccaga

SEQ ID NO: 399781 - DNA, 51 bp, Homo sapiens
tttccggcctgacaacttcatctttgagcagcccgacggccatggaggctg

SEQ ID NO: 399782 - DNA, 75 bp, Homo sapiens
gtcagtccgccgctcaccccgcggccgcaccttcccgccttctcaggtgtcccgacccaggctaagcttgagcat

SEQ ID NO: 399783 - DNA, 141 bp, Homo sapiens
cggcgggcattcagtgacctgacatcccagctccacatcaccccagggacagcatatcagagctttgaacaggcctcaggagtgcaagtagctgatgaagtatgtcgcattttttatgacatgaaagttcgtaaatgctcc

SEQ ID NO: 399784 - DNA, 100 bp, Homo sapiens
agagcctcacatgcaagctctagtgactggactccaaggccacggatagaagtctcaggggatccagaactgcagccagtccttgctgggctgttcctgt

SEQ ID NO: 399785 - DNA, 75 bp, Homo sapiens
tccgtgttcatgctgtccacgtatcagacagacttcatcctggactggaatgtcacgtggaataccagcaacccc

SEQ ID NO: 399786 - DNA, 100 bp, Homo sapiens
ccagcaggcggcgttcggcgaccacaacatccagtaccagttccgcacagagacaaatggaggacagatgccatggacaatattaccaggcagaaccaat

SEQ ID NO: 399787 - DNA, 90 bp, Homo sapiens
atcatggcgtgtttgtcaacattcaggttacacggtgtgggcacacaacctcattgccattgctcgtcttcggggctctgatctgaaagt

SEQ ID NO: 399788 - DNA, 50 bp, Homo sapiens
gggcaaggctctgacaatccgggccaggcttctgggaacttggcagacgc

SEQ ID NO: 399789 - DNA, 100 bp, Homo sapiens
caaatcccagactagctgctaccccaagcccgggagcttctcaggtaagtggagaaagagttgaagggaaagtgttgggatttggacatggagttcctga

SEQ ID NO: 399790 - DNA, 101 bp, Homo sapiens
ttcttgatcactgtggctggggacccgcttcgcgttatcatcctggtcgcagggaccttgcagatgcttcgggagaacctggaggaggaggccatcatcat

SEQ ID NO: 399791 - DNA, 100 bp, Homo sapiens
ggataatgtgctgccttctgctcagctgatgatggacaagaggcagaagaaaattcgtgaagatcataaatcctactatgcgattaacactgtttatgta

SEQ ID NO: 399792 - DNA, 50 bp, Homo sapiens
tcctccctgcggaccctggggtcagatatggctcgtggacagcagaaaat

SEQ ID NO: 399793 - DNA, 50 bp, Homo sapiens
actccctggaaacctagaaatggggacggcaaaacagaacagaaaggcgg

SEQ ID NO: 399794 - DNA, 83 bp, Homo sapiens
gtggagtccgagctgagatccatctgcaccacggtgctgaatcttgcctcctggaatccttcaaatcctgaatgtctcttact

SEQ ID NO: 399795 - DNA, 100 bp, Homo sapiens
ctgcccatgacggaggaagagctcggtcacggtctagatcacattctcgatccagaggaaggcgatactctcgctcacgcagcaggagcaggggacgaag

SEQ ID NO: 399796 - DNA, 50 bp, Homo sapiens
cggcatgagtatctgggatgtgaagggaaaaagacctcgatgaagttctg

SEQ ID NO: 399797 - DNA, 130 bp, Homo sapiens
cgccgctccgaggcctcgcgaccgccgagcctgcagcctgccccgcggccaacatgagcttcttgttgaagagcaaccgaggtttcaatctgcggtacgtctcctactctccatttcatttttatttccg

SEQ ID NO: 399798 - DNA, 76 bp, Homo sapiens
gatcagcatcatgaccgagcggagcgtgccccacctccagaaagagagagcaggagattcggatgggtcagatggc

SEQ ID NO: 399799 - DNA, 100 bp, Homo sapiens
agaggtggagaaagtggtggagattgtccgctcgagcctgaaggaccctgagaaagcaatggtacaacagctccatgaacgtgatctgcacctggttgac

SEQ ID NO: 399800 - DNA, 100 bp, Homo sapiens
gtggtgccgcgctcctggccccgcgcgggcggacggcggaggcgcctcccagtcaggatggctaaaggtgaccccaagaaaccaaagggcaagatgtccg

SEQ ID NO: 399801 - DNA, 83 bp, Homo sapiens
gacagtcaaagacagcaccccaagttctctggactcagatcctctgaatttggtgttcacttggcagaactgactgtagatcc

SEQ ID NO: 399802 - DNA, 75 bp, Homo sapiens
aaagccatcaccgtggagagcagcatgatcctcaatgtgctgctatgtttccagtgtcctctgggtgtttccaag

SEQ ID NO: 399803 - DNA, 100 bp, Homo sapiens
gttcaagccagatagcacctgaggacagaacatatcagctgagatgagtgaactgagtgtggcacagaaaccagaaaaacttttggagcgctgcaagtac

SEQ ID NO: 399804 - DNA, 82 bp, Homo sapiens
catctcgctcggctgcgggaaatcgggctgaagcgactgagtccgcgatggagtgtgccgtgcaggtgaagctggagctggg

SEQ ID NO: 399805 - DNA, 98 bp, Homo sapiens
tctcgcacacgggccgcggcatcctcagcatggccaactccgggcccaacagcaacaggtctcaattgacaagggctcagaggactggacgtgctcag

SEQ ID NO: 399806 - DNA, 83 bp, Homo sapiens
cgaacgcccgcggcgcgggactccatcgtcaggttttaaaatcaaagatgggaaaatcggagaaaattgcccttccccatggc

SEQ ID NO: 399807 - DNA, 75 bp, Homo sapiens
ggaggaggacgaggacttggaagcaatggctgccatccggaagaaactggtgattgttggtgatggagcctgtgg

SEQ ID NO: 399808 - DNA, 82 bp, Homo sapiens
ccgcctccgccgctgcctcaggagcggaacaacgtcggcgagcggggtggctgacgggtccctgatcaaccagctggcgctg

SEQ ID NO: 399809 - DNA, 100 bp, Homo sapiens
tttagtcggtgaagttagttgttctcattctttttcttctggacaacggggtctcactgcagtggatgtcactgatgattctagtctgattgctggaggt

SEQ ID NO: 399810 - DNA, 80 bp, Homo sapiens
cgcaaggtcgccctcaaggccatgatcaaaacgcttggccggtacaggtgtgagaaagggactactgcagtcctcactga

SEQ ID NO: 399811 - DNA, 51 bp, Homo sapiens
gcgatcctgggctaccggtctgtggcctccggcctctcctcctctccgtca

SEQ ID NO: 399812 - DNA, 51 bp, Homo sapiens
gtctgccgcgatggatgacagtaagatggatctgtctgtagaaactctgtt

SEQ ID NO: 399813 - DNA, 127 bp, Homo sapiens
ttgtcttcattcactttcccccctcagtttctgaaatgattctccagaatttctcctcataaaaaagggattcacctacgctcttaccagctggagggagtaaactggctcgcccagcgcttccatt

SEQ ID NO: 399814 - DNA, 50 bp, Homo sapiens
gctccgggggaacccgccgccgggcaggtgacagcagggacatgtctcgg

SEQ ID NO: 399815 - DNA, 82 bp, Homo sapiens
gaccacatagacatttacgcggatgtcggcgaagagttcaaccagaaccgggctgtgggtcggcccaaggggaagctgggcc

SEQ ID NO: 399816 - DNA, 100 bp, Homo sapiens
ctggccggcgtggagagccgccagggctctatcaaggggctggtgtactccagcaacttccaggacctcctctgtcagagagagcagctttgtggaaaag

SEQ ID NO: 399817 - DNA, 83 bp, Homo sapiens
agtgctttttatttttccccaattcagcagagaatattttcaagggggatatggctcgtggacagcagaaaattcagtctcag

SEQ ID NO: 399818 - DNA, 74 bp, Homo sapiens
ttgccttcaaccgggaacagagaatgtttaagcattgcactttgactatggaaacagaggctattgatggctat

SEQ ID NO: 399819 - DNA, 75 bp, Homo sapiens
gcgacctggggccctgggtgaagtgctccgccgcccttgcctccagtactatactggcaattgctggagaagatt

SEQ ID NO: 399820 - DNA, 100 bp, Homo sapiens
aggtgagtcgcggtgggtcctcgcttgcagttcagcgaccacggcgttacatagccatgtgccgcgagaagcagcccatggtgccagagtctctggctga

SEQ ID NO: 399821 - DNA, 98 bp, Homo sapiens
ccacgcctctgcaatcatgggtcaccaagagaggctgagagaccaggatgcatcatctgcagacatcagaaaagcatatcgtaagctttcactaactt

SEQ ID NO: 399822 - DNA, 83 bp, Homo sapiens
agcaatcctaccatgtcagccttcccagtagctggaactacagactgcaggcaccacctgtgtgaaccggacatgaaactggt

SEQ ID NO: 399823 - DNA, 51 bp, Homo sapiens
gcctgagcccgacattattcctgagaatatgacagatacctagcatctagc

SEQ ID NO: 399824 - DNA, 100 bp, Homo sapiens
ggcggatctggaggagcagttgtctgatgaagagaagtgttctggacttggtgcctctttctgttatatgctttcctatttagttgggagaccagttgta

SEQ ID NO: 399825 - DNA, 90 bp, Homo sapiens
ggaagttccacgtcagtcagtctgacggatgttttagaagaatgtatgtctcttcccaagctatcttcttattctggatgggtggtagag

SEQ ID NO: 399826 - DNA, 74 bp, Homo sapiens
attggagctattgaaaaggctgtgtgtgatccctcacatccacaaatctctgattggaaagaagggacagcaga

SEQ ID NO: 399827 - DNA, 82 bp, Homo sapiens
gcgcggacatggcctcaaacgcactctcgagtggaccctgaggagctcttcaccaagctcgaccgcattggcaagggctcgt

SEQ ID NO: 399828 - DNA, 75 bp, Homo sapiens
cggtgacatgtctgtgagctgcggaggctgcggcccccagggttctgagcaaggttcaaccagtcaagaacaggc

SEQ ID NO: 399829 - DNA, 100 bp, Homo sapiens
attcacccttgtagagtcattcctgcctttgagcggactcccttttaagaatggtagctgagtggaggttgtctcgaggtgttgaagaacagacacaagc

SEQ ID NO: 399830 - DNA, 90 bp, Homo sapiens
acaaattacagcagtctgaatcgagctcagctaacctttgaatatctgcacacaaattcaaagtgactgagaccgaagatgatagtgata

SEQ ID NO: 399831 - DNA, 90 bp, Homo sapiens
tccgtgtgtcacaggaagactcttctgttgttggcctactgtacccctgtatcgacagtcacctcggagaaccccacaaatttaagagag

SEQ ID NO: 399832 - DNA, 80 bp, Homo sapiens
ggaaatcgggctgaagcgactgagtccgcgatggagaaatattgctgacactgctgaagccagttgcttcttcagctgac

SEQ ID NO: 399833 - DNA, 100 bp, Homo sapiens
tcagtctgacatccacactcgaaaacctttccccgtcagcaaagcatcacaatcaggggagcatgtaacttcaaggtttaaaaacgaggtggagaggatg

SEQ ID NO: 399834 - DNA, 101 bp, Homo sapiens
ttgcatctgcctgtccagccagcatggaaccaaagcggatcagagagggctaccttgtgaagaagagagacaagagagacacctccaacttcgacaaagag

SEQ ID NO: 399835 - DNA, 97 bp, Homo sapiens
gggagcagaagggaggctccaagacctcatcaacaattaaggtgcttccagaggcagggctatgctcacattcatggcctctgacagcgaggaagaa

SEQ ID NO: 399836 - DNA, 82 bp, Homo sapiens
ggggtacgctggcttcatcatgcccatcgaggtgcacttcaaaaacaaggtgagaagccctaccactgcaactgggacggct

SEQ ID NO: 399837 - DNA, 83 bp, Homo sapiens
aaggacttggcctccatggtgtcagagcaaggagaagctgttgggtttgccttcccggattgggcctacaagccagagtcgtc

SEQ ID NO: 399838 - DNA, 100 bp, Homo sapiens
tgccgccgccgggactcccgtcccagcaggtgacctgagcatctctgcagaccgcctgagtgagaagcgctctcccaacgactttgccttatggaaggcc

SEQ ID NO: 399839 - DNA, 101 bp, Homo sapiens
ttttaaatttatgaactcgaaatgaagcggaaagcagatatgcgcgtcagcatactttggcggtttgcccagtatgcggagatcgtccacttcaccctccc

SEQ ID NO: 399840 - DNA, 88 bp, Homo sapiens
tgttgccattgaaaaccctgctgatgtcagtgttatatcctccaggaatactggccaggttacgggtaaattccggggaggtgtgaac

SEQ ID NO: 399841 - DNA, 100 bp, Homo sapiens
acctggtcattgtggaaaaagcaggatacaatctcacctgagttcgaaaaagctgttcatttgcaagaggagctcatagctattaattcaaaaaaggagg

SEQ ID NO: 399842 - DNA, 100 bp, Homo sapiens
ttcacccgctgccgggcaccgaggaccagctcaatgacagcttccccgggcgctgcctggacaggcctgcctgcgtgctgggacatgtctggcctccaag

SEQ ID NO: 399843 - DNA, 74 bp, Homo sapiens
acccccgagaagtacttaaaaaaacattggaattctgcttatctaggtcaaaatgcagatcttcgtgaaaaccc

SEQ ID NO: 399844 - DNA, 98 bp, Homo sapiens
tcaatgagaagaatgaacagacctagtgggcgttgcctttagacccagagcgggcagctaaagttgctgagcagcaggagagagagcgagcagcacag

SEQ ID NO: 399845 - DNA, 90 bp, Homo sapiens
agttatctcaattttgctcgaaagagaataaagagttggaagagactcaggtccccctcctccctcccttgctataggccttcatgcccc

SEQ ID NO: 399846 - DNA, 90 bp, Homo sapiens
taaggaatttattgatgggagcttacaaatgggaggtgccagcttaggaataaccagcgatggattttttcagctggaagaattgcccgg

SEQ ID NO: 399847 - DNA, 100 bp, Homo sapiens
aagagaggatttgcttttgtaacttttgatgatcatgatacagttgataaaattgttggcgtggtgaccaagatgaagatgcagaggaccattgtcatcc

SEQ ID NO: 399848 - DNA, 100 bp, Homo sapiens
gtcctgaacctggaagttgtgctttttaaggctgatcttcagacaagttctcagcgtttaaatctttcagcctccaatgctgcagtggctgaacttaaac

SEQ ID NO: 399849 - DNA, 101 bp, Homo sapiens
ctacacaccacctctagccaactacctgctctccaaggagcatgctcgcagctatgaggacggggacttggttgccttttccagtgacgaggaattgacaa

SEQ ID NO: 399850 - DNA, 74 bp, Homo sapiens
tcaaaatgaagcccataggacttcaagagaggttatcttatgatgaggcttttgctatggctaatgatcccttg

SEQ ID NO: 399851 - DNA, 75 bp, Homo sapiens
ggagcccgactcccttctggaccaagacgactcctacgggagaagaaatgggtgaccgttggtgacacatcccta

SEQ ID NO: 399852 - DNA, 80 bp, Homo sapiens
tctgaaaggtggaatcctactcagaatgtgaggaagatggatgttttgaaagctaccgcagaacaaatttcttctcaaac

SEQ ID NO: 399853 - DNA, 75 bp, Homo sapiens
agggtaaagtcgagtatctggtgaagtggaaaggatggcccccaaagtgcgtgagcatctgctccctggccttca

SEQ ID NO: 399854 - DNA, 100 bp, Homo sapiens
ggggaataaccctgcagaaaatggagatgccaaaacagaccaggcactgcaacatggtgctggagaacgtgaaggagatgtggactgaggtacccaagag

SEQ ID NO: 399855 - DNA, 98 bp, Homo sapiens
agcaaagagctgcatcatgaattcaggagcatcctactttgaaacatatggtacatttgtgttaaggctagtcaccctgctgtggaatagaaggccag

SEQ ID NO: 399856 - DNA, 90 bp, Homo sapiens
caaagtccttggaagcaagtggctgttcttgtagttttctgcatagataaacatatctgaagagatggattaagaatgctttggattaag

SEQ ID NO: 399857 - DNA, 83 bp, Homo sapiens
gaaactgcaccttatcacccggaacctgcagggggatatgagactttctactcggaatatcctgagtgttgcgtggatgtaaa

SEQ ID NO: 399858 - DNA, 94 bp, Homo sapiens
gcggctcagaagataaacgaggggctggaacacctcgccaaagcagagaaataaattttgatttggctgctgggctgctaccttgaaatccaag

SEQ ID NO: 399859 - DNA, 80 bp, Homo sapiens
cttacttctccgccaacgcggtcatctcgcagaacgccatcaaccagcttgagaaagatcagtctaaagaaaaggagaag

SEQ ID NO: 399860 - DNA, 75 bp, Homo sapiens
aagaacatgtctgtacacctgtccccctgcttcaggatcacagaagaactgcagcttcctggggagcagtttcac

SEQ ID NO: 399861 - DNA, 50 bp, Homo sapiens
acgatgagctcaatcggcactgggccctaccacttatgtcttggatgaag

SEQ ID NO: 399862 - DNA, 97 bp, Homo sapiens
aacatcgagtcactttgcctggacaggaggaaccctccatccgggtgacctgcataggttcctgcggggtctccaacaaggctaatgacacagcgtg

SEQ ID NO: 399863 - DNA, 88 bp, Homo sapiens
gcgtctgccactgcaactgtggccggtgctggagaatctggtaaaagcaccattgtgaagcagatgaggatcctgcatgttaatgggt

SEQ ID NO: 399864 - DNA, 83 bp, Homo sapiens
cgcagggcctgcagcgggagctggacggcgagcgcgagcggcgcgagaaacatttgcaagtgaggaagcagcacaaccctggg

SEQ ID NO: 399865 - DNA, 83 bp, Homo sapiens
ggagcgctcagtaaatgctcgctggacgaataaatggctagataaggttaatgttgaagaaggaaaatgcggaagtcgtcatt

SEQ ID NO: 399866 - DNA, 113 bp, Homo sapiens
aacactgaagagccctcccaaaggatttgatacgactgccataaacaaaagctattacaatgtgagtcattcaggagagcaggaaagaaaaggccatccctgtggatgtcgcg

SEQ ID NO: 399867 - DNA, 100 bp, Homo sapiens
ccttgaatgtcctgagttgatgtcaagattcatgcatatcataaaagcacagaaactctataaaacaggtcgggagatgcaggagaggatcatggacctg

SEQ ID NO: 399868 - DNA, 98 bp, Homo sapiens
ttgccagtgagaacatcctacaaagcatttagtacaagatggaagtgtgttcatcctcgaggtggtgtgattcagagtgtttcttcatggaagcatgg

SEQ ID NO: 399869 - DNA, 100 bp, Homo sapiens
gattcgcagtggtcgcttcttctccttggttatctgggaacaaagcaggacaagtctgggcacctgaaggatctactgctttcaagtgtctgctttcagc

SEQ ID NO: 399870 - DNA, 100 bp, Homo sapiens
aaggagagcgccaaaccattactgatgatgtggaggttaacagctatctttctgtacttaagagattatggcatcagaaacccacaatgttaaaaaacgg

SEQ ID NO: 399871 - DNA, 82 bp, Homo sapiens
cgctggtgaccctgccgctggcgagcgccaccgcatgggtcgcgtggggcaggcagtggcgctgcgggccaaggccttcggc

SEQ ID NO: 399872 - DNA, 82 bp, Homo sapiens
ggagagtccggccgcgacaggacgcagcccctgtcaaagggaacaggaagcagtccacggagggtgacgccctagacccacc

SEQ ID NO: 399873 - DNA, 75 bp, Homo sapiens
ggacagtcatcaccatgggccgggatcacattctgattggcggcgactggcggcgcgatggacctgaccgggctc

SEQ ID NO: 399874 - DNA, 150 bp, Homo sapiens
catcggagcaccatggcggagctaggagctggcggcgacggccacaggggcggcgacggcgcagtgcgaagcgaaacaggaaaaccagtagattcccagacatcgcgaagtgaatctgaaattgtgccaaaagttgctaaaatgactgta

SEQ ID NO: 399875 - DNA, 90 bp, Homo sapiens
gcacagtgtctgatggagctttcctaccagaccctgaaattcacgcatcaggcgcgggaagcggctgtgtgccgagcttggaagaaagtg

SEQ ID NO: 399876 - DNA, 100 bp, Homo sapiens
caatgagtggcacacagtctactatcaccgacagattgacgtgagtgaattcagatataactcaagcttgttagagggctttttaaaaataaaaagttga

SEQ ID NO: 399877 - DNA, 124 bp, Homo sapiens
aatgtttgaacaaactcgaagaacagctgtggaaagaagttgcaaaacactgggaacgtgttgtgggctttcacgtactgggtccaaatgctggagaagttacacaaggctttgcagctgcgct

SEQ ID NO: 399878 - DNA, 90 bp, Homo sapiens
ggaagatcaagctgcagaacaaggtgtttcagtactcctacgaggggaacgatgtcagcgacctgccagtgaacctgtcagtcgtgtgga

SEQ ID NO: 399879 - DNA, 51 bp, Homo sapiens
ttgacatctttacccgactctttcagagcaaagaagattttctgaatatct

SEQ ID NO: 399880 - DNA, 75 bp, Homo sapiens
cccggaccctggaagagaagagggtggctaatgattaagggtgataaaagaaaatgtggctgaagttacccgaag

SEQ ID NO: 399881 - DNA, 82 bp, Homo sapiens
gaaggaacttggttccccctccctcagcttccgccccaaaagaacatccagtcatggataaaaatgagctggttcagaaggc

SEQ ID NO: 399882 - DNA, 100 bp, Homo sapiens
tatgtgactatcattgatgccccaggacacagagactttatcaaaaacatgattacagggacatctcagggagcctccaccaaggcgctggtgcaacacc

SEQ ID NO: 399883 - DNA, 83 bp, Homo sapiens
tgcgttgcgtgccctacttcaaggataagggcgacagcaacagctctgccggctggaagggcgccctgcgtccggcagaggag

SEQ ID NO: 399884 - DNA, 98 bp, Homo sapiens
aaacggagccagcggctgaggaggggccccagcagcccccgaaggccctatcaggacatggagtatgaaagacgaatagcctaacatggcagaccaga

SEQ ID NO: 399885 - DNA, 100 bp, Homo sapiens
cggatttcaccacaagaagggctgccaggactcacaccacccggcaagaactgctcactacggctccctgccccagaagtcacacggccggacccaagat

SEQ ID NO: 399886 - DNA, 50 bp, Homo sapiens
tggcctcacctggatctactataccagtcctcatcaccgggggcatcgtg

SEQ ID NO: 399887 - DNA, 111 bp, Homo sapiens
gacatgagcagcggctgccggtcctgggactaggccccgccattttggatccgctgacagtactatactggcaattgctggagaagattttgcaattgttgcttctgatac

SEQ ID NO: 399888 - DNA, 100 bp, Homo sapiens
aatctacaaccttctcattcagacacacggagcggcctattgccaattcatggacatgctcttccctggctgcattagtttgaagaaagtaaaatttcaa

SEQ ID NO: 399889 - DNA, 106 bp, Homo sapiens
cgagcacagagcctcgcctttgccgatccgccgcccgtccacacccgccgccagtcaggatggctaaaggtgaccccaagaaaccaaagggcaagatgtccgctta

SEQ ID NO: 399890 - DNA, 83 bp, Homo sapiens
gtcttgcctgtgtcccacttgttcgcggcctataggagccagcattcgaacgttcactccattttattttctggtggagccgg

SEQ ID NO: 399891 - DNA, 73 bp, Homo sapiens
gacaatagaaagaaccagcttaaagatatggctattgctactggtggtgcaggcacctcaacacctttgcttc

SEQ ID NO: 399892 - DNA, 100 bp, Homo sapiens
gtctgtgacacaccatgactaccgaatggagctggcacaagcagggactcctgccccaacaaagactgattcttgctattccaaatcctcttccacgttg

SEQ ID NO: 399893 - DNA, 75 bp, Homo sapiens
taagggaactttgcgatacatgagcccagaacaggaacagtaagaggaccttgtgcatgaataatttgtttccac

SEQ ID NO: 399894 - DNA, 95 bp, Homo sapiens
agcgcttctttaagggctacgggaagatcctggaggtggatctgaagaacggagaattttctctacatgtgcacccatttaaaggactcggcttc

SEQ ID NO: 399895 - DNA, 80 bp, Homo sapiens
ggacgggccatacccaataaccaggtgcttggcaaaatcgagcgggccattggggagtacatcaagacctggcggccacg

SEQ ID NO: 399896 - DNA, 51 bp, Homo sapiens
ggaacatgtcaagtccttttcttggagagaacattgaaagtattctctaag

SEQ ID NO: 399897 - DNA, 90 bp, Homo sapiens
ccgccgcgggcctcctgcctgggggcaaagcccgcgagttcaaccgcaaccagcgcaaagactcagagctagccacagtgcagcctggcc

SEQ ID NO: 399898 - DNA, 100 bp, Homo sapiens
cccaggggcatgttggaaagaactgagagaaagagcaacaaagcggcgagtggtgtgagagggcagcacgcgctgtggagagacaagagagacacctcca

SEQ ID NO: 399899 - DNA, 100 bp, Homo sapiens
gtcctcaatctccttttccttggctaccctttcgagaggcccgtgccatgagaccgcctggggtgagcaaggcgacctgggctgctgcccgaaggtttgg

SEQ ID NO: 399900 - DNA, 51 bp, Homo sapiens
gtattacaacttttagctgcagtggagctttccgatgaagttaaattccgt

SEQ ID NO: 399901 - DNA, 100 bp, Homo sapiens
actcccgcccacgtcccatttcgcccctcgcgtccggagtccccgtggccaggtagtaagcattaataatgtctttcatctttgagtggatctacaatgg

SEQ ID NO: 399902 - DNA, 91 bp, Homo sapiens
gtcaaacgcagaaggactgcctcactgagcaaccaagaatgatagtgtcgaaccaagtggaacaaagaaagaagatctgaatgacaaagag

SEQ ID NO: 399903 - DNA, 102 bp, Homo sapiens
tcccaagatgtcgcagacggccatgtccgaaacctacgtgaacagagtatctgtcaggcaagagctgctgtgatggtttatgatgatgccaataagaagtgg

SEQ ID NO: 399904 - DNA, 80 bp, Homo sapiens
gagatgaaccatcttcctgcacacagccacgatttgcaaaggtcagcccaaggccaaccccactgtcactctgttcccgc

SEQ ID NO: 399905 - DNA, 135 bp, Homo sapiens
cagaatcaacgacgggctccccggctcggctctcgctgcggcagacgggctcccccgggatgatctacagggtgaagttgaacaaattgctatgatgaaaccaaaaggccagactgaacacgatgagggtatgct

SEQ ID NO: 399906 - DNA, 90 bp, Homo sapiens
tcggttttcttatgcttataagagtggaacaggtaatgagaatcttcgccttgcgttactccacaggatccgctgaacataggatgttgc

SEQ ID NO: 399907 - DNA, 83 bp, Homo sapiens
cggaggaatgcaaggcctgcaccaggaggcagtggagaaggtgacacagcacatccacggcctgtctgggaagaaggatgggc

SEQ ID NO: 399908 - DNA, 78 bp, Homo sapiens
ccgactgaacatcacggtggtacaggcatctgcatctgggaccgacctcctgggctggctgatcaaagaggaagcagc

SEQ ID NO: 399909 - DNA, 100 bp, Homo sapiens
tttatgatttcttcagatatgtcgaaatgtcaacatttgacatagcttcagatgcatttgccacattcaaggacatggatttgattgacatactttggag

SEQ ID NO: 399910 - DNA, 90 bp, Homo sapiens
aagaacatgacgccgtcacccttcctgcgattctacttagatatgtcttgtcgttcaagacttgcaacactaaacgagaaattgacagcc

SEQ ID NO: 399911 - DNA, 110 bp, Homo sapiens
ctcagccaggggcagccggctctggtgctcccagaagaggctgttgagctaatggaccgaactgaaatgccatgccaggcattagtgaggatgctagccaagaaacctgg

SEQ ID NO: 399912 - DNA, 88 bp, Homo sapiens
taagacatcacaatcccattattcagagcgcgtatggagtggaaacgcttgtagggcttcaccagatggagtctcactctgtcaccca

SEQ ID NO: 399913 - DNA, 98 bp, Homo sapiens
gcgtctctctgctgcggcgcggggaccgctgtgctctcggtccaagcatctcattttgaaggcctaatcacaaccatagttgggtatatacttttagc

SEQ ID NO: 399914 - DNA, 83 bp, Homo sapiens
ggagcctccgtgcggagaccactgttcaaggccacaggttcagcagctggacatggagaaccaacgctcatcacctctgtcgt

SEQ ID NO: 399915 - DNA, 100 bp, Homo sapiens
gccgccgccgccgccgaggtcccgcaccagccatggcgcagatcctccctgttcgctttcaggagcacttccagatggagcagttgaggaatgagctact

SEQ ID NO: 399916 - DNA, 127 bp, Homo sapiens
ctcaccctgatggacattctggacacagatggggacaagtggttagatgaactggattctgggctccaaggatgtgaagccggtagagaaataaagcatcgcccctctgcgcgcccctccccgtctg

SEQ ID NO: 399917 - DNA, 75 bp, Homo sapiens
cttttcaggacagggtcacagactaggaagagagacacatctcaattcaaaggcagcttgctgatctagagaatt

SEQ ID NO: 399918 - DNA, 100 bp, Homo sapiens
ctcaccccgcggccgcaccttcccgccttctcaggttctcccccatgggcgtcgatcacatgagcgggctctctggcgtcaacgtgccaggaaacgcctc

SEQ ID NO: 399919 - DNA, 98 bp, Homo sapiens
aattctgtgttgctgttggagcagatttcttctctgtgtagcaagtatgttcatgcggatgctcctaccaataaaacactggctgggctggtggtgca

SEQ ID NO: 399920 - DNA, 100 bp, Homo sapiens
tcactaagccagaatcctgaccttgctgcacaggccattgtttttgtggtgggaggaggcaactacattgaatatcagaatcttgttgactacataaagg

SEQ ID NO: 399921 - DNA, 97 bp, Homo sapiens
ccgcagaagcagtgaactcttggtgaggaagctccaggggactgagcctcggccctccagaccagtgtgcttttcttggagaaagaagaaaagaaga

SEQ ID NO: 399922 - DNA, 82 bp, Homo sapiens
tccgggacgcggagcccggagctggggcgacgaggcgattgcgggggcctgggctagattggagaaagtttgaatattggtg

SEQ ID NO: 399923 - DNA, 98 bp, Homo sapiens
gaagaggctgcagcagcacatacaggccaggaccaaaccgtcacgagccaggtggccgtgaccctccgcagcactttggggggccaccacctctgatt

SEQ ID NO: 399924 - DNA, 100 bp, Homo sapiens
ctcggggtcccggtcgcgaggaggaggaggatgtggcgcgcggaggggaaatggctgccgaaaacaagccggaagcctcccctggtgaagacacaaactg

SEQ ID NO: 399925 - DNA, 80 bp, Homo sapiens
cggaggacgcgcccggcgcccctgagccggccgagcggcgacggaccgcgagatgaaggatttgggggcagagcacttgg

SEQ ID NO: 399926 - DNA, 87 bp, Homo sapiens
cacccagcctcggtgaccaggagactcggcgcaaggcccgagtattcaagtcaaacaacgttgaaatggattgggtgttgaagcata

SEQ ID NO: 399927 - DNA, 101 bp, Homo sapiens
aaaagaatcaccaaaatatctggctaatgcctgcttcggaaatgattaaagcaaggagagccaatcatgactggcaaaacacagaccagcaacgtcaccaa

SEQ ID NO: 399928 - DNA, 50 bp, Homo sapiens
gccaatggcacggaggcctgcgttggaaatcctgactgctcgtcagaaga

SEQ ID NO: 399929 - DNA, 101 bp, Homo sapiens
tggggctgctgtttctcttcgccgacggtcatcatcctgaaccacccggggcagattagcgccggctactccccggtcatcgactgccacacagcccacat

SEQ ID NO: 399930 - DNA, 107 bp, Homo sapiens
cgcacacatcccggtcaggatcaaggagcaagtagtgggaatgaagaaaactttcttgagaacgagaacacatcaggaaacaactcaataagaagcagagctgtgca

SEQ ID NO: 399931 - DNA, 100 bp, Homo sapiens
cgggctccgcgcccggccggacccgggcccgaggagctgacatggacccaaatcctcgggccgccctggagcgccagcagctccgccttcgggagcggca

SEQ ID NO: 399932 - DNA, 74 bp, Homo sapiens
cgcggaatctgggtgcagttcctgcagtaccccactctacgatcaggacacagatttagacttggagatgttag

SEQ ID NO: 399933 - DNA, 60 bp, Homo sapiens
gggggagaacgttactgtggagaaccaaccaagatgaatgcactggacacccttggtcag

SEQ ID NO: 399934 - DNA, 83 bp, Homo sapiens
cctggacctggagaagaatgaattgtggtggtgccatgcagcaagaatcagagagatgcagagttagagccagaaggcctgac

SEQ ID NO: 399935 - DNA, 88 bp, Homo sapiens
cctaaatggcgcagcatgattttgttcctgcttggctaaatttctcaacaccacagtcagctaaggtggatatactcggttgcagggg

SEQ ID NO: 399936 - DNA, 90 bp, Homo sapiens
agaatccccccgaaaggaccccccaggtcctcatgctgataccgccagtggatgccagaatttgcagtgtggttttcgagcctgctgccg

SEQ ID NO: 399937 - DNA, 90 bp, Homo sapiens
ggggagcggagccatggcctccggatacattaattgtttggtcagaagcagagaactatgatttggctctgagttttcaggagaaagctg

SEQ ID NO: 399938 - DNA, 50 bp, Homo sapiens
ttcagcctcctgagtagctacgactacagaaaaggtggccattaagatcc

SEQ ID NO: 399939 - DNA, 74 bp, Homo sapiens
agcctgatctaacccctagaaacagacaagttggatggcttgaggactggtactaaaaggaaacgtgactggga

SEQ ID NO: 399940 - DNA, 82 bp, Homo sapiens
ggcgacagcaacagctctgccggctggaagcaaaatgatgcttcaacacccaggccaggtctctgcctcggaagtgagtgct

SEQ ID NO: 399941 - DNA, 100 bp, Homo sapiens
tgtagaccttccacactgccacctgattaaaggaattgaattctgcttggtcagaatcgtgatggcattgtgttcagcactgatgactattttcaccatc

SEQ ID NO: 399942 - DNA, 75 bp, Homo sapiens
ccaaaaccagtcatgaccactagacccacagctgttaaagcaacagagtgggctccacctcaaccagaatatttc

SEQ ID NO: 399943 - DNA, 75 bp, Homo sapiens
catcttcccggaatcagattcaaagatttacagaatgtcaacatcacactgcgcatcctcttccggcctgtcgcc

SEQ ID NO: 399944 - DNA, 72 bp, Homo sapiens
ctccgaaacccgccggtcaacgcgatcagaattctccctctgaagcacagaatttagatgagaatacaactg

SEQ ID NO: 399945 - DNA, 75 bp, Homo sapiens
ctagccctgcagacagaggtgtgctgacgacctgctacaacagaaactcaccccacacagaccgcgtttctctcc

SEQ ID NO: 399946 - DNA, 75 bp, Homo sapiens
gaagaagtcaaggttgcccccaggcggtccttcctgggacctgctgaagttcccatgatgtcacccaatggatcc

SEQ ID NO: 399947 - DNA, 90 bp, Homo sapiens
ccgccttctctgtcagctctttccccgtcagcatcccagccgtgctcacgcagggtttccaggcctgaggtgcccgccctggccccagga

SEQ ID NO: 399948 - DNA, 75 bp, Homo sapiens
aggcagtctttgctacgtacagcaaaaggtgactgaaaactcctgaggcatttcctggactagaatgggtagtga

SEQ ID NO: 399949 - DNA, 83 bp, Homo sapiens
ccagcagcccccgaaggccctatcaggacatggagtatgaaagacggccctgggaggagcggggacactgaggacctctctcc

SEQ ID NO: 399950 - DNA, 90 bp, Homo sapiens
ctgttggattctaatgcagttcatcacatcattcatgattttcagattctgctagcctaccaagaatccaagacacattttgtttgtgtg

SEQ ID NO: 399951 - DNA, 75 bp, Homo sapiens
ctgaactgtaagctggctaccagggccaagtcaccttcaggccattcagaggaggaaagagaggggaatatgaag

SEQ ID NO: 399952 - DNA, 83 bp, Homo sapiens
ggaaatggccgaggggccggagccacagggccgccttcaacaacaacgtgagcgtggcctacgagtgcctgagcgccggcggg

SEQ ID NO: 399953 - DNA, 75 bp, Homo sapiens
ggggcctgggcctcccggtccgcaagcagggcgtgatggtgggcatgggtcagaaggattcctatgtgggcgacg

SEQ ID NO: 399954 - DNA, 50 bp, Homo sapiens
acgacgaggaagaggaggtttctgaggaggcgatcgagatcggatgacag

SEQ ID NO: 399955 - DNA, 50 bp, Homo sapiens
gcaggactgccagaaaccaaatctggagtgtgacaatatgaaccgctttg

SEQ ID NO: 399956 - DNA, 83 bp, Homo sapiens
cagccttcctgtgtggttttaccgcccagagagcgtcatggacctgggtgctcttacagcctgttccaagtgtggcttaatcc

SEQ ID NO: 399957 - DNA, 101 bp, Homo sapiens
gcaggagaaatagggaccggctgctttggaagaaacatgctgtagcgcgcaaagagtctgccaaggagaagcagctgaaggaagaagagaagatcctggag

SEQ ID NO: 399958 - DNA, 90 bp, Homo sapiens
gtacctgttaccactttcaaaaccaggcccacaactcctctttctgtaggcaccattgtcccacctccgaggcctgcttccagaccaaag

SEQ ID NO: 399959 - DNA, 134 bp, Homo sapiens
ccagagcctggagtctgcgaaggccgggacccggttccccggcccacagtgggggtgtgcaaacccgagagaactgggtggaaccgtcccaaaatgtcccttgctcagaagaaggatcgggtagctcaaaagaa

SEQ ID NO: 399960 - DNA, 100 bp, Homo sapiens
tacaccctgttaatgttgatattttgacctccttccatgaatcacaaatgttcttaatggcatctagaatggaagctcttcgtgggcggtcttgactgga

SEQ ID NO: 399961 - DNA, 82 bp, Homo sapiens
cggctctgcgctggccgggggcgcgggcggcggcgccggcaggaaggttgttcttgcagaacatgccagcagaagcattcac

SEQ ID NO: 399962 - DNA, 90 bp, Homo sapiens
gcaggagccgggctgcctcgagccggggctggaggctccccgggagaattaaacaaccaccatgtcgagcaaaaaggcaaagaccaagac

SEQ ID NO: 399963 - DNA, 100 bp, Homo sapiens
cggaacttgccgcgtcgaggactgtcggccccaggccagccagcctgcgacccccggccccgagagtacctgatcaagctccctgaggactgtggtcagc

SEQ ID NO: 399964 - DNA, 83 bp, Homo sapiens
ctcggcctccggcgcagcccggaaatgtccggcaagatcgagaaagcaggagcagctgtacaagatgcagcactggcagccgg

SEQ ID NO: 399965 - DNA, 75 bp, Homo sapiens
gtaacctttgacgaccatgactccgtggataagattgtcaggcaagttaaagtcttcagagccctgtatacgttt

SEQ ID NO: 399966 - DNA, 100 bp, Homo sapiens
aattctcctctactgaggtcatcctttggcaatggacctcatcatgaccgttgctgtacttacaatgaaaacaacttggtggatggtgtgtattgtctcc

SEQ ID NO: 399967 - DNA, 88 bp, Homo sapiens
agccatcttctaattttcattccttcaaaggtgaaaccagcccagagaagttacgggatttgcccccggggctcctgcccagcaagcc

SEQ ID NO: 399968 - DNA, 75 bp, Homo sapiens
gatgtagagcctgttttagatttggtcacaattcagaatcccaaggaccatgaaagtttcgctcttcttgcccag

SEQ ID NO: 399969 - DNA, 83 bp, Homo sapiens
ggcaccgaggcactcagaggagcccgtgcagcctgccaggactcttccagacacgggatttgtcggtgaacaacgcagagctg

SEQ ID NO: 399970 - DNA, 83 bp, Homo sapiens
ctgcaacaattcagccacctgcccaggtaagaacaagagagttggaaagcagttagcctcacagaagatccttcagctgctgc

SEQ ID NO: 399971 - DNA, 75 bp, Homo sapiens
ctggcaagaaagctaagcattgatattatgaggaaactgaggcttggtgaagttacgaaacttgtccaaaatcac

SEQ ID NO: 399972 - DNA, 105 bp, Homo sapiens
aaaaccaaaggccgaagtacaagatctaaggctcttgtctgttgacgaaggatcagagattggtgtattcgggcagactgcttcccgatcatctgcagctgaaag

SEQ ID NO: 399973 - DNA, 82 bp, Homo sapiens
gatcctgaaccgcgcggccgaaccctccgtgtactaatggtcacttgatgtgcgctggctgttttatccacctactagcaga

SEQ ID NO: 399974 - DNA, 95 bp, Homo sapiens
ggaggaggttcgaagctgagtatgtgacaggaaagaccacagcaagattctttcattcgtctcctcctagcctgggggaccaggctcgaactgac

SEQ ID NO: 399975 - DNA, 100 bp, Homo sapiens
ttctcgtggcggcggggaccgtccagcccagcgattctcagtcagctcgacccacttttgtaatccagccacagaatacagaggtgctggttggggagag

SEQ ID NO: 399976 - DNA, 85 bp, Homo sapiens
gatattgaaatggacagtggagatgaagcctaagaatatgatcagatgtatcggcaagcagtgtaaacggaggacttggggaaaa

SEQ ID NO: 399977 - DNA, 98 bp, Homo sapiens
ggagagcctgttggagaaacacaaagagggttttggccaaattgggcgagggcacaaaataaccacttaccccttctcaccgaggaagagcgggagaa

SEQ ID NO: 399978 - DNA, 74 bp, Homo sapiens
tggcactagtcaagatggaggtgatgctgtgccttgctttccatgacatttcccctcaagcaccaacacatttt

SEQ ID NO: 399979 - DNA, 75 bp, Homo sapiens
gctctgtctgggttctgctgtcaatggtgttgtccatgaggagctggtttcacctgaggacctgctggagtggct

SEQ ID NO: 399980 - DNA, 90 bp, Homo sapiens
tgccactttgcatcccacgccggaggaggcattaacgagaccgggtaagacgctccacactcatgctcagagcagcattattcacagcag

SEQ ID NO: 399981 - DNA, 135 bp, Homo sapiens
aagaaactcaaagatgccattgaagaaaagatcatcattgctgaagtcgtgaacaaaattaaccgtgctaatgggaagagaatgtaaagctgtacagttatggcgaccccaaagagaaagcatgaaagaaccttt

SEQ ID NO: 399982 - DNA, 83 bp, Homo sapiens
gcttacgcagaaggacctggccacgggctgccagaggaacccgaccagaacctgtccagccctgaggaggtgttccactctgg

SEQ ID NO: 399983 - DNA, 50 bp, Homo sapiens
agttcagaggacaccctgctgaaggtaccaggaacaaggagccaaactgc

SEQ ID NO: 399984 - DNA, 100 bp, Homo sapiens
ggccgctgagggctagctacacacacgccctcacgcccggcgagcccgcgaggatttttagactctgaggagcagttggagctaatccacattatggaaa

SEQ ID NO: 399985 - DNA, 82 bp, Homo sapiens
tttggtctcggcttttatctgcctccctgagtttatcaggtagaagatgtgtgtgaagaagaaatgccagaagagtcagatg

SEQ ID NO: 399986 - DNA, 100 bp, Homo sapiens
gaagcacaaccacagcaagagcacctggctgatcctgcaccacaaggtgtacgatttgaccaaatttctggaagagctacaaccggaagcttcaagctat

SEQ ID NO: 399987 - DNA, 97 bp, Homo sapiens
cagtatgacaccttccacaatggcagctgggtccacctcaccatcaacgaaactaattctgaagcaagcccttatagttgtgctgcagtggtgtttc

SEQ ID NO: 399988 - DNA, 100 bp, Homo sapiens
gggaagcccaccgactttgaggatctggaggacggagaggacctgttcaccagcactgtctccaccctagaggttgaattgaccaaagcaatggtgatgg

SEQ ID NO: 399989 - DNA, 51 bp, Homo sapiens
cagaatcaggggaggcatgcttcagacaagttggatggcttgaggactggt

SEQ ID NO: 399990 - DNA, 83 bp, Homo sapiens
ccgagttcatttccgagcgggtggaggtggtgtccccactgagctcttggaagagagatattgatgatgttaagaagttcaaa

SEQ ID NO: 399991 - DNA, 75 bp, Homo sapiens
acactgcaatgtttttgtggaacatggctacccacctttctgttctgagacccctcaagagacatataagaaggt

SEQ ID NO: 399992 - DNA, 95 bp, Homo sapiens
gacgtcgcaaaaaaattggatagagctgaaggtggtggatcatcgtctggaaatgtgtctggggttgcccctgctgcccctgcagggggctcgcg

SEQ ID NO: 399993 - DNA, 50 bp, Homo sapiens
ctcattttatctgccacgacccagaaggatcaccccttctgtgtcattct

SEQ ID NO: 399994 - DNA, 75 bp, Homo sapiens
cggcccagctctctctgacacagaagtcctggagggtatttgggagccaaaaagaaaaagaagaaacagaagaga

SEQ ID NO: 399995 - DNA, 87 bp, Homo sapiens
gaaatgtatcgccgctcagctttccctaaggcagccatcaaaagggtggagatgacccctgagaagttcagtgtcttaatggagaag

SEQ ID NO: 399996 - DNA, 98 bp, Homo sapiens
agtggaggaagtacagccagcagtaggagcattgcttttcgtggtgaaagaggcaatgatgaatctgccatcgaaatgattaaagtatctcatttgaa

SEQ ID NO: 399997 - DNA, 75 bp, Homo sapiens
ccttgatcctcctcctaattgcagcaatcatcctcttccagtggtagcgtgtttgggtctggaaacactggaaga

SEQ ID NO: 399998 - DNA, 74 bp, Homo sapiens
ccggccttcatcgacatcagtgaagaagatcaggtagttttggatgttgggtgtggaactggaattctctctat

SEQ ID NO: 399999 - DNA, 100 bp, Homo sapiens
acgggaacaatggccacagtgtcccaccatcaaagagatcagagaccagggctcctgtggctcctgctggcaatatgagaagccgctgtctgagatggag

SEQ ID NO: 400000 - DNA, 100 bp, Homo sapiens
tagaggggatgcagatatgtatgatcttcccaagaaagaggacgctttactctaccagagcaagggaccatcagcacgtgcccatcgacatccagaccag

SEQ ID NO: 400001 - DNA, 74 bp, Homo sapiens
ctgacgcttgatgagaaggacccacggcgtctgttcgaaggcctcgggatgtctctggcagatgagctcttagc

SEQ ID NO: 400002 - DNA, 82 bp, Homo sapiens
cagatgatgcggtggtgggggacctgccggcacgcgactccccccgggcccaaaggctccggctggcacctgaggagcggcg

SEQ ID NO: 400003 - DNA, 88 bp, Homo sapiens
cttggagaaagactttatacagaaactaagatttttttggaaaatcatgttcggcatttgcataagcagcctgagggaactggcatga

SEQ ID NO: 400004 - DNA, 100 bp, Homo sapiens
gcgatggcggcggcggcggccggagcttctctcagccgtgtaaggagaggatgaggcccgtgaaaaaggcactgaaacagctcgacaaacctgacaaggg

SEQ ID NO: 400005 - DNA, 98 bp, Homo sapiens
tcagccagcctaatcttagaaccacagtaaaatggtgaagatctttaagcaagaagttaaagagtgaacatggtggaaaaaatataattattttcatc

SEQ ID NO: 400006 - DNA, 90 bp, Homo sapiens
gagaatgccaacatgtggttcaagaaccttgacaagctcatccggctggtaaatgcgcagtgtgaatgggaaacgctacttcgaatgcca

SEQ ID NO: 400007 - DNA, 76 bp, Homo sapiens
cgcaaccagccttctagggcggcggagcttccagagctaagctcagcatgatcaacaccatgtcaaaaatccgtgg

SEQ ID NO: 400008 - DNA, 100 bp, Homo sapiens
tgcgccacgtgttgctcagacagggactgcctggacagatcctttcgggcacaggtgttcagctgccctgcctgccgctacgacctgggccgcagctatg

SEQ ID NO: 400009 - DNA, 75 bp, Homo sapiens
gtcgactacaagaagagggcggagcggagacgggagtattatgaaaagatcgctgccccgggagacgctggcctt

SEQ ID NO: 400010 - DNA, 100 bp, Homo sapiens
gggtagagaagcacttggcgcctcggggaggggaccgcgcccgcctcatttgcgccttgcagcactgctggaccagctgctccttgacaagcacatgggg

SEQ ID NO: 400011 - DNA, 101 bp, Homo sapiens
cggtacctcgcctcggtgcagggctccgccccgtcgcctggaaagacaatgcagatcttcgtgaagactctgactggtaagaccatcaccctcgaggttga

SEQ ID NO: 400012 - DNA, 100 bp, Homo sapiens
tggagtgctgtcccttggaacaggaggagtaagattgagattaaaggatcctggtcaaataaaagaggtaaagaaaattacaatccctacagctacggaa

SEQ ID NO: 400013 - DNA, 100 bp, Homo sapiens
catcctttacgagcacggcctcttgcgctacgccctggatgagatgatactctggatgaatattttgaatatgatgcagaggagttcttggtctctttgg

SEQ ID NO: 400014 - DNA, 83 bp, Homo sapiens
agcaacagctcggcgggctggaagatctctggaaacatggctacagaacatgttaatggaaatggtactgaagagcccatgga

SEQ ID NO: 400015 - DNA, 90 bp, Homo sapiens
cttttctacaaggatgtctcgtatctcagttttttaggtggtggcggcagtcggatagacaataccacaacaacacattttgcagaggta

SEQ ID NO: 400016 - DNA, 100 bp, Homo sapiens
tgagaactggttctacacgcgagctggttcgagaacttgtcttggacaattgcaaatcaaatgatggaaaaattgagggcttaacagctgaatttgtgaa

SEQ ID NO: 400017 - DNA, 75 bp, Homo sapiens
agaaagaccatcaagtttaccagcggatgtagctgttttagttgtagatgccagcaggggagagtttgaagctgg

SEQ ID NO: 400018 - DNA, 98 bp, Homo sapiens
tcaagcttaggaccacccaccatgcctatccagggttgccatagtttctaaatcttttgaaggaaaaactgatcgcacagaagagtggtatggaaccc

SEQ ID NO: 400019 - DNA, 99 bp, Homo sapiens
gcggcggagcgcaggcctcgtgccgttacggccatcacggcggccgcagtggcgtcctggagccctcctcagacaatgcagatcttcgtgaagactctg

SEQ ID NO: 400020 - DNA, 82 bp, Homo sapiens
ccgcaacagaaccatctcaagatttttagactctgaggagcagttggagctaatccacattatggaaatggaaaccaccgaa

SEQ ID NO: 400021 - DNA, 75 bp, Homo sapiens
ctgcaaacagaccttcagcttcccccgtgagggatgatgatgctgaagctatccttgctgcagacttcgaaattg

SEQ ID NO: 400022 - DNA, 75 bp, Homo sapiens
gttggaggagagaaatgaaattttggaagagtcagcagaaggtgtgctgggcatcaaggtgaagatcatgctgcc

SEQ ID NO: 400023 - DNA, 127 bp, Homo sapiens
ctccagctaggatgatcgaggttgtttgcaacgaccgtctggggaagaaggtccgcgttaaatgtatgcatcttctattgatgatattttggaagatgaagaacattatgcagatcagttaaaagag

SEQ ID NO: 400024 - DNA, 88 bp, Homo sapiens
gaagagagttcagctctgattgaattttttgacagaaaagactttttaaaactgtggacttaaatgttctgcaaagtcttacacaaaa

SEQ ID NO: 400025 - DNA, 74 bp, Homo sapiens
ctcggttgtaccatgaagatcacccacagttaatatgatcctctgttgaagcaagaagacaaactgtatggtgg

SEQ ID NO: 400026 - DNA, 74 bp, Homo sapiens
aaatttttggatgatgatggatccatttctcctattgaggagtcaacatatgatcgcttgctggagacctgctc

SEQ ID NO: 400027 - DNA, 75 bp, Homo sapiens
tattgaacggctgggccagagcgtggttgctgaccagttgaaagtggatttggcatgataacatgcagtttcttc

SEQ ID NO: 400028 - DNA, 101 bp, Homo sapiens
cgcaggaaatgggaattctacttgtgtggtaccttctccaggcaaattccgttcccctgcagcaccatctcctttggctcttcggcaaccagtgaaagcat

SEQ ID NO: 400029 - DNA, 80 bp, Homo sapiens
aacagacatctaacacaaagggagatggcggcttacagggagaacacagttggcctccaccgtttctgccccacagaaaa

SEQ ID NO: 400030 - DNA, 98 bp, Homo sapiens
gccatgtccacccaacagatcaagaaggctgaagagattgctaatgagatgattgaggcagccaagccacgaggaggggtggaagaaggccctacagt

SEQ ID NO: 400031 - DNA, 75 bp, Homo sapiens
cgtgtcctgaaggagttccaccaggccgggaagcccatcggggcgtctctggccgagcctctttttgtggaaaac

SEQ ID NO: 400032 - DNA, 75 bp, Homo sapiens
aaacgcaagacggtgccgagaagcagctgcgaggctactgcagcactggggtgtcagttgttggtccgacccaga

SEQ ID NO: 400033 - DNA, 100 bp, Homo sapiens
catcatccaacaccgccatcctttcattgagtgggctcggccaccccaaccttctgatactaatggaccatactaccaaggaccagtccacctgaaccac

SEQ ID NO: 400034 - DNA, 75 bp, Homo sapiens
gcagttggttgggacccgctccaaccctcgaccaaactgcagctggaatacccagtacagttctgcttactacac

SEQ ID NO: 400035 - DNA, 101 bp, Homo sapiens
tacataatgattggactcacaattatcgcctgctttgctgtgatagtgtcagccaaaaggccatgtgaagatgtgcttgcttcccctttgccttctgccat

SEQ ID NO: 400036 - DNA, 83 bp, Homo sapiens
gaatttatacaaggagaagcactggatccaaagcatgtctgcaacccagccattttcagcttcctgtgcttcccagaattcca

SEQ ID NO: 400037 - DNA, 82 bp, Homo sapiens
gcgcgctgagggtctcggggcgggcgccgcgggacctctccgggccatggaaatgcttcggttacccacagtctttcgccag

SEQ ID NO: 400038 - DNA, 100 bp, Homo sapiens
gatcatggggaagacagacaaggaagaaatcccttttgtggagacagtctctttgaatgaagacaagctcctcctccaagccggcatcgacattaaccgc

SEQ ID NO: 400039 - DNA, 100 bp, Homo sapiens
agaagaggctcagggaataaatgggaacaggccagcaaaacactcagctgcaagtccaaagccacaagacttaattcagtgcacaaatgagatgaatgtg

SEQ ID NO: 400040 - DNA, 100 bp, Homo sapiens
gctcactgactgcagcatcgacctccggggctcaagtgatcctttcatctcagcctcctcagtagctgagactacagaaatacactttcgggaaatggcc

SEQ ID NO: 400041 - DNA, 75 bp, Homo sapiens
caaccaccgcacccctacgctgaccaggtgtgctgtttgcccagaagcctgtggtccacctcatcacggggtctg

SEQ ID NO: 400042 - DNA, 98 bp, Homo sapiens
ggcccggatgagtacgataccgaagcgggctgtgtgccccttctccacccagagggttcaggataagtttgaggtgctgaattacacaagcattccta

SEQ ID NO: 400043 - DNA, 97 bp, Homo sapiens
gttattacagagcccctgaggtcatcctggggatgggctacaaggagaacggacttccaatagtagtcagacattatcatcctgtcatactatggag

SEQ ID NO: 400044 - DNA, 98 bp, Homo sapiens
gtcaagctggccaagcacaaagagcttgctccctacgatgagaactggttctacacgcgagctgaaatggtggagtcaatgaagaaagtagcagggat

SEQ ID NO: 400045 - DNA, 74 bp, Homo sapiens
agagaacgcagtggcacagagtagcagattttcagctgaactctcatctctcaacactggcaaatattcataag

SEQ ID NO: 400046 - DNA, 87 bp, Homo sapiens
ttgacatttaattttagggtcctttatatagaagggagagtaggttttgagaacagagtgctgttttagagctggcagcagcatctc

SEQ ID NO: 400047 - DNA, 83 bp, Homo sapiens
ccccagacaagatggacaccgcggaggaagaccatggtgaatccgggcagcagctcgcagccgcccccggtgacggccggctc

SEQ ID NO: 400048 - DNA, 75 bp, Homo sapiens
aaagatgagcgaggagacggcgacttctgacaacgaggcttcctgaagaatgagaaggacaatgccctgctgtct

SEQ ID NO: 400049 - DNA, 95 bp, Homo sapiens
cttgatagatcagctgatcctcctcctgcaatttgggttgcaacaactaagtctacagtaaataaatgggtcaatggctgtctgcttgaccctgt

SEQ ID NO: 400050 - DNA, 98 bp, Homo sapiens
tggaggctggtcctgctggctctgtgggtgtggcccagcacgcaagttaaacaggtgttcaaggagctggagtttctgggttggtataccacaggggg

SEQ ID NO: 400051 - DNA, 74 bp, Homo sapiens
aggagagcgtgcaggtcaatgggcgggtgcccctacctcacattcccggactttgaacatgtcggggatcgccc

SEQ ID NO: 400052 - DNA, 97 bp, Homo sapiens
ggctgcggaggcgcaggcagcaactgaggcagcggcaggctcaggtgtcatggagaaactccagctgggcccagagattctgcagcgggaaaatcca

SEQ ID NO: 400053 - DNA, 102 bp, Homo sapiens
cttgtggagccggagctgggcgcggattcgccgaggcaccgaggcactcagaggagccttatgccagcctggaccatcttggaggcagtgtaggatcatgga

SEQ ID NO: 400054 - DNA, 75 bp, Homo sapiens
ctgcgctgggcgctgccgctgctgctgctgctgctgcgcctgggccagagaaagcaaccagcgagatgaatactg

SEQ ID NO: 400055 - DNA, 75 bp, Homo sapiens
attaatgctgctaagacatccatgtcttccaaaatcattggaatgtagataatgaagacatctatgaatctagac

SEQ ID NO: 400056 - DNA, 144 bp, Homo sapiens
ccatcaccctgcagaagaaggctgaagctgcacatcggattctggaaggcctggggccccaggtggagctgacaatgcagatcttcgtgaagactctgactggtaagaccatcaccctcgaggttgagcccagtgacaccatcg

SEQ ID NO: 400057 - DNA, 51 bp, Homo sapiens
ggcagatgaagcaggatgtacaggttatgatgtgattgctcaagcccaatc

SEQ ID NO: 400058 - DNA, 98 bp, Homo sapiens
ctgccctggccctgctcagcgccagcggcactggctccgccgcccaaggtcacgcaatatttaaactcacgtatctaagcaatcacgactataaacac

SEQ ID NO: 400059 - DNA, 78 bp, Homo sapiens
gaggtttcaacagcctgctccgtggctgtctttggcaatcagctagatgaggaagaggagcgaaggaaaaggcgccgg

SEQ ID NO: 400060 - DNA, 100 bp, Homo sapiens
gggagttcaagaagaacactccagagggcgatgctggatcttttcttgtctgaatgttatgaggcttccattcatgaaaaagttaaatattgaagaattt

SEQ ID NO: 400061 - DNA, 100 bp, Homo sapiens
gctttcttcttcttcagcgagattcctgagccgttctatccctttccttcttggagggaccactcagtagagcctctaagggacccaaatccttcagacc

SEQ ID NO: 400062 - DNA, 90 bp, Homo sapiens
agcaccggggaagccgaggcggagaagccgcgcgcgcctcagaagctcccggacgcccagttactgtaaaatggggaaaggagaaatttg

SEQ ID NO: 400063 - DNA, 96 bp, Homo sapiens
gcaattgaagctgactactaaggagaataaggttattgagccacatgatatatcagtggcactcaacacccgaaaattgtggagcatgcaccttca

SEQ ID NO: 400064 - DNA, 100 bp, Homo sapiens
gcgagtgccaggaactcttctggggagaccccgacgtggagtgccgagtgtgaagtggaatctctgaaactcaggtgtggcatcaacaaagtcaagaagg

SEQ ID NO: 400065 - DNA, 100 bp, Homo sapiens
gaagctggaggccggcaaagccaagccatattgaaggtggtatcatcggtcctgcagcttggaaatatcgtcttcaagaaggaaagaaacacagaccagg

SEQ ID NO: 400066 - DNA, 100 bp, Homo sapiens
ctcttcaacttgtacatgagcaagctggagaagatgcaggacaagagtgagaatggtgaggcatatcagagaaagaaggcggcagccactggccttccag

SEQ ID NO: 400067 - DNA, 109 bp, Homo sapiens
gtggtgcgtgatgtggctaagatgctgccgactctgggcggcgaggaaggcgtctcccggctgaacatactgacttgtggagtcattggctcctattcggtggttttag

SEQ ID NO: 400068 - DNA, 96 bp, Homo sapiens
gaagggcttcgtgcccaacatgcagaaatcagggtgaaatggcccacacgtgccgtggaaccatcaacctgtccaccgcgcacattgacacggagg

SEQ ID NO: 400069 - DNA, 100 bp, Homo sapiens
gagtatagatgacataggtcacctcattcatgaaggcctacagaagtttaaaaggatgcttaatcgggagctcacccatctctctgaaatgagtcggtct

SEQ ID NO: 400070 - DNA, 100 bp, Homo sapiens
tctggaaaatgtagttggagataaagtttttgtgctttgtaacagagccagactggtttcctatctcccaggattttgctctttagttaaaagggttgtc

SEQ ID NO: 400071 - DNA, 98 bp, Homo sapiens
cgaggagagtggaagtgtgagaggcacacctctgtgcagaccacatcgagcggaggctgcattgaggcgtgagcaaaagaagttggaaaagaagcaaa

SEQ ID NO: 400072 - DNA, 75 bp, Homo sapiens
tcggactcaggcccttaagcaaaaggtctgcggaagagggagctgctgaaggagctgctaccagtcatcgggcag

SEQ ID NO: 400073 - DNA, 74 bp, Homo sapiens
aacactctgggagccgtggtgacagccattgacataccactaggtatgaacgctgccgtccgtgccgtggtgcg

SEQ ID NO: 400074 - DNA, 83 bp, Homo sapiens
gttagagttcgaaaagctgagaatcctcagtgtttgctaggttggcaaaagcagcttttgatgatgcaattgcagaactggat

SEQ ID NO: 400075 - DNA, 75 bp, Homo sapiens
ctgggaccttctccctgcctggacccctactattgcaacaagggacacagcaggtcaggagagattcaacagcat

SEQ ID NO: 400076 - DNA, 80 bp, Homo sapiens
ctgaccaggaacctgggcgagcagcggcgggggcccgaggggttttagctaaagaagatactgaggcagctattcaatca

SEQ ID NO: 400077 - DNA, 90 bp, Homo sapiens
gtagaggagtatcagttcagtatcgctacttcaaagggtactttttagaaccaaaggaatccagccatcatctgaggaagcagttcatgt

SEQ ID NO: 400078 - DNA, 82 bp, Homo sapiens
cctgtttatgcagtttcgggaccacctggaggaggtgttgaaaggggagggtgaggacaaaatcttcttaatcaacaagctt

SEQ ID NO: 400079 - DNA, 80 bp, Homo sapiens
accagctcccgggacccgctcagcgatgaatactcccccagttgcaagaggcgcaggaccgtggaagacttcaacaaatt

SEQ ID NO: 400080 - DNA, 100 bp, Homo sapiens
ggagtggcaacttcaggatgacaaaaaccaaagtctcttctgctgggaaatcccagtacagatcgaggcagtaggggacacattagaagaactgtggatc

SEQ ID NO: 400081 - DNA, 75 bp, Homo sapiens
cctgactgctgcggaggcctcggcaatattgattttagacagcgccctcacaaagccaatgctgaggagatgacc

SEQ ID NO: 400082 - DNA, 73 bp, Homo sapiens
gcgagctgcgctggttcaccccgtggtcgaggagtcggccaaagatgaagaggaagcctttctggattggagt

SEQ ID NO: 400083 - DNA, 98 bp, Homo sapiens
cgcatacacaatcccgggcatgggcggcaactctttgatgtactactataatgggaaagcggacactgatgacattgaaagtcctaaacgcagtatcc

SEQ ID NO: 400084 - DNA, 100 bp, Homo sapiens
gcttcctgaagaataactgggtgttgctgtccaccgtggccgcggtggtgctagcttggattccttagcaccaccacagctcagccagaacagaaggcct

SEQ ID NO: 400085 - DNA, 80 bp, Homo sapiens
cccaggagaagccgcccaaagaactgtctctgctttctatccgtcaagatgataaagtcgtgtgcccgagaaccaaagaa

SEQ ID NO: 400086 - DNA, 90 bp, Homo sapiens
ttaaagggggaaacgaagaagctagactcagatcagtgcaagatgtctctgaacgggcagcgtggggagtgctggtgtgtgaaccccaac

SEQ ID NO: 400087 - DNA, 83 bp, Homo sapiens
accgacccgagttatgcccaccctccaactttgcgacggaaatgtgtcatcgaaagccagagagcgcctgctcgctgtgcccc

SEQ ID NO: 400088 - DNA, 82 bp, Homo sapiens
ctagatgtcaataaccagtccttcagagaacaagagatctgcctggctcagaattcaccttctacatttcactatgtgctgg

SEQ ID NO: 400089 - DNA, 90 bp, Homo sapiens
gagaggtgctgaagtccacgaagaggtcaaaatgcagatcttcgtgaaaacccttaccggcaagaccatcacccttgaggtggagcccag

SEQ ID NO: 400090 - DNA, 114 bp, Homo sapiens
attggaggtgtcagtgttaaaggaacctctacaacgaaggtgaagccacggaagataagacctctgtgagtgaaagccttcagagggaagctgctaagaagcaggccatgaaac

SEQ ID NO: 400091 - DNA, 100 bp, Homo sapiens
gaagtttcccttttgcaaggagaaaattttggtggagaattatccaacaagaaaaagacctgtggctattaagataggaaagatatgatccgccaaatga

SEQ ID NO: 400092 - DNA, 75 bp, Homo sapiens
gaggatgtgctggagcggtacaaagatgccgcatcctcgaaggtaccactcctcagagcgaggcagccgggggag

SEQ ID NO: 400093 - DNA, 100 bp, Homo sapiens
gtggtgcttctgttgctcacagtgctgggcctaaaggagataacatttatgaatggagatcaactatacttggtccaccgggttctgtatatgaaggtgg

SEQ ID NO: 400094 - DNA, 76 bp, Homo sapiens
cgccgcccggaccccggcgcgctgaatgcagcatttgacattgtgcagcaaagaaatggttatggagaagcccagt

SEQ ID NO: 400095 - DNA, 78 bp, Homo sapiens
aagcgactgagtccgcgatggagacaccttggaagagcttaaggaaatagataaaggcatgtggaagaaactgcagga

SEQ ID NO: 400096 - DNA, 96 bp, Homo sapiens
aaaactgcacagtggaaggcactttccatgaatactgagaatgccaaagtaaccagatctaacatgagcaggaacgaatgcaggaatttgggaact

SEQ ID NO: 400097 - DNA, 98 bp, Homo sapiens
agggaatacaagtgtcatgtctgtggtgctatgaagggaaatcctccaaagatatcctgaaaagagtagctgcaaatgcattgatgtcactgctggct

SEQ ID NO: 400098 - DNA, 101 bp, Homo sapiens
tgttaggagcgcagtggcggcgcaaccagccttctagggcggcggagattggtttatcttggaagctaaagggcattgctcatcctgaagatcagctgacc

SEQ ID NO: 400099 - DNA, 75 bp, Homo sapiens
tgactcatgatccaaagtacaggaaatgggcctgggaagccgtagagtgtgaagcagtattctggaaagtttttc

SEQ ID NO: 400100 - DNA, 96 bp, Homo sapiens
ccgatttcagatgctcttcacatcctttcaagaacggaagaagcgatgctgtccacatactttgaaaccatcaatgacctgctgtcttccttcggg

SEQ ID NO: 400101 - DNA, 98 bp, Homo sapiens
atgagtgtccagtctccagcttcgtgggtgcctggaggcaggtgcggagggctgaaatctctttaatgatggagggaagcaggcagacgcgagtgtct

SEQ ID NO: 400102 - DNA, 143 bp, Homo sapiens
gaagcgtactttcatggttttcacaaacaaatatcccaggagaagtgatcatggagaccaaggagaacaggcctggcagctgcgattcagccacctcgtggggtatggtgctagatattactcttacctcatgtccagagcgg

SEQ ID NO: 400103 - DNA, 75 bp, Homo sapiens
atcttgacgaggctgcggtgtctgctgctattctccgagcttcgcaatgctgattgggcagaaagtggcccatgc

SEQ ID NO: 400104 - DNA, 100 bp, Homo sapiens
gttggggagctgctccggcttcggcgcggaggggcggcggccggggaggcggcggcggcggcagccaaaatgaagtttaatccctttgtgacttccgacc

SEQ ID NO: 400105 - DNA, 80 bp, Homo sapiens
cagtcatctgcaccaaactgtgcaggccacaccccaggagatgctggacgatgccccgaattcccaccctgaagaaccta

SEQ ID NO: 400106 - DNA, 89 bp, Homo sapiens
ctcagcgagctgcggcagaagggctacgaagaagtgcttcagcgggccaggaagcgcatccaggagggtgatgaattagaagacaatgg

SEQ ID NO: 400107 - DNA, 75 bp, Homo sapiens
tttaaatgcagcatctgcgatgtgaggaaaggcacctccaccagtgctcatcatcactgtaggggacctttgaaa

SEQ ID NO: 400108 - DNA, 90 bp, Homo sapiens
cccaacagatgacagctggaagggtagaccatacgcaatgaacaaggggagaagaattgccttcagctccacgtcgttactgaaaatggc

SEQ ID NO: 400109 - DNA, 97 bp, Homo sapiens
agctgcagctgcgatctctgtggtaggcccaggccagaactgcacgttccaactgcacggtcccaatgggacagttgagagcccagggttcccatat

SEQ ID NO: 400110 - DNA, 83 bp, Homo sapiens
cgtgtcccaggcccaacgccagatcaagcggggggcgccgccccgcaggctgaaggggatgctaagggagataaagcaaaggt

SEQ ID NO: 400111 - DNA, 50 bp, Homo sapiens
ctttcggccgcgctggtgaacaggtcccgcagcccccggaagccaataga

SEQ ID NO: 400112 - DNA, 80 bp, Homo sapiens
agagggacacgcagtgacgagcggccgaagcagctttgcgcagaaagatgaaggtcttagaatcattgattggaatgatc

SEQ ID NO: 400113 - DNA, 83 bp, Homo sapiens
cgacgaccggatcctgaggaggcagctgcggtggcagctgctgagttctcggtgaagccagccgtgtcggtgacaccaagcat

SEQ ID NO: 400114 - DNA, 48 bp, Homo sapiens
ttataacaaccgctatgctggactttgagaatcactacaagaaaaact

SEQ ID NO: 400115 - DNA, 74 bp, Homo sapiens
ccagccttctagggcggcggaggtgtcagcttcctctggtgcaaccagcaagtcttccagtatgaatcccacag

SEQ ID NO: 400116 - DNA, 100 bp, Homo sapiens
cctcctaccactacaatactatcactgagttgctgggagcctgagcacctttcgtttttcggctcagagaaagccaagtgcaacttgcttcagtcatcct

SEQ ID NO: 400117 - DNA, 87 bp, Homo sapiens
ggaagtgttgcgcaggcgcatccgatcgactcgggactttgaacatgtcggggatcgccctcagcagactcgcccaggagaggaaag

SEQ ID NO: 400118 - DNA, 100 bp, Homo sapiens
cccacctgccaccgaggccccctcttcgcctcctccagaaaacatcggagcagtgtgggtccgagcaaacctgtttcccagccccggcggaacatcgtag

SEQ ID NO: 400119 - DNA, 48 bp, Homo sapiens
atttcgatctggacctggcctggcggtggagaccatcctgggcctcac

SEQ ID NO: 400120 - DNA, 76 bp, Homo sapiens
tacgacagaaggagaatgcagaccctcgacctccagtgcagttcccaagccaagtcctgtatctgccatgtctgtg

SEQ ID NO: 400121 - DNA, 50 bp, Homo sapiens
ctttgccaagttcagcaaatttggagatgataagaccatcatcatgtgga

SEQ ID NO: 400122 - DNA, 76 bp, Homo sapiens
accccaccagtgagatccactgctccagtggctgacaagattttgaaaaagaaagaataccctctttatataaatc

SEQ ID NO: 400123 - DNA, 98 bp, Homo sapiens
catcgaccgcatgctgcgcgaccagaagcgcgacctgcagcagacgcaccggctcctgctgctcgaggccacaagaggaagctgaatgaagaggacgc

SEQ ID NO: 400124 - DNA, 100 bp, Homo sapiens
aatgcagaacattttaaaaaaagttgcagctactttgcaagtgccagtaaatgatttaaatgcagatatcaatgatgtcaaacggctgaaacctggctac

SEQ ID NO: 400125 - DNA, 75 bp, Homo sapiens
ctcatgtgcggaaacacatggttgaggagttggtgaacagcaggatggatgggatgtcagtcagctgtgcccctg

SEQ ID NO: 400126 - DNA, 100 bp, Homo sapiens
ctcggattctcgtagctgtgccggttgggacccctgattttagcaggatggcccaatggaatcagctacagcagcttgacacacggtacctggagcagct

SEQ ID NO: 400127 - DNA, 74 bp, Homo sapiens
gcgatgtgtagtgccttccatagggctgagtctgggaccgaggaagaggcagaaatccaggcagaacttgaacg

SEQ ID NO: 400128 - DNA, 100 bp, Homo sapiens
gaaaatgccccacggtttccttcaagctaaccaggatacagaacttggtggtttttgtgcttgccgagggaccgagcttgatgatggcatccaggccgac

SEQ ID NO: 400129 - DNA, 100 bp, Homo sapiens
ctgttatcctgtgacctgcaggtactgggagatccatagggaagaaggcggaacatccggaggctgggaaatgggaccactgacatttatggatgtggcc

SEQ ID NO: 400130 - DNA, 100 bp, Homo sapiens
ctgagatgaggaggcgtcgcgcgcgcctgtagctcgcgggcctcgcaggagctttcaagttgtggatggaataaaaaagaaaaatatagttctgcaccaa

SEQ ID NO: 400131 - DNA, 86 bp, Homo sapiens
tgaccaggaacctgggcgagcagcggcgggggcccgagggatgtgaagttcatttccaatccgccctccatggtggcagcggggag

SEQ ID NO: 400132 - DNA, 75 bp, Homo sapiens
tacgtgagcatcttcgtctgcagtgattggcagctcctgcggactctgaaactggaccacccgaagatagcagcc

SEQ ID NO: 400133 - DNA, 82 bp, Homo sapiens
aggcaaactgtcagaaaagagtagcctgggctgtctggaaatctgagagaggaacgaagggcatcctacgactataaccaag

SEQ ID NO: 400134 - DNA, 100 bp, Homo sapiens
agaaccccagaatatcgaagatgaagcaaaagaacaaattcagtcccttctccatgaaatggtacacgcagaacatgtgctcaatggtgcccaggctgga

SEQ ID NO: 400135 - DNA, 100 bp, Homo sapiens
gccaaaatatggtgtgaaggttggcctgacaaattatgctgcagcatattgtactggcctgctgctggcccgcaggattcaattagcagagcctcacaga

SEQ ID NO: 400136 - DNA, 74 bp, Homo sapiens
ctcacctgtgcgggatggaacaaaaggctggtggatgaccgctgtgtggtggagcccgcggccggggacctgga

SEQ ID NO: 400137 - DNA, 50 bp, Homo sapiens
cgtgagtgatcactctcaatcccgggtaatgagaggccctaagatcccag

SEQ ID NO: 400138 - DNA, 83 bp, Homo sapiens
acttggagatttccaccttcagaaatatagaggaagtgttcatacctcaagatgggaaaaaggtgacgtggtattgctgtggg

SEQ ID NO: 400139 - DNA, 90 bp, Homo sapiens
tgaagaaaattaaaaaactggagaatgacaccatttctaagcaacttacattagaacagctcttagaacaagctctggtgattgaggaac

SEQ ID NO: 400140 - DNA, 100 bp, Homo sapiens
cgaggctgcgggaccccaggatgggggacaggaggctgcggggcctcagtgtgttgcctgtgagtgtgacctcggaggctcttcctcaggagctgaagtc

SEQ ID NO: 400141 - DNA, 110 bp, Homo sapiens
cgagacggcggcgcagcggtacagcgcccgactgctgcaggccggctacgagcccgagaggaacttgctactaccagcaccatgccctaccaatatccagcactgacccc

SEQ ID NO: 400142 - DNA, 100 bp, Homo sapiens
tgccaccgagccgggcccacctccccaccaaggaaggaccaagaatcgccttcagccctgtctggtgcatccttggcagaaagtgaggaggaaaacaccc

SEQ ID NO: 400143 - DNA, 100 bp, Homo sapiens
tgaggcctcaactaatgacttcccagttcatcagcgtcttcaggggcagaaccccttcgagctggccttctccctagaccagcccgaccacggagactct

SEQ ID NO: 400144 - DNA, 82 bp, Homo sapiens
gtacctgcagaaggtctctggagacatcttcagcaggaagtacatgacctgctcagtgactatgagctcaaatactgttttg

SEQ ID NO: 400145 - DNA, 82 bp, Homo sapiens
ctcctgcatctgcctccccatttggttaccacagagaagcgcttcctcaaagacagtttgtacaatgaaggaatcctaattg

SEQ ID NO: 400146 - DNA, 74 bp, Homo sapiens
tcccgctcgcagagagccggcttgcagttaccagatgtatgctactcatggtgggtcctggcttccctaaagat

SEQ ID NO: 400147 - DNA, 100 bp, Homo sapiens
cctccttctcctggcagcaggcccagctgaccacctcctgctgcagctctactctggacgcctgcagatggcttctgggaggccctgggcgggaaggctg

SEQ ID NO: 400148 - DNA, 73 bp, Homo sapiens
acaacctcacagcacctgaacctcaagaagagattgatcagggaccatgaaaagaaacttgtgcttcaccgaa

SEQ ID NO: 400149 - DNA, 113 bp, Homo sapiens
tgcggctgaaacagcaagaactgcttcggcaggtgaggccacaggtttacaaaggaggaaaacgacttcttctagatttttttttcagtttcttctataaatcaaaacatctc

SEQ ID NO: 400150 - DNA, 74 bp, Homo sapiens
gtgcattgtctctgatttcactattggtcggaaaggatttaagcgagagcctcactggttcccaggacatcaac

SEQ ID NO: 400151 - DNA, 100 bp, Homo sapiens
agccccatgcagggggactctctgaagctgtgcaggctgcctgtatggtattgacctgatggacatggcttcggacatcctgcagcccaaaggagatgat

SEQ ID NO: 400152 - DNA, 100 bp, Homo sapiens
taaaatctcccaagaggaatgacaaacaaccagctcttcagggccgttgctccagggagaactgcaaatatcttcatccacccccacatttaaaaacgca

SEQ ID NO: 400153 - DNA, 85 bp, Homo sapiens
ctggcctgttgcagccatggtgcattgcagttgcgtgttgttcagaaaggtttgcccaaaggaccagccaaaacctcacctcaag

SEQ ID NO: 400154 - DNA, 82 bp, Homo sapiens
tgcacgacgtggacttctacaaggcccgcatggaggagcaggccgggctctcgccatgggtcactgtcgcctctgccacggg

SEQ ID NO: 400155 - DNA, 90 bp, Homo sapiens
aaacggaaaagcgtgtgtaggggagcggaaaaggaagtcaccaccgtggcctgcgacgaactggttagatcctgctaaagaaataaagag

SEQ ID NO: 400156 - DNA, 74 bp, Homo sapiens
tgtactggcctgctgctggcccgcagggttgctggaggagccagtatgagtcagatttcagaagcactgagccg

SEQ ID NO: 400157 - DNA, 100 bp, Homo sapiens
ttccaggtagacatggaggccgtcggggagacgctgtggtgtgactggggcaggaccatcagaatcattgatcagcgattcgagaaggtttcctactttg

SEQ ID NO: 400158 - DNA, 125 bp, Homo sapiens
gagagggagccagaacagggaagaacggattcacacaggatggcttgcagaagacgctatttgtacatgtcccagagcaagcacacggaggcccgggagctcatgtactcgggagccctgctctt

SEQ ID NO: 400159 - DNA, 75 bp, Homo sapiens
ctgaaacagtgccgacttgcaaacgggtcgacaagtgcccccaatgatttatggtacaacttcattgaactgccc

SEQ ID NO: 400160 - DNA, 76 bp, Homo sapiens
acagcagcattgaactgtgtggggaagggcatggacaagaagaaggcagccggaagagagaagggcacagttacct

SEQ ID NO: 400161 - DNA, 51 bp, Homo sapiens
gtcccccgtgtcaactgaactggatttggacacctcccacactgagtcccc

SEQ ID NO: 400162 - DNA, 82 bp, Homo sapiens
caagaacatcacccagcgcggcaacgtcgccaagacctcgacaatgcagatcttcgtgaagactctgactggtaagaccatc

SEQ ID NO: 400163 - DNA, 83 bp, Homo sapiens
gaattcgcgctgctcgccgacaaggctgcacaacagtgggcatccccaccatcagatggtgcggggcagagggggactacaac

SEQ ID NO: 400164 - DNA, 100 bp, Homo sapiens
ccccagcgagcccgttcctgggacgaaccccagcatcctgatgggagctcagcaggcaggaccataattatggtgctcgtcctcctccgacacctccggc

SEQ ID NO: 400165 - DNA, 97 bp, Homo sapiens
gccatccagagctgtgcctcccagcaccacagtccttctgcagtccctcgtccagccacccccagtgtctatgtctctccccaacgtatgagctcgc

SEQ ID NO: 400166 - DNA, 83 bp, Homo sapiens
ttgtgcgcaggcttttccatcctcatcctcacagggaattggctattcatcatggctggagacttcctgaatataccctttcc

SEQ ID NO: 400167 - DNA, 96 bp, Homo sapiens
gcagcgggcactgcggcgccgaggcgcggcggcaggacgggaaccacgcgagctgcagccagactgcctctgtcaccgggtccctccacccttgtc

SEQ ID NO: 400168 - DNA, 101 bp, Homo sapiens
cagaaacctgaagttagaaaggctcaacgagaacaagctatcagggtccgcaagcaggtggtgaacatcccgtccttcattgtccgcctggattcccagaa

SEQ ID NO: 400169 - DNA, 100 bp, Homo sapiens
tatgagctggagttaaatatccaaggccacaaacagttaacagattgtatctcggaatttttgaaggttgaatttagtattagtgacaaacagaggcctg

SEQ ID NO: 400170 - DNA, 74 bp, Homo sapiens
ggagacatgaccaacaggaagttccgccatgacaaaagggtttacttggggttttaaaatcaaagatgggaaaa

SEQ ID NO: 400171 - DNA, 97 bp, Homo sapiens
gcaggggttttctgcacttctacactcaggtgccagcgagatttcagattcctgtaaacctctaaagaaaaggagtcgcgcctcaactgatgtagaa

SEQ ID NO: 400172 - DNA, 98 bp, Homo sapiens
gtggaggcagaggtggcatgggtgaaccaaggactgggttttgctctggaagcctgtcctgattgcttctgtaatctggcgctatgcatccggatctt

SEQ ID NO: 400173 - DNA, 83 bp, Homo sapiens
caactccatcaagcctcaggagctgctggctacgaggaacaccggcaagagtatcgccaataagaacatcgccaaccccacgg

SEQ ID NO: 400174 - DNA, 75 bp, Homo sapiens
gttttaagaaagtggacaaagagaggagtcaggccaaaggtgtccaaactatacagacccacagaatctaacaac

SEQ ID NO: 400175 - DNA, 90 bp, Homo sapiens
ggacatcaattcttcaaggcctgttttactaaatgggacctatgatgtgcaggatgggtcatcagttaaggaagttgaaacctaccaccg

SEQ ID NO: 400176 - DNA, 100 bp, Homo sapiens
gcctacctgttcacttcagagttgtaccctacggtgctcaggctgcagagagactaagggcacttcctgaggttcattaccacctggggcagaaggacag

SEQ ID NO: 400177 - DNA, 83 bp, Homo sapiens
atggccatcctgtccctgcgagcccctgggccctggcaggcgatgcaggttctgcggggagtgtctccagccctgcctgcagg

SEQ ID NO: 400178 - DNA, 97 bp, Homo sapiens
ggaatcactaccaagcttctgacctttctgtcacccaggctggagtacagtggcacgatcacagctcactgcaccctcaacttcccaggctcaggtg

SEQ ID NO: 400179 - DNA, 101 bp, Homo sapiens
gcacaaacagcccccacctcgggagccagctcgggcccaggcccccaaccaccgagtggccagagccaacgggctgaagtcttgtgtcattgtgatccggg

SEQ ID NO: 400180 - DNA, 100 bp, Homo sapiens
aggccctctattgccaactgttaatttcctagaggaagttctggcttctggactgcacagccgaagcaaggagagctctcaagtcacatcaaggtcagcg

SEQ ID NO: 400181 - DNA, 89 bp, Homo sapiens
gactcagcccagctgcttggcctgaccctctcacagcataatttcccggcacctgatttgcctgaagacctggataatctccatttttg

SEQ ID NO: 400182 - DNA, 75 bp, Homo sapiens
tcagcctctttgtcactgcctggaccattgtccctgctgtttctcagtgtgaagcctcagtttaggtcatctggt

SEQ ID NO: 400183 - DNA, 100 bp, Homo sapiens
cccatgttcgtcatgggtgtgaaccatgagaagtatgacaacagcctcaagatcatcaggaatttgctcgccctgatacatcgaatgatagagtttgttg

SEQ ID NO: 400184 - DNA, 49 bp, Homo sapiens
gacgccgccgctgcctcccgcgttcaaaccttgtactactcagctgatc

SEQ ID NO: 400185 - DNA, 80 bp, Homo sapiens
ctgcagtggaccacagtcatcgagaggaccttccacgtggattctccagacgagaggaattcatgatttgttcctgtagc

SEQ ID NO: 400186 - DNA, 49 bp, Homo sapiens
agctctatgccctgaacgaaaacatcagatccacagaccagcatggctg

SEQ ID NO: 400187 - DNA, 90 bp, Homo sapiens
ggtgatttctgcatttccatctgaggactggacctacagagacatctgggattttctgcgtcagctgtttgtcccatactgtatcctgta

SEQ ID NO: 400188 - DNA, 75 bp, Homo sapiens
tttgatgcataaaggcagctttgaaacagatttctccagtgatgattctaagttagaatataacgtagatgctgc

SEQ ID NO: 400189 - DNA, 100 bp, Homo sapiens
aaacataaagatgaagtgcttaattcaaggtcacacaatgtcggggatggacctccagatttccttactggtgctggagaatctggtaaaagcaccattg

SEQ ID NO: 400190 - DNA, 75 bp, Homo sapiens
aagcaattctggaagcgcagcaacagcaagctcccgggcagtccacagacaaacgaatttaaaggagcaaccgag

SEQ ID NO: 400191 - DNA, 90 bp, Homo sapiens
atgaagagactccagaaagggaataaaagccgccctcattctaggggagaatataatgtttacagcacctttcaaagtcatgaaccggag

SEQ ID NO: 400192 - DNA, 74 bp, Homo sapiens
cttcgctccggcccggtgaaactgaacttataatcgtcactggattctcctgttggaacaccaggatgcaattg

SEQ ID NO: 400193 - DNA, 100 bp, Homo sapiens
ctgaggatgctcagaagagttcttctccagcacctgcagacatagctcagacagtacaggaagacttgagggtatcgagaaccttccctgcgaacttcag

SEQ ID NO: 400194 - DNA, 90 bp, Homo sapiens
cgagaccctccctgctgagatgcgcaaattcactccccagtacaaaggactgcccacagtggtgaaactggtagacagaaacaccttatt

SEQ ID NO: 400195 - DNA, 90 bp, Homo sapiens
agaaaggaaggaatatatcctgactgattgtccccttcccctgagcccatctacaatagcgaggggaagcggcttaacacccgagagttc

SEQ ID NO: 400196 - DNA, 151 bp, Homo sapiens
ggacttctcgtagaagcaaaaggaataaaggagcactactttaagccatatatttcaaaactctttgacaggaaggtgagatctgatgttcatcgtttctccgtgactctctttggagccgccataaagtctgtaaaaaacccagataaga

SEQ ID NO: 400197 - DNA, 75 bp, Homo sapiens
gtggcgtcctggagccctcctcaggttatcaatactctggctgaccatcatcatcgtgggactgactttggtgga

SEQ ID NO: 400198 - DNA, 90 bp, Homo sapiens
cagcttcaagatgaactggagatgctcgtggaacgactagggctccgggattgtggagggctgcgggaggtggaggtgactgcctgcctg

SEQ ID NO: 400199 - DNA, 75 bp, Homo sapiens
ccactgccgcggccgtgggcccgaccgcggggacccgagttccaccatcttcctctgaagacgtagccatcttgc

SEQ ID NO: 400200 - DNA, 100 bp, Homo sapiens
caggaccggcaactgaaaatcgtcgtgctgggggacggcgcctccgggaagctgttcaacggttttgtgtatagcatttgaggttcttcagggcttgcag

SEQ ID NO: 400201 - DNA, 100 bp, Homo sapiens
gagcggcggctcctccgggggacccgcggtccccaccgtgcagcggggcatcatcaagatggtggcagttaaaatgaagcagtacaaagatgaacttttg

SEQ ID NO: 400202 - DNA, 75 bp, Homo sapiens
ccagagtccgcgaatcctccgctccgagcccgtccggactcccccgatcccagccctcgagcatgttccaaactc

SEQ ID NO: 400203 - DNA, 75 bp, Homo sapiens
tggagccctgcattcgcggcgtgtgcaggaactttttacccctgaatgcaagtttaaagaatctgtttttgaaaa

SEQ ID NO: 400204 - DNA, 100 bp, Homo sapiens
ggagactgcccaggtgtggtcaccatgttcctctccgcggtcttctactggtgaattttcagctcgtttccttttgaagctgcccgtagatttcagcaat

SEQ ID NO: 400205 - DNA, 100 bp, Homo sapiens
agctactggatctcagccttgtcaaagatgccagatgtgggagacacgccaaagctcccaaggaatctggtgaacagtaacaaactttggtgaaatttca

SEQ ID NO: 400206 - DNA, 83 bp, Homo sapiens
gtgccttttgcctcccaccgtgattctgaggcctccccaaccatgtgcaattggcgtgatggtgggcatgggtcagaaggatt

SEQ ID NO: 400207 - DNA, 100 bp, Homo sapiens
gccagaaggaagagtgtatgtgatcatcgatctctcagggtcgtcgggtgaagggcttatttcaaaacctttgtccctcagttccaggaggcagcatttg

SEQ ID NO: 400208 - DNA, 75 bp, Homo sapiens
acactgcgagtggcaactcagcaggcctatgagagctacaagaagaaggactacacccaggtggactacttaatc

SEQ ID NO: 400209 - DNA, 100 bp, Homo sapiens
cttgcagctgttcagaccgcgctccgccgaggtatccgttacagcactgatgtgagtgtagatgaagtaaaagctttggcttctctgatgacatacaagt

SEQ ID NO: 400210 - DNA, 99 bp, Homo sapiens
cgcggtgaccccctccccggctgccgccgccgccgcctcggccgaccagggacctgcccgcctgcggctgctccggatgatagtatttctgctgcaagt

SEQ ID NO: 400211 - DNA, 76 bp, Homo sapiens
agcgcggcagccacacagacgcacctgacacggcgacaggaagacctctggagatacattggagctgatggaggag

SEQ ID NO: 400212 - DNA, 101 bp, Homo sapiens
gaaagaggtcccagaagacgcctagtacaccacgaagggtcacacaagagaatagtgacagtggtacaggaaagaaagaaaaagaaaagaaaaacagaaag

SEQ ID NO: 400213 - DNA, 74 bp, Homo sapiens
tggtaatgtgtccattcgagggcggatcctctctgctctggatcctggtattgggagctgtatttggtttctcc

SEQ ID NO: 400214 - DNA, 75 bp, Homo sapiens
ttcccctctttgacctggtaaatgcaggcttttatgcgagaggggatcatggaagctgataaagatgacacacaa

SEQ ID NO: 400215 - DNA, 74 bp, Homo sapiens
ttgttcttttcttttccatgatatcattatatggacagtttagggctttggatgaagagtatttaaaagtagat

SEQ ID NO: 400216 - DNA, 75 bp, Homo sapiens
ccctgacacccggcatgaccagcacgtgtggttctcaaatataggcattctgatgggaacttgtgtgttaaagta

SEQ ID NO: 400217 - DNA, 98 bp, Homo sapiens
tcttcctcctcctcctccccaccaccaccatctccatcacccaccaacaacaccacaataatccacagccaagacaaatttacatgtattggagacca

SEQ ID NO: 400218 - DNA, 53 bp, Homo sapiens
gtcggaaagaggccggggcggctgggtggcaaagcaaagctatattcaagacc

SEQ ID NO: 400219 - DNA, 87 bp, Homo sapiens
tcgaaggacagctggaagccttgtcactggaggcgagtcagtcattgcacgtgcagaagagcgacgtggacctgatgagaacgaagc

SEQ ID NO: 400220 - DNA, 100 bp, Homo sapiens
ccccgcagcggccgggctgtcgcggcccccacctcaggtggatctttcaacatatcgttgtttagttttcaagaataaagccatcataagacctcatgcc

SEQ ID NO: 400221 - DNA, 98 bp, Homo sapiens
agaatgacaccttctcaggttgcctttgaaataagaggaactcttttaccagggtgtacaactatgagcctttgacacagctcaagaatgtcagagca

SEQ ID NO: 400222 - DNA, 77 bp, Homo sapiens
tgaagcaaaagccttccatgattacacaaacatcatatctgaactaagtaaatggagacttaattttattgactggc

SEQ ID NO: 400223 - DNA, 100 bp, Homo sapiens
aatattaatgcttttgacaagaaagataggcgtgctatccattgggcagcatatatggaacattctagtatgccagtagaaaaaaatatcactttagaaa

SEQ ID NO: 400224 - DNA, 50 bp, Homo sapiens
tccagaacttgtgccacagaactacagtgcagattcactttataggaaca

SEQ ID NO: 400225 - DNA, 99 bp, Homo sapiens
aatcgacttaaagcctccagagaagtagaatctgtagaccttccacactgccacctgattaaaggaattgtcttattgccagcagttttgaagatgact

SEQ ID NO: 400226 - DNA, 75 bp, Homo sapiens
tatttgcaacagctcacgggagcaagaacgttggtagctggcagtgttgtgatggcttttgaagaagtatgcccg

SEQ ID NO: 400227 - DNA, 99 bp, Homo sapiens
cttatatcccaccattgccacgggcattctccatctccttgcagctggttttccaagaattgatataaagcgggaagaacagaaaacagcagtcataag

SEQ ID NO: 400228 - DNA, 100 bp, Homo sapiens
gaaggcggctaagtcccggcagcgggaacacagagagcgaagccaggtggcacaagatctctgtaaagtagcaggcatagcaaaagttctggtggctcag

SEQ ID NO: 400229 - DNA, 51 bp, Homo sapiens
cccgatcctattcccagtcgtaaactggcgatggaatatgagaggagccct

SEQ ID NO: 400230 - DNA, 83 bp, Homo sapiens
ctgcagcgggagctggacggcgagcgcgagcggcgcgagaaaccccctcggaaaaccacactgagagttgcattaaaaaccag

SEQ ID NO: 400231 - DNA, 100 bp, Homo sapiens
agctgctgcggctgctggaccgcgacgcctgcgacacggtgcgcgtcaaggccctcttcgccatctcctctcgccctcccctacctgcggaagagtcaag

SEQ ID NO: 400232 - DNA, 75 bp, Homo sapiens
cccattctcccagacatggggaacagggtcacagctctcacccagcatcaacaacagcaacttgtgattggcggt

SEQ ID NO: 400233 - DNA, 98 bp, Homo sapiens
gtgagagctgtgtcctgcaccgctcatgctcgcccggctttggggtcaagcagattggaagctgaaatgttacgttccatctcttttcatccttctgg

SEQ ID NO: 400234 - DNA, 82 bp, Homo sapiens
ggacaacttgcgagccatggggctggcggatgcgtcgggggagctgaatacacggctgcgggatgacagggacgcctgcgag

SEQ ID NO: 400235 - DNA, 82 bp, Homo sapiens
ctgcgtagtgaaactgcgtaggaacctgggaagaaggtgacttaagagattaaaattaatttggttgctgttggttctgaac

SEQ ID NO: 400236 - DNA, 74 bp, Homo sapiens
tgttaaagtaacagatgatttagttggtaatactgaacaacctgtccaaactagcaagattggacttggaagaa

SEQ ID NO: 400237 - DNA, 121 bp, Homo sapiens
acatctgttattctccagatacccaaaagctcctcgtccgcctcagtgacgtttacaacagagaggaacgaagggcatcctacgactataaccaagatcgtacatattatgagagtgttcg

SEQ ID NO: 400238 - DNA, 100 bp, Homo sapiens
aaggaagctgcacaggaagccgtgaaactggcaatttgaatcaacccatagaagtgacagcgctgtattcatttgaaggacagcagcctggggatttgaa

SEQ ID NO: 400239 - DNA, 75 bp, Homo sapiens
cccacacacaggtgaatttaaaggagcagccctggtgtcacctatcagtaaaagtcttctcaagtcttaggattg

SEQ ID NO: 400240 - DNA, 60 bp, Homo sapiens
tgaacacaagatccagtcatctgggggcccactgcaggtagagctgaagtttcctgcacc

SEQ ID NO: 400241 - DNA, 74 bp, Homo sapiens
gccttgcacacctgcagccctaccaaatatctccggagcatttggataatgtgacagttggaatgcagtgatgt

SEQ ID NO: 400242 - DNA, 50 bp, Homo sapiens
cccacgtcaaaggaaagtttcaagagtccttaaatgcactggaagaccaa

SEQ ID NO: 400243 - DNA, 75 bp, Homo sapiens
ctcagtgcttccagcagttcccagaaggactcttctatgagccaatgttttcagttgcaccaagcttagccacca

SEQ ID NO: 400244 - DNA, 80 bp, Homo sapiens
acgtcatcaggcttgttcaagacacaccggaggcgacggccatggccacaggtctcggcgcggaagatggccggcggcgt

SEQ ID NO: 400245 - DNA, 90 bp, Homo sapiens
aacgtcaacaacagttttacgggtatcactgggatacatcagattggatgccaagcgttcctctgccggacatacaagagttccccaact

SEQ ID NO: 400246 - DNA, 50 bp, Homo sapiens
ctggacaggacggagcgcaggcaggctcgcctgcctgttcctgaaacggg

SEQ ID NO: 400247 - DNA, 75 bp, Homo sapiens
aaacaacttgctgggaccatcccaaaatgacagagctctaccagtctttagttttcatggagtgataatgaaagg

SEQ ID NO: 400248 - DNA, 83 bp, Homo sapiens
ccactgaagacgtctgcgtgagaatagagaccaccgagtcttcccgaggctgctgtccatgacactgagtccagatcttcaca

SEQ ID NO: 400249 - DNA, 82 bp, Homo sapiens
agccagcacactcctcgcgagcaagacagtgggagtagctcaccgttacccaagtatgcttcatctcccaaaccaaacaaca

SEQ ID NO: 400250 - DNA, 90 bp, Homo sapiens
aaactgtcagaaaagagtagcctgggctgtctggaaatctgaggtccttgaatgggcaagagggcacatgaagtacggcgtcctccacat

SEQ ID NO: 400251 - DNA, 114 bp, Homo sapiens
ccagcatccttcagaaaaagcatccccgaggaggaagacgaatcgttaaacatctgaaagggtcagatgccatggacaatattaccaggcagaaccaattctacgatacccaag

SEQ ID NO: 400252 - DNA, 90 bp, Homo sapiens
cacaacatgcacagcctggcgacggctgcggttaatccctatatcctgaagaagaacatgatcctcatgacaaatcatttctatgcagcg

SEQ ID NO: 400253 - DNA, 89 bp, Homo sapiens
cccagggatcttgagagtgaagatctcgaaggatttcatagtgtgaccgcaacaagggaaaacatggcttatactgtggaatgcctgcg

SEQ ID NO: 400254 - DNA, 98 bp, Homo sapiens
gttcagcccacctgagcccccgctgagcagcccagccagtcagcacaaaggaggacgtggtatgcttcagaagtgtccttctgttgatgacttcgtaa

SEQ ID NO: 400255 - DNA, 100 bp, Homo sapiens
cttaaggagtttatgtctgctgtattctctgtatggaatcagtcagaacgcgggggatttccttcagacttcatcacctgattcttccaatgagaattcc

SEQ ID NO: 400256 - DNA, 83 bp, Homo sapiens
gccagacaaacagcccgcccgaccccgtcccgaccctggccgccccgagcggagcctggagggatacccacccaccatcccag

SEQ ID NO: 400257 - DNA, 75 bp, Homo sapiens
ggcgcggattcgccgaggcaccgaggcactcagaggagtaatctatgccagcaattatgacaatgttagcagacc

SEQ ID NO: 400258 - DNA, 100 bp, Homo sapiens
tatttgggcttcggagcatttactctctgattctgggccaagataatggcctcagagaaccatggctactgccaagggaatcgccataggcatcgacctg

SEQ ID NO: 400259 - DNA, 75 bp, Homo sapiens
gccacttctgccctggcccccaagatcggccccctgggtctggaccttgaccctgctgttcacagccagggggac

SEQ ID NO: 400260 - DNA, 82 bp, Homo sapiens
cccggtgcccgaggaggcagccaagctcgtagcctgccactccgtgcgtgctccagaggctggtggacctgagcggaggctg

SEQ ID NO: 400261 - DNA, 82 bp, Homo sapiens
gctgcagcatggagagatagataaacggcaggaacgaatgcaggaatttgggaactgagctgtgcaagtgctgaagaaggag

SEQ ID NO: 400262 - DNA, 51 bp, Homo sapiens
tgacagtctgcatgtgcagttttcagcatcgagagtaaacatgaggttacg

SEQ ID NO: 400263 - DNA, 100 bp, Homo sapiens
cagactgaaaaaatgtggcagcgcctgaaaggaatgtgcaagtgaaagtgtaggaaaacatatgcttgaagcgtgcaacaataatctggaaatggcagtc

SEQ ID NO: 400264 - DNA, 75 bp, Homo sapiens
aggatggcggagtcggggctcctgacgaacctaaaggcagacccagaagagctttttacaaaactagagaaaatt

SEQ ID NO: 400265 - DNA, 75 bp, Homo sapiens
cagggaccggctgctgcaggccatcgacccccagagcaaccgttacagtgtttctgccacctctgtacaaaagac

SEQ ID NO: 400266 - DNA, 82 bp, Homo sapiens
ctcatgatcgacttcctcacccgcgcctgcgacctcggcggaaggtgctctaccagcgtgcacccaggaatatccaccgcca

SEQ ID NO: 400267 - DNA, 74 bp, Homo sapiens
catctcagagaagaggaggaagaaggcgagaagcacagattggggaccacaaattcagtgcccaccggattgtc

SEQ ID NO: 400268 - DNA, 134 bp, Homo sapiens
tgcaggggcagagcgctcctgtggggatgaaggccgagggcttcgtggatgccctgcaccgggtccggcagaactttcacgatggccgtaaagcacagcagcacatcgagacttgctggaagcagcttgaatct

SEQ ID NO: 400269 - DNA, 100 bp, Homo sapiens
cagtgacgtcctgtgcaccatcaccaagaccatggactacctccattcccagggggtcctgaggcacgtgaatggccaggatcagattgtgcccggcctg

SEQ ID NO: 400270 - DNA, 100 bp, Homo sapiens
gtggtggccttcgcggtggcgatgctcttcttggaaaaccagatccagaaactggaggagtcccgctcgaagctagttgtattccctgaatgactataaa

SEQ ID NO: 400271 - DNA, 100 bp, Homo sapiens
cgtgtgaagagaccaccaaacaggctttgtgactggcaacgcctgcttcctcctctgagctgtcaagtaggaagtccgggctgctctgctagaaagagaa

SEQ ID NO: 400272 - DNA, 101 bp, Homo sapiens
aggaggaagaagacctagctttagcacaagcactgtcagccagtgaggcagaataccagcggcagcagtgagagccacgagccaaggtgggcacttgatgt

SEQ ID NO: 400273 - DNA, 82 bp, Homo sapiens
cgggcgccatggagggggtgctgtacaagtggaccaactatctgagcggtgcgcgcggagccatggttatcatgtcggagtt

SEQ ID NO: 400274 - DNA, 75 bp, Homo sapiens
ggcccccaagatcggccccctgggtctgctcatgatggagcagtccaagaagtcctccctcatggtggcccgcag

SEQ ID NO: 400275 - DNA, 83 bp, Homo sapiens
ctcggctccctgctgggcgggaccctggtctccgcgtacgggtgagccgttctccaaccctttggcccccgatggccacgatg

SEQ ID NO: 400276 - DNA, 95 bp, Homo sapiens
gggcgcccttcccctggatacggtcactttctacaagatgagcagcaccagcagtaagagggctccgaccacggcaacccagaggctgaagcagg

SEQ ID NO: 400277 - DNA, 80 bp, Homo sapiens
agcagacactccagagtgaacagcctttacaggttgccagggctctgggtttgcagagagccgaaatgaccatgactgcc

SEQ ID NO: 400278 - DNA, 100 bp, Homo sapiens
ctgtgatggcgtgcagatcaatgtcccggaggtggtccaggccacgctggtggtcctggccttggccatggtgcccatcctgctgcttggcacacccctg

SEQ ID NO: 400279 - DNA, 100 bp, Homo sapiens
ctggctgatcctgcaccacaaggtgtacgatttgaccaaatttctggaagaggcatgtcctagttcagataaacatgctttagtaactccttggctcaaa

SEQ ID NO: 400280 - DNA, 100 bp, Homo sapiens
ttggcaggcttcgaagagctacagaatatgctccaaagaagagcttggtgatccagctatttttcctgccgtaattgtggaacatgttcctggtgctgat

SEQ ID NO: 400281 - DNA, 75 bp, Homo sapiens
agatggacaagatggtgcagaagaagaacgcggttatgaagttcatggaatggaaaaaataccagaagatggacc

SEQ ID NO: 400282 - DNA, 51 bp, Homo sapiens
gcaatgccccgggctgtggacagattcagtttaaggagaaagtgctgtgga

SEQ ID NO: 400283 - DNA, 136 bp, Homo sapiens
ccctttgataccttggcaacaatgactgaccagcagcgtgaagacatcacatccagtgcacaggtaatctgtaagtcagatgctccaacaggggatgttcttcttgatgaagctctgaagcatgttaaggaaactc

SEQ ID NO: 400284 - DNA, 100 bp, Homo sapiens
ctcgacctgctaacagaactggaccttttcgacatcttcatttgattgtacaccatctcccagcaagacaccagttgaaaaccccttgaatattatgttg

SEQ ID NO: 400285 - DNA, 145 bp, Homo sapiens
atgggcgccctttcctcatcatcaaggatcaggaccgcaagtcccgtcttatgggacttgaggccctcaaggctgaccggttccctgatgtgttacctgcttctgctactgatccaaactgcagaacttctcattcatccccaag

SEQ ID NO: 400286 - DNA, 83 bp, Homo sapiens
ctcggcctatcgctaccctccgaagtccgtatggtttgaagtggtgaacatggatttttctcggcttcacatgtacagtcctc

SEQ ID NO: 400287 - DNA, 100 bp, Homo sapiens
gggagattgagattgcagagcaaggggtggcctggaggccaagcagatgtggcagttctgcagcagaagcatctgccacaaaagcggaagatgactcctt

SEQ ID NO: 400288 - DNA, 100 bp, Homo sapiens
ctttgcccaaggagatggtctcattaaggtcagggaagtcaaagatgcatccctgagttcttcctagcaggcaagcagccgtgcaccaatgacatggcca

SEQ ID NO: 400289 - DNA, 83 bp, Homo sapiens
agcagataaccggaaaatcacacctcttatgtcagcatttcgcaaggaaggtgcttttgcacttgtgtttaaaagtgttcatt

SEQ ID NO: 400290 - DNA, 100 bp, Homo sapiens
tgctcccatcattgatgtggtgcgatcgcttttatcaaaatacaactcaaacctagctactccaatagcaattaaagcagtgccacccagtaaaaggttc

SEQ ID NO: 400291 - DNA, 96 bp, Homo sapiens
ctcgtagtccatcaagggtttccaaacactctgaatcccattctcgatcaagatcaaaatccaggtttacaggtacatacattacacccctatttc

SEQ ID NO: 400292 - DNA, 100 bp, Homo sapiens
cgtctgcaaagtgtccccggcaagaagggttgtgagtcccggcccagcccctccacccccctgcccccccgatgcgaccatgggctctggcagtgactag

SEQ ID NO: 400293 - DNA, 101 bp, Homo sapiens
cggtgcgcgctcagtgcggctgcgccggccggtagctgcagctggagcagtggcgtttggaggagactcggtggcaagtgggatgatactggtcatggctt

SEQ ID NO: 400294 - DNA, 97 bp, Homo sapiens
acaacttctgcaaggcggtttctagtgcaaatcccctgctcagggtcttcatccagaaacgaggtgtcatggagaaactccagctgggcccagagat

SEQ ID NO: 400295 - DNA, 98 bp, Homo sapiens
cagcctgtgccacgtggctgacgcgggcagcccaggccatgtggaagcctgcgtatgacttcttactcacctggagccatcagatcggggacagctac

SEQ ID NO: 400296 - DNA, 74 bp, Homo sapiens
ccttctgcagccactgcaccgacttcatctgttttgcgtttggctccctaatatctgctgtcgatccagtggcc

SEQ ID NO: 400297 - DNA, 100 bp, Homo sapiens
actcgcatcatccacagcagcagctggatattgagccggatagacctattggatatggagcctttggtgttgtctggttccggagtctcaccactgcatt

SEQ ID NO: 400298 - DNA, 98 bp, Homo sapiens
aggcagttatgattcttcgaggcaacgagcccacatgggcagaggccaagaggcagctaggatgcagaaggctatcaacaggctgagcaggcttctga

SEQ ID NO: 400299 - DNA, 83 bp, Homo sapiens
ggagctgctggacacgactcagccggccatcgtggtgaaggactgagctagagccggtgcaggccacgcagaacaagacaggg

SEQ ID NO: 400300 - DNA, 120 bp, Homo sapiens
ctgtgctggtcacagccacactctgcaccgctaggccgtccccgaccttgcctgaacaaggttcttgggtgtctctggggagtccctgggccagaccttcctccagactccagcccacct

SEQ ID NO: 400301 - DNA, 75 bp, Homo sapiens
ccgctttgtagaaaccaacctcttcctggaggagattcagatgtctggcgataaagggatttctgccttccctga

SEQ ID NO: 400302 - DNA, 76 bp, Homo sapiens
atctccacttaatgactgtctcacattggccggcaacttgttccagaaatctatgacaagttcaagcagagtacac

SEQ ID NO: 400303 - DNA, 100 bp, Homo sapiens
ctggggtctgtgtgttgtgtttctgcgtgttctcggcagggaaatcgtgatgagaaccagagtataaaccaccaaatggctcaggaagatgctcagcgtc

SEQ ID NO: 400304 - DNA, 83 bp, Homo sapiens
caccgtcagcactcagcgcgggccgcggagctggagtttgttcagatcatcatcatcgtggtggtgatgatggtgatggtggt

SEQ ID NO: 400305 - DNA, 83 bp, Homo sapiens
gaccgagagcgtgaccgagagcgcgaatatcgtcatcgttagaaggttgcctgtggctggagaaaggaatgtgctcatcacca

SEQ ID NO: 400306 - DNA, 100 bp, Homo sapiens
gaagataatgaatgtcgaatgtgactgactagcagcttcattttgaagtggctgggagcccgagccccacacctgccgggcagcaggtgctggacgtcga

SEQ ID NO: 400307 - DNA, 100 bp, Homo sapiens
tgccgacatcgacgccgcctggcaggccctgcgcaccagcaaaagtactttgactcaggagactacaacatggccaaagccaagatgaagaataagcagc

SEQ ID NO: 400308 - DNA, 100 bp, Homo sapiens
caacatcgcggtgcagcgaatcaagcgggagttcaaggaggtgctgaagagcgaggagatgaggtggaaagtgagaaatggtacctgtctacagacttcc

SEQ ID NO: 400309 - DNA, 98 bp, Homo sapiens
cggggcacagccagagcagcacccaggtgtggtatctgtgcgctttgaagaagatgaagacaggaacttgtgtctaatagcatatccattgaaagggg

SEQ ID NO: 400310 - DNA, 100 bp, Homo sapiens
cagggatgtctacctggtaatagaggacttgaagcagaaagcaagtgaatacgagtcagaaggcatgaagcaggagctgcagaacctgcgcgatgagatc

SEQ ID NO: 400311 - DNA, 100 bp, Homo sapiens
gcatcaaggaagggatgcacatcatcacaccatcagcttcagagaatggcagccatttatttgtcccgtggtgaacctgaacaccatcaagcgctgcctc

SEQ ID NO: 400312 - DNA, 100 bp, Homo sapiens
ctggcacagtggagaaaccgcctcgaaaacggagaagcagataaccagttcaggatgtccatcctggaacgactggagcagatggagaggaggatggccg

SEQ ID NO: 400313 - DNA, 74 bp, Homo sapiens
gcggcaacaagagcgttttgatggagcggctgaagaaggcccagatggtacaggaagacttggagaagacccgt

SEQ ID NO: 400314 - DNA, 83 bp, Homo sapiens
ctacaacgtgctggccaaggtgaagcgcgagcgcgacgagtataagcggagcaaccatgtccaagggacctgcagttggtatt

SEQ ID NO: 400315 - DNA, 73 bp, Homo sapiens
gttgcggcccagcctcataacagggatcatgaaagacagtgctgtggaggaagatgcagagtcagaagatgaa

SEQ ID NO: 400316 - DNA, 87 bp, Homo sapiens
cctattacttcacggagctgaaggatgaccaggtcaaaaaggtacttgttttggctccaacaagggaactggcaaaccaagtagcca

SEQ ID NO: 400317 - DNA, 89 bp, Homo sapiens
tgacatttaattttagggtcctttatatagaagggagagtagatcctgctcacactaaaatatgaaccacaaacacacagagaaacaac

SEQ ID NO: 400318 - DNA, 75 bp, Homo sapiens
ctgtaaggagccgcggcggggggaaaatggagcccttcaccaatgggtgtgtttgaccatcgaatgaagtgctgg

SEQ ID NO: 400319 - DNA, 100 bp, Homo sapiens
cgggaagcactacaagggtcctgaagtcagttgttgcatcaaatacttcatatttggcttcaatgtcatattttggatggtgagaacaagaccaagattg

SEQ ID NO: 400320 - DNA, 90 bp, Homo sapiens
ccttggtgctacttcttgctatgttggagacaatactgccaaggcgaacctagacaagaataagcagacgctggagaaagagaacgcaga

SEQ ID NO: 400321 - DNA, 101 bp, Homo sapiens
gttcttggtctgagctacagcacaaataactccataatgtctgaaaatactgaaattgatagcagtttgaatgttggttgaatctggcgatgtggaaccca

SEQ ID NO: 400322 - DNA, 87 bp, Homo sapiens
ttgctgggtatgaataatgactttcctccaagagcacattgcctggtaagatggttttgctgttactgctcagtgtagtcacacctt

SEQ ID NO: 400323 - DNA, 50 bp, Homo sapiens
gtgaaaggttgcgactattaccaaataggagccagatgaccaagatgctc

SEQ ID NO: 400324 - DNA, 50 bp, Homo sapiens
gggacggccgccggagccgcgaggccaattaacaagcacaagccctggct

SEQ ID NO: 400325 - DNA, 108 bp, Homo sapiens
ctttaacacacctactgggattccttgggcaatggtgaatttgaaaagcaaaacaagctatcgatcagggaagatctccagttataatagataacactaatatacaag

SEQ ID NO: 400326 - DNA, 100 bp, Homo sapiens
cgacttgccggcagaacttacgctgcgggaccccgggcactgttgctgctgcgggagatccgagtgatggtggacctgtgcaacagcaccaagggcatct

SEQ ID NO: 400327 - DNA, 119 bp, Homo sapiens
gcaattcctcgaacgcccctgagcccaagtcctatgaaaacccctcctgcagcagctgtgtcccctatgcagaggctgacccgcggctgattgagtccctctcccagatgctgtccatg

SEQ ID NO: 400328 - DNA, 100 bp, Homo sapiens
tcagaagcatgtgtcttccccagctctgcagccacatactatccgtttgttcaggaaccaccagtgacagaaggtgcacctggtgcagtttcatgagcca

SEQ ID NO: 400329 - DNA, 101 bp, Homo sapiens
ctgctcagaggaccctgtacagggaggtgatgctggagaactacagccatctggtctccctggagattatgcatgatgtgataaagaaggtcaagaagaag

SEQ ID NO: 400330 - DNA, 98 bp, Homo sapiens
gcctcggccttgcaaagtactgagattacagactaatagggatgccaaaggaaaaatatgatcctccagatcctcgcagaatttataccatcatgtca

SEQ ID NO: 400331 - DNA, 100 bp, Homo sapiens
gtggttatagccagtccacggacacttcaggctatggccagagcagctattcttcttatggccagagccagaacatgctggaggctgggaagttcaagat

SEQ ID NO: 400332 - DNA, 75 bp, Homo sapiens
taaacagtggactcaacttcaaagacgttctcaaggagaaggcagacctggtacttacagatcatcagtatttgg

SEQ ID NO: 400333 - DNA, 100 bp, Homo sapiens
aatgaagcattacttactaaatttcatctgtatggaaaaggagctctggtaactttggccaagacttttcagtaggaaatgcttcaaaatacaaagcaag

SEQ ID NO: 400334 - DNA, 100 bp, Homo sapiens
accgcctgctgcactttgggttcaaggcgacagatcatggggttgacagcagcattttccagaatcctaaaaagcttcatctaactattgggatgttggt

SEQ ID NO: 400335 - DNA, 83 bp, Homo sapiens
gtcagagccaccagccaatgatcttttcaatgctgcgaaagctgccaaaagtgacatgcagtctgaagatgatgagaaactga

SEQ ID NO: 400336 - DNA, 74 bp, Homo sapiens
aaggattccaagtaactcttatttgggaagctgtgattaagcactcattggtgcataaagtattcttggacttt

SEQ ID NO: 400337 - DNA, 74 bp, Homo sapiens
atcaccttgcccatgtctcacgcggatatggaggccacatttgcagagtatgaagaatggtcagaagacccaat

SEQ ID NO: 400338 - DNA, 100 bp, Homo sapiens
gtgtatggaaactcatcaggacggaagcacaggggccactcagagtcgcccgagaagtgacaaagtaattccactttatgcacctctatgtagaaaatgc

SEQ ID NO: 400339 - DNA, 89 bp, Homo sapiens
cggcggtggcagcggcggaaaccgaaggggagccatggcggctgacagtcgggaggagaaaggaaaccacccctactcctaatcccccg

SEQ ID NO: 400340 - DNA, 75 bp, Homo sapiens
gttccatcgagccattactacagcaatttgcaacccaaaatgtctttatggaggcagatgcatatttcccaatgt

SEQ ID NO: 400341 - DNA, 100 bp, Homo sapiens
agggttggggactcgaacccccgcttcgcagctcaggagcctgaggtccgaaagatacttggcatatcgaaattttatgattgacacgtatcgtctaaac

SEQ ID NO: 400342 - DNA, 82 bp, Homo sapiens
ggtctggagagggggagccaggggaggacgcaggtatcatgatattagctggtttgacatcaagtcatttgtgagtcatcag

SEQ ID NO: 400343 - DNA, 90 bp, Homo sapiens
attatagtctctcgccacagcggcctcggcctccccttggattcagacgccgattcgcccagctatgaagacggccaagtgggagatgca

SEQ ID NO: 400344 - DNA, 75 bp, Homo sapiens
gtgctgtgctgtgtatgaagaggcagtgaagactctgccaacaggttttgatgtggccaagacaggtgatgctcg

SEQ ID NO: 400345 - DNA, 100 bp, Homo sapiens
gcgggacggagcggccggggcctggggctgcctgccgggcggccgggcgcggcgagcccaggcaggatggggaagcagaatagcaaactggcccctgaag

SEQ ID NO: 400346 - DNA, 75 bp, Homo sapiens
ggcaagagttggatcaacccagagctattgccttagatccttcaagtggtactatactggcaattgctggagaag

SEQ ID NO: 400347 - DNA, 100 bp, Homo sapiens
ctccgggaacggcggcgggtacggcggccccgcgcagcccccggccgcagcgcaggcagcccagcagatatgagatcctgactccaaactccattcccaa

SEQ ID NO: 400348 - DNA, 75 bp, Homo sapiens
ctctacatttctgaatgtctgaagaaactgcaaaagaaactggcagacctttcacttcgtatccaacaaattgaa

SEQ ID NO: 400349 - DNA, 75 bp, Homo sapiens
ggaccccaactccacccagcgctaccggctggaagccctcaaggccaaacgtaccaagaaagtcgggatcgtcgg

SEQ ID NO: 400350 - DNA, 90 bp, Homo sapiens
gagattcaagctgaagaaaacctgtttaaactcattgtcaagactatggcagccagggacgccacttcaggcagcctgtcagaggagagc

SEQ ID NO: 400351 - DNA, 75 bp, Homo sapiens
tggtcctggcagcctgcagcccctacttctgtgcgatgttcacaggtagaggaggtcagtcagccttgcgttttg

SEQ ID NO: 400352 - DNA, 100 bp, Homo sapiens
ggtgctctgacctggctgtcctgcgggagcctgtgcctgctgggggttgtctcctcacagactatgagctccttgaaagagggaatcgtgtcttactcat

SEQ ID NO: 400353 - DNA, 83 bp, Homo sapiens
gacataagggagatagtgcagagactgaaggtccaggtgcaggtacagcagtctccgcaacaggtctcggctcagctctcccc

SEQ ID NO: 400354 - DNA, 75 bp, Homo sapiens
aattctgaactcaggacttggcaagacaatcatatcctgattcagcccttcctccacaaaggcaagacagatttt

SEQ ID NO: 400355 - DNA, 74 bp, Homo sapiens
gtggtggccgacacgggcgacttccacggacactgcccatctctaagataagaacctggaaaggggactctgtt

SEQ ID NO: 400356 - DNA, 100 bp, Homo sapiens
tacatgcggagaccctatgggcgtcgaccacagtattccaaccctcctgtgcagggagaagtgatggagggcgcactgtgtgaggagaacatgcggggtg

SEQ ID NO: 400357 - DNA, 100 bp, Homo sapiens
gaaacacacaggcaccatcccaggggcacaaggactgatgaacagttccctccttcatcaggtgtacaagggagaagaagccacattccaaatctcaggc

SEQ ID NO: 400358 - DNA, 100 bp, Homo sapiens
ggttggcaccactgaagtgaccgaatgaggaataagacgagttggaagaagacctgatcaacaacttcagggtgaagggaaaataattgatagaagacca

SEQ ID NO: 400359 - DNA, 100 bp, Homo sapiens
tacacttgctcagttcagacacagcatgagcccaagacctcccaagtttacttgatcgtacaaggtgcaaagacggaggaccactccaactcagaccaga

SEQ ID NO: 400360 - DNA, 88 bp, Homo sapiens
gattctctgctagatgttgtggttgaaaataatctagatattgatggctttggtggatgaaaatactaggaaaagtttatttaagtta

SEQ ID NO: 400361 - DNA, 100 bp, Homo sapiens
tgctcctgcggctgtatggagcgattttgcagatggacttgaaagaggagattgatattcgactctccagggttcaggatatcaagtatgagccccagct

SEQ ID NO: 400362 - DNA, 95 bp, Homo sapiens
ttgcaggaaatgtgaatctcaggagagagcagccagagtgcaggaaaccagtctcagtgtccaactctctaaccttggaactgtgagaactctga

SEQ ID NO: 400363 - DNA, 98 bp, Homo sapiens
gtctttgcagtggtcatctatttccagcaattttccagattattcaaagtatcaggatgggcatgtgaagtgactgaccttaagatgtttccattctc

SEQ ID NO: 400364 - DNA, 75 bp, Homo sapiens
gggcgactgcctggggcgccggcgaggtcatttcttcagatagctccccagctgtggaaaatgagcatcctcaag

SEQ ID NO: 400365 - DNA, 98 bp, Homo sapiens
ttctgcccaagatgaggagcccctggcctgcccggacgagttcgatgacttcgtcacctatgagaaaaacacaccttgactttagtcagatacatcac

SEQ ID NO: 400366 - DNA, 50 bp, Homo sapiens
cagcactatcccaagactgctggcaacagcatacgtgagaaggctgttcg

SEQ ID NO: 400367 - DNA, 74 bp, Homo sapiens
cttattagtcatcaccgttattcctactaacgtcctgtgtcactgagaagtctggaacgttttttcttagagtt

SEQ ID NO: 400368 - DNA, 75 bp, Homo sapiens
tggccactggcttctgcagggatgtgcacgggcaggccttgtacctcattgccaccaatgggaccccagaacttc

SEQ ID NO: 400369 - DNA, 101 bp, Homo sapiens
ctcgcctcccggccgagctgacgatggtgagaacaagaccaagattggaaagccagcttcagaggagggaattacagcaaaaattgaaccattgacagaag

SEQ ID NO: 400370 - DNA, 104 bp, Homo sapiens
ttcacgcacgggatccagagcgccgcgcacttcgtcatgttcttcgcgccctggtgcgcgcggagccatggttatcatgtcggagttcagcgcggaccccgcgg

SEQ ID NO: 400371 - DNA, 98 bp, Homo sapiens
tggatgtcggtgggcctctgagatatgccgtttacgggtgactgggtacctggatatgtgatcgagtattcttctgggtgtttctatgaggatgtttt

SEQ ID NO: 400372 - DNA, 75 bp, Homo sapiens
ctgcagaaagacttgaaggcgtatacaggaacaatattgatgatgtagtaagggattaatgaaaatcaagttcca

SEQ ID NO: 400373 - DNA, 88 bp, Homo sapiens
aaggttggcctgacaaattatgctgcagcatattgtactggcctgctgctggcccgcagggattttgcaggatcgtggtctttccaaa

SEQ ID NO: 400374 - DNA, 75 bp, Homo sapiens
ctcaagaatctcgtgctcaccggtttctcccacatcgacctggtacacggctgccccacaccccctgctatctct

SEQ ID NO: 400375 - DNA, 97 bp, Homo sapiens
acaggatattcctcatgacattgctgtctgacactggtgaagacatttgaagtatgtgatcttcctgttcgagctgcaaagtttgttgcaaggaaga

SEQ ID NO: 400376 - DNA, 50 bp, Homo sapiens
gcgcagatagcagagccatccttggggcatttccctggaaatggcagctg

SEQ ID NO: 400377 - DNA, 98 bp, Homo sapiens
atgaacttaacacctctgaaattgaggaagaagaggggatcttcaatattcatgttattttctcctttggtcttatatgattgttacctttatgaagc

SEQ ID NO: 400378 - DNA, 87 bp, Homo sapiens
tgccggtgacatctgtactacatcctggcagctgagcccagtctggcagcaggttaagtgcatggaaagaacctctgatggaaatca

SEQ ID NO: 400379 - DNA, 100 bp, Homo sapiens
tttacagttcattttttgcttggtttggaaaaatttcattagagaaatctcctgcaaagaagctgagccatgcaattagtaaatctttggggtgtgtacc

SEQ ID NO: 400380 - DNA, 90 bp, Homo sapiens
atgagggacaacctctttgaaattgtaacaacgtctcgaactttctatgtgcagggagagcacatctgcctgatccgcaaggtgaacgag

SEQ ID NO: 400381 - DNA, 97 bp, Homo sapiens
tttttcgtcgagagattcactatggaatcggtggtttgaagtgtcctgtttgcagctttgtatatggcaccaaatgggagttcaataggcacttgaa

SEQ ID NO: 400382 - DNA, 49 bp, Homo sapiens
cctgctgggagcgccgctcaaggatcagttgtgtggccgggaccctact

SEQ ID NO: 400383 - DNA, 82 bp, Homo sapiens
caggctcgcctcgactccaaatggttgaaaacagatatacagtactatgaagtattccttcgacagtctccattggagccct

SEQ ID NO: 400384 - DNA, 100 bp, Homo sapiens
cggcgaggccctcatgtaccacacggtactccaaagattcaggtttactcacgtcatccagcagagaatggaaagtcaaatttcctgaattgctatgtgt

SEQ ID NO: 400385 - DNA, 82 bp, Homo sapiens
caaagatccccgttcctggagattctgattgaggggttggccggagacctacgacatgaatacctcggagcccaagacggag

SEQ ID NO: 400386 - DNA, 75 bp, Homo sapiens
ctgcacttcactgcactgaatgggaagatttactttcgaagctataaatgttgggatgagagtcggagccgaata

SEQ ID NO: 400387 - DNA, 80 bp, Homo sapiens
tgttctcatcaccatggcaacagacaatgcagatcttcgtgaagactctgactggtaagaccatcaccctcgaggttgag

SEQ ID NO: 400388 - DNA, 51 bp, Homo sapiens
caaccagaaagagattgggtacttaatggtggagcagctcctgtacgaaag

SEQ ID NO: 400389 - DNA, 80 bp, Homo sapiens
gagaatgtattttgacaagtatgttcttaagccggccacagaaggaaagcattgaggagctcaagcttgggaaaatggtg

SEQ ID NO: 400390 - DNA, 74 bp, Homo sapiens
cgtccacatgttgggctaccccgcccactttggacagtgagtgagatcattggccgagacctgagtggcttccc

SEQ ID NO: 400391 - DNA, 82 bp, Homo sapiens
gttctggtgccgcgcagctttccccgaacgctgtaaatgtaagcctattagagctacacagaagacctatttccggaacaat

SEQ ID NO: 400392 - DNA, 101 bp, Homo sapiens
aataacccttgatcctcctcctaattgcaggccatctgtcctggacagctttgccttgctttctggacagctgaacactctgaacaaggtcttgaagcatg

SEQ ID NO: 400393 - DNA, 85 bp, Homo sapiens
caaatctaaaaggcgcgagagaatggatgatagtagtgtgcatagcagcctggttggaagcattctgagtgctctgtctgccctg

SEQ ID NO: 400394 - DNA, 90 bp, Homo sapiens
ctctacgccaacgtggtgctgggatgggtctgtgaagaaatcccggatctcaagctcgctatggagaattacgttttaattgactatgac

SEQ ID NO: 400395 - DNA, 100 bp, Homo sapiens
cgaccaggggcgccggggcagcagcgaccccacagtgcagcgctccgtgtttgcatcggtggacaaggtgccagacaatgcagatcttcgtgaagactct

SEQ ID NO: 400396 - DNA, 82 bp, Homo sapiens
gagacatccaaagaagaagaactgaagctgctggataaacctgagcaatacagtctcgctgtgatgcccaggctggagtgca

SEQ ID NO: 400397 - DNA, 100 bp, Homo sapiens
ggggtcggttctgcagcgctgtatcgtgtcgccggcagggaggcatagcgcctctctgatcttcctgcatggctcaggaagctgtggatcggaaaaggac

SEQ ID NO: 400398 - DNA, 98 bp, Homo sapiens
gtgttcgctgcccagaagaagggaaggcgcgagtgaggaaaggaggtactgtaggcagcgggaactactttacatcctcctggcgtatgaggagtata

SEQ ID NO: 400399 - DNA, 82 bp, Homo sapiens
cctgcccagacggctcacctgtgcgggatggaacaaaagggcgtgatggtgggcatgggtcagaaggattcctatgtgggcg

SEQ ID NO: 400400 - DNA, 99 bp, Homo sapiens
ctttatctacagtcctgagaagagggaggaagcctggaggtttatctcatacatgctggtacatgctggagacgagttgtactgctgtcacaggaaatg

SEQ ID NO: 400401 - DNA, 75 bp, Homo sapiens
tggtcgcttcccgcgcgggtatctgtgcgtttcagcggcgacacggcctttttgacagccccccaggttcagatg

SEQ ID NO: 400402 - DNA, 83 bp, Homo sapiens
ccctgtggggaccattctggccatcattacaacttccctcgtgtagcgacgagctggggctgcagaagaagctacgcacagag

SEQ ID NO: 400403 - DNA, 100 bp, Homo sapiens
ctcctcgtccgacctcacaggccgacaagatacctctcgcatgtccacctcacagcgccgtgccgtccctgcagtgacaccgaggtgctcctagccgtct

SEQ ID NO: 400404 - DNA, 51 bp, Homo sapiens
acccgtgtacgtgcctgtgcctaaatttcccaggcggcaagtgcgacccgg

SEQ ID NO: 400405 - DNA, 95 bp, Homo sapiens
tgtaatttctgttttcaaagaaatcagctgtcaaagctcgaaaaacagcagcagaggaaagaaaagaccagagctaagggaccttctgaatcaag

SEQ ID NO: 400406 - DNA, 100 bp, Homo sapiens
aaattccagtcaaggccctaaaatataggtatgtgactggtgtaagcacataagacacacaaaagaatacctggattttggggacggggaaagaaggctt

SEQ ID NO: 400407 - DNA, 83 bp, Homo sapiens
ccaagaccgcggtcgcccccatcgagagggtcaaactgctgctgcaggactatcggacaaaacctttctgctgcagcgcttgt

SEQ ID NO: 400408 - DNA, 75 bp, Homo sapiens
cattctgcacctgatagtgcaacacttcaaggtcatgtccaaagtaatggagatgttccagcctagtgcggtggt

SEQ ID NO: 400409 - DNA, 83 bp, Homo sapiens
atcaacgtcctccgggaccggagtcagaaccctccgcagagtaaagcaaacggggattcagcgtccgatcctttggaacaggg

SEQ ID NO: 400410 - DNA, 74 bp, Homo sapiens
atggagcatatccggacgaccaagggaatgggtactgttcaaaaaggaatgccccacaagtgttaccatggcaa

SEQ ID NO: 400411 - DNA, 82 bp, Homo sapiens
ccaacagcaacaggtctcaattgttgggcccgaaggcatcctgcagaacggggctgtggacgacagtgtagccaagaccagc

SEQ ID NO: 400412 - DNA, 100 bp, Homo sapiens
gtgaaatcagaggagatgtaactatcgatataattggtgattacaactttcctctataaattaactcttgacactccttgggatttgaagaaaaaaatgc

SEQ ID NO: 400413 - DNA, 90 bp, Homo sapiens
cgccgctcagccgtgccctccgcccctcagggcagcagaagaagcctttgtaaatgacattgacgagtcgtccccaggcactgagtggga

SEQ ID NO: 400414 - DNA, 75 bp, Homo sapiens
tgcgcttcgtgcaccggggcggtccgttgccaaagccaggccataggaaaaggatacagagtagagtttcatgaa

SEQ ID NO: 400415 - DNA, 80 bp, Homo sapiens
taacgcctcccggctctcgtcagcctcccgccggccgtctccttaacaccgaacaccaacccttaggagaaatcttgaga

SEQ ID NO: 400416 - DNA, 75 bp, Homo sapiens
cgattatcgagccgacatccgggaacaccgggcgctgctgggcggccaccaccacggagggactcctcatctact

SEQ ID NO: 400417 - DNA, 80 bp, Homo sapiens
ctctactctggggtcaaagccaactactgcttggctgctaggtcaggcagctcgaaacatggtactccaggaagatgcca

SEQ ID NO: 400418 - DNA, 90 bp, Homo sapiens
cacaagttcacgaaagcctacaaaagtgtggagaggttccttcaggaggatcagaactctagaggaaagcgtctacagcattgctatttc

SEQ ID NO: 400419 - DNA, 100 bp, Homo sapiens
cggcataccaccctgcactgtgaggatattggtgctggaaaaggcaaatactatgctgtcaattttccaatgagagatggtatagatgatgagtcatatg

SEQ ID NO: 400420 - DNA, 97 bp, Homo sapiens
caaagcctccagaggacataccacctccaggatcaggatgcagaggtccgggcccaccagctggtcttgccaccttgcgacgtagtgatcaaagccg

SEQ ID NO: 400421 - DNA, 82 bp, Homo sapiens
cgtgccctcccgctcggccccgccagcagcactgtggaggccgtcctcgggtttccaggcctgaggtgcccgccctggcccc

SEQ ID NO: 400422 - DNA, 89 bp, Homo sapiens
gagatctcctgtgctgcgaccactgcccggctgccttccacctccagtgctgatttggagcaagaggtggtggtggccttcccccgaag

SEQ ID NO: 400423 - DNA, 75 bp, Homo sapiens
aattatgaaagaagtcattccttttttgaagacactacaacaacaggagtgcaaacttctctacagccgaaaaga

SEQ ID NO: 400424 - DNA, 90 bp, Homo sapiens
gctcagacacctattaccagagggtttagatgtagattctctggtcattgagcatatccaagtgaacaaagcacctaagatgcgccgccg

SEQ ID NO: 400425 - DNA, 75 bp, Homo sapiens
gcaagaacgggaacaaaactctgtacgagctcaactggaggcagtcctgtgcggaaatctgaagaaaaaacagat

SEQ ID NO: 400426 - DNA, 82 bp, Homo sapiens
ctctccctgtcctagctctgtaactgtttacataagaagaggaggaggccaggcaggcaaaaggagtcatggcttctgatgc

SEQ ID NO: 400427 - DNA, 90 bp, Homo sapiens
tgttcaccaactgttacatttacaacaaggttatgatgtgattgctcaagcccaatctgggactgggaaaacggccacatttgccatatc

SEQ ID NO: 400428 - DNA, 100 bp, Homo sapiens
cagcgcaaccaaaaggagatccaagaatcgagtaccagttttttgaagacagacacagaacacagatatgtagaactcttcttgaattctacagcaggag

SEQ ID NO: 400429 - DNA, 99 bp, Homo sapiens
cagctgattcctgggagcacatccatttcattggcaaggtgatgctgtggagtcttcaaaaagcccgaccactctggattacaaatttacaggaggatg

SEQ ID NO: 400430 - DNA, 80 bp, Homo sapiens
ggaaaaggcaaaaatcccatctaccgcaactctcagttcgagagtaaagataacgaaggaggcccaacttcattcaataa

SEQ ID NO: 400431 - DNA, 88 bp, Homo sapiens
cttgaagtggaaaatcaagctaagcgcctactagagcagggtttggagactcaggtctattctggataagcaggttttgtgaagacat

SEQ ID NO: 400432 - DNA, 82 bp, Homo sapiens
gcagtggccacaagagcgaggagaagcgagaaaagatgaaacggaccctccctggcctcccacgactacatcctgaagattg

SEQ ID NO: 400433 - DNA, 96 bp, Homo sapiens
tacagtagcagcagtacgtcagctgccatgccgcattcctccagcgccaagctgcccaacatgtttgggaacctgcgctccacgttaatggccctc

SEQ ID NO: 400434 - DNA, 75 bp, Homo sapiens
atgcccagtggggcattcgtcttggtaaacttggtctgaaggaagaggatcaccttccaagacaaaacagtcttc

SEQ ID NO: 400435 - DNA, 90 bp, Homo sapiens
gtcccgagcccgcggggcagctaccgctcggtgattttacaacgagatgctgctctccatagggatgctcatgctgtcagccacacaagt

SEQ ID NO: 400436 - DNA, 100 bp, Homo sapiens
tgcagcttcaagcttaggaccacccaccatgcctatccaggaattgaatgatctggcacgggaccctccagcacagtgttcagcaggtcctgttggagat

SEQ ID NO: 400437 - DNA, 50 bp, Homo sapiens
agttttcatggatgcccctgtttctggtgcttcgcagaatcaagaacggc

SEQ ID NO: 400438 - DNA, 82 bp, Homo sapiens
ataaaatgcatgagaggaattctctactgctatatgcgtcaggccgataaggttggaagcgaagtggaagcactgaacctcc

SEQ ID NO: 400439 - DNA, 119 bp, Homo sapiens
cttttcagggcccccaaactgtcacagaaagagctgttaacacttcctagataacgggtgagaagccctaccactgcaactgggacggctgcggctggaagtttgcgcgctcagacgag

SEQ ID NO: 400440 - DNA, 74 bp, Homo sapiens
gaaaatcgtcttatagttgagaatttatcctcaagagtcagctggcagacggggtctggctctgtcacccaggc

SEQ ID NO: 400441 - DNA, 89 bp, Homo sapiens
gaatccttgctctgcgatggactattccctggctgcagccctcactcttcatggtcactggtgatcccattaagatactaatgccatca

SEQ ID NO: 400442 - DNA, 90 bp, Homo sapiens
cggggatttctggctctttcctcttcgccttaaattcggggctttgaccacgacctttgaagagcttcattttgagatcaagccccacga

SEQ ID NO: 400443 - DNA, 83 bp, Homo sapiens
cgagagcaagctctataagattcttcaaggtggggttggcatcccccacatacgcttccgggaggatttccattataatgaca

SEQ ID NO: 400444 - DNA, 100 bp, Homo sapiens
ctctaccctggaggagattctggggcagtatcaacggagtctccgggggaagaatggacagaagctatccaggctgtagcagacagactgcagaggcaag

SEQ ID NO: 400445 - DNA, 75 bp, Homo sapiens
aagccgtggccccgagggcggatccgagctcttcacagatggaatcacaaataaacttattggctgttacgtggg

SEQ ID NO: 400446 - DNA, 100 bp, Homo sapiens
tattatttcaaagatgaagatgaaaccaagcccttgaactgtagtgaaatgtagtattgccaagtcccaagccctctacagtgcccaaagagggctgaag

SEQ ID NO: 400447 - DNA, 88 bp, Homo sapiens
cgtccccagaacgcagatcagaggtagtcggacctttcccgctggcgcgcagcctcagctaggtgtgggcaataatagtgaaggtgga

SEQ ID NO: 400448 - DNA, 88 bp, Homo sapiens
accaactgaggaacagtggccgttggaaattttgcagaagagtaaagaagaagcttacgtgatggcagatgctttcagaattgcattt

SEQ ID NO: 400449 - DNA, 100 bp, Homo sapiens
tggcccagctgcctcagagcctgtcctgcctccgctccctggtcctcaaagccgtgggggaaaagaccccctctccagccctgggggccctggatctcgg

SEQ ID NO: 400450 - DNA, 51 bp, Homo sapiens
catccggctgctgcaggcccagctgcagagtttactcgaactagaagtaga

SEQ ID NO: 400451 - DNA, 100 bp, Homo sapiens
gggacaactaaagctgcgggatacaaagtcagcccaggcagacctccagccaaatgatttctcagtatcactaaaagcacaagggaaaaacaagcatttt

SEQ ID NO: 400452 - DNA, 83 bp, Homo sapiens
cttcgcctcgcctcgggacccgcggtccccgctcttgctgccttatgccagcctggaccatcttggaggcagtgtaggatcat

SEQ ID NO: 400453 - DNA, 98 bp, Homo sapiens
gccaagcagacaggccagtggatcggaatggtggagaacttcaaccaggcactcaaggtgtcattccacacatccacaaatctctgattgggaagaaa

SEQ ID NO: 400454 - DNA, 74 bp, Homo sapiens
gctaaggactgtatcgactcctttgttactcactgtgttcgggtatgttcgcaattcgtgctgatcatgatttt

SEQ ID NO: 400455 - DNA, 100 bp, Homo sapiens
tctccccagccaagagcatggctatgggagaaggaaggcaggcagcaggcagctcaaagcttggattctgccgtgccactcacgaatggcgacacagaag

SEQ ID NO: 400456 - DNA, 97 bp, Homo sapiens
cgtgttctccaaataccagctcgacaaagatggggttgtcctctttaagaagatgatgatgccaattcctacgagaatgtgctcatttgcaagcaga

SEQ ID NO: 400457 - DNA, 75 bp, Homo sapiens
ttataattcagtggataaaactaccacaggcaccatcatgggagcagcattgctggaggactggtgaagggggct

SEQ ID NO: 400458 - DNA, 82 bp, Homo sapiens
aggcgggcagccggggcgtccagatttggtgcttccagatgtgagttatcaggtggaatccagtgaggaggatcagtctcag

SEQ ID NO: 400459 - DNA, 75 bp, Homo sapiens
aaagaacttgcagttgaaggagtataacacagacgcaggaggagggagacgcactgatgacatcgggccgctcct

SEQ ID NO: 400460 - DNA, 74 bp, Homo sapiens
gagagcagctgcattgcaggcacagggcccgatgagccagagaagcttggtgggtaaagcaggaatctgagatt

SEQ ID NO: 400461 - DNA, 100 bp, Homo sapiens
ctttaagaaacatcagcagctgaaaatccatcagtgccagcataccaatgaacctctattcaagagccaaaaacctgtatatcatctccgtgaaggggat

SEQ ID NO: 400462 - DNA, 100 bp, Homo sapiens
tgtggcttttgtttggattgcagcatgcagaattacaggtatagacacgtgtggccgtttacgctgtaggatcctcattcccactggctttgaacatttt

SEQ ID NO: 400463 - DNA, 89 bp, Homo sapiens
cagtactcgggcaagaccaccttcgtcaatgtcatcgcggagactacctaggtggagaagcgtactgggccggcggcctgcacctctac

SEQ ID NO: 400464 - DNA, 83 bp, Homo sapiens
agtgtctttctcgagaagcaggtggaaacatgagcattcagtttcttggtacagtggatgtgctgatggagctccttgagcag

SEQ ID NO: 400465 - DNA, 100 bp, Homo sapiens
ctggagcctgggggaacaagatccgacccatcaaggcttctgtcatcactcaggatgaagatttgataaagtggaaggcactgtttgaggaagtccctga

SEQ ID NO: 400466 - DNA, 100 bp, Homo sapiens
cagctcgtgcaattgttgccattgaaaaccctgctgatgtcagtgttatatcctccaggaatactggccagaagttgggatatctaaagcagaagcctta

SEQ ID NO: 400467 - DNA, 90 bp, Homo sapiens
tgctcaatgaccgccgccgcctggccctggagaactacatcaccgctctgcaggctgttcctcctcgggaagcccagaacctcatggccc

SEQ ID NO: 400468 - DNA, 75 bp, Homo sapiens
ccccaatccccggcagctctctcaggcaccttctaaaaatgaacaagagcagctctgatttggaaaaagtgagcc

SEQ ID NO: 400469 - DNA, 82 bp, Homo sapiens
gaggctgtgcttcggcgctccggctcctcagagagcctcggctaggtttttctatatgagtggagaagacagctgttaccag

SEQ ID NO: 400470 - DNA, 100 bp, Homo sapiens
ggaggaggaggattcagggaataggagctggggagcccttctgcgccacagggtatttgaagtataccatacaactgttttgaaaatccagcgtggacaa

SEQ ID NO: 400471 - DNA, 75 bp, Homo sapiens
agccgctggggtcccttttgcctcagatactattttgaagacttcaccacaagcaggaatgcagactcagcctca

SEQ ID NO: 400472 - DNA, 98 bp, Homo sapiens
gtagatccctcccggcttcccggcttcccgtctcgtcaccctctgtatttgattttcatcaagcagctgatggtatccaggaacaacagagacaagaa

SEQ ID NO: 400473 - DNA, 75 bp, Homo sapiens
tcggctgcgggaaatcgggctgaagcgactgagtccgcgatggagtggcttttcatggcctgccactgaaaatca

SEQ ID NO: 400474 - DNA, 82 bp, Homo sapiens
gaccctggagcctcagttggaagcagccgatccagcctgcggagcctgtggggcaggatcaccattaacaaggacaccaagg

SEQ ID NO: 400475 - DNA, 100 bp, Homo sapiens
tccaatacagaggcagagtccgggtccagctcaaacaggaagatgggagcctctgccttgtacagttcccatcaccgaagaaagctaccgtgaatttact

SEQ ID NO: 400476 - DNA, 101 bp, Homo sapiens
gggaaagctttggactactacatgctccgaaatggggtgaggatatggaaccgcaccaaagaaaatgcagagaagtttgcagacacagtgcaaggagaggt

SEQ ID NO: 400477 - DNA, 100 bp, Homo sapiens
accttgctgctcagacgctccgagaagcttcaggcagcataacacttacagctccgctccatcccagtcaagggggctgaagatgatgaactagaagaag

SEQ ID NO: 400478 - DNA, 74 bp, Homo sapiens
agcaatctctgagaccaaggttaagaagagacatgttgaccctttcatggggcatgaccctggattgtgtggag

SEQ ID NO: 400479 - DNA, 101 bp, Homo sapiens
tggacacccagcggtctgacatcgcgacgctgctcaaaacctcgctccggaaaggggacacctgctccagcggcgccatgagcaaatgaaaaagaatttgg

SEQ ID NO: 400480 - DNA, 82 bp, Homo sapiens
ccggacggcacaccctacgttaccgtgctcaaggtggtgctgtgggtcggcctgggcgtcctggtggtgagcactgtcacca

SEQ ID NO: 400481 - DNA, 100 bp, Homo sapiens
cggcccgcaggggctacctctaccagcagctgtgctgcgtagggggggccctcagcctcttggccttgaacgggctgttcatcttgattcacaaacacaa

SEQ ID NO: 400482 - DNA, 100 bp, Homo sapiens
gcgccgcgccgcacgagcaccagcctagagccagacacatcatctcagagttggagcacctgacgtttgtcaacacggatgtgggccgctgccgggcatg

SEQ ID NO: 400483 - DNA, 83 bp, Homo sapiens
ctggggaacctgctcaaagccctgggtcgcttggaagaagccaaggatgagaacaagttgagcagtgccaacggccatgaaga

SEQ ID NO: 400484 - DNA, 100 bp, Homo sapiens
gtggaaggaggggccgtgaggtgagagagtccgggagcccgagcttgagggcgaccattgacgaggtggagacggacgtggtggagattgaggccaaact

SEQ ID NO: 400485 - DNA, 100 bp, Homo sapiens
ttcccacttgattacccgttaagtcccccaaagatgagatttacctgtgagatgtttcatcccaacagtcctgactttttggaatgcccttcttcctcct

SEQ ID NO: 400486 - DNA, 87 bp, Homo sapiens
tggcttgaattgggaggggggcagctggagcctcaggcggcagcgcttctaggtcggcagccgccgcgtgatacagtgcggagcagc

SEQ ID NO: 400487 - DNA, 100 bp, Homo sapiens
gaagctgtggatgaatttgcttttctggaaggttcaaaccttgtactactcagctgatcacaagctgcttgatgggaacctactagatggacaggctgag

SEQ ID NO: 400488 - DNA, 100 bp, Homo sapiens
aaactgcacagtggaaggcactttccatgaatactgagaatgccaaagtaaccagatctaacatgagggcaaccttcgcccagaagaggcacttcaggct

SEQ ID NO: 400489 - DNA, 100 bp, Homo sapiens
ctgcgatggggcgagaaaggtcccactgcagccctccaagcaggagaaccaggtgcatcagcgcattgcggagctgaggaaagcaggtctgtggtcccag

SEQ ID NO: 400490 - DNA, 100 bp, Homo sapiens
cggagaacagcggtcgcgccggcaagagcagcgggagcggcgcggggaagggggcggtgtccgcagagcagatggcccactgcgtgaccttggttcagct

SEQ ID NO: 400491 - DNA, 50 bp, Homo sapiens
ctgttagaaggttctggtcttgcactaagaccaaacctggaccacccaaa

SEQ ID NO: 400492 - DNA, 144 bp, Homo sapiens
agaccaagatagaacagcccttcagaaagtgaagaagtctgtaaaagcaatatataattctggtcaaggtcagctggccgccggcacctgtgagattgtgaccttggaccgggacagcagccagcctcggaggacgatcgcccg

SEQ ID NO: 400493 - DNA, 100 bp, Homo sapiens
ggaagaaccatctactgtcctgtcctgaagggagttcctcctagatctggtcggacctttgtatgctgcagatctgggacacggccggccaggagcggtt

SEQ ID NO: 400494 - DNA, 50 bp, Homo sapiens
ccggggccggcagaggaggatctaggccggtctaattgaagccaacggag

SEQ ID NO: 400495 - DNA, 98 bp, Homo sapiens
tttgctgagggtcacattgagctgcaggttgaatccggggtgcctttaggataaggatgctaaattccgtctgattctaatagagagccggattcacc

SEQ ID NO: 400496 - DNA, 88 bp, Homo sapiens
tacgcggtgctgcgagggcagaacctgggcctcgggccagcggccaggagctgcctcccccagcccccgtcccgcggcccccagccgc

SEQ ID NO: 400497 - DNA, 96 bp, Homo sapiens
tgaccgagagcgtgaccgagagcgcgaatatcgtcatcgttagaaggataaaagaatcagagtgtctcaacccttgacaagaggaccaagtgcctt

SEQ ID NO: 400498 - DNA, 82 bp, Homo sapiens
ctttgaggtgcttgtcggtctggactgatgaaaatccatatggtgaactactgagttcttcattatgtctgatggagattat

SEQ ID NO: 400499 - DNA, 100 bp, Homo sapiens
tgatctccagcgccggcctcctcagtgcgaagaagctgcagccgcacctggccaaggatgacagatttgaagatctggaagaggcaaatccattctcttt

SEQ ID NO: 400500 - DNA, 83 bp, Homo sapiens
caacactaccaaaaataatccagtgatgtcattgcaagatcagactacacttgctgctttgaaggatgaagttgtatctgttg

SEQ ID NO: 400501 - DNA, 82 bp, Homo sapiens
accgaagttggaagtgtctcttagcagcgcgcggagaagaacggggagccaggcgagaaccactgtctctgatcaacgtgcg

SEQ ID NO: 400502 - DNA, 50 bp, Homo sapiens
gctagtaatttgccttctggattttttagaaagagcgttttcgctacgta

SEQ ID NO: 400503 - DNA, 75 bp, Homo sapiens
cggcagcagctccaggcaaagtgacaggactcaactattgttactccaattattttgaggactgaccctcaggga

SEQ ID NO: 400504 - DNA, 82 bp, Homo sapiens
ctggtgacacgactcagacagaaggtggtacagaagttggtcctgccctttgggcgactgaactacctgcccctggaacagc

SEQ ID NO: 400505 - DNA, 83 bp, Homo sapiens
ttcttaacagccaaactgaatgcagaaaagctcaaagatttcaaaatcaggtggacccccaaaagtacaagggcatatttaac

SEQ ID NO: 400506 - DNA, 100 bp, Homo sapiens
gagatggatattcaaaatgttcctctatcagaaaagattgcagaggaaaatatgttgtgttcttcttttaccctcttgacttcacctttgtgtgccccac

SEQ ID NO: 400507 - DNA, 100 bp, Homo sapiens
ctctgagcccagaggaagccgagtcagccctggaggcggcccattatttcacagaggacagctcctcagaaggtaagatgttcaagtcgctggacctgag

SEQ ID NO: 400508 - DNA, 75 bp, Homo sapiens
ccaactccctgcagaccatgcagcaggacatgatagagccgctcccgaggccccggcgcggcgcgagggcgcggg

SEQ ID NO: 400509 - DNA, 51 bp, Homo sapiens
tctctgcctcctgtggacaaaaaaaggactcctagaagtaccccaccccac

SEQ ID NO: 400510 - DNA, 100 bp, Homo sapiens
tgtgaatttggaagggatcgtgtggcatgaaacagaagaagttgtggaagaaggactctgggaaaatggcctttcctatgaatgtaggacgctgctcttc

SEQ ID NO: 400511 - DNA, 142 bp, Homo sapiens
agaagcatgtgtcttccccagctctgcagccacatactatccgtttgttcaggaaccaccagtgacagaaccctcaaactgacacaagacctacagagaaaaccctttgccaaatctgctctcagcaagtggacagtgatac

SEQ ID NO: 400512 - DNA, 101 bp, Homo sapiens
cccgagttcgctgccagccccaagaaggagaccctcatccagctgatgcccttcttcgttaatctcaggggcgatataatcaatgaggtggtcctaaagtt

SEQ ID NO: 400513 - DNA, 100 bp, Homo sapiens
atctcaaagattatgcgagaatgtcaggaagaaagtttctggaagagaggaggaatcttcgagtatgcggacggccccaacgcccaggtcatgaatgccg

SEQ ID NO: 400514 - DNA, 75 bp, Homo sapiens
atcgaagctctagaaatgaatgtttccatctcttcagagatgaaccagcgcccccctcgcgggcccagctgcaac

SEQ ID NO: 400515 - DNA, 87 bp, Homo sapiens
aattacttggagcaaagggcagtcggcggagcttcgccaaggctggcgcagtcgatcttcccagacccgtcagattttgaccgctgc

SEQ ID NO: 400516 - DNA, 101 bp, Homo sapiens
gccgagccggaggctgcaggatggtattcctggagtggagagccactctttttgacctgccctacatcagaagtcaccgagctcccagcctgcagccagtg

SEQ ID NO: 400517 - DNA, 82 bp, Homo sapiens
accttgaggctctgtgcaagcaggaaatgaaggctgaggcagagtggaagctcttcgtgggcggtcttgactggagcacgac

SEQ ID NO: 400518 - DNA, 100 bp, Homo sapiens
tggtggaagatcagggatttctggattctctacgggatctcatagcagattcaaatccaatggatggttcctacctggctgagttcctgctggagaaagg

SEQ ID NO: 400519 - DNA, 98 bp, Homo sapiens
cttgaaggcatcgtgtggcaggaaacagaagatgttgtggaagatatcaataagcgcagagagccgctccccagcctggaggctgtgtatctcatcac

SEQ ID NO: 400520 - DNA, 76 bp, Homo sapiens
gcacaggctgtgtgaatttcataagaagaggaggttacttcaaacagaacctggcagttggattaataccttgaag

SEQ ID NO: 400521 - DNA, 75 bp, Homo sapiens
gggaaacaaggcttccagtgccaagacaagttggatggcttgaggactggtactaaaaggaaacgtgactgggag

SEQ ID NO: 400522 - DNA, 74 bp, Homo sapiens
gagcgggagacagcggtgacaggagcagcggccgggagcccttagggaggcagatccagacatttaatgtggat

SEQ ID NO: 400523 - DNA, 98 bp, Homo sapiens
cgctgcgctcgcgcccggatccctcagcatttaaatcaaacggtattgagatggattgggttatgaaacataatggtccaaatgacgctagtgatggg

SEQ ID NO: 400524 - DNA, 100 bp, Homo sapiens
ttccactgtccgcggggtgagaatgcccctggaggaactgtgagagtgacactgaggaggacatcgccaggaggaaagccctccacccacggaggaggag

SEQ ID NO: 400525 - DNA, 50 bp, Homo sapiens
attaaacaactacctgctgaaattgatcttccatggtggcttattctaat

SEQ ID NO: 400526 - DNA, 75 bp, Homo sapiens
caaaagacacagaagaaaaagtgggactgaagtacactgaagcaggggataaaaacattcagatggcagatcaca

SEQ ID NO: 400527 - DNA, 101 bp, Homo sapiens
gaggacgagcggaaaaacggagcctacgcgagtgcggtgggcccgggcgctgtatgactttgaggccctggaggatgacgagctggggttccacagcgggg

SEQ ID NO: 400528 - DNA, 97 bp, Homo sapiens
catcataaactctgcacattcattctcaaaaacccacctggaatctctgaaggaagaagatgaatcagatgatgataatatgtaacatttactccag

SEQ ID NO: 400529 - DNA, 88 bp, Homo sapiens
tgttgaacatgtggaaggtgcgcgagctggtggacaaagcgtaaaaagatggcctatcagaaggtccatgcagatcaaagagctccag

SEQ ID NO: 400530 - DNA, 89 bp, Homo sapiens
aagaggggctggagcccacctgctttgagaagagcaatgacattgggggcctgtggaaattttcaaaccctgatgccaacccacgcccc

SEQ ID NO: 400531 - DNA, 75 bp, Homo sapiens
aaccaaattcgagaccaagagcgcgcgggtcaaaggtctggccgtgggcctgggcttcggggcactggcagaggt

SEQ ID NO: 400532 - DNA, 100 bp, Homo sapiens
gtctacctcctgtggtttttgattcaagtcctgttctacctactgccaattggaaaggagtccttcaataatgttaaacagtggctgcaggaaatagatc

SEQ ID NO: 400533 - DNA, 105 bp, Homo sapiens
caaaaacttattccgacattcagagttgtttcctccatttgctaaaggaatagtgtttggtcagaagagatcaattctacagaaatttccagtggttctgttgag

SEQ ID NO: 400534 - DNA, 75 bp, Homo sapiens
gaagctggctatggttaaagcggtcccgcggcagtgctggtggccatggttcccgtagccagaaggagttgccca

SEQ ID NO: 400535 - DNA, 100 bp, Homo sapiens
gactcctcgggcagcctcaacgagaactcggagggcaccggagaaactgattattgatgagaagaagtattacttatttgggagaaaccctgatttgtgt

SEQ ID NO: 400536 - DNA, 102 bp, Homo sapiens
ccaccctgagcagagccgccgaggatgataaacacccaggacaggtggttagctcaaccaatggagagctgaatgttgatgatcccacgggagcccactcca

SEQ ID NO: 400537 - DNA, 50 bp, Homo sapiens
cgggagctgcacctgatgcggttttttgctccactcaagcctgttagaat

SEQ ID NO: 400538 - DNA, 74 bp, Homo sapiens
ccgggggttggcgaccgaagtctaggttttcgagaagcctggagctgctgaagactgctattgggaaagctggc

SEQ ID NO: 400539 - DNA, 100 bp, Homo sapiens
cggcctggctaactcctgccaggcagtgcccttcccggagcgtgccctcgccgctgattagcctgaggcctgctcagtcgttcctaatgaataaaaatca

SEQ ID NO: 400540 - DNA, 111 bp, Homo sapiens
agcctggatcaactttaataaagaggaaagagaggcttttgcagagtcactcaggacaagcttgaaggtttctaccatgaatgaaatgaagagttattctcaagctgtcac

SEQ ID NO: 400541 - DNA, 100 bp, Homo sapiens
ttcaagctcatctacaacgagtactgtgggcctggagccaagcccctcttcaggagtaagaatttctttggccctgagtttgtgaaaatgacaattgaac

SEQ ID NO: 400542 - DNA, 97 bp, Homo sapiens
atgaccgagatcggcatggctctgtccgggcccctgaccactgccgtgcgcctgccagggaactgtacctggggaatgaattgtaggtttatacacc

SEQ ID NO: 400543 - DNA, 80 bp, Homo sapiens
tggccggtacatggctgctacttctcctggcccttgggtgtccagccctacccacagcttccccgggcgctgcctggaca

SEQ ID NO: 400544 - DNA, 74 bp, Homo sapiens
ccgcccccggcgccatcttcccgaccgcgagccgtccagattatgtttgagaccttcaacaccccggccatgta

SEQ ID NO: 400545 - DNA, 96 bp, Homo sapiens
caggctctgcagcccctgctgctggttctgcccctgctgcagaggatgacggacaagtgtttccggaagtgtatagggaaacctgggggctccctg

SEQ ID NO: 400546 - DNA, 96 bp, Homo sapiens
aggttgtccttctattcaggccactcttcgttttccatgtactgcatgctgtttgtggcactttgatgtggaaaatggcccttccccaggtcggag

SEQ ID NO: 400547 - DNA, 75 bp, Homo sapiens
tggacgtgtaaaaagaactcttaacggccgatgcagctcttccaaagctaagatgacatgaaaatggagactgat

SEQ ID NO: 400548 - DNA, 98 bp, Homo sapiens
ccttttgagctgggaaaactgtttcagttgcagactttaggcctgaaagagagaactcgatgccaccgcaacggtattggcgaaccggcaggatgaaa

SEQ ID NO: 400549 - DNA, 99 bp, Homo sapiens
gcgatagacgagtatcagattgttaatgtaccgcggtgaggctcttgaagatttcacaggcccggattgtcgttttgtgaattttaaaaaaggtgatcc

SEQ ID NO: 400550 - DNA, 100 bp, Homo sapiens
ccgaccacggggtctgtggagtggctggaggaggatgaacactatgattaccaccaggagattgcaaggaagcaggtcctggggaccaaggtggacgcgg

SEQ ID NO: 400551 - DNA, 51 bp, Homo sapiens
gtaccagcacttcatccagcagtgcacaggctggagcgcagtggtacaatc

SEQ ID NO: 400552 - DNA, 75 bp, Homo sapiens
cagcatttgtttcccttagccagcccgagcaagtaaagattgccctgggcgctgcctatggcacagccaagagcg

SEQ ID NO: 400553 - DNA, 119 bp, Homo sapiens
cttttatccagacagaccacaccaaaaaagcgtaggattctttctccagtgcaatgctgaatctgattccacaaagcgtggatacccatcaacgaagttttgatattggaattcagatt

SEQ ID NO: 400554 - DNA, 100 bp, Homo sapiens
ccaccgtgcagcggggcatcatcaagatgttcctcagcactttgtttgcccccttaaactttgtcatggagaaagtggagagcatcctcccatccagtct

SEQ ID NO: 400555 - DNA, 83 bp, Homo sapiens
ggagtactagtctcaacgagagacccaagagttggaatcgaagcctcttaaaatggcagatgacttggacttcgagacaggag

SEQ ID NO: 400556 - DNA, 90 bp, Homo sapiens
aatcaaagggccgggagcgatgaggcggggtttcaccatgttgcccagactggtcttgaactcctgagcttaagcaatccacctgcctcg

SEQ ID NO: 400557 - DNA, 75 bp, Homo sapiens
cctcgaagtgcgcaaacttgacactcaccctgaccgagctccatgaacctgcctccagacaaggcccggctcctg

SEQ ID NO: 400558 - DNA, 83 bp, Homo sapiens
caaggggctcagctcgcagcgcatccccgcgcacagatgtccagctcgccgctgtccaagaaacgtcgcgtgtccgggcctga

SEQ ID NO: 400559 - DNA, 98 bp, Homo sapiens
cgggatcgtgaccgagaccgtgaccgagagcgtgaccgagagcgcgaatatcgtcatcgttagaagtgttctaagaacggaagcatctgggctggatg

SEQ ID NO: 400560 - DNA, 73 bp, Homo sapiens
ggccagatagtaccatgatagctgtatcagagcaattatgtttgcctctccacattttagaagagaaaggttt

SEQ ID NO: 400561 - DNA, 100 bp, Homo sapiens
gacgtagaggaggacgcctcacagctcatctttcctaaagagtactgggatttaatgaatttgtctgaaaaacatgataagataccagaaatctgggaag

SEQ ID NO: 400562 - DNA, 51 bp, Homo sapiens
tggcaatctagaacctgtgtttggaaaatgtttcaacgtgcgcaagagttg

SEQ ID NO: 400563 - DNA, 100 bp, Homo sapiens
atatgaaacagcgaaccattcagcaactcaagtcgttcccactcagttttctctgttacaatacatatgaaagaaactacgattgatggagaagagcttg

SEQ ID NO: 400564 - DNA, 97 bp, Homo sapiens
gagtcttctggcaaacagtgtttgcctctggttcagctcatacaacagcttcttagaaaaattctgtaggccgttggaaggaagctaccataccagg

SEQ ID NO: 400565 - DNA, 89 bp, Homo sapiens
gccacaagttacaatgcaacaggaaacagagcaaatgcagcgttacaatcaaagacttattgaggaattgaaaaacagacagactcaag

SEQ ID NO: 400566 - DNA, 74 bp, Homo sapiens
tgctaagtacatgctggattgtagaacttctctctctccacaagtatatggttatgatgacttgcagatgcttc

SEQ ID NO: 400567 - DNA, 120 bp, Homo sapiens
ggcttctctggaaacctggaaggagaaggcttcatccttgggggagttttcgtggtgggatcaggaaagcagttggctggagttgtcttccttggagtcgggctgtgggcatggagcgaa

SEQ ID NO: 400568 - DNA, 82 bp, Homo sapiens
agaggaacatttggctaaaatatttgcattcgttcagtcagagagcataatagaagtactgcgttttgatgatggagggcta

SEQ ID NO: 400569 - DNA, 87 bp, Homo sapiens
ctcccaaagtgctgggattgcagctcttgcaggagaactctcttgtagctcaccctgtctgaaaacatactggaaaggaattcaagg

SEQ ID NO: 400570 - DNA, 50 bp, Homo sapiens
ggcggagtcggggctcctgacgggctctggaacttcatccattctctatg

SEQ ID NO: 400571 - DNA, 83 bp, Homo sapiens
accaacgccatccgcgagactggacaatgcagatcttcgtgaagactctgactggtaagaccatcaccctcgaggttgagccc

SEQ ID NO: 400572 - DNA, 87 bp, Homo sapiens
cgcgtctccgcttctgctgcctgccgggcgggctccggtggccgctggacacctgttctgctgttgtgtcctgccattctcctgaag

SEQ ID NO: 400573 - DNA, 74 bp, Homo sapiens
cggagcgcgggtacagcttttcgctgactacattcagactgggctggcttagatgaagatgaagatgcacatgt

SEQ ID NO: 400574 - DNA, 100 bp, Homo sapiens
tctggaaaaggagatgcagaaaatgaatccatacaagattgatataggcgcagtatattctcacagagatcaagcgtgctttccttatcgaggagcagaa

SEQ ID NO: 400575 - DNA, 82 bp, Homo sapiens
cagagactccggaggggcgtcggaccagccggcgcaagcgggcgaaggatgataatgaagataattcaaatgatgggaccca

SEQ ID NO: 400576 - DNA, 50 bp, Homo sapiens
ccgggatgcaggaggagagcctgcaggtgtaatgttcaagctcagaaatg

SEQ ID NO: 400577 - DNA, 100 bp, Homo sapiens
agaaggaagagtcagcagagcaaccagagttctactacgatgagtttggtttccgtgtgtacaaggaagctgcctgctgaagatgaagtcttactacaga

SEQ ID NO: 400578 - DNA, 48 bp, Homo sapiens
atgcgagatgaggtcctggaacatgagtcattttttacaggtcagaac

SEQ ID NO: 400579 - DNA, 136 bp, Homo sapiens
ccacctcgggacctacccagccctctgcccaccaagcggaccaggacctattcagctgagcagtagccaacatgtcagggtgggagtcatattacaaaaccgagggcgatgaagaagcagaggaagaacaagaaga

SEQ ID NO: 400580 - DNA, 75 bp, Homo sapiens
attctacggggctttcagcaaatcaaagccagccctttctaaggcacaaaatgatgtgatggaaatgaagatgca

SEQ ID NO: 400581 - DNA, 97 bp, Homo sapiens
tatgattatgatgcagcaaacagtactgaattatcacttctggcagatgagaattatatccagatcgagagacagaagattctgaaagggttcaatg

SEQ ID NO: 400582 - DNA, 50 bp, Homo sapiens
ctctggtgcatgctgatgacgaaaaacgtgtggaaacaggaagagaacta

SEQ ID NO: 400583 - DNA, 75 bp, Homo sapiens
agaagctgaatatgctgcattagacaaacgagagggaggagagagcgatggcttttttcacccagaaggccagcc

SEQ ID NO: 400584 - DNA, 98 bp, Homo sapiens
attgcatttcatgatccagagctgagtaatcatctcaatgagattggtttcattccagatgatctaagcctttcccacgttatggttataaaccctcc

SEQ ID NO: 400585 - DNA, 100 bp, Homo sapiens
tggcttctcccagcatagccccagtgcaaagagccgtctcactcttctctctgaacgacccggccctgagcccggacatcccgcctgcacacagtcctgt

SEQ ID NO: 400586 - DNA, 100 bp, Homo sapiens
cgcctccctcagccagggcaagactaaggagctggccttagattgtaagcaaaagaaatcaaggtcaagatctggaagcaagaagaaaatgctaacatta

SEQ ID NO: 400587 - DNA, 100 bp, Homo sapiens
gcctattccacgccctccctggggatgtggagacgctggtagcggggccaggaaggctccggacggagcaggttttctggaccacagacacactgccccg

SEQ ID NO: 400588 - DNA, 97 bp, Homo sapiens
atctgttttcaccgtttgttggagattcagaaaaagtgttgtctcagactatgtatagccaggacaggcatgttgatgtcctcaatctctgctttgc

SEQ ID NO: 400589 - DNA, 90 bp, Homo sapiens
tcaatggcaagaattcctctttgactctgactggagagagacggtaaagaacaggtccaagaaaagctcaaagaaagcaaataccagcag

SEQ ID NO: 400590 - DNA, 83 bp, Homo sapiens
ggtgccggtggccgcgctcggacccgctccttccgcttccagccgttcgagtcctatgactccaggccctgcctgccggagca

SEQ ID NO: 400591 - DNA, 75 bp, Homo sapiens
ttgtaagagcattggatcttctggtggttagcaggaagaagatgagccttaagtctgaacgccgaggaattcatg

SEQ ID NO: 400592 - DNA, 96 bp, Homo sapiens
aaagccctgggtcgcttggaagaagccaagcattcagcaactagttcctgaatataaggaaaaacagacacctgaaagtcttcctcaaaataacaa

SEQ ID NO: 400593 - DNA, 50 bp, Homo sapiens
ctataagcagttaggatctggagatttctcacattggcaaactgagagat

SEQ ID NO: 400594 - DNA, 50 bp, Homo sapiens
ctcgccatgaaactcaaagatcgagaggtgttcaagctggaatgaagatg

SEQ ID NO: 400595 - DNA, 83 bp, Homo sapiens
atccttaccaaggaatctgcttttcaagtatgccaccaacagtgaagagaaatgcactcggtgatggaaagagagccactatt

SEQ ID NO: 400596 - DNA, 100 bp, Homo sapiens
ctgtgtggccatctaccactttgaaggtaacctggatgaggacatcattgcagaagagaacatcgtttcccgaagtgagttcccagagagctggctgtgg

SEQ ID NO: 400597 - DNA, 100 bp, Homo sapiens
cgccatttcacatccagcagaggaggcgggggcagccgctgagacggtttttcacaaggacggttcactgggaaacatcgatgacctggcgcagcagtat

SEQ ID NO: 400598 - DNA, 98 bp, Homo sapiens
gtaaatgtcagctacaggccagcttatgaccaggtgctggagaatctggtaaaagcaccattgtgaagcagatgaggatcctgcatgttaatgggttt

SEQ ID NO: 400599 - DNA, 83 bp, Homo sapiens
aaattatcaacaccaaaaagctttctgctagggttgaagattcctgtctctggatccaaatcagagggccttctctacgtcca

SEQ ID NO: 400600 - DNA, 100 bp, Homo sapiens
gggaaaatgcccaggaggaagcaggagcagcccaagcgccttccctcacgaggactggaatgaaattgaccccattaaaaagaaagaccttcatcacagc

SEQ ID NO: 400601 - DNA, 100 bp, Homo sapiens
ttaaacagacctctgaagagaagcccaaagacagtgaagaactcgagctccttccgcttccagccgttcgagtcctatgactccaggccctgcctgccgg

SEQ ID NO: 400602 - DNA, 90 bp, Homo sapiens
caggatgatccgttccgcccagcaggcctccagaggaagaagtccaagttccgcttgtccaagatctggtcaccaaaaagcaaaagcagc

SEQ ID NO: 400603 - DNA, 100 bp, Homo sapiens
gattcctcaatcctgagagagagaattaaagtctaactctccaaatatgttccatttaagcagacctcttccatagctgtagctggagcggtaattggag

SEQ ID NO: 400604 - DNA, 50 bp, Homo sapiens
tggcatccccgcagccgagagccaggttcaattcccatgaaagtgcagca

SEQ ID NO: 400605 - DNA, 75 bp, Homo sapiens
agaatcttctggtggcgaagaagaagatgaagatgagaacattgaggtggtatgcagatcttcgtgaagaccctg

SEQ ID NO: 400606 - DNA, 100 bp, Homo sapiens
gttcgggttcaccgccctgatgaaagccgccatgcagggtcgaacggactgcatccgagccctgatgctagcagatttattcctgacgacattgaatgcc

SEQ ID NO: 400607 - DNA, 97 bp, Homo sapiens
acggcgcggccacggagaagggcgcggtgtcatggagaaactccagctgggcccagagattctgcagcgggaaaatccaaggcttatttatgccagg

SEQ ID NO: 400608 - DNA, 80 bp, Homo sapiens
ctggagtccgcgcctccctggagactggctccagctttccttgaaatcctgcagagccttcattaaaatgagtgcaaggc

SEQ ID NO: 400609 - DNA, 74 bp, Homo sapiens
ctgtgccctacctctggagtgaagaaacacctgcaagagtcaaattgactttatcagctttaatcgatgggaag

SEQ ID NO: 400610 - DNA, 100 bp, Homo sapiens
aagccctggtgccaggtgtccatccccgtgctgagatgacttcaaacctgcttctattgacacttcttctgaaggataccttgaggttggtgaaggtgaa

SEQ ID NO: 400611 - DNA, 101 bp, Homo sapiens
ggggacggggaccagcagctgtcgccgccgctctcaggtcctactgctctgttggctcatgaaataggttttggaagtaaagttacaacacaccctcttgc

SEQ ID NO: 400612 - DNA, 82 bp, Homo sapiens
ccggcgtgccgagcggcaacggggctccgggccctaagggcttccccgggcgctgcctggacaggcctgcctgcgtgctggg

SEQ ID NO: 400613 - DNA, 83 bp, Homo sapiens
gtctggataccattgtcaagatccctccacatgtactgaggtgacttaagagattaaaattaatttggttgctgttggttctg

SEQ ID NO: 400614 - DNA, 82 bp, Homo sapiens
ctgctgaaaaataaagctccaggattagggaaagtcaatgtttggtgccctggttgtcagatgttggaaagcagtaggacgg

SEQ ID NO: 400615 - DNA, 75 bp, Homo sapiens
tgttctcttttttttgtggagaagttttagatcgcaaaagcggcgccaggaaattgaacaaaaacttgaagttca

SEQ ID NO: 400616 - DNA, 80 bp, Homo sapiens
ctattggaaagtttttttaatgtggttggaacaactgagctgaatgccaagggaacagaagcacccgcagtagtgacaga

SEQ ID NO: 400617 - DNA, 100 bp, Homo sapiens
ctcctcctctccttctacctgctggggttgcttgtcagtagcgggcaaggcagcagtacctgtccaaagatcgctttagttccaccttgctccacaagca

SEQ ID NO: 400618 - DNA, 100 bp, Homo sapiens
gggatgggtctccgtgctgaaacccccggcgctcctgccacagcttagaagcaaagttaagagactcatcagattctgagctgctgcgggatattttgca

SEQ ID NO: 400619 - DNA, 100 bp, Homo sapiens
agtggaattgcatgggaaaatcatggaagttgattactcagtctctaaaaagctaaggtggctgcttctctattatgctctgtgcttctccctgtcaaag

SEQ ID NO: 400620 - DNA, 88 bp, Homo sapiens
aaaagagaagatgaagaaacccagcttgatatgttggtgacctggtgattctcgatggcattcccactgcaggctggctgcagggccg

SEQ ID NO: 400621 - DNA, 99 bp, Homo sapiens
ggtccgcagcctgtctgccatctacctggagaaccttaaagaaggagaggatcagaaagagataaagattgagccagctcaggctgtggatgaagtgga

SEQ ID NO: 400622 - DNA, 105 bp, Homo sapiens
cagcggcgaggagaacgtcccgctggatctgacccgaggtcagtactcctgcatttgtaccaacgaaaactcacgtgctgcttcatcgaatgagtggaaaaggac

SEQ ID NO: 400623 - DNA, 100 bp, Homo sapiens
cgggcgtccttcaaccacttcgacaaggcatttgttgctatcggggactacaatggccacgtcggtctgggtgttaagtgctccaaggaggtggccaccg

SEQ ID NO: 400624 - DNA, 96 bp, Homo sapiens
agccaaacttgcagctgttcagaccgcgctccgccgaggggtgagcccctccagactccgaataggagatcaagagtttgattcattgcctgcttt

SEQ ID NO: 400625 - DNA, 51 bp, Homo sapiens
acctccagtcaagacaattctgtgaagaacagcacttcttaacccagctcc

SEQ ID NO: 400626 - DNA, 98 bp, Homo sapiens
agcgctcggtagccgtctggctcttggtcgggctcagcctcggtgtcccccagttcggcaaagtggctgccttttctctatcctctttcctttattca

SEQ ID NO: 400627 - DNA, 78 bp, Homo sapiens
gtctctggagacatcttcagcagagctaaagttgcagacaagatccagctcatcaataatatgctggacaaagtcaat

SEQ ID NO: 400628 - DNA, 75 bp, Homo sapiens
agataagcaactggattttttaactgaagatagtgcctttcagccctaccagcctcaagtactacagccttccag

SEQ ID NO: 400629 - DNA, 98 bp, Homo sapiens
gcgcccagcctgccgcctcgctgtccctgcggcttctggggataaacaggggtcacatgacgacagaagccaagagggctgcaaagatggaaaagaag

SEQ ID NO: 400630 - DNA, 81 bp, Homo sapiens
cgccttcccagcagcagtgaggattctgacgacaatggcagtgacatcagttgcaaggggatgaccgagcgcattcacagc

SEQ ID NO: 400631 - DNA, 50 bp, Homo sapiens
ccgtctgggccagccacctggtgtccggtctctaattaacagaagatggc

SEQ ID NO: 400632 - DNA, 100 bp, Homo sapiens
ctagcattgcagttggctgaaccttgtgtcaaccatccattccaggagccagctatctgaggttaatgttgaagaaggaaaatgcggaagtcgtcatttg

SEQ ID NO: 400633 - DNA, 97 bp, Homo sapiens
ttttccgttgccggtgccggcctagcgtcctggaattacttcaatcaaaatagaacatttggattcaggtgatctggccagatttcctgaagtggta

SEQ ID NO: 400634 - DNA, 82 bp, Homo sapiens
cctggagcacctgcagctggcgcctctgcagtgggatggggacccagagcctgctcttgggaacagccagagtaagattgga

SEQ ID NO: 400635 - DNA, 90 bp, Homo sapiens
tgaagcagaagaataaggagaaggataagtcgaaggggaaggcgcctgaagaggacgaagaaagaagatgctgatatgctacaacacgga

SEQ ID NO: 400636 - DNA, 100 bp, Homo sapiens
ggcgaccgcctctgcttcaatgtgggccgggagctgtacttctatatctacaagggggtccgcaagcagaggctgaccatgtggaggccgccatcctcga

SEQ ID NO: 400637 - DNA, 75 bp, Homo sapiens
gatgtgtgcataaagccacagacaccgagtatgccgtgaaggcaatccagcatccagcagatgagaagttgcaag

SEQ ID NO: 400638 - DNA, 51 bp, Homo sapiens
ctctgtgtacgctgaggggggaggtactccaaagattcaggtttactcacg

SEQ ID NO: 400639 - DNA, 50 bp, Homo sapiens
tggcagtgctcaaactcaccgaccagattgctgtgctaaggagacagcaa

SEQ ID NO: 400640 - DNA, 82 bp, Homo sapiens
ggttacctatgtacctgttaccactttcaaaagagaatgccgtgaatggagaacacctgtggctggagaccaacgtctcggg

SEQ ID NO: 400641 - DNA, 98 bp, Homo sapiens
tggaagagaataaccgaaaaattgcagaagcacaagccaaactgatcacaaaatttgtccaggatagacatagagctagaagaaacagacttcgtaaa

SEQ ID NO: 400642 - DNA, 101 bp, Homo sapiens
aatgccatgcgtatctttaagaaattttatcttttgaaacacgttctgattaaccaaggttgagaaaccaaggcagtatcatgagcaggaagaaacacctg

SEQ ID NO: 400643 - DNA, 90 bp, Homo sapiens
gaatgcttgctggaatagcaattacagttaaggtggccccaatgtcagtgtatgcttgtctgggcaatgatgcggctgccattcgtgatg

SEQ ID NO: 400644 - DNA, 74 bp, Homo sapiens
ttgtagcgaactgcggtcgctggaatgtgtgtctcacgagttactggctgaccaacaaagttcctatcaaaaga

SEQ ID NO: 400645 - DNA, 100 bp, Homo sapiens
ctctgcagtgtcttccacaacctggatcagcttgaacgggtctttttacgacttggccatgctgaaacagatgaacaattacagaatattatatctaaat

SEQ ID NO: 400646 - DNA, 100 bp, Homo sapiens
ccacgcctgcatccccatcaagagtccttcgatatctcctaatacgagtttcacatctgatggctccccgtctccattaggaggaattaagcgaaaagca

SEQ ID NO: 400647 - DNA, 106 bp, Homo sapiens
caacatccgcgagttcctgcgcggctgcggggcttccctgcggctggagttggagtgcttagtgcagttggtgagagcgggagccacactcaacgtctccaccaca

SEQ ID NO: 400648 - DNA, 50 bp, Homo sapiens
tcatcaggcacaccaaccagcaggaccagaaaggagcgagtgggactgtg

SEQ ID NO: 400649 - DNA, 83 bp, Homo sapiens
atgggactgaagggggatcatctagaagttgtatcacggactgattcaccgagcccaaccgtactcaactcacatatttctac

SEQ ID NO: 400650 - DNA, 90 bp, Homo sapiens
cgggttaattactgtcttctggattcagatcagatgcctgaggaagtgcaccatggagaggaggaggtggagacttttgcctttcaggca

SEQ ID NO: 400651 - DNA, 100 bp, Homo sapiens
acgttcatgtaaacagcatgacgtgaggccgtggatgcaggcattaaggtggaaaaggattattcatacctgaaggagatatgtgatcaccaagccgaac

SEQ ID NO: 400652 - DNA, 83 bp, Homo sapiens
acactttgtttctcatataagggcaaggaagttccaggttacattggtgtttggagaagagggattgaccctgaatcttgaag

SEQ ID NO: 400653 - DNA, 75 bp, Homo sapiens
caggaccctctggaagcctagaaatgattacagtagaatgcacattccttgactatataatgggaggatgtcagc

SEQ ID NO: 400654 - DNA, 123 bp, Homo sapiens
tactgttgattcacagaaagactgtagaaaatttccagttccacagaagatcgttaactgaagacaatatgcaaaattctcacatggatgaatacagaaattctagtaatggcagcacaggca

SEQ ID NO: 400655 - DNA, 100 bp, Homo sapiens
atgatggttgattacctgtaccgaaatgctgtccagcagaagctggattatatcacatacctgtccatctttgaccaattatttgacattcctaaagaaa

SEQ ID NO: 400656 - DNA, 75 bp, Homo sapiens
tgctggaatcgggggaaccaaagcttcaagttcttggaacaaattctttttcagataactattatcgtgcagaaa

SEQ ID NO: 400657 - DNA, 90 bp, Homo sapiens
tgttccgaggccacgagtgggcaggagcttgcaggatgatcgctgcaagatccctttattcatgctaatgtcctttatgccggcctctgc

SEQ ID NO: 400658 - DNA, 100 bp, Homo sapiens
tgaaaggagacgtcagaacgtggcttatgagtacctttgtcatttggaagaagcgaagagggccatccaggttatgcactagtacattcctacattcaat

SEQ ID NO: 400659 - DNA, 75 bp, Homo sapiens
atctggattgtcacctttgctgcaaaaaattacggatgctgtctttgcatttcaactacgcaacccagtgcacaa

SEQ ID NO: 400660 - DNA, 98 bp, Homo sapiens
cgtcaggcactgaggaggccgagagatgaggccggagcccaccaagttctgggaagttttatgaatgaagctatggctacagattccccaagaagacc

SEQ ID NO: 400661 - DNA, 101 bp, Homo sapiens
gaaaccggtagcgcttgcagcatggactcgggtcaagctggaaagcctggaagacgcctacattctgcggggagatgatgattccctctccgacaagcatg

SEQ ID NO: 400662 - DNA, 82 bp, Homo sapiens
caaagggaagcctgcaacaagttaagctgaagaccgaagcaagagctggttcaggagcatggcttgaacttccagagactcc

SEQ ID NO: 400663 - DNA, 90 bp, Homo sapiens
tcgacctcaaggacatcaacttccggccgcagatgtcccagtctgcgggccaggcatcgacatccgcaacgactatcagcagctgaagcg

SEQ ID NO: 400664 - DNA, 88 bp, Homo sapiens
aacaaatgctgctgctatgaatatgggtcgaccattccaaaaaaatcgcttcatcactggtccagctgtaataccagggtacttctcc

SEQ ID NO: 400665 - DNA, 75 bp, Homo sapiens
cggagtttgacgaagaggtggtttttgaggaagaccaacactgtcatctgaagttggaatcatcatctgtgatat

SEQ ID NO: 400666 - DNA, 100 bp, Homo sapiens
ccaaagacacagaggctcccacagcacctcagaatagccagttaacgtggaagcaaggcagacagcttttaagacatttgcctgagaatacagatcaacc

SEQ ID NO: 400667 - DNA, 51 bp, Homo sapiens
cccaacagagggaactacaaccaggagttgatccctgaattttattatctc

SEQ ID NO: 400668 - DNA, 88 bp, Homo sapiens
cagatcatgtcagagagagagcttggttaacttgggagaaagtttcatctgtggatggagtattgattgcgcagtctctttgtggaga

SEQ ID NO: 400669 - DNA, 95 bp, Homo sapiens
caagatatgttgtgggttgtcgtcgacaggaatatgaagccatctacctagcaaaattaacaatacagatgatgtcaccactccagatagaaagg

SEQ ID NO: 400670 - DNA, 95 bp, Homo sapiens
aaaagaggcgaaaggaagcaagcagttcagaagagccaaggaataaacatgcaatgaacccaaaagggtcctgctgccgtgaccagccagtctcc

SEQ ID NO: 400671 - DNA, 103 bp, Homo sapiens
accagagaaggtgaaacgatcatcgagctaaaatatcgtgttgttaatggccagccaagaccccttgaatcaagtcaggtgaaatatctccgtcgagaactga

SEQ ID NO: 400672 - DNA, 100 bp, Homo sapiens
acctcgtggacaagtttgcagatcgggagcgcaaggtcgccctcaaggccatgatcaaaacaggctgtggccaggccagctgggctcggggagcgccagc

SEQ ID NO: 400673 - DNA, 100 bp, Homo sapiens
atcaccatggatgggacgctgcaggccctgggcaaagtgcacctggagctgcggctgagcgaggtcatcacagacactggggtcgtctgccacaagctcg

SEQ ID NO: 400674 - DNA, 100 bp, Homo sapiens
cagtttccgcttttcctgattattatgggaaagcgatcatctaatgaagtgttgaatgtgatacaaggtacggagtttgtggtcattgaagatgtgtcct

SEQ ID NO: 400675 - DNA, 100 bp, Homo sapiens
tactacagagcacccgaggtcatccttggcatgggctacaaggaaaacggtactggtcttcttggacattaatctttgaatacttgctgactgctaagaa

SEQ ID NO: 400676 - DNA, 101 bp, Homo sapiens
catcgcccagctgtacatgatacagacacgatgaggcgagtggtacgacagagcaagtttcggcatgtatttgggcaagcggtgaaaaatgaccagtgcta

SEQ ID NO: 400677 - DNA, 75 bp, Homo sapiens
ccctctggatccttctggcctgcctcatgaagatagtggagcagcgtgacttcattggagtggacagcacaggaa

SEQ ID NO: 400678 - DNA, 100 bp, Homo sapiens
gcttccgggattaggggaacctgaagttgaatatgagaatcggtttgggcttggccagccaggaagaatacctggttctgtgaatgccatgagagttctg

SEQ ID NO: 400679 - DNA, 100 bp, Homo sapiens
tctgattctaaccagtatattggggaactgaaagatcagatagcagagctgaatcatgaggatcctgctggccactttcatcaagtatggtatgataacc

SEQ ID NO: 400680 - DNA, 83 bp, Homo sapiens
acaagatccgatctactgagagctgcgaggtttcccaccgttttcgagaactcatgcagctcttccacactgcctgtgaagcc

SEQ ID NO: 400681 - DNA, 100 bp, Homo sapiens
tgctcccgcactccgtgccctgcccgcccgccttcctctacctccaacagtacatcgacgccatcagcaacaagcagggcgagctggagaattacgtgtc

SEQ ID NO: 400682 - DNA, 74 bp, Homo sapiens
ggtgtatggccgtgggcatctcctacattagcgtctacgaccaccaaggtcctcgatgggcttcctggaatatt

SEQ ID NO: 400683 - DNA, 100 bp, Homo sapiens
caagatttaccccgaaaccaaaagagaaccatggagtctggcagtaccgccgccagtgaggaggcacgcagccttcgagaatgtgagctctacgtccaga

SEQ ID NO: 400684 - DNA, 75 bp, Homo sapiens
agatgcaggagagcgtgcaggtcaatgggcgggtgcccctacctcacattcccaaaactgtcgctgaaaagcagg

SEQ ID NO: 400685 - DNA, 98 bp, Homo sapiens
gccttcccatcagcacagttcgtgaggtggctttactgaggcgactggaggcttttgagcatcccaatgttgtccggcaacgcggtaaaaatattgct

SEQ ID NO: 400686 - DNA, 75 bp, Homo sapiens
tgatggttgggctgatccggcagggctacgcctgcgagggaacagcgtttacattttctaaagcaacaggagcgc

SEQ ID NO: 400687 - DNA, 76 bp, Homo sapiens
ctcagcttatctacaatcatatcacaaaaatatttacaccagcagctccagttcataccaataaagaagatcctgc

SEQ ID NO: 400688 - DNA, 97 bp, Homo sapiens
agcggcacagaggtgcttctgccaggacggcagcccaacaaccagcaggcggccctcaggcaccgggactgggccagaagatggcagaccaagcctg

SEQ ID NO: 400689 - DNA, 95 bp, Homo sapiens
aactacccattttcttttttggaactcatgagacgagcaagatactgctgtgcaaaatatgcataagaaagtagaaaaattagaaacagaacata

SEQ ID NO: 400690 - DNA, 100 bp, Homo sapiens
atcttcgaacttagacttccggaaggactttggcgaggcgtgagtgcatctccatccacgttggccaggctggtgtccagattggcaatgcctgctggga

SEQ ID NO: 400691 - DNA, 100 bp, Homo sapiens
cgacgggggacttaggtgccagtccttctaggcagaagggccctcttggtaacatttgtctactgaagcacacccaaacagggacaccaaccagaataac

SEQ ID NO: 400692 - DNA, 73 bp, Homo sapiens
cctatgtcatttcatccaccacattacttaggtgctggagaatctggtaaaagcaccattgtgaagcagatga

SEQ ID NO: 400693 - DNA, 83 bp, Homo sapiens
ggagccggagctgggcgcggattcgccgaggcaccgaggcactcagaggaggttagctttatacgtctacgaatatttactgc

SEQ ID NO: 400694 - DNA, 75 bp, Homo sapiens
gccggctgcaggagcagctagcgcagcaaacggggattcagcgtccgatcctttggaacagggactcacgtgaag

SEQ ID NO: 400695 - DNA, 100 bp, Homo sapiens
acgacttctaccatgggaccaaggatgatcacggacgtgcagctcgccatcttcgccaacatgctgggcgtgtcgctcttcttgcttgtcgttctctatc

SEQ ID NO: 400696 - DNA, 88 bp, Homo sapiens
tagttagctccgcaaggacccggacgcgaccaggggaggcagaagaaatggttcaccaaaccaccagccagagccaccccctccagtc

SEQ ID NO: 400697 - DNA, 100 bp, Homo sapiens
cagaaaccctgtctttcaggattcctgggacacagaggattcttacagaaaacaagtggttatagatggtgaaacctgtttgttggacatactggataca

SEQ ID NO: 400698 - DNA, 75 bp, Homo sapiens
agggccatgttcggagtgtatgacaacatcgggatcctgggaggaagtgggacgcagagagaaacgcacatgggg

SEQ ID NO: 400699 - DNA, 75 bp, Homo sapiens
gagacattcacaccaaactttttcctgttgagggcgacgtcgtaaaccaggacgacctgtaccaggccttggcca

SEQ ID NO: 400700 - DNA, 100 bp, Homo sapiens
cgacttcaaagagggctacctggagacagtggcggcttattatgaggagcagcacccaccaccaattaccctagttatgggcccatcatctcacctggac

SEQ ID NO: 400701 - DNA, 75 bp, Homo sapiens
ttcatgagtgttcctgtggtctctgcacctcctttctgcagttgcagtggtgcagaatggctgacctcagtcttg

SEQ ID NO: 400702 - DNA, 96 bp, Homo sapiens
taattttagggtcctttatatagaagggagagtaggaatatcagaagctctttcctgacattcccatagggtattctgggcatgaaacaggcatag

SEQ ID NO: 400703 - DNA, 100 bp, Homo sapiens
gaagcccctgaccattgaagaggtggcccccgccccgtcgggcctcacgagttatgcaaagggtgacctggacatatcttacatcacatccagaattgca

SEQ ID NO: 400704 - DNA, 75 bp, Homo sapiens
ctcccgcggcgggaggagcctgttcccctgagatcccccagattagttatgcatcaacggcacccgagctaagtg

SEQ ID NO: 400705 - DNA, 51 bp, Homo sapiens
cttcgggtctacccctaatcactgttttccaagcagtgaagcacttgccgt

SEQ ID NO: 400706 - DNA, 75 bp, Homo sapiens
gaggaggcgagctagccgggagttacaccgccaccgccagtacagtgctgtggataccaatccactttctctgta

SEQ ID NO: 400707 - DNA, 75 bp, Homo sapiens
ttggatttgctaaaggagcttaagaatattcctatgaccctggaattactgcagagagaagaagaaggaggttcc

SEQ ID NO: 400708 - DNA, 100 bp, Homo sapiens
tgtaaattatgtgaaacctccaaatgtggaataacatagctgatccagaagaactgttcacaaaattagagcgcattgggaaaggctcatttggggaagt

SEQ ID NO: 400709 - DNA, 74 bp, Homo sapiens
cagaaatggctgcaggccaagcgcctcacgccggacctggtgcaggctcaagttggcttaccagaagttacact

SEQ ID NO: 400710 - DNA, 96 bp, Homo sapiens
gcttagaccacagcgacgaggacgactgcctcaggatggctaaaggtgaccccaagaaaccaaagggcaagatgtccgcttatgccttctttgtgc

SEQ ID NO: 400711 - DNA, 50 bp, Homo sapiens
cctgctttgattcattgaaattgtggaagaaggactctgggaaaatggcc

SEQ ID NO: 400712 - DNA, 100 bp, Homo sapiens
gccctcttagactcccccacagctttaagtatggaggaaaaacttcagcagaatgaagcaagagttcacctttccttgccagtgaagatggcgtgcttgg

SEQ ID NO: 400713 - DNA, 90 bp, Homo sapiens
gttttctagtccctcttacttgaagcatgtctttcagagcccggcaccacccatcttgagtatctgtcccaacatggccaacacagtcaa

SEQ ID NO: 400714 - DNA, 50 bp, Homo sapiens
cccagaaggactcttctatgaggaataaaattgaagggtgtttttcttag

SEQ ID NO: 400715 - DNA, 98 bp, Homo sapiens
gccgggaccctggcccctgtcgaggccttctggcggccgcccctggtttctcctggggggtgatgagcgggagcggctctgggccgagctactgcgca

SEQ ID NO: 400716 - DNA, 83 bp, Homo sapiens
ctttaggcagcttacaactcacaagtgcatgggagattcctgcatcttttgcgctctcaagctctgctgtgtgcgtgcaccag

SEQ ID NO: 400717 - DNA, 100 bp, Homo sapiens
cctgtgggagaagcacagtccacagactaccatgccggggatgaagcgagactgcgggggtgctgcggccgtcctgggggccttcagagccgcaatcaag

SEQ ID NO: 400718 - DNA, 96 bp, Homo sapiens
ccagtatccaggtcgaggttctgcagaaggttgtgactttagtatacactctctggtggctgtgagctgacagtggtgatccatgacttcaccgct

SEQ ID NO: 400719 - DNA, 82 bp, Homo sapiens
tcggcggccgctctgcctgcgcgctgctcctgctctgctacctgactgattcttgctattccaaatcctcttccacgttgac

SEQ ID NO: 400720 - DNA, 100 bp, Homo sapiens
gtggcctccacctcggccgccctgcccagctgcctgcccccggaggtgcccacgcagctgcctggacaaatacgtaggtaacctttccagagatgtgaca

SEQ ID NO: 400721 - DNA, 100 bp, Homo sapiens
caagagcggcggtagcgcaggggagattacttttctggaagattactcttgtctctgctgctcctgggaaagtgatttgtgaaatgaaagtagaagaaga

SEQ ID NO: 400722 - DNA, 75 bp, Homo sapiens
ggaggagaggagcggccggcccgccttaaaggcatgacttcctggcaccacagggaaaatcgggtgcaagcccag

SEQ ID NO: 400723 - DNA, 100 bp, Homo sapiens
agaagggaagccggcccggtcccgggaggaagatggcgctgcgaattcgagagcagagccactgccagaaggaaggggacaagacccagcaggacacctt

SEQ ID NO: 400724 - DNA, 98 bp, Homo sapiens
gcttgcttgcctgtgcgcgcgtgcgcggacatggcctcaaacggaacttgctactaccagcaccatgccctaccaatatccagcactgaccccggagc

SEQ ID NO: 400725 - DNA, 100 bp, Homo sapiens
gttggggagggggctgtgccgggcggagagaactcagcgaggattctgaggtggtataagttgaaatccaaaccaggaaagaaggacaaggagcgaggag

SEQ ID NO: 400726 - DNA, 100 bp, Homo sapiens
gctgagccggcgcggggtcggcgctgggctggaggcggcggagcgcgagagcttcgagcggactcagggcctgcggcctcaccatggacccagaatgcgc

SEQ ID NO: 400727 - DNA, 97 bp, Homo sapiens
gtttttcgagctccactctgcgccaggagagccacggcagcaggaacgggcactgctgccaccgggccgacgggaaagaggttggcctcagcagcaa

SEQ ID NO: 400728 - DNA, 83 bp, Homo sapiens
ccaaactggaggatgcctatgtattccctggggatggcgcatcacacaccaaagatgaccgcacctcgagcaggagtggggat

SEQ ID NO: 400729 - DNA, 74 bp, Homo sapiens
acacctccacatcgccttttgccacctttccctttatttccggaggattctgaaaccttccttgtatccctcct

SEQ ID NO: 400730 - DNA, 75 bp, Homo sapiens
tggcagctgcacttcttgcggctggatcacagtcttactactttgaccgcgatgatgtggctttgaagaactttg

SEQ ID NO: 400731 - DNA, 50 bp, Homo sapiens
ggacccgcggtccccgctcttgctgggttacattccgaaaagcaaatggg

SEQ ID NO: 400732 - DNA, 100 bp, Homo sapiens
ggcgctccaccggcgtggtcaacatccctgccgcagagccaaaccaaacaggaagcttacttttctctacctagccaatgatgtcatacagaacagcaag

SEQ ID NO: 400733 - DNA, 51 bp, Homo sapiens
ggagtcttccatcaatcatatctcacaggtgaatgaaggcaaggaggagcc

SEQ ID NO: 400734 - DNA, 100 bp, Homo sapiens
aggaatcgtcacccggcggcctctcattctgcagctcatcttctcaaaaacagatgaaacgactacaaagtgccatgacagaaggtggtgtggttctacg

SEQ ID NO: 400735 - DNA, 82 bp, Homo sapiens
atttcattcttatttcaatgcagaaaacaaccctttttgctgcacatgtaagtggagctgtgcttacctttggtatgggctc

SEQ ID NO: 400736 - DNA, 100 bp, Homo sapiens
ccccaagcccgccacgccgcccagcccggccccgcccgcgccggaagagccacgccggaagcaatgaggctccccaagaacacacctgaggaaaaggaca

SEQ ID NO: 400737 - DNA, 146 bp, Homo sapiens
cctccctgccctcaggggctctcagcaagtcagctcctgggtccttctggcacattcaggcagatcatgcataccaggagcaggacatcgagactttacatggctctgttcacgtcacgctgtgtgggactcccaagggaaaccgg

SEQ ID NO: 400738 - DNA, 97 bp, Homo sapiens
acccatctggactaccaaggagaagctatagactacttctactccaccaggaagaaatgcactcggtgatggaaagagagccactattctgaagaac

SEQ ID NO: 400739 - DNA, 100 bp, Homo sapiens
ctaaggattgtcctgagaagatcctgtattcttggggagagttgctaggaaaatgcagatggtgagctatatgtgtttggagaacctgagaatgggaagt

SEQ ID NO: 400740 - DNA, 82 bp, Homo sapiens
gatcgacttcctcacccgcgcctgcgacctcgagccagcagccacccccgcccagccaacacctccccaggcccaaggggga

SEQ ID NO: 400741 - DNA, 98 bp, Homo sapiens
tcgggttctgttggagtgcgttcggtgtgccgtgggtccgcgctgcttccacccaacttcctgttagcccacaggtgctgagaacaagagaaatcaag

SEQ ID NO: 400742 - DNA, 90 bp, Homo sapiens
ggtggagacatttacatctgagaacaatgaactgtggaagaaggtggagaccctggagaatgccaacagatgaacaggaagcggtgcagg

SEQ ID NO: 400743 - DNA, 101 bp, Homo sapiens
ctctggcaggatgaggcgtgcaggcctggggccgttgctccagggagaactgcaaatatcttcatccacccccacatttaaaaacgcagttggagataaat

SEQ ID NO: 400744 - DNA, 75 bp, Homo sapiens
ccgagcccatcaaggtgtacggacaggtgcactattacaatgagatccatgctgtctgggagccactgattgaga

SEQ ID NO: 400745 - DNA, 100 bp, Homo sapiens
gtttgagtacgaagggtgcaaagtgggacgcggcacctacggtcacgtctacaaggcgaggcggaaagatggatgcagcagcttttttatgagaattacg

SEQ ID NO: 400746 - DNA, 75 bp, Homo sapiens
caacgggggaatcaccgacatgctcacagatatgtgtaacacaccaacgtactgtgacctaggaaaggctgctaa

SEQ ID NO: 400747 - DNA, 90 bp, Homo sapiens
gggagacaaagcagcgcccgtctgcttcgggcctctggaatttagcgctcgcccagctagccgcaggactgcctccaagtggaagttggc

SEQ ID NO: 400748 - DNA, 100 bp, Homo sapiens
tcctaacttaatcaacaacctggaaacattctttgaattggattatcccaaagaggataagatcaatgccctcattaaagcagccggtgtaaatgttgag

SEQ ID NO: 400749 - DNA, 97 bp, Homo sapiens
gggtttttaatgaccacaacaagcaagcatgcagcttactgcttgaaaggtacttaaacttcacccttgtttagcccctattaaggttgctttggat

SEQ ID NO: 400750 - DNA, 75 bp, Homo sapiens
gggctatgggcccatcgactacaaacggaacttgccgcgtcgaggactgtcggaccgagaagatcaatccatctt

SEQ ID NO: 400751 - DNA, 75 bp, Homo sapiens
agatgtgatgttggagaactatagcaacttggtatcactagaagtttgggaagttgatgaacagatcaagaagca

SEQ ID NO: 400752 - DNA, 116 bp, Homo sapiens
cgccgcagcagccgagtctgacggcgccggttcgctgcccggtccgcccgcggtgagagtggtctaccatcacggcaacagtgcgacgggcggccattacactacagacgtcttcc

SEQ ID NO: 400753 - DNA, 75 bp, Homo sapiens
ttctaccgggcgccccacgggccgaagccgtttctcttcagcaacgggtagcagaattggaaaaaattaatgcag

SEQ ID NO: 400754 - DNA, 82 bp, Homo sapiens
gagctgcagtcggcactgctactgcgaagacagctggcagggtcctcactgagcagcgagtcgtcccccgtgtcctctccgg

SEQ ID NO: 400755 - DNA, 75 bp, Homo sapiens
gcaggagctggcgtctctggagaaaggaaagcttagatatgccaacaacagcaattacaaaaatgatgtcatgat

SEQ ID NO: 400756 - DNA, 85 bp, Homo sapiens
ctgcaacaacaggaaaggcaatgttatattaagtgagaaagatcagtctaaagaaaaggagaagaaagtgaaaaaaacaattcct

SEQ ID NO: 400757 - DNA, 127 bp, Homo sapiens
cagtggatttccttgcggaaaggatgttggcggtccctgtgacctgtggagacacggccagatctgccctccaagcatatatcattacagactatatgggcatccgaaatgaaagtttcatgaaatt

SEQ ID NO: 400758 - DNA, 133 bp, Homo sapiens
ttgggggttgatacagcagagacgtcatacttggaaatggctgcaggttcagaggaagcagtgcgttatatcaatgaaaacctaattgttaacacagatgaactgggaagagattgcctgattaatgctgcta

SEQ ID NO: 400759 - DNA, 82 bp, Homo sapiens
gtggggactgcacgtagcccggcgctcggcatggctctcctggtgctcggtagctacagcaagctgggtagcaggcagatcc

SEQ ID NO: 400760 - DNA, 102 bp, Homo sapiens
aaagtgatacagcaataccaccttcagtacttggcaagatttgatgctcttgtgctcagtgacatcattcaggcctgtagtggtggagacacgcccagtgga

SEQ ID NO: 400761 - DNA, 75 bp, Homo sapiens
tcagctatggaactattcttgagattaacgagaccagaaggaagcatgaaacgcgcttggtagaggtggattctg

SEQ ID NO: 400762 - DNA, 113 bp, Homo sapiens
ctcgcgcctcctgcttcaagagcccagcggtgagagctggcctgcggcacgcggcctaatgccagttggtagctggcagtgttgtgatggcttttgaagaagtatgcccggac

SEQ ID NO: 400763 - DNA, 75 bp, Homo sapiens
ctcaggcacacagtacaacagagtcaacctcaccttggatctggggcagtcactgtgtgcccagtattctgcaga

SEQ ID NO: 400764 - DNA, 82 bp, Homo sapiens
acagtgactccaggatttctgaagactattgtggaagaagcatccattaagattgtagaaggcatgaaacaaaaaatgtgga

SEQ ID NO: 400765 - DNA, 75 bp, Homo sapiens
agaaactgcaccggaaatgtgcctaccaggcttgtgacatcacgggaggactgtacctgaaggtgcctcagatgc

SEQ ID NO: 400766 - DNA, 82 bp, Homo sapiens
taattacattctctcggccagcgcctccgcgctgcggaagccctgacccgggagttctcggtgctcaagatccggcccctca

SEQ ID NO: 400767 - DNA, 100 bp, Homo sapiens
catggatgttcttcttcgagtatttgtagaagggagccagcaccgctctttgaccttgccatgcttgccttagatagtccagagagtggctggacagagg

SEQ ID NO: 400768 - DNA, 100 bp, Homo sapiens
gcggtggtgaagatggattactgaaagttttgaaattagagacgcagacagcttggaagctcgaagtctggctgtggccatgggagatacagtagtggag

SEQ ID NO: 400769 - DNA, 75 bp, Homo sapiens
accggctggacctgttcgagatcagccagccgaccgagtaagactttgaccccgacgcaggcttcagtgattgcc

SEQ ID NO: 400770 - DNA, 60 bp, Homo sapiens
aattactgtctcaagtgatacggtgttgacagctcttctaccacaagcagtgcttctcca

SEQ ID NO: 400771 - DNA, 75 bp, Homo sapiens
ggaagaatggcagtgctcaaactcaccgaccagatattgaagcacagattcgagaaattcaaggcaagaaggcag

SEQ ID NO: 400772 - DNA, 82 bp, Homo sapiens
gagtttccgatttaaagctgagctgcgaggaaaatggcggcgggagggacccagaccccaggaggcctcaccccacagcaag

SEQ ID NO: 400773 - DNA, 75 bp, Homo sapiens
actttccatttgccttcctgggaagccagttgagggaagttctccatgaatgtacgtcacaatgatgatgaccga

SEQ ID NO: 400774 - DNA, 75 bp, Homo sapiens
aaggcggcggccagcgggcagccgcggcccgagatgcagtgcccggccgagcagatataccttctcagaagctgc

SEQ ID NO: 400775 - DNA, 98 bp, Homo sapiens
ctgtgtctgaggagccttggaacattcacccaggttctgggaagttctggattgtttaataaccatggactccaagtacagcagcaacagcaaaggaa

SEQ ID NO: 400776 - DNA, 101 bp, Homo sapiens
tccttcctcatcgtgcttgtcaacaaggcgctgctgaccacctacgggtgcagcggaactgctgcctgacgctctgcaacttcagcatccccgaggagctg

SEQ ID NO: 400777 - DNA, 100 bp, Homo sapiens
cgggacacctggaagccgagaaatgtgaaggagaacgacctgctcagaatgagaagaggaaggagaaaaacataaaaagaggaggcaatcgctttgagcc

SEQ ID NO: 400778 - DNA, 98 bp, Homo sapiens
ccagagcttctggacccggagcccggcggcctcctcaccagccaagacttcccaagtaagaagcggaagaggagccgctggaaccaagacacaatgga

SEQ ID NO: 400779 - DNA, 99 bp, Homo sapiens
gaatatgtggctttggtggatggggtattcttgaaccaggtcatgctccaaatcacattcatcattgagaagcagcctcctcaggtcctgaagacccag

SEQ ID NO: 400780 - DNA, 96 bp, Homo sapiens
gacactgggagggtttcctgtcaagagtgttgttccagctttgcaatggctgccatccggaagaaactggtgattgttggtgatggagcctgtgga

SEQ ID NO: 400781 - DNA, 98 bp, Homo sapiens
cggcccaggccgcggaacggtgatgctcgggccggacgggcgggcgcggatccctgcgtcccgttgaaggagaagagccaggcgtgcggagggaactt

SEQ ID NO: 400782 - DNA, 95 bp, Homo sapiens
gccgctggcagccgcggatctcaccgccgctcaggatattgatgaccatgagatccctgctcagaacccccttcctgtgtggcctgctctgggcc

SEQ ID NO: 400783 - DNA, 97 bp, Homo sapiens
atgcaccgagtccagcccaggaaaatggagaggtgggtcttcaaacaactctatgataaaggccttgtttatagaggtgtgaaagtcatgcccttct

SEQ ID NO: 400784 - DNA, 100 bp, Homo sapiens
ctcaccgtaagcctttggtcataatcgctgaagatgttgatggagaagctctaagtacactcgtcttgaataggctacaaactggaccagtgagattccc

SEQ ID NO: 400785 - DNA, 82 bp, Homo sapiens
ccctcccagcccccatcgagaaaaccatctccaaagccaaaggtagcttttaaatattgccagaaatatggaagtgacaaag

SEQ ID NO: 400786 - DNA, 82 bp, Homo sapiens
ccaaacatcaagcagaatgtgatttgcttgaagatatgaggttgctatcaagatcatagataagacccagctggatgaagaa

SEQ ID NO: 400787 - DNA, 98 bp, Homo sapiens
tttttggcatctaacctcctgtggataagggctcagaatagcaccattgctggcacagcacagccgcctcacacgcccagcagcttgttggctgacca

SEQ ID NO: 400788 - DNA, 75 bp, Homo sapiens
accagatgtaccttggaagcaggagccatgacttttcagaaaacgggccttactatacatcatatcccccatcac

SEQ ID NO: 400789 - DNA, 82 bp, Homo sapiens
cgtccccctgccccgttcacaatatttggtcgtattgggcgcctggtcaccagggctgcttttaactctggtaaagtggata

SEQ ID NO: 400790 - DNA, 90 bp, Homo sapiens
tctaaatgatgggcagtcatggtcccagaaacgtcactatcaagaagattttgaagatgtaactgagtttctggaagaggtcattgaagc

SEQ ID NO: 400791 - DNA, 98 bp, Homo sapiens
gggctccagatggagaattatttgctgttggatcgtttcatactttacgcttgtgtgataaaactggggaggtgtcattaacttgtcagtacctatag

SEQ ID NO: 400792 - DNA, 74 bp, Homo sapiens
ttggctgaaggacttggggagcccagaagctgccaccgaaccaaggctatggtgaactaaacggtaatgctgga

SEQ ID NO: 400793 - DNA, 76 bp, Homo sapiens
atcccgccagcgaccagatgcagcactggaaggagcagcgggccgcgcaggtccttttggtgtgaaccatggggtg

SEQ ID NO: 400794 - DNA, 98 bp, Homo sapiens
ggtgctgaggcacctggagaccttcgagcaccccaacgtggtcaggtacatcaggaacgtctctatcaagaatacaatttcagcaaggctgagggcca

SEQ ID NO: 400795 - DNA, 90 bp, Homo sapiens
agcggcccgcgcctgggctgccggcacttcgcggcaggttggcttttaggacactagtaagaaaatatagttgtgatctgtgttacacac

SEQ ID NO: 400796 - DNA, 80 bp, Homo sapiens
gctggcggacatcactttagaccctccacctaattgcagatcgatctggaatagaaaacgtcaactctgtggaggctttg

SEQ ID NO: 400797 - DNA, 100 bp, Homo sapiens
cttgaagagcccacctcctggcttcgacagtgtcattgcccgaggccacaccgagcctggtgcagacatggccaagtccaagaaccacaccacacacaac

SEQ ID NO: 400798 - DNA, 82 bp, Homo sapiens
gtcaaggtggcctaccaggaggccaggggtgtcgccatggtcagaatggcggcagtggagcatcgtcattcttcaggattgc

SEQ ID NO: 400799 - DNA, 83 bp, Homo sapiens
ctccagcaggcgctggctcctgctcagtgatgcggacccaggggagcctgcgactgatcctcaacaccaagctgtgggcccag

SEQ ID NO: 400800 - DNA, 73 bp, Homo sapiens
gttctggaggagatgaaagctttgtatgaacaaaaccagtctgatgtgaaggtgaaccttccggaaagagaaa

SEQ ID NO: 400801 - DNA, 100 bp, Homo sapiens
gggacctcttcatctgagagcactcatccagaaggccctgaggaaggagcgttacaggtatagccaaccccataaggcgttcacctttcgcatgcacggc

SEQ ID NO: 400802 - DNA, 83 bp, Homo sapiens
gcgtgtccctgcagcgaaggatcctgaactgccattggatgtccagaatcccctgtagttgataatgttgggaataagctctg

SEQ ID NO: 400803 - DNA, 80 bp, Homo sapiens
cgccgcgtgtacccggttgtcctcaggcgctgtcagggtgagcttgtcggccacagactgctacattgtgcatgagatct

SEQ ID NO: 400804 - DNA, 90 bp, Homo sapiens
ggaagacgcgccacgacgtgggactgcccggggtgtctcgcgcacgggccctcaggaaggtgaaagaaaagatgttgtcccggttaagag

SEQ ID NO: 400805 - DNA, 116 bp, Homo sapiens
ggcgcatccctgccccggcgccgtccgtgcccgcgggacctgacagccgggtcagagggcgtgatggtgggcatgggtcagaaggattcctatgtgggcgacgaggcccagagcaa

SEQ ID NO: 400806 - DNA, 49 bp, Homo sapiens
cggaaaactcccaacttcctggtctcgtctacagaggactggtctttca

SEQ ID NO: 400807 - DNA, 82 bp, Homo sapiens
gcggcggcacgatgccctttgacttcaggaggtttttctatatgagtggagaagacagctgttaccagggaggtcatacaac

SEQ ID NO: 400808 - DNA, 74 bp, Homo sapiens
tcagagcctgattgacaaaacaacccgaggagccttcaacacctggtacagtggtcagttcccctagcatctcc

SEQ ID NO: 400809 - DNA, 100 bp, Homo sapiens
gggccttcacttcagccttcagacccaagtcttggcagacaacctagtagaagaaagccaatgggtggttcttccagtacttggatacaatattcagtac

SEQ ID NO: 400810 - DNA, 107 bp, Homo sapiens
actgtggtggcatcccagcactggtgaggttactccgcaagacgactgacctggagatccgggagctggtcacagatgctgcagttggagaagaaacttgaacgtga

SEQ ID NO: 400811 - DNA, 78 bp, Homo sapiens
gaagcacgagcagatcctggtcctcgatccgcccacagacctcaaattcaaaggactgttatgaacactatccaacaa

SEQ ID NO: 400812 - DNA, 75 bp, Homo sapiens
aagggccaaattgaattgactgggaaaagatatttagcttcctgtggtatactgatgagcagaactcttccacta

SEQ ID NO: 400813 - DNA, 75 bp, Homo sapiens
tatcacaaaagcagatgctgctgaattctggagaaagttttttggagacaagtcccaggagaaaaaggaagaagc

SEQ ID NO: 400814 - DNA, 101 bp, Homo sapiens
agaatgtcttcgctgcccttgttcagcagtgacatctacaggcagctgctctataaaaatagctgacaagatctacaatctgtacaatgggtacacaagtg

SEQ ID NO: 400815 - DNA, 100 bp, Homo sapiens
ctgactccacctgttatatgtagcagaaagtggtaaaatagctgtggagtgcagacccagtgaagagattgtagatgtcagatgggaagaactacacagt

SEQ ID NO: 400816 - DNA, 100 bp, Homo sapiens
ccttcatcacgaggccacccagtcccacttcaaacattcgtctcggaaaccccgcctcttacagtcacgagggaaatcctcattgacgattcaatttgtt

SEQ ID NO: 400817 - DNA, 100 bp, Homo sapiens
tttgactgaggcctgccgcctgaatgatgatggctatctggagatgtcagcctgatctagttgaatctgaagatgtggacctgctgatgaagagggctga

SEQ ID NO: 400818 - DNA, 98 bp, Homo sapiens
gaagaagtccgcggccaggacacagttccggaaagcacagccaggcagaaaacctgctcttggatgctgatatgaacatcaagattgcagactttggc

SEQ ID NO: 400819 - DNA, 75 bp, Homo sapiens
tctcagccaggcggcggcggcgactggcaatgtttggcctcaaaagaaacgcgcggagctggagtttgttcagat

SEQ ID NO: 400820 - DNA, 97 bp, Homo sapiens
aggacaccgacatggaacagggactcactgggggattcactccttctccagttgcacagccacacccttcagctggccttaatgttgactttgaatc

SEQ ID NO: 400821 - DNA, 50 bp, Homo sapiens
ctgcaagtcaccatggacgctgaagagcagcccgacggccatggaggctg

SEQ ID NO: 400822 - DNA, 100 bp, Homo sapiens
ttaagagccctgaatcagggttccttgaaaagggaggaacggcgacatcctgacctagagcccatcctaagtactatactggcaattgctggagaagatt

SEQ ID NO: 400823 - DNA, 101 bp, Homo sapiens
tttcccacccgagagccgcgagcgcccggccgaacccgcgatggaataatgcccagcggcccgccaggtcccggggacggcaaaacagaacagaaaggcgg

SEQ ID NO: 400824 - DNA, 96 bp, Homo sapiens
catccgccccccgctcaatggcgactccctcaccgagtacgaagcgggcgtttgcgaaggaaaatcaagaagatctgggcctgtgggaagagaaat

SEQ ID NO: 400825 - DNA, 100 bp, Homo sapiens
aaatggaacatacgggcaagtttataagatttaaggaccatagtacagctatggatactgaaccaaacccgggaacatcttctgtgtcaacaacaaccag

SEQ ID NO: 400826 - DNA, 149 bp, Homo sapiens
ttcacactgggtgaaggaagctgaaaccacagacatgactgagtcctccatgaagactcggcaagatgtcggtgaaggagggcgcacagcgcaagtgggcagcgctgaaggagaagctggggccacaggattcggaccccacggaggcc

SEQ ID NO: 400827 - DNA, 74 bp, Homo sapiens
acaaatcatcaggaatccattatggtgtcattacatgtgaaggctgcaaggacatggtccggcgaggagagatc

SEQ ID NO: 400828 - DNA, 95 bp, Homo sapiens
ctgagctccgcatggagcctgcagcctttgtttaacttgactttctaaatgggtacggcagcagattcagcaccattcaacctttgaaagtgcac

SEQ ID NO: 400829 - DNA, 100 bp, Homo sapiens
caacatcacaaataatgaaaaagttgttgttaaaattctcaagttccagtctcatcagattttccatgtcctggtggtggcagcagcctttgtccacttc

SEQ ID NO: 400830 - DNA, 100 bp, Homo sapiens
cgaaaacgtggttgtagagttccgtgactcccagaactcccccactggaaaggattctgaaagaaatgaagtcagccctcagaaatgaagttgactgcct

SEQ ID NO: 400831 - DNA, 75 bp, Homo sapiens
taggagcgctctgtggtgcctggggctgaacgcggctttctgggtgaaaatgggatggaggattgtgtcatggcc

SEQ ID NO: 400832 - DNA, 83 bp, Homo sapiens
catcttgttcctgtaatagaaatgtgggcagatcaactgacatccttaaagtttttcagaagaagtgaagtcaagatgaagaa

SEQ ID NO: 400833 - DNA, 97 bp, Homo sapiens
tgacaagacgcggctgccgtacgtggccctcgatgtgctctgcgtgttgctggctgatctcattatgcttggccttgccacacatgaaccgaacttt

SEQ ID NO: 400834 - DNA, 87 bp, Homo sapiens
gcattacaaatatgaagaggcattatttatgaccttttctatggaaaggtggagctgatcagaataatgttcagcatcaaccccctg

SEQ ID NO: 400835 - DNA, 100 bp, Homo sapiens
gggatactgtgttgcaggctatacagtctctgaaattgccagacaaaaccctcattgacctctatgaacaggaatccctgggccactggagtcaaggctt

SEQ ID NO: 400836 - DNA, 100 bp, Homo sapiens
tgcacctcagtaccagaaggctttccagaatgtctttgcaccaagaaacaagaacttcaacatccatggaacggtgttcttccagagagcaaagccctga

SEQ ID NO: 400837 - DNA, 100 bp, Homo sapiens
gccagatagtaccatgatagctgtatcagccctggcctattttgagcagttaaaaatttccccagatgcctggcaggtgtgtgcagaagctctagcccag

SEQ ID NO: 400838 - DNA, 95 bp, Homo sapiens
tatctctgagaatgacccgttctggaatcagcttctctcattttctttccctgcaccaactagcagtgaatcagacgtcccaatagatgtggaga

SEQ ID NO: 400839 - DNA, 100 bp, Homo sapiens
atcaaccagctgacgccggagcagctcctaacccagcgctgataaagcagtttgtgtccgacgtggcctggggggagctggactacctggtggtggacac

SEQ ID NO: 400840 - DNA, 82 bp, Homo sapiens
gcctgcggagcctgtggggcagattctgaaaaagagttccacgtcctcccttatcgagtctttgttccccttcctggatcca

SEQ ID NO: 400841 - DNA, 100 bp, Homo sapiens
tgggactttggtgtgggatactgaggtgaagccagcatggcggacaccgacctgttcatggaatgtgaggaggaggagttggagccatggcagaaaatca

SEQ ID NO: 400842 - DNA, 83 bp, Homo sapiens
cagctgcacgccgtggagatcagcgcggtgcactcgcgcgaccacggcctggaggtgagaagccctaccactgcaactgggac

SEQ ID NO: 400843 - DNA, 82 bp, Homo sapiens
agctaaggccgcgttggggtgagaccctcacttcatccggaattctgtggccacactgcgaggagatcggttctgggtcgga

SEQ ID NO: 400844 - DNA, 101 bp, Homo sapiens
atgcacagctagaaggttggctttcacaagtacagtctacaaaaagacctgctagagccattattgccccgtgctatacttggtagatcagaaactcagga

SEQ ID NO: 400845 - DNA, 75 bp, Homo sapiens
tcgcagtctggaaagctttaggagttcacagtctctggattaatcgaattacagctgctagccaggaacatggac

SEQ ID NO: 400846 - DNA, 75 bp, Homo sapiens
cggggatgaaaggactgatgcaggtgttggggatgtcctttgcactgaccctgaactgccagattgacaaaacca

SEQ ID NO: 400847 - DNA, 82 bp, Homo sapiens
gctttgtggacgctggcaacgcattcaagaaagccgacccccaaggcggacctacgtgggcgccatgcccgggaagatcatc

SEQ ID NO: 400848 - DNA, 75 bp, Homo sapiens
atatggctttgtctcctttttcaacaaatggattctgaaaaagagttccacgtcctcccttatcgagtctttgtt

SEQ ID NO: 400849 - DNA, 88 bp, Homo sapiens
gcgacgaaccttggagagaggagaacgaacatcttctggacctttgtccaggatttatgagcagcttccagaagtacagaaaaagaga

SEQ ID NO: 400850 - DNA, 100 bp, Homo sapiens
aacgattgggctgagcagaggacgacatgttgcttttcgtggagctactctcctctgcaaggcctaccgtgggggccacttaaccatccgccttgccctg

SEQ ID NO: 400851 - DNA, 85 bp, Homo sapiens
gggattcgcagggaggatgtcgggacaccccggaagctgggaaatggtggaagttgatgggtcgaaactaaatgtgaccagcacg

SEQ ID NO: 400852 - DNA, 113 bp, Homo sapiens
ctgacgtgtttggagggaaatgggaatgtacacgataattaaagagtaaagttgtgctcaacgcactttcatttggacccgtggatacccattgaacagatgcttgaaacctg

SEQ ID NO: 400853 - DNA, 75 bp, Homo sapiens
caaccagaaagagattgggtacttaatggtgaggaaaatagcagctgaatactatgacaacctccctcactacaa

SEQ ID NO: 400854 - DNA, 114 bp, Homo sapiens
tctgtctgggttctgctgtcaatggtgttgtccagtgaccaagaatatggcccaggtgaccaaagccctggacaaggccctgagcaccatggacctgcagaaggtctcctcagt

SEQ ID NO: 400855 - DNA, 75 bp, Homo sapiens
aagagacctctacttagctcagcaattcttacctttattatgcagatatgccagcagaagaaagagaaaagaaat

SEQ ID NO: 400856 - DNA, 100 bp, Homo sapiens
gtagccttggaccgagacatgatgaagaaaggactccctggaggaaaagcggaagcggcagcggtctgaacgcctggaacggattttccaacttagtgag

SEQ ID NO: 400857 - DNA, 99 bp, Homo sapiens
cgcgccgctgcggttaatcgcagccaagaacgagaagagccgcagtgagttgggcaggttcttggccaagcagacatgacaatggatgaagtccgagaa

SEQ ID NO: 400858 - DNA, 90 bp, Homo sapiens
gtggaccacatagacatttacgcggatgtcggcgaagagttcaaccagactggtattgctcgagttccacttgctggagctgccgggggc

SEQ ID NO: 400859 - DNA, 73 bp, Homo sapiens
gcaactattcgcagtccgagcgattgtcctgggtcacataatgccagctgagcgtaaaaagccagcaagtatg

SEQ ID NO: 400860 - DNA, 75 bp, Homo sapiens
caggcgctggcgtccggcctgagctggcaggcgctggtgggcgcaagaaaattttccgtctcagcgacgtgctga

SEQ ID NO: 400861 - DNA, 98 bp, Homo sapiens
cttcctggcgctttcctgggttgcttctggcggccatggtgttgctgctgtactccttctccggtgaatctggattgggaaagtcgacattaatcaac

SEQ ID NO: 400862 - DNA, 98 bp, Homo sapiens
ccgccgcagccgccggcgctgtggaggaagatgataagatcagatgggcgtctagatgggactatattctggagtctatgcctcatacccacattcag

SEQ ID NO: 400863 - DNA, 83 bp, Homo sapiens
atcaagtaatggtgcaaagcctgaagtggaacggcacatgtgtgatggggacattgttatcttcaaccggcagccaactctgc

SEQ ID NO: 400864 - DNA, 90 bp, Homo sapiens
gagaaaggaaggaatatatcctgactgatttaaaggcatgacttcctggcaccacagggaaaatcgggtgcaagcccagaaactatttcc

SEQ ID NO: 400865 - DNA, 100 bp, Homo sapiens
ctccatggccagtgaggaagtcttgaagaatagagccataaagaaagcaaagcgcagaaatgttggatttgaacaactccaggtggttccgctatttggg

SEQ ID NO: 400866 - DNA, 101 bp, Homo sapiens
gaaaaacctcagcgacctgatcgacctggctcctgttctggatgtcagatatgcatctgcctcctgagaaactggtggctttgaacacttggtgtggacta

SEQ ID NO: 400867 - DNA, 88 bp, Homo sapiens
ccagtcagaccagcgcgtcatcatcaaggtctgggaggggctgaacgtggtgaagacaggccgagtgatgcttggggagaccaatcca

SEQ ID NO: 400868 - DNA, 106 bp, Homo sapiens
cctcatccctgactttgttaaacagacctctgaagagaagcccaaagacagtgaagaactcgaggacactcatgaggaccatgatacttccactgagaatacagac

SEQ ID NO: 400869 - DNA, 98 bp, Homo sapiens
agagctaagactccacgacatcccggaagccgaaaaatggagtatgaacccaccatcttctaccccacacgctcgctggacctgctgcatcgggacct

SEQ ID NO: 400870 - DNA, 100 bp, Homo sapiens
catgttccttttttggtcatgatatcactcctcagcttatccccaaatcacctgtttctggcccagcttattccaggtgtacattccaagcagagtggcc

SEQ ID NO: 400871 - DNA, 75 bp, Homo sapiens
cgagagcgtgaccgagagcgcgaatatcgtcatcgttagaagccaagacaatgcaaactccagtgaacattcccg

SEQ ID NO: 400872 - DNA, 100 bp, Homo sapiens
tgacccggccccggacggagcgccggccgcaccaccgccctctggccgttgcctcaccgggagctggagttcctacgcgtggccaagaaggagaagctgc

SEQ ID NO: 400873 - DNA, 51 bp, Homo sapiens
ggataaccttttgctaacaaaaacagggcttaaaagacaaccttcttgctt

SEQ ID NO: 400874 - DNA, 75 bp, Homo sapiens
atgcgaaggagctgcagcatccaggtatcgaaggatgatcgcagtgatgtggagagcagctcagaggaagaagat

SEQ ID NO: 400875 - DNA, 100 bp, Homo sapiens
agaagagccaaagtttgtatcatccatatgtgtcaaggcttgaagacggctgagcagacagccagcagatatgagggaaacttcgtggcttgcatgacag

SEQ ID NO: 400876 - DNA, 100 bp, Homo sapiens
ccggtttccctcggcgtgctactgtgcgctcgatccagcaccatggggaagcgggacaatcgggtggtactccaaagattcaggtttactcacgtcatcc

SEQ ID NO: 400877 - DNA, 75 bp, Homo sapiens
tgccctttgaggccttcctggccagagatgaccaagcgagacgtgcctggcttcgccatcgggggcctgagcggg

SEQ ID NO: 400878 - DNA, 80 bp, Homo sapiens
gcaacgatgtcatccgcaagaggcactaccgcatcggcctgaacctcttcaacaaacctgcctagagctggaacgttacc

SEQ ID NO: 400879 - DNA, 83 bp, Homo sapiens
gcgttgtggtgatcagcagctcggaagactcagatgccgaaaactcggtaactaggatttctacctcaaccgcgagacctatg

SEQ ID NO: 400880 - DNA, 90 bp, Homo sapiens
cgcgggccggccccgcggggagcgcccccggcgcgatgcccttcaggaaagacagcccacctgaggatattgaccataaggactcatatc

SEQ ID NO: 400881 - DNA, 75 bp, Homo sapiens
cgtctctctgctgcggcgcggggaccgctgtgctctcggtgtaaagggtcaagtttttgatcagaatggaaatcc

SEQ ID NO: 400882 - DNA, 82 bp, Homo sapiens
ttgcttgggcgcttctccgctgcgtgtaggtgaagggggcttcctgaccgagtgtgtttcctgtaacaaatcgttcaagaaa

SEQ ID NO: 400883 - DNA, 75 bp, Homo sapiens
ggcgacggaggagagcagctcctcactgtcaagcacgagctgcggactgctgactccactggaacccattctctg

SEQ ID NO: 400884 - DNA, 75 bp, Homo sapiens
cctttagaaaactgatcttaatacagctccataatgggagaagtaaagaacaaagacttaaggaacagcttggcg

SEQ ID NO: 400885 - DNA, 100 bp, Homo sapiens
gagaccgcgggccgcggagctcgggcggccggcgcggagggttacacatcattttggaatgactgtatatcatctggattacgtggctgtatgttaattg

SEQ ID NO: 400886 - DNA, 74 bp, Homo sapiens
tcttctgcggctctcggtgccctctccttttcgtttccggaaacatgatgtacggagcgcaagaggacggcagc

SEQ ID NO: 400887 - DNA, 100 bp, Homo sapiens
ccatggctcagaccgtgcagaatgttacattgtcgctcactctgcccatcacgtgccacatttgcttggggaaggtgtggttgacctgcctgaggaaaat

SEQ ID NO: 400888 - DNA, 100 bp, Homo sapiens
ccgagcctgcccgggtccgggcgcttgtctatgggcaccacggggatccagccaaggtcgtcgagaatgtgccataccgaatccgtgtgcggctgtccag

SEQ ID NO: 400889 - DNA, 83 bp, Homo sapiens
ccaggagagagatgtcttatcaggggaagaaaaatattccacgcatcacgagcttacaagaccctatgaaaaaattagttgag

SEQ ID NO: 400890 - DNA, 73 bp, Homo sapiens
gcccctggtgctggagatgctgaaggctctacctcggagaagagaagccccatgaaaagggagaggtcccgct

SEQ ID NO: 400891 - DNA, 98 bp, Homo sapiens
tcccatcgtcccaggaactagaggatgcctcctgctgttctcttaagaaagattccaacccaatgctgccactgcagagccccgccatggaagacacg

SEQ ID NO: 400892 - DNA, 82 bp, Homo sapiens
ctggcacccctgggaaaataggtctgcagccagaaaactgaaggtcagagaggttcaattttgtggggaaattgcttggacc

SEQ ID NO: 400893 - DNA, 76 bp, Homo sapiens
accgactggaccgggaaggagcatcccaggacctaccagaatctgatggaatcttgctctcttgctcagactggag

SEQ ID NO: 400894 - DNA, 83 bp, Homo sapiens
gtacccaccggagcctggcgcagcctccctctattaccagccgcttacaaacacgcagatggcaagaagattgatggcaggag

SEQ ID NO: 400895 - DNA, 90 bp, Homo sapiens
gagtggggacgtccggcttcggagcgggagtgttcgttgtgccagcgactaaaaagagatcatggaagggaagtggttgctgtgtatgtt

SEQ ID NO: 400896 - DNA, 50 bp, Homo sapiens
ctatcaggacatggagtatgaaagacggttcagcttgttggtttagatga

SEQ ID NO: 400897 - DNA, 50 bp, Homo sapiens
caggattcagaaatcatggaaagcagatatgattctataacagactcttc

SEQ ID NO: 400898 - DNA, 83 bp, Homo sapiens
agggcactcgtctccgtgggtgtggcggagcgcgcggtgcatgggtgaaggttgccgaactgtccccctggctggacatgtgg

SEQ ID NO: 400899 - DNA, 100 bp, Homo sapiens
cgccatcttggatccgcgggacaagaaaattcatgcgacacgatgaggcgagtggtacgacagagcaagtttcggcatgtatttgggcaagcggtgaaaa

SEQ ID NO: 400900 - DNA, 100 bp, Homo sapiens
gcgctgacgccgcggacctccctgcgaccgtcgcggaccatgggcgacaaagggacccggtggcacctctgagcatgagaagctgtgccgggcccgggac

SEQ ID NO: 400901 - DNA, 74 bp, Homo sapiens
agtacttcgacgaacactacgagtaccggctatgcccactggaagggccaagtgctgaattcagatgagctcca

SEQ ID NO: 400902 - DNA, 75 bp, Homo sapiens
cttacaaagtccatgctaacctactatgagggtcgagcagagaacccagcccttgctgacatctacacagagcac

SEQ ID NO: 400903 - DNA, 75 bp, Homo sapiens
cggaggacccgacccagctggaggaagtggatgtggaagatgtgaaatttgtcatcaattatgactaccctaact

SEQ ID NO: 400904 - DNA, 82 bp, Homo sapiens
aagtaatgcaatggtctcaatctctggaaaaacttcttgccaaccaaaaattacctctggactacaaatttacaagattctc

SEQ ID NO: 400905 - DNA, 74 bp, Homo sapiens
cgagcgccgcgccttcgcccagaagatcagcagaaggacagaataacgggctcccagattcacaagccccacca

SEQ ID NO: 400906 - DNA, 90 bp, Homo sapiens
cccaaaggtcctggagaaccagactcaccaactcctctgcatcctcctacaccaccaattttgaagagagcaggagattcggatgggtca

SEQ ID NO: 400907 - DNA, 100 bp, Homo sapiens
gaacgtgcggatttatcaaatagccttgaggaaatatatatgcgagtgttgtgtataaaggaagttgaaatcctgggccttatgtgtgtagactggcaat

SEQ ID NO: 400908 - DNA, 83 bp, Homo sapiens
gtttagcaagaatgaatgaagagatgcgggaatcagaaggactttatggacagccagattgaaaatcttcaagagcagcttag

SEQ ID NO: 400909 - DNA, 74 bp, Homo sapiens
gaaaatgtccttccagcgctgcgcccggacagacaagattacctctctagtgacccttcagctgttaaccctgg

SEQ ID NO: 400910 - DNA, 81 bp, Homo sapiens
gcctcccaaagtgctgtgattacagccagtcagaagtccagaaagaagagatagaaaagcatcagctaatgctcgaaagag

SEQ ID NO: 400911 - DNA, 49 bp, Homo sapiens
cgagaagtccccgaccgactgttcaaaaggtgatgacctatcaacagcc

SEQ ID NO: 400912 - DNA, 75 bp, Homo sapiens
aatcgcctgctacagaaacaaggtcgtcggctggcggagcggcttggaggagctgtgcagtgagaagcaaagcag

SEQ ID NO: 400913 - DNA, 51 bp, Homo sapiens
ggattccaagtaactcttatttggcaacacttccccagatcaaaaggagcc

SEQ ID NO: 400914 - DNA, 87 bp, Homo sapiens
ctaccacgccgtcaaggaccggcacaaggacgttctcaagtggggcgatgagttgctgattgttggaggttcttttggtcttcgtga

SEQ ID NO: 400915 - DNA, 98 bp, Homo sapiens
gtgcatcaaaggtgtgaacacagaactacaagcagctgtcgaagagatactgccaagccttaaaaaagatgatgtgtccatctattatgtgagcagaa

SEQ ID NO: 400916 - DNA, 100 bp, Homo sapiens
gcctgattgacatctgtgacagactaaacaggacgtctttaatgaaggtgtcatggagaaactccagctgggcccagagattctgcagcgggaaaatcca

SEQ ID NO: 400917 - DNA, 90 bp, Homo sapiens
ccccggcccgccgtgacccacggccgcctccggagcccgacgcgattattcagagctgggagagcttcccccacgatctcctttagaacc

SEQ ID NO: 400918 - DNA, 102 bp, Homo sapiens
cgccggcatagtacaatgaggcagccagcggatcttggtttcatcaggctggggagaaatgcctaatgttcactcaaagactgaaaactcttggggagaacc

SEQ ID NO: 400919 - DNA, 100 bp, Homo sapiens
cgctactacgccatgaagatcctgcggaaggaagtcatcattgccaagggtaaagcatcaagtcgaatatttgggtctgaaagagaacattcgagtgaga

SEQ ID NO: 400920 - DNA, 82 bp, Homo sapiens
tccttcaagtacttggcagatcactctcttagcaggttttgggatttgagattgacgcggtgaactctgtccagttttcaaa

SEQ ID NO: 400921 - DNA, 75 bp, Homo sapiens
tctgatctcaccaccctggtggcctttccctccagctctgtctatcctaccaagctccaccagatctgcagaatt

SEQ ID NO: 400922 - DNA, 100 bp, Homo sapiens
ccttcacctgaatgacatctacctccatcaggaccccagatgtctgacagccctgtgtgacaccaagataagtaacaaacttgaactggatcgatttatg

SEQ ID NO: 400923 - DNA, 75 bp, Homo sapiens
cctgagtagctggaaccatcatatgcaccagcacgcctggctaactgcattcatccgggtcgtgggctcggagtt

SEQ ID NO: 400924 - DNA, 90 bp, Homo sapiens
ccgggagctgggcggccatttaccaggtgggaccagggagattggatctgctctcaccaggatgtgcatgaggcacagaagcattgaagc

SEQ ID NO: 400925 - DNA, 75 bp, Homo sapiens
tgttccacgctatgttgggagtgttcgctttcgagaactacagtctttggaacagcaattagaagaagcccaaac

SEQ ID NO: 400926 - DNA, 75 bp, Homo sapiens
gtccctgaagtgccgcaggcagctccgtgtggaggagctggagatggtgtttggagaagagggattgaccctgaa

SEQ ID NO: 400927 - DNA, 95 bp, Homo sapiens
tctgatatgatgggaaatacaaatgaaccaagcacacgtgtccgagacacagcattgttggttttgccatgtactattttacctatgacccgtgg

SEQ ID NO: 400928 - DNA, 76 bp, Homo sapiens
ctgcaacccccatcaccttagccgactctgcgaactaggagcccaggatgtgcgagttcaagtgctacccgaggtg

SEQ ID NO: 400929 - DNA, 75 bp, Homo sapiens
gcgggctggcgacgtagaggaggacgcctcacagctcatctttcctaaagtgggtcaacaacctggaggttgata

SEQ ID NO: 400930 - DNA, 100 bp, Homo sapiens
aagtctcttgcaaattccagtcaaggccctaaaatatagaagctgtacattggaatgcgtttacagtcattgtaatggaagcaaaatacatgaaggaaaa

SEQ ID NO: 400931 - DNA, 74 bp, Homo sapiens
gcagatgttgttgaagataaagacaaggcctggcccgagccaagtcaatcccaacaaagacatactccaatgag

SEQ ID NO: 400932 - DNA, 88 bp, Homo sapiens
agtgccctccctctccgggatcggcaggacctcgccacagagggagaagttttcaggttgctggaggaagagggcgtctccctccccg

SEQ ID NO: 400933 - DNA, 82 bp, Homo sapiens
gaggaggagcaggagaaacccatcctcgacaggcctgatcttttggccagaaggagattaaaaagatgcccctcaagatggc

SEQ ID NO: 400934 - DNA, 100 bp, Homo sapiens
tacgctgccagcaacacgggcgaccatgctgatgagcaggacggcgattccagatggggcgcctacccttcttcagcaagatgggaacagctgagtctga

SEQ ID NO: 400935 - DNA, 98 bp, Homo sapiens
tcaaaattggagcatgtcgtcatggagacaggtgctctcggttgcacaataaaccgacgtttagccaggaaggatgccaattctgcgcttctcagtaa

SEQ ID NO: 400936 - DNA, 74 bp, Homo sapiens
cctcgaagcactccccccagctccatgaatggaaatcggctccgcaggtgtaattgaaaagtgatcctctcttc

SEQ ID NO: 400937 - DNA, 90 bp, Homo sapiens
gatagtgttagttccacagatggggaggacagtctagagagaaagatgaccgcacctcgagcaggagtggggatgccacgtctgccccca

SEQ ID NO: 400938 - DNA, 100 bp, Homo sapiens
cccagctgcagggcggcagtaatgagggagggacattgcttgggcctccagactctgtggttgatgtggggagtacagaagtcacagaagaaatctttct

SEQ ID NO: 400939 - DNA, 75 bp, Homo sapiens
tcttccttgatcagcctttacagtaaaaatgacccatctatggctgcttaatgtccctatgttaactacttgaga

SEQ ID NO: 400940 - DNA, 74 bp, Homo sapiens
gtcccggcacagggaccagcgtgatgggtgtctgcactgcttggggaggaagatgaagaggcactgcattattt

SEQ ID NO: 400941 - DNA, 82 bp, Homo sapiens
gcactgtattctttacctgcttcccaatcccactgatgaggatcagcccatgcaatacgtttggtttaatattggcagtgtg

SEQ ID NO: 400942 - DNA, 97 bp, Homo sapiens
ttgattttgttggaggactccactgcaaacctgccaaacccctacctaaggaaatggaggagtttgtacagagctctggagaaaatggtgttgtggt

SEQ ID NO: 400943 - DNA, 50 bp, Homo sapiens
ctattccctatattcagcaattaaagaggattgtgaagcagaaaatgtgt

SEQ ID NO: 400944 - DNA, 73 bp, Homo sapiens
aatgacccaccaatggaagcagctggcttcactgctcaggaacatgtttgacaagctgaaccgtgatgccttt

SEQ ID NO: 400945 - DNA, 83 bp, Homo sapiens
caactcctcacgatgctcctgacggtggtggacagactctccatgccccgatgaagttgcagttgtgaaaaacttcaggacaa

SEQ ID NO: 400946 - DNA, 132 bp, Homo sapiens
atccaggcgggggccaggggcccctcgcctcccctctgaggaccgaagatgagcttcctcttggtcgtaagagtgaggctgaaaagctcttcttgaaggctattgagctggatcccaccaaaggaaactgtt

SEQ ID NO: 400947 - DNA, 100 bp, Homo sapiens
ggccttggttatgacagtggaaccggggtttggagggcagaaattcatggaagatatgatgccaaaggaagatgagaatgtgcctactgctcctgatcct

SEQ ID NO: 400948 - DNA, 100 bp, Homo sapiens
ccatttgtttttaactaccgggaagatttacacagatggaaccagaaaagatacgaggctctaggagaggcactgtggttggcgtggacgagagcactgc

SEQ ID NO: 400949 - DNA, 96 bp, Homo sapiens
aatacattgagtttgtggcagacagacttatgctggaactgggttttagcaagtaacaacatgctgtaccccaaggaagacaaggagaaccgcatt

SEQ ID NO: 400950 - DNA, 83 bp, Homo sapiens
gactgtggcggcttcggcggctcaggttgtggtagaggcggaggctcaggcagcttgagaatccacattcatctcaatggaag

SEQ ID NO: 400951 - DNA, 100 bp, Homo sapiens
aaatggcgcgtgctgcaacccgcgcccgcttcggagagagaaatgctggggatgttttagaagaatgtatgtctcttcccaagctatcttcttattctgg

SEQ ID NO: 400952 - DNA, 100 bp, Homo sapiens
tgctgctgctgcgcgtcccgcccagccgcagcttcccaggttatttggaaatagcggtgcttgcagcgcttgcggacagtcgattcctgcgagtgaactc

SEQ ID NO: 400953 - DNA, 100 bp, Homo sapiens
agagttatttgtattttgaggaaaaagactttgtggataaagcagagaagagcctgaagcagactccccatagtgaggacttggaaaaggagagtgacac

SEQ ID NO: 400954 - DNA, 100 bp, Homo sapiens
gacttagcccatgagctggtgaccagcaagattgcactacggaaggacctggataacgtgtgttccagagaacaagccttcagacatttgctatattgac

SEQ ID NO: 400955 - DNA, 50 bp, Homo sapiens
tgtgggttacgccatctttaagatgcagcagcttttttatgagaattacg

SEQ ID NO: 400956 - DNA, 101 bp, Homo sapiens
ggcgacctgggcaccagcaggacccgaggccaggagccaggggcccagaaggctccagcaggagaagacagacacggtccgctgcatcaagtcctgccgcc

SEQ ID NO: 400957 - DNA, 89 bp, Homo sapiens
aacagattcagaaggagcaggattaccaaaggctgctgctgctgcactacaaggccagcgcggaagtgcaggacaacaatgggaatacg

SEQ ID NO: 400958 - DNA, 75 bp, Homo sapiens
attggagccaagaaatgagtatagaccaagatcactccatggatgaaatgacagctgtggtgaaaattgaaaaag

SEQ ID NO: 400959 - DNA, 97 bp, Homo sapiens
gcccccggccgcagcgcaggcagcccagcagctgtcgcctggttgggcccggaaatgggacgtcgcgctttctcagggagcgtagaagcagccaggg

SEQ ID NO: 400960 - DNA, 75 bp, Homo sapiens
agccccacagaccagcccagcattcaggtacatgtcccagagcaagcacacggaggcccgggagctcatgtactc

SEQ ID NO: 400961 - DNA, 96 bp, Homo sapiens
cgcagctgcgaggagctcactgcggtcctaaccccgccgcagctcctcggacgcagagagaagaagaaggaggttcctgctgtgccagaaaccctt

SEQ ID NO: 400962 - DNA, 100 bp, Homo sapiens
ccagcacgcgcctgcttcccgtctgcgcgagtccacgcagctccccagtgggttgaccacacaggtgcagcctcacagaagaaggctttccgttcttcag

SEQ ID NO: 400963 - DNA, 83 bp, Homo sapiens
gtctggctccttcggggacatctatttggcgatcaacatcaccaacggcgagacaatgcagatcttcgtgaagactctgactg

SEQ ID NO: 400964 - DNA, 100 bp, Homo sapiens
aggctgagatagttgatgttgctctgggaatcctgattgaggtatctcagatgaagacatcatcaacattactcttcctactggagtccccattcttctg

SEQ ID NO: 400965 - DNA, 100 bp, Homo sapiens
gaccccaactggcatgctccccagcggagtactttctggagggaagcaaaccctgcaaagcgaaattgacattgaacgctgtgtgagagaatctatcaac

SEQ ID NO: 400966 - DNA, 100 bp, Homo sapiens
gaaggaaaccagaattcaaaacactactaagctgttggagctgactgctgggcaggaacgtctctcaggagaaagagtggaagagaaaattgtgaactaa

SEQ ID NO: 400967 - DNA, 119 bp, Homo sapiens
tctcgctccgtggccttagctgtgctcgcgctactctctctttctggcctggaggctatccagcgtagctacagcaagctgggtagcaggcagatccaaaggatatcatgaagtttcca

SEQ ID NO: 400968 - DNA, 99 bp, Homo sapiens
ggatgagttaatgggccgggaccgaaacctagccccggacgagaagcgcagcaacgtgcggtgggaccacgagagcgcattcccatcaagagcaccatg

SEQ ID NO: 400969 - DNA, 100 bp, Homo sapiens
tacagcccaacatgaactccagtgacccagacctggctgtggtcaaacccacccggcccaactcactgtttttcgttggaatatacgttgcacatttatg

SEQ ID NO: 400970 - DNA, 75 bp, Homo sapiens
aatccagtaccaaaaacgtcaacaacagttttacgaggagagaacacgtcttacaggatggaagagaaaagtgat

SEQ ID NO: 400971 - DNA, 82 bp, Homo sapiens
tttgaagtctgtgtcaaacatccatatcataagtggaattttggagatattcaaagcttaaagcttttcaagccaggccaag

SEQ ID NO: 400972 - DNA, 50 bp, Homo sapiens
ccagatggcagccagtcagtggtggaggaacgtgttgtgggctttcacgt

SEQ ID NO: 400973 - DNA, 100 bp, Homo sapiens
gtacttgtggcagttgtggtcagtttcgctttgattgctaccctggtatatgcacttttcagggaagaaacccttttttcttggagccagcaataattat

SEQ ID NO: 400974 - DNA, 100 bp, Homo sapiens
gctccctgggcaccaggcagctaacaggtgtcatggagaaactccagctgggcccagagattctgcagcgggaaaatccaaggcttatttatgccaggct

SEQ ID NO: 400975 - DNA, 100 bp, Homo sapiens
cccagacaagatggacaccgcggaggaaggttccgtggggaccccactgcctggagtacaggtgcgcattgtctcagaaaacccacagagggaagcctgc

SEQ ID NO: 400976 - DNA, 99 bp, Homo sapiens
atctaacaggaggagaaggagcatatctttattccagcaatctacagtcctggcctgaggaaggcccccgacagctgctctcgggagccgcctcccgac

SEQ ID NO: 400977 - DNA, 98 bp, Homo sapiens
tgaatcaaggtccagagaaggtggaggaatcctgatactgagcggaaggtgctcgggtcttcggggcactgggtcccatcggtccctcctcacctggg

SEQ ID NO: 400978 - DNA, 98 bp, Homo sapiens
gaaaaaatgtctgtcacatatgatgattccgttggagtagaagtgtccagcgacagcttctgggagtgtatccaaagtgtgtacatcagtaagatcat

SEQ ID NO: 400979 - DNA, 105 bp, Homo sapiens
gaccccggaggcgtagccggctgcggaggcgaagaggtggcagcgcgagctgggaccagcgtctcggaggcgccgcagagacggggtcttgctgtattgcccagg

SEQ ID NO: 400980 - DNA, 80 bp, Homo sapiens
gcccgggcatggtggtctggggcaacgcggaaggaagaggatttgacaacttgacttctgtccatcttgcacggcatact

SEQ ID NO: 400981 - DNA, 95 bp, Homo sapiens
gaagattagcaaaggtgctaatccagtggaaatcaggagagataagccaatggacacgtcagtgttatctgaagaaggaggagagccttttcaga

SEQ ID NO: 400982 - DNA, 95 bp, Homo sapiens
caccatgccgctcctaagcctgcacagccgcggcggcagcagcagtgagagcttcctgcctgacacagctcacttcaagaagtgcacaatgtcag

SEQ ID NO: 400983 - DNA, 98 bp, Homo sapiens
ttcggcgggcccctgctgaaagaccggcatgccctattctgtgggcttccgcgaaggcacttgatgacattagtgaaagcatcaaagagcttcagttt

SEQ ID NO: 400984 - DNA, 50 bp, Homo sapiens
agcctgtcttccggctcagtgtggttggtgttcgaggaagagacattgtt

SEQ ID NO: 400985 - DNA, 80 bp, Homo sapiens
atggccgcgggaggctgctggtgaaggtggttgaacagggtatgtttgtaaagcactgcaaagtagaagtatatctcaca

SEQ ID NO: 400986 - DNA, 75 bp, Homo sapiens
atctatacaaagaagtgatgctggagaattacaggaatcttctctcattggaaacaaaaccatgggcagtgtatg

SEQ ID NO: 400987 - DNA, 75 bp, Homo sapiens
ggctgtggaagaagcataatatggtgaacggccgcctggcagaacatccagtcatggataaaaatgagctggttc

SEQ ID NO: 400988 - DNA, 100 bp, Homo sapiens
atctggtggtcgtcatcaccttattctggtcccggttggcaaacatgaattgactgggcataaagtagctgtgaagatactcaatcgacagaagattcgg

SEQ ID NO: 400989 - DNA, 97 bp, Homo sapiens
gaaaatggggcggaagaaaatacaaatcacacgcataatggatgaaaggaaccgacaggaactgtggctgcaccatctgtcttcatcttcccgccat

SEQ ID NO: 400990 - DNA, 73 bp, Homo sapiens
ggcaagcatgtggtgtttggcaaagttctagagggcatggaggctatggtggtggaggtggtggcagcagagg

SEQ ID NO: 400991 - DNA, 98 bp, Homo sapiens
aattcgtcaagttatccgaaaatataattacgttgctatgatggaggagatgtataagaaagctcatgctgctatacgagagaatccagtctatgaaa

SEQ ID NO: 400992 - DNA, 100 bp, Homo sapiens
gccccagggaacggacagcccgacctcttaggcgccgggaccctcaggctcagatcagtggccgaggccccagaggtacaccaggggttggaaaaaccac

SEQ ID NO: 400993 - DNA, 74 bp, Homo sapiens
acgcggctgcacaactgcaggaacaccgtcacgctgctggaggaggtctgctgagaacagacccagtccctgag

SEQ ID NO: 400994 - DNA, 116 bp, Homo sapiens
atcatcctaaggacgcagctgtctgtgagggtccatgcctgcatcggagtacaagcgcaagctagccagagtttccctggtgcgcaaagaactcaggtcccggatccagagcctgc

SEQ ID NO: 400995 - DNA, 99 bp, Homo sapiens
atgatcaccagggcaggccttccttgccaggacctagagtttgttcagttccaccctacaggcacgtgtggttctcaaatataggcattctgatgggaa

SEQ ID NO: 400996 - DNA, 50 bp, Homo sapiens
gtgtcatccagccttagcaaaccagaggaaacctaaagatttttcatgat

SEQ ID NO: 400997 - DNA, 98 bp, Homo sapiens
ctgatcttcgatgagctctcggattccttatgcagagtggccgacttgggtgacatccagcagctgctctttgtctcggaccaccgggcagcttatga

SEQ ID NO: 400998 - DNA, 100 bp, Homo sapiens
caacaatggtggctttggagcaggcagtgtgaagtggaatctctgaaactcaggtgtggcatcaacaaagtcaagaaggtagtccaaactctctcttaca

SEQ ID NO: 400999 - DNA, 50 bp, Homo sapiens
ccgtgcctgacctgctgctgccactggtccagcaagactatgaatctctg

SEQ ID NO: 401000 - DNA, 100 bp, Homo sapiens
gagtgatgtcttccagactcggtgctgtacccgccgggcccagaagacacctgctttgagtttggtgtttttcctgccatcctgagtttcccacttgatt

SEQ ID NO: 401001 - DNA, 100 bp, Homo sapiens
accctctcagagctccaagatatggcagctaggcaacagcagcagattgaaaatcagcagcagatgttggttgccaagctggatagaacttatactggct

SEQ ID NO: 401002 - DNA, 73 bp, Homo sapiens
cctgccctgaggagtccccgctgcttgatctgggacatgagcgatgatgagaccatctgagatggccccgctg

SEQ ID NO: 401003 - DNA, 101 bp, Homo sapiens
ccgatggctctgtgcaacggagactccaagggctctcacctttgtgtatccttttggtgccacattgagtgtcatgaaaccagcagtggcggttctgtcta

SEQ ID NO: 401004 - DNA, 80 bp, Homo sapiens
cgcagagaagagctgctcagtctggcatgcagcgagtaaccagctcataaatcacatcgaacagtttttggatactaatg

SEQ ID NO: 401005 - DNA, 82 bp, Homo sapiens
ctaatactctaggttctctgggtatctgctgtgcgtttcagtcaacaatacagcttgtgttcgacaatattccttgatgaca

SEQ ID NO: 401006 - DNA, 100 bp, Homo sapiens
gtgcgtccctggcgcttccttcttctcttccggcggagaggcactcttaaaagacccattttacatgggcttgtaccagaaacgagatcgcacacaacag

SEQ ID NO: 401007 - DNA, 100 bp, Homo sapiens
ccttggtccaacacaaattgcctccttatgtctccaacatggaccgcctgggggactcggaactggtcctggatatgcccacccaagaactgggcctccc

SEQ ID NO: 401008 - DNA, 100 bp, Homo sapiens
gggcttcataccagctgaagagcgacaagccgctggcagccgcggatctcaccgccgctcaggattcccaacttcttctggagcctggggatcggtcaca

SEQ ID NO: 401009 - DNA, 90 bp, Homo sapiens
ctgcctaacgttcacttcactcacgaaaaagcttgtggtgaaggggggcaaaaaaaagaagcaagttctgaagttcactcttgattgcac

SEQ ID NO: 401010 - DNA, 94 bp, Homo sapiens
ctggggggctcgctgtatttactgggaactagtcttgcaggaagatgtaggtgcaaaaaactacagacatctctgtgctgtttattacaacaag

SEQ ID NO: 401011 - DNA, 124 bp, Homo sapiens
ctcgctccgtggccttagctgtgctcgcgctactctctctttctggcctggaggctatccagcaaggaaggggagttcaccctgcacggccgggccatcctggagatggagcaatacatccggg

SEQ ID NO: 401012 - DNA, 82 bp, Homo sapiens
ttcaacccgcaccttgtgttccggaagttccagcacatacccccggcctcatgagtacctgtccccagcggatctgcccaag

SEQ ID NO: 401013 - DNA, 83 bp, Homo sapiens
ggagtcatggaagagtttttaaaccagagttgatctctctaatgtattagatcttcatgcctttgatagtctctctggaataa

SEQ ID NO: 401014 - DNA, 100 bp, Homo sapiens
ctcttcagttcgtgtgtggagacaggggcttttatttcagtgctggagaatctggtaaaagcaccattgtgaagcagatgaggatcctgcatgttaatgg

SEQ ID NO: 401015 - DNA, 75 bp, Homo sapiens
gaaggagtacatgccctttatgaagatattcttgaggcttgctaagtactgtgacaacttactgaagaagtcagc

SEQ ID NO: 401016 - DNA, 89 bp, Homo sapiens
gtcttctgacagctggtgcgcctgcccgggaacatcctcctggactcaatcatggcttgtgtaaaggcgacacaggaggagaaccggga

SEQ ID NO: 401017 - DNA, 158 bp, Homo sapiens
gcatttgttggggagaagaggattggaggtgtcagtgttaaaggaacctctacaacgaaggtgaagccacggaagataagacaatgcagatcttcgtgaagactctgactggtaagaccatcaccctcgaggttgagcccagtgacaccatcgagaat

SEQ ID NO: 401018 - DNA, 75 bp, Homo sapiens
gtcggctcagccgggcagtttgaggagctgctgcgcctcaaagccaacaatggccaatgtacatggtggactatg

SEQ ID NO: 401019 - DNA, 100 bp, Homo sapiens
agcccccaggaggccttgccgggccggaaggaacagacccctgtagcgggcgggaggcagcaccgggctcttgatggacttggcagccaatgaaaaggcc

SEQ ID NO: 401020 - DNA, 100 bp, Homo sapiens
gaagggctgagggcttctgcagatgctaagaagtggtggacttgctttgtgaagagacagttcatgaacaagagtctttcaggacctggacagtgaaggg

SEQ ID NO: 401021 - DNA, 89 bp, Homo sapiens
cggccggagaagggctgcgggttagggggccggcgcccgcggttcaggtacagcaatcatttgaaactccaagggccaaagctcaaatg

SEQ ID NO: 401022 - DNA, 100 bp, Homo sapiens
aggaacagtgggctggaggaaagttgtcaatacctgtaaagaagagaatggctctactggtgcaagtgttgggtggtgaattcctcaagtacatggaggc

SEQ ID NO: 401023 - DNA, 88 bp, Homo sapiens
tggagaagggagactacaaggacagcagcgactttggggcccgtcaccctcagagaacccgaacgatgtcgtcactggcagcgaagcg

SEQ ID NO: 401024 - DNA, 75 bp, Homo sapiens
gctgagcacctgtagtcaatcacacgcaggttgtggcagcactgcctgaaggtatgagaccagattctaatcttt

SEQ ID NO: 401025 - DNA, 75 bp, Homo sapiens
tggcatcagggaggctttcagccggagaagcgagtttcagctgagccctgaggatgatgacaggaaggtccgaag

SEQ ID NO: 401026 - DNA, 74 bp, Homo sapiens
cagagctgaggactgcctgtttgcagaaaaggcgacggcggattgacagaagtatgattggagagcccacaaac

SEQ ID NO: 401027 - DNA, 50 bp, Homo sapiens
agacaccatgcccagcccctgaggttttgattcccaccatggccatcacc

SEQ ID NO: 401028 - DNA, 100 bp, Homo sapiens
gtttcacagggctaaagcctgaacaggtggaggtggaggaagcgtccctgggatcgagaggatgggtcctggcattgaccgcctcgggggtgccggcatg

SEQ ID NO: 401029 - DNA, 100 bp, Homo sapiens
ggggcggcggaccgcggggcgctcatctggctctgctacgacgcgctggtgcacttcgcgctgccaatcctgaggcaaaagaaacattttaattcactgc

SEQ ID NO: 401030 - DNA, 83 bp, Homo sapiens
ctgggatcccggccaccagcaattgtccggagctagagttaatgccaaagacagcaaatggttgacacctttacacagagcag

SEQ ID NO: 401031 - DNA, 100 bp, Homo sapiens
gacactttcaacaagtggactagaatcactctgcctctccctccttataccagctgtagaaattcttgctgatataatacaaaacagcacattgggagaa

SEQ ID NO: 401032 - DNA, 98 bp, Homo sapiens
gtatttcgaaggactctatccaacctattatatgacatggacatcttccagcaacagatctcgagaagacagctggctaaaatccttatttgtccgga

SEQ ID NO: 401033 - DNA, 101 bp, Homo sapiens
agagggactctgaaagggccccggccagcgtccctgagacgccaacggcagtcactgccccccattccagctcctgggtattgtactgatgatatgctgca

SEQ ID NO: 401034 - DNA, 75 bp, Homo sapiens
cagtcagctgggggagatgtccctggaagaacacagccagtgtgaatgcagacctgccgggaagagcacaagaag

SEQ ID NO: 401035 - DNA, 74 bp, Homo sapiens
ggcgctggagagggggcgctgagctgttggggcagttgtgaaaaacttcaggacaaaaatgtttcatttaagga

SEQ ID NO: 401036 - DNA, 100 bp, Homo sapiens
ggacgaggggctccgggtcttccagagcgtgaagatcaagatcgatccagacatttaatgtggatgcaccatgccagaccgtggaagatttaacgaatgg

SEQ ID NO: 401037 - DNA, 90 bp, Homo sapiens
agctgtggtacaagcccgtggaacaattcatcttaccagagtttaaagatgtatttggcacatctgtttatggacagactgtaattctta

SEQ ID NO: 401038 - DNA, 100 bp, Homo sapiens
caaaacaggcagaaatggaagtcaagagggaatcttatgcaagagaaagaagggacaaactctgcctgggcgagtccttttcctgcgttatgtcgttcag

SEQ ID NO: 401039 - DNA, 100 bp, Homo sapiens
gacgcccgcggagagagccactcccgcccacgtcccatttcgcccctcgcgtccggagtccccgtggccaggtattctctgaaaccaaatgaccaaatct

SEQ ID NO: 401040 - DNA, 98 bp, Homo sapiens
accatcctacagatcttccctttcacctatgaaagcaaacgtatgggcatcatcgtgcggttgctgatagtccaactccaccgccaccacctccacca

SEQ ID NO: 401041 - DNA, 98 bp, Homo sapiens
tggagtgtagagatatagttggcaacctcactgagttagaatcagagaatctacctgttactcgtattttggacaatcttatggagatgaagtcaaac

SEQ ID NO: 401042 - DNA, 100 bp, Homo sapiens
ggatgagcctgcagagcgcgcagtacctccggccaatttaacctttgacccagctgctctactgcctggggcctcacccaagagtcctggactcaaggct

SEQ ID NO: 401043 - DNA, 100 bp, Homo sapiens
gggaacaatggccacagtgtcccaccatcaaagagatcagagaccagggctcctgtggctcctgctgggtggacccccaaaagtacaagggcatatttaa

SEQ ID NO: 401044 - DNA, 98 bp, Homo sapiens
aaaatattgacagaatgtgccagctgcatgaaagcggttacgatgctggcaaagccctgcagcgcctggtgaagaagcctgtgcccaagctcatcgag

SEQ ID NO: 401045 - DNA, 100 bp, Homo sapiens
caaggccaggggagacctgggtgccttcagcagagagaatagtgacagtggtacaggaaagaaagaaaaagaaaagaaaaacagaaagggcaaagacaag

SEQ ID NO: 401046 - DNA, 89 bp, Homo sapiens
tcagcctccaaaagtgctggcattacagaacattaaccaggtggtatttgttggaaatttcttgagaattaatacgatcgccatgcggc

SEQ ID NO: 401047 - DNA, 100 bp, Homo sapiens
ccccaagccagaatatgaaggccccttttgtgtcttcaatgaacccgatgaggctacggaaacaggccgagaagaacgtggagaagaaaattgacaaata

SEQ ID NO: 401048 - DNA, 85 bp, Homo sapiens
atggacaccttctaagagtttggcgagtcagtgactgaagcgcccgtccattccaagtttgtcagggagccactggtgatgtgga

SEQ ID NO: 401049 - DNA, 75 bp, Homo sapiens
acgaacttcaaaggggaaagcaaggccaaagacagggagaagtgattcgcctttgccagtctcatctcgtgtctg

SEQ ID NO: 401050 - DNA, 87 bp, Homo sapiens
ggttgttccgttgcgagctgcagctgcgatctctgtggtaggcccagtccagttacaacacagggatcacaacaaacacaaccgcca

SEQ ID NO: 401051 - DNA, 83 bp, Homo sapiens
gaagacatcaagaagatcttcgagttcaaagagaccctcggaacggtggcccagttgaaatccttcccttcctctaccttgga

SEQ ID NO: 401052 - DNA, 83 bp, Homo sapiens
cacaattgtctgtgacagtaacagtacttgggatcccccagttccaaagtgtcttaaagggaaattcacctcttctatagaag

SEQ ID NO: 401053 - DNA, 83 bp, Homo sapiens
ggagaatttaggatcttgttgaatccagtccagataatatcgtctactgcattatttttggctgcaaaagtggaagaacaggc

SEQ ID NO: 401054 - DNA, 80 bp, Homo sapiens
tagtggaaggagtacagggaagtctataagctttgcaacagaattacagagtatgatcttgaagctcaactagagaaaaa

SEQ ID NO: 401055 - DNA, 83 bp, Homo sapiens
cctttccacctcgcggcagttcggaggatacgaagcgttttcggcttcctgcccggagctgtgcagcaaacagtcgaccccca

SEQ ID NO: 401056 - DNA, 75 bp, Homo sapiens
ttggatccatacgttataagcaccgctacagtcttggctacttatgattcagcagacagaacaacttagtaggat

SEQ ID NO: 401057 - DNA, 100 bp, Homo sapiens
ttccagtaccagtacattaggaaacatgctagaattacctggaacttcatcatcatctacttcacaggaattgccatttacttggaacgccagttggagg

SEQ ID NO: 401058 - DNA, 50 bp, Homo sapiens
tgtgtgtgtgtgcgcgcgcgtgtgtgtgacggagtctcgctctgtccccc

SEQ ID NO: 401059 - DNA, 90 bp, Homo sapiens
atttggaaatatataatgaagaagttcgtgaccttttgggcaaggatcagacacaaaggttagagcttctgcagaaagccgtcattacac

SEQ ID NO: 401060 - DNA, 82 bp, Homo sapiens
ccccggcccgcgctgcccgcactcctggtcctgctcggggctctgttcccagcctctacagctttacgttccagtccaataa

SEQ ID NO: 401061 - DNA, 100 bp, Homo sapiens
atgaagcccagacctgcagggttcgtggataataaactcaagcagcgagtcatccaggaggtgttccggcagcaccgggggccacagctcctggccctgg

SEQ ID NO: 401062 - DNA, 75 bp, Homo sapiens
gccaggcggagggggctttgctggtctttcttggactattccagagagccaccagctgaacaggccaaagccaga

SEQ ID NO: 401063 - DNA, 97 bp, Homo sapiens
ggaagactggtctaggtgctgctcctgaacttggtctctgagccatggcttcccatagacactcaggaaagaccacagcaagattctttcattcgtc

SEQ ID NO: 401064 - DNA, 80 bp, Homo sapiens
tcgtgggagaaattagagaagaatctttctgataggcttgaatatgatgctgtggctgagaaagctggtaaagtagaagc

SEQ ID NO: 401065 - DNA, 100 bp, Homo sapiens
cggggcgccataaacgcccccaatttcccagctgctaaaggaagaggaagatctgctgatttgggtcctactttaatgacaagacctggacaaccagcac

SEQ ID NO: 401066 - DNA, 82 bp, Homo sapiens
agggaccaggcggaggcgtcgcgggagcctttggggcaccacagagatgcggatacagatccacgggttttagaaaaacaag

SEQ ID NO: 401067 - DNA, 75 bp, Homo sapiens
cctcctgcagcccaccgtctacttgggtgtcgaagtgcagacagactacgtgcccctgctgaactcgctggcggc

SEQ ID NO: 401068 - DNA, 100 bp, Homo sapiens
gacatacataggaattatgttgattgtgtgcgatggttaggcgatttgatactttctaagttgatgaaacttctgagcaggaacaaaaacataaagaaac

SEQ ID NO: 401069 - DNA, 101 bp, Homo sapiens
aggccgtgcttctgcctaagaagaccgagagtcaccacaaggccaagggcaagtgatttgacagagacggagtttcgtcatgttggccaggcccatttgag

SEQ ID NO: 401070 - DNA, 75 bp, Homo sapiens
acagctctgtgaagaggggctacttccagaagctgcctccatcttctccctgaaggagatccagctccagaagga

SEQ ID NO: 401071 - DNA, 98 bp, Homo sapiens
atttgcacccataccccggatcacctgggagcacagaggctttcttctagtcaagatgagtgataaaccagacttgtcggaagtggagaagtttgaca

SEQ ID NO: 401072 - DNA, 75 bp, Homo sapiens
ataatgggcaatcaggggacaatgtagtaaaggaagctgcagtaaaggaagatgaagaagaagtttcagataagg

SEQ ID NO: 401073 - DNA, 100 bp, Homo sapiens
atctccaacagcgacctgagcggtggagccatcgaagcccccacccacaggctgacagaggcaccgttcaccagagggctcaacaccgggatctatgttt

SEQ ID NO: 401074 - DNA, 75 bp, Homo sapiens
cgaggcctgagcctctgcgtctagaggaattacggaggttgagctggtccggaatccctaagccagtgcgtccaa

SEQ ID NO: 401075 - DNA, 82 bp, Homo sapiens
aagggacaaggtgtcaacaatgtgccggatgaaacaggcgcctatttaatcgacagagaccccacctactttgggcctgtgc

SEQ ID NO: 401076 - DNA, 75 bp, Homo sapiens
cggatgagtacgataccgaagcgggctgtgtgccccttctccacccagaggatgaatctggttatagatggacaa

SEQ ID NO: 401077 - DNA, 98 bp, Homo sapiens
ccattcatgtgcctccaggttatatctcacagcatggcaccacactcctgatggttgctgcctacgctggccacatagactgtgtgagggaactggtt

SEQ ID NO: 401078 - DNA, 75 bp, Homo sapiens
attgacccttatttatccagaagattgatcatcatatgggttgtcccaccacatcaaccgggtccacctgtagtt

SEQ ID NO: 401079 - DNA, 99 bp, Homo sapiens
gggagcaggagcatcaggcggccggcgcatggcgtgtctggccaaatcttcccgacaggctgaagccgacgtagcttctctgaacagacgcatccagct

SEQ ID NO: 401080 - DNA, 75 bp, Homo sapiens
aagcttatgaaaaagttggatgtcagttaagggaacaggatctggacttggcacatttcttttaaaggtgcttga

SEQ ID NO: 401081 - DNA, 75 bp, Homo sapiens
cttcaacgctctgacgcgccgtcgccaccactgccgggcctgcggctatgcagattttttgaaaggactgcctgt

SEQ ID NO: 401082 - DNA, 50 bp, Homo sapiens
cttattggaaaaacatttcttacggagtgcatccgccccaacccttttcc

SEQ ID NO: 401083 - DNA, 82 bp, Homo sapiens
gtcgagcacataacggggttcgggtgtctcgtgtgtgaacatcacagtgtgactgtgaaatactatggaaaagcatctcatt

SEQ ID NO: 401084 - DNA, 100 bp, Homo sapiens
aaaaatgcgccacctgctgcatgtcctgaaagtagacttaggctgcacatcggaggaaaactcgggaatgaaaaagactcgagtagatgcaaaaaaaatt

SEQ ID NO: 401085 - DNA, 96 bp, Homo sapiens
gcaactgcagcatcacctccatctgtgagaagccacaggaagtctgtgtggctgtatggtactattaccaaaggggtattctggcaaaagtggaag

SEQ ID NO: 401086 - DNA, 75 bp, Homo sapiens
cggagccggcacggctcggcgatccccgtcgaggtcaagatcaagatccaggtctatttcacgaccaagaagcag

SEQ ID NO: 401087 - DNA, 100 bp, Homo sapiens
cattgacgaaggccaagtcactcacaactgggatgaagttgatcctgatcctaaccaggtcctgggaactccaacaagggagcaaatcagagaaatgaac

SEQ ID NO: 401088 - DNA, 87 bp, Homo sapiens
tgcccgcccgcccgtaaaatggtcccctcggctggacagctcgccctgttcgctctgggaaaatgtttataggaggccttagctggg

SEQ ID NO: 401089 - DNA, 100 bp, Homo sapiens
gttaagggagacaaagttgaaaacaaagtgctggcattgaagaaaaatttaggcctttttatttaagtcaattagaagaaagtgtagaagaggacgtgaa

SEQ ID NO: 401090 - DNA, 90 bp, Homo sapiens
caaaatctttgatgagattctagtctttcccagggaactccgatgaagtgttccaacaaaatgagcgagtgaaccaagaagaggatgaca

SEQ ID NO: 401091 - DNA, 83 bp, Homo sapiens
ctcaagtatctcagcgaccaggagcacaagcacttaagctttccttaaagtttcccatgtctcaatggactcctgaatataac

SEQ ID NO: 401092 - DNA, 100 bp, Homo sapiens
cacaccagtgacagttaagattcccaaggctcggaagaggaagagtaatgaaatggaggaggagtcgtaagaaagcagtgggagttgaagtcattgtcaa

SEQ ID NO: 401093 - DNA, 98 bp, Homo sapiens
gaggagaaggaaagtcgctcaagcagtggacagagcggagaaagcgacttcgggtgacatcagttgcaaggggatgaccgagcgcattcacagcatca

SEQ ID NO: 401094 - DNA, 100 bp, Homo sapiens
gaaggtgtccacggaggcacacttaacaagaaagcatatgaactcgctttatacctgaggaggtcctgagccagctggaggcctgtggcctcgtggagac

SEQ ID NO: 401095 - DNA, 87 bp, Homo sapiens
cagcagccggcccttgttaactacaacagaccatctggtgctggagaatctggtaaaagcaccattgtgaagcagatgaggatcctg

SEQ ID NO: 401096 - DNA, 100 bp, Homo sapiens
gaaatacatcagagagctggagcaagcaaatgacgacctggaaagagccaagcgtgtcttgggacaaggtgcgcattcctggtgtgctgcagcgattggg

SEQ ID NO: 401097 - DNA, 74 bp, Homo sapiens
aatttaaatagattagtaactggcatagacaactatgggcagacaaatttacatgtattggagaccagaccaga

SEQ ID NO: 401098 - DNA, 90 bp, Homo sapiens
gattcgcagtggtcgcttcttctccttggaccgtataatagacgctggccccaaaggaaactactctcgatttatgaatcacagctgcca

SEQ ID NO: 401099 - DNA, 112 bp, Homo sapiens
gggtgatctttggtctcttcggaaagactgttccaaaaacagtggataattttgtggccttagctacaggagaggtgcttgtgaatgacttcttcttggtggcttgtcttga

SEQ ID NO: 401100 - DNA, 98 bp, Homo sapiens
cgaggaggcgaagcgcggcgggcaggcgctacgaggaaggagatggataaagcagatgtttattggggcattccttatcccagctatggtgtgtggca

SEQ ID NO: 401101 - DNA, 100 bp, Homo sapiens
ggaagatcatgttcgaatatgggaagttttaaagacagaggaggaggactggaatgaaattgaccccattaaaaagaaagaccttcatcacagcaatgga

SEQ ID NO: 401102 - DNA, 83 bp, Homo sapiens
aggacagtcgcgaggttcgagtgttgcagagcctgcggggcaagatctaacatccagtcatggataaaaatgagctggttcag

SEQ ID NO: 401103 - DNA, 100 bp, Homo sapiens
gctgcgttcacaggtgtttctgcggcaggttgagaacttgttgcttagtaaccaagggaccattaagctgtgtgactttggcagtgccacgaccatctcg

SEQ ID NO: 401104 - DNA, 50 bp, Homo sapiens
aacacatccacagatgcaacaagatcctgctcacactaaaatatgaacca

SEQ ID NO: 401105 - DNA, 127 bp, Homo sapiens
gaagacccggaaacttaggggccacgtgagccacggccacggccgcataggattaaactgcaaatatctcatgaagctgctgcctgtatcactggtctccgggcagccatggaggctttggttgttg

SEQ ID NO: 401106 - DNA, 97 bp, Homo sapiens
caacaagtatgggtctccgtacaccaaaaactcaggcttcgccacctgcgtgcaaacatgatgccttcttctgtagagtgggcgctttgcagaatac

SEQ ID NO: 401107 - DNA, 82 bp, Homo sapiens
cagaggttgtctgaaggccgaggccaagatggcggtgctgtcagcttccccgggcgctgcctggacaggcctgcctgcgtgc

SEQ ID NO: 401108 - DNA, 90 bp, Homo sapiens
gagctagagggtgaagctggcggagcaggaggatgggcgctcaccatctgctacctggatatgctgatgaccagtgaggagcgccggaag

SEQ ID NO: 401109 - DNA, 95 bp, Homo sapiens
atctctctcatctcgctcggctgcgggaaatcgggctgaagcgactgagtccgcgatggagcacatacccccggcctcatgagtacctgtcccca

SEQ ID NO: 401110 - DNA, 97 bp, Homo sapiens
ctttacatgatctcttgatgtcacaagtaatgtttaaatcaggagatgagtatgatgtatgtgccatttgtttggatgagtatgaagatggagacaa

SEQ ID NO: 401111 - DNA, 74 bp, Homo sapiens
caagcgcagggggacggggaccagcagctgtcgccgccgctctcagtgatggaatggggagaagatattaaagc

SEQ ID NO: 401112 - DNA, 100 bp, Homo sapiens
tgaggaggggagtaaattgaaaatattggggccatttagtaacttctttgcaagctctgcttatgataatgtcaacaaagttcgagtagctatcaagaaa

SEQ ID NO: 401113 - DNA, 82 bp, Homo sapiens
accctatgcaacgggcagctgggctgcagtgaccccgctttcctcacgcccagggcaactccaacaacattgccaccgtgga

SEQ ID NO: 401114 - DNA, 100 bp, Homo sapiens
gtccgccaggcgtacggtgccaagggattcagcctggcggacatcccctaccaggagatcgcaggatcttacacatttgttccatggcttctcagcttta

SEQ ID NO: 401115 - DNA, 75 bp, Homo sapiens
tctcggtgctgcagacggcgagacctcctgcacaggaatcaagtactggaaatgtttgatcatgcttatggtaac

SEQ ID NO: 401116 - DNA, 89 bp, Homo sapiens
gactctttggactgctccagatttcttgtggaggccccccatgactgggatttagaggagccagagactgctgctactttgaaacgtac

SEQ ID NO: 401117 - DNA, 100 bp, Homo sapiens
gaagatcaaagatgccaagaaaccctggatctgaaacttgcccacccttcgggatattgcaggacgctgcatcatgagcgacagtaaatgtgacagtcag

SEQ ID NO: 401118 - DNA, 100 bp, Homo sapiens
ttctgcacttcaagaacacaagttgaatcactcagacctgaaaaacagtctgaaaccagtatccatcaatacttggttcatgggacggctccagacattg

SEQ ID NO: 401119 - DNA, 96 bp, Homo sapiens
tagacgtgcggacggcccaccaccccagcccgccaactagtcagcctgcgcctggcgcctcccctctccagggtaccgtgagggttttctctggaa

SEQ ID NO: 401120 - DNA, 100 bp, Homo sapiens
cgacaagcacatcaccactctgcagatatggaatatatgaacgctgtcgagaattggtggaagcaggttatgatgtacggcaaccggacaaagaaaatgt

SEQ ID NO: 401121 - DNA, 136 bp, Homo sapiens
aaatagcagaagaataccatgaggtcaaaaaggaaatcaccctgcttgagcaaaggaagacccagatgatgtggtaccagttggccaaagaagagcctggtgttggtgcatgtgctttggactagcatttatgctt

SEQ ID NO: 401122 - DNA, 100 bp, Homo sapiens
ggagttgtgaaagcttatacaactagagttggtattggtgcctttcctacagagcaagacaatggtgcgcctggctgggatgaagatctctcggcccccc

SEQ ID NO: 401123 - DNA, 100 bp, Homo sapiens
aatgtagacaatggttagagaagaattttccaaatgaatttgcaaaacttactgtaggagctggtacatacactacctcttctttgagcacaaaatctac

SEQ ID NO: 401124 - DNA, 80 bp, Homo sapiens
aaattgtatacactggaacagaatcaacccagaacggatagctccctcctggaaaagtgtgtcccggcatggatatccgg

SEQ ID NO: 401125 - DNA, 75 bp, Homo sapiens
cgcggcgggaagcggcggcggcggctccagcgtcctaagaggaatcccgttctgcttccagaagtggaagtgctc

SEQ ID NO: 401126 - DNA, 98 bp, Homo sapiens
gctaatccacccaaaatgtgcctggtgctccaaagaggtgctggaaacatgcatgaagagctgcggcaagcggttccacgacgaagtgggcaagttcc

SEQ ID NO: 401127 - DNA, 100 bp, Homo sapiens
tccgggccgtgaacgaaagcagtgacggaggagcttgtaccaccggatttgcagatttacagaatggctgcacattaatggaaagagaagcataaaccta

SEQ ID NO: 401128 - DNA, 100 bp, Homo sapiens
agagcgcgaatatcgtcatcgttagaagacccggagtggcgttggatggaagcgagtcctgcgttcactctgtcattcacggacccgagtgccacttcta

SEQ ID NO: 401129 - DNA, 100 bp, Homo sapiens
tgaggggtttcttgcaaaacgcttctccggctgcaccctgaccgatgggaccctgtgtcccagaagcttttgttgacaattccagtttccgaacaaaaca

SEQ ID NO: 401130 - DNA, 100 bp, Homo sapiens
ggtggaggtctggaaccagctgctaagccagaagcgcgtggccaattcctgtccccccagcagcatggcatcgtgtgctgaaccctctgagccctctgcc

SEQ ID NO: 401131 - DNA, 75 bp, Homo sapiens
gaaaatttcgatattgaagtgtcaaaatccatagatggaaaagatgctctccactgtggtttgaatccacggggt

SEQ ID NO: 401132 - DNA, 80 bp, Homo sapiens
gagcgcttccgcaccatcacctccacgttacgggcaggacttgagtggcttcggacagggcttctcagaccccagccagc

SEQ ID NO: 401133 - DNA, 75 bp, Homo sapiens
cagaacccaaattggcgtttgtcatcagaatcagaggtgacactggtacagtagctccagaaaaatgcttatttg

SEQ ID NO: 401134 - DNA, 100 bp, Homo sapiens
ctctggtggaatgagcttatttttatccaaagcagtacgaggatgtcgtccaggaaagattgtgcagatgactgaagcagaagttcgaggcttatgtatc

SEQ ID NO: 401135 - DNA, 100 bp, Homo sapiens
taattttagggtcctttatatagaagggagagtaggatggagttctggtggatgaatttggattgccacagatccctgcttcatagatttgcatcattca

SEQ ID NO: 401136 - DNA, 98 bp, Homo sapiens
accgagaccgtgaccgagagcgtgaccgagagcgcgaatatcgtcatcgttagaagtggcctggtttgctttcgaccctggctcggcgcactcggaca

SEQ ID NO: 401137 - DNA, 100 bp, Homo sapiens
ctgacccacgaggcgggaatcactgacattgtggtgttacagcaacacagtcactcctggcggcaaaccaaacaaaaccagagtcatctggggaaaagta

SEQ ID NO: 401138 - DNA, 74 bp, Homo sapiens
ctgggatcctgttattgaactcataagggacggggttgctaccaaatccatcagaccacgctactgcaagatcc

SEQ ID NO: 401139 - DNA, 83 bp, Homo sapiens
cgagaagctccagatggcgtcttccgtgggcaacgtggccgacagcacagcatttgttcagtgctcagcacaggagtttgacc

SEQ ID NO: 401140 - DNA, 76 bp, Homo sapiens
atgaactgtgttacagagatggagaagaatatgaatggaaagaaactgctagatggaattactctgatcaccaaag

SEQ ID NO: 401141 - DNA, 75 bp, Homo sapiens
gccggctcccctctcaggacaacccagatgtgcaacaaagtgcgatgttttgggaggtcatcagcgatgagcatg

SEQ ID NO: 401142 - DNA, 100 bp, Homo sapiens
aaaaaagctgtcgaagaagctgaaagactctctgaaagccttaaattaagatgtccctggtagatttgggaaagaagcttttagaagcggcacgagcagg

SEQ ID NO: 401143 - DNA, 98 bp, Homo sapiens
gcagtcatcagtgttttaatgcatcagtttgatgatgccgtcagtatcactgtgacctgcttttttaaaggctgcagaaaacttcactcttttggtta

SEQ ID NO: 401144 - DNA, 75 bp, Homo sapiens
tgaaggagcgtcctgacctaaaagcaatgtggctgggataccctgggacgagtggtgcgcttttcatggattata

SEQ ID NO: 401145 - DNA, 98 bp, Homo sapiens
tatgacactgactccctcaaaatcaaggttattctcgttcaagttaatccaggtgagactttcacaataagagcagaggatggaacacttcagtgcat

SEQ ID NO: 401146 - DNA, 83 bp, Homo sapiens
agaagggcaaggattctctgtacgcccagggtcaaaatgcagatcttcgtgaaaacccttaccggcaagaccatcacccttga

SEQ ID NO: 401147 - DNA, 75 bp, Homo sapiens
taacatattactggcatcttcaatctgtacataccgagcatcaaatattaaggcacccggagaacagacagtacc

SEQ ID NO: 401148 - DNA, 75 bp, Homo sapiens
attactgaaaaaagacatgggactttggtgtgggatactgaggtgaagccagatgcgtctgttactagagtggag

SEQ ID NO: 401149 - DNA, 101 bp, Homo sapiens
atgaacggccctgcggggctggccggacggctgcaagaacatgctgagcccaaagatcaggcaggccaggagggagtgtgaacatggctacgcctcttcat

SEQ ID NO: 401150 - DNA, 100 bp, Homo sapiens
agccgcaggaaaaagaaggtgtatgttgggggtttagagagcagattcatcaataagctgcagccaggctccgtgaagaagatcaatgagtcaacccaaa

SEQ ID NO: 401151 - DNA, 75 bp, Homo sapiens
gtggccgaagccatgctgacttgccggcataagttgtaaatatggacagctgggccacgaggacaccaccagctt

SEQ ID NO: 401152 - DNA, 100 bp, Homo sapiens
ctgcctcccccaccaccgcctcatctgtatcctaatacacagcttggtgctaacagtggtttgcacatcatcatctttgatgaaattgatgccatctgca

SEQ ID NO: 401153 - DNA, 83 bp, Homo sapiens
gatggatggggcctgaagaaagctgctgatggggctgctgagggaatccctgtgctgatcgtggggcatcatatcctgtatgg

SEQ ID NO: 401154 - DNA, 83 bp, Homo sapiens
tcgtcgacatgagtgatgtggaggaaaacaacttcgagggcagaggaacggcaggagcagctgatgggatatcggaagagagg

SEQ ID NO: 401155 - DNA, 100 bp, Homo sapiens
cggaggttcaaagtgtccgacgaggtgaccctggcaaagatgagagtgcacatttcgtcctgcctgaaggtccaggagcagatggccaactgccccaagt

SEQ ID NO: 401156 - DNA, 90 bp, Homo sapiens
gggagcggggccttccacaccccctccgtgggtgtgtgcaagccagggctgagcaggaagaagaattcattagtaacactttattcaaga

SEQ ID NO: 401157 - DNA, 100 bp, Homo sapiens
ggtctcagctgacaaaaacgggatcgctttggaaacatctttaccctgttcattgggccagagctctctttaagaactgtgacctgatgtggaagcagag

SEQ ID NO: 401158 - DNA, 100 bp, Homo sapiens
tcgcgtctctctgctgcggcgcggggaccgctgtgctctcgcactccctcaacatcctgggccagaaggtgtcgatgcactacagtgaccccaagcccaa

SEQ ID NO: 401159 - DNA, 98 bp, Homo sapiens
gcagccacaccggcagattgcagcggagctcgagaagcagaaaggcgtcgtgcggcccagcatgtcccagtgctctagcctcaaaaaggagtcgggca

SEQ ID NO: 401160 - DNA, 100 bp, Homo sapiens
ctttcctctaaagtcaaactggtacatcaggaacgtctctatcaagaatacaatttcagcaaggctgagggccatctgaaacagatggagaagatatata

SEQ ID NO: 401161 - DNA, 83 bp, Homo sapiens
aggcaggctgcggcagacggcgacagtggcggcggcgccatggcagggcttgcagggccaattcctgtccccccagcagcatg

SEQ ID NO: 401162 - DNA, 89 bp, Homo sapiens
tcagctgacaacagctgtcgtctctgggactgtgaaacaggggatgttggaaattactattatggacaaggccacccaatgaagcctca

SEQ ID NO: 401163 - DNA, 75 bp, Homo sapiens
cataaagaacagcgtaactccagacatgcaaagccaagatgagcctttgagaagcagaaaagtgtttgtggggcg

SEQ ID NO: 401164 - DNA, 95 bp, Homo sapiens
agtcctccagtgtttggatattcaggcagctgacaccctagctgtacgccagaagcggcggatttacgacattaccaatgttttggaaggtatcg

SEQ ID NO: 401165 - DNA, 100 bp, Homo sapiens
ctgagaatgacccgttctggaatcagcttctctcattttctttccctgcaccaactagcaggttgcttatcaagtgtcccacaaatgaaaaaaatttcta

SEQ ID NO: 401166 - DNA, 100 bp, Homo sapiens
cagcagcaaaggatgagcggaaccttggaaaagattgaccgactcatcagtcacggggccgacatcctgaagcctgtaatgctcaggcagggagaaaagg

SEQ ID NO: 401167 - DNA, 75 bp, Homo sapiens
ctggtgcgcatcctgctgctggctgcccttgtctcctttgtgggagatgccatcccagcagtggaggtgtttgaa

SEQ ID NO: 401168 - DNA, 115 bp, Homo sapiens
gtttgagagtgggaacatgacgcaggtgcaggtgtctcttctcgccctggcggggaagacaatgcagatcttcgtgaagactctgactggtaagaccatcaccctcgaggttgag

SEQ ID NO: 401169 - DNA, 87 bp, Homo sapiens
ccggtcgccggtcgcggcggagcctgggcgctgaggtgctatggtctttagaattgggtcactggatttctgaggagccgttcgaac

SEQ ID NO: 401170 - DNA, 75 bp, Homo sapiens
aagaaacccagcttgatatgttggagaagacagactgctgctttggacctgttggtaatgatggcctgagctaaa

SEQ ID NO: 401171 - DNA, 89 bp, Homo sapiens
acgagcagtctatcatgacttacgtggcacagtttctagaacgttttccggagttggaagccgatctgaagaagctgaagaaaaacagg

SEQ ID NO: 401172 - DNA, 100 bp, Homo sapiens
gcccccgaaggccctatcaggacatggagtatgaaagacgactgcagccgaaccctggtccctcctccacaatgtggcttctcctcactctctccttcct

SEQ ID NO: 401173 - DNA, 130 bp, Homo sapiens
agaaaatggttttctaccatttcgactggatcatatcagaaagatggcatatcagatatgcaagtctgtgaattgttcggctttccagtttggcagcagcactacaaatttcaacttcacaaacaacagt

SEQ ID NO: 401174 - DNA, 98 bp, Homo sapiens
cgttgacaaggcactgctttttcatgacgttttcggctttgtgagaaaccttaccatcaaacacgatggccagcaacgttaccaacaagacagatcct

SEQ ID NO: 401175 - DNA, 100 bp, Homo sapiens
gggtgttttgctaccgtgaccgtttagggaaaccatctgccgtgtgactggtgggatgaaggtaaaggcagaccgagatgaatcctcaccatatgctgct

SEQ ID NO: 401176 - DNA, 75 bp, Homo sapiens
tatcctcggtgctgtggtgcagagctagttcctctccagctcagccgcgtaggtcacagggattatggacccaga

SEQ ID NO: 401177 - DNA, 83 bp, Homo sapiens
ggccgggtgttgcgcctggcctacagcgaggctgagtgttgccagggacggcagtatctctttgtgtgaccctggcggcttat

SEQ ID NO: 401178 - DNA, 90 bp, Homo sapiens
tttataaactgcctggccgaatcagccttttcacgctcaagacggccaatgggaacgtggaggccaaagtggtgtgcttctaccggaggc

SEQ ID NO: 401179 - DNA, 82 bp, Homo sapiens
caggcctggctcgcgcctctcccaggacccgcctggctgcgagatatgtgaaatgacaatggatgctctgttggctcgattg

SEQ ID NO: 401180 - DNA, 50 bp, Homo sapiens
gggaaacccggagaccaaatccttgcccaggagttaaagtcactgtttga

SEQ ID NO: 401181 - DNA, 100 bp, Homo sapiens
cagcgccagcagctggactatggcatctatgttatcaaccagggaatatccgatgtagcctggtcgtcagattctaaccttcttgtttctgcctcagatg

SEQ ID NO: 401182 - DNA, 90 bp, Homo sapiens
ctctatcggactctcccatcactctgcatggttgaccgttctggaagggaaggaagccatgctgaagcaccgggactacgagacggccac

SEQ ID NO: 401183 - DNA, 96 bp, Homo sapiens
gactgacaccccacatcgacaatttggaggtggcaaacagcttcgcagtcactaatgcttcacgctccctgaaatttggcaggcagactggaggtg

SEQ ID NO: 401184 - DNA, 82 bp, Homo sapiens
ctcgtccaagtgatcgggactctggagctggtgggagagatcgaggtggccgtttgtatgcaggggcaaaaggtgctcttgg

SEQ ID NO: 401185 - DNA, 75 bp, Homo sapiens
tgaaagatatgttagaagtgaaggaaagaaaaatcaatgttcttcagaaaaagaattaccctttatgactaccaa

SEQ ID NO: 401186 - DNA, 100 bp, Homo sapiens
ccgaattcagaaggatatcgacgtcgtgatccagaagtccagagctgaggactgcctgtttgcaggctaaggcagctggataagcacagccaggccacag

SEQ ID NO: 401187 - DNA, 82 bp, Homo sapiens
cacgcaccgactatgtcgcctgccaccgagccgggcccacctccccaccaaggaaggaggagataagcaaggacctcagagc

SEQ ID NO: 401188 - DNA, 90 bp, Homo sapiens
ggcaagaggaaatccgggaaggacttcgtgaccgaggcgctgcagagcaggatggatagaatgacagaagatgctcttcgcttgaatctg

SEQ ID NO: 401189 - DNA, 90 bp, Homo sapiens
ctgcgaaggccgggacccggttccccggcccacagtgggggtgtgcaaacccgagagaactgggctttatcctgtggataaacgcagagt

SEQ ID NO: 401190 - DNA, 100 bp, Homo sapiens
cctccggaagagcaacctgaaggccccgtccagatagcagaagactgctgcctgacgattgtgggcagcctggtaacatctggctccaagctaggcctgg

SEQ ID NO: 401191 - DNA, 75 bp, Homo sapiens
cttgcatgatggaaacaccatggctgcggcggcccagctctctctgacacagttggttgaatctggcgatgtgga

SEQ ID NO: 401192 - DNA, 98 bp, Homo sapiens
caggagacatcggtgtttccagagtccagacccaccacaagcagtatggtatgaccccatctactatccaacctcatggcagttggatccaacagaag

SEQ ID NO: 401193 - DNA, 75 bp, Homo sapiens
ctgcaaccacccatatatgtttcagcacattgaggcaacaatttgggatgaatcccaaagacattatgctgaatg

SEQ ID NO: 401194 - DNA, 90 bp, Homo sapiens
ctggtgcctgtgcaagttgttgaggttaatcaaactgtggcagcattaaaaaccaataatgtgaatgtcagttcccgggtacagtcaact

SEQ ID NO: 401195 - DNA, 96 bp, Homo sapiens
cggcgcctgaggagccgcccccggcgccgcggcccagtgtgcagagaagaaaccagaagccagtggcccagaggctgagccctgcccagagctcca

SEQ ID NO: 401196 - DNA, 83 bp, Homo sapiens
cagaacatggaaggagacttctcggtgtgcaggaactggttcgatacaagaggctgttttcctagcgtggcttgctgcctttg

SEQ ID NO: 401197 - DNA, 88 bp, Homo sapiens
agatagtcactattttgcaagatcgacttaatcaggttttgatacttatagaggactcccttcaatttccaatggaaattatagccag

SEQ ID NO: 401198 - DNA, 100 bp, Homo sapiens
agcagcttcctgtggatatcttgatattgcagacaggttcaggagaagtggcacctggtggaggacctgtcgcgactgctgccggagccaggcccgagcg

SEQ ID NO: 401199 - DNA, 100 bp, Homo sapiens
gcggcgggcggcagcatgtcggtggcggggctgaagaagcagttctacaaggcgagccaggaagaggtacgtccacaggacactgtatcggtaattggtg

SEQ ID NO: 401200 - DNA, 101 bp, Homo sapiens
cccgggccccccagcatgaagaccccggcggacacaggccgcgtgcccacgtcgttctccactccctactcggcggccaagtttgcgctggacggcttctt

SEQ ID NO: 401201 - DNA, 90 bp, Homo sapiens
cgtgaccaagtttaaaaaggagaaaaacaacaagaacaaagaagctcacagtagcctgggagccccggattcttctgatgtagagcgact

SEQ ID NO: 401202 - DNA, 100 bp, Homo sapiens
gcccactccgcagaggccagggctgctgccttccagcaccttctgctcctcgtgggcatccacctcctcaaggttatcaatagtctggctgtctatcgtc

SEQ ID NO: 401203 - DNA, 74 bp, Homo sapiens
ctcgcttgcagttcagcgaccacggaactgcaagcacatgttgaccagataactgaaatggcagcagtaatgag

SEQ ID NO: 401204 - DNA, 96 bp, Homo sapiens
ggacgggactgccaagagacatgttagaaggacaagtgcctgattattacaaaataattaaaaatccaatggatttgtcaaccatcaagaaaagac

SEQ ID NO: 401205 - DNA, 73 bp, Homo sapiens
gagacctccactggctgtttgtttgctggatcatcgcttggtaaacgaggatgccccttacctagacctggcc

SEQ ID NO: 401206 - DNA, 96 bp, Homo sapiens
gttgaggaagaagccacccgagcggactcccgaggtataaagatggctgtgaccacatcggggagcaccgagatgatgaaagagaactggcccctg

SEQ ID NO: 401207 - DNA, 98 bp, Homo sapiens
tggtggccactggcggccgaggtagaggcagtggcgcttgagttggtcgggggcagcggcagagaaagatgctggtttcgagttttggagatccttgt

SEQ ID NO: 401208 - DNA, 104 bp, Homo sapiens
tgccgtccgccttctctgtcagctctttccccgtcagcatcccagccgtgctcacgatgatatcatcaagttgaatcgaaaggaagggaagaagcagaattttc

SEQ ID NO: 401209 - DNA, 74 bp, Homo sapiens
tcttcaggaatggagacacggcttcccccaaggaatatacagtgcttcaccgatatagacacattttgggattg

SEQ ID NO: 401210 - DNA, 87 bp, Homo sapiens
agaatggtctttgcagcagcaaagggaatggaagaacgcccgtgctgaacaaaaatgcgcagatgatgctggagggtcttgaaatct

SEQ ID NO: 401211 - DNA, 75 bp, Homo sapiens
ctcatggccaatagtacatggggctaccccttccacgacggtgtttcctgaggttataggcgggtgtttgaggag

SEQ ID NO: 401212 - DNA, 102 bp, Homo sapiens
tagtcgcgggagccacgcagaggacgccggaacaccctggaagccgagaaatgctcatgatggagcagtccaagaagtcctccctcatggtggcccgcagta

SEQ ID NO: 401213 - DNA, 100 bp, Homo sapiens
gggaggaactgtttgtagccctcgtccagacgccccaaacaaacagtatagccaggctggagaaaagaagctgccaccatggttgcactttcactgaaga

SEQ ID NO: 401214 - DNA, 100 bp, Homo sapiens
gacctgtgaaggctgcaaaggcttcttcagtggcgtagatgtttactatgcagttaccttcaatggtgaggccatcagcaataccacctgggacctcatt

SEQ ID NO: 401215 - DNA, 83 bp, Homo sapiens
attcatatggaagaggacagcagaggatcctgatggtgaacatgccaggagagcaatgcaaaaggtgatggctacgactggtg

SEQ ID NO: 401216 - DNA, 74 bp, Homo sapiens
gggggctacggaggtggttatgacaactatggaggaggtatgggaggacatggctatggtggagctggtgatgc

SEQ ID NO: 401217 - DNA, 75 bp, Homo sapiens
cttgggtcttccggtaggagctgtaatcaattgtgctgacaacacagatgacacaattggtactgcctggcatgg

SEQ ID NO: 401218 - DNA, 98 bp, Homo sapiens
ggtaggaaaaatccgcagagaaattcagaacctcaagcttttcaggcatcctcatataattaaactgtgcagcttcaagcttaggaccacccaccatg

SEQ ID NO: 401219 - DNA, 82 bp, Homo sapiens
tggtgataatgaaaagatggctgccctggaggccaaaatctgtcatcaaattgaggttcaaaccttgtactactcagctgat

SEQ ID NO: 401220 - DNA, 78 bp, Homo sapiens
ccagcctctcgaatgggcacacctgtgtagacttaattcagtgcacaaatgagatgaatgtgaacatcccacagttgg

SEQ ID NO: 401221 - DNA, 100 bp, Homo sapiens
ctagccgggagttacaccgccaccgccagacatcgctattgcggttccgaggcagtgggaagagatgcggcccctggacatcgtcgagctggcggaaccg

SEQ ID NO: 401222 - DNA, 88 bp, Homo sapiens
gggaaatacctctcatcaaattactcagagaacagccaccccatcttttctctcaactgggagtgtgtggtcagtttcctgtggaaca

SEQ ID NO: 401223 - DNA, 100 bp, Homo sapiens
tctccagcctcttgcgaccacagccagagcctcagcaggagcctgttctcatcaccatggcaacaggacatgatccacatcgcggacaccaaggtcgcca

SEQ ID NO: 401224 - DNA, 75 bp, Homo sapiens
ctggaggccgcccaagctggctacctcatgtccttcttcgggctcctccagatgccacctggtttccatcgggcc

SEQ ID NO: 401225 - DNA, 75 bp, Homo sapiens
ccatcaggaccccagatgtctgacagccctgtgtgacaccaagataagtaaccacgagggccgggaggaggatca

SEQ ID NO: 401226 - DNA, 97 bp, Homo sapiens
cacactggacatggtcttcctcgaccactggaaggaccggtacctgccggacacgcttctcttggagcccgatctgctcaacttcaagaagggatgg

SEQ ID NO: 401227 - DNA, 83 bp, Homo sapiens
taaggatgcagccagagacatgaatggaaagatttgtgccaatgtaatggaatattgccagtcactcatgttacagagttccc

SEQ ID NO: 401228 - DNA, 74 bp, Homo sapiens
ctgaggccggaaggagctagacggcggtcggaatgttggctcaattaagaaacatcagggagataaattcaacc

SEQ ID NO: 401229 - DNA, 100 bp, Homo sapiens
tttaaaacaaatagaaggaactgggatctctatgtcggcatgtagagaaatagcaactttgaagattatccaatgagaattttatatgaccttcattcag

SEQ ID NO: 401230 - DNA, 83 bp, Homo sapiens
cccgcggccgctcaaagccgggagatcgactgtttgagcccggaagcgcagaagctggctctgaatggctttgtattagttgt

SEQ ID NO: 401231 - DNA, 75 bp, Homo sapiens
agttgaacatgaagaatactggaaagttgctatgttttggtttttctattgggaaagctactgatcggatggatg

SEQ ID NO: 401232 - DNA, 90 bp, Homo sapiens
ccaagccattttatggtggcaaactgcatcgaattgtgagaagctggagaataattttgatgacatcaagcacacgactcttggtgagcg

SEQ ID NO: 401233 - DNA, 83 bp, Homo sapiens
cttcgatgtgcgagactttggaaagattattttcgaaataccagtatttcgactccagggggatgttcatttctatagtattt

SEQ ID NO: 401234 - DNA, 75 bp, Homo sapiens
cgagccttggcggcggacgtgcaggcctccggtgtggctgtctctgatggtgtcatcaaggtgttcaacgacatg

SEQ ID NO: 401235 - DNA, 58 bp, Homo sapiens
agattgcgagggagcgatgcggtgcagcgcgggagtaccctgacttctaccggaagct

SEQ ID NO: 401236 - DNA, 100 bp, Homo sapiens
tgcggcagtaccgcctccttcccagccgcgcggcttcctccagacctctcggcgcgggctgccctgaggatctgtgtttggtgaaaaggagccaaattca

SEQ ID NO: 401237 - DNA, 100 bp, Homo sapiens
aagctgtgttcatggccgagaccaagggggtcgccctcaaccagctgtcactgcaggagctgcagaccatcaggtgaaaggtgtagcagtcactcggcct

SEQ ID NO: 401238 - DNA, 75 bp, Homo sapiens
gggccctaaggagccccagcccagccccacagaccagcccagtttcagggaaaagagtgcaaattcggaaagcac

SEQ ID NO: 401239 - DNA, 82 bp, Homo sapiens
ggcagctgaggagactccggcgctcgccatggccgacgaaaagcccaagggtggcccagttgaaatccttcccttcctctac

SEQ ID NO: 401240 - DNA, 80 bp, Homo sapiens
ggacatcaagattaaaagagcgaataaagtttatcacgccgggtccaagtggtaagaagttcagaagcaagcctcagttg

SEQ ID NO: 401241 - DNA, 100 bp, Homo sapiens
tgtgacattgcaagggaaaaagtaaataaagctgctgtttttgaagagatgaccgcacctcgagcaggagtggggatgccacgtctgcccccagcgcccg

SEQ ID NO: 401242 - DNA, 95 bp, Homo sapiens
ggacttctacaaggaatttttaagtaaaaattttcagaagcacatgtattataacaggtctcccaccatccgggacatggcgatccgctgcattg

SEQ ID NO: 401243 - DNA, 50 bp, Homo sapiens
gaaccgggggagcgaggcacggtatgaagctaaaatgcagcggctaagaa

SEQ ID NO: 401244 - DNA, 135 bp, Homo sapiens
aaaagaaataacctgtcgaagttatctgatgacaaattacgaaagtgctcccccatccccacagtataaaaagattgtaaatcctcacttattgaaagatcttaccgagcggggcctatggcatgaagagatgaa

SEQ ID NO: 401245 - DNA, 97 bp, Homo sapiens
agtcccgtgacggcctcatcaccacggtctacttctatgaattgcaggagaacctggagaagctccttcaagacgatgctgatgtaccagcaccaga

SEQ ID NO: 401246 - DNA, 99 bp, Homo sapiens
ctgcgccgcggtgcctcggtcaacagccgcaaccactacggctggagcgcgctcatgcaggcggccagtgtcagctgctgctggaagtggcctggcctc

SEQ ID NO: 401247 - DNA, 100 bp, Homo sapiens
atgaccgctactcaggaggaaattacagagacaattatgacaactgaaatgagacatgcacataatataggtgaaaggtgtagcagtcactcggcctaca

SEQ ID NO: 401248 - DNA, 124 bp, Homo sapiens
gatgcctggaatagaagagaatgacctagcaaaagttgatgatcttccccctgatggaattgtcagccacttgaagaagcaggcaggaccagcttcagtgcctctcaggactgaggaagaattt

SEQ ID NO: 401249 - DNA, 100 bp, Homo sapiens
gaacccaccagaaggaaccaattccggacacataacaagcagcagtgaggacaccaaaggtacctggagtacaagagggtccctaacagcagaccacctg

SEQ ID NO: 401250 - DNA, 75 bp, Homo sapiens
gtggttttctctgaatcatttttgacttctcagatcttagttaaagaaaagggttggatggcaagcatgtggtgt

SEQ ID NO: 401251 - DNA, 75 bp, Homo sapiens
ggacactatcctggccgagggccttcacttcagggacgtccagatcggtgacatcgtcacagtgggcgagtgccg

SEQ ID NO: 401252 - DNA, 82 bp, Homo sapiens
agaaggctcactcaaggatcagttggctttagcaattgaccattcctcaagaattttgtatccaaggcccaaaagtttgtta

SEQ ID NO: 401253 - DNA, 101 bp, Homo sapiens
cgaagctggccaaagcctgcccagacggctcacctgtgcgggatggaacaaaagcgcaatgtccctgctcttctctcgatgcaactctatcgtcacagtca

SEQ ID NO: 401254 - DNA, 90 bp, Homo sapiens
tagaagaataagcagtgcctgtgtggctcgggttatgtatgattttgctgctgaacctggaaataatgaactgacggttaatgaaggaga

SEQ ID NO: 401255 - DNA, 75 bp, Homo sapiens
gtggcaattaatggaaatggacccaccaagctgcccgctcactccagtagtcagcaagtccagcgcgggggctat

SEQ ID NO: 401256 - DNA, 74 bp, Homo sapiens
cgacagtggggacacagccattggtacatcatgctcagatattgcggagggctgattcaccccaagagtggccg

SEQ ID NO: 401257 - DNA, 101 bp, Homo sapiens
agtagcgcagaggcggcggtggcgagaggtgcggcgaaggaggcagaggcacttatgcttgtcagtttgaacgccatgaccctgtggatgggagaattact

SEQ ID NO: 401258 - DNA, 75 bp, Homo sapiens
cacccacaattccagcttcaaatacaggtgttggggatgtcctttgcactgaccctgaactgccagattgacaaa

SEQ ID NO: 401259 - DNA, 99 bp, Homo sapiens
cctgacctgcctgtcgtcgtggtggccaacaagcagatcactggggtgatcctgctggctgttggagtctggggcaaacttactctgggcacctatatc

SEQ ID NO: 401260 - DNA, 74 bp, Homo sapiens
tgcaccaaccctgtggctacattactcgaatggcaggatgccctgcctgcctgctccgcttcagcggactctcg

SEQ ID NO: 401261 - DNA, 100 bp, Homo sapiens
ccggcgaggatcaaaatcttcgaaggagggttattcagcttctcaaggctggaaaagcgaaggaagtttcctacaatgcactagcctcacacataatctc

SEQ ID NO: 401262 - DNA, 100 bp, Homo sapiens
tgtcttccaccaactccagcaggttcccaccttcacccctggcttctaagcccacagctcttggtgctggacaggcatctttgtttgggaacaaccaacc

SEQ ID NO: 401263 - DNA, 75 bp, Homo sapiens
atggacagatggttttgcatttcagaatcttgtgaagatttggtgctatggagaaatttttggtagaatataaga

SEQ ID NO: 401264 - DNA, 100 bp, Homo sapiens
gccgccgccgccatgaacaactcgggcgccgacgagatcggatcgcaccccctccctccctggcggagcccctgaaggagctgttcaggcagcaggaggc

SEQ ID NO: 401265 - DNA, 100 bp, Homo sapiens
cggccgtggaagcggccaccgactactgtcagcagctgtgccagacttcctttaataagtgttgcgctggttcaaggttgggcattgggtggaggagcag

SEQ ID NO: 401266 - DNA, 100 bp, Homo sapiens
gtgaagcggccaatggcacggaggcctgcgtcgtccagcctgcatgccgtgcggactgcacccaccagcaaggtgatcaagacccgctaccgcattgtca

SEQ ID NO: 401267 - DNA, 88 bp, Homo sapiens
agcttcggagaagcagtggtgggttccatgtgatggtggagtaggaggcaggtctccgcgattcaagtgctttttccactgtttcccc

SEQ ID NO: 401268 - DNA, 82 bp, Homo sapiens
atggaggcttcattctggacgaggctggactttatggacagcagcctgctaaccaagtcatcattcgagagcgctatcgaga

SEQ ID NO: 401269 - DNA, 98 bp, Homo sapiens
caggcccgtatcttccagcccacaccacctggggcacgaaagggccgggtatgactttgcaactgaagctgaaggagtcttttctgacaaattcctcc

SEQ ID NO: 401270 - DNA, 75 bp, Homo sapiens
cgggaacaaatactactacatcccgcagtacaagaactggagagtgtatcctactcagtacatgtatctgaagat

SEQ ID NO: 401271 - DNA, 100 bp, Homo sapiens
ctggccgcgcctggcctggccgggaccatggctgcaagatcaaggccctgcgggccaagacaaacacctacatcaagaccccagtgcggggcgaggagcc

SEQ ID NO: 401272 - DNA, 51 bp, Homo sapiens
ttggatggcacctgaagtttttgaagggtggtaataggagttcttcacgtg

SEQ ID NO: 401273 - DNA, 75 bp, Homo sapiens
ctgagattgtggactgtgacggccaaaccccctaaaggtctccacactgctgtttaacggcacacttgacaatgg

SEQ ID NO: 401274 - DNA, 75 bp, Homo sapiens
tgagagagggaagtcgcctctgtgctcgcttcctgtgtccagtaccggttagtggtccgggatgtgaacaccctt

SEQ ID NO: 401275 - DNA, 82 bp, Homo sapiens
cttggtttcgggatctcggtgctgcagacggcgagacctcctgcacaggcaagagcggtgagcggggcgcctatgcctcctt

SEQ ID NO: 401276 - DNA, 80 bp, Homo sapiens
aagccatcaaaactgccttcagaagcaaaaggtccccttcccctgagcccatctacaatagcgaggggaagcggcttaac

SEQ ID NO: 401277 - DNA, 82 bp, Homo sapiens
cgaccgccatggcgttcctcaaactccgtgaccaggaagccagttgagggaagttctccatgaatgtacgtcacaatgatga

SEQ ID NO: 401278 - DNA, 89 bp, Homo sapiens
ggtgaatttaaaggagcagccctggtgtcacctatcagtaaaaggtatacccgaaatcttgtggatcaaggaaatggaaaatttaatct

SEQ ID NO: 401279 - DNA, 75 bp, Homo sapiens
aggaagctaaggccgcgttggggtgagaccctcacttcatccgctatcagttgagggatttgcagttgataaaat

SEQ ID NO: 401280 - DNA, 87 bp, Homo sapiens
tgagacaactggaagagtatcaggggatcttgctggcaagcctctccttggcagatactaatctaccatccgaagtggagccagagc

SEQ ID NO: 401281 - DNA, 50 bp, Homo sapiens
agcacctggaggatacctgctacctgcaaaggcagctcgagcatctcatc

SEQ ID NO: 401282 - DNA, 80 bp, Homo sapiens
ggttccccctccctcagcttccgccccaaaagcaaagactcttggaactgtaacgcccagaaaacctgtcttatctgtca

SEQ ID NO: 401283 - DNA, 75 bp, Homo sapiens
catcaacatcctcatccaggatgccaggtcatgctggccgactggtgtttgggttcctgaatggcagggcctgtg

SEQ ID NO: 401284 - DNA, 100 bp, Homo sapiens
gccgcgatctatgggggtgtagaggggaggaagagttcatcgattggtggagcaaattctttgcctccataggggagagggaaaagtgcggctcctacct

SEQ ID NO: 401285 - DNA, 82 bp, Homo sapiens
aggagagctggcctggggggcagcatgagggctttgttcgcgggggtcacagctctcatggctgcagctagcgtgacccccc

SEQ ID NO: 401286 - DNA, 100 bp, Homo sapiens
ctcaaacagttaatggagctggtttctggcatttgaagtcaaagagtattcagcgttggatgaattacaaaaggaatttgaaactgcaggacttaagaag

SEQ ID NO: 401287 - DNA, 100 bp, Homo sapiens
tggttcatcccatcagcctggattggtgaaactgaatcacaggagatatttccagtttcaggcgacctccaagaagggtatcagtcgactggataaacag

SEQ ID NO: 401288 - DNA, 76 bp, Homo sapiens
gaagtctgggggccgagaccacacagtgagtactaccacttccgccaggcctgggtgccgctgcgctggatgtccc

SEQ ID NO: 401289 - DNA, 98 bp, Homo sapiens
acctgcccgaggtgtttgcccccaacgccccggatgtgctgagctgcctggagctcaggtacaaggtggactataaggcagatgagtggctgatgaag

SEQ ID NO: 401290 - DNA, 75 bp, Homo sapiens
ctgtcctgcctccgctccctggtcctcaaaggctagacaaatggccgccgttctcctaagacgtctcttgtcctc

SEQ ID NO: 401291 - DNA, 100 bp, Homo sapiens
gcaggacctgctttcggagtacatgggcaataccccaagactgcttctgagacagaaacagatatctgtgctgaatgggagataaagaccatcactagtg

SEQ ID NO: 401292 - DNA, 100 bp, Homo sapiens
gtcacaaaacagcagatttcccaagagcagcggaaaatgatccagtcacaggcaaatgaagaggattcttccagttctctagtgaaggatcacctttttc

SEQ ID NO: 401293 - DNA, 83 bp, Homo sapiens
cgctggagctgggtcagtccgccgctcaccccgcggccgcaccttcccgccttctcaggtggtacagaagttggtcctgccct

SEQ ID NO: 401294 - DNA, 78 bp, Homo sapiens
taaattcttcagctgctcggacagatgaagctccccaaggagctgcagaggcacagttgaatgctgttgatgctttga

SEQ ID NO: 401295 - DNA, 96 bp, Homo sapiens
cagagcacaaggcagaaaatttactggttaaggaggacttccttcgctgggcatctggctgggattcttgttggactaatgtacactcaagggcct

SEQ ID NO: 401296 - DNA, 88 bp, Homo sapiens
tggagccgttcgtaatgcgagaggtgcgggcgcggctggcggccacgcaggtaatgtttgaaacttaccagttttccggtgtatatgt

SEQ ID NO: 401297 - DNA, 83 bp, Homo sapiens
ccatgggctgctgcagctccgcctcctccgccgcgcagggggatatgagactttctactcggaatatcctgagtgttgcgtgg

SEQ ID NO: 401298 - DNA, 100 bp, Homo sapiens
agcccatggaggagatcggcctcagcccccgcaaggatggcctttcctaccaggtggtccgagacattctgctgattggacatagacaggcttttgcatg

SEQ ID NO: 401299 - DNA, 98 bp, Homo sapiens
aatgcccactttatgaagccaacggacaagctgactcaagcacagagggttcggaaaccgcgttgctgcacggggccccaggggctgcttccccgata

SEQ ID NO: 401300 - DNA, 90 bp, Homo sapiens
agcacgctggactgcgagacggcccggctgcagcgagcgctggacggagaggaaagcgatacagaagtttacggtgagttttatcccgtg

SEQ ID NO: 401301 - DNA, 98 bp, Homo sapiens
gggcatgaaggtccaggcgctggccagctgacaagctctctactgatgatctgaactccctcattgctcatgcacatcgtcgtattgatcagctgaac

SEQ ID NO: 401302 - DNA, 74 bp, Homo sapiens
cccggcggcgcccgggcccacgcggaacgacggggcgaggggacggcaaaacagaacagaaaggcggagataaa

SEQ ID NO: 401303 - DNA, 75 bp, Homo sapiens
ggtgtgtcaaaaggcaaagtgtgttttgagatgaagattgcaggatacctatatggggtgagcccaccagataac

SEQ ID NO: 401304 - DNA, 101 bp, Homo sapiens
cacctctctcaggatgcgtgaggcggacacgttgaggccacctcagctgatggaagtttccgctgcatcttcctcccgtgaggctggccgagctccacgct

SEQ ID NO: 401305 - DNA, 83 bp, Homo sapiens
cagttttcatctttgaatggttgcgatttcttgataaagtcttggttgctgccaacaagagaaagcatgggattatggcaacc

SEQ ID NO: 401306 - DNA, 100 bp, Homo sapiens
tggagtgaaccggagaccccgaaaacggaagcgcagggagaaggaagaggtgtttgaaaagggaagaaacccttttttcttggagccagcaataattatc

SEQ ID NO: 401307 - DNA, 50 bp, Homo sapiens
gggatgattacagttcttcctaaaaaagtactgtaagattgatgttaaag

SEQ ID NO: 401308 - DNA, 50 bp, Homo sapiens
cagccggagaagcgagtttcagctgatgtgtcgtggaggccgaatgtttg

SEQ ID NO: 401309 - DNA, 74 bp, Homo sapiens
cgcgagtgaggaaaggaggtactgtaggatgaccagtgtcccagtgaaggaacgagtgaaggtgtctcagaact

SEQ ID NO: 401310 - DNA, 83 bp, Homo sapiens
ccaacagccagtgatatgctatacatggttatcaatactctggctgaccatcatcatcgtgggactgactttggtggaagtcc

SEQ ID NO: 401311 - DNA, 82 bp, Homo sapiens
gagtatttgaagtctgtgtcaaacatccatatcataagtggaattttggagatattcaaagagattgggtcttgctctagga

SEQ ID NO: 401312 - DNA, 83 bp, Homo sapiens
ctctaagatctgaatgttgtgaccactaatttggttactataacaacagtaccaaggtggctgtgaaaaccctgaagccagga

SEQ ID NO: 401313 - DNA, 90 bp, Homo sapiens
ttcagaaaactactactccagtgaccccatggatcaggtgcttgacaaaagtaagctgaagccaggaacaagagttgctttggatatgac

SEQ ID NO: 401314 - DNA, 96 bp, Homo sapiens
gctaatccagtggaaatcaggagaggttatggaggttttgatgactatggtggctataataattacggctatgggaatgatggctttgatgacaga

SEQ ID NO: 401315 - DNA, 100 bp, Homo sapiens
taaactaggagacaagatccatggattcaccgtaaaccagtacaaggcgagtggataattccaacacaagactggcagtccaaattgaaagagatccagg

SEQ ID NO: 401316 - DNA, 82 bp, Homo sapiens
gcaaagcacttatcaaaactcataactactcaatgaataacctgaagcccccacaagcaaaaaggaagatacaacatgttac

SEQ ID NO: 401317 - DNA, 75 bp, Homo sapiens
aacagtttcctgcgtcgggcacaacagatgctgggctcttgcactgtttggtggaaatggtgagacaggatttga

SEQ ID NO: 401318 - DNA, 83 bp, Homo sapiens
agccggtgtaaatgttgagcctttttggcctggcttgtttgcaaagtgtttaaccagggggaagaaggtacctcctggtacat

SEQ ID NO: 401319 - DNA, 98 bp, Homo sapiens
ggcagaggaggaagatgagttctaccagacgacttatgggggtttcacagagagttactgaaagctctcgaaattacggttacaatccttctcctgtg

SEQ ID NO: 401320 - DNA, 100 bp, Homo sapiens
cggcggccgaagacactgcgactccggagacagcccaaatatcctcggaagagcgctcccaggagaaacaagaccaattctgactccgccctgcaccaga

SEQ ID NO: 401321 - DNA, 100 bp, Homo sapiens
cgcgggccctttgcagctgcgattttcgccctacgttttcaacggaggtcacccacaaaagctgtatataatgccagacattggaatcatccagattcag

SEQ ID NO: 401322 - DNA, 100 bp, Homo sapiens
tgggcgtcagcgagccgtgagatgcgtggtccaccatcggtgacctcaccgcctcggttcgccctcagccgccccggccctggccaacgtcaacattggg

SEQ ID NO: 401323 - DNA, 100 bp, Homo sapiens
tggagacgccattggatgttttgtccagggcagcatctctggtgcatgctgatgacgaaaaacattccaaattacagaaatgcagtcattgtagctaagt

SEQ ID NO: 401324 - DNA, 75 bp, Homo sapiens
agctcatctggaattttgccgatttcatgactaaccagtgccgaatacatcaagcaatggtaacatctttaaatg

SEQ ID NO: 401325 - DNA, 50 bp, Homo sapiens
agggctctgcatggcaggttagctcaggaacaagaccctgcagatggaga

SEQ ID NO: 401326 - DNA, 99 bp, Homo sapiens
ggatatttagttggaaataccttatggttggttgcagttggctattatatctatgtaactttcctgggatacagtggggaaagctctggcaatttaaat

SEQ ID NO: 401327 - DNA, 51 bp, Homo sapiens
cacggtagcgcagccgctctgagtatggatggatttcgactggtgaaatta

SEQ ID NO: 401328 - DNA, 98 bp, Homo sapiens
tcccctgaagtcaagattgttgaactagtaaaagattgtaaaggtttgggattcagcattttggattaccagaaaatttcccaggaacgagaaaaatt

SEQ ID NO: 401329 - DNA, 100 bp, Homo sapiens
ttatttccaaagttgaagaagtcttgaatgactggaaactgattggaaactctttgggaaagccactcgaaaaggtgcctatggttcatgcttgaagttt

SEQ ID NO: 401330 - DNA, 80 bp, Homo sapiens
ccacttgcacgaaagctttcctaggccaaaaagaggccgactcgcgggccgctgcacccaccgccaaggacaaaaggagc

SEQ ID NO: 401331 - DNA, 73 bp, Homo sapiens
aggttcacgccaacagtacctcattgctctttggcgactcttattggttacaagatgttcacctaagattgag

SEQ ID NO: 401332 - DNA, 97 bp, Homo sapiens
ccgagagcgcgaatatcgtcatcgttagaagaaaacatccagtacagacctttctgatatccctgctctccctgcaaatcctattcctgttatcaag

SEQ ID NO: 401333 - DNA, 102 bp, Homo sapiens
gacagcactttaatattcctgccatcacaaaagctggacaagcgaagttgctgggcatattggattttacccatcataggcgctgttctcttaggtttcctg

SEQ ID NO: 401334 - DNA, 74 bp, Homo sapiens
gcgcggattcgccgaggcaccgaggcactcagaggagggaacccgagcgtcatgttagggtgaagcagaggacc

SEQ ID NO: 401335 - DNA, 99 bp, Homo sapiens
cgaccttaatgggaggccccgggaggccgaggttcgggtgtttgagaagctgcagctgctcaaccctgaaatagaagcagaacaaatattaatgtcgcc

SEQ ID NO: 401336 - DNA, 98 bp, Homo sapiens
caattctcgagagaccagcaaggaatccaaatgcatcattcagatgcaaggcaactcgaccatactatactggcaattgctggagaagattttgcaat

SEQ ID NO: 401337 - DNA, 100 bp, Homo sapiens
gctacagccctgcagaagctggaggaggccgagaaggcggctgatgagagcgagaggctgcaaaacgggaacttgaaaggcaacgacaacttgagtggga

SEQ ID NO: 401338 - DNA, 98 bp, Homo sapiens
caaactaacagcagaagctattcagacacccctgaaatctgccaaaacagctaccaagggggtgccagctggaaacagtgacacagaggggggccagc

SEQ ID NO: 401339 - DNA, 127 bp, Homo sapiens
ggagcctcagttggaagcagccgatccagcctgcggagcctgtggggcagacctcctgccccccgaggtctgcagtctcctgaacccagcagccatctacgccaacaacgagatcagcctgcgtgac

SEQ ID NO: 401340 - DNA, 108 bp, Homo sapiens
ggcgccagcctgcgaaggtggcggcgctgctgctcgggctgctcttggaggttcagcagctggacatggagaaccaacgctcatcacctctgtcgttccccagtgttc

SEQ ID NO: 401341 - DNA, 75 bp, Homo sapiens
tgctcgacgaccaagaggcgaagagtcgtccctggggatgagcccagggagaagatggacttggtcacctacttt

SEQ ID NO: 401342 - DNA, 118 bp, Homo sapiens
cccaggcagagacgggggaagcagcacgggatcccagcctcaggcctgcacggacggtgttggttggggcaggagtagggctgattggagccattgtacagtgtcgggaacataccag

SEQ ID NO: 401343 - DNA, 75 bp, Homo sapiens
ggatcgtgtgcattacaggagtcctccacttgccactgggaaaaccgtcttcagatacagtccctaagcccaaga

SEQ ID NO: 401344 - DNA, 87 bp, Homo sapiens
cgtttgtcactttttgtacaaaagaagcagctcaggaggctgttaaactgtcacagcccgttggagattgtgattttaatgttcgtc

SEQ ID NO: 401345 - DNA, 100 bp, Homo sapiens
ttggagtcaggaggaacctcagaacatgggtccgtggtcgtttgtttctccaaggtttgaaaagcagctggcctgcaagaaacctctgtagaggagcagg

SEQ ID NO: 401346 - DNA, 125 bp, Homo sapiens
tccacccctccgcgctggcggtgtggacgcggaactcagcggagaaacgcgattgaggaatgaatctgaagtctgctgcagtaaaacacagaaggctttaaaatgttttcttgcataaaattcaa

SEQ ID NO: 401347 - DNA, 100 bp, Homo sapiens
tctgaggacggctcaggagcatgacaagcgagaccctgtggtggcttattactggagactcatgcatctgtatgccgtgtgcgtggactgcctggaaggg

SEQ ID NO: 401348 - DNA, 49 bp, Homo sapiens
agttcaaggagtctcttgttaatttccagctcaaccaagataaaatgaa

SEQ ID NO: 401349 - DNA, 51 bp, Homo sapiens
cactgcattgtgttgctgcagattgccaaaatgaagaggaagatgatgatg

SEQ ID NO: 401350 - DNA, 75 bp, Homo sapiens
actattttattagtcttctactgccctacagctacagagcagggtaagcaggaagagaacgacgtggtggagaag

SEQ ID NO: 401351 - DNA, 75 bp, Homo sapiens
ctgcctgtggaatctgccattgcgattgtccagaggtctgtcctcccatgactcacctgtgtgagaaaatcatct

SEQ ID NO: 401352 - DNA, 82 bp, Homo sapiens
ctgattccaagacaaggcgcccaccccacagagcaagttttctgaaacgtggggcaagcgcgatgaagagctggttctgccc

SEQ ID NO: 401353 - DNA, 75 bp, Homo sapiens
gatggagaatatatggctggacagctagctgcttatggctataaaattacagaaggaagaatcctgctcaaaaat

SEQ ID NO: 401354 - DNA, 100 bp, Homo sapiens
ttggggatggctataatgggtatggaggaggacctggagtactttgccagacgtttatcaaaatggggctgctgtcttctttcacttgtagtgacgagtt

SEQ ID NO: 401355 - DNA, 76 bp, Homo sapiens
ccctcgggcacataccatgcctggaaggtcagtttaggggctggtgcaaaggatgagttgcacattgttgaagcag

SEQ ID NO: 401356 - DNA, 78 bp, Homo sapiens
tcaggagcacagcagtcccgagtgcagtgtccttgaatccgacccctactttgggtttgaagaagcaaagaggaagtt

SEQ ID NO: 401357 - DNA, 76 bp, Homo sapiens
aaagttcacaaccggacaaggaccctcacatgtgcaggggtgaaactactgggccatggacagccacttaactgga

SEQ ID NO: 401358 - DNA, 80 bp, Homo sapiens
acagacagacagctggcaagaggcagcctgggggccacagctgcttcagtacaatgactcttcttgcttttcacctaagt

SEQ ID NO: 401359 - DNA, 83 bp, Homo sapiens
tctttccgccctaatggaggtctccagtttcgacctcctgccccccgaggtctgcagtctcctgaacccagcagccatctacg

SEQ ID NO: 401360 - DNA, 51 bp, Homo sapiens
ggagagcctgttggagaaacacaaagaggaggaagaaccctttgagagctc

SEQ ID NO: 401361 - DNA, 87 bp, Homo sapiens
ggagacacggccagatctgccctccatctgttctctggggaggcagtaaggggccgtggagctggcctcggcctcggcatcgggaga

SEQ ID NO: 401362 - DNA, 98 bp, Homo sapiens
tcttcatggaaacgtctgctaagactgcttccaatgtagaagaggctgctctttggcgtaaattgcaatcgattagggatcgtttctcagaatcaagt

SEQ ID NO: 401363 - DNA, 82 bp, Homo sapiens
caaaaggattcctgggttcaaatttgacaattcgttgatcaaccagatagagcctgctcttgaggttcacagatgatacctt

SEQ ID NO: 401364 - DNA, 98 bp, Homo sapiens
ccacagcatatggcagctgctgcaggctggacagcccccagacctggagaggatccgcacacttctggagaactgatagtgcatcagctgacccaggt

SEQ ID NO: 401365 - DNA, 50 bp, Homo sapiens
gcgctgccccgccggaccgtggttgtggcagcactgcctgaaggtatgag

SEQ ID NO: 401366 - DNA, 90 bp, Homo sapiens
aagccatgggcgccgggaccccgccgccgccgccgccgccgccgtctggccccaggagattacctggggcaattgatgttatcggtcaga

SEQ ID NO: 401367 - DNA, 100 bp, Homo sapiens
gtgtggcactgccttcttcatcaatttcatagccatttattaccatgcttcaagagccattccttttggaacaatgtttaataagcaatcattgacccag

SEQ ID NO: 401368 - DNA, 98 bp, Homo sapiens
ttgtacctggtgttcggttatggagcctctctcctctgcaacctgataggatttggctacccagcctacatctcacatatgtagagtgtgtcggtcag

SEQ ID NO: 401369 - DNA, 98 bp, Homo sapiens
tgtggccgctgcggcctcagctccgactgggtcaggttgcggagactccaggccgcttccagggcgggccaattcctgtccccccagcagcatggcat

SEQ ID NO: 401370 - DNA, 100 bp, Homo sapiens
ttgctccccagctgtcttatggctatgatgagaaatcaaccggaggaatttccgtgcctggccccatgaaccctggatatgctgggcgccaggaactacc

SEQ ID NO: 401371 - DNA, 75 bp, Homo sapiens
tagcaccccgagaaccgtcagtttgagccagatggaccctaaagtaaattggttgaagaaattagatcccaaaga

SEQ ID NO: 401372 - DNA, 100 bp, Homo sapiens
tactgacagatccgtagggaggacaccgtgacttcccggacgctgggaaatggaacattttagtggacaaaccaaatgaccaatcttcaagatggtcttc

SEQ ID NO: 401373 - DNA, 98 bp, Homo sapiens
aacacaaggagaccgggaaccactatgccatgaagatcctcgacaaacagaagagcccagcattacatcaacatgcccgtgcagttcaaaccgaagtc

SEQ ID NO: 401374 - DNA, 100 bp, Homo sapiens
aacaatttctcctgctctgcagcttctgttcagatcttcagtgtctattggatttttccaagagaaagtttgtaaaattccttacactgtagatgtggat

SEQ ID NO: 401375 - DNA, 75 bp, Homo sapiens
ggaaattcagaagaaattagaagctgcagaagaaagacgcaagatttatcatagaatccccgactcagacccatc

SEQ ID NO: 401376 - DNA, 75 bp, Homo sapiens
tgagtagctggaaccatcatatgcaccagcacgcctggctaagtgcgcgctgtgattggaagcacctacatgctg

SEQ ID NO: 401377 - DNA, 100 bp, Homo sapiens
gccaagccgcggagcctccagacggcttattgcaggagtgaccaggacactacctcctagaagtaatgcccacagaaagcgcaagttgttcgactgctcg

SEQ ID NO: 401378 - DNA, 83 bp, Homo sapiens
cttggaggcactgctggatgacagcaaggagttgcagcgattactccaaaggtttcggcggcaaatacggtatcgacaaggac

SEQ ID NO: 401379 - DNA, 100 bp, Homo sapiens
tggcaaaagcacaaggattctcgctgtgacagagacaacaccgagtatgagaattacgcagatgtccgggtggaaaggaggcaggagctggctctggaag

SEQ ID NO: 401380 - DNA, 100 bp, Homo sapiens
tttttgaagagattcggaaaattgaggataatgaatttcattaccaagaacagattctacttgacacacctggcattatcagtcctggtaaacagaagag

SEQ ID NO: 401381 - DNA, 100 bp, Homo sapiens
ctgccccggcgccgtccgtgcccgcgggacctgacagccgggtcagagttactccacaggatccgctgaacataggatgttgccacaaaatctacctcgt

SEQ ID NO: 401382 - DNA, 50 bp, Homo sapiens
tcaaagctggattagaacatctgataattcttgctaatcacttcaatgaa

SEQ ID NO: 401383 - DNA, 97 bp, Homo sapiens
caagctcggatccctgaatttgatccaggtgctggagaatctggtaaaagcaccattgtgaagcagatgaggatcctgcatgttaatgggtttaatg

SEQ ID NO: 401384 - DNA, 98 bp, Homo sapiens
ctcgggtctcaggtcatggcggtcgcggggcccgcgcccggagctggcgccaggaatgtatcctgtcaggtataatgtcagtgaatggcaagaaagtt

SEQ ID NO: 401385 - DNA, 83 bp, Homo sapiens
tgaaaatggacatacggatgttgcagatgttttacttcaagcaggggctgatttaatcttgcttctgaaatatctacctggga

SEQ ID NO: 401386 - DNA, 74 bp, Homo sapiens
catcaagttgcaagagattccaaccttccagccccttttgaaagaatcatcggactcaggtacatctgtgagtg

SEQ ID NO: 401387 - DNA, 113 bp, Homo sapiens
gtgggattctggagtccttgggagggcgacaaaccaaacttgagtttgtgggcatcacctatgccctgaccgttgtgtggctcctggtgtttgcctgctctgctgtgcctgtg

SEQ ID NO: 401388 - DNA, 75 bp, Homo sapiens
gaccacactgcgccaacacagaaattatttggtagctggcagtgttgtgatggcttttgaagaagtatgcccgga

SEQ ID NO: 401389 - DNA, 96 bp, Homo sapiens
gccggcgcctcctcggagtccttggggacggagcagcgcgtcgtggggcgagcggcagacctgcctgaccagtgcacgcccaacccctgcgatagg

SEQ ID NO: 401390 - DNA, 90 bp, Homo sapiens
gtttgcagctgatgctccgggtcaatgagtaccgctttgcttgggtggaagcagatggggtaaattgggatcaaggtggtcggacattgt

SEQ ID NO: 401391 - DNA, 100 bp, Homo sapiens
agctgtggaaagaagttgcaaaacactgggtcacggtctagatcacattctcgatccagaggaaggcgatactctcgctcacgcagcaggagcaggggac

SEQ ID NO: 401392 - DNA, 100 bp, Homo sapiens
ttcccagccatggcagattcctccgggcagcaggtcagcagataagcagagagccctagaagaaaccaaagcctacaccacccaatccttagcaagtgtt

SEQ ID NO: 401393 - DNA, 82 bp, Homo sapiens
cattaacctgcgagaagtcatctgcacgtccagggacgagattgaggagctgcgggccgagatgctggagatgcgggacgtc

SEQ ID NO: 401394 - DNA, 98 bp, Homo sapiens
tcctatgactcagacctgggcacagcaaatgctgaggactcagaccagtctctgcaagaattgaagatctcaaacagacaaatcatggcttggaagaa

SEQ ID NO: 401395 - DNA, 50 bp, Homo sapiens
acagacaagtcaaccatgctatttggggttgttcgccgcaggacccagcg

SEQ ID NO: 401396 - DNA, 101 bp, Homo sapiens
cacaaagattgaacgacatgccatgtactgcaatggtctgatggaggaagatacaggttctaaggcccagcagctactacaaggattgcaagccagtgatg

SEQ ID NO: 401397 - DNA, 100 bp, Homo sapiens
gctcattgaagcagaggacaacatgaactgccagcctccagggtcgtatagacctccccctcctatgggcaaaccaccaggttcaattgtaagaccctct

SEQ ID NO: 401398 - DNA, 75 bp, Homo sapiens
caggaagcgagggatggaggttgtgcaggtccggcccggagcggccatgtcccacggccccaagcagcccggcgc

SEQ ID NO: 401399 - DNA, 75 bp, Homo sapiens
atgagcactgcagcgattgcgagaatgaggaggacaacagctacaaccgggggtggcttgtggtccggttggcca

SEQ ID NO: 401400 - DNA, 98 bp, Homo sapiens
cccctccccctccagtccacgacgactggctgttgaccctgttcaggcctcggtgaaggtctctgctggagaaggagctggagtctgtgggcatccgc

SEQ ID NO: 401401 - DNA, 83 bp, Homo sapiens
ccctggaccgtgtcctctgaaggtgtccacactgtggaccaggtgttgagtgagacaatgcagatcttcgtgaagactctgac

SEQ ID NO: 401402 - DNA, 82 bp, Homo sapiens
gtatcggggcctttatttctcgtcggcggcgccctgcaccgcgcctcgcaaagcttaagcaggtaaagcagtcactgtgaag

SEQ ID NO: 401403 - DNA, 83 bp, Homo sapiens
agcagctataccagccaccctgcccccaagaaggaagtcatcatgggccggcctggaacagttgcagagtgggcaggatctta

SEQ ID NO: 401404 - DNA, 100 bp, Homo sapiens
cagctggatactcttgttaccagaattccaaaggttctgtgagtttactgggacctgtgaccactcctgaacatcagcttctcaagactccttcatctag

SEQ ID NO: 401405 - DNA, 97 bp, Homo sapiens
cctccggaagaggggaccggagaccgcggggacctcggagggagcccggcggcttcgggtgtgtgcagtggcctcagggatccggaaagtctaggac

SEQ ID NO: 401406 - DNA, 100 bp, Homo sapiens
tgcacctcatgaagacatatactgtgaacacactacagaccctcacaagtcagttactgaaaaggggccaggaaggaatactgggagaatcttcggatag

SEQ ID NO: 401407 - DNA, 80 bp, Homo sapiens
gaaggatatcgacgtcgtgatccagaagtccagagctgaggactgcctgtttgcagacctagaggatcaagacataatgg

SEQ ID NO: 401408 - DNA, 83 bp, Homo sapiens
ggtacaacatcacagtcactgcttcagaaattgttgacattttgctaaaggctgtgggagacactcctattatgaaaacaaag

SEQ ID NO: 401409 - DNA, 82 bp, Homo sapiens
ctggacactctctgaggacatctctgcaaaggccccagcggcccagctttggctagatcagagtctaagagagatggaggtt

SEQ ID NO: 401410 - DNA, 100 bp, Homo sapiens
caggcaccagtgccattaacgagctggcgaagatgggcgacccggatctcctggaagtgttggcggaggaaggatttatgagcgtgtgatagaccctcca

SEQ ID NO: 401411 - DNA, 100 bp, Homo sapiens
acccccctgactaccgagggcagagctgcatgaagaggcacggcattcccatgagccacgttgcccggcagatgatgaagaacgagagcttcaaatggat

SEQ ID NO: 401412 - DNA, 75 bp, Homo sapiens
agaggcagctagtggcttctatactcagaggagaaggcagagcccccccaggctatgaatgccctgatgcggttg

SEQ ID NO: 401413 - DNA, 90 bp, Homo sapiens
agtttgaggatgaggaagctcaggcatttgcattgagactccttgcattccgccagatacacaaagttctaggcatggatccattaccgc

SEQ ID NO: 401414 - DNA, 83 bp, Homo sapiens
agcagcgcctgttcccggggcagatccaggttcagtgcctatgattacacaataccacctatggagaaagctgttgtgaaaac

SEQ ID NO: 401415 - DNA, 101 bp, Homo sapiens
ctatgagagacagagccaggatttgaaaccaggcactggtgaggtggattgatgatgaatcttctggcacacctggagcaactccagaacacagtcgtgag

SEQ ID NO: 401416 - DNA, 75 bp, Homo sapiens
acatggtcccatgagattcccaccttctttatctgaaacaaacaacttcttggacacttaatgattgttggcaag

SEQ ID NO: 401417 - DNA, 85 bp, Homo sapiens
aagacatctttgtgtctggagtgaagattttttatggttctcagactggaacagcgaagggaaaaagacctcgatgaagttctgc

SEQ ID NO: 401418 - DNA, 100 bp, Homo sapiens
cagggctcggcgtcgctgccaccatgacgggaagcagtctctggtcccagcccaccccatggcccctcccagtcccagcaccaccagcagtaataacaac

SEQ ID NO: 401419 - DNA, 78 bp, Homo sapiens
tttatatttccagaacctagcacagtgccgggcataaagtgatcagactctgagaatatgggatgtgaaggcagcagg

SEQ ID NO: 401420 - DNA, 82 bp, Homo sapiens
cgcccggcgcccctgagccggccgagcggcgacggaccgcgagactggtcgaattgacaaatcttaccctacagtatgtggc

SEQ ID NO: 401421 - DNA, 100 bp, Homo sapiens
gcgagggcgagggcgagccagagctcagccccgcgatgttggagtccggggtgacctggtctcagtgaagaaatctttaggccggaatcgactccttcct

SEQ ID NO: 401422 - DNA, 100 bp, Homo sapiens
atcgccacagctgaaggctgcgagggactaagagcagatctcatgcagattcaaaaatgtgagttggtcttgatccacacctacccagttggtgaagaca

SEQ ID NO: 401423 - DNA, 100 bp, Homo sapiens
gcattgaaaaatgctggccaggctgtcacaattgttgcacaatatcgacctgaaggggggacacagcgattgccacgcgccattggaatgtccctggcca

SEQ ID NO: 401424 - DNA, 100 bp, Homo sapiens
cttgcagggtgtctgagctaaacttcaccaaataatagctgtttgtattttggctgctgcaggagccattttaggtctgaaggggcgtctcgattacctg

SEQ ID NO: 401425 - DNA, 90 bp, Homo sapiens
ccgggaattaaaagcagaacaacatcgaaaagagagggaagaagcagctgccagaaagccgtgattctatcccactttttccggcatccc

SEQ ID NO: 401426 - DNA, 110 bp, Homo sapiens
ccttccaaataagcggcataaagcaattgagaattcaggtgtgattgaccgatgggagcttctccaggcccaggcattgagcaaggagttgaggatgaagcagaacctcc

SEQ ID NO: 401427 - DNA, 75 bp, Homo sapiens
tcgaaagtcttgtggaagatctggaagaaacagttgcagatctgatctcttctgaacacctcatcgtgtctccat

SEQ ID NO: 401428 - DNA, 50 bp, Homo sapiens
ttcagctcgatacaatttcacacctggtgaatcaaaaactctggttttaa

SEQ ID NO: 401429 - DNA, 88 bp, Homo sapiens
ccccgtccggtccctctctccacggtaagggatggtgaccctgataactatattgcttattatcggagggctactgtctttttagcta

SEQ ID NO: 401430 - DNA, 100 bp, Homo sapiens
ctaccccgtggctgctaagacacagcttggccggtgcttccaggaaaccattgggtcacaggatatgttcaaggaatgagtgatttactttcccctcttt

SEQ ID NO: 401431 - DNA, 89 bp, Homo sapiens
caatcgccgcctggcttggtcctggctctgtctgctgccctctgccttctgcccagcccaggttttacgtaccctgggaagcaagtgtg

SEQ ID NO: 401432 - DNA, 100 bp, Homo sapiens
ccgagtggaagtggttcatcgagcagaggctgctcatgttctccttcgtcaacgaccgggaatggcttgtgttggtcgtacgagagaatgtactattgtc

SEQ ID NO: 401433 - DNA, 100 bp, Homo sapiens
ccttgacacttatatcctccctggagacctattactacatttctccattagttggtgtatttttcttggctctaacccctatttggattataatagctgc

SEQ ID NO: 401434 - DNA, 82 bp, Homo sapiens
gagaccaagaggcgggggctgcacttgacaaccagcatgccgagatgggctttgttcgcgggggtcacagctctcatggctg

SEQ ID NO: 401435 - DNA, 73 bp, Homo sapiens
ctgacctgaatcctgaattttccttgatggtcaaaagattaaggtaagaatgattgatgttggctgatattgg

SEQ ID NO: 401436 - DNA, 95 bp, Homo sapiens
cttcagtggatcttcggatacgaagaacccaggaggagagggcagtgagagataggaatctcctccaggttcatgaccataatcagcccatcccg

SEQ ID NO: 401437 - DNA, 100 bp, Homo sapiens
gcttgggctgttcagaacattcgaaatgttttggtggatgccagtgccaaatttaaagagcttggtgcggtcttgctctgttgcctaggctggagtacag

SEQ ID NO: 401438 - DNA, 83 bp, Homo sapiens
cggggcttgccctggtcttgctcggccgatgaagtgcagaggtttttttctggtaacagctgtggactggcactttgaggagg

SEQ ID NO: 401439 - DNA, 50 bp, Homo sapiens
agcatctccggtctataatcctgaatgatccttcctgagcgtttcctggc

SEQ ID NO: 401440 - DNA, 90 bp, Homo sapiens
gagagcgtgaccgagagcgcgaatatcgtcatcgttagaagattcatgatgttgctatcaaaagttgagaaattgtcagaagaaatcatg

SEQ ID NO: 401441 - DNA, 144 bp, Homo sapiens
tgggagtctccgcgtcccgctcgctgggagagaggtacctctccttttccctctccctttccctaagcttccctctgtgtgttgcagtcctgtggcattatgcatgccccctcccagtgaccccaggctttttatggctgtgag

SEQ ID NO: 401442 - DNA, 75 bp, Homo sapiens
accatgtgctgaaatgtttgacgacactgatggtttggtggaaaacgaagctcattcccaacgtgcaaagccaag

SEQ ID NO: 401443 - DNA, 98 bp, Homo sapiens
tgattgggagccactcgggggtgaagctttgcaggtggacaaaggttgaaccatgattccggtgacagagctccgctactttgcggacacgcagccag

SEQ ID NO: 401444 - DNA, 75 bp, Homo sapiens
catttcttcggcattctgcaacaggagttggtggtgaccccgcccagttggcccagaggatctcttctaacatcc

SEQ ID NO: 401445 - DNA, 75 bp, Homo sapiens
gttcgagcactaatatttaagaaagaagatgttaactttcaggatttcttacaatctccagctacaacctgctta

SEQ ID NO: 401446 - DNA, 90 bp, Homo sapiens
ggcgacctcttccagaagctggttgaatcgctcctagctgacccctcacgtctcttatgatacgtacagaaagcaagagcagcccatgcc

SEQ ID NO: 401447 - DNA, 98 bp, Homo sapiens
acgaactgggcaacatctacacgcacgctgggaggctgtggcgtgctgggtgtcggcatctggctggccgccacacaggggagcttcgccacgctgtc

SEQ ID NO: 401448 - DNA, 96 bp, Homo sapiens
atcatcctggggacctggtacatggccttcacaatgaacagaaagctgcagtttcctcctctgtattctttctccactcccactcgcctcatgtac

SEQ ID NO: 401449 - DNA, 74 bp, Homo sapiens
cggatttgctccaagctatggctatcagttcccaggtattgggagagttgctgctacatctttaggaaatttga

SEQ ID NO: 401450 - DNA, 75 bp, Homo sapiens
atcattcacagcatatcttgaaagatgtcattcctccattggaacaactgtacaagccagctgccatgttgtgag

SEQ ID NO: 401451 - DNA, 75 bp, Homo sapiens
aagttcatctcctccgtcaccagccacatctaccagggggtccactggacggggcctgagctacaacttcaccca

SEQ ID NO: 401452 - DNA, 100 bp, Homo sapiens
ctggatgccgtgatctccagcgccggcctcctcagtgcgaagaagctgcagccgcacctggccaaggaaagctgccgtgtgggagatcacaggggctgaa

SEQ ID NO: 401453 - DNA, 50 bp, Homo sapiens
gcctcccaagtagctgggattacagggccatcgatgcacccctcggagct

SEQ ID NO: 401454 - DNA, 75 bp, Homo sapiens
gaacatcttgccaatttcaaatcggtgttctaagaacggaagcatctgggctggatggaatttagcatcaagcag

SEQ ID NO: 401455 - DNA, 98 bp, Homo sapiens
gaacagtgccaagttagatgccgattacccacttcgagtcctttattgtggaggcaacatttcatttgttgcatttccagtttccaataccaactcac

SEQ ID NO: 401456 - DNA, 90 bp, Homo sapiens
gatggcctactggggataacattcatgcagaacatcagagcccacccacctttgggttcctgttggacatcgatggagtgcttgtgcggg

SEQ ID NO: 401457 - DNA, 73 bp, Homo sapiens
aggatacctctgcgatcccgggtcatctccagatgctagggttatggttgcccagaagattgttgccacaagg

SEQ ID NO: 401458 - DNA, 83 bp, Homo sapiens
agcattgtgcatagttttcttcgattgttgcaacatcccttgcgaggttggggtgactcagtgggaacgccatctgagcgggg

SEQ ID NO: 401459 - DNA, 82 bp, Homo sapiens
tcatttcgcctctggttcttgccaatcctgaatctgcaacaactttcaagcacatggattaattgatgtatgttgagtttat

SEQ ID NO: 401460 - DNA, 100 bp, Homo sapiens
aagaaaacattcctgctctgaaagctcttcttgaaaaatgcaaagatgtagatgagagaaatgagttgtcacaggtagtactgatggaattggaaaatca

SEQ ID NO: 401461 - DNA, 90 bp, Homo sapiens
gggacgagggcaaaggcaaggtggtggacctgctggccacggacgccgacatcatcagccgctgccagatcctcagccacagaaagccac

SEQ ID NO: 401462 - DNA, 74 bp, Homo sapiens
accaggcttcctccttccaggaatcattgagagccttgccacctcattctttaatgaaaaaaatatgaatatta

SEQ ID NO: 401463 - DNA, 102 bp, Homo sapiens
ggcggctgctccgggtgagcagggcactgccctgctgtgctactcctgcaaagcccaggtgagcaacgaggactgcctgcaggtggagaactgcacccagct

SEQ ID NO: 401464 - DNA, 100 bp, Homo sapiens
aggctgtaggctccttcaacccgtggctgatagctgaaaggaccacaagcggggccgggctacagatgctgcggctgcccgggcagcgctagcaccgagg

SEQ ID NO: 401465 - DNA, 100 bp, Homo sapiens
tcctcgctggactgctcagggtgccagacctcatcctatcagaggactcctgaaacctggagagctacctgctgtataaaggctggcctgagggcatttg

SEQ ID NO: 401466 - DNA, 75 bp, Homo sapiens
gcagcttgggaggtgctgccaccacaggcaaagccatgactacagtagtggtacatgtggactccaaagctgagc

SEQ ID NO: 401467 - DNA, 82 bp, Homo sapiens
ggaagacccaaggagaacaaggggaacagaaccaaccaggctttacagtattggtaaaggttttcaaggtgtcatgaaaaga

SEQ ID NO: 401468 - DNA, 104 bp, Homo sapiens
aagatggtgcagaagaaaccagccgaacttcagggtttccaccgttcgttcaagggggatatgagactttctactcggaatatcctgagtgttgcgtggatgta

SEQ ID NO: 401469 - DNA, 50 bp, Homo sapiens
agaaacccaaactcttcttcattcagcaatggccaatgtacatggtggac

SEQ ID NO: 401470 - DNA, 95 bp, Homo sapiens
gctgcgccgcgcccgcacccgcgccgcgcgccgaggacctcagcctgggagtggaaggaagcagccaccctcgccatggcctccccgcccgcctg

SEQ ID NO: 401471 - DNA, 82 bp, Homo sapiens
tgtgctcgcgctactctctctttctggcctggaggctatccagcattcctggtcgggtggcttccagtggtcttcagtctgt

SEQ ID NO: 401472 - DNA, 101 bp, Homo sapiens
gcctttaccaacgccatcaccgacctcatcagtgagctgtccctgctggaggagcgcttccgggtctgctcaccaggtggccagataccgcccacgtgccc

SEQ ID NO: 401473 - DNA, 75 bp, Homo sapiens
gatttgttaaggattccaagtaactcttatttgaacttgatggagagtttggattcattgctttgtgcagaaggt

SEQ ID NO: 401474 - DNA, 95 bp, Homo sapiens
caaccttcgatctcctgacgagttgggacaaacattcctatggttaccatggtgatgatgggcattcgttctgctcctcggggactggccagccc

SEQ ID NO: 401475 - DNA, 75 bp, Homo sapiens
tgcagtgcaaacacctgatcaaggaagggaagcctggctcccaccatgagtgctgagcttaacgtgcctatcgac

SEQ ID NO: 401476 - DNA, 82 bp, Homo sapiens
cggggtggtcctcttccctttgtcggcttctcacggcattcagcagcagcgttgctgtaaccgacaaagacaccttcgaatt

SEQ ID NO: 401477 - DNA, 76 bp, Homo sapiens
tcgtaatcagcaggccaaagactcagagtttgctaatccagactttacacaacctatctcagaagttgtagatgaa

SEQ ID NO: 401478 - DNA, 50 bp, Homo sapiens
gttgggtcagtgacacagccagaagctagagtaccgtggcacaatctcag

SEQ ID NO: 401479 - DNA, 74 bp, Homo sapiens
tggccctcttcaatttctgacaaaagcgaaaccttgaaagccatttgatgtcccctgctgagattccaggccag

SEQ ID NO: 401480 - DNA, 83 bp, Homo sapiens
catggacagcatcatcttcccaaagctgagatctgtatctgtggacctgaatgttgatccctcgcttcagattgacatacctg

SEQ ID NO: 401481 - DNA, 90 bp, Homo sapiens
tcttccaaccaggggctgagcttctgcgctgtggagaagccagctgacacagccagtgtaagcagcctgagtctgtctacaggacacacg

SEQ ID NO: 401482 - DNA, 76 bp, Homo sapiens
tatctttcgttctcttttttgactgtaataatgagagctggaagtcgagtgtgctactcaactcaggagatttgga

SEQ ID NO: 401483 - DNA, 90 bp, Homo sapiens
gggcggaggcggaggcagaggtggaggcgctttgaaagataactggattcactttacaatttgcaaaacggctgcaggtcaacctattgg

SEQ ID NO: 401484 - DNA, 98 bp, Homo sapiens
cgggatggtcgcgcgtcccctgcacagcacagaggggcagccggagagcctgggaaaggcccctccagccagcgtcaggtgcagaatggcccctctcc

SEQ ID NO: 401485 - DNA, 100 bp, Homo sapiens
gatacactcgccctcaagcctatgaactgccctgcacactgtgagtgagatcattggccgagacctgagtggcttccctgcacctcctggagaagagcct

SEQ ID NO: 401486 - DNA, 90 bp, Homo sapiens
gggaccccctggagcccccatgatccctaagaagacagcttgaacctagggtaaaggatttagaggataaacttcactctgtgcagctaa

SEQ ID NO: 401487 - DNA, 145 bp, Homo sapiens
tataaatgaagtcacacaacactgggtcttatgtgactggcttctatcaaagtttgcaaggttcatttatgttcatgaattttgtatgggcgaatgaagaataagactgggagtaaaactcaggggaaatctgcttcaggcaccc

SEQ ID NO: 401488 - DNA, 100 bp, Homo sapiens
atgaattcagtggaaccatcacacaaaagcacacaaagacctcctcctccacaggggagacagagggatggcatgcatgtagcagtgaaaatcgtaaaaa

SEQ ID NO: 401489 - DNA, 100 bp, Homo sapiens
aaaggaaaagactcatatcaacattgtcgtcattggacacgtagattcggtgggaaagctcatggagcttcatggtgaaggcagtagttctggaaaagcc

SEQ ID NO: 401490 - DNA, 75 bp, Homo sapiens
gggagtcgccgctggagaggggctcggcgcccggcggggactgcagatctacgaactgcgtgtgatggagaccaa

SEQ ID NO: 401491 - DNA, 75 bp, Homo sapiens
atggctgcagaggatccatctgtcttagcaaggctgtcatcacagaaatatattcttccctctctcctgccttta

SEQ ID NO: 401492 - DNA, 75 bp, Homo sapiens
agacaagttctggaggagatgaaagctttgtatgaacaaaaccagtctgatgtctcaggtgcctaaaaggccaga

SEQ ID NO: 401493 - DNA, 100 bp, Homo sapiens
gttgtgccaatggtggagaagaaaacttcggatgcggttcatgctattattcagccggcagggaaaactgcggctgcaaaaatggtacctggccacttcg

SEQ ID NO: 401494 - DNA, 98 bp, Homo sapiens
tcacggtttttggaacaaggattttggatgaagaagtttttgaggcaattaagttggaatatgcaaggttggttaagttggcccaagaagacacccca

SEQ ID NO: 401495 - DNA, 100 bp, Homo sapiens
gcactgcgggcgcatccctgccccggcgccgtccgtgcccgcgggacctgacagccgggtcagaggtttcacgtggcaggatgactatactcagtatgtg

SEQ ID NO: 401496 - DNA, 90 bp, Homo sapiens
gtgaggtccactccagatgggacagggaaatcgtggaacacatggtccagcactttaaaacacagatctttggggatcggaagcccgtgt

SEQ ID NO: 401497 - DNA, 90 bp, Homo sapiens
caacggaaactagctcatctgtagagactgatttgcaacccttccgggaagccatagctctgcatgccacttctgccccaccaacgttgg

SEQ ID NO: 401498 - DNA, 82 bp, Homo sapiens
atgatgatatcattatgctgacctctgacgagctgcaatttggttatgagatacagtttatgtaacttgatggaagaaaatg

SEQ ID NO: 401499 - DNA, 90 bp, Homo sapiens
tggaggctgagtgctaaactgtgtggggcgcggatgggatccagctgttagtcgggtaggcatagacaaatcttcctattttcaagctga

SEQ ID NO: 401500 - DNA, 100 bp, Homo sapiens
gactacgacggcgttgatatcggtggtaacgacggcctcagcaggcggggaagatgaaagggccgccatggcatcagatgaaggcaaactttttgttgga

SEQ ID NO: 401501 - DNA, 82 bp, Homo sapiens
ggaacccctccgagacccagtccaaaagagatagagtttcaccatgttgtccagggtggtctcaaaactcctgagctcaagc

SEQ ID NO: 401502 - DNA, 99 bp, Homo sapiens
cactccagtgccttcttacagcagtagcagccaggaaaccctgagtcaagacacaacagatctttggatataggaaatcaaatgaatgtttctgaggag

SEQ ID NO: 401503 - DNA, 100 bp, Homo sapiens
ggaacgactgcggcgcgctgctggacgaagagctctcctccttcttcctcaactatctcgctgacacgcagcacaacctccaagagggaaaacatttctc

SEQ ID NO: 401504 - DNA, 100 bp, Homo sapiens
tctaccttcttctgatccagacagtcagtgtctgcttccctgtgtgtgtggaagtgccctcggagacggaggccgtgcagggcaaccccatgaagctgcg

SEQ ID NO: 401505 - DNA, 100 bp, Homo sapiens
ttgagccaggacacaacaccgcggagccctgcaggcgcaagaggtggaaacatacagaagaagcaaggaaattacagttagaggtcacaactgcccgaag

SEQ ID NO: 401506 - DNA, 82 bp, Homo sapiens
cgaaggccgccgaacctgcctggctagccggcgacttgagtgacgaagtctctggtaagaagagtgaaagcaaagaagccaa

SEQ ID NO: 401507 - DNA, 75 bp, Homo sapiens
tcaaattgaagagagcagttgaagaagtgaagaaattattggtacctgcatgaccaaagacttgaccactcaaag

SEQ ID NO: 401508 - DNA, 50 bp, Homo sapiens
cccatccctgcagcatgaacaagatgggtagcaagagtctttgaaataag

SEQ ID NO: 401509 - DNA, 50 bp, Homo sapiens
ctacctactgccaattggaaagggtatgttagagcccaccaaggaaccac

SEQ ID NO: 401510 - DNA, 82 bp, Homo sapiens
cttcggcagtccacccaccgccgccgcctcccaggttcatgcagcatcccaagaactttggcctgatcgcatcattcctgga

SEQ ID NO: 401511 - DNA, 96 bp, Homo sapiens
gctgactgcacttcttttttgagaaaggaaggaatatatcctgactgattacagcgtggaagatgaactggagatggccaccgtcaggcatcggcc

SEQ ID NO: 401512 - DNA, 100 bp, Homo sapiens
ctcagcggtagcaacctcgccccttgcaacaaaggcagactgagcgccagagaggacgtttccaactcaaaggacattgctgtccggaacatcctggtgg

SEQ ID NO: 401513 - DNA, 100 bp, Homo sapiens
gcccttatgaggcaatttgttaggccttttgttgtatttaatttttggaacaatttgatgagctaggaggttacaagatgttcacctaagattgagacct

SEQ ID NO: 401514 - DNA, 100 bp, Homo sapiens
ctgagcagctctcaggatcggctttcacttgtccacggagcaccaataagagaaggatacccagagttatattgacgaatgtcctgggaacggagttagg

SEQ ID NO: 401515 - DNA, 82 bp, Homo sapiens
ccgtctggatttccaaggaagaatttcctctgaagcaccgggtcccctggaagtgacgctgactcagccagtgaggagcggg

SEQ ID NO: 401516 - DNA, 73 bp, Homo sapiens
cgaccaagagggtgttcgactgctagagccgagcgaagccatctgtgagcgggtcacccccaggctctcccat

SEQ ID NO: 401517 - DNA, 75 bp, Homo sapiens
cgcgagccgccggccgggagggatccgggtcctgaagccctgggcgctgcctatggcacagccaagagcggtacc

SEQ ID NO: 401518 - DNA, 101 bp, Homo sapiens
tcggagagagaggtgctagtggctggacttgacctggaaagtaggccaaccttgtctatccagcatcctccatctgcagcaatcagtattcagcgtcctgc

SEQ ID NO: 401519 - DNA, 50 bp, Homo sapiens
cgcgagggcaccatggaggtgaatgcagatgagcagcaccagcagtaaga

SEQ ID NO: 401520 - DNA, 83 bp, Homo sapiens
tgtttttgttggcaacatttccgagaaagcttcagacatgcttataagacaactcttagcttttttcactaaagatgtcatcg

SEQ ID NO: 401521 - DNA, 100 bp, Homo sapiens
cttgcctgtgtcccacttgttcgcggcctatagagcataatggcagcgtctgaggttgctggtgttgtggccaatgcccccagtcctccggaatcttcta

SEQ ID NO: 401522 - DNA, 75 bp, Homo sapiens
gctttctcagcactagatctggactccgacccggcgccagcttcccatcgacggtcagtgcgcacgttgtaatca

SEQ ID NO: 401523 - DNA, 82 bp, Homo sapiens
cagcggaagaagatcaaggccaagatgttagggacaccagaggaagcagagagcagaacgggctcatgtcggggctgatgca

SEQ ID NO: 401524 - DNA, 107 bp, Homo sapiens
aaatcccactgggcagagcttgaaataagtgctggcccccaagaggaccctttccaagtccccagctgggggccctgtgtagacctggagtggacacgcccctcctt

SEQ ID NO: 401525 - DNA, 85 bp, Homo sapiens
attctgtggcctgcaggtgacatgctgcctaagagaagcagagagagtctacagggagattgaacaggtgattggcccacatcgc

SEQ ID NO: 401526 - DNA, 50 bp, Homo sapiens
gccgcagcgcaggcagcccagcagcagtggtctcggaaagagggtcgtgg

SEQ ID NO: 401527 - DNA, 97 bp, Homo sapiens
ccttgatcctcctcctaattgcagtccaatatcagatggaaatgatgcggagccttcgccatgtaaacattgatcatcttcacgtgggctggtatca

SEQ ID NO: 401528 - DNA, 100 bp, Homo sapiens
cagtcttgtctgcctcggctgtgaagtggggaggctggcaacagttttcttcagcgcccaggatgcagccggctaagaggctgaggggatctggcggtgg

SEQ ID NO: 401529 - DNA, 75 bp, Homo sapiens
agccccgctgagggaagggctgtcaccaatgagcctgaggaggaagagccagcaggccgaacgagagtatgagaa

SEQ ID NO: 401530 - DNA, 75 bp, Homo sapiens
gacatcagccacgcatctgaccttgttggagcaggccgggctctcgccatgggtcactgtcgcctctgccacggg

SEQ ID NO: 401531 - DNA, 83 bp, Homo sapiens
gcgttacgggcggtacggaggagaaacgcttcgttaagggactcaggcagtacgggaagaacttcttcagaattagaaaggag

SEQ ID NO: 401532 - DNA, 82 bp, Homo sapiens
cacggaggacgggaaaatccagcagcaggatgtctcccgtgctaagctagcagctataattccggacccagttgtagctcct

SEQ ID NO: 401533 - DNA, 100 bp, Homo sapiens
atagaaaatctagagccccacattgatgatccagatgttaaagaatgatatggaacctagcaaagctgttccactgaatgcatctaagcaagatggacct

SEQ ID NO: 401534 - DNA, 75 bp, Homo sapiens
aaaatctacaagatgatgcagggaggagattgtcattcttcagggatggcagccctaaacacagcatggcaactc

SEQ ID NO: 401535 - DNA, 80 bp, Homo sapiens
cccggctctgcatcgcgtcgccatgatgggccatcgtccagtgctcgtgctcagagccaccatgttggtgataccccccg

SEQ ID NO: 401536 - DNA, 82 bp, Homo sapiens
aggatgctgagtccggagcgcctagccctaccggactacgagtatctgggttatcaatactctggctgaccatcatcatcgt

SEQ ID NO: 401537 - DNA, 75 bp, Homo sapiens
gaaacatgcagattatatcgcatcctatggctcaaagaaagatgattatccaggcccagacatgtccgtccttgt

SEQ ID NO: 401538 - DNA, 100 bp, Homo sapiens
cccgccccctggagggcacctccttcatcgtggaccaggccaaccggccccactgtgtccccgactaccacaagcaatgataccgtctttatccaagtta

SEQ ID NO: 401539 - DNA, 100 bp, Homo sapiens
agggaaaaagaggaaggcctgtaagaactgccctggtacctgacagtgtaaagaaggagctcctacaaagaataagaacattccttgctcagcatgccag

SEQ ID NO: 401540 - DNA, 87 bp, Homo sapiens
tcaacaaacaccagcgctttgggtgtcccaccggccttccgggttccagcgccaggcctggtgcctgccccaggaggatgagcattt

SEQ ID NO: 401541 - DNA, 83 bp, Homo sapiens
cttcggctgtgtcaatgccattgaattctccaacaatggaggccagtggctggtctcaggcattttttactgtctacagaaac

SEQ ID NO: 401542 - DNA, 83 bp, Homo sapiens
gctgtatttactgggaactagtcttgcaggaaggtattctttaggtgatgctagaaggcctcttcatgaaacagcagttttgg

SEQ ID NO: 401543 - DNA, 100 bp, Homo sapiens
gacctttgtcctgcacaccattgttcgaggtttcttccactcagcctgtgggagtctctatgctgcagtggcgaactttctgaccaagtatacaactacc

SEQ ID NO: 401544 - DNA, 75 bp, Homo sapiens
ttggaagcagccgatccagcctgcggagcctgtggggcagtgaatcagaaatcctgcaccatgagaagcagtacg

SEQ ID NO: 401545 - DNA, 74 bp, Homo sapiens
ttgaggtcactttccagcagtccagcacggccaagtcagccacctggacgagagcgtactgcggtcagtgcagc

SEQ ID NO: 401546 - DNA, 82 bp, Homo sapiens
ggatcattgctctttgaattccagtcccgtagttgatctctctaatgtattagatcttcatgcctttgatagtctctctgga

SEQ ID NO: 401547 - DNA, 110 bp, Homo sapiens
ggtggcgctgctcatcgtttgcgacgttccctcagcctctgcccaaagaaagaaggaggaaaaggccaaagttgttgagcccctggactatgagaatgttattgcccaaa

SEQ ID NO: 401548 - DNA, 80 bp, Homo sapiens
gaccttcaagatagacattgaccccgaggagacggatgtacagttacccagcacgtgtacctcctcctcctcctattgct

SEQ ID NO: 401549 - DNA, 76 bp, Homo sapiens
tggatccacgtcttctacaagaggtagatgtgttggagtctcagttctcccagctgcttcatcagatcaattctac

SEQ ID NO: 401550 - DNA, 76 bp, Homo sapiens
cctggataaagatgcaccggttccttttgcagcatttggaggctacttaagtgaagtagtagaagaaaatactcca

SEQ ID NO: 401551 - DNA, 101 bp, Homo sapiens
cccaagtccagaatccgcgcgcaccgcggtatcattgcccagtgcctaagatcttttatgttcagctcactgtaggaaataatgaattttttggggaagga

SEQ ID NO: 401552 - DNA, 50 bp, Homo sapiens
cttattcctgtccggagacagcctaaggattaaagtatggacagccaacc

SEQ ID NO: 401553 - DNA, 99 bp, Homo sapiens
gccgtgtggctgctcagctcgggccacggagaggagcagcccccggagacagcggcacagaggtgcttctgccagaaacctctgcgccatgagagccaa

SEQ ID NO: 401554 - DNA, 78 bp, Homo sapiens
ccatgctcttggcattgcagctttctatggcggagaacaacaaacagctaatggttgcagagaagaatggaacaatcc

SEQ ID NO: 401555 - DNA, 82 bp, Homo sapiens
tggagccgagatggagccctggtgggcacggcgtgcaagggagtgcatccgccccaacccttttccccctcgtctcctgtga

SEQ ID NO: 401556 - DNA, 75 bp, Homo sapiens
gcagcatggaggacgatgcaccagtgatctacgggctggagttccaggttgttcggaatcctataattgaaaaac

SEQ ID NO: 401557 - DNA, 90 bp, Homo sapiens
ggaaaatgtgataaaaacaaggtggaagattcttccaaggaaccagtgcgaagactatcatagaactctctgaagagcgggatggtctcc

SEQ ID NO: 401558 - DNA, 88 bp, Homo sapiens
ccccatcggttgttgtctgggcggggaaatgttttgggggatcaggtgacctccgcaggcatgtccgcactcacactggggagaagcc

SEQ ID NO: 401559 - DNA, 76 bp, Homo sapiens
ccgcccgtcctccaactacagggaccgcacgaacattaaccaggtggtatttgttggaaatttcttgagaattaat

SEQ ID NO: 401560 - DNA, 83 bp, Homo sapiens
cgtgagcgagcagaggcttaaggtcttcagcggggcgctccaggaggcactcacaggccctgagcctgtgcaattatttcgag

SEQ ID NO: 401561 - DNA, 100 bp, Homo sapiens
agactgacctcatgctggcggctctgcgtacgctggttggcatttgctctgagcatcagtcacgggacagagcgggatgccaccagcttgtccaaaggga

SEQ ID NO: 401562 - DNA, 100 bp, Homo sapiens
ggccctgagtgctgaggaggaagctgccatgcacttttccctggcatttttcctgcatggctctgtacaactcaatcaagaatgagaagcttgaatgggc

SEQ ID NO: 401563 - DNA, 100 bp, Homo sapiens
gggaagctgatcatgggcattggtcaccgagtgaagtcgacttgtctgcagcgcagattgctacatattgcttggcccagctcctatgtgatgtgactct

SEQ ID NO: 401564 - DNA, 100 bp, Homo sapiens
tgaaacgtcagctgcgctcccctaggagtgctgagcccgcggaaccgcagccatgggcgtctctggccgagcctctttttgtggaaaacgacagcagcag

SEQ ID NO: 401565 - DNA, 76 bp, Homo sapiens
gattatccatgacactgttctgccctgctctgctctaacaacatttacatgggaaagcggaaccaccaaaaggagt

SEQ ID NO: 401566 - DNA, 82 bp, Homo sapiens
gttcgagcgctgttctcgctccggagccgctgcacatttcggccaagaagcttgagagaagaaaaatttcagaaaaattgtc

SEQ ID NO: 401567 - DNA, 83 bp, Homo sapiens
cctcatccagcaggcggtgacccgctaccggaaggccatcgccaagtgggtgtataacattctcgacaagaaggctgaagcgg

SEQ ID NO: 401568 - DNA, 100 bp, Homo sapiens
cgcgggagtaggcgacgggcgtgagggcgaggcggcggcggcggcggccagagagcagcagccgcctgagtttgacaggaggagtcaatggaggtgtcca

SEQ ID NO: 401569 - DNA, 119 bp, Homo sapiens
aaaaagaaactggagccaccatcaagctgtctaagtccaaagatttttacccagacaagttggatggcttgaggactggtactaaaaggaaacgtgactgggaggccattgccagcaga

SEQ ID NO: 401570 - DNA, 75 bp, Homo sapiens
tttgccaggtgtttgttaccttgggagtgcatccgccccaacccttttccccctcgtctcctgtgagaattcccc

SEQ ID NO: 401571 - DNA, 99 bp, Homo sapiens
agcagaatgtgatttgcttgaagatatgaggcaagagggcacattgggagattcagcttgcaagagtcctgaatctgatctagaagacttctccgatga

SEQ ID NO: 401572 - DNA, 96 bp, Homo sapiens
cagcccgagcgcggtggtgccctcagccccgtcctcttgtcctcctcagcctcgggaccagtgactttcgaggatgtggctgtgcttttcactgag

SEQ ID NO: 401573 - DNA, 50 bp, Homo sapiens
gaggagtcctccacctcgtcgcaggcttttacctgatatccccatcagaa

SEQ ID NO: 401574 - DNA, 98 bp, Homo sapiens
aggtgctccacgaagacgaaaccacgctctcgtggcattatccttcagtggggctattggactgacttttcttatgctgggatgtgccttagaggatt

SEQ ID NO: 401575 - DNA, 75 bp, Homo sapiens
cgcagtggtcgcttcttctccttgtgctggtcccaaaggcgataacatctatgaatggagatcaaccattctagg

SEQ ID NO: 401576 - DNA, 100 bp, Homo sapiens
cgaaggccgggacccggttccccggcccacagtgggggtgtgcaaacccgagagaactgggttctgtggatggagttataaaggaagtgaatgtgagccc

SEQ ID NO: 401577 - DNA, 100 bp, Homo sapiens
gaacgtctggactctagggaccctgctgaatagctggggctacaggcgtgtgtcactgcgcccaggactgcaggatgccggctggaagaccgagaagcac

SEQ ID NO: 401578 - DNA, 75 bp, Homo sapiens
cgccggcgggtcgggccgggcaatgcctcgcgggcgcaatgaatccgcggcaggctcaggatatcaaaaaactcc

SEQ ID NO: 401579 - DNA, 75 bp, Homo sapiens
ggaggctctaggctccaagacgccgtcgcttgagcctcctgctcggtgcgcttggagaggccttgctggttttct

SEQ ID NO: 401580 - DNA, 90 bp, Homo sapiens
gtgaatatcctgacatgtgacaatgaaattgaattgaagaaaattgcacgtaatcacccaaatgccaattgaagctttatatcaaactac

SEQ ID NO: 401581 - DNA, 88 bp, Homo sapiens
gaaggcggctttagtggcagcatgaagcgcaccccgactgccgaggaacgagagcgcgaagctaagattgccatcacgaaagccaaag

SEQ ID NO: 401582 - DNA, 97 bp, Homo sapiens
ggaggtcctgccgtccatgcggaagatcgtcgccacctggatgctggagacctccgcgctctggcagctcctcttccgtgtgctctcgccactccct

SEQ ID NO: 401583 - DNA, 99 bp, Homo sapiens
caacatgtttgcagctgctcagcagctctcgcagaacatcagttcagtggaagagaaagccaatacccacctcctcttgggcatgtgcttagacgcctg

SEQ ID NO: 401584 - DNA, 90 bp, Homo sapiens
atatcttgaaagatgtcattcctccattggaacaactggctacattattggaattttgaagtcatgaaaacatcagatgaaccaacctgc

SEQ ID NO: 401585 - DNA, 75 bp, Homo sapiens
gagaaggaccgggaaaagtccaagcatagcaacagcggagcgtgctttggacaccatgaattttgatgttataaa

SEQ ID NO: 401586 - DNA, 90 bp, Homo sapiens
ttcgccgcgccccacttgctcgtgcactttacacacatgaggacaatttcaaaggatcagtttgaaaagaagaaaaatgataccttagac

SEQ ID NO: 401587 - DNA, 100 bp, Homo sapiens
taaccattccaaaatctctttcagagagagatcatcattgcctgaatttagctttgtgactgcaagagcaagaccagttcctgtctggagacgactgtta

SEQ ID NO: 401588 - DNA, 75 bp, Homo sapiens
ggtacaccacgctgagcctgctgcgccgtgccaggatgcacatccaggtgtcctgctccttgaccacgatggggg

SEQ ID NO: 401589 - DNA, 74 bp, Homo sapiens
tccagctccgctctcttcggctgccccaatccccggcagctctctcaggattgcacctctgcctccacctcccc

SEQ ID NO: 401590 - DNA, 83 bp, Homo sapiens
ttccccgttagaactcgcgtttccacttcagagatctggtaatggaactgctggtccatctgaataaacgtataaaaagccgc

SEQ ID NO: 401591 - DNA, 75 bp, Homo sapiens
acacctccgggtcggagctggacgggaggaactgcaagcacatgttgaccagataactgaaatggcagcagtaat

SEQ ID NO: 401592 - DNA, 75 bp, Homo sapiens
atttcccattatgaaaaggaatacattctttcatcattaagaaatcaggcctaattcctcgcttaattaaaattg

SEQ ID NO: 401593 - DNA, 75 bp, Homo sapiens
ctgggacggagcctgacctcttacttcctgtggtcttctgagttgacagagcagaagcttcgtgcctgtttagag

SEQ ID NO: 401594 - DNA, 74 bp, Homo sapiens
ccgcatggcgggggccatcgcgcagggcctcatcagagcaggtgctggagaatctggtaaaagcaccattgtga

SEQ ID NO: 401595 - DNA, 50 bp, Homo sapiens
agatcctggaggtggatctgaagaacggcaaccatgtccaagggacctgc

SEQ ID NO: 401596 - DNA, 75 bp, Homo sapiens
tccggcatggccgggatcattaagaagcagatcctgaaacacctgtcccgcatcagaagagctaacaattgctgg

SEQ ID NO: 401597 - DNA, 100 bp, Homo sapiens
aggtgattccagtgcagaccgactcttcccacctcagggtgaatcgaaacgcatcaccctggtcctccagcagccacagtctggaggtccccaaggacat

SEQ ID NO: 401598 - DNA, 110 bp, Homo sapiens
cagcaagggcctgacgctgagcgagcaggcgctgcacaccaagcggttgtcgcctggcgggcacaaacagaaggtgctgacctggaggggaagcggcagatgaaggtcag

SEQ ID NO: 401599 - DNA, 82 bp, Homo sapiens
cttcgctgtggcatggcggacgaggggaagtcgtacagcgcaatcatcctcttccagtggtagcgtgtttgggtctggaaac

SEQ ID NO: 401600 - DNA, 100 bp, Homo sapiens
ctcatcctccccctcaagttcaaggtctaggtccagcgcccccatggacttcgccctcaatacctacatgagccatgctgggatccgtcttcgagaggca

SEQ ID NO: 401601 - DNA, 82 bp, Homo sapiens
cacgggatcccagcctcaggcctgcacggacggtgttggttgggggtcggcactcttcaccctcccgagccctgcccgtctc

SEQ ID NO: 401602 - DNA, 98 bp, Homo sapiens
tgcacttcacagggctgtggaaaaccgatcacggaggaaagctccaccttaggagaagggagtattgactgggctcccaagagcgaccgcattgtcac

SEQ ID NO: 401603 - DNA, 132 bp, Homo sapiens
gggatcgtgaccgagaccgtgaccgagagcgtgaccgagagcgcgaatatcgtcatcgttagaaggtcatacttacctggttgcttgcgcatctagtaatgttggatcatattctggatgttttgaatacca

SEQ ID NO: 401604 - DNA, 98 bp, Homo sapiens
aacagctaaacggagtcgccacaccactgtttgtgctggatcgcagcgctgcctttccttatgaagaagacacaacatccatgagtatgttttctgat

SEQ ID NO: 401605 - DNA, 100 bp, Homo sapiens
gggaaatctggcacaacggctgggagaggaaacttgatgcttctgggccaccatttgccagggcctcgctcgaggaaactatggtccaggaggcagtgga

SEQ ID NO: 401606 - DNA, 75 bp, Homo sapiens
cactccatcgccaggatctccttcgccaaggagccccacgtagagcaggaaggttgtgcaggaccagcgttccct

SEQ ID NO: 401607 - DNA, 75 bp, Homo sapiens
aagcctccatgccccggcagagggacggacacgcggacgtctagcggaggtgtccggctttgctggcccagcaag

SEQ ID NO: 401608 - DNA, 100 bp, Homo sapiens
ccatgacgatcagcttgatggaccaaaatacaaatgcacagtgtctctagacttcatcagagctattgcaaggagcttgcaagtttttgaagaaacagga

SEQ ID NO: 401609 - DNA, 50 bp, Homo sapiens
agtcggcgtaactatcgcctgacaggaatggtggtttgggccacatgaac

SEQ ID NO: 401610 - DNA, 80 bp, Homo sapiens
cgacagcccagatgactcaactctcagtgaaagtgccaatcaggtctttctggcttgcatgcttgtctttcaacccgatc

SEQ ID NO: 401611 - DNA, 80 bp, Homo sapiens
aagatggtgcccaccacatggaggccagcctaggtcttgtatgaaacctgtgagggcgatgccagtccctccactccaga

SEQ ID NO: 401612 - DNA, 50 bp, Homo sapiens
caccttggacacctcgcttggagccaggactgtctccagtttggtcctcc

SEQ ID NO: 401613 - DNA, 97 bp, Homo sapiens
gaggaggaggtggagttgctgcccttccggagtccgccccgtgaggagaatgccccacaccagtgagaagcatcagcaccgtgaacttgtctgagaa

SEQ ID NO: 401614 - DNA, 96 bp, Homo sapiens
cccatcctgcagcccaccttcctgcagtgtcgtggcagccagacgaggacagccggctgctgcccctgctggtctgcctgcggttcctgttcgtgc

SEQ ID NO: 401615 - DNA, 83 bp, Homo sapiens
accaggagcagcgaggcactcatcctgcacgccggcgagtgccagcgggcgaactttctgaccaagtatacaactacccagag

SEQ ID NO: 401616 - DNA, 100 bp, Homo sapiens
ggcccttccaaataagcggcataaagcaattgagaattcagtcataccctaatgatcccagcaagataatgtcctgtcttctaagatgtgcatcaagcct

SEQ ID NO: 401617 - DNA, 98 bp, Homo sapiens
ttttgcggaacctgaaaaattcaagaagttgaaaaacgcttttcacgtcacctggagagatgcacaggcccagtgcttttacaacagaggaatgctaa

SEQ ID NO: 401618 - DNA, 75 bp, Homo sapiens
cttcaagcttaggaccacccaccatgcctatccagacttttggaaaagaatttgataaacattttgggaaaggag

SEQ ID NO: 401619 - DNA, 82 bp, Homo sapiens
ccaagttcctgacagcctggaacaacgtcaagtacgctcctgtccaaatatgacccccagaaggaggcagagctccgcacct

SEQ ID NO: 401620 - DNA, 50 bp, Homo sapiens
cagggcaccagttcgacgcgctttttgttactaaaagatgtaactgaact

SEQ ID NO: 401621 - DNA, 90 bp, Homo sapiens
gatttcccacccagaatctttaggtaaatgaggtggagccgccaccaaaatgcagattttcgtgaaaacccttacggggaagaccatcac

SEQ ID NO: 401622 - DNA, 100 bp, Homo sapiens
agcccagctcctgacccatgctgggccctcatgtttgctttcacaaccaaagttctgggccattcagacatcagccttgatcctccggacaaaacttgag

SEQ ID NO: 401623 - DNA, 97 bp, Homo sapiens
gccaccgctgcccgcctgccgccgcccgcctccgcctgccttctgccgccggccggcgcgtcgtccccacaggttgtggcagcactgcctgaaggta

SEQ ID NO: 401624 - DNA, 100 bp, Homo sapiens
ttaatctcagggaactggatgtcagcaagaatgagacagccggcgccgccccgaggagtgagcggaggatctgcctggagctagccagcctcatggcctg

SEQ ID NO: 401625 - DNA, 75 bp, Homo sapiens
cagcggaggtgcagtgtttaaaaaggatgatattggacgaaggaatgggcaagtagagatggggttttgccatgt

SEQ ID NO: 401626 - DNA, 100 bp, Homo sapiens
gactcatggaggctgagcatttattcaggtgatactatcaaccaaagcaccctgccctcacagcagaaccgtttcccagactaccttgaagccattcctg

SEQ ID NO: 401627 - DNA, 100 bp, Homo sapiens
agacttcaaagttatggcaagagatgagttaattctaaggcgcatattaaatttcctattgactacccctattcaccacctaccttcagattcttgacca

SEQ ID NO: 401628 - DNA, 83 bp, Homo sapiens
ggattatttcggctccttatgccctgttcttctggatccgtttaactaaaggaacccaagccagaccgtctccttgtattgaa

SEQ ID NO: 401629 - DNA, 123 bp, Homo sapiens
ccctgagtcactgcctgcgcagctccggccgcctggctccccatactagtcgccgaatgcctgtctggggaggtggaaacaagtgtggggcctgtgggaggaccgtgtaccacgcagaagagg

SEQ ID NO: 401630 - DNA, 50 bp, Homo sapiens
gaagtctgggatgtagtagacaaagggtgcaacaccggaggatttcagca

SEQ ID NO: 401631 - DNA, 100 bp, Homo sapiens
ggcgtcgagaggaccatcctgggtgctggccctgtgctggaggaattgaatgatctggcacgggaccctccagcacagtgttcagcaggtcctgttggag

SEQ ID NO: 401632 - DNA, 83 bp, Homo sapiens
cgcggcagcccgtggagtcggctgagggaaaagcgaggcaaggcaggcggaactcccccactggaaaggattctgaaagaaat

SEQ ID NO: 401633 - DNA, 100 bp, Homo sapiens
ggcggcgggctggagacatggaccgcggcgagcaaggggctttgttatgcacctaaagccatattggaagctccagaagaaagagcaccccccggaagtc

SEQ ID NO: 401634 - DNA, 100 bp, Homo sapiens
cctccccccgctccgcccgctcaggtgaatacatcaagacctggaggccacggtacttcctgctgaagagcgacggctccttcattgggtacaaggagag

SEQ ID NO: 401635 - DNA, 83 bp, Homo sapiens
ctcaagtacaactcccggcacgagctgctgatgcaaggaatcccctgggctcccgtccactccactgctgaccagcccattcg

SEQ ID NO: 401636 - DNA, 78 bp, Homo sapiens
tcctacaggagttcaaaacccacacatcctactttggggataaaggattatttggtcttctggatttggaggcaatca

SEQ ID NO: 401637 - DNA, 98 bp, Homo sapiens
gggaattcatgtggaggtcagagtggaagcaggagcccgttcggtctgaggaaggccgggacatggcgaaccggatcagtgcctttggctaccttgag

SEQ ID NO: 401638 - DNA, 117 bp, Homo sapiens
cctgctggtgggtgttccagctggaagtaaccccttccgggagcctagatcctgtgctttactctgaagactctgccaagaattcaagagccccacagccaatattcagttacagat

SEQ ID NO: 401639 - DNA, 98 bp, Homo sapiens
agaagtataatgatttatataagttccagcagtggcagctgaaatatcctaaactaattctccgagaagccagcagtgtatctgaggagctccataaa

SEQ ID NO: 401640 - DNA, 100 bp, Homo sapiens
tgctccaagattcagggctggcagtattccttctgttctggtggctcgatcttcattgctttcctctggacttaaactgttttggctgggcctacttcac

SEQ ID NO: 401641 - DNA, 100 bp, Homo sapiens
accctggggcttcacccttaaggggggtctggaacactgtgagccgctcacagtgtctaagaagtctggcaagttgatgagcagatagatcactacaagg

SEQ ID NO: 401642 - DNA, 50 bp, Homo sapiens
gtcacaggcacatcagcaaagagggagctgtgattggtatagacgatgag

SEQ ID NO: 401643 - DNA, 98 bp, Homo sapiens
gcgactcgagggtgacgctcgctccgctcgtcccgctcgtcatggcctacccgggatacggaggagggactctgctaacaccagatagtggaaagaaa

SEQ ID NO: 401644 - DNA, 100 bp, Homo sapiens
tttcaaggaagaaaatcttaggattgagctaagagaacgagagatagaacgactgtcagttgctttggatggtggtcggtcccctgatgtcctttctctg

SEQ ID NO: 401645 - DNA, 87 bp, Homo sapiens
tttttcctgtcgtacgtgggacaggccacgctgtccgtccgcagtaccgacgcctgcagggagtgcatccgccccaacccttttccc

SEQ ID NO: 401646 - DNA, 117 bp, Homo sapiens
aagaaaatggcctggtctttgaggactcagaggaactggcagctcagctgcagtcaccaccaagtaagcgaagaaaattagagaaaccgagaaaacccataacattcgtggtgctgg

SEQ ID NO: 401647 - DNA, 82 bp, Homo sapiens
tgctgcagtaactacattcactcaggacaggcagataagctctgtatgaaaaagctgatatcaaggggcctgaagacaagaa

SEQ ID NO: 401648 - DNA, 100 bp, Homo sapiens
ggcagtgagctcggccggcaaccgagggacccgcgtccaggtggccaaggtggaatacgtcaggaagaagccaaaattaaaagaagtccaggtgaggtta

SEQ ID NO: 401649 - DNA, 74 bp, Homo sapiens
ttcttcattgctgcttcttatgctccatgcttgcttggctcaggaacaacagaagagaataaagaaaatgacct

SEQ ID NO: 401650 - DNA, 73 bp, Homo sapiens
attgccgctcggaaacacatggacaaggtggtggcagcagaggtagttatggaggaggtgatggtggatataa

SEQ ID NO: 401651 - DNA, 75 bp, Homo sapiens
tttcagcattccatgtgaacccaatcttgatgctttaatacagaaccagcatggaatctaagggaggaaattatc

SEQ ID NO: 401652 - DNA, 49 bp, Homo sapiens
cttttcctccacctaccttcccgagattcaggagcagttccagaaaaat

SEQ ID NO: 401653 - DNA, 75 bp, Homo sapiens
tgaaaaatattatggcaacaaatgcattattccatggtttctctacagtgagttaatgaaatacaactcccagac

SEQ ID NO: 401654 - DNA, 74 bp, Homo sapiens
gtctcaggcctttagtgatgatgcatgtgcagtctttgccaacaaaaaaaattaccaagaaacctattccagat

SEQ ID NO: 401655 - DNA, 98 bp, Homo sapiens
tgagggttctggaagtcggggccctacaagcagtctacgagcttgagagaattctgaacagggtttgtcctggttgtggtcaagactggatgatgtaa

SEQ ID NO: 401656 - DNA, 75 bp, Homo sapiens
atctcatcaaaaaggacaccagcaagctgttcaatgaggagacggtgatcgttggctcctacttgattgcacacg

SEQ ID NO: 401657 - DNA, 75 bp, Homo sapiens
gccctgctacgcgtcgggtccaggtggcagaacatcctaggatcccaaaatggctgggcgaaaacttgctctaaa

SEQ ID NO: 401658 - DNA, 51 bp, Homo sapiens
ggtctccagcactaactatttcaaaagagacagagtttcaccatgttgccc

SEQ ID NO: 401659 - DNA, 96 bp, Homo sapiens
tgatgacaactgccgctcaggccatctctggcttcttcgtgtggacggccctgctcatcacatgccaccagactcttccagctggagttggaggct

SEQ ID NO: 401660 - DNA, 100 bp, Homo sapiens
gcgccctgccgagcgggggcccccagtgcggcttttcaccgaggaggagctggcccgctatggcggggaggagtcttccgtgtgtgctaagatcgtgcag

SEQ ID NO: 401661 - DNA, 82 bp, Homo sapiens
cgcccagggaaggcatttccagcccgcccacccaggaaataatgcaaaaggtgtcccaaggctcctgaccagtgaacaaaga

SEQ ID NO: 401662 - DNA, 97 bp, Homo sapiens
gccatcagccctgacagccccatcagtcaggtttgggactgacaatagctgactaacatgtcctgagctgtgagagggcatagcaagaaggccttca

SEQ ID NO: 401663 - DNA, 102 bp, Homo sapiens
ggatgagacatttgctacagcatcccacattaagtcaacgtacctaggtgctgatatggaagaatttcatggcaggactttgcacgatgacgacagctgtca

SEQ ID NO: 401664 - DNA, 152 bp, Homo sapiens
attggcagcacagaagaactgaagataggcaacaagatgatgagggcgcggcagtatccttggggcactgtgcaggaggggccgtatggggtctttgctggaagagatgcatccaggggccttgccacattttgcctggataaggaagcact

SEQ ID NO: 401665 - DNA, 49 bp, Homo sapiens
ggtccgggcggggccggggggaaggctataacaagggccacatttaaaa

SEQ ID NO: 401666 - DNA, 101 bp, Homo sapiens
agtaatagatttttccctctaccttaaggatgtgcaggatcttgatggtggcaaggagttggcagcgctaaaccgggccttcagaaagttgttgatgtgct

SEQ ID NO: 401667 - DNA, 83 bp, Homo sapiens
ctcagctcctggggctgctaatgctctgggtctctggtgtgcaactgaggaacatggctcaagaaactaatcacagccaagtg

SEQ ID NO: 401668 - DNA, 82 bp, Homo sapiens
cattgacatttaattttagggtcctttatatagaagggagagtagatgccggtggccgtgggtccctacggacagtcccagc

SEQ ID NO: 401669 - DNA, 100 bp, Homo sapiens
gctctacatcccatctgtggatcttctgactgcccagcttctcagatgaccaagatggtgctgcagatggtgctgaggatggagaacccaccaagccccg

SEQ ID NO: 401670 - DNA, 82 bp, Homo sapiens
cgcgtcgcggaggcacgtgtggagccccggcagcaggagcgtcgcagagaggtggagaagagcgagtacttgagaaagaaga

SEQ ID NO: 401671 - DNA, 83 bp, Homo sapiens
ttccacagatgtacctgaaaagtcgtcactctttcaccaaggttacacaaggacaggctcaatctttctggcccaaactcagg

SEQ ID NO: 401672 - DNA, 76 bp, Homo sapiens
cagcagactctgtccattgcaaagatggctttcaaactgggcctgagctatacccccttggcagaagtaggcctga

SEQ ID NO: 401673 - DNA, 95 bp, Homo sapiens
caaacagcaacggaacctgtgtacttgaggtatgcttcagaagtgtccttctgttgatgacttcgtaagtgccctcgtttccgacttggatctgg

SEQ ID NO: 401674 - DNA, 96 bp, Homo sapiens
tcccgatcccgaccccaaaagagtattcttggatcttgcacaggaaggaattaaaggaatcattaaccaatggcaacaggaatccaaggataaagt

SEQ ID NO: 401675 - DNA, 100 bp, Homo sapiens
tcacagatcctgtttcagccccctgtgcgccaccattgcagccaaagctggacaatccagatgagcaagcagcccagatcagacgagagctggatggacg

SEQ ID NO: 401676 - DNA, 73 bp, Homo sapiens
aaatcgcttggttaaaacctgacacttttaacaggtagctacagcaagctgggtagcaggcagatccaaagga

SEQ ID NO: 401677 - DNA, 82 bp, Homo sapiens
tctgtcttcggtggactccttcggcagtccacccaccgccgccgcctcccagcttgctatggcattgttcaagtacccactg

SEQ ID NO: 401678 - DNA, 100 bp, Homo sapiens
cttctttactgctacctgccaagatggggtatcctatcctggtcagaggaagtgtgagggtctgaagattggggacacgtgcacagccagagaacaacac

SEQ ID NO: 401679 - DNA, 82 bp, Homo sapiens
ccgcgcggggggcgagtaagccagcggcaggaccagcgggcgggggcccacgacacggggtcactctggtgcccattgagga

SEQ ID NO: 401680 - DNA, 75 bp, Homo sapiens
gctcgatggggacaataaatacgacgctggggaacatggcttacagcgagtgatagacagccaagcagagaaact

SEQ ID NO: 401681 - DNA, 100 bp, Homo sapiens
taaacatgcaatgaacccaaaaggcttttcatgcaacacccaacacttataagcggaagaacacagaaacagctctagacaacaaaccttgtggaccaca

SEQ ID NO: 401682 - DNA, 50 bp, Homo sapiens
cagccttcccagtagctgggaccacagatgctgacctgacctttgaccag

SEQ ID NO: 401683 - DNA, 75 bp, Homo sapiens
cattttaattttgccggaatatttcaagacaccgaaagcccatgaaacccctgaaggccaccgccaccacctccc

SEQ ID NO: 401684 - DNA, 75 bp, Homo sapiens
gcggcaccgggaggccgggccgagcggggctaagtgatggatcttgtactccgtgttgcagattactattttttt

SEQ ID NO: 401685 - DNA, 83 bp, Homo sapiens
ggggaggcccccacctccccttctattgttctgtggcccagaacaccttccaccatgaccacctcagcaagttcccacttaaa

SEQ ID NO: 401686 - DNA, 83 bp, Homo sapiens
gcaggctggagcccaagccccagccccctgtggctgaggctacaccccggagccaggagggtccgactgcagacacagccacc

SEQ ID NO: 401687 - DNA, 100 bp, Homo sapiens
atcaccatgaggagcctggctgggattttgagaagggcttgggcagcagaatcagccgcttacaaacacgcagatggcaagaagattgatggcaggaggg

SEQ ID NO: 401688 - DNA, 100 bp, Homo sapiens
cacacaactgggagatgaattaccaagaggcagcaatctacctccagtgttctaagaacggaagcatctgggctggatggaatttagcatcaagcagagt

SEQ ID NO: 401689 - DNA, 97 bp, Homo sapiens
ccagactgaggaagacccggaaacttaggggccacgtgagccacggccacggccgcatagggtaggagtcaatgaagacatcttagtcttaacaagt

SEQ ID NO: 401690 - DNA, 100 bp, Homo sapiens
ggaggagccttctcaagaacagagcaacctgggctggctgagttatggggctttgaagggagacgggatcctcatcgtcgtcaacacagtgggtgctgcg

SEQ ID NO: 401691 - DNA, 51 bp, Homo sapiens
gggcaaggccctcttcccgggaagcgactcactgagcaagaaccctggcta

SEQ ID NO: 401692 - DNA, 100 bp, Homo sapiens
gggtaaatgagggtgttgatttctccaaggatctgctgaaaaaatgcatcttctgcagacaccgggttaagagggtctctggagcctgcatccagtgttc

SEQ ID NO: 401693 - DNA, 100 bp, Homo sapiens
tacgatttaaaacttcgccagaatttgtaattaagaatcgttttcatcgtgtgttcctaccctcccactcactggacactgtgtccccatctgatacgct

SEQ ID NO: 401694 - DNA, 98 bp, Homo sapiens
gatcgccagcgccggcctcctccgtgcggagaagaagctgcggccgcacctggccaaggaaaaaagggttgctcattttgggtatcactggagtctga

SEQ ID NO: 401695 - DNA, 88 bp, Homo sapiens
ctggtaatagatgtctgacaaactaaagaaagacttgtgttacataacaacgaacttgatgcaagtgataggtttgccaaggtcagac

SEQ ID NO: 401696 - DNA, 75 bp, Homo sapiens
ccagtccctgttactccattttggccagaaattcaaggcctaagatctggcaaacttggtgaacagtgtgaagca

SEQ ID NO: 401697 - DNA, 100 bp, Homo sapiens
aatcccgtgtgcagtcgccccgcgccccgcgcgacccttcgggaagtaaagcaatgaatggctctgcagctaaactacagcagtattattgttggccaac

SEQ ID NO: 401698 - DNA, 100 bp, Homo sapiens
gtcgacatgagtgatgtggaggaaaacaacttcgagggcagaatccctaaagaagtggctgacatctttaacgcccccagtgatgatgaagagtttgttg

SEQ ID NO: 401699 - DNA, 75 bp, Homo sapiens
ctccgcacctcggggacattattgcgcgtggaacggctgcttttggaagctctacgaactcgacggggaccccaa

SEQ ID NO: 401700 - DNA, 83 bp, Homo sapiens
ccgcgcctctcttcgcctcgcctcgggacccgcggtccccgctcttgctgggcatcagtgccttcctggtccccatgccaacg

SEQ ID NO: 401701 - DNA, 110 bp, Homo sapiens
gaagaagcttcgtgtccaacctgttcagtcaatgaagcctgtgagtggacacccttttctcaaaaaggtcaaaatgtgggtacagctcctgattcccaggatagaagatg

SEQ ID NO: 401702 - DNA, 100 bp, Homo sapiens
gtcattgctcatatagaagacccagaggacactaaccaagcctcccctggtgaagacacaaactgtcaccatctcagataatgccaatgctgtgaaaagt

SEQ ID NO: 401703 - DNA, 83 bp, Homo sapiens
gacggattcatttagagctgcggaacaggacgccctctgatagaggaggttcagatgagcccctgctgacttgagagagacag

SEQ ID NO: 401704 - DNA, 109 bp, Homo sapiens
ctacactgcttttctaggaaacctaccctatgatgttacagaagagtcaattaaggaattctttcgaggattaaattcccccccgaagggcgtgaccatcccgtaccgg

SEQ ID NO: 401705 - DNA, 100 bp, Homo sapiens
cgaagataattccaaatactgggtcctatggaaggacatacagcatgaggtcctgtaataaagagggatccgaacaagctcagaaagaaaatgaatttca

SEQ ID NO: 401706 - DNA, 100 bp, Homo sapiens
ccggagcgggcggctgagacaaaggcgacggagtcattgcagttttcagtagaggtgtacttctgagaagtggcttcttgggtcttcatgcagccatgga

SEQ ID NO: 401707 - DNA, 98 bp, Homo sapiens
tggagagaggctctgcacccgagcacagcctgctgcgactcctcatagacccggaaaactgattagaaggcagagaggcatttcatccttcatgaagc

SEQ ID NO: 401708 - DNA, 75 bp, Homo sapiens
ggtcctgttactccagagaaaattgagcagctcagaccttagctggatctccaaaatacaagtgaatcacccggc

SEQ ID NO: 401709 - DNA, 105 bp, Homo sapiens
attaagtgaattgatttggttggaatgctcttttaccgatgctttaacatacagccactaggtcgtttatacgcaatgcagactggaatgaagatcgatagtaaa

SEQ ID NO: 401710 - DNA, 81 bp, Homo sapiens
cctcgatccgcccacagacctcaaattcaaaggttcgccaagcagcttttcagtctctgggacctttcatatctacttttg

SEQ ID NO: 401711 - DNA, 100 bp, Homo sapiens
aacgagccagtgatttacaatagagcaagattgctttggattgcccatctgagctctgccgattatatacgcaatttcaagagccctatctaaaggatcc

SEQ ID NO: 401712 - DNA, 73 bp, Homo sapiens
tcatacaccagtactaccaaggacagcttttttcctgcaaggcaagtactcaaacagatgccctgaaactgcc

SEQ ID NO: 401713 - DNA, 134 bp, Homo sapiens
atttcattccgcggcgggggctccgcgagcggaattccggcggctgccgtgactccagtgcaaacatccacgacagcgatggcagttccagcagcagccaccagagcctcaagagcacagccaaatgggcggca

SEQ ID NO: 401714 - DNA, 100 bp, Homo sapiens
tgaacatgccaggagagcaatgcaaaaggcaacacccaggacacctactgtgtgaaagaatactagaagatcttcctattcaaggacctaagggcgtaga

SEQ ID NO: 401715 - DNA, 73 bp, Homo sapiens
gaagctgagtcagctacgggcaagcgggcagctgaagatgatgagctactacccacagatggcatgatccgaa

SEQ ID NO: 401716 - DNA, 90 bp, Homo sapiens
tcagttgaaacagttacactgcttgtagctcttaaggtttgttggcatccaaagctgttggggttgatggtgctgaaaaaaaggaagact

SEQ ID NO: 401717 - DNA, 50 bp, Homo sapiens
tgaacatgggcaggataaatgatgcaatcttcttaccgcgaagaagccag

SEQ ID NO: 401718 - DNA, 90 bp, Homo sapiens
gggtgagaccctcacttcatccggagaataaaggcagccccgttgatgactgaaaatgacaaagcatccacctaacagacgaggaatcag

SEQ ID NO: 401719 - DNA, 90 bp, Homo sapiens
cggcgtggctgctgctggcaatctggggtttcatcaccttaaatggttttgaaccaatgaaggtgtattcccttaaaaagacggacagcc

SEQ ID NO: 401720 - DNA, 100 bp, Homo sapiens
gacgaagtgggatgtgctcgatggggtggttagacggctgttcaaagctatggggatacagctgcaggtaaaaaagacaaacatctctgccctcctgctg

SEQ ID NO: 401721 - DNA, 87 bp, Homo sapiens
caagaacaagggccgcgatgtggaagggggacacagcgattgccacgcgccattggaatgtccctggccaaggagctcatattctct

SEQ ID NO: 401722 - DNA, 98 bp, Homo sapiens
atcctcagaggggagacccctcgggtggaagaagtggggccatacacctacagcgcgcagggaccatgtcggcggagaccgcgagcggccccacagag

SEQ ID NO: 401723 - DNA, 100 bp, Homo sapiens
gatccacagctaagacgccaggacccactggaagcctagaaatggtgtacacttaaagcgttctgggaatatgaatcccttctgcaccctggaatcacca

SEQ ID NO: 401724 - DNA, 83 bp, Homo sapiens
cagatacccaggaactaacccagtcgcccatgtttgatggaaaagtcccacactggtaccacttctcctgcttctggaaggtg

SEQ ID NO: 401725 - DNA, 141 bp, Homo sapiens
gaaggaagacctcctctgcggtgccaccgacgggaagaagcgctatgacctgtccgcgctggtccgccatgcagctggagatatccctgttcagtactgcgcccagcccaccaatggcatggtgtatttccgggccttctc

SEQ ID NO: 401726 - DNA, 82 bp, Homo sapiens
aaaaggaagaggagaaggaaattgtcccgaatccctgcagagtccggcagcgtcttctcttgagggagcaatttggagaaga

SEQ ID NO: 401727 - DNA, 75 bp, Homo sapiens
ccttgaatgttgaagatgtccttaccagctttgacaatacaggaaatgttttctgcaaaatgaatgttcaccgtc

SEQ ID NO: 401728 - DNA, 97 bp, Homo sapiens
gcgaagccttgggtttctttcttaaaggactgatttttagaactccacatttgaggtcattgaatctttgggaattattatttataaagcactggac

SEQ ID NO: 401729 - DNA, 97 bp, Homo sapiens
atggtggtctggggcaacgcggaaggctgagtcatcactagagagtgggaagggcagcagcagcagagaatccaaaccctaaagctgatatcacaaa

SEQ ID NO: 401730 - DNA, 92 bp, Homo sapiens
tcgacccagggcccgcgggccaggagagcgctcggcgggcctccggtgtggctgtctctgatggtgtcatcaaggtgttcaacgacatgaag

SEQ ID NO: 401731 - DNA, 82 bp, Homo sapiens
ggccacttgcttgggatcctttatcctggtcatcttctatttccaaaaacaccttccaccatgaccacctcagcaagttccc

SEQ ID NO: 401732 - DNA, 100 bp, Homo sapiens
ccaagtttccagaaaacagaaatcgaaacagatacagagatgtaagcccatctacacacagacctggatcctgggagcaaaaaaatcaagtatatcctat

SEQ ID NO: 401733 - DNA, 83 bp, Homo sapiens
ggcttgtcctggctcttgccctcatcctggttctggaatcctcagttcaagctctccaatcctgaagtcaaaatggaatgcat

SEQ ID NO: 401734 - DNA, 100 bp, Homo sapiens
tccggctcgtcggtgtcctccggagagcaagccctggaggttcactctttcaagaagtcgtgtgctgaggtgtaatgctacacaagtcagaggaaggaag

SEQ ID NO: 401735 - DNA, 74 bp, Homo sapiens
ccagtctgccgcaagttcatgcaagatggcctgaaggccaggaggagtcaactccgcaatcagatgttacagag

SEQ ID NO: 401736 - DNA, 100 bp, Homo sapiens
tttcttcgatcgcagctacgacaagggcctcgcttggtaccggtatatgtctcgagtccacggtatgcaccctaaagagaccacccgtcagctgagctta

SEQ ID NO: 401737 - DNA, 50 bp, Homo sapiens
ggtctgtctgctgtccaacagggatgccatgcggcatccaacgatccacg

SEQ ID NO: 401738 - DNA, 51 bp, Homo sapiens
ccagccaccagcaaccccccagatgccagaccagtttgaccaggcggttgt

SEQ ID NO: 401739 - DNA, 100 bp, Homo sapiens
catccagaagactctgtggtttcctcaaaagtcttgttccctgacatcgtggagttctgcgaggccatggccaacgccgggaagaccgtaattgtggctg

SEQ ID NO: 401740 - DNA, 90 bp, Homo sapiens
ggataagacattaaaggaagcagtagaaatggcttataagcaagcccttgtgattcgaaatggtgagaaaatgagcataaatgcggagga

SEQ ID NO: 401741 - DNA, 82 bp, Homo sapiens
gctgaatgaactcattcaggttgggtgtcgtgaaaactacccctaaaagccaaaatgggaaaggaaaagactcatatcaaca

SEQ ID NO: 401742 - DNA, 80 bp, Homo sapiens
gcccgcgggacctgacagccgggtcagaggtttacccaaggtccagcctagcccctaggcaccatgtcggacagtgatct

SEQ ID NO: 401743 - DNA, 74 bp, Homo sapiens
gtggatgagaagatattctgctgtcatggagactctaaaatagagctcaagcttgagaagagagaaccactaaa

SEQ ID NO: 401744 - DNA, 100 bp, Homo sapiens
caaaagagtctccgcggtggaggtctgcgttgctcttgcttttcctcgctggggtgtacggctcttaaaaacatgggtgaaattctgaaagctgcaggct

SEQ ID NO: 401745 - DNA, 89 bp, Homo sapiens
gtcgtgtctccagtgatgtcattgaccagaaggtgtatgagatccaggacatctatgagaacaggttccttgcattgactccatggaga

SEQ ID NO: 401746 - DNA, 80 bp, Homo sapiens
gttcgctccgagccccggccgcctgtccgtcgatgcaccgaaaaggccaatgagaacagcctgctgagtgcgcagctcaa

SEQ ID NO: 401747 - DNA, 75 bp, Homo sapiens
cattaacaaggagcatgtactggccgcagcaaaggctgaactccagtgcacccagttagacttggagcggaaact

SEQ ID NO: 401748 - DNA, 74 bp, Homo sapiens
aacccccagccttgtactgatgtcggatgcgagagcctgtgcttaactgctatggaggacttgggagatcttgt

SEQ ID NO: 401749 - DNA, 98 bp, Homo sapiens
ggggacgtgccgcccctttgcgggtccagtgcacgtgccaacattacactgtcagggaagaagcgcagaaaactcctccagcagatccggcttgccca

SEQ ID NO: 401750 - DNA, 80 bp, Homo sapiens
ggctgctgctgctgctgacgctgctgctgcccggcctcggggcaaagcgaaggctggagctaggagaaagcggtcatcag

SEQ ID NO: 401751 - DNA, 80 bp, Homo sapiens
gcttaggaagttcgtcttctccacggaggagagaatcatttgctgtttcaaatagagaactgtgcgatgatgagaaagag

SEQ ID NO: 401752 - DNA, 80 bp, Homo sapiens
ggatcttgatgcttgctttattagtgtttatactatggaagtgctaaggaaattcctgaagatgtagatatggaagaaga

SEQ ID NO: 401753 - DNA, 90 bp, Homo sapiens
ttttcgtcgagagattcactatggaatcggccaaagatgaagaggaagcctttctggattggagtgatgatgatgatgatgatgatgatg

SEQ ID NO: 401754 - DNA, 80 bp, Homo sapiens
gcccagtgcagggcatcatcaatttcgagcagaagggcgagctggagcggcagctgctgcaggccaaccccatcctggag

SEQ ID NO: 401755 - DNA, 83 bp, Homo sapiens
cggaacacaagctgtgaaacactaggtttacaaaggaggaaaacgacttcttctagatttttttttcagtttcttctataaat

SEQ ID NO: 401756 - DNA, 88 bp, Homo sapiens
tcctgaccaccgtgaacggacagtcccccccaggttatatcttaagtgtggtgctgctaacattgcccaggcagcatctggttcagct

SEQ ID NO: 401757 - DNA, 82 bp, Homo sapiens
cgacagccaggcccgggagaatgcagagcagagcgggcggaggaccccgggcgcgggcgcggacggcacgcggggcatgaac

SEQ ID NO: 401758 - DNA, 78 bp, Homo sapiens
tacaaagggttcaatgcagtgatgatccgagccttcccagccaatgcgttccagttcctagcagatttaatagacgag

SEQ ID NO: 401759 - DNA, 100 bp, Homo sapiens
gcacctgtcggcagactggtgacttcacttttgagtgcaactgccttccagagtacatccaagccattatgatgatggaggaatctgttcaacatgttgt

SEQ ID NO: 401760 - DNA, 75 bp, Homo sapiens
ccaagttcatctcctccgtcaccagccacatctaccagctcagctcacctatgaaccccgtcagcagcagcgagg

SEQ ID NO: 401761 - DNA, 90 bp, Homo sapiens
ccgccccctaaagcggaaccggatcaccgagggcatttacggcaggtgctaaagtggaattttactaccccacgggatgaatacattgag

SEQ ID NO: 401762 - DNA, 121 bp, Homo sapiens
tccatcaggaaaacaagcctggttcagttaaacctactcaaactattggtgtggatgaggtcaccattgtcaacattttgaccaaccgcagcaatgcacagagacaggatattgccttcgc

SEQ ID NO: 401763 - DNA, 98 bp, Homo sapiens
gatcctgaaaacagaaggaaattgaaggaacttggagttaatggtctaatttatgatagacttaattcagtgcacaaatgagatgaatgtgaacatcc

SEQ ID NO: 401764 - DNA, 100 bp, Homo sapiens
gacatcccagagtctgggaaatgggcagctgcaatgactctccgcacggtattattgtcattgcaagcactattggcagctgcagagccagatgatccac

SEQ ID NO: 401765 - DNA, 100 bp, Homo sapiens
cgccagcacgcgcctgcttcccgtctgcgcgagtccacgcagctccccagagctcccagctcctccagcagccgacaggaggcccgtcaagatgcaggca

SEQ ID NO: 401766 - DNA, 74 bp, Homo sapiens
atgccgctcctaagcctgcacagccgcggcggcagcagcagtgagaggaggccccgtgtgggccgcggcccggc

SEQ ID NO: 401767 - DNA, 83 bp, Homo sapiens
cagcgatgtgactgctcaatggagagaaggaaagtcaatcgtaggaagaacacagtacaggttgctgcttttgctcagaggac

SEQ ID NO: 401768 - DNA, 74 bp, Homo sapiens
ttctacagagctggatattgagattgacgtgcacctccacgatgccctgggccggccacatcagtgtgggacaa

SEQ ID NO: 401769 - DNA, 100 bp, Homo sapiens
cggagggaggaagctgggacacccgggagtcaggaaatggttactcctggatggagcacctctgatagcaatccacaaagccaggtattacaagaggaaa

SEQ ID NO: 401770 - DNA, 75 bp, Homo sapiens
gcgtaatgctgtggatgagtttttactccttttagacaagggagtatatgaggccccacagtatcaaatatccgc

SEQ ID NO: 401771 - DNA, 75 bp, Homo sapiens
attgggagatccacagctaagacgccgggactccctggaaacctagaaatggagttgtatcccgcattttgtatt

SEQ ID NO: 401772 - DNA, 74 bp, Homo sapiens
gcgcggggaccgctgtgctctcgggagccatttgtgcaggccaagctgcggcccgaggacggcctgtacctcat

SEQ ID NO: 401773 - DNA, 75 bp, Homo sapiens
gctagccgtcctgcgggacgccggcgctgatgggatgatcggctgaatgtaacagaggaactaacgtccaacgac

SEQ ID NO: 401774 - DNA, 83 bp, Homo sapiens
caaacagccgattggagacgggagccaaccagggctgcattggagctattactataacaagcgcattctgcacaagaccaagg

SEQ ID NO: 401775 - DNA, 96 bp, Homo sapiens
cccttccgtatctgcctaggcattttgctgtctcctcctaatacggtgtgaccatgaagctcatggatgaggtcgccgggatcgtggctgcacgcc

SEQ ID NO: 401776 - DNA, 75 bp, Homo sapiens
aagttttgaaattagagacgcagacaggtgacacttggacagaaacactggcctatgtgctcttctggggagttg

SEQ ID NO: 401777 - DNA, 90 bp, Homo sapiens
ccgcgggcctcctgcctgggggcaaagcccgcgagttcaaccgcaaccagcgcaaagactcagagttaagtgggcagaccaacatccacc

SEQ ID NO: 401778 - DNA, 90 bp, Homo sapiens
agatcccgaaggtggacctgcgagtgtggcaagactgctgtgcagcatgactatatgaaggaagaggaaggttttcctgaagatgaggcg

SEQ ID NO: 401779 - DNA, 100 bp, Homo sapiens
gaagctcttcagcccctgcagcccgagccgccccccgagcccgccttctccgaggcgcagaagtggattgaggtaagaatgattgatgttggctgatatt

SEQ ID NO: 401780 - DNA, 50 bp, Homo sapiens
ccgggctcgggggagcgtgagttgcagattgccaacactcctgatagctg

SEQ ID NO: 401781 - DNA, 74 bp, Homo sapiens
gcggatggaagggaggagactcctgaccctcagaatgtgccagcgccacagcccttcaatcattttggttgcta

SEQ ID NO: 401782 - DNA, 75 bp, Homo sapiens
gtgatcagaaggcaaagatgtcggagcgaaaagtattaaacgatgatgatgacgacatgggagaggatgaagatg

SEQ ID NO: 401783 - DNA, 75 bp, Homo sapiens
tgtcgctgacggcgactgcgggaggccagacttcccaagtaagaagcggaagaggagccgctggaaccaagacac

SEQ ID NO: 401784 - DNA, 100 bp, Homo sapiens
ttgtgtgtgtggcaggggttgttttgagtcccaccatcttccatccctgatgcttggagaagctgaggacacacaggctctaccgcaatggccagcgctt

SEQ ID NO: 401785 - DNA, 83 bp, Homo sapiens
gttggtgcttcctgttcgcagctgcggcaacctgcctagagctggaacgttacctccagagcgagccctgctatgtttcagcc

SEQ ID NO: 401786 - DNA, 100 bp, Homo sapiens
cgacatgatgcaatcttcaggaaagtaagagggccagcgatctgtacatgagacccaggaattatttccaaagcaagattcatatgctgaaggggtaaca

SEQ ID NO: 401787 - DNA, 100 bp, Homo sapiens
cggccgtggaggaggtcggctcagccgggcagtttgaggagctgctgcgcctcaaagccaagagcgtgaggatcatccccggagaggacgggaggatcgg

SEQ ID NO: 401788 - DNA, 98 bp, Homo sapiens
gccgctgagccgtcgcggagccgcgcagccctcggagcacggtgggcagaaccgaggtggtccggagcagcctgcatcccgtgttctccaaggtcttc

SEQ ID NO: 401789 - DNA, 100 bp, Homo sapiens
tttctaccctgtccgaaggagctccaggaagagcaaagccgagctgcaggtcaaaatgcagatcttcgtgaaaacccttaccggcaagaccatcaccctt

SEQ ID NO: 401790 - DNA, 100 bp, Homo sapiens
taaatgaaaaagggcaagatactggggaacagtgtgtggtggatgcagctctggagtacgttcccggcgctcaccagtttggtctcacacaaaacagcca

SEQ ID NO: 401791 - DNA, 83 bp, Homo sapiens
gcagccgtagacaccagctccgaaatcaccaccaagcatcgatttcttccctgtgaaaacaagagcaaggccgtggagcaggt

SEQ ID NO: 401792 - DNA, 83 bp, Homo sapiens
cgcctcactatggcagcagcacggcacagcacgctcgacttcatgctcggcgccaaagcaaaatgatgcttcaacacccaggc

SEQ ID NO: 401793 - DNA, 100 bp, Homo sapiens
cggctccgcctcctttcccgggctcttccagcggctcccggggcgcgtctgagatgaagctactgaatctttacatcaaacgtgcacaaacaggttctgg

SEQ ID NO: 401794 - DNA, 100 bp, Homo sapiens
aacaacaagctccgagggcagccattctatgctgtggaaaagaaagcatactgcgagccctgctacattgttatttggacaagaggcacattgacccaat

SEQ ID NO: 401795 - DNA, 75 bp, Homo sapiens
ctgtcacctggatcctcattgaccgggccctcaatatcacctcccttcagacttcacagagaatgcagttgtctt

SEQ ID NO: 401796 - DNA, 75 bp, Homo sapiens
tgctgattggacatagacaggcttttgcatgggttgatgagtggtatgcaccagcagacgtttttgaatcaactg

SEQ ID NO: 401797 - DNA, 100 bp, Homo sapiens
gtggccttcgcgtctgcccggccaagaggcaaaggggaggttacgcagcaaaccatccagaaggtctctaattaacagaagatggcaaagcccagccaca

SEQ ID NO: 401798 - DNA, 82 bp, Homo sapiens
ggatcatgtctgcgagccaggattcccgcagttggaattgatcacaccttttcagttgtacttcaatcctgaattaatcttt

SEQ ID NO: 401799 - DNA, 90 bp, Homo sapiens
ccccgcggccgcaccttcccgccttctcaggctgctctttggcgtaaattgcaatcgattagggatcgtttctcagaatcaagttagaag

SEQ ID NO: 401800 - DNA, 101 bp, Homo sapiens
cttgacctttaggtgcttttatattcatctcaaaaacaaaattctgaactcaggacttggcaacccctcatatggaaaatttgaaatgcagaggggaaaca

SEQ ID NO: 401801 - DNA, 75 bp, Homo sapiens
tactgattggatgctgctcaaaatcagcctacatgccatctttgtttggctgtagcagcaattcctgaaggtctc

SEQ ID NO: 401802 - DNA, 82 bp, Homo sapiens
gcttcggttagccagccacgaagttctcgcgagagtcgtctcctcgataccaagaactttatattgctgttggaatatctgg

SEQ ID NO: 401803 - DNA, 98 bp, Homo sapiens
gggagataatagtgaggacgctgatgaaataattcagtgtgacaattgtggcattacagtccatgaaggcatcccgggcccaaatcctagacaaagcc

SEQ ID NO: 401804 - DNA, 50 bp, Homo sapiens
gccaatttcatgctccactatagtgagatggaagattttcgaggtatagc

SEQ ID NO: 401805 - DNA, 100 bp, Homo sapiens
gaggagtagtcgctggagtccgcgcctccctggcttcaaggttactgactttttatgatgtttggtggctatgagactatagaagcatacgaagatgatc

SEQ ID NO: 401806 - DNA, 100 bp, Homo sapiens
tgctccgtcatccatgccactgaagggaatttgaaggagaagaagaatatctggagatccttggcatcaccagggagcagtcaggcaaatatgagtgcaa

SEQ ID NO: 401807 - DNA, 89 bp, Homo sapiens
cccatatcagagcatcacttttcctgagttaagcaataaaggagagtcccgtattctcagagtaaaagttgtttctggaattgatctcg

SEQ ID NO: 401808 - DNA, 100 bp, Homo sapiens
gcatggcaaagactggcaaaagcacaaggattctcgctgtgacagagacaacaccgagtatgagaactcttatggaaggcatggcagaagatgagacagg

SEQ ID NO: 401809 - DNA, 100 bp, Homo sapiens
cgcgctgcccacgattcgcttctgagtttgtcagaggaatggctgtgaatggatgcctggaaggaccatcctctaattttctcagttgcctgttcattgt

SEQ ID NO: 401810 - DNA, 75 bp, Homo sapiens
ctccttttcgtttccggaaacatgggacctcaggatggaaaccagcagcctgcaccgcccgagaaggtcggctgg

SEQ ID NO: 401811 - DNA, 75 bp, Homo sapiens
aagggcaggatgaaaaccaagaaggagattttgaagatgcagatacccaggttggtgggacaagtgatgttgaag

SEQ ID NO: 401812 - DNA, 90 bp, Homo sapiens
taatcccagcggtttaagaggccaaggcctaagcccaggtgttggagaccagcctgagcaacacagtgatggcccgctccctctccccac

SEQ ID NO: 401813 - DNA, 82 bp, Homo sapiens
ctaccctgtgtgtgtgtccaaggtggtaaaggcaagtagcctgcagtatgaaatgctgctgctgacggattctatctccaag

SEQ ID NO: 401814 - DNA, 90 bp, Homo sapiens
ccgagcgcggcccggcccgcagcgtggggccccgagcgcgacagagggagttacaaagcgtttggcagaaaagaatgactttgtgatctt

SEQ ID NO: 401815 - DNA, 75 bp, Homo sapiens
gtcgaaggggaaggcgcctgaagaggacgaaggccaaggcagaggcttcctcaggagaccatcccactgacacag

SEQ ID NO: 401816 - DNA, 100 bp, Homo sapiens
ggaattcaggcagccctcttctctccccgaaggcctgccagcacccctggagaagcgcgttaaggagctggctcagatttcctcctctgatgctcctctt

SEQ ID NO: 401817 - DNA, 75 bp, Homo sapiens
gaagagacaggaggcagtagccaaacacccaggtgtatgcaacagcgttattgcaacaggctaacgaaaacagac

SEQ ID NO: 401818 - DNA, 83 bp, Homo sapiens
ccgcatcatcgaggagacgctcgcgctcaagttcgagaacgcggccgccggttgaactgctggcttataaagtagagcaggag

SEQ ID NO: 401819 - DNA, 50 bp, Homo sapiens
gcgcgagcgccccgccatcgtcccggctgatgtttcagacaccgcaggaa

SEQ ID NO: 401820 - DNA, 75 bp, Homo sapiens
tataatagagtggatttattccctgcaggtccttcccacagaagacaatggaatctgcctgtgtttcaattcacg

SEQ ID NO: 401821 - DNA, 100 bp, Homo sapiens
ccggggacccttccgtatctgcctaggcattttgctgtctcctcctaatacgggggaacttgaacggcagcttttgcaagcaaatccaattctggaatca

SEQ ID NO: 401822 - DNA, 83 bp, Homo sapiens
tactatccgtttgttcaggaaccaccagtgacagaagaccatgaaccaggcatctcctgctagaaagctggaagagattcttc

SEQ ID NO: 401823 - DNA, 50 bp, Homo sapiens
cctcccaaagtgcttggattacaggatctgtagtcaggaagaagtagtga

SEQ ID NO: 401824 - DNA, 75 bp, Homo sapiens
aatgtacccatctcagatgaagtcaagaaatccctgaggagggacgggaagtagaggaattttcagaggacgatg

SEQ ID NO: 401825 - DNA, 100 bp, Homo sapiens
tccctcttcactttcctcggcaagaaatgtgtgtggaaattaatctcactaatgactaccgtgtcagcggaggagtttcagaaatggtgtttaaagcaag

SEQ ID NO: 401826 - DNA, 75 bp, Homo sapiens
ctgacctctgacacgtattgtctcaagattaaagggagttacccagggagattatacacctatggaagacagtga

SEQ ID NO: 401827 - DNA, 95 bp, Homo sapiens
caaggctgaagatttaagaactgaatgtgcaacttgcaagggaactggagacaatgaaaatcttgtcagtactatactggcaattgctggagaag

SEQ ID NO: 401828 - DNA, 89 bp, Homo sapiens
gcagaaatggactgtgtacagagagcctggtgtggagcaagataagattaaatctcttgatgaacagtgtgtggttggcaaaatttcca

SEQ ID NO: 401829 - DNA, 75 bp, Homo sapiens
atgtcgaaggacaaggaagctgttgattcaactttgaccattttcagattctgcgggccattggtaaagggagtt

SEQ ID NO: 401830 - DNA, 97 bp, Homo sapiens
acgcccttgccttctgcttccagggaactcaccagtcaccaagttgaagatgagcagccgtcaacactatcaccaaaaaaaaagcaacggaatggag

SEQ ID NO: 401831 - DNA, 101 bp, Homo sapiens
acgagggcgacagcagcgtgtccagggcggctgtggaggtgttcgggaagctgaaggtgagaagccctaccactgcaactgggacggctgcggctggaagt

SEQ ID NO: 401832 - DNA, 82 bp, Homo sapiens
cgaggaggcagccaagctcatggcctgccactgcgtgcatgagacaaaaggacccagtgaaaggaatgacagcagatgacta

SEQ ID NO: 401833 - DNA, 51 bp, Homo sapiens
tcctgtacagcctgcagaactacagagtctcgctctgctgcccaggctgga

SEQ ID NO: 401834 - DNA, 90 bp, Homo sapiens
gcctgcagagcgcgcagtacctccgtggaggcgctccatttgggaacattaatggctgcccacggctacttctttccaatctcagatcat

SEQ ID NO: 401835 - DNA, 75 bp, Homo sapiens
ggcaccaccaaccagacctgtatcctgtgggatgagacggatgtatgctgtgtgctgtggacccacctggggttc

SEQ ID NO: 401836 - DNA, 100 bp, Homo sapiens
cgctcgctgggagagaggtacctctccttttccctctccctttccctaagatagccttggataccagttactggactttcattaatcacgtcttcatctg

SEQ ID NO: 401837 - DNA, 82 bp, Homo sapiens
cccagagtgcagagccgcctttccagcatgcaggggctgctcagatttccgtgagggtggaagaaaatcataccatatcaga

SEQ ID NO: 401838 - DNA, 51 bp, Homo sapiens
cctaaatatgaaagattcatcaggccaatgccaagacaatgcaaactccag

SEQ ID NO: 401839 - DNA, 83 bp, Homo sapiens
gagaaaagtgagtttattctgaagagcatccagtgtatgctgatggtagcatatgtttagatatccttcagaatcgatggagt

SEQ ID NO: 401840 - DNA, 75 bp, Homo sapiens
ggacggtttcgccggcagtctcggagcagcatttctttctattactactatctatgctgagactggttcaggttt

SEQ ID NO: 401841 - DNA, 74 bp, Homo sapiens
gccttccgagtagctgggactacaggtgtgagccaccctgcccagccgtcaaaagagtcttaatatatatatcc

SEQ ID NO: 401842 - DNA, 75 bp, Homo sapiens
ctccttttggatgtaccttctcttctggatatgctgcaggctgctagtcattatcgccaaaatagaaactctttg

SEQ ID NO: 401843 - DNA, 75 bp, Homo sapiens
ccgagggcttcgtggatgccctgcaccgggtccggcaggcatgaaagaattactgatgtccttgatcaaaaaaat

SEQ ID NO: 401844 - DNA, 75 bp, Homo sapiens
attggagctgaaggcggcggcagagaacttgccggtgccagctgagctcaggtacctgacaatgatgagcagttt

SEQ ID NO: 401845 - DNA, 100 bp, Homo sapiens
attgggaggtcggcggccccaaaaggcagctggtggaatttttgaagaaaatggaatctcgaggccccctttcgtgcgacacggttctgaagatcttcta

SEQ ID NO: 401846 - DNA, 100 bp, Homo sapiens
cacctcagccccttgaatagctgggattacagaactgggatggataattggataaaattgtctgggtgtcagaatattactagtaccaaatgcaactttt

SEQ ID NO: 401847 - DNA, 82 bp, Homo sapiens
caggaagttccgccatgacaaaagggtttacttgggtctgcagatctccaggggagcccaccagcctagtcaacatggcctc

SEQ ID NO: 401848 - DNA, 100 bp, Homo sapiens
gattttgacagtcgtagatacaaatttttggatgatgatggatccatttctcctattgaggagtcaacgtggatgaaaatactaggaaaagtttatttaa

SEQ ID NO: 401849 - DNA, 138 bp, Homo sapiens
cttcgacctgcgctccgcgctctggcgctacggtctggccgtcggctgcggcgccatcggatcgacgagaacgtgctaggagcccagctggacgttgaggccgcccattcagagatcctcaagtacttccagtctgtc

SEQ ID NO: 401850 - DNA, 50 bp, Homo sapiens
ctggagccctgcattcgcggcgtgtgcagataaaaatgaatgccatttcc

SEQ ID NO: 401851 - DNA, 100 bp, Homo sapiens
aacatgcaatgaacccaaaagggaccctaatcgactgcattatgaccctgctgaactcaagctcttcgaaaacattgaatgtgagtggcctgtgttttgg

SEQ ID NO: 401852 - DNA, 51 bp, Homo sapiens
ggataaacttaaaattgctgatgaagggataccgtagagttgcgagaacac

SEQ ID NO: 401853 - DNA, 90 bp, Homo sapiens
gtccagatcaacgttatccccacctctgatgattcctcagttgcaggaagaggcagaggaagaggaagaggaagaggacgtggccgtggc

SEQ ID NO: 401854 - DNA, 89 bp, Homo sapiens
gtcctgcatggagtcttgtgaaatcgcgtggactgcaacacccagcagcgcggttgggaaaaatagcagcctagctttgtcacaatcca

SEQ ID NO: 401855 - DNA, 99 bp, Homo sapiens
agttcatcaaagagctcattaaggacgggaagaacctcatcgctgcgacgaaaaagcctccattatggcatgctgaatttaccaaagaagaattggttc

SEQ ID NO: 401856 - DNA, 74 bp, Homo sapiens
aagcctccgagctgaagcagctcatccaccagcagctgagcaagaatccgtctcttgctcaagtgaaaattgaa

SEQ ID NO: 401857 - DNA, 82 bp, Homo sapiens
gaaaactttaggaacctgaattcattgcgtaaagggatcatagacggtatttctatgtaaacgaacagtcgggcgagtctca

SEQ ID NO: 401858 - DNA, 98 bp, Homo sapiens
tctacccgtggccgctgccggtctacctatggaagtgataaacaagtccagtgttaagtattcagtacaacttgaagacaggaagactcaatcaccag

SEQ ID NO: 401859 - DNA, 99 bp, Homo sapiens
gtcccacaggctcctgccctggactaccgagaatcctcactatggatgggctcattgaggacattaagcatcggcggtattatgagaagccatgccgcc

SEQ ID NO: 401860 - DNA, 96 bp, Homo sapiens
cggcggccgggcgggggagatggcggcgcgatggagcagcgaaaacgtggttgtagagttccgtgactcccaggctgaccccgcactacatctacc

SEQ ID NO: 401861 - DNA, 75 bp, Homo sapiens
atgtcaggaccctgtacacccagattcgcaaccgtgccctcatccaggtggctctgagggtcctgttccccgacc

SEQ ID NO: 401862 - DNA, 100 bp, Homo sapiens
aagcgactgcagagccagaagggagtgcagggaatcatcgtcgtgaacacagaagagtgagcacaaatggatcagatgaccctgaagatgcaggagctgg

SEQ ID NO: 401863 - DNA, 101 bp, Homo sapiens
cgcacagccaggacatcctggaacctgggaaagggttgagataagtcgaagagtgactctggaaaaactccctcctgtcctcgtgctgcacctgaaacgat

SEQ ID NO: 401864 - DNA, 80 bp, Homo sapiens
ccgaagcctaaattccaggaggattcacaatgacatcctttcaagaagtcccattgcagacttccaactttgcccatgtc

SEQ ID NO: 401865 - DNA, 75 bp, Homo sapiens
ggtgtgcaaacccgagagaactgggatggcgtcctaaagggctgttagttgcccatcttcatgagcataaatctg

SEQ ID NO: 401866 - DNA, 82 bp, Homo sapiens
agaattttgataaaatcagagtgtggctgcaaagtgaaaagcttgaacctccagaacctgggtatcaacccagcaaacattg

SEQ ID NO: 401867 - DNA, 97 bp, Homo sapiens
tcgttctgggcttcgttttcatgttgctggtggaccagattggtaactcccatgtgcattctactgacggttgtatcagagtaagatggacggtagc

SEQ ID NO: 401868 - DNA, 73 bp, Homo sapiens
tgatctcgtcactcctttctttgtggtcttcatttgtgaatacataggtactggttttggattaggaattgtt

SEQ ID NO: 401869 - DNA, 98 bp, Homo sapiens
gcatatgtatgtgtttggagacttcaaagatgtattgtttggtgcacctcgatttggaggaagtagggcagggcccttatctggaaagaagtttggaa

SEQ ID NO: 401870 - DNA, 90 bp, Homo sapiens
taacattaatggatgttccagtatttaaagctattcaaccagatatgcctgtgaggagccaccaacatttgaagctatggagctcattgg

SEQ ID NO: 401871 - DNA, 100 bp, Homo sapiens
aagaaaaaaaccacaaatgtttttctgttttgcctgaatacatgatttaaacaagagatttccacagaaggcatcagaacacaccatgatggctgtgacc

SEQ ID NO: 401872 - DNA, 82 bp, Homo sapiens
gccactgctgggccctgaggctgcaccaagtggcgaaggagccggctccaagtccctgaagaggaaggagaaggaatatgag

SEQ ID NO: 401873 - DNA, 98 bp, Homo sapiens
accgggtcttatgcacagaagtatggcaaggtctcctctgagcctccggcctccataagacccaaaacagatgacacctcttcccagtcccccgcgcc

SEQ ID NO: 401874 - DNA, 104 bp, Homo sapiens
gtttacaaagtcacagatagatttggctttttacagttctgactcagaagatcttttggaagaattgctgtgctgtttgatgcagttgatcactgatattccac

SEQ ID NO: 401875 - DNA, 100 bp, Homo sapiens
gccgtcttcgggttcgtcctcttcttggtgctgtggctgatgcatttcatggctatcatctacactaagactttgaccccgacgcaggcttcagtgattg

SEQ ID NO: 401876 - DNA, 50 bp, Homo sapiens
cggacggcgacgcagcccgcggcagaagacctgcctagagctggaacgtt

SEQ ID NO: 401877 - DNA, 100 bp, Homo sapiens
gcctcaaagagttgctgagagctaaattaattgaatgtggctggaaggatcagttgaaggcacactgtaaagcaacagtatcaaagtgctctattttggg

SEQ ID NO: 401878 - DNA, 100 bp, Homo sapiens
tgggaacttcaaggatctactctgaagatccctgtggtagagagaaaaatcctggatctgtatgctttgagcaaggcacttggaggtgtcccaggaagtc

SEQ ID NO: 401879 - DNA, 100 bp, Homo sapiens
cctcgggcagcctcaacgagaactcggagggcaccggagtactatactggcaattgctggagaagattttgcaattgttgcttctgatactcgattgagt

SEQ ID NO: 401880 - DNA, 100 bp, Homo sapiens
gagtgtgatgcagaagtaccttgcagagagaaatgaaataacctttgacaagattttcaatcagaaaattggtaagaatgattgatgttggctgatattg

SEQ ID NO: 401881 - DNA, 74 bp, Homo sapiens
ctcagcgtcgctggcagccgctgtacttgttggggaatggcggtcaatgtgtattctacctcgataacccaaga

SEQ ID NO: 401882 - DNA, 100 bp, Homo sapiens
aacaatgaagattatttacaatgctaccctgctttttctggtgtcctgaacctggaagttgtgctttttaaggtctgctggagtttgctggaggtccact

SEQ ID NO: 401883 - DNA, 49 bp, Homo sapiens
ttcatagcattcgcctactccgtgaaggccacagctgagaccgtgtatg

SEQ ID NO: 401884 - DNA, 95 bp, Homo sapiens
cgagcacgagctgtgaggggattcacttgtgtgcggaactcctcggaaccatggtgaaatgacaatggatgctctgttggctcgattgaaacttc

SEQ ID NO: 401885 - DNA, 75 bp, Homo sapiens
ccacatcgtgggcagtcccttcaaggccaaggtgacagaggagggggctgatcctgatagcattgaaatggtggc

SEQ ID NO: 401886 - DNA, 74 bp, Homo sapiens
taaagtctgagagagggaagtcgcctctgtgctcctatcatggtgaacttacttcagattgtgcgggaccactg

SEQ ID NO: 401887 - DNA, 75 bp, Homo sapiens
gccctgcagtacctgcagaaggtctctggagacatcttcagcaggtacatgtccagggccgccgggtccccttcc

SEQ ID NO: 401888 - DNA, 82 bp, Homo sapiens
taagaagcagatcctgaaacacctgtcccgtgagtgtgtccgcttgaaaccaactgacatacagcccgacatcttcagctat

SEQ ID NO: 401889 - DNA, 91 bp, Homo sapiens
cttgactgcatttttgggaaaagacagagtaagaagactcccgagctctaagcgaaagacatgaggcctcagcctgaaatgaggttgtttt

SEQ ID NO: 401890 - DNA, 100 bp, Homo sapiens
gcagcgacgagaacctggatcaggagaacctttacaaatagatcacttggtttttgtagtccatgggattggaccagcttgtgatctccgctttcgaagc

SEQ ID NO: 401891 - DNA, 98 bp, Homo sapiens
gaggacgacgacgacgaggaagaggaggtttctgaggccctggagagtgaatttgtttcctgccagcttcaccaatggattgatctcatttttggcta

SEQ ID NO: 401892 - DNA, 75 bp, Homo sapiens
cattttaattttgccggaatatttcaagacaccgaaaggacttccaatagtagtcagacattatcatcctgtcat

SEQ ID NO: 401893 - DNA, 83 bp, Homo sapiens
ctcccaaagtgctgagattacagacaacacaggcagttctacataccggccaccccctcggacccgggaggtgctgatcaacg

SEQ ID NO: 401894 - DNA, 100 bp, Homo sapiens
gaaacgggaagtggccgtgggccggtgaattccgtgtagtggccaagaaccaccgggaggaactgggccattctaacacccgttgctaccatgctggcca

SEQ ID NO: 401895 - DNA, 100 bp, Homo sapiens
cccagaccagataccttttatatcaaaagaatatgctattcagcttgaattcgctgttctggacttggtgcctctttctgttatatgctttcctatttag

SEQ ID NO: 401896 - DNA, 75 bp, Homo sapiens
ttggaagacactgaagcaaataaagagaaaaatctggagcagtataatgtgttatgaagcggagattgaggagat

SEQ ID NO: 401897 - DNA, 103 bp, Homo sapiens
gccacgatcgcagactccaaccagaacatgcagtccctgcttcctgcccactctcgagtggaccctgaggagctcttcaccaagctcgaccgcattggcaagg

SEQ ID NO: 401898 - DNA, 100 bp, Homo sapiens
cttactcacacatcagtctatcagtgttcggctccagcctgtgaagaagttaactggtccagtccaggtgcagcagcaaggagaacattctcagagccag

SEQ ID NO: 401899 - DNA, 96 bp, Homo sapiens
aggcggcgccatcttcgaacttagacttccggaaggactttggcgagggacttgaaagaggagattgatattcgactctccagggttcaggatatc

SEQ ID NO: 401900 - DNA, 149 bp, Homo sapiens
ctcccttctgatgaaaattgagctgtccatgcagccatggaacccgggttacagcagtgagggggccacggctcaagactgaaactgttgaggagcccatggaggaagaagaagcagccaaagaagagaaagaagaatctgatgatgaa

SEQ ID NO: 401901 - DNA, 95 bp, Homo sapiens
gcaggcaggggatcccggacggcaagaatatcacggcatgggcatgagtagcttgaaactgctgaagtatgtcctgtttttcttcaacttgctct

SEQ ID NO: 401902 - DNA, 98 bp, Homo sapiens
tctgcttccacgaggctgctgaccagaagaggtttagtgccctcctgagtgactgcgtcaggcatctcaatcatggttggattagcttttcaaaacag

SEQ ID NO: 401903 - DNA, 96 bp, Homo sapiens
gccagaaggctagaagaatcagacgtgctccaggaggccagaaggaaatacgtgaaggtgctaaaggagaagatagaagctgagaagggtcgtgat

SEQ ID NO: 401904 - DNA, 76 bp, Homo sapiens
ctggcaaacatcccagacgtgccagtgaagtacagaaaggtactggttttggattaggaattgttttctcacttac

SEQ ID NO: 401905 - DNA, 98 bp, Homo sapiens
tcggattcttcaaaaacttcacctgaagattccagactccatcatttctcgtggtgttcaggtgctcccacgagacacagcctccctcagcactactc

SEQ ID NO: 401906 - DNA, 90 bp, Homo sapiens
agacaaagacccagtgaacaaatccgggggcaaggccaaaaagaagctatatcgagaagtttactgactttcttcggctctttgtgagtg

SEQ ID NO: 401907 - DNA, 74 bp, Homo sapiens
gctgtgaagacgcacggtgccaggaccaagtatctgttggataacagggcaagattcagaggaagaaaaggata

SEQ ID NO: 401908 - DNA, 100 bp, Homo sapiens
ccctactacaagaccattgaagagctccgggacaagatgttccccatcattgcccagtatggagatgtattggtgagaaacttgaggcgggaagcagaga

SEQ ID NO: 401909 - DNA, 83 bp, Homo sapiens
gcagcatgcccagccagggcagggtggagagctgcagctgcagatttgtaagactccagggcctcccagccgtgaataatctg

SEQ ID NO: 401910 - DNA, 52 bp, Homo sapiens
gtacctgttaccactttcaaaagtggccagcatcgaaatgttcagcctttta

SEQ ID NO: 401911 - DNA, 98 bp, Homo sapiens
ccgtgggacatggagtgttccttccgctagtgatcctttgcaccctgcttggagacggacttgcttccgggaaatcctcattgacgattcaatttgtt

SEQ ID NO: 401912 - DNA, 100 bp, Homo sapiens
tgatgtcaggagggcagcagtagaatcacttgggttcattctattcaggaaaagagcactggttgccattggtacccatgatttggacactttgtcgggc

SEQ ID NO: 401913 - DNA, 99 bp, Homo sapiens
cccacgcaaccccagatccatttacactttacagcaacggacagccaagacgtagatccatccaagacttgactgtaactggaacagaacctggtcagg

SEQ ID NO: 401914 - DNA, 75 bp, Homo sapiens
agggagcattccaggagagaaagggaaatgtttcaacgtgcgcaagcgttgcggcggcgggcagaggactactac

SEQ ID NO: 401915 - DNA, 127 bp, Homo sapiens
aagtagaggagtcggggtacgctggcttcatcatgcccatcgaggtgcacttcaaaaacaagttctccaatatccccttcttcatcttcgggccactgatgatgctcctgatgcacccgtatgccca

SEQ ID NO: 401916 - DNA, 50 bp, Homo sapiens
gagagcttcacagtgcagcggcgaggatattgctgcatatcgagctaaag

SEQ ID NO: 401917 - DNA, 100 bp, Homo sapiens
gggagcttccgggagggcggctcgcaggagaactacgatgacccgcacaaaacccctgcctccccagttgtccacatcaggggcctgattgacggtgtgg

SEQ ID NO: 401918 - DNA, 83 bp, Homo sapiens
tcgggggctgcgcgggggctgtggctccgggactgcgacaatgcagatcttcgtgaagactctgactggtaagaccatcaccc

SEQ ID NO: 401919 - DNA, 102 bp, Homo sapiens
ttcgcattttggcattgacatttaattttagggtcctttatatagaagggagagtagggacatatttggagaagactgtgtaagtgtaaaggatgactctat

SEQ ID NO: 401920 - DNA, 75 bp, Homo sapiens
gtcggggatcggtcgcctgagagggtttccaggcctgaggtgcccgccctggccccaggagaatgaaccagccgc

SEQ ID NO: 401921 - DNA, 75 bp, Homo sapiens
taatatatgtgtctgagagtgtaacttcattacttgaacatttaccaaaaatatttacaccagcagctccagttc

SEQ ID NO: 401922 - DNA, 75 bp, Homo sapiens
ggaagtgcagctgcctcagttcttagcgcaggtcctcgaggccacacgggttaatcgaagaaagagcgcactggc

SEQ ID NO: 401923 - DNA, 113 bp, Homo sapiens
tattttgcagagcatcccccaaagacagattgaagaaatgcagagacagagtgtcctgccatacttcgtagctacaaaactggctaaaatccggaagccaactttggataagc

SEQ ID NO: 401924 - DNA, 95 bp, Homo sapiens
agatttgcaagaggaactgagcagcagattaccctgtgctgtggaagagcacccagtagcaaaagttcaaacagaccctccctcagttccaatat

SEQ ID NO: 401925 - DNA, 75 bp, Homo sapiens
tcagatgcaattggaccaagagaacaatgggaaccagtctttcaaaatatattgatgatgttaagaagttcaaac

SEQ ID NO: 401926 - DNA, 82 bp, Homo sapiens
gcgagcgcgagcggcgcgagaaaggatgtttcagcagcccctgagaaggaagaggaggaagctgagggcccgctgagggcgc

SEQ ID NO: 401927 - DNA, 100 bp, Homo sapiens
ctggaggcccggcggtcccacctctcagagagctgcagcataggccatctacgtgattgacttcttctggaacgaaacctggtacctgaagaccattgac

SEQ ID NO: 401928 - DNA, 75 bp, Homo sapiens
gaaaggacggaggctgttatctatggcagccataaggatgagtttaccattattcctgtactggttggagctctg

SEQ ID NO: 401929 - DNA, 100 bp, Homo sapiens
gggggagactgtgccgtggagggcctcgccatgtcctgctgcccggagcggttggttccccgaggcgtacgtgaaggctctggaggaggggcccgtgaat

SEQ ID NO: 401930 - DNA, 138 bp, Homo sapiens
gcgggcagcaggatggtggtggatgcggccaactccaatgggcctttccagcccgtggtccttctccatattcgagtttttgaaatcatgaatcctgtttatagtcctggatcttctggggttccctatgcaaatgcc

SEQ ID NO: 401931 - DNA, 75 bp, Homo sapiens
cggacgctcgcctgccggctgaggtagttaaaccagagagcaatgacaaagaaacagaagctgcgtatgaatcag

SEQ ID NO: 401932 - DNA, 83 bp, Homo sapiens
gagacctgtcaccccgactcaacgtgagacgcaccgcccggactcaccatggtcctgtccctgggcgccgacgtgctgcctga

SEQ ID NO: 401933 - DNA, 75 bp, Homo sapiens
cggacgggcactgggcgactctgtgcctcgctgaggctgccttcctatttcaaggaaagacgccaaggtaatttt

SEQ ID NO: 401934 - DNA, 144 bp, Homo sapiens
aaaccagagcattgatgtctccctgcctctcaataccttgggcccagtcatgaagatggaacctctgaataacctccagattttggaaataatcagggttattttaaaactatatgagcagtggaagaatttcgatgagagaaa

SEQ ID NO: 401935 - DNA, 74 bp, Homo sapiens
tcagcagaagaaacacttcctataaatctcgcccaaacaggaaagatcctggctgcagctctgaccgaatgtca

SEQ ID NO: 401936 - DNA, 75 bp, Homo sapiens
tgctgcaaccccaagatgtcggagacacggtggaaacgcttatgctactccctgtatcaaagccatcagcccgag

SEQ ID NO: 401937 - DNA, 50 bp, Homo sapiens
cacccaacatgctggtgtacagaaagttgcagaatgaagaagagtctgga

SEQ ID NO: 401938 - DNA, 75 bp, Homo sapiens
cctttttattggagaacttaatccacttacgttcagggttatcattcataggaaccacgtgaatgttgagggggc

SEQ ID NO: 401939 - DNA, 74 bp, Homo sapiens
acccgcgaacccctctgggatccccgccgctctgtctacaacccgagcattttgaaagcgaagcagaagccgta

SEQ ID NO: 401940 - DNA, 100 bp, Homo sapiens
ctctcatgcttaacatgcatcttactggttctttatgaagagctttctcttgggctttgaccagcttcgacttgaaggattgctttgtgatgtgaccctg

SEQ ID NO: 401941 - DNA, 75 bp, Homo sapiens
tgggtcctgatgaaagcaaacagaaatttgtgctcaaaacccccaagagacggggcctcaatatgttgcccagtc

SEQ ID NO: 401942 - DNA, 75 bp, Homo sapiens
aaaacctcaaaatatgatggtggttggacagtcagcatttgcagactttggtgtcagctgtgatgcatgtttaaa

SEQ ID NO: 401943 - DNA, 100 bp, Homo sapiens
gcgagtggctggtgcccattgggcagtgcctgtgccaggcaggctacgagaaggtggaggatgcctgccagggatgaagctggaggcagattcgtcgctt

SEQ ID NO: 401944 - DNA, 87 bp, Homo sapiens
cgacgccgcctggcaggccctgcgcaccaggtgttggagcgggccggagagaagtagagtgggctgcgaggagaaggaaacaggcct

SEQ ID NO: 401945 - DNA, 95 bp, Homo sapiens
agggcccacgctggggccctggggctgttttggagtcagcggaagatcaccaaggccagggagtggttccaccgcactgtgaagattgactcgga

SEQ ID NO: 401946 - DNA, 73 bp, Homo sapiens
ctgctgacgctctgggtgaagaatggaagataatgatgaacctctcctgagtggatctggtgatgtatccaaa

SEQ ID NO: 401947 - DNA, 75 bp, Homo sapiens
aatccttacgaagagctgagttaaatcacaatgtcacatatgctcatgccttgcctatgttccgtgagccccgcc

SEQ ID NO: 401948 - DNA, 100 bp, Homo sapiens
gcaaacgcagagacaaaagaaacgggccccgactggctatgcctttctgctgttccaagaggaaagctcagtacaagctttgatagatgcctgcctagaa

SEQ ID NO: 401949 - DNA, 82 bp, Homo sapiens
ctcaaagccctgggtcgcttggaagaagccaaggctcaaagtctaactccccaggactataatctgaggtggtcaggccttt

SEQ ID NO: 401950 - DNA, 73 bp, Homo sapiens
ccagcaacatcatcatggacacctccaccttcctgctcaggcaaggggatcaggcgagtgaagccgaagcgca

SEQ ID NO: 401951 - DNA, 131 bp, Homo sapiens
aggtgatggcaacggccaacttcggcaagatccagatcgggatttacgtggagatcaagcgcagcgatgacaatgcagatcttcgtgaagactctgactggtaagaccatcaccctcgaggttgagcccag

SEQ ID NO: 401952 - DNA, 50 bp, Homo sapiens
gctgcgctcgcgcccggatccctcaggaagctcttcgtgggcggtcttga

SEQ ID NO: 401953 - DNA, 75 bp, Homo sapiens
ttcatgagggagactgtcaataaggtatccaatgaacctgggaatcgctacaacctccagctcatcaatgcactg

SEQ ID NO: 401954 - DNA, 82 bp, Homo sapiens
gctcaacgagctgctggaggacgagggccagctgacggagatggtgcagaagatggaggagcccgatggcaccagcaaggag

SEQ ID NO: 401955 - DNA, 82 bp, Homo sapiens
gcggaggccgcctggggtagcggcggcgggagtcctggcgctctgcaggtgtcgtgaaaactacccctaaaagccaaaatgg

SEQ ID NO: 401956 - DNA, 120 bp, Homo sapiens
tcttcccgcgtccgccgattcctcctccttggtcgccgcgtccttggctggcgtgttgtgaccgagattcccgacgagagagactgaggggaagagaggaaggaggggcgggctcctggc

SEQ ID NO: 401957 - DNA, 74 bp, Homo sapiens
gaagcaggactgcgccgcgtcttcctcaagtatttgtgtggaagtaatcgaaaagacaacatatttattgatcc

SEQ ID NO: 401958 - DNA, 82 bp, Homo sapiens
gaaggaaaaggaggaattcgccgtgcccgagaatagctccgtccagcagctgacatagcccagagatacaggataagcaaat

SEQ ID NO: 401959 - DNA, 100 bp, Homo sapiens
cttgatctgtgatgaatcagatgtcaaagacttagcttttaaattaaaaaggaagctattcaccattgaggaaaatgttggggcttttcaggaagcataa

SEQ ID NO: 401960 - DNA, 100 bp, Homo sapiens
tgccaaagacaaggttcgagatgaagctcagactctgatattgaagttaatggatcaagtagcaccacctatgggattcgataaacaagtggatgtgtca

SEQ ID NO: 401961 - DNA, 71 bp, Homo sapiens
agaagaagggaaggcgcgagtgaggaaaggaggtactgtagagtcatgtgctgttcctggggcttggatga

SEQ ID NO: 401962 - DNA, 74 bp, Homo sapiens
caagaacagcccaatctcctttctgggcaaacgttccaagtaaaaaagcacgcttagattggaatactgatgct

SEQ ID NO: 401963 - DNA, 82 bp, Homo sapiens
aaaagagttgattgaaattatctctggtgctgcagctctgctaattgaacaagccccaattcaaatgggagaagaggcagtg

SEQ ID NO: 401964 - DNA, 100 bp, Homo sapiens
atggggacacgccaaacctgagtttctacagaaatgagatccgcttcctgcccaacgtggatgcctggactttggccttttctcctgattcccagtatct

SEQ ID NO: 401965 - DNA, 98 bp, Homo sapiens
agcagccgcggagcagtagccgccgtgggagggagccatgaagcattacgaggcggctgcaggcttcagcctgcgctggttggtgaaacagagatgtc

SEQ ID NO: 401966 - DNA, 76 bp, Homo sapiens
tctgccgatgaagatgtcattaaggtaaaataccatgaagattttgaaaaaacaaaggggagaggctttactcccg

SEQ ID NO: 401967 - DNA, 75 bp, Homo sapiens
tacaccaagatctgtgctgaccacaggaattggatctactagtgcaggtcagcccaaggccaaccccactgtcac

SEQ ID NO: 401968 - DNA, 98 bp, Homo sapiens
cgacgctatggcgcactggagtaccctgttcctggcagtctcggcgcggaagatggccggcggcgtggacggccccatcgggatcccgttccccgacc

SEQ ID NO: 401969 - DNA, 80 bp, Homo sapiens
ccctcatcagtggctggctcttcttccgatacctggctatcggaggatgagacctgcacgcagtggctcacagcagcacg

SEQ ID NO: 401970 - DNA, 90 bp, Homo sapiens
ggaaaagcaggaagctggaaaggaaggtactgcaccatctgaaaatggtgaaactaaagctgaagagtctggccttaccaaggcagtgaa

SEQ ID NO: 401971 - DNA, 82 bp, Homo sapiens
gggcgcgggcggcggcgccggcaggaagcagcccctgtcaaagggaacaggaagcagtccacggagggtgacgccctagacc

SEQ ID NO: 401972 - DNA, 96 bp, Homo sapiens
atttgttaaccgggggacaggataaactgttacgcatatatgacttgaacaaacctgaagcagagaacggagaccaacctgggctgaagaaagaag

SEQ ID NO: 401973 - DNA, 101 bp, Homo sapiens
aatgacagtgaaaagcagccttacatcactaaggcggcaaagctgaaggagaagtatgagaaggatgggtctggcaatttccctggtggcaacagaaaaag

SEQ ID NO: 401974 - DNA, 82 bp, Homo sapiens
tgttcctctggcaatacaaactttctgctttcaaggctacatggtaatgggagattctttcaacacttctctcttcaagcag

SEQ ID NO: 401975 - DNA, 74 bp, Homo sapiens
ctgggttacaagcagcaagtgcgcggttggggccactgcgaggccgttttagggcacattcactgaaatccccg

SEQ ID NO: 401976 - DNA, 75 bp, Homo sapiens
gccgctgttttgccggaggagcccctcaggccattgtcctgggtcacataatgccagctgagcgtaaaaagccag

SEQ ID NO: 401977 - DNA, 83 bp, Homo sapiens
caaaaccaacgcctggctcggagcagcagcctctgagaccctctttcccagctgcccgctcctcagcacccgaagattcgcct

SEQ ID NO: 401978 - DNA, 100 bp, Homo sapiens
cggaatgcactacaacaggaaaatcatattatagatggagtaaaggtgcacatcctcatgggctcctgttacaagaccaaaaaattcctgctctccctgg

SEQ ID NO: 401979 - DNA, 109 bp, Homo sapiens
gaagaaagatgttttgcctactgttgatccgaatgcttcagacatgcctgaaacaatcaccagccgggatgccgcccgcttccccatcatcgccagctgcacactcttg

SEQ ID NO: 401980 - DNA, 97 bp, Homo sapiens
atgttcctcttcctgctctgcctcaccctcttccagttctcctgttaccctaaatgcacgctgcacgaggactacgggcggctgtgggagagccgcc

SEQ ID NO: 401981 - DNA, 100 bp, Homo sapiens
ggacatcctggaagctgggaaatgaatgtttactcagtgcctggctcccagtatctttataaccaacccagttgttaccgaggttttcaaacagtgaagc

SEQ ID NO: 401982 - DNA, 50 bp, Homo sapiens
aaaacaacttcgagggcagagaattgaatgatctggcacgggaccctcca

SEQ ID NO: 401983 - DNA, 83 bp, Homo sapiens
cggacagccgcgcgctgagggtctcggggcgggcgccgcgggacctctccgggccatgggggccatggcacctgcaaggtgtt

SEQ ID NO: 401984 - DNA, 100 bp, Homo sapiens
caagcagttcagaagagccaaggaataaacatgcaatgaacccaaaagggttggaagtacaagcagatgtacagaaagaacggtacagtctaagtggaga

SEQ ID NO: 401985 - DNA, 83 bp, Homo sapiens
ctactgggttattaatcctgctgacagtagtggcattacacctaaaggattaggtgaaaggtgtagcagtcactcggcctaca

SEQ ID NO: 401986 - DNA, 76 bp, Homo sapiens
cttaaacctgaaagtggtagcaaggctcttcagagtaacctgaggtactccttgttgccaagacggctcctcatca

SEQ ID NO: 401987 - DNA, 104 bp, Homo sapiens
tgaccaagcaaggtacccaccaggccgattatgtccattgttctcttggagcagctggtcatcatggtaaaataccatgaagattttgaaaaaacaaaggggag

SEQ ID NO: 401988 - DNA, 100 bp, Homo sapiens
tggggccaaaagaaaaagaacagcaacatgacctacgagaagctgagccgggccatgaggacatggtctgctatacagctcagactctcgtccgaatcct

SEQ ID NO: 401989 - DNA, 100 bp, Homo sapiens
acctggacgaggagctggactaccggaaacaggccttggaccaggccaacaagaataaaagccgccctcattctaggggagaatataatgtttacagcac

SEQ ID NO: 401990 - DNA, 82 bp, Homo sapiens
ccggctcgcggggcccggcgaagggcaggagaagaatttggattggtttcctcggatgcgagccatgtccctcgttagcaat

SEQ ID NO: 401991 - DNA, 75 bp, Homo sapiens
tgctgggcgccccccgggacagtctccgaagtctcgagcaggttctccagaagctggggaaggcagatgagacca

SEQ ID NO: 401992 - DNA, 100 bp, Homo sapiens
ctgcaaggtgggaagtgaagtcagtgcctcagttgctgaaatgctgagccgattatcaggattagcaaatgttgttttgcatgaattatcaggagatgat

SEQ ID NO: 401993 - DNA, 100 bp, Homo sapiens
ccgtcttccgccgcacgtggattcagcgcgatgcccaaatccaagcgcgacaagaaaggcatcagggatttggggtactctcagtaatattggcaaacca

SEQ ID NO: 401994 - DNA, 89 bp, Homo sapiens
aagaggaaagaaaaggagtcagggatggcccttactcagggggacttgatctcatcttcatgccaggccttgggtttgacaaacatggc

SEQ ID NO: 401995 - DNA, 74 bp, Homo sapiens
ccctgctgctctgtgccagggcccagggtctgcctcagtgcccagttcagcagaccccattgaccccagagcag

SEQ ID NO: 401996 - DNA, 51 bp, Homo sapiens
gagtccgccccgtgaggagaatgaaagagctaggagacaagcgatcagaaa

SEQ ID NO: 401997 - DNA, 76 bp, Homo sapiens
aactacagatactttgaagtagaagaagctgatgacccctcctcctgtagagagtggtgctgccctctcgggatgt

SEQ ID NO: 401998 - DNA, 73 bp, Homo sapiens
agatcatcgaggacctgagggctcaggttattaatgctgcactggctttagcagcaaaaccacagagtaaact

SEQ ID NO: 401999 - DNA, 89 bp, Homo sapiens
tttggggacagctgtcagtggcctaggccgcagtatccagaaggctacctggaagccctggccaaccgagagcgagagaaggagaacag

SEQ ID NO: 402000 - DNA, 74 bp, Homo sapiens
tcttaggcgggtgcacccagtttccaccatgattaaggaaggtgcaatttctcaagtcgcctgttgtttacatg

SEQ ID NO: 402001 - DNA, 100 bp, Homo sapiens
acttcacaagctaatggatggttccttgcaaagggcacgtatagcattggtaaagaacgatcgtccagtggaggcagaaggagaagacagcctgaagaag

SEQ ID NO: 402002 - DNA, 83 bp, Homo sapiens
agtatctggtgaagtggaaaggatggcccccaaaaataccctctaccatctgctttggtcagggtgccgctcgaggatttaaa

SEQ ID NO: 402003 - DNA, 88 bp, Homo sapiens
aaaggacctactactgcctatcaaaacgcccaccacaaatgcagtgcacaagtgcagcttagcagtgtctgcaaaaacgaatcttttc

SEQ ID NO: 402004 - DNA, 100 bp, Homo sapiens
cggaggaccctccgtgggcacctggcaaagatctatgccatgcactgggggaccgactcaaggactcagaattcatgattgaagaaatgcaggttagttt

SEQ ID NO: 402005 - DNA, 100 bp, Homo sapiens
ttgaaccagtgagaagatggccgagcaagcaaggataagtcctgcctagggtagttaaaagacgagtgaatgctctcaaaaacctgcaagttaaatgtgc

SEQ ID NO: 402006 - DNA, 100 bp, Homo sapiens
gttcattgttcggtcgaggacattattttcacatgccggtggtggtgtgcacattgagccccggtatagacagttcccccagctgaccagatcccaggtg

SEQ ID NO: 402007 - DNA, 75 bp, Homo sapiens
gtgatgatcaaccttctgcgttgcgaagacagaatcaagctgggtgtgtccgcagccggccaggtggtatccctg

SEQ ID NO: 402008 - DNA, 50 bp, Homo sapiens
cccgggttcctctcattgcaggctgaagcctttctgagaaaagtctacag

SEQ ID NO: 402009 - DNA, 75 bp, Homo sapiens
cgccgagaggccgtgcgggacgcgggcgccaggaccggccgaacgcagagcgcgcctggtgattcggctgcaccc

SEQ ID NO: 402010 - DNA, 51 bp, Homo sapiens
ttcccaacacccgccaccagcaggccaatgaacttccggcagaactaacca

SEQ ID NO: 402011 - DNA, 98 bp, Homo sapiens
aaggcgctcatggacggaagacccctggctctataagctgaattatggcagcccagtcaagcctacttctgcttcctcctggccgctctgggtgtgac

SEQ ID NO: 402012 - DNA, 100 bp, Homo sapiens
tggatgtggaggggaatagactccatctatccatatgagggggtccctaaagatgaagtgttagcaaatcgattgcttaatttcctaatgaaacatgtct

SEQ ID NO: 402013 - DNA, 101 bp, Homo sapiens
aagagcagtgggggttgctgacccagaggagagttctccaaacatgatcgtttactgcaaagttggtttgttggaccttgaactcaatcggctgacgaaag

SEQ ID NO: 402014 - DNA, 75 bp, Homo sapiens
tcaattaaacactgcattgtgttgctgcagattgccaaaggagagtcccgtattctcagagtaaaagttgtttct

SEQ ID NO: 402015 - DNA, 55 bp, Homo sapiens
ctgaaggaacgcgacggcggcgcccgcagaccagcggccagtgacgaggagctca

SEQ ID NO: 402016 - DNA, 129 bp, Homo sapiens
agatcaccgggggcgccctggaggagtccctgaagatctatgctcctctgtacttgagcttcacatttttcatccattcttaaaattgagccagtttagccctaggaggtgggcaggctctgaggaatc

SEQ ID NO: 402017 - DNA, 75 bp, Homo sapiens
gcaggctgggcacgaggaccatgctgggccggagcctccgagaaggaagaaatgatttcccttggggatggagac

SEQ ID NO: 402018 - DNA, 98 bp, Homo sapiens
accaagtgcgctgtgtccaacgacctcacccagcaggagatacggaccctggaggccaccagcccctcgggttccaagatgcagctactggagacaga

SEQ ID NO: 402019 - DNA, 100 bp, Homo sapiens
gccattgaagatgctgtgcggaggattgagtgatccctgaaaagttccagcatattttgcgagtactcaacaccaacatcgatgggcggcggaaaatagc

SEQ ID NO: 402020 - DNA, 100 bp, Homo sapiens
ccactacaagtaaaatgcgaattccacattctcatgcatttattgatctgactgaagattttacagcagctgatgaacttattagtcctaaagacattga

SEQ ID NO: 402021 - DNA, 50 bp, Homo sapiens
caaaaagtgccgggcatgcggatatgggcacggttatgaaatattttgtg

SEQ ID NO: 402022 - DNA, 100 bp, Homo sapiens
cttctgcatccttaactgagaatgaggttgttcctactgaaggattggtctccatattaaagaagaggaatgatactgtaggagatcatcctgcccaaat

SEQ ID NO: 402023 - DNA, 75 bp, Homo sapiens
caaagggccaatacctggatatggttctgaattcacagatggattcagtggaaaagacaacaaatagaagtgaac

SEQ ID NO: 402024 - DNA, 98 bp, Homo sapiens
tgatccgggtataataatgaagttaaaagagcagcactccaaggattacatcccagtagaccaagaagagttaagagattatgtcaaagctaggctga

SEQ ID NO: 402025 - DNA, 100 bp, Homo sapiens
cgcggctcacgctgagagggacacgcagtgacgagcggccgaagcagctttgcgacgcccctgtcctggcaagagctagaaggtgagcgtgccagttcct

SEQ ID NO: 402026 - DNA, 74 bp, Homo sapiens
agaagaacagctcgagagagcattacaagccagcctctgggaccgaggaagtgcacggctgtctataacgtgct

SEQ ID NO: 402027 - DNA, 74 bp, Homo sapiens
tggggaatttcccaccaggatgagtatgattggctgtgattttagagcagttgaacaacagatggattgtagtt

SEQ ID NO: 402028 - DNA, 101 bp, Homo sapiens
aaggagtcagacagatggcactctggatcaggtttcccacagggagaaaatggagcagacattcaggttcccagtgacctgacagcagaggagcgtcaaga

SEQ ID NO: 402029 - DNA, 80 bp, Homo sapiens
tagtcgcagtcttcgctgctaacgagatgaggatgacatcaatgatgtgacttctatggcaggggtcaaccttaatgaag

SEQ ID NO: 402030 - DNA, 75 bp, Homo sapiens
ctgaaaagtggagagcatcttaatccagaccagttggtaagtgtgttaacagaccaggtggaggctcagggagag

SEQ ID NO: 402031 - DNA, 75 bp, Homo sapiens
ttggggttggtagaaggtgttattgggaaaattcaacttcattcaggcataatgattataaagtggtttctcctg

SEQ ID NO: 402032 - DNA, 100 bp, Homo sapiens
agaaaggcccacctgtgtcctggttgagggtctccagggttctttggggcccgagggggcagctggcattttatgctatgtgggagcctatgtcttcatc

SEQ ID NO: 402033 - DNA, 100 bp, Homo sapiens
gagatgtggggggattctcgacctgctaacagaactggaccttttcggtggttattaacttggtgatgcttttggctgaaatgaaaatacaggaccgcgc

SEQ ID NO: 402034 - DNA, 100 bp, Homo sapiens
gaagggaaggcgcgagtgaggaaaggaggtactgtagggaatggacccaatcaatgaacggagagtgtttgaaatggttgtaaatactgcctgtaaagaa

SEQ ID NO: 402035 - DNA, 100 bp, Homo sapiens
cccagagaagaggaaaactctaccggtgcagaattaaacaaccaccatgtcgagcaaaaaggcaaagaccaagaccaccaagaagcgccctcagcgtgca

SEQ ID NO: 402036 - DNA, 98 bp, Homo sapiens
ttgcgcctctccagcctccgcaggcccaaccgccgccagcaccatggccagcaccatttccgacacgatgaggcgagtggtacgacagagcaagtttc

SEQ ID NO: 402037 - DNA, 73 bp, Homo sapiens
ttggactggcaaaacagatagctttgcatgctgaactggcccgccaagctgccccctgtgtgctattctttga

SEQ ID NO: 402038 - DNA, 90 bp, Homo sapiens
cagcaatgagaggacccgcgtgggcaccctgcaggtggtcagacatgtcatcaactcagctgtcaccttcaggccattcagaggaggaaa

SEQ ID NO: 402039 - DNA, 83 bp, Homo sapiens
cgggtggcggctcgggacggaggacgcgctagtcaaattgtggctactaatttgccccctgaagatcaagatggctctgggga

SEQ ID NO: 402040 - DNA, 110 bp, Homo sapiens
gcaagatcggcaggcgagattgcctgacccaggcctgctcggccctcacaggacaatgcagatcttcgtgaagactctgactggtaagaccatcaccctcgaggttgagc

SEQ ID NO: 402041 - DNA, 100 bp, Homo sapiens
ggcctccccgggcctcccattgcagcatctgtgacaactgtgtgggtgtggtggctggaggtggccgaattgacaaacccatcttgaaggctggccgggc

SEQ ID NO: 402042 - DNA, 75 bp, Homo sapiens
ggctggtctcccctctgctggtgacctgggagccaacaccctcgctgaggttccaggagcccccgcctggaggag

SEQ ID NO: 402043 - DNA, 95 bp, Homo sapiens
cctaagcaagctgccgcagatcgcaggaccgtggagaagacttggaagctcatggacaaagtgatacagtttatgtaacttgatggaagaaaatg

SEQ ID NO: 402044 - DNA, 74 bp, Homo sapiens
ccgcggatctcaccgccgctcaggaatcttgcctcctggaatccttcaaatcctgaatgtctcttacttgtggt

SEQ ID NO: 402045 - DNA, 100 bp, Homo sapiens
cgaattcgccaatcaggatacagctccaaatattctttccaggcaagaggaggaacgacgtagaagagaggaagagatgatgattcgtcaacgtgagatg

SEQ ID NO: 402046 - DNA, 100 bp, Homo sapiens
ttccgtcacttagctgaccatgggcaactttctgggatccagcgagcgacatggaatttgctgattcccttggaattccgtttttggaaaccagtgctaa

SEQ ID NO: 402047 - DNA, 100 bp, Homo sapiens
cccagctgcccggtgcccgaggaggcagccaagctcatggcctgccactgcgtgcgtaaggaaacaagtgggagaagatgccaggataacgcagctggaa

SEQ ID NO: 402048 - DNA, 100 bp, Homo sapiens
cggctccggtcacgtcaccgtgacacagctctctgcctccatgtcaccacctttgaaggactgactgattccctcggctggtgccagtgcctgctcctgc

SEQ ID NO: 402049 - DNA, 76 bp, Homo sapiens
gaagggctccttcaagcccagcgagcatgggattgtgaagcagcagatagacagccatatcacagatccagatcaa

SEQ ID NO: 402050 - DNA, 100 bp, Homo sapiens
cagaaataagccgttttttgacatctgtacttcaagaaagttgcaggacgaggagcggaggcggcagcagcagttagaagagatgcgcaagcgggaagcg

SEQ ID NO: 402051 - DNA, 98 bp, Homo sapiens
cgcgacatggccttcaattttggggctccctcgggcacctccggtaccgctgcagccaccgcggcccccgcggaccgtgagtcccctagaagttactc

SEQ ID NO: 402052 - DNA, 75 bp, Homo sapiens
catgatcgagtgcgacgcctgcaaggactggttccacggcagggaagccatcagccgcgtctgtgaagctgtgcc

SEQ ID NO: 402053 - DNA, 100 bp, Homo sapiens
ggaaaactgcaattttggagcagctcctttatggaaatcatactattgggggctgatcctgcaggacctgaccttcgttcacctgggaaacccagactac

SEQ ID NO: 402054 - DNA, 82 bp, Homo sapiens
cacggtgaacctggaccaggaggaggttttcaggaccaaaattgtggaaaagtcactctgagtctgtagaagaggcgacacc

SEQ ID NO: 402055 - DNA, 83 bp, Homo sapiens
ccagaaagaaattattgataccaatggagctggagatgcatttgttggagggcagatgattctggaccagatgaagcctgagg

SEQ ID NO: 402056 - DNA, 100 bp, Homo sapiens
tggcgccaccaggaaaatgtcctcagtgcaagagcaacacgtttccacagcacccccccaggcagcagcagcagttttcatctctggatgacaagcccca

SEQ ID NO: 402057 - DNA, 89 bp, Homo sapiens
cagcaatggagaagagaaagcacaaagcatggagaccctccctccagttaaagccttccatctgaagtatgatgaagttcgtctggatc

SEQ ID NO: 402058 - DNA, 101 bp, Homo sapiens
gaccgagctgcggctgctgtgggaaggctttgtgatacctgatgaagggggcccacaggaggagcaagaagagtattaacagcctggaccagcagagcaac

SEQ ID NO: 402059 - DNA, 80 bp, Homo sapiens
tcgcccggctttgcagcggggacttcggcggcggcgcctcaggcacctcggcccgggtctcctctgagcctccggcctcc

SEQ ID NO: 402060 - DNA, 87 bp, Homo sapiens
tgaccactagacccacagctgttaaagcaacaggacttgctgaagcacactcctgccagccaccctgaccaccccttgctgcaggac

SEQ ID NO: 402061 - DNA, 95 bp, Homo sapiens
gctgaatgtgttactccattgctgaggagtggagcgattggttacatgggaacaagtgcctttgtccgaaaaatctatactaatgtgaaaattga

SEQ ID NO: 402062 - DNA, 100 bp, Homo sapiens
cagttacatactgattctttaagaaaatcagataacttgtactggagagaaatcctacaagtgtgtgacaaatggcctacagctgtgagagcaaatggac

SEQ ID NO: 402063 - DNA, 100 bp, Homo sapiens
gtcagcccgtcttccttcccctcccttgcatgatggaaacaccatggctgcggcggcccagctctctctgacacagatggagccttcctctgtcacccag

SEQ ID NO: 402064 - DNA, 90 bp, Homo sapiens
tacattttggaacctcttcgaggccatcctgcagttccagatgaaccatagcgtgcttcaggagatggggtctcaccctgtcacccaggc

SEQ ID NO: 402065 - DNA, 82 bp, Homo sapiens
gaacctctatgccgacatcgacgccgcctggcaggccctgcgcaccagtccttcagtgaatctacagacctattttctcagg

SEQ ID NO: 402066 - DNA, 98 bp, Homo sapiens
ctcttgtagggccagagaggaaaaaatcttcaactattccaagtgcaaagggcgttgtgaatacagctgtgtctgcagcagtccaagctgttcggggc

SEQ ID NO: 402067 - DNA, 74 bp, Homo sapiens
agtcactggtttgcagagtccaggtgaaattgccaaatacatggaaacagtgaaattactagactacactgaaa

SEQ ID NO: 402068 - DNA, 82 bp, Homo sapiens
cctatcataccacactcttcagcgaccacgcaggcactttcccggtccccaggtagccaatctgaattctaaggacctctca

SEQ ID NO: 402069 - DNA, 98 bp, Homo sapiens
gcatcgtattcccggaatcagacggtgccccatagatggccagctttcccccgagggtcaacgagaaagagatcgaaatggagaagaagctcttggag

SEQ ID NO: 402070 - DNA, 49 bp, Homo sapiens
caacgatggagaacaaatcattgctcagcttcagaggatgattccgaag

SEQ ID NO: 402071 - DNA, 75 bp, Homo sapiens
ttctttatggtaaccgagctctttgttttcttcgtactggacagtttagaatttcgctaaggagtttgtgatcag

SEQ ID NO: 402072 - DNA, 87 bp, Homo sapiens
gaagccggaggcctgcgtggaggaggcgccccgcgcagctggctggcggagcatgagcgccccaggcctgggcagtttttaaaggga

SEQ ID NO: 402073 - DNA, 100 bp, Homo sapiens
ttgtccacagctggcaaattcagtgcagatcaggcgggtgccacgtctatgtgggcttcgtgctgtgggctgctgaatgaagtcatgggaactggagctg

SEQ ID NO: 402074 - DNA, 83 bp, Homo sapiens
ggagctcaaagtgtgccttctcgggcacacggaccctgactactcggctgcctatgtcgtcatagaaactgatgcagaagatg

SEQ ID NO: 402075 - DNA, 106 bp, Homo sapiens
gactagccactttgcattgactggaaacaatggcatttacagaaagagtcaacagcagtggcaacaggccagaaatgtacacacaggagagctggctgcagtaaaa

SEQ ID NO: 402076 - DNA, 89 bp, Homo sapiens
ctggaagacattagagaggagctcaccatggcaatattggcatttgcaagtaaaatcactggcatgttgttggaattatccccagctca

SEQ ID NO: 402077 - DNA, 97 bp, Homo sapiens
gcagacgaaatgttgatttggatttggcagcatctcacagaaagagagggatgttggtggtaaatgtaacgtggaggaacaagacatatgtaggtac

SEQ ID NO: 402078 - DNA, 100 bp, Homo sapiens
agaaattcaggactgggctaaagaaaaacaacacacacgtctctgaaggaggtgttggctgtgtctgctgccttctctggtttgttgtgatttatgatga

SEQ ID NO: 402079 - DNA, 83 bp, Homo sapiens
gaggattccggcgggaactcgactcttggcgccaccgcctcatgcactgtgcggctatgagaggttttcctccgagtacccag

SEQ ID NO: 402080 - DNA, 101 bp, Homo sapiens
cttcaaccatctggggaaaaggcaaaaatcccatctaccgcaactctcagttcgagagtaaagggtttggattcaggatttgttcctagtgtccaagattt

SEQ ID NO: 402081 - DNA, 83 bp, Homo sapiens
cgccagcctcggcaccgtcctttcctttctccctcgcgttagtaatcaagatgattaccaactggttcgaaaacttggtcggg

SEQ ID NO: 402082 - DNA, 90 bp, Homo sapiens
tagagctcttcagggaccacactgcaattctggatttcctgccagtttggtatttccattcaggacattttatctctgtgcaaagaccgg

SEQ ID NO: 402083 - DNA, 100 bp, Homo sapiens
ttaatttccaaaatggaatagaatgtggtggtgcctatgtgaaactgctttctaaaacaccagaactcaacctgctgctgctgttcttgaagggtttttc

SEQ ID NO: 402084 - DNA, 75 bp, Homo sapiens
gacaagcacacactatggcgctgaaacggattaataaggggctatctgatgggttagagtgcctttgagaagaaa

SEQ ID NO: 402085 - DNA, 101 bp, Homo sapiens
agccaatcctggagctgctgttgcagcacttgttccccaaacaagtgctcctacattctgcactattcctgatcagagaactccagttgcttcaacacaca

SEQ ID NO: 402086 - DNA, 80 bp, Homo sapiens
cctcagtgccagagtccatgacaattagctgaccccgcactacatctacccaccagccatcgtgcagcccagcgtggtga

SEQ ID NO: 402087 - DNA, 100 bp, Homo sapiens
aaaaatgatgaagagcagatggaaacacatgaaagacttcctcaaggactacagtatgcacttaatgtccctctcctggtaacgtttttatccatggatg

SEQ ID NO: 402088 - DNA, 100 bp, Homo sapiens
gttagaaaaggtttttgaggaacttcaagctactgacaaaaagatgttgaacgtcgacgcatttacgatatcgtgaacgtcctagagagtttacatatgg

SEQ ID NO: 402089 - DNA, 98 bp, Homo sapiens
ggtgtaggaggacgccagttactgcacggaaagcagcgtcaggagccatagtacctacagcagcactccagatctttgatgatgcgtacaaatcccag

SEQ ID NO: 402090 - DNA, 100 bp, Homo sapiens
cggttctctctcgaccccttctgcccggcgcttcggcccgggccgctcaggtgcagaattaaatgtgagggagtctgacgtaagagtttgtgatgagtca

SEQ ID NO: 402091 - DNA, 100 bp, Homo sapiens
agaccgcaggaaggactggggccacgtggagctgctggagggtgaccagaagtcagcagcttcccagaagccccgaagccggggcatcctccactcactc

SEQ ID NO: 402092 - DNA, 100 bp, Homo sapiens
ggttctacctgggagaatccaccgccatccgccaccatgggaaattcctcgctgccggactgcgcccacccttgaggacctcacattctctttgggcaga

SEQ ID NO: 402093 - DNA, 87 bp, Homo sapiens
ccaacccgcggccccggcgccaagccgccgtcatcttcttcctgtgccaggatggatagaatgacagaagatgctcttcgcttgaat

SEQ ID NO: 402094 - DNA, 49 bp, Homo sapiens
tcttcttcaatcttggtgtgaagcaacttgagttggtggaaccaagtgg

SEQ ID NO: 402095 - DNA, 51 bp, Homo sapiens
agaggatgatgctgactttgatgaaggccccttcacagatgtagtcactac

SEQ ID NO: 402096 - DNA, 96 bp, Homo sapiens
gttcccggagatgcggcgcgcaggttactcctggatggagcacctctgatagcaatccacaaagccaggtattacaagaggaaagatggcttagcc

SEQ ID NO: 402097 - DNA, 90 bp, Homo sapiens
caggccgggtgctgggcacggtcccgcgagctgtcttgtcgacggtctcactgatgcctcttctgcattcaaagttcctcgacccgggcc

SEQ ID NO: 402098 - DNA, 100 bp, Homo sapiens
catccccacatcaatgcactgccaatgctgcagatctgggacacggccggccaggagcggttccgcaccatcacccagagctactaccgcagtgccaatg

SEQ ID NO: 402099 - DNA, 82 bp, Homo sapiens
acctttgctgcaaaaaattacgggtaaagaaactgcggcaatgaaagctgatctcctgagggccaggaacatgaagaggtac

SEQ ID NO: 402100 - DNA, 75 bp, Homo sapiens
cttatgctgaagaggacccaccgtgggctccacgttcttacttggaaaaggacatatctgaagagatggattaag

SEQ ID NO: 402101 - DNA, 82 bp, Homo sapiens
gggaaccctggtcaccgtctcctcaggttacgggcaggacttgagtggcttcggacagggcttctcagaccccagccagcag

SEQ ID NO: 402102 - DNA, 97 bp, Homo sapiens
tagaacagaaaaatgaagatggaacatggccaaggggtccttctactcctaacttagaaatgttggacaaagttgagcctccaactatacctgaagg

SEQ ID NO: 402103 - DNA, 82 bp, Homo sapiens
ccgcctccgagcccgccgccacatcctctgagaaaatgatgcatcctgttgccagcagtaatccagctttctgtgggcctgg

SEQ ID NO: 402104 - DNA, 50 bp, Homo sapiens
gaacgaatacacctcaatgtctctggagtgaaagctggacattgaagaag

SEQ ID NO: 402105 - DNA, 83 bp, Homo sapiens
tggaattctaatttgaaccatgtttggattgaagccgcctctgtattacttaccaggttcgagaacttgtcttggacaattgc

SEQ ID NO: 402106 - DNA, 75 bp, Homo sapiens
aatagttctactccttctacaggtgtgtatggttggtgacatcgtgaaagtcacaaggatgaatataaatggcca

SEQ ID NO: 402107 - DNA, 101 bp, Homo sapiens
gtgtggcagctgctctgaaccaggacctggacccggacccaaagtgccatgtctttaatgatcccgagatggacatgaagtcagtgactgaccgggcagcc

SEQ ID NO: 402108 - DNA, 75 bp, Homo sapiens
tcacgacttggtcttcccgaggagccagtcaggcaccgctctaaagagggtctgactgagcgctttgagctgttt

SEQ ID NO: 402109 - DNA, 50 bp, Homo sapiens
aatgaatccttctagagacgtccacgaccctctttcccagctgcccgctc

SEQ ID NO: 402110 - DNA, 83 bp, Homo sapiens
gctctctgctcattggggcgttgaggagtatcatgaactgatcactaaatatgggaagttggagcctttggcagaagtggacc

SEQ ID NO: 402111 - DNA, 83 bp, Homo sapiens
aaatagagctgccagaggttccctccgagccccttcctgagaagatcccagcttcctgcctgacacagctcacttcaagaagt

SEQ ID NO: 402112 - DNA, 90 bp, Homo sapiens
caaaaccagtcatgaccactagacccacagctgttaaagcaacaggacctgaaggagaagaaggagaaggtggaggagaaggcaagccgg

SEQ ID NO: 402113 - DNA, 75 bp, Homo sapiens
ttggctggctatgcagacatctttctgcctccatcaagaaatcggcgagagagagctgagctaaggccagacttc

SEQ ID NO: 402114 - DNA, 83 bp, Homo sapiens
ctgattcacaattatggagactgtacccaacatgagtgaagtttcctgcaagaaacgggacgactatttggaatggccagagt

SEQ ID NO: 402115 - DNA, 80 bp, Homo sapiens
cagccaggacatcctggaacctgggaaaggattatctcaactttggtctcctgggaccactcgttgctgacagtcagaaa

SEQ ID NO: 402116 - DNA, 75 bp, Homo sapiens
gaggaaacccagccgcttctggggcctcctggcggcagaacccttaggagaaatcttgagagtggacagcaattg

SEQ ID NO: 402117 - DNA, 101 bp, Homo sapiens
aggaatctggaattttattaaacatgaatgaagagcttcgaaacttgtctttgtctggccatgtgggatttgacagcctccctgaccagctggtcaacaag

SEQ ID NO: 402118 - DNA, 82 bp, Homo sapiens
ggcagtccacccaccgccgccgcctcccaggacggggaggtttactgcatcgacgcgcggttctacgggaacgtcagccggt

SEQ ID NO: 402119 - DNA, 98 bp, Homo sapiens
ctgccgtgcgtttaacccaggcgaggaggaggaggagaaaattcccccagattcgggcagaagccagctgaagatgagtggggtaaaaccccagacgc

SEQ ID NO: 402120 - DNA, 75 bp, Homo sapiens
aacatcctttgactggttagccaggtgggtttggaggatttgggacaacatctacaactgcaggttctgcattca

SEQ ID NO: 402121 - DNA, 80 bp, Homo sapiens
ctactctcagcctactatctgtctggagaagagttgatgctgatgtaacagttataggttctggtcctggaggatatgtt

SEQ ID NO: 402122 - DNA, 100 bp, Homo sapiens
tttgagaacacatttcttcgcctaaagctaaataacttggtgctacatgcattgaaagaaaaggttacttcactacctgacaaccataaaaatgcccttg

SEQ ID NO: 402123 - DNA, 115 bp, Homo sapiens
ttcatctttacagaggaatagtctacaaaggaagacttgtaacctggagaagaggcacagatgaggagagcatcctgactctgttgacatcccgaagtaatgctcagcgccagga

SEQ ID NO: 402124 - DNA, 120 bp, Homo sapiens
aaaaatttttcaaattcagtttcccttatatactgcttacaagcataatactcaccctactattgagggaagagaacaccaaaggcgaaggagaagaggaacaagaaaaagaaaaggaag

SEQ ID NO: 402125 - DNA, 101 bp, Homo sapiens
ggaaggaggagaggtgctgtgctgtgtatgaagaggcagtgaagactctgccaacagggctgcctgaccatggtccccagtgagaaggaagtggaacccaa

SEQ ID NO: 402126 - DNA, 147 bp, Homo sapiens
gcccgagtggtgtcagctcagtcccggccgccgccgcgcgaggaaatggccgaggagccggagccgcagggtgctgaaaagtcacccaccacttcagctgaccttaagtcagacaaagccaactttacatcccaggagacccaaggg

SEQ ID NO: 402127 - DNA, 98 bp, Homo sapiens
gctgaatcctgcccgcgtgaaccacatgcccagcacggctctgggaaaccaaggttttgcagtctaaagcaacagaagacttcttcagaaatagcatc

SEQ ID NO: 402128 - DNA, 75 bp, Homo sapiens
tggaaagacgctcgtcaccaggacccaaggaaccagtgctggagaatctggtaaaagcaccattgtgaagcagat

SEQ ID NO: 402129 - DNA, 50 bp, Homo sapiens
ggacattccaggcagaggcaagtctatccagaagttaaaggagagattgc

SEQ ID NO: 402130 - DNA, 98 bp, Homo sapiens
agctcatgagcagcctgcccaacttctgcgggatcttcaaccacctcgagcggctgctggacgaagtgagccgaacctgctcgtccgtgcctgcaacc

SEQ ID NO: 402131 - DNA, 100 bp, Homo sapiens
ctaatggcaggcattttacaaggatacaatgtctctttgctatatgaccttgaaaatcttccggcatccaaggattccattgtgcatcaagctggcatgt

SEQ ID NO: 402132 - DNA, 75 bp, Homo sapiens
ggtgatgaggatgtagatttaccagaagtagatggagcagatgattcagggactatgcggcgcaaacatctcctt

SEQ ID NO: 402133 - DNA, 98 bp, Homo sapiens
aaccatgggcactgcagggtgagaggccacgtcagagctgcccagggcttttttgaagaagaagaaggtaaagagtatatttataaagagcctaagct

SEQ ID NO: 402134 - DNA, 88 bp, Homo sapiens
ccagatggcagccagtcagtggtggagaaatacaggtatcaggatgaagatacacctcctcaagagcatatttccccacaaatcacaa

SEQ ID NO: 402135 - DNA, 75 bp, Homo sapiens
cggcccgcttcctggaatggcaagcgcagcaacaacagagagcacgtggaactctgcgaccttcaagtcgtttga

SEQ ID NO: 402136 - DNA, 98 bp, Homo sapiens
tgaaggaaaccattgaagagcttcgttgtgtacaagctcaagaagggcagctcacaacacaagcatcagataaactgctgctggcctggagggaaatg

SEQ ID NO: 402137 - DNA, 80 bp, Homo sapiens
tggtggactcgctctccgagggcgacgcataccccaacggcctgcagcctctacggcagacacatgcaggccaacccaga

SEQ ID NO: 402138 - DNA, 89 bp, Homo sapiens
gattccaagtaactcttatttggttctatgtcaatgggcccaggattctgaaacatagtccatgttgtcataaaggccacagcctagtt

SEQ ID NO: 402139 - DNA, 96 bp, Homo sapiens
aagagacaggaggcagtagccaaacacccagcacaatcctggaggaagagaaggctcagcaagaagagcgcatgaggatggagtccagaagacagg

SEQ ID NO: 402140 - DNA, 90 bp, Homo sapiens
gagggttgggagagcgcgttggtggcgacggccgagtcaggtatagtggaggattacaagccaccgttctacgatgtggttcccaatgac

SEQ ID NO: 402141 - DNA, 100 bp, Homo sapiens
gacgtcatcatgctgaccaccaatcagatccgtaaggttatgccaaggacgccctgaatctggcacagatgcaggagcagacgctgcagttggagcaaca

SEQ ID NO: 402142 - DNA, 80 bp, Homo sapiens
gtggcgcctccctgcgactcctggaccaccgggcgctggtctgctcccagccggtatttcaggacagccaggagggggcg

SEQ ID NO: 402143 - DNA, 82 bp, Homo sapiens
cggtccctgcgcttgctgctgggaagtggggttgtgagtcccggcccagcccctccacccccctgcccccccgatgcgacca

SEQ ID NO: 402144 - DNA, 82 bp, Homo sapiens
ggagggcgagcgaggaggatggcggagtcggggctcctgacgcttcgagagctgtgcccaggagtgaacaaccagccctacc

SEQ ID NO: 402145 - DNA, 75 bp, Homo sapiens
accccgcggctgggcgttcatctaccacgctttcgttgggacaaatctgctcagtgtggatgaagatgaggattc

SEQ ID NO: 402146 - DNA, 82 bp, Homo sapiens
aaatagatgacatcaataccagtgataagttactacatgatcatgctgtggagcatttcactgagtttcttctgggtgcctg

SEQ ID NO: 402147 - DNA, 82 bp, Homo sapiens
ggcgactggacttacgaggagcagtttaagcagcccgtggaccgggagcccgtggaccgggagccggtggtgtgccaccccg

SEQ ID NO: 402148 - DNA, 74 bp, Homo sapiens
ttgaacctatatcctagttgccagaccagtaaactgaccatgggacctgggagtcttgctgtgtcacccaggct

SEQ ID NO: 402149 - DNA, 73 bp, Homo sapiens
aggtcacctttgcattgcactcaggctcaggggagagagaaagcccagaaagaaagctactccagggtcctat

SEQ ID NO: 402150 - DNA, 50 bp, Homo sapiens
gtggcctgtggcgctaaccacacggagatcatgagagactatatccagaa

SEQ ID NO: 402151 - DNA, 50 bp, Homo sapiens
tgttcaccagcactgtctccaccctagagcactattggaaataattatga

SEQ ID NO: 402152 - DNA, 82 bp, Homo sapiens
ggacctggaaggggagactctgctgacacccatcacccacatctcacagattcagtgcccggccatcctggctgccctggcc

SEQ ID NO: 402153 - DNA, 75 bp, Homo sapiens
gacgacttcgaccctgcccagcacgaccagctcatgcaggtaactgacgatgccctggtgtacagcaccttcctg

SEQ ID NO: 402154 - DNA, 101 bp, Homo sapiens
ccgctgtggatggtttctaaaatgatcattgaaaacttcgaggcactcaagtcctggctcagcaagactctcgagcccataaacccttgaaactctcatca

SEQ ID NO: 402155 - DNA, 76 bp, Homo sapiens
ggcctctttgtggcctgccgccactcagaagcccggttcatcgctagacattcactactttcactgcctaagaatc

SEQ ID NO: 402156 - DNA, 100 bp, Homo sapiens
aagtttatatctaagactccaagtaaggaagaaattgagaaagaatgtgaagataccagtttgcgtcaggagacacagattataagaagaccagtctagc

SEQ ID NO: 402157 - DNA, 82 bp, Homo sapiens
cttcaaagccagtatcaacactttggtctgctctaaacttatccatctctgtccattactggaacaactccgcaaagtcctt

SEQ ID NO: 402158 - DNA, 101 bp, Homo sapiens
agagaagtttaagagaagaaatggacatgattgcctaaatcagccaaacacagggaaaccacccctactcctaatcccccgactacagaagaggagaaaac

SEQ ID NO: 402159 - DNA, 98 bp, Homo sapiens
tatggcaacatcaggtgactgtcccagaagtgaatcgcagatcagtcgcatcgaatacattcattcaaagaacttcatccaccgggatgtgaagccag

SEQ ID NO: 402160 - DNA, 78 bp, Homo sapiens
cctttccaacacagatgtccaagctgccaagctaggtcccactcagctcaaaatcttcacttgtgaatactgcaacaa

SEQ ID NO: 402161 - DNA, 98 bp, Homo sapiens
cagtgcttgcaggatctctcctggacaaatcaatcaggcagacctgttatcctaaactaggtgagtcagcttttggtacatgtgatgattttcagtgt

SEQ ID NO: 402162 - DNA, 112 bp, Homo sapiens
gcgcgcaggacagcgccttcctcaacgacgcggacatggtcatgagctttgtgaacctgggtgtcgtgaaaactacccctaaaagccaaaatgggaaaggaaaagactcata

SEQ ID NO: 402163 - DNA, 98 bp, Homo sapiens
tggatcgagttctcctgctacaattcccggctgctcaacactgcaggaactggcccatctcgggcagaagctggcagtggtgggcctggcttcacctt

SEQ ID NO: 402164 - DNA, 88 bp, Homo sapiens
tttgttaaggattccaagtaactcttatttgatgtttctttctcagcaaaatagaggagaagcttacccctcttccagaagataatag

SEQ ID NO: 402165 - DNA, 96 bp, Homo sapiens
gccgcgccgggagcggcgctggccccaaggcgctgccctgcgcaggaaaaatatgtcgtaactgcaagtgtggccaagaagagcatgatgtcctct

SEQ ID NO: 402166 - DNA, 100 bp, Homo sapiens
gccaagcagcttgcgacttctggcggcttacagggagaacacagttggcctccaccgtttctgccccacagaaaacgtagcaaagatcaaccgagaggtg

SEQ ID NO: 402167 - DNA, 90 bp, Homo sapiens
gcagttggcaagaaaactctgtgactccatgagatgggaaattacaccagcagtcaaggtagcaaggttttgcactgattgcaaaaataa

SEQ ID NO: 402168 - DNA, 116 bp, Homo sapiens
ctggctctgctgctgccgccggcgaaggaggaggcgttgccggcccttcgccacaagaagatgggcagatcatgtttgatgtggaaatgcacaccagcagggaccatagctctcag

SEQ ID NO: 402169 - DNA, 88 bp, Homo sapiens
gcgtccgcccgggtcgtggcggcgggcgcccagcgcgtggtatgccattgcattggccttaagggaaaagcagcgtgtaatatttacc

SEQ ID NO: 402170 - DNA, 100 bp, Homo sapiens
aacaactacacgttacgctattcgttgtggtccaaaacagtttacctcttatctaacaggtgtggatgaggtcaccattgtcaacattttgaccaaccgc

SEQ ID NO: 402171 - DNA, 138 bp, Homo sapiens
cggagcttatactcctcccagtgacgggtctggagtgcgtgggggaccggctgttggcggtaagactttgaccccgacgcaggcttcagtgattgccgcggatcagaagcctgagcactttggctcgagacaattaag

SEQ ID NO: 402172 - DNA, 90 bp, Homo sapiens
agcctttacttgttgaggagcagtgagtacctatttgggatttctggaagttcttctaaatcaggaatggattgaaatctaatgaaccga

SEQ ID NO: 402173 - DNA, 99 bp, Homo sapiens
gaaggaccgattttaccgatccattttacctggagataaaagatttgtacacacagatatgacgaaagacttgaaagaagaacatttaaagaaaaatat

SEQ ID NO: 402174 - DNA, 125 bp, Homo sapiens
ttagaaaaacaagaattacagcagccaacctatgttgccctgagttacataaatagggtcttactgaagtaacacaaagcttaaaaatggaaaatgaagagtttaagaagaggttcagtgatgct

SEQ ID NO: 402175 - DNA, 100 bp, Homo sapiens
ccgaaataaagatgccttaagccattttgtaattgcaggaggcgctgagatgcgtctggagagccagagggcctgcctgaaggaatcacctgagcctgtc

SEQ ID NO: 402176 - DNA, 75 bp, Homo sapiens
ggacgcaggaagtggctccccccacacccctcacccctacctcacacacggatcctcaccaagacaggggagctg

SEQ ID NO: 402177 - DNA, 83 bp, Homo sapiens
caaacatgaatgtagtgacaagctggcccagaatcccctactttgaaactagtgctgccaatgggacaaacataagccaagca

SEQ ID NO: 402178 - DNA, 100 bp, Homo sapiens
aaaaatcaagtcttaccaatgcagaatttgaggagattgtccagattgttctgcagaagtcccttcaggagtgcttggatggagtctcgctctgttgtcc

SEQ ID NO: 402179 - DNA, 101 bp, Homo sapiens
tgcagtgacatgttgataaaaaatgatgtttgagttcatgatcgagtccatcctgtatgcccgggatgcctggctgaaggaggacggggtcatttggccca

SEQ ID NO: 402180 - DNA, 100 bp, Homo sapiens
ttatagagcattatacccctttgaagcaaggaaccatgatgagatgagttttaattctggagatataattcaggaagaagctgggagagttcttccagac

SEQ ID NO: 402181 - DNA, 50 bp, Homo sapiens
tgaaattaagctaaaagactggcaagaagacagcgacagctgtggcgcac

SEQ ID NO: 402182 - DNA, 100 bp, Homo sapiens
ttccagcccttcaaccaacatcttctgccctgggtcaagtgtacaaccgtcttcagatctcattcgagtggtgaatgcatttcgtagttctttatatgaa

SEQ ID NO: 402183 - DNA, 83 bp, Homo sapiens
attcattagcactttacaagcccagctcagccagacacaggcagagcaagctgcacaggggtttgtgaccatgactctggaaa

SEQ ID NO: 402184 - DNA, 74 bp, Homo sapiens
aacacagatgtccaagctgccaactgctaatagtaaatggatccaggaacatccagaatgtgcctataatcttg

SEQ ID NO: 402185 - DNA, 82 bp, Homo sapiens
tcaagtagagatttgctcaatgcattgaagtcagtcattaatgaccctatctggagaagcgactggaggagtggttggggag

SEQ ID NO: 402186 - DNA, 75 bp, Homo sapiens
gcctgtgttggcctggagcctccccaggatgatatgtcttgtcgttcaagacttgcaacactaaacgagaaattg

SEQ ID NO: 402187 - DNA, 82 bp, Homo sapiens
ggagaccacctggtggggaacgtgtacgtcaagaaccctcacacggacgcctggaagagccacggcttggtggaggtggcca

SEQ ID NO: 402188 - DNA, 100 bp, Homo sapiens
tcagcccttctgagctctgtgctgaacaagccatgctgtgacctacaagcaaactaaatagccaacatttctgaacccctaagtctcctgtgccaagctg

SEQ ID NO: 402189 - DNA, 75 bp, Homo sapiens
ccagcatgaggcaggaggagcgctacctgcttattcagctgattctgaatcatcttacactaccagacctgtgta

SEQ ID NO: 402190 - DNA, 75 bp, Homo sapiens
ccccagacaagatggacaccgcggaggaagatttcctccttcttcacccctgaaaccatatccaaagaagccccc

SEQ ID NO: 402191 - DNA, 100 bp, Homo sapiens
gacctacatccgtgagtggctaatcgtgaaccggaatttgcaggtcgaagtaagaaggaaaccaaatattctcttaaggctgtcgaagacatgttggaaa

SEQ ID NO: 402192 - DNA, 96 bp, Homo sapiens
taggaatctatgatgctgatggtgatggagattttgatgtggatgatgccaaagttttattaggtgggaccagggagattggatctgctctcacca

SEQ ID NO: 402193 - DNA, 100 bp, Homo sapiens
tcattattgatcagttcattgacaggcagcacacttctgcttttgttccttcatcaggacgaatttactcttttgggcttggtggtaatgggcagctggg

SEQ ID NO: 402194 - DNA, 82 bp, Homo sapiens
cgatggtgacccggttcctgggcccacgctaccgggagctggtcaagaactggtatcacctcttctgggctcaagatggaca

SEQ ID NO: 402195 - DNA, 75 bp, Homo sapiens
ccagaacctcctttacacagtatcagaacttgatattcactgatggactccaaagaatcattaactcctggtaga

SEQ ID NO: 402196 - DNA, 75 bp, Homo sapiens
cgcccgcttcaaccccaggggaccagaggaactcagccctgattgcgatgtgtatatctcatgattgatatggag

SEQ ID NO: 402197 - DNA, 82 bp, Homo sapiens
tgactcctacttcctctgtatagagcaactgttgaactcagctgcctgtagaatgttgtaccatctttgggtaggcagactt

SEQ ID NO: 402198 - DNA, 96 bp, Homo sapiens
ggaagcaggaaaagcagacggcacgattggccatctgcaagcttcccttctccgtggagagcaggaagacagtcatgggacctcagggagccagga

SEQ ID NO: 402199 - DNA, 100 bp, Homo sapiens
aaccgctctcgcttcgtcctacacttgcgcaaatgtctccgccctccttacagcctagaaaaaatgacagatctcgtagctgtttgggatgttgctttaa

SEQ ID NO: 402200 - DNA, 101 bp, Homo sapiens
tgggataatttcctcattggttgagtcagtgagttgcgtgtctgcaagagagcatcctatctgagcaacttgctggatgtgaatcagatcatcaaggactt

SEQ ID NO: 402201 - DNA, 83 bp, Homo sapiens
ggcccttgttcccccaaatgtctgactctgactctcggactgagaaacgcaagggtaacaagatgctcaactatagtgctccc

SEQ ID NO: 402202 - DNA, 90 bp, Homo sapiens
ctctggaggcacctgttgcaagtgacaggtctgccatcatggatgttctcgcagaagcaaatggcacctttgccttaaaccttttgaaaa

SEQ ID NO: 402203 - DNA, 100 bp, Homo sapiens
tgaagcacaagggattgattgaaatacccaatctttctgaggaaaatgaagtagatgacactgagtctattgcgtctgcagacatggatttcaaccagct

SEQ ID NO: 402204 - DNA, 105 bp, Homo sapiens
ccggctgcgggaactgctgatggctcagggactgtcagcctctgctctggaaggagagaagatggggctctcaatctttgccctgctgacccttactgtgttcct

SEQ ID NO: 402205 - DNA, 100 bp, Homo sapiens
caaggaggagactgtgctggctcattttttgagaccagtactgttataatccctatttacagatgaagaaactgagcttcaaaatgattaagtgtcttgc

SEQ ID NO: 402206 - DNA, 80 bp, Homo sapiens
gggagccgtgctctacctctatccgattgaaagtatccagctgatgatggacagtgaaactggtcgatccaagggatatg

SEQ ID NO: 402207 - DNA, 87 bp, Homo sapiens
gagaccctgtggtggcttattactagttcttgaagccagcatagcagagaataaagcatgtttgaagaggacacctacagaagtttg

SEQ ID NO: 402208 - DNA, 75 bp, Homo sapiens
gatctggaagcggctcaatgaccatggcaagaactggcgtcacgtttacaagatgatcatcgagcccaccagccc

SEQ ID NO: 402209 - DNA, 75 bp, Homo sapiens
acagtatagaatacaaaggctgttatttacgtgaacacacagcatggaaccgagattaagcgtagctcctgaaat

SEQ ID NO: 402210 - DNA, 90 bp, Homo sapiens
cgctgccatcccggccacgcgggtggaggtgtccgtgtcctgcagcatgactatatgaaggaagaggaaggttttcctgaagatgaggcg

SEQ ID NO: 402211 - DNA, 100 bp, Homo sapiens
gcacacgggggagcggccttacagctgctctgcctgcgggcccagatacaatcagcagaggaagaaaaccacaggatgaaacagtcccaatgaccagcac

SEQ ID NO: 402212 - DNA, 82 bp, Homo sapiens
cggcgccaagccgccgtcatcttcttcctgtgccaggctgaccccgcactacatctacccaccagccatcgtgcagcccagc

SEQ ID NO: 402213 - DNA, 75 bp, Homo sapiens
ctcctgcctcagcctcgcaagtagctgggattacaggttatcaagttatacccaaccagcagcaaaactaccaag

SEQ ID NO: 402214 - DNA, 74 bp, Homo sapiens
ggaggccaggggtgtcgccatgctggcaaactgatacaactcagaaactgctcaatgtcaggaaaaccggaact

SEQ ID NO: 402215 - DNA, 74 bp, Homo sapiens
ccatgcggcggctgccattgccaaggctggcattccgggagagaagatgactgaggaggaggtggagaccgttc

SEQ ID NO: 402216 - DNA, 100 bp, Homo sapiens
gagaaccccagcttggagaaccaccgcatcaagagcttcaagaacaagggccgcgatgtggaagtataatattgagcccagcctatattgcccgtttttc

SEQ ID NO: 402217 - DNA, 83 bp, Homo sapiens
ccaccatgtcagacgcagccgtagacaccagctccgaaatcaccaccaagctcactgttaatgaagcggctgctcaactctgt

SEQ ID NO: 402218 - DNA, 100 bp, Homo sapiens
tggctagcaggaatgcttactgttgcgtggttcgttattaacagcttctccaaacaggctggtgtacagggagcaacaccggagctggtgcacgctgggg

SEQ ID NO: 402219 - DNA, 75 bp, Homo sapiens
tgaacactgaccagctctcagttgcacttctcaaagaggcagcttgccaactacaactttgacttccggagctgg

SEQ ID NO: 402220 - DNA, 82 bp, Homo sapiens
cccgggtccccgcgttcacagccccagcgcagtggaatgcagtagccctctgggcctgggatattgtggttgataactgtgc

SEQ ID NO: 402221 - DNA, 110 bp, Homo sapiens
atcctgccggagccccgccgccgccggcttgatgaccgcacctcgagcaggagtggggatgccacgtctgcccccagcgcccggccctctgtccaccacggtcattcccg

SEQ ID NO: 402222 - DNA, 98 bp, Homo sapiens
gggcctgggccctcccgcgactacagccactactacacgaccatccaggacctgcgggacaagaacggccggtttgtgggcgatgctgaccttgaaag

SEQ ID NO: 402223 - DNA, 90 bp, Homo sapiens
ataattctttttatgtgcgaacatgtaacaagaatccaaagaaaacaaaatggtggtatcatgccccccgaatccaagcccaacttcacc

SEQ ID NO: 402224 - DNA, 100 bp, Homo sapiens
cagaggtgaaaccaacagccagtgatatgctatacatggtgtgggttgctgaccgaggaaataaaagaatccaagtatttgataaagacactggggagtg

SEQ ID NO: 402225 - DNA, 100 bp, Homo sapiens
aaactgggtcccttgaagaatctacagatgagtctgagtgccggtggtggtgtgcacattgagccccggtatagacagttcccccagctgaccagatccc

SEQ ID NO: 402226 - DNA, 82 bp, Homo sapiens
gacaggatggattgccagggcttcctggcccgaaaggagagccttgttcctctgaacaacagggagaatatctctgatccca

SEQ ID NO: 402227 - DNA, 82 bp, Homo sapiens
gcgcccgggaggaaggaacgaggcaaggagctaaagcagcgtgcgttcagccctgggactaatagggatgccaaaggaaaaa

SEQ ID NO: 402228 - DNA, 75 bp, Homo sapiens
acggcgtggaccacatagacatttacgcggatgtcggcgaagagttcaaccaggccgccatggcatcagatgaag

SEQ ID NO: 402229 - DNA, 100 bp, Homo sapiens
agtgcattaagttttccttagaaaataagatattggctgttcagaggacctcaaagactgtgaattggcagagggggtcgatttgggaggaaaggtgtgg

SEQ ID NO: 402230 - DNA, 111 bp, Homo sapiens
cgagcaaggagaagagccctggatattagaaaaaggattcccaagccagtgccacccagagagttaattgttaaatccagtatggccacaggaggaggtccctttgaagat

SEQ ID NO: 402231 - DNA, 83 bp, Homo sapiens
tgccatcctgaacgtctctccctgtcctagctctgtaactgtttacacttagaaagctgtggtctcacagaggctggctgtga

SEQ ID NO: 402232 - DNA, 90 bp, Homo sapiens
aaggcccagcgcttcctgcagaaggccgagaagctctacccactgccctcggcccgcggacccatggcgaatgctgctgcccccacgagc

SEQ ID NO: 402233 - DNA, 75 bp, Homo sapiens
catagagtctggcgaagtgagcatcttgattagaagcaggaagcacaatgatgactttgagatgacgtcattctg

SEQ ID NO: 402234 - DNA, 90 bp, Homo sapiens
atgcagctcagggtttcagcggatgagcgtcataaactttgagtgcaataaaaccgcagagcagttgaagacatctcttcatcgaggact

SEQ ID NO: 402235 - DNA, 75 bp, Homo sapiens
ggctggaggaggatgaacactatgattaccaccaggagattgcaagaatgaatgtctcccccaaaactggctggc

SEQ ID NO: 402236 - DNA, 100 bp, Homo sapiens
acatctgggggccacaaatgctccttctcctggagacgcaactcaagagccatccaaaactctgtttgtcaaaggcctgtctgaggataccactgaagag

SEQ ID NO: 402237 - DNA, 89 bp, Homo sapiens
tgcagctgcagacatcttcaaacactacatgaagatgaagtggccattctgcctgcccctcagaacctctctgtactctcaaccaacat

SEQ ID NO: 402238 - DNA, 98 bp, Homo sapiens
ttgcaacgcgcacctaactccaggtgaatctgattaacgagcccctggtgatatttgtttgtgcaactacaggccaaggagacccccctgacaacatg

SEQ ID NO: 402239 - DNA, 74 bp, Homo sapiens
gtaagtgcagatggaacacaacaggtgctcaaaaatgtgataactttgctgaaaaaagacccctccttggtgtt

SEQ ID NO: 402240 - DNA, 100 bp, Homo sapiens
ccgagctccagccgaaggagaaggggggagaaagaccactgcaggtcagaagagcaggtctcaggacagcaggggcagctgcctctctctctgaagcatg

SEQ ID NO: 402241 - DNA, 100 bp, Homo sapiens
cgaggcgtcctcatgtatggcccacctggctgtgggaagaccatgttggcaaaggcggtggcacatcacacaacagtttaatggatcgagaagtggcgtt

SEQ ID NO: 402242 - DNA, 74 bp, Homo sapiens
gaaaagcctctgggagcagaagggaggctccaagacctcatcaacaattaaggacactgcccatctctaagata

SEQ ID NO: 402243 - DNA, 100 bp, Homo sapiens
gtgccatccggcaggtcatcaccacccgcaagcaggtggtgaacatcccgtccttcattgtccgcctggattcccagaagcacatcgacttctctctgcg

SEQ ID NO: 402244 - DNA, 74 bp, Homo sapiens
agaggatcaggtgttttcaggttaaccgtcaggtggtcgtgtgatggtaacagatgctgacaggtcaatactat

SEQ ID NO: 402245 - DNA, 96 bp, Homo sapiens
tggcaccaccacccgagactccttaaccgagatcaacctgtctgaggtgcacctggtgcagtttcatgagccagacatctacaactactcagcctt

SEQ ID NO: 402246 - DNA, 75 bp, Homo sapiens
gacccagggcatttggtggacacttttgcttgcagttaggtcaagtggagcggctcgtctactccatgtgctccc

SEQ ID NO: 402247 - DNA, 98 bp, Homo sapiens
catgggtgtattgtttccacaataaaactttttctaccagatggtatggaagcccggctccgctcagagttgactttggcagaatatcatgaacagga

SEQ ID NO: 402248 - DNA, 100 bp, Homo sapiens
tcttcttcgaataactgaaacctggaaagcttacaacagtgactttgaggaatcaggcaaacgaagatttaatattaaattgtggaagaccttcactgat

SEQ ID NO: 402249 - DNA, 50 bp, Homo sapiens
cctggctgtgggagtacttgaaggcactcaaggagttgcccctggtcctg

SEQ ID NO: 402250 - DNA, 100 bp, Homo sapiens
ccgccccttcccaactgcggacatgctgggtggatccggatcgcatggaagacgcagcctggccgcgctctcccagcagtttggtggttatgccaaggaa

SEQ ID NO: 402251 - DNA, 101 bp, Homo sapiens
gccaactcttcgttcgattattagctttagtgaaatgggctaataatgctggcaaagtggaaaaatgtgcgatatgcacccaatgtccagggagcgtgcaa

SEQ ID NO: 402252 - DNA, 100 bp, Homo sapiens
cttccagtacccccttgccatggcagcaaagcctcttcttcttcactctcctcttctacttgctgtcgatcgcggccgtggcgctgatgttcatgtacta

SEQ ID NO: 402253 - DNA, 75 bp, Homo sapiens
acccacccaacattgactgcacatggaacattgaggtccagtccaggtgcagcagcaaggagaacattctcagag

SEQ ID NO: 402254 - DNA, 90 bp, Homo sapiens
ggcggaacaggctaccaagtccgtgctgtttgtgtgtctggcctgccacagtgactcaggtcactcaaggaactatccgaccagctgcca

SEQ ID NO: 402255 - DNA, 100 bp, Homo sapiens
ctagccaatgctctcaaagagaagggcagtgttttgcagccactcttgatgatgacaaaccttggtactccatttttcccattgacaatgaggatctggt

SEQ ID NO: 402256 - DNA, 85 bp, Homo sapiens
gaagaggctggactcggattcgttgcctgaggctgtctgtccccagaccccagagcacgtccggcaccaccatgactgggctgtt

SEQ ID NO: 402257 - DNA, 83 bp, Homo sapiens
gcaaagcaagcgagaagtcgcgggcccagcccacagcaggatgccatggacaatattaccaggcagaaccaattctacgatac

SEQ ID NO: 402258 - DNA, 100 bp, Homo sapiens
ccctcgatgtgctctgcgtgttgctgggatcagttcttaagagcagccccggtaactggaggaatgggagccgttttgatgagaaaaatgggctggagag

SEQ ID NO: 402259 - DNA, 100 bp, Homo sapiens
gcgcccagggaaggcatttccagcccgcccacccagtgtttgaaagatgtatggtgatcttgaaacctccagacacaagaaaacttctagcaaattcagg

SEQ ID NO: 402260 - DNA, 75 bp, Homo sapiens
cctctacgaaggcggctacttcaaggcatttccggagagttcttttgaagtcacttcagaaggatctacatgagg

SEQ ID NO: 402261 - DNA, 78 bp, Homo sapiens
gccgccgccgccgccatgaacaactcgggcgccgacgagatcggaatagcctaacatggcagaccagagacagcgctc

SEQ ID NO: 402262 - DNA, 82 bp, Homo sapiens
ggaccacggtcaccgtctcctcagtgttatagttttgccgctggactcttccctcccttcccccaccccatcaggatgatat

SEQ ID NO: 402263 - DNA, 101 bp, Homo sapiens
gaagttccttcttctttgctggcactgttattacaaccatagagaggatctgacgaactactctcaggcagtgttctcagtagtccgaactctaatatgag

SEQ ID NO: 402264 - DNA, 101 bp, Homo sapiens
gaagtggaattgcttggtcaaacgttgttgaatgttgggtcacgaagatctcaacctggccaaagaagagaacccagaaagatcatcacagtttctgtaaa

SEQ ID NO: 402265 - DNA, 74 bp, Homo sapiens
cggcagcaaccgcagcagcagccttcagccaatggagatcttcgtggatgatgagacgaagttgacgctgcatg

SEQ ID NO: 402266 - DNA, 100 bp, Homo sapiens
gagagaggcaccgggatcgtgaccgagaccgtgaccgagagcgtgaccgagagcgcgaatatcgtcatcgttagaaggttctgcggggagtgtctccagc

SEQ ID NO: 402267 - DNA, 101 bp, Homo sapiens
catgagtggttccatgatgggaagtgacatgtacctgtttgaaaatggtagaatagataacatttttactgagccctattccagatttatgattgaactta

SEQ ID NO: 402268 - DNA, 100 bp, Homo sapiens
gagagatatagcccacttagaaatcacagaagagcagatattctggggatggcataatgatgtccacatatttgacacaaagacacagacttggtttcaa

SEQ ID NO: 402269 - DNA, 50 bp, Homo sapiens
acatctaatttcattgctcggcaggtgagtggcagtgtgatgagtgttta

SEQ ID NO: 402270 - DNA, 98 bp, Homo sapiens
ccaatatgttaaggacatgaagtgaaaagcgggaagagcttcttattcatgttatcactgagcaggaagcttatgtgcagaaaatggttaaagtgtgc

SEQ ID NO: 402271 - DNA, 80 bp, Homo sapiens
ggaaccctggtcaccgtctcctcaggttggcagcctcgatggttccttctctgtgggggaatattgtcctattatgattc

SEQ ID NO: 402272 - DNA, 83 bp, Homo sapiens
cagaggcctatttgatagaggaaatgtatgatgaagaatatattgcactttatccatattcaagtgtggaacctggagatttg

SEQ ID NO: 402273 - DNA, 89 bp, Homo sapiens
tcccgtccgacgaggatatcgtgtctggagcagtggagcccaaagacccctggagacatgatcagggagcagagaaacatgaaggcaca

SEQ ID NO: 402274 - DNA, 101 bp, Homo sapiens
ctcgcggacccaggggcgcccacgccagatctttaatctcatgaagtacgacagctacagccgcttcttaaagtctgacttgtttttaaaacacaagcgaa

SEQ ID NO: 402275 - DNA, 76 bp, Homo sapiens
gcgcctcatgaacctgcataacaatgaggccggcaggaagggtggtgacttcacacgccataatggcactggtggc

SEQ ID NO: 402276 - DNA, 88 bp, Homo sapiens
agactttgatgaagagactggcattctccctaaggtggatgatgaagaaggtggcgacatgtctaagaatgtgagccagtcacagatg

SEQ ID NO: 402277 - DNA, 73 bp, Homo sapiens
attgattcaagagcttgagacatctaataaggtaccacaacatcagagtatacaagaatactggaagtgtgtg

SEQ ID NO: 402278 - DNA, 98 bp, Homo sapiens
ttgagcatgaagctgagatggacctgggaactccaacatatgatgaaaaccccatgaagccaccattggttcaggcaatcttcagcggtgatccagag

SEQ ID NO: 402279 - DNA, 90 bp, Homo sapiens
gccgaggggaccatgtccgggaggcgcttccacctctccaccaccgaccgcgtcatcaaaggtcaacaaaaatctctcatttacttcacc

SEQ ID NO: 402280 - DNA, 100 bp, Homo sapiens
gtttctctgctgcaccgacctcgacgtcttgcctgtgtcccacttgttcgcggcctataggaatacaggagtttccagaaaatataaaaaattgtaaagt

SEQ ID NO: 402281 - DNA, 90 bp, Homo sapiens
atcggccctagacaggggtggcagggtgccacttcccattaatgacctgaaggagggatatccttggaacagaagatcttattgtggaag

SEQ ID NO: 402282 - DNA, 75 bp, Homo sapiens
ggaagctggagagggatgtgtggctgcgatcctcggggaaaccgagacatctttccaggaacagcgtgaggagga

SEQ ID NO: 402283 - DNA, 75 bp, Homo sapiens
gaggatcaaaatcttcgaaggaggagagaagctgcatgaggccaataatgaactacagaagaagagagccattat

SEQ ID NO: 402284 - DNA, 75 bp, Homo sapiens
caatgcagcttctcttgcagtgcaggtggacatcatcagccgtagtggggagaagattccagtgtctgtgtggat

SEQ ID NO: 402285 - DNA, 109 bp, Homo sapiens
tcagcaaagggaagaaactaaagaagacggtcaccaatgacagaagtgcaccaatactggacaagatctggttggagttggagggtgagagaaaatgaattctaattta

SEQ ID NO: 402286 - DNA, 75 bp, Homo sapiens
ggcactgggcgactctgtgcctcgctgagggtactccaaagattcaggtttactcacgtcatccagcagagaatg

SEQ ID NO: 402287 - DNA, 51 bp, Homo sapiens
ctggtattcaaagaggatggtcaggatgtgccgtttgggggtgctaaagct

SEQ ID NO: 402288 - DNA, 75 bp, Homo sapiens
cctggcattggcgaggcccaagagcagtgatgtgaccattgtgaggtagatattttgttctaattttccagatga

SEQ ID NO: 402289 - DNA, 74 bp, Homo sapiens
ccaggccgtggtcagccgcttcgacgagcaggaattaaggataacctagacgacataaagaggataattaaagc

SEQ ID NO: 402290 - DNA, 101 bp, Homo sapiens
tgagcggcgagtttccgatttaaagctgagctgcgaggaaaatggcggcgggagaacattcctgatgtagatgaagaaggctacagtattaaaccagaaac

SEQ ID NO: 402291 - DNA, 80 bp, Homo sapiens
ccgctgccctcagctccgagtccagggcgagccttcaaatgtttatctggtgtgactgtattatgccctcagagagtact

SEQ ID NO: 402292 - DNA, 100 bp, Homo sapiens
cgcgtacgggcttcccgagctgacgtggcttgaattgggaggggggcagctggagcctcaggcggcagcgcttctagtttgaaggatgacctctaggaag

SEQ ID NO: 402293 - DNA, 94 bp, Homo sapiens
cagagaaacctgactgggaggcagaaaagaccactgaatctagaaatgaggtcaagcagatgtttgcagcatttcccccagatgtgtgcggcaa

SEQ ID NO: 402294 - DNA, 88 bp, Homo sapiens
gccgctgaagctgccgccgttgcctccgccgccaagagtgagcgagcggacccgcgatggcctgctcaatgtgaagagacaaggatga

SEQ ID NO: 402295 - DNA, 83 bp, Homo sapiens
gccgcggcggcagcagcagtgagaggatgagacctgcacgcagtggctcacagcagcacgatttgtgacagcccgaggcggag

SEQ ID NO: 402296 - DNA, 83 bp, Homo sapiens
gggcgaggccggtgaggacgcggcgggcgagcgagaggccgagggttgaaaggattgttgacaaaaggaaaaataaaaaaggg

SEQ ID NO: 402297 - DNA, 98 bp, Homo sapiens
gccgcggagctaattggagatggtttcacagcacgcagtggcttcggggcaatgtctacttcgatctgaagtctagaggagacaagtatggcaaattg

SEQ ID NO: 402298 - DNA, 83 bp, Homo sapiens
agcagacatcagccacgcatctgaccttgttggatcatccagcagctcgtcaacggcatcatcacgcccgccaccatccccag

SEQ ID NO: 402299 - DNA, 75 bp, Homo sapiens
cacaggagtcgctggatagactgcacaaggtgaagactgtctgcagcaaggtttttagaacttcagccataaaaa

SEQ ID NO: 402300 - DNA, 100 bp, Homo sapiens
tcatccctggcttcatgagtgtatgattcgtctctttaatactgttaaacacagtgggaatatcacttttgatgagattgtcaacattgctcgacagatg

SEQ ID NO: 402301 - DNA, 100 bp, Homo sapiens
tcaattcttggagaacacaaagaagtgtgatggaacatgtttgacaagctgaaccgtgatgcctttcatataatttcttattttttgtttcaagttctgg

SEQ ID NO: 402302 - DNA, 98 bp, Homo sapiens
aggatttggagccccttgtttaaaatgcaaagaaaaatgtgaaggattcgaactgcacttctggagcattatctgcataccagaggtactacagttta

SEQ ID NO: 402303 - DNA, 74 bp, Homo sapiens
cggacttccccgttagaactcgcgtttccacttcagagatctggtgttacagttcgagtgcctcaaacaaccac

SEQ ID NO: 402304 - DNA, 98 bp, Homo sapiens
tagaaggcaaaagagggaggagatgcgactcgaagcagaaagattagcctgaggcctgctcagtcgttcctaatgaataaaaatcaagtgccaaagct

SEQ ID NO: 402305 - DNA, 124 bp, Homo sapiens
gctgggcagaggcttgggccgccgagctggacccggaccggttttgggaatggccaacctgctgacgggccccaaacggaacctgatggccctggcccggacatggtggaatcagttcagcgtg

SEQ ID NO: 402306 - DNA, 97 bp, Homo sapiens
gctactaacagcctgggtgagatcaacactagtgccaagctctcagtgctcgaagaccatcatggagcagttcaaccctagcctccggaacttcatc

SEQ ID NO: 402307 - DNA, 82 bp, Homo sapiens
ggcggaaggagaagatgtgccgccgctgccaacgtcgagcggcgacggctgtggtcatatgcattagaaaaacccaacactg

SEQ ID NO: 402308 - DNA, 74 bp, Homo sapiens
cagagctttacgatgtcacttgggaaggttatttccgatgttgaagaagatgccggggaactaagcagagagag

SEQ ID NO: 402309 - DNA, 75 bp, Homo sapiens
ccggagaggagcctcggccccgtacccaggtgttgctggaagaagccaaggatttgctctctgactggctggatt

SEQ ID NO: 402310 - DNA, 95 bp, Homo sapiens
cagctctttcctttccgtctggcggcagccatcaggtgctggagaatctggtaaaagcaccattgtgaagcagatgaggatcctgcatgttaatg

SEQ ID NO: 402311 - DNA, 85 bp, Homo sapiens
caagagggtgttcgactgctagagccgagcgaagcaattggctgtgaaaggactgaggcagccatctgggggtagcgggcactct

SEQ ID NO: 402312 - DNA, 100 bp, Homo sapiens
ccctgatgtaactggactcccaacaatacccgagagtatcaaggatctggattttgcataactggtaaaatagaagctggttatatccaaactggtgacc

SEQ ID NO: 402313 - DNA, 100 bp, Homo sapiens
gtgaccgagagcgtgaccgagagcgcgaatatcgtcatcgttagaagccgccgccgcgccgccgtcgctctccaacgccagcgccgcctctcgctcgccg

SEQ ID NO: 402314 - DNA, 100 bp, Homo sapiens
gcagcacattttgaaaaatcctctcattattaacagcattatcgataaggtcgtggttcaattccagaattctttcatattatgaaaagaaagtttacca

SEQ ID NO: 402315 - DNA, 98 bp, Homo sapiens
gctcctgggactggatgtgccatctctgtgcttggcagaactggtgaagacctattgcagcaggctgtcgagcattgcaaacgccatgtgtggaacta

SEQ ID NO: 402316 - DNA, 100 bp, Homo sapiens
aaaaactattaccagttggatggacactgaaggaatcaagacagcggaatcagacaggatgattatgtacttgaagtgaggcactttcagtgtcctaaat

SEQ ID NO: 402317 - DNA, 100 bp, Homo sapiens
atcctctgcagcatccttgatgataaaccagtaaatacatccacgacagcgatggcagttccagcagcagccaccagagcctcaagagcacagccaaatg

SEQ ID NO: 402318 - DNA, 97 bp, Homo sapiens
actccccagagaagcagccaccacctactggggcagcacctactccgtgtcagtggtggagaccgactacgaccagtacgcgctgctgtacagccag

SEQ ID NO: 402319 - DNA, 75 bp, Homo sapiens
catcatagctttaaaggcagagaagctgtagagaaatatgaagaagtgctacataatttggaatttgccaaggag

SEQ ID NO: 402320 - DNA, 100 bp, Homo sapiens
tcagtgggctgatcccaatggattgcatccacattccagagagcatcatcaagaaacacatatcatgcataccttcaaagaggacttctatggggaaatc

SEQ ID NO: 402321 - DNA, 100 bp, Homo sapiens
agtgcgcccgggccgcggatccccaagcccgccacgccgcccagcccggccccgcccgcgccggaagagccacgccggcttgggcactgtttaaaggaaa

SEQ ID NO: 402322 - DNA, 75 bp, Homo sapiens
tctacccgacacttacatgccatggccttctacgttgtgaaaatggcaaatccagatcccaacacttgccttgga

SEQ ID NO: 402323 - DNA, 96 bp, Homo sapiens
agggagtcctaagcaggaatgactggagagcaggctggatagatcagggagcagagaaacatgaaggcacaggtcagtcctctgggatcactgatc

SEQ ID NO: 402324 - DNA, 100 bp, Homo sapiens
aaattgttctctggagatgacaaaggcaaaattgtttattcttctctggatctagaccaggtggcagagcgagctctctattactggaataatgaataca

SEQ ID NO: 402325 - DNA, 127 bp, Homo sapiens
cagcccctgtgaggaggtgatcaaaaacctcagcctggaggccattcagctgtgcgaccgggacggttatgcaatggtctctgcaagatggtttattcttgaattggacctttttaagactgacaaa

SEQ ID NO: 402326 - DNA, 101 bp, Homo sapiens
acccgtgaaggcaatgatttataccatgaaatgattgaatctggtgttatcaacttaaaagatgccacctctaaggtggcattggtgaggctgtgtccagt

SEQ ID NO: 402327 - DNA, 74 bp, Homo sapiens
ctcagctgccacctgcctttgacctttttgaagcctttgcaaaaactctgatgccagtatggactggagatgat

SEQ ID NO: 402328 - DNA, 83 bp, Homo sapiens
gcttaaaatggtctatggtctgtctctctcaccatggatgatgatatcgccgcgctcgtcgtcgacaacggctccggcatgtg

SEQ ID NO: 402329 - DNA, 100 bp, Homo sapiens
aggactcagaggccgccatcaaccgccagatcaacctggagctctacgcctcctacgtttacctgtccatgagccaaaagccttgaaagtctcatctata

SEQ ID NO: 402330 - DNA, 75 bp, Homo sapiens
gcaggagcgattccgtcgccaaacagtctgcaggcccaggtggggcttcatgttcagctcactgttggacttcat

SEQ ID NO: 402331 - DNA, 90 bp, Homo sapiens
aaaagaaaaagtgatgaagaaacctccaaggtgggaggaaggcgaagctgcagccaggtaatagcctgcagctggtgttttgagaagccc

SEQ ID NO: 402332 - DNA, 75 bp, Homo sapiens
aaggattccaagtaactcttatttggtcttaaaattttggtagcagaaagcaaatgtgcaaagagcaatggaaaa

SEQ ID NO: 402333 - DNA, 100 bp, Homo sapiens
gagcactagtgtctagaaggcactaaggtgcctggatcaaagtggaacagctgaagccatatcatgctcataaagaggaaatgataaaaattaacaaggg

SEQ ID NO: 402334 - DNA, 101 bp, Homo sapiens
ccacattcccgcggtccttcagactgcccggagagcgcgctctgcctgccgcctgcctgcctgccactgagtgatcagggccaaagcggtcagtgagaagg

SEQ ID NO: 402335 - DNA, 133 bp, Homo sapiens
tgccaagttatttacaatggaggaattacaggacatgaaaaagaactaatgtttgatgccaattttacatttaagtaattagtgaatgccaaaggcagcaactggaggctgtgagctactcctctcgatatgc

SEQ ID NO: 402336 - DNA, 75 bp, Homo sapiens
gagaactcaaggtcttcatagaccagaaccttagtcccgggaaagtaccatctgccagcatgactcggctcgccc

SEQ ID NO: 402337 - DNA, 82 bp, Homo sapiens
atgcagtccgagagctagatggaagacctccttaactacgtgttttgctcaagaaacttttgggaaacagtacaaacaaact

SEQ ID NO: 402338 - DNA, 100 bp, Homo sapiens
ataaactccttttcgccacagaaagtgatttgtggagctatgatttcttcagtggtgaatttgtggtgtcacctgaaccagacacaagtgtccacactct

SEQ ID NO: 402339 - DNA, 83 bp, Homo sapiens
aactgcactcccgtcagcagcccgcgtctgccgcccacgtacatgcacgccatgtgagagcgcgccagccttggaaggaatcc

SEQ ID NO: 402340 - DNA, 98 bp, Homo sapiens
aaatacacccgtcagattctggagggtgtccattatttgcacagtaatatgattgtccatagagatatcaaagatgatggtggtgctaccccagtaca

SEQ ID NO: 402341 - DNA, 88 bp, Homo sapiens
cacaggcatctacagtgtcatgatccagaagggacacggccaacacggtgaaggaaaagttcgggaggaagctttatgaatccttact

SEQ ID NO: 402342 - DNA, 99 bp, Homo sapiens
ggttaaaggagcctcctgtggatatctgtctaagtaagctccagggttccttgaaaagaaaacaggtagttaacctatctcctgccaacagcaagcgac

SEQ ID NO: 402343 - DNA, 75 bp, Homo sapiens
tgaagatcagtacaaaaattcttcaagaaatctaaggtgacattgcattccggttccttaattatgttcagtccc

SEQ ID NO: 402344 - DNA, 100 bp, Homo sapiens
gtgggccagtactccactgggaagaccaccttcatcaggtttacccaaggtccagcctagcccctaggcaccatgtcggacagtgatctaggtgaggacg

SEQ ID NO: 402345 - DNA, 99 bp, Homo sapiens
cctggttgagggtctccagggttctttggggcccgagaagactgtgcagtctttgtaactgatgaagagcaaggctttgtctctaattctgcccagtta

SEQ ID NO: 402346 - DNA, 100 bp, Homo sapiens
ctttggggcccatgggcgtggtcgcagctactctagaggtggagaaggaacgtgataaagaagtaagcgatgatgaggctgaagaaaaggaagacaaaga

SEQ ID NO: 402347 - DNA, 50 bp, Homo sapiens
gtccagatctccatctccaaaaagaaggtgtggaatccatagcatgttcc

SEQ ID NO: 402348 - DNA, 97 bp, Homo sapiens
tcagctcgggccacggagaggagcagcccccggagacagcggcacagaggtgcttctgccagagtcagcgtgggagaaattgtaacgagaaaccaac

SEQ ID NO: 402349 - DNA, 76 bp, Homo sapiens
agtatggctgcagaggatccatctgtcttagcaaggctgtcatcacagaaccttttgaggatggctttgcaaatgg

SEQ ID NO: 402350 - DNA, 75 bp, Homo sapiens
aattattgaaaacctcttttaccctgttaccctggaagttcttcatcagataccatgtttgtgtggaagtgcccc

SEQ ID NO: 402351 - DNA, 80 bp, Homo sapiens
tcttatgactcctccatgtctccagatgcctgaaaacttcatgcctcctgttcccatcacatcaccaatcatgaacccgt

SEQ ID NO: 402352 - DNA, 74 bp, Homo sapiens
aaagtgactggcccgcctcctggcacaccccagccccggccacatgaagaaagaggagcgtgtctctgaactgc

SEQ ID NO: 402353 - DNA, 75 bp, Homo sapiens
ccgttctacgacgtggccagacatggcattctgcaggtggcagggaacccgagcgtcatgttagggtgaagcaga

SEQ ID NO: 402354 - DNA, 75 bp, Homo sapiens
cctttcaggacgagaaccacctgacaatgcagatcttcgtgaagactctgactggtaagaccatcaccctcgagg

SEQ ID NO: 402355 - DNA, 90 bp, Homo sapiens
ggaaaacctaaccatgaagacttgaacttaatacagcaagaaagaccatcaagtttaccattttgtcagcctggcgggtggcagctgtcc

SEQ ID NO: 402356 - DNA, 75 bp, Homo sapiens
cgggcttcggcccccaccagagactcgaggaggagctccggaagctgcgagaagaaaccaacgcggagatgctgc

SEQ ID NO: 402357 - DNA, 74 bp, Homo sapiens
ccgggagctgggagcgacgctcagggcccgcagctcatgatggagcagtccaagaagtcctccctcatggtggc

SEQ ID NO: 402358 - DNA, 98 bp, Homo sapiens
gatatgatgggaaatacaaatgaaccaagcacacgtgtccgagaacaaactctagccctcaggaaagaagggattggagttgttttggattctgaact

SEQ ID NO: 402359 - DNA, 101 bp, Homo sapiens
aataccagtccccagtgagggtgtacaaatacccctttgaattaattatggctgtacaccaggggttggaaaaaccacactaggcaaagaacttgcgtcaa

SEQ ID NO: 402360 - DNA, 50 bp, Homo sapiens
agtgaggaggctctagtaactgtccagcacacgtcacatggagatgggcg

SEQ ID NO: 402361 - DNA, 83 bp, Homo sapiens
ccgccaccgacatctactttaacttccttcacaagtgggacccccgcagccacctgcagccccttgctgggaccccagaggcc

SEQ ID NO: 402362 - DNA, 50 bp, Homo sapiens
agagcttccagctgagacaccgtgaggtggatgcccggagcataccagtg

SEQ ID NO: 402363 - DNA, 51 bp, Homo sapiens
gaaggagatcgagtcgcagaagggcgagttcaaggcccaagctacaagcag

SEQ ID NO: 402364 - DNA, 83 bp, Homo sapiens
cttctctacagaagagcttctcctcatcaactggggatgattacagttcttcctaaaaaagacttaattcagtgcacaaatga

SEQ ID NO: 402365 - DNA, 98 bp, Homo sapiens
gggatcggttgccttgagcctgaactgtcaagtaatccacctctggctaccatccttattcctcctcatgctcggattcaagcagctgcttcaacccc

SEQ ID NO: 402366 - DNA, 82 bp, Homo sapiens
gtggggacttgtggacccagaggattttatggcacatttggtcaaaatgcagatcttcgtgaaaacccttaccggcaagacc

SEQ ID NO: 402367 - DNA, 75 bp, Homo sapiens
agccaatgccatgatgcctggtgccccattacaacccgtgctgtgcaaccatattgcttctgggaaaaaatgtca

SEQ ID NO: 402368 - DNA, 101 bp, Homo sapiens
agaggcataattaggataataaatcctataacaatgcagtgtataaaggtggaccaaactacgaattaacatgcttcctgctacaataatttgtgagccaa

SEQ ID NO: 402369 - DNA, 80 bp, Homo sapiens
tgaaattgttacttcaacttctgctgctttaccaacagggacgcttatgtcaactgggcagtgaattttgtgaattggaa

SEQ ID NO: 402370 - DNA, 75 bp, Homo sapiens
atccctttgtgcttgtctccaatcttatggctgtcaacaactgtggctctagaggacaaaatcccagtccttggc

SEQ ID NO: 402371 - DNA, 97 bp, Homo sapiens
cagacaccggtgtcatgagcaggaaggaaccgctggaaacactgaagagttcttttagaactcatcaaattgaagctgttccaaccagctctgcaag

SEQ ID NO: 402372 - DNA, 98 bp, Homo sapiens
ccagcagcaacgctagtgtggcctggatgccaggtgctgatggccgagctctgctacagtcctgtacagttcagcttcccattgaccggggtggaggt

SEQ ID NO: 402373 - DNA, 100 bp, Homo sapiens
ggagttctaccgagccctgtatatccatgcccagcccctgcacagccgcctgcccagccgccacgctctgcgagatctattgggaaactgattataacca

SEQ ID NO: 402374 - DNA, 100 bp, Homo sapiens
tgggaggatgcgcaggggttttctgcacttctacactcagttgaagattcctgtctctggatccaaatcagagggccttctctacgtccactcatccaga

SEQ ID NO: 402375 - DNA, 83 bp, Homo sapiens
cctggcccggcaaggcaacgggtgctggcccagcagggggagtacagtgaggccatccccatcctgagggcagccctgaagct

SEQ ID NO: 402376 - DNA, 98 bp, Homo sapiens
tgatcccaagttgtcgacgaccgacagggtggtgaaaggtagtgggcagcagtcagtgacaggtgtaacctctgtggatgacagcaacagttactgga

SEQ ID NO: 402377 - DNA, 83 bp, Homo sapiens
catctggtcttaacaaaagaaaaatgattcagcatgctgtatttaaagaacttgtgaagatgcttgctctgtcaaggcacagc

SEQ ID NO: 402378 - DNA, 75 bp, Homo sapiens
ctccctgcagatgttcctgccccaggtatgctatacctccggagcatggaaaacgacttgaaagactagctcaag

SEQ ID NO: 402379 - DNA, 82 bp, Homo sapiens
ctgctgctgctgctgacgctgctgctgcccggcctcgggatgcctgaggaaacccagacccaagaccaaccgatggaggagg

SEQ ID NO: 402380 - DNA, 90 bp, Homo sapiens
ctgctcaataaccctgccctggagttcatcaaatacgtgtgcaagattgtaaaccatggctgtgtggatacaagctcagcagctccaagg

SEQ ID NO: 402381 - DNA, 100 bp, Homo sapiens
ttgtgaaatggaaaatgaggtacttaaagtgctttccgaagctgctatttcagcaataagagctaactgccatcaagagccatcagtatgtcttcaagct

SEQ ID NO: 402382 - DNA, 82 bp, Homo sapiens
gtcgtccgttctctcaggctcccgttcaggaagaggatcacctagcccgggtagaagaggcaatcacccgtatgcttgtgtg

SEQ ID NO: 402383 - DNA, 97 bp, Homo sapiens
ctggtacggaagatcgggtctggctccttcggggacatctatttggcgatcaacatcaccaacggcgaggattcctccttggtcacttttcagcagc

SEQ ID NO: 402384 - DNA, 100 bp, Homo sapiens
gtagccggtaacaaacgagggttcccgggattggaccgacgcagccatggatgaatcttcaagtcatgaatgtaaccagcgcacaatccttctctatgga

SEQ ID NO: 402385 - DNA, 100 bp, Homo sapiens
gtttgggctggaggtcgccatggggcgaggcagcggcaccttcgagcgtctcctaggaccctgatgcttggtgtgacctgagtaaatttgacctccctga

SEQ ID NO: 402386 - DNA, 75 bp, Homo sapiens
gtggctgaaggggctggtgcgagcgtggactgtgaccgccggatacttgctggtggttctcttcccaaagtggaa

SEQ ID NO: 402387 - DNA, 98 bp, Homo sapiens
cacagaagaaaaccttccacagcttggtgctaatgagaatcttgagtcgcagtcagctagtatgttcaacacaccaggaatgcagagcttgttgcaac

SEQ ID NO: 402388 - DNA, 95 bp, Homo sapiens
gatgtcagttaactctgagaagtcgtcctcttcagaaagctcttcctgctgcccacattcctgcaccccctcatgagggtagtcccagagaccag

SEQ ID NO: 402389 - DNA, 98 bp, Homo sapiens
tcccagactttccttgttttggatgaccttgacagttgaggagtcctggtgaggtggtcattgggactcccacacttaaacaaagaaaggaaattctg

SEQ ID NO: 402390 - DNA, 74 bp, Homo sapiens
accgagcgggcggcgggcgcgcgcaccatgggggagaaacccgggaccaggagccagtggggtgggtcgcagcc

SEQ ID NO: 402391 - DNA, 100 bp, Homo sapiens
ggtttctcaatctctgcagatggccgtacgtgtgaagttgacattttgctaaaggctgtgggagacactcctattatgaaaacaaagaagtgggcagtag

SEQ ID NO: 402392 - DNA, 100 bp, Homo sapiens
ttgtgcagtgggcaggaagaacccatcgggcagctacacatcttgaaagagaagctcttcctgtgagttgctgaacctgtttgcatgagttgctcctgac

SEQ ID NO: 402393 - DNA, 75 bp, Homo sapiens
ggtgtacgagaagccggtacaggtgccctgcggacacgtaagagccgaatgcacataaggtcgccagcccaccct

SEQ ID NO: 402394 - DNA, 75 bp, Homo sapiens
ctcagggctgcccggacggtgttggttggggtgctggagaatctggtaaaagcaccattgtgaagcagatgagga

SEQ ID NO: 402395 - DNA, 100 bp, Homo sapiens
gcgaaaacacccggccttactgaggaacaaagggtgtcacccccaaccacagtgccttttccatgcacgccctgctggtcaaccactacatgaaaggagg

SEQ ID NO: 402396 - DNA, 75 bp, Homo sapiens
gactattgacagcacccaccttggtgctgcgcgcccgggacccggccagccgtggagacaggtacatgctggtca

SEQ ID NO: 402397 - DNA, 75 bp, Homo sapiens
ttaaagaagaaaaactttcgcctgagcctattttgtgcagtcattggagaaatcgatgaagaaacagattctgcg

SEQ ID NO: 402398 - DNA, 100 bp, Homo sapiens
gaggacctggggtctctgatgcctattattgtaaggagtgcaccatccaggagaaggacatctatgggagtcgtcagattatactggagaaagaggaaac

SEQ ID NO: 402399 - DNA, 98 bp, Homo sapiens
gaccacccagaaatctacaggtcattcctggagatcctgcacacgtaccaggaatttttggaatttcgtaaggcaagaagtgacatgcttctctccag

SEQ ID NO: 402400 - DNA, 98 bp, Homo sapiens
gaggcagaaggagccccagagctcaatgggggaccacagcatgcacttccttccagcagctacacaggccctgttaaacctggcagagcgactgggag

SEQ ID NO: 402401 - DNA, 100 bp, Homo sapiens
attcgcagtggtcgcttcttctccttggttttcttggagcagaagaaaatgttaaaaagtggccttaacatagcccactttaaacagcatgtttctataa

SEQ ID NO: 402402 - DNA, 100 bp, Homo sapiens
gatgatgctgatggggatgggatcaagaatgttgagccggcaacgaagagaagaacttccatctgcagcccgatgggtgtctgctggtgctgcgggacct

SEQ ID NO: 402403 - DNA, 75 bp, Homo sapiens
taaaaacaagactggggctgctcccatcattgatgtggtgcgatcgcactgctcagcacgcaggcatgtgaggaa

SEQ ID NO: 402404 - DNA, 100 bp, Homo sapiens
cgtctgttcgcgctgctgctgttcttcgtaggcggagtcgccgagtcggttcagccgtctgtatatctccccagatacctgaaactgaccacctgagtac

SEQ ID NO: 402405 - DNA, 75 bp, Homo sapiens
gcggtgacagagtggagccatggctagagagtgatcagcagctggactgtgccttggacctaatgaggcgcctgc

SEQ ID NO: 402406 - DNA, 100 bp, Homo sapiens
ccaaaatcccaaatcctcgatttcagagattatttcagcttcaccagcaagacacacgacatcagtatccccctcgcctgccgggcgatctccattgaag

SEQ ID NO: 402407 - DNA, 96 bp, Homo sapiens
ggagggcggtcttccccggctcgccaactcggctgctctgggggattcgtgcgcggggcttacggtgagacatatcctgccattgaagatgacgtc

SEQ ID NO: 402408 - DNA, 51 bp, Homo sapiens
tacggtggtgccgtccgccaagtcaccaggagactaaagtccatcaaaaac

SEQ ID NO: 402409 - DNA, 74 bp, Homo sapiens
gtatggcctggccagagaactctcggatgagatccaagtccaggaatgggtaccacagaccatgtcatcgtcct

SEQ ID NO: 402410 - DNA, 83 bp, Homo sapiens
cagcctcttcgagcgccgcggacgcgtcatcgagtgtgacgtggtgaaagctggtcagtgagaaggtcggaggggccgagggg

SEQ ID NO: 402411 - DNA, 49 bp, Homo sapiens
ggattccaagtaactcttatttggcatggctctgtgagcgctgatgagg

SEQ ID NO: 402412 - DNA, 75 bp, Homo sapiens
tggcaaagcttctccctcagtatttagaccagtgggacacagcaggccaggaaagatttcgaacaatcacctcca

SEQ ID NO: 402413 - DNA, 73 bp, Homo sapiens
aaattagagaagcattccgtgtgtttgataagcgatttgaaattattaatgcaatttatgaacctacggaaga

SEQ ID NO: 402414 - DNA, 96 bp, Homo sapiens
cccccatgagcagtgccatgatccagcctcacgcatcagaagctgctcgcccagctactagtactttgaatcgcttctcagcccttcaacaagcgg

SEQ ID NO: 402415 - DNA, 82 bp, Homo sapiens
ccatcttacagatgtattaagaagcctcagggcagatgattctggaccagatgaagcctgaggagccttccagctctaagat

SEQ ID NO: 402416 - DNA, 78 bp, Homo sapiens
agaaaggaaggaatatatcctgactgattacagatgcaccatcaggaatggaattacagtcatggtatcctgttataa

SEQ ID NO: 402417 - DNA, 101 bp, Homo sapiens
taagagaagaaatggacatgattgcctaaatcagccaaacacagggccgaatacatcaagcaatggtaacatctttaaatgaagataatgaaagtgtaact

SEQ ID NO: 402418 - DNA, 83 bp, Homo sapiens
gtggaaaatgcgctcgggctggaccagcagattgccaaaatgctttggagtttttaactgaatctaagaaaagtccaaaatag

SEQ ID NO: 402419 - DNA, 75 bp, Homo sapiens
ttttggaacttcaccggcaactaaacaccaggggactcacagtcatgtttgagatcatgaagagctatggccaca

SEQ ID NO: 402420 - DNA, 100 bp, Homo sapiens
gaggagtacagcttagatctcattccattcgatggggatctcttatccatggaatcagagggtgcattcaaagaggatttgatgaagatgttaaagcgaa

SEQ ID NO: 402421 - DNA, 100 bp, Homo sapiens
gcagcagatcatcactaacacaggagagatccagcagatcccggccttcctcctacagacagtagacggaaagcaccaagacctcaagtacatctcacca

SEQ ID NO: 402422 - DNA, 75 bp, Homo sapiens
cgtccttttgtctctgcctttgaggttggcgggaactgaaactgacccgggaaaaggagaagatgaaggaagcca

SEQ ID NO: 402423 - DNA, 100 bp, Homo sapiens
ctcctaaggagctggtgtcttcatccagaagggacagtttgtgccagctctccagagagaaaagagcttctggaagctgaggtctactgagaagtcgtcc

SEQ ID NO: 402424 - DNA, 98 bp, Homo sapiens
ggcggtcgacatgttccaggtcccggatagcgagggcggccgcgccggctccagtgaataaccctataccttccaatttgaaatcagaagcaaaaaag

SEQ ID NO: 402425 - DNA, 43 bp, Homo sapiens
aacatgcagagtctgcacaaaccctgtattcagtggatcagct

SEQ ID NO: 402426 - DNA, 83 bp, Homo sapiens
gtgatggaaccgacctggcacatcctggagaaaaacctgaaatccggtgctgttggcccaaaggttgccctgaagccccccat

SEQ ID NO: 402427 - DNA, 50 bp, Homo sapiens
ctgcctgcctttgatgccctgggtttggtcaagcctcctctaaaacgctc

SEQ ID NO: 402428 - DNA, 76 bp, Homo sapiens
cgaagctaagagcccccttcagtcgcagcctcactctagagtccggcagcgtcttctcttgagggagcaatttgga

SEQ ID NO: 402429 - DNA, 87 bp, Homo sapiens
atgacccagcctccgcctgaaaaaacgccagccaagaagcatgtgcgactgcaggagaggactggaatgtcacgtggaataccagca

SEQ ID NO: 402430 - DNA, 50 bp, Homo sapiens
aaaatagtgatagctttgataaattctaaactccctgaaggagacaaatt

SEQ ID NO: 402431 - DNA, 96 bp, Homo sapiens
aagcagggaaagagagcgccaggtgcttagcaggtggtcctgacaaccaagtccactttgaagggtaccaggtgtccaatcagtgtatggcactgg

SEQ ID NO: 402432 - DNA, 97 bp, Homo sapiens
aggaaggccaggaggacgggccggcaggatggagagcgaatctgaagcccgtggacaggagaagcccagctgagagcttccaggccgagcggcccgc

SEQ ID NO: 402433 - DNA, 100 bp, Homo sapiens
attcgcccagccaagttgaagaacctaatcttgctggtgaagcactggtaccaccagtctcttccagttgcgcctcttctccttggtggtcttcttaagc

SEQ ID NO: 402434 - DNA, 75 bp, Homo sapiens
cccagccgcgccagcctcctcactggcctgccccagacctgcgaccgcatcaagcagtccgccagcggaaccaag

SEQ ID NO: 402435 - DNA, 75 bp, Homo sapiens
ctcagatatggctgctggatcagagagatgttgcagtaaagatcctaaaggttgtcgacccaaccccagagcaat

SEQ ID NO: 402436 - DNA, 50 bp, Homo sapiens
ttaggagctctgctcaaagccagacgatgctgtcttcgcagtgccatgcc

SEQ ID NO: 402437 - DNA, 100 bp, Homo sapiens
ggagtgtccaaatataaccctaacccagaccaatcagtttctgtcactgtgaccaccaaccaagcaggcggaagagacggaatttcaacaagcaagcgac

SEQ ID NO: 402438 - DNA, 50 bp, Homo sapiens
agctcagcctgcagcacagactgggcaagggaactttgaagagagccagg

SEQ ID NO: 402439 - DNA, 119 bp, Homo sapiens
ctcgtagtgtgcagtgcctgtaaccaggtcgtcaagccacaggttttccagtcgcactgcgggaaatcctcattgacgattcaatttgttgaaggccaatttgtggactcctacgatcc

SEQ ID NO: 402440 - DNA, 117 bp, Homo sapiens
gcagtggtgggataaacggagagcagcagccgcccgcttcaaccccaggggaccagaggaactcagccctgattgcgtgcctccacttctcattcagagaattcagtgcatacaaaa

SEQ ID NO: 402441 - DNA, 100 bp, Homo sapiens
gcgctcaccatgttccctggaggattgaaagaaggtggcaagaggaagaagcagaagcagagagaggagtcgaagaagaagaagtcgaccaaaggcaatc

SEQ ID NO: 402442 - DNA, 75 bp, Homo sapiens
gccgcggccgtgggcccgaccgcggggacccgttaaccccaaagattggctttccttggagtgaaatcaggaaca

SEQ ID NO: 402443 - DNA, 51 bp, Homo sapiens
ccagcatcaagatgatttatggtaataagcctgtcagagttgttcagtata

SEQ ID NO: 402444 - DNA, 101 bp, Homo sapiens
tagagaaattagatctgggtgactgtgatctggtggtccgtactgagaagaacagtttgaacaaccgattcttaccctggaatgaaattgagacagaggcc

SEQ ID NO: 402445 - DNA, 100 bp, Homo sapiens
atatgctcatgtggtgttgaggaaagcagacattgacctcaccaagagggcgggagaactcactgaggatgaggtattaacaagtaaaggtgacgcgtgg

SEQ ID NO: 402446 - DNA, 82 bp, Homo sapiens
atcagggctgcagcccaggagcctcaaggcggcccggcgggcgactggacggccggacagatggacacccgctccgggagcc

SEQ ID NO: 402447 - DNA, 100 bp, Homo sapiens
aaaacaatgaagattatttacaatgctaccctgctttttctggtgtcctgaacctggaagttgtgctttttaagatttttaaagagcgagaagaagattt

SEQ ID NO: 402448 - DNA, 101 bp, Homo sapiens
ggcgggtggaccgattgtcgctcggcggcgggagtcggctctggctccgctactgcatcgtgtgcttctgtccaagaggcagagagactgaaactatctgc

SEQ ID NO: 402449 - DNA, 90 bp, Homo sapiens
ggcattccttccttcctgagcaagaatttgaactctattcttcagctaggtgcccacgagtgtattcggggagaagcttcgagaacaagt

SEQ ID NO: 402450 - DNA, 100 bp, Homo sapiens
caagcctgtcattcctgctgctgccctagctggctacacaggtgtcttcaaaaacaaacatatttaaaagattttacttctcatctccaggaagaaccag

SEQ ID NO: 402451 - DNA, 98 bp, Homo sapiens
cacaccggggaccctcagctggacacggccatcgggcagtggctccgctgggataagggagaaaactggttgtcctggatgtttgaaaagttggtcgt

SEQ ID NO: 402452 - DNA, 100 bp, Homo sapiens
cgaagagcggcttagggcctcaccgcgacctgggtttggtgcacctcgatttggaggaagtagggcagggcccttatctggaaagaagtttggaaaccct

SEQ ID NO: 402453 - DNA, 96 bp, Homo sapiens
tcccctgacctgagtagtcgccatggcacaggtttggcaaatacgtgtagacctacatttattaaatcatgatggaaatattattgatgctgccag

SEQ ID NO: 402454 - DNA, 99 bp, Homo sapiens
gctgcaacctacggggtgtacttgggaacgaggggtgaagcggcccaggtgagggactcagtgacctttgaagatgtggctgtgaacttcacccaggag

SEQ ID NO: 402455 - DNA, 75 bp, Homo sapiens
ccagccctggcggggcgggcagcatggttcactccagcatgggggctccaggatgaagcctgctgggagcgtgaa

SEQ ID NO: 402456 - DNA, 100 bp, Homo sapiens
aaagaaagatttgaagcactacaaacaagcagctgagacacagcattgttggttttgccatgtactattttacctatgacccgtggattggcaagttatt

SEQ ID NO: 402457 - DNA, 98 bp, Homo sapiens
gcgactcgtgaccaacatgctgtgatgtgtgccgagggaggaattgggcggcgactggcggcgcgatggacctgaccgggctcctgctggacgaagaa

SEQ ID NO: 402458 - DNA, 100 bp, Homo sapiens
taaaattcttaaaaaggctcagaaagatggatttttgcatgagacgcttctggacaggccggattcagaagccagccagagcccacaatacagcttcgag

SEQ ID NO: 402459 - DNA, 83 bp, Homo sapiens
ggaacagactgcaacaaccacaaacaaaaagcctggccagctgccattcgatttcacatggaagatgctaaaggacaaattca

SEQ ID NO: 402460 - DNA, 98 bp, Homo sapiens
tcagaaggaaaatgggtcaagcttgaaaaaacaacgtacatggatcctactggtaaaactaggtccggaccctatttgtcagtggccttcctctggat

SEQ ID NO: 402461 - DNA, 97 bp, Homo sapiens
cttgaaaggagaacctgggaggaaaggagagaaaggagagcctgacaatgaagtggccgccttgcagccccccgtggtgcagctgcacgacagcaac

SEQ ID NO: 402462 - DNA, 83 bp, Homo sapiens
gggaaccctggtcaccgtctcctcagaagatgaggatatgcctgctgctgggatgccacctcttccccagagtcctcctgaga

SEQ ID NO: 402463 - DNA, 80 bp, Homo sapiens
cgcctgagcgcaactagcggcgggtcgtgggcacctccagatgtgaagttcatttccaatccgccctccatggtggcagc

SEQ ID NO: 402464 - DNA, 78 bp, Homo sapiens
ttcctggagcggagcgcaggcgccgagactgacaacgcggtcccacaggggaaagttgctcagacagcttgcatgtca

SEQ ID NO: 402465 - DNA, 100 bp, Homo sapiens
agaaggttcagttggcaaaccagatatatgacttgaaccccagctcaaagggattgtgacaaggttattcagccagcagggatacttcctgcagatgcac

SEQ ID NO: 402466 - DNA, 95 bp, Homo sapiens
tttatccaccggcactgccaagatcaggatgtacagttacccagcacgtgtacctcctcctcctcctattgctcgggctgtagtgccctcgaaac

SEQ ID NO: 402467 - DNA, 83 bp, Homo sapiens
ccgcgcccggccggacccgggcccgagagacacctatggctgccgatgaaggctcagcagagaaacaggcaggagaggcccac

SEQ ID NO: 402468 - DNA, 80 bp, Homo sapiens
tgatgcttttgctacgacctcattttctgctggaactggtgctggagaatctggtaaaagcaccattgtgaagcagatga

SEQ ID NO: 402469 - DNA, 80 bp, Homo sapiens
tccgtctctcctcaccaggtcccctgtgggaggagatgctgcaggccagaaaaaggaggaggagaaatgtctgaagtaag

SEQ ID NO: 402470 - DNA, 75 bp, Homo sapiens
cagcatttacatgacagaaatcacctatgtttacagcgacagggcttaaaagacaaccttcttgcttctgggaca

SEQ ID NO: 402471 - DNA, 51 bp, Homo sapiens
atgtggagttcggaggaaaagggctcagacgaagttatacggaagcgtctc

SEQ ID NO: 402472 - DNA, 75 bp, Homo sapiens
ggccaatgatgggagaccaccgggatgggcagatcatggaagggaagtggttgctgtgtatgttactggtgcttg

SEQ ID NO: 402473 - DNA, 96 bp, Homo sapiens
agccctttctgaggcagatacccaggaactaacccagccatccagtccaatggatcagatgggcaagatgagacctcagccatatggcgggactaa

SEQ ID NO: 402474 - DNA, 97 bp, Homo sapiens
cagatgtaccctcagtacgccacctactattacccccagtatctgcaagccaaggtcatcgtattgaggaagttcctgaacttcctttggtagttga

SEQ ID NO: 402475 - DNA, 100 bp, Homo sapiens
tggccctcgtccttccatggcactggcaccggcagcggcggcgcgggcggaggcagcagcaggcggattttttatcaagcagaaatgcatcgaacaacga

SEQ ID NO: 402476 - DNA, 101 bp, Homo sapiens
ttcacagtttgcgggactcagtcccatcactccaaggagagaagactgccactggagacaccattgtctcatccaagtccagtgcattagctgcagctcgt

SEQ ID NO: 402477 - DNA, 97 bp, Homo sapiens
cactgggccctgtatataggagatggctacgtgatccatctggctcctccaaattcttctgcacagtcagtatcctcgggagttcgtgcaccatctc

SEQ ID NO: 402478 - DNA, 75 bp, Homo sapiens
agcgacagtgcccaggggtctgagtctcacagcttgtaaagggatagctgggagtatggccaccctgctccacga

SEQ ID NO: 402479 - DNA, 100 bp, Homo sapiens
gaaaggccgcgtcgtgatcgactcggacacagaggacagcggcagcgacgagaacctggatcagatgagcagcaccagcagtaagagggctccgaccacg

SEQ ID NO: 402480 - DNA, 77 bp, Homo sapiens
aaacaagcttcattgttttcagctaacagtaaccccagaactcccccactggaaaggattctgaaagaaatgaagtc

SEQ ID NO: 402481 - DNA, 83 bp, Homo sapiens
ccgagggactgggagtcgttagtgaggctatgactttgcagccgtcctggagtggttcgcggagcgtgtggaccgcatcatcc

SEQ ID NO: 402482 - DNA, 95 bp, Homo sapiens
gaaggcccagcgcttcctgcagaaggccgagaagctctacccactgccctcggcccgcggaatgttttaaaggaagttgggctactcacaagtta

SEQ ID NO: 402483 - DNA, 88 bp, Homo sapiens
ctgtgacctgcatgtactgggggattcgcagggaggatgtcgggacaccccggaagctgggaaatgtgaaaatgcctcgtgtaaaagc

SEQ ID NO: 402484 - DNA, 75 bp, Homo sapiens
gtgtgggtttcccaagcaaggttccttggaagaagatgtctgcagaggcatctgcatctgggaccgacctcctgg

SEQ ID NO: 402485 - DNA, 88 bp, Homo sapiens
tgagcagtctctggacaagatgaccacactccaggaatgccagtgcatcttttgcacagctgaagatgagaatgtgcctactgctcct

SEQ ID NO: 402486 - DNA, 82 bp, Homo sapiens
ggaagagaaagaaaatgccgaaggcactcagacagatttattcaggagattgagcatgctctgggtcttggcccagccaaac

SEQ ID NO: 402487 - DNA, 96 bp, Homo sapiens
cggtgctgcaagagaaggcactcaagtttatgtgtctttggtgcaacactaacaaggcttgtctggactacccagttacaagcgtcttgccaccgg

SEQ ID NO: 402488 - DNA, 100 bp, Homo sapiens
aatccagtttgcttcttggagaacactggacagctgaataaatgcagttgttgacctcctgtactggagagacattaagaagactggagtggtgtttggt

SEQ ID NO: 402489 - DNA, 101 bp, Homo sapiens
agagttatggatattctggtggggagatgaacccaacctagtgggtgtaatacatcatgaactgcaggggaggcagcgtccatggagcaaaaggaatgcca

SEQ ID NO: 402490 - DNA, 99 bp, Homo sapiens
cgcggaccatgggcgacaaagggacccgaatggacgcgatctctctatctggtccagtggcagccggcacatgaagaagcagacatttgtggtacatgc

SEQ ID NO: 402491 - DNA, 75 bp, Homo sapiens
ctgtttccacgtgcggtgctcgtcgggagtgatcacctaccctacagacttaattcagtgcacaaatgagatgaa

SEQ ID NO: 402492 - DNA, 95 bp, Homo sapiens
gaatccctgccccatctgtcgagatcacaagttgcatgttgactttaggggaaatgtttcaacgtgcgcaagcgttgcggcggcgggcagaggac

SEQ ID NO: 402493 - DNA, 90 bp, Homo sapiens
tgtgctgagacctataaccctgatgaggaagaggaagatacagatccaagggcaaaggaaggatgaactggagcagaggatgtcggccct

SEQ ID NO: 402494 - DNA, 88 bp, Homo sapiens
ccggacagccgcgcgctgagggtctcggggcgggcgccgcgggacctctccgggccatggccctccagaatacccatcatatagcccc

SEQ ID NO: 402495 - DNA, 54 bp, Homo sapiens
atttaagcactgctgcactttatgagtgggacttctcctcttgcatgcctgaat

SEQ ID NO: 402496 - DNA, 100 bp, Homo sapiens
tgaagatgatgtggtctacagaccaggagattcgacggaggcgccttgcacgacttgctggtggacagacctctcagccaaccaccccactcacctctcc

SEQ ID NO: 402497 - DNA, 75 bp, Homo sapiens
atttctgtgtaagagctgcagaaaatgatcagcttccaggtcctgctggtcaatctttgtgaaggaaccttctta

SEQ ID NO: 402498 - DNA, 78 bp, Homo sapiens
tttccttggagagtcataacatatcactgactggcagcagtgaggatgccagagttcatgggtttctagaagacaagt

SEQ ID NO: 402499 - DNA, 83 bp, Homo sapiens
cacgagctggaggactgggtatcaatctcactgctgcagacacaaggtcatggaagaagtgacaacatgctccttcaacagcc

SEQ ID NO: 402500 - DNA, 74 bp, Homo sapiens
gtttacactggaactggacaggtttgtgaatagcacaatggaagaagctggactttgtgggttaagagagaaag

SEQ ID NO: 402501 - DNA, 122 bp, Homo sapiens
taagccttaaagagacaggacggtcgattggtctgaaattcttgaagagacagatccagacatttaatgtggatgcaccatgccagaccgtggaagatttaacgaatggggttgtgatggcc

SEQ ID NO: 402502 - DNA, 83 bp, Homo sapiens
gtctttcctctgcattgctgatcttgtacttggattcagcaaggaaccttccggtcaatgtgacggtggactacattagacca

SEQ ID NO: 402503 - DNA, 100 bp, Homo sapiens
cagcggtccagggaaggaagcaaagcaaatggagaatggcatgctggtgacggacagtgcagggaagcaactgcagagaggtgctgatactcaaagaagg

SEQ ID NO: 402504 - DNA, 90 bp, Homo sapiens
gaagcgtgaggccggcatcgtctttccgtcctctgaggcgacggccgcggctgcacaggatttttttcccaggaagccatcccgtcagag

SEQ ID NO: 402505 - DNA, 75 bp, Homo sapiens
tggccaagaagggccttactccttcacagatcggtatagtcgtctccccctccaccacggcaagtcctgcagagg

SEQ ID NO: 402506 - DNA, 50 bp, Homo sapiens
cctggatcgacaccctctacagcagtgcagaggccaagaccgttttgccc

SEQ ID NO: 402507 - DNA, 100 bp, Homo sapiens
cgagaggctgctggagctcgtgtttggacgctatgacctgtcagcctctacattctctcctgacggaagagtttttcaagttgaatatgctatgaaggct

SEQ ID NO: 402508 - DNA, 80 bp, Homo sapiens
ggagtagtcgctggagtccgcgcctccctgggagctggcgttacagcccaaagatgatattgtagaccgagcaaaaatgg

SEQ ID NO: 402509 - DNA, 75 bp, Homo sapiens
gagagctgtcactttgggagcggttctgtgccaacatcataaaggctactgtggagccgatatcaaggccctgtg

SEQ ID NO: 402510 - DNA, 142 bp, Homo sapiens
gggcggcgcgaagcgctggtggcgggcccgggctgcggcgtgtgcgcgcccgccagctgctccggagatacggtgctggagaatctggtaaaagcaccattgtgaagcagatgaggatcctgcatgttaatgggtttaatgg

SEQ ID NO: 402511 - DNA, 100 bp, Homo sapiens
gagtgacagtaaggaggcctgaccccattgactggtcattgaagtataaaactcctgattttgagtctacgggctgctttgctggctctgcaagaaaatg

SEQ ID NO: 402512 - DNA, 83 bp, Homo sapiens
gaaacaccatggctgcggcggcccagctctctctgacacagaagaaaagatgtggagtgggctgctacctcctggcctaaatg

SEQ ID NO: 402513 - DNA, 94 bp, Homo sapiens
ccactgctgctccgtggagatcgtcccgcgcctgccgggggggccctcagcctcttggccttgaacgggctgttcatcttgattcacaaacaca

SEQ ID NO: 402514 - DNA, 96 bp, Homo sapiens
caggctgccccggacatgagcaagcccccgacagctcagccagacttcccctatggtcagtatgtgaagtacctggggctgctggcaatgtccaag

SEQ ID NO: 402515 - DNA, 100 bp, Homo sapiens
gaagatagctgaccagctggaagagttgaataaagagcttactggaatccagcagtgggccccatgctgattgagtttaacatgcctgtggacctggagc

SEQ ID NO: 402516 - DNA, 75 bp, Homo sapiens
gtgtgccccctcccctggatcaatccaaggccacctttgatgccatttctaagacctacagctacctgacccccg

SEQ ID NO: 402517 - DNA, 75 bp, Homo sapiens
gaacgaggcaaggagctaaagcagcgtgcgttcagccctggggaacttgcttgctagaaaacaaagtgcaaggct

SEQ ID NO: 402518 - DNA, 90 bp, Homo sapiens
gagaagctggatttgccctttgatggtggccctcttgatccccggcttgctgaagtcaaacttcgagagctgtgcccaggagtgaacaac

SEQ ID NO: 402519 - DNA, 100 bp, Homo sapiens
atgcccgagggcactacaccattggcaaggagatcattgacctcgtgttggaccgaattcgcaagctggttttgcacactagggaccaagaagccctcgg

SEQ ID NO: 402520 - DNA, 127 bp, Homo sapiens
tcaaattgtagtctatggtattttagtcattttggcgacaaacaagataaggtatgcagtggaactgatgaagaccctgatgataaaaacgcaccctttcggcaacggccattttgcaaatataaag

SEQ ID NO: 402521 - DNA, 100 bp, Homo sapiens
ctcataggagttcccgctgacgctgaggccttaagtgaaagaagtggaaacacccctaactctcccagattgtcagcagcctgctgcctccgtaccgcca

SEQ ID NO: 402522 - DNA, 79 bp, Homo sapiens
atcagataacttgtactggagagaaatcctacaagtgtggactccctggaggaaaagcggaagcggcagcggtctgaac

SEQ ID NO: 402523 - DNA, 90 bp, Homo sapiens
gccaggagctgctcaccttcattgatgctgaactcaaggccccaggtcttatatccagatggccaggctcagatgattcaccccaagcct

SEQ ID NO: 402524 - DNA, 98 bp, Homo sapiens
ttctgagcgagccttgaaagagataaaagcggaagtttgccacacgatttatcagcgatgctggttagtattcaagaaagcttcaagcaaaggtccaa

SEQ ID NO: 402525 - DNA, 89 bp, Homo sapiens
ggcaggctctatggcctgcaggaagcgctggaaatagccagagagatgcgttgccgtccactctctgccagtgatgcggaaatgaaaaa

SEQ ID NO: 402526 - DNA, 90 bp, Homo sapiens
cgctttttagaattgcacttggaggacaaggtgatctttagacagtgactgagtatggatcatttgaacgaggcaactcaggggaaagaa

SEQ ID NO: 402527 - DNA, 100 bp, Homo sapiens
ggcggagttggacacggtgtgcagacacaactacgaggtggcgttccgcgggatcttgcagaggagaggtgaccctggcagcaaccccaacaaacgccag

SEQ ID NO: 402528 - DNA, 98 bp, Homo sapiens
ttctggtacaccctcttatatcaggcccatcgggaaggcattcctgtcatgagcttgtctccttcagatggagcccgtgaactacgaacgagtgagag

SEQ ID NO: 402529 - DNA, 100 bp, Homo sapiens
ctggtgctcatccccaaagccaagccactcactctgctctggggactttccttatcccagttgattgtgcagaatacactgcctgtcgcttgtcttctat

SEQ ID NO: 402530 - DNA, 83 bp, Homo sapiens
cagaatttctgcaagtaattggtaatctgtaagtcagatgctccaacaggggatgttcttcttgatgaagctctgaagcatgt

SEQ ID NO: 402531 - DNA, 50 bp, Homo sapiens
agggaccccgctgtcagtatggtattggcaagcttgccagtgtacctgct

SEQ ID NO: 402532 - DNA, 75 bp, Homo sapiens
caactatctaaacaaatctcagacctaatcagacagccttctacagcgccttagattttagtgatgatgaaaaag

SEQ ID NO: 402533 - DNA, 100 bp, Homo sapiens
ccagcaaacagtcttccgcaggaaggagatgtggcctatgagagctacaagaagaaggactacacccaggtggactacttaatcaacgggatgtatgcgg

SEQ ID NO: 402534 - DNA, 50 bp, Homo sapiens
tccagtgctactgctacaaataaggtgattgaaatctctgaatatcgaac

SEQ ID NO: 402535 - DNA, 98 bp, Homo sapiens
cgcaggaaagccccagccacccatcaaatcagagagaaggaatccaccttcttacgctatggcagaatggggaatgcatcagcaacccccacaccccc

SEQ ID NO: 402536 - DNA, 90 bp, Homo sapiens
gtttatttacttgatgtccaggggaacatcactcagaagtttgatgtagctcaaagtctaactccccaggactataatctgaggtggtca

SEQ ID NO: 402537 - DNA, 75 bp, Homo sapiens
cctagatccttgtatctacagagtatccgtgaggaagaattgtgagaagctggagaataattttgatgacatcaa

SEQ ID NO: 402538 - DNA, 89 bp, Homo sapiens
ctgcgggcggcttgggcagcccgcgggcgcctcagtcgtggcattcctggtggctttccatcagaacaagcagctcatcggtgacaggg

SEQ ID NO: 402539 - DNA, 100 bp, Homo sapiens
atcactgtgaccctaaaaaagcagaatggaatgggccttagcattgttgcagcaaagcaagaagatccttataggaagaaaaagcttcaggagaaaagag

SEQ ID NO: 402540 - DNA, 82 bp, Homo sapiens
gtgtgaaggagcgggatatgacataattcttattgaaaccgttggcattgtgtccagatctggcaccctgacttatgaagca

SEQ ID NO: 402541 - DNA, 75 bp, Homo sapiens
cttcatgagctgccagagtttaacctcatccactccctgagttacacaacagccaatgcggagtctgacaatgag

SEQ ID NO: 402542 - DNA, 75 bp, Homo sapiens
gatgggctgggaatgaagcgatgtagccttttaagtgccaagtcctgccctgccaacttcttggcagctgccgac

SEQ ID NO: 402543 - DNA, 83 bp, Homo sapiens
ccgagaccgactgagggagcgacctgcgcagggcccggggagtcatctcaccatggatgatgatatcgccgcgctcgtcgtcg

SEQ ID NO: 402544 - DNA, 89 bp, Homo sapiens
acagcgccttgttccagcagggcctgatccagcttgctagagaagttttggatgttgctgccggcatgattaaaccaggtgtaactact

SEQ ID NO: 402545 - DNA, 73 bp, Homo sapiens
tttctgctcttggtgcaggatctgcagctactgctgcatcagaagaaatgttgaatccttggcctgaatatat

SEQ ID NO: 402546 - DNA, 51 bp, Homo sapiens
ctacagggaagtgcatcacatgtcagcttcgagattcaacagaacaatttc

SEQ ID NO: 402547 - DNA, 101 bp, Homo sapiens
cggggccgctgctcaagttccagatttgtctgttctctggggaggcagtaaggggccgtggagctggcctcggcctcggcatcgggagaggctggacttcc

SEQ ID NO: 402548 - DNA, 100 bp, Homo sapiens
ctcagtttacctgcaacaatggcagatgtatcaacatcaactggagatgcgacaatggtgctaatgtcaatgctaaggacacactgtggctgacccctct

SEQ ID NO: 402549 - DNA, 98 bp, Homo sapiens
cgaaacctccatagtcaccacttcacttcacctctttctggaaaccagtaccactccaaaggcaaggaaccatgattgacaacagtcaagctgtggat

SEQ ID NO: 402550 - DNA, 83 bp, Homo sapiens
ctcgggcgccggcgagatgcctttgttcaccgccaaccccttcgagcaagacgtgggattttttatcaagcagaaatgcatcg

SEQ ID NO: 402551 - DNA, 82 bp, Homo sapiens
gtccaagggggacgggatgcggggcctggcggtcttcatctcggatatccgcaactgatttttagactctgaggagcagttg

SEQ ID NO: 402552 - DNA, 90 bp, Homo sapiens
gaaaatgcaactgcgtgcatggtgaatcttcagctggtaagaattgtgacaaaggccagtcttttttcattgacgccccagattccccag

SEQ ID NO: 402553 - DNA, 100 bp, Homo sapiens
ccactgtggtctgttgtaccccactgctggggtggtggttccaatgagacagggcacaccaaactccatctgcagttggaattgatcacaccttttcagt

SEQ ID NO: 402554 - DNA, 51 bp, Homo sapiens
aagaggagaaggggaagatcacattcgatttgtcccatcagatgaaaagaa

SEQ ID NO: 402555 - DNA, 88 bp, Homo sapiens
ctgggagaatatttaatggaaaatcgcttggttaaaacctgacacttttaacagattacgtgtgaaaatgaacttgtgcaaacccaac

SEQ ID NO: 402556 - DNA, 90 bp, Homo sapiens
cgcctcgggacccgcggtccccgctcttgctgctccagaacctgggtatcaacccagcaaacattggcttcagtaccctgactatggagt

SEQ ID NO: 402557 - DNA, 50 bp, Homo sapiens
gacgaggactacgtgccgtcggaatttcgctaaggagtttgtgatcagtg

SEQ ID NO: 402558 - DNA, 100 bp, Homo sapiens
gctgtaaccacctcacagattccagcttcggaacaagagaccctggaataagacgagttggaagaagacctgatcaacaacttcagggtgaagggaaaat

SEQ ID NO: 402559 - DNA, 90 bp, Homo sapiens
ccgaaggggagccatggcggctgacagtcgggaggagaaagagatgtgaaagctggaaacattcttcttggagaagatggctcagtacag

SEQ ID NO: 402560 - DNA, 82 bp, Homo sapiens
gcttagcattcgagagaacaaaattaaacaactacctgctgaaattggtgaccaagtcagccatcggggtgctctaactggg

SEQ ID NO: 402561 - DNA, 82 bp, Homo sapiens
gcagccagcacggccaaaccccctcctctgcctcgctccaacacagctctggcaggctgccctgagcacgctcaaccccaac

SEQ ID NO: 402562 - DNA, 75 bp, Homo sapiens
aggtctttacagagcttgcccagaagcttttctgggagaagaggctacaaggacttagtgcatcagatgtaacag

SEQ ID NO: 402563 - DNA, 75 bp, Homo sapiens
gatgggaaaccacgcaggcaaacgagaattaaatgccgagaaggccagtacgcttggtgatccagctatttttcc

SEQ ID NO: 402564 - DNA, 100 bp, Homo sapiens
gtcggcacgagggaggcggggatgcgcctgcgcaacaagttcggcggggaagatggcggatgacaaggtgagccgttctccaaccctttggcccccgatg

SEQ ID NO: 402565 - DNA, 90 bp, Homo sapiens
cgcagtggtcgcttcttctccttggtggtgatggcacttctcaaatactggccaaagactcacagtccaaaagaagtaatgttcttaaac

SEQ ID NO: 402566 - DNA, 80 bp, Homo sapiens
gccagggaaccctggtcaccgtctcctcaggcgccatgtcagaaccggctggggatgtccgtcagaacccatgcggcagc

SEQ ID NO: 402567 - DNA, 83 bp, Homo sapiens
aggctatgcagctatcgtggacgtcactggccctggtggggattgacagccacgggaagtccagaatgacagggtccagaaac

SEQ ID NO: 402568 - DNA, 75 bp, Homo sapiens
gagtggttgtgtggtcgcgtctcggaaaccggtagcgcttgcagcatgatgctgtgtgctgtggacccacctggg

SEQ ID NO: 402569 - DNA, 100 bp, Homo sapiens
gccaaagatgcggcaccgggaggaggaggagatcgtcaggctggcccaggaccgggaggagatgaagcctgggttggactctcacctctgccacttaact

SEQ ID NO: 402570 - DNA, 74 bp, Homo sapiens
tggaatactcctaaccaagaagttgcccagagaggtgagagacttcagaggctgccctttcttttcatctgctg

SEQ ID NO: 402571 - DNA, 100 bp, Homo sapiens
cagaagcgaggcctggatgagcacaagaggacgcacactggagaaaagccttttcagtgtgatgttcttgagttcatgtaagaggacagtcttaaaacgg

SEQ ID NO: 402572 - DNA, 75 bp, Homo sapiens
aagttccggcagttcatgcagaatttcaggtatctgaaaaggtttaaagtgatgaagatcaaagttctaagaagc

SEQ ID NO: 402573 - DNA, 50 bp, Homo sapiens
cgggcccacggaggttccggccccgaaggccctcgggaccaaggatcacg

SEQ ID NO: 402574 - DNA, 90 bp, Homo sapiens
gccgacttcgatgatcgtgtgtcggatgaggagaagcttgtattggttggtgatggtggtactggaaaaacgaccttcgtgaaacgtcat

SEQ ID NO: 402575 - DNA, 98 bp, Homo sapiens
cgagaaagcacggggtgaaactgaccacagtgctcaccacccaccaccactgcacaagctccgggtggataaggcagctgctgcagcagcggcactac

SEQ ID NO: 402576 - DNA, 98 bp, Homo sapiens
atctattctgctgattcacaattatggagactgttgacttttttgaacgaaccattctgtgcaacagccttgtgtggagttgtgctgtgacgggtaga

SEQ ID NO: 402577 - DNA, 104 bp, Homo sapiens
aagtctatcaaacagcaagcactgacaagcagcacattctcaagagcacacagggtgctgataagactgtgaaaggcccagatggactgaccgcctttgaagcc

SEQ ID NO: 402578 - DNA, 97 bp, Homo sapiens
atgagcaaagggttcatcaccacatctttgcaagaggaaaaagaaaggggaagaatcatgtgtctaatgttgtaagatggagtcttgctctgtctcc

SEQ ID NO: 402579 - DNA, 51 bp, Homo sapiens
cgttcagatttcctgaccattgttgctgatagtccaactccaccgccacca

SEQ ID NO: 402580 - DNA, 80 bp, Homo sapiens
ctcgcgcgcgcctccaggagcaaggatggagaggctggcaatgcatgaaccattgcaaacttggcaagatgcaccataca

SEQ ID NO: 402581 - DNA, 51 bp, Homo sapiens
gaggccctgaagcctggcatgccattggaaaagaagtttgttcgagtttca

SEQ ID NO: 402582 - DNA, 101 bp, Homo sapiens
caactttaacgacatagtcaagcagggctacgtgaaaatccgcagcaggaagcttggggtaaagtcagtgataaatcttttgtttgctgcatatactggag

SEQ ID NO: 402583 - DNA, 100 bp, Homo sapiens
gacctagatggaacacatgctctgatggagtcaaattgactttatcagctttaatcgatgggaagaacttcagtgcaggaggtcacaaggttggcttggg

SEQ ID NO: 402584 - DNA, 75 bp, Homo sapiens
tcatgggccagacctcggtgtccacgctgtccccgcagcccggcagcggttatgaagacagtatggagtttccag

SEQ ID NO: 402585 - DNA, 100 bp, Homo sapiens
atcgagaaggcgtctgcgagaccatggagaacggggtactggagaagacagctggatcacatctctgctcacctcaggtgttatgctcagaacaaccctg

SEQ ID NO: 402586 - DNA, 80 bp, Homo sapiens
tttccgcagacagaagtggggagaagcggaggtgctttgcaagatatcaccttgtcacagcagaccccctccacttggaa

SEQ ID NO: 402587 - DNA, 50 bp, Homo sapiens
cccccgaagaagactcccccacatctggaggcaggagaggcaggtccgag

SEQ ID NO: 402588 - DNA, 83 bp, Homo sapiens
gctcaaagccgggagatcgactgtttgagcccggaagcgcagaagctgacctcctgccccccgaggtctgcagtctcctgaac

SEQ ID NO: 402589 - DNA, 75 bp, Homo sapiens
gttcgaaaagctgagaatcctcagtgtttgctaggttatctaccttgcctgctcctatgccacagtgtacctgat

SEQ ID NO: 402590 - DNA, 75 bp, Homo sapiens
tgtcacgcctcgggaagcgcgcacctgccaagcaggcatagaatgtcaagctaaccaggcgtccgctacttcaga

SEQ ID NO: 402591 - DNA, 90 bp, Homo sapiens
atttaattttagggtcctttatatagaagggagagttcggactaaggatcaccgctttgaaagtgtcagtcaccttatcagctaccacat

SEQ ID NO: 402592 - DNA, 75 bp, Homo sapiens
cccagacttgccccaggacacctttatccagtttcctggatggaccaagaattaacactgaatcctccggaagga

SEQ ID NO: 402593 - DNA, 90 bp, Homo sapiens
ccgggattcccagccatggcagattcctccgggcagcaggctggctggaggcgtgatcctgggtgtggccctgtggctccgccatgaccc

SEQ ID NO: 402594 - DNA, 74 bp, Homo sapiens
gaggagcgcgccctgcctgagaaggagcccctcgtcagggcactgaaggctttgtggaactacctgagccagaa

SEQ ID NO: 402595 - DNA, 75 bp, Homo sapiens
agcttactctctcagatgacttcgtctcccaccgactgcctgtttaagatcactgagacccagaggctgggcctg

SEQ ID NO: 402596 - DNA, 74 bp, Homo sapiens
aatgggaagatttactttcgaagctataatgagagtagcatgtttgtctccaagagacgtttcattttgaagac

SEQ ID NO: 402597 - DNA, 74 bp, Homo sapiens
agaagtgcatcctctcacaccccagctgtgcatggtgcaagcaactgctgtctgtggaagcccgtaaagagatg

SEQ ID NO: 402598 - DNA, 100 bp, Homo sapiens
tgtggaggacccggtcactgtggagtacatcacccgctacatcgccagtctgaagcagatgcagcaacaggaactggcacaaatgagacagcgggacgcc

SEQ ID NO: 402599 - DNA, 82 bp, Homo sapiens
tgtgtcagaacaatcttgaatcatgaagctactaaccagagccggctctttctcgatacctactggagcaggatttcccagg

SEQ ID NO: 402600 - DNA, 74 bp, Homo sapiens
cccggcgcgtgtgggaccgaggtggacatggatccgcaggttgcagagcctgaggcctgtgatcagatgtacga

SEQ ID NO: 402601 - DNA, 98 bp, Homo sapiens
tgcctttccagtggacctgggctgttgttgcggttgttttccttctctccgtgcaacgctgggggcaatggcggcttcctgtgttctactgcacactg

SEQ ID NO: 402602 - DNA, 97 bp, Homo sapiens
gtaattcagaaattagggacagccaagtatcttcaagaccttctcatggagagtgtgaatttttcccccgccaatctctctagcactggttccaggt

SEQ ID NO: 402603 - DNA, 75 bp, Homo sapiens
agtttttatcaacaaaggcaaaggattcggatttattaagcttgttggtcaaagaaaaagtgatgtatgaaaaag

SEQ ID NO: 402604 - DNA, 100 bp, Homo sapiens
ctcagcagacttgcatatatttgactgcaagtgctgctagctgaggaggggatagctcctctttcttctgcaggaccagggaaagaggagaaactcctgt

SEQ ID NO: 402605 - DNA, 75 bp, Homo sapiens
gatgatcaagcggagttcgatgcgggggggccctcagcctcttggccttgaacgggctgttcatcttgattcaca

SEQ ID NO: 402606 - DNA, 74 bp, Homo sapiens
ggacagcatccaggcctcattggacagcattcgagaagctccaccatgaggcgaggtggatggaggaagcgagc

SEQ ID NO: 402607 - DNA, 100 bp, Homo sapiens
ctgatcgagcgcatcgaggatttggcgctgcagaaccagatccgggagcacgtcatctccatcgaggaccgagacatgggtgcccggcaccgcgcccgag

SEQ ID NO: 402608 - DNA, 90 bp, Homo sapiens
atcagtgcccttgtggcgaatggggctcacgtcgaagatgcccgagtggtaaaagacatggcaacaggaaagtctaagggatatggcttt

SEQ ID NO: 402609 - DNA, 87 bp, Homo sapiens
aatgacctgctgcagagacttgatgttcagaatgaccgaagaagcatgccgaacacggagtcagaaacgagcgcttgaacgggaccc

SEQ ID NO: 402610 - DNA, 82 bp, Homo sapiens
cagctgcgccgggaggcagagcggctcagccagcggcagacagaacgggacctgtgtcagtacgaattggagcaatgttggc

SEQ ID NO: 402611 - DNA, 83 bp, Homo sapiens
atggtctcaatctctggaaaaacttcttgccaaccaaaatcttcccagacccgtcagattttgaccgctgctgcaaactgaag

SEQ ID NO: 402612 - DNA, 90 bp, Homo sapiens
ggtgacaagcacaccctgagcaagaaggagctgaaggagctgatccagaaggagctcaccattggctcgttttctggatatgccgcagaa

SEQ ID NO: 402613 - DNA, 87 bp, Homo sapiens
ggcctcccgggctccgggaaaactacactggccaggctcctggctggtgccccccgggagctcgctgtgcccgatggctacaccaac

SEQ ID NO: 402614 - DNA, 98 bp, Homo sapiens
ctgagaggaggccccgggagggcagccactccccgctggacagcgccgacgtccgggtgcacgtgccacgcacggcgggagtcatggatgtagatgct

SEQ ID NO: 402615 - DNA, 135 bp, Homo sapiens
ggcgctacgggacccgagccgtcccagaaaccaaagggcaggcacggcagcaaacgcctgaggtgtgatgaatgcagactctgctaccattttggctgtttggatcctcctttgaaaaagtctcctaaacagaca

SEQ ID NO: 402616 - DNA, 75 bp, Homo sapiens
cggcacccagacaggtggcgaaggcagaggagttacttcctcagaatgttggcctcctgtatgttggaggttatg

SEQ ID NO: 402617 - DNA, 82 bp, Homo sapiens
cctcagcgacctgatcgacctgacaatgcagatcttcgtgaagactctgactggtaagaccatcaccctcgaggttgagccc

SEQ ID NO: 402618 - DNA, 100 bp, Homo sapiens
gggcatacagagggacacacggaggtctgttttgatgattctgggagtttccaagccagcgccctactgggaaggaacagctgtgatcgatggagaattt

SEQ ID NO: 402619 - DNA, 75 bp, Homo sapiens
ccatgggggaggccagtgtggggtatggtcaagatcttttcaggccgaaaacccatgttgtacagcttccagaca

SEQ ID NO: 402620 - DNA, 97 bp, Homo sapiens
tctctacttccatccctgtaatttcacagccccagcggggatctgatgagcttctttcttctggcatcattaacggaccttttaccatgaatagttc

SEQ ID NO: 402621 - DNA, 75 bp, Homo sapiens
caaagatacagaagcccctcaggatgttccatttaagcagacctcttccatagctgtagctggagcggtaattgg

SEQ ID NO: 402622 - DNA, 89 bp, Homo sapiens
ggctggtgaagtacatgaactcagggccggttgtggccatggagaagttaaggctgcaaggccaaatcacagagggaagcaacatgatt

SEQ ID NO: 402623 - DNA, 90 bp, Homo sapiens
tgaaacaccactgaagcattgccaaggtttacccaaggtccagcctagcccctaggcaccatgtcggacagtgatctaggtgaggacgaa

SEQ ID NO: 402624 - DNA, 100 bp, Homo sapiens
cgggactctttcacaggctggatgaagattgggggtagaatccgccaagctttgagagaaggctgtgactgctgtgctctgggcgccagctcgctccagg

SEQ ID NO: 402625 - DNA, 100 bp, Homo sapiens
tggatgtccccagagtccattaacttccgacgcttcacgacagccagtgacgtctggatgttcgaggacttctgaatgatgctttccagaaagggggacc

SEQ ID NO: 402626 - DNA, 88 bp, Homo sapiens
gtgaatctcagtggctggagaatggagctgaagaaggcatcgtcaaatcagacctacaacaagaaaggggcctcccgaaggaaagacc

SEQ ID NO: 402627 - DNA, 100 bp, Homo sapiens
cgctgtgcccctactgctacaaccacccacccttccgagacatgaagaaagcatcatggcagaacaggatgtggaaaacgatcttttggattacgatgaa

SEQ ID NO: 402628 - DNA, 50 bp, Homo sapiens
catcagctatggagataggcagatgaggaggtatggaaacattggaactt

SEQ ID NO: 402629 - DNA, 122 bp, Homo sapiens
ggataattgggatgatgacaatgtagaggatgacttctctaatcagttacgaataatcatgggccagactgggaagaaatctgagaagggaccagtttgttggcggaagcgtgtaaaatcag

SEQ ID NO: 402630 - DNA, 75 bp, Homo sapiens
cttctgagtagctgggaatacagtaccacctgtactctgagcctcagtttaatgtccctgaaaagccggagttgg

SEQ ID NO: 402631 - DNA, 75 bp, Homo sapiens
ctgcccgggtagcttcccgacttatcgacatgagcaggcaccaaggtgaaacctttgtcctggggaatagtctgg

SEQ ID NO: 402632 - DNA, 83 bp, Homo sapiens
cccaggcggacgaggccgtgttagatggtcagtaggacagaaggtaacattgatgactcgctcattggtggaaatgcctccgc

SEQ ID NO: 402633 - DNA, 100 bp, Homo sapiens
ttgtgttgtagacttgctaaaggagaagtctggtgtaatacaagatgctttaaagaagagatggaaaataatgtcctgcaagatgaggattgaacagtta

SEQ ID NO: 402634 - DNA, 100 bp, Homo sapiens
cctgtgtcccaaccggcctgagtcaagtcctcttcctgatggatgggaacaagccatgactcaggatggagaaatttactatataaaccataagaacaag

SEQ ID NO: 402635 - DNA, 100 bp, Homo sapiens
tcctgacatcgaaaacccggacctcgcttacctgcatgctgtttcaccaggtgatatggatcggacacaaattgagcttaatccgtacctcacatgtgta

SEQ ID NO: 402636 - DNA, 74 bp, Homo sapiens
agacctaaagccacagtcttcaagagcccacggacaccacctcaacgggtgtggatgaatggaacatagctcgc

SEQ ID NO: 402637 - DNA, 73 bp, Homo sapiens
atggaggccgtggcgacggcgacggcggcgaaggaacccgataagggtacggcttcaggtccagagcgtggag

SEQ ID NO: 402638 - DNA, 100 bp, Homo sapiens
aggggctgactgagagcgtctgcttgacaatgcagatcttcgtgaagactctgactggtaagaccatcaccctcgaggttgagcccagtgacaccatcga

SEQ ID NO: 402639 - DNA, 100 bp, Homo sapiens
ctccagtggaagtggttggaaagatgctgaaattttcttctaaggagaaatatcccttatttacttttgtaaatggtcattccagagactatgattttac

SEQ ID NO: 402640 - DNA, 125 bp, Homo sapiens
cgtggccttagctgtgctcgcgctactctctctttctggcctggaggctatccagcgcaaatgttctgaaaaagactctgcatgggaatggcctgccttacgatgacagaaatggagggaacatc

SEQ ID NO: 402641 - DNA, 100 bp, Homo sapiens
ggttcaagatcaagtgacattgaggtgctcccactctttcccggcttttagaagctggtcctacacagttcaccacacctcttgcttccttcactactgt

SEQ ID NO: 402642 - DNA, 98 bp, Homo sapiens
tgaagattcagagcctttccgtcagccggtagatctccttgaatatccaggtgtccgcaatgttgccagtgtctgtctgcagattggctacccaactg

SEQ ID NO: 402643 - DNA, 73 bp, Homo sapiens
actacaatcagtttctaatccagttcacagaaaggaaccctaaggactctgcaatatgaataattccctagag

SEQ ID NO: 402644 - DNA, 50 bp, Homo sapiens
caaattttatatttcagatttgtggaaggcactttccacacatgaggaga

SEQ ID NO: 402645 - DNA, 98 bp, Homo sapiens
gccaagactctctaggaccagggactccaagggacagaaaaggtattctctactgccgctgatggtcaaacgcaagtggaaattaaagtgtgtcaggg

SEQ ID NO: 402646 - DNA, 97 bp, Homo sapiens
gccacatagggaaaggctgcgaccgagacacctactcagagaagtccctccaccggctctgtgtggtgtggagattccagcactcccaggacagtgg

SEQ ID NO: 402647 - DNA, 82 bp, Homo sapiens
ccagctgcagcttggacccagacatcagcattccagagttatcattaccatgttggtgacctgttcagtttgctgctatctc

SEQ ID NO: 402648 - DNA, 83 bp, Homo sapiens
ggcgttccctcacctgcagcagcccagctttctactgagctcccagctcctccagcagccgacaggaggcccgtcaagatgca

SEQ ID NO: 402649 - DNA, 74 bp, Homo sapiens
gagcgggatcgagaccgagaccgagagggtcctttccgcatccgctgcctggcccggaagcggaggaactcacg

SEQ ID NO: 402650 - DNA, 50 bp, Homo sapiens
tgttcagctgatggaaccttaaaggttaaagatcgaggtccggaagccac

SEQ ID NO: 402651 - DNA, 78 bp, Homo sapiens
ggacttccattattctttgtgataacagtaactgccataaagcaggtaaaaatgtctccatcgtatcatcagtccaaa

SEQ ID NO: 402652 - DNA, 100 bp, Homo sapiens
agcagcggggagacagccaccatgcacatcctcgtggtccatgccatggtgatcctgctgacgctgggcccgcctcgagacagaagagcctgcaagtgac

SEQ ID NO: 402653 - DNA, 83 bp, Homo sapiens
tggagctcactgcgggagacggacagaggaatgtcagctgagtacagtgaggccccgtgtgggccgcggcccggccctcacca

SEQ ID NO: 402654 - DNA, 82 bp, Homo sapiens
tgggcaccaggaagcgaaggctgtgaactttgaggcgctgatcatcaccatgtcggtagtcgggggaaccctcctcctgggc

SEQ ID NO: 402655 - DNA, 87 bp, Homo sapiens
acatattcgatgccatcgtgatggcggatgagaggctgcagtgcagaaggcaattcctatgtacaaaattgccaccaaaaacgatgt

SEQ ID NO: 402656 - DNA, 97 bp, Homo sapiens
acaaacggacgtcattgagtgcaagcctgtgtatattcacgccacctgggataaaggaaggaaaaccccgcctcatccctgctgggcccatcactca

SEQ ID NO: 402657 - DNA, 80 bp, Homo sapiens
cctcgagccagcccgccagcatgccccagtccaaagtgctgctcacggccgtgaactgctacagcgtgaaggccgccacc

SEQ ID NO: 402658 - DNA, 76 bp, Homo sapiens
cttcaacacctggacaccttgttagatggaacctacaagcagcagataatcaccagaatgggagtgaatgacttgt

SEQ ID NO: 402659 - DNA, 106 bp, Homo sapiens
tttcgggccagcgacccgctgctcagcgtcctcatgtggggggtaaaccactcgattttaccaaatgttgcaagaactctggagttcttatggtagtaaaatgccg

SEQ ID NO: 402660 - DNA, 101 bp, Homo sapiens
gacgggaatgacctgacccacaccttcttcaacccggaccgggagggctggctcctgaagctgggccccgtggagaattgattccccgaagacccgacccc

SEQ ID NO: 402661 - DNA, 100 bp, Homo sapiens
gccaggctggccccgagcggaactggagaaagctgaggggtctccgtctctccaccgggggcttcatccttccagggaggagaagagggactccagaatg

SEQ ID NO: 402662 - DNA, 100 bp, Homo sapiens
ctgcgatctctgtggtaggcccaggtgccacacctccctggatgatccaagatgaagaatacattgctgggaaccaagaaataggaccatcctatgaaga

SEQ ID NO: 402663 - DNA, 82 bp, Homo sapiens
ccagctccgtctcggcggcggcggagaaccatggagtctggcagtaccgccgccagtgaggaggcacgcagccttcgagaat

SEQ ID NO: 402664 - DNA, 75 bp, Homo sapiens
tcaggcttccatgcagcctgccttaccgcacctgtggccttgccgaagaactggaaaaagagaagtcaagggaac

SEQ ID NO: 402665 - DNA, 50 bp, Homo sapiens
ccggagatgcagctcaaggggaagaaagagtctcgctcttttgcccaggc

SEQ ID NO: 402666 - DNA, 85 bp, Homo sapiens
gaggccggccggtgccagcacctttcggcttctgagacggcggcagcagcggcattcaggagtggacagtgcaatgaaggaagaa

SEQ ID NO: 402667 - DNA, 50 bp, Homo sapiens
ccggaatctgtctcctgatcatcattcagaatgagatgctggaggaagga

SEQ ID NO: 402668 - DNA, 90 bp, Homo sapiens
attgagcggcgacagcaagaagtggagacagagcttaaaatgtgagtacgaccccagcaaagcgacctttgtgaaggtggtgccaacccc

SEQ ID NO: 402669 - DNA, 125 bp, Homo sapiens
caccgcgacgttgcctgtgggtgcccgcgaaccaacggttagcggtggcaggggctgactgagagcgtctgcttgacaaatcttcctattttcaagctgaaagaatctactgttagaagaagata

SEQ ID NO: 402670 - DNA, 100 bp, Homo sapiens
cgacgcgttcgtggagaggagcagcggttgctgttggaggagattttgtggaagtataatactttgtcattatgagatgtcgtctctcggtgcctccttt

SEQ ID NO: 402671 - DNA, 51 bp, Homo sapiens
ggattccaagtaactcttatttggatctcagaccgtggtggaggaatcgct

SEQ ID NO: 402672 - DNA, 75 bp, Homo sapiens
cggaggcggaaggggaaagcctggagtcctggctcaccactgaggcggctcccagctgcgttggcgacatggccg

SEQ ID NO: 402673 - DNA, 75 bp, Homo sapiens
cctggacgacatcgacctgtccgccctgcggatgtggacgagtgccaccgcgtgccgccgccgtgtgacctcggg

SEQ ID NO: 402674 - DNA, 101 bp, Homo sapiens
ccggtaccttgctgaagttgcgtgtggtgatgatcgaaaacatctgggacatgtttggagtcttctttgctaaccaccctgatctaagaaggatcctgaca

SEQ ID NO: 402675 - DNA, 100 bp, Homo sapiens
ctgatgcagcagagcttggaaggatgcttcagctcatcttaggctgtgctgtgaactgtgaacagaagcaagagagcaagcgagacattctgttcctctt

SEQ ID NO: 402676 - DNA, 82 bp, Homo sapiens
ggaagagattcagccagcacactcctcgcgagcaagagctccacgcaggagatcggtgaggagctgatcaacggagtcatct

SEQ ID NO: 402677 - DNA, 100 bp, Homo sapiens
ctgaaacggattgccagagaattggcagaagagtgcccaagacaggagcaggacattgtgttcctgatcgatggctcaggcagcatctcctcccgcaact

SEQ ID NO: 402678 - DNA, 100 bp, Homo sapiens
ggctgtggaccacgagtgtgccaccccagcggcggggcagcaggtcctactgctctgttggctcatgaaataggttttggaagtaaagttacaacacacc

SEQ ID NO: 402679 - DNA, 51 bp, Homo sapiens
gccttcccagtagctggaactacaggctctggggtctacatcacacgcggc

SEQ ID NO: 402680 - DNA, 82 bp, Homo sapiens
ccaacatggcggaacgcaggagacacaagaagcggatccagacagatgcaccatcaggaatggaattacagtcatggtatcc

SEQ ID NO: 402681 - DNA, 105 bp, Homo sapiens
acctacgtcccgctgccgtcgccgccgccaccatgcccaagagaaagaggctgggaggcggcagaatgcagccagaggagggcacaggctggctgctggagctgc

SEQ ID NO: 402682 - DNA, 75 bp, Homo sapiens
agaaatattacaatcaagcttggatatgctaatgctaaggtttgaattttgggaagattttgaagaagaccatgg

SEQ ID NO: 402683 - DNA, 100 bp, Homo sapiens
tctcagaagacagagggttttcttttgagatctcgtagtagaaattcttggggtgaacaaatgccggctgagctggggtctagtcctggagtcactacaa

SEQ ID NO: 402684 - DNA, 74 bp, Homo sapiens
ccggcgccgtcgcgccactcctccgagaacgaatgcaggaatttgggaactgagctgtgcaagtgctgaagaag

SEQ ID NO: 402685 - DNA, 100 bp, Homo sapiens
agttaatccaggtgagactttcacaataagagcagaggatggaacacttcagtgcattcaagcaaaagctgatgaagcattgaaagccaaagaaagaaat

SEQ ID NO: 402686 - DNA, 90 bp, Homo sapiens
aatgttttccttcagcaaggacaaagtgcacaaaacaacttgcagcagcttttcatgaggaatttgttgtgagagaagatttaatgggcc

SEQ ID NO: 402687 - DNA, 100 bp, Homo sapiens
atcaagctctgtgagggtttcaatgaggtgctgaaacagtgccgacttgcaaacgatctgcagtggtacgaaggtccaacaccagccccatgggcttcct

SEQ ID NO: 402688 - DNA, 83 bp, Homo sapiens
gtggcccagagaccaagatcactgataagaaatgttctcgacagcaaggtatgaatgctgctgtcagggctgtggttcgagtt

SEQ ID NO: 402689 - DNA, 88 bp, Homo sapiens
gaaagtggacaaagagaggagtcaggtttatcgacaagaaggaaaggttaagccgacttaagagcaagcaagaagaatttcagaaaga

SEQ ID NO: 402690 - DNA, 75 bp, Homo sapiens
gattcgcagtggtcgcttcttctccttgaatttggaggttttggttcagttagtggaaaaattgaaatagaaatc

SEQ ID NO: 402691 - DNA, 80 bp, Homo sapiens
tcattttgaaaaacagtattccaaagaactcggagatgcctggaatacagtaagaactgaaggcagaagctagtctaatg

SEQ ID NO: 402692 - DNA, 100 bp, Homo sapiens
ggtagtcgaccgtgtccgcgcgcctgggagacgctgcctcggcccggacgcgcccgcgcccccgcggctggagggtggccaaaggtgtccaaactataca

SEQ ID NO: 402693 - DNA, 75 bp, Homo sapiens
tgtacagaaattgaaaggcttcaaagctagcaggatattgagaaagtctgtgaaactgtctatcaaggatctaac

SEQ ID NO: 402694 - DNA, 51 bp, Homo sapiens
tgaaacaaaaggagaccctaatcttcaggttttgaaaacattgaattgact

SEQ ID NO: 402695 - DNA, 100 bp, Homo sapiens
gagctgtcagatcaccattcccaaaggtatcatgatattagctggtttgacatcaagtcatttgtgagtcatcagatcttctcctgaaaatgggagacac

SEQ ID NO: 402696 - DNA, 75 bp, Homo sapiens
actctacagcattcctttccttgaagtcttcgtttttaccttagtctcggggtaagggactgttctgaagaacct

SEQ ID NO: 402697 - DNA, 75 bp, Homo sapiens
tgccagtaggagcctgccgcgagtgctgacggatcccatgacagattctgttgtcacgtctccttacagagtttg

SEQ ID NO: 402698 - DNA, 99 bp, Homo sapiens
gtggatttattaacacctcttgccactcagctgacatatgaaggactcattgatgaaatttatggcattcagaacagttctactgtttctaaggcttat

SEQ ID NO: 402699 - DNA, 75 bp, Homo sapiens
tccgtcctctgaggcgacggccgcggctgcacagaaactggcagacctttcacttcgtatccaacaaattgaaac

SEQ ID NO: 402700 - DNA, 80 bp, Homo sapiens
cggctctggtgctcccagaagagctgaagaaacacttaaattctggaaatagcgactcagtatcatggccagcagcctta

SEQ ID NO: 402701 - DNA, 82 bp, Homo sapiens
cccaagactgcgactctaaacggactcatgtactttgtcagggggagctgatcaccttctattactattggaagaagacccc

SEQ ID NO: 402702 - DNA, 75 bp, Homo sapiens
tctccaggtttccctattacaactccctcaaggactgcctttcctggagccaaggcaaagagggaccactgtgct

SEQ ID NO: 402703 - DNA, 100 bp, Homo sapiens
ttgggcagccattgagattatacggaaccagaagcagattgccaacattgaccgtattacaaagaagaattcctttggctaccggaagaaaagggaggag

SEQ ID NO: 402704 - DNA, 100 bp, Homo sapiens
gctggaccagtggatcgagcagctgaacgagtgcaagcagctgtccgagtcccaggtcaagagcctctgcgagaagacctgtcatttactccatccttta

SEQ ID NO: 402705 - DNA, 98 bp, Homo sapiens
tcaggttgtggtagaggcggaggctcaggcagcttgagctgttccatttcctccaagtcaccggcttacagcaaaagaagtgtttgataatgatggaa

SEQ ID NO: 402706 - DNA, 100 bp, Homo sapiens
cagatccgcgaggtggcgtccggcgctgccaggatccgcggggagaccttgggcatcatcggacttggccccccaaagatggcggacaaggtggtcccac

SEQ ID NO: 402707 - DNA, 82 bp, Homo sapiens
tctcggagacacatgaaggtggcattttttggcaggaacgtcaaggtcgtgggaaataaaaggcagttctacacagactgca

SEQ ID NO: 402708 - DNA, 101 bp, Homo sapiens
atcccctcagccttcctgtggcaaatggtccagccaaggagcccagagcgactttggactggagtgttgctgaaaagccaggagtcaaaatgactgagcgc

SEQ ID NO: 402709 - DNA, 101 bp, Homo sapiens
aaagagtcctgcatggtttcaagggacgtaccaggaggatggtgcccagatacgggaatatgaatggattcattcccaaaccaaaagattgaagttcaacg

SEQ ID NO: 402710 - DNA, 75 bp, Homo sapiens
ttcatcgccacgttccactttcctcaccccaaatatgtggacctgtacaaggtggctgaatccacagaggagcct

SEQ ID NO: 402711 - DNA, 100 bp, Homo sapiens
cgacggcgtcctcaggagctgtggggtcccctgctagaagtgggggactcggcgggccgtctccaacctggacatagagagtaagctgagtgtgtactac

SEQ ID NO: 402712 - DNA, 72 bp, Homo sapiens
cgaaagccacccatctacaaacagcatggttaccgcagtgccattggattcttactgcaatgaccgaagtgc

SEQ ID NO: 402713 - DNA, 98 bp, Homo sapiens
acatgctgcagctgtatgccagtatgctgcatgaaaggcgcatcgtgattatctcgagcaaattaagcactatttgtcaaggtttgaaactgacattt

SEQ ID NO: 402714 - DNA, 75 bp, Homo sapiens
ctggagacaaacctcatatgcagacttatgaagttgaccttaataagtaccctgcatgcatatagctgctgattc

SEQ ID NO: 402715 - DNA, 75 bp, Homo sapiens
atcctgaagttccctcacattagccagtgtgaagacctccgaaggaccatagacccaagcaccagccgccgcttc

SEQ ID NO: 402716 - DNA, 98 bp, Homo sapiens
tcgcctgctcatcaacaaggagaaagctggccaggtacaggtttgcagattccgccagcagcacagcaagctctacagatgagtggctctttggcatt

SEQ ID NO: 402717 - DNA, 75 bp, Homo sapiens
ccccggctgcctcctccctgagggtggcattgtgtgtcccagagtgccggagcgagtcccagaagagaggcgagg

SEQ ID NO: 402718 - DNA, 83 bp, Homo sapiens
gttgaatgtgaacgaggcgtgtgggaccatgcatcagaagagctaacaattgctggaatgacctttacaacttttgatcttgg

SEQ ID NO: 402719 - DNA, 75 bp, Homo sapiens
cttcctgtcgctgacggcgactgcgggaggccagattgtgaaaactgctgagagagacttgcaatccagtcacat

SEQ ID NO: 402720 - DNA, 75 bp, Homo sapiens
cggtcgcgaccccgtctgggagtgtaaactggagttgctggtgggcagccctgcttcctgcatggaactggagct

SEQ ID NO: 402721 - DNA, 97 bp, Homo sapiens
tctccagccaaattcaaaaaggataaggagatcatagcagagtacgatactcaggtcaaagatatggaatgtgcagatgtcccactattaactccaa

SEQ ID NO: 402722 - DNA, 90 bp, Homo sapiens
ggaaggggaccctgaaagaatacgagatcctcgttcctagctgcctgccagcgtcctcggcccggccctgaggatggacccaggagatcc

SEQ ID NO: 402723 - DNA, 100 bp, Homo sapiens
ggttttatgagtgggaaccatttgcagaaggaatggtggaaagcagcagacataattggagtgggttggataagcaaagtgatattcaaaatttaaatga

SEQ ID NO: 402724 - DNA, 50 bp, Homo sapiens
tcctcccttcgctcgcaccatgggtaacaagatgctcaactatagtgctc

SEQ ID NO: 402725 - DNA, 83 bp, Homo sapiens
accacccctatccagacggctgcccttcaagtaccacaatctgcacatcgtgctgccacacgaggcttcattcgttatggctg

SEQ ID NO: 402726 - DNA, 75 bp, Homo sapiens
ggaagcccctgcgcccgcgccatgacatagggcctgattacattccaacagaggaagaaaggagagtcttcgcag

SEQ ID NO: 402727 - DNA, 100 bp, Homo sapiens
tgtaaaagcataattgaatttgtttcacccccgtggattccagtgggcccgacagcgcaacagggttctgatcccactgcattctccgtccttacccaag

SEQ ID NO: 402728 - DNA, 100 bp, Homo sapiens
gaacttctttatccttcgaaggaagcctgtggagcatgattttgaagtcagaggagatgtggtcaatggaagaaaccaccaaggtccaaagcgagcaaga

SEQ ID NO: 402729 - DNA, 135 bp, Homo sapiens
ccaacttcaaagccacagctgttatgccagatggtcagtttaaagatatcagcctgtctgactacaaagtgctacagttgaaactccagcagcgccggacccgggaagaactggtgagccaagggatcatgccgc

SEQ ID NO: 402730 - DNA, 75 bp, Homo sapiens
cactcatttgcaacttatatcgccagtccagcagctaaggatattttgtgcagcagccaagagtttgttgaagaa

SEQ ID NO: 402731 - DNA, 75 bp, Homo sapiens
cacagtgggggtgtgcaaacccgagagaactgggaaaagcacaatagtgaggctattatttcgcttctatgagcc

SEQ ID NO: 402732 - DNA, 98 bp, Homo sapiens
aaaagtaaaattggcaagacatatccttacaggcagagagagcagcccgacggccatggaggctgaagagacgatggaatgccttcaggagttccctg

SEQ ID NO: 402733 - DNA, 50 bp, Homo sapiens
agtcaacaagatgaccgcaatccccttacgagaatccaggacttgaatcg

SEQ ID NO: 402734 - DNA, 100 bp, Homo sapiens
ctctgacagcgaagactccgaaacagtgttttaactcaaatgggtgatgaaaaggactcttggaaagtgaaaactttagatgaaattcttcaggaaaaga

SEQ ID NO: 402735 - DNA, 74 bp, Homo sapiens
tttaatgaccttgttatcagtgatggctcttctctggaagatcttgtggtggataagattgtggaccagctgca

SEQ ID NO: 402736 - DNA, 74 bp, Homo sapiens
cggaagggcctgatagccgccatctgtgcaggtcctgttccctcttctcccagccaggagcctcccaccaagcg

SEQ ID NO: 402737 - DNA, 101 bp, Homo sapiens
gggaagctttcaacagactggacttctcaactgccattctggattccagaagatttaactacgtggtccgggtggatctccttacgtagcagccaaaataa

SEQ ID NO: 402738 - DNA, 100 bp, Homo sapiens
gtgctccaggtggcagcctggacttagagaaagccaggatacatcagcaggtgctggagaatctggtaaaagcaccattgtgaagcagatgaggatcctg

SEQ ID NO: 402739 - DNA, 100 bp, Homo sapiens
aaatggcacttcattggccacctacagaaacaaaatgtcaacaaattgatggcctacagacctggtacctggatttttgcccgagatgattcctaccacc

SEQ ID NO: 402740 - DNA, 83 bp, Homo sapiens
gagacgtcggttgagcggcggcgaacatgcgcttttgacacattggagaagacagcgacagctgtggcgcactgcaaacgcgg

SEQ ID NO: 402741 - DNA, 97 bp, Homo sapiens
caggtccgacccgcgaacccctctgggatccccgccgctctgtctacaacccgagtgtaaggcaaacattggtgggcaccgatcttcctgttcattc

SEQ ID NO: 402742 - DNA, 82 bp, Homo sapiens
acccagcccccaaggattctgggggaggcctcaggtgggaggaggagctcgccaagcgcatgaaccttcagaccatggtgga

SEQ ID NO: 402743 - DNA, 76 bp, Homo sapiens
aggaggtggagttgctgcccttccggagtccgccccgtgaggagaatggagctcttgtccctggcaaagcgaaagc

SEQ ID NO: 402744 - DNA, 100 bp, Homo sapiens
ctccttcctgctgcggttcctgcgcgcccgggatttcgatctggacctggcctggcggtgtgttttatggaccatgtgctgctatgtatgcctgaagaag

SEQ ID NO: 402745 - DNA, 100 bp, Homo sapiens
gcgtgtggtccttgcgccgctgacttctccactggttcctgggcaccgaaagaatacagtcgctttgaatcgaagatacatgacttacgagaacaaatga

SEQ ID NO: 402746 - DNA, 95 bp, Homo sapiens
aagctaaggccgcgttggggtgagaccctcacttcatccgtattggtaaaggttttcaaggtgtcatgaaaagatggggatttaaaggccagcct

SEQ ID NO: 402747 - DNA, 83 bp, Homo sapiens
gtcacctaaagttaggcggcactccagccccagctcgatatgatgcttcctggtgtgtttagtggttggtgccattccaattt

SEQ ID NO: 402748 - DNA, 50 bp, Homo sapiens
aggatcctgtagccataaagattgcagctgatgaacttattagtcctaaa

SEQ ID NO: 402749 - DNA, 74 bp, Homo sapiens
aaagctgcacggcagtctgtttatgagggcattttgtcagtgatgctgatctttgccttcttccaggaacttgt

SEQ ID NO: 402750 - DNA, 82 bp, Homo sapiens
ggacgagtaccaggtggcccagctctacatgatccaggctttatcctgtggataaacgcagagtgaacgagtttggggagtc

SEQ ID NO: 402751 - DNA, 50 bp, Homo sapiens
cgcagtggtcgcttcttctccttgaattcaggaagaagaatgggataaat

SEQ ID NO: 402752 - DNA, 99 bp, Homo sapiens
aagcacaccctgtcctatgtggacgttggcactgggaaggctcttcttcgtggggtcccgggaaggccacctgccctccatcctctccatgatccaccc

SEQ ID NO: 402753 - DNA, 50 bp, Homo sapiens
atgaaatgctgactaaggaacaagataacaacgaacttgatgcaagtgat

SEQ ID NO: 402754 - DNA, 100 bp, Homo sapiens
agagcaccgaaccccagatgtgctcaagaaatgccagcagtgtgaaatggcctttccccgggtcaagccagcacctgatgaaacttccttcagtgaggcc

SEQ ID NO: 402755 - DNA, 97 bp, Homo sapiens
ggaaggtggggggcggcggcactgccggcggggaccgctgggaaggcgaggacgaggacgaggacgtcaaggcagtgtgtgaagaaaccctgaaggt

SEQ ID NO: 402756 - DNA, 122 bp, Homo sapiens
agcagatgacaaaacttcaagccaaacatcaagcagaatgtgatttgcttgaagatatgaggagtgcgctacagccagcagggaaacaatgagatcacttcctcctcaacaatcagtcacca

SEQ ID NO: 402757 - DNA, 100 bp, Homo sapiens
aagtaatgaaaagagacatgaagaattggtatttcaaatgaccaccatgttgcaaaaggttttgctgatttgggaaaataaagactatggatcaactagg

SEQ ID NO: 402758 - DNA, 75 bp, Homo sapiens
ggaagctcctgtacctcttagatgggatgctggatgggcagacccccccaagacacatatgacccaccaccccat

SEQ ID NO: 402759 - DNA, 98 bp, Homo sapiens
tttcagtcactggtttgcagagtccaggccgctttgtagttcagaatgtttctgcacagaaagatggagaaaaatctagagtaaaagtcaaagtgcga

SEQ ID NO: 402760 - DNA, 75 bp, Homo sapiens
ctggggactaagcaacaggtgtttcaaggaactaattctctggtggatggcattcccaatgacagtagtgatagt

SEQ ID NO: 402761 - DNA, 87 bp, Homo sapiens
attggacccagctattgctgcagcatttgccaaggagacatccctcttaggcaaactaggcgtggcaactgctggctgcgtgaatga

SEQ ID NO: 402762 - DNA, 51 bp, Homo sapiens
tggaaggtcacaggagttcagcctcagaatttggagttgtctgcttaatat

SEQ ID NO: 402763 - DNA, 75 bp, Homo sapiens
cgctttcggcgcgggcccgggccccgagcgcccgaacaggaaaatgttggggcttttcaggaagcataataagat

SEQ ID NO: 402764 - DNA, 75 bp, Homo sapiens
ttcttaacccctagaccggtttttagtccattgactatgcagcctaatgctcccatggctattgaagaacaagtg

SEQ ID NO: 402765 - DNA, 100 bp, Homo sapiens
tgtgagttttgtggacctggaacaatttaaccagcaactttccaccaccattcaagaggagttctatagtgatcaccagcagcttgcaaaacttatccag

SEQ ID NO: 402766 - DNA, 75 bp, Homo sapiens
gctcatcatgctcaagtcagagggcttttactcctacctgtgtaccgagccagggtacaaacattgctgctggga

SEQ ID NO: 402767 - DNA, 75 bp, Homo sapiens
gtgcatcccctggcagaggctcctgctcacagttgatatgagactgaaacccctgggttgtggagggaaattggc

SEQ ID NO: 402768 - DNA, 90 bp, Homo sapiens
cgccgcttctagaccctactgcggtctcggatattgccgggcacggagtgtgaatgtgaagacacaagctctttctggatacagagacca

SEQ ID NO: 402769 - DNA, 82 bp, Homo sapiens
caagccgcggagcctccagacgggaacgcggcaggcaaagatggcaaagagcgcttgggcggctcagtgctggggcagatcc

SEQ ID NO: 402770 - DNA, 92 bp, Homo sapiens
gatccgttggtgcatgaaagtcttctaaccattccaaaatctctttcagttgactaatctccttcagaatcaagcagtgaaaggaaaagttg

SEQ ID NO: 402771 - DNA, 50 bp, Homo sapiens
gttggactcatagtcactgccagaaagcttgtctccaatgttctcatttt

SEQ ID NO: 402772 - DNA, 51 bp, Homo sapiens
cgctgccagtttgcacagcagcagattccttgacaaggatatcctagcggc

SEQ ID NO: 402773 - DNA, 82 bp, Homo sapiens
tgaagcgcgagcgcgacgagtataagcggaggcagcttcggtcacctctctgtccaacctggcatgcatgcacatggtccgc

SEQ ID NO: 402774 - DNA, 75 bp, Homo sapiens
tccagaaaagctgccttatatgcgaagaattttaaatcgtttctccaaagacattggacacttggatgatttgct

SEQ ID NO: 402775 - DNA, 90 bp, Homo sapiens
gtaagctccgccgccccctaaagcggaaccggatcaccgagggcatttacggcaggactgtgaaggccttattgttcgctctgccaccaa

SEQ ID NO: 402776 - DNA, 98 bp, Homo sapiens
aaagctgtcctaggccaaccagagattcatctttcatgcagtgacatgttgataaaaaatgatggatgaaaactttgacctgtcaaaaagactgagtg

SEQ ID NO: 402777 - DNA, 90 bp, Homo sapiens
cgggggaagcagcacgggatcccagcctcaggcctgcacggacggtgttggttggggtactactgagcgagtgtgcttgatccagggaac

SEQ ID NO: 402778 - DNA, 75 bp, Homo sapiens
ttctctctcgtcctcgctgctgtacttcgtctatgtggcgcccggcatagccatcatcgtctacagactgccgtg

SEQ ID NO: 402779 - DNA, 98 bp, Homo sapiens
gatggaagatattgtggatttggcaaagaaagttgctggcaccggtgaatccaagtgtcctctgatggtcaaagttctagatgctgtccgaggcagtc

SEQ ID NO: 402780 - DNA, 75 bp, Homo sapiens
agatcctctggttccggggcctgaaccgtatccagactcaggtcggatcatgctaaaaggagataatattactct

SEQ ID NO: 402781 - DNA, 74 bp, Homo sapiens
gctcatgtctcattaatcacaccaacaaaaagatcctgtggtacaggatctcgaggacctggaagaagcagagg

SEQ ID NO: 402782 - DNA, 100 bp, Homo sapiens
ggacccggcaagccagcagaagggtcccgcagcccccggaagccaatagactccctcagggactctcggtccctcagctactcgcctgtggagcgtcgcc

SEQ ID NO: 402783 - DNA, 82 bp, Homo sapiens
ggccaacgagctcaacgccaggcgccgctcctttacagttgcagatctgatctcttctgaacacctcatcgtgtctccatcc

SEQ ID NO: 402784 - DNA, 75 bp, Homo sapiens
agaccgggaaccactatgccatgaagatcctcgacaaacagaaggatgtggatgaagcttacatgaacaaggtag

SEQ ID NO: 402785 - DNA, 75 bp, Homo sapiens
tgaaaatcgctgctaaacattaccagagtaaaggtgctagtgctggaagagaatggactgaacaggagacccttc

SEQ ID NO: 402786 - DNA, 50 bp, Homo sapiens
aattcccataccaaccacagaggtttattgttggccaaaaccaggctttg

SEQ ID NO: 402787 - DNA, 102 bp, Homo sapiens
cctgttaaacaagaaccagagactgtacctactccagcactattaaatgtgagggatgcctggtgtgcaggagtatatacaacagcctattctcaatggtct

SEQ ID NO: 402788 - DNA, 100 bp, Homo sapiens
tctcaaactttactttgcctcatttgaggagtgggaacaggcttcggcgaacacaaaggttttggaggtgccctgggttaccttttgggtgctatagact

SEQ ID NO: 402789 - DNA, 75 bp, Homo sapiens
cctgctcggggctctgttcccaggtcttgcaagagcaaaatccgtccctagccacacatactccaacgaagtggt

SEQ ID NO: 402790 - DNA, 96 bp, Homo sapiens
ctgtggcggcgcccaattacaggcacccacctttaccagtaccgaggaggcttcgacggcttccagggctgctgtcccgatctgtgctctgaggcc

SEQ ID NO: 402791 - DNA, 77 bp, Homo sapiens
ttagaagtggtgatgcaagaagtttctaggaaaggccggacaccagtacaggagagggtgaccttctgtcccacggt

SEQ ID NO: 402792 - DNA, 90 bp, Homo sapiens
gaggcgcgggaggtgttcgagaacgaccccgagacgaccttcacggcatggtgcaactcccacctgcggaaggcaggcacacagatcgag

SEQ ID NO: 402793 - DNA, 90 bp, Homo sapiens
cacgcccaatatgtgggcccctatcggctggagaagacgctgggcaaaggacagacagcttcggaaccaaaaagaagcttcccagagccg

SEQ ID NO: 402794 - DNA, 74 bp, Homo sapiens
ggtaggaattggaaagcatctgtgtggtatggcaacagacggagtctcgctttgtcgcccaggctggagtgcag

SEQ ID NO: 402795 - DNA, 60 bp, Homo sapiens
gatgctttggatgttgccaacaaacagcctcccgcgacgatgcccctcaacgttagcttc

SEQ ID NO: 402796 - DNA, 75 bp, Homo sapiens
ctcctgggggccggggctccgagaagctatgtggaagcagtgacctgaatgcttctatgacatctcaacattttg

SEQ ID NO: 402797 - DNA, 100 bp, Homo sapiens
gtggagcccatggaatcggtcctggaggacaggagcctgccagatgtgtctgctacagactttgagaaggttgatctgacccagttcaagtggatccaca

SEQ ID NO: 402798 - DNA, 100 bp, Homo sapiens
cttccctatccccgacgaccggatcctgaggaggcagctgcggtggcagctgctgagttctcggtgaaggccctcgggaccaaggatcacgtcatgactc

SEQ ID NO: 402799 - DNA, 102 bp, Homo sapiens
aacagctatctcgggagaaacaacaactgctacatctgttggaggagccaactagcatggaagtgcaggttccagcaacagatagaaatgctttaagttcac

SEQ ID NO: 402800 - DNA, 95 bp, Homo sapiens
cggagcccgggacgcgcgtacgccctgctgcttctcctgcaataggagtgaaacatccacatctgataacacagaaacttaccaagagaatacaa

SEQ ID NO: 402801 - DNA, 100 bp, Homo sapiens
acacgatgctgggaggcctggggaagctggctgccgaaggcctggcccaccgcaccgagaaggccaccgagggagccaagacagggtttcgccgtgttgg

SEQ ID NO: 402802 - DNA, 88 bp, Homo sapiens
agatcaaatggcacttcattggccacctacagaaacaaaatgtcaacaaattgatggggttattttggagctgttggagcactccttg

SEQ ID NO: 402803 - DNA, 74 bp, Homo sapiens
aatgtcggggatggacctccagatttccttactgggtgcttcaaggatgaccgcatcgtcttctggacttggat

SEQ ID NO: 402804 - DNA, 100 bp, Homo sapiens
cggggacaatgaggaggagacggagcacgccaaagggtcttgggcgtctttggtactggcttttttaggggtctgcctggggattacccttgctgtggat

SEQ ID NO: 402805 - DNA, 83 bp, Homo sapiens
ctgaagagcgacaagccgctggcagccgcggatctcaccgccgctcagggtgcactacatcctccaggaggtggtgatgggtg

SEQ ID NO: 402806 - DNA, 87 bp, Homo sapiens
ctcatcaaggtgaacgggcggcccctggagatgattgagccgcgcacgctacagtacaagatttggaacattgctaccaataaactg

SEQ ID NO: 402807 - DNA, 100 bp, Homo sapiens
tgaggctgatgcagaggagaggggtcctgaggagaactatagcaggtgaatgaaaactttgccattgatttgatagcagagcagcccgtgagcgaggtgg

SEQ ID NO: 402808 - DNA, 100 bp, Homo sapiens
atcaggtctgccggcccctgttttagctgaaatatggagccttcacgtaaatgggtccagtcatgcctcccagtaagaagccagaaagctcaggaattag

SEQ ID NO: 402809 - DNA, 75 bp, Homo sapiens
cgcagctgcgatggccgtggccgtggggagaccgtctataagaccatcatcatgtggaaactgaccagggatgag

SEQ ID NO: 402810 - DNA, 96 bp, Homo sapiens
gtgcaacaaccactggttctccaggaaccgaaaaggcgaggagtatagtacggcaaaaaactgtcgaaacaagtgttgaaaatgttaaaggctgtg

SEQ ID NO: 402811 - DNA, 100 bp, Homo sapiens
gctggattgctgcaaggctgagggacgagaacgaggggatggtggatccaggagagaagattagtgccacactgaaaagagaatttggtgaggaagctct

SEQ ID NO: 402812 - DNA, 82 bp, Homo sapiens
tcttgacaaccaagggcctccgtctggatttccaaggaagaatttcctctgaagcaccggattatatctgtccaagatgcga

SEQ ID NO: 402813 - DNA, 75 bp, Homo sapiens
ctgggatcccggccaccagcaattgtccggtttggttttcctaaacaaatcctttcacagggaccgacggcactt

SEQ ID NO: 402814 - DNA, 101 bp, Homo sapiens
aaacagataaagtccatagatgcaggacctggtttgagaaatttctgtggttcattagctcagagaactatctaattataggtggacgagatcagcaacag

SEQ ID NO: 402815 - DNA, 82 bp, Homo sapiens
cgacagtggcggcggcgccatggcagggcttgcagtgagggagactctgatgtggactcggagctggaggaccgtgttgacg

SEQ ID NO: 402816 - DNA, 75 bp, Homo sapiens
gcgggcccggcggcggcggcagcggggtccgggtccggagcgccacaatatctggggaagatgaagtagagtgct

SEQ ID NO: 402817 - DNA, 101 bp, Homo sapiens
ttaggcctgtaagtgagacatgcacagacagatctggcatctccactggacactggtcaggaggagatgaccgccgggttctgctatggcacatggaacaa

SEQ ID NO: 402818 - DNA, 75 bp, Homo sapiens
tgtttgacatcatccctccccagaacccagcgggtgccgcttctccacccgaggcttccacctccaacgagccat

SEQ ID NO: 402819 - DNA, 80 bp, Homo sapiens
ctgccgtccatgcggaagatcgtcgccacctggatgctggaggtctcagcggcggtggcagccgaggtgcaggatgcaag

SEQ ID NO: 402820 - DNA, 50 bp, Homo sapiens
tgcgcgtccgttactacagtgacaccagctttaccgatttgttacaactc

SEQ ID NO: 402821 - DNA, 100 bp, Homo sapiens
gggaccgcaagctgagcgagctgtcagagcccggggacggcgaggccctcatgtaccacacgaagctccaccatgaggcgaggtggatggaggaagcgag

SEQ ID NO: 402822 - DNA, 75 bp, Homo sapiens
cacacgggcgagaagccctacgagtgcaacatctgcaaggtccgcttcaccagggttgtgagtcccggcccagcc

SEQ ID NO: 402823 - DNA, 83 bp, Homo sapiens
cccttgcctgggagaacagttcaggagacagatggccccaagagcccagatccagggggcaaatatggccaaacagattggag

SEQ ID NO: 402824 - DNA, 82 bp, Homo sapiens
ttactgaccacatacattgttcgggaaaacagcttggatcagggaggagggccgctgctccagcagtgacgatgacaccgac

SEQ ID NO: 402825 - DNA, 100 bp, Homo sapiens
ctggaggtgtccatcctgctattgctctgagggagtatcgaaagagaccaagaagcgtcagtgtaaagttctttttgagtacattccacaaaatgaggat

SEQ ID NO: 402826 - DNA, 82 bp, Homo sapiens
ggagcactttgaggacatggcctccgacgaggacatagagcgcctgctcgctgtgcccccgggttatgacgacccccaataa

SEQ ID NO: 402827 - DNA, 83 bp, Homo sapiens
cgacgtcttgcctgtgtcccacttgttcgcggcctataggtcgcaatggaagaagagatcgccgcgctggtcattgacaatgg

SEQ ID NO: 402828 - DNA, 100 bp, Homo sapiens
ctgactcggactgggacaatgacagcagctcggcccgcctctttgagaggtctcgcattaaggctctggcaggctcacagaacatttcctgcctgttgct

SEQ ID NO: 402829 - DNA, 104 bp, Homo sapiens
cagaggcccgtcatctggcggatgaggctaagaatcttgttgactatagtcaatggggccaatggagccaagtgtatggaaacccacaacagtatggacagtat

SEQ ID NO: 402830 - DNA, 100 bp, Homo sapiens
ccgagccgtcaagcaagaatctgtgggagcagatctgcaaggctgatgcttttttcaaagccgctataagccttgttccggaagttccaaagatgattaa

SEQ ID NO: 402831 - DNA, 113 bp, Homo sapiens
ccgcgtcccgctcgctgggagagaggtacctctccttttccctctccctttccctaagacacgatgaggcgagtggtacgacagagcaagtttcggcatgtatttgggcaagc

SEQ ID NO: 402832 - DNA, 99 bp, Homo sapiens
gctgctccagctcctcagtcaacagctacagccaattttgctaactttgcacatttcaacagtcatgcagacatatctgaagagatggattaagaatgc

SEQ ID NO: 402833 - DNA, 73 bp, Homo sapiens
gagggaagaaacacagttcacaggacattccgtatctaagccagatttaatcaccttattggagcaaggaaaa

SEQ ID NO: 402834 - DNA, 82 bp, Homo sapiens
ttgatcccaagttgtcgacgaccgacagggtggtgaaaggtcaaaatgcagatcttcgtgaaaacccttaccggcaagacca

SEQ ID NO: 402835 - DNA, 100 bp, Homo sapiens
ggcctccccttggattcagacgccgattcgcccagaatctgtctatgatcttctcccaaaggagttacagttacctccatctagagaaacatctgtagca

SEQ ID NO: 402836 - DNA, 100 bp, Homo sapiens
ggtcgctgctgtgatgtggaggaagaagagctcaggttctgccctgatgtttcctggaataatgctgaggactgcctttcgggtagccgccctattcagt

SEQ ID NO: 402837 - DNA, 98 bp, Homo sapiens
ccggagctgggtctggagacgccgtggcagcctgaacggagtgtgcgacggattgggagatgcctgaggaagtgcaccatggagaggaggaggtggag

SEQ ID NO: 402838 - DNA, 132 bp, Homo sapiens
cagctcatgagagtccacaaaacaatgccttcaagtgccaagaaacagtgcgacttcaaccaaggagccgcaaagacagcctggaaagtgacagctccacggccatcattccccatgagctgattcgcacgc

SEQ ID NO: 402839 - DNA, 100 bp, Homo sapiens
tgtacatggccgccgtcctggaatacctgacagatgggcttccccaaggatttattgacattgctacttgagtgtgaacagttacctggaaatactgatg

SEQ ID NO: 402840 - DNA, 75 bp, Homo sapiens
caaaccgagatgggcgagactacttcatcaaagccccagagtgtgccacttctggccagatccccaagcaccaac

SEQ ID NO: 402841 - DNA, 83 bp, Homo sapiens
caaagatacgaatctcttaaggggggggatatgagactttctactcggaatatcctgagtgttgcgtggatgtaaaacccatt

SEQ ID NO: 402842 - DNA, 74 bp, Homo sapiens
aaagctataccagacgtttaaggatcggggtatactggatacactcaagttcattcggctcctaaagaagtagc

SEQ ID NO: 402843 - DNA, 100 bp, Homo sapiens
ctgggtcttatataataaatacattgtatgacagcgtgtacctgactttatacaatatttgttttacttccctacctattctgatatatagtcttttgga

SEQ ID NO: 402844 - DNA, 100 bp, Homo sapiens
ctctttggacatctaactaagacactaaaggagactcagccatggtcctctcccaaaggttctgaaggataccttgcagccacctatccaactgtcggcc

SEQ ID NO: 402845 - DNA, 96 bp, Homo sapiens
ggcgagatcctggcgagcctgcaggatggcgcggccgagtccccgtacggccacccggcgggtttatggctacaaatgatttgatgacggaactgc

SEQ ID NO: 402846 - DNA, 100 bp, Homo sapiens
ctgctgaggaggagccgaagcccaaaaagctgaaggtggaggcgccgcaagcgctgagatttaatccagagactgacttcactatagaacccacagttgt

SEQ ID NO: 402847 - DNA, 100 bp, Homo sapiens
attagatcatctggtgattcagcgcatggacaccactggccggacgatcctggaaaacaactcaggaaggtccaagaagaaggagagacgaccatcttgc

SEQ ID NO: 402848 - DNA, 75 bp, Homo sapiens
gccttgatgacggccatcttcccccgataagagtgttgctgttgatcatctttgcctgggaagttgaatgataaa

SEQ ID NO: 402849 - DNA, 50 bp, Homo sapiens
ggcgagtgtccgtgccatcaacgggactagggacggggtttcaccgtgtt

SEQ ID NO: 402850 - DNA, 50 bp, Homo sapiens
cctacagatcctgacttaccaccagagtgtgaacatggctacgcctcttc

SEQ ID NO: 402851 - DNA, 100 bp, Homo sapiens
tggttctatcggtggacagtgggacattctgaagggaggcaaggaggcggactgagcgctcccaattgggataccggggagaccacgacgctgcctcctg

SEQ ID NO: 402852 - DNA, 90 bp, Homo sapiens
cagcacagccagcaccgcacgccctgcaagggaggtaaaataccatgaagattttgaaaaaacaaaggggagaggctttactcccgtcgt

SEQ ID NO: 402853 - DNA, 82 bp, Homo sapiens
gacaagccgctggcagccgcggatctcaccgccgctcaggaattcagcggggtgccaagtcgttttctgtgtgggttgagag

SEQ ID NO: 402854 - DNA, 98 bp, Homo sapiens
gttctgtcccaagaagaactctgaagatgattcagccttctgcatctggatctcttgttggaagagaaaatgaggaaactcttatcactactattgat

SEQ ID NO: 402855 - DNA, 100 bp, Homo sapiens
gatattagcctaacaagatggaagcaggtttaaaattttacataagaagttacctttttcagggggattcccgaagtcttccgttttctgagaatgtgag

SEQ ID NO: 402856 - DNA, 100 bp, Homo sapiens
gctgtggacggcagccggcactccaactggaccgtcaccaacacccgcttctctgtggatgaaggtatctctcctaaatgtgtgatcaaggaattaccac

SEQ ID NO: 402857 - DNA, 83 bp, Homo sapiens
cgcttccccacgtcgcttgggggccacggcgcggacgccatgaaatatggctacacacacctttctgcaggagagctgcttcg

SEQ ID NO: 402858 - DNA, 100 bp, Homo sapiens
gaagatctgggtgcccgtggaccacaggccctcgttgcccagattgtactaatggtcacttgatgtgcgctggctgttttatccacctactagcagatgc

SEQ ID NO: 402859 - DNA, 100 bp, Homo sapiens
ttcagcaggcttttgcttcttcctgcaccatttccagcaacggccctgggcagaggagagagagctacaggccaaatttgagcaccttaagagacttcac

SEQ ID NO: 402860 - DNA, 100 bp, Homo sapiens
aaacatgcagcaaccactattttcttcctgcccctcgttgatgagagcattcgaagtgacctcagcagggcatccaggaaaatgtttataggaggcctta

SEQ ID NO: 402861 - DNA, 100 bp, Homo sapiens
gacgaggagctgagcaagctgggcctgctggacaaccactcctcggagttcaagcccaaccgcttgcttatcctccacggcttcctggacgaaaacgtgc

SEQ ID NO: 402862 - DNA, 95 bp, Homo sapiens
acgccgagggcgggggagagcgcgccgctgctcccggaccgggccgcgcacgccgcctcaggttatcaatactctggctgaccatcatcatcgtg

SEQ ID NO: 402863 - DNA, 76 bp, Homo sapiens
cccagatgtgaggaaagtaaaagttgttgtcaacttgctggctgaagatgcaatcaaggccgccctggctgattac

SEQ ID NO: 402864 - DNA, 50 bp, Homo sapiens
ctcctgagtagctgggattacagataggagcatgctgctatgtggaatgt

SEQ ID NO: 402865 - DNA, 74 bp, Homo sapiens
attgagcagcagattggaaaagtgaatggtgtgcatcacattaaggacgtcttcctcatctgcttctccctcgt

SEQ ID NO: 402866 - DNA, 75 bp, Homo sapiens
acgaggggctggaacacctcgccaaagcagagaaataggcgtctctggccgagcctctttttgtggaaaacgaca

SEQ ID NO: 402867 - DNA, 96 bp, Homo sapiens
catgtctgtacctactgatggtgctgtaaccacctcacagattccagcttcggaacaagagaccctgccaagccaaagccatgtactcctgtaaag

SEQ ID NO: 402868 - DNA, 116 bp, Homo sapiens
ctatcttctacagcagtggttgttgctgaacttttgaagataatggcctgcattttattggtctacaaagacagcagtttcagcagagcagctttaccatttgggctggtgaggcg

SEQ ID NO: 402869 - DNA, 85 bp, Homo sapiens
ttgtcctggcattgcatccacaggaggggcaggaaattctttgaaggataactgggatgacgatgatgatgaaaaaaaagaggaa

SEQ ID NO: 402870 - DNA, 75 bp, Homo sapiens
ccatccaccagcactcctttaaagtgggcactgcaaaagtgtctattatcctcccagtccacaacgctgaaccgt

SEQ ID NO: 402871 - DNA, 73 bp, Homo sapiens
cttgcgctcggggcctgagaggggcggcggcggggtcaggggccggtgttatgatgctacaacttctggaaaa

SEQ ID NO: 402872 - DNA, 98 bp, Homo sapiens
tgtgctcccctcccccatcaaaggaaaggggaaaatgtctcagtcgaaaggattggcacagctgcactggccgttcaggttgtgggcagtaactggcc

SEQ ID NO: 402873 - DNA, 96 bp, Homo sapiens
ctcgcttcctgctcgacctgcggcagtacttgggttcttgatagtccacaatgggtgaaccacagcaagtgagtgcacttccaccacctccaatgc

SEQ ID NO: 402874 - DNA, 100 bp, Homo sapiens
cggagatggtgcagaagatggaggagagtttggagcctcttccatcaagtggacctgattttggaggattaggagaagaagctgaatttgttgaagttga

SEQ ID NO: 402875 - DNA, 100 bp, Homo sapiens
gatccggctcctccagctaccggcccaaggccatctacctggacatcgatggacgcattcagaaggaagctcttcgtgggcggtcttgactggagcacga

SEQ ID NO: 402876 - DNA, 82 bp, Homo sapiens
tccccagagcgtcttgatccttttgcagatgatcctgtgtatcgatgaggccacagcaagtgtggaccagaagacagaccag

SEQ ID NO: 402877 - DNA, 74 bp, Homo sapiens
cagccctgtgtgacaccaagataagtaacggacctgatttcccatcgccttctgtccccctaaaggcttcagat

SEQ ID NO: 402878 - DNA, 83 bp, Homo sapiens
cctccagggctgagtcacagggaagaaagcgatttcctccgcctcttccaaagcgttgactagataacgaaggacaatgcata

SEQ ID NO: 402879 - DNA, 50 bp, Homo sapiens
ctagcactcatccgcttccgggtcaagggaatgactctactaatgatggg

SEQ ID NO: 402880 - DNA, 100 bp, Homo sapiens
gagacgcacagtagaaccgatctcagccttgctgatcatctcgtacagcagcagaaaatgaccatgttacagacactggtgaccttcaaggatgtatttg

SEQ ID NO: 402881 - DNA, 100 bp, Homo sapiens
ctgaggagtatgactacatgaaagatatagtagtacaggaaacaaggtatcgccagagatacttggacttgatcctgaatgactttgtgaggcagaaatt

SEQ ID NO: 402882 - DNA, 98 bp, Homo sapiens
ggcccacgcagctggatgtaccgcatgtgatcactctgggactcgtggggctgcagcaccggaaaatgttggggcttttcaggaagcataataagatt

SEQ ID NO: 402883 - DNA, 75 bp, Homo sapiens
ctacttggaatttctgcagaagtttgagaggaacttcattgctcaggttaatcagctgtgttcagcgaatactta

SEQ ID NO: 402884 - DNA, 88 bp, Homo sapiens
aaagaagagttaaatgccctcaagtcgacaggggatgggaccctagagcatagcggcctgaccacaggggtggccttcgggcatcacg

SEQ ID NO: 402885 - DNA, 75 bp, Homo sapiens
ctggcccagggcatactggatgcaggactggaaggatcaccagcacatatgcggccagtcagcagctgtcaccgt

SEQ ID NO: 402886 - DNA, 74 bp, Homo sapiens
ttcctggcctatggcgagaaaggctatgggcaataaaccttggatttccctgcccaggggaaagggcattcgac

SEQ ID NO: 402887 - DNA, 79 bp, Homo sapiens
tcaagataaagtgattttttgcctttgttgattaactggacaaattcagggcagaaaaggcctctcaaacactcacctc

SEQ ID NO: 402888 - DNA, 50 bp, Homo sapiens
aggggccactcagagtcgcccgagaagcccgtggtcgagccagagctgat

SEQ ID NO: 402889 - DNA, 75 bp, Homo sapiens
tgggcttgacagctgcaaggagttactgaagttttgcgtttggctccctaatatctgctgtcgatccagtggcca

SEQ ID NO: 402890 - DNA, 75 bp, Homo sapiens
ggagaagccgcccaaagaactgcaataccaagtttccaggcccgaagagcatcccagactattgggactcctctg

SEQ ID NO: 402891 - DNA, 74 bp, Homo sapiens
gcctataaaatgcttcaagtagtcctgtgctcaacattgcttatcggtcttgttgcagtaggagaaagagcaca

SEQ ID NO: 402892 - DNA, 100 bp, Homo sapiens
tggcctcaatatgtgccgccagtgtttccgtcagtacgcgaaggatatcggtttcattaaggttccttttttgccaggagattcagaccttgatcagcta

SEQ ID NO: 402893 - DNA, 101 bp, Homo sapiens
gggatctttccggatcaatccagatggcagccagtcagtggtggagcgccctcacaaagccaatgctgaggagatgaccaagtaccacagcgatgactaca

SEQ ID NO: 402894 - DNA, 98 bp, Homo sapiens
attctggtggggagatgaacccaacctagtgggtgtaatacatcatgaactgcagggaacaccagatgcattttcacaattactcacctgtccatatt

SEQ ID NO: 402895 - DNA, 76 bp, Homo sapiens
cagagagagaggtggacagatctgagagatactgagctcattcttggaatcccagaacaggccttaagtcttctcc

SEQ ID NO: 402896 - DNA, 100 bp, Homo sapiens
ccgaacaccgcgccttcggaagcccgttcggcctggaggagccgcagtgggtcccggacaaggaggttgagaacttgttgcttagtaaccaagggaccat

SEQ ID NO: 402897 - DNA, 50 bp, Homo sapiens
cgttttgaaaatttcatcacctgaggtaagaatgattgatgttggctgat

SEQ ID NO: 402898 - DNA, 74 bp, Homo sapiens
ccccatttctatggtcctcctcacctatggccgctggcaggtcaagctttccgtgtactgggactacatgaagg

SEQ ID NO: 402899 - DNA, 101 bp, Homo sapiens
ctactgcaatctactgcactcgagttggttgaatctggcgatgtggaacccatggatatggagggctgactatatacaccatgttttttcctggcacatca

SEQ ID NO: 402900 - DNA, 75 bp, Homo sapiens
gagagagaagagaggagattgcagcagcgaaccaatcccaagtggtatgtgtgcaacagagagaaattatgcgaa

SEQ ID NO: 402901 - DNA, 80 bp, Homo sapiens
cgacgatctactatgtgatgtcagggcctgcgtgtagccatccctgccattggggctcagtattccatgtttccagcagc

SEQ ID NO: 402902 - DNA, 97 bp, Homo sapiens
cgtcaaggagctggacctctacctggcctacttcgtgcgtgagcgaggccctgggaggagcggggacactgaggacctctctccaaattggcctctc

SEQ ID NO: 402903 - DNA, 96 bp, Homo sapiens
tgattagcaatttaaagatcctctccaaggtctacagccagaagtgtaggagtatttcagaggaatggatgatacatttgagggtatccctgctct

SEQ ID NO: 402904 - DNA, 100 bp, Homo sapiens
tcacagacatgcggaatttgaggtgaaaagaacggaggggagcccgatgacgctgaactagtaaggctcagtaagaggctggtggagaacgcggtgctca

SEQ ID NO: 402905 - DNA, 75 bp, Homo sapiens
ccaagctcatggcctgccactgcgtgcgaagggaaaaggccgaggcatcagcgtgtgaagaccgcaaagacgatc

SEQ ID NO: 402906 - DNA, 73 bp, Homo sapiens
gcataagaccacaaaaagaaggagacttcagaaaggagactgccactctccgcccctacctgagtgccgtgcg

SEQ ID NO: 402907 - DNA, 75 bp, Homo sapiens
ccccgcggccgcaccttcccgccttctcagaccatccttggagaaacacaggaggaggaggatgagattcttcca

SEQ ID NO: 402908 - DNA, 101 bp, Homo sapiens
gcaagcccggctcggcccggccctgctctgttctgcccggaggagccgcccattcacaatgacatcctttcaagaagtcccattgcagacttccaactttg

SEQ ID NO: 402909 - DNA, 83 bp, Homo sapiens
aagcgcttcaaaggaccggacccagagaagaggaaaactctaccggtgcaggagaatggggtactaagagaaaagcacgaagc

SEQ ID NO: 402910 - DNA, 100 bp, Homo sapiens
ccctgctggccacgctggaccagggtcctgtcggcggcaagcgagcagcctgcgcaggtggctggagctgaacagagaggagccggggcctgaggaccag

SEQ ID NO: 402911 - DNA, 82 bp, Homo sapiens
ccaagtccgtgctgtttgtgtgtctggattccccgccactgtatgtctgaagatagcaaatatgttttaatacaaatgttat

SEQ ID NO: 402912 - DNA, 101 bp, Homo sapiens
agaagctggagctcacggagaagaaggcctccgaccttgccttgcgccatggactggcagccagacgagcagggcctgcagcaggtcctgcagctgctcaa

SEQ ID NO: 402913 - DNA, 100 bp, Homo sapiens
gtagttgagagctcggccccaggagccaataacctgcagcctgttcgactggctcctgagagagaattcatcaagtccctgatggcgatcggcaagcggc

SEQ ID NO: 402914 - DNA, 50 bp, Homo sapiens
cagaggtggaggcgctttgaaaggacatgctgggcctgcgccccccactg

SEQ ID NO: 402915 - DNA, 83 bp, Homo sapiens
gacgtcgtgatccagaagtccagagctgagaaggactgcctgtttgcaggtatttaccttgctgtggattgctgactggatgg

SEQ ID NO: 402916 - DNA, 50 bp, Homo sapiens
tttactctaaaggaggtattccttgcagctaatttcttgagatagaggac

SEQ ID NO: 402917 - DNA, 108 bp, Homo sapiens
agcagggccttggaccccgcggcgcccctcggcctcggagcaacgagcgcagcgccggtgggaccagggagattggatctgctctcaccaggatgtgcatgaggcaca

SEQ ID NO: 402918 - DNA, 80 bp, Homo sapiens
gctgtgagctgcctaagaaatcatggcattcacacagcccataaagcaagacaggacccagatgatgtggtaccagttgg

SEQ ID NO: 402919 - DNA, 119 bp, Homo sapiens
caagtttgcagatcgggagcgcaaggtcgccctcaaggccatgatcaaaacctcgggttcatgacgctctcgatattcctgtgcagaaacctggaccacgtctacaaccggctcgctcg

SEQ ID NO: 402920 - DNA, 75 bp, Homo sapiens
tgaggtgagagagtccgggagcccgagcttgagagtgcctggaagagctgggatgtctggttgagtcctatggca

SEQ ID NO: 402921 - DNA, 100 bp, Homo sapiens
ctgttgcagcaaggagaagatccctgggaggtggagaaagacagttctggtgtctcctctctagactggatgactatgcctgccagtaagaaatctactg

SEQ ID NO: 402922 - DNA, 98 bp, Homo sapiens
ggcgagatctgcgtcaacgtgctcaagagggactggacggctgagctgggcatccgacacgtactgctgctggttgtcttcttgcctgccctgtgtcg

SEQ ID NO: 402923 - DNA, 98 bp, Homo sapiens
caccatcaaaatggaatgtaaccctagccaggtgaatggctcaaggaatactcccccagttgcaagaggcgcaggaccgtggaagacttcaacaaatt

SEQ ID NO: 402924 - DNA, 100 bp, Homo sapiens
catgctgagatggagctgcgccgaggccagatcctctggttccggggcctgaaccgtatccagactcagggaccactgacatttatggatgtggccatag

SEQ ID NO: 402925 - DNA, 96 bp, Homo sapiens
tgaagtgagaagggggctgggggtcgcgctcgctagcgggcgcggggggtcttgaagatggggtcatcgcttctggtccatcggaggatccgagtg

SEQ ID NO: 402926 - DNA, 100 bp, Homo sapiens
ttcaataggcagctgagcctccacccagaccgaaaaccccagagatcttcaggtgccactgattaatgaacttgaatcagcaatacatcagctgtacaaa

SEQ ID NO: 402927 - DNA, 82 bp, Homo sapiens
gagcctcagttggaagcagccgatccagcctgcggagcctgtggggcaggtttattaatgccagaagaagaatagtacagcc

SEQ ID NO: 402928 - DNA, 74 bp, Homo sapiens
cccaccccaccccattaccctccacatgtccttcagtgaatctacagacctattttctcaggagctcagcctgg

SEQ ID NO: 402929 - DNA, 75 bp, Homo sapiens
gtgaccagcaagattgcactacggaaggacctggataacggatcaaggtggtcggacattgtgtggtgtaatgag

SEQ ID NO: 402930 - DNA, 75 bp, Homo sapiens
tgtgctgaggaccaggtgttggacgcagacggcgtcacttgcttgggcacaagaatagccgcccagtgactgcca

SEQ ID NO: 402931 - DNA, 75 bp, Homo sapiens
ccgcctaaggcactgggtgtacctgctttgcttctctgcaggtgagcgagtgctgtgctttcatgggcctcttct

SEQ ID NO: 402932 - DNA, 100 bp, Homo sapiens
caagccgcacctggagaagctgaccctgggcatcacgcgcatcctagtgcacctggtggacatatggaatgtcatagaagcattgcgggaaaatgctctg

SEQ ID NO: 402933 - DNA, 100 bp, Homo sapiens
tgggcgctgcttgctaaagagccgagcacgcgggtctgtcatcatgtcgcgttacgggcggtacggaggagggagtaccctgacttctaccggaagctct

SEQ ID NO: 402934 - DNA, 83 bp, Homo sapiens
ttgaatacatcgatctggtctgtggtgatgatgaaaaccctagcgcctattatagtgatgcagtacttaattttcctaaatat

SEQ ID NO: 402935 - DNA, 90 bp, Homo sapiens
gaagcatttttacaaaaacttgttgtttgttggctattttactgaagacaacaaatagagcctcttgtcagagatggctttggattcccc

SEQ ID NO: 402936 - DNA, 100 bp, Homo sapiens
ggccgagtccccgtacggccacccggcgggcaggtcttgacgagccctgcccgggccgacgcatgcggaggatggaaacacttgcccggcaatgtctctg

SEQ ID NO: 402937 - DNA, 51 bp, Homo sapiens
ggcctccccagccacgtggaactgtgacagaccatgccaccactgccctgc

SEQ ID NO: 402938 - DNA, 82 bp, Homo sapiens
caacatggaggccgtgaagaccttcaatagcgaggacttttccagatttctcagaataaagtagcagttcttcttctagctg

SEQ ID NO: 402939 - DNA, 75 bp, Homo sapiens
gacctccaaagactaaactgacaagccttcaaggagcccagggttcaacaggttattgagtcacatttgttgaag

SEQ ID NO: 402940 - DNA, 74 bp, Homo sapiens
ctcgccggccgagggtggccctaggggcagcgagcaagacagcaagcagggccatgaagcccccaggaggagaa

SEQ ID NO: 402941 - DNA, 75 bp, Homo sapiens
agcatgcctcaccaagtcacatgacaagcaatgttctcaaatagtgatgaagctgtaatcaataaaaaacttccc

SEQ ID NO: 402942 - DNA, 98 bp, Homo sapiens
acactgggtacgctgtgccaaattcgagtggtgaatgcatttcgtagttctttatatgaagggttagaaaaaccggaatcaagaagttcgattcacaa

SEQ ID NO: 402943 - DNA, 83 bp, Homo sapiens
acaaactcgaagaacagctgtggaaagaagttgcaaaacactgggtccggcctctttggcctacccccgttggctccgctgcc

SEQ ID NO: 402944 - DNA, 99 bp, Homo sapiens
ccaccatgtccgtggccttcgcgtctgcccggccaagaggcaaaggggaggttacgcagcaaaccatccagaagggaaagcaggcaggatgggagagtc

SEQ ID NO: 402945 - DNA, 90 bp, Homo sapiens
gggaaggtggagccaccagcctctccttggatgtgctgatggagctccttgagcagtgcgcagatggactctggaaagccgagcgctacg

SEQ ID NO: 402946 - DNA, 82 bp, Homo sapiens
cgagaagagcagagcggagggagccccagacacgaacccagtgacttgattgtaaaaatttacagagcggaatcatatgctg

SEQ ID NO: 402947 - DNA, 90 bp, Homo sapiens
aaaaagcaagaggagacagccgtactggaaggttggatggcaagcatgtggtgtttggcaaagtgaaagaaggcatgaatattgtggagg

SEQ ID NO: 402948 - DNA, 100 bp, Homo sapiens
ccgagggcttcgtggatgccctgcaccgggtccggcaggtgttcattgaggatgtcagcagggagtttgtggaggagttcatctggccggccatccagtc

SEQ ID NO: 402949 - DNA, 90 bp, Homo sapiens
aggcattttggggcagaatacagagatatggaatcaggaattgaatgatctggcacgggaccctccagcacagtgttcagcaggtcctgt

SEQ ID NO: 402950 - DNA, 75 bp, Homo sapiens
gcaggcttggaaacgaagagtggttgtaccagaggtaccactaggcatatttagattgtgcttcttggtcagacc

SEQ ID NO: 402951 - DNA, 49 bp, Homo sapiens
cgaaggtcgtattgaatggtgttgtagtgagcatgtttttgaacacatt

SEQ ID NO: 402952 - DNA, 100 bp, Homo sapiens
ggagatcaccgccctggcgcccagcaccatgaagatcaagaccatgggaaaggtttctcgattcagaatacgcagaacaccagcccgtcctcagctaaac

SEQ ID NO: 402953 - DNA, 100 bp, Homo sapiens
gtgtcgtatcatagttcattttatgtgggaggatgttcagcagcgcggcagagtcatggggacgaagggaacgtcatcgtttggaaagcgtcgcaataag

SEQ ID NO: 402954 - DNA, 83 bp, Homo sapiens
ccctgcaccatgagctggggcaccgagctctgggagcaggccgggctctcgccatgggtcactgtcgcctctgccacgggaag

SEQ ID NO: 402955 - DNA, 74 bp, Homo sapiens
ctggaccacaaaccgctgccagaaaaacatccacgacagcgatggcagttccagcagcagccaccagagcctca

SEQ ID NO: 402956 - DNA, 100 bp, Homo sapiens
acagaagagtcaccttctggaagaggctggcccagtcagaatcaggagctgccttcctgctcttctaggttatcaatactctggctgaccatcatcatcg

SEQ ID NO: 402957 - DNA, 51 bp, Homo sapiens
aagaagggccttactccttcacagatcgtcaaggcggataagaaggcggca

SEQ ID NO: 402958 - DNA, 97 bp, Homo sapiens
gaggagcagctccagccctcggcttgctatcagaggaagtggagaatgtgccttcctgaatgacaatggagtcaacagtggcagaatctacatgaac

SEQ ID NO: 402959 - DNA, 90 bp, Homo sapiens
cgcagggagaaggaagaggtgtttgaaaagagatgctgcctatggaagttgcaatttctacattacacttcttgactgttttcatgcagt

SEQ ID NO: 402960 - DNA, 75 bp, Homo sapiens
gtggaagcagcagtccaggaatgcagtcagtctgttgatgaaactatagcatagcggcctgaccacaggggtggc

SEQ ID NO: 402961 - DNA, 78 bp, Homo sapiens
ctgcccctcccgcccgcaactccgccgcccaccatggcttccgaggagctgtacgagaaatgaataccttccgcacgg

SEQ ID NO: 402962 - DNA, 82 bp, Homo sapiens
cccgggcacctgtgtcagccctgccccttgcccctaaccacctggctgccaacatcctgggccatgagaataagggtgtcta

SEQ ID NO: 402963 - DNA, 101 bp, Homo sapiens
tgaacctgaacgatttcatcagtatggatcccaagctcttgaatgtcgtctctcaactagccaaacggaatctgcgactgctggtcctaggccggaagcac

SEQ ID NO: 402964 - DNA, 99 bp, Homo sapiens
atttggattaaggaacagcgagctgtttgacccctttgacctcttcgatgtgcgagactttggaaagagaggtacagaaagcagtcaacactgcccagg

SEQ ID NO: 402965 - DNA, 81 bp, Homo sapiens
cccggctttcgcatttgggaccctgcaggagagaaaaggaacagttccgtaagctctttattggtggcttaagctttgaaa

SEQ ID NO: 402966 - DNA, 75 bp, Homo sapiens
tcaacgtcctccgggaccggagtcagaaccctccgcagagtaaaggtgtggtggacacaggcctattcatcaaca

SEQ ID NO: 402967 - DNA, 75 bp, Homo sapiens
atcctgcggcagaagccgagttcaacatcctcctggccaccgactcctacaagatttcctcctctgatgctcctc

SEQ ID NO: 402968 - DNA, 90 bp, Homo sapiens
gaaattggagaaggacgagatcatcaagttgtatagctgtatcattggcaacatgatttcggccctagactggagctggttacagacgga

SEQ ID NO: 402969 - DNA, 75 bp, Homo sapiens
ctcggagcgcggcacggagacggcggcagcgctggactaggtggcagatgtagtggaaccaaaggagaggggcaa

SEQ ID NO: 402970 - DNA, 101 bp, Homo sapiens
acggtggcgccgcccggggcgaggcagggccagcagcaggcgggagacaatgcagatcttcgtgaagactctgactggtaagaccatcaccctcgaggttg

SEQ ID NO: 402971 - DNA, 75 bp, Homo sapiens
ggagactgaatcaaggtccagagaaggtggaggaatcctgatactgagcgggcgcggatggcgtcggggcgcccc

SEQ ID NO: 402972 - DNA, 100 bp, Homo sapiens
gtggtggagttccgccacatgaggaaccatgcctatgagccactcgccagcttcctagacttcattacatgaacatctgcaacaagccctccaacaagac

SEQ ID NO: 402973 - DNA, 75 bp, Homo sapiens
gcaagggttcggccgtgccctccgacagccaggcccgcgagaagacgtggcccagtggaacatcgggagcctccg

SEQ ID NO: 402974 - DNA, 75 bp, Homo sapiens
ttgagtggagagcctggaagcccgtactcaccagtgcagtcccagattaatgctgaactgttgtttcggccaact

SEQ ID NO: 402975 - DNA, 115 bp, Homo sapiens
gaaacttcttggaggttttcaggaaacttgcagcaaagccattcgggttggagtaattgttggaaaataaacgtgatgctttctttcctccattacatcaattttgtacaaatcc

SEQ ID NO: 402976 - DNA, 90 bp, Homo sapiens
cgacagtcaccgcaggttcgaagccaaaccactgagcatattgttaaactagtggaacaacacggcagtgatatctggtggactcttccc

SEQ ID NO: 402977 - DNA, 100 bp, Homo sapiens
tgatgtaaatgagcaacactccggatcagacactggaagtgtagaacgtcattcagagaacactcctatgccaccttcaccagctgtacaagtgcagggc

SEQ ID NO: 402978 - DNA, 100 bp, Homo sapiens
atttctgtggaagggtggagtttcactttgaagttggtgttggtattaggagatctgcacatcccacaccggtgcaacagtttgccagctaaattcaaaa

SEQ ID NO: 402979 - DNA, 82 bp, Homo sapiens
catggcctgccactgcgtgcgttgattcttcaccacactgaaaccattaggaaaaatccttgtggttaacagcagaggcttc

SEQ ID NO: 402980 - DNA, 74 bp, Homo sapiens
cgccctcttgccccccggagccgcgagcacccaagggtgaagttgaacaaattgctatgatgaaaccaaaaggc

SEQ ID NO: 402981 - DNA, 75 bp, Homo sapiens
cgcgctgcgcatccccgcggacgccacagcgctgctgcctgctgtttcccggggagatcatgaaacgaggtcgcc

SEQ ID NO: 402982 - DNA, 71 bp, Homo sapiens
aagctctgctccacactgccaaccggccagaggacgagtgtgactctcgcctgactgctggtgtgcccgac

SEQ ID NO: 402983 - DNA, 100 bp, Homo sapiens
agtttgactgaaaaagtttctctctatagaggtgacatcacattgctagaggtagatgctatagtcaatgccggtacatggactatatcgcacaacaggt

SEQ ID NO: 402984 - DNA, 100 bp, Homo sapiens
gctgcaccgcggcgccgacatcaattacgccaatgtggacggactcactgccctgcaccagttccccacactgcttaatggccacatgccagtgccaatc

SEQ ID NO: 402985 - DNA, 87 bp, Homo sapiens
agcagcttcgacaaagggaccatgcggaggatggcgctgtccatgatcgagtgctggagaatctggtaaaagcaccattgtgaagca

SEQ ID NO: 402986 - DNA, 89 bp, Homo sapiens
caatactacaagagacagataaatccaagtcaaataccaagcaaaatagtgtgcctccttcacagagtggcttctggcacagcagctta

SEQ ID NO: 402987 - DNA, 98 bp, Homo sapiens
cagttcttgaaggtgacaacttagagactcagctctttgtagcctacagaaatggaagagtggatgaagcagtctctctgggttttctggattgctgg

SEQ ID NO: 402988 - DNA, 145 bp, Homo sapiens
aagcggggacccagaccctggagcctcagttggaagcagccgatccagcctgcggagcctgtggggcagatttggagcaagaggtggtggtggccttcccccgaagaaatttggtaatcctggggagcgtttgcgtaaaaaaaag

SEQ ID NO: 402989 - DNA, 75 bp, Homo sapiens
ctaatattgagagagagtgcctgaataacaagcaacagctcatgagagagaaagtggctcatgccaaagaagaaa

SEQ ID NO: 402990 - DNA, 90 bp, Homo sapiens
gagcccagggcgacggtcagcttgttaattcctggctgcagggcattgtctaaatataggagcagatctgcagatggggccaagaattac

SEQ ID NO: 402991 - DNA, 137 bp, Homo sapiens
aagcacatcgaccggcgacagcagccaggagtcatgagcgacagcggcgagcagaactacggcgagcggggaacctcagaacctgttctggatccacagcaaatccaagcatttgatcagctttgccgtctctaccg

SEQ ID NO: 402992 - DNA, 100 bp, Homo sapiens
caaaatgggaacaagcaacaaaactaatccttagctatccaaaagcccaaatggaagatggccaggggatgtggagacgctggtagcggggccaggaagg

SEQ ID NO: 402993 - DNA, 83 bp, Homo sapiens
agttctccctagcagtgaagagctgtcctgaccaagaggaccagactttgttaatgaagcttcctgtgcttcccagaattcca

SEQ ID NO: 402994 - DNA, 50 bp, Homo sapiens
ccaaaatgtggacttcagcaaagaggcagaatacttctatgaattcctgt

SEQ ID NO: 402995 - DNA, 100 bp, Homo sapiens
catggaacagggactcactggggagccagcggtgagcctggagcagtgtgagcagctggtggcagagctccgcggcagcgtgcgccaggcagtgcggctc

SEQ ID NO: 402996 - DNA, 107 bp, Homo sapiens
tgctggatgccgtgatctccagcgccggcctcctcagtgcgaagaagctgcagccgcacctggccaaggctatccagtcagttcgctgctattcccatgggtcacag

SEQ ID NO: 402997 - DNA, 75 bp, Homo sapiens
ctacagacctcacagtgccaaatggagctggaagcagtccagtggtcatacagtttgtcaagaaagaaaatagtg

SEQ ID NO: 402998 - DNA, 100 bp, Homo sapiens
gcccttttgaagaggaaatgaagggtattgccgctgttactgatatacctttaggagagcgacttgcagttgtggaggtacagtgtgaacggctgaggat

SEQ ID NO: 402999 - DNA, 100 bp, Homo sapiens
gtggagatccgcggaggccgacaggattcgttggctgccgtccccgctgctgtgcattggttgccttgccaactaatacgacctcatcgagacctcggac

SEQ ID NO: 403000 - DNA, 73 bp, Homo sapiens
ttcggatcatgtctggtggctccgcggattataacagatgtaacctcgggtatggtgaaagacccaccggacg

SEQ ID NO: 403001 - DNA, 101 bp, Homo sapiens
gcccccggccgcctcccgcggacgccagggctgcctgctggtacctgcgcgggttttaaaatcaaagatgggaaaatcggagaaaattgcccttccccatg

SEQ ID NO: 403002 - DNA, 82 bp, Homo sapiens
ctgtcgcaagagaaaacttgactgtatacagaatcttgaatcagaaattgagaagctgaacccagcttagactagaaagtct

SEQ ID NO: 403003 - DNA, 75 bp, Homo sapiens
gttggcaaaggcggtggcacatcacacaacagctcccatggctattgaagaacaagtggctgttatctatgcggg

SEQ ID NO: 403004 - DNA, 80 bp, Homo sapiens
cttgaggattcgttttcctggctttgagcccctcacaccctggatccttgacctactagattttgacacttcatgacatg

SEQ ID NO: 403005 - DNA, 88 bp, Homo sapiens
gaggtgccagcccgcgaatccggccggagggtttgaaagtattcttgaagggctgtttggacctgcattattaaaagatctcagttta

SEQ ID NO: 403006 - DNA, 101 bp, Homo sapiens
cacagagccgcgccgcccgcaccacagaccttcgcctcgccccgccggttcctcaccctcggggagcaacatggggcgccaatgcttcggcattagagaaa

SEQ ID NO: 403007 - DNA, 83 bp, Homo sapiens
cagaaagcaggcgaacccgcggcgcaataacgaaactatgttccaacttcctgtcaacaatcttggcagtttaagaaaagccc

SEQ ID NO: 403008 - DNA, 111 bp, Homo sapiens
gccatgagccccccgctctgagggccccggcccctggatgcacagccccggcgctgggggggccctcagcctcttggccttgaacgggctgttcatcttgattcacaaaca

SEQ ID NO: 403009 - DNA, 82 bp, Homo sapiens
agcgagagcggcccggacgacaaggtttggtgcacctcgatttggaggaagtagggcagggcccttatctggaaagaagttt

SEQ ID NO: 403010 - DNA, 98 bp, Homo sapiens
attggaggagccacccgcacagacatctgccaaggagccctggcaatgtctcaggctgtgcagacaaacggaactcaaccattaagcaaaacatggga

SEQ ID NO: 403011 - DNA, 100 bp, Homo sapiens
acttcaactgcactgacttgaaccccagccgggagcgctgcggggtgcccttctcctgctgcgtcagggaccctgcgatggcgtcccatgtagagtgccg

SEQ ID NO: 403012 - DNA, 109 bp, Homo sapiens
gttctcccggcagcagcccgacgcaaaccaaggatctggggatcttcgcactatcccaagatccagacatttaatgtggatgcaccatgccagaccgtggaagatttaa

SEQ ID NO: 403013 - DNA, 50 bp, Homo sapiens
acttcccagcctccagaactgttggcgtgcagtggtgtgatctcagctca

SEQ ID NO: 403014 - DNA, 100 bp, Homo sapiens
ctcgaaactattccatgattgttatgttcactgctcttcagcctcagcggcagtgttctgtgtgcagtgttttacctcaatcatatatccacacaagtgc

SEQ ID NO: 403015 - DNA, 51 bp, Homo sapiens
cagagctttctggaagggggcagaagctggagaagcttcgagagaaggagc

SEQ ID NO: 403016 - DNA, 100 bp, Homo sapiens
gagcttatccgtggtctggagcaggatgtcaaggttcatcatgcctagtggcgtataagaagaccccgccaccggtccctccacgcaccacttcaaagcc

SEQ ID NO: 403017 - DNA, 74 bp, Homo sapiens
gctttggtccccagcgcagtgaagtggtgagcctttttgtcactggccattgcaaaccaaccctgggctcagaa

SEQ ID NO: 403018 - DNA, 90 bp, Homo sapiens
ctcgcttctgccgaggtgtccctgttctgtggtccgaggcagtgagagtcacaagatgatcgacttgtccgggaatccggtgcttcggat

SEQ ID NO: 403019 - DNA, 75 bp, Homo sapiens
gcactgcaagcttgagcaccagcagcttccttgtggtcatagatgcaaagagatgtgtcatcctggtgaatgtcc

SEQ ID NO: 403020 - DNA, 100 bp, Homo sapiens
cagcccctaagggcccttcgcgggagagcgtcgtgcacgcgggccagaggcgcttggtgatccagctatttttcctgccgtaattgtggaacatgttcct

SEQ ID NO: 403021 - DNA, 76 bp, Homo sapiens
agcctctcagcttcggagaatggagtcttccatcaatcatatctcacaggaactgtggctgcaccatctgtcttca

SEQ ID NO: 403022 - DNA, 75 bp, Homo sapiens
ggacttctacaatgcagacgagctcaagatacagtttatgtaacttgatggaagaaaatggaattactccaaaaa

SEQ ID NO: 403023 - DNA, 100 bp, Homo sapiens
caatatgttatctccagatgccgcgcaactgtctgatctcagttcatggtgctgaaaggacatgatgatcatgtgatcacatgcttacagttttgtggta

SEQ ID NO: 403024 - DNA, 98 bp, Homo sapiens
cgtggagtacccgggagtggtgcgtgatgtggctaagatgctgccgactctgggcggcgaggaaggcgtctcccgggcagctgtgcctcctgctgaat

SEQ ID NO: 403025 - DNA, 100 bp, Homo sapiens
agagaagaccaatgttcatataaatggtggcagaaataccagaaggccaaatttgagtttcatcatggtgactatgaaaaacagtttctgcatgtactga

SEQ ID NO: 403026 - DNA, 97 bp, Homo sapiens
cggggcgtcgcggcccaggtgctgcggcctggggctggagtccgattgccgattcagcccagcagacacgttggtcgtcattgcctccgagcccact

SEQ ID NO: 403027 - DNA, 50 bp, Homo sapiens
cggagcagaggaaccacacgctgatcatgaaagtgactgagaccgaagat

SEQ ID NO: 403028 - DNA, 75 bp, Homo sapiens
aatgacaaaaagtttgtcattaaacccatcgacaagaaggcacctattcttggtgccaccattgagaactccagg

SEQ ID NO: 403029 - DNA, 80 bp, Homo sapiens
ctagcggcgggtcgtgggcacctccaggtgtggcagttgggctcttcgtcaccaaacttcactttggaaggacatgagaa

SEQ ID NO: 403030 - DNA, 90 bp, Homo sapiens
aaaactccgaagatgaagaaggaaaaagcggaagaaaacatgaagatggcggtggagataagaatccttgccagcacattacagaatatt

SEQ ID NO: 403031 - DNA, 82 bp, Homo sapiens
gttcggccaagggaccaaggtggaaatcaaacctccctgtgctgtcaggaatctacaggacttggctcgtatttacattcga

SEQ ID NO: 403032 - DNA, 100 bp, Homo sapiens
ttaatcagaggttctaagcactggacatttgaaaaggtggaagaagagcccgaagaagaacctgaagagacagcagaagacacaacagaagacacagagc

SEQ ID NO: 403033 - DNA, 83 bp, Homo sapiens
gttcggcacggaacagtcaggtaccgcagttcagcgctgttggcccgcacaagtgcatacaccttgatagcaccaaatataaa

SEQ ID NO: 403034 - DNA, 82 bp, Homo sapiens
caagcttagagcgtctggccaagaatcagaggaagtgggtgagccagccatgagagggtatcttgtggccatattcctgagt

SEQ ID NO: 403035 - DNA, 82 bp, Homo sapiens
agccggcagccgacggcaaaggtgtcgtggtggtcattaagcggagatccgcccatgacagacctggacacaaagatccaag

SEQ ID NO: 403036 - DNA, 85 bp, Homo sapiens
cgggccaaggcctcggagctgcacagcgtgcgcaagctcaactgctgacaatgcagatcttcgtgaagactctgactggtaagac

SEQ ID NO: 403037 - DNA, 90 bp, Homo sapiens
gcctgaggaggcccgagcggcggcggtggcggcgaaggccgaggcgaacatgaaaggctcccggagcagcgctgactcctccaggaaaca

SEQ ID NO: 403038 - DNA, 89 bp, Homo sapiens
ctgggtcagtccgccgctcaccccgcggccgcaccttcccgccttctcagaagctgagagccacaaggaggacagcagtgagcatctgc

SEQ ID NO: 403039 - DNA, 83 bp, Homo sapiens
tggcgaagcacgagcagatcctggtcctcgatccgcccacagacctcaaattcaaagttcctgatccgcctcatacacaagga

SEQ ID NO: 403040 - DNA, 100 bp, Homo sapiens
ctcaagcagtcctaccatgtcagccttcccagtagctgggaccacagcctccacaaatgggaagtgttcctgtaatgacgcaaccaaccttaatatacag

SEQ ID NO: 403041 - DNA, 100 bp, Homo sapiens
agaaaaagaaactggacttaatgtgttcttattggatatgtgtaggaaaagggacatccaacgggctcatagagtggtagctgagcttcaggctgggacg

SEQ ID NO: 403042 - DNA, 51 bp, Homo sapiens
gtggagcccaaagacccctggagacatgatggacacccgctccgggagcca

SEQ ID NO: 403043 - DNA, 82 bp, Homo sapiens
tctgatgaagaagttattcaagatgactgggactcttcaattaatctgacatttcacaaatccaaaattgccgtggatgaac

SEQ ID NO: 403044 - DNA, 90 bp, Homo sapiens
gtccttaccaacctgggcgacatccaggtggtctcgctgcccctgctcaagccccaggtggcagtgctccttttggacttttctctaggt

SEQ ID NO: 403045 - DNA, 75 bp, Homo sapiens
gagagttggctgtgcagatccagaagaagagacggggtttcatcatattcaccaggctggtcttgatctcttgac

SEQ ID NO: 403046 - DNA, 92 bp, Homo sapiens
gctgttcgtgctgctgggattcgcgctgctgggcacccacggagcctccggggctggaagctcttcgtgggcggtcttgactggagcacgac

SEQ ID NO: 403047 - DNA, 82 bp, Homo sapiens
cctccacttccaaggatatagagcagttgcaagaatgtagtaactctgatcagctacaaggaaaggaggaaagagtaaatga

SEQ ID NO: 403048 - DNA, 90 bp, Homo sapiens
ccactccccagctgtgaaagggggaagccatatgtttttgaccgtgtattccccccaaacacgactcaagagcaagtttatcatgcatgt

SEQ ID NO: 403049 - DNA, 100 bp, Homo sapiens
aggggaccccgcgagagggccgcgcgccggccgccgccgccccggcgcccaggctcgaaatggtggagtcaatgaagaaagtagcagggatggatgtgga

SEQ ID NO: 403050 - DNA, 75 bp, Homo sapiens
tggtcctacctggggatattatcaaatctactactgttcatggcagaattagacctttacgagaagcacagtttt

SEQ ID NO: 403051 - DNA, 100 bp, Homo sapiens
aaaccagatttagataaagtcatcagtttgaaagaagctaatgtgaaggagtacttctttgattccagagtattaacagatggagaactggctcccaatg

SEQ ID NO: 403052 - DNA, 95 bp, Homo sapiens
cggaggcccacgacgcccaggcgcttccgcgaccacccggagtgattgcccggcagagcgcgatggcagaaacggtggacacaagcgaaatggtc

SEQ ID NO: 403053 - DNA, 50 bp, Homo sapiens
cagaaagccaccgaccttattccggccaccagcttgggctccccacggag

SEQ ID NO: 403054 - DNA, 100 bp, Homo sapiens
cttgccccgggagcccgcgaggtgactgtgaagtgctgaccacactcaccccagacactggccgtatcctgtccaagctacatactgtccaacccaaggg

SEQ ID NO: 403055 - DNA, 98 bp, Homo sapiens
tcctgcgcctccatgtacagccgctccatccagggccaccatgtctgcctcctggtgaaaaagtgtctttggtgcaacactaacaaggcttgtctgga

SEQ ID NO: 403056 - DNA, 74 bp, Homo sapiens
aggccaagagggatccttcacccgtgtctggaccgtggcaaggaggtgtacagccctgactttcatagcctcgg

SEQ ID NO: 403057 - DNA, 97 bp, Homo sapiens
agggctgaaggaagctgccttgtacccacatctcccgccagggaccgcagatgttcatggactgcagcccacaggccctgcccatcgcatcagagga

SEQ ID NO: 403058 - DNA, 83 bp, Homo sapiens
ctccaggaatgccagtgcatcttttgcacagctcttcttggacacttaatgattgttggcaagaaatgtgctgctgatctggg

SEQ ID NO: 403059 - DNA, 75 bp, Homo sapiens
ctgtgaacgtattaagaactgattcctctcatcaagcctgacactggtgaagacatttgaagtatgtgatcttcc

SEQ ID NO: 403060 - DNA, 73 bp, Homo sapiens
ggcgttaactatgttatccagggaaaatcatcctttcctgaaactggccaaaccgttatctagcttgacacca

SEQ ID NO: 403061 - DNA, 83 bp, Homo sapiens
cgccggccgggcatgagttagtcgcagacatggacaccaaacatttcctgccgctcggttgtgaccgagattcccgacgagag

SEQ ID NO: 403062 - DNA, 90 bp, Homo sapiens
atgcgcactacgacccaatggccaatatccacaccttttctgcctgcctaggctttgatttgttggagaaactgttaccagaaaaacagg

SEQ ID NO: 403063 - DNA, 111 bp, Homo sapiens
ttaagaattaaaagatgatgagaaataaggacaaaagccaagaggaggacagttcgctacacagcaatgcatcgaggtcctagcagaagatgtgactcagactgcctctgg

SEQ ID NO: 403064 - DNA, 100 bp, Homo sapiens
gtgaaaaataccacgacaaaaccaccctaggaagcagtttaagtgcacggtgtgtgactacacagcggcccagaagccacagctgctgcggcacatggaa

SEQ ID NO: 403065 - DNA, 117 bp, Homo sapiens
agttcaacagaaggcaaatacgaagacgaggcaaagcacccagctttcttcactcttccgctgtgtcagcgtgttatgatgccgtcccgtaccaacctggctactggaatccccagt

SEQ ID NO: 403066 - DNA, 75 bp, Homo sapiens
ctgggagcctgaaaactgtgaatggtatgaggatacatgggctgcacttcacagaagagccaaagactgtgcaag

SEQ ID NO: 403067 - DNA, 98 bp, Homo sapiens
ctctcatggaggcgtctctaaccaggaatcagagcagaaccaagcgggaagctcagaatcagagagacctcatcaagtttttggcaaacccaaacatt

SEQ ID NO: 403068 - DNA, 108 bp, Homo sapiens
tatgcatctttatccaatcaagtgcccttggacaaagcctgaaaccagaatctggccaacctatttgtggaaatggaatggtagaacaaggtgaagaatgtgattgtg

SEQ ID NO: 403069 - DNA, 100 bp, Homo sapiens
ccggagctgcctggaggcggccgcactcgggcgaccatggccttgctgggtaagcgctgtgacgtccccaccaacggctgcggacccgaccgctggaact

SEQ ID NO: 403070 - DNA, 75 bp, Homo sapiens
tatgtcagccaaagctactcctactcatctattttgaataaatcagaaactgaaattacagaagacatccccgtg

SEQ ID NO: 403071 - DNA, 96 bp, Homo sapiens
actgggtcaccagagtttgagagagtatttcgggcacagaagagagagaaaatccttcaaaacggagtagaattgaacgtgatatagataacaatt

SEQ ID NO: 403072 - DNA, 118 bp, Homo sapiens
cggttccccggcccacagtgggggtgtgcaaacccgagagaactggaaagtgaagtcactgcttttgctgtcttggatcaagaccagaaagaaattattgataccaatggagctggag

SEQ ID NO: 403073 - DNA, 100 bp, Homo sapiens
aaacagtgtatagatgaatgcacagccaggattgaaattggactgcattacaagattccttacccaaggccaacagtacaatgtagattataaactggag

SEQ ID NO: 403074 - DNA, 74 bp, Homo sapiens
ccccaggaggaggtcccagtggtgctgccccacgtcccccaccaaagcccatgtaaggagctgagttcttaaag

SEQ ID NO: 403075 - DNA, 98 bp, Homo sapiens
ccagaaggctgacaagctccatgaggaagaattgtatttgcaacgggtagcagaattggacaaaattacttatgaaagagacagttttagacaggcat

SEQ ID NO: 403076 - DNA, 75 bp, Homo sapiens
gacgtgctgcggcttcatcccgcagaaatatggctacacacacctttctgcaggagagctgcttcgtgatgaaag

SEQ ID NO: 403077 - DNA, 75 bp, Homo sapiens
gctaaatcaactggatatgatccagttaaactttttaccaagctccgccgcatgcaagagatgattgcaaggatg

SEQ ID NO: 403078 - DNA, 74 bp, Homo sapiens
cgcgttggggtgagaccctcacttcatccgtgtgtcccggcatggatatccggaacaacctcactaggttgcat

SEQ ID NO: 403079 - DNA, 107 bp, Homo sapiens
cagcctttaacacatctgtccatgctgcaattagacatggaaattggaaactcctcacgggctacccaggtggcatttttctgaagttgttcattaagacttcccag

SEQ ID NO: 403080 - DNA, 99 bp, Homo sapiens
cgaggagcgcgtcgtgcgcctgggggtgcgcgcctgcgacctgcccgcctgggtcactcctggaagcaaggcggctctagctaatttatgtattggaga

SEQ ID NO: 403081 - DNA, 75 bp, Homo sapiens
ggcctccgccaccgtgcacatccgaatggatgatgataattccgaagaaggcttccacactattcattcaggaag

SEQ ID NO: 403082 - DNA, 96 bp, Homo sapiens
tcccaaggtgctgggattacaggcagaagagcactgatcgtactggctcactcagagaggacgtccttcaactatgccatgaaggaggctgctgca

SEQ ID NO: 403083 - DNA, 75 bp, Homo sapiens
caataatgtcctggcaacaataggagaattggcacaggctctggaatgggcactctccttatcagcaagatccga

SEQ ID NO: 403084 - DNA, 100 bp, Homo sapiens
cttcggccgctgagattctgtcgtgtcgtcgctgctggcacttcaggctctggttttcatagagctgaatcacattaaaaagtgcaatacagttcgaggc

SEQ ID NO: 403085 - DNA, 75 bp, Homo sapiens
ttcgccactcacttggaggatgtgttttgggccacagcacagcagggttctcatgtatcagccatcttctgtaag

SEQ ID NO: 403086 - DNA, 100 bp, Homo sapiens
gtcccaatatccaagaagcagtagagggtgccatgcacattcagtcctcctgcatatgcccaagaggattgggagtggaatggacaccagcagaagcacc

SEQ ID NO: 403087 - DNA, 50 bp, Homo sapiens
tgggggcaggtgggcccggtgacagggaaggtgctgagctactggtgctt

SEQ ID NO: 403088 - DNA, 100 bp, Homo sapiens
acagcagccaggagtcatgagcgacagcggcgagcagaactacggcgagcggggagaagaaatgggtgaccgttggtgacacatccctacgaatctacaa

SEQ ID NO: 403089 - DNA, 98 bp, Homo sapiens
ggcggcgaacatgcgcttttgacacattggagctcatgatggagcagtccaagaagtcctccctcatggtggcccgcagtattctcaacaacaagctc

SEQ ID NO: 403090 - DNA, 98 bp, Homo sapiens
gcctgcatcagtgcaaaactcctattatccaccgggacctgaagtgtcgatatatagtatctggttttatgacaagaatgactgtcaccgcatagcaa

SEQ ID NO: 403091 - DNA, 75 bp, Homo sapiens
catgaagaaagacgtgcggatcctgctggtgggagaactgttatagttttgccgctggactcttccctcccttcc

SEQ ID NO: 403092 - DNA, 80 bp, Homo sapiens
gaaggaaagtggctgcagtgacacaggtgtgttccagagaacaagccttcagacatttgctatattgacgctgagctgtc

SEQ ID NO: 403093 - DNA, 75 bp, Homo sapiens
atcaaacactggatcaccatcatccgagctcgcttcgaggagaattttcaagaaatgattcctgcctttggaatt

SEQ ID NO: 403094 - DNA, 82 bp, Homo sapiens
tttagagctgcggaacaggacgccctctgatggagtgcatccgccccaacccttttccccctcgtctcctgtgagaattccc

SEQ ID NO: 403095 - DNA, 51 bp, Homo sapiens
cgggaaaggagaggatcccggagccgtccacgctggcagtgtgggtgaagt

SEQ ID NO: 403096 - DNA, 75 bp, Homo sapiens
gacagaatatgctagtggaggggaaatatttggtgactgggtacctggatatgtgatcgagtattcttctgggtg

SEQ ID NO: 403097 - DNA, 94 bp, Homo sapiens
aagctatttattttactgtcgacggtgatgacttgggcgcgctccaaagccctggacccctgtctcaatgagatcttggagtcagcagatgcac

SEQ ID NO: 403098 - DNA, 104 bp, Homo sapiens
cattttggcattgacatttaattttagggtcctttatatagaagggagagtagtgtccccagttgtcctcatccagggtgctattcgagtccagcctgaagggc

SEQ ID NO: 403099 - DNA, 100 bp, Homo sapiens
gcgggagcttccgggagggcggctcgcagatgccatggacaatattaccaggcagaaccaattctacgatacccaagtcatcaaacaagaaaacgagtca

SEQ ID NO: 403100 - DNA, 100 bp, Homo sapiens
cctctgccacaccctggggcctgtgcatcctcctgacccacagcccgtggaccgggagcccgtggaccgggagccggtggtgtgccaccccgacctggag

SEQ ID NO: 403101 - DNA, 50 bp, Homo sapiens
tctggagagaagcagcggatcagcagagatttggtcgtattgggcgcctg

SEQ ID NO: 403102 - DNA, 75 bp, Homo sapiens
tttgcatgtcactgctctggaggatattaagccaggagaggtacaaatcgaatgaagattatgtatatgtcagag

SEQ ID NO: 403103 - DNA, 100 bp, Homo sapiens
caatatctgtcttcggtggactccttcggcagtccacccaccgccgccgcctcccagagaggaggttcagatgagcccctgctgacttgagagagacaga

SEQ ID NO: 403104 - DNA, 100 bp, Homo sapiens
agaatcttcaagaacttcctcgcactgtgacatgtctgatcccttgctcccatccctgcagcatgaacaaggtacctgcaaggtgtggagttacagtccg

SEQ ID NO: 403105 - DNA, 100 bp, Homo sapiens
ctgcccgagaaggtggacgtgctggtgtctgagtggatggggacctgcctgctggagccttcacgtaaatgggtccagtcatgcctcccagtaagaagcc

SEQ ID NO: 403106 - DNA, 100 bp, Homo sapiens
ccagtggcgccagatagaaaacggcgagagtgggcgagaacgtccactgcgggccggcgaaagctgggaaagcaggcaggatgggagagtcgccgataga

SEQ ID NO: 403107 - DNA, 89 bp, Homo sapiens
gcagagcgagtacttcgttccaacatggacatcctgaagccaatcctgttttcaccatggagcagctgagctcagcaaacacccgcttc

SEQ ID NO: 403108 - DNA, 101 bp, Homo sapiens
gaagaaccggaagctctttgaccttctggatgtccttgagttcaaccaggccatggaaatagcatctcaaaggaccaaggaagaacggtctagccaagatc

SEQ ID NO: 403109 - DNA, 97 bp, Homo sapiens
gtacaacacctttacagcatcaaagaatactgatcgttaactgaagacaatatgcaaaattctcacatggatgaatacagaaattctagtaatggca

SEQ ID NO: 403110 - DNA, 100 bp, Homo sapiens
cagctggatcgacccccgggacaggttctgcttggattctgctagacagacccgacaaagactgtctatcaactggtccaattttagcttgaaaaaagcc

SEQ ID NO: 403111 - DNA, 80 bp, Homo sapiens
ctttgataaggtcaaggagcctcggaagtcaagagactcagagtcccatagtgccggtggtggtgtgcacattgagcccc

SEQ ID NO: 403112 - DNA, 76 bp, Homo sapiens
cggggagtcaatgctgaggtccactactccctcctgaaagctgagtccacctcaggacgaggccagtgcctgaaac

SEQ ID NO: 403113 - DNA, 82 bp, Homo sapiens
gtacctgaaccggcacctgcacacctggatccaggataacggaggctggataacgaaggaggcccaacttcattcaataagg

SEQ ID NO: 403114 - DNA, 83 bp, Homo sapiens
ctcggagaaacaggcgccgcgggctccgcgcccggccggacccgggcccgagatcaatgtccgagttaccaccatggatgcag

SEQ ID NO: 403115 - DNA, 90 bp, Homo sapiens
ggtgaccatccactacaacaagctgcaggcggaccccaagcagggcatgtccctggacattggagacgttcggagcccaggacatgtcgg

SEQ ID NO: 403116 - DNA, 98 bp, Homo sapiens
tgctcactgtcaccgagccgctgcggccagtatgaatgctacctctactcctgctgcattgtcaccttctgtgttaacgaccccgtccaagatcgaac

SEQ ID NO: 403117 - DNA, 74 bp, Homo sapiens
ggttaaaccatgttaaggaggattttacagaggatcttcgtgaagactctgactggtaagaccatcaccctcga

SEQ ID NO: 403118 - DNA, 97 bp, Homo sapiens
cctcatcgattcctacgagtcttctagcttcatgttcctggtgtttgacctgttctgacatccacggagacccaggcttcccaggccctcctgggga

SEQ ID NO: 403119 - DNA, 101 bp, Homo sapiens
ggccacagtggcttggccaatggcacagccgtttccctggggagatggtaaccatactctattccataaccctcatgtgaatccacttccaactggctacg

SEQ ID NO: 403120 - DNA, 98 bp, Homo sapiens
acactcccgacctggtaaacaacctgctcagggctctggtgaacaagctgtaggtctctaattaacagaagatggcaaagcccagccacagcagctat

SEQ ID NO: 403121 - DNA, 100 bp, Homo sapiens
tgtgcctgtctacacagcactgaaggggactttgccttcaaaagaaacagcatttttaaacactacacaaatgccttgcctgcaatcagcttcaacttgg

SEQ ID NO: 403122 - DNA, 100 bp, Homo sapiens
agactaccttgcacctgagctgttactaggcagggcccatggggtttcttttgcgggacagaggatcagatgttgagagtttggacaaactcatgaaaac

SEQ ID NO: 403123 - DNA, 111 bp, Homo sapiens
tcgattattagctttagtgaaatgggctaataatgctggcaaagtggaaaaatgtgcgtctatccttcactggagtctgatgatgatgaccctgctttgaaatctcgaccc

SEQ ID NO: 403124 - DNA, 147 bp, Homo sapiens
ggcggccgggcgggggagatggcggcgcgatggagcagcgaaaacgtggttgtagagttccgtgactcccagctgccactgcagagccccgccatggaagacacgccgttggtgatatcgaagcagaagacggaggtggtgtgcggg

SEQ ID NO: 403125 - DNA, 83 bp, Homo sapiens
cgggtgtctcgtgtgtgaacatcacaggctctgaagggctccaagaagctggtgctgtctgtgtactcagcagggcgcatccc

SEQ ID NO: 403126 - DNA, 100 bp, Homo sapiens
ttgttaaggattccaagtaactcttatttggtcagaaagcaacattgaatgcagaagaaatggcggacttctacaaggaatttttaagtaaaaattttca

SEQ ID NO: 403127 - DNA, 74 bp, Homo sapiens
tcatggccgcagccgctctggggcagatgtgatggatgtagcatggtctccccacgatgcctggctagcctcat

SEQ ID NO: 403128 - DNA, 75 bp, Homo sapiens
ctgacggtgaccaacttattagaaaaggaccattcctcaagaattttgtatccaaggcccaaaagtttgttaccc

SEQ ID NO: 403129 - DNA, 100 bp, Homo sapiens
catacgaatatgaacacactgagctgcagaaggtgaatgaaggtgaaaaagtctttgaagaagaaatagtgatatttggagttcttacaacatggcagac

SEQ ID NO: 403130 - DNA, 100 bp, Homo sapiens
attttcctgatccaaacaagcttcattgttttcagctaacagtaaccccagccatcactggtgcaagctatatttaacggagatcctgatgaagttcgag

SEQ ID NO: 403131 - DNA, 73 bp, Homo sapiens
gagcccctcacaccctggatccttgacctactaacgaaggggaggaccaggctggcgatgaagatgaagatga

SEQ ID NO: 403132 - DNA, 107 bp, Homo sapiens
ggcgactcctttgtctttgaaggcatgttgagtgagcaagtgaagaccaatattcaacaggcagtggtccagcatgacccatgtcggggcggagcagggtattggaa

SEQ ID NO: 403133 - DNA, 98 bp, Homo sapiens
cctatgtgcaccagcacagccggcagcccccctcccagtttgaacctctggacatgaagctcatgaggggtccccacggagtctggaccatggaggag

SEQ ID NO: 403134 - DNA, 98 bp, Homo sapiens
tgagtttgtcacctggctcgatggcattaactccaccgggggacggctacgtgcaggcggacgcccggggccccccggaccacgaggagcacctgtat

SEQ ID NO: 403135 - DNA, 82 bp, Homo sapiens
tggccgaagacaaagcagagttggaaagtgatccaccttacatggaaatgaaggtactatggatatagaggagagaaatcgc

SEQ ID NO: 403136 - DNA, 74 bp, Homo sapiens
ccgacagaggcagacacagaaggccgacaccctgcacctgacaggcaaatgtacactggggaccaccatgttca

SEQ ID NO: 403137 - DNA, 96 bp, Homo sapiens
ccccaacacctgagccaggtgaagggccccgtaaattggaaggatgcacaagttccaaggttacgtttcaagtgttgcggagataggaacatggga

SEQ ID NO: 403138 - DNA, 75 bp, Homo sapiens
ctgccaatttaccagagataattgataacaccctgtaacagctgaatctcccttgagtttagaaatctggctgag

SEQ ID NO: 403139 - DNA, 118 bp, Homo sapiens
gtccaaatggtccccccggtcctgctggaagtcgtggtgatggaggcccccctggtgctgacggccaacctggtgctaaaggcgaacctggtgatgctggtgctaaaggcgatgctgg

SEQ ID NO: 403140 - DNA, 133 bp, Homo sapiens
cccgaagcaagatggcggtgaatcagagccacaccgagaaccgccgcggagccctcatccctaacggtgaaaggctcttgtcaggatggtgaagctgttcatcggaaacctgccccgggaggctacagagcag

SEQ ID NO: 403141 - DNA, 106 bp, Homo sapiens
gaaacactgcctgggaggaagagaatttgtccaaatacaaagacagtcgctgggtaagtcggagtgccactgcacagcgcaggaaagaacgccttcgccagcattc

SEQ ID NO: 403142 - DNA, 100 bp, Homo sapiens
cagtcctctccgattatgtgggctcggggcctcccaagggcacagaatctgttccaagtggagaaaatcagagtgtgacaggaggtgatgaagaagtagt

SEQ ID NO: 403143 - DNA, 50 bp, Homo sapiens
gcgagagcatcaaactggtgtccatcgtcctcatcaccgggggcatcgtg

SEQ ID NO: 403144 - DNA, 110 bp, Homo sapiens
ttggagtatcgttctatttctctagctattgccttattttttctcatggatgttcttcttcgagtatttgtagaagggatttgttaaggattccaagtaactcttatttg

SEQ ID NO: 403145 - DNA, 75 bp, Homo sapiens
gcagaaggattccgggagcacagttccgccgagtattgactttgccactcgtaaaatagccaagttgctgaagcc

SEQ ID NO: 403146 - DNA, 75 bp, Homo sapiens
tacagaaacctcgtctccctggaacattaaccaggtggtatttgttggaaatttcttgagaattaatacgatcgc

SEQ ID NO: 403147 - DNA, 98 bp, Homo sapiens
gtggttcgatggctgccgcggctacgctgaggctctccgctcagcgattattggagccggaattggtggcacttcagcagcctattacctgcggcaga

SEQ ID NO: 403148 - DNA, 49 bp, Homo sapiens
ttatgctgatatacatccaatgaggaaaagtcctccatacattttctcc

SEQ ID NO: 403149 - DNA, 100 bp, Homo sapiens
ggccgtcctgagcgccatggctcactccccggtgcagtcgggcctgcccggcatgcagatggtgaccctgataactatattgcttattatcggagggcta

SEQ ID NO: 403150 - DNA, 76 bp, Homo sapiens
gttgttgcatcaaatacttcatatttggcttcaatgtcatattttgggttggtcaaagaaaaagtgatgtatgaaa

SEQ ID NO: 403151 - DNA, 96 bp, Homo sapiens
ggcgcgagcgccccgccatcgtcccgcaaatccagtttgctgatgacatgcaggagttcaccaaattccccaccaaaactggccgaagatctttgt

SEQ ID NO: 403152 - DNA, 100 bp, Homo sapiens
ggaagagttcatctggtagattggactaccacttttccttggtctccaactgaattccttgaagagaaaatggcctaccaggaatacccaaatagccaga

SEQ ID NO: 403153 - DNA, 50 bp, Homo sapiens
gcctgctgtggaagaccagccccaaagggatccacatcttctggacccaa

SEQ ID NO: 403154 - DNA, 100 bp, Homo sapiens
ctgttcgcgatcctgccggagccccgccgccgccggcttggccgctttgtagttcagaatgtttctgcacagaaagatggagaaaaatctagagtaaaag

SEQ ID NO: 403155 - DNA, 100 bp, Homo sapiens
gaactagaggacggcccggcagacatgcagaaagtacgaatctgctctgagggcggatggatcgtcagtatttaaacagatcacatcatgcgtgagtaca

SEQ ID NO: 403156 - DNA, 96 bp, Homo sapiens
aaagaactgatggaaggcagtgacttaaattactatttcaattggataaaaactcagctgagttcacaggaacggttttccaaagcagacagcagc

SEQ ID NO: 403157 - DNA, 71 bp, Homo sapiens
tgtcccttcttccacatgaaaaggataagccacctgcggcctgagacagtacagccagcctcagtttcgca

SEQ ID NO: 403158 - DNA, 74 bp, Homo sapiens
ccttgggatgtggacacaatttgtaagctatccaacttgataaagtcaatcttcaagtatattgtgcatggtct

SEQ ID NO: 403159 - DNA, 146 bp, Homo sapiens
catgaagcgctcggtagccgtctggctcttggtcgggctcagcctcggtgtcccccagttcggcaaaggtcgaatgagtgatttgagtgtaattggtcatccaatagattcagaatctaaagaagatgaaccttgtagtgaagaaa

SEQ ID NO: 403160 - DNA, 100 bp, Homo sapiens
cctgtgggcacggacgcacgccactttttctctgctgatccagctcccagggttgctagagctccttgtagaatatttccgacgatgcctgattgagatc

SEQ ID NO: 403161 - DNA, 100 bp, Homo sapiens
gcgtgcagctcagcttctccggggcatttttttctacacggcatcagtgtttttctgaccgaagttctcatttcctgacaatggaaatggaacaagaaaa

SEQ ID NO: 403162 - DNA, 98 bp, Homo sapiens
tttccagtatgtattttcaaaggccatgtcatttttgaagtcctacaagattatcaattttgcccccagtttacttcggattatagtctctgaccatg

SEQ ID NO: 403163 - DNA, 51 bp, Homo sapiens
gtcgaaggccgtgaggtatttttctaagatttcagagacaactgtctgaac

SEQ ID NO: 403164 - DNA, 98 bp, Homo sapiens
ctagggttctaagtgatgtccaggaaggaggaggaataatatttatggagcatatattatggaacacattatccaagcattaggtgaacatcttaaat

SEQ ID NO: 403165 - DNA, 147 bp, Homo sapiens
aaagaaacaagttcttggcaagagaggcatcctccttgaagtatttggctgaggagttttcaatcccacacatgatgaagataagctatgatgtggttaagcgctggatcaatgaagcccaagaagctgcatcaagtgataatatta

SEQ ID NO: 403166 - DNA, 82 bp, Homo sapiens
gtgcatgaggccatgactgatctcattttgctgatgggccctgggctgcatcttgtacctgctgtgcttccggcagcaccct

SEQ ID NO: 403167 - DNA, 100 bp, Homo sapiens
tgcgtggtgcccgggcagtcccatgcccaggtcacgtggcacaagcgtgggggcagcctccctgtccggcaccagttccgccatggagtcatagttgcag

SEQ ID NO: 403168 - DNA, 50 bp, Homo sapiens
cacttgaaccggcactgtgagaagattgtcgccgtgatcctgaaggcgct

SEQ ID NO: 403169 - DNA, 100 bp, Homo sapiens
ctggattataaggatgtcatccccatggctgatgcagcaggcatcatccgctatgcaattgggggagagaagtcttttttcctccagccaggagagcagc

SEQ ID NO: 403170 - DNA, 74 bp, Homo sapiens
cccgggcagcagcagggctacgggacgcttgactttcagggatgtggctatagagttctctttggaggagtgga

SEQ ID NO: 403171 - DNA, 98 bp, Homo sapiens
ttctgtgccctcagcccctgtgctcatggcacgtgccgcagcgtgggcaccagctacaaatgcctctgtgatccagggtgtggatggcgtcataaaaa

SEQ ID NO: 403172 - DNA, 76 bp, Homo sapiens
ccatcggtggttccagggagcattgcattcagtttacctcaggtttgtcaagggctatttaatgagttactagaaa

SEQ ID NO: 403173 - DNA, 152 bp, Homo sapiens
ggaagatgccggccgtgtccaagggggacgggatgcggggcctggcggtcttcatctcggatatccgcaactgtgtgtgggcaagtcttcgctctagcactcgcttgatcagctctccaacatccttcattgatgttggcgcccggctggca

SEQ ID NO: 403174 - DNA, 82 bp, Homo sapiens
taagctctggttcactctggatcatcccccaaaaggctgaagaagagcaaacatgcccagtgccccaggaagaagaggagga

SEQ ID NO: 403175 - DNA, 90 bp, Homo sapiens
aggcttcaaaggctgtcgcaaggaggaagggccttcatcctagaataatcactgaaggatttgaagctgcaaaggaaaaggcccttcagt

SEQ ID NO: 403176 - DNA, 100 bp, Homo sapiens
tcacgggtagagattggcttcgggctgagctagcagtgagcaccttttggcccaatgaatatcaggatctagtgaaaagccatttgatgtatgcggtcag

SEQ ID NO: 403177 - DNA, 101 bp, Homo sapiens
tgtgatgttggagaactacagcaacctgatctcattgggtttcctgagtactggagatcaggctgccaagggcaactatgggctccttgaccagatccagg

SEQ ID NO: 403178 - DNA, 83 bp, Homo sapiens
gggacagctgagctggcatcagaagacctacgccttcaggtcaaaatgcagatcttcgtgaaaacccttaccggcaagaccat

SEQ ID NO: 403179 - DNA, 75 bp, Homo sapiens
tttgtgcaagatgagcctcaagtgcttctgcattacatgcctacaccaactaatgttacaattgaatcctataac

SEQ ID NO: 403180 - DNA, 100 bp, Homo sapiens
gaagaagcagcctcatttgttttctggtgtcatcgtaggtggccacctatggcttttggggaccgactgtgattcctccaccacctcactctgctccttc

SEQ ID NO: 403181 - DNA, 75 bp, Homo sapiens
tggagttcttacaacatggcagacattgacaagtgatttcctaaaaactttggaagacccagatttgaatgtgag

SEQ ID NO: 403182 - DNA, 83 bp, Homo sapiens
cgacgctggagtggggagaagcatcatggttcaacgtgtccctggccagtgtccttccacctgtccacaagcatggggaacat

SEQ ID NO: 403183 - DNA, 75 bp, Homo sapiens
ctgactcaagcggaggcgcgcggaacagtcgccgaggcgattcccgcccagagatagaatctcactatgttgacc

SEQ ID NO: 403184 - DNA, 50 bp, Homo sapiens
ggaacttcttcatcaccgccatcccgtccatgctgctcctggccccaaag

SEQ ID NO: 403185 - DNA, 100 bp, Homo sapiens
cagctgtgcaatggtgtcttggactgcccagatgggtatgacgaaggagtacattgtcagggatttgctagtccacttactgggatagcggatgcctctc

SEQ ID NO: 403186 - DNA, 75 bp, Homo sapiens
ccagctcatgggcacggctcgggacggttttgggatttgagattgacgcggtgaactctgtccagttttcaaacc

SEQ ID NO: 403187 - DNA, 100 bp, Homo sapiens
agacatcggtgtttccagagtccagacccaccacagtaaaataccatgaagattttgaaaaaacaaaggggagaggctttactcccgtcgtggacgatcc

SEQ ID NO: 403188 - DNA, 100 bp, Homo sapiens
ttgcaactagggtggagatcaagctggaacaggagttccgatcgacccggtaccaagaaggggagtgcccgcggcaggtctatgttaacaatgaatgggc

SEQ ID NO: 403189 - DNA, 75 bp, Homo sapiens
atagttggcaacctcactgagttagaatcagaggcctacagattcctggaggagatgcggcggcggcttcccttg

SEQ ID NO: 403190 - DNA, 112 bp, Homo sapiens
cctgaccctgatttcacagtccgagacgtcaaactcctagtgggtcaagtacaaaagagattttgaagaaagcaaagggaggggcttcagcatcgtcacggacactcctgag

SEQ ID NO: 403191 - DNA, 100 bp, Homo sapiens
tgggggcgcaggagccctcccggcccctattttcccttataaaggaggcagtccagtgcgtgcaggagctggcctcaccctccttgctcttcatctttgt

SEQ ID NO: 403192 - DNA, 100 bp, Homo sapiens
ccacccgcatgctctttgtcactccccggcggcagcacgaaagtaccatgtgtcagctgacaggggctctggccacagcttgtggggatgacgcgatccg

SEQ ID NO: 403193 - DNA, 96 bp, Homo sapiens
tctgttgcagcagcccctgcccaagtctcaagtccacaggaggcccccctgttgctacttaattcagtgcacaaatgagatgaatgtgaacatccc

SEQ ID NO: 403194 - DNA, 101 bp, Homo sapiens
agccacgtgggggagatagagcaggagctagctctggcccgggacggacatgaccagtgtgctggaattgatgttcgtctgtgtgatgttggtgaggccat

SEQ ID NO: 403195 - DNA, 100 bp, Homo sapiens
gccctccagccttctgccgctcgccctctgcctgctggctgcacccgcctccgcgctcgtcagaaaccaaggtgtatgttggtaacctgggaactggcgc

SEQ ID NO: 403196 - DNA, 75 bp, Homo sapiens
aatccagatgctggatgacacccaggaggcatttgaagttccaaatttcgctaaggagtttgtgatcagtgatcg

SEQ ID NO: 403197 - DNA, 74 bp, Homo sapiens
gtggatcctgaaacaaacatgaatgtgattttgtatcagattgtaccatctcataaattgatgttggaattcca

SEQ ID NO: 403198 - DNA, 75 bp, Homo sapiens
aggagctaaagcagcgtgcgttcagccctgggtgaccaaagacttgaccactcaaagtccagctccccagaacac

SEQ ID NO: 403199 - DNA, 75 bp, Homo sapiens
cagattcgcagtggtcgcttcttctccttgatgtcggtgcagatctcttgtccatgtgccagcgaaacattgccc

SEQ ID NO: 403200 - DNA, 100 bp, Homo sapiens
aaaagaaagagaaaaagcagaaagtagatgaagatgagattcagaagatgcatgaaagctcggacagctcaattagccaagataaaatgggtgataagtg

SEQ ID NO: 403201 - DNA, 50 bp, Homo sapiens
ctcaacaaaaccagccgacagcagatgggccggacatggtacattctttc

SEQ ID NO: 403202 - DNA, 74 bp, Homo sapiens
ctccaccgtagcccttgccaaagtttaattggttggggtcagataagaagaggagtgacaatcaagccaacagt

SEQ ID NO: 403203 - DNA, 88 bp, Homo sapiens
tctccggcgggaaggaaaaccgcgcagagaggtggtgatgatgtccagcaactctgtgaagcaggagaagaggagtttttggaaatca

SEQ ID NO: 403204 - DNA, 75 bp, Homo sapiens
ccgcagtgagcccaccaagaaggaagcgatgcctgctctgtgcctgtatctgagatcatcgccgttgaggaaaca

SEQ ID NO: 403205 - DNA, 100 bp, Homo sapiens
atgcagggggactctctgaagctgtgcaggctgcctgtatgacctgcaggctgggacaatgaaaagaaaatagctattttacatgaaaattttacaaccg

SEQ ID NO: 403206 - DNA, 108 bp, Homo sapiens
cgccgagtcctagcgcctggcctgcgcgccgctgcccgcgccacaggagtatgctgctgctgttccgctttgcgtcctcgctacaaacgcctggtggacaacatattc

SEQ ID NO: 403207 - DNA, 100 bp, Homo sapiens
gtcaccacatcagatacatcctactcagatatggctgctggatcagacttagcagtgtctgcaaaaacgaatcttttcctacaacctgttaactgactgg

SEQ ID NO: 403208 - DNA, 83 bp, Homo sapiens
cgcgccggctatggccgtgccctggggctgagccctcaggtgagcgagtgctgtgctttcatgggcctcttctttatgaagca

SEQ ID NO: 403209 - DNA, 74 bp, Homo sapiens
ggaaaaccagttattgaatatcaagaggaggagttgttggatccacctctgatgttcactgaagagtaccagaa

SEQ ID NO: 403210 - DNA, 100 bp, Homo sapiens
gatatctttgttaaattgacaacaatggccatgtatccctgtccccaatctcttcatgctggaaacagtggattctgtgaagttggcagacaaagtgaac

SEQ ID NO: 403211 - DNA, 132 bp, Homo sapiens
gaccgcgcggagcaggcggaggcggataagaaagccgctgaggacaagtgcaagcaggaaggcaacagcccccaggggagcaaccagggagtcaaaatcacaccggaccagcagaagaggagcagctttttc

SEQ ID NO: 403212 - DNA, 98 bp, Homo sapiens
cgcggggcccggttctccatcgcgcgcacggcagcctagcgcaatgaggcgggcagcactgcggtatcgagaaccttccctgcgaacttcagaggaac

SEQ ID NO: 403213 - DNA, 90 bp, Homo sapiens
gctggagacaaacctcatatgcagacttatgaagttgaccttaataagcaacaagcagtggtggtttggtggtggatgtgacctcactcc

SEQ ID NO: 403214 - DNA, 99 bp, Homo sapiens
aggagaggccggtgcctgcgctgccgtctctggcacctaacccagcagaccgctcaccccatcggaccggagtacactgggaagcatcaaagaaggaat

SEQ ID NO: 403215 - DNA, 75 bp, Homo sapiens
acgaggaagaggaggtttctgagctgtatgcaggagctattcttgaagtttgtggatgaaaattgggaaggttcc

SEQ ID NO: 403216 - DNA, 110 bp, Homo sapiens
gacgcgggcgagctgcggctcggacgccagcggacacgcgggcgaggtcatcatcagatttgaaatatttaaagtggatacaaaactatttcagcaatgcagacaattaa

SEQ ID NO: 403217 - DNA, 90 bp, Homo sapiens
cacccgttttggcattgctgctaagtacatgctggattgtagaacttctctctctacacatcatctcagagttggagcacctgacgtttg

SEQ ID NO: 403218 - DNA, 97 bp, Homo sapiens
aagcaagtgcctcaaaagctggaacagtgcatggccagcaagcactatctcagtgccactgacatgttgagcatgcttgagaagggaggataaaaac

SEQ ID NO: 403219 - DNA, 100 bp, Homo sapiens
cgaaggccgggacccggttccccggcccacagtgggggtgtgcaaacccgagagaactgggttcttcgtgaactttgtggttgggcaggatccgggctca

SEQ ID NO: 403220 - DNA, 82 bp, Homo sapiens
tttcgggggcacacgggggcgggccttcagctgaatttcactgcctcctggggagacttgcactacctggggctcactggcc

SEQ ID NO: 403221 - DNA, 100 bp, Homo sapiens
gcagcccccgaaggccctatcaggacatggagtatgaaagacgccccacagccaagctcttcaggatgttgaaaaggccatcatggtgtttgagcatacg

SEQ ID NO: 403222 - DNA, 90 bp, Homo sapiens
ctcaccacccctatccagacggctgcccttcaagtaccatctccagagaatacagagggcaaagatggatccaaagtaactaaacaggag

SEQ ID NO: 403223 - DNA, 116 bp, Homo sapiens
ccgagggggcatcatgaagcgggctggcggcgctgccgctcccgggcggccgcgggcgggcatgaacgctgctgtccgggctgtgacgcgcatgggcatttatgtgggtgccaaag

SEQ ID NO: 403224 - DNA, 100 bp, Homo sapiens
ctgagcccgagcctgaggccgagactgccagaggtgtgtcggcccagtccttcctccactgtttcacgatggccagcaccgccttcaacctgcaggtggc

SEQ ID NO: 403225 - DNA, 88 bp, Homo sapiens
gagcgcaaggacagcgcgaggtccgcgcagcccagcgcagccatgaccatggccaacctggagcgcaccttcatcgccatcaagccgg

SEQ ID NO: 403226 - DNA, 101 bp, Homo sapiens
gccgacctcgcagcccccgcgggcgcagccctttgcgcagccgccgggaccctggcccctgtcgagttacctggtgatgccgttcatgggcaccgacctgg

SEQ ID NO: 403227 - DNA, 60 bp, Homo sapiens
tctgttcagagaagtatgcaagctatggttgatactaaaggaggttttcccactatccgt

SEQ ID NO: 403228 - DNA, 51 bp, Homo sapiens
agcaaacagaaaattgtggaggttttgttgatgttctgccttactcaatac

SEQ ID NO: 403229 - DNA, 100 bp, Homo sapiens
ctcctacttcaccctgctggttggcatctacttcccctcagtcacagacgagggaactgagctgtcaaaactaagtgacttgattgaggccatgcagctg

SEQ ID NO: 403230 - DNA, 100 bp, Homo sapiens
gcctcgactccaaatggttgaaaacagatatacagtgttccttgcctgtatctccccttggttcaatagctaccagatttttggaagaggaggaactgag

SEQ ID NO: 403231 - DNA, 75 bp, Homo sapiens
cacctcactattgatggtgtagcgctttaggggaagcctcccctggtgaagacacaaactgtcaccatctcagat

SEQ ID NO: 403232 - DNA, 88 bp, Homo sapiens
gtgatgcttaagctggtggagaaactcgaaatcacctgctaagaagctgactaatgcattaagcaagtccctgagctgtgcttccagc

SEQ ID NO: 403233 - DNA, 75 bp, Homo sapiens
cgccagcaccgtcctggccacgcaatttgaggaaagtcgaggccggaccagtagcaaaacagccttttaccaggc

SEQ ID NO: 403234 - DNA, 90 bp, Homo sapiens
tgctcggccgatgaagtgcagaggtttttttctggagccgggtgtgggctgagccctgcctgattgatgctgccaaggaggagtacaacg

SEQ ID NO: 403235 - DNA, 75 bp, Homo sapiens
agcgagccgccgacccgccgagcaaaatgaaacagaagcctatcagttgctgaagaaggccacccttcaggataa

SEQ ID NO: 403236 - DNA, 83 bp, Homo sapiens
taaatgcaaaggacatggccggccggaagtcttctcccctgcacttcgctgcagattaatactgaggaacacgtggatgcagc

SEQ ID NO: 403237 - DNA, 100 bp, Homo sapiens
tcctaatattgtatcttactacacatcttttgtggtaaaagatgagctgtggcttgtcatgaagctgctaagtggaggcactggaaatgtacaaagatga

SEQ ID NO: 403238 - DNA, 98 bp, Homo sapiens
atacctcaagggttctcttgtttatcgagggttttgggctggtggtctcggcaggtcatctcgatgcactcctgaggggcttggttctgggaaaacta

SEQ ID NO: 403239 - DNA, 75 bp, Homo sapiens
tacttccaggtgaatccaacaagatcccccgtctgaggactgacctttttccacctgcctagagctggaacgtta

SEQ ID NO: 403240 - DNA, 95 bp, Homo sapiens
gctgtcatcgtttgtcagaagaaagcagctggctcagaaaacagaccaagatcactccatggatgaaatgacagctgtggtgaaaattgaaaaag

SEQ ID NO: 403241 - DNA, 101 bp, Homo sapiens
taaggattccaagtaactcttatttgctgtcaccactgactaaagaagagaaaactgcggcagagcaattcaaatttcacatgccagatttatgaagaaat

SEQ ID NO: 403242 - DNA, 100 bp, Homo sapiens
cccgcctcggcgcgcacatcccgcggggcccggccgggtgcagagcatcctggccagaacaagccaaggagccaagacgagagggacacacggacaaaca

SEQ ID NO: 403243 - DNA, 98 bp, Homo sapiens
cccttgcactttgttttcaatgacaccaagttggacgctatgctggaagaatttaagaaaggaaactttgagggaaattttgagtcactggaccttgc

SEQ ID NO: 403244 - DNA, 97 bp, Homo sapiens
agcgactaactcctgcgcccctgaggcatccgcacttccactaatagccaagtagacaagctgaccctgtcagggagtgacagcgtcatccttggtg

SEQ ID NO: 403245 - DNA, 51 bp, Homo sapiens
tcgacaggcggcgcgggcggcggcatttattaatacagcaaaagaaattta

SEQ ID NO: 403246 - DNA, 90 bp, Homo sapiens
tgcttctcaggagccctcacccatttccgccatggagtcatagttgcagctgactccagggctacagcgggtgcttacattgcctcccag

SEQ ID NO: 403247 - DNA, 87 bp, Homo sapiens
gatttcgtcccagcctgacaaccttggaacagaacaagaggacaggaggtgtcgttccaggcaaaacaacgagtggatgagaaaccc

SEQ ID NO: 403248 - DNA, 78 bp, Homo sapiens
ggctcgccttgtatctcaacaccctgagtgcggatttctgctatgatgacaggatctgtctggctccattgatgacct

SEQ ID NO: 403249 - DNA, 100 bp, Homo sapiens
agtgcgtcaatcagagcgtcctgtgcggactgctgtgtaagctatggtggcatgtggtaccttaaagggacagtacagtcttgacaatagtagcaaacta

SEQ ID NO: 403250 - DNA, 50 bp, Homo sapiens
aaaaagcactgactgctctgcttaatcccccccgaagggcgtgaccatcc

SEQ ID NO: 403251 - DNA, 82 bp, Homo sapiens
tggcactggcttggtaggcagcttggagctggaagaagagcagccagggccaattcctgtccccccagcagcatggcatcgt

SEQ ID NO: 403252 - DNA, 132 bp, Homo sapiens
ctgcttgtgagaaatccaattcagctttttgtgctgccagcaagaaatgatcagtagcaccagtgtttatggattctggactctacttataatatccctaactgctggattctcctgttgcagcttttcttg

SEQ ID NO: 403253 - DNA, 100 bp, Homo sapiens
ctgggacagcaagacctccgctcaggcccctctttcgaatgctccacgccctcctgcgatctagaatgataactacgtgtctcgaggatgatctgctcag

SEQ ID NO: 403254 - DNA, 100 bp, Homo sapiens
gaaattgtgtgtccatcttggttttgagctctgctctgcctgtgatgtcgagaacactggacctgcaatgcttcttttgccacccgagaccgtctgcgct

SEQ ID NO: 403255 - DNA, 82 bp, Homo sapiens
tcgcttcggaggggaaggctgaggaaaggtccagggagtcggtagtaagggatggcgggacgtcaccacctttttttcgggg

SEQ ID NO: 403256 - DNA, 74 bp, Homo sapiens
acaccccatgctgcattccagccaaattcccagctcagcgacccttccctctatgatgaagtgcattgaagaga

SEQ ID NO: 403257 - DNA, 101 bp, Homo sapiens
agggtggtggaaatagctcatgggaacccagaagaggtgacgctcttgcaagcttaggatatgaaaagagctgtgtgttgttcaattgtgcagccttagct

SEQ ID NO: 403258 - DNA, 74 bp, Homo sapiens
tgcgcttgtcaccatcatcaccgtgcccgtggttctgctgaacaaaggcaatagtgtgtgtaccatatcagtgg

SEQ ID NO: 403259 - DNA, 90 bp, Homo sapiens
attcagctttgagaactttcagtcccaagttactcaggtgatagaggggaaatgtttcaacgtgcgcaagcgttgcggcggcgggcagag

SEQ ID NO: 403260 - DNA, 101 bp, Homo sapiens
aggtgatctggacaaaggaacaggtatctcagttggagtgcctcaagcttattgcctctcaaaaatttacagacaaacgcattggctatttaggggcaatg

SEQ ID NO: 403261 - DNA, 100 bp, Homo sapiens
tctgactgcggcgtgggagtggaaggaaagttaagtgggcagaccaacatccacctcagcaaaaacttcttcctgacgaatcgcgccagggagcgctcag

SEQ ID NO: 403262 - DNA, 75 bp, Homo sapiens
atcaccatgaaggccaacagttttgagtccagattaacaccaagcaggtgactctgacatcattagaagcatgcc

SEQ ID NO: 403263 - DNA, 109 bp, Homo sapiens
tcctaaaggagatggaagtgatgtaccatcatgggtagcctttgataaacaggttttagctaaagaagatactgaggcagctattcaatcaatattatacaaagaaaat

SEQ ID NO: 403264 - DNA, 71 bp, Homo sapiens
ggtgaaaccattgcactgctctttgagcttgcccgggaccttgaggaggagaagctggagctgcagaagtt

SEQ ID NO: 403265 - DNA, 99 bp, Homo sapiens
aggatctttgctcttccatccgcctttgatcgtcttcctcttcagccatccagatgagatcgtggggctcaccagcgtcccccatggcttctgagtagc

SEQ ID NO: 403266 - DNA, 98 bp, Homo sapiens
ctcaggaagaccttccgggcagagaccagagggaaggtcagtaacatcaaccagcccctggagattacagccatctcgtccccggagacctccctgaa

SEQ ID NO: 403267 - DNA, 82 bp, Homo sapiens
ctggtggtttgtgtatgacgccgagggacctcacatcaacttctaccagctgggtgtgggccgaagatatgctcatgtggtg

SEQ ID NO: 403268 - DNA, 100 bp, Homo sapiens
tcgagtctgcagtcgcccgggcgacggcggggtccgcgcggccagtttgtcaggctgtcccagagcaacctttgctggaaagaagggaaaactgtcaggg

SEQ ID NO: 403269 - DNA, 99 bp, Homo sapiens
cggatctggaggagcagttgtctgatgaagagaaggattctggactctacttataatatccctaactgctggattctcctgttgcagcttttcttggac

SEQ ID NO: 403270 - DNA, 82 bp, Homo sapiens
gtttgacttagtggaggaggtgcagctcaacttctaccagttcctcggggtgcagcagacctgcctagagctggaacgttac

SEQ ID NO: 403271 - DNA, 75 bp, Homo sapiens
acttctaccgaccagagacccagcaccggttgtttgactggctggtatcagtgatcaacagcagcatctgtgcag

SEQ ID NO: 403272 - DNA, 74 bp, Homo sapiens
cgtggaggagctgtgggtggaagccaacaagtcccaaatttggaaaagctgactcatatgaaaagctggaaaaa

SEQ ID NO: 403273 - DNA, 90 bp, Homo sapiens
gatatttgaagttgatgtggaaattgccaaacaatctgtgactattaagaccatgttggaaggccctttgaagaccccaatagcagccgg

SEQ ID NO: 403274 - DNA, 97 bp, Homo sapiens
ggctccggctcatggcatcaagtggcatccatcataaggttgggaatgtatcgtgaagcagaaaaacagtttaaatcagccctgaagcagcaggaaa

SEQ ID NO: 403275 - DNA, 75 bp, Homo sapiens
gccagggaaccctggtcaccgtctcctcaggagaactacgatgacccgcacaaaacccctgcctccccagttgtc

SEQ ID NO: 403276 - DNA, 74 bp, Homo sapiens
gtcggagaaggtggtctaccggcgcttcaccgagatctacgagttccattcctcatcaccgggggcatcgtggc

SEQ ID NO: 403277 - DNA, 101 bp, Homo sapiens
ataagaacatgaagctgggacagaaagtgttaattcccgtaaaacagttccctaagtgtgtatgtacagagaaccatcgctacatgaaattggagaaaaac

SEQ ID NO: 403278 - DNA, 100 bp, Homo sapiens
gaacagaatgctaaggaagctgtggcaagtgactctgacatcattagaagcatgccagaacagactggtgaaaagtaaaccttttcacctacaaaatttc

SEQ ID NO: 403279 - DNA, 96 bp, Homo sapiens
gaaggaacgaggcaaggagctaaagcagcgtgcgttcagccctggggctaccggctctctgaccagttccacgacatcctcattcgaaagtttgac

SEQ ID NO: 403280 - DNA, 100 bp, Homo sapiens
gcggaatgacagcggcgaggagaacgtcccgctggatctgacccgaggtgtggatgaggtcaccattgtcaacattttgaccaaccgcagcaatgcacag

SEQ ID NO: 403281 - DNA, 96 bp, Homo sapiens
ccagatgagttcttccagtcccctgaggtgatggcaggggcaagattcttgccaagagaattaatgtgcgtattgagcacattaagcactctaaga

SEQ ID NO: 403282 - DNA, 83 bp, Homo sapiens
gagcgggtaccgggcgcgggcagagcgcggcggcgcggctgtatccagcatgctccaaggccacagctctgtgttccaggcct

SEQ ID NO: 403283 - DNA, 83 bp, Homo sapiens
tgggagcgtgctttccacgacggtgacacgcttccctggattgggtactccaaagattcaggtttactcacgtcatccagcag

SEQ ID NO: 403284 - DNA, 75 bp, Homo sapiens
tgttcatcaaggacaattgcatgcacttacagagccttccttgaatccagaagctggcaaacagcatcagccatg

SEQ ID NO: 403285 - DNA, 51 bp, Homo sapiens
cgccgtgcagctcgccgcctaccgcaagtcagccctgacaaaggtcagcta

SEQ ID NO: 403286 - DNA, 50 bp, Homo sapiens
agcagaggaagcttcgggaggagcttcacgttacagcatggaagctgttg

SEQ ID NO: 403287 - DNA, 100 bp, Homo sapiens
acccagtcccacttcaaacattcgtctcggaaaccccgcctcttacagtcacgaggagtcgatagcagcagttggtgacgagatggcactcagaaacggc

SEQ ID NO: 403288 - DNA, 98 bp, Homo sapiens
tgagaatgtccatggatttgtttctcattctcatatttcaccaataaaggtcttctgaatattgtgatggagccattttttaaaagagaagtttttga

SEQ ID NO: 403289 - DNA, 83 bp, Homo sapiens
gcgcggaggggcgggggaggcgccgggaagtcgacggcgccggcggctcctggtcaaaatgcagatcttcgtgaaaaccctta

SEQ ID NO: 403290 - DNA, 75 bp, Homo sapiens
aaccggcagctaaagtagactcgccgtcaaagaagaaaggatgaagatttgataaagtggaaggcactgtttgag

SEQ ID NO: 403291 - DNA, 97 bp, Homo sapiens
cggccgtcagcaacctcgtccgggactacaaagctgatgaagacccagcattattccagtcagtcaagaccaagagaggccctttgggacccaactg

SEQ ID NO: 403292 - DNA, 51 bp, Homo sapiens
gactaggcaccagcatgcagagtaatggcttgttcaatcagtatatcagtc

SEQ ID NO: 403293 - DNA, 95 bp, Homo sapiens
cacaacatctactattggcatgtgattgcagccaagctggcttttatcattgtcatggagggggattcccgaagtcttccgttttctgagaatgt

SEQ ID NO: 403294 - DNA, 138 bp, Homo sapiens
gacacctcggcacgcagcggagatgcctctttttgccaccaatcccttcgatcaggatgttgcttagaccatgctcagcctccaagcagccttgtcatcgacaaagaatctgaagtttacaagatgcttcaggagaaa

SEQ ID NO: 403295 - DNA, 90 bp, Homo sapiens
ctacaaaggtctggacactgaaaccaccgtggaagtcgcctggtgtgaactgcagaccggagtacactgggaagcatcaaagaaggaatc

SEQ ID NO: 403296 - DNA, 75 bp, Homo sapiens
cgtgtggacccgtaaaataaaatgggagagaagatgactgaggaggaggtggagaccgttctggcaggacacgag

SEQ ID NO: 403297 - DNA, 51 bp, Homo sapiens
catctcaccaatttcaaatctgaatcggaagactttttgatggtacagagc

SEQ ID NO: 403298 - DNA, 101 bp, Homo sapiens
gccgacatcgacgccgcctggcaggccctgcgcaccaggcacgggcgaaacgcccacgctgggcactctggacttctacatggcccggcttcacggagcca

SEQ ID NO: 403299 - DNA, 83 bp, Homo sapiens
tcatggggttgcccagggggccggagggccagggtctcccggagtggtcccaggctgcacccatggcagaaggaggagggcag

SEQ ID NO: 403300 - DNA, 76 bp, Homo sapiens
agacgacatcaagtaccgtacctctatttacagatgtagagctaaaacgactgaaggatgctttcaagaggacctg

SEQ ID NO: 403301 - DNA, 83 bp, Homo sapiens
ggccgacccggcccgtagtgtggaagcagcttcaggattttttatcaagcagaaatgcatcgaacaacgagaatcaagatcac

SEQ ID NO: 403302 - DNA, 100 bp, Homo sapiens
ccccctggtgtggcatctgaagacagagagacttgccactggggtctccagactgtttttgattttatcatgtgggcaacctgctgcaactggttctgcc

SEQ ID NO: 403303 - DNA, 100 bp, Homo sapiens
cagacccgagtggaatctttagaatctcaaacaagacaacttgagctgaaagcgaaaaactatgctgaccagaaaagctaccctggttgaccatgggatc

SEQ ID NO: 403304 - DNA, 73 bp, Homo sapiens
tgaaagaaattaaacattttgatgcagacgaatggaagttggatacactttgtgacttgtacgagacactgac

SEQ ID NO: 403305 - DNA, 100 bp, Homo sapiens
agccaaattgctcaactaagaccaagtcctcgctggactgctcagggtgccagacctcatcagtctctggtactcaggctggagtgcggtggtgtgatct

SEQ ID NO: 403306 - DNA, 90 bp, Homo sapiens
ctcgcctcctggatgactttgatggcacatacgaaacccaggaatcagagatcattgatttcttcctgggggcctctctcaaggatgagg

SEQ ID NO: 403307 - DNA, 90 bp, Homo sapiens
gacacatttgacattgatccgatggtggttactggctgcaggccaacttcaccatccgggaagatgccaaccccagctcccgacagcgag

SEQ ID NO: 403308 - DNA, 88 bp, Homo sapiens
gggaggattgtaagatactgtgcctttgctccagggcatttgtggagtaatgggaaacccaggaactttcaaaagaggccttttactc

SEQ ID NO: 403309 - DNA, 75 bp, Homo sapiens
tcaggatcaacttgaacgaatatttctgcctggagaaaatgcagaaagataccagtgcaggaaaagaatctattc

SEQ ID NO: 403310 - DNA, 50 bp, Homo sapiens
cagattttgaaaattagattactacctgggtgtactgtatgacctagaca

SEQ ID NO: 403311 - DNA, 75 bp, Homo sapiens
cagctgctgtcttcaatgctgttaactggattgagtccagctcttgggatgggccatcactgtgcatgtccccat

SEQ ID NO: 403312 - DNA, 76 bp, Homo sapiens
caaggttatggatgtcacagggggccgttgctccagggagaactgcaaatatcttcatccacccccacatttaaaa

SEQ ID NO: 403313 - DNA, 75 bp, Homo sapiens
gtcggtcggcgcctgttctcgggctgtttggcgggagaacatttcaggataggaataggccaagtgctgagaaga

SEQ ID NO: 403314 - DNA, 75 bp, Homo sapiens
tgggcttggcttccggctccccccatctggctggaacacacatcagtcactttggacccaattaaatcctttgaa

SEQ ID NO: 403315 - DNA, 134 bp, Homo sapiens
ggatatccaaccctgaagatatttagagatggtgaagaagcaggtgcttatgatggacctaggactgctggacttggatgttgtgggtgatggtatgcagtgtcctccttcacctttgctttttgatccttcac

SEQ ID NO: 403316 - DNA, 50 bp, Homo sapiens
ccggagcttgtacagcagctaaggaatcagagatcattgatttcttcctg

SEQ ID NO: 403317 - DNA, 75 bp, Homo sapiens
cagaattagaagaaaaggaaccctggcctgaggttattaagtgtgatatgctgtgatctggacactcttctcctg

SEQ ID NO: 403318 - DNA, 85 bp, Homo sapiens
tgcagcgctgcacccgcaccctgcaggccgagggacgtgccaagaagcgcaagggccagttcaactttgtccacgtgatcgtcac

SEQ ID NO: 403319 - DNA, 100 bp, Homo sapiens
acttggatctttatataggatttaatggttggattgacttctaaggactcttggtacatgaggaagaaacccggaaggggaagaggaaagcaaaggcgtc

SEQ ID NO: 403320 - DNA, 97 bp, Homo sapiens
gaattataaagacccaaccaacttgcaggatgcttggttaccaagtaaaggattccaaagtggagcagcaagacaactttctaaaacgcatgtcagg

SEQ ID NO: 403321 - DNA, 100 bp, Homo sapiens
cttggcatttggctttgcctttctggacacagaagtatttgtgacaggatatgacatgtctacatttattaggcggtatagtagatatttaaatgagaaa

SEQ ID NO: 403322 - DNA, 49 bp, Homo sapiens
tcttagtgaagaattaggatacaggcacgtgacacaagctgacctcaag

SEQ ID NO: 403323 - DNA, 82 bp, Homo sapiens
cctccccgggcccctgagccatgcccatcgcagccgccccgaaggagccaggaagcggggagaggtggtgagagatgacccc

SEQ ID NO: 403324 - DNA, 133 bp, Homo sapiens
acccccagcatgagcggcctgcgcgtctacagcacgtcggtcaccggctcccgcgaagctcactcagtaacttgatggattttgtgaagaaaacaggcatttgcgcttcaaagtgggaatgggggaccactca

SEQ ID NO: 403325 - DNA, 75 bp, Homo sapiens
gcaggagaagctggagctcacggagaagaaggcctccgacgatgattcaaagccgccttactcctacgcgcagct

SEQ ID NO: 403326 - DNA, 90 bp, Homo sapiens
atttcggtagccatggcacaagaatatagtggggacccatcgtgaagatggcgtggccctgagaggcagccattctcttctgccaaacca

SEQ ID NO: 403327 - DNA, 87 bp, Homo sapiens
tggacttcgtgctatcaaaaatgccattgaagatggtcctagcagaagatgtgactcagactgcctctgggtggggctggctggccc

SEQ ID NO: 403328 - DNA, 83 bp, Homo sapiens
gtgattttttgcctttgttgattaactggacaaattcagcaattctgtggtgttcttggtcacacatttatggagtttctgaa

SEQ ID NO: 403329 - DNA, 50 bp, Homo sapiens
agtaggatggtgaagacctacgagggtggcgctccaaccccctttgaccg

SEQ ID NO: 403330 - DNA, 75 bp, Homo sapiens
caaaggtcaggttgagggatctggtgagggaatgcccggccccccaggacctccagggcccccaggccctccagg

SEQ ID NO: 403331 - DNA, 99 bp, Homo sapiens
gtggccaagacagaaccagtcagcattctacaaccccagaccaccgttaatccagatcgcatcaaacaagtaaattgggatattcacaatgtatggaaa

SEQ ID NO: 403332 - DNA, 51 bp, Homo sapiens
tgatggaattaaatctgcgagctacaagatcttcagtttagatcttggagg

SEQ ID NO: 403333 - DNA, 75 bp, Homo sapiens
caaaagacaactctgcttttccagaaactgtgccaggatcacgggcgacaagtcagcagtgagtgccagggggag

SEQ ID NO: 403334 - DNA, 100 bp, Homo sapiens
gatttgttaaggattccaagtaactcttatttggggaaggtgtggctcattgactttaatccatttggtgaagtcacagattcactgctgttcacctggg

SEQ ID NO: 403335 - DNA, 75 bp, Homo sapiens
gaccggcgcctcggacaccttcgagggttgggcctcaaggggaaggtatatcaggaacctttgtcccccaatgcc

SEQ ID NO: 403336 - DNA, 100 bp, Homo sapiens
agaagtagcatggaaatggagggcatcttcaaccacaaagctattcctgcaccaactgacctgaagttcactcaggtcacacccacaagcctgagcgccc

SEQ ID NO: 403337 - DNA, 100 bp, Homo sapiens
tgtgtgcacagaggaatcatcacctccaaatactggtcccacggcatacccagatggaagtagcaaagaaaagagaagagcagcaattgcccaggcctta

SEQ ID NO: 403338 - DNA, 50 bp, Homo sapiens
tgcgagagcctcctcacttgggtttcctcttactcgacccagtctttgta

SEQ ID NO: 403339 - DNA, 75 bp, Homo sapiens
tgtcaagtatcacatcaactccgtccatgctgagaccctggtgggcagcagtgggaccattctgaccacaatgcc

SEQ ID NO: 403340 - DNA, 100 bp, Homo sapiens
ttctcggcccggcgcctgggggactcgccattcaccatccgcacagaaggcctatgaaaggaggttccctacatgtcctttgattccgatgttcgtgggc

SEQ ID NO: 403341 - DNA, 98 bp, Homo sapiens
agcccagataagaggagctccctgtactttccccggtctccttcagcaaacgctctcatttcactcttcagtgttcctgttatttatgaacggcatca

SEQ ID NO: 403342 - DNA, 100 bp, Homo sapiens
ctcggaggggagggggcgttagccccgcgcagccgccggcgtcgccgccatggacctagtggtttccagtgacagtgacagtgactcggatcttagctcc

SEQ ID NO: 403343 - DNA, 82 bp, Homo sapiens
gaagaaattccagaagcagaagtatttgtcaaccccagacagggggatatgagactttctactcggaatatcctgagtgttg

SEQ ID NO: 403344 - DNA, 90 bp, Homo sapiens
cggtccgggacgtgcgcttccccacgtcgcttgggggccacggcgcggacgccatgaccatggtgaatccgggcagcagctcgcagccgc

SEQ ID NO: 403345 - DNA, 90 bp, Homo sapiens
gagattgtgaagaagaatttcgatctccgccctggggtcattgtcaggttccactgggctgattcccccctcccactttcaagctcggcc

SEQ ID NO: 403346 - DNA, 98 bp, Homo sapiens
tctgcaaacatagagaattctgggcttccacacaactccagtgctaactcaacagtgccgcagaatggaattcggcattgttcctacacagcttctcg

SEQ ID NO: 403347 - DNA, 94 bp, Homo sapiens
ctttacagaggaatagtctacaaaggaagacttgtaacctggagaagaggtaaaacttccttttcctgtagatcaaatcacagatcttccaagg

SEQ ID NO: 403348 - DNA, 60 bp, Homo sapiens
cgccagctgccatgagcgagcgcctccgtcccaggttatcagtgagctgaatggaaaaaa

SEQ ID NO: 403349 - DNA, 80 bp, Homo sapiens
cccgggaggaaggaacgaggcaaggagctaaagcagcgtgcgttcagccctggggatcatccagcagctcgtcaacggca

SEQ ID NO: 403350 - DNA, 78 bp, Homo sapiens
ctctcaactacaacatcgtttcagggcctccccatggccacccatggaccagtcggcattcacttcctcccttctgcg

SEQ ID NO: 403351 - DNA, 90 bp, Homo sapiens
cgtgagttcgccgctggtggctccggattttcagctgaactctcatctctcaacactggcaaatattcataagatctaccacacccttaa

SEQ ID NO: 403352 - DNA, 50 bp, Homo sapiens
ggaaaacaacccagctctggagaataacaaatgtggcaattattttggat

SEQ ID NO: 403353 - DNA, 90 bp, Homo sapiens
ctcccgcggcgcggcctctggctgctcctggctggcccgagataacttcttccgctgtggtgtgctgtatgaggactccctgtcctccca

SEQ ID NO: 403354 - DNA, 75 bp, Homo sapiens
caaaaacctttggacagtccaatgtcaacattgcccagcaagtgatttgtcaaagatgaaagtgaccttatcagc

SEQ ID NO: 403355 - DNA, 100 bp, Homo sapiens
caggagccataatgtcgacctgccggagtcgaggattccagggtcgaacactcgctttctgaggaagagaaaattcagcgctacagcatcctctccgagc

SEQ ID NO: 403356 - DNA, 102 bp, Homo sapiens
catgagtggaatccatgtttctggacgcggatttttggcctcatactctgttatagataaacaagaagctgttgtgaaggcagagcagcatctgctgaagag

SEQ ID NO: 403357 - DNA, 100 bp, Homo sapiens
ctctgccctatgaacagcttaagcacttttaccgaaaaccttctccccagccgagagacacacaagattgcagtattttatgttgctgaaggacaagaag

SEQ ID NO: 403358 - DNA, 83 bp, Homo sapiens
gcttcccagcttcaagtgattctcctgcctcagcctcccgagtagctagtattacaggtgaagctcgtgtgtggagtgccacg

SEQ ID NO: 403359 - DNA, 50 bp, Homo sapiens
ctcctgctggtggccacagcttggcatgatatggtccggcttgctttcac

SEQ ID NO: 403360 - DNA, 100 bp, Homo sapiens
ttggaacacagcagagggtgtgtaataaaatacagattgcgtacccactgcagagtgctgaagacggggtagccacgaggtgagaggctctctggtgtag

SEQ ID NO: 403361 - DNA, 50 bp, Homo sapiens
aaattctggaacacctatatggtgggcagacccagcaacatagggcaggc

SEQ ID NO: 403362 - DNA, 100 bp, Homo sapiens
gaagaacagctgtggaaagaagttgcaaaacactggacatgtgcattgccattgcgatttctcttctcatgatcctgatatgtgctatggctacttacgg

SEQ ID NO: 403363 - DNA, 92 bp, Homo sapiens
ggagtatctggtgaaatggagaggctggtcgcccaagagcaggccgggctctcgccatgggtcactgtcgcctctgccacgggaagttttcc

SEQ ID NO: 403364 - DNA, 100 bp, Homo sapiens
cttcagtgccgagttcaccaagttgcacgtgcattatttaatcacatagacaagtcaggattgaaggatagttctgtcgaagaactcaagaaaagatacg

SEQ ID NO: 403365 - DNA, 51 bp, Homo sapiens
agaaattctggaacacctatatgctcatgatggagcagtccaagaagtcct

SEQ ID NO: 403366 - DNA, 100 bp, Homo sapiens
cgaggagtttaatgccaccaaactgtttgaagttggctggtgtttggaatgctttatcctgcatattattcatacaaagctgtgaaaacaaaaaacgtga

SEQ ID NO: 403367 - DNA, 75 bp, Homo sapiens
ggccgaggagcggctgcccgcggcgccggaggacgcagtgtcatcattaggctgtctttgtgccttaacagtatt

SEQ ID NO: 403368 - DNA, 90 bp, Homo sapiens
gttgatggcattccagaatatctcagatgagcagccctggcttgaaaaacagtccaattgatgaaagtgaggtgcaaacagcaactgata

SEQ ID NO: 403369 - DNA, 100 bp, Homo sapiens
cggtagcagcaatggactttctcctggggaacccgttcagctctccagtgggacagcgcatcggtctaaagacattgccctcacagagtgaaatgatggc

SEQ ID NO: 403370 - DNA, 100 bp, Homo sapiens
cgccgagctggacccggaccggttttgggccctgctgctcctgggggccgccgccctggcctgcctcgccctggacctcctcttcctgctcttctactcc

SEQ ID NO: 403371 - DNA, 120 bp, Homo sapiens
ctgtctgtactacagcagttcaaggaaagtgacttatcacatgttcagctcctttggtgaagattaaacagagcttaacaaaactgaagcaagaaactgtagagatggacattagaattg

SEQ ID NO: 403372 - DNA, 100 bp, Homo sapiens
aggcagtgtaatctcattccatcttcattcatgactccagacaggtatggcctcacaagtcttggtctacccaccatatgtttatcaaactcagtcaagt

SEQ ID NO: 403373 - DNA, 100 bp, Homo sapiens
ctggaccctgcccaaaggacactgtacagggatgtgatgctggagaactgcaggaacctggcctcactaggtgcgggcggcacccagagactcacccgtg

SEQ ID NO: 403374 - DNA, 75 bp, Homo sapiens
ctggttacagtttcgactcctctctgcaagtgaataggcccagaaagcctcccgcgacgatgcccctcaacgtta

SEQ ID NO: 403375 - DNA, 50 bp, Homo sapiens
caaaatggaagagtgcgtgcttcccgaggagggcatcctggctgtttcac

SEQ ID NO: 403376 - DNA, 96 bp, Homo sapiens
ccaccgaggctgaggatgatggtagattgccaggaccaagaatcgccttcagccctgtctggtgcatccttggcagaaagtgaggaggaaaacacc

SEQ ID NO: 403377 - DNA, 90 bp, Homo sapiens
tttcatgggcgtcatgaataacatgcggaaacagagcgactactcaagcgacacagagagtgaggacaatttcctcatgatgcccccgcg

SEQ ID NO: 403378 - DNA, 74 bp, Homo sapiens
agacctgcgtggtgcactacaccggtagaacgtcatgacatgaataccttaagcctgcccctgaacatacgccg

SEQ ID NO: 403379 - DNA, 100 bp, Homo sapiens
gtcctgctgggggtcggcctgtccttagtcggggagatgttcctggcgtttaggcagacgccgggattgcgccgcctgcagggacctgcccagtcttaac

SEQ ID NO: 403380 - DNA, 75 bp, Homo sapiens
ctttatgggaaacctcagcttgatgatgtatctcagggtgataaaagaaaatgtggctgaagttacccgaagttc

SEQ ID NO: 403381 - DNA, 50 bp, Homo sapiens
agcgaatcctcaagcataacatgatatgatttttcttcagggaacagagg

SEQ ID NO: 403382 - DNA, 75 bp, Homo sapiens
tataccgtgaagggcattcagaaatacaaagcaaagattgtttttgcaggatctggggactttgatgattttaac

SEQ ID NO: 403383 - DNA, 87 bp, Homo sapiens
gacatcaagagctgcgagatccaacagggatgatcatggtgattttactgctgcttgtggctatcgtggttgttgcagtctggccga

SEQ ID NO: 403384 - DNA, 83 bp, Homo sapiens
agagcgacaagccgctggcagccgcggatctcaccgccgctcagggaaaacagtcgcctacagaaggagattgtggaagtggt

SEQ ID NO: 403385 - DNA, 50 bp, Homo sapiens
gcagatccttatcgccgacctcaggggccaggagtaaatagtatggatgt

SEQ ID NO: 403386 - DNA, 83 bp, Homo sapiens
tggctatggtgggcaaactaagccgattttccggaaaaaggtggactgggtggttatggatcaggagacagtgaagatgagag

SEQ ID NO: 403387 - DNA, 101 bp, Homo sapiens
gccatggaagctgccggcagccctgcggctacggagacaggcggaggttgcagcgagctgagatcatgccgttgtactccagcttgggcaacagagtgaga

SEQ ID NO: 403388 - DNA, 98 bp, Homo sapiens
atcatgctctggaattttggcatcaaggacaaacccaccttcatcaaaggggaagaaatctttcctgttttctgctctgtatgctgcctttatattcg

SEQ ID NO: 403389 - DNA, 83 bp, Homo sapiens
gacagcgccttcctcaacgacgcggacatggtcatgagctttgtgaacctgggtgagcgagtgctgtgctttcatgggcctct

SEQ ID NO: 403390 - DNA, 98 bp, Homo sapiens
tccgaggccttgaacgacaagcacgggccgctggccggagaaattacgacaactacgagactgcattattgggaaaaggccagaagaagaaaatgtct

SEQ ID NO: 403391 - DNA, 75 bp, Homo sapiens
cgggtctcgggggccgctctgggatcccggccaccagcaattgtccggtttttagaacttcagccataaaaatgg

SEQ ID NO: 403392 - DNA, 83 bp, Homo sapiens
cgcggagctgcttaagcccttctcccgcctcacttccgaggatcacaagatttctgttgtgaaggatgtggctctgccatgaa

SEQ ID NO: 403393 - DNA, 100 bp, Homo sapiens
ctcggcccgcgggggagccccgggagccgcacgcttgccaattctgtaactccttgggatatcttgctgagcttaattgcagctgccactcatgatctgg

SEQ ID NO: 403394 - DNA, 50 bp, Homo sapiens
agagcaccaggcccaccgtgaaagtttttcacagcatatggtcctgatta

SEQ ID NO: 403395 - DNA, 97 bp, Homo sapiens
tggctttgacgccgagagctacacgttcacggtgccccggcgccacctggagagaggccgcgtcctgggcagagatgcctgtgaggagccaccaaca

SEQ ID NO: 403396 - DNA, 100 bp, Homo sapiens
acaagctgaaccccaaacccaaattcttcgttctgtgcggcgacctcatccacgccatgccagcgaaaacagtgttacaccagaagagcagccggcctcc

SEQ ID NO: 403397 - DNA, 82 bp, Homo sapiens
ctcggggcgggcgccgcgggacctctccgggccatgggaattgaatgatctggcacgggaccctccagcacagtgttcagca

SEQ ID NO: 403398 - DNA, 82 bp, Homo sapiens
gaaaaaggaagaggagaaggaaattgtcccgaatccctgcagcaaccatgtccaagggacctgcagttggtattgatcttgg

SEQ ID NO: 403399 - DNA, 75 bp, Homo sapiens
cctggctcaagtgatctcccaccttagcctcccaagctgacctggatatcaccgaaataaacaaactaacagcag

SEQ ID NO: 403400 - DNA, 99 bp, Homo sapiens
gttgagctcgcgcgggctgccgggagtggtctctgaggcggcggcggcggcggggatcgtctccggcattcaaaaggtgatgacctatcaacagccatt

SEQ ID NO: 403401 - DNA, 99 bp, Homo sapiens
ggactgcactacaccgtgcacattctctgttctaagtgccttaagagaggatcgcccaatccacatgcttttccagtgctgctgcagcacggagctgac

SEQ ID NO: 403402 - DNA, 75 bp, Homo sapiens
acttttctcagatgttggatatttgcttggaaaaacgtgtgggtacgaccttgcaactccgatccaatatccgag

SEQ ID NO: 403403 - DNA, 100 bp, Homo sapiens
cagcttagcgctcggccgctggcgacagcggagggcggaggatctgcaggttccgggggacgtgtgccgtggaggtcccagcccccgctgcggttctcgg

SEQ ID NO: 403404 - DNA, 50 bp, Homo sapiens
cgacgccgtggctgccaagcacccggttccttgcattgactccatggaga

SEQ ID NO: 403405 - DNA, 100 bp, Homo sapiens
ctcaggtgctgaaccagatgatgaagagtatcaggaatttgaagagatgctggaacatgcagagtctgcacaaagtcctttgtcatggataaaaggcttg

SEQ ID NO: 403406 - DNA, 100 bp, Homo sapiens
aaagggagcattccgatcatctgaggaacagcaggctacggagagtgaggtaggagatgtagatttgacacgtcttccagaaggacctgttgattctgag

SEQ ID NO: 403407 - DNA, 100 bp, Homo sapiens
cagagaatggagaagaaggttgattccagaatctcgctctgtcgcccaggctggagtgcagtgggctcgctgcagcctctccctcccaggttcaagcaat

SEQ ID NO: 403408 - DNA, 111 bp, Homo sapiens
tgggctgtgacgcgcgcgccggagcggggtccgatggttctcgaaggcccgcggcgccccgtgctgcagctgaagtctatatcggcatcgggaagcctgcagaagccacag

SEQ ID NO: 403409 - DNA, 100 bp, Homo sapiens
agtttgtggcctcctaccaggagctcatggttgagtgtacgaagaaatgaactcctgggacccttggacagaggggatatgctaaatgaagcatttattg

SEQ ID NO: 403410 - DNA, 50 bp, Homo sapiens
caggactggctacctcatttgcagctttgttttccggaaagttcgaagct

SEQ ID NO: 403411 - DNA, 90 bp, Homo sapiens
tcctctacagcatcggcagcaagcctctgcaaatctgggacaaaaaggtgggccttaatgtcctggttcagaaagccaacaagttcaccc

SEQ ID NO: 403412 - DNA, 100 bp, Homo sapiens
aagagacattagaggtcatccaaagcagccgtcccctctgcagcctctctgacaagtgaaactctataaaacaggtcgggagatgcaggagaggatcatg

SEQ ID NO: 403413 - DNA, 50 bp, Homo sapiens
gagcggagggagccccagacacggaaagtaatggaccagtgaaggtgtgg

SEQ ID NO: 403414 - DNA, 50 bp, Homo sapiens
ggaagacggagctggtcggcccgaaggtttttagaacttcagccataaaa

SEQ ID NO: 403415 - DNA, 75 bp, Homo sapiens
gcaagatggtgttggaaagcactatggtgtgacaacctcatcagccttgaaaggtgccatccagttaggcattac

SEQ ID NO: 403416 - DNA, 83 bp, Homo sapiens
cgcgcgaccgccgaatcgctcctgcagcagagttccagggtctccctccactgctgtagtaacccgggtccggggcctcggtg

SEQ ID NO: 403417 - DNA, 100 bp, Homo sapiens
ggagctcaagacggtggcccacgccggaatggatgccgaggaatgtgacagggctgggagtgtggccacctgccaggccgtcatgcgtgccgtgattggg

SEQ ID NO: 403418 - DNA, 75 bp, Homo sapiens
catgctgcttttgatgtctgacaacgtggatcgttgttttgaaacgcatcaagcatgatggaaccatgtgtgata

SEQ ID NO: 403419 - DNA, 98 bp, Homo sapiens
tcaaggcccgcggaacagcggaggacgaagagcgggacccgagccctggtagttccaatttgccagcagaatgagtacagaaagagactcagaaacga

SEQ ID NO: 403420 - DNA, 100 bp, Homo sapiens
aaaaacagctgggctcccttggagacagagcgccatgggaaaccgggtctgctgcggaggaagctgtttacgtttaataagaaggagacctgtaagcttg

SEQ ID NO: 403421 - DNA, 84 bp, Homo sapiens
cgccacctactattacccccagtatctgcaagccaaggtgctggagaatctggtaaaagcaccattgtgaagcagatgaggatc

SEQ ID NO: 403422 - DNA, 75 bp, Homo sapiens
gcaaaaatcccatctaccgcaactctcagttcgagagtaaaggacaagatcgcagaggaaggtgggcggcgggag

SEQ ID NO: 403423 - DNA, 76 bp, Homo sapiens
agcagcaggagctggaggccgtgcggaagagagaaaaggaacagttccgtaagctctttattggtggcttaagctt

SEQ ID NO: 403424 - DNA, 93 bp, Homo sapiens
caatatctgtcttcggtggactccttcggcagtccacccaccgccgccgcctcccagcaggttacgggcaggacttgagtggcttcggacagg

SEQ ID NO: 403425 - DNA, 75 bp, Homo sapiens
cagtgaaggacaaaatcctttgcatttgataatgggctgcattaaaagtaaagaaaacaaaagtccagccattaa

SEQ ID NO: 403426 - DNA, 82 bp, Homo sapiens
gtggggctcggccgcgcggactgaaggagactgaagggccgagaactactggtggcgtggccagaacacacggacgctgtgt

SEQ ID NO: 403427 - DNA, 75 bp, Homo sapiens
cgacatcagtgaagaagatcagtggatatcttgacctacgtggcttggaagataagtggttttcccaaaaaccgt

SEQ ID NO: 403428 - DNA, 51 bp, Homo sapiens
cagccctcagtttctggagctgttccgagggctattgagtggccagacttc

SEQ ID NO: 403429 - DNA, 140 bp, Homo sapiens
cgaaatcgccattgctgcccagcagctaggcatcaagtacatcgggatgaggaatgagcaagcgaactgataaatttcaaacggaagagagtggcagcatttagaaagaatctaattgaaatgtctgaactggaaataaa

SEQ ID NO: 403430 - DNA, 100 bp, Homo sapiens
aagacacagataaaagagaaagatagatgccctctctcttcatcttcacttgaaataccggatgattttggagatggcggacttccaccacaaatggagg

SEQ ID NO: 403431 - DNA, 100 bp, Homo sapiens
cagccttagccctagtgtagagtgctgcttttgacacaaaaacggggttacgtgtggcagtgaagaagctctccagaccatttcagtccatcattcatgc

SEQ ID NO: 403432 - DNA, 75 bp, Homo sapiens
atttttactctttgaaacagtggggcaatgagctcaagtcagaagccaatgacctggccctgaggctggctcgcc

SEQ ID NO: 403433 - DNA, 155 bp, Homo sapiens
atatgcgaaggaaaaaccacacacaccagcaagatattgacgacctcaagcggcagaatgctcttctggagcagcaaggaaacccctcctggagtttccccaaagccatggacagccctagtcttcgtgagcttcaacagcctctgctggagggc

SEQ ID NO: 403434 - DNA, 101 bp, Homo sapiens
caagaccatgctggcaagtctgaaggtcaagccccttcacagatgtagtcactacaaatcttaaattgcgaaatccatcggatagaaaagtgtgtttcaaa

SEQ ID NO: 403435 - DNA, 100 bp, Homo sapiens
cggctgctcgggctgaccccacctgaggaaggccaggagaatgtcgagatcctcccctctggggagcgaccgcaggccaaccagaagcgaatcaccacac

SEQ ID NO: 403436 - DNA, 100 bp, Homo sapiens
ctggcggccgttgaaaaatggcgactgtggcagagttgaaggctggtagtgtgccagtatttgaaaaatcccaatgtatctgattcactgctgctgcaga

SEQ ID NO: 403437 - DNA, 75 bp, Homo sapiens
gcgccgcggacgcgtcatcgagtgtgacgtggtgaaagaggatggcattccctgtggatatgctggaaaattgca

SEQ ID NO: 403438 - DNA, 50 bp, Homo sapiens
gcgacctgcgcaaagccagcgtgaccatctttccaacatggctagatcca

SEQ ID NO: 403439 - DNA, 100 bp, Homo sapiens
agaaaactgaagctcagagagtgaaaggacttgcctaaagacacacagctgaggtggtgcggagctcctgtttgacggtattaagaaacatcgagtcact

SEQ ID NO: 403440 - DNA, 82 bp, Homo sapiens
acaagttcatcaagcaaagggactaccaccagcagcacttttctgtagaaggtcagttggaattcagggcattgctatttat

SEQ ID NO: 403441 - DNA, 50 bp, Homo sapiens
ctttcctctgctgccgctcggtcacgcttggatatcactactttaactgg

SEQ ID NO: 403442 - DNA, 100 bp, Homo sapiens
cgccaccactgcgtcgggctggtgcagccccgggccaggccgcggccggggcaggagcgcaggctcttaaagactctgaccaagtagcacagagtgatgg

SEQ ID NO: 403443 - DNA, 99 bp, Homo sapiens
cgcggctgaccctgatggaggaagtgctcctgctgggcctcaaggaccgcgagattgagaggatccagaatccagatctctggaatagctaccaggcaa

SEQ ID NO: 403444 - DNA, 100 bp, Homo sapiens
agaagaacttgtacagagatgtgatgttggagaactatagcaatctggttttcttggaatgctacagctttccatgtaactgtccaagatgataataaca

SEQ ID NO: 403445 - DNA, 100 bp, Homo sapiens
gactactggggccagggaaccctggtcaccgtctcctcagtatcaaaggtgcagaatctgggacaagttgcatgaagagcatatcaatgcaggacgtaca

SEQ ID NO: 403446 - DNA, 100 bp, Homo sapiens
ggaacagcttacgtttctgcaacaactggtgccgtagcaacagctctaggactcaatgcattgaccaaggtacatcgaggaggccattgagaaactaagc

SEQ ID NO: 403447 - DNA, 80 bp, Homo sapiens
accatcacaccacctacagcccaggtggttggcgtgcttaagattcagaaattaaatgagcaagccgcagaactcttcga

SEQ ID NO: 403448 - DNA, 97 bp, Homo sapiens
cctgtgggatttattattttgaagtaaaaattgtcagtaagggaagagatggattctggaacttttcaaagcctgactctcttcttgaaacagtgga

SEQ ID NO: 403449 - DNA, 75 bp, Homo sapiens
gaaaacggaagcgcagggagaaggaagaggtgtttgaaaaggttgtctgcattcaaaagagcattctattaaagc

SEQ ID NO: 403450 - DNA, 76 bp, Homo sapiens
cttgtgatgacttggatgaagctgctagaatgtgtttctaagacctcagagaaatttggaatctatagacccgcag

SEQ ID NO: 403451 - DNA, 76 bp, Homo sapiens
gcaatcctaccatgtcagccttcccagtagctggaactacaggtcgccccacggctgaattctcggtgataaaggc

SEQ ID NO: 403452 - DNA, 74 bp, Homo sapiens
accaaaaatgaacctgtgttaaaacctggagacagggtatcctggatacagccatcgttgatcgggggaggaat

SEQ ID NO: 403453 - DNA, 75 bp, Homo sapiens
cgaagttggaagtgtctcttagcagcgcgcggagaagaacggggagccaggcccggagcgatggcagccttgatg

SEQ ID NO: 403454 - DNA, 100 bp, Homo sapiens
cacaggcagcccagagccctgccggccaagtgaaacatcttacacgggactggagaaccacagcacatgctttgaagtattcagtggtccttgagttgaa

SEQ ID NO: 403455 - DNA, 75 bp, Homo sapiens
caagaaacaaatcttgaagcacctctccaggcatcattcttaacaaagaagttaaatattggtgggaaaagagta

SEQ ID NO: 403456 - DNA, 73 bp, Homo sapiens
gcccacgtcgcctgtcacccaatatctccagccgcgcagtcccgaagagttctcttcctcttccggctgggat

SEQ ID NO: 403457 - DNA, 75 bp, Homo sapiens
tgacagattctagccgctactttgtaatccggatccaggatggtactggaaagtgactattttaccccacaggga

SEQ ID NO: 403458 - DNA, 75 bp, Homo sapiens
atatcctcggaagagcgctcccaggagaaacaagaattgaatgatctggcacgggaccctccagcacagtgttca

SEQ ID NO: 403459 - DNA, 75 bp, Homo sapiens
ctttccgccagtgactccagagggacgggcataaaatcttgttattttaatttgcatctgggagaatgtctgagc

SEQ ID NO: 403460 - DNA, 98 bp, Homo sapiens
ctggatctctcattggactcaagccagcatggctcacaccacaaaggttaacggcagtgcctcaggactgagcagggggaggaacatttaagctgatg

SEQ ID NO: 403461 - DNA, 83 bp, Homo sapiens
aggaaatgcatctttatgtcagaaacacaaagcagcccaaccaaagggccagatggggactgtgcatcttcccttaatggtgg

SEQ ID NO: 403462 - DNA, 100 bp, Homo sapiens
gactagcggcggcgggagcggcgccgagaggccgtgcgggacgcgggcgccaggaccggccgaacgcagaggcacgtgtggttctcaaatataggcattc

SEQ ID NO: 403463 - DNA, 83 bp, Homo sapiens
cggtggtgctgtcgctcttgatactcggctcagcaaaatgatgcttcaacacccaggccaggtctctgcctcggaagtgagtg

SEQ ID NO: 403464 - DNA, 100 bp, Homo sapiens
atggattcgacttagacttgacctgttaacattcaagatggtacatgctgaagccttttctcgtcctttgagtcggaatgaagttgttggtttaattttc

SEQ ID NO: 403465 - DNA, 97 bp, Homo sapiens
catctttccaccgaatgccacctggtttataacaaaaggtgctgtgattgtctccacgccccaggacatcgcattgatggatgcacacaagggtgct

SEQ ID NO: 403466 - DNA, 100 bp, Homo sapiens
cagaaagcagctccataggggaggagagccacgcaggatctcacagctgcagtctaatagtaacacagaggcacacaagccatgccccctcttttctctt

SEQ ID NO: 403467 - DNA, 97 bp, Homo sapiens
tcatcggctccaccaagtccaacatggggcacccggagccagcctcggggctggcagccctggccaaggtgctgactcagaagttgtcatcagtcag

SEQ ID NO: 403468 - DNA, 95 bp, Homo sapiens
ctgactctctgaggctcattttgcagttgttgaaattgtccccgcagttttcaatcatgactttggatggaggcctgaatgtcattcaattagaa

SEQ ID NO: 403469 - DNA, 100 bp, Homo sapiens
caccttagaagatgtgattgaagaaatcatcaaatctgagattcttgatgaaacagatttatacatcaccaggagactaaagtccatcaaaaacatccag

SEQ ID NO: 403470 - DNA, 51 bp, Homo sapiens
cccagggcagaaatagcgaccatggcgagcaagtgatagaggttgtcaagt

SEQ ID NO: 403471 - DNA, 88 bp, Homo sapiens
gcagccaagctcatggcctgccactgcgtgcgaccagaggagcgagagcagcaagaaccacacccagcagcaatgtcagcggaagtgg

SEQ ID NO: 403472 - DNA, 83 bp, Homo sapiens
cacggacgcaacacttttggaacttagacgctaggtcctcactgagcagcgagtcgtcccccgtgtcctctccggccaccaac

SEQ ID NO: 403473 - DNA, 74 bp, Homo sapiens
agagcgctcctggggacttctccctctctgtcaacttttcctccgcaaccatgtctgacaaacccgatatggct

SEQ ID NO: 403474 - DNA, 90 bp, Homo sapiens
accgctctgcaggctgttcctcctcgggaggaggaagccaagaatctggtgagcgaagccatcgcagctggcatcttcaacgacctgggc

SEQ ID NO: 403475 - DNA, 140 bp, Homo sapiens
gaacgccggcaaccgcgagaaggcccagcgcttcctgcagaaggccgagaagctctacccactgccctcggcccgcgatttatcagcaagactgttgaacgcataactgcccaagatgcctgtccctccccctccagcac

SEQ ID NO: 403476 - DNA, 98 bp, Homo sapiens
tcgacatgagtgatgtggaggaaaacaacttcgagggcagaaccaagatggtccagcacattcgaaagaagcatccagagttcgcccagctctccaac

SEQ ID NO: 403477 - DNA, 100 bp, Homo sapiens
ctgaatttgaaggtggaaaatcaacagtgaattgtagaacccagtgacttgattgtaaaaatttacagagcggaatcatatgctggtctccaagagttta

SEQ ID NO: 403478 - DNA, 82 bp, Homo sapiens
tgcggaacaggacgccctctgatgtgctgaaggtcgccatcctggctgagaagtacgcggtggactacacctggtatgtgga

SEQ ID NO: 403479 - DNA, 75 bp, Homo sapiens
tcttcaagttttagaaaagcataaagctgatgttgtaaagctgcgtgaacattcacagccagcagcacgtactgg

SEQ ID NO: 403480 - DNA, 98 bp, Homo sapiens
ctcccttccccacgacggggcgcctctgcaactcacatccctgctatgtggatatttggtagcaatgactgatgtggaaactacatatgcagatttta

SEQ ID NO: 403481 - DNA, 51 bp, Homo sapiens
ggggggcggtggccggcaccgcagacctcagcagccatgtcgaagccccat

SEQ ID NO: 403482 - DNA, 100 bp, Homo sapiens
cagaaataggaaggttgttgattactcacagtttcaggaatctgatgatgcaggcacgtgtggttctcaaatataggcattctgatgggaacttgtgtgt

SEQ ID NO: 403483 - DNA, 75 bp, Homo sapiens
tcagcttgcattcagtcgtgatcttttagcaagtcagaatgaagatttgatttgaatataacctgccgctttgca

SEQ ID NO: 403484 - DNA, 100 bp, Homo sapiens
cggccgggtacgaggcgcctcgggtccccgcaccacctcctgctgccttcccgtcgccgctcccgaagcttttccagattgacttgatgcacaacatcac

SEQ ID NO: 403485 - DNA, 96 bp, Homo sapiens
tgtttccacagcagaggaattacagattcgggaactggagcctctcctctgtcacagtgacaatccatctcagctcatctggacatcatctcgcag

SEQ ID NO: 403486 - DNA, 100 bp, Homo sapiens
gatgtccctgccgcggaggtcgaggatccgctcgtccgtggtctcacagaaagttctccgctcccagacatgggtccctcggcttcctgcctcggaagcg

SEQ ID NO: 403487 - DNA, 123 bp, Homo sapiens
tccacaaagtcccctttgtgttcacataatgctgtcaggaactgtgaccaagatggactagaggcttttaccagatttcttaaaactgaattcagtgaagaaaatattgaattttggatagcc

SEQ ID NO: 403488 - DNA, 100 bp, Homo sapiens
acccacagcggggcggcggcggcggcggctgcggcccaatatagccactgaggcggctcccagctgcgttggcgacatggccgacacccccagagatgcc

SEQ ID NO: 403489 - DNA, 75 bp, Homo sapiens
caacatgctgtgatgtgtgccgagggaggaattgtaccttctccaggcaaattccgttcccctgcagcaccatct

SEQ ID NO: 403490 - DNA, 100 bp, Homo sapiens
gcgcatgtccttcctgttctccgctttcaagaggagtcgcgagtaccacttccgctgtcacggtaaagtccgccatcagaagactgaaggagttgaaaga

SEQ ID NO: 403491 - DNA, 100 bp, Homo sapiens
gtgtaatcagaaggcacagattagaggaaggaagaggcgctttgacttccgtccaaaacctgatccttattgtcaagctaagtatactttctgtccaact

SEQ ID NO: 403492 - DNA, 83 bp, Homo sapiens
gccgcaccatgccgctcctaagcctgcacagccgcggcggcagcagcagtgagagtttgtttcgacgccggaccgcgtaagag

SEQ ID NO: 403493 - DNA, 102 bp, Homo sapiens
acttctttaagcagtgtggggttgttaaggttttgatgtggccaagacaggtgatgctcgaattggatttgttggttttccatctgtggggaagtcaacact

SEQ ID NO: 403494 - DNA, 100 bp, Homo sapiens
gggggcccggagcggagctcggggcgcgctgctgctggcactgctgctctgctgggacccgaggctgagccaagcagtgatgtcttggcattgcccattt

SEQ ID NO: 403495 - DNA, 100 bp, Homo sapiens
ccacgggcaggctcctgcttctgctgctggtggggctcacggcgcctgccttggcgctggccggctacatcgagtaacagcaacaagtgggaatggagac

SEQ ID NO: 403496 - DNA, 82 bp, Homo sapiens
ccggggccccgggatctcggctgtccttcctcccgtgggtaattccagaattgattggccataccattgtcactgtattact

SEQ ID NO: 403497 - DNA, 115 bp, Homo sapiens
aaaaagaggaaagtggactgtccggggccgggctcaggagcagagactgattcttgctattccaaatcctcttccacgttgacagcccttcagatatttcaacactcctctcagc

SEQ ID NO: 403498 - DNA, 82 bp, Homo sapiens
gtgccgcgagcgcggcctgcaggagttgatattcactgatggactccaaagaatcattaactcctggtagagaagaaaaccc

SEQ ID NO: 403499 - DNA, 80 bp, Homo sapiens
gtcagcactgactttcagctatggaatcggtcacccaattgacaggtttctcagatcctgtatatgcagaagcttacgtt

SEQ ID NO: 403500 - DNA, 75 bp, Homo sapiens
tgatgatacaatttctgactggaatctaagatccaaggattctgtagctacaatgttgtcaagactttttcgaat

SEQ ID NO: 403501 - DNA, 90 bp, Homo sapiens
cttggatccgcgggacaagaaaattcatgcgtctacgcctgcaagctctcagaccgggaacatccactctacctgcgtttggtagcaggg

SEQ ID NO: 403502 - DNA, 100 bp, Homo sapiens
caggatctgcagctactgctgcatcagaagaaatgatgaacccacaagatcattgagtggtcttatcttgaagaataatgtgaaagcacactttcagaac

SEQ ID NO: 403503 - DNA, 95 bp, Homo sapiens
cctggactctgctcagagagatttgtatagagatgtgatgttggagaactatagcaacttggtatcactagatttggagtccaggaatgagacta

SEQ ID NO: 403504 - DNA, 83 bp, Homo sapiens
ccgagatgaatcctgcggcagaagccgagttcaacatcctcctggccaccgactcctacaagtggtcaaggaagtttgctcca

SEQ ID NO: 403505 - DNA, 100 bp, Homo sapiens
gctcttcagaaaccaggctgctttcaggaacattgctgtggattcccagctgctctgttaaaagcgaaaatgaaacaattgcctgcggcaacagttcgac

SEQ ID NO: 403506 - DNA, 74 bp, Homo sapiens
aggatctccgtgtagaactccttggagagtcttgtgaaaatgccattgtgtgctggaaacctggcaagatggaa

SEQ ID NO: 403507 - DNA, 75 bp, Homo sapiens
attagacctgataaattatatagacgttgcccagctttggacatcagacagtgcaggagaagaatgtgatgcggc

SEQ ID NO: 403508 - DNA, 73 bp, Homo sapiens
cagcctccaaagtagctgagactacagaaccgagctgaagctgccatggaattcttacaagaattaaatagcg

SEQ ID NO: 403509 - DNA, 99 bp, Homo sapiens
tcatcgctctcggcctccgacacgatgtgtcttgctgaatcagggctctcttatccctgccatcgacttacagtgggaagaagatcttcacctgcacag

SEQ ID NO: 403510 - DNA, 82 bp, Homo sapiens
ctagctattgccttattttttctcatggatgttcttcttcgagtatttgtagaagggactgcttcaccagtttttctactgg

SEQ ID NO: 403511 - DNA, 83 bp, Homo sapiens
tccagaagtccagagctgaggactgcctgtttgcagcgctgataaagcagtttgtgtccgacgtggcctggggggagctggac

SEQ ID NO: 403512 - DNA, 100 bp, Homo sapiens
caagggatgttgctgaacagttggagaagatctatgggtcagacagaattggtgcagtcaatttcactggggcaaggacaaggacctattgctgaaaaaa

SEQ ID NO: 403513 - DNA, 82 bp, Homo sapiens
cggaggcagaggtggaggcgctttgaaagaacatggtccaagacaattcctgggaaagttcagttcttctcaagtgagggtt

SEQ ID NO: 403514 - DNA, 75 bp, Homo sapiens
gagtccctcttcactttcctcggcaagaaatgtgtggacaccattgcagtggctagatttattgtttttttagct

SEQ ID NO: 403515 - DNA, 50 bp, Homo sapiens
cggagacatgggagacccggggtcggagccaagaagtatgatgcgttttt

SEQ ID NO: 403516 - DNA, 75 bp, Homo sapiens
ctgaagtaagcacagtagaactgctgcatctgcaacaacagcaggttctccccatgacaccacctgaacgtctct

SEQ ID NO: 403517 - DNA, 75 bp, Homo sapiens
cctgaggcggcggcgcgaggcaggatttaagtgccctgtatgctcaaaatttgtatcctcagatgaaatggattt

SEQ ID NO: 403518 - DNA, 100 bp, Homo sapiens
cgaagaagaaaggattcgttacagccagagattggtcgcccggctcatggagatgggattttccagaggtgatgctttggaagccctgagagcttcaaac

SEQ ID NO: 403519 - DNA, 51 bp, Homo sapiens
ggaatttatggtcgcctttttgaatgagatgttccatttaagcagacctct

SEQ ID NO: 403520 - DNA, 51 bp, Homo sapiens
acagaaacctggttttcttggcggttgctgatgctattagaacaagccttg

SEQ ID NO: 403521 - DNA, 100 bp, Homo sapiens
ggcattatccttcagtggggctattggactgacttttcttatgctgggatgtgccttagaggattatgggtactaggttttgacaagcttgcatcatgcg

SEQ ID NO: 403522 - DNA, 76 bp, Homo sapiens
gcaattgaaagttattaccagagggaaacaaaggacccatcgcaaatgttttccatgctgatctccaaagtggtga

SEQ ID NO: 403523 - DNA, 82 bp, Homo sapiens
gaagacgtccaatctgagcgtgctgcggacggcgctgcggtacatccaggaaggtgctcgggtcttcggggcactgggtccc

SEQ ID NO: 403524 - DNA, 75 bp, Homo sapiens
gataaaccaccgcttacagatattggacctggaatggccaaatatcaaggtgaagttcaaagtttgaaactggat

SEQ ID NO: 403525 - DNA, 50 bp, Homo sapiens
gacggcggcagcagcggcattcaggtcctgcacacccatgaagcgactga

SEQ ID NO: 403526 - DNA, 83 bp, Homo sapiens
catacccaaaaacatgcattggtatagcccaccagaaaggacaggtcaggatggctaactggttggctccccacatggtgccc

SEQ ID NO: 403527 - DNA, 100 bp, Homo sapiens
agtacagatcacacgcccactaaagcccagaagaatgtggctaccagcgaaggtgtcatggagaaactccagctgggcccagagattctgcagcgggaaa

SEQ ID NO: 403528 - DNA, 96 bp, Homo sapiens
agcagtccagcacggccaagtcagccacctggacgcctctgaagagccaatccattcaggatgggaaaccacgcaggcaaacgagaattaaatgcc

SEQ ID NO: 403529 - DNA, 83 bp, Homo sapiens
tgcgcggtcctggcgctcagccatacagtggagagcatcccagtgtttggggcactgtgttcctcttcgtccctgcaccagac

SEQ ID NO: 403530 - DNA, 82 bp, Homo sapiens
ctggaccgtcgccttgctcctcgccgcggcggggactgcagtcggctcctccctgaagaagaggttcaagcggcgggagatc

SEQ ID NO: 403531 - DNA, 75 bp, Homo sapiens
cgcaggtgcaggtgtctcttctcgccctggcggggaagcaactgaagcagcagcgggacaagctgaggcagtacc

SEQ ID NO: 403532 - DNA, 50 bp, Homo sapiens
actacaggaacgtggtctccctgggactcagtggtctttgaggatgtggc

SEQ ID NO: 403533 - DNA, 100 bp, Homo sapiens
cgactacgcggccgcggagacctacctgcggcgtcggcagctgctgctccgagggagttgaccacatttggccatttcccagaagggccccaccccaagg

SEQ ID NO: 403534 - DNA, 100 bp, Homo sapiens
cagcagggtattgtcaccagcaccacccagcaggaaatccttgcacgaggaattcttcttccattaataaatcaactcagtgatcctgattatattaatc

SEQ ID NO: 403535 - DNA, 82 bp, Homo sapiens
ggaaattattttgggtcttcttcttaatcccatatctggacatctggaacatccatggtgccgtgagcgatgtggagatgca

SEQ ID NO: 403536 - DNA, 98 bp, Homo sapiens
atatatcacccataatcggaatgtgatcacagagcctatttacccagaagtagtccatatggactacttccagcaacccagtctcctgccatgtccga

SEQ ID NO: 403537 - DNA, 83 bp, Homo sapiens
agacaaacagcccgcccgaccccgtcccgaccctggccgccccgagcggagcctggagcacatacccccggcctcatgagtac

SEQ ID NO: 403538 - DNA, 74 bp, Homo sapiens
gcgcccggccggacccgggcccgaggttcgtgctggccgtgggcagcgccgtctttgatgccatgttcaacggg

SEQ ID NO: 403539 - DNA, 83 bp, Homo sapiens
tatggccaacagttagaaatctgccctaaagtacatgccccacgcagtcctcaaactcctggagaacatgcctatgccttggg

SEQ ID NO: 403540 - DNA, 83 bp, Homo sapiens
caagaagatcatcattaaggacggaggcacgcggggatctgacgagcttttctctacttgtgtcactaacggaccgtttatca

SEQ ID NO: 403541 - DNA, 100 bp, Homo sapiens
gctcaagtatatcaagcattcaaattgctcacagctgatcctaaggatgctgaaatttctggaaaagacaatggaaatcaggggcaggaagagaacagtg

SEQ ID NO: 403542 - DNA, 75 bp, Homo sapiens
cagatatcaagaatacttcagtcaccaacgtgccaaatatgtgaattttgaagattgcaccggtcgacaaaggac

SEQ ID NO: 403543 - DNA, 151 bp, Homo sapiens
gttagagattacaatttgactgaagaacagaaggcgatcaaggccaagtatccgccagtcaataggaagtacgagtgtcaatgagctgaaggagaaaggcaacaaggccctgagcgtgggtaacatcgatgatgccttacagtgctactcc

SEQ ID NO: 403544 - DNA, 75 bp, Homo sapiens
cagattctgccaattcgttttcaggagcatctccaggagcctggctcaacccgtcagtgattcaagtaagactca

SEQ ID NO: 403545 - DNA, 100 bp, Homo sapiens
tcagatcaagcacagcagcctcatcaccccgttacaggccgtggcccagggaggagtctgctactagtcttatcagctcttaaaaacagaaactcatctg

SEQ ID NO: 403546 - DNA, 97 bp, Homo sapiens
acggcccgggccggcgctccaaggcccgcccgggagggccggggccgcgctcaggtgtcatggagaaactccagctgggcccagagattctgcagcg

SEQ ID NO: 403547 - DNA, 75 bp, Homo sapiens
ctccttcttcctcaactatctcgctgacacgcagatgctcagccagcattgggcagcccccgcttcctgctcccc

SEQ ID NO: 403548 - DNA, 75 bp, Homo sapiens
gtctggcgaagtgagcatcttgattagaagcagggcacgtgccttaacacctcaaactgcagaaacagatgccat

SEQ ID NO: 403549 - DNA, 100 bp, Homo sapiens
aatggaaatgagacaattgaagctcaagcagagcttacagtgcaagccaaagcgccagacaaacctattcaggtggtttatgtgccctcacatctgtttc

SEQ ID NO: 403550 - DNA, 82 bp, Homo sapiens
cccgccctctctgtttctccccaaaataaccattctccagatccagacagaatgttgctgcgggatgtaaaagctcttaccc

SEQ ID NO: 403551 - DNA, 100 bp, Homo sapiens
ttgatcaggtggaacagattcagaaggagcaggattaccaaaggctcactcctgggggcaaagcggcgcaggccggagtggccgtgggtgactgggtgct

SEQ ID NO: 403552 - DNA, 75 bp, Homo sapiens
aggtgaccggcgcgcgggagcgctacggccccaacgctttaaggaagcctcctatttcagtttctcaacatgaaa

SEQ ID NO: 403553 - DNA, 83 bp, Homo sapiens
aggatatcgacgtcgtgatccagaagtccagagctgaggactgcctgtttgcaggccttccggagcagtactacagcctcacc

SEQ ID NO: 403554 - DNA, 82 bp, Homo sapiens
ctgggcaaagaatgtagtcaatttagggatctgctggaggaaggaaaggccacggttccctgcctggcagaaaaacttacca

SEQ ID NO: 403555 - DNA, 90 bp, Homo sapiens
aatttctgtggaaaacagctggcaggtgaagatggagctggaaaaacaagcttaataagaaaaattcagggaatagaggagtataagaaa

SEQ ID NO: 403556 - DNA, 95 bp, Homo sapiens
gccccggggttgaggcgaggagcccgcgggcggccggtcgggcggggcggcggcgctgacagtgggtaattccagaattgattggccataccatt

SEQ ID NO: 403557 - DNA, 105 bp, Homo sapiens
gtctagtgctgcagggatctcggcatgaggccccttctcccaggaggggaggcacgtgagaagccctaccactgcaactgggacggctgcggctggaagtttgcg

SEQ ID NO: 403558 - DNA, 100 bp, Homo sapiens
ggccttcagacagttttggggtggtctttctcagaaacatgccaagggacaagtgttatttgacaaagtgtgtgaacacctcaatctcttggagaaagac

SEQ ID NO: 403559 - DNA, 73 bp, Homo sapiens
cagttcccagctgtggaacacacagcatcattagttattcctgctggtagaactcttccaagttttaccacag

SEQ ID NO: 403560 - DNA, 95 bp, Homo sapiens
ttgcaaggatattcctcatgtatcatgcaaggatattcctcatatatcatgtggaatcgtcccaagaagccaatgctgaggtgatgcgagagatg

SEQ ID NO: 403561 - DNA, 51 bp, Homo sapiens
ctcctgagtggctgggactacaggtaggccgccttttgcagcagttagcaa

SEQ ID NO: 403562 - DNA, 99 bp, Homo sapiens
gagtatctgccaaacgtagaccaaaggctcagcccacaactcttgtcctaccacctcagaagagagagaaaatccttcaaaacggagtagaattgaacg

SEQ ID NO: 403563 - DNA, 87 bp, Homo sapiens
cagaggggcagcttcaaaatgaagaaattgtgcctcccctggtgaagacacaaactgtcaccatctcagataatgccaatgctgtga

SEQ ID NO: 403564 - DNA, 82 bp, Homo sapiens
ggaagtattagaaatgagctgaagaccattcacagtgagaaagatcagtctaaagaaaaggagaagaaagtgaaaaaaacaa

SEQ ID NO: 403565 - DNA, 82 bp, Homo sapiens
ctcagaccgtaccttgcaacaagaatccacattcatctcaatggaaggatcctgccttaagtcaacttatttgtttttgccg

SEQ ID NO: 403566 - DNA, 90 bp, Homo sapiens
caaggtgatagacttcgggccttgaaaagcagaagacaatccaaaacaaacgctattcctctcacggtaaagcatgaatcatcctccagt

SEQ ID NO: 403567 - DNA, 97 bp, Homo sapiens
gataaatttgaccatggctgtagaacccagcagctcagaatccattaaaaggagagctgggaggaggaagatgatccctatgatcttgaagatgttt

SEQ ID NO: 403568 - DNA, 50 bp, Homo sapiens
ttcgcctccatctgtaccatggaaatatgagctgtacagcatggactggg

SEQ ID NO: 403569 - DNA, 75 bp, Homo sapiens
cggctctcgtcagcctcccgccggccgtctccttaacaccgaacaccgtactaggttttgacaagcttgcatcat

SEQ ID NO: 403570 - DNA, 75 bp, Homo sapiens
gaaagctttaggagttcacagtatgtttactgaactgcaacagatgaggcaacagttaccagacatggaatttgg

SEQ ID NO: 403571 - DNA, 86 bp, Homo sapiens
gcacgtgcccctcaatttcatagccccgggcggttcccagcatggccccttcacagtgagtgagatcattggccgagacctgagtg

SEQ ID NO: 403572 - DNA, 75 bp, Homo sapiens
aggggctccggctggtctgtggtgaggacctgaaggagaagaaggagaaggtggaggagaaggcaagccggaaag

SEQ ID NO: 403573 - DNA, 75 bp, Homo sapiens
gcggcttccacctctgaagcgggcgacgctatgggtcccacaggtttaatgcattcaaaaggactaataccatac

SEQ ID NO: 403574 - DNA, 75 bp, Homo sapiens
gctgtggttccagagcagtgagctgctggatattcagtcctgggctggaatcatccaggctttgctggaagcacg

SEQ ID NO: 403575 - DNA, 100 bp, Homo sapiens
tgtccaaaatttcctttactggttcaacaactacaggaaagtatgaccagtataagactccaatggagaacattgggctacaggactcactgctgtcacg

SEQ ID NO: 403576 - DNA, 97 bp, Homo sapiens
gccgccgctctgaggagttaaaggtgaagatggagctggaaaaacaagcttaataagaaaaattcagggaatagaggagtataagaaaggaagagga

SEQ ID NO: 403577 - DNA, 90 bp, Homo sapiens
gcttttaagcctatactttctaccagaagcttgaagggtttggttaagttggagctcagctgcatggaaggcagctgcacgtgttcgttc

SEQ ID NO: 403578 - DNA, 90 bp, Homo sapiens
tggagtatgaagagacatgagatcatggtggccaaacccacaggttcttcacacacccccattcggcgtagtacccagagagctcaagat

SEQ ID NO: 403579 - DNA, 100 bp, Homo sapiens
gcggcgctttcggcgcgggcccgggccccgagcgcccgaacaggagcaggccgggctctcgccatgggtcactgtcgcctctgccacgggaagttttcct

SEQ ID NO: 403580 - DNA, 75 bp, Homo sapiens
gtggagcagatgacaaccatagcccagtgccaatgcatcttctgtactctggtatcatgatattagctggtttga

SEQ ID NO: 403581 - DNA, 100 bp, Homo sapiens
tagctctgactgatggcttagggaacctcaccatcatcattgaaaccatgactgaaagagcatattccttttgtggaactattgaatacatggcaccaga

SEQ ID NO: 403582 - DNA, 50 bp, Homo sapiens
gtacatctgaaagccgggaaatggagcttgaagaaatccgcaaatgtggg

SEQ ID NO: 403583 - DNA, 50 bp, Homo sapiens
ggaaaacctggcgctgcaaaatgtgcagacctgcagccagttacctactg

SEQ ID NO: 403584 - DNA, 100 bp, Homo sapiens
tggcatcccgagcccagagagcgagtttgaaggcctcttcaccacccacaagggtaacttccaggtcaaaatgcagatcttcgtgaaaacccttaccggc

SEQ ID NO: 403585 - DNA, 76 bp, Homo sapiens
aatcgacagtttcttttccggccctgggatgtcacgctatgaggtgtcaggtcgcattgaggccattgagggctca

SEQ ID NO: 403586 - DNA, 90 bp, Homo sapiens
gggtggtgaccatcgaaaggagcaagagcaagatcaccgtgacatccgaggtgcctttctccaaaagataaagccaccaatccttccaac

SEQ ID NO: 403587 - DNA, 100 bp, Homo sapiens
tgctgatcaacttgatgtctttttacaaaaaggacccacaaattccttgaaatatgtccctttagtaacaggcttagcctctgcccgaaacttggaacac

SEQ ID NO: 403588 - DNA, 74 bp, Homo sapiens
ggtggaccgattgtcgctcggcggcgggagtcggaagacctccgtgtggatggccgtggctgtgaggactaccg

SEQ ID NO: 403589 - DNA, 75 bp, Homo sapiens
agacgggcagccaaaggagcagacgcccgagaagcccagcatcctggtggggaagaagttttaagggaacaagct

SEQ ID NO: 403590 - DNA, 90 bp, Homo sapiens
ctgcttcatccttgtttaatgactttggtgccctcaacatctctcagagacgaaagttgcagaatgaagaagagtctggagaacctgaac

SEQ ID NO: 403591 - DNA, 75 bp, Homo sapiens
gatttttagaactccacatttgagaaatggcgaaaagtcttttgaagacagcctctctgtctggaaggacaaaat

SEQ ID NO: 403592 - DNA, 90 bp, Homo sapiens
ggactttccttacctgtttttccagctcacccactgccagcagaggacagagcgggatgccaccagcttgtccaaagggaagttccagga

SEQ ID NO: 403593 - DNA, 99 bp, Homo sapiens
tctgacagttggcgccgccgggagggagggcgggcggcgcgagtgggcgcgggcccggtgggccagagttcaaggaggccttctccctctttgacaagg

SEQ ID NO: 403594 - DNA, 90 bp, Homo sapiens
ccacctgtgtgatgatgcctgagttcagccctcagcaggaacaggcctttgagagcagccagaagtacaaagaggggaagtacatcattg

SEQ ID NO: 403595 - DNA, 94 bp, Homo sapiens
ccttagctgtgctcgcgctactctctctttctggcctggaggctatccagcatcgcaccccctccctccctggcggagcccctgaaggagctgt

SEQ ID NO: 403596 - DNA, 74 bp, Homo sapiens
tggcatggaggaagatcacacctacgaggaagaagcctatatcccaaaggaacagaagtattcattcctgcaga

SEQ ID NO: 403597 - DNA, 101 bp, Homo sapiens
cagaagttctcgaatcattctttgtacagaaattgaaaggcttcaaagctagcaggggtattgtccagtcagaagaaaaacttgtcatcagtgcatcctgg

SEQ ID NO: 403598 - DNA, 88 bp, Homo sapiens
cagattcgcagtggtcgcttcttctccttggtctgggcaagagtggctatgaatagacaacttcttgatcatatggattcatggacag

SEQ ID NO: 403599 - DNA, 101 bp, Homo sapiens
ctggagaccatggagaccctcacggagctgggcgacgagctgaccctgggagacatcgacgattgtgaatcggcacggtcctgaggcagacaggcatttat

SEQ ID NO: 403600 - DNA, 100 bp, Homo sapiens
tgagtgcctacttcatcaactcctcgcataacacctatctcactggggccttcagcctcctgagggagaacttctcccatgcgccgagcccagacatgag

SEQ ID NO: 403601 - DNA, 97 bp, Homo sapiens
tcccgcgcggggcacgatgttgaacatgtggaaggtgcgcgagctggtggacaaagcacattccacttcttccatctattacatctctgagtctaaa

SEQ ID NO: 403602 - DNA, 130 bp, Homo sapiens
cggaggcctcggcccggcctcatcgtgccggcttcgcgcgcgaacccggctttcgcatttgggaccctgcaggagtaattccctcctggtcccagacagtctaagaggcacagataaacgcagaaatgga

SEQ ID NO: 403603 - DNA, 74 bp, Homo sapiens
aatgaatgacagcactgtagaacagctttatgaaacagcttgcttcctacaggagcagttgcagaagctcgagg

SEQ ID NO: 403604 - DNA, 98 bp, Homo sapiens
tggtgtggacatctgctgccggaaggggtcccgaagccccctgcaggaactctacaacccaatccagatggcccactgcgtgaccttggttcagctgt

SEQ ID NO: 403605 - DNA, 75 bp, Homo sapiens
aatttatatagagatgtgatgttggagaactacagaaacctcgtctccctgggaatcactctgcatgatgaacct

SEQ ID NO: 403606 - DNA, 75 bp, Homo sapiens
aatagatgacatcaataccagtgataaggatttggagttccatggagtgatgagattttattttcaagataaagc

SEQ ID NO: 403607 - DNA, 74 bp, Homo sapiens
tcgcctttgccgatccgccgcccgtccacacccgccgccaggtcttattagtaggtaagaaacagctgctcctc

SEQ ID NO: 403608 - DNA, 75 bp, Homo sapiens
gcaccatccactgcaacacaccaagcctcctgcagttgcgacatggtctcgctatgttgcccagaatggttttgc

SEQ ID NO: 403609 - DNA, 102 bp, Homo sapiens
cagcgatccgcgggctggcgacgtagaggaggacgcctcacagctcatctttcctaaagatgagtggtctaggcctatatttggtcttacctcaaactacaa

SEQ ID NO: 403610 - DNA, 75 bp, Homo sapiens
ggggctgaacacgacaattctgacgcccaatgggaatgaagacaccacagctgttccagcgccaggggcttcagc

SEQ ID NO: 403611 - DNA, 89 bp, Homo sapiens
ccagaggtgtatgtgcccacagtgtttgagaactatgtggcagatatcgaggtggatggaaagcaggttctgaagccagacacaagatg

SEQ ID NO: 403612 - DNA, 96 bp, Homo sapiens
gctcagaatgaacgctgcctacacatgttcctgcaagaggaggcaattgacaggaactacgtcccggggaagacatttgaagacagtgatttgttc

SEQ ID NO: 403613 - DNA, 86 bp, Homo sapiens
gggagctggacggcgagcgcgagcggcgcgagaaagtgaggcggaaccaaccctcctggccatgggaggggccgtggtggacgagg

SEQ ID NO: 403614 - DNA, 100 bp, Homo sapiens
caacagcagcagcaagttagtggattaaaatctcccaagaggaatgacaaacaaccagctcttcagagacctgtcggccatggagcctaatgatagtacc

SEQ ID NO: 403615 - DNA, 75 bp, Homo sapiens
acccacgggctggctgtggctgccagcttccttgtgagcaagaagggtcctgccctccggaggagcagcctcgag

SEQ ID NO: 403616 - DNA, 83 bp, Homo sapiens
gagggactcttgcaccccgactgcaagcttcaggtgttggagtatcgagaaccttccctgcgaacttcagaggaacttccagc

SEQ ID NO: 403617 - DNA, 100 bp, Homo sapiens
cgcgtgcttcgtggcccggcaccgttccgcggacgtgctcgctcagttttcagttcagaaagtcactcctcagtctgatggctccagttcaaaagtgaaa

SEQ ID NO: 403618 - DNA, 75 bp, Homo sapiens
tcgaactaaacaaattcatcccagaaatctaagagggttgaagctttgagagaagcagcaactgctgttgagcaa

SEQ ID NO: 403619 - DNA, 100 bp, Homo sapiens
cctggatccaggataacggaggctggctggagaatgctggaggagaccttaaggatggccaccaccactatgaaggagctgttgtcattctggatgctgg

SEQ ID NO: 403620 - DNA, 90 bp, Homo sapiens
cgccagccaagaagcatgtgcgactgcaggagaggcgtggtgaccaagatgaagatgcagaggaccattgtcatccgccgagactatctg

SEQ ID NO: 403621 - DNA, 98 bp, Homo sapiens
aggagctcttgggagcaattccacagctacaaaagaccccacagctgtagagagagcaaacttgttaaacatggctaaactgagtatcaaaggactca

SEQ ID NO: 403622 - DNA, 75 bp, Homo sapiens
agctgcagccgcctgaccacggcgactggacttacgaggagcagtttaagcagggggggccctcagcctcttggc

SEQ ID NO: 403623 - DNA, 75 bp, Homo sapiens
tgagctgatctgtggatcgcggcgtgtcggttattaccccattcaagttgacaactgaggcaacgcagactccag

SEQ ID NO: 403624 - DNA, 97 bp, Homo sapiens
caggaagaatttttacagtatctcaaagacttcacttgacttcttgatcctgcataaaaccaagctggtgagagagtgtaaggaggtcctgaagggc

SEQ ID NO: 403625 - DNA, 89 bp, Homo sapiens
caaacacgtcatgaggaaggagcagcgcaaggaaacctcgacctgtctcccagttggttgcacagcaggttactcagcagtttgtgcct

SEQ ID NO: 403626 - DNA, 100 bp, Homo sapiens
aggccggccggtgccagcacctttcggcttctgagacggcggcagcagcggcattcagatataacgtcgaggtcaagcacattaaaatcatgacagcaga

SEQ ID NO: 403627 - DNA, 97 bp, Homo sapiens
ctggtttcaagaccctacccgcttcactggcaccatgcagcaacatgaagcgagcagcctccttgaactatctgaaccaacctagtgcagcacccct

SEQ ID NO: 403628 - DNA, 101 bp, Homo sapiens
agggctgaagacagctgatccccatgactgctctgcttatactggctggacaggatgctttcattggatttggaggaaatgtgatcaggcaacaagtcaag

SEQ ID NO: 403629 - DNA, 98 bp, Homo sapiens
gccagtatggcttagtggctgcgtgtgcagctggagggcaggtaaagcagctgagcagccattttcagatttaccccttctcattgaggaaaccaaac

SEQ ID NO: 403630 - DNA, 74 bp, Homo sapiens
tggcagccaaatgcatcctggcaggattgctgacccagaccagcccgtgctgtggttagatcaaatgccagcac

SEQ ID NO: 403631 - DNA, 98 bp, Homo sapiens
ggaagtgtacaacttccccgcaggcggcgtgggcatgggcatgtacaacaccgacgagagcccacaggcggttttgtgagctgcttccccaggagcag

SEQ ID NO: 403632 - DNA, 70 bp, Homo sapiens
agcaaaggtgctaatccagtggaaatcaggagaggattccagacagcattggaaaagacatagaaaaggc

SEQ ID NO: 403633 - DNA, 83 bp, Homo sapiens
cctccgccagaaaacagcgtgtggggcgcctagtgggatatgctgtgagttctttggaattgtgaacattcttttgaaatatg

SEQ ID NO: 403634 - DNA, 82 bp, Homo sapiens
gcatttcaacgtgcgtgtcacccacgcagacatcttcagccgctgccaggacacctgctccacttcaccttttgccatgagt

SEQ ID NO: 403635 - DNA, 100 bp, Homo sapiens
cgagaggaacctctatgccgacatcgacgccgcctggcaggccctgcgcaccaggggagaatttcgatcgccaggccagccttcggcggtctctaattta

SEQ ID NO: 403636 - DNA, 50 bp, Homo sapiens
aaacggcgcacattggtatgatgtggaagagtcttgctgtgtggcccagg

SEQ ID NO: 403637 - DNA, 75 bp, Homo sapiens
cctcaatggcctaagcaagtgtctgcagtgccaaatgtgtgacccaggacacagtgtcctggatgccatacatca

SEQ ID NO: 403638 - DNA, 75 bp, Homo sapiens
atccagtccggcacccagtaccatattctctggaggttttagacacttgtctggatttctcgaacttttagtcga

SEQ ID NO: 403639 - DNA, 90 bp, Homo sapiens
acctcattggctgtctccagaagctgctgtttggaaaggtggcaaaggatagcagcagccttgttcgggagtctagcagttctcgctcac

SEQ ID NO: 403640 - DNA, 75 bp, Homo sapiens
tggttcacagggaagtcgcctggaaaaaccaatagtgtaaaaagatggcctatcagaaggtccatgcagatcaaa

SEQ ID NO: 403641 - DNA, 99 bp, Homo sapiens
gcacgggctctgctgtctccacggacgactcagagcaagaatcacaaccacagctgcctgcatgatggacctaaggaggtacccactggatgaacaaaa

SEQ ID NO: 403642 - DNA, 90 bp, Homo sapiens
tgcaaagcctccagaggacataccacctccaggatcaggatgcagagagtgaagttcccagaccctacgccccgctgtcaggcagcccgc

SEQ ID NO: 403643 - DNA, 98 bp, Homo sapiens
atcagactgaccgtgtcttacatcagttcagagaggtttcagcaaccaaggagcacacaccctgatccttgattggtgaaaggatacacaaaatcagg

SEQ ID NO: 403644 - DNA, 83 bp, Homo sapiens
attgaaggctttgtgattcaggagggattggagccatttcctatgtcaaaatccacaggcaacttcctcactttgacccaagc

SEQ ID NO: 403645 - DNA, 90 bp, Homo sapiens
gcagagccagatgatccacaggatgctgtagtagcaaatcaggacattgcatattaccaagccttgtctgctgagaggttgcagacagat

SEQ ID NO: 403646 - DNA, 75 bp, Homo sapiens
gccatggctcactccccggtgcagtcgggcctgcccggcatgcaggtagcagaaggtcaagaaatttgtgtgatt

SEQ ID NO: 403647 - DNA, 71 bp, Homo sapiens
cgacgcgccccgcctcccccgtccggtccctctctccacggtaaggggcagcttcggtcacctctctgtcc

SEQ ID NO: 403648 - DNA, 100 bp, Homo sapiens
tttcgtctccagaaccctggacagctcctccaggggtccacattcagtcgtcccagactgtggagtcgagtggtttgtacaccttgcagagtattctgaa

SEQ ID NO: 403649 - DNA, 100 bp, Homo sapiens
gagcctgcagccggccctgccgagacaagaggagcagcagcggcaccgcccctcaccctggagggtcctgtacaatctcatcatgggactcctgccctta

SEQ ID NO: 403650 - DNA, 74 bp, Homo sapiens
atgcagattatatcgcatcctatggctcaaagaaagatgattatatacgtaggtaacctttccagagatgtgac

SEQ ID NO: 403651 - DNA, 73 bp, Homo sapiens
gttcacatcctggagatgtacgagggcgaatctggctttgggggaagaggaagaaaagtcggattacaagatc

SEQ ID NO: 403652 - DNA, 100 bp, Homo sapiens
ccagggtgctttctggagacccccagaacctgtgacatggtctgctatacagctcagactctcgtccgaatcctctcacatggtggctttaggaagatcc

SEQ ID NO: 403653 - DNA, 83 bp, Homo sapiens
atgtacgccgcgatcaaggctgaccctgatggtgacgagacaagaggagcagcagcggcaccgcccctcaccctggagggtcc

SEQ ID NO: 403654 - DNA, 82 bp, Homo sapiens
cctaccccagcggccagatcggcttcatgctgtgcagcaagaacccgatgagcatcgcctggacccagatgcctacctctta

SEQ ID NO: 403655 - DNA, 100 bp, Homo sapiens
ctttctgaagagctcaaaaaggaaaatcctttcttgaggcaagaggagctatgaagacatgattggtgaggaggtgccatcggatcaatactactgggct

SEQ ID NO: 403656 - DNA, 75 bp, Homo sapiens
tcacggccagctccgagggttacatgcacaagacagttttagaagacgacagaaagaaaaaagaaagagaatgaa

SEQ ID NO: 403657 - DNA, 74 bp, Homo sapiens
agatccactagaaattaacccagaatcttagcctctcagtggcctatcgctggcacagtgatgtttgagtatgg

SEQ ID NO: 403658 - DNA, 87 bp, Homo sapiens
ctgtatctactcaagagtggaagttttcacagggccgttgctccagggagaactgcaaatatcttcatccacccccacatttaaaaa

SEQ ID NO: 403659 - DNA, 96 bp, Homo sapiens
gtcccctgttccgaggtcaggaggatgcaagtcctgacagattcagcaacactgatgggtttgtggagttcttccatgtagaggacctagaaggtg

SEQ ID NO: 403660 - DNA, 75 bp, Homo sapiens
gatacaatcactacggacacaggattcatgcgatctcaggtgtacatgcaccccagcctgtcaccgcccagcacc

SEQ ID NO: 403661 - DNA, 88 bp, Homo sapiens
ctgctcttcagggaggtcagttttttgggccacctacagatgctcctgcagtggacacagcagaacaagtctatatctcttccctggc

SEQ ID NO: 403662 - DNA, 137 bp, Homo sapiens
tgaaatggcagacgatctcggagacgagtggtgggagaaccagccgactggagcaggcagcagcccagattggatttgtcctgtatccccccagtggaggtcctgcatgggatctgatggatcatgaaaatattttg

SEQ ID NO: 403663 - DNA, 50 bp, Homo sapiens
cgagtctgtgatggggccatccgggaagggatggcattcctactgtattt

SEQ ID NO: 403664 - DNA, 122 bp, Homo sapiens
tcagcggtgttggaacttcgttgcttgcttgcctgtgcgcgcgtgcgcggacatggcctcaaacggttgaattgaccaaagcaatggtgatggagaagcctagtcccctgctggtcgggcgg

SEQ ID NO: 403665 - DNA, 82 bp, Homo sapiens
gccaagttcatctcctccgtcaccagccacatctaccagcccaagaggagagggtttgaccgcttcggaccagatggcacgg

SEQ ID NO: 403666 - DNA, 100 bp, Homo sapiens
caaattgtcgccattaagaaagatttccatcaccaaggagtaagaagaccttcgggcagagactgttgggtatgctcccttcagaaaacagttctaagag

SEQ ID NO: 403667 - DNA, 75 bp, Homo sapiens
tgtcctcctgaccctcacaaagggatcgttgtgaaagattttcaagactatatggaacctgaagaaggttgtcaa

SEQ ID NO: 403668 - DNA, 82 bp, Homo sapiens
cactggcctacctcgtcaatacctatgcactggacagtggggcagcctggcatcctcgctacaacctcattgttgtgggccg

SEQ ID NO: 403669 - DNA, 85 bp, Homo sapiens
aatccctagtgtcagcagattcagcggtactggtgtataataggttacaggaaatacaggaggcagaggaacaaataaaagacac

SEQ ID NO: 403670 - DNA, 104 bp, Homo sapiens
catccttcacccatctgaagggaggaaatagtggcaggtgacagtctgcatgtgcagttttcagcaatggctgccatccggaagaaactggtgattgttggtga

SEQ ID NO: 403671 - DNA, 98 bp, Homo sapiens
ccgggatcgtgaccgtggaggaaagttactgtggcccatgtcctaaaaactggatatgttacaaaaataactgctaccaattttttgatgagagtaaa

SEQ ID NO: 403672 - DNA, 99 bp, Homo sapiens
gggccaccgcgcaaccaagtgttgcctggtgaggatacagtacagcctgaatgtggcagacaggctagctgatgaacatgttctcatcgggttgtatgt

SEQ ID NO: 403673 - DNA, 152 bp, Homo sapiens
ggacaaatacagaatccgtgtctgggagaaacctcgtggcctggtctccattatttgagatgagttacatcttggagattcaccaaggcctgaaaagagggagaccaagtgcccgatccctggatgtgatggcacgggacacgtgacagggc

SEQ ID NO: 403674 - DNA, 75 bp, Homo sapiens
caagaatttcaagaacaaaggccgcgacttggaggtctcctccgggctggggctgagcaagccctcggagtgacc

SEQ ID NO: 403675 - DNA, 82 bp, Homo sapiens
gccatgaacggaagcgtctttgctcaaggatcccagttttctctggatgacgtgcttcgagagctgtgcccaggagtgaaca

SEQ ID NO: 403676 - DNA, 88 bp, Homo sapiens
tggagcgaagtagaggatgccgaggagaaaacagcaggcacccaagcgggcggcaggatcaaaatacttgctggatggtggactcaga

SEQ ID NO: 403677 - DNA, 87 bp, Homo sapiens
tggccctgcgcaacatcaatctcatcgtgcagaaaagggcaaacttgaagataaatcttttgactccagctctttagaggatctaaa

SEQ ID NO: 403678 - DNA, 75 bp, Homo sapiens
cccgagtgcagtttcgatggaaaatgaaggtgttgctgcctatgttggctggcaaagctcctcaattctcaagcc

SEQ ID NO: 403679 - DNA, 115 bp, Homo sapiens
agtaatggagaaaaaggttgtcttttccagtacttcattaggaaattgttcggttactataacaacagtaccaaggtggctgtgaaaaccctgaagccaggaactatgtctgtgc

SEQ ID NO: 403680 - DNA, 85 bp, Homo sapiens
ctaatggcaggcattttacaagaggagaatttgcgctttggcttgatggagatctctaccatggaagaagccattcttgtaaaac

SEQ ID NO: 403681 - DNA, 83 bp, Homo sapiens
ttggcccagaggatctcttctaacatccagaagatcacacagtgttgttgagccagtgatacagagaggccatgagagtctgg

SEQ ID NO: 403682 - DNA, 100 bp, Homo sapiens
tatgatttggctctgagttttcaggagaaagctggctgtgatgagatctgggaaaaaatttgtcaggagtctactcttcatcttgtgttgagacttcgtg

SEQ ID NO: 403683 - DNA, 89 bp, Homo sapiens
tatcacactgaagatgatatttacaaactgtcactggtgctggagcctagaaattctaaatcggcagaagaaatccttagacaagagct

SEQ ID NO: 403684 - DNA, 50 bp, Homo sapiens
ctcagccatctgcggaggtcaagcagccctagcaaaccaagagtgagcca

SEQ ID NO: 403685 - DNA, 60 bp, Homo sapiens
caggaggcggtgcacagcgccaagtgagtgttgaaaagatagacctgaagggattatcac

SEQ ID NO: 403686 - DNA, 98 bp, Homo sapiens
gcccacctcgtggggtgtgtgagggccgagtgaaatcgtgcatttgcgacactaatatctggagctgtggtagaacaacttgatttcctacgaatcag

SEQ ID NO: 403687 - DNA, 74 bp, Homo sapiens
acactgagagttctctctggagtctcgagcccgggaagtgcgttttgaaaaaaccactgtctgcaataataaag

SEQ ID NO: 403688 - DNA, 98 bp, Homo sapiens
ttacgacaagaagaaaaacggcaacgtgtaatcagaaggcacagattagaggaaggaagagcttttctgggagaagaggctacaaggacttagtgcat

SEQ ID NO: 403689 - DNA, 98 bp, Homo sapiens
tcctgggaggcgaggacggtctctgccagtataaatgcagtgacgctgttccatttcctccaagtcaccggcttacagcaaaagaagtgtttgataat

SEQ ID NO: 403690 - DNA, 82 bp, Homo sapiens
gaagattagattgggaatagaagtacaagattctgctgtactcattggatggccggttgttgtccacgtacagcgcttacga

SEQ ID NO: 403691 - DNA, 98 bp, Homo sapiens
agggaggcgacagagacagcagcaggcatcgtgctggactctggagatggtgtcacccacaatgtccccatctatgagggctatgccttgccccatgc

SEQ ID NO: 403692 - DNA, 75 bp, Homo sapiens
tcacttataaatggcgccgaagcaggacccgaagcctaaattccaggaggaagtctggaacgttttttcttagag

SEQ ID NO: 403693 - DNA, 100 bp, Homo sapiens
ccgcggcgtctcgtggcccagctgcatctgctgcagcttgcccagtttcgacaaagaaaagctcagtcggatgggcagagtccttccaagaagcagaaaa

SEQ ID NO: 403694 - DNA, 100 bp, Homo sapiens
ggaccatggccgatcctcgcgtgagacagatcaagatcaagaccggcgtggtgaagcgccagcagacttcataggaaagcaagcactgaaacagattaaa

SEQ ID NO: 403695 - DNA, 90 bp, Homo sapiens
tctgaagttcacgactactagaaggggaggggagtggaaaggctctcagtgaaaaaggtaccagttcaacccagccttctttcagaccac

SEQ ID NO: 403696 - DNA, 83 bp, Homo sapiens
ctgcgtacttcatagttcgcgtagcggctcgagcgtggagatgaaggtgtttcccattaaacactaccaggacaaaatcaggc

SEQ ID NO: 403697 - DNA, 85 bp, Homo sapiens
gagtcgccgccggcgtcggcgccggtgttttacaactgcagttgtttggaagtaactggtctccagaacagaaattactcagccc

SEQ ID NO: 403698 - DNA, 76 bp, Homo sapiens
gcgactcatgagagcgcggccggaggacagtactatactggcaattgctggagaagattttgcaattgttgcttct

SEQ ID NO: 403699 - DNA, 89 bp, Homo sapiens
aagccagatatggtacaggactgtcaacgaaacctggcacggctcttgcttccgacccaacatgagtgaagtttcctgcaagaaacggg

SEQ ID NO: 403700 - DNA, 98 bp, Homo sapiens
tcaccagttaactatggtagcccacccagcattgggctccgccatgtcacagatgaccagaagacatacaaaaatcccagcctgcgggctcaaggagg

SEQ ID NO: 403701 - DNA, 100 bp, Homo sapiens
gtggaccccaagaagaccattcagatgggatctttccggatcaatccagatggcagccagtcagtggtggaggtgggaacattctccatggccagtgagg

SEQ ID NO: 403702 - DNA, 90 bp, Homo sapiens
caggcatcaagtttccagacttcaagtctgcaggtgtcacgctgcggagccaacggagaacaggggccccattctgctcccctaccagtt

SEQ ID NO: 403703 - DNA, 100 bp, Homo sapiens
cgggacggctctgtaggaaggaacttggttccccctccctcagcttccgccccaaaaggtgaccaagaatatggcccaggtgaccaaagccctggacaag

SEQ ID NO: 403704 - DNA, 100 bp, Homo sapiens
gcgggatctggtagcttggagtcgaagggtggtagtacccgagctatcagctggtgtagccaggaagatttggagactggagttcaccttgaccctgccg

SEQ ID NO: 403705 - DNA, 101 bp, Homo sapiens
cctcaccatacaggaacagggcagacgttagcgtgagtgatcactctcaatcccggaaaatgtggacacagacttgccaggcagcctggggcagagtgaag

SEQ ID NO: 403706 - DNA, 100 bp, Homo sapiens
tgtctattcccagacagagagaaagagcagaagagcagattacctgcaaaggacagacttaggagcatcagatccatgctgctgctgactcggagcccca

SEQ ID NO: 403707 - DNA, 101 bp, Homo sapiens
ccgagagcgtgaccgagagcgcgaatatcgtcatcgttagaaggtctctggggaacaagactcatggaggaaagcagcactaaccgagagaaataccttaa

SEQ ID NO: 403708 - DNA, 100 bp, Homo sapiens
ccaccggacgatactggcctttgtctctggcatcttctttatcctctcagcacctccttttgtggctcgggagacgctaagggcctggcaagagaagaat

SEQ ID NO: 403709 - DNA, 101 bp, Homo sapiens
cttgccggctgtctgatgaagagcagcgagaatggcgcggaaaaaacgaggagtcattggagagtacagaaggcttccgggctgcagagcaaggtgtccag

SEQ ID NO: 403710 - DNA, 98 bp, Homo sapiens
tgggacccgaggctgagccaagcagcaacccagactactacggactcatctaacaaaacagcaccgactccagcatccagtgtcaccatcatggctac

SEQ ID NO: 403711 - DNA, 82 bp, Homo sapiens
ctgttgcgatggcgcagaaaccccgttgacaaggcactgctttttcatgacgaaagaaatgaccgcccggatgtgccactga

SEQ ID NO: 403712 - DNA, 50 bp, Homo sapiens
ctggcgttaactgtgcggaggcagtgcctttgttccattgaatgttccca

SEQ ID NO: 403713 - DNA, 83 bp, Homo sapiens
ctaaaaagaagcgggagaatctgggcgtcgctctagagggacccgagtgtatagccctccagagtggatccgctaccatcgct

SEQ ID NO: 403714 - DNA, 101 bp, Homo sapiens
agcaaacagtctgcctctgctgtgcagccgagaccgacccgcccgcccgcggccccgcagcagctccaagaaggaaccaagagaccgaggccttcccgctg

SEQ ID NO: 403715 - DNA, 74 bp, Homo sapiens
gacagtatgtggatgtcacagccaaaacagtgaaccagaggaaatgcctccagaagcaaagatgaggatgaaga

SEQ ID NO: 403716 - DNA, 131 bp, Homo sapiens
caactgctcacgacagaaggcgtctcatggcgttggaataccggctctcagcggctcaggggaaatgctgtctgtagctgagcacttcctggagcagcagatgcacccaacagtggtgatcagtgcttacc

SEQ ID NO: 403717 - DNA, 94 bp, Homo sapiens
gcagctccatttctggagtctgggtcttccgaggccaggagcttgcctttccgatggagaaggaggagacaacccgggagctgctgctgcccaa

SEQ ID NO: 403718 - DNA, 76 bp, Homo sapiens
gcccggactgcacaactagcaagacttcagccccaggctccccctccaccgccaccgccgcctcagcagcagccga

SEQ ID NO: 403719 - DNA, 100 bp, Homo sapiens
ctgaagcatgttaaggaaactcagcctccagaaacggtccagaactggattgaattacttagtgcttcagtatcagacacagcacagcagccatctgaag

SEQ ID NO: 403720 - DNA, 90 bp, Homo sapiens
taacatcacctgcttcatccttgtttaatgactttggtgccctcaacatctctcagagacgaaagccactgtagtctgcagatcaaagct

SEQ ID NO: 403721 - DNA, 74 bp, Homo sapiens
tctttaattttggagaacagaatggctacaagaaacaccatctgattcagatcacaagaagaagaaaaagaaaa

SEQ ID NO: 403722 - DNA, 98 bp, Homo sapiens
atgaattcaaagtgattgtagagggtcaaaatgcccatggggaaggctatgtgaacgtgacagtcaagccagagactgatgagtgccgactgaaccag

SEQ ID NO: 403723 - DNA, 82 bp, Homo sapiens
ggagtacacggagcagcggccccggccccgccaacgctgccgccggggccgcctgggcagaatgtcacgatggacgagggcg

SEQ ID NO: 403724 - DNA, 49 bp, Homo sapiens
tacctctttgatctcgacaataaggacgtggcccagtggaacatcggga

SEQ ID NO: 403725 - DNA, 101 bp, Homo sapiens
ttttccaaagagaaatgaagaagaaaactgtatgtaccctaaatatgggagataagaagtatgaagacatggaagcaaagaagtttgtcatcctgatattg

SEQ ID NO: 403726 - DNA, 90 bp, Homo sapiens
cccatgtgcgcagcctggcactgttttcacttgcctttggaaatgaaggtgcagaaaccatgggagtaggataagttctgaacgtcgaaa

SEQ ID NO: 403727 - DNA, 83 bp, Homo sapiens
gtcccggccatctcgctgcccgacgatgtccgcaggcgcaaactgcggaaccaggcacagagtgagcgatacggatataagga

SEQ ID NO: 403728 - DNA, 100 bp, Homo sapiens
accactggatctccaaacagggccagaagctggagatgatgctggagcagaagttagcgcttctctctcggcaaatgttctgaaaaagactctgcatggg

SEQ ID NO: 403729 - DNA, 96 bp, Homo sapiens
cttcctgtcaccgaacaagagctgcagaaattaaagaatccagatacagagcaggaattggaagatcaaaatacttgctggatggtggactcagag

SEQ ID NO: 403730 - DNA, 90 bp, Homo sapiens
caaacaacaagggcagcccctatacaaggacagttggctcctaagggagggactaaataatgattccagcttcctcagtacacttcatga

SEQ ID NO: 403731 - DNA, 90 bp, Homo sapiens
tgagaggagtcttctggtgcagtcttattttgaaaaggtttctgggtgtctctggggagcccctgggccagattttcctctagactccag

SEQ ID NO: 403732 - DNA, 100 bp, Homo sapiens
ccacctcaaagacactggttgtgatcagcttgaaattcagctaaccgagcagctacggtccctcatccccaacgaggatgtgagaaagttcatgtctcat

SEQ ID NO: 403733 - DNA, 94 bp, Homo sapiens
caatattggaagcgctttgatttacagcagctgcagaaatgagccgtcagactgctacagcattacctaccggtacctcgaagtgtccaccatc

SEQ ID NO: 403734 - DNA, 100 bp, Homo sapiens
agaaaatgaaggaaagcgaggctgacagcgagatctgtaagagcaaagctaaagaatctcagcagtattatcacagcttggctgtccggcagagtctggc

SEQ ID NO: 403735 - DNA, 100 bp, Homo sapiens
caccaaatactcaaggtcactacagaattagcccaagcagattcctcccagggcgtctctggccgagcctctttttgtggaaaacgacagcagcagcagt

SEQ ID NO: 403736 - DNA, 100 bp, Homo sapiens
gaaagaagtctcatcttcctttgaccacgttatcaaggagaatgcctcggctggggtggagcgcctcttgctggggaacaaatgtgacatggaggccaag

SEQ ID NO: 403737 - DNA, 74 bp, Homo sapiens
cttgaggggtctccatccagatcagctgaatcagagtttgcattgttaacaagactctttttgatcagaacaat

SEQ ID NO: 403738 - DNA, 98 bp, Homo sapiens
aaatatccaaacaggccctccagaatgagctggagagactgaaagagatacatccagaaagtgcccagaagaaacttcctgctggaaaaaatgaaaaa

SEQ ID NO: 403739 - DNA, 104 bp, Homo sapiens
cgcggacgaagatggcgaccgccatgtacttggagcactatctggacagtacttcctcctccagctggttatgttcctattcgaactccagctcgaaagctgac

SEQ ID NO: 403740 - DNA, 90 bp, Homo sapiens
ccccgcggccggacgacccaagcccgctgagcaggatgaggagtgatcagcagctggactgtgccttggacctaatgaggcgcctgcctc

SEQ ID NO: 403741 - DNA, 90 bp, Homo sapiens
gatcctcctgcctcagcctcccgagtacctgagattagcccaggatcttacacatttgttccatggcttctcagctttaaaaggggaagt

SEQ ID NO: 403742 - DNA, 75 bp, Homo sapiens
tgttggagaactacagaaacctcgtctccctggagatggggtctcactgtgttgcctaggctggtcttgagctcc

SEQ ID NO: 403743 - DNA, 90 bp, Homo sapiens
ttatgggagggctggccaacttctgctacagacgactcatccaaggacaaaatgatgagaggctctcgcagaggatgtgttagactcaga

SEQ ID NO: 403744 - DNA, 98 bp, Homo sapiens
cgaccctctcccggcccctccccttctttgtcttttgcagatgatcgccgggtgtcgatccttttccctccagtcagccctgccttaccagctctctg

SEQ ID NO: 403745 - DNA, 96 bp, Homo sapiens
acgggcgaatagccctgctgcccggtgccttgagggggtctcagggcagcagcatacaaggtgtcctgggaagaggtgaagaatgagatggtggga

SEQ ID NO: 403746 - DNA, 100 bp, Homo sapiens
cgcattcgccatccaggctctgcttgaggcactggtgaggtggattgatgatgaatcttctggcacacctggagcaactccagaacacagtcgtgaggat

SEQ ID NO: 403747 - DNA, 100 bp, Homo sapiens
ttcgggaagcagatagcatagctgctgtggctgaactacgacaacacattgctgagcttgaaatccagttaattggccttggtcctcacagctccaaaaa

SEQ ID NO: 403748 - DNA, 75 bp, Homo sapiens
tggaagcaggactgcgccgcgtcttcctcaagacatatgtagagtgtgtcggtcagaaggaacacctgagaaacc

SEQ ID NO: 403749 - DNA, 98 bp, Homo sapiens
cccctccgagctggggttggacgctgccagtttgcacagcagcagctattgtggaaaacatggctgagttccggcctgagatgtgtacagagggtgcc

SEQ ID NO: 403750 - DNA, 89 bp, Homo sapiens
gaaattggcaatatcatctctgatgcaatgaaaaaagttggaagaaagggtgtcatcacagtaaagtatcaccttttgccatgatagca

SEQ ID NO: 403751 - DNA, 98 bp, Homo sapiens
taacccccacacctacagggcaaccatgaccgaggagagctctgacgttcccagggagttgatagttcctacaacagcagccagtacccctgatgccg

SEQ ID NO: 403752 - DNA, 82 bp, Homo sapiens
gggccgtgctgcttatggcggcgctggagagggggcgctgagctgttgggccgcggcgagtcctttgcacatgttggcaaca

SEQ ID NO: 403753 - DNA, 90 bp, Homo sapiens
ggcttgaaacacatctaattgcacttaaacttgaagaacttattttagaagacacttctctctcaccggctggagcgcaatggcgcgatc

SEQ ID NO: 403754 - DNA, 100 bp, Homo sapiens
cagaaccagtggtaattaccatcaatactatggaatgcattttgaaacttaaggatgggatacaggggaaagtggaagttgaagctgggaaagaaggtat

SEQ ID NO: 403755 - DNA, 50 bp, Homo sapiens
gacagcaagcccatcacgctggaatttggagttgtctgcttaatattttc

SEQ ID NO: 403756 - DNA, 83 bp, Homo sapiens
cagcgtttctcctctcgtccctggatcccctaacaacagtgagagagcaatgcgagcagttggagaaatgtgtaaaggcccgg

SEQ ID NO: 403757 - DNA, 51 bp, Homo sapiens
accttcgagcaccccaacgtggtcagtactatactggcaattgctggagaa

SEQ ID NO: 403758 - DNA, 100 bp, Homo sapiens
caagactgtccttcggacaagttttagcatgttggcagataaattgaacatgactccagaagaagctgaaaggtggattgtaaatttgattagaaatgca

SEQ ID NO: 403759 - DNA, 82 bp, Homo sapiens
cgctgcgcggcgcggcggccgggccctcgagacggggacggtgctgaaggtcgccatcctggctgagaagtacgcggtggac

SEQ ID NO: 403760 - DNA, 90 bp, Homo sapiens
agttgaaaaggaagcaaagtgtgaatatttctgattccatatggctctcatatcattccattccatctctgccaagatttggataccgca

SEQ ID NO: 403761 - DNA, 75 bp, Homo sapiens
ctctggagggaagagcgatgggagaggcatgtactggcattgaaaacattgacgaagctattacattgcttgaac

SEQ ID NO: 403762 - DNA, 100 bp, Homo sapiens
gagtattcccacaggaggtggctgatcgactgcttcggaccatggcttttcatgacagatgtgctggtgctgagctgtgatctgataacagacgttgcct

SEQ ID NO: 403763 - DNA, 74 bp, Homo sapiens
ccagcagccgtccggagccagccaacgagcgctctggatggacaaggaaaaagaggaaagcatgaaagaaaccc

SEQ ID NO: 403764 - DNA, 75 bp, Homo sapiens
aaaatccagatgctggatgacacccaggaggcatttgaagttccagtaagaatgattgatgttggctgatattgg

SEQ ID NO: 403765 - DNA, 86 bp, Homo sapiens
tcgaggtcccgggggtccccagccgcccggccagggggggccctcagcctcttggccttgaacgggctgttcatcttgattcacaa

SEQ ID NO: 403766 - DNA, 75 bp, Homo sapiens
aaaggggcattatcccgctggatgcacactgctgcgtggaggctgcatgttaaatggccaagaggtgaggcttac

SEQ ID NO: 403767 - DNA, 73 bp, Homo sapiens
gagaggagacttccttgcttctttggagaatgatatcaaaccacaaagttccctgattacaaatcaacatggt

SEQ ID NO: 403768 - DNA, 90 bp, Homo sapiens
aattgttttacagtctgttccgcatgatcgttataataagtgtcctctacaagcctggtgatgcccacacaccacttacttcgtgcgcaa

SEQ ID NO: 403769 - DNA, 100 bp, Homo sapiens
gagaacctcctctcccacttcttgccccagaaagccccagacggaaagagctacttgctgagattcaggtccgttcctctgaagaatgggtacagcgagg

SEQ ID NO: 403770 - DNA, 75 bp, Homo sapiens
aaggcattcatcatagaaagcttaagaacatcgatatattgaactcttcttgaattctactcctggaggcggctc

SEQ ID NO: 403771 - DNA, 75 bp, Homo sapiens
tggcataccattctcatcgttggccaagaagacgctggagggaggctgttaggagggactctgagcttcacacct

SEQ ID NO: 403772 - DNA, 100 bp, Homo sapiens
atcggggacaccacgaacagaagtaatgaaatcccttccacagacgtcactgataaaaccggtcgggaacatctctcgtctctgccatccaggaccctgc

SEQ ID NO: 403773 - DNA, 100 bp, Homo sapiens
cctgcctccactcactcgcctggagaagtatgctttcagcgagaacaccttcaaccgtgatgttacagcctttcgattatgatcccaatgagaaaagtaa

SEQ ID NO: 403774 - DNA, 75 bp, Homo sapiens
gcccggaccccgaatatgacggttgtacatcctggagacctgaagaattctgttgaagtcgcactgaacaagttg

SEQ ID NO: 403775 - DNA, 100 bp, Homo sapiens
tagtccctcttacttgaagcatgtctttcagagcccggcaccacccatcttgagtatctgatgctgctttggaggccacagagaatgaaccacttaacaa

SEQ ID NO: 403776 - DNA, 75 bp, Homo sapiens
cagagactccttgctcccaggagataaccaggatatgggccctcacattttccaaacctgtccatctgctaacta

SEQ ID NO: 403777 - DNA, 90 bp, Homo sapiens
gcccaatccacatgcttttccaggagagaacattgaaagtattctctaagctatttgaagagagtgactaaatgcacctgggtcaggctg

SEQ ID NO: 403778 - DNA, 75 bp, Homo sapiens
gaaaagtcgcagcgagctggagccgccggaggttactgaagctaaaggagatgtttaactccaagtttggatcta

SEQ ID NO: 403779 - DNA, 83 bp, Homo sapiens
gaattccgagagaacgagcacctcctcgaagtcatcccagtgtgtcgtgaaaactacccctaaaagccaaaatgggaaaggaa

SEQ ID NO: 403780 - DNA, 90 bp, Homo sapiens
cctggaggccgttgctggggagtacgccctggtcataaatggtcacagcctgttgaacagacacggtagaagactcgcccattttggaat

SEQ ID NO: 403781 - DNA, 80 bp, Homo sapiens
ccacagataaccaagtcagacttcgtaagagaaagctgccttcctatttcaaggaaagacgccaaggtaattttgaccca

SEQ ID NO: 403782 - DNA, 75 bp, Homo sapiens
tattcggttctctacttccaacagaaggggctaagtgatggatcttgtactccgtgttgcagattactatttttt

SEQ ID NO: 403783 - DNA, 100 bp, Homo sapiens
gcaataatattgaactgggcacagcatgcggaaaatactacagagtgtgcacactggctatcattgatccaggtgacaacatccgggaattcttgctgag

SEQ ID NO: 403784 - DNA, 96 bp, Homo sapiens
cttcaattgggagcaagtgaacaccttgactaaaccgacttctgatccatggatgccatcaggggcaagattcttgccaagagaattaatgtgcgt

SEQ ID NO: 403785 - DNA, 75 bp, Homo sapiens
tcaacctctgcgctcttagtgttgacaggccctggccaacgtcaacattgggagcctcatctgcaatgtaggggc

SEQ ID NO: 403786 - DNA, 80 bp, Homo sapiens
agcccccgcgggcgcagccctttgcgcagccgccgggaccctggcccctgtcgagaaaaagcttgtggtgaaggggggca

SEQ ID NO: 403787 - DNA, 97 bp, Homo sapiens
cagaggcaggtggtgctgaccctgtaacccaaaggaggaaacagctggctaagctcatcattgttactggtgctggagaatctggtaaaagcaccat

SEQ ID NO: 403788 - DNA, 100 bp, Homo sapiens
cgcgtggagtctttactcaaaacagccctggaagaaagcgggacttttcccctgttccttggagtcagtattttgagtccatggaagatgtagaagtaga

SEQ ID NO: 403789 - DNA, 83 bp, Homo sapiens
gaactgactgccccgcatcaccggagcgtcccagctgcgaggagtactttaggaagaatcatcaaagtaactcaggaggtgat

SEQ ID NO: 403790 - DNA, 76 bp, Homo sapiens
atcgtgatggtgccgtcgctcatcaagcagcaggtccttaagggagtgagttttccgggagtccctacagccaccc

SEQ ID NO: 403791 - DNA, 100 bp, Homo sapiens
ggctcgcactcttctggtctcccaggcccaacccacctgaagaggagagcgggaatgacgaggctcgggtggaaggccaggccacagatgagaagaagga

SEQ ID NO: 403792 - DNA, 75 bp, Homo sapiens
ctgcagagaccccgctatggctgttgcagagaacacatcttagaagatgaaaaacctgaatctatcagtgacact

SEQ ID NO: 403793 - DNA, 82 bp, Homo sapiens
gtttttttcatggtcgtaggaaaaaagagagggagcaaaggagtttgctgctgctctcaccgctgagcggataaagacccca

SEQ ID NO: 403794 - DNA, 75 bp, Homo sapiens
gcccagaggatcggaatgacagatacggtctggaaaatcccgaagcagaagcccgtattcatctaggcattcaag

SEQ ID NO: 403795 - DNA, 50 bp, Homo sapiens
ctcaaggccatgatcaaaacacatcaacgagtgtgtgacggacctgcaca

SEQ ID NO: 403796 - DNA, 98 bp, Homo sapiens
aaaaagcacaggggatgccagaaagtggacagtcattttgtttactcattcagccctgttgcaggtcccaataaactcttcataaggttgacagaagc

SEQ ID NO: 403797 - DNA, 100 bp, Homo sapiens
gttcctcttcgtcctgctaacaccattaccaaggtgcccctggtaatctttaagcgggagaaggagctggcccggaagctggagtttgatggcctgtaca

SEQ ID NO: 403798 - DNA, 98 bp, Homo sapiens
gatctgctctaaaccttatagcctgcttatgggggaagagctctgcgtgcctcttgctgtgccctacctggacaaacccccaactccgctccacttct

SEQ ID NO: 403799 - DNA, 50 bp, Homo sapiens
ctggtttcttaagtccagaactgcaatggaaggggatgattatgaagtca

SEQ ID NO: 403800 - DNA, 99 bp, Homo sapiens
tgtactcgcagttgcctcatcacatcctagccgatgtctctctgaaggtatgtgtctgatttcaccagcactctccagtccatacgaaagaagtgcaaa

SEQ ID NO: 403801 - DNA, 100 bp, Homo sapiens
gctatcagaaggtctggaaggcaccaagtacagtaatgtgatgaaactccttcggatggccctcagtggacagcaggctccagcaggaggaaatggtgca

SEQ ID NO: 403802 - DNA, 75 bp, Homo sapiens
gcagaggcgacaactgcacggatctactcgcactgggtagctacagcaagctgggtagcaggcagatccaaagga

SEQ ID NO: 403803 - DNA, 101 bp, Homo sapiens
ttaaatgaaaacacagtttctgcaggaaaagatctctctacttctcctaagttggatgtgctgtgcaatggtgaaattatggggaaggatcatactatgga

SEQ ID NO: 403804 - DNA, 101 bp, Homo sapiens
gcgagcgaggcgccctagacatcttctccctcccttgcctcagcatcgacaccccaggagtgattagtcgtgtgtcccagctattcaaaggccaccccgat

SEQ ID NO: 403805 - DNA, 96 bp, Homo sapiens
cgcctacaggggacccagctcttcttgcagccactggaagctgatcacctggagtgaagacctcacactttcaaattactccccagtatgactttg

SEQ ID NO: 403806 - DNA, 80 bp, Homo sapiens
ggaccgctctcttctctcgccgacaggacgagattgaggagctgcgggccgagatgctggagatgcgggacgtctatatg

SEQ ID NO: 403807 - DNA, 83 bp, Homo sapiens
ggacgtgttctccactgatgacctcaccggatttttacagaccatggtgaatccgggcagcagctcgcagccgcccccggtga

SEQ ID NO: 403808 - DNA, 100 bp, Homo sapiens
ccgcgacacatccgcacccacacgggcgagaagccctacgagtgcaacatctgcaaggtccgcttcaccaggcttgagtttgaagaaacagaagaacctg

SEQ ID NO: 403809 - DNA, 98 bp, Homo sapiens
ccctgaactacttcttggagcaaggcattataccaaagctattgggtgctattctcaataatttgctacccaatatgagttatgttcttcagatagta

SEQ ID NO: 403810 - DNA, 112 bp, Homo sapiens
aggaaagccccagccacccatcaaatcagagagaaggaatccaccttcttacgctatggcagatgtccacttaaaaaaatctggcgatgggagcagaaagagtaagtggcag

SEQ ID NO: 403811 - DNA, 89 bp, Homo sapiens
gctcgccctggtcttcgggctgtcgctcgtctacttcctcagcagcaccttcaagcaggttcagtaccttgaaatagttccagaaacca

SEQ ID NO: 403812 - DNA, 100 bp, Homo sapiens
gctcggaccatcactgtggcactggctgatggtggccggcctgacaacacagggcgtggcaaagtggaagatgctttctacaaaggtgaactcaggctga

SEQ ID NO: 403813 - DNA, 90 bp, Homo sapiens
gaagaaaaaggaagaggaagctactgagtggcaacacaaagttgggtatctacagccattggttgctgttcaggtcagctttgctcctaa

SEQ ID NO: 403814 - DNA, 100 bp, Homo sapiens
gcccagccgagacggagccggacccgccgcctcccgggacttgaggtgggacatggaagaacagggacccctcctggtttgtccacccagcccacacctc

SEQ ID NO: 403815 - DNA, 75 bp, Homo sapiens
gagctgtcactttgggagcggttctgtgccaacatcataaagaacacgatgatgaacgcgttaatttccctcaaa

SEQ ID NO: 403816 - DNA, 98 bp, Homo sapiens
ctggacagctagctgcttatggctataaaattacagactatacttgtagcaagcagaaacatcgatctaatacaagacagatgcacatcaacaccaag

SEQ ID NO: 403817 - DNA, 76 bp, Homo sapiens
ctccgccgccccgaaactttcaccgcgagcgggtaccgctggctgcccagtaggagaggaggagtatcaggatttg

SEQ ID NO: 403818 - DNA, 97 bp, Homo sapiens
cggcagccgaggccgcgaactgcatcatggaggccaagactaaggggctgcagagcggggtggacattggcgtcaagtactcggagaagcaggagcg

SEQ ID NO: 403819 - DNA, 90 bp, Homo sapiens
aagttgcaaaacaccatgaagcttttgcagctgagcaagcgccaggaaaaagtcatctttgatcaatttcagtgcattcagaacaagccc

SEQ ID NO: 403820 - DNA, 83 bp, Homo sapiens
ccggaggagacatcggcctctgcaggcttgccgaagaagggagtggagacctttggcgacttggcctttggcgacatcttcct

SEQ ID NO: 403821 - DNA, 51 bp, Homo sapiens
aaaaaagagcgacgagtgcaagaagaacatgtgatcatccaggccgagttc

SEQ ID NO: 403822 - DNA, 75 bp, Homo sapiens
ctaaagtatcaactatcaacttttcttgatgctggttctgtgaattatattgatgatgttaagaagttcaaaccg

SEQ ID NO: 403823 - DNA, 82 bp, Homo sapiens
tcatggctgctcctgtacgtagtcacggtcttgtgctctaaggtcccgcagcccccggaagccaatagactccctcagggac

SEQ ID NO: 403824 - DNA, 95 bp, Homo sapiens
tttttgaagcctttgcaaaagagctggaggagggaatgatattcagtggtgtttttctcaggtgaaaggagcagtagatgatgatgtagcagaag

SEQ ID NO: 403825 - DNA, 82 bp, Homo sapiens
gggtgccgaggagcgggaagagttgctggggtctcctctgagcctccggcctccataagacccaaaacagatgacacctctt

SEQ ID NO: 403826 - DNA, 75 bp, Homo sapiens
ctgaagactattgtggaagaagcatccattaagtcacaatatggagcttccgtttctgccaagcctgaactaccc

SEQ ID NO: 403827 - DNA, 90 bp, Homo sapiens
atcacgccctttctcttgctcaaggaagaattttcatctattgaagaaaaattcaaaattattgagagagctgaaaaatttggactcccg

SEQ ID NO: 403828 - DNA, 98 bp, Homo sapiens
gtgtgagctgtgcccacacaaagacggggcattgaagaggactgataatggaggctgggctgggcgagtatctcttcgaaaggctcactctcaagcac

SEQ ID NO: 403829 - DNA, 98 bp, Homo sapiens
ttagagattacaatttgactgaagaacagaaggcgatcaaggccaagtatccgccagtcaataggaagtacgagtgttttagctaaagaagatactga

SEQ ID NO: 403830 - DNA, 98 bp, Homo sapiens
caacatcaccgtactgcatgtgaagctcaccgagacggcgatccgggcgctcgagacttaccagagccacaagttatttatcagagagtctgatgctg

SEQ ID NO: 403831 - DNA, 88 bp, Homo sapiens
agagaatggcagccatttatttgtcccgtgcctgctgttcatgtacaaggtcaggaacctttgactgcttccatgttggcatctgccc

SEQ ID NO: 403832 - DNA, 79 bp, Homo sapiens
agacctcaagggccttctccagcggctggagacagtatcggatttggtgcttccagatgtgagttatcaggtggaatcc

SEQ ID NO: 403833 - DNA, 75 bp, Homo sapiens
taaagcagcgtgcgttcagccctggggagctgggctggtgatgaaggtcaagcaggagaagccggagcggctgct

SEQ ID NO: 403834 - DNA, 82 bp, Homo sapiens
cctacttgcctaaatgaggaatgtctttcctaccatctaaaatacgaaggtttctggctggtgtccctaacgaccgtgtctg

SEQ ID NO: 403835 - DNA, 50 bp, Homo sapiens
gtcggtctgctggtctccgctcctgataacgaaggaggcccaacttcatt

SEQ ID NO: 403836 - DNA, 75 bp, Homo sapiens
aaaatacagctgaggaaagagggcttgcatgaagaggatggatcttctggagcaatggaccacagaaattctgca

SEQ ID NO: 403837 - DNA, 101 bp, Homo sapiens
tgaactgagcgtatgtgccacgccgcccaggagacccctctgctgcaccacttcatggcaacaacatgctgctggtgggggttcatggcccaaggaccccc

SEQ ID NO: 403838 - DNA, 74 bp, Homo sapiens
ccatctggtacgtgcgcttcctgtgggagtgacccgccgcccccgacccagaagtgccttttgcctcctgccat

SEQ ID NO: 403839 - DNA, 126 bp, Homo sapiens
gaagacttttgggagattataggagaactgggcgacggagcctttgggaaagtgtacaaggtcactcctggaagcaaggcggctctagctaatttatgtattggagatgtaatcacagccattgat

SEQ ID NO: 403840 - DNA, 83 bp, Homo sapiens
gagattcgggccgtcaccctgcctcccctgcgtcccgccaccggccgcttctgtcctcggctacggggcgtggagtgctggac

SEQ ID NO: 403841 - DNA, 90 bp, Homo sapiens
accggctggagagcagacaggccttttgccatcgacatggcagctgcagaagaaagatcagcaactggagcctaaaaaaagtaccagccc

SEQ ID NO: 403842 - DNA, 100 bp, Homo sapiens
agaactcagagccaagggctgaaccaactcagaatgcattgccattttcacatagctggaatagtcaaatgatttcagttcgtgaagccaaagccattcc

SEQ ID NO: 403843 - DNA, 111 bp, Homo sapiens
tgggccgccgtcggcagcaagaacagagagagaggtggacagatctgagagatactgagaaatgcactcggtgatggaaagagagccactattctgaagaacacttggcca

SEQ ID NO: 403844 - DNA, 96 bp, Homo sapiens
ggcgcgtttctatcgggacgtcctggggatgaagctcaaactttggaacaaataccgaatttccaacattccatcactaatattcctcgacgccac

SEQ ID NO: 403845 - DNA, 82 bp, Homo sapiens
aacgagtccgagaactggctgaagccgatgaacagcgccgggatccaggtgtggacactgccagcggctgcagccgacttgg

SEQ ID NO: 403846 - DNA, 90 bp, Homo sapiens
gtccgagctgagatccatctgcaccacggtgctggcagaggtggaggagacactgaagcgactgcagagccagaagggagtgcagggaat

SEQ ID NO: 403847 - DNA, 100 bp, Homo sapiens
gttcctcctcctgtcgctgcccgtgtgattactgagactcagtatctggagtccatctttcaccatcttctcctgagattgtactggaccgtgaccactc

SEQ ID NO: 403848 - DNA, 100 bp, Homo sapiens
ccacaattcagcagacaaaaagatttccagcagcaacagatacagtactgtagtcttgaagagaaaattcagtctccaacagaagaaacagaaatctttt

SEQ ID NO: 403849 - DNA, 92 bp, Homo sapiens
cttgtccctgtttcgccacagttcctaccttatgagctcggttttcttatgcttataagagtggaacagatgaacgacaatctccttgagag

SEQ ID NO: 403850 - DNA, 75 bp, Homo sapiens
atgtatctactgtatccatgcactcaggctttcttcgagagtcacccagctccttcagctgagcgtaccatccag

SEQ ID NO: 403851 - DNA, 97 bp, Homo sapiens
atgttcgcgcgtgggtcccggaggcgccgctccgggcgtgcggtggggaacgccaagcacaacgtgcatgtcatgaacatctccacaggcaagaaag

SEQ ID NO: 403852 - DNA, 74 bp, Homo sapiens
ctacctcctgcgaggcctcccgggctccgggaaaactacactggccagggggaaatttgcagtggtgagaaaat

SEQ ID NO: 403853 - DNA, 50 bp, Homo sapiens
tatataccttggggaaagctgattggatgaggatcgcagtacggaacctg

SEQ ID NO: 403854 - DNA, 89 bp, Homo sapiens
aagcaatcctaccatgtcagccttcccagtagctggaactacagctcattatcaaattatagtgatttgaagaaagagtctgctgtgaa

SEQ ID NO: 403855 - DNA, 83 bp, Homo sapiens
cccttccccacgcaaccccagatccatttacactttacaggtttggaaatcccttgtctccaggttgctgggattgacttctt

SEQ ID NO: 403856 - DNA, 96 bp, Homo sapiens
ctgccgcagctggcgcagcccacgctcatgatcgacttcctcacccgcgcctgcgacctcgccatcccaggcctcaggacctgagttctccgacgc

SEQ ID NO: 403857 - DNA, 100 bp, Homo sapiens
tttcgctgtcctgtacctggagcgggcggggcagctgtcagtgaagctctacggggaggagccccagccccgcgacgaggaggaagcggagctggagctg

SEQ ID NO: 403858 - DNA, 80 bp, Homo sapiens
gaaaggcaacagaatcatgtctttcagagcagcatgatcagcatgtttataaagctagacagggtctcgctatgttgccc

SEQ ID NO: 403859 - DNA, 78 bp, Homo sapiens
tgaaaaaagagaactggtattcaaagaggatggtcagggtacagtagcagagggagctcccattattccaatttcagc

SEQ ID NO: 403860 - DNA, 75 bp, Homo sapiens
ccaatgcggccgcgagaagcagcgggggggcaggcgatcgaagaaatgaaagctcattagcatctacactgaaga

SEQ ID NO: 403861 - DNA, 90 bp, Homo sapiens
caagtagtccgatggcagcggctgtgccgaggcgcccaactcagttccagaaagctgagtctgatctggattacattcaatacaggctgg

SEQ ID NO: 403862 - DNA, 75 bp, Homo sapiens
cctcggcctcccaaagagctgggattacaggatgtttgccacacgagtcactcgagagaatctctgagtcctggc

SEQ ID NO: 403863 - DNA, 50 bp, Homo sapiens
tggcatccccaacatcatcctcacagttggctagagatttactacatccg

SEQ ID NO: 403864 - DNA, 75 bp, Homo sapiens
ttcattttgaggaggatggatgaacagagaccgaacgtcgaggaacagatactgggtttgtagatgaaactgaag

SEQ ID NO: 403865 - DNA, 100 bp, Homo sapiens
agtgcttccccttgccgagcactggaatcttgtggaagaagaatgaagttgctgattatgaagctacaacattttccatcttctataacaacactctgtt

SEQ ID NO: 403866 - DNA, 83 bp, Homo sapiens
ttcaccatggacaagctggtgcagaacattgcgcggcaggagccttcacgtaaatgggtccagtcatgcctcccagtaagaag

SEQ ID NO: 403867 - DNA, 75 bp, Homo sapiens
gccagaggcagaaaacggacggaagaaaaggtctggccggtaagaatgattgatgttggctgatattggagtgct

SEQ ID NO: 403868 - DNA, 89 bp, Homo sapiens
gacgaacatttctgggtgacactcaacaggattcccggaattcctcctgatcagcagagactgatctttgctggcaagcagctggaaga

SEQ ID NO: 403869 - DNA, 74 bp, Homo sapiens
cccctccgagctggggttggacgctgccagtttgcacagcagcagaaatgcactcggtgatggaaagagagcca

SEQ ID NO: 403870 - DNA, 121 bp, Homo sapiens
aaacacaagtttatggtacagacaatttttgctccaccaaacacttcagatatggaagctgtgtgctgtgctgtggctttcattgagaagctagacgcccagtctttgaatctaagtcagg

SEQ ID NO: 403871 - DNA, 75 bp, Homo sapiens
gttttagagctggcagcagcatctcagcccaagagaagggtgcctctgccaactggtggaatcatcgccacttcc

SEQ ID NO: 403872 - DNA, 74 bp, Homo sapiens
tggaagacggagctggtcggcccgaagctgatccagtgtctctttgggccacttcaggcggggccgagcaatgc

SEQ ID NO: 403873 - DNA, 100 bp, Homo sapiens
ggaccgcagtgccccaagagaggctgaagccgacgtagcttctctgaacagacgcatccagctggttgaggaagagttggatcgtgcccaggagcgtctg

SEQ ID NO: 403874 - DNA, 97 bp, Homo sapiens
cgacagggctgggcctgctgtccctaccgccaggcatccagcaagatgaggacatctatgaggaaggaaactatgaggaggaaggaagtgaagatgt

SEQ ID NO: 403875 - DNA, 100 bp, Homo sapiens
gcggcgcgggctccagactcgccgtggtcaagttcaccatgagagggtgatgatgaacagtctacacagatggctgcaagttgggaagatgataaagtta

SEQ ID NO: 403876 - DNA, 100 bp, Homo sapiens
ctttgtcctggcaggaatgaactctgctggcctttcatttggtggaggagccggaaaatctccagtctatgtgctgaagaagcagcagcccaagagcaga

SEQ ID NO: 403877 - DNA, 100 bp, Homo sapiens
agaagccccagctgcactacgcggaaacctcgacctgtctcccagttggttgcacagcaggttactcagcagtttgtgcctcctacacagtcaaagaaag

SEQ ID NO: 403878 - DNA, 50 bp, Homo sapiens
ctcccgggcggccgcgggcgggtgctggagagtcatgcctgtgagccctg

SEQ ID NO: 403879 - DNA, 100 bp, Homo sapiens
catgccctgcacgtgggtgatggcatgtgcttatgccccatcgggatgtgccattgcttgtggcaccccagatactcgcccagctggtctggaagaggct

SEQ ID NO: 403880 - DNA, 98 bp, Homo sapiens
actagaaaagaaaagaaaacttgaaactaatcctgatattaagccatcaaatgtggaacctatggaaaaggccgccatggcatcagatgaaggcaaac

SEQ ID NO: 403881 - DNA, 75 bp, Homo sapiens
actggagtgagagggtcttctggttttttgcatgtctgacacccatgactccacctggaccttatggctccaccc

SEQ ID NO: 403882 - DNA, 83 bp, Homo sapiens
aatccctcacgcgggcgcggatcgaccggagcagagagctggcgagcaagtgaagatagtgatccggggagacaggaacacgg

SEQ ID NO: 403883 - DNA, 51 bp, Homo sapiens
ctatgctgctgtaacacagtttgagatgtgtggagttggctgttacgacat

SEQ ID NO: 403884 - DNA, 98 bp, Homo sapiens
ggcgcccgggcccacgcggaacgacggggcgagcccctggcgaagcggtgctgcctccagcccagagatgccgccaagatgcccgagagcgcttggaa

SEQ ID NO: 403885 - DNA, 100 bp, Homo sapiens
gtagaaacaccaacaggatacattgaaagtgggttggcagctggagaagataatggacagagaggttatttgctgacctatgttattgcatacattcgag

SEQ ID NO: 403886 - DNA, 75 bp, Homo sapiens
gactgaaggtgaagaccagtttgatgaatggcctgtccagaagacagccaaatacatccttcaaacagacttcac

SEQ ID NO: 403887 - DNA, 74 bp, Homo sapiens
gaaacaccactgaagcattgccaagattctgaggttgggaccaagaaggaactatctattttaaaccaaaaatt

SEQ ID NO: 403888 - DNA, 100 bp, Homo sapiens
gggggttttgtttgtggatgccctgcccactactctcttaatgctgacaacaggacttgtagtgtgccatctgggattgacagctcagcctgaactctat

SEQ ID NO: 403889 - DNA, 100 bp, Homo sapiens
tagaacttgatagttttctgaaggtgatggaggacgaggagaaggcagtggagatcttgggcaacacggaagctgctcatcctccatcccccatccgctg

SEQ ID NO: 403890 - DNA, 97 bp, Homo sapiens
gcacctggggtggccctggcgtgcgggcggcgacatggaggacggcgtgctcaaggagggcttcctggtcaagaggctgctaaatcctgaagatgac

SEQ ID NO: 403891 - DNA, 82 bp, Homo sapiens
gtagcccggcgctcggcatggctctcctggtgctcggtaccactgatgaaattatgaccaggtgggcccgagttagtaccac

SEQ ID NO: 403892 - DNA, 88 bp, Homo sapiens
cgcgtcccgagccctccacccgtcgtgccggcgccgcccggaccgccaggagctgacatggacccaaatcctcgggccgccctggagc

SEQ ID NO: 403893 - DNA, 97 bp, Homo sapiens
actacataagcgaggctgtggaagatgctcccagctacagagggtaccgggatgcctgcaccattactgagtcaagggtccagagaaggaggagaag

SEQ ID NO: 403894 - DNA, 75 bp, Homo sapiens
tcgcctctgtgctcgtgagtgcatggggtataagaaaccaccatcatgggttcgggtcccatagaccccaaagaa

SEQ ID NO: 403895 - DNA, 90 bp, Homo sapiens
aacaaatccaagattagcacagctctgcttatgataatgtcaacaaagttcgagtagctatcaagaaaatcagcccctttgagcaccaga

SEQ ID NO: 403896 - DNA, 126 bp, Homo sapiens
tcatcctccttccacatggctacgatggggctgggccagaccactcatcctgtcgaatagagcgtttcctgcaggcaccagaatttcctgagtttgccactaaagtccaggaagctatcaattccc

SEQ ID NO: 403897 - DNA, 90 bp, Homo sapiens
tgtttatttagaagacacagactaacaattttagatggtgaccaagaatatggcccaggtgaccaaagccctggacaaggccctgagcac

SEQ ID NO: 403898 - DNA, 100 bp, Homo sapiens
gacaagatggtttacatctcgaacggcttggacttaaggatcagcaggagagagaaatcattcacgttctcatggattgctgccttcaagagaaaactta

SEQ ID NO: 403899 - DNA, 107 bp, Homo sapiens
agtggatggcgtggagatatggcgcaactgcggcgccattgacttccaaagactcctggcacatgaggaagaaacccagaagaggagagcaaaggagtcaggaatgg

SEQ ID NO: 403900 - DNA, 96 bp, Homo sapiens
agagacttggctgcaagaaactgtatgacttggtggggaaacttaaagatgcttcgaaaagcctggaaagagcaactcagttgtaacttggggaag

SEQ ID NO: 403901 - DNA, 100 bp, Homo sapiens
aggccttccagcgctatcgtgacctgcttttcggttccgggtcttggccccgtccttacctcacagattccagtgctgaatattcaaatgaaaatttttc

SEQ ID NO: 403902 - DNA, 82 bp, Homo sapiens
cttagagaaaaccagttaaaaatgttgcctaagtgagacatggaatccattaaaattgcattatcagttaagaaatgtacgg

SEQ ID NO: 403903 - DNA, 50 bp, Homo sapiens
ggaaaaagatgctacaattgcttctgaatctctgaaggaagaagatgaat

SEQ ID NO: 403904 - DNA, 101 bp, Homo sapiens
tgaatatctgcattgaacctgacaccatcagcaaaggagactttataactatagggtggtgaagcagtattttccaatttgaagattcatttgaaggtggc

SEQ ID NO: 403905 - DNA, 74 bp, Homo sapiens
agatgtggttgtcaactttgacattcctacccattccaaggcatttcagaagatggacacaaagaagaaggagg

SEQ ID NO: 403906 - DNA, 100 bp, Homo sapiens
tgtgctcaaaactgtcattttgggactgctgtgcctcctcctcctgtggtggaggagaaggaaaggagcagccaaaccaagtgaactatgggaatatctg

SEQ ID NO: 403907 - DNA, 73 bp, Homo sapiens
attccgaaaacattgctgtgaatggataaaaaggatttctggttatgtggtccgaatcagtggtgggaacgac

SEQ ID NO: 403908 - DNA, 75 bp, Homo sapiens
tctgttagagttcgaaaagctgagaatcctcagtgtttgctaggatcatcatgcctagggttcataacataaaaa

SEQ ID NO: 403909 - DNA, 80 bp, Homo sapiens
gaggcagtaagcatgcatgatggaaacgtcattactgcatttacaagtccttccactttctctctgaggcagaaagagca

SEQ ID NO: 403910 - DNA, 101 bp, Homo sapiens
ctgttggaaccaggctccctatgcaattgcccgtgctttgaagaagaggagcacttcaaggtgctggtgaagatgaccgcccaggagctcgccaatggaat

SEQ ID NO: 403911 - DNA, 75 bp, Homo sapiens
atcttcctttgagctccggaaagttggtgaaactactgggccatggacagccacttaactggatttctttggagc

SEQ ID NO: 403912 - DNA, 82 bp, Homo sapiens
gagaggtcgttttcccgtccccgagagcaagggcgtgatggtgggcatgggtcagaaggattcctatgtgggcgacgaggcc

SEQ ID NO: 403913 - DNA, 95 bp, Homo sapiens
cgcctccagcttgccaccaaagacctgcgactttgctcaggatgatcggctgaatgtaacagaggaactaacgtccaacgacaagacgaggattc

SEQ ID NO: 403914 - DNA, 73 bp, Homo sapiens
ccgacccgcgccctgctccctctcagcacctgggcggacggagatcatgaatcagacagataaaaatcaacaa

SEQ ID NO: 403915 - DNA, 75 bp, Homo sapiens
ctgggcttgtccttgctggtgcatgcgtcgtcggcctctgggcagcagctttccgaggagatccagtgctccctg

SEQ ID NO: 403916 - DNA, 84 bp, Homo sapiens
aacttactaaagacggcaatgtgctgcttcacgaaatgaggtttttcattagtcaatacagtgaaggctggcatgatcatcagc

SEQ ID NO: 403917 - DNA, 95 bp, Homo sapiens
gatgagctggtctgcgatcctgaatgggggcggcgtgcccgccggggggctagtggccacgctgcagagcctcgacagcaactctggaaagtggc

SEQ ID NO: 403918 - DNA, 109 bp, Homo sapiens
ctcaatgccaggatggcccggccgcagggctcctccgtccacgatggcgtccccgtgcctttccagctgcccccaggatgtacctgcttttgtgagacctgcacgtgtg

SEQ ID NO: 403919 - DNA, 83 bp, Homo sapiens
gctcttcaccatcccgttttccagcaagtttaatggatcgagaagtggcgttgcttgctgaaatggacaaagtgaaagctgaa

SEQ ID NO: 403920 - DNA, 90 bp, Homo sapiens
gtggtcgcttggggtgatcatgtatgagatgctcatcggaaaaggggaagatagtgatgtactcagtataaatgcagatgcttatgacag

SEQ ID NO: 403921 - DNA, 101 bp, Homo sapiens
ccggaacccgaacaacatgcaggtcctctataccgcactgcagcacagctcagagctggcgcccaaggcctcaggcccaggcccaaggccaagtgagagag

SEQ ID NO: 403922 - DNA, 100 bp, Homo sapiens
cgaagcgctgcgctcgcgcccggatccctcaggcatctcgtccccggtgaagaagacagagatggacaagtcaccattcaacagcccgtccccccaggac

SEQ ID NO: 403923 - DNA, 75 bp, Homo sapiens
gtgacggaggagcttgtaccaccggatcttatggttggtgatgaggcaagtgaattacgatcaatgttagaagtt

SEQ ID NO: 403924 - DNA, 98 bp, Homo sapiens
tagctggatgcgtccggactcctgcagtccaacatgtttaccgtggctgatgtgttgagtcaagatgaactgcgcaaaaagctataccagacgtttaa

SEQ ID NO: 403925 - DNA, 100 bp, Homo sapiens
ggcggagcgcaggcctcgtgccgttacggccatcacggcggccgcagtggcgtcctggagccctcctcagttcattatgctgacatatcttttcatgttg

SEQ ID NO: 403926 - DNA, 75 bp, Homo sapiens
acgggcattctccatctccttgcaggtctgtgatgatgagtggcaccactacgctctgaacctcgagttccccac

SEQ ID NO: 403927 - DNA, 90 bp, Homo sapiens
atcccaggttgccttggaaaatgccaacgccgtgtctgaagctgtgtgttctcatttcacccaaaacctttggacagtgcagggcataga

SEQ ID NO: 403928 - DNA, 82 bp, Homo sapiens
cttccagaagccaatatctactcttgacaaccgaaccatcgtcatcacctctcatccaggcgcagtggctcacgcctgtaat

SEQ ID NO: 403929 - DNA, 100 bp, Homo sapiens
aaagctcggacagctcaattagccaagataaaatgggtgataagtgtcgctttctacgtattgcagacagaagatccaaccatggagcgaccctatacat

SEQ ID NO: 403930 - DNA, 87 bp, Homo sapiens
cggctccggaggtggcagttaagtactatactggcaattgctggagaagattttgcaattgttgcttctgatactcgattgagtgaa

SEQ ID NO: 403931 - DNA, 90 bp, Homo sapiens
gacgaagacagtccctggatcaccgacagcacagacagaatccctgctaccagccccttcacagatgtagtcactacaaatcttaaattg

SEQ ID NO: 403932 - DNA, 82 bp, Homo sapiens
tcgggagcgcaaggtcgccctcaaggccatgatcaaaactctaaggagctgcagatcaagaagcagttccaggagacgtgta

SEQ ID NO: 403933 - DNA, 96 bp, Homo sapiens
tttttattacaagactacggagcataggaggaaaattcatcatctggacagagcgggatgccaccagcttgtccaaagggaagttccaggagctcc

SEQ ID NO: 403934 - DNA, 98 bp, Homo sapiens
ccgccttcctgtgcggggccgtggcggccgcggcgatgactcggacccagaaaaatcctcagatcatgtatctagaacaggagttagaaagcctgaaa

SEQ ID NO: 403935 - DNA, 98 bp, Homo sapiens
gtaacgactgtaatcaggttgtcaaaccgcaggcatttcaatcacattatggtgtgatgaaccaaggagtggcccctatggtagggactccagcacca

SEQ ID NO: 403936 - DNA, 101 bp, Homo sapiens
aagactccgagttctcggtactcttcagggatgagtcatgtggcagtggaaaatgcgctcgggctggaccagcagaagctggcagggcggagatgctggac

SEQ ID NO: 403937 - DNA, 76 bp, Homo sapiens
ctccgttggagccccagtggaaactgcctgctgtctggggacaggattctgaaaagaaatcatctctcctgtcaga

SEQ ID NO: 403938 - DNA, 74 bp, Homo sapiens
gcctgattgaggactgccagctggcgctgcagcttctaccctcctcatctttggaagttgtcccagaagcagcc

SEQ ID NO: 403939 - DNA, 83 bp, Homo sapiens
tacagatggacctgtacgcgctgctaggcattgaggagaaggcagcggacaaagaggtctgcgcaggcatggcactaagtgtc

SEQ ID NO: 403940 - DNA, 90 bp, Homo sapiens
ggcatactttgaagatcgtcatggggggcaagattcttgccaagagaattaatgtgcgtattgagcacattaagcactctaagagccgag

SEQ ID NO: 403941 - DNA, 100 bp, Homo sapiens
cggcagggaccagcagttactgggaaggttaacacagaaatctgcctcctgggccatgccgcttctaaggcctgtttcttctcatgagccccagcacaag

SEQ ID NO: 403942 - DNA, 100 bp, Homo sapiens
gacatgaagagctgccagatccaacagatcaatgaactgagccatgttcaaatccctgttatgttgatgccagatgacttcaaagcctattcaaaaataa

SEQ ID NO: 403943 - DNA, 88 bp, Homo sapiens
atagaccgcttcgatagggagaacctgagggcccgcgcctacttcctgtcccactgccacaaaggtatgaacgctgccgtccgtgccg

SEQ ID NO: 403944 - DNA, 90 bp, Homo sapiens
gaaagcctccggaatctaaaaagccctcagtaccagagacagaagcagatggattcgtccttttagatctaattatcatggacctgcgac

SEQ ID NO: 403945 - DNA, 100 bp, Homo sapiens
aatgctccacctgtaagaacagaaaatcgtcttatagttgagaatttatcctcaagagtcagctggcagattggcacttctctgtttgatgaagagggag

SEQ ID NO: 403946 - DNA, 50 bp, Homo sapiens
tctaaacttgatccaaagacaatgaaggtgaaggtaggcaatgaagttgc

SEQ ID NO: 403947 - DNA, 75 bp, Homo sapiens
tgttgttgcctccatgcgccaatccaaaccgaaagccagaagaaactgttttggctgggcctacttcacctatac

SEQ ID NO: 403948 - DNA, 99 bp, Homo sapiens
agcttgatgacattgaagagtttgagaacattcgaaaggacctggaggactgaaatgcaactgcagaagcaacatgtgaccttttagagatgcttgtgg

SEQ ID NO: 403949 - DNA, 75 bp, Homo sapiens
ggagcttctgaagaaggccggctacgtcagcaagattgtcggcaagtgttaagtgatgcaattagcattattggc

SEQ ID NO: 403950 - DNA, 75 bp, Homo sapiens
ctggagcctagagaagcagctccagttcttccaggacttaaccaccaccatgtcgagcaaaagaacaaagaccaa

SEQ ID NO: 403951 - DNA, 98 bp, Homo sapiens
gaatgcagaagatgtctacagtcgcctgacaacacctgtgtttgggaagggagttgcatacgatgtgcctaatccatggatatcttgacctacgtggc

SEQ ID NO: 403952 - DNA, 100 bp, Homo sapiens
ggtgacagagtggagccatggctagaggcctccggtgtggctgtctctgatggtgtcatcaaggtgttcaacgacatgaaggtgcgtaagtcttcaacgc

SEQ ID NO: 403953 - DNA, 90 bp, Homo sapiens
cgcctgccaccgagccgggcccacctccccaccaaggaaggttgggcccgaaggcatcctgcagaacggggctgtggacgacagtgtagc

SEQ ID NO: 403954 - DNA, 75 bp, Homo sapiens
ccaggctgctttcttcggtagctaccgaaacgctctgaaaatcgagccggactgcacatgtgaggagttctgccc

SEQ ID NO: 403955 - DNA, 100 bp, Homo sapiens
agaccctggagcctcagttggaagcagccgatccagcctgcggagcctgtggggcaggctcagtagatgaaggcgtttctgagggcttgcctacacttca

SEQ ID NO: 403956 - DNA, 98 bp, Homo sapiens
gcaagatccagatcgggatttacgtggagatcaagcgcagcgatggatgtcacatgtacttcagtttgaggataaaagcagaaaagtgaaagatgcaa

SEQ ID NO: 403957 - DNA, 98 bp, Homo sapiens
cagcggctacagcacccagacaaccaccccctgctgctctgaggacaccatcccttcccaagtttatgattacaggtggaaatctacaagacagtaaa

SEQ ID NO: 403958 - DNA, 75 bp, Homo sapiens
tttgccctgaacatcatgaattcccaagaaggagaaatacctgctccccctcatcctgggcggccgagaggacag

SEQ ID NO: 403959 - DNA, 83 bp, Homo sapiens
ctggagaagcacggagttcgggggatggcacagaatgggagttcttcgtaagtacatcttaaagctgtcaagatggttctagc

SEQ ID NO: 403960 - DNA, 100 bp, Homo sapiens
gacaaaattaaggaagatatccttaccgatgaagatgaaaaaacaaaaggactgtgggattccattaaaagtcctgccattgactctaccagaggagatt

SEQ ID NO: 403961 - DNA, 101 bp, Homo sapiens
aaagccccacatttgcagctcattgaaggaaaggtcatgcgcatcgtggataatgttcgtcctgatcgacagacggttatgttttcagctactttccccag

SEQ ID NO: 403962 - DNA, 97 bp, Homo sapiens
gctggatccgtgggtcagagaacacaggaccagtttgccatcccaaggccgaagctgagtcagtgctgattctctcaaatagagcttgaaggataaa

SEQ ID NO: 403963 - DNA, 101 bp, Homo sapiens
ctgccagaagctctttgtgtatgaccttcacgcagtcaagaacgacttccagaatatgcttttaaggctattaaccagggtggccttacatcagtagctgt

SEQ ID NO: 403964 - DNA, 50 bp, Homo sapiens
gtgggaatcagcaattttgcacaggctctgtgtgtactactcggaagaaa

SEQ ID NO: 403965 - DNA, 75 bp, Homo sapiens
cccggcccggccgcagccccgctgggcgccgcaggcgcagcccagcctcgaaatgcagaacgacgccggcgagtt

SEQ ID NO: 403966 - DNA, 100 bp, Homo sapiens
ctgtggggcgggggcgaggttcgggctggttgttccgttgcgagctgcagctgcgatctctgtggtaggcccaggtttacaggtacatacattacacccc

SEQ ID NO: 403967 - DNA, 90 bp, Homo sapiens
ctcatagtggcaattgccttttcaaaaggaaaacccttcaggcaaccttgctacaaaaattgattcactacaacattttctattgcctat

SEQ ID NO: 403968 - DNA, 51 bp, Homo sapiens
caagcagttgttgcacaggtaacagaaactcccatcaagactgaagcagac

SEQ ID NO: 403969 - DNA, 100 bp, Homo sapiens
aaattggaagtgaatggccccatggtgacggtggccctgtcagtggctctcttggccctcctgaaatggtttttcgttggaatatacgttgcacatttat

SEQ ID NO: 403970 - DNA, 82 bp, Homo sapiens
gttccgcaccctgatgaaagcctacgggatccgctttgacgtgatggtgaacggcaagttccagggtctccctccactgctg

SEQ ID NO: 403971 - DNA, 75 bp, Homo sapiens
tatgcccaccctccaactttgcgacggaaatgtgtcatcgaaagccagggacaggctggcctgacatggaaggtg

SEQ ID NO: 403972 - DNA, 100 bp, Homo sapiens
cccagctgtaaaccgaacagagagccccatgggggccctgcagccagttggatcacaaggacgagtcataagttttgaggtacgaaaagaccaccatgat

SEQ ID NO: 403973 - DNA, 90 bp, Homo sapiens
ctgctatgcttcgaagctgtagtctgaatcaacctaagttttaaacagaaggtgaacctctgaggacactttcttcatgagcaacaaacc

SEQ ID NO: 403974 - DNA, 83 bp, Homo sapiens
gctgagtggttgtgtggtcgcgtctcggaaaccggtagcgcttgcagcatgcaacttccctgggagagggaaagatttgtgcc

SEQ ID NO: 403975 - DNA, 90 bp, Homo sapiens
ctgaagagcttgcagtaccttcaacattccttcaggtacatgtacccctccatggatcagctggctgaaatgcttcctggagtccttcaa

SEQ ID NO: 403976 - DNA, 50 bp, Homo sapiens
cccgcacttccgggttcctctgcaatggagagaagatgactgaggaggag

SEQ ID NO: 403977 - DNA, 82 bp, Homo sapiens
ggtagatgtcattcaagaaccagcttgatgaagaaatctctggaattgtggaagtggttggaagagtaaccgccaaggccac

SEQ ID NO: 403978 - DNA, 50 bp, Homo sapiens
gctgaagctgcgggaggcccccagccccaatcaggaaacccaggcccaac

SEQ ID NO: 403979 - DNA, 83 bp, Homo sapiens
ggcgagcgcgagcggcgcgagaaacaggatacagacgtccctcaccagtgccagcttggggtctgcagatgagaactccgtgg

SEQ ID NO: 403980 - DNA, 75 bp, Homo sapiens
caggaagtgagtcatcacaaactgggacctccaccacatctagcagaagtgacgcatccaaagaagacattgaca

SEQ ID NO: 403981 - DNA, 74 bp, Homo sapiens
acagaacaatcaaagtagaggtgtatgactgggaccgagatggaagcttccaaactacaaaaactttaaaggca

SEQ ID NO: 403982 - DNA, 75 bp, Homo sapiens
ggcggtccctgtgacctgtggagacacggccagatctgccctccattacagaatgtctgaaggggacagtgtggg

SEQ ID NO: 403983 - DNA, 74 bp, Homo sapiens
ccaggaccctcagggagagcgggcagccttccaggtggacagatcctggccaatttggagcaaggcttagcaga

SEQ ID NO: 403984 - DNA, 88 bp, Homo sapiens
cctgcgatttgcagcctccaatccatgtggcaacattcagcgctcactctatgaggcttcgcaaggcatggtgggtcagctggcggca

SEQ ID NO: 403985 - DNA, 100 bp, Homo sapiens
ccttgtttcagctcaggccctgcaaccgaccgaccgtctgctgggctccaagtcacctgagaggcgaggtgaggaagcaatgaggctccccaagaacaca

SEQ ID NO: 403986 - DNA, 101 bp, Homo sapiens
gtgatgcgggcagcaggcccctcctgcgcacagaaatgagtggtggattggctccaagtaagagcacagtgtatgtatccaacttgcctttttccctgaca

SEQ ID NO: 403987 - DNA, 75 bp, Homo sapiens
cccatgtgtggaggaaatgaaattaaggcttttaataggatacattaattgtttggtcagaagcagagaactatg

SEQ ID NO: 403988 - DNA, 90 bp, Homo sapiens
ataaggacaaaagccaagaggaggacagttcgctacacagcaatgcatcgagcattgccgccaccaccacctcctgaattctgccctgct

SEQ ID NO: 403989 - DNA, 82 bp, Homo sapiens
aataaatggcgtccaaagtcacagatgctatagtctggtatcaaaagaagatcgccaaactgaggcagcaactacaacgcag

SEQ ID NO: 403990 - DNA, 100 bp, Homo sapiens
atgatttgcttccatgcaaactggggatttggttttgccttacactaaaagcattacctcacctcatccagggtgcgtctcctggtggaagagggctgtg

SEQ ID NO: 403991 - DNA, 96 bp, Homo sapiens
tcctaacctactggttcctcttcagaaagaaaaaagaagaagtccccgagttcaccaaaattcagacatttagagacggggtttcgccatgttggc

SEQ ID NO: 403992 - DNA, 100 bp, Homo sapiens
aggaagatgtacgaatccaaaatgcaatcaatatagctcagttgcagagctattttgctgcatgtgaggatgagatccctgccatccggaaccatgacaa

SEQ ID NO: 403993 - DNA, 90 bp, Homo sapiens
atggatgttcttcttcgagtatttgtagaaggcatccttcggaaagctctggacaagatcgcggaaatcaagtctctgttggaagagagg

SEQ ID NO: 403994 - DNA, 76 bp, Homo sapiens
gggaaatataacattcttggcacaaatactattatggataagatgatgattgaagaattggaggagaaacttaatg

SEQ ID NO: 403995 - DNA, 100 bp, Homo sapiens
tttatcctgagcaggcagagagcagaagatattcacagacatgcggaatttgagacatttgaagacagtgatttgttccatttgattggtgttatctgtg

SEQ ID NO: 403996 - DNA, 100 bp, Homo sapiens
gcatgtctaccaaacatgtgggacattaggaagtggtattggaaggaactggccctgggcctctggaggcagcagtattctggcagaatttggaaccctg

SEQ ID NO: 403997 - DNA, 96 bp, Homo sapiens
ttatcacagtcctggagatgactccggtgcttgggacagaaatcatcaattaccgaggttctgccattactgcaatagccacatctgtgtgtcacg

SEQ ID NO: 403998 - DNA, 83 bp, Homo sapiens
agctgggtcagtccgccgctcaccccgcggccgcaccttcccgccttctcaggtgttgacttcaaaatcaaaactgtagagct

SEQ ID NO: 403999 - DNA, 75 bp, Homo sapiens
atttaatggaaaatcgcttggttaaaacctgacacttttaacagacaaatttacatgtattggagaccagaccag

SEQ ID NO: 404000 - DNA, 100 bp, Homo sapiens
ggagctcagcatcacctccaggggcgcgacgctgctggtggccaagaccaaggcctctccagagtacagttgtgaatttggctccgcgaagtattatgca

SEQ ID NO: 404001 - DNA, 97 bp, Homo sapiens
ggctgtgccaagttcccaaccaagtgttgtgggtgcggaggcagcaaatgttacaggtcctggtggtgttccagttcaaggcagtaaatatgcagca

SEQ ID NO: 404002 - DNA, 100 bp, Homo sapiens
aaagaagtttgtatcaacccataccactataagagagtggagagtccagtgagtgatagttgcttcaggaatcttgcagaagaccgcagtgggataaatc

SEQ ID NO: 404003 - DNA, 80 bp, Homo sapiens
gccaggccacccaggagcagctgagcaacttgtcaagaccggatattaataaggcagcggaaagaagaaatatgaatacg

SEQ ID NO: 404004 - DNA, 80 bp, Homo sapiens
gaagagctgcttctgtatcttaaggacactggcctgagactgtctgcagttgcaccgcagatcctcctgcccggctggcc

SEQ ID NO: 404005 - DNA, 98 bp, Homo sapiens
gacgataatcctgtctgtcgactgccagatgacacagtttatctctttgttgtaaaccacccagaattcaagaatacagtggaaatttttaaatttga

SEQ ID NO: 404006 - DNA, 75 bp, Homo sapiens
cagcgcttcaatatgagaagttcttgaatggctactacaaagttctgggaaagggaaagctcccaaagcagcctg

SEQ ID NO: 404007 - DNA, 100 bp, Homo sapiens
ttaaaggatggctttggctttgcagacagcacagtcttacagggagccaagaaccatggggtagtcatgccagatgccaataaggaaaataccctgaacc

SEQ ID NO: 404008 - DNA, 100 bp, Homo sapiens
gagggcagcctggcctatgtgaaaggcggtctcagtacattcttcgaagcacaggatgccctctcaggcattgaatgccccagaggagcccgaaacctcc

SEQ ID NO: 404009 - DNA, 90 bp, Homo sapiens
acagtggacccagacaccggtgtcatgagcaggaaggaaccgctggaaacactgaagaggaaaatgtttataggaggccttagctgggac

SEQ ID NO: 404010 - DNA, 100 bp, Homo sapiens
attagatattcgacattcttctataatggggaacacttaagaatctgtcctcaggaatatacatgctgcaccacagaaatggaagacaagttaagccaac

SEQ ID NO: 404011 - DNA, 82 bp, Homo sapiens
ttattttcaatagaaacagatatacagatgtggagaagtgtgaaagcagctgtagacaacaaggaagtgaatgaatgttgcc

SEQ ID NO: 404012 - DNA, 100 bp, Homo sapiens
ggccagtcgcctccaggccaagagggatccttcacccgtgtctgggaaaacaaagtgcatgatgaagtcttcagactgtgtcataaagcatgctggtgta

SEQ ID NO: 404013 - DNA, 76 bp, Homo sapiens
gctgcggaacaggacgccctctgataaatcttcccaaggctgcagacaccgacggatttgctttgggagccagagt

SEQ ID NO: 404014 - DNA, 98 bp, Homo sapiens
tctcaataccttgggcccagtcatgaagatggaacctctgaataacctccaggctcatgctgaagattcggttatggaccatcatttccggaagccag

SEQ ID NO: 404015 - DNA, 101 bp, Homo sapiens
agcatatatcctaaaggagatggaagtgatgtaccatcatgggtagcctttgataaacaggcagcaattccatttccgtgagggcgtttctagatgaagat

SEQ ID NO: 404016 - DNA, 95 bp, Homo sapiens
gagttcaacatcctcctggccaccgactcctacaaggtgcctactccctgtccatccgggactgggatcagaccagaggcgatcatgtgaagcat

SEQ ID NO: 404017 - DNA, 99 bp, Homo sapiens
gcgcagccggcccagagctcgggtctccggggaccgagagctatttatgaagaaattgatgctcaccagcacaaaggagctcaaaatgatggtgactga

SEQ ID NO: 404018 - DNA, 75 bp, Homo sapiens
ggggaggcgaacagtctcgttgctgcctctgtgtacgctgaggggggagtttcagtctgatggaagcaaacaaga

SEQ ID NO: 404019 - DNA, 50 bp, Homo sapiens
cgttgacaaaacttttttccatcaaatcgggaagcccgagagaggaagag

SEQ ID NO: 404020 - DNA, 100 bp, Homo sapiens
aggcggcgctcctactccctccccggactccgcggcataagctgtggccatgactactgaagtaggctctgtgtctgaagtgaagaaggactctagccag

SEQ ID NO: 404021 - DNA, 92 bp, Homo sapiens
gccagatagaaaacggcgagagtgggcgagaacgtccactgcgggccggcgaaagctggtcaaaatgcagatcttcgtgaaaacccttaccg

SEQ ID NO: 404022 - DNA, 82 bp, Homo sapiens
gccgcgttggggtgagaccctcacttcatccggtgtgctccccagaaggggggccgctcccagccagccactgggaccagaa

SEQ ID NO: 404023 - DNA, 83 bp, Homo sapiens
ccaagacccgttggacgctcctcgggagtgggacccagctcgcctgaatgaatctaccacctttgtgttgggatctcgagcca

SEQ ID NO: 404024 - DNA, 82 bp, Homo sapiens
ttaaaagcttgaaagagaaacttttgttggaggaagaaccaacaaccagtcatggtcaggaaagatgaatgggagggctgat

SEQ ID NO: 404025 - DNA, 82 bp, Homo sapiens
gaccctggagcctcagttggaagcagccgatccagcctgcggagcctgtggggcaggctggagtacaatggcgtgatcttgg

SEQ ID NO: 404026 - DNA, 87 bp, Homo sapiens
cttttcgagcctggaagggagagacctggagaggctgggaggcggcagaatgcagccagaggagggcacaggctggctgctggagct

SEQ ID NO: 404027 - DNA, 90 bp, Homo sapiens
cagtcccccaggatacagggtcaaaggagagcacaaccatcgcagttggaagcccatggggcagaaactcctttaaataacggatcaacc

SEQ ID NO: 404028 - DNA, 82 bp, Homo sapiens
caacgccccggtggagaagctgaggcccacccttcctccattctgagcacataaaaaccccacactcagccagactcaacac

SEQ ID NO: 404029 - DNA, 92 bp, Homo sapiens
attaaccctttcattttgtttggaagatggaccaaagcgatacagaaaagatggtaaagcacgcaataaagacaagaggaatgtaaagaagc

SEQ ID NO: 404030 - DNA, 83 bp, Homo sapiens
ggaacagctacgcatagaagccgggattgagcgcatcaagcggggatctgacgagcttttctctacttgtgtcactaacggac

SEQ ID NO: 404031 - DNA, 75 bp, Homo sapiens
ctcagaatgcattgccattttcacataggctcctgggtagaactgcacttcagcaataatgggaacgggggcagc

SEQ ID NO: 404032 - DNA, 76 bp, Homo sapiens
ggacccggtcccaggggaggcccccacctccccttctattgttctgtggcccagttacagccaagttctacttctg

SEQ ID NO: 404033 - DNA, 100 bp, Homo sapiens
aggcggaagggacttgccttgtctcatatgaaactttggactgtggacttttgagttaacgctgaaatgaggtgctggtgaatctggtaaaagtacaatt

SEQ ID NO: 404034 - DNA, 100 bp, Homo sapiens
cctggctgggattcctacacaatgcgttgcctggctccacgccctgctgggtcctacctgtcagagccccaaggtctgaactccatactctttgcgatta

SEQ ID NO: 404035 - DNA, 82 bp, Homo sapiens
aaacccaaagatccccgttcctggagattctgattgaggtgagcatgggtttatgcgtcttaggcattattgtgatggcgag

SEQ ID NO: 404036 - DNA, 82 bp, Homo sapiens
gctgggccagggagcctgggacatgatcgacagccaggtcttcaaggagcccaagatgatacagatcacttggattcagtcg

SEQ ID NO: 404037 - DNA, 50 bp, Homo sapiens
gcatgtctatgcctactctcaagaaatggaatcaggaaacccaggcccaa

SEQ ID NO: 404038 - DNA, 74 bp, Homo sapiens
accttcatcacgcagcagggcatcaagagtcagatttttggggacatcaggacagaacgtgagtgacattttcc

SEQ ID NO: 404039 - DNA, 75 bp, Homo sapiens
tcacggcctgtgagacaagagcatcttggatgtaggacaatggaagagttaggaagtggtcatagtaagtgctac

SEQ ID NO: 404040 - DNA, 98 bp, Homo sapiens
gaagttcagcccagaggagaaactcgctcgccttcagaagacaggcagaatccagagaccacatttgaagtatatgttgaagtggcctatcccaggac

SEQ ID NO: 404041 - DNA, 87 bp, Homo sapiens
catgtgcctggaccttgcagcttcctggatgaagtgccccttggacagggcctctaattgtggcattgtagaaagtatcctgaactg

SEQ ID NO: 404042 - DNA, 100 bp, Homo sapiens
cccatcctcgtgctggaggaacaggtgaatctggattgggaaagtcgacattaatcaactcattattcctcacagatttgtattctccagagtatccagg

SEQ ID NO: 404043 - DNA, 83 bp, Homo sapiens
catgccgctcctaagcctgcacagccgcggcggcagcagcagtgagaggcttcttccccgggagctcgcagggctgcgacgcc

SEQ ID NO: 404044 - DNA, 90 bp, Homo sapiens
cctgcggtgacactgtataaacacgatgaccctgccttggacactgcccatctctaagataagaacctggaaaggggactctgttggcca

SEQ ID NO: 404045 - DNA, 100 bp, Homo sapiens
gaggagtctctgtccgggggcctggctaaggaaaccctattacctccagaagtccaaggcttgcgagaaggtcatttccgtgggtcaaacggtcatcacg

SEQ ID NO: 404046 - DNA, 140 bp, Homo sapiens
caaaggccaaacagagaatgtggttcagctcatcaacaagggcgccagggtagcggttaccaagttctggacttcagtgaccccttcagcactgaagtgaagccgagaatcctgctcatgggcctgaggagaagcggcaa

SEQ ID NO: 404047 - DNA, 100 bp, Homo sapiens
accattaagaagtgagaatgctcagttacgaaggtatgcaaccactcatgtattcggttcaggaagcattaaatgccagaccatggtggattcgtatggg

SEQ ID NO: 404048 - DNA, 98 bp, Homo sapiens
gaggatctgccctccaaactggaaggcttcaaaggcttcagtattctggtccatctcttattactcctctcccttcgccttcttctacttgtacagga

SEQ ID NO: 404049 - DNA, 104 bp, Homo sapiens
agcagcagctgctggtatatttctgaataatgtgaagtttactcatgctttctccagtgatctcatgaggacaaagcagatggagtctccctctgttgcccagg

SEQ ID NO: 404050 - DNA, 75 bp, Homo sapiens
cggcgccgctcatccccctctcccagcaggattctgtttcactgaggccatctatccgatttcaaggaagccaag

SEQ ID NO: 404051 - DNA, 100 bp, Homo sapiens
tagcagaagccaagtactacctagtccaaggcctggtggaagagtgccaggcggccctacaaacacgatgaggcgagtggtacgacagagcaagtttcgg

SEQ ID NO: 404052 - DNA, 98 bp, Homo sapiens
tagctcttcactcctcagcgcgacgtcgtgtcgagttcccaaaaagctccgcaggggctgtagggaggttgcttacactgtctttcagtatttaaaaa

SEQ ID NO: 404053 - DNA, 72 bp, Homo sapiens
ggcccgaccggctccgcgtggcagttctcagagtacattcacgcccaggtggcatctggcaaagggaaactc

SEQ ID NO: 404054 - DNA, 100 bp, Homo sapiens
agattgcttgcaacaattgttatgcttgttcccgaaggaaaagtagtcgttctcaatttccgattcatagacctcgagagtgacaacctgtgccgctatg

SEQ ID NO: 404055 - DNA, 76 bp, Homo sapiens
gcgaatatcgtcatcgttagaagagatttaccgcattgtttctcagaagcaaatgtcagacagacgcgaaaatgac

SEQ ID NO: 404056 - DNA, 98 bp, Homo sapiens
tttggatccaacaaaaacagaccagaagattaccaaggtggcccgggaccaggccgtgaagaaatggcagttcgtggagaaactgcaggacttggata

SEQ ID NO: 404057 - DNA, 98 bp, Homo sapiens
aggagaggagcgtcaacagcagcaccatgggattcaggagcagttccagaaaaatcccgacagttacaatggtgctgtccgagagaactacacctggt

SEQ ID NO: 404058 - DNA, 51 bp, Homo sapiens
gcccccattgaggatacctaatcagctgagaaacatgctggagtttcctgc

SEQ ID NO: 404059 - DNA, 82 bp, Homo sapiens
cccattgatttgatgcataaaggcagctttgaaacagttagctccattcagaaccaaatgcagtccaagggaggttatggag

SEQ ID NO: 404060 - DNA, 75 bp, Homo sapiens
tgactccaggttatcatggattcccagcgcgggacagccagaagatgcagatgcctccagctattacgagtccca

SEQ ID NO: 404061 - DNA, 100 bp, Homo sapiens
tgataaatgaaatcttcctaagtatagtatctggagtccatctttcaccatcttctcctgagattgtactggaccgtgaccactcttcttccattggctg

SEQ ID NO: 404062 - DNA, 90 bp, Homo sapiens
gtggggatggctataatggatttggtaatgatggaagctgagatgatttccaagaacaagaaccctagtatttcttgaagttaatggaaa

SEQ ID NO: 404063 - DNA, 100 bp, Homo sapiens
atacgagtcctagatgtcaataaccagtccttcagagaacaagaggtttttgaattccagttgacatcagaggatatgaaagttctagatggtctaaaca

SEQ ID NO: 404064 - DNA, 73 bp, Homo sapiens
aaatcacacgcataatggatgaaaggaaccgacagaccagaatccgtagaagctagccctgtggtagttgaga

SEQ ID NO: 404065 - DNA, 74 bp, Homo sapiens
agacctgtgcttctgactatcttctcttcaccagctcttcagatcaatatgatcatgtatcagttggaggactt

SEQ ID NO: 404066 - DNA, 75 bp, Homo sapiens
gaaagagaagggaatgctaagaactgctgggaggatgacaggcttcctcagccgccgcctcaagggctccatcaa

SEQ ID NO: 404067 - DNA, 50 bp, Homo sapiens
tgccacctgattaaaggaattgatctgactgcagccatgagcagcaatga

SEQ ID NO: 404068 - DNA, 100 bp, Homo sapiens
tcatggtgtccattttatttagcaaggtggttccttaaaaacagttattgctcaagatgaaaacctcccagaagatgttgtgagagaatttggaattgac

SEQ ID NO: 404069 - DNA, 75 bp, Homo sapiens
caaggttctggacaagatgaagtctttctgccaggacctcagcaggaccccaggctatactggcaggggggccca

SEQ ID NO: 404070 - DNA, 80 bp, Homo sapiens
cttggagaggctgtgagccacaatgcatcgctggaagtagccaaaagttcaggagccctggaaaggagaaggaataagac

SEQ ID NO: 404071 - DNA, 75 bp, Homo sapiens
tggacccggcctgggagaagcagcagagaaagaactgcaacttccagtgagtccctctgtgtgtctggatcaggg

SEQ ID NO: 404072 - DNA, 74 bp, Homo sapiens
aaatcgacaacactgtagagatcacccccacctccaacggagccatcgcgtgcttgatggacatgaacgcgctg

SEQ ID NO: 404073 - DNA, 82 bp, Homo sapiens
gaggagactcctgaccctcagaatgttgatattcactgatggactccaaagaatcattaactcctggtagagaagaaaaccc

SEQ ID NO: 404074 - DNA, 75 bp, Homo sapiens
ctggagcgagagatggatgctcacccgaaggctgattactttggtgtccctggccagtgtccttccacctgtcca

SEQ ID NO: 404075 - DNA, 100 bp, Homo sapiens
gccaagaccgctgcagccgctggctgaggttatatcctgtgttgtgacctcatggtttaagtgggaataaagatgagtataagcagtgatgaggtcaact

SEQ ID NO: 404076 - DNA, 100 bp, Homo sapiens
tcttggccccgtccttacctcacaggctttccttaaagtttcccatgtctcaatggactcctgaatataacgagctctacaccttaaaagtggatatgaa

SEQ ID NO: 404077 - DNA, 51 bp, Homo sapiens
agctacgtggacgcaggaactccaattccatcacccagcacaaggtctgtg

SEQ ID NO: 404078 - DNA, 96 bp, Homo sapiens
ctgaatacatgatttaaacaagagatttccacagaagggatttgtcttggctgttactatgacacgggaagcaattgatgaatttcggcgttttca

SEQ ID NO: 404079 - DNA, 100 bp, Homo sapiens
cagaatccgcgggagcgcggctgttcctgttccagggtctccctccactgctgtagtaacccgggtccggggcctcggtggtgctcctgatgcccctcac

SEQ ID NO: 404080 - DNA, 75 bp, Homo sapiens
actatggcagcagcgtggcctccgccaccgtgcacatccgaatggatacaaccagacctccaaagaaagacgaag

SEQ ID NO: 404081 - DNA, 100 bp, Homo sapiens
gcggcggcaagggcgggagggagcggtcgccgcgggatttggagctgcctagcctcgcggtcggcccgatgagagaaagggaaagttaaggatgctggag

SEQ ID NO: 404082 - DNA, 49 bp, Homo sapiens
gcctgggagaagcagcagcgcaaggctggagtgcaatggcgcgatctcg

SEQ ID NO: 404083 - DNA, 75 bp, Homo sapiens
tcgttttgaagagttctgcgttttgccagtcacctctcaactgtgtgccaaagattgtgccaaggacttgaatgg

SEQ ID NO: 404084 - DNA, 100 bp, Homo sapiens
ggtgtggtggcggcggcggagactgcgggcccgtagctgggctctgcgagattggcccggatcctcgttcgcctgccggcactcaggctgatgagctcca

SEQ ID NO: 404085 - DNA, 90 bp, Homo sapiens
tcaaagtcttatgtgtggacatcagtttttggctttcacccccaaccagtgaccaaagacttgaccactcaaagtccagctccccagaac

SEQ ID NO: 404086 - DNA, 75 bp, Homo sapiens
ctccagggcgggctgcgcaccaaggccctgattgtgggtgaatcacaagcctttgagaacagcctgagccttcag

SEQ ID NO: 404087 - DNA, 80 bp, Homo sapiens
ctctccagggagtgctctgttcacggctccatcgctgttaagctttctccgcatgtgggactctcggcctcattatgagt

SEQ ID NO: 404088 - DNA, 82 bp, Homo sapiens
cctggaaaaagcaagctgaagacatcaagaagatcttcgagttcaaagagaccctcggaacctgtgtaaatgagtatggaag

SEQ ID NO: 404089 - DNA, 100 bp, Homo sapiens
aggagggtgagctagctgccgatcctgctctgctcctgggtttgctgtgtggcccttgtctgaagatgatgagaaactgaaaaagaggaaggagcgattt

SEQ ID NO: 404090 - DNA, 98 bp, Homo sapiens
gctcacgcgatagaaacgtgttcgctgcccagaagaagggaaggcgcgagtgaggaaaggaggtactgtaggaggatttgttggtattgaggaaaacg

SEQ ID NO: 404091 - DNA, 100 bp, Homo sapiens
tactacgtatatgaaagaggaagtggataggtcagctgttgccagcaaaccgcaatacaccaagtcccattgatcctgacaccatccaggtcccagtggg

SEQ ID NO: 404092 - DNA, 51 bp, Homo sapiens
gttaacgtctctgttagttcagagagtactgggatttaatgaatttgtctg

SEQ ID NO: 404093 - DNA, 73 bp, Homo sapiens
cttctcaatcccaagtggccaaaggttcagcaaaaggatgtcactgaaattgatattttagttaagaaccggg

SEQ ID NO: 404094 - DNA, 75 bp, Homo sapiens
gaaggatcttctcatgcacagaggcaacaaatggcaactttctgaggaggttttacataaatggagtcctaaaca

SEQ ID NO: 404095 - DNA, 83 bp, Homo sapiens
atgttcttaaatgggattatacatatgcaaacatgacctttcaagttcagtggctccaggcaagtgtccagagaatggctggg

SEQ ID NO: 404096 - DNA, 82 bp, Homo sapiens
cccgaccccgtcccgaccctggccgccccgagcggagcctggagtgccctctggtggtcagaagatgctgtgctgtctcgtt

SEQ ID NO: 404097 - DNA, 100 bp, Homo sapiens
aggactttaaatgacgttttccaccaccaaggaaacagccacctagccaacggacactctggatgccagtctgcagagtttccagcaagagagacttccc

SEQ ID NO: 404098 - DNA, 76 bp, Homo sapiens
accaagtgaaaaatcagaggccacctacatgaccatgatcaacttcctggtacaatggccaccctttctctggtga

SEQ ID NO: 404099 - DNA, 75 bp, Homo sapiens
ctcgaagtgcgcaaacttgacactcaccctgaccggtacagcagggaagaactggaaactcagagaaagaaactg

SEQ ID NO: 404100 - DNA, 75 bp, Homo sapiens
gatcagctatgctatcaagaatatccatggcattaggtgcacgagaaacagactaccctgcaggagaagatcttt

SEQ ID NO: 404101 - DNA, 82 bp, Homo sapiens
ggcttccaggcgcactaccgcgcttctggtagatgaattgagagatgcagtgctgctactttttgcaaacaaacaggatttg

SEQ ID NO: 404102 - DNA, 75 bp, Homo sapiens
agtgcctaattcaaatgggagcagcggtggaagcgaaggctatggaaagggcaaatggaatggagctggatggta

SEQ ID NO: 404103 - DNA, 75 bp, Homo sapiens
ggctccctcccccgcgtccctgcgaccgccgcggcgaagatgggtgactatgaccagagcaggaccaaagtgctg

SEQ ID NO: 404104 - DNA, 99 bp, Homo sapiens
ggatttttttcgggtagtggaaaaccaggaaggtgggagtcaatcattttgacaagtctcctgaaaggaacagctagcaggaactgaaacctttttcca

SEQ ID NO: 404105 - DNA, 75 bp, Homo sapiens
agaagaattcagaagaaacaaaagtgccaccgaagagggatgcttgaagatggaaagaaatttgattcctcccgg

SEQ ID NO: 404106 - DNA, 114 bp, Homo sapiens
gcctgtgcgggaggcgacagtgaaaccctttgccatcgacatatttcctgtcaccaacaaagatttcaggacatggacatcttccagcaacagatctcgagaagacagctggct

SEQ ID NO: 404107 - DNA, 75 bp, Homo sapiens
atttgcagcaggtgtcagagctcatcaaccgcacggaaccaagaaacagcccagatctcctcttaagcggaaaag

SEQ ID NO: 404108 - DNA, 100 bp, Homo sapiens
ttgggagtcttctgctggaggttccttcactgtgcgtgctgaccatggtgctggagaatctggtaaaagcaccattgtgaagcagatgaggatcctgcat

SEQ ID NO: 404109 - DNA, 101 bp, Homo sapiens
ggagaagcggcgctccaccggcgtggtcaacatccctgccgcagagatcaccgaagtggccttggagtacaacaactgtcatggggaccaggtggtggagc

SEQ ID NO: 404110 - DNA, 89 bp, Homo sapiens
gaccccaggctttttatggctgtgagacacgttaaaatttcagggcttgtgacaaggactcccaatgtggtggaggcatgtgctgtgct

SEQ ID NO: 404111 - DNA, 100 bp, Homo sapiens
caaacaatgggtcagtgttctcgattggatttgtcctgtatccccccagtggaggtcctgcatgggatctgatggatcatgaaaatattttgtttctcac

SEQ ID NO: 404112 - DNA, 96 bp, Homo sapiens
gcgggatcaaatactaatggatcccagtttttcataacggtagtaccaacggttatggatcgcagctttaaaaaggaattttctgaaattcctggt

SEQ ID NO: 404113 - DNA, 136 bp, Homo sapiens
ttgcagctgattaaggactatcgggagaaagtggagtccgagctgagatccatctgcaccacggtgctggggcatggtctagtggcccagtcaggacgcggaaacactccctggaggttctgacccactccctctc

SEQ ID NO: 404114 - DNA, 100 bp, Homo sapiens
aagcatttttatggacaacgaccacaggaatctggaattttattaaacatgacatccctttaaaagtagttggaatgttcccaagtagaggtgagaaaag

SEQ ID NO: 404115 - DNA, 83 bp, Homo sapiens
gtcaactatcctggttttaatatatctactcccagaggaattccagacgttcctgcttggctcgagtttgagtttacagcccc

SEQ ID NO: 404116 - DNA, 73 bp, Homo sapiens
gacgcaacgtcgagaacatgaaggagtgcctgcagggcaccatccgcaacagccaggaggcggaggtctcctg

SEQ ID NO: 404117 - DNA, 82 bp, Homo sapiens
cgatcaaggccaagtatccgccagtcaataggaagtacgagtgtgacggccagcctcccaactacgagatgctcaaggagga

SEQ ID NO: 404118 - DNA, 83 bp, Homo sapiens
gggagctacagcgttgaacaaccacagctctattcccatggacccagtgttatgtgccaagaaccttgcaaagaaagacttct

SEQ ID NO: 404119 - DNA, 74 bp, Homo sapiens
gctgctctcaggggccctggccctgaccgatacttgggcggggagcgcatgaacctgaaggtgcccatctactt

SEQ ID NO: 404120 - DNA, 50 bp, Homo sapiens
ggcagtctttgctacgtacagcaaaaggttgtctgcattcaaaagagcat

SEQ ID NO: 404121 - DNA, 100 bp, Homo sapiens
tggcatgagggagccggaagagctgatgcccgctgataaaatactgggaagcattcctacctgaagccaaagccattgcctagcaataagattgttgccg

SEQ ID NO: 404122 - DNA, 75 bp, Homo sapiens
aaaaagctgcacgcaagtgttaaacttctggtattatctaagtaccgcagtggaaaactgcccaaggcatttaag

SEQ ID NO: 404123 - DNA, 75 bp, Homo sapiens
ggggctctcacgctttctgctcaagtcctgtcctcttctgaccaaagatactatactggcaattgctggagaaga

SEQ ID NO: 404124 - DNA, 98 bp, Homo sapiens
gacgcttgggtatttgcaaagcccaatgccattcaagcggtcggggttatgtcttttgttggtccagcatttgccacatctttatatgtgccttcaat

SEQ ID NO: 404125 - DNA, 80 bp, Homo sapiens
ggagaagcagctgggggccttggctgtaaggacccctaaggccttggcaaatgcaacattatgtattcttgaacctatta

SEQ ID NO: 404126 - DNA, 101 bp, Homo sapiens
atctgcggcaggacctagagaggccagttctggtgactcagtccgcagctatagttccagtaagaactaaaaaacgtttcacacctcctatttatcaacct

SEQ ID NO: 404127 - DNA, 82 bp, Homo sapiens
ctcaactttctgggcgttcatgatcctggccagcctgctcatcgcctactgcaactcggtgaaatacctggagtgctcagct

SEQ ID NO: 404128 - DNA, 90 bp, Homo sapiens
atcgggaagaaaccattacaatagatcgagcctgcagacaagaaacattcgtttatgagatggcatgtttgccacagtcgcagggatatc

SEQ ID NO: 404129 - DNA, 102 bp, Homo sapiens
gaattcagaaggagctagctgaaataacccttgatcctcctcctaattgcaggaagatgttaccgagtacttcagtgaattccttagtgcaggggaacggag

SEQ ID NO: 404130 - DNA, 100 bp, Homo sapiens
ttggaatactctactggacaaacatttcctccaaggacttaaagagagatctacttcagagccagcagtcccgccagaagaggctgagccacacactgag

SEQ ID NO: 404131 - DNA, 75 bp, Homo sapiens
caagacagagcgctactcctggcagtgcgtcaatcagagcgtcctgtgcgacccaacatgagtgaagtttcctgc

SEQ ID NO: 404132 - DNA, 100 bp, Homo sapiens
accgtttacaaggccagagataagaacaccaaccaaattgtcgccattaagaaagtattgaaatagaagagttacagaatgaggaagaagaactaagtcc

SEQ ID NO: 404133 - DNA, 100 bp, Homo sapiens
tgttgaagaaacataaggatcttcattgtgctaagctccgccgcatgcaagagatgattgcaaggatgcaggcgcagatgcagatgcagatgcagggcgg

SEQ ID NO: 404134 - DNA, 90 bp, Homo sapiens
gccttgagtcagtgcgccgctctccagcccgcttgaacggaagcgccgcggagccatcaacagcaagcagctcacctacctggagaaata

SEQ ID NO: 404135 - DNA, 83 bp, Homo sapiens
gaccagagatcatcacactacgatgaactgcttgctgcagaggccagacaatgcagatcttcgtgaagactctgactggtaag

SEQ ID NO: 404136 - DNA, 74 bp, Homo sapiens
gccagggaaccctggtcaccgtctcctcaggatgagacctgcacgcagtggctcacagcagcacgatttgtgac

SEQ ID NO: 404137 - DNA, 75 bp, Homo sapiens
ttggctactcactcttctgttaacagggtcctggcagatgccatggacaatattaccaggcagaaccaattctac

SEQ ID NO: 404138 - DNA, 100 bp, Homo sapiens
acaagcgagaggaggaggaggatgatgaatgcacccactgggcctatgtaataacaatgacgaagaggacttgtatgaatatggctgggtaggagtggtg

SEQ ID NO: 404139 - DNA, 98 bp, Homo sapiens
cgtcctggaattacttcaatcaaggggctgttgtggttccgactataaacagtacgtgtttggcggctgggcctgggcctggtggtgtatctccgaca

SEQ ID NO: 404140 - DNA, 100 bp, Homo sapiens
gggctcttcttggtgtctgtatggttgctggctgaggttcaactatgctacctggaagcacaaagagatgctgttgagcagatgtccctcaagctgtaca

SEQ ID NO: 404141 - DNA, 76 bp, Homo sapiens
tcgccggggaggcagcgcgggatcccagcctcaggcgtgcgcggacggtgtgcggttgatgcgatgaagagagttg

SEQ ID NO: 404142 - DNA, 100 bp, Homo sapiens
acattcgatttattggaggcctacttgcagcatattacctatcaggagaggagattggccagtctgaagtttacctcatcagtcctgacaccaaaaaaat

SEQ ID NO: 404143 - DNA, 121 bp, Homo sapiens
ggaaagacgaggaaagaggaggaaaacaaaagctgctacttatggaagatacaaagggggatcccaacaagccctcaggattcagaagtgttaaagctcctgtcactaaagtggctgcgtc

SEQ ID NO: 404144 - DNA, 100 bp, Homo sapiens
ttcagatgggatctttccggatcaatccagatggcagccagtcagtggtggaggtctgtgcagacttttgcagacaaatcaaaacaagaagctctgaaga

SEQ ID NO: 404145 - DNA, 97 bp, Homo sapiens
ggagacccatctggactaccaaggagaagctatagactacttctactccaccaggaaggttagctccattcagaaccaaatgcagtccaagggaggt

SEQ ID NO: 404146 - DNA, 75 bp, Homo sapiens
gtcattctgacccggggattcctcacagcgtctggcagtggtgctgattactatgattacggacatggactcagt

SEQ ID NO: 404147 - DNA, 85 bp, Homo sapiens
agatttggtttatcccgaaatatttccagcaggagtccactgagtaccggagacaggtgcagtccctcacctgtgaagtggatgc

SEQ ID NO: 404148 - DNA, 101 bp, Homo sapiens
tgacacagttcacatcctggagatgtacgaggggccgttgctccagggagaactgcaaatatcttcatccacccccacatttaaaaacgcagttggagata

SEQ ID NO: 404149 - DNA, 90 bp, Homo sapiens
cagtggatcggaatggtggagaacttcaaccaggcactcaaggaagtactagccggacatcatgagtggctgtcgggtattcatcgggag

SEQ ID NO: 404150 - DNA, 74 bp, Homo sapiens
tagaactctccacagccatcactcatgtccataaggagaatttggattgggtgcctctcaccacactgtcacac

SEQ ID NO: 404151 - DNA, 87 bp, Homo sapiens
cctcccgcctccagcaggacaatattcgcacccggctgaagagggcagcctgtactcagccacagctgcggatttccaggccagtga

SEQ ID NO: 404152 - DNA, 90 bp, Homo sapiens
cttacatctctagataacagtctgcactttcacccgtttcaggctttccatctgatggtcccctggtgtgtgccctggaacaggagcgaa

SEQ ID NO: 404153 - DNA, 83 bp, Homo sapiens
gagctgaagactccagtatgcaactgactacaaggaggattttttatcaagcagaaatgcatcgaacaacgagaatcaagatc

SEQ ID NO: 404154 - DNA, 100 bp, Homo sapiens
aggcattgacctacagacaattcattcccgtgagttaccagactgttatgtctttcagaatacgttcctggtccagaactttacacagaaaaggtgctca

SEQ ID NO: 404155 - DNA, 86 bp, Homo sapiens
tgccctccatggccaggaggacacccctggtggcctgcttggttgacatcatggacatatgtgagtccatcctggagaggaagcgg

SEQ ID NO: 404156 - DNA, 75 bp, Homo sapiens
agcgcttcgcacaggctcagcagcagctgccgctcgagtcacttgggaaagctctgggtgtgcggcagtaccatg

SEQ ID NO: 404157 - DNA, 99 bp, Homo sapiens
cagtgtagatcctgagaacatcaccgaaattggtttttaattgccaacagatcctacaaagtcagtgcagcaagctcttttttcttcagtggtgtattt

SEQ ID NO: 404158 - DNA, 74 bp, Homo sapiens
tgcttcccaatcccactgatgaggatcagcccatggcaccatcatgggagcagcattgctggaggactggtgaa

SEQ ID NO: 404159 - DNA, 74 bp, Homo sapiens
agccgtggccctgatccagacctgggcagaggaagctggcgcgtatggcagccgaggagcacactctgcaggac

SEQ ID NO: 404160 - DNA, 77 bp, Homo sapiens
cctcacccgaacatcagggccctccagactcaggcgccccaacataatagctcttcaagtctgcaataaaaaatggc

SEQ ID NO: 404161 - DNA, 73 bp, Homo sapiens
cataaacgcccccaatttcccagctgctaaaggaagaggaagagtggtggacatgacaacagagtcaactgca

SEQ ID NO: 404162 - DNA, 80 bp, Homo sapiens
tgccctgagggccttcgagagctaccgcgccagacaggtgaacttcacggtagaccagatccgcgccatcatggacaaga

SEQ ID NO: 404163 - DNA, 100 bp, Homo sapiens
cagagctcgtgcttcgggatggaaacctatggttatctgcagagggagtcatgctttcaaggacctcatgacggtaataacggaagaattcaaagtgcct

SEQ ID NO: 404164 - DNA, 75 bp, Homo sapiens
gttacacttggggttcattcagatccgagagaagcttgatcagttgagggtcctacgtgtggaggacgtaccatc

SEQ ID NO: 404165 - DNA, 75 bp, Homo sapiens
ccaatgtaccccactatgctacctgcctagggtagttaaaagacgagtgaatgctctcaaaaacctgcaagttaa

SEQ ID NO: 404166 - DNA, 101 bp, Homo sapiens
gaccttcatcacagacaacagcctggtggcagcgaaagtgaaattcgttattctacatggaagaaagctgtgatgaagtcaatgggttgggttacaactca

SEQ ID NO: 404167 - DNA, 75 bp, Homo sapiens
gtgaagctccgctcactgatctgcgtggggctcaaggacactggcccagggagagctgaatgagatgaggacccg

SEQ ID NO: 404168 - DNA, 75 bp, Homo sapiens
gcccactgaggccctgtccccagaagatggagccagcacagcactcattgcaggccccttcacagatgtagtcac

SEQ ID NO: 404169 - DNA, 100 bp, Homo sapiens
cgccctagacatcttctccctcccttgcctcaggcagctggctaagagtcttgggcaggctggtgaaattgagcctgaaacagaaggaatactaacagag

SEQ ID NO: 404170 - DNA, 50 bp, Homo sapiens
ctggattccatgtagagacccctggagccacggacagcatttagtgcttt

SEQ ID NO: 404171 - DNA, 100 bp, Homo sapiens
gcccagtggctgcgtggtgtctcccctcagtcctgctctgaagatcctgccctgccctgggctacaatgacgactactatgaagagagctacttcaccac

SEQ ID NO: 404172 - DNA, 74 bp, Homo sapiens
acttgccctgtctcctcgcagatgagttggctgattgcaattctggcccaactcaaccctctctttggaccgca

SEQ ID NO: 404173 - DNA, 71 bp, Homo sapiens
ctcaacttggttattgtaaaaaaaggagacggcatgatacccatgtagggaattccccaaagcagggcttg

SEQ ID NO: 404174 - DNA, 101 bp, Homo sapiens
tgccacttcttcacggaccagtttcagttcgccgatgggaaacccggagaccaaatccttgcaacatggccaacgccctggccagcgccacttgcgagcgc

SEQ ID NO: 404175 - DNA, 99 bp, Homo sapiens
gagaactatagcaatctggttttcttgggtgacatgtacagccatgatgggaatactgatgagccagaatgggtaaagacagagcgagagcagtttgtt

SEQ ID NO: 404176 - DNA, 100 bp, Homo sapiens
cctctctgcgagggcagctccgctactctcacctgtgtgcctttgggaaacctgattgttgtaaatgccgggtgggcttggactgggcgtgctccatggc

SEQ ID NO: 404177 - DNA, 90 bp, Homo sapiens
ccctgtccctcggccccctgagtgagtccggtctcccggcgaaaaacatccagtcatggataaaaatgagctggttcagaaggccaaact

SEQ ID NO: 404178 - DNA, 101 bp, Homo sapiens
ggctgctgttgtccaacagaacgacctagtatttgaatttgctagtaacgtcatggaggatgaacgacagttaccttatcccatatcacacaactggtcct

SEQ ID NO: 404179 - DNA, 90 bp, Homo sapiens
ctcgtcatggcctacccgggatacggaggagggctggtgagcgacctgctggaattctgcttctacaccttccgagagtcccatgcgctg

SEQ ID NO: 404180 - DNA, 100 bp, Homo sapiens
cttcagcagaaaagtatagcgtggcaacccagctgttcattggaggtgtcactggatgagacagagtttcaccatgttgcccagactggtctcaaacacc

SEQ ID NO: 404181 - DNA, 100 bp, Homo sapiens
ccagggttgaggcgattccagagagcggcggaaaggataagcctcgacttagaagctaccgagttaccctaagaaagttggttgaatctggcgatgtgga

SEQ ID NO: 404182 - DNA, 50 bp, Homo sapiens
gcaaatgtctttcgtggaagacataagcacgtcagctaactgttcagatg

SEQ ID NO: 404183 - DNA, 100 bp, Homo sapiens
cccgttcgctggactgcaaaccgagctcccgtctgccttgcagttaaaggcattaggatttcctgaaggacttgtgatacaagcgtattttgcttgtgag

SEQ ID NO: 404184 - DNA, 82 bp, Homo sapiens
gagggcctgggagcttgctgcagcttcaggtacacggtcctcttctcgcacggcaatgccgtggacctgggccagatgagca

SEQ ID NO: 404185 - DNA, 74 bp, Homo sapiens
ccctcctgcttacaaagatttagctgagccatggattcagatgttgatgatggagacacagtgacagatttcat

SEQ ID NO: 404186 - DNA, 74 bp, Homo sapiens
gagagctttacctggaatattaccatcttaaagttgtctgttttgatgccaagataaactttgatgacaacgca

SEQ ID NO: 404187 - DNA, 80 bp, Homo sapiens
atgccccccggagccgcgggctggcaggttttgggatttgagattgacgcggtgaactctgtccagttttcaaaccacac

SEQ ID NO: 404188 - DNA, 51 bp, Homo sapiens
atactcagtggctgcaaaaagacttgatcatcttccctgacgactgtgagt

SEQ ID NO: 404189 - DNA, 50 bp, Homo sapiens
agaggaggtacctccaggaaatgtgctagacaggcaaatgtacactgggg

SEQ ID NO: 404190 - DNA, 100 bp, Homo sapiens
ctccaagggcttccgcctgggcagcggccgggaacccaagatgggccaagtggtgtatgtgccggtcaagacgggctcgaaactggcgatggaatatgag

SEQ ID NO: 404191 - DNA, 75 bp, Homo sapiens
gctagtcctggtggatctgcagtacgaagaactcttcatcttggcttatacctatactgcctgatatgctccgac

SEQ ID NO: 404192 - DNA, 125 bp, Homo sapiens
cagagggtgcatcaattcttcgacaggaaaaaaatttgctggatattgatgcgccagtcactggtggggaccaaggcatactgaacacattttttagcagctgggcaacaacagatatcagaaaa

SEQ ID NO: 404193 - DNA, 90 bp, Homo sapiens
cagagctgggtccgggtgtacggaatagagctgtgcccccctggaaaacggttcatgattacgatggtggcgagcttcgtggccatggcg

SEQ ID NO: 404194 - DNA, 83 bp, Homo sapiens
ccgattcctcctccttggtcgccgcgtccttggctggcgtgtgtccctacctgcaccggacgacgggggacacagaacgcaag

SEQ ID NO: 404195 - DNA, 85 bp, Homo sapiens
atagtgctacttcatgacatcatccataccaaggagacgctgacacttgtgtttgaatatgtggaatgttttaaaggaagttggg

SEQ ID NO: 404196 - DNA, 100 bp, Homo sapiens
tctgaaggattggtcgtgtaccccaaaggcaattgaaggaacagactaaaaatcgtgtcctggaaggaaactacaggtactaccagggattttcagtctg

SEQ ID NO: 404197 - DNA, 95 bp, Homo sapiens
attacttggaagaatataaattccagcctctactcaatagtccccccagctttgtgtgctggtctcggggcttcatggagatgaatgggcggggg

SEQ ID NO: 404198 - DNA, 75 bp, Homo sapiens
gcacagctcgatcgccctgggcaaggtcgatttagaggaaatctctcaggaaagagagtggatttttctggcaga

SEQ ID NO: 404199 - DNA, 75 bp, Homo sapiens
gaagcaagaaggccctggacacagcaatatctctgggctttcacagtgcccagcgcctcaagttccggctgaacc

SEQ ID NO: 404200 - DNA, 82 bp, Homo sapiens
ggtgaaactgaacttataatcgtcactggattttgaggaaacgtgtgaagcttgaagggaaagaacttgaagaatacttgga

SEQ ID NO: 404201 - DNA, 159 bp, Homo sapiens
accacctactgcagatgctgtgtctggtggccatggagaagcccgcctccaccaactcagatgacgtccgtgatgagaagacagaagccctgcagcagctgcagaaggactctgaggccatccgcagccagtacgctcactactttgacctctcactgg

SEQ ID NO: 404202 - DNA, 80 bp, Homo sapiens
tgcaccacaaggtgtacgatttgaccaaatttctggaagaggctgcttacagaaatctcgtcttcatgggatggatgcca

SEQ ID NO: 404203 - DNA, 125 bp, Homo sapiens
ctcgagggtgacgctcgctccgctcgtcccgctcgtcatggcctacccgggatacggaggaggggtcaatgagtggtcattgaagataagaaaggaaatgagagttgttgacaggcaaataaggg

SEQ ID NO: 404204 - DNA, 124 bp, Homo sapiens
cgacgccctcgtcctccaatgacaccagggagcaggtgctgccagccggccagattgtgagtccagccctgctgggagttttctgccacacagatttgcggaagaacctgaccgtggacgaggg

SEQ ID NO: 404205 - DNA, 74 bp, Homo sapiens
gcagaacattgcttatgaatatctgtgccacttagaggaagccaaaagtgtatcctactcagtacatgtatctg

SEQ ID NO: 404206 - DNA, 75 bp, Homo sapiens
cggaactcggccaagggaaaggtgcccaagtcggcactggggctgacaggacaactggatcagtttcattaaaaa

SEQ ID NO: 404207 - DNA, 74 bp, Homo sapiens
cgcatggtcagggagagccatggagagacaaggagcccggaaaaccgatgatgaggagtctgatgaggaagctg

SEQ ID NO: 404208 - DNA, 75 bp, Homo sapiens
tctgatgacacctttattttaaaagctgatgttccaagggtcctcagaagtggaatacagagcggaggtcggtca

SEQ ID NO: 404209 - DNA, 98 bp, Homo sapiens
ggactgaatgtggttgttctggaagcccgggaccgtgtgggaggcaggacttacactcttaggcgggtcacagaaagtcgagagagccaaatgacgat

SEQ ID NO: 404210 - DNA, 80 bp, Homo sapiens
cggcagaagccgagttcaacatcctcctggccaccgactcctacaagggagtgcatccgccccaacccttttccccctcg

SEQ ID NO: 404211 - DNA, 74 bp, Homo sapiens
gaaattatctctggtgctgcagctctgtgtgggcagaagaaaaagctagtgatcaacagtggcaatggagctgt

SEQ ID NO: 404212 - DNA, 90 bp, Homo sapiens
tgcttccaaagctcattgacttttctgctcagccatggcaatgacaggctcaacaccttgctcatccatgagtaaccacacaaaggaaag

SEQ ID NO: 404213 - DNA, 97 bp, Homo sapiens
gtgggacccaacttcagggttggcaagaagataggatgtgggaacttcggagagctcagattagctgccccagagcacatcagctatgtgccccagc

SEQ ID NO: 404214 - DNA, 105 bp, Homo sapiens
aagcaatcctaccatgtcagccttcccagtagctggaactacagagtgcgatgacatggatcctgcggacaaaccgccccagggcgtacctagcaccgaagcatc

SEQ ID NO: 404215 - DNA, 100 bp, Homo sapiens
atgacaggctcagccaaagtaaatccatgatcctcaccgatgtcgggaaggtcactgaacctgctcaacgagaacctttgacaagagcacgaagtgaaga

SEQ ID NO: 404216 - DNA, 90 bp, Homo sapiens
ggagatagtcagtgcagtaaattcagtgtcagtatacagactagaccatacctttgaggagaaagaattgtgccatgaaaaatggaaaac

SEQ ID NO: 404217 - DNA, 100 bp, Homo sapiens
agaaaaaacacctagtccagattaccataaagaaaggaaaaaatgtagacgtgtcagaaaatgaaatggctttgatgacagtagggaaagaaccatttcc

SEQ ID NO: 404218 - DNA, 98 bp, Homo sapiens
atacaacttacgtttgatgaaagatttgggcttgaagacccagaagatgacatatgcaagggcactatgaacgaagaggagcagtttgtaaacattga

SEQ ID NO: 404219 - DNA, 100 bp, Homo sapiens
tgtgatctcgagagacctgcgtacattcggggtgccagaaggaaagcatagcacccctgcagtggaccatgagtcggtaatgcccactgaggacctctgg

SEQ ID NO: 404220 - DNA, 95 bp, Homo sapiens
aacaagattgtcctgaagaagtgggcattttgggtcagcaccaatttcttgaaggccccgagggcattgaaaacactcgatttggttcagcaatt

SEQ ID NO: 404221 - DNA, 100 bp, Homo sapiens
atttcaaaccctgaaggacagtgacttattatgtctccttgaagaaaatgatattttcaggaatgctcaagcaggtgttctcatcagcactaatagtcat

SEQ ID NO: 404222 - DNA, 134 bp, Homo sapiens
gaggaggcggggaggcgcggagcgcgcgtgtggtccttgcgccgctgacttctccactggttcctgggcaccgaaagattgttgtgtccactgtatcctggcttgcttgttctgcgaattcctgaccctttgca

SEQ ID NO: 404223 - DNA, 51 bp, Homo sapiens
cattcaggcacttatggccatttcagccatctcgctctgtcgtccaggctg

SEQ ID NO: 404224 - DNA, 90 bp, Homo sapiens
aggaaaacccttcaggcaaccttgctacaaaaattggttggggtctgctaggtccccggaatgagttgtttgacgcagccaaataccgag

SEQ ID NO: 404225 - DNA, 88 bp, Homo sapiens
gcgccttcccacggagcagcactcttcaccctgcacagccttgttagggttcatagtggcgtcatgcacgcagactcctgcaagttcc

SEQ ID NO: 404226 - DNA, 100 bp, Homo sapiens
ctctccgatcctgcagctgctgctgcggctctcactgtgcgggctgctgctccagagggcggagagaggtggagaagagcgagtacttgagaaagaagag

SEQ ID NO: 404227 - DNA, 83 bp, Homo sapiens
ccatgcggcatccaacgatccacgtgatgtccttgcaaatatcaatggtgtgagcacagaaggttttacctacaaacaagtcg

SEQ ID NO: 404228 - DNA, 90 bp, Homo sapiens
cctcggccccaggttctctgcagatgcagtaccagcagagcatgcagaaggaagaggcccagcagaagggactcgctgagccaccccccg

SEQ ID NO: 404229 - DNA, 100 bp, Homo sapiens
agagctctgccaggcagaaggcctctctcctgatacagcaggcgctcaccatgttccctggagaatgtgagaacttcctggatgttggactgggcagaga

SEQ ID NO: 404230 - DNA, 50 bp, Homo sapiens
aaaggactgaagtggggttaagactggtgaattctatagccaagacgtat

SEQ ID NO: 404231 - DNA, 96 bp, Homo sapiens
aaaagacagtcctcgtcagcactgactttcagctatggaatcggtcaggagagcgctattggaggcagctctgcgatcggtgaatatatccggccc

SEQ ID NO: 404232 - DNA, 100 bp, Homo sapiens
gccattgctggctatgtgtttagagataagggtaccatgcttgggaagattgaatttgaaggtcagcctgtggattttgtggatccaaataaacagaatt

SEQ ID NO: 404233 - DNA, 101 bp, Homo sapiens
gagccgtgggcaagggaagaggccacaccctgccctgctctgctgcagccagaatgggtgtgaaggcgtctcaaacagggagacaccagtctgcagtctgt

SEQ ID NO: 404234 - DNA, 100 bp, Homo sapiens
gtaaagtggaattgcatgggaaaatcatggaagttgattactcagtctctaaaaagctaagtggtgcttcatgccccacctccaaccaagatcaaacggg

SEQ ID NO: 404235 - DNA, 98 bp, Homo sapiens
attatggggactgtatatggtttgtgaatcatccactgttgcagacatgctacatgttgttcaaaaagaatgacttcattagaggggtggtagactcg

SEQ ID NO: 404236 - DNA, 101 bp, Homo sapiens
aaagtggcgctttctccgccccagctatttctactgctaataaagcgaatgcagagaggttgaaaaggctgcagaaatctgcagacttgtataaagatcga

SEQ ID NO: 404237 - DNA, 97 bp, Homo sapiens
aaagccgaacaagacccaaccaaatttgttaagtatgagagagaagctagtaaatactgggacacattttacaagattcataagaataagtttttca

SEQ ID NO: 404238 - DNA, 73 bp, Homo sapiens
agcacctggatgagacatttgctacagcatcccacattaagtcaacgtggactgcccctgatggtgattattc

SEQ ID NO: 404239 - DNA, 90 bp, Homo sapiens
cggggagcggagccatggcctccgagattcgtcagcgaactgcagctcaaagaaacctttctccaacaccagcaagccctaaccagggcc

SEQ ID NO: 404240 - DNA, 90 bp, Homo sapiens
tggtcgtgatcgtgactattcagatcatccaagtggaggttcctacagagattcatatgagagttatgaccggttcgtgagacgcaagaa

SEQ ID NO: 404241 - DNA, 80 bp, Homo sapiens
cgacgggcgcctggaggagctgtaccgcggcatggctatgggtacacaacgccactgactgatgcgggcaaggccttctc

SEQ ID NO: 404242 - DNA, 98 bp, Homo sapiens
cggcgcccgcgccatgcggcgggagagagccccccaagatgaacccagtggtggagccactgtcctggatgctgggcacctggctgtcggacccacct

SEQ ID NO: 404243 - DNA, 83 bp, Homo sapiens
accggagccagccccgcagcgggtagcccctggaattttgccttcacagtcaagttctacccgcctgatcctgcccagctgac

SEQ ID NO: 404244 - DNA, 74 bp, Homo sapiens
ctgcgaaagctgaaggagcaaggacaccgagtgctcatcttctcgcagttccaggtattcctgaagcagatcaa

SEQ ID NO: 404245 - DNA, 80 bp, Homo sapiens
caaagagcagagccaaaggcaacagaacgagggattctccgtgccacaggtgttgatcatccctcagaggtgccagagaa

SEQ ID NO: 404246 - DNA, 75 bp, Homo sapiens
cccgggacgctgcccacggcgtccccggtcgcgaaaaatatgtcgtaactgcaagtgtggccaagaagagcatga

SEQ ID NO: 404247 - DNA, 80 bp, Homo sapiens
gagatggatgctcacccgaaggctgattactttgattggcggcagtaagcacacaatgaatgatcacctgcatgtcggca

SEQ ID NO: 404248 - DNA, 82 bp, Homo sapiens
gaaaactcaggaccatgatggctcagtttcccacagctatgaatgacctgatggccaaaagaaaggaagaaaatttttcctc

SEQ ID NO: 404249 - DNA, 100 bp, Homo sapiens
caaggaggccttccagctgtttgaccgaacagaaggtgttgagctggcgagttcgcggaggctactattcaggaaatcttatccagatgagtacactgga

SEQ ID NO: 404250 - DNA, 74 bp, Homo sapiens
atcatttacggcatgtacttctgcatgaacatctccagccagggcttggactatgtcagccatgaagacatcct

SEQ ID NO: 404251 - DNA, 96 bp, Homo sapiens
tgtgggcatggcagacaaatctgtaggtgtcatggagaaactccagctgggcccagagattctgcagcgggaaaatccaaggcttatttatgccag

SEQ ID NO: 404252 - DNA, 90 bp, Homo sapiens
gcctcgagtaattctttcatgggttccctggcttcaaggaggtccgtctggtacccgggcggcatgacatcgccttcgtggagtttgaca

SEQ ID NO: 404253 - DNA, 83 bp, Homo sapiens
ccgaggaggacctcactgaagtgaagaaggacggtgtgattgctgccatgagagatggttttggtttcatcaagtgtgtggat

SEQ ID NO: 404254 - DNA, 75 bp, Homo sapiens
aagccactgattagcaatttaaagatcctctccaagtaagactttgaccccgacgcaggcttcagtgattgccgc

SEQ ID NO: 404255 - DNA, 90 bp, Homo sapiens
gttgtgtggtcgcgtctcggaaaccggtagcgcttgcagcatgaggccacaagaggaagctgaatgaagaggacgccgccagcgagtcca

SEQ ID NO: 404256 - DNA, 101 bp, Homo sapiens
aggcgcggggatggagcccctgcgggtgctggagctatacagcggcgtgggcggcatgcaccacgcgctgagaggcttgcattgatgacaatgttgatatg

SEQ ID NO: 404257 - DNA, 75 bp, Homo sapiens
gagcagctgcattgcaggcacagggcccgatgagccagagaagcttggcacccagattggctgaaaacttctgtg

SEQ ID NO: 404258 - DNA, 82 bp, Homo sapiens
ggcgggaccggtttggaagactttgccggcctgcagatgccatggacaatattaccaggcagaaccaattctacgataccca

SEQ ID NO: 404259 - DNA, 101 bp, Homo sapiens
tgtacccagagtgcagagccgcctttccagcatgcaggggctgctcagtgagaagaggggatgtcctggcagcatggagtggaatccgtcctcttgttaca

SEQ ID NO: 404260 - DNA, 80 bp, Homo sapiens
cctattggaggaaaacacaccaagtattctaccttgtaaatactgttatttgtatatactgtaaatgatgacatcggtgg

SEQ ID NO: 404261 - DNA, 98 bp, Homo sapiens
agaaggtgccggtggtgcgagtcttcggagcgaccccggcagtctgagaataaaggattagaaactaccaagaacaatgtagttcagccagtttcgga

SEQ ID NO: 404262 - DNA, 82 bp, Homo sapiens
tcgcagtggtcgcttcttctccttgaccagattatcaaaaattctcatgattaaaaaggaacatatcaagaaattaagggaa

SEQ ID NO: 404263 - DNA, 100 bp, Homo sapiens
ccactggagcacccatttgatttccgggtgaaaggtgtaaccagcatttcagctgacacccataagcttggagttatgacctacagtgatacagggaaac

SEQ ID NO: 404264 - DNA, 75 bp, Homo sapiens
gttgcaccagtgcagggacagcagcaatttcagaggctgaagtgaactttgaggcgctgatcatcaccatgtcgg

SEQ ID NO: 404265 - DNA, 83 bp, Homo sapiens
gtgcactccgcacctcggggacattattgcgcgtggaacggctgcttttggaagggcgaactttctgaccaagtatacaacta

SEQ ID NO: 404266 - DNA, 102 bp, Homo sapiens
ggtctgagtctcacagcttgtaaaggcagctgaaaaagttggatgaagatagtttaaccaaacaaccagaagaagtatttgatgtcttagagaaacttggag

SEQ ID NO: 404267 - DNA, 75 bp, Homo sapiens
caaagcctgaacaggcagggccagacccagagacatgaggctgagctggttccgggtcctgacagtactgtccat

SEQ ID NO: 404268 - DNA, 100 bp, Homo sapiens
tggagggcgagtggatgctgaaattgagtatgctgctgctgttccgctttgcgtcctcgctacaaacgcctggtggacaacatattccctgaagatccaa

SEQ ID NO: 404269 - DNA, 82 bp, Homo sapiens
caagatccatctgccttctgcataggccaaacaggtctgcattactagcgtacatggaagaaatggggtgatagattatact

SEQ ID NO: 404270 - DNA, 83 bp, Homo sapiens
cagacaaacagcccgcccgaccccgtcccgaccctggccgccccgagcggagcctggagaattaaacaaccaccatgtcgagc

SEQ ID NO: 404271 - DNA, 98 bp, Homo sapiens
ttcccgtagcctcggggaaggagcaggatttagaggaccactagttggaccccatcctcgtgctggaggaacagggagcatcgagtacagctgtccgg

SEQ ID NO: 404272 - DNA, 75 bp, Homo sapiens
acagcagtggagaaggagaacctttgactggagatgccacaactgaatgttaccagagagaacttctctatcaga

SEQ ID NO: 404273 - DNA, 75 bp, Homo sapiens
ccttgacaacacagagtttcaagggtctccgtctctccaccgggggcttcatccttccagggaggagaagaggga

SEQ ID NO: 404274 - DNA, 83 bp, Homo sapiens
cgaaagtttcaaggagtttgggaaaaaccgcgaagtcatggggctctgtcgggaagatgacagtcatgtccctttccagggac

SEQ ID NO: 404275 - DNA, 51 bp, Homo sapiens
accgcgcgactcggcgcccgcccgcggggacggcaaaacagaacagaaagg

SEQ ID NO: 404276 - DNA, 75 bp, Homo sapiens
atatcccacttaaatcattccaggtcagcccaaggccaaccccactgtcactctgttcccgccctcctctgagga

SEQ ID NO: 404277 - DNA, 110 bp, Homo sapiens
ccccaagtagctacctatcacagagcaattaaagttacagtagatggacctcgggaacccagaacactattcctgatcagagaactccagttgcttcaacacacagtatc

SEQ ID NO: 404278 - DNA, 96 bp, Homo sapiens
gttttgggggagcagacggttgacagtgttgagtttgattgaaggaaggcagcaacaactcatctccagtggattttgtaaataacaagaggacag

SEQ ID NO: 404279 - DNA, 75 bp, Homo sapiens
aaaatgttcaagtgatgtttagaaataacttgtgagggaccctaacctccaaaagaggtacccattggcgctcaa

SEQ ID NO: 404280 - DNA, 87 bp, Homo sapiens
ctgactttcagctatggaatcggaatttgagagcgtattttgcggtaaaactggccgaaggctaaagctgaccagaccggactcctt

SEQ ID NO: 404281 - DNA, 97 bp, Homo sapiens
ccggccctcagagcaaaccctctccccacacaatcgctcagccctgtacaactatcagttgagggatttgcagttgataaaatggctggagaggtta

SEQ ID NO: 404282 - DNA, 110 bp, Homo sapiens
ccggtgctgcggctgttgccatgtccgcaccgggacgatcatcctggggacctggtacatggtgtgcgcagagcagagcacagagggccacccggggagcggcaatgtct

SEQ ID NO: 404283 - DNA, 98 bp, Homo sapiens
tggaacttatgaagagcttgcttccagttgacaggagttgtgaagacttggtgaggactacactgaaacattcaaatgtgtggcgaaaacataatttt

SEQ ID NO: 404284 - DNA, 98 bp, Homo sapiens
ccccagttttgctgaccttattcaccatgacttatcagagtcctgtgaagataaatcagattagcttggatgaaagtggagagcacatgggtgtgtgt

SEQ ID NO: 404285 - DNA, 90 bp, Homo sapiens
gtggagcccaaagacccctggagacatgagctttcagcagaggccaaggcagcattgcttgaatttgaagaaagggagcgacagcataaa

SEQ ID NO: 404286 - DNA, 49 bp, Homo sapiens
gttgcccccaggcggtccttcctggagcggttccgccaccccagccgca

SEQ ID NO: 404287 - DNA, 100 bp, Homo sapiens
cacccaagcttttgtatcctatggaaagtaaactgacaattcaggagacccagctgggttccagcaacagatagaaatgctttaagttcactctggggaa

SEQ ID NO: 404288 - DNA, 75 bp, Homo sapiens
gccagagtaaagcaaagagaaaggaagcaggcccgttggaagtggttgtctattggtgtcagcaaccagagggaa

SEQ ID NO: 404289 - DNA, 76 bp, Homo sapiens
gagagacacttgtgaacattcaagtgaagcaaaagcctttcatgattatgtcagcccaaggccaaccccactgtca

SEQ ID NO: 404290 - DNA, 76 bp, Homo sapiens
ctgcgctaccggaatgtcatccagcgagtgattagccttcaaagaaaaacctcggtatccaccaagtcaggctcaa

SEQ ID NO: 404291 - DNA, 100 bp, Homo sapiens
aaaactcaaggaacatctgttgagaagaaaaacgctttttgcatacaagcaggaaaatgagatgttatccaggtgcctcatctccagacatggagcccag

SEQ ID NO: 404292 - DNA, 100 bp, Homo sapiens
agagccattgaggagcagtggtcgggcattgccccaaatacaatgttagcaaaagtatgcagtgataagaataaaccaaatggacaataccaaattcttc

SEQ ID NO: 404293 - DNA, 83 bp, Homo sapiens
cgctgctgcaggaggccaaggacggcgttctggatctcaaagcgccgccgccatgtctgcgcatctgcaatggatggtcgtgc

SEQ ID NO: 404294 - DNA, 111 bp, Homo sapiens
aaacagcccgcccgaccccgtcccgaccctggccgccccgagcggagcctggagcaaattgtggctactaatttgccccctgaagatcaagatggctctggggatgactct

SEQ ID NO: 404295 - DNA, 75 bp, Homo sapiens
ttcaatcaattctttgtgactcctcgatcttcagttgaggtgaactgcgccaggccactgtggccatgatgaaca

SEQ ID NO: 404296 - DNA, 75 bp, Homo sapiens
gctgagcgggccgccaccatcgccaagcagaaggctgagatcgcggcttccagtgtcaacagcatctccaccctg

SEQ ID NO: 404297 - DNA, 100 bp, Homo sapiens
cccttaccccgaaagccccgctcagacactaccccaagcagtccttcaccatggtggcggacaccccggaaaaccttcgcctcaagcaacagagtgagct

SEQ ID NO: 404298 - DNA, 90 bp, Homo sapiens
cttggtttatctggtgcaaaggccaactaccgtggagaacttggagcgtgatgcccagaagtgtgtgaactggtctgtgaccacaaagat

SEQ ID NO: 404299 - DNA, 100 bp, Homo sapiens
gctggtgggtggcaggaaatgccaagaagtgagacacctcagctcttcactgtgttgccagagaagagaacagccactgttggaggggccatgatgggat

SEQ ID NO: 404300 - DNA, 100 bp, Homo sapiens
aatgaaaagggatggaactacattcttgaggtcctagcttactctgccaccactgcccggcaggaggaagttccccagcagacagtggccccacagcaac

SEQ ID NO: 404301 - DNA, 74 bp, Homo sapiens
ttccagtacacagacgagcatggggaaggcactacctggcagcaccatctaaacctgtatcatctgctgtggtc

SEQ ID NO: 404302 - DNA, 97 bp, Homo sapiens
aaaatcatggaagttgattactcagtctctaaaaagctaagttctcaaagaagtcagatggacacattaaagaccaaaggctggggggaagagcaaa

SEQ ID NO: 404303 - DNA, 50 bp, Homo sapiens
ctctggatgctgacagaaacaagggccaacgaggtgacggacagcgcgta

SEQ ID NO: 404304 - DNA, 90 bp, Homo sapiens
agtgcctcgagcgctcaggatggaggaagactcgatccgcctgcctgcgcacctgccccagcgacttctccgtgtcccttaaagcgtcag

SEQ ID NO: 404305 - DNA, 115 bp, Homo sapiens
cgagctgagtggttgtgtggtcgcgtctcggaaaccggtagcgcttgcagcatgcggagctggagtttgttcagatcatcatcatcgtggtggtgatgatggtgatggtggtggt

SEQ ID NO: 404306 - DNA, 82 bp, Homo sapiens
cagagattgagaatgtccatggatttgtttctcattctcatatttcaccaataaagatggacaagaggaaagacccttcttc

SEQ ID NO: 404307 - DNA, 83 bp, Homo sapiens
agactgctgagcccgtccgtccgccgccaccacccactccggacacaggtgttggagagcacaatggctgaacaagtccttcc

SEQ ID NO: 404308 - DNA, 75 bp, Homo sapiens
atccgtgcccggatatttctcatcgccagcaaagagcttgaggcaagtagcctgcagtatgaaatgctgctgctg

SEQ ID NO: 404309 - DNA, 100 bp, Homo sapiens
ggcagaactgccagccaagatcctggttgagtttgtggtggcccggacatatatccagtccctgccccccatgccccagaaggacctgagcagcatcttc

SEQ ID NO: 404310 - DNA, 100 bp, Homo sapiens
tctatggaaagttctgagacatcttgtagaggaacccaagccagaccgtctccttgtattgaaagtactatggaatgatttcctgatgtgctactcctct

SEQ ID NO: 404311 - DNA, 74 bp, Homo sapiens
cttctaaagtataccccacagcacatgcattgcggagcagccttttgggatggtaaggttgaagttacaaaaga

SEQ ID NO: 404312 - DNA, 75 bp, Homo sapiens
aatcaatgtctggtagccaccggcactcacgagcttactcacatagcatattggtatatcaaaatgaaatgcaag

SEQ ID NO: 404313 - DNA, 90 bp, Homo sapiens
ctcggacgtagcccggcttgtattggctggaaactgacaaactagctctcccgatgagccccagcccgcttagcccgagccccatcccca

SEQ ID NO: 404314 - DNA, 50 bp, Homo sapiens
gcccagagtacgtgcactgcctgctggaggatcctctggatcacccttcg

SEQ ID NO: 404315 - DNA, 75 bp, Homo sapiens
tgatccaagtagcctgtggtggagagcatactgtggttctcacgggccttcatgccccgaggactagcagacaaa

SEQ ID NO: 404316 - DNA, 51 bp, Homo sapiens
tgtggtttgaatgagatttcagaggccttgagagtaatggctaaaattatg

SEQ ID NO: 404317 - DNA, 100 bp, Homo sapiens
gtgaaaaaaaagacctgctttgccctgggaaatagtaaccctgccaaatacatcagcttgtaggagacagaggaaggtgaaattgttgaagtggatgaag

SEQ ID NO: 404318 - DNA, 74 bp, Homo sapiens
ctgtctgtcttgaaatttacctaccctacattattccaagggtttacaagtaaaagtaaccaagctaaaacagg

SEQ ID NO: 404319 - DNA, 90 bp, Homo sapiens
ctctgttcagagaagtatgcaagggaaatccctaagtcagccaacccctcctcccatgccaatcctttcacagtctgaagcaaaaaaccc

SEQ ID NO: 404320 - DNA, 100 bp, Homo sapiens
attgtgaataatgctgcagtgaacatgggagtacatacatctgtttgagatctggcatttccttgtgctcataatgagaatagttctccaattagccaag

SEQ ID NO: 404321 - DNA, 74 bp, Homo sapiens
ttgagagtccaactggcactgtgccttatgcccgctcagaggcccacctcacagagctgctggaggagatatgt

SEQ ID NO: 404322 - DNA, 73 bp, Homo sapiens
ccatattgggagtgtgattaaggaactcgaatcatttatgacagaaagtttctgttggatcgtcgcaattctc

SEQ ID NO: 404323 - DNA, 74 bp, Homo sapiens
aggtgatcaggaggttttagacagcgtgtgccaagcagatgagaattcagctgactggaaataccggcatgcag

SEQ ID NO: 404324 - DNA, 100 bp, Homo sapiens
agctgcaggtgccagagttccaggcctgcccacagacggtggtgcctcaaaacacctacccagatttgaacatggaattcaatccttcagatcatcctcg

SEQ ID NO: 404325 - DNA, 82 bp, Homo sapiens
ggcggccaagcagccaaccatgctcaacttcggtgcctctctccagcagactgcgacaaatttacatgtattggagaccaga

SEQ ID NO: 404326 - DNA, 70 bp, Homo sapiens
ttgtccatctgtaacttcattaagtcaaaaagtggatagaacgcaaacaacttgattatttaggaattcc

SEQ ID NO: 404327 - DNA, 90 bp, Homo sapiens
tgaatttctccgcaaatttcctgccggcaaggtgtttgatgcgatcatgaatttcaagaaagaggagacagcaaaactgatagagaaact

SEQ ID NO: 404328 - DNA, 100 bp, Homo sapiens
cgcagtgccggaacactgtggcggccatcgaggaggtatgccttacactttcttgtacaaagtggaatttcctactgtatcatgatcatcataggagtgg

SEQ ID NO: 404329 - DNA, 100 bp, Homo sapiens
ctgtgatctgtgtcctctttgcagaagaatagcctaacatggcagaccagagacagcgctcactgtctacctctggggagtcattgtaccacgtccttgg

SEQ ID NO: 404330 - DNA, 83 bp, Homo sapiens
atttgggtcgcagttcttgtttgtggatcgctgtgatcgtcacttggacctatatccagactttgcctgacactgcagggtcc

SEQ ID NO: 404331 - DNA, 80 bp, Homo sapiens
gagacggtcgtagctgcggtcgcgccgagaaagtttttcagaagaagtgaagtcaagatgaagaaccatttgcttttctg

SEQ ID NO: 404332 - DNA, 90 bp, Homo sapiens
ccgccggagatgcctgacgcatctgtctgaggagcggtcagtgacgcgatggagcgggcaagaaatcaatgtggactgaacataaatcac

SEQ ID NO: 404333 - DNA, 78 bp, Homo sapiens
gggacccggtgacagcgtgagagataccgagacatgtgactatggctggcacaaattccaagggcagtgctacaaata

SEQ ID NO: 404334 - DNA, 98 bp, Homo sapiens
gtgggacgcggcacctacggtcacgtctacaaggcgaggcggaaagatggcatgggtggtaaagtaccacctgctactcagaaagctaaatcagaaga

SEQ ID NO: 404335 - DNA, 74 bp, Homo sapiens
cgtgacatccgaggtgcctttctccaaaaggatttaagaggggtgcagatcccggaatgcctgaaccaactgtt

SEQ ID NO: 404336 - DNA, 73 bp, Homo sapiens
tgcacgagtcattgtttggatctgttgctgatgatcagaaacttatgatgactcagaattcatgattgaagaa

SEQ ID NO: 404337 - DNA, 50 bp, Homo sapiens
gtgtccagcgctgccggagccgcctgagatgaagtcttgctctgttgccc

SEQ ID NO: 404338 - DNA, 83 bp, Homo sapiens
cggacgggcactgggcgactctgtgcctcgctgagggctccataaaaatacagactcaccagttcctgctttgatgtgacatg

SEQ ID NO: 404339 - DNA, 75 bp, Homo sapiens
acaaggaaagatttttattgcaaggcgctctctcttagagtttactcctggcttgggggcattaggaagcactgg

SEQ ID NO: 404340 - DNA, 99 bp, Homo sapiens
catgtgagacgtgcctttgaccttctgccatgattgtgaggcctccccagccacgtgaaactgattttttatcaagcagaaatgcatcgaacaacgaga

SEQ ID NO: 404341 - DNA, 82 bp, Homo sapiens
agtatttgaagtctgtgtcaaacatccatatcataagtggaattttggagatattcaaagagaacactttttacagttggct

SEQ ID NO: 404342 - DNA, 100 bp, Homo sapiens
agaagtcccaggaggtggaggagaagagccagcagaaccagcttctggtggatgagctgtctcagaaggtgctgtcacggcaaagcagaggaatgcatcg

SEQ ID NO: 404343 - DNA, 100 bp, Homo sapiens
aacagtagcccccgggcccccgtcaggaagcggggagaggtggtgagagatgacccctgttgaggatttcattggtgtctgccacaggccgccatggcat

SEQ ID NO: 404344 - DNA, 73 bp, Homo sapiens
tacctccaggccctgaacgcggactggcacgcagactgcttcaggaaatcacattctgcctgatgaagatctg

SEQ ID NO: 404345 - DNA, 75 bp, Homo sapiens
ggaccacaagatcctcatcgacaggggaacgcccttttgcttgtgactggcagggctgcgacaagaagttcgccc

SEQ ID NO: 404346 - DNA, 95 bp, Homo sapiens
agcattggatttagcagatccatctgccaaagcagtgcttactgggcttttttccagacttcaagctcccattccaacagtaagagcttcttcca

SEQ ID NO: 404347 - DNA, 87 bp, Homo sapiens
cagaggataaatttcaacctccggggccacaatagcgaggtaactactccagacccccagcgtatagtggggtgcccagtgcaagct

SEQ ID NO: 404348 - DNA, 90 bp, Homo sapiens
cgccctgaagaagtgcaagagcagaggccttctctagaccttgccaagatggcacaggatgttttagaagaatgtatgtctcttcccaag

SEQ ID NO: 404349 - DNA, 75 bp, Homo sapiens
cttccgctagtgatcctttgcaccctgcttggagacggacttgcttccgggacatctctacaccgttcccatccg

SEQ ID NO: 404350 - DNA, 90 bp, Homo sapiens
gaaggctcctacatgtgttcatgccacaaaggctatacccggactccggaccacaagcactgtagagtttccatagcaaggcgtgtacaa

SEQ ID NO: 404351 - DNA, 75 bp, Homo sapiens
agtgggccacaagcctttactcagaggctacagatgtccattatgtatgcactctgctttagatatgaccaggta

SEQ ID NO: 404352 - DNA, 100 bp, Homo sapiens
gtctgaaggatgggacgtggagtaacaagattcccacctgtaaaagtatgagttaatacagaaaggagtgactgaacttagaactgttgggaatgttcca

SEQ ID NO: 404353 - DNA, 100 bp, Homo sapiens
cggggatgtatttggaacattatctggacaggcgtctctggccgagcctctttttgtggaaaacgacagcagcagcagtggcctggaagacgccaccgct

SEQ ID NO: 404354 - DNA, 51 bp, Homo sapiens
ccgagggcagtctgtgtcaaacgcaggttatgaagacagtatggagtttcc

SEQ ID NO: 404355 - DNA, 75 bp, Homo sapiens
ggagtaacgagccggacggcgtcctcagctatcagtctcgcccaagaacttcaaggtgaaaatgatcatgaagac

SEQ ID NO: 404356 - DNA, 75 bp, Homo sapiens
acaaagctgctagcagaaaatcaaaacgctgattaaaagaagcacggaactgtggctgcaccatctgtcttcatc

SEQ ID NO: 404357 - DNA, 73 bp, Homo sapiens
cgggaagttcgtactgggcagaacgcgacgggtctgcggcttagggccatttcataattctgaatcatgtctg

SEQ ID NO: 404358 - DNA, 76 bp, Homo sapiens
agctgaacaagaagttggccaacaaggcgaagtttattttgagttggatgctgataaaatatgtagagcagcagca

SEQ ID NO: 404359 - DNA, 82 bp, Homo sapiens
tcttcctgctggggctcatgtttgaggtcaatgtgacggtggactacattagaccagccagcccagccacagagacagtgcc

SEQ ID NO: 404360 - DNA, 100 bp, Homo sapiens
caaaggaccagtctgcagagggatcctgtggctggaagcgaggaggctccacacggccgttgcagctaccgcagccaggctggtctcaaactcctggcct

SEQ ID NO: 404361 - DNA, 110 bp, Homo sapiens
ctcggggccatgattgcacccttgcacttcctggaggtgaaactgggcaagaggccccagcccgtgaaaagtgagcaaatttccgtcaggaaaaacagccttgttgctgt

SEQ ID NO: 404362 - DNA, 99 bp, Homo sapiens
tcgacgccacttcatgttccagtgcctcgagcgctcaggatggaggaagactcgatccgcctgcctgcgcacctgcgcaggcagtggttaaaggttccc

SEQ ID NO: 404363 - DNA, 82 bp, Homo sapiens
ggggccgtcctgaggagcctcctggcctgcagcttctgtgtgctcctgagagacaatgcagatcttcgtgaagactctgact

SEQ ID NO: 404364 - DNA, 100 bp, Homo sapiens
tcttgcatgttggctagactagaaatcaaacaacttggaaatcgatcacaaccaggcattaagttcacaaaagcatatgcttacgcagatgaagatgaag

SEQ ID NO: 404365 - DNA, 80 bp, Homo sapiens
tgttggaggccatgcggagggggcagttatttggcagaaaagcagagtatcagatcacaagatggctctcatgtcagttc

SEQ ID NO: 404366 - DNA, 74 bp, Homo sapiens
aaggcggtgaccaagacgctgcgggagcccggcgccggagcccaagcacctgttcttcccggagcctatcagca

SEQ ID NO: 404367 - DNA, 50 bp, Homo sapiens
atcgggtgtgaccgccgccgcccagcattcgttcagtcagagagcataat

SEQ ID NO: 404368 - DNA, 90 bp, Homo sapiens
tggaaaatcgcttggttaaaacctgacacttttaacagggacagagcagaatgggctgatatagatccggtgccgcagaatgatggcccc

SEQ ID NO: 404369 - DNA, 90 bp, Homo sapiens
ccggggcctccgtattgaatgaaagacccagtgcaaagacatcaccatgaacactagcagaaaatgttggggcttttcaggaagcataat

SEQ ID NO: 404370 - DNA, 74 bp, Homo sapiens
ccggaaggagctagacggcggtcgggtccctgactatggctccccagagcctgccttcatctaggatggctcct

SEQ ID NO: 404371 - DNA, 100 bp, Homo sapiens
ctaccagcgggcggacttcgtcctggccgccaactcctacgacctcgccatcaaggctatcacctccagcgccaaaggttctgccattacaggaccagta

SEQ ID NO: 404372 - DNA, 98 bp, Homo sapiens
ccagtatgactaacagggagctcatgagcagcattgtccatcaggataatctacaggggtacaaaacccaaaacaaatttctaaataaggagattttg

SEQ ID NO: 404373 - DNA, 82 bp, Homo sapiens
ttcaaggagtttgggaaaaaccgcgaagtcatggggctctgtcgggaaggctcttgtcaggatggtgaagctgttcatcgga

SEQ ID NO: 404374 - DNA, 75 bp, Homo sapiens
agaaacaaagccacccagccaatgaagtgggctcgggatgagtttgaaggcctcttcaagcagccagcagaaaat

SEQ ID NO: 404375 - DNA, 89 bp, Homo sapiens
tcatgatagcttccaagggacaaggtgtcaacaatgtgccggctgaccggttccctgatgtgttacctgcttctgctactgatccaaac

SEQ ID NO: 404376 - DNA, 90 bp, Homo sapiens
actcccgcggcgggaggagcctgttcccctgaggtttttcgttggaatatacgttgcacatttatggcgattctgagtgtgagggcagac

SEQ ID NO: 404377 - DNA, 74 bp, Homo sapiens
ggtgctaccatcgtgagagtaaggggcaagattcttgccaagagaattaatgtgcgtattgagcacattaagca

SEQ ID NO: 404378 - DNA, 100 bp, Homo sapiens
cccagaggaagctggagagggatgtgtggctgcgatcctcggggaaaccgaggaccccaatgaggatgagccaaacatccgagtgctccttgagcaccgc

SEQ ID NO: 404379 - DNA, 83 bp, Homo sapiens
ggccagcaggggcagatggcaagtggagacagcaatctcaacttcagtcagttcatcagttacttcctcccacttaccgagat

SEQ ID NO: 404380 - DNA, 75 bp, Homo sapiens
gaaaattaaagcagaaataaaggctgccaaagcaggaatccatcacttgaagatcaagcttgtgaccgaatttac

SEQ ID NO: 404381 - DNA, 82 bp, Homo sapiens
ctcaaggacacggtctacaccgacttcgacgtattatgcggagtgtcacggcgtcatctacgtcattgactccaccgacgag

SEQ ID NO: 404382 - DNA, 75 bp, Homo sapiens
caaattatagagctaattacaactttcggggcatgtacaatcagagttcttcagtgccctactccacagccaaaa

SEQ ID NO: 404383 - DNA, 101 bp, Homo sapiens
cctatctgcccgtcaacgagtcctttgccaacagacctcaggaaagaggggatgaacttgcagactctgcgcttgagatcttcaaacaagcatcagcgttt

SEQ ID NO: 404384 - DNA, 83 bp, Homo sapiens
ctcaatatctgtcttcggtggactccttcggcagtccacccaccgccgccgcctcccaggctggaggcaaagctggaaaggac

SEQ ID NO: 404385 - DNA, 100 bp, Homo sapiens
tgtgtagaaagtgaaatcagaggagatgtaactatcgatatatttttgccatcatggatcagtttggagatatattagaaggtgaagtggaccattcttt

SEQ ID NO: 404386 - DNA, 95 bp, Homo sapiens
cgccgagcgcggcccgggcgccatcgagccttggcggcggacgtgcaggccggatcacctcaacagtcacgtcagacaagtgcactcaacagaac

SEQ ID NO: 404387 - DNA, 101 bp, Homo sapiens
ccacttgatgtcatcacgcagaaggggtgaaagagactcggtgacagatacagattctgacaatggagatattaattatgattatgttcatgaattgtcat

SEQ ID NO: 404388 - DNA, 75 bp, Homo sapiens
ggtcgtccgcaccgacgaggatgtctagggacaggaagatggttggcgacgtgaccggggcccaggcctatgcct

SEQ ID NO: 404389 - DNA, 100 bp, Homo sapiens
accatgtttcggaatagtctcaagatgctgcttactggtgggaaatcaagtcgtaaaaacaggtcaagtggtactgcataagccgaccacagtataagac

SEQ ID NO: 404390 - DNA, 75 bp, Homo sapiens
caagtatgccaccaacagtgaagaggttttaaaatcaaagatgggaaaatcggagaaaattgcccttccccatgg

SEQ ID NO: 404391 - DNA, 101 bp, Homo sapiens
acttgagaatttctgaacctcgagttgtaatggagctgtatggaaaggaacagatggagtcggataactgttcaggaggagatgatgactggacccatctg

SEQ ID NO: 404392 - DNA, 95 bp, Homo sapiens
acaaggctttgtgcttcaccaagtgcaggcagtcgggcagcgactcctgcaatgtggaaaacttgcagagctgaagcaggagatgggcggcatcg

SEQ ID NO: 404393 - DNA, 90 bp, Homo sapiens
gtcgcggcggcgactctcggcgtgcggtgatagccaagccatgggagacaagaagagccccaccaggtgtaaagatttctctctgtgtta

SEQ ID NO: 404394 - DNA, 75 bp, Homo sapiens
cttcttcaatggctactctgcgcaggtgaagattggtgcgttagaaggatatagaggccaaagagtaaaggtgtt

SEQ ID NO: 404395 - DNA, 50 bp, Homo sapiens
aacagccgaagcaacaaactgcactcctagtatcagaaggccaggcgaga

SEQ ID NO: 404396 - DNA, 100 bp, Homo sapiens
atggtggccagggcacgtcactgcaggccagggtgacgagaacaagtcagtgcgcgaccgtttcaacgcccgccagttcatctcctggctccaggacgtg

SEQ ID NO: 404397 - DNA, 82 bp, Homo sapiens
ccgggaggaaggaacgaggcaaggagctaaagcagcgtgcgttcagccctggggtcacaccgacaaatctgaagcgggtttg

SEQ ID NO: 404398 - DNA, 98 bp, Homo sapiens
ggaggtcgataagctggaactgatgaatattccgtcaacctcaaggccacttgcttctgattggtgttagtggagcaggaaaaactaccctgtctcgt

SEQ ID NO: 404399 - DNA, 100 bp, Homo sapiens
attattccagtcagtcaagaccaagagaggccctttgggacccaactggaaggatggcactggatctttaaaacgcagtggttcctttagcaaactccgg

SEQ ID NO: 404400 - DNA, 100 bp, Homo sapiens
ggtctgtagttactgtggaatcaataagccatggcatctaagaaatttgctgttaaagtgaaaggaaagcaagccaggatggatatttacgacactcaaa

SEQ ID NO: 404401 - DNA, 114 bp, Homo sapiens
cgcgcccgggaggaaggaacgaggcaaggagctaaagcagcgtgcgttcagccctgggaagccccatgtgccactcccctgatctgcagcttcggtaggccggtggacctggag

SEQ ID NO: 404402 - DNA, 103 bp, Homo sapiens
gatcctaatcttcaacaaccacgggaagccgcggctctccaagttctaccagccctacggccagctctcaatgttgcaagaaaaaatagaccatttggagcgt

SEQ ID NO: 404403 - DNA, 80 bp, Homo sapiens
cggcggaggaggagacggcaggtcggagtgacctccattgcagacaggctgaatgtggactttgccttgattcacaaaga

SEQ ID NO: 404404 - DNA, 51 bp, Homo sapiens
tcctcacccgcgcctgcgacctcggtatcatgatattagctggtttgacat

SEQ ID NO: 404405 - DNA, 74 bp, Homo sapiens
gatagtttgtggcttgtagaattctatgctccatggagtggtcaccatctcacaacttgaagagcctgagaaag

SEQ ID NO: 404406 - DNA, 100 bp, Homo sapiens
ttacactgttggaccaagttttgccaggatctagtgaaaagccatttgatgtatgcggtcagagaagaagtggaggtcctcaaagagcaaatcaaagaac

SEQ ID NO: 404407 - DNA, 83 bp, Homo sapiens
ctgacggcaacctctacaaggccaagttcatctcctccgtcaccagccacatctaccagacaccattcgcttttcacccaaga

SEQ ID NO: 404408 - DNA, 100 bp, Homo sapiens
atcccgcaagtcggaacccggcggatcggatcccgcagatcggagacggggcctggagatgacgtccggttgtttgccttcgtgcgcttcaccaccgggg

SEQ ID NO: 404409 - DNA, 83 bp, Homo sapiens
tggaggaatccgagaagagcagagcggagggagccccagacacgattgacgagatgcctgaggctgccgtgaaatcaacagcc

SEQ ID NO: 404410 - DNA, 100 bp, Homo sapiens
acgacggcgttgatatcggtggtaacgacggcctcagcaggcggggaagatgaaagggttgggataattcttcactattccacccttgccacagtactat

SEQ ID NO: 404411 - DNA, 100 bp, Homo sapiens
gtgaaggtgaaagtgaatttctctgatagagtcttcaaagctgtttctgacatctgtaagacttttattagcagacttgaagaaagagaagcagaactga

SEQ ID NO: 404412 - DNA, 98 bp, Homo sapiens
caccgcctccgaatttgcaaagaggaggaaggagggacttcttggcttctcccagcatagccccagatcatggaagggaagtggttgctgtgtatgtt

SEQ ID NO: 404413 - DNA, 83 bp, Homo sapiens
ctcggagtccttggggacggagcagcgcgtcgtggggcgagcggcagcagcctcccgcgacgatgcccctcaacgttagcttc

SEQ ID NO: 404414 - DNA, 100 bp, Homo sapiens
cccggaagaccaaagaggtggctgaccgggtccgcaagttctttcggtcaatcatggatggtgtgaaacacataggacatgaacaagctgagtggaggcg

SEQ ID NO: 404415 - DNA, 100 bp, Homo sapiens
ggaggccctgagcccggcgagcaggagaggaggtcttccgggccgcggcctccgagcgcgcgggatttgcaggggagaatgcaccgaaaccttacggaat

SEQ ID NO: 404416 - DNA, 74 bp, Homo sapiens
tgggagggcaacgagcacaacaggagctacgaggagttggtgccgtgagcgatgtggagatgcaggaacactat

SEQ ID NO: 404417 - DNA, 75 bp, Homo sapiens
cctctcgctgcttcaggaggacctgcaggaggacgcagacggatggaggttcccctgaaggatgctaaggaatac

SEQ ID NO: 404418 - DNA, 82 bp, Homo sapiens
gacgcgcaagggctgcggagccgcgggccggcgagcgcgtcgccaccatgggaaccttctgaccagcctcatgggctcctca

SEQ ID NO: 404419 - DNA, 117 bp, Homo sapiens
cagagcttggaaggatgcttcagctcatcttaggctgtgctgtgaactgtgaacagaagcaaggtatgctccagaatcactgacagagagcaagttttctgtggcctcagatgtttg

SEQ ID NO: 404420 - DNA, 101 bp, Homo sapiens
ggatccagtgttcaccatcctggccccggaagggaggagtgagatgtggatgttgcttttgcacctacgggggcatctgagtccagctccccccaagatga

SEQ ID NO: 404421 - DNA, 100 bp, Homo sapiens
ggcctttttccatctgcaggactatgaccaggcccgccactacctcctggctgccgtgaataggcagcctaaaggctaaatttattgtgaagaaatcaga

SEQ ID NO: 404422 - DNA, 83 bp, Homo sapiens
gaaaaagcatccccgaggaggaagacgaatcgttaaacatctgaaagggtcaggtttacccaaggtccagcctagcccctagg

SEQ ID NO: 404423 - DNA, 50 bp, Homo sapiens
gttgcacttgagaaaattaatgtggcagtgcaatcaaactgaggccgaag

SEQ ID NO: 404424 - DNA, 74 bp, Homo sapiens
ggcgcttgctgtcctcctggagtgcctcgagagccccggctccagccccacgaactggaagaagttcgggaact

SEQ ID NO: 404425 - DNA, 51 bp, Homo sapiens
tcaaggcagcagctgttacccttaaagactgatcctttgaaatactccagc

SEQ ID NO: 404426 - DNA, 76 bp, Homo sapiens
gtgcagactcagactggccaaaattcaatccctgctttagctcaggaatgtatcctgtcaggtataatgtcagtga

SEQ ID NO: 404427 - DNA, 50 bp, Homo sapiens
ctgcagcacttccactctgagagcagttaacacagaaatctgcctcctgg

SEQ ID NO: 404428 - DNA, 75 bp, Homo sapiens
atgtcctgttgtggggcttttacagcctttgggaccaacttggaggccttgcagaagaagctggaggagctagag

SEQ ID NO: 404429 - DNA, 90 bp, Homo sapiens
ctctttagcctgcctgataaagagcttatttcaacaattccaactagccgtttaaaattcctcaaagaagctggtcatggaacacaaaag

SEQ ID NO: 404430 - DNA, 50 bp, Homo sapiens
gcggccaagatgtccgtgcctatggagttttaacattgaatgcggagaac

SEQ ID NO: 404431 - DNA, 74 bp, Homo sapiens
cgtcacctccgctcccccgatcctattcccagtcgtgaagaaggtagataatgactataatgcccttcgagaaa

SEQ ID NO: 404432 - DNA, 100 bp, Homo sapiens
ccgcctcctcctgctgctgctgcgctacctggtggtcgccctgggctaaatcaagatgactaccagctggttcgaaaattaggccgaggtaaatacagtg

SEQ ID NO: 404433 - DNA, 83 bp, Homo sapiens
cccgtccccggcacacgcgcagccccggcctctcggcctctgccggagaaacaggttttaaaatcaaagatgggaaaatcgga

SEQ ID NO: 404434 - DNA, 100 bp, Homo sapiens
ccactcacgctttagaatatgtgctcttcagaccaaatagaagatgatgataattccgaagaaggcttccacactattcattcaggaaggcatgaatatg

SEQ ID NO: 404435 - DNA, 75 bp, Homo sapiens
gtcgatggtcggcggcgcccggatgggcagctgagggttatatcctgtgttgtgacctcatggtttaagtgggaa

SEQ ID NO: 404436 - DNA, 96 bp, Homo sapiens
acaactacacgttacgctattcgttgtggtccaaaacagtttacctcttatctaacaggttgcactgatgacatcgtcaccagcgaccattccccc

SEQ ID NO: 404437 - DNA, 75 bp, Homo sapiens
cggcgaatggagcaggggcgcgcaggacacagcattgttggttttgccatgtactattttacctatgacccgtgg

SEQ ID NO: 404438 - DNA, 83 bp, Homo sapiens
cgagagtttgcagcaaagatcattgaagccatgccagtgacggtaacccgcaccaccatcacaaccaccacgacgtcatcttc

SEQ ID NO: 404439 - DNA, 98 bp, Homo sapiens
aattgcggcagcggaacctaaagtttcaggggttacacatcattttggaatgactgtatatcatctggattacgtggctgtatgttaattgaattagc

SEQ ID NO: 404440 - DNA, 51 bp, Homo sapiens
ggcgaatagctctgaccacccggcgaagttggtccaggcgcaatgttcagc

SEQ ID NO: 404441 - DNA, 100 bp, Homo sapiens
cttgtccatggcaaatgctggacccaacacaaatggttcccagtttttcatctgcactgccaagactgagtggcagtgttctgacttactgagccaggcc

SEQ ID NO: 404442 - DNA, 83 bp, Homo sapiens
ccgagaagagcagagcggagggagccccagacacggttatgaaaactacaattactatggcgcccagaacaccagtgtcacca

SEQ ID NO: 404443 - DNA, 87 bp, Homo sapiens
cagacgttagcgtgagtgatcactctcaatcccggttcaatttcaccatttagtattgagagcacaagacgccagagacggtctgaa

SEQ ID NO: 404444 - DNA, 75 bp, Homo sapiens
tgcaaggatgtcatggatgccctcattctggattacggtgggatcatggcagggctgggctccgatccctggtgg

SEQ ID NO: 404445 - DNA, 51 bp, Homo sapiens
tctgaacttctcatgaaactctcaggagctgaccagtgctttggtgcatct

SEQ ID NO: 404446 - DNA, 83 bp, Homo sapiens
ccgacagccaggcccgggagaagttgattcttcaccacactgaaaccattaggaaaaatccttgtggttaacagcagaggctt

SEQ ID NO: 404447 - DNA, 100 bp, Homo sapiens
ggatggtggaggaatgaaaacgccggagtgctaacaggaatgaatgaaacttctgctgtaatcattgctgcaccacagaatttcactccctctgtgatct

SEQ ID NO: 404448 - DNA, 90 bp, Homo sapiens
cggggactgaagatggcgccgcgaggtgagcacctgcggatctgtccccagggctacacctgctgcaccagcgagatggaggagaacctg

SEQ ID NO: 404449 - DNA, 75 bp, Homo sapiens
caagcaggtccggacccactggctgctggagcttgtcaccaccagggtttccaggcctgaggtgcccgccctggc

SEQ ID NO: 404450 - DNA, 73 bp, Homo sapiens
acggagtgaccaagagcaggtttgagcttgcattcacaagagatgggctctgtggtctgtggaatgaaatggt

SEQ ID NO: 404451 - DNA, 98 bp, Homo sapiens
gaccagttacactccatacgcaaaccgcgatacattttgctgaacaaatagcaaagtgttctaagaacggaagcatctgggctggatggaatttagca

SEQ ID NO: 404452 - DNA, 96 bp, Homo sapiens
ggagcacagagaaagagaatgatgaagagaaaggcccggagactaaccagcagacctggataaaaagaacccagaaattaaaattgatgaaacagg

SEQ ID NO: 404453 - DNA, 100 bp, Homo sapiens
actcatttcctatctagcctgtattcccaggtgaatgaaaactttgccattgatttgatagcagagcagcccgtgagcgaggtggagactcgggtgatag

SEQ ID NO: 404454 - DNA, 74 bp, Homo sapiens
gcgcccagctgccaacaccaaggtctcctctgagcctccggcctccataagacccaaaacagatgacacctctt

SEQ ID NO: 404455 - DNA, 100 bp, Homo sapiens
atcatcccgccttttgaggacggcactccccggaggttcttgggtgtctctggggagtccctgggccagaccttcctccagactccagcccacctcttcg

SEQ ID NO: 404456 - DNA, 83 bp, Homo sapiens
cttacataatgcattggaacatgacatgagattaagttcattcaatgtgtcatgagtgtttaaatcaagaggaagctgcatga

SEQ ID NO: 404457 - DNA, 100 bp, Homo sapiens
tggatgtcggcgaagccgcgggcgaggtacctgaagctgttcactttcctgccccttccagagattgatcatatcatgcagctgcatgtcaaagagccag

SEQ ID NO: 404458 - DNA, 97 bp, Homo sapiens
gggggtgtcctggtgcacccccagtgggtgctcacagctgcccattgcctaaagaatgcctttgctaccctagaagaggaggcttgtacagaacttg

SEQ ID NO: 404459 - DNA, 74 bp, Homo sapiens
cgcttgcctacccgccggcccgcgggtctacttcctcaaagccctccagaatacccatcatatagcccctgagg

SEQ ID NO: 404460 - DNA, 100 bp, Homo sapiens
catgtatggaggaaatgcaccaggttgcaaggattgtcaatgaggcagatcagattccgatttgacgggcaaccaatcaatgaaacagacacacctgcac

SEQ ID NO: 404461 - DNA, 100 bp, Homo sapiens
tgcatcaattcttcgacaggaaaaaaatttgctggatattgatgcgccagtcactggtattatacctgaagaaccttagccctcgggtgactgaaagaga

SEQ ID NO: 404462 - DNA, 95 bp, Homo sapiens
atctgttcaattcttatagccattcttatagttgtaaggtcaaagattctaaactgcctgcatataaggatctcggtaaaaatctaccattccct

SEQ ID NO: 404463 - DNA, 100 bp, Homo sapiens
tggcacagcatctgacaaacactgtattcgttgacagagctttgatagtcgtaccatatgcagaaggagcagacgcctccgcctagacctgaagcctacc

SEQ ID NO: 404464 - DNA, 82 bp, Homo sapiens
ggttggacgctgccagtttgcacagcagcaggatgccggctccaggagcagcagtggaggtcgggaacgcctcattgtggag

SEQ ID NO: 404465 - DNA, 75 bp, Homo sapiens
cagatgctggcgacctatccagaatgatcaagttactggctgaccaacaaagttcctatcaaaagacccagcaca

SEQ ID NO: 404466 - DNA, 128 bp, Homo sapiens
gggaagaagagattgaagctcaagaaaaagccaaacgggaaagagagtggcagaaaaactttgagcctgtggtcagctgttagatgaggcacaagtgactttatccttccaagactggctggccagtg

SEQ ID NO: 404467 - DNA, 100 bp, Homo sapiens
gcaccatcctcatgatgcttctcaatcgctactcagagccgccgggcagccctgagcgtgcagttatggctgcagcttcgattgccaatattgtaaaaag

SEQ ID NO: 404468 - DNA, 90 bp, Homo sapiens
ccaaaggctcctaaacatttaaaagcagcccagaagaatcagtgcggtttctgtggcagagcgagttgcatttgaaagaggagaagagcc

SEQ ID NO: 404469 - DNA, 101 bp, Homo sapiens
tgttggggagaagaggattggaggtgtcagtgttaaaggaacctctacaacgaaggtgaagccacggaagataaggaggcaagtgaggcctatctggttgg

SEQ ID NO: 404470 - DNA, 75 bp, Homo sapiens
aggacgaggagtcggaggagccgcgggcggcgcggcccagctcgttccagcgaggaagaaaggacccggtttcag

SEQ ID NO: 404471 - DNA, 100 bp, Homo sapiens
ttcgagccaccgccaggggtgaaggccaacatgctgaggacgttcagcagcattcccgtctcacggatatgcaaggtatcttggagatggccgcttccat

SEQ ID NO: 404472 - DNA, 98 bp, Homo sapiens
aggcaatgatgagcaagttatcctccatgatgttgaaaggtggacaaactgagagtgatgttcctggagatgaaaaatgagaaggaaaaactcatgat

SEQ ID NO: 404473 - DNA, 98 bp, Homo sapiens
tttggatcaccgaacatgtccaatgtgtaaacttgatgtcatcaaagccctaggatattgggctctggaatgtttttgtcaggcagcatctgaagtag

SEQ ID NO: 404474 - DNA, 82 bp, Homo sapiens
tcttcctcaatgcttgtgtgggtaactccatttccaaatactggatttataaatgggtttacgtctccagcgttcaagcctg

SEQ ID NO: 404475 - DNA, 99 bp, Homo sapiens
ggaatgtgcagtcacagagaaaggggaacccacctgtctctgcattgaggtattcaaaacctttgaccacatggcccgtcaggatgatgagaagagaag

SEQ ID NO: 404476 - DNA, 82 bp, Homo sapiens
caagcgggagtatgaccacatgaatggatccagtgcctccggagccagcgtggtggccatagacaacaagatcgaacaggcc

SEQ ID NO: 404477 - DNA, 83 bp, Homo sapiens
cgccagcccgtgccgcgagcgcggcctgcaggaggtcgcaatggaagaagagatcgccgcgctggtcattgacaatggctccg

SEQ ID NO: 404478 - DNA, 100 bp, Homo sapiens
gaaaaatgaaagacacagacagtgaagaagaaattagagaagcattccgtgtgtttgataaggttggcattgtaaaggaggaacagcttaaggttcatgg

SEQ ID NO: 404479 - DNA, 82 bp, Homo sapiens
caaagatccccgttcctggagattctgattgaggtggaaatgagttctcaacagtttcctcggttaggagccccttctaccg

SEQ ID NO: 404480 - DNA, 83 bp, Homo sapiens
gggaggaggactctggagctgacagcgcgcacttcacccgcagttgtgatcagggccaaagcggtcagtgagaaggaagtgga

SEQ ID NO: 404481 - DNA, 102 bp, Homo sapiens
gccagtcgtccacatcagtggcagacagatgaagaaggcgttcgcaccggaaaatgtagcttcccggttaaggtatggaacctggctaactgcaagctgaag

SEQ ID NO: 404482 - DNA, 51 bp, Homo sapiens
gaaatgccctccgggtcacaggataagcactttcagaccatgctgaagtct

SEQ ID NO: 404483 - DNA, 78 bp, Homo sapiens
tggggaaacgatccgctcccaaaacgatggaaattccttcttccagcattataaatcagtacattgcttgtcaagggc

SEQ ID NO: 404484 - DNA, 82 bp, Homo sapiens
gctggactacgtggcggcgctggaagggatgtcgtctcagcagtgctcgggcgcaggctttactgcagatggtgcgtgacga

SEQ ID NO: 404485 - DNA, 83 bp, Homo sapiens
gcgtgctggtcagcatccggaacaacagctggagctctcaaacactgctgtcctgcaccagatgcggcgggaccaggtgacag

SEQ ID NO: 404486 - DNA, 82 bp, Homo sapiens
gacaaaacttcaagccaaacatcaagcagaatgtgatttgcttgaagatatgaggctattcagcttgaccctgaagaaactc

SEQ ID NO: 404487 - DNA, 100 bp, Homo sapiens
tacggcaaaggcaagagtaacagcagcgccgtcccgtccgacagccaggcccgggagaagtcagtactcctgcatttgtaccaacgaaaactcacgtgct

SEQ ID NO: 404488 - DNA, 139 bp, Homo sapiens
gagtctcctccagaccctccctcccgttgctccaaactaatacggactgaacggatcgctgcgagggtaccttctcaaaccagatttcatgaggcggcctgatcgaacatttgaccccttctctgaaactcctgttgat

SEQ ID NO: 404489 - DNA, 82 bp, Homo sapiens
ggaaccgccatggccgagccggcttcggtggtttggctttgaatgacagcaagaactctgtctttaatggcttcattggtag

SEQ ID NO: 404490 - DNA, 101 bp, Homo sapiens
cgagggggcatcatgaagcgggctggcggcgctgccgctcccgggcggccgcgggcgggcagaagattttcgcaagctctggaaaactccacctcgagaga

SEQ ID NO: 404491 - DNA, 88 bp, Homo sapiens
acccaccctgagagcaaccagggcatcctgacaaccaggaagggggttggcactgatgaagcctgcctgattgagatcctcgcttccc

SEQ ID NO: 404492 - DNA, 97 bp, Homo sapiens
gaaaagccacttgaagaaaagggtgaaggaggcgaattttcagttgatagcccagcagttgaacccaggctttcagctttcttttgcatcatctggc

SEQ ID NO: 404493 - DNA, 75 bp, Homo sapiens
cgcgcccggagcgccccgccgcgcacagggttgtagaaggtgatttagctgccatagaagcatacaagtcatcag

SEQ ID NO: 404494 - DNA, 75 bp, Homo sapiens
aagaagcaaggtgaagataactctactgcacaggtggagccgccaccaaaatgcagattttcgtgaaaaccctta

SEQ ID NO: 404495 - DNA, 50 bp, Homo sapiens
ctgtaacatggaggagctggaaaagttgccagtagtcatcagagtaccaa

SEQ ID NO: 404496 - DNA, 87 bp, Homo sapiens
ccccttcgcgtcccctgcaccatgagctggggcaccgagctctggccttcaaatgtttatctggtgtgactgtattatgccctcaga

SEQ ID NO: 404497 - DNA, 100 bp, Homo sapiens
gtcaattcaaaggacctgcccccagagagaatgcttttactgactctgctatcagtgctaaagtgaatggcgaacacaaagagaaggacctggagccctg

SEQ ID NO: 404498 - DNA, 100 bp, Homo sapiens
cctcacgattgagtgtcaaagaaggcccctagcagtcttcttgatgctttggaacaacatttagcttccttggaaggaaagaaaatcaaagattctacag

SEQ ID NO: 404499 - DNA, 50 bp, Homo sapiens
gcaaaacgtgactccccacaataatatattatttccggatcactcctggc

SEQ ID NO: 404500 - DNA, 88 bp, Homo sapiens
catttaggagctctgctcaaagccagacggatttttacctcctataactccaccagaaaagttttttctttcccagctgatgctggca

SEQ ID NO: 404501 - DNA, 106 bp, Homo sapiens
agaaggaaccaattccggacacataacaagcagcagtgaggacaccaaaggagttgatccccctcatattgtgtacagcatgtctacatcctgagcctaaagagcg

SEQ ID NO: 404502 - DNA, 101 bp, Homo sapiens
tggatctgaatcatctcttgaaagcatgggcattaaccatgacaatgaccacccatcgtgtgctgatggtcttcatatcatgtctggtgaatggattaaag

SEQ ID NO: 404503 - DNA, 75 bp, Homo sapiens
caataaaagagacctctacttagctcagcaattcttaccttgaatgtggttcctgttttaacgtagtacatgtca

SEQ ID NO: 404504 - DNA, 90 bp, Homo sapiens
agctatggcattagcccacaggccaaggagtacaagcgcaagctagccagagtttccctggtgcgcaaagaactcaggtcccggatccag

SEQ ID NO: 404505 - DNA, 82 bp, Homo sapiens
aggcctgcaaagctgtacaagagatcatgcagaaactaatctggattcactccctctggttgatacccactcaaaaaggaca

SEQ ID NO: 404506 - DNA, 100 bp, Homo sapiens
gcgttccggaggcccggccacctctgagaagggagacgacgctgctgggtccgctgagcggggcgacccgaggctctgcgaacatcaatagatgcttatg

SEQ ID NO: 404507 - DNA, 50 bp, Homo sapiens
tagtcacccacctacatgttgaggtggtataagttgaaatccaaaccagg

SEQ ID NO: 404508 - DNA, 100 bp, Homo sapiens
gcagaggaaagcgggctggcaggcgagggagcccgcgtcggctgagagcccacaggcccccacaggctctggcacgttttgggggaggtgcctgcaggac

SEQ ID NO: 404509 - DNA, 98 bp, Homo sapiens
cgagcaccgggccctctgcgacctggggccctgggtgaagtgctccgccgcccttgcctccagcccgtctggtaaacttgtccagattgaatatgctt

SEQ ID NO: 404510 - DNA, 74 bp, Homo sapiens
ttttttattatgttgcacggaggtgcctggaatacttattaagaaacgatgcaaatccagggatccgtgataag

SEQ ID NO: 404511 - DNA, 51 bp, Homo sapiens
aaacatctcaccaatttcaaatctgtcatggctgagtacgggaccctcctg

SEQ ID NO: 404512 - DNA, 137 bp, Homo sapiens
ggaagcactacaagggtcctgaagtcagttgttgcatcaaatacttcatatttggcttcaatgtcatattttggcagataatctcagtgataccttgaagaagctgaagataacagctgttgacaagactgaggata

SEQ ID NO: 404513 - DNA, 100 bp, Homo sapiens
cagcagtcttacagcaattgaactttcacccatgtgaggatcggcccaagcacaaaacaagaccaagtcattcagaaggacgtggtgggtcctctggtgc

SEQ ID NO: 404514 - DNA, 100 bp, Homo sapiens
ccaaaaggaagtatgttgatccatcaagagcagttgaaattcttaaggatgctttcaaatcaaatgactcacagcagatctttccctagatcattctgac

SEQ ID NO: 404515 - DNA, 100 bp, Homo sapiens
tgagaagtccctttctgcagaacagggtgttacagatgggacctcagacattcctgaaagggctctcacctttgtgtatccttttggtgccacattgagt

SEQ ID NO: 404516 - DNA, 51 bp, Homo sapiens
ccagatatctacctaattgattgtgtgtttcacataacagcagataatcac

SEQ ID NO: 404517 - DNA, 75 bp, Homo sapiens
gccgggcagcagcaggcgacgccgggagccttgctgcaagcggattggccatttgatgatggagctccaccccct

SEQ ID NO: 404518 - DNA, 100 bp, Homo sapiens
cataccactatatcagataagcttgacattacagccaagatggtgctgtcccagagacaacgagatgaacttgcaaggatgatgctgaaaggaataacaa

SEQ ID NO: 404519 - DNA, 50 bp, Homo sapiens
cgactcagacgtggataaagataatcccgatgcccccatgagtccagaac

SEQ ID NO: 404520 - DNA, 96 bp, Homo sapiens
agacagtggaagcttttgatgctgacatgctcaaagtctttcggaatgctgaggccaaggacagcgatgatgatgatgatgtcgctgtcaccgtgg

SEQ ID NO: 404521 - DNA, 100 bp, Homo sapiens
actttctgggcgttcatgatcctggccagcctgctcatcgcctactgcaaggcagaggaggtggacacggtggacgtctccggcgtgcccgcagaggtgc

SEQ ID NO: 404522 - DNA, 122 bp, Homo sapiens
caagaccaaggtcaacaaggacaacaatgagatcgtggacaagatcatgggcaaaggacagatccagcgagggcggcactgctcacaggacggctacccatccgcaatggcttctacaccac

SEQ ID NO: 404523 - DNA, 100 bp, Homo sapiens
tcaggaagcctatgtcaactatggaacaacaacttgcagctcatctctattgatgcgatgcggtttcactatggtgtccaggctggtctgcaactcccgg

SEQ ID NO: 404524 - DNA, 73 bp, Homo sapiens
gcagcgcgggatcccagcctcaggcgtgcgcggacggtgtgcggattgcccaaggactccagatactccaaat

SEQ ID NO: 404525 - DNA, 88 bp, Homo sapiens
cccccttcgcccgtttccatcacgagtgccgccagcatgtctgacaaactgccctacaaagtcggttacatccactaccagcctgccc

SEQ ID NO: 404526 - DNA, 90 bp, Homo sapiens
cttgtagataagcaactggattttttaactgaagatagtgcctttcagccctaccagagtgcctggaagagctgggatgtctggttgagt

SEQ ID NO: 404527 - DNA, 100 bp, Homo sapiens
gcgagaaagacctgaaggagatccaggggctctttgtgcagttggtccaggccaacacccctgcatcccttgtggggctgcgctttggggaccagctcct

SEQ ID NO: 404528 - DNA, 98 bp, Homo sapiens
tgggcaccgcggccggagctgtgggctggaagaaatgcagagtaacgtggaagtggtccacacctaccgccagcacattgtgaatgacatgaaccccg

SEQ ID NO: 404529 - DNA, 50 bp, Homo sapiens
gaccaggcaccttctgtggaaggtgattgtagagaaggctccaaaagcca

SEQ ID NO: 404530 - DNA, 75 bp, Homo sapiens
gcctcgccatgtcctgctgcccgcttcggaaccaaaaagaagcttcccagagccggggccaggagccccaagcgc

SEQ ID NO: 404531 - DNA, 101 bp, Homo sapiens
gcggaccgcgagcgctgggcgggtccgcggcgcggtcggtcggcgcctgttctcgggctgtttggcggggaatacagtgagtaacctgatcatgattatac

SEQ ID NO: 404532 - DNA, 82 bp, Homo sapiens
aagaactggcgtcacgtttacaaggctgaagctcagggccctgtctgctctgtggactcaacagtttgtggcaagacaagct

SEQ ID NO: 404533 - DNA, 100 bp, Homo sapiens
ggagaggcggcggcggcggcggccgaggaggaggagggggaagcggcggcggcaaaggcttggattccttagcaccaccacagctcagccagaacagaag

SEQ ID NO: 404534 - DNA, 75 bp, Homo sapiens
gtgaagctcaccgagacggcgatccgggcgctcgagacttaccagagccacaagcagaaaaatatggctcaggag

SEQ ID NO: 404535 - DNA, 83 bp, Homo sapiens
gaacaggcccagaaggccaagaacccccaggagcagaagtccttcttcgccaaatacaggtcctgtccattttcgtgcctcct

SEQ ID NO: 404536 - DNA, 100 bp, Homo sapiens
tttggtcaccagtgagctggagaagttccagttggatccttatgactatgaaatgattgaagttgtcttgaaagttatagaacgagctgatgaaaagata

SEQ ID NO: 404537 - DNA, 100 bp, Homo sapiens
cacttatcatctattccaccgtgttctgggcctccggtgtggctgtctctgatggtgtcatcaaggtgttcaacgacatgaaggtgcgtaagtcttcaac

SEQ ID NO: 404538 - DNA, 74 bp, Homo sapiens
acctgcagcggcgcctcaaggaggcgagaaagatggtgaatgtgtaccacgtacatcagcattcctgcttcctg

SEQ ID NO: 404539 - DNA, 75 bp, Homo sapiens
aagaatctgcaggacttggtccgcggcatccgtaaccacaaggaggacgaggactcctcctattttgaggacttc

SEQ ID NO: 404540 - DNA, 99 bp, Homo sapiens
gagtttagtaataggtgactgccggaaaaaagggaactttgaatattgtcaaggtaagaatgattgatgttggctgatattggagtgctcattcacatg

SEQ ID NO: 404541 - DNA, 100 bp, Homo sapiens
caaaaagctcctctgtgcccaccccacctcccatccagctcggcagcctggtgacgcaggaggccccatggacgccagcgtggaggaggagggtgtgcgg

SEQ ID NO: 404542 - DNA, 90 bp, Homo sapiens
gaggggaaaccccgtaaagtggttggttgcagttgtgtagtagttaagaatcgggaccagtattcacatctgctaagtgatcattttctg

SEQ ID NO: 404543 - DNA, 75 bp, Homo sapiens
tcagcaggaactggaatgtgttcaagtcttggcagagccaggatgtgatcttcgtggtggaaagctaaattttaa

SEQ ID NO: 404544 - DNA, 100 bp, Homo sapiens
cagatgtcccaggtgcaggagctcttccatgaggcagcccagcaggcacgtgacacaagctgacctcaagagctccacgttttggcttcgagcaagtttt

SEQ ID NO: 404545 - DNA, 88 bp, Homo sapiens
tattttgttcgtgataaactggatcctgatatggctctttgccgaaatgctagagaaatgccaaggccacctttgatgccatttctaa

SEQ ID NO: 404546 - DNA, 74 bp, Homo sapiens
ttttcctccaggcctttgagagagaactcctggaagccccgtcttcctcctcatgcccattgcctgaccagagc

SEQ ID NO: 404547 - DNA, 75 bp, Homo sapiens
gtacgtgcctgatgtgttttataaggtggtggacataatgcgagttaacgtggacaaggttctggaaagagacca

SEQ ID NO: 404548 - DNA, 83 bp, Homo sapiens
ccttcatatttgattggatttacagtggtttcagcagtgtgctacagtttttaggtcctgtccaaaatgcattgctgtcttca

SEQ ID NO: 404549 - DNA, 73 bp, Homo sapiens
ccaaaaaggcctcgcacattcagttggacagtgctgtggagcatccgagtgtgccagagtctccagaattcgt

SEQ ID NO: 404550 - DNA, 82 bp, Homo sapiens
cgagccatggctctcgccgtccgagtcgtttattgctctttcctctcaggatcctgctctttccctgaaagagaatctcgag

SEQ ID NO: 404551 - DNA, 75 bp, Homo sapiens
gtctgactctgactctcggactgagaaacgcaagattttgtggaagtataatactttgtcattatgagatgtcgt

SEQ ID NO: 404552 - DNA, 76 bp, Homo sapiens
gcaggcacccaagcgggcggcaggtggcagtagagaagagcatcacagaagttgctcaggagctgacagagctggt

SEQ ID NO: 404553 - DNA, 75 bp, Homo sapiens
tgcaagtcgggatactttcagttcaacaagatggaccactcctgccgagttgactggattgttgctgacatcttg

SEQ ID NO: 404554 - DNA, 80 bp, Homo sapiens
aaacctaaccatgaagacttgaacttaatacagcaagaaagaccatcaagtttaccatcacttatataagaagaaccttg

SEQ ID NO: 404555 - DNA, 82 bp, Homo sapiens
cgctggctgtctggagcctggactggcagcaggccctgcaggtgagcatctgcctggagtgtaacagcagcaaactgcgcgg

SEQ ID NO: 404556 - DNA, 83 bp, Homo sapiens
gtgatggtggagtaggaggcaggtctccgcggcctaatttgtagatatcctcaagaagattatgagtcattctcactaccgga

SEQ ID NO: 404557 - DNA, 100 bp, Homo sapiens
cggagaccccgcgccggaccctgaggcagcgaggacgatccgtaaggctcagaaccttctgaaacagtattcccagcatggtctagatgggaaaaagggg

SEQ ID NO: 404558 - DNA, 90 bp, Homo sapiens
cggggcaggggcggaggcggaggcagaggtggaggcgctttgaaaggctatgaccagggccagagcactcagatctcagtcagaggagtc

SEQ ID NO: 404559 - DNA, 100 bp, Homo sapiens
ccgcactgcaggccaggggcctggccagctacagagagaggccattttgcaacctgtgttggcagcagaagattttactatctttaaagcaatgatggtc

SEQ ID NO: 404560 - DNA, 80 bp, Homo sapiens
gttgcgtgccctacttcaaggataagggcgacagcaacagctctgccggctggaagtgatcagggccaaagcggtcagtg

SEQ ID NO: 404561 - DNA, 115 bp, Homo sapiens
ccaatgtgggatcgatgtttcaatattggaagcgctttgatttacagcagctgcagaactctaagaaggagctgatgtggaggagcagctgagacagttcaagatgacgaccaca

SEQ ID NO: 404562 - DNA, 75 bp, Homo sapiens
cagccgcttggggcccgcacggaccctctacttcactgctgtgacttactcgaagcctcgattggccacattttg

SEQ ID NO: 404563 - DNA, 100 bp, Homo sapiens
aattattactcagaacatctgttatacaaggtattcacacagaccacaatacactgagaaatgcacaattttgaggaagagttaacttgtcccatatgtt

SEQ ID NO: 404564 - DNA, 82 bp, Homo sapiens
aagattccagagaagcctgtgaacaaaaaccacgaagctgccctgagacgctcactcacgctgtggggatgtcagagagccc

SEQ ID NO: 404565 - DNA, 80 bp, Homo sapiens
ttttactctgggagcccagaaacccgctgccgatgctgacctccaggtagagtggaacccccagctattagaggtcccac

SEQ ID NO: 404566 - DNA, 83 bp, Homo sapiens
cctcgcttggccgccagttcttctgcagccgaaggcggagttcaaagaaggacgcagagccagccacacagccccacaggtcc

SEQ ID NO: 404567 - DNA, 100 bp, Homo sapiens
gctggggtctagaagatgacgaagacatgacacttacaagatggacagggatgataattgggcctccaagaggagctgtgattggtatagacgatgagga

SEQ ID NO: 404568 - DNA, 97 bp, Homo sapiens
tgacctacgagacgccacagggcaaggcccgaggcttcttcaagaagggagatgtggtcattgtgctgaccggatggcgccctggctccggcttcac

SEQ ID NO: 404569 - DNA, 151 bp, Homo sapiens
tctcttggctcctgtcccgctggccctctgtctgcctgtgtccctgaccatggctccctgcagtaccctttaacggcaaaggaaggatgaactggagcagaggatgtcggccctgcaggagagcaggcgggagctgatggtccagctggaa

SEQ ID NO: 404570 - DNA, 102 bp, Homo sapiens
caccagtttctgatggagctgaagcaggaagccctcacctttgccaggaactggggggccgactatatcctggatgaaactgattccaagacagcctccccg

SEQ ID NO: 404571 - DNA, 75 bp, Homo sapiens
cgcagtggtcgcttcttctccttggtctctgcaatgaaatgtggcctcttgccaatctccccggaggcgctttcc

SEQ ID NO: 404572 - DNA, 87 bp, Homo sapiens
tctgcgaaatcatatggctgtagcattcgtgctatccctgggggttgcagctttgtataaggctatttttatgattcccacaaatcc

SEQ ID NO: 404573 - DNA, 100 bp, Homo sapiens
cggagcgctgaggcgggcgttttcttggatgaattgcttgctttggagcttcggaaccaaaaagaagcttcccagagccggggccaggagccccaagcgc

SEQ ID NO: 404574 - DNA, 74 bp, Homo sapiens
taacgagcctagtaatgactgggatatttactactgggccacagtgtgtgatccagtcttgggtgacaagtggg

SEQ ID NO: 404575 - DNA, 76 bp, Homo sapiens
ggctgacgtctccttgcgatggagcatatccggacgaccaagagtgacgtcagaatcaagttcgagcacaacgggg

SEQ ID NO: 404576 - DNA, 75 bp, Homo sapiens
gagaccgcggccgggaccgaggatcaatgtccgagttaccaccatggatgcagagctggagtttgcaatccagcc

SEQ ID NO: 404577 - DNA, 74 bp, Homo sapiens
aagaaggctgctattgaaagagagtatgcacagcttcacttaaaggacaagaagcgatttgaaaaagctaacca

SEQ ID NO: 404578 - DNA, 75 bp, Homo sapiens
ctcatcctctctggcaaatgcagttacagcccggagcccgaccagcggaggacttgggcaagacctgaagctcac

SEQ ID NO: 404579 - DNA, 90 bp, Homo sapiens
gatcacttgagccagggagttgaaggctgcagtgagccctgtttttgccaccacactccagcttgggccaagcatggggatcagcacgag

SEQ ID NO: 404580 - DNA, 87 bp, Homo sapiens
ggctgatggagagctgaacattactcttccagaagagttgcagatctgatctcttctgaacacctcatcgtgtctccatccctggga

SEQ ID NO: 404581 - DNA, 97 bp, Homo sapiens
agggacgcctccaaggaactgttcaggtctgccatcatggatgttctcgcagaagcaaatggcacctttgccttaaaccttttgaaaacgctgggta

SEQ ID NO: 404582 - DNA, 98 bp, Homo sapiens
catgtaattggaccaaggaagagttgctaaatgaattcagtgaagatcctgataacttaagtgactctctcttttccggtgatgaagaaaatgctggg

SEQ ID NO: 404583 - DNA, 75 bp, Homo sapiens
caagaagtcgtcaccccagacaacatgtgcatggggaggaccagtcgtggaaaaatgccagctgtgggacaagga

SEQ ID NO: 404584 - DNA, 50 bp, Homo sapiens
ggcgactgctgccctgactgtgatggtgctgtttcctctacttaccaagc

SEQ ID NO: 404585 - DNA, 96 bp, Homo sapiens
ccaggaggagcgcgcgggcacagggtgccgctgaccgggctcaaaatttgggcggggaactggactcactcagccttctcaacgcacgtctgctcg

SEQ ID NO: 404586 - DNA, 100 bp, Homo sapiens
atctgctgtcgcctgcagctgctcgcctgtctccgtcggaagggagcccaagctttgcagagcgcatttgtagccatgaagtgccatcttgcccaatatg

SEQ ID NO: 404587 - DNA, 75 bp, Homo sapiens
agcagccggcccttgttaactacaacagaccatctggtgtgatgaatgcagactctgctaccattttggctgttt

SEQ ID NO: 404588 - DNA, 141 bp, Homo sapiens
aggtcaagcagaacttcattgaccccctccagaacctgtgcgagaaagacctgaaggagatccaggatcaggagcgtctgggcaagcagctcaagttacgtgcagaaagggaagaaaaggagaagctgaaagaggaggcca

SEQ ID NO: 404589 - DNA, 100 bp, Homo sapiens
ttggaacaattatcaggtcattaggatgctgtcctacggaaggagagctgcatgatctgattgcagagtccaagtgtctacctggtagcttctttcctct

SEQ ID NO: 404590 - DNA, 50 bp, Homo sapiens
gatgaagaaacccagcttgatatgttggtttcagatcgggtggagcggcg

SEQ ID NO: 404591 - DNA, 74 bp, Homo sapiens
tcaagtctggacctgggacccactgcagataaaggctggtggtgggagaatgctatcgctgccctgtttcggag

SEQ ID NO: 404592 - DNA, 75 bp, Homo sapiens
tgcttgtcctggctggacgctactccggacgcaaagctgtcatcgtgaaggtccccttcccctgagcccatctac

SEQ ID NO: 404593 - DNA, 100 bp, Homo sapiens
gtcacaaagcctattctgaaatgttctttggggtgactttcaagatggactctactctaacagcaagtgaaatccggcagcgatttatagatttcttcaa

SEQ ID NO: 404594 - DNA, 100 bp, Homo sapiens
atgtgtcggtgaccatctcgcaggatgccggcaggatgaagcctgctgggagcgtgaatgacatggccctggatgccttcgacttggaccggatgaagca

SEQ ID NO: 404595 - DNA, 75 bp, Homo sapiens
gagcagcttgtggtgggagtagcagacaaagatctgttgaagagagaggcagcttccccccttgggtccaacaaa

SEQ ID NO: 404596 - DNA, 98 bp, Homo sapiens
gcgtataccaggcatccagccccgatgaggcaggtaaaaatcaaggtgaccccaagaaaatggctcctcctccaaaggaggtagaagaagatagtgaa

SEQ ID NO: 404597 - DNA, 82 bp, Homo sapiens
aggaaccaattccggacacataacaagcagcagtgaggacaccaaaggaagccacttggaggatgtgctttaccaaaatgag

SEQ ID NO: 404598 - DNA, 112 bp, Homo sapiens
cttgcactgtgcctgtatggtgtcagatgctgactgtgtggagttacttctggaaaaaggagccgaggtgatgagacaaaccatgcttctgccacatcaacacaggactttc

SEQ ID NO: 404599 - DNA, 100 bp, Homo sapiens
gtgccaatatccaggagtttgctggctgcaagaagatctttgggagcctggcatttctgccggagagctttgatgggttacatccactaccagcctgccc

SEQ ID NO: 404600 - DNA, 100 bp, Homo sapiens
caatgctcaagtgatggctggttttcaggaactcataaatgccacctcaacaattcagagttggaggacaacagcacacctgaaccaaaggaaaatgggg

SEQ ID NO: 404601 - DNA, 82 bp, Homo sapiens
ccagaatttcctgcgctgttccacctcattcaacttcaggctgaccccgcactacatctacccaccagccatcgtgcagccc

SEQ ID NO: 404602 - DNA, 90 bp, Homo sapiens
tgttgcagccatggtgcattgcagttgcgtgttgttcagaaaggacttcagggccacaggtgctgccaagatgctccagggcacctgctc

SEQ ID NO: 404603 - DNA, 75 bp, Homo sapiens
cgcaggacggcccagccccagcagtcaccaggagactaaagtccatcaaaaacatccagaaaattaccaagtcta

SEQ ID NO: 404604 - DNA, 80 bp, Homo sapiens
agaagaggcgttcgctgcgcgtgcacattccgaatgttgtaccatctttgggtaggcagacttccctgacgacatcagtg

SEQ ID NO: 404605 - DNA, 88 bp, Homo sapiens
ggcgcttggacgccaggaatcctctgaagcaggagactgccctatccagctagaagaaccacacctcttttggaatatattaaaaata

SEQ ID NO: 404606 - DNA, 50 bp, Homo sapiens
cctcctgagtagctgggataacaggttacccaggagatttcagatgaaac

SEQ ID NO: 404607 - DNA, 80 bp, Homo sapiens
ggcctgcctgggagcctgctccctgctcagctgcactgattcttgctattccaaatcctcttccacgttgacagcccttc

SEQ ID NO: 404608 - DNA, 83 bp, Homo sapiens
tcgcgggagtcgtagggaggacgccgggacacctggaagccgagaaatggcgttggaggttaagcagagagagagaggcgtgg

SEQ ID NO: 404609 - DNA, 90 bp, Homo sapiens
gtggaggaggtggcaggcctcggcggactccatctcccttgaggatgtggctgtgaacttcaccctggaggagtgggctttgctggatcc

SEQ ID NO: 404610 - DNA, 100 bp, Homo sapiens
tgtgtcaggcactgggaatacaaagacactgagattggtccctcctgttgaggaactcacaacctaggtttccatcgtgtgggaagaacggagtaacgag

SEQ ID NO: 404611 - DNA, 73 bp, Homo sapiens
agtttggcaacgagacgtggggcgtaacaaaggggtaaatcttcagcgaaaacaggcggcgaacttcacggcc

SEQ ID NO: 404612 - DNA, 100 bp, Homo sapiens
aaagaactggtttctacagggattatgacattccatttactcagataaagaaatgggggctcagagcagtcaagaacatgccccaagttattcgtcagtg

SEQ ID NO: 404613 - DNA, 78 bp, Homo sapiens
gtgcagctcttggcaggagtagctgatcaaaccaaggatgggggctttgaccacgacctttgaagagcttcattttga

SEQ ID NO: 404614 - DNA, 74 bp, Homo sapiens
gccaacgccgtggccagctccactgagagaaccccagagattccatcgtgcctggctcacataagcgcttcctg

SEQ ID NO: 404615 - DNA, 100 bp, Homo sapiens
gtggcgcctaaagtctgagagagggaagtcgcctctgtgctcattgtaaaccatggctgtgtggatacaagctcagcagctccaaggagaagcccttcat

SEQ ID NO: 404616 - DNA, 50 bp, Homo sapiens
ccgagaccgcggccgggaccgagggccttggacaagattcgctatgagag

SEQ ID NO: 404617 - DNA, 89 bp, Homo sapiens
gcccagagttgcagttaacaattttggagtgaagcactatgctggagagctgataccccaatgtccttctttgactttgtggttgatcc

SEQ ID NO: 404618 - DNA, 75 bp, Homo sapiens
gaggaaacttcagtggtcgtgcttctggtagatgaattgagagatgcagtgctgctactttttgcaaacaaacag

SEQ ID NO: 404619 - DNA, 75 bp, Homo sapiens
cgtgtctaatatacattaccacaccctcagtgacatttcatggctctgtggatagcaactggatcgtgggtgcca

SEQ ID NO: 404620 - DNA, 82 bp, Homo sapiens
ggcaacttacccgagaacgtgcgggaagagaagatcatcgagcatttcaaacggcaacgtcacacctcctgaggacagccag

SEQ ID NO: 404621 - DNA, 75 bp, Homo sapiens
ctgtgatgggccttcgcactcccagaccagtgtgcttttcttggagaaagaagaaaagaagaaagaaggaagaag

SEQ ID NO: 404622 - DNA, 83 bp, Homo sapiens
gaaaaaaccaacaccttcctgtgcagtcctgttggaatttatttacaaccctgaagaatctccctatccctattttgtccccc

SEQ ID NO: 404623 - DNA, 101 bp, Homo sapiens
cagaagagtgagagagagctattagagattgtgaagaagaatttcgatctccgccctggggtcattgtcagagaatgctgctcggtcctcctacccctctt

SEQ ID NO: 404624 - DNA, 75 bp, Homo sapiens
gtcaggccgatccgctccgctcacggagtctcgctctcagtcaaaatctccaacgggaactcctgctcgtgtaaa

SEQ ID NO: 404625 - DNA, 101 bp, Homo sapiens
caggaactattccagctttctcagtatctacaggaaatttagaacgtccaacaccaaagtacacaaaagtaggggagcgtttacggcatgtcattcctgga

SEQ ID NO: 404626 - DNA, 98 bp, Homo sapiens
gagctagccgggagttacaccgccaccgccagctcgcaaaggatctccttcatccctctccagaagaggagaagaggaaacacaagaagaaacgcctg

SEQ ID NO: 404627 - DNA, 98 bp, Homo sapiens
cagcaggagcctggagcgcgagtacagctgcaccgtgcggctgctggacgacagcgagtacacctgcaccatccaggaccagtcctgcctctgttgta

SEQ ID NO: 404628 - DNA, 80 bp, Homo sapiens
atcctgccgtccttctccactttcgccagcccgtgccgcgagcgcggcctgcaggaggctcctctgctgaacagcccctg

SEQ ID NO: 404629 - DNA, 100 bp, Homo sapiens
tgagccgggacacgattaacaggtggtccgcaggcctgaccagcaggaaatgggtcctgatgaatatgaagagatggaagaagaggaggaggaggaagag

SEQ ID NO: 404630 - DNA, 100 bp, Homo sapiens
ctgctcacaatttatatggccaacttgtttatgggaaaaacagatggagactattacaccctggatgacatgtttgtctccaaagcagctgagagagaac

SEQ ID NO: 404631 - DNA, 82 bp, Homo sapiens
gggaaccctggtcaccgtctcctcaggcaagtgaaccggagcaaacgacttccgatccagtctgcgctgttgcggctcccgt

SEQ ID NO: 404632 - DNA, 100 bp, Homo sapiens
aataaaagagacctctacttagctcagcaattcttaccttgccccttcacagatgtagtcactacaaatcttaaattgcgaaatccatcggatagaaaag

SEQ ID NO: 404633 - DNA, 96 bp, Homo sapiens
accattcagatgggatctttccggatcaatccagatggcagccagtcagtggtggagctcgccctcccctacctgcggaagagtcaagggaatgtc

SEQ ID NO: 404634 - DNA, 100 bp, Homo sapiens
agttgctctgtgtgctgagcgttctaaaggaaggcgtccgttggccttcgtacccgtcttgattgagagtttatgtggccgaggcagacaagtggaatta

SEQ ID NO: 404635 - DNA, 75 bp, Homo sapiens
cggatcgaccggagcagagagctggcgagcaagggctttgttcgcgggggtcacagctctcatggctgcagctag

SEQ ID NO: 404636 - DNA, 100 bp, Homo sapiens
tcccccgggccggtgggcgaaggacacccgcaggaactcggcagaggagaaattcagacggctcccgagggaggaattttgttgtcagagaataaaagga

SEQ ID NO: 404637 - DNA, 75 bp, Homo sapiens
cagcaaatgctgaggactcagaccagtctctgcaagacacaagctccgggtggataaggcagctgctgcagcagc

SEQ ID NO: 404638 - DNA, 100 bp, Homo sapiens
gatactgattcagcacttagtgaagttcctcaattgaagcaagagatttctgaatgctatttcaagaagcccctgaatatctactttggatttattcctg

SEQ ID NO: 404639 - DNA, 137 bp, Homo sapiens
ctgcttccaggctgcaaacctgacagcatggggctgtactgaataccgcagaccattgtaattcatggaaacatggtagaatggtgcttacctcaagatattgaccttgaaggtgttgagttcaagtctatggccag

SEQ ID NO: 404640 - DNA, 82 bp, Homo sapiens
tggcagccccgctctctgcagcaacaagattgacctggctgaaaggagagaggtttcccagcagcgagctgaagaattctca

SEQ ID NO: 404641 - DNA, 50 bp, Homo sapiens
aacagcttctccgggtctcagcatggttgtctgcattcaaaagagcattc

SEQ ID NO: 404642 - DNA, 100 bp, Homo sapiens
atgggagataccatgtcctgtttctcggaacaggtgggtttggaggatttgggacaacatctacaactgcaggttctgcattcagcttttctgccccaac

SEQ ID NO: 404643 - DNA, 101 bp, Homo sapiens
ggagcttcgcgacggcagcggcaagaaggttcacattggagtgaaaggatttgttaaagattccataacaggatctgggttagagaatgcaaccatctcag

SEQ ID NO: 404644 - DNA, 74 bp, Homo sapiens
gcagctccactgccgtcaactcctgttctcctcagagcctgatcactaaggaggaagagcgagagaagaagttt

SEQ ID NO: 404645 - DNA, 83 bp, Homo sapiens
gatggtgctggccacttgcttgggatcctttatcctggtcatcttctatttccaaagtcagaagacatgtcttcatctacatg

SEQ ID NO: 404646 - DNA, 100 bp, Homo sapiens
agtgggctttgactgcccagcatgcagtctccattcttagttaaacacagtgggaatatcacttttgatgagattgtcaacattgctcgacagatgcggc

SEQ ID NO: 404647 - DNA, 83 bp, Homo sapiens
gaaatacatttgtacacgatcccaagaatagcctaacatggcagaccagagacagcgctcactgtctacctctggggagtcat

SEQ ID NO: 404648 - DNA, 98 bp, Homo sapiens
gtacagttacctccgtgtgtcacaggaagactcttgtgatactatcaaccaaagcaccctgccctcacagcagaaccgtttcccagactaccttgaag

SEQ ID NO: 404649 - DNA, 89 bp, Homo sapiens
cactacctttgtgagcagtgtgacccaaggcctgtggacaggttccaagatgagatgggattctccaacatggaagatgatggcccaga

SEQ ID NO: 404650 - DNA, 82 bp, Homo sapiens
aggaggcggtggccctgctggaggagctctggaagtccattggaatattaagcccaggagttgctttggggatggctggaag

SEQ ID NO: 404651 - DNA, 100 bp, Homo sapiens
tgtagagaggaccccggtacatctgaaagccgggaaatgccctgccaaggtaaccctgctggggtcagttatcttcacattccagcacacccagcatctg

SEQ ID NO: 404652 - DNA, 74 bp, Homo sapiens
gccgccatcagcttcacaggggccttgaaaattccagtgtcggcacatctgaagcttcaggagaaggatgaagg

SEQ ID NO: 404653 - DNA, 83 bp, Homo sapiens
gaagaaaccagccgaacttcagggtttccaccgttcgttcaaggaaattgagaggctgactgagcgactagaagaaaaagaga

SEQ ID NO: 404654 - DNA, 75 bp, Homo sapiens
gaagtttctaggaaaggccggacaccaggtcgctgatcagggccaggcggctgcagcagcgactgcagaggcgct

SEQ ID NO: 404655 - DNA, 51 bp, Homo sapiens
caccactctgaatgcactgaacacaactagacgcttgaagcaaagctgcca

SEQ ID NO: 404656 - DNA, 100 bp, Homo sapiens
tgcaaagagttatggatattctggtggggagatgaacccaacctagtgggtgtaatacatcatgaactgcaggtctggttgaaactgaaaagaatcttga

SEQ ID NO: 404657 - DNA, 91 bp, Homo sapiens
accacagacatgactgagtcctccatgaagaggagtgcatccgccccaacccttttccccctcgtctcctgtgagaattccccgtcggata

SEQ ID NO: 404658 - DNA, 75 bp, Homo sapiens
aagaggaggaaggagggacttcttggcttctcccagcatagccccagaggttgacggatatattcagacgttacg

SEQ ID NO: 404659 - DNA, 75 bp, Homo sapiens
gggcaagaacgtgctgatcaacaaggacatccgttgcaaggtgacaggccgctgcggctctgtgctggtacgcct

SEQ ID NO: 404660 - DNA, 76 bp, Homo sapiens
aacgaccgtggccacagtaccacaaagtctctggaattgaatgatctggcacgggaccctccagcacagtgttcag

SEQ ID NO: 404661 - DNA, 50 bp, Homo sapiens
gttgccctgagttacataaataggatttttagactctgaggagcagttgg

SEQ ID NO: 404662 - DNA, 97 bp, Homo sapiens
gcaggcctcctcctcttcatcagcctgcaggaccctacggagctcgccccccagcaggtgccagcttcgtggtggatcctgaacaactagatgttcc

SEQ ID NO: 404663 - DNA, 100 bp, Homo sapiens
atgactacctgaaccgcatcttttcctcttctgaacatgcacccccagcagccaccagcagcatacacaagctgagggagaatgtctttcaagagcatca

SEQ ID NO: 404664 - DNA, 82 bp, Homo sapiens
tgcggagccgcagccgcccagaccgcgcagcgcgggaggcaggttccgcacgtaaccctccactgagtgaagaaatgttgcc

SEQ ID NO: 404665 - DNA, 90 bp, Homo sapiens
cgccggggtcgcgggccgggcctgcaggagccgggccgccgaggtcgggtaagactttgaccccgacgcaggcttcagtgattgccgcgg

SEQ ID NO: 404666 - DNA, 100 bp, Homo sapiens
gatttcaaaccttcagaaatagaagttggagtagtgacagttgaaaatcctaaattcagaggcttcgtgacggagttatcagagacattgagaggcaaat

SEQ ID NO: 404667 - DNA, 90 bp, Homo sapiens
ccgccgggttgctgtgcgactattctccgggagccgtccgtgtcaccgccggaacctggcgcagccctgaaggatggctgccatattggg

SEQ ID NO: 404668 - DNA, 100 bp, Homo sapiens
tgacccagtttccacttcccaagaaccttctggccaaggtgattcagattgcaacgtcatcctccacagctaaggtcaaggccttcttggctgatccatc

SEQ ID NO: 404669 - DNA, 100 bp, Homo sapiens
atggcctctcgtcggcagtgaagctcaagttgctactcgggacgctgcacctcccgcgccgcacggtggacgagtgcacgtgccggaaggacatggtcaa

SEQ ID NO: 404670 - DNA, 100 bp, Homo sapiens
tcgcagtgagtgttacagctcttaaggaaactactttgcttcgcactttttcatgggaggagagaaattcgacaccccccaccctgaaggttacctcttt

SEQ ID NO: 404671 - DNA, 90 bp, Homo sapiens
ggtcgttgtggtgcgctgtcttcccgcttgcgtcagggacctgcccgactcagtgataccccagaatcttccatgctccgtcacactgca

SEQ ID NO: 404672 - DNA, 51 bp, Homo sapiens
cttggctgttaatttctcagagatgaggagactgtccttcctgtttcgcag

SEQ ID NO: 404673 - DNA, 100 bp, Homo sapiens
atcaataatgaaatgctgactaaggaacaaggtgatgtaataggaataccatttaatgtggatattaatactgaggaacacgtggatgcagctgatcagg

SEQ ID NO: 404674 - DNA, 51 bp, Homo sapiens
caggaggccaggggtgtcgccatgtgtgagtgcatctccatccatgtgggc

SEQ ID NO: 404675 - DNA, 78 bp, Homo sapiens
tgaaagtggaggctgcgaaaatagtttgctaatccagactttacacaacctatctcagaagttgtagatgaagtaatt

SEQ ID NO: 404676 - DNA, 82 bp, Homo sapiens
attcatttagagctgcggaacaggacgccctctgatccattcaaactcctccccacgacactctgaagcagcgacggcacag

SEQ ID NO: 404677 - DNA, 75 bp, Homo sapiens
tgctgtttttgcagctgtatcaatgatgttctgcaggctgggaagcccaaggtcgaggggctgcctttggtgact

SEQ ID NO: 404678 - DNA, 82 bp, Homo sapiens
tccatgagagcattgttatggacttatgtcagagctgttgcgcagccattggtacctgtattggggaaacatagcatacaag

SEQ ID NO: 404679 - DNA, 100 bp, Homo sapiens
tggccaggcttctggggctgactcaactgctttgtctcctcagcactctgctgtcactcaaggaagtatcatcaagaacaaggagggcatggatgctaag

SEQ ID NO: 404680 - DNA, 75 bp, Homo sapiens
aggatattttgattggaaggactgcctgcctccaacaggctatgtggttgatgttgcagaatgatgagccggagg

SEQ ID NO: 404681 - DNA, 49 bp, Homo sapiens
gccgcacctccgtagctgactcggacccccgcagcaaacacaagtttaa

SEQ ID NO: 404682 - DNA, 90 bp, Homo sapiens
gggccacggagaggagcagcccccggagacagcggcacagaggtgcttctgccagtactatccttttctgggggatcctaggcagaagcg

SEQ ID NO: 404683 - DNA, 83 bp, Homo sapiens
ggaagctgaaaccaactcagaatgcttctgagaaggcccagtttgacctggcctttgtcgtccgctacaagcctgatgagcag

SEQ ID NO: 404684 - DNA, 98 bp, Homo sapiens
aaaagttcaaatgaaggccaagagaaccaagctctggttgaagaagtgtattttgcgcagaaggaacgtgatgaagctgttatgtctagactgcaatt

SEQ ID NO: 404685 - DNA, 96 bp, Homo sapiens
atcaaatggcacttcattggccacctacagaaacaaaatgtcaacaaattgatgggtcctgcctcccagcttgatggtggccggcgtgtactgcct

SEQ ID NO: 404686 - DNA, 75 bp, Homo sapiens
ggagaattcatggggtgaagaccatggccacaaaggaagatcccagtgtctgagtgaactaacagtcctgctttc

SEQ ID NO: 404687 - DNA, 100 bp, Homo sapiens
gaaattgcagaagcctaccttgggaaggacagagcgggatgccaccagcttgtccaaagggaagttccaggagctcctggtgggcatcgttgtggagaat

SEQ ID NO: 404688 - DNA, 98 bp, Homo sapiens
ggatccgagcgttctgcacaccgaggaaatgcgcttcctgagggagtgggtggagagctgtcaccactgactaaagaagagaaaactgcggcagagca

SEQ ID NO: 404689 - DNA, 82 bp, Homo sapiens
ctcagacctgccaatttaccagagataattgataacaccctgtaacagctgaactaatagggatgccaaaggaaaaatatga

SEQ ID NO: 404690 - DNA, 100 bp, Homo sapiens
cggcggtgccgctcctgctgctgctgtgttttggcccagcagccaccacagcgcctgcttcctcggccctgaaatcatgcccctaggtctcctgtggctg

SEQ ID NO: 404691 - DNA, 75 bp, Homo sapiens
cgtgtgcaggccgcgcgcctgctggagcagatcctggtggctgagaaccgtcattgagaaggtcaaaacgaaatt

SEQ ID NO: 404692 - DNA, 97 bp, Homo sapiens
cggggtgtgccggggggaaaggggcagcatgatggtctgagatgtggagtgatgcttcggggctcaggcatccagtgggacctgcggaagacccagc

SEQ ID NO: 404693 - DNA, 100 bp, Homo sapiens
cttccgggagggcggctcgcaggttgataaggattttattcctggactcatgtacatccgagacaatgaagccacctcagaggagtttgaagccatgagc

SEQ ID NO: 404694 - DNA, 50 bp, Homo sapiens
ctcgactttattattaatacgggaaattcaactactgaggaggttacggc

SEQ ID NO: 404695 - DNA, 100 bp, Homo sapiens
aagcccaccgactttgaggatctggaggacggagaggacctgttcaccagcactgtctccaccctagaggtttttgactaaaggccagaatgcattggta

SEQ ID NO: 404696 - DNA, 100 bp, Homo sapiens
caaggatggagatcctaggaaaggaagcacaagcctatgcagacgacaacagtttgctgttcatggagacatcagcaaagactgcaatgaacgtgaacga

SEQ ID NO: 404697 - DNA, 83 bp, Homo sapiens
cgcagctgcagccgcctgaccacggcgactggacttacgaggagcagtttaagcaggtttggtgcacctcgatttggaggaag

SEQ ID NO: 404698 - DNA, 136 bp, Homo sapiens
cacctcgacctctggttctacttcacactgcagaactgggttctggactttgggcgtcccattgccatgattatggattggatatgtctacttctggatgcaaattttactgttgttgtaatgatgccagaagcaa

SEQ ID NO: 404699 - DNA, 51 bp, Homo sapiens
aacagtttacctcttatctaacagaagctaaaccagccccagaaatatttg

SEQ ID NO: 404700 - DNA, 80 bp, Homo sapiens
cttggactgagtcctgcaggacacagacagcttatctcctgtgctgcacccttctgatttgatcctgactcgaggaacct

SEQ ID NO: 404701 - DNA, 100 bp, Homo sapiens
cgagcgcgccttcggcattggccgccgcgatgtcagctcagtgctgtgcgggccagcagaagatggctgtgccacccacgtatgccgatcttggcaaatc

SEQ ID NO: 404702 - DNA, 100 bp, Homo sapiens
ctttagaggccatgaaagtattatttatagcacaatctggtctccccacatccctggttgttttgcttcagcctcaggcatgaacaaccgggaggtgctg

SEQ ID NO: 404703 - DNA, 98 bp, Homo sapiens
cctttgcggttccaacatggcggagctgacggtggaggttcgcggctctaacggggctttctacaagtatgccgagattttgctgtcctggaggacca

SEQ ID NO: 404704 - DNA, 74 bp, Homo sapiens
gtcagggacagccgtggagagaccagggaccaggctcacggaatttgaagacacccccaccagtcagttgacca

SEQ ID NO: 404705 - DNA, 74 bp, Homo sapiens
ggaccagctcatgggcacggctcgggacgcaaacggggattcagcgtccgatcctttggaacagggactcacgt

SEQ ID NO: 404706 - DNA, 101 bp, Homo sapiens
gcaggcgccgagcggccgaggcgccgcggtcggctctgggactcgtctggcgtccctcagttgttggaattggaagcggaacaaaaatgttgaccagtatg

SEQ ID NO: 404707 - DNA, 98 bp, Homo sapiens
tggcgacgtctacactgagtcggaggcgaagatgaaggtcaccgtgtccaaagggggcgaccgggacagtgacgacgacagcgtcctcgaagccacca

SEQ ID NO: 404708 - DNA, 100 bp, Homo sapiens
gttgctatggtgacagactatggggcctttatcaaaatcccaggctgtcggaagcaaggattggccatttgatgatggagctccaccccctaatcagata

SEQ ID NO: 404709 - DNA, 95 bp, Homo sapiens
aaactgtccgagaagcccaaagtaaatatttccaactacagtctggtgatggagtctgacgcaggaaccttcttacccactgggctgcaattcac

SEQ ID NO: 404710 - DNA, 121 bp, Homo sapiens
actgaaatctcagaagggagttttttattcacgccatcgctgcagctcttttgagacatttgggaaatgatgaagtgcacattgtttggtcagagcatactagagactacaggagaggaat

SEQ ID NO: 404711 - DNA, 90 bp, Homo sapiens
tgcttcccattgctgcaggtgaagaagaacgctggcagctgcagagactgcttatgatatggtgtctcctggtaccctttctatcgagcc

SEQ ID NO: 404712 - DNA, 100 bp, Homo sapiens
tgcggccaactccaatgggcctttccagcccgtggtccttctccatattcgaggtatctgaaaactgaagagtggagaatatgttcagcagggaacaaga

SEQ ID NO: 404713 - DNA, 100 bp, Homo sapiens
agtgacggaatgcctccatacattatcaccttttgccatgatagcatttctttcattggacagttccttacaagggctccactcagtgtctgtctgtatt

SEQ ID NO: 404714 - DNA, 100 bp, Homo sapiens
ggcaaagtggcacagaaagatttccactccatttcttggaagagccagcaatacatctctctaatggtcttaaagaaagtgcagaagagatggtcaaaaa

SEQ ID NO: 404715 - DNA, 100 bp, Homo sapiens
cctcaggaacgtgtcccggggccgacccggcccgtagtgtggaagcagcttcagactgtgccctgtccacggtgcctcctgcatgtcctgctgccctgag

SEQ ID NO: 404716 - DNA, 100 bp, Homo sapiens
ccagaactacgccaaggaggtggcaggggtaactgctggttccttgcagctgccgcctcccttactctgtatccccggctcctgcgccgggtggtccctc

SEQ ID NO: 404717 - DNA, 75 bp, Homo sapiens
gaaaagtcaaccaaatcagagggaaaacatgaaggtgtctatagagaactgcccttgaagaaagctgttaggatg

SEQ ID NO: 404718 - DNA, 75 bp, Homo sapiens
ggttgaccagttcctggaagacgtgcggctacaggagcgcacgagcggcttccacagcgcggcacctgtacctcc

SEQ ID NO: 404719 - DNA, 100 bp, Homo sapiens
aaaggagttcgagcagatcgacaagtccgggagctgggcggccatttaccagtggatggctgtattcatagagcagccggcccctgtttgctagctgaat

SEQ ID NO: 404720 - DNA, 80 bp, Homo sapiens
gagactagacctcgtaattacattctctcggccagcgcctccgcgagatgttcgacaagcagcaggcgaacaccatcttc

SEQ ID NO: 404721 - DNA, 88 bp, Homo sapiens
gagaatgaatacgggtccatcaatcacacgtaccacctggatgttgtggctccacctgaagaagattgtacatcagtcacagacctgc

SEQ ID NO: 404722 - DNA, 83 bp, Homo sapiens
aactcaactggtgtcgagaagtccggaagcttgtggcgctgaaaacgaacgccatcactggtgcaagctatatttaacggaga

SEQ ID NO: 404723 - DNA, 60 bp, Homo sapiens
aaaaacaagtgcaaaggccctttatgccctattacttatgcctgggaaggtggaaaattg

SEQ ID NO: 404724 - DNA, 87 bp, Homo sapiens
cagttgctcagctacttctctacccttgacatccagcctgggttactaggtgtctttcagaagctgattgcatccaaagcaaatgac

SEQ ID NO: 404725 - DNA, 75 bp, Homo sapiens
acaaatctgttcttggtcctgaagattttatggatgaagaggccctggccaacgtcaacattgggagcctcatct

SEQ ID NO: 404726 - DNA, 74 bp, Homo sapiens
ttctatgtcgttgatcaaggggaagtggattacggcaagaagaagctgaaatacctgccctacaatcaccagca

SEQ ID NO: 404727 - DNA, 74 bp, Homo sapiens
atcacttaaaggagtggacattgctagcaatgagctcccaaagccatccagtgtcgtgtgggagccaatgggag

SEQ ID NO: 404728 - DNA, 83 bp, Homo sapiens
catgaggcgccagcctgcgaaggtggcggcgctgctgctcgggctgctcttggaggtgaaatgacaatggatgctctgttggc

SEQ ID NO: 404729 - DNA, 74 bp, Homo sapiens
cttgtgggagcaaaaccaacgcctggctcggagcagcagcctctgaggtccctgtgcgttttattgcgacctgc

SEQ ID NO: 404730 - DNA, 102 bp, Homo sapiens
ttccaatcattactttctcctctgtgtcaatctgcctcttcgagaaattcatactcctgctcctccacccccaccacctgtgatccgaaatggtgccaggga

SEQ ID NO: 404731 - DNA, 100 bp, Homo sapiens
taagaccatgttccggattccctggaaacatgcaggcaagcaggacttccgggaggaccaggatgctgccttcttcaagtagagacggggtttcaccatg

SEQ ID NO: 404732 - DNA, 75 bp, Homo sapiens
cttgacacttatatcctccctgggaggtgtttgacaagcgagcagccaccaaattgaaagagcagctgcacggct

SEQ ID NO: 404733 - DNA, 75 bp, Homo sapiens
tgttggcctcctctatcgtctactgacagagattcttctgctgatcgacattgagcagtcctacatcaacacgaa

SEQ ID NO: 404734 - DNA, 74 bp, Homo sapiens
gcgcttctcctctcggggtcccatgtgccgccggctctcggacgttcaaggagcagggacaagttacaggaatg

SEQ ID NO: 404735 - DNA, 75 bp, Homo sapiens
ctttcaggcagcaacatggcaagacggtggtgggccaaatcactgtggacatgctgctacaggagctgagagacc

SEQ ID NO: 404736 - DNA, 97 bp, Homo sapiens
ccccatcattgggagaaatccccactcctccaagaaccaacccccaaattggctgggacagtggcttttcatggcctgccactgaaaatcaagaaag

SEQ ID NO: 404737 - DNA, 110 bp, Homo sapiens
gttcatgaggaagttcaagatcgggtacagcaacaacggctcggactggaagatgatcatggatgacagcaaacgcaaggcgaagaggatgctgtttaatcatattggag

SEQ ID NO: 404738 - DNA, 89 bp, Homo sapiens
ggagaaggactgttgggagaatttaggatcttgttgaatccagtccaggaaatggaagttccagtattaccgaaaatctctctaccgat

SEQ ID NO: 404739 - DNA, 82 bp, Homo sapiens
tccatctttcagcagttggcacacatggttaaggaacaggaggaaaccattcagaggtaatctgtaagtcagatgctccaac

SEQ ID NO: 404740 - DNA, 100 bp, Homo sapiens
cacggagacaggtacccactgtatgtcattcccaaaacaaagcgaccagaaattgactgcactctggtggctaacagggtactttgaatccctattgtgt

SEQ ID NO: 404741 - DNA, 75 bp, Homo sapiens
cagaaaggtgctaaagcaacccctgcttgctgtccaactaagtgagctagagccggtgcaggccacgcagaacaa

SEQ ID NO: 404742 - DNA, 90 bp, Homo sapiens
ttggggtccccaacaaacccctgcagtgtttgggtggacccgaactccccggtgctcttggaggacccagtcctttgtgccttggcaaaa

SEQ ID NO: 404743 - DNA, 83 bp, Homo sapiens
caaacgcagagacaaaagaaacgggccccgactggcaccagtttgtagaaaataatttaatactaaagatgggcccagtggat

SEQ ID NO: 404744 - DNA, 75 bp, Homo sapiens
cctaaaatgtcgagatttgtacaaggttgttattgatgccttcagattgatcaatgctaatatgatggtcttagg

SEQ ID NO: 404745 - DNA, 85 bp, Homo sapiens
gagaaggccgccgggcccgggcatggtggtctggggcaacgcggaagttggaggcatctatactgtgattcagacaaaggccaaa

SEQ ID NO: 404746 - DNA, 96 bp, Homo sapiens
gactttgtaggctccgccaagaggcgccgcaggaggacctgaaggagaagaaggagaaggtggaggagaaggcaagccggaaagagcgaaagaaag

SEQ ID NO: 404747 - DNA, 100 bp, Homo sapiens
tgacatcacagatggcaaccccaagttgaccctgggtctgatctggaccattattttgcatttccagggaaatgctccaaggctggaattttctacgact

SEQ ID NO: 404748 - DNA, 101 bp, Homo sapiens
ggaagccgactgctgcctggtctgcaaagaagtcctttcaagtctctaggactggactcttcctaagcaagtccgccctacccggaacagcaatagctccc

SEQ ID NO: 404749 - DNA, 98 bp, Homo sapiens
gtgggctggatgctggagcacacggaggccgtgatgaagtggaatgcagtagccctctgggcctgggatattgtggttgataactgtgccatctgcag

SEQ ID NO: 404750 - DNA, 74 bp, Homo sapiens
atcgcgatcctgggctaccggtctgtgggtgaccattgtgaggtagatattttgttctaattttccagatgagg

SEQ ID NO: 404751 - DNA, 119 bp, Homo sapiens
cggccgtgggcccgggcggcgggcggagacgtgggcgccctccccgccaaggcccgtgcgagaaagcctcacattgtgcagtggagaagctgagagaagaggaaaagaggagtggccag

SEQ ID NO: 404752 - DNA, 98 bp, Homo sapiens
ggaggagcagcaggcctccgggcccggcgccgccgcccgcaggacttgctacattttcccacaaaggagcaatttgatgaggctgaaccagccactct

SEQ ID NO: 404753 - DNA, 98 bp, Homo sapiens
ggatcctccattggataccatacctcagtctccagccctacccctctggttccagacctttccaaagtgaaactgatgagatttgatgatccactgtt

SEQ ID NO: 404754 - DNA, 51 bp, Homo sapiens
agatttgcagatggctctgctgtagtacagactgaaactgttgaggagccc

SEQ ID NO: 404755 - DNA, 96 bp, Homo sapiens
ccaaacccctagccacgacatggaagaatttttgcaacgcgccaaatctaaactgaaaacatagctctgctggcagaaacagctctgagattcctg

SEQ ID NO: 404756 - DNA, 75 bp, Homo sapiens
gtgacgtcaccccgctgtgacgcgcacgctgtaggaaaactggaagaggcgtcctgccaaggcctggtcaggcag

SEQ ID NO: 404757 - DNA, 100 bp, Homo sapiens
catctcctcggcccctggctcctgctcctgggtttactcctggcttgggggcattaggaagcactggaggctcttcgggaactaatggatctaacgccac

SEQ ID NO: 404758 - DNA, 75 bp, Homo sapiens
gggaggtcaagagttggagcagacggtcagttctgggtctcttgcctgctgtgtactgcttttactgccagaaat

SEQ ID NO: 404759 - DNA, 74 bp, Homo sapiens
aacgacgttccatctgtggaaggacctaccaaccagaaaataagacctactcatctgtgagaacagaagcttta

SEQ ID NO: 404760 - DNA, 83 bp, Homo sapiens
ggacgtgttctccactgatgacctcaccggatttttacaggtggccatggtggaggtgcagctggagagtgaccacgagtacc

SEQ ID NO: 404761 - DNA, 100 bp, Homo sapiens
agccagagggagttgagccgcggcgtgtgcgccgagcgctactcgcaggaggtcttcggttgaaggtcgaggagctggaaggcgagcggagtcggctgga

SEQ ID NO: 404762 - DNA, 100 bp, Homo sapiens
cgtctgctggccatcgtggcagacctctacgagcaggagcagtacaggagagtagttatcttgatggaattagaagttttgaagtcagctgaagcagttg

SEQ ID NO: 404763 - DNA, 83 bp, Homo sapiens
cctgccgtctgctcttctgcctcttgatctccgccaccgtcttcaggccagcagaaaaatatggctcaggagactaaccagac

SEQ ID NO: 404764 - DNA, 75 bp, Homo sapiens
tttcccttcctccatatttactggacagagtgctgttataacgcagacaaggccatcgtggacagtggcaccacg

SEQ ID NO: 404765 - DNA, 100 bp, Homo sapiens
cagaagtcgcgtgtctaggtgagtcgcggtgggtcctcgcttgcagttcagcgaccacggaggctactcacagtcgaactacaactccccggggtccggc

SEQ ID NO: 404766 - DNA, 101 bp, Homo sapiens
atatccttctcaaccttgtgggatgtgaaaactctgttactgaaggctgctttgtaccgcctcagtggagactggaatcccttacacattgatcctaactt

SEQ ID NO: 404767 - DNA, 129 bp, Homo sapiens
cagtcagattgctcaggaccatcagaagaaggagacagttgtgaaagaggatgaaggaaggagagagagtattagaattcctcctgatcagcagagactgatctttgctggcaagcagctggaagatgg

SEQ ID NO: 404768 - DNA, 80 bp, Homo sapiens
caccatgtcagacgcagccgtagacaccagctccgaaatcaccaccaaggtggacgacatccttggagaaggcagcgacg

SEQ ID NO: 404769 - DNA, 101 bp, Homo sapiens
cagaaggcctctctcctgatacagcaggcgctcaccatgttccctggagttgaatggcggtggggacgtagcaatgcttgaacttacaggacagaatttca

SEQ ID NO: 404770 - DNA, 60 bp, Homo sapiens
ggaaccatcaaccagcaggccatggaccaacttcaatctccatccagttcctggtgtaca

SEQ ID NO: 404771 - DNA, 75 bp, Homo sapiens
gaggccccctcttcgcctcctccaggtgatttgatgaaggctgctgcaggagagttcgcagatgatccctgctct

SEQ ID NO: 404772 - DNA, 98 bp, Homo sapiens
agacaacagtgatgaggaaagctgtgaaagttctcaagcaccatatgaaggcggagtatggaaagttagagtggacctacctgataaataccctttca

SEQ ID NO: 404773 - DNA, 100 bp, Homo sapiens
cagtgatcagtcagtcaactttggttttagtaagagtgaatttgatggagatttacaatcccaacttctgagtaaagccaatgaagaagataaaaactgt

SEQ ID NO: 404774 - DNA, 98 bp, Homo sapiens
agtcatcgtcacgagtcctgagtcggttaagtttgagaaggccggtgatacagtgtcagagaaaaagaatcctccaaggttcaccctgaagaagctgg

SEQ ID NO: 404775 - DNA, 74 bp, Homo sapiens
cagaagtccagagctgaggactgcctgtttgcagcttctttatgaaaaaggcatcagcctcagggcctccttca

SEQ ID NO: 404776 - DNA, 100 bp, Homo sapiens
atgggacccggttttacacttttcaagagtatgctgctgctgttccgctttgcgtcctcgctacaaacgcctggtggacaacatattccctgaagatcca

SEQ ID NO: 404777 - DNA, 100 bp, Homo sapiens
ctttggaagatgcagatgagaaggttcagttggcaaaccagatatatgacttggattttcctaagcccagtgaagagaagattaagttaattctcaatca

SEQ ID NO: 404778 - DNA, 100 bp, Homo sapiens
cctcagacagatcgccggggaggcagcgcgggatcccagcctcaggcgtgcgcggacggtgtgcggtatggcatgcagctgtaccagaattatatgcatc

SEQ ID NO: 404779 - DNA, 101 bp, Homo sapiens
ctttctcgagaagcaggtggaaacatgagcattcagtttcttggtacagtgcctagtgtgttaattgtaacctacaaggagcctgcaaaatcatctactca

SEQ ID NO: 404780 - DNA, 74 bp, Homo sapiens
tacactatcctgaagaacatgactgaagcagagaagggttctgtagctatagctggtgctgttattcgctggct

SEQ ID NO: 404781 - DNA, 82 bp, Homo sapiens
caggtggataaggaacatctcttcccagcggctcagataacgaaggaggcccaacttcattcaataaggagcctgacggatt

SEQ ID NO: 404782 - DNA, 90 bp, Homo sapiens
cggaagcggagagcaacagcgcgccggcaccatactggacataccttttatgtgcactgggactttttatttaccagtcactggatgcta

SEQ ID NO: 404783 - DNA, 106 bp, Homo sapiens
gagcagcgccagcggccgagcgggcggcttcctggcctgggcgctccggtggcggcggaggttcgtgctggccgtgggcagcgccgtctttgatgccatgttcaac

SEQ ID NO: 404784 - DNA, 82 bp, Homo sapiens
aatggaggtggatggaacatagaacaaccttccattctaaaccaaaggttgggcccatgagatgtgtgctctgtatattccg

SEQ ID NO: 404785 - DNA, 75 bp, Homo sapiens
gtgtgaatttgtgacagctgcagttgctccccgcccccgagcagccgagtttctccttggaccaagatgactgat

SEQ ID NO: 404786 - DNA, 100 bp, Homo sapiens
attcaacatgattgcatttgaagtgagaagccttataagtgctcatgggagggatgtgagtggcgttttgcacgaagcgatgagctcacgaggcactaca

SEQ ID NO: 404787 - DNA, 100 bp, Homo sapiens
ggaaaatgcaagaagactgatggagcaggcttgcaatattaaagtgagagaacgccgagccgtcgccgcagcctccgccgccgagaagcccttgttcccg

SEQ ID NO: 404788 - DNA, 100 bp, Homo sapiens
gctcagagtctcaatgaacttgacctgatggccaaaagaaaggaagaaaatttttcctctcctaaaaatgccaaaaggccaagacaagaagaattggagg

SEQ ID NO: 404789 - DNA, 96 bp, Homo sapiens
tgagcctggaacaggtcaagaagcttaaggagagatggggctccaacgatgtgtcttgctgaatcagggctctcttatccctgccatcgacttaca

SEQ ID NO: 404790 - DNA, 78 bp, Homo sapiens
gcagaatacagagatatggaatcagcgagtaaccagctcataaatcacatcgaacagtttttggatactaatgaaaca

SEQ ID NO: 404791 - DNA, 83 bp, Homo sapiens
cccgggtggcttacagacgctgccagcatcgccgccgccaggtaactaggatttctacctcaaccgcgagacctatgcaagga

SEQ ID NO: 404792 - DNA, 100 bp, Homo sapiens
ctaccttcttctgatccagacagtgggcactggcctggggggcaactgcacaggctgtatcatctgctcagaggagaacggctgttccacctgccagcag

SEQ ID NO: 404793 - DNA, 90 bp, Homo sapiens
agatgatccaagtcaccaagaaattactgtctcaagtgatacgtaagagatgctaaaaaccttgtacctatggaccccaatggcctgtca

SEQ ID NO: 404794 - DNA, 80 bp, Homo sapiens
tgttcttaagtatgagaagattaaggctgcaagccggaacaacagatgatgtatgcagggagtaaaaacaggctggtgca

SEQ ID NO: 404795 - DNA, 100 bp, Homo sapiens
ccaattacagacgacaaagtagcactgaaatgggacgtcggtcatcagatactgaagaagaaagcagaagcaagagaaaaaagaaacaccgtagacggtc

SEQ ID NO: 404796 - DNA, 85 bp, Homo sapiens
aaggtctatgtccagagtcaagccctgtatgatgagattcgtcagtttcgcaaggcctgtggggaggctcatcttaaaactatat

SEQ ID NO: 404797 - DNA, 100 bp, Homo sapiens
ctgcagtccctcgtccagccacccccaggtactggtgtggcatactcggacagagaagcccaagatgaagcaggaggagcagctgcagcggcagggccgg

SEQ ID NO: 404798 - DNA, 101 bp, Homo sapiens
cttctcctttgggttgtactcatagattgtgtaggcgttggtcttctgatagcaactttaatgtggtatcattgcccagtgcctaagatcttttatgttca

SEQ ID NO: 404799 - DNA, 104 bp, Homo sapiens
accaccatctccatcacccaccaacaacaccacaataatccacagccaagattctggacaatcaggaagtccaagccacaatgatcctgccaagaatcctccag

SEQ ID NO: 404800 - DNA, 75 bp, Homo sapiens
ctgaacattactcttccagaagaggaacggaaaacagttcttccttcaaagcatgcagtacctgaagtaatagaa

SEQ ID NO: 404801 - DNA, 75 bp, Homo sapiens
cagcagttaatagatctccggcataagctcaatcttcggagtcctgatgggaaatacctagccagtggagccata

SEQ ID NO: 404802 - DNA, 75 bp, Homo sapiens
aatacatcagcttgtaggagacagagcaagccctggatgaaaacatggacctcttggaaggtataactggctttg

SEQ ID NO: 404803 - DNA, 100 bp, Homo sapiens
gcggtccagaacccggccctcaccgccctcaccacccctatccagacggctgcccttcaagtaccagcatcttccttgacttgatgcacctgaagaaacc

SEQ ID NO: 404804 - DNA, 90 bp, Homo sapiens
gttctgaggacatggggaccacagtcaatggagatgtgtttcaggatctcactggcatcgaatctatggatcagtgtcgccataccttgg

SEQ ID NO: 404805 - DNA, 98 bp, Homo sapiens
tgacttggacttcagaggaaggcagctattctcaggatatgacaggggtaacacccttccagatgatttttgagataatgttaattcaagactctcga

SEQ ID NO: 404806 - DNA, 90 bp, Homo sapiens
ggctcccagggcaggtgccgcgggctgcgggcaggtggcggcgcggcgcgggctggcggtggctccacgacggagtcttgctctgtctcc

SEQ ID NO: 404807 - DNA, 100 bp, Homo sapiens
gagggagccatgaagcattacgaggagccaaaaacctgtatatcatctccgtgaaggggatcaagggacggctgaacagacttcccgctgctggtgtggg

SEQ ID NO: 404808 - DNA, 75 bp, Homo sapiens
tatgctgtctaccctcaggcaacccaaacgtatggactacctccttttgaataactgaagtgaagtgatggactc

SEQ ID NO: 404809 - DNA, 100 bp, Homo sapiens
tggactttatttataccagttccaattctttcaagaggcagttccacccaatgactactatgcaaggtgttgacttcaaaatcaaaactgtagagctaag

SEQ ID NO: 404810 - DNA, 99 bp, Homo sapiens
tgaattctgctattatctatgaccgagatttctcttacaattacttcggctttaagcttccagggaaaaagacaactaaactttgggttccagatgaag

SEQ ID NO: 404811 - DNA, 92 bp, Homo sapiens
ccctctgggatccccgccgctctgtctacaacccgagggggatatgagactttctactcggaatatcctgagtgttgcgtggatgtaaaacc

SEQ ID NO: 404812 - DNA, 98 bp, Homo sapiens
gacgggcgcccccgagccgccgccgctgtccggagccccacaggatgttttagaagaatgtatgtctcttcccaagctatcttcttattctggatggg

SEQ ID NO: 404813 - DNA, 100 bp, Homo sapiens
gggcctcgcctcactatggcagcagcacggcacagcacgctcgacttcatgctcggcgccaaaggattgtactgtatatgaaacagagaataaaattctt

SEQ ID NO: 404814 - DNA, 98 bp, Homo sapiens
ggggccccagaggccgcggacaccgacctggagtccacaggtcctggctaccctgggaagagacaagaagtaaatgaagaaagaggaagattccagga

SEQ ID NO: 404815 - DNA, 123 bp, Homo sapiens
ctatgccctgctgtagtcacaggagctgtagagaggaccccggtacatctgaaagccgggaaatgcaattctgtggtgttcttggtcacacatttatggagtttctgaagggcagtggagatt

SEQ ID NO: 404816 - DNA, 80 bp, Homo sapiens
accagagtcttgctccggccgcggccagcggagccctgggctggggcaggagccgtgatggaatggggagaagatattaa

SEQ ID NO: 404817 - DNA, 74 bp, Homo sapiens
tggagagtcacagaggggaacagatttcagtgtcctccttagctctgcagtgagtgatagttgcttcaggaatc

SEQ ID NO: 404818 - DNA, 100 bp, Homo sapiens
agaacggcacggccatctgtgtgtctgggcagtgcaagtacaattgtcccactgagcatgcagacctgcagggaagaactgcacttcacgatgccggtga

SEQ ID NO: 404819 - DNA, 96 bp, Homo sapiens
gcggcgctgccgctcccgggcggccgcgggcggttccagggtctccctccactgctgtagtaacccgggtccggggcctcggtggtgctcctgatg

SEQ ID NO: 404820 - DNA, 75 bp, Homo sapiens
tgccgccggccggcgcgtcgtccccacaggtactccaaagattcaggtttactcacgtcatccagcagagaatgg

SEQ ID NO: 404821 - DNA, 88 bp, Homo sapiens
aattcctgaaagagctccaaaacgtggaaccgtcccaaaatgtcccttgctcagaagaaggatcgggtagctcaaaagaaggcaagct

SEQ ID NO: 404822 - DNA, 98 bp, Homo sapiens
ttttggatcgtatccacaatcctggaactgtcacagccacctcaaccttcagcaaccaccactgttcaaggcaacatccttcagcagcagaaagattg

SEQ ID NO: 404823 - DNA, 83 bp, Homo sapiens
ttctctactatgttacacgtgatgacttaaaatgcttgagactaagtgcctacaccaactaatgttacaattgaatcctataa

SEQ ID NO: 404824 - DNA, 90 bp, Homo sapiens
aagacagctatgaacgtgaatgatctcttcctggcaatagaatctctttaaaatggacatagaagactgcaatggccgctcctatgtgtc

SEQ ID NO: 404825 - DNA, 100 bp, Homo sapiens
agctggatttcttgactggccacaggtgaccaagaatatggcccaggtgaccaaagccctggacaaggccctgagcaccatggacctgcagaaggtctcc

SEQ ID NO: 404826 - DNA, 87 bp, Homo sapiens
accagccccagtgatggagcaatggcaaactatgaaagtacagatccatatgctcatatctgtttcctccatcggagcaaaaccact

SEQ ID NO: 404827 - DNA, 99 bp, Homo sapiens
agcctggagtctgcgaaggccgggacccggttccccggcccacagtgggggtgtgcaaacccgagagaactggaatattatccagcaatgcaaatgaac

SEQ ID NO: 404828 - DNA, 100 bp, Homo sapiens
gctgtttttcctgaatgcaaaggcctgtgtgcacaaggccttgtctggttttagacagattcatgttatagatatggacactatagatgtttccaatcta

SEQ ID NO: 404829 - DNA, 75 bp, Homo sapiens
gcctgtgggcttcccatccttccacctgagggggtgctcaaaggatttaaaggagaactaattcatgtatttaac

SEQ ID NO: 404830 - DNA, 100 bp, Homo sapiens
gtgtattctctttggaaaaccgatgtgatacagccgctcaggaagcaatcttgcatgcgtctggaaatggcacaaccaaggactactgcatgctttataa

SEQ ID NO: 404831 - DNA, 83 bp, Homo sapiens
gcaagatggcgtctgctagtagggtcgttcagacaatgcagatcttcgtgaagactctgactggtaagaccatcaccctcgag

SEQ ID NO: 404832 - DNA, 96 bp, Homo sapiens
gcgatgccttccatcagtcggatacacacatattcatcatcatgggtgcatcgagggaagttgctgactcatatgcacagaatgccaaagtgattg

SEQ ID NO: 404833 - DNA, 96 bp, Homo sapiens
cctcttggctggttggtctgtggagtgcctgaagtgaccagctttttgtaagctagaggaagcagagcactttgccatgatggtgatcagcctcgg

SEQ ID NO: 404834 - DNA, 95 bp, Homo sapiens
gtcctgcctctgtaccacgtgatgggacttgtcgttgggatcctcggctgcttagatctcggaatgatgtatttaaaatccactggctgatggcg

SEQ ID NO: 404835 - DNA, 96 bp, Homo sapiens
caaagacagcacgctaataatgcaattactgagagacaacttgacaactgcttttcaggaagccttggacgctgcaggtgataaacttgtagtagt

SEQ ID NO: 404836 - DNA, 75 bp, Homo sapiens
cccagatgcccaccgggatggagaaggaggaggaatcgccctgggcgctgcctatggcacagccaagagcggtac

SEQ ID NO: 404837 - DNA, 82 bp, Homo sapiens
gctatctgaagaaaagtagaaggaaaaacagaacgttgcaaactctggaaaaaaacttggtggtggtatctccatcaaggct

SEQ ID NO: 404838 - DNA, 75 bp, Homo sapiens
gaaatttgcctcgaaaaccaaaacgaaaagggtcttggtcagagaggaggaattctagtattgttggcagacgat

SEQ ID NO: 404839 - DNA, 97 bp, Homo sapiens
cagcaccgcgcccatggcagagccagaccctggaagatctggaagttactgtagctgatcacattcaaaaggtcatgaaactgaacttcgaagcagc

SEQ ID NO: 404840 - DNA, 83 bp, Homo sapiens
cgccccgctctgctgtgggcgctgctggcgctctggctgtgctgcgcgacccccgcgcatgataacgaaggaggcccaacttc

SEQ ID NO: 404841 - DNA, 75 bp, Homo sapiens
accaaatattatggatcctatctgaagaatgatatggaacctagcaaagctgttccactgaatgcatctaagcaa

SEQ ID NO: 404842 - DNA, 98 bp, Homo sapiens
cttcctcctgcttcccatcgaagctctagaaatgaatgtttccatctcttcagagatgaaccaggattttggccccaaacagtaattatcaagatgtt

SEQ ID NO: 404843 - DNA, 82 bp, Homo sapiens
gcgaggagagcacggaccgcacgcctcttctaccgggcgccccacgggccgaagccgatctgaagaagacacttgaatcatg

SEQ ID NO: 404844 - DNA, 98 bp, Homo sapiens
agagaaccaccagcattgccaccaccaccaccaccaccacagagtctgtggaagaggtggttcgagcaaatagaggaagcggggcagccggcagctcc

SEQ ID NO: 404845 - DNA, 98 bp, Homo sapiens
cggagaggagcagcccccggagacagcggcacagaggtgcttctgccaggtgctggagaatctggtaaaagcaccattgtgaagcagatgaggatcct

SEQ ID NO: 404846 - DNA, 50 bp, Homo sapiens
agggccctgcaggcagagttctgcaggaagaaccggacccggcgaacctg

SEQ ID NO: 404847 - DNA, 100 bp, Homo sapiens
tggtaggcctcctagatgtacagcttcggaacttgaccccaggtggaaaagatagtgctgcccggagtttgaacaaggaaactggccaagaagcggaaag

SEQ ID NO: 404848 - DNA, 75 bp, Homo sapiens
gggagctggagaacttcagacactacgagcaggccgtggagcagaaaactttagaaactgttcctttggagagga

SEQ ID NO: 404849 - DNA, 50 bp, Homo sapiens
gagcggaacaacgtcggcgagcgggcagcgatggattttgggtggggaag

SEQ ID NO: 404850 - DNA, 88 bp, Homo sapiens
tcagaaagttacagtcgcccatctgagcgtttgtaagagatggaggcaggagtggtgaggtcatcatcagatttgaaatatttaaagt

SEQ ID NO: 404851 - DNA, 83 bp, Homo sapiens
gagtattccaaatttgatggcaaggtaaatgaattggtggatgccagagatgtcggccttggtgcttggtttgaagcacacat

SEQ ID NO: 404852 - DNA, 83 bp, Homo sapiens
tggactccttcggcagtccacccaccgccgccgcctcccagggggggccctcagcctcttggccttgaacgggctgttcatct

SEQ ID NO: 404853 - DNA, 100 bp, Homo sapiens
gctccctcccagcagagctacctatctatggagaaaatcattcaagtggccaagacctctgctgcacagattcatgatgttgctatcaaaagttgagaaa

SEQ ID NO: 404854 - DNA, 98 bp, Homo sapiens
cgacggggagcggcggagaccgcctctgctcccgcctgggacctagaggatcaagacataatgggagcatttttagacaagccaaagatggaaaagca

SEQ ID NO: 404855 - DNA, 98 bp, Homo sapiens
ccgccctaatggaggtctccagtttcgctctacattaatcatactcctccaccactgtccaagagtaaggagagagaaatggacaagaaagatttgga

SEQ ID NO: 404856 - DNA, 100 bp, Homo sapiens
cccggctgccgggctacggggcagatggactcggagcgccccgccgttgtaggacagtcccatctggacagcaacattgagaatcaagagattgtcacca

SEQ ID NO: 404857 - DNA, 100 bp, Homo sapiens
cctcaatggggaaacccaaattgtagctgacgaagcattttgcaacgcagttcggagttattatgaggctgaacatgaactaaatctggcaagaaaaatg

SEQ ID NO: 404858 - DNA, 75 bp, Homo sapiens
caggaaacttgcagcaaagccattcgggttggagtaattgctatggaagagagagcaattcaacgagctgaatgt

SEQ ID NO: 404859 - DNA, 141 bp, Homo sapiens
cggtgaagtgccatcttcggctaggtcgtcacaggctccggctcatggcatcaagtggcatccatcataaggcctcatgcattgtgcgtcagcagcaatgtttatggtgaaaaatggcaacgggaccgcgtgcataatggc

SEQ ID NO: 404860 - DNA, 87 bp, Homo sapiens
ctgtttgacttcttggggagcttgctcactatgtgctcctctgacgtgccgttactcagagagtccacgctgaggcggcgcagggtg

SEQ ID NO: 404861 - DNA, 75 bp, Homo sapiens
gtttccgtcagtacgcgaaggatatcggtttcattaagggctcttttccaagaagtggattttcattcaaagttt

SEQ ID NO: 404862 - DNA, 75 bp, Homo sapiens
tctcagtcgggctccatccgtgtctgggacctggaagctgccaaaatgggtaattccagaattgattggccatac

SEQ ID NO: 404863 - DNA, 88 bp, Homo sapiens
gcagattttggtttaatatctgattgggacaacattcagacccatttccagtcatgagcaatttgaatcaacccatagaagtgacagc

SEQ ID NO: 404864 - DNA, 100 bp, Homo sapiens
tgcctatatcgctgtggattgggatcccacagcccttcaccttcgctatcaaacatcccaggaaagggaacaggcctttgagagcagccagaagtacaaa

SEQ ID NO: 404865 - DNA, 98 bp, Homo sapiens
cttagctattcattgcatgcaggtggaatgaatcttacttgttgaatatcttctggttactagttggattcatttgtgaaagaatcattttcccctgt

SEQ ID NO: 404866 - DNA, 49 bp, Homo sapiens
gcggctgggagaagcggagtgttgtttggaaattttagcattcaggtgc

SEQ ID NO: 404867 - DNA, 97 bp, Homo sapiens
aaaagaatacattcctgattacctgccacccattgtgtcttctcaagaaggtccttatgtcgtcagaagatcgagaagctcaggaggatgaattgct

SEQ ID NO: 404868 - DNA, 101 bp, Homo sapiens
gcggaggcggcgggcgagggcgactacgaccagtgaggcggccgccgcagcccaggcgcgggggcgacgacagctcttccaccaaagccacctaagccaat

SEQ ID NO: 404869 - DNA, 83 bp, Homo sapiens
aaacgtggatgattactacgacaccggcgaggaacttggcaggaattcatgatttgttcctgtagctgaaacatacattgaat

SEQ ID NO: 404870 - DNA, 88 bp, Homo sapiens
acaagtgtctttggttataaattatgatctacctaccaatcgtgaaaactatattcacaggttgactatagtcaatggggccaatgga

SEQ ID NO: 404871 - DNA, 131 bp, Homo sapiens
gactgagtggacctttgagtgacaagatgggggtgttccaaagagaccatggcagcctgcagctaggactttaatacctgtggatgaagagccagagtcctctgaggtcgatgctgctggtcggtggcctg

SEQ ID NO: 404872 - DNA, 90 bp, Homo sapiens
acagatgaacgaagttatggcagagttagctaaagaactccctcaagtttcatttgtgaagccaaacccatccaccagcatgaagaccgc

SEQ ID NO: 404873 - DNA, 156 bp, Homo sapiens
gactgcgaccagcgcggccccacctacgttaacatgacggtcggctccttcgtgtgtacctcctgctccggcagcctgtaattaataaaatgtctccaacatctctaaagatcacactaaggcaactcatggaggggtcttcaaagaccttgcaag

SEQ ID NO: 404874 - DNA, 90 bp, Homo sapiens
ccgcgccactgcagcaccagcagccgccgccgcccgcggggccccggcccgagccgcacgttaccgaagtgcatgtttgggattttgttg

SEQ ID NO: 404875 - DNA, 100 bp, Homo sapiens
tcaaccgccagatcaacctggagctctacgcctcctacgtttacctgtccatgaggatcagcactgccagtggagatgggcgtcactactgctaccctca

SEQ ID NO: 404876 - DNA, 83 bp, Homo sapiens
acgcaaccccagatccatttacactttacagtcatgcaagacaagataatctgccttccgaaaagagtgcagcctgctcagaa

SEQ ID NO: 404877 - DNA, 55 bp, Homo sapiens
gcggagagaactcagcgaggattctgaggcatgtgatgtgaatcagctgacatca

SEQ ID NO: 404878 - DNA, 139 bp, Homo sapiens
gaaaaagccaagagactgcttttgagtgacatttatttagcagctagtaacttcacttatttcaggggtgaaaatcctatttataagagtgccgtaacaactgtggtcaatccgaagtatgagggaaaatgagtactgc

SEQ ID NO: 404879 - DNA, 96 bp, Homo sapiens
ctgcgctacatgcactcgcgtgtggtggccaactcggaggagatcgccttctatgggggccatgaggtggccctgctgctgctggtgggcgtggta

SEQ ID NO: 404880 - DNA, 115 bp, Homo sapiens
gttcttcgaaactgttgttagatatgaaaagtttttcacagttgaacctcagcacattccatgtgtactaagctctgagctcttcaccctgacctatggtgccctggtcacccag

SEQ ID NO: 404881 - DNA, 82 bp, Homo sapiens
tatcctcggaagagcgctcccaggagaaacaaggtgctttcttctgcgacctggtactcatctacctcatcaaaaagagaga

SEQ ID NO: 404882 - DNA, 88 bp, Homo sapiens
tgaaataacctttgacaagattttcaatcagaaaattggcaattaagttggaatatgcaaggttggttaagttggcccaagaagacac

SEQ ID NO: 404883 - DNA, 75 bp, Homo sapiens
gccaagttccgcagcctggcatggcttctggggacctttacgagcaattctgtggtgttcttggtcacacattta

SEQ ID NO: 404884 - DNA, 90 bp, Homo sapiens
gagaggattacatgtaaagtaccaggacagtgcatggcacatccacggactttacgttgaaggctttcgattgcccggaaacagaatacc

SEQ ID NO: 404885 - DNA, 74 bp, Homo sapiens
caccataggagacatggacgaagccttcaaatccatcaagctcatcaaaaggtcaaaatgcagatcttcgtgaa

SEQ ID NO: 404886 - DNA, 75 bp, Homo sapiens
ccgcagggttcggatgagaccagaatgtgtgcccagtccttcacagaagccacatggcagttacccgggaaggtc

SEQ ID NO: 404887 - DNA, 80 bp, Homo sapiens
tccggctccgtcgtggaagcaggactgcgccgcgtcttcctcaaggatttaagtgccctgtatgctcaaaatttgtatcc

SEQ ID NO: 404888 - DNA, 98 bp, Homo sapiens
acagttttttctaatggctattcaagggactatgttcggagtgaactggagtttgcctatgagggaccaatgtatttagaacctctctctatgaatcg

SEQ ID NO: 404889 - DNA, 112 bp, Homo sapiens
agaggaggcagaagatttctggccagtggagagaggaattcctcaagacaccattccaggaacgaggcccagcaaaaagcagagacggtacagggccagaaggatctgagag

SEQ ID NO: 404890 - DNA, 100 bp, Homo sapiens
cacggacgggttccttggcggttggggatttggggagaggaggtgggcaggaggaacggccctttgtggcccggtttggatttgacgtggtgacgtgctg

SEQ ID NO: 404891 - DNA, 87 bp, Homo sapiens
tctaaaagccacccaggccttggtcctagcacccactcgagaattggctcagcagctgtcggaaaaggtaacagaagatggaactcg

SEQ ID NO: 404892 - DNA, 82 bp, Homo sapiens
aaggtgtacaacacccgccatcagtgtaaactggagttgctggtgggcagccctgcttcctgcatggaactggagctgtatg

SEQ ID NO: 404893 - DNA, 83 bp, Homo sapiens
ccttggtgtcatccagccttagcaaaccagagaaggatgccctgcagtggtctcgccatccagctacagtggagggagaggag

SEQ ID NO: 404894 - DNA, 76 bp, Homo sapiens
aaaaggaaaaagcccgtgaggatgcagcccgggaaagagctagatccctctctgggcgcattgttggaggtgtgtg

SEQ ID NO: 404895 - DNA, 90 bp, Homo sapiens
aagatggcgggttcgtggtgagaagccgtcaaggttaagcaaccttttccacgggatggataagaatactcctgtaagatacacagtgta

SEQ ID NO: 404896 - DNA, 74 bp, Homo sapiens
cccaactgctcctgtgccgctggtaactaggatttctacctcaaccgcgagacctatgcaaggacggtgtggac

SEQ ID NO: 404897 - DNA, 75 bp, Homo sapiens
ccttgcgctggattggggacaaagaggctacctatggtgaactacagtctgctggcggacatctgcaacctctgg

SEQ ID NO: 404898 - DNA, 83 bp, Homo sapiens
gtacgataccgaagcgggctgtgtgccccttctccacccagaggcagaagctcctcctggggtagagacagatcttattgatg

SEQ ID NO: 404899 - DNA, 75 bp, Homo sapiens
cagaaggaacttgcagaaatcacattggaccctcctcccaactgtagtttgggcttcctgtagacacccttttcc

SEQ ID NO: 404900 - DNA, 100 bp, Homo sapiens
ggagctagaactggacacctcgggggtttcctgctttatggcgaagggtatttgaaatggacatcgctaaacagttacaagcttatgaagttgagtacca

SEQ ID NO: 404901 - DNA, 96 bp, Homo sapiens
gttttgtcttcctgtatgacacagacaggggagagctggaggtgtttcagaaagatggggaacgaaaaattcagagtcgacagcaacttccagtgg

SEQ ID NO: 404902 - DNA, 100 bp, Homo sapiens
caaagctgaagagcacacagtcgaagtaaaatgcccattcccatcaagaccagacaatggatttgtgaactatcctgcaaaaccaacactttattacaag

SEQ ID NO: 404903 - DNA, 100 bp, Homo sapiens
cttcctctcgggcatgaccggaaaggccaaggctggccgtgagtactcacctgccgccaccacggcagagaatgggggcggcaagaagaaacagaaggag

SEQ ID NO: 404904 - DNA, 75 bp, Homo sapiens
ggtggcctaccaggaggccaggggtgtcgccatggcctatgaaaggaggttccctacatgtcctttgattccgat

SEQ ID NO: 404905 - DNA, 98 bp, Homo sapiens
cgtttacaattattgatggaaatcaggtcagcggagaagatgctggaaacaaaccaatttatatctgacttggaacaccagccatcaggttcagcaga

SEQ ID NO: 404906 - DNA, 100 bp, Homo sapiens
agtcccccgagtggaggtcggctgcccctgggaaaccagagagtcggagggagtccatctggagcggccaagatgtcagtgggggaggacccgcacgttc

SEQ ID NO: 404907 - DNA, 83 bp, Homo sapiens
ctacgccagcggcgtcgagaggaccatcctgggtgctggccctgtgctggaggtacaatgactcttcttgcttttcacctaag

SEQ ID NO: 404908 - DNA, 100 bp, Homo sapiens
gagcggagacgggagtattatgaaaagatcgtcatgatgatgggcagcgcccgagtggcggagctgctgctgctccacggcgcggagcccaactgcgccg

SEQ ID NO: 404909 - DNA, 113 bp, Homo sapiens
tgctcacgccgggttctttacctccgagccaggccgccgcaaagcagggttccaacaaagtgaatgaagctcttctgcaaagaataaacagtgccaaaaaaatccacttggtt

SEQ ID NO: 404910 - DNA, 100 bp, Homo sapiens
ttctactgtgggtctggactgatctccatgtcctgttgtggggcttttacagcctttggtgacctgaaaaaaatgtctggatttctagagggcttgagat

SEQ ID NO: 404911 - DNA, 100 bp, Homo sapiens
ctcagcagctccagccagcggacccgacggctgagaggtctttctcctacatggacagctataaccatgacattcgttttgacaacatctacatcagtac

SEQ ID NO: 404912 - DNA, 75 bp, Homo sapiens
tcctttatatagaagggagacgggacgaccctgggacagtctccactggggcagatccagctgaccatccggcac

SEQ ID NO: 404913 - DNA, 100 bp, Homo sapiens
gcggcgtctgcgaggcccgaggttacagatgtagagctaaaacgactgaaggatgctttcaagaggacctgtggactctcatattacatgggccagcact

SEQ ID NO: 404914 - DNA, 98 bp, Homo sapiens
tttactatgagattatccgcatgcaccagagctttgacaacctctactccatggcaactgaagcagcagcgggacaagctgaggcagtaccagaagag

SEQ ID NO: 404915 - DNA, 100 bp, Homo sapiens
caccctggtcaacaagaagaacgctctcatccggaggcaggaccagctgcagctgctccccaggatgggtgagttcaacgagaagaagacaacatgtggc

SEQ ID NO: 404916 - DNA, 97 bp, Homo sapiens
atggcagggaacttttggcagagctcccactatgatagactggagtgatgttagaaaacacaaatatggtcacctatcagagtctgcatcccaatat

SEQ ID NO: 404917 - DNA, 74 bp, Homo sapiens
attggtatctacggcctggacttctatgtggtgctggagaatctggtaaaagcaccattgtgaagcagatgagg

SEQ ID NO: 404918 - DNA, 83 bp, Homo sapiens
cagctgctatgttaagaaaacataccaatattgttgcacagactaggcttccgttacaagatgaggtctgtgtatgctcactt

SEQ ID NO: 404919 - DNA, 75 bp, Homo sapiens
aaaagatgacagacttggacaacatgtcccaacattacatcccagatctgtgccagttcagaagcaggcgagcct

SEQ ID NO: 404920 - DNA, 82 bp, Homo sapiens
accgaagacgaccatgacgagctctagctggatgggcgcagagagatgaccaagcgagacgtgcctggcttcgccatcgggg

SEQ ID NO: 404921 - DNA, 83 bp, Homo sapiens
caagaagcacggcaccaaaaacaagcgcggcactgaacttaccttcaactacaacctagaatgtcttgggaatggaaagactg

SEQ ID NO: 404922 - DNA, 95 bp, Homo sapiens
gggaggggacggccgccggagccgcgaggccaaatgcctgtgaggagccaccaacatttgaagctatggagctcattggtaaaccaaaaccctac

SEQ ID NO: 404923 - DNA, 97 bp, Homo sapiens
ccacgctctcgggctctgcctcgggtggaagatgtctatggatgtgacattcctggggacgggtgcagcatacccatctccaacccggggtgcctct

SEQ ID NO: 404924 - DNA, 100 bp, Homo sapiens
ggagatggcagctgcacttcttgcggctggatcacaggcaccagttagaagacaaatgaaagctaagcaactcagtgcacaatcttacggtgtgaccagt

SEQ ID NO: 404925 - DNA, 82 bp, Homo sapiens
tgcacagccgcggcggcagcagcagtgagagcagggtttccaggcctgaggtgcccgccctggccccaggagaatgaaccag

SEQ ID NO: 404926 - DNA, 75 bp, Homo sapiens
gcagaaggagctctggaatctcctgaagattgcttgtaggcggggtttcaccatgttgcccagactggtcttgaa

SEQ ID NO: 404927 - DNA, 100 bp, Homo sapiens
cccggggtgtaataatgttaactgagagagaatttcccaagagatttgtgtagttatggatacagaagaagataacaaacatgtaggtcatcttcttgaa

SEQ ID NO: 404928 - DNA, 90 bp, Homo sapiens
ggcccgacagcctcgcttggccgccagttcttctgcagccgaaggcggtgatggatgtggacacactgtactaggccctgagagtggaac

SEQ ID NO: 404929 - DNA, 95 bp, Homo sapiens
tcactctaggaatgaaggtgtgggagtcagtggatcggtggggaaaatgctgcttaccctgggccctgggctgtagaaagaagacaccaaaggca

SEQ ID NO: 404930 - DNA, 100 bp, Homo sapiens
cgaggacgaaggggtagcgggagtgatgtctgtggggccgccggcggcccggcttcagctgcagaaccttggcctgaaaatgctacattatatcagcaat

SEQ ID NO: 404931 - DNA, 98 bp, Homo sapiens
tctgcaagcacgcttcccgatgccacgttacatcaacacggagcatggaggcagtcaggcttcttctcatatcggtaattccactcaggccactgtga

SEQ ID NO: 404932 - DNA, 100 bp, Homo sapiens
tatgaataccagccactgcagatagagacatatggaccacatgttcctgagcttgagatgctaggaagacttgggagaatcctcattgacactggagaac

SEQ ID NO: 404933 - DNA, 98 bp, Homo sapiens
gctgctaatgtggccaccctggggctcctcatggcccggctccttagcacctctccagacatagggcctgattacattccaacagaggaagaaaggag

SEQ ID NO: 404934 - DNA, 100 bp, Homo sapiens
ggggagccctgccctcctggttcggcctccccgcgcactagaacgagaaccatggagtctggcagtaccgccgccagtgaggaggcacgcagccttcgag

SEQ ID NO: 404935 - DNA, 83 bp, Homo sapiens
cagagacacaggcacgactagaagcattgctagaagcagcaggttacccatgcagttgttactgtaccagcctattttaatga

SEQ ID NO: 404936 - DNA, 100 bp, Homo sapiens
cagctggcagaagaagcaacacgcaaacgagagctgaggctaatgaaaaacaggccttagattttagtgatgatgaaaaagagaaggaagccaaacagag

SEQ ID NO: 404937 - DNA, 75 bp, Homo sapiens
gttcttaaggaccaacctcctaatagtgtggaaggtcttctaaatgctctcaggcgcagacggggaagcggagcc

SEQ ID NO: 404938 - DNA, 87 bp, Homo sapiens
aaggagtcggaagaggtctcacgaggctgtcatcaccgccatgcccaagaataaaggattttaaacaatttgaacctaatgactttt

SEQ ID NO: 404939 - DNA, 75 bp, Homo sapiens
cagggagttcctcagcagaaaggtcagccatgtcatctgagcctcccccaccaccacagccccccacccatcaag

SEQ ID NO: 404940 - DNA, 98 bp, Homo sapiens
aaatggggctggacatgtgtgaagccataaaacatatgtagagtgtgtcggtcagaaggaacacctgagaaaccgctttatcatccttgtgtatgtac

SEQ ID NO: 404941 - DNA, 82 bp, Homo sapiens
cagccatgatctccttaacggacacgcagacaaagtgtgggatgctgtctcaggagatgaattgatgaccctggctcataaa

SEQ ID NO: 404942 - DNA, 50 bp, Homo sapiens
ccggaccctgcccctggcggagaattcctccacgtactgggaaggcaaag

SEQ ID NO: 404943 - DNA, 90 bp, Homo sapiens
tggaattctaatttgaaccatgtttggattgaagccgcctctgtattacttaccagactcgtttgtgaacagccaggagtggacgctgag

SEQ ID NO: 404944 - DNA, 89 bp, Homo sapiens
ggaagctgggaaacccacaggaggcaaccacactagtttaggtgggatgctatggaatatgatgagaagctggcccgtttccggcaggc

SEQ ID NO: 404945 - DNA, 110 bp, Homo sapiens
gttcgacctacaggcgtaatagattggaactcagtgaagacacagatgttcctgttcagagcaaccagctaataatcaaagaatcttcaggatggcagcaagtgtttacg

SEQ ID NO: 404946 - DNA, 122 bp, Homo sapiens
cactgtatggtatcagtgtgagcctttcatcagaagaccaacatctgaaactcagttctccagagaatacaatagcagggtgtcttttatgaataatcaaaagcagcaaaagccaacgctat

SEQ ID NO: 404947 - DNA, 98 bp, Homo sapiens
gcagggaaggagggcgtccgagtcaacaaccgcttcgagctggtgagaacccgcccggaggaagaaggaaggcgcgggccggggattaggagacggag

SEQ ID NO: 404948 - DNA, 100 bp, Homo sapiens
tggacaggaaagtgtaacatcagttacagagaaccctaaggactctgcaatatgaataattccctagagaacaccatctcctttgaagagtacatccgag

SEQ ID NO: 404949 - DNA, 100 bp, Homo sapiens
ttgcaagggaccttctccggcccctccagctgccccctgtgtggcaaacctttcttgagctcaggtcaaaatgcagatcttcgtgaaaacccttaccggc

SEQ ID NO: 404950 - DNA, 74 bp, Homo sapiens
gattccagtgactggggatagtgaaggtgctacggtgcaggtccgtgtttatgatccagcatccccccagcgcc

SEQ ID NO: 404951 - DNA, 75 bp, Homo sapiens
gacttctcagtgtacaacgccaacattaacctgttctgtgtggtcaggtgcttccaatagtcctggtcagcctaa

SEQ ID NO: 404952 - DNA, 88 bp, Homo sapiens
gggcagctggagcgttgcgagcgcgaatggcacgagctggagggagaatttcaagaactgcagattcacagtctgagaatgaggcttc

SEQ ID NO: 404953 - DNA, 74 bp, Homo sapiens
cactgatgagttcatcgagaagagtgtctctgaggccctggcatcttttaattatcctagaaggaaaacatcac

SEQ ID NO: 404954 - DNA, 74 bp, Homo sapiens
agaaggccaacctgcagctggaaagtgaagaactgaatatcctcatcagtctcttgcatggcaccaagaatgtt

SEQ ID NO: 404955 - DNA, 94 bp, Homo sapiens
agttagtggatatagcacaccatccccagccaacaatgcagatcttcgtgaagactctgactggtaagaccatcaccctcgaggttgagcccag

SEQ ID NO: 404956 - DNA, 98 bp, Homo sapiens
aaatacgcagattgcttggccatcaaaactgaagatcggagccaaatccaagaaagtggatccttcaggttccagggatttcaccagtagcagtgaaa

SEQ ID NO: 404957 - DNA, 75 bp, Homo sapiens
ctatccacaagtacaatgcttacagggacaggctggcctgacatggaaggtgaaacaaggcagcagcccctgcct

SEQ ID NO: 404958 - DNA, 75 bp, Homo sapiens
ctgtctctatgaatgtgactaccctggttacctcatattgccggtggtggtgtgcacattgagccccggtataga

SEQ ID NO: 404959 - DNA, 75 bp, Homo sapiens
gcggggtgcgccggcagaggatccagtgttcaccatcctggccccggaaggcatccgtgtcattctggaccttac

SEQ ID NO: 404960 - DNA, 109 bp, Homo sapiens
caatgaactgtataagcctttaagagcagagggaaccagcttcagaacagttttagataaagctgtgcaagcagatggacacgtgaaagaatgttacccgtctcatcgt

SEQ ID NO: 404961 - DNA, 98 bp, Homo sapiens
gcagggtgcgggagagccccttgcagaagacgccgtacgaggaggacatgaaccttaacgaagagaaaaaagctcctttacgaaacaaagactttacc

SEQ ID NO: 404962 - DNA, 76 bp, Homo sapiens
aatgaattgtacagcagcgcagtcacaggcggggagacaaccccttccccaagaatgctgatgggactatatgcta

SEQ ID NO: 404963 - DNA, 100 bp, Homo sapiens
ccacctgtggtcctggccattcggagtcgatatgtgctggaagctgcagtctacaccttcaccatgttcttctccacgagtgcctggtgaagaatgtgat

SEQ ID NO: 404964 - DNA, 98 bp, Homo sapiens
gccaatgttggagccgtctgcaaagtgtccccggcaagaaggaaagaccacagcaagattctttcattcgtctcctcctagcctgggggaccaggctc

SEQ ID NO: 404965 - DNA, 75 bp, Homo sapiens
ctggagtattttgagattggagaattaaggtgctggagaatctggtaaaagcaccattgtgaagcagatgaggat

SEQ ID NO: 404966 - DNA, 96 bp, Homo sapiens
ctcggatcccatgcaacagccacgatgtgaagcggggcagagccgggggagcccagcccagccagcctccaggtactccaaagattcaggtttact

SEQ ID NO: 404967 - DNA, 100 bp, Homo sapiens
gtgagcataggtgctctgataagtaaagcacatttggagaaatactatactggcaattgctggagaagattttgcaattgttgcttctgatactcgattg

SEQ ID NO: 404968 - DNA, 100 bp, Homo sapiens
cgtggagatatggcgcaactgcggcgcggaaagcaggcaggatgggagagtcgccgatagaaccacctcttccctgcctcctgggcttgggggaagcttg

SEQ ID NO: 404969 - DNA, 75 bp, Homo sapiens
gagggcaagaagatatgaacctgagccttcagtcaagaccctccagcttgccttgacctgaaaaaaatgtctgga

SEQ ID NO: 404970 - DNA, 98 bp, Homo sapiens
tggactgatggcagcacactgaccacaattagtcctctggagaatgccatagaaaccatgtccacggccaatgagaagatcctgatgatgataaacca

SEQ ID NO: 404971 - DNA, 89 bp, Homo sapiens
ggaagacgaatcgttaaacatcttaggtcagcccccaaatacatcaagatgtttgtactggatgaagctgacgaaatgttaagccgtgg

SEQ ID NO: 404972 - DNA, 50 bp, Homo sapiens
agcagggactcgtgaaacagcaggatggtcccaagccactcgtttccgtt

SEQ ID NO: 404973 - DNA, 90 bp, Homo sapiens
gcaaagtgtatcctttcttgtcatatgactttgacactcagtatgctttcgttggtgattattctgggcagatcaccctgctgaagcttg

SEQ ID NO: 404974 - DNA, 100 bp, Homo sapiens
catcgctgcagctactcagtgggtgaaggagcatgtgggggacagagttgggacccctgattttagcaggatggcccaatggaatcagctacagcagctt

SEQ ID NO: 404975 - DNA, 74 bp, Homo sapiens
ggcgcgagccccgtcctccttcgccgccgcgcacaaccgcacgtgcaggaatgggtaccacagaccatgtcatc

SEQ ID NO: 404976 - DNA, 85 bp, Homo sapiens
agaaaggagcagactgtggagcaaagatcccagatgcagtgactggttactacctgaaccgtgctggctttgaggcctcagaccc

SEQ ID NO: 404977 - DNA, 96 bp, Homo sapiens
tggcttttctagcctgctgatgtgacaactgtgatgtgcctgcaacaacaggaaaggcaatgttatattaagggtcttgctctgtcacccaggctg

SEQ ID NO: 404978 - DNA, 76 bp, Homo sapiens
tgtaaaaaaaagggctttcatccacacaccaaggagcccaggctgttcagtatgttcctcctgctgatcaagagaa

SEQ ID NO: 404979 - DNA, 74 bp, Homo sapiens
ttggcctctggctgaccaccgcctgggtgctgtccgtggccgagaggccctgtctctgcccctggtggtcatcg

SEQ ID NO: 404980 - DNA, 50 bp, Homo sapiens
ctctcgagtagctgggattacagtatggaaccacccctttagtttgggct

SEQ ID NO: 404981 - DNA, 74 bp, Homo sapiens
gaacgggttgcttcccccgctgcgagaataccctctaccatctgctttggtcagggtgccgctcgaggatttaa

SEQ ID NO: 404982 - DNA, 75 bp, Homo sapiens
cacatacataactttggagagcaaagacatcaggacagtcattttgtttactcattcagccctgttgcaggtccc

SEQ ID NO: 404983 - DNA, 98 bp, Homo sapiens
ctgggggcggagcccttcagattccaagaccccaggcaggggtggcgccaaagggctggtgaattaccagatctctgtcaagggcagtaacctgttca

SEQ ID NO: 404984 - DNA, 100 bp, Homo sapiens
agggtttttaatgaccacaacaagcaagcatgcagcttactgcttgaaaggtgctgcagcatgttcgtttgcctttgcttagtcccaagttcctggtcgg

SEQ ID NO: 404985 - DNA, 83 bp, Homo sapiens
ctgaccacagtgctcaccacccaccaccactgatgtgaagttcatttccaatccgccctccatggtggcagcggggagcgtgg

SEQ ID NO: 404986 - DNA, 75 bp, Homo sapiens
aagcgatctacccaccttaccctcccaaagtggtgagattacagctgcaagctttcttcctggtggcagatgaca

SEQ ID NO: 404987 - DNA, 50 bp, Homo sapiens
ataagagactggacgctgtgagataacaaggacatcctgctgatgctgag

SEQ ID NO: 404988 - DNA, 104 bp, Homo sapiens
gccagaaggaagatggcggatctggaggagcagttgtctgatgaagagaagccttcacagttgttgatcacatagcatggtcatccactcacagcttaaaaaaa

SEQ ID NO: 404989 - DNA, 83 bp, Homo sapiens
ccggtgccagcacctttcggcttctgagacggcggcagcagcggcattcaggttatcctacctacaaagaaaaagtaaagaaa

SEQ ID NO: 404990 - DNA, 75 bp, Homo sapiens
gaccccagtcggtgctccggggaggtcacctgacgaggagaatgtgacagtgatgataacatgggtgccaaaaat

SEQ ID NO: 404991 - DNA, 100 bp, Homo sapiens
acaatggggaggacaacttcgcccgggacttcatggagttaaagttcctcgtaattttcgcttgttggaagaacttgaagaaggacaaaaaggagtaggc

SEQ ID NO: 404992 - DNA, 75 bp, Homo sapiens
tgaagatcaaagatgccaagaaaccctctatccagtcagttcgctgctattcccatgggtcacaggagacagatg

SEQ ID NO: 404993 - DNA, 100 bp, Homo sapiens
ttactaaacactaaaggagttttactaaaggagtttcaattgtttttaagggaaatgaatagaaacaatccactttgaagaagccatggcgaaatcaaag

SEQ ID NO: 404994 - DNA, 82 bp, Homo sapiens
gccggcggcaccatggtccacctcagacatggatttgattgacatactttggaggcaagatatagatcttggagtaagtcga

SEQ ID NO: 404995 - DNA, 101 bp, Homo sapiens
ttccagccccgagcgggacagcgcggcggggagcgacgaggccgttgctccagggagaactgcaaatatcttcatccacccccacatttaaaaacgcagtt

SEQ ID NO: 404996 - DNA, 100 bp, Homo sapiens
ggcagctggagcctcagtggaagatgttgcagtgccaactgccgcatgtggaagcatctacccgttcactccagtcccaccccacgcctgactcccctct

SEQ ID NO: 404997 - DNA, 98 bp, Homo sapiens
gcagagcgaagctgaggagtccagcgctcgccgacaggggcctgggctgtcccgagccggcataatggttatgaaagcttctgtagatgatgacgatt

SEQ ID NO: 404998 - DNA, 51 bp, Homo sapiens
gtgtagccaaaccagctgttccctgttaagtgcactgacaggcagaactca

SEQ ID NO: 404999 - DNA, 101 bp, Homo sapiens
aaacgaagtcgtggaggtggcgaaacgaggaggagataacgcggccttgggctctgtgtcttgggacaaggtgcgcattcctggtgtgctgcagcgattgg

SEQ ID NO: 405000 - DNA, 101 bp, Homo sapiens
tcggcttctgcctggtgctctgcgtcctcatcgggcttatgttcgagggggatatgagactttctactcggaatatcctgagtgttgcgtggatgtaaaac

SEQ ID NO: 405001 - DNA, 101 bp, Homo sapiens
cttcctaacatccaggccgtgcttctgcctaagaagaccgagagtcaccacaaggccaagggcaagtgatttgacaggcctccccatggccacccatggac

SEQ ID NO: 405002 - DNA, 88 bp, Homo sapiens
acattaccattttttcacccgagggtcggctctaccaagtaggtggcttcctgtttgaagggctctcagatgatgaggatgactttca

SEQ ID NO: 405003 - DNA, 75 bp, Homo sapiens
tgtggccttagctacaggagagaacagcacatcccattataatgctggaacttggggcattgtacagggacaact

SEQ ID NO: 405004 - DNA, 100 bp, Homo sapiens
ctcatcagtggttgtcccaatatccaagaagcagtagagggtgccatgcacattcagatgaagtgtttagaggacatgagccaggtcaagcagcaaacag

SEQ ID NO: 405005 - DNA, 75 bp, Homo sapiens
cccattgtctatgaaattcatccaaccaaatcttttattaggtatggtggtccctgcagtcagagtgtaaggtct

SEQ ID NO: 405006 - DNA, 80 bp, Homo sapiens
caaggaacacctgggcaacagaatattggtcaagttgctgaccttgaacatctggaatcaagagacccatggcatctgag

SEQ ID NO: 405007 - DNA, 100 bp, Homo sapiens
caagccccgatatctgatgggggttgggtcttgggcgtctttggtactggcttttttaggggtctgcctggggattacccttgctgtggatagaagcaac

SEQ ID NO: 405008 - DNA, 117 bp, Homo sapiens
ccctcccgcgactacagccactactacacgaccatccaggacctgcgggacaaggaaagaccacagcaagattctttcattcgtctcctcctagcctgggggaccaggctcgaactg

SEQ ID NO: 405009 - DNA, 75 bp, Homo sapiens
aggaggaggaggaggggctccggctggtctgtggtgagggttccgagtctgaggaagacataaccttgtgcctgc

SEQ ID NO: 405010 - DNA, 82 bp, Homo sapiens
ctgagggagggtccgagccagccgctgttttgccggaggagcccctcaggccgttattcagcttctcaaggctggaaaagcg

SEQ ID NO: 405011 - DNA, 101 bp, Homo sapiens
tcgcgatgctgcccggtttggcactgctcctgctggccgcctggacggctcgggcgctggagatgcccccaagtttatatcaaaccaaacaatttattact

SEQ ID NO: 405012 - DNA, 71 bp, Homo sapiens
catgctgcgcggccttcccatcaccatcacagagagcgatggcaaacttgaagataaatcttttgactcca

SEQ ID NO: 405013 - DNA, 75 bp, Homo sapiens
cagtctccccaaggcatgcggcccatgagcaacatgagaccatagctgtctgcagtgcaggaagccaactattaa

SEQ ID NO: 405014 - DNA, 100 bp, Homo sapiens
gatgttccagggcatgagagtcagctttgtgacaacaaactgtgctctgcagttttcatcccgtggaatccgacccggcctgaccactgtcctagctcgg

SEQ ID NO: 405015 - DNA, 100 bp, Homo sapiens
caacaccccgtacggtacggccagcgagcccagcgagaaggccaagagaggtggagaagagcgagtacttgagaaagaagaggaagaagatgatgatgaa

SEQ ID NO: 405016 - DNA, 90 bp, Homo sapiens
tcggaaaccggtagcgcttgcagcatgatgcctgaggaagtgcaccatggagaggaggaggtggagacttttgcctttcaggcagaaatt

SEQ ID NO: 405017 - DNA, 82 bp, Homo sapiens
caaagcgaggctgaagaaggccaaggctgcagaagccaaagccacggtgagacacagtaacctggttgaactctgcatctgg

SEQ ID NO: 405018 - DNA, 75 bp, Homo sapiens
cttgggtgaactctagcaattacaagaggtgttatgaacataaacagtatagaaatggattgaaattctgtaaac

SEQ ID NO: 405019 - DNA, 90 bp, Homo sapiens
ggaaactgccattaacctccagctttttaagcaggctatgtggaggagatatagagccaagaaatatttatgtaaagtgaaagctgcctg

SEQ ID NO: 405020 - DNA, 98 bp, Homo sapiens
ccaagcgcgtcacattcccgtccgacgaggatatcgtgtctggagcagtggagcccaaagacccctggagacatgctcttatggatggattggacagc

SEQ ID NO: 405021 - DNA, 75 bp, Homo sapiens
gagccattgaagggaacaacacccttgatggtgatccatgctctagggcaatcatggcatcctgagcattttgtc

SEQ ID NO: 405022 - DNA, 75 bp, Homo sapiens
ctgaggcctccccagccacgctttctgtacagcctgcagaactacggtctggaaaatcccgaagcagaagcccgt

SEQ ID NO: 405023 - DNA, 95 bp, Homo sapiens
aatagtgtagcttacgactgtgtacagctccatggaggttggggatacatgtgggagtacccaattgcaaatatccctctgaagaagatatgatc

SEQ ID NO: 405024 - DNA, 82 bp, Homo sapiens
ttatcaaatctactactgttcatggcagaattggagcgttattcagtatattaatgtcttattgataatggcagaacatcca

SEQ ID NO: 405025 - DNA, 74 bp, Homo sapiens
ccctggagtctgcgatcgccatcgcaaccggaaagatgctgtccttggatgggaacctgcccagtggagaggcc

SEQ ID NO: 405026 - DNA, 51 bp, Homo sapiens
acagcgtcgggcgggggacagctcagttctgactcagaagatcttttggaa

SEQ ID NO: 405027 - DNA, 100 bp, Homo sapiens
tggctctactgcttgccccactggtggagacgcttattctactggaccggctgctgtaccttcaggaacaggtctattatcctcccagtccacaacgctg

SEQ ID NO: 405028 - DNA, 75 bp, Homo sapiens
atcatgagaggggagtatgatgcgctgctgccgtggcccttccggaacaaggacactttgccaccatcaccttga

SEQ ID NO: 405029 - DNA, 82 bp, Homo sapiens
gtgaggctcccctcaacaacttctctgtggcgcgccctgggaggagcggggacactgaggacctctctccaaattggcctct

SEQ ID NO: 405030 - DNA, 95 bp, Homo sapiens
cgggtccgtgcgcccagcgtcccagggcccaggccgagcagattattctgtaacaagacttcaagttccttgactcattctgaatgcagagctgt

SEQ ID NO: 405031 - DNA, 100 bp, Homo sapiens
ccaacaccaatcatcccagacgttccaatgacaggatttacacagagagcaactattgatccagaactgaatgaaatacacgtcttatctggactcagca

SEQ ID NO: 405032 - DNA, 96 bp, Homo sapiens
caacaacccgtacgtgcggaaggccctcaacatcccggagcagctgccacaatgggacatgtgcaagtgtgccacggaccacaatgtggacaacac

SEQ ID NO: 405033 - DNA, 75 bp, Homo sapiens
gggccttactccttcacagatcgacatttctcttgggaagttgtgcatctgacaggaatatagtactgtacgata

SEQ ID NO: 405034 - DNA, 98 bp, Homo sapiens
tcaggcgtcaggctagtccgacgaagagtggctgatcttgcatctttaatggataaaacatttgagagaaagttgcctgttagttctttaacaatatc

SEQ ID NO: 405035 - DNA, 90 bp, Homo sapiens
gccagcaccgcacgccctgcaagggagcttcctgcctgacacagctcacttcaagaagtgcacaatgtcagaacgtggaattaagtgggc

SEQ ID NO: 405036 - DNA, 100 bp, Homo sapiens
gacccggttccccggcccacagtgggggtgtgcaaacccgagagaactggtgtaaactggagttgctggtgggcagccctgcttcctgcatggaactgga

SEQ ID NO: 405037 - DNA, 100 bp, Homo sapiens
cgacgcattcaggagaagaaggatgaggttacgttatatataggattcgtgttcgccgtggtggccgaaaacgcccagttcctaagggtgcaacttacgg

SEQ ID NO: 405038 - DNA, 75 bp, Homo sapiens
caaggaataaacatgcaatgaacccaaaaggtcacggaacagcaaatttctgagaagttgaagactatcatgaaa

SEQ ID NO: 405039 - DNA, 74 bp, Homo sapiens
cgactgcatctttgacaagtttgagtgttgctggaacggttcggatagggagttcctctttaaacacccgaagc

SEQ ID NO: 405040 - DNA, 90 bp, Homo sapiens
tcgcagtggtcgcttcttctccttgacatggcccatgaacatggacatgagcatggacatcataaaatggaacttccagattatagacaa

SEQ ID NO: 405041 - DNA, 75 bp, Homo sapiens
ttcttccagctacagatgtgcgaggttcgatacaagaggctgttttcctagcgtggcttgctgcctttggtaaga

SEQ ID NO: 405042 - DNA, 75 bp, Homo sapiens
ctagaagggtagtaatttctcataatatggataaagctctgaaagaaggcaacaatttgggatgaatcccaaaga

SEQ ID NO: 405043 - DNA, 90 bp, Homo sapiens
gtgaatccggcctggcttgtatcctcccttcaggacagcgagctctccactggcccaaggactttgtgttttatgccccacgtctgagaa

SEQ ID NO: 405044 - DNA, 75 bp, Homo sapiens
ctgcaggctctcggctgcagcgctggagcaaggtccgtggtcctgtcagtggaagcccggatagcatgaatgcct

SEQ ID NO: 405045 - DNA, 100 bp, Homo sapiens
gtgccccaccatgtcagacgcagccgtagacaccagctccgaaatcaccaccaaggtgtgcaactgaggaacatggctcaagaaactaatcacagccaag

SEQ ID NO: 405046 - DNA, 97 bp, Homo sapiens
aaaaaccagctggagattgagagactggaggagcaggacatggtccggcgaggagagatcatcgacaatgacaccgaggaggagttctacctccggc

SEQ ID NO: 405047 - DNA, 100 bp, Homo sapiens
gttcgctggactgcaaaccgagctcccgtctgccttgcaggaattggattcaagtacgtggctctgggagacctcatcatcctcatcacttttggcccgc

SEQ ID NO: 405048 - DNA, 100 bp, Homo sapiens
aggctgtgctcaagcatttcaacgtgcgtgtcacccacgcagacatcttcagccgctgccaggctgaccccgcactacatctacccaccagccatcgtgc

SEQ ID NO: 405049 - DNA, 100 bp, Homo sapiens
cttcaggaatccaggtgcacccaattcaaggcctgccgttggctatagcaaatgccccaggggtagaaatatttctgtcatggctcattcaaagactagg

SEQ ID NO: 405050 - DNA, 100 bp, Homo sapiens
aaagggatttaatggtgaagattttgaacggcttacgaaaatttgtgcaacacatcaagagatgctgatatgctaactggtgatgagcaagtatggaagg

SEQ ID NO: 405051 - DNA, 100 bp, Homo sapiens
gtggccgcacagtatagtgaagataaagccaggcaagggagatgaagcatctggtttttgttatctcaatgatgctgtcctgggaatattacgattgcga

SEQ ID NO: 405052 - DNA, 75 bp, Homo sapiens
ctggtggctggagcgaccccttgttctttggtggcgctggcacgtggactccctttaatccagtgactgtcaggt

SEQ ID NO: 405053 - DNA, 131 bp, Homo sapiens
ctttgtgtcctgagatcaaatggcacttcattggccacctacagaaacaaaatgtcaacaaattgatggctttggacatcagacagtgcaggagaagaatgtgatgcggcagaaggggctgaaaactaaat

SEQ ID NO: 405054 - DNA, 80 bp, Homo sapiens
agaagatcatcgagcatttcaaacgccgcggcgagtcctttgcacatgttggcaacacacgcatccgcatcggcctccct

SEQ ID NO: 405055 - DNA, 97 bp, Homo sapiens
ctggatgttgtcaacatggccatcaccgagcaccctgagaacttcaaggtcaacgtctttttgaaaagttgctccagctgacttcgcaaaatattga

SEQ ID NO: 405056 - DNA, 100 bp, Homo sapiens
ccctggtcagtttctgctttggatgttgagaaagagaaggaaacccacagttacctcagcaaagaggagatcaaagagaaagttcataaatacaacttag

SEQ ID NO: 405057 - DNA, 75 bp, Homo sapiens
catcaggaccatctgttcggaaccccagagcacgagtagtagtcttaagagtctaacttcaaacttgtggctgtt

SEQ ID NO: 405058 - DNA, 100 bp, Homo sapiens
tggaaaatgccaacattccttctgtgtccctgtccaagcgagagggaggcaaatacatgcaggcggtgattcagtatgggaagatagtgtcctggttaga

SEQ ID NO: 405059 - DNA, 73 bp, Homo sapiens
gaggaggccatcctgcagatggaggttcatgatcaagagggcccaaggacggaagcgctttgggatgaagaat

SEQ ID NO: 405060 - DNA, 100 bp, Homo sapiens
ctgcagaagaaggacgaatgtgaagaaatgttgaaactatttaaagaggttgctagcttacagagccaggactgtctccagtttggtcctcctgctgaag

SEQ ID NO: 405061 - DNA, 76 bp, Homo sapiens
gtcggactcccgcggcgggaggagcctgttcccctgagaaatgggacgtcggtcatcagatactgaagaagaaagc

SEQ ID NO: 405062 - DNA, 100 bp, Homo sapiens
ttggaaagctgggagtcctgagatccaaagagaaagtggagaatgtgatccgagaatttaacttaaatgagctataccagcgggccaagaaactatcaaa

SEQ ID NO: 405063 - DNA, 100 bp, Homo sapiens
tgtagcattcaagacttcaaactgagaaagcatgggattatggcaaccacagaatctcagtagtacaagttccattcagttttttctgaaagaaagccct

SEQ ID NO: 405064 - DNA, 100 bp, Homo sapiens
tggagacagactgacgcgagcagccaaggtgttggagcagctcacagggcagacccctgtgttttccaaagaaaactatgtgcaagctgtggaggagttc

SEQ ID NO: 405065 - DNA, 100 bp, Homo sapiens
acgcaggatctcacagctgcagtctaatagtaacacagaggaaaatggctttgtaaagaagtttgaacctaaatctggctggatgacttttctagaagtt

SEQ ID NO: 405066 - DNA, 102 bp, Homo sapiens
tgacacatattctgtctgtccacgatagtgccaggcctatgttggaggactttctgcagggcgactgcaccaaagcgaaacagaagctgaactggaagcccc

SEQ ID NO: 405067 - DNA, 80 bp, Homo sapiens
cgtctctctcatcgaggcccaaaccgccaaggtgcacaagcttctcatcgtggtggagctgttgctgggggagatccctg

SEQ ID NO: 405068 - DNA, 100 bp, Homo sapiens
ctttttaatattggccaatcatcaagacaagccagcagctcgctcagtacaagagggtacatttaaattcaaagcagaaagcgaccttttccttgctgag

SEQ ID NO: 405069 - DNA, 83 bp, Homo sapiens
gtttctgcgatacctgcctgcaggagttcctcagaattggctgtgaaaggactgaggcagccatctgggggtagcgggcactc

SEQ ID NO: 405070 - DNA, 121 bp, Homo sapiens
gacgattcacctgtccagcatccgaccaccgaggctggagggggagaacacccagtggtcctttggcgtgctcctctgggagctgatgacaagaggagccccaccttatcctgacgtaaac

SEQ ID NO: 405071 - DNA, 50 bp, Homo sapiens
cgttggaggccaccgtttccagctgctgcagaagaatattttgcctgctg

SEQ ID NO: 405072 - DNA, 100 bp, Homo sapiens
ctgaaatacactgtggcatattctaagaaatgggactttacagctttgatcgatttctgggataagcctgagcctccaacaacaaacaaatggcagctgg

SEQ ID NO: 405073 - DNA, 100 bp, Homo sapiens
cttcaagctctacagtgccttctgcgccagccacacaaaagttcccaaggtcctggtgaaagaacggccggtttgtgggcgatgctgaccttgaaagaca

SEQ ID NO: 405074 - DNA, 101 bp, Homo sapiens
gaagggagatcagctatgctatcaagaatatccatggcattagaccattcccggagtaataaatccagttggagcagcagtgatgagaagaggggatcgac

SEQ ID NO: 405075 - DNA, 100 bp, Homo sapiens
atgggcattttgtttatgagcaagggaagaaatgatttcccttggggatggagacatcaggaccatgtgcccccttctgtctatgaaacctggagaatat

SEQ ID NO: 405076 - DNA, 100 bp, Homo sapiens
ctacacaccaagtgacggaacccaaaaggtgacatacctggtacataactttgaagttttcctaggacttcagctgagaccatgaaacatagaagtggag

SEQ ID NO: 405077 - DNA, 87 bp, Homo sapiens
gctttgcaacgctaattagactcatgccacttgagcattgtttacaataaccaagatatgaaatcaacctatgtcttcattgatgga

SEQ ID NO: 405078 - DNA, 100 bp, Homo sapiens
aaggagcagatcaagaccctcaacaacaagtttgcctccttcatagacaagtctctggatggtcgtcagatccgtgtggatcatgcaggcaagtctgctc

SEQ ID NO: 405079 - DNA, 75 bp, Homo sapiens
gcactcaacagatctttaccagatgttaggttagaagggtttttaacaagttaatcaggcgctacaaatacctgg

SEQ ID NO: 405080 - DNA, 90 bp, Homo sapiens
gtgcagagctgtgggtctggttccaagacactgtcactgactgtccccaatctcttcatgctggaaacagtggattctgtgaagttggca

SEQ ID NO: 405081 - DNA, 75 bp, Homo sapiens
gccggagccgcgccccaccccgccagctccagagccactattaaaggtggaagaaggtccatatctttttctgtg

SEQ ID NO: 405082 - DNA, 82 bp, Homo sapiens
atgtctgcggaagtccccgaggcagcctccgcggaggagcagaaggtactccaaagattcaggtttactcacgtcatccagc

SEQ ID NO: 405083 - DNA, 98 bp, Homo sapiens
gaggatctgacgaactactctcaggcagtgttctcagtagtccgaactctaatatgagcagcatggtagttacagtggtaaatcatccctgtgcaaca

SEQ ID NO: 405084 - DNA, 100 bp, Homo sapiens
cacaaggacaagcaggaaaacggcgagaggactggaggggtgcctctgatcaaagcccccaagagagatgccagaagtgggtggagaactgtaggagagc

SEQ ID NO: 405085 - DNA, 99 bp, Homo sapiens
cggcactgagggccccgacccaggaggaatgggagctgctggatgaggctcagagactcttctattatgaaataatggcttctgtgcttcgcatttata

SEQ ID NO: 405086 - DNA, 100 bp, Homo sapiens
ccgacggcgacgtcggggccgagctaacccggcctctggacaagagttatcctacgcggagagccaggtaccaatgggtgcgctgcaatccagacagtaa

SEQ ID NO: 405087 - DNA, 82 bp, Homo sapiens
gcagccgcagcgacggcggcgacagcagtaagactttgaccccgacgcaggcttcagtgattgccgcggatcagaagcctga

SEQ ID NO: 405088 - DNA, 100 bp, Homo sapiens
acaggagtataacaaacttaccacaatgcaggcccttgcagaactctggattaatcgaattacagctgctagccaggaacatggactgaagtatccagcg

SEQ ID NO: 405089 - DNA, 75 bp, Homo sapiens
tcctctgatctacgaaagtcatgttacccaacaccgggttaatgttcgtgaagaaattgaagagttttttccaag

SEQ ID NO: 405090 - DNA, 100 bp, Homo sapiens
ccaaatcggcccgcggtgcggtgcggagactccatgaggccctggaccactccaccagcatcctgggagtcgcctcctccatagcccatgagttgggcca

SEQ ID NO: 405091 - DNA, 83 bp, Homo sapiens
caccggaagtgtccgatcggaatcagccctgtccgagaggaattgagtgatctacagcgcgatccacctgctcactgttcagc

SEQ ID NO: 405092 - DNA, 83 bp, Homo sapiens
cccaaagacgctaaacgtgccctactctgccccgggggagagaaatcttcccaaggctgcagacaccgacggatttgctttgg

SEQ ID NO: 405093 - DNA, 102 bp, Homo sapiens
actgcaatgtttttgtggaacatgttcactgagacttttttgacggagagggacaaacaatccaagtggagtggaattcctcagctgctcctcaagctgcac

SEQ ID NO: 405094 - DNA, 83 bp, Homo sapiens
aaaagacagtcctcgtcagcactgactttcagctatggaatcggccgccatggcatcagatgaaggcaaactttttgttggag

SEQ ID NO: 405095 - DNA, 83 bp, Homo sapiens
cacgcgaagtggccgcatccgcaaggttgtgaccgagattcccgacgagagagactgaggggaagagaggaaggaggggcggg

SEQ ID NO: 405096 - DNA, 98 bp, Homo sapiens
ccccctttaacttagaggaacgaggattatacagaaatttgaaggtttgtggatgcacttagatgtttgcaatgagcactgtggctggcatgccccag

SEQ ID NO: 405097 - DNA, 83 bp, Homo sapiens
tacccgagcggcggcggcggcagcagcggcagcggcaagcaccattgtggtatctgaacgggaactatttggttctgttggtg

SEQ ID NO: 405098 - DNA, 100 bp, Homo sapiens
caatgtccagcagctgttgaagttcttaacctagtagcccaggaatgtagtgctggtatgatctcgtgaaatcttgagagaaactgaatgacgaatgaaa

SEQ ID NO: 405099 - DNA, 100 bp, Homo sapiens
cctgtctcggcctccagagtggctgggattacaggtgagggtatggcagataggctgtcagacccagaagctggaggaggccctgaaggaacacaagtca

SEQ ID NO: 405100 - DNA, 100 bp, Homo sapiens
acgaccgttgctgagctggtgtggaacgtctgtgatcaggcttacagcttcgccatgggctgctggcccaagaatggacttctagacatgaacaagggcc

SEQ ID NO: 405101 - DNA, 96 bp, Homo sapiens
tgaggcctacagctctgccggggaggaggaggaggaggaagaggaggagaagttttcggctttgtgagaaaccttaccatcaaacacgatggccag

SEQ ID NO: 405102 - DNA, 90 bp, Homo sapiens
ccagttggaagcccgggaccgtttaaaaaactggcaactttagcgagtatagatgctgagcttcagaaacttaaggaaatgaccaaccac

SEQ ID NO: 405103 - DNA, 89 bp, Homo sapiens
caaaactttgggcttgcaacttttgttaccaaaggaatcagcctaaaacaaccaatgttctaggagctgttaacaagccactttcatca

SEQ ID NO: 405104 - DNA, 90 bp, Homo sapiens
ggccgccgccgccgccgccgcgccgagcggaggaggaggaggaggcgaggaggagagactggccttggctgattatgaggggaaggatgt

SEQ ID NO: 405105 - DNA, 100 bp, Homo sapiens
aattgataacaccctgtaacagctgataatctatgccagcaattatgacaatgttagcagaccatgcagctcgtcagctgcttgatttcagccaaaaact

SEQ ID NO: 405106 - DNA, 75 bp, Homo sapiens
tccaggagggcgcaggagcgggactgagagcgcctggaggctcgagcggaggtttcccagagctatggggacttc

SEQ ID NO: 405107 - DNA, 50 bp, Homo sapiens
gcagctgctgagttctcggtgaagtttaacccagaactggtgctggtctc

SEQ ID NO: 405108 - DNA, 80 bp, Homo sapiens
caaacaaaagttagaattcttgaaaaaaagcatgttattgaattatcaacatcactggaaatctgaaatagagtactatg

SEQ ID NO: 405109 - DNA, 90 bp, Homo sapiens
gaactgtcaggtacctcaaagcgtgcactttacaggtccccgatgaaccaagagaaccctccaccatatccaggccctggtccaacggcc

SEQ ID NO: 405110 - DNA, 152 bp, Homo sapiens
gccgctgccgctatggatgatcgagaggatctggtgtaccaggcgaagctggccgagcaggctgagcgatacgacggtttctctggaaacccccctggtaagtgtggaggaggcgggacactctgacccaagacgaaaggcctgtagctcca

SEQ ID NO: 405111 - DNA, 75 bp, Homo sapiens
cgacgcggacatggtcatgagctttgtgaacctgggtcttgagtcaccacgtccgaatataattcttgggttagt

SEQ ID NO: 405112 - DNA, 50 bp, Homo sapiens
ttttgcatgagacgcttctggacagcaattctgtggtgttcttggtcaca

SEQ ID NO: 405113 - DNA, 100 bp, Homo sapiens
gactttgtaggctccgccaagaggcgccgcaggaggtatgcttcagaagtgtccttctgttgatgacttcgtaagtgccctcgtttccgacttggatctg

SEQ ID NO: 405114 - DNA, 100 bp, Homo sapiens
caaagagcaaggcagaatgtgaggtcagcccaaggctgccccctcggtcactctgttcccgccctcctctgaggagcttcaagccaacaaggccacactg

SEQ ID NO: 405115 - DNA, 87 bp, Homo sapiens
aggatgcagtggaggccatcaggggccttgataacacagagtttcaagggggattcccgaagtcttccgttttctgagaatgtgagt

SEQ ID NO: 405116 - DNA, 90 bp, Homo sapiens
atcattgatgtggtgcgatcgatttcctttgacctcgctgagtacactgcggacgttgacggagttggcactctacgacttctagatgca

SEQ ID NO: 405117 - DNA, 101 bp, Homo sapiens
aggagttccgcccctttctggcaaagatgagggggattcttaagtgagcaagaagaacccatcaggtgattgtcaggcctctgagcccaagctaagccatc

SEQ ID NO: 405118 - DNA, 100 bp, Homo sapiens
tacacagaattacactgaagaagtagagtatttcaaccataaagacatcttaattgggcacgaaagagaaatgcactcggtgatggaaagagagccacta

SEQ ID NO: 405119 - DNA, 75 bp, Homo sapiens
aaggattccaagtaactcttatttggtatctaaaacagcaccaactggagaatatttgacaacaggaagcttcat

SEQ ID NO: 405120 - DNA, 100 bp, Homo sapiens
agctggaaagcaccctgggaatcaatcttcctaagctgaagaacctctacctggagtctactcttcatcttgtgttgagacttcgtggtggtgctaagaa

SEQ ID NO: 405121 - DNA, 90 bp, Homo sapiens
cacttgtgcagaccgggcgagcagagtaagaagcagctactgtgtgaagacattcacaggacacagagaatgggtacgtatggtacggcc

SEQ ID NO: 405122 - DNA, 88 bp, Homo sapiens
ggccgtacgcggtgctgcgagggcagaacctgggaccacatgcaaagggccaatgtgccagcagatctgagctgagaatcatcctggt

SEQ ID NO: 405123 - DNA, 100 bp, Homo sapiens
ctgcgcaagcccgacggcaccctcgtctccttcaccgccgacttcaagaaggacctgaaggagaagaaggagaaggtggaggagaaggcaagccggaaag

SEQ ID NO: 405124 - DNA, 121 bp, Homo sapiens
ggtctcaatgttgccaaaatgtttcctaaagttcgtgaatctcaacttatgagtaacgaaagaggctttgaaaatgtagaactgggagtcataggaaaaaagaagaaagtcccaaggagag

SEQ ID NO: 405125 - DNA, 74 bp, Homo sapiens
tctctgtctcgctcagaggagatgcaccggctcacggaaaatgtctataagcgggctgacgcacgaggcacaca

SEQ ID NO: 405126 - DNA, 97 bp, Homo sapiens
acgtcttcgatggcccggccgcccagcccagcctggggcccacccccgaggaggccttcctcaggtcaccctcgagtcctggctgattcttttcctg

SEQ ID NO: 405127 - DNA, 75 bp, Homo sapiens
agaaaccgccccagcgatggaagaggatcaggagctggagaggtgttacacataatattgcattacttcgagagg

SEQ ID NO: 405128 - DNA, 50 bp, Homo sapiens
gccgccaaagaccccgtccggtagtgaaacccagggccccaggaaacctg

SEQ ID NO: 405129 - DNA, 100 bp, Homo sapiens
ctttgccttgccttatgtggaccattttctcagggaatggccaaatccagtgctattgaaacagcctgaagaatgcaatcttaatttgcctgtatgggac

SEQ ID NO: 405130 - DNA, 115 bp, Homo sapiens
ctcctcccagtgacgggtctggagtgcgtgggggaccggctgttggcgggtgctggagaatctggtaaaagcaccattgtgaagcagatgaggatcctgcatgttaatgggttta

SEQ ID NO: 405131 - DNA, 83 bp, Homo sapiens
gaagatctgggtgcccgtggaccacaggccctcgttgcccagatgctttgtccagggatctgaaaccactttgcagtcgacat

SEQ ID NO: 405132 - DNA, 75 bp, Homo sapiens
ttgatgaaattgatgctattggagggccctcgtttaaagcaagcagtttgaaagcagataaaaagttagaatttg

SEQ ID NO: 405133 - DNA, 103 bp, Homo sapiens
tcattacagaccctgaaaaactggaccaaattagacagaggcttttgctcatgtatccaagttgctgtcacagtgtaaatttgatctgttggaagaacttgtg

SEQ ID NO: 405134 - DNA, 74 bp, Homo sapiens
tacctgaaccggcacctgcacacctggatccaggataacggaggctgggtagttaaaccagagagcaatgacaa

SEQ ID NO: 405135 - DNA, 51 bp, Homo sapiens
ggctcaccgtcactctgacccagcatggtcctagcagaagatgtgactcag

SEQ ID NO: 405136 - DNA, 87 bp, Homo sapiens
gcgagcgaggcgccctagacatcttctccctcccttgcctcaggtgcaatggatgagcttcatagtctggatccaagaaggcaagag

SEQ ID NO: 405137 - DNA, 100 bp, Homo sapiens
agccagccccaggcatggtctacgattagtacgaaaaaggtagtgggcagcagtcagtgacaggtgtaacctctgtggatgacagcaacagttactggag

SEQ ID NO: 405138 - DNA, 51 bp, Homo sapiens
cagccttcccagtagctggaactacaggttatcaatactctggctgaccat

SEQ ID NO: 405139 - DNA, 90 bp, Homo sapiens
agaagacacccctttggttccggacaccagcagtgaaaacactgtggttcctccagaaacatatgtgaaagtggcaggccacctgagatc

SEQ ID NO: 405140 - DNA, 90 bp, Homo sapiens
gccagtttcatggatggctacaagcagaagaatgcttacattggcacacaaggtgagcgagtgctgtgctttcatgggcctcttctttat

SEQ ID NO: 405141 - DNA, 90 bp, Homo sapiens
ctgagccaggtgaagggccccgtaaattggaaggatgcacaagttccaaggttacgtttcagcaccacaccaaccccgtgggcactgagt

SEQ ID NO: 405142 - DNA, 74 bp, Homo sapiens
ctgttcaggtaccccttccagagaagccaggagcacccggcgtcccagacaagcaatggatcacttggagtcct

SEQ ID NO: 405143 - DNA, 75 bp, Homo sapiens
catgcctcaccctcatctatatcctttggcagctcacagctggtatgaatatgagcccagtctctcgactaaaaa

SEQ ID NO: 405144 - DNA, 97 bp, Homo sapiens
taccaagacccgacacaaggcagcttcccacagcaggttggacagttcacaggtgtcatggagaaactccagctgggcccagagattctgcagcggg

SEQ ID NO: 405145 - DNA, 100 bp, Homo sapiens
tgacatcgcgacgctgctcaaaacctcgctccggaaaggggacacctgcagaatggaagtgaggaaaggcaaccagctgacacaggagccagagtgagac

SEQ ID NO: 405146 - DNA, 82 bp, Homo sapiens
ctcctaaagaggatataaagccattaaagagacctcgagatgaggatgagctccaggaggccagagctctactgaagcggcg

SEQ ID NO: 405147 - DNA, 120 bp, Homo sapiens
tgcctgtgggacgctccgtggatgaggctctgcggctggtccaggccttccagtacacagacgagcatggggaaggccctggccaacgtcaacattgggagcctcatctgcaatgtaggg

SEQ ID NO: 405148 - DNA, 99 bp, Homo sapiens
cactctctgctattgtctgctgcatccaaatcttctccctggacctcgtgcatacgggaaatgtttcaacgtgcgcaagcgttgcggcggcgggcagag

SEQ ID NO: 405149 - DNA, 100 bp, Homo sapiens
tacggacttctgtgtatatgttatactgattctactctgcttttatcctttggagcctgggagactccccaaaaaggtgctggagaatctggtaaaagca

SEQ ID NO: 405150 - DNA, 82 bp, Homo sapiens
gccacggccgtctctggagagcagcagcttccatgaggcaggctgaacctgcagatatgcgcccagagatatggatcgccca

SEQ ID NO: 405151 - DNA, 97 bp, Homo sapiens
tcacctatgaaagcaaacgtatgggcatcatcgtgcggctctgaggatgaagtggatgtgcttttacatggaactcctgaccaaaaacgaaaactca

SEQ ID NO: 405152 - DNA, 100 bp, Homo sapiens
gtatgtggaaatagcgcggctgtgcaagtacctgccagagaacgacctgaagccgagtcgtccggaaatccattgcccgtgttctcacagttattaacca

SEQ ID NO: 405153 - DNA, 95 bp, Homo sapiens
cctgtgggcttcatcccaattcaggagacggtggacacacgcctttgtgacactaaccacaaacgatgcctacgccaaaggtgccctggtcctgg

SEQ ID NO: 405154 - DNA, 100 bp, Homo sapiens
aaatctgaaacttaagttgcattcctttgagtcacataaggatgaaatattccaggccaggacgactggaatgggaccaggccgtcgctgaaggcccctc

SEQ ID NO: 405155 - DNA, 90 bp, Homo sapiens
acagaacctttgacttggtgttgaaagtgaaatgtcatgcctctgaaaatgaagtagacccaaatgatttgtacattgtagaacccctca

SEQ ID NO: 405156 - DNA, 75 bp, Homo sapiens
tttgcagcgtagcccgagtcggtcagcgccggaggcggagaacaagcacaagccccgcaggaagtcaaagcgggg

SEQ ID NO: 405157 - DNA, 82 bp, Homo sapiens
acaaaaacctatcgttagagtcttcctgcccaacaaacagaggacagtgttttctggatatgccgcagaaggatccgtgcca

SEQ ID NO: 405158 - DNA, 82 bp, Homo sapiens
ggcactgtggttcctgcatgaagacagtggctggcggtgcctggacgtacaatttctggcccccaaagacaaaccaagtgga

SEQ ID NO: 405159 - DNA, 101 bp, Homo sapiens
gcaccatgggagacgctgggagcgagcgcagcaaagcgcccagcctgccgcctcgctgtccctgcggcttctggggtgcaaggatgatgctgaaaggaata

SEQ ID NO: 405160 - DNA, 98 bp, Homo sapiens
cccagacttgccccaggacacctttatccagtttcctggatggaccaagccgccgtcagccaatccagtggactcgcagccaaatttgtcatccactg

SEQ ID NO: 405161 - DNA, 99 bp, Homo sapiens
caggagtggccctgccttttgagaagtctcagctcactttgaaagattcagtacctctcgccagactctcacctggatcccagactccttcttctccag

SEQ ID NO: 405162 - DNA, 50 bp, Homo sapiens
gatgtacctggaattgttaaaattttgcctcaaggctgtcctggccggaa

SEQ ID NO: 405163 - DNA, 132 bp, Homo sapiens
ccgctaggctgtctgcctcggtacctgttactgctgctacttcctcgtttgacaccttcctgggctaaaagagatgctaagagaatgcctgcaaaagaagtcaccattaatgtaacagatagcatccaacag

SEQ ID NO: 405164 - DNA, 75 bp, Homo sapiens
caccacggcacggaaggtggggcggcctgggaggaagcgcaagcaccccccgttgtcgagatgtccacagaagga

SEQ ID NO: 405165 - DNA, 96 bp, Homo sapiens
ccgggatcctggagcactcggtcatgtacccggtggactcggtgaaggctggagtgaagtggcacgatctcggctcactgcaacctctgtctcccg

SEQ ID NO: 405166 - DNA, 101 bp, Homo sapiens
atcaagccacaatttccatcaaaaagtgattaagcagagaatggagaagaaggttgattccaggtaactgcatcctgcccagcatgacggccccctgcccg

SEQ ID NO: 405167 - DNA, 100 bp, Homo sapiens
ctctgacccagctagccagatcccggacccaaaccatgttccctgtgaaggtgaaagtggagaaatcaggtggacccccaaaagtacaagggcatattta

SEQ ID NO: 405168 - DNA, 83 bp, Homo sapiens
ccggaatcccgctcggagccagccagccgtcccgagctaccagcaggacctgaaggagaagaaggagaaggtggaggagaagg

SEQ ID NO: 405169 - DNA, 95 bp, Homo sapiens
atatgtttgagaggctggctgaggaggagaacaagaaagtttcctacactactgaggtttaggggcactgtgaagcaaaagccacgcctcagaat

SEQ ID NO: 405170 - DNA, 74 bp, Homo sapiens
ccgacgacgacctgtttgtggacttggggagcggtcttgaggaccggcccagctcaggctcctggggcagcggc

SEQ ID NO: 405171 - DNA, 74 bp, Homo sapiens
ttggaactgctttacaaagtattttagtcctcagaatggttggaatgaccctccagctttgaacagagtaccca

SEQ ID NO: 405172 - DNA, 86 bp, Homo sapiens
tgacctacctcaccagcatccccagggctccacgtgttccccacgtttgtggcgtacgagctcacggtgctggtgttcctcacctt

SEQ ID NO: 405173 - DNA, 82 bp, Homo sapiens
cttacagccgctcgtcagactccagcagccaagatggtgaagcagatcgagagcaaggccactctgcccttccactgcagtg

SEQ ID NO: 405174 - DNA, 75 bp, Homo sapiens
atgaggctgatgcagaggagaggggtcctgaggagaactatagcaggctggtttaccatgacttcttcagagacc

SEQ ID NO: 405175 - DNA, 97 bp, Homo sapiens
attgctgcccagcagctaggcatcaagtacatcgggatgaggaatgagcaagcgatggggtcgaggatttggtcttttgggttccatttttggaaag

SEQ ID NO: 405176 - DNA, 101 bp, Homo sapiens
ctcgggtttggaccccaggatccgatcagcggacccttgattcaacgtggtgcgttgtagaagacaagaactcaaaggtggcctggttgaaccgttctggc

SEQ ID NO: 405177 - DNA, 100 bp, Homo sapiens
ccgggagccgcggcccggaatcggggcgcttcgccccgggccccccagcatgaagaccccggcggacacagccctccagaatacccatcatatagcccct

SEQ ID NO: 405178 - DNA, 76 bp, Homo sapiens
tctgcgttctgctcctactgcttcgcgtccagacagatgaaggatttgggggcagagcacttggcaggtcatgaag

SEQ ID NO: 405179 - DNA, 77 bp, Homo sapiens
tgccaggaacgtggagcccggctttttgctacagatgagaggcatatacaagctgagtttcagccatggaaaaactc

SEQ ID NO: 405180 - DNA, 100 bp, Homo sapiens
agagagttctttccttggcctgggagcatccgtttctgacgcacatgttttgtacattccagaccaaggttaatggggttgacctgaggaactccagcca

SEQ ID NO: 405181 - DNA, 100 bp, Homo sapiens
ccccaggtcgcagcagcgtgtcgcctccggggggcgtagcaaggtattgttgcagcatctggcagtgagactgaggatgaggacagcatggacattccct

SEQ ID NO: 405182 - DNA, 90 bp, Homo sapiens
atctcgaggaatctgcagtggagctcatgaaagaccaggattccaaaagaggatttggaattgcagtgtccggaggcagagacaaccccc

SEQ ID NO: 405183 - DNA, 98 bp, Homo sapiens
cggcgcgggacccggaggacggtatcccgagcccaccgtgctacgcagggagcgcatgaacctgaaggtgcccatctacttctccacggggctgaccg

SEQ ID NO: 405184 - DNA, 90 bp, Homo sapiens
gaagaattattttgcaccactggatgttgtttactggtgacagagctgaatgaacctctctccaatgaagatcgaaatctcctctctgtg

SEQ ID NO: 405185 - DNA, 75 bp, Homo sapiens
tcaacgccatcgcagtgctgcacgaggagcgattcctcaagaacattctgtggaagcaaatcattgaacgcaatg

SEQ ID NO: 405186 - DNA, 76 bp, Homo sapiens
agaatttactacagcatgtgatttcagacaacgactgaaagacctttcattcagaagctgtttcgtcctgtggctg

SEQ ID NO: 405187 - DNA, 50 bp, Homo sapiens
ggaaaacaaaggcattcaggagccacaccaccaaggtgttccagggcgtc

SEQ ID NO: 405188 - DNA, 75 bp, Homo sapiens
ctccggaacagcaagaactgcaccgaaccagggtgttgatgatgccttctatacattagttcgagaaattcgaaa

SEQ ID NO: 405189 - DNA, 78 bp, Homo sapiens
gaagaggacacagccatgcagatgactccttttcccacccaggtttgaagatgccgcatttggattggatgaattcca

SEQ ID NO: 405190 - DNA, 90 bp, Homo sapiens
cgaccattcttccctgggctggtgaagtacatgaactcagggccggttgtggccatgcctgatctagttgaatctgaagatgtggacctg

SEQ ID NO: 405191 - DNA, 75 bp, Homo sapiens
gatcaggatttttggcctaccctccaaagaaaaggtctctaattaacagaagatggcaaagcccagccacagcag

SEQ ID NO: 405192 - DNA, 96 bp, Homo sapiens
gctcgggccgcaccgcgcggggccgctcggagtggaggccgcctgggggcaggcgggctagaggagcaggttcgaagtcaacaataccattcttca

SEQ ID NO: 405193 - DNA, 50 bp, Homo sapiens
tgctgcaagagaaggcactcaagtttatgctgccactgcagagccccgcc

SEQ ID NO: 405194 - DNA, 100 bp, Homo sapiens
tcggtcctatacaaggagtatgctgaagatgacaacatctatcaacagaagatcaagggacaagaatccttcaagaaacaggaaaaaactcctaaaacac

SEQ ID NO: 405195 - DNA, 90 bp, Homo sapiens
catcaagagctgcgagatccaacaggaagctctatgcagaactgtgccaaggcatcgtggacatagccatttccagtgtcttcccacccc

SEQ ID NO: 405196 - DNA, 98 bp, Homo sapiens
atttattgacttggcaagggcttattgttcctgttatgatgtgattgctcaagcccaatctgggactgggaaaacggccacatttgccatatcgattc

SEQ ID NO: 405197 - DNA, 75 bp, Homo sapiens
gggaagatcctggaggtggatctgaagaacggtggagaacatgcagctgaccctgaacctgcagacggagaacaa

SEQ ID NO: 405198 - DNA, 100 bp, Homo sapiens
aatactccttccttcctccccacccattcctttaaatccggagggggaaaaaatcccaaggtctgcaaaggctcatgcacaattagttcgagaagttgat

SEQ ID NO: 405199 - DNA, 100 bp, Homo sapiens
tccagatcgggatttacgtggagatcaagcgcagcgatgaccttctctgatggatgacctctgtgaagcaaatggcacttttgccatcagcttatttaaa

SEQ ID NO: 405200 - DNA, 101 bp, Homo sapiens
attaacatatttcagagcaacctctttcaggctttaatagtcgcaatgtatctgctgagcaaaaagatgaaaacaaagaagcaaagcctcgatccctacgc

SEQ ID NO: 405201 - DNA, 74 bp, Homo sapiens
gagaattaaacaggcctttcaaggagctgtgcaaaagagtgaattactggaactgaaacggcagcagcaagagc

SEQ ID NO: 405202 - DNA, 100 bp, Homo sapiens
gcttcggaggcaagtttggtgtccagatggacagagttgatcagttacggctagatgaggctcaagaagcagaatgccaggccttgaggctacagctcca

SEQ ID NO: 405203 - DNA, 100 bp, Homo sapiens
gctgttgctgaaatacggtgatgcctgggtgaagaagtatgatcgctcctccctgcggaccctggggtcaggtgatgatgaacagtctacacagatggct

SEQ ID NO: 405204 - DNA, 100 bp, Homo sapiens
cccaagtctgcccttgtttgaggccttcacagcatgtggttttgtgcagactatgtcttcagcagtggtgcagttatatgcagcagatcggaactgtatg

SEQ ID NO: 405205 - DNA, 87 bp, Homo sapiens
tgtagaaacgtgctgtgtaattggtagaggaggtcagtcagccttgcgttttgcccgtttaagaatggaaaagcgacataactatgt

SEQ ID NO: 405206 - DNA, 100 bp, Homo sapiens
cagtcggcttctctacgcagaacccgggagtaggagactcagaatcgaatctcttctccctccccttcttgcaatcactgcttgagaagcagagagtcct

SEQ ID NO: 405207 - DNA, 111 bp, Homo sapiens
cacttgctctgcgctgaggtgctgggacagccatggtttcagacggctgtctacctggtctccagaatggacggccctgtggcagagcatgccaagcaggagccctttcac

SEQ ID NO: 405208 - DNA, 75 bp, Homo sapiens
gaaaatcaagtagtgtttgccagagttgattgtgatcagcactgtacaccttgactgtccctggagacagcccct

SEQ ID NO: 405209 - DNA, 50 bp, Homo sapiens
ccaccagcggttccatcctacacttggacccaacatgagtgaagtttcct

SEQ ID NO: 405210 - DNA, 90 bp, Homo sapiens
gaaacaccgttgtcagcacttggaatacaagatggttgccgggtcatgttaattgggaaaaaggaggtagaagaggatgatccagtgcct

SEQ ID NO: 405211 - DNA, 100 bp, Homo sapiens
tttgaccagaaaaccgacaaccttcccagaaagtccaagctcgtgtgtcttgggacaaggtgcgcattcctggtgtgctgcagcgattgggagtgacata

SEQ ID NO: 405212 - DNA, 75 bp, Homo sapiens
cactttcatcacatggatcctcatccagtttgcatttaggtttctaagcatgaattgaggaacagaagaagcaga

SEQ ID NO: 405213 - DNA, 80 bp, Homo sapiens
gagaaagtcgtcttccacttgcacgaaagctttcctaggccaaaaagagaagaggtgcagtatattcaggctgagaaaaa

SEQ ID NO: 405214 - DNA, 100 bp, Homo sapiens
gaaaagagtagcctgggctgtctggaaatctgaggaacgtcaaggtcgtgggaaataaaaggcagttctacacagactgcagcaacggttgcatctgcat

SEQ ID NO: 405215 - DNA, 83 bp, Homo sapiens
ctggaggaggataacaagttttgtgcagattgccagtctaaagatcaccgaagtggccttggagtacaacaactgtcatgggg

SEQ ID NO: 405216 - DNA, 75 bp, Homo sapiens
ccatttgagccctatatttccatggatgccatgccaggaaagatttgaagcactcttcaccatctatgatgacca

SEQ ID NO: 405217 - DNA, 100 bp, Homo sapiens
gagcttggaaggatgcttcagctcatcttaggctgtgctgtgaactgtgaacagaagcaagggccgttgctccagggagaactgcaaatatcttcatcca

SEQ ID NO: 405218 - DNA, 98 bp, Homo sapiens
ggaactgctagatgaacccatcccccagatagtggctacagagataagttctgaacgtcgaaaagaaaagtctcgagatgcagccagatctcggcgaa

SEQ ID NO: 405219 - DNA, 100 bp, Homo sapiens
gcaggagctgcggcggcgaagcggagagcaccggggggaggagatggatgtctctgcccacccacgcaacccagactatgaagagtccggtgaaagcagc

SEQ ID NO: 405220 - DNA, 82 bp, Homo sapiens
cggcgagcgcgagcggcgcgagaaaggccggagttaagatgagtccagcgaagtgcctagagtaccaaattcatggagacgt

SEQ ID NO: 405221 - DNA, 98 bp, Homo sapiens
cagaggaagatggacagctgggaattgctgaattagaactgcagaggttcctctacagcaagattgactggggcgactttggggtagaggcagtgtct

SEQ ID NO: 405222 - DNA, 130 bp, Homo sapiens
cgaagcacgagcagatcctggtcctcgatccgcccacagacctcaaattcaaaggaggatttgacagctaaggatattgaagaaattattgatgagctcaaggctggcaaaatcccaaaaccagggccaa

SEQ ID NO: 405223 - DNA, 90 bp, Homo sapiens
gccgcgcggcgctggactggagcagaaccccaggactgcgcccccgggagcgggcgcccagagcattccacgcctacgggaaggcaggca

SEQ ID NO: 405224 - DNA, 97 bp, Homo sapiens
acaaaaattccctgaagtacctgaagttgttgtatccaggtgcatgttacaggactcacaccacccggcaagaactgctcactacggctccctgccc

SEQ ID NO: 405225 - DNA, 75 bp, Homo sapiens
aagtgctcagcaaagcaggctgtaggtttagttgagcaccggaaagaacgtgcaaacagctgcacagcaagtggc

SEQ ID NO: 405226 - DNA, 50 bp, Homo sapiens
gaaaaaagcctgcattcattggtaaaggagaatggtgttgaacgcgtgtg

SEQ ID NO: 405227 - DNA, 97 bp, Homo sapiens
ccgactccgcacggcactgccgacctccgggagcagcgcagcgtccgtctccaagagagtatgaagagagtgcgtctgtagggcagggaagatggcg

SEQ ID NO: 405228 - DNA, 85 bp, Homo sapiens
ccaagcattgtatcacttcatctgcaaatatttcaataagtacccaaaaggctttgatgcggcctggaagaattgatagaatcat

SEQ ID NO: 405229 - DNA, 100 bp, Homo sapiens
ctggagtccaagttcaaacaggtggaggagagtcataagcaacacctggccaggcagtttaaggatggagggtacagagtctgcctacatcagctccttt

SEQ ID NO: 405230 - DNA, 100 bp, Homo sapiens
tatagtatttcatttctgaagcagcttattgctggcaaactccaggagtctgttccagaccctgagctgattgttttccacctatttccctggatatttt

SEQ ID NO: 405231 - DNA, 75 bp, Homo sapiens
aagctaatcagctctttgatcctatgacaggaaggatttgatgccctggatccctttattcccatcctggtttcc

SEQ ID NO: 405232 - DNA, 101 bp, Homo sapiens
ccatcctccagctttgccgccgcgctgcgcaagctcgccaaacaggcggaggagcccagaggtactccaaagattcaggtttactcacgtcatccagcaga

SEQ ID NO: 405233 - DNA, 50 bp, Homo sapiens
atcctggggacctggtacatggctgtgtgaggcattgtgtaatcagccag

SEQ ID NO: 405234 - DNA, 50 bp, Homo sapiens
atcctgggtgctggccctgtgctggagctcaccgtctacctgggaaagcg

SEQ ID NO: 405235 - DNA, 82 bp, Homo sapiens
aggagcggatcagaagcaagacccagcggctctccaaggaggtgcttcccaaggaccgtagatgcctctctagagcatgagc

SEQ ID NO: 405236 - DNA, 100 bp, Homo sapiens
cggccccccagtccagggggaacgcagtgcgccccgcttcggtgttacttccctcaggtatgattatcgggaaatgctgcacaatgccactttctgtctg

SEQ ID NO: 405237 - DNA, 100 bp, Homo sapiens
cttctttcagctgttcgttcaaggctatgccctgcaactgcaccagttacagaggtgctgatactcaaagaaggtttaagttgtctgatctctctataaa

SEQ ID NO: 405238 - DNA, 95 bp, Homo sapiens
ctgtgggggccgccgggctgcggcaagctgtcaataccagcaaatatgcagaaagctatcggatccaaacctatgctgaatatatggggagaaaa

SEQ ID NO: 405239 - DNA, 101 bp, Homo sapiens
catgcagcgcttggacatggacgttactccacaggatccgctgaacataggatgttgccacaaaatctacctcgtgtatttttctctttcactcatgagct

SEQ ID NO: 405240 - DNA, 50 bp, Homo sapiens
agcacctcctcgaagtcatcccagtccattgtttgatgtcctgtgactga

SEQ ID NO: 405241 - DNA, 83 bp, Homo sapiens
accaagcgcctctactacctctggatgtcccaagaagatgaaaggattgttcttgttgacaacaaatgtaagtgtgcccggat

SEQ ID NO: 405242 - DNA, 76 bp, Homo sapiens
tccgagatcgacgagtctgtggttcaggtgtgggacacagcaggtcaggaacgtttccgcaaaagcatggtcgagc

SEQ ID NO: 405243 - DNA, 100 bp, Homo sapiens
cactggtagcccccacccctctccgtccatggccccagatgacacttcaggagttcaaagaaggacgcagagccagccacacagccccacaggtcctctt

SEQ ID NO: 405244 - DNA, 100 bp, Homo sapiens
tgactccaagcccccgtcctgcagcgagaggcccctgacgctcttccacaccgttcagtcaacagagaaacattcatgccagaactgaaagctaaattac

SEQ ID NO: 405245 - DNA, 89 bp, Homo sapiens
gaaagtttagaaggatgccatacgctttgtctaatgggtattatgccggctgggctgataagtaccacgggaaaaccatccccattgac

SEQ ID NO: 405246 - DNA, 88 bp, Homo sapiens
atgagcagaaaggagttggggcttgatgaaggcgtggatagcctgaaggcagccattcagcttgacagagccaattcgctattaaacc

SEQ ID NO: 405247 - DNA, 102 bp, Homo sapiens
cgccggcagcaggacacatccgccagcatgcccaagctcttcctgcacctggaaaagagacagtcattttgtttactcattcagccctgttgcaggtcccaa

SEQ ID NO: 405248 - DNA, 75 bp, Homo sapiens
cagaaagcacagacccaggaatttcagtttccaggaatatggatctactggaacagcccatgctgatagtgaata

SEQ ID NO: 405249 - DNA, 105 bp, Homo sapiens
gtctcaggtgacttggcgtaactgagaatacagccttgggaccttcgggtgtatgtacaaagacttttgaagaggtgtgggagcacacatgatttaaaggaaaac

SEQ ID NO: 405250 - DNA, 83 bp, Homo sapiens
cgtcacggcgtacgccctcatggggaaaatctccccggtgactttcagaagctccaccatgaggcgaggtggatggaggaagc

SEQ ID NO: 405251 - DNA, 82 bp, Homo sapiens
tggtttttcggatcatgtctggtggctccgcggattataacagttcctctgtgacgagggtgcaggtatctctggggactac

SEQ ID NO: 405252 - DNA, 90 bp, Homo sapiens
gagcaaagctacttccattccagaaagatggcatcatttttgccctcaaaagaaatggcagcagataatcaccagaatgggagtgaatga

SEQ ID NO: 405253 - DNA, 100 bp, Homo sapiens
tattacaatcgcttgtacaaaggagagtttaaacagccaaaacagttcattcatattcagcgtcagcagcaaggacaagatggagtaaaagtccagcaag

SEQ ID NO: 405254 - DNA, 100 bp, Homo sapiens
taccgggcgccccacgggccgaagccggtccgtggcactcaggtagttggttctgacatgactgtgacagttgagtttaccaatcctttaaaagaaaccc

SEQ ID NO: 405255 - DNA, 51 bp, Homo sapiens
agacagatcgctgtcaaaaccctaggttatatcttaagtgtggtgctgcta

SEQ ID NO: 405256 - DNA, 89 bp, Homo sapiens
gggtccagagcattgtccagactgaggaagaacaggcttttgagttcctgtgcagatcacacgatttatgcctccccatgttctctgag

SEQ ID NO: 405257 - DNA, 135 bp, Homo sapiens
gatcgtggtgacgtttaagacttttgaagaaatctggaagttttccacctaccatgctctcgatgtcctcaatggaaccataacgtttttgcctttggaagaagatgatgaggggaacctaaaggttaagatgag

SEQ ID NO: 405258 - DNA, 89 bp, Homo sapiens
ggcgcgctgctggacgaagagctctcctccttcttcctcaactatctcgctgacacgcagcccgtggaccgggagcccgtggaccggga

SEQ ID NO: 405259 - DNA, 75 bp, Homo sapiens
ttagtagtgtccaggaaaatatacagcagattggtcttgatttgagcaatggtaaacctcgagacaacaaacaag

SEQ ID NO: 405260 - DNA, 100 bp, Homo sapiens
cttccagaaaaatctcaaggaaaagtattgcaagcaacagtagtcgctgttggatcgggttctaaaggaaaggaaactacaagatccccggatcatgacc

SEQ ID NO: 405261 - DNA, 100 bp, Homo sapiens
tgacacctgaatatttgttcccccttgtggcagaccttaagcatgccattcaaagcaaatacaagattgctattcaacaccaggtgctggtggtcaatgg

SEQ ID NO: 405262 - DNA, 101 bp, Homo sapiens
aaagggagttggaaattgaagaacgagaacggcgtagagaggaagagagaagacttggcgatagttccctttctagaaagacagcaagtgtctctgctagc

SEQ ID NO: 405263 - DNA, 75 bp, Homo sapiens
ggcgcccccgagccgccgccgctgtccggagccccacaggcccaggctgcaagcacaaaggaagtttgctcagtc

SEQ ID NO: 405264 - DNA, 75 bp, Homo sapiens
ctccactccgtcccccgcgggtctgctctgtgtgccatggacgggtaaggctggcctctctgcagtcagaggtct

SEQ ID NO: 405265 - DNA, 132 bp, Homo sapiens
ggcacgacgacggtccctcagcccagccaccatgagcaccaagcagatcacttgcaggtctgggtagatgctggaacgcagatctttttctcctatgccatttgcctgggctgtctgaccgctctgggaagt

SEQ ID NO: 405266 - DNA, 75 bp, Homo sapiens
gatttattggaggcctacttgcagcatattacctatcaggagaggaggtacgcatagctgctaaattcatcactc

SEQ ID NO: 405267 - DNA, 100 bp, Homo sapiens
aggatgctcctgcctcccagagaggggagccggcgaggatcaaaatcttcgaaggagggacttggcacaatatgtgaatgaagtgaaaagagataatgag

SEQ ID NO: 405268 - DNA, 101 bp, Homo sapiens
cgggtacaatgggcagctgctgaccagtgtgtaccagcccactgagatggccctgatgcacaaagttccgcgcatttgtagccatgaagtgccatcttgcc

SEQ ID NO: 405269 - DNA, 100 bp, Homo sapiens
cagccctccccttctacaacttccaagacagttactacatcagattctccaatggatgacttctttcagtgtgtgaatgggaaatacatttctcagatga

SEQ ID NO: 405270 - DNA, 96 bp, Homo sapiens
tacgtcccgctgccgtcgccgccgccaccatgcccaagagaaaggtgcgcgcggagccatggttatcatgtcggagttcagcgcggaccccgcggg

SEQ ID NO: 405271 - DNA, 75 bp, Homo sapiens
gaagatcagaggctcacattccaggctgaagaactatgccctggttattctaatcccaattacatgtacttagca

SEQ ID NO: 405272 - DNA, 100 bp, Homo sapiens
cagtccacgtgtggcaggaccaagggaagtgtcttcacaaagatgaggtcactgaactgatgcaggagcagtcatacctgaagtctgaattgggcctggg

SEQ ID NO: 405273 - DNA, 100 bp, Homo sapiens
cagttgtggcggttgctggtcagtaacagccaagatgctgcggaatctgctgggtaagaagtaccaatgggatgcagaaactcaaggatggattctcggt

SEQ ID NO: 405274 - DNA, 96 bp, Homo sapiens
tgtaaatatggaggagtctgtaaagaagatggagatggtttgaaatgtgcatgccaatttcagggtgcttcaaggatgaccgcatcgtcttctgga

SEQ ID NO: 405275 - DNA, 83 bp, Homo sapiens
ttacattctctcggccagcgcctccgcgcccgcggcgccatggctcacgtcggctcccgcaagcgctcgaggagtcgcagccg

SEQ ID NO: 405276 - DNA, 100 bp, Homo sapiens
ttctgttactccactgactctctcttttcctgataacatggccagcaagaaagtaattacagtgtttggagcaacaggagatgagtatgatgtatgtgcc

SEQ ID NO: 405277 - DNA, 100 bp, Homo sapiens
attacaggcatgagccaccgcgcccggccatgagttgcttcttttaattaaaaattccttttccaggagtatgctgctgctgttccgctttgcgtcctcg

SEQ ID NO: 405278 - DNA, 89 bp, Homo sapiens
gctgtcctcatttgtgactatggacctatggagttgggctttgtggtgacccagctggtgacttcctgtggttctgatgggcactctat

SEQ ID NO: 405279 - DNA, 88 bp, Homo sapiens
ataagtgcagtatgagctacatgtttgagtacccggagtatcagacccctgggcatactccttccttaagatgggatgagacaccagg

SEQ ID NO: 405280 - DNA, 100 bp, Homo sapiens
gtgaagtgccatcttcggctaggtcgtcacaggctccggctcatggcatcaagtggcatccatcataagagcaaatcatggaggaagataaaaaacatgg

SEQ ID NO: 405281 - DNA, 100 bp, Homo sapiens
cttgtgtgggcactgaagggggactacaggttcgagacacaacattctgaaattttttggttattgtaatgatgttgatcgggagttgagaaaatgcctg

SEQ ID NO: 405282 - DNA, 83 bp, Homo sapiens
ccgctgagccgtcgcggagccgcgcagccctcggagcacggggacaccgtggtgtttaaggatggccagtactggatccgagg

SEQ ID NO: 405283 - DNA, 98 bp, Homo sapiens
gcttcgagaagcgccacaagaacatgtctgtacacctgtccccctgcttcagatacatcgagatatttccaagcagaaggaatgaagttcgaacacat

SEQ ID NO: 405284 - DNA, 98 bp, Homo sapiens
aaaggatcagtgcttcctaactcagatgtcatgtggcctgtgttttggaccgtggttcgtacctatgctccttatgtcacattccctgttgccttcgt

SEQ ID NO: 405285 - DNA, 75 bp, Homo sapiens
agtgtgttagctttccccaatgtgttagtgacaaacagtctgcggtaactgaatcctcagagggtacagtatcct

SEQ ID NO: 405286 - DNA, 101 bp, Homo sapiens
ctctttcctcccatccaggcctcctgcctctcagatgcttctgttgagcctctctctgccacaatggtagttgagaagacccttttgaggacttctttggg

SEQ ID NO: 405287 - DNA, 75 bp, Homo sapiens
tgggaactccgccatgtcatccacttcgcccaacctccaggatccgagccagagacaacaacggctcctacgccc

SEQ ID NO: 405288 - DNA, 98 bp, Homo sapiens
tgtcgtggccgtgttgctgatcgcctgggtggttgttggcgtgtccctgcagcgaaggatcctggtcgcaatggaagaagagatcgccgcgctggtca

SEQ ID NO: 405289 - DNA, 74 bp, Homo sapiens
gagcctctcagccggccgggatggctaccacggccgagctcttcgagttctcaaaagtctatggccctgtgttc

SEQ ID NO: 405290 - DNA, 98 bp, Homo sapiens
aacgaacttgtatgagggtcatattgaaaaggatgcccgggaattcctggacaagcaggaccatcagcacgtgcccatcgacatccagaccagcaagc

SEQ ID NO: 405291 - DNA, 100 bp, Homo sapiens
tcttttaatttagctacagttgttgctgaaacacttggacttggtgttcaagaagaatctgtgggatgagagactgagaaaagaaataagacacggagac

SEQ ID NO: 405292 - DNA, 102 bp, Homo sapiens
ccagagaatgagttaaccaaacagcacccttctgtttctttacagcagtataaggaatttttgagagatatcttcaatctcctgtttttgttgccaagtcta

SEQ ID NO: 405293 - DNA, 76 bp, Homo sapiens
ccagtgctaaaggatctctgatctggatgagtgaccgaggaggtggcgttcctttgaggaaaattgacagactttt

SEQ ID NO: 405294 - DNA, 100 bp, Homo sapiens
caggcttcatacgctattgtcctgcccgtaagttcccgttttgtgtgtgtgttatccaagataaattctgtgggattataaacatttcagtagaaggcct

SEQ ID NO: 405295 - DNA, 100 bp, Homo sapiens
catccagaaggtctcagcacactgatgatagtgccttgtgcatgagaaagtggctcatgccaaagaagaaaaccttagtatgcatcagatgctggatcag

SEQ ID NO: 405296 - DNA, 100 bp, Homo sapiens
aaactatgggacacagatatgttgaagggactgtcctggctgtgtttggctccgtgagagacgacgggaagtttctggtggaggactattgctttgctga

SEQ ID NO: 405297 - DNA, 98 bp, Homo sapiens
catggaggctgagcatttattcaggttgtttttcaccattcagaacattgcctgaagcaggtccaccatgccgttagtaacgaggaacatcgagccaa

SEQ ID NO: 405298 - DNA, 75 bp, Homo sapiens
gcccttgctcaacagaagatttgctctatgatcgtgataaagaaatacactttcgggaaatggcctctaaatcct

SEQ ID NO: 405299 - DNA, 101 bp, Homo sapiens
cggagccgcactaagagcgctggacggcgggagagaggctcggaggaccggtagctcccagcaaagcggcccagcggagcaaaatatgctgtgaattccat

SEQ ID NO: 405300 - DNA, 74 bp, Homo sapiens
gttcagaccctcggcagcctgtccaagtccaaatcttgcagagcagagcgggcggaggaccccgggcgcgggcg

SEQ ID NO: 405301 - DNA, 96 bp, Homo sapiens
taccatgtcagccttcccagtagctgggaccacaggatgagacctgcacgcagtggctcacagcagcacgatttgtgacagcccgaggcggagaac

SEQ ID NO: 405302 - DNA, 75 bp, Homo sapiens
gggtgtaatacatcatgaactgcaggctgatgttctaatcatgtcagataaagatgatattgagactccactgct

SEQ ID NO: 405303 - DNA, 75 bp, Homo sapiens
cgccagctccgtgaagcagatggccgagctgctgcgcagctcctgcccggtactccaaagattcaggtttactca

SEQ ID NO: 405304 - DNA, 100 bp, Homo sapiens
aagagtaagaattggctgagttcacatatgggctccatcaataactagcggccaggtgagattaggaattgtggtgcttggaataaacagagcttatggc

SEQ ID NO: 405305 - DNA, 75 bp, Homo sapiens
cggaaccagaagcagattgccaacattgaccgtattacaaagaggaaatgagtctcaaccagacagccaggaaga

SEQ ID NO: 405306 - DNA, 132 bp, Homo sapiens
tctggccctgagtagggtgtgacctccgcagccgcagaggaggagcgcagcccggcctcgggttctcatgtatcagccatcttctgtaagggtgcccagtgtgacttcggttgatcctgctgctattccgcc

SEQ ID NO: 405307 - DNA, 75 bp, Homo sapiens
agaaacacaagaccttcgtggaaaaatacgagaaacagatcaagcactttgggatcaagcatgaattgcaagcaa

SEQ ID NO: 405308 - DNA, 87 bp, Homo sapiens
tgccctggcgctgacaagggtccagcctccgatgcctgggcagtttttaaagggaagtttaaagaaggggacaaagctgaaccagcc

SEQ ID NO: 405309 - DNA, 96 bp, Homo sapiens
gacaaatgtgtgcgatcggaggaatgcctgagcgggacatggactcaacagatctgtctgcctgcaatctacaagatatgccaatgtcaagaaatg

SEQ ID NO: 405310 - DNA, 100 bp, Homo sapiens
agagtactcatggaaaaggagttccctggatttttggaagtttctcagtttgggtgcagatcatttgctttgctttttgatgatatagaccataatatgt

SEQ ID NO: 405311 - DNA, 82 bp, Homo sapiens
ccgaagaataagactaaagaaaacattttggaagaattcagtaaagtcacagcatgcaggttaccacccatacctcggctgt

SEQ ID NO: 405312 - DNA, 100 bp, Homo sapiens
caataatgaaattgattggcttaaaagaattagggtttgatgatcgtggacggagtgattacgatggcattggcagccgtggtgacagaagtggctttgg

SEQ ID NO: 405313 - DNA, 73 bp, Homo sapiens
ccggaaccgcgattcggcgtgtcagaaatatggctacacacacctttctgcaggagagctgcttcgtgatgaa

SEQ ID NO: 405314 - DNA, 100 bp, Homo sapiens
ccccggagcagtacctcgtgctggaaagagttctactgtttcgaaccatggttaccaaggagaaggagaaactggggctggtggaaaccagctctgcctc

SEQ ID NO: 405315 - DNA, 100 bp, Homo sapiens
tattcaattttgcagacggcaagacttctaccaggagcacctcagcaacctcattcttcaggtcatctgaaccttctgagaaaacatggtcaacgtcttg

SEQ ID NO: 405316 - DNA, 88 bp, Homo sapiens
gtcggcatcacaggggtaaccaaggccctggccaacgtcaacattgggagcctcatctgcaatgtaggggccggtggacctgctccag

SEQ ID NO: 405317 - DNA, 82 bp, Homo sapiens
cgtgagagcatcaagctcgtgtccatcggagcccagcagccggggccgccctattacaccgacccaggaggaccggggatga

SEQ ID NO: 405318 - DNA, 75 bp, Homo sapiens
ctacagcatggtggagtcgcctctgatctgcaaagaaggagaaagcgtgcagggacacttgacattcagggacgt

SEQ ID NO: 405319 - DNA, 100 bp, Homo sapiens
ggggatcattgccctgaacgtggatgactcagtttcaggcccacacctctcagtgacgttcttttggatcctagtggccagacggggttttgccatgttg

SEQ ID NO: 405320 - DNA, 100 bp, Homo sapiens
ccaggcccgcccctcccctcgatccaggtccagagagcatcgcagacatcgatctcgctccatgtcacgtgaacgcaagaggagaactcgatccaaatct

SEQ ID NO: 405321 - DNA, 100 bp, Homo sapiens
gcctgacgcatctgtctgaggagcggtcagtgacgcgatggagcgggcaagggtgcgaagtaccacattactgtcatctccctgtgagtgggattggcac

SEQ ID NO: 405322 - DNA, 75 bp, Homo sapiens
accagtccatttggggaaatccttcggatggtgaactcattagaaatatgaaaaacagtagctccgtatcgaata

SEQ ID NO: 405323 - DNA, 75 bp, Homo sapiens
atgacagggacgtctactacatcaaggtttttgccaatccagaagactgtgtagcatttggcaaaggagaaaatg

SEQ ID NO: 405324 - DNA, 82 bp, Homo sapiens
gagcacataacggggttcgggtgtctcgtgtgtgaacatcacagtgcccttgctaccagttccgagccagccgagacctgcc

SEQ ID NO: 405325 - DNA, 87 bp, Homo sapiens
ccaatccgcatgagcgtcctttcggtgactttcggatggtggttggagaagataaaacaaaagtgttgaatattgtgaagcccaata

SEQ ID NO: 405326 - DNA, 100 bp, Homo sapiens
atctgatgaatattttccttctgaaccagggttctgcatccactacaacattgtcatgccaggtatacctcagttaccatgtgccaaagcattatacaac

SEQ ID NO: 405327 - DNA, 100 bp, Homo sapiens
catctccttctctaagagatgcctgcagcctgccatgggacgtggggtccaccggtacaggtgactcccacacgggtcatgctgttgtctcctgatccag

SEQ ID NO: 405328 - DNA, 100 bp, Homo sapiens
gggagcttccgggagggcggctcgcaggtatcctgtggtctgaggccatcttcctcgaggcaaggccccagaggaggaccaagagcgtggatgccctgaa

SEQ ID NO: 405329 - DNA, 74 bp, Homo sapiens
gagagcacgccatgaaggcctcgggcacggatctgttccggtctactatgaagcccgtccagaaagtgttggaa

SEQ ID NO: 405330 - DNA, 100 bp, Homo sapiens
cgctcctctgaagagtgaagtgagcaaatacaacccagcagtaggttattgaagacagcagccccagggcccaagggatgcagacagtgatgaaaacgac

SEQ ID NO: 405331 - DNA, 74 bp, Homo sapiens
tttactctttcattgttgggacatgtatattgcttggtgctaacagtggtttgcacatcatcatctttgatgaa

SEQ ID NO: 405332 - DNA, 75 bp, Homo sapiens
aaggcatcttgtccctacatcttctcttctgactttggctacatctcataaacaagaactgcatttgaactcaag

SEQ ID NO: 405333 - DNA, 100 bp, Homo sapiens
gtctttatgggaaacctcagcttgatgatgtatctcaggtacgcatagctgctaaattcatcactcatgcacccccaggggaatttaatgaagtattcaa

SEQ ID NO: 405334 - DNA, 83 bp, Homo sapiens
gggcccaggaaaaagaggaaagtggactgtccggggccgggctcaggagcagaggagcttactccacgggaacagcctctaga

SEQ ID NO: 405335 - DNA, 100 bp, Homo sapiens
gagatattggagaaaccacattattagatcggcttcagctccccaggaatatgattgaaaacagcatgtttgaggaagaaccagatgtggtggatttagc

SEQ ID NO: 405336 - DNA, 75 bp, Homo sapiens
gagcttttgattaacaccttaataaccagcggagctgacacagccaacgtttgtcttcaaaatttcagataccta

SEQ ID NO: 405337 - DNA, 99 bp, Homo sapiens
tcggggttctccgggagagggggagtgcgcggcggccgcagctgccacaaaccagatctgaagaagacacttgaatcatgggtgacgttaaaaattttc

SEQ ID NO: 405338 - DNA, 83 bp, Homo sapiens
tagacttgtcccagcaagaccacaaatttattcaagtcaattaccatcctttaccaggccgttggacataccagatggtcgaa

SEQ ID NO: 405339 - DNA, 74 bp, Homo sapiens
tacagaaattgaaaggcttcaaagctagcagcaattaccagctctggctgggtcgccacaacttgtttgacgac

SEQ ID NO: 405340 - DNA, 90 bp, Homo sapiens
cagcctcatttgttttctggtgtcatcgtaggtggccacctatggcttttgggacgcaaacatgcagatctttgtgaagaccctcactgg

SEQ ID NO: 405341 - DNA, 90 bp, Homo sapiens
aaaacttgctgctgatgaagatgatgacgatgatgatgaagaggatgatgatgaagagtggttgaagatggatatgaattttttgcaaag

SEQ ID NO: 405342 - DNA, 82 bp, Homo sapiens
ctgcaacaaccagcagcatcagagggaggtggggaagacagggctccagctaccacaggacgggctctgggtatagccgttc

SEQ ID NO: 405343 - DNA, 50 bp, Homo sapiens
aatgctgggattggctgcttttcgtactccaaagattcaggtttactcac

SEQ ID NO: 405344 - DNA, 100 bp, Homo sapiens
gatgcgggccctgctggaccagctcatgggcacggctcgggacgtgttctacgcagaaatagaagagctgaaactggtgtatccttatcacggcgttcta

SEQ ID NO: 405345 - DNA, 83 bp, Homo sapiens
gggagacagcgtccacagcctgctcagcatcctggacatcatcaccaacccagcgggtgccgcttctccacccgaggcttcca

SEQ ID NO: 405346 - DNA, 89 bp, Homo sapiens
agggcctggagtgtgtgcccactgaggagtccaacatcaccatgcagcattggggctttccagctctcacagaaccttcagcatcccca

SEQ ID NO: 405347 - DNA, 90 bp, Homo sapiens
atgaagactgagaattgtgtggccaaatgagaaagtggcgtgtgaaaagtgccctgggagccatgggccagtggcagcttgaagtaggag

SEQ ID NO: 405348 - DNA, 100 bp, Homo sapiens
cggttaaagacggacttattgtatatgaagactcacctttgaatacagtcaatccttgcccagatgatactttgatatctttcttgcctctcgcccatat

SEQ ID NO: 405349 - DNA, 50 bp, Homo sapiens
gttaaattgactccgctgattctgaaaccgaaccctcaccaaacagatct

SEQ ID NO: 405350 - DNA, 74 bp, Homo sapiens
caagactgcgactctaaacggactcatgtactttgtcaggtgtttcccattaaacactaccaggacaaaatcag

SEQ ID NO: 405351 - DNA, 96 bp, Homo sapiens
agccacatatactgccattgaggctcccaaggaagccctctccgggttcgctgaggccgcgggcacgaccttcgtcagtctggtggtgtccggccg

SEQ ID NO: 405352 - DNA, 144 bp, Homo sapiens
ataaagcctaaatgtagcatatatcctaaaggagatggaagtgatgtaccatcatgggtagcctttgataaacagtcgtcctcttgagttctggcgccttgactactgggaagatgacttgcggcgccggcgacgatttgtgcg

SEQ ID NO: 405353 - DNA, 98 bp, Homo sapiens
gacgaggagaggatccaggaggaggagttgcagagtattgcctaagtgtaatcttgaacatgggcggtgctgtgagtgctggtgaagacaatgatgag

SEQ ID NO: 405354 - DNA, 100 bp, Homo sapiens
actttggggcttcaggagctgaaggaacaggatgaccggaaagaagggatgaccgcgtttgtggaaaagagaaaggccaacttcaaagaccagtgagaac

SEQ ID NO: 405355 - DNA, 98 bp, Homo sapiens
ccacccccagaaacagagcacaacggggtgttgcgtggatacatcctcaggagctggattttgaagccaaaacaagttacacgctacggatagaagct

SEQ ID NO: 405356 - DNA, 75 bp, Homo sapiens
cgagtgggagcaccaggatctcgggctcggaacgagactgcacgtaatctatgccagcaattatgacaatgttag

SEQ ID NO: 405357 - DNA, 90 bp, Homo sapiens
cggtaccgggccttgaagcgcaccgcagagagagagctgctgatggatgtctccccgttcaatgttgtggcctggcacgggaattataca

SEQ ID NO: 405358 - DNA, 128 bp, Homo sapiens
gtggaagttactgccgcgccaccgagtccggaccggagactttggggcctaactagcggtcacctttgtcccggtgtccaaggtgagcgggcaggcagaggtggacgacatcctcgcggcagtccgcc

SEQ ID NO: 405359 - DNA, 80 bp, Homo sapiens
gaccttgccaaccctcccaagaagttcagaggagaatggggtactaagagaaaagcacgaagctgtggatcatagttccc

SEQ ID NO: 405360 - DNA, 90 bp, Homo sapiens
cgagcccaaggcaattgatcccaagttgtcgacgaccgacagggtggtgaaaggatcctcggttcaatgcagaagttgaccaaattacag

SEQ ID NO: 405361 - DNA, 83 bp, Homo sapiens
cagaaaacaagaaaaattcactgtggtccagaagcagatatcggtgagcacccagtcagcttgaagagtttcaaatggaccct

SEQ ID NO: 405362 - DNA, 83 bp, Homo sapiens
ctgccgacgccgcgttcagaaaggatgatcggctgaatgtaacagaggaactaacgtccaacgacaagacgaggattctcaac

SEQ ID NO: 405363 - DNA, 74 bp, Homo sapiens
ttctgaaccatccacacatcataaagctttaccaggttcgggatgagtatcggcaggactacgatgctgggaga

SEQ ID NO: 405364 - DNA, 90 bp, Homo sapiens
cagcatggttgtgggccagcttaagctcaaccatccagagcttgtggaaggccttgtgctcattaatgttgacccttgcgctaaaggctg

SEQ ID NO: 405365 - DNA, 83 bp, Homo sapiens
aatagagtggatttattccctgcaggtccttcccacagaagacatgtaaacaggaacatcgataagtagtgtaaaaacttgca

SEQ ID NO: 405366 - DNA, 100 bp, Homo sapiens
ctgtaccacactgaggagcgcggccagccctgctcgcagaattaccgcctcttctttagaagaagctctacttctgatgtactagacatacaaaagcctc

SEQ ID NO: 405367 - DNA, 82 bp, Homo sapiens
acttcttggtctcaaagggaacttggaaatgacattggcatccagattatccactgcattttgctacttgagaagatagaac

SEQ ID NO: 405368 - DNA, 100 bp, Homo sapiens
aggctgtggtggccccgagcgcgagtgtgtaggtgacaggacagcggccaggcccgcccctcccctcgaaccggatggaggagagcaaagccctgttccg

SEQ ID NO: 405369 - DNA, 90 bp, Homo sapiens
cgtacacctactgaatggattcaagacttcaaaacccattttcttgacacatcatctcagagttggagcacctgacgtttgtcaacacgg

SEQ ID NO: 405370 - DNA, 98 bp, Homo sapiens
ccaacactcacgtgaagaagttcagcctggccgcaactcgcagcaatgaccctgtggccattatggaacagattaaaagggccaataaactgtttacc

SEQ ID NO: 405371 - DNA, 89 bp, Homo sapiens
gaagaagggaaggcgcgagtgaggaaaggaggtactgtagcaatctgaagaggatgtaagtcagtttgattccaagtttacacgtcaga

SEQ ID NO: 405372 - DNA, 121 bp, Homo sapiens
cgcaactcggcagcctccacccaccggcccaccctacatttagcgcatcatgtgatccgggttatacattggctcttcaaagacgttcacctcatcagagaaatccctgactcctttgcag

SEQ ID NO: 405373 - DNA, 82 bp, Homo sapiens
gggagactcccggtaacccccaacttgccggtgtggtggacacaggcctattcatcaacatggctgagagagtctactttgg

SEQ ID NO: 405374 - DNA, 50 bp, Homo sapiens
gcagcagctccactgaacagataaggttggcaaacatgaattgactgggc

SEQ ID NO: 405375 - DNA, 100 bp, Homo sapiens
ggactacggctgatgccatgtgccccatcctggagttcgcagatttccgcccaccttccgcctcgtctagccgcgccacagctagcggggtgatctttcc

SEQ ID NO: 405376 - DNA, 82 bp, Homo sapiens
gatgatcctgccatgcaggcaggccctgagcacgctgctgtgtgagcagcaggtcttccactttcgccttggtgcctgtctt

SEQ ID NO: 405377 - DNA, 75 bp, Homo sapiens
cagcgggagaggagtctccaccaggactgaccgctgccgcccagcacgtccagccaaaacctattgatgtacaag

SEQ ID NO: 405378 - DNA, 109 bp, Homo sapiens
tagggctgacgctgctgctgtgtgcggtgctgctgagcttggcctcggcgtcctcgggaactgtggctgcaccatctgtcttcatcttcccgccatctgatgagcagtt

SEQ ID NO: 405379 - DNA, 115 bp, Homo sapiens
gatgcgttacccagagggtgcgaggtcgagtaccttccctgtcccatcgcaaacccaaagatccccgttcctggagattctgattgagcatacaatgttacagctgatgaaggag

SEQ ID NO: 405380 - DNA, 100 bp, Homo sapiens
tatttcagcttcctgctatgtgccctctttgttcctaaagggagtggctgttctggggattgcccttattgctatgggggaggagattggtgcagagatg

SEQ ID NO: 405381 - DNA, 90 bp, Homo sapiens
cgcgacccggggaaccggcattgtgatgtcttggcattgcccattttcaagcaggaagattccagccttccattggatggtgaaacagag

SEQ ID NO: 405382 - DNA, 100 bp, Homo sapiens
tggcagcaatggctgtatttgaagataagtttaggccagacatggagatgccccctaaaaagggaggtgatggaattaaaccacccccaatcattggaag

SEQ ID NO: 405383 - DNA, 74 bp, Homo sapiens
attaggccacaatcttcaatgagtaaacatattccttcgtgagatggagaataaagaaactctcaaagggttgc

SEQ ID NO: 405384 - DNA, 82 bp, Homo sapiens
gccaaactgtggagcctcttctgtaaccaaggtgattgatgagatttatcgtgtgttgagatatgtcaattctaccagagcc

SEQ ID NO: 405385 - DNA, 100 bp, Homo sapiens
gcaaagctggaggattcggaggtccggtccgttgcctcaaaccagtcagagatggagttctcttcacttcaggacatggaccctgatgctcccataagac

SEQ ID NO: 405386 - DNA, 100 bp, Homo sapiens
ccaggagttcgtctcttacgtctgcggaagtgcagctgcctcagttcttagcgcaggaaccagggaaaatgtgtagagggcatggtggagatcttcgaca

SEQ ID NO: 405387 - DNA, 100 bp, Homo sapiens
ctcgcttcagtcagtcgggccgcgccgcgcctcagctctgttgaccacggcatgtttgagaatttgaacacagccctcactccaaagctccaggccagcc

SEQ ID NO: 405388 - DNA, 100 bp, Homo sapiens
acctgaaaagcccaagtcgccctttccagaccacaattccacatggctccacaaggctgacttcaggacctgggcctgcatggatttgtgccgagaccag

SEQ ID NO: 405389 - DNA, 98 bp, Homo sapiens
gggacgtggtataccgcgacatcaagccaatggagatcttcgtggatgatgagacgaagttgacgctgcatgggttgcagcagtactacgtgaaactg

SEQ ID NO: 405390 - DNA, 75 bp, Homo sapiens
cctgatcatcctgctgggcttcgtccagatcgggaagggataaagataaagtttctctaaccaagaccccaaaac

SEQ ID NO: 405391 - DNA, 100 bp, Homo sapiens
gtaggggaagagacaacacacacccaaaatggcaagaatccgctggcacggacaggctggacccaggcgcattatacgtgacttgcttgagactgaagag

SEQ ID NO: 405392 - DNA, 98 bp, Homo sapiens
tcgctgcccccagctcagctcttactgcgggccgctccgacggcggtccatcctgggtgctgccccacgtcccccaccaaagcccatgtaaggagctg

SEQ ID NO: 405393 - DNA, 100 bp, Homo sapiens
cagagagcgccctgagagaacagggtggccgcttggtccaggctttacaggaagtatggtgctggcatctgcttggcttctagagagtcttacaatcgtg

SEQ ID NO: 405394 - DNA, 96 bp, Homo sapiens
tgatgctgacccatttcagatggagaatacagactgctacctccccgatgccttcaaaattatgactcaaagatgtcatcacaatggatcccaaag

SEQ ID NO: 405395 - DNA, 75 bp, Homo sapiens
ccgcgcactcgcctcagctgagcctggagcattagtttggatgaattcaagtcattttgccattttacaacccac

SEQ ID NO: 405396 - DNA, 75 bp, Homo sapiens
ttttgatgtctgacaacgtggatcgttgttttgaaacgtgcaggtggtaccattataacgaattttgagaggttg

SEQ ID NO: 405397 - DNA, 104 bp, Homo sapiens
cgactgtgccgtcaagctcatcggcaccaactgcatcatctatcccgtcaacagcaaggacctgcagcacatctggaaagtctgcaccaaatgtgggatcgagg

SEQ ID NO: 405398 - DNA, 75 bp, Homo sapiens
ctgtcatagaaactcacatgagacaaatgcgctcagcttcaattgatgtgcactcccagcaacacccctgccacg

SEQ ID NO: 405399 - DNA, 74 bp, Homo sapiens
ccctgtcgccgttcgctgcgctgccggatcgatgctatagaagacaaacaagggaaggttttttttccttttgc

SEQ ID NO: 405400 - DNA, 74 bp, Homo sapiens
ggaaactatgggagttcccaattaacaatgaagcaggatttttagactctgaggagcagttggagctaatccac

SEQ ID NO: 405401 - DNA, 75 bp, Homo sapiens
ccgcgcacttccaggtgcacagcgcgggagccgtcacggtgctcaagatccagacatttaatgtggatgcaccat

SEQ ID NO: 405402 - DNA, 98 bp, Homo sapiens
ccgcctcgctgtccctgcggcttctgggggtagtaagcattaataatgtctttcatctttgagtggatctacaatggcttcagcagtgtgctccagtt

SEQ ID NO: 405403 - DNA, 82 bp, Homo sapiens
aggaatagtctacaaaggaagacttgtaacctggagaagagggtcaccagcatgaatgctcggcaggcagctcccaagacca

SEQ ID NO: 405404 - DNA, 50 bp, Homo sapiens
gctgaagcgactgagtccgcgatggagagctgaagaagcaggtggagagt

SEQ ID NO: 405405 - DNA, 96 bp, Homo sapiens
tgatacagtttgaaaaagatggtgttattcagaccaaagtgaaacatcgtactccaatgtggaaagaggcaaaacctgatgaattaatggattcca

SEQ ID NO: 405406 - DNA, 75 bp, Homo sapiens
gcggcacgcacgcggtgcagggtaacatggcggatgcggaagggtccagtgtccatcaaagtccaggtgcccaac

SEQ ID NO: 405407 - DNA, 88 bp, Homo sapiens
gacaacaaaaaatgaaaacttagattgcaacagtgattcacaggtgtttccctctttgaatgtggcacaagatctctgtaaagtagca

SEQ ID NO: 405408 - DNA, 96 bp, Homo sapiens
cggagtcttcctgatccatggacccgatgaacatagacacaggcagcaggagccattcgacctcttgtatctactgtcgtcagtccatctgctgat

SEQ ID NO: 405409 - DNA, 75 bp, Homo sapiens
caggtgcccacttaactgtgaaaaagatatttgttggtggatgtgaagaaaacagcattggccttggccattaca

SEQ ID NO: 405410 - DNA, 75 bp, Homo sapiens
ggaaaggccaagacaaaggcggtttcccgctcgcagagagccggcttgcagggatttggacatttggtgccatct

SEQ ID NO: 405411 - DNA, 82 bp, Homo sapiens
aagcggtgcagacgggaggaaggaacttgctactaccagcaccatgccctaccaatatccagcactgaccccggagcagaag

SEQ ID NO: 405412 - DNA, 95 bp, Homo sapiens
tgtgaaaaactggaaatcccaaagcctcgaatggctgccactcagaaacttgttaaagacattattgaaatctcctttacagacaataggtgaag

SEQ ID NO: 405413 - DNA, 74 bp, Homo sapiens
gctccacctacctgcacccgctcagcgagctcctgggcatcccgctggaccagacaggtgctctagttcacagc

SEQ ID NO: 405414 - DNA, 96 bp, Homo sapiens
ccagctcaaccgcttcgtgcaactctccgggcggccgcacctgccagcaccatatgaaggcggagtatggaaagttagagtggacctacctgataa

SEQ ID NO: 405415 - DNA, 96 bp, Homo sapiens
ttcacccacagtggttttcaactcaggattagcaggttggcgtgcagtggtgtgatctcagctcattgcaacctctgcctcccggactcaagcaat

SEQ ID NO: 405416 - DNA, 96 bp, Homo sapiens
tgagctccgatgatgacaagggggcccaggcagcacgggacagtatggaaattaccagcagtgaaaaagtacttacattccagtagccagtatcta

SEQ ID NO: 405417 - DNA, 100 bp, Homo sapiens
ccgaaaactccaccgtagcccttgccaaagttacagaatgtctgaaggggacagtgtgggagaatccgtccatgggaaaccttcggtggtgtacagattt

SEQ ID NO: 405418 - DNA, 75 bp, Homo sapiens
tggcaggatcctggtatccgctaacagaacatgacctttgacctgccatcagatgccacagtggtgctcaaccgc

SEQ ID NO: 405419 - DNA, 83 bp, Homo sapiens
caatatctgtcttcggtggactccttcggcagtccacccaccgccgccgcctcccaggttaatgttgaagaaggaaaatgcgg

SEQ ID NO: 405420 - DNA, 73 bp, Homo sapiens
aagtggctgccgagagggctacaagcgtctacttggttcaaaagagcagcccgacggccatggaggctgaaga

SEQ ID NO: 405421 - DNA, 100 bp, Homo sapiens
gtcactgcagctagcgaccagaagcaagaccggttggagggtgacagatcagaaggctctggtcaagagaatgaaaatgaggatgaggaataataaactc

SEQ ID NO: 405422 - DNA, 95 bp, Homo sapiens
actgagcccaggccacagtaccctattcacgctctgtgcttgtgccaagtgtcaaaccagaagagaagtaaaattcaacaaaaatttatgtgtgg

SEQ ID NO: 405423 - DNA, 83 bp, Homo sapiens
tttgctcctccctgcaactaactccattcttaattggagaagtttttgcgatatgtggaagctgtgatgctttgggaaactgg

SEQ ID NO: 405424 - DNA, 83 bp, Homo sapiens
cggcggaagcggagaccatgttccgagcggcggctccggggcagctccggcgggcgagggaagtctcaggttgccctgaagat

SEQ ID NO: 405425 - DNA, 83 bp, Homo sapiens
cagatgtgcaacaaagtgcgatggccgggctctcgccatgggtcactgtcgcctctgccacgggaagttttcctcgagaagcc

SEQ ID NO: 405426 - DNA, 100 bp, Homo sapiens
cagaagttggcaggagcatgggcttcggaggcctatagcccgcagggaattggctcgggaaaaggtaatgcgagaagttaaagccttagccaagcttgaa

SEQ ID NO: 405427 - DNA, 100 bp, Homo sapiens
aagtgactgggcggtgccggcgccggagacgatgccgttgttgtgatgatgattggcttgccaggagctggaaaaactacctgggttactaaacatgcag

SEQ ID NO: 405428 - DNA, 75 bp, Homo sapiens
ctggggccagggaaccctggtcaccgtctcctcaggtggtctttgggaagaagcttcctgcctttgccaccatcc

SEQ ID NO: 405429 - DNA, 100 bp, Homo sapiens
ctccctccggtgggcccgggaggtagagaaatgatgaatcaccaacaccagcagcagatggcccccagtaccctgagccagcagaaccaccccactcaga

SEQ ID NO: 405430 - DNA, 75 bp, Homo sapiens
tttgccaaaggattccgggattcctccaggctcactgacattgagaggtccatattcaagcctttcatctttgtt

SEQ ID NO: 405431 - DNA, 100 bp, Homo sapiens
gcccgcagccatggcaaaaagctaccacctgccagtctgaagcaccgagatggtgaagaagctaagtctcagaaagataactcacccaagaggacacaag

SEQ ID NO: 405432 - DNA, 75 bp, Homo sapiens
caacagtggcaatgagaccagtggaagcagcaccatcggggagacaagcaaaggcggggtttcaccatgttgccc

SEQ ID NO: 405433 - DNA, 82 bp, Homo sapiens
gtgggagcaaaaccaacgcctggctcggagcagcagcctctgagggcgatgccagtccctccactccagaggagaacgaaac

SEQ ID NO: 405434 - DNA, 100 bp, Homo sapiens
aagcagtcctcctgcctcagtctcccaaagtgctggaattacagggatcccaaagagaagattgatattgggctgcctccacccaaagtctcccggaccc

SEQ ID NO: 405435 - DNA, 85 bp, Homo sapiens
agtgcagaggcatcacctgaaagattacctaaaaccagatccatggatgatcttctttctgcctgtgacacaagcagccccctga

SEQ ID NO: 405436 - DNA, 83 bp, Homo sapiens
ggagacgttgataacgatacgacaggggcaagtgtccgagtggtgaatcagctacttacagagatggatggtctggaagcacg

SEQ ID NO: 405437 - DNA, 97 bp, Homo sapiens
cactggagctgcgctgtgaggaggagcaggatggtaaagagtggatggaggccattcaccaagccaggaggactcagagagagtaatgataattacc

SEQ ID NO: 405438 - DNA, 136 bp, Homo sapiens
atattgtggagaatgatctgtacatagattttggtggaaagtttcattgtgtatgtagaagaccagaagtggatggagaccatcatgtatgtcatgggagcacttggccctgcagtgggatatttattaggtggac

SEQ ID NO: 405439 - DNA, 106 bp, Homo sapiens
cacacattcagcaaacgcacatcccagcagcaccgagagaacacacagaagctggcagggcggagatgctggaccacgccgtcctgcttcaggtgatcaaagaaca

SEQ ID NO: 405440 - DNA, 98 bp, Homo sapiens
tttgatgttgcaagtatcatcctgggctccaaggagaggattttgactaaaggagaagttcaagtatcagataaagacacacacaactggagcagatg

SEQ ID NO: 405441 - DNA, 75 bp, Homo sapiens
gccgagtagccacagcggcagctccagcccggcccggcagcgacatggaagttgtgattcaatgggcatgaattg

SEQ ID NO: 405442 - DNA, 100 bp, Homo sapiens
ggatttaaaagacagtcctcgtcagcactgactttcagctatggaatcgcacatcaaagctgcccaatgatctgcttgatttgcagcagccaacttttca

SEQ ID NO: 405443 - DNA, 75 bp, Homo sapiens
agagattgtgaagaagaatttcgatctccgccctggggtcattgtcaggagagaaacaagaatgctgctcaggag

SEQ ID NO: 405444 - DNA, 75 bp, Homo sapiens
atcaacccacctcacagcacttcattatgcagctaaggtttccaccgtgcacattatgaagaaaagaaatggagg

SEQ ID NO: 405445 - DNA, 100 bp, Homo sapiens
aagccttagcagcaaaagactttgttaacctcagaggtgacattgtgattgcaaaaagcccaagtgatccaaaatcaaatatttgtaaaagagtaattgg

SEQ ID NO: 405446 - DNA, 82 bp, Homo sapiens
cctgcagcgggagctggacggcgagcgcgagcggcgcgagaaaatgacgacaacccccccgtgtcttttgtgaagttctccc

SEQ ID NO: 405447 - DNA, 116 bp, Homo sapiens
caaaatctatgaatgaaagcatgaaaaatcaaaaggagttcatgcttatgaatgctcgacttcagttcttcctgtccaagatccggtcccacgtggctacttgttccaaataccag

SEQ ID NO: 405448 - DNA, 74 bp, Homo sapiens
aaaagtattgcaagcaacagtagtcgctgttggatcgggttctaaaggaaagagtgaacctctgtatgtgcctg

SEQ ID NO: 405449 - DNA, 97 bp, Homo sapiens
cagcatcgtggagaagcgcttcccggacttcgtgcgggacttcatgggcgccatgaacaaaccctatctgttttatttcaacattgtgaaatgtgcc

SEQ ID NO: 405450 - DNA, 90 bp, Homo sapiens
gtggcgtggccaagattcgcattgaagatgacgggagctacttccaaattaaccaagtcacccttgtggttggagcgtcccaggacatca

SEQ ID NO: 405451 - DNA, 51 bp, Homo sapiens
cacgaaaggcatttttactgctgatctaacagctttaatacagatagaaac

SEQ ID NO: 405452 - DNA, 82 bp, Homo sapiens
cgaggcgtctgggatggtgtgggaccggaaatatggctacacacacctttctgcaggagagctgcttcgtgatgaaaggaag

SEQ ID NO: 405453 - DNA, 148 bp, Homo sapiens
acagatatctgtttgaagaagacaatcttttacggtctacacaaaagctttcccattcaacaaaaccttcagtaacttcaaatgagcatttttcaactgcagaagaaagtgagtcctgctttgcccaaccaaagccacatgcactggg

SEQ ID NO: 405454 - DNA, 100 bp, Homo sapiens
gaggcagcgccacctcgcttggtgatggaactgtactggaacaatgggagaagctggtagcttataggaagccaagatgaccagaatgtttttaaataat

SEQ ID NO: 405455 - DNA, 82 bp, Homo sapiens
gaggaggcagccacggggcccctgggagcacgtgaattgcctctgcttacgttcaggccctgtcctaaacccagccgtctag

SEQ ID NO: 405456 - DNA, 100 bp, Homo sapiens
catgctctgcatcccgctctggatctgcatcacagtgtggaagacggaggggacactgcccgagggggtccactggacggggcctgagctacaacttcac

SEQ ID NO: 405457 - DNA, 75 bp, Homo sapiens
ggaaagtggactgtccggggccgggctcaggagcagagaattcagcagctgaatatcaagacctttgaattcaac

SEQ ID NO: 405458 - DNA, 90 bp, Homo sapiens
ggaggcgcgggaggtgttcgagaacgaccccgagacgggtgactatgaccagagcaggaccaaagtgctgcacatgagcctgaaccccac

SEQ ID NO: 405459 - DNA, 49 bp, Homo sapiens
gcagctggctggcttcagtggaccagcatacgaggagcggcagcggcac

SEQ ID NO: 405460 - DNA, 82 bp, Homo sapiens
cggggcgctgcgtgcagaaaagcgaccggcggccacagcaagagtgagccatggagctacgtgtggggaacaagtaccgcct

SEQ ID NO: 405461 - DNA, 100 bp, Homo sapiens
caaggatcgatattttgtcgaagaaactgtggaagtcattaggaacaatggtgcaagtactatactggcaattgctggagaagattttgcaattgttgct

SEQ ID NO: 405462 - DNA, 82 bp, Homo sapiens
caaaaatccagaagtacaagcagtctggtatcagcggcagggaaggaggctttgccatcttggctgcactgggactcacaga

SEQ ID NO: 405463 - DNA, 115 bp, Homo sapiens
tcctattcagaggggccggtctctctaaatatgccccaggtactccaaagattcaggtttactcacgtcatccagcagagaatggaaagtcaaatttcctgaattgctatgtgtc

SEQ ID NO: 405464 - DNA, 98 bp, Homo sapiens
gacaattttcctggacgggccaactgttgatctgggaaatgtgcctaatggcagtgccctgacagatgggaagacatgtaaggaatttgcataagaca

SEQ ID NO: 405465 - DNA, 100 bp, Homo sapiens
aggaaactgaggcctggagaggttaaagagacccgttcagagtcctacagtggcagactgcttttggcttctggatgccctcctccagtacacatcgtat

SEQ ID NO: 405466 - DNA, 75 bp, Homo sapiens
gggagacgacgctgctgggtccgctgagcggggcgacccgagttttctggatatgccgcagaaggatccgtgcca

SEQ ID NO: 405467 - DNA, 74 bp, Homo sapiens
gttgaacacatgcaggttgaaaggttccagtgcccaagatggagatcatgaatcagacagataaaaatcaacaa

SEQ ID NO: 405468 - DNA, 78 bp, Homo sapiens
agtgtagtgtgcaagtattttcagcgagggtactgtatttatggagaccgctgcagcattgagttacagctacaagaa

SEQ ID NO: 405469 - DNA, 96 bp, Homo sapiens
ggagactagcgttaaccggcggggcggccggtcccatctgatgccgaggctgaaggagtctcgctcccacgagtccctgctcagccccagcagtgc

SEQ ID NO: 405470 - DNA, 100 bp, Homo sapiens
tctgtgggatgtggcatcagggcaggtcgtgcgcaaattccggggccacgcaggggttcgtgctgtaagacctaaagttcttatgagattgtccaaaaca

SEQ ID NO: 405471 - DNA, 100 bp, Homo sapiens
cttccccgccgccacgatgcccaagaggaaggtaatacggtgccagcagtgttcgccatcccagctgccaacagacctggcttcaccggctacttcatcc

SEQ ID NO: 405472 - DNA, 90 bp, Homo sapiens
agtggatccaagtgggcgagagacattttaatctggaagagtcttgtgatttgggagacaggctcagtattctcaccatgtgatccagga

SEQ ID NO: 405473 - DNA, 100 bp, Homo sapiens
ggacatatgacccagatttcaaggggcctgttgccaacaggctaactgccaggcggccaaaggacagtatgttcacacgggttcttctggggctgcttcc

SEQ ID NO: 405474 - DNA, 97 bp, Homo sapiens
taaatattccgaggacctgaaggacgcgcaggagaagctggagctcacggagaagaaggcctccgacgttcgggaagaataccggaagtgggcctgc

SEQ ID NO: 405475 - DNA, 80 bp, Homo sapiens
cgggaggggccgcgccgccaccgtctgaactaggatgtcccgacatgaagacaatgcagatcttcgtgaagactctgact

SEQ ID NO: 405476 - DNA, 97 bp, Homo sapiens
gcggtccagaacccggccctcaccgccctcaccacccctatccagacggctgcccttcaagtaccaaacatcgggtcagaagttgagatttccacta

SEQ ID NO: 405477 - DNA, 98 bp, Homo sapiens
gtgaatatggtggaaaaaggaatcattgacccaacaaaggttgctccttgagggcaggacagttcttatggctttatccgttgcgtaagcacagagag

SEQ ID NO: 405478 - DNA, 98 bp, Homo sapiens
acgagacgacttcgtgctgacagctgctcactgttggggaagcccgagaccgaggacgagaagaagcgctttgaggaaggcaaagggcggtacctgca

SEQ ID NO: 405479 - DNA, 88 bp, Homo sapiens
gcaaggtgcggcggaaaggcctggggaagttcctcatacagatcctgcagctcatggccaacaggtggctattatcatggaaaactaa

SEQ ID NO: 405480 - DNA, 76 bp, Homo sapiens
gaagtaatggggctgtgcataggggagttttctggatatgccgcagaaggatccgtgccagaagcaagcctgtgag

SEQ ID NO: 405481 - DNA, 100 bp, Homo sapiens
tgccttggaaaatgccaacgccgtgtctgaagggacgtccagatcggtgacatcgtcacagtgggcgagtgccggcctctgagcaagacagtgcgcttca

SEQ ID NO: 405482 - DNA, 82 bp, Homo sapiens
gaaagaaaagaatacattcctgattacctgccacccattgtgtcttctcaagaaggagaagatggggagccccgaggatgac

SEQ ID NO: 405483 - DNA, 85 bp, Homo sapiens
cgggtcgttgtggtgcgctgtcttcccgcttgcgtcagggacctgcccgactcagtgaggagcccaaggtgggcatcaagaccat

SEQ ID NO: 405484 - DNA, 100 bp, Homo sapiens
gactacaaacattttgctctgagaactttcttccctgagcaaaagcgaaagcttcggatctacatttccaatacgttcagtcccagcaaggcggaaggcg

SEQ ID NO: 405485 - DNA, 74 bp, Homo sapiens
caaagggcagtcggcggagcttcgccaaggctggcgcagtcggttatgaagacagtatggagtttccagaccat

SEQ ID NO: 405486 - DNA, 99 bp, Homo sapiens
cctccgcgcccgcggctcgcgcgctcccgaggaagagtgagggcgcgacgcgcaccaacggtggagcaatgtttttggaacagtgccagtggttgcttc

SEQ ID NO: 405487 - DNA, 100 bp, Homo sapiens
gggtgggtgtcgggacatgctgatcttccctcaagacagaccaagatcactccatggatgaaatgacagctgtggtgaaaattgaaaaaggagttggtgg

SEQ ID NO: 405488 - DNA, 82 bp, Homo sapiens
gcggagggagccccagacacggacggcggctccctggaccaggtgctgaaagaggccaagaggattcccgaggagatcctgg

SEQ ID NO: 405489 - DNA, 74 bp, Homo sapiens
cgctctgggcacagccttggaaagtcaggaccgcgacggcagcagagcagcatgcatgtagggaataccggatt

SEQ ID NO: 405490 - DNA, 80 bp, Homo sapiens
ccccgggacacccccgcaagcgagcaggtgacttaagagattaaaattaatttggttgctgttggttctgaacaaataat

SEQ ID NO: 405491 - DNA, 100 bp, Homo sapiens
ccaaatgatttgtacattgtagaacccctcaagttttctccagaaaagaagaatgttctgctgcagatggggctgcacgtgctggcggtgaacggcatgc

SEQ ID NO: 405492 - DNA, 83 bp, Homo sapiens
atgcaatgtcacttacaacattaatcagatactgcatttaagatcccagatgcagtgactggttactacctgaaccgtgctgg

SEQ ID NO: 405493 - DNA, 75 bp, Homo sapiens
acaagtgcagacagcagcttcatgatattactgtaccgttagaagtttttgaagggtgatgagactggtgtgatg

SEQ ID NO: 405494 - DNA, 87 bp, Homo sapiens
cagggaaaggatgacatatttttggacctgaaacagaaattctggaacacctatatgattgatctggatactattgatgtaagcaac

SEQ ID NO: 405495 - DNA, 90 bp, Homo sapiens
gctcttgggattgttattcttctgcttgttgatgtgatatgggttgcttcctctgaacttacttcgggctactttcagctgaaagccaac

SEQ ID NO: 405496 - DNA, 100 bp, Homo sapiens
cactgaaactgtcaaccatcactacttgctctttcaagacacagatttgttattagaggaagtaacacaaggggatatgagtgcagcagacacatttctg

SEQ ID NO: 405497 - DNA, 100 bp, Homo sapiens
ggaattgataaaccaagctcggaaacaagccaattctatgcttgtgaccacaccagaaaaatgggatgtagtgacaagaaagagtgttggggatgtagct

SEQ ID NO: 405498 - DNA, 100 bp, Homo sapiens
agtgtagagatatagttggcaacctcactgagttagaatcagaggtatcgaaggatgatcgcagtgatgtggagagcagctcagaggaagaagatgtgac

SEQ ID NO: 405499 - DNA, 99 bp, Homo sapiens
cttacagattcctctaggcacagtggaggtctagggagtgagaacgtgatttctcagccgaatgagtttgaacataccccacaggaagatgacttgggg

SEQ ID NO: 405500 - DNA, 82 bp, Homo sapiens
aggctcccgggctggactcaggcttctcagttcaaatctgaacatcaatgatgtactagggaactactcattgactcttgtt

SEQ ID NO: 405501 - DNA, 87 bp, Homo sapiens
aacgtgttggaccttccggagcttctcagaagacagagggttttcttttgagggattaatgaaaatcaagttccatcctcagacaag

SEQ ID NO: 405502 - DNA, 75 bp, Homo sapiens
ccagcgccctggcctccctcaccttggacacctcgcttgggtggtctttgggaagaagcttcctgcctttgccac

SEQ ID NO: 405503 - DNA, 74 bp, Homo sapiens
cgcgggaggtgttcgagaacgaccccgagacggtccggcctctttggcctacccccgttggctccgctgcccca

SEQ ID NO: 405504 - DNA, 90 bp, Homo sapiens
agcagcacgaaagagagaggtccgtctaatgaagaacagaatactagttgatcagcaagtttggaaaatagaagatgtcttcacattaca

SEQ ID NO: 405505 - DNA, 50 bp, Homo sapiens
ccgaaaccgttggagagggccagagggcagaggtggctcagagagaggcg

SEQ ID NO: 405506 - DNA, 82 bp, Homo sapiens
agtagctccgaggtctgatagtgaagaaagtggctcagaagaagaggaagaggatggagatgaagatgaggaagctgagtca

SEQ ID NO: 405507 - DNA, 82 bp, Homo sapiens
tgggagcgagcggaggagcaggcgccggagggggaaatttgcagtggtgagaaaatgtataaagaaagattctgggaaagaa

SEQ ID NO: 405508 - DNA, 100 bp, Homo sapiens
ttcctcaagatcgaggggcttcaggacagtgaacatatcttactgtgccgagatcgctcacaatgtttcctccaagaaccgcaaagccatcgtggaaaga

SEQ ID NO: 405509 - DNA, 96 bp, Homo sapiens
gctctacaaggacggaggcgttgcgattattgaccagtggatctgcgcacacgccaggtacatgtcccagagcaagcacacggaggcccgggagct

SEQ ID NO: 405510 - DNA, 50 bp, Homo sapiens
tggatgtgcagtttgacttcaagcgcaccttttgacaagacagccaacat

SEQ ID NO: 405511 - DNA, 75 bp, Homo sapiens
ggtgaatcccctgtttgagaaaaggcctaagaattttggcattgggaacaagctaccctctgagtcagcactgga

SEQ ID NO: 405512 - DNA, 100 bp, Homo sapiens
cttctttcttctggcatcattaacggaccttttaccatgaatagttctactccttctacaggtgtgtatggaagatgagaatgtgcctactgctcctgat

SEQ ID NO: 405513 - DNA, 50 bp, Homo sapiens
ccgagccccgacccctgcagctgtgaggagtcctccctcctgaacctgat

SEQ ID NO: 405514 - DNA, 82 bp, Homo sapiens
gtaacaacagcgaggaagaagaggacgacgacgacgaggaagaggaggtttctgaggtagtgtgccagtatttgaaaaatcc

SEQ ID NO: 405515 - DNA, 75 bp, Homo sapiens
aaacctggcttgaagtataagcctgcagttaaccagatcatcgccaaccaccacatgcaatctatctcatttgca

SEQ ID NO: 405516 - DNA, 100 bp, Homo sapiens
agcctctacatcacaggagctgccctgtatgctgcccggatccccgaacgctttttccctggcaaatgtgacatctggggggacgcttggaccagcttgc

SEQ ID NO: 405517 - DNA, 100 bp, Homo sapiens
gttctgacgaggcacagcgtttcttgcaagaatgggagcccgagttctttcaggtctgccacaccaagaaggactatgaagagtacgggcccagcatctg

SEQ ID NO: 405518 - DNA, 101 bp, Homo sapiens
gaaggggaaggcgcctgaagaggacgaaggtttggggcaagatggaaagacactgctaattacgaatattgacatggagccatgcacggtagacccccagc

SEQ ID NO: 405519 - DNA, 50 bp, Homo sapiens
gagctgcatgatctgattgcagagcccatgcatgatgactatgacttaag

SEQ ID NO: 405520 - DNA, 75 bp, Homo sapiens
gtggactcctgcctactcctaacccacttacccagcttgtttggatcgaaacccccacaaaccccacccagaagg

SEQ ID NO: 405521 - DNA, 98 bp, Homo sapiens
ctgactacgggagttgggaggacccgggacaccgcacagccgggaaatgatcgacgacatcgcggatggcgccgtgaagcccccacccaacaagtacc

SEQ ID NO: 405522 - DNA, 82 bp, Homo sapiens
ctggataaacttcgaagtactatgacttgtttaaagttcacaagcttaagccaaatctgaagtggcgacaggcttttgacag

SEQ ID NO: 405523 - DNA, 98 bp, Homo sapiens
gattgtcaagttctcgagcagcttctattctctgctggatgaaccgaatcctaacagtccagccaatagccaggcagcacagctttatcaggaaaaca

SEQ ID NO: 405524 - DNA, 75 bp, Homo sapiens
gggttcgcgcccgccgacccgcgccctgctccctctcagcacctgggcggacgcccgagcgggaagaagttccgc

SEQ ID NO: 405525 - DNA, 83 bp, Homo sapiens
gcgagaactccagtccgggctccacaaagggcgcgggtgaaaaggaacagcctgtatttgcaatgaccggccttcgatgggga

SEQ ID NO: 405526 - DNA, 90 bp, Homo sapiens
attactactttgactcctacgcacactttggcatccacgaggttgactatagtcaatggggccaatggagccaagtgtatggaaacccac

SEQ ID NO: 405527 - DNA, 80 bp, Homo sapiens
ctgggaccaaggtcaccgtcctagttcttccctgtggaacagtagagacctagtctgccttctttcacaagataatcctt

SEQ ID NO: 405528 - DNA, 125 bp, Homo sapiens
tcgagcgacagagacaagctgagcttgccgcacaaaaagctagagagatgtgtcttgctgaatcagggctctcttatccctgccatcgacttacagtgggaagaagatcttcacctgcacagacc

SEQ ID NO: 405529 - DNA, 75 bp, Homo sapiens
gcgctgcccgcactcctggtcctgctcggggctctgttcccagggcaagcatgagtttgtgaatgacgtggcatc

SEQ ID NO: 405530 - DNA, 75 bp, Homo sapiens
cgccgctccccagggagggagtccgcagcctgagagttgtctgctggttctcagcttgaagaagattctgcagtc

SEQ ID NO: 405531 - DNA, 98 bp, Homo sapiens
atgtggcctgctacgggctgggctcagcctctctggatacaaaggagagtcaggcctacctctccaggaacagatggagtcggataactgttcaggag

SEQ ID NO: 405532 - DNA, 98 bp, Homo sapiens
gatagccacaaagcaagcagggatgtacagttacccagcacgtgtacctcctcctcctcctattgctcgggctgtagtgccctcgaaacgtcagcgtg

SEQ ID NO: 405533 - DNA, 100 bp, Homo sapiens
cagaaatcgacttaaagcctccagagaagtagaatctgtagaccttccacactgccacctgattaaaggaattggtcctattcactggaaggaatttttc

SEQ ID NO: 405534 - DNA, 100 bp, Homo sapiens
cacttttggaccaaaggcctgtgtgctgcagaacccccagaccatcatgtgatggtggaggcctaccggcgcgacgccacctccaaagaccagctcatca

SEQ ID NO: 405535 - DNA, 100 bp, Homo sapiens
gcggacagcgacgtgggtgaggaacctgactctgagaacaccccccagaaggctgacaaggatgccggcctggcccagactgatgctgagaagcactcac

SEQ ID NO: 405536 - DNA, 105 bp, Homo sapiens
ccgggaagagctgatgagaatgctggcggaggacgagctccgggatgctgtactccttgtctttgcaaacaaacagatatcagttttagagaatgtggcgtggag

SEQ ID NO: 405537 - DNA, 100 bp, Homo sapiens
agcagtcctctcagcccacttgcacggccttggacaagattcgctatgagagcctgacagacccttcgaagttggacagtggtaaagagctgaaaattga

SEQ ID NO: 405538 - DNA, 100 bp, Homo sapiens
gtggccaagtatgcgcccagcggattctacattgcctccggagccgctccgggaattctgaagttctgggcctttctcagaagactgtaatgtacctgaa

SEQ ID NO: 405539 - DNA, 88 bp, Homo sapiens
agaagtgttatatgtcctaaagtaaggtttcaggcccagttccaaggctccggcatcctgtgtctcactgagcactgctgcccgatgg

SEQ ID NO: 405540 - DNA, 100 bp, Homo sapiens
cccaggtcaccgccagcacgcgcctgcttcccgtctgcgcgagtccacgcagctccccagattgtcactgctgttccaagggcacacgcagagggatttg

SEQ ID NO: 405541 - DNA, 74 bp, Homo sapiens
gggggctcccgggtcatcagccactacgccgggcaggatgccacggacggggaggtttactgcatcgacgcgcg

SEQ ID NO: 405542 - DNA, 100 bp, Homo sapiens
gcagcaccaaatccaagatggcggccagcaggaggctgatgaaggaggctactcacagtcgaactacaactccccggggtccggccagaactacagtggc

SEQ ID NO: 405543 - DNA, 75 bp, Homo sapiens
atttggccttggtggtctcaactgtggaaaccggaccagttactctccacaagaaaattcacacaaccacagtgc

SEQ ID NO: 405544 - DNA, 51 bp, Homo sapiens
agctttatcgtctgcaacaacatgttaaggcgcatattaaatttcctattg

SEQ ID NO: 405545 - DNA, 75 bp, Homo sapiens
cccagagccccgcgtttcagccctagggaagccattgagacccagagcagcagttctgaagagatagtgcccagc

SEQ ID NO: 405546 - DNA, 75 bp, Homo sapiens
tgcctggcattcgggtggttgataatagacatatctgaagagatggattaagaatgctttggattaaggattgtg

SEQ ID NO: 405547 - DNA, 83 bp, Homo sapiens
tagtgcactcttctccttcacagtaaagtggctgttgctcgataatgtggaaaataagatgaaaggcacctgtgtagagggca

SEQ ID NO: 405548 - DNA, 75 bp, Homo sapiens
ccttgccccttttggaacagaaacagggccctccaggaaagcctgcagctgtccacagagcccaggggcccagga

SEQ ID NO: 405549 - DNA, 100 bp, Homo sapiens
aagaccatcctgctctcaactacaacatcgtttcagggacttgaaagaggagattgatattcgactctccagggttcaggatatcaagtatgagccccag

SEQ ID NO: 405550 - DNA, 101 bp, Homo sapiens
cggacttccccgttagaactcgcgtttccacttcagagatctggccctgggaggagcggggacactgaggacctctctccaaattggcctctcaactcaca

SEQ ID NO: 405551 - DNA, 82 bp, Homo sapiens
ccgctcgctgggagagaggtacctctccttttccctctccctttccctaaggtactaggttttgacaagcttgcatcatgcg

SEQ ID NO: 405552 - DNA, 83 bp, Homo sapiens
cgccctctgccttcgtcatttcctgccggccggtcggtttccggatgaaacgaggagccaggactcagtggcctttgaggatg

SEQ ID NO: 405553 - DNA, 90 bp, Homo sapiens
gctcggtgccggctcgcgcgatcggtgggacagaatttcgttgttttcaccgacgagactggagaatcccgtcacggggctgctgtcagc

SEQ ID NO: 405554 - DNA, 90 bp, Homo sapiens
atgcaatgttcttaggatcctcctcccgtccttctcatccttctgccgcagaatggaattcggcattgttcctacacagcttctcggcaa

SEQ ID NO: 405555 - DNA, 83 bp, Homo sapiens
caccaatactgttgcagattggctctgggcgtggggaggctgagacacgggagtgcatctactacaacgccaactgggagctg

SEQ ID NO: 405556 - DNA, 82 bp, Homo sapiens
ggaagacccccgagaagtacttaaaaaaacattggaattctgcttatctaggcacctgaatggacagaagaggacctcagcc

SEQ ID NO: 405557 - DNA, 100 bp, Homo sapiens
ttatcataataggagccacaaacttcccagaggcattagataagcttgaaaaagataatgccaagttaaaagttacagtcaaaaagcaaatggacaaaat

SEQ ID NO: 405558 - DNA, 75 bp, Homo sapiens
gccccgctacgagctggctttaatcctgaaagccatgcagcggacccaacatgagtgaagtttcctgcaagaaac

SEQ ID NO: 405559 - DNA, 101 bp, Homo sapiens
ctcagttggaagcagccgatccagcctgcggagcctgtggggcagttgccaaaacaaaggggatttggtgatggaggctttgttagaaggaatacaaaatc

SEQ ID NO: 405560 - DNA, 75 bp, Homo sapiens
ggggaaactaggtcgatggtcggcggcgcccggatgggcagctgagactgtcagcatcaataaggccattaatac

SEQ ID NO: 405561 - DNA, 75 bp, Homo sapiens
ctcagacctgcaagagaagctgggcaagcagaagtatttcctgctgttcctgttccagctgctccgtggcctggc

SEQ ID NO: 405562 - DNA, 97 bp, Homo sapiens
ttgtaatgcgactagcaaccaaggaacaagagatgcaagagtgtactgtggtgaagcagtattttccaatttgaagattcatttgaaggtggctcct

SEQ ID NO: 405563 - DNA, 75 bp, Homo sapiens
agtgaacctgtacacattttaaagaggtcttttgcaagaactgtctcagtgctgcccaaactccaaaatgatggt

SEQ ID NO: 405564 - DNA, 75 bp, Homo sapiens
ccggcggcatcgagactatcgctaatgagtatagcgaccgctgcacgccgaacagcttgagaactatgacttcac

SEQ ID NO: 405565 - DNA, 82 bp, Homo sapiens
ggacaagctggtgcagaacattgcgcggcaggcagaacgcagagctggccaagcttcggcaggagctcagcaaggtcagcaa

SEQ ID NO: 405566 - DNA, 83 bp, Homo sapiens
ggcatccagcaaccccttcctggtcggattacactcctgcttccagacgacaagtcggtttttagaacttcagccataaaaat

SEQ ID NO: 405567 - DNA, 100 bp, Homo sapiens
tcaagttcttaattattcagaatgctgcggttttccaaggtccagaggtgtccttctaaagctggtagaggtttcacgagtcatcagggacccagaaccc

SEQ ID NO: 405568 - DNA, 99 bp, Homo sapiens
cgatcttcgccgttaccttcttgctggcgttggtgggagccgtgctctacctctatccgcaaaatgatgcttcaacacccaggccaggtctctgcctcg

SEQ ID NO: 405569 - DNA, 73 bp, Homo sapiens
catgttatggacacggtctttcttattcaggaatggaagttggatacactttgtgacttgtacgagacactga

SEQ ID NO: 405570 - DNA, 51 bp, Homo sapiens
ggaagaagatggaaaaaacttgtttaatggatctgcaatgcatctagaact

SEQ ID NO: 405571 - DNA, 82 bp, Homo sapiens
tgtgtgctcatctcgggcctggtgctgctcgcctacttcctgccggcgcaggcacgcgaagctgcccccagacagctgtccc

SEQ ID NO: 405572 - DNA, 75 bp, Homo sapiens
tgcgtggtcatcgacctggacgagaccctggtgcacagctccttcaagcacaatcctggaggaagagaaggctca

SEQ ID NO: 405573 - DNA, 90 bp, Homo sapiens
ttttgctggtggttggacctgcagagcagtttcctaagagctgtaggtaaaacttgcctactgatcagttacacaaccaatgcatttcct

SEQ ID NO: 405574 - DNA, 100 bp, Homo sapiens
tgcctggggcaacctccaccttgacggttccaggtcccgtcaggaagcccaagtatgtggaaagccccagagtgcctggagatgcagttataatgccatt

SEQ ID NO: 405575 - DNA, 75 bp, Homo sapiens
gccacccagaaacctactggagttacttattaacatcaaggctgagaacgggaagcttgtcatcaatggaaatcc

SEQ ID NO: 405576 - DNA, 90 bp, Homo sapiens
cctggatggagccgccgctcccggtcggagcccagccgcttgcctgtggcgggcgtgtttgtgtgcctgctggagtacccccgggggaag

SEQ ID NO: 405577 - DNA, 100 bp, Homo sapiens
ggcgcactggagtaccctgttcctggcacaatggctgccatccggaagaaactggtgattgttggtgatggagcctgtggaaagacatgcttgctcatag

SEQ ID NO: 405578 - DNA, 50 bp, Homo sapiens
actgttttggatgatcttgaccccgagaatcaggaaacccaggcccaacg

SEQ ID NO: 405579 - DNA, 100 bp, Homo sapiens
attggcttcgggctgagctagcagtgagcaccttttggcccaatgaatatcagttcttacagctccattctcagatatttctactcagttcagatgaaag

SEQ ID NO: 405580 - DNA, 100 bp, Homo sapiens
gagacaacagtggccttctgatgaatactttaagtgtatacatttccaaatactccgactgtcttcattcaagaccatggtatcatgggaaatctggtta

SEQ ID NO: 405581 - DNA, 97 bp, Homo sapiens
gcccgtagccgggctgggccagaacagcccaagatggccgacttcgatgatcgtgtgtcggatgaggagaaggcccaacacagagatactttcattg

SEQ ID NO: 405582 - DNA, 96 bp, Homo sapiens
aagaagtagagtatttcaaccataaagacatcttaattgggcacgaaagaggtattgttgcagcatctggcagtgagactgaggatgaggacagca

SEQ ID NO: 405583 - DNA, 90 bp, Homo sapiens
cgaggatccagactgtgcagatgcatcagacgaggccaactgcgaaagaagagattttatcgacatcgaaagtaaatttgccctaaggac

SEQ ID NO: 405584 - DNA, 100 bp, Homo sapiens
aaaccgtccctcttccagcacgtgggcactcactcctcgctggctggcaagatccagaaactgaaggacatgatccacatcgcggacaccaaggtcgcca

SEQ ID NO: 405585 - DNA, 75 bp, Homo sapiens
atcacagaagccgacaaggcgttcaagcgaaaacatgaccgctgagcccatgagacatgggaaagcggaaccacc

SEQ ID NO: 405586 - DNA, 98 bp, Homo sapiens
cgcgaggacacgggctgcaacctgcagcacatcagcgaccgggagaacatagacggtgtacacttaaagcgttctgggaatatgaatcccttctgcac

SEQ ID NO: 405587 - DNA, 82 bp, Homo sapiens
ggagaagtttccgcaggactacttccccgagggtggcccagttgaaatccttcccttcctctaccttggaagtgcctaccat

SEQ ID NO: 405588 - DNA, 97 bp, Homo sapiens
ggggcatgatggacagggatcacaagaggtggcaaggtggctccacagaggctgtgcactcaggtctggcccggcaggtgtccagccttctcactaa

SEQ ID NO: 405589 - DNA, 90 bp, Homo sapiens
acacgtctgcggtgttacccacgactgcctgggacctggccaagggctccacacaccaagaccaagattatgtttgagaccttcaacacc

SEQ ID NO: 405590 - DNA, 96 bp, Homo sapiens
gtcctgtcaggcggcggccgagggcgtcgcggactctccccgcgatgatgccggttgcagtccatgagctgggaaaggaggcagtgctcttgggag

SEQ ID NO: 405591 - DNA, 75 bp, Homo sapiens
cgggaagaacttcttcagaattagaaaggagctgcttcccaataaggaaacataaaataaaacagggtctgttac

SEQ ID NO: 405592 - DNA, 98 bp, Homo sapiens
tcccttatcaagtaacagagcggggatgtgccctgactttcagttttgattaccagccgaatcctgaagagacactcagaagtaatgacagtggaatt

SEQ ID NO: 405593 - DNA, 90 bp, Homo sapiens
ataagtcgaaggggaaggcgcctgaagaggacgaagatatcagttttagagaatgtggcgtggagaaattctcaaggaaagagtaaaatg

SEQ ID NO: 405594 - DNA, 51 bp, Homo sapiens
ccacagtcaagacgatcatagtcactggggacccggctacctgtaagcaga

SEQ ID NO: 405595 - DNA, 97 bp, Homo sapiens
ggcgatgtgccaccgaggctgaggatgatggtagattgccaggctggaatgagctgctcatcgcctccttctcccaccgctccatcgccgtgaagga

SEQ ID NO: 405596 - DNA, 100 bp, Homo sapiens
gaagagctcccagaaatccgtgtggatgcagcatctcctggacctagagtaacttttaatatccaggatacagcatctccagaatatcagaaactgcagg

SEQ ID NO: 405597 - DNA, 100 bp, Homo sapiens
atgatgatggatccatttctcctattgaggagtcaaccacgtaaccaaggctttgacgtggtgctggtggacacggcaggccgcatgcaagacaatgccc

SEQ ID NO: 405598 - DNA, 51 bp, Homo sapiens
cggcggcggcggctgcggcccaatatagatatttagcttcctgtggtatac

SEQ ID NO: 405599 - DNA, 101 bp, Homo sapiens
ggttgtttgcaacgaccgtctggggaagaaggtccgcgttaaatttccatcacctgaagtggacctcttgggaccgtctgaaggtaccagctgggcagcct

SEQ ID NO: 405600 - DNA, 82 bp, Homo sapiens
gagacgtaccggctctggaaaatccgcaagaccatcatgcaggtgtcccgacccaggctaagcttgagcatggctgagcagg

SEQ ID NO: 405601 - DNA, 51 bp, Homo sapiens
tatgaagtgtggcatccaaaatcagagcaagaggaggagcgaggccgggta

SEQ ID NO: 405602 - DNA, 100 bp, Homo sapiens
gttctggggagcgcctcgtcgacatgagtgatgtggaggaaaacaacttcgagggcagactccagggcccacaacggcagtgtcctacatgtcggtgaaa

SEQ ID NO: 405603 - DNA, 120 bp, Homo sapiens
aacaaaaattgaagaaatggatccctctttcaaccttcatgaaaccattactaaggtctttttgccattcctccaggacatccaccataaggaaaggagaccctggaccaacattctcta

SEQ ID NO: 405604 - DNA, 100 bp, Homo sapiens
ccaggacttgatgaatataatccattctcggattctagaacagtggtataagttgaaatccaaaccaggaaagaaggacaaggagcgaggagaaattgag

SEQ ID NO: 405605 - DNA, 100 bp, Homo sapiens
ttcgggaacaaatactactacatcccgcagtacaagaactggagaggtgaatgaaaactttgccattgatttgatagcagagcagcccgtgagcgaggtg

SEQ ID NO: 405606 - DNA, 90 bp, Homo sapiens
attccaagtaactcttatttgcttcacggtgatgatatggcatctgccagctctagccgggcaggagtggccctgccttttgagaagtct

SEQ ID NO: 405607 - DNA, 74 bp, Homo sapiens
ttaaccgagatcaacctgtctggtactggtgtggcatactcggacagagaagcccaagatgaagcaggaggagc

SEQ ID NO: 405608 - DNA, 100 bp, Homo sapiens
cgggcagcaggatggtggtggatgcggccaactccaatgggcctttccagcccgtggtccttctccatattcgagctctggatgagggggatattgcctt

SEQ ID NO: 405609 - DNA, 97 bp, Homo sapiens
tggagaggagcagcggttgctgttggaggaggtgaaatgacaatggatgctctgttggctcgattgaaacttctgaatccagatgaccttagagaag

SEQ ID NO: 405610 - DNA, 100 bp, Homo sapiens
cttcttggatccacggcagccatcatacaacgtcaagtctgtctgttccagggagcgaggcagtgcagcaaaccaaatcccaaccaaatatccactagta

SEQ ID NO: 405611 - DNA, 100 bp, Homo sapiens
tagaagctatcaaagcccttgaagtcagccacagcaattgtctgctattttaaaagcactgtgatgcttaaatattccagctgctacatcggacaggtgt

SEQ ID NO: 405612 - DNA, 97 bp, Homo sapiens
ctcttcggctgcggaccctgccattccggaggagatggatcctgagcttgaaaaaaaactgaaagagaataaaatatctttagagtcggaatatgag

SEQ ID NO: 405613 - DNA, 100 bp, Homo sapiens
cctggctacatggcttttttgacgtatgacgaagtgaaagctcggctccagaaattcattcacaaacctggcaggcagagctgcaaccctcttgtcctct

SEQ ID NO: 405614 - DNA, 95 bp, Homo sapiens
gttctccaggtgtctgcgagcctctccacgcacgtgccctccagcaggttacgggcaggacttgagtggcttcggacagggcttctcagacccca

SEQ ID NO: 405615 - DNA, 50 bp, Homo sapiens
catatccactgccaaagggaccagattcttctcatcgcagtgctccaggc

SEQ ID NO: 405616 - DNA, 75 bp, Homo sapiens
tggagacctgccatttccaggccttctgggcagaaaatctatttcaggaacttcaggaacattttcaagctctga

SEQ ID NO: 405617 - DNA, 125 bp, Homo sapiens
ccggcactgcctggctgcgagcacatgatggcgatacgggagctcaaagtgtgccttctcggggtactccaaagattcaggtttactcacgtcatccagcagagaatggaaagtcaaatttcctg

SEQ ID NO: 405618 - DNA, 98 bp, Homo sapiens
ctggagccagccccagcgcttcagcatcggtttactcctggcttgggggcattaggaagcactggaggctcttcgggaactaatggatctaacgccac

SEQ ID NO: 405619 - DNA, 100 bp, Homo sapiens
actgagtgaaaatacagccaagatcttggcaaagcttctccctcagtatttagaccaggctccctgaaacaacagtaacctacccctgtgggtcatcatc

SEQ ID NO: 405620 - DNA, 96 bp, Homo sapiens
gacaaggagccgtcgtcgttaggggaacgcccttttgcttgtgactggcagggctgcgacaagaagttcgcccgctccgacgagctggcccgccac

SEQ ID NO: 405621 - DNA, 100 bp, Homo sapiens
ttaactcttacctgaagcccatgttgcagcgggactttattaccgctttaccaggtatatgctcgtatgtcagaagtcttaggaataacagatgacaacc

SEQ ID NO: 405622 - DNA, 90 bp, Homo sapiens
ttttactttctgacaatgcagcttctcttgcagtgcaggttttataggatcacattgacaaaagtaccatggagttttatgagtcagcat

SEQ ID NO: 405623 - DNA, 51 bp, Homo sapiens
actggttggtgaagaaggatttgtaggggcaccaccacgaggcgatttgtg

SEQ ID NO: 405624 - DNA, 110 bp, Homo sapiens
acgacacccctggtggatggcgaggatgagaggatgagtaagagatacttacagaaagcaacaaaaggaaaactgctaataataatatttattgtaaccttgtgggggaa

SEQ ID NO: 405625 - DNA, 100 bp, Homo sapiens
tggccatgttggcccagcaaatgcaactagccaatgccatgatgcctggtgccccattacaacccgtggtcactctgtgagactgctgggtcagaaaaag

SEQ ID NO: 405626 - DNA, 95 bp, Homo sapiens
tgtaagagcattggatcttctggtttgcattgagactccttgcattccgccagatacacaaagttctaggcatggatccattaccgcaaatgagc

SEQ ID NO: 405627 - DNA, 100 bp, Homo sapiens
ccgaagccaccgcggccacggagaagggcgagaagaagaaggaggtcactttagacaactgtgttgaagttggacggattgccaacacctacaatctaac

SEQ ID NO: 405628 - DNA, 76 bp, Homo sapiens
atggcatctatgttatcaaccagattactacaatgcagctagaacgtgaaaaggctcttgaacataagaatcgaat

SEQ ID NO: 405629 - DNA, 90 bp, Homo sapiens
cgaaatcatgctgtgttaactgctaacttttctgtaaccaacctgtggtacccggaggtgcggcaccactgcccccacacgcccatcctc

SEQ ID NO: 405630 - DNA, 97 bp, Homo sapiens
cgcaaggggccagcttggtgtcgccttcgttcttctgccaccccattcggagtacgagagggcctccaaagtggaccagtttgtgacgcgcttcctg

SEQ ID NO: 405631 - DNA, 75 bp, Homo sapiens
ggccatccagctcatcgctcgcatcgctgccgccaacgggggcgacatggagtccaatgggaaatacatcaccaa

SEQ ID NO: 405632 - DNA, 98 bp, Homo sapiens
ctccttagaaaacctcgcagcagaaacctgttttttttctggagctgatcttagaaacctctgcacagaaaagccaagtacaagaagctggagaagcg

SEQ ID NO: 405633 - DNA, 74 bp, Homo sapiens
ccatcgccacaacctggacaggcagcaaggtacctgcaccagtcaggggccctgaccatggaggccctggagga

SEQ ID NO: 405634 - DNA, 75 bp, Homo sapiens
attgtgtctgcttggtgtggagccatgaaggtgtggaaacaggaagagaactagaactggaagtaaagcattgaa

SEQ ID NO: 405635 - DNA, 75 bp, Homo sapiens
ctgcgaccccagtcggtgctccggggaggtcacctgacgaggaggtgtcgtgaaaactacccctaaaagccaaaa

SEQ ID NO: 405636 - DNA, 80 bp, Homo sapiens
cttaaggtcttcagcggggcgctccaggaggcactcacagggaacggcaggagcagctgatgggatatcggaagagaggg

SEQ ID NO: 405637 - DNA, 75 bp, Homo sapiens
ctagagttgccatttcgctgggatttttgggtggtgcaaagttccagtgtctcgccccatcctcaccctcagggt

SEQ ID NO: 405638 - DNA, 82 bp, Homo sapiens
tcactgcttgtcaggagggatttatttgcacatggggaaggcctggtaaagtgacaatgcagatcttcgtgaagactctgac

SEQ ID NO: 405639 - DNA, 50 bp, Homo sapiens
tgttcaccatcctggccccggaaggacacaactcagatgggaagttcatc

SEQ ID NO: 405640 - DNA, 101 bp, Homo sapiens
gtccgatgctggggacaagaatgccaccaaagcaggcgatgacgagccagagtacgagccttgatgacttacaagccctcaaggggaagcattttctcctg

SEQ ID NO: 405641 - DNA, 88 bp, Homo sapiens
cacacagtgtccagatacgaggtggaatgcagtagccctctgggcctgggatattgtggttgataactgtgccatctgcaggaaccac

SEQ ID NO: 405642 - DNA, 83 bp, Homo sapiens
cttaacacagtagcagctggaaccatgacaggcatgttgtataaatgtacaggaagtgggaaaactcttgcctttgccatccc

SEQ ID NO: 405643 - DNA, 75 bp, Homo sapiens
caaaggcggaaatattggggctaagtggagatctagtttgaagcactaagaagaataagacatcagtttgaaaag

SEQ ID NO: 405644 - DNA, 97 bp, Homo sapiens
tcgactcccccggctcttagactagtgctggagaatctggtaaaagcaccattgtgaagcagatgaggatcctgcatgttaatgggtttaatggaga

SEQ ID NO: 405645 - DNA, 50 bp, Homo sapiens
cagccacagacggaacaagcatgcaggcttcagggatgacttcttagggg

SEQ ID NO: 405646 - DNA, 50 bp, Homo sapiens
cacattttgtgatccagtcatcatttcttggttagcaggaagaagatgag

SEQ ID NO: 405647 - DNA, 74 bp, Homo sapiens
cgttgccatggagacgcgggcggcagacaatgcagatcttcgtgaagactctgactggtaagaccatcaccctc

SEQ ID NO: 405648 - DNA, 80 bp, Homo sapiens
gaggaggagctgctttccccatcatctggaagttacatcatgctgatgacagcttcctggtcctcaccacagatggaatt

SEQ ID NO: 405649 - DNA, 75 bp, Homo sapiens
gtctggaggcttccagtccatggggccatccaggagagcctcctcaccagcacagaaggcctgtgccccagcgcc

SEQ ID NO: 405650 - DNA, 100 bp, Homo sapiens
gacccggaagtggatggcgtggagatatggcgcaactgcggcgctcattttttgagaccagtactgttataatccctatttacagatgaagaaactgagc

SEQ ID NO: 405651 - DNA, 100 bp, Homo sapiens
agaagggcatccagatccagatgcagagctccagaggataggactgaggctttcagtgcatactggcaaccttggaaggcaggaatgtgaaacttttccc

SEQ ID NO: 405652 - DNA, 83 bp, Homo sapiens
ggggaacccacaggagtcgctggatagactgcacaaggtgaagactgtctgcagcaagaagctccaccatgaggcgaggtgga

SEQ ID NO: 405653 - DNA, 105 bp, Homo sapiens
cctgaaccggcacctgcacacctggatccaggataacggaggctggtctgaaccggacggcttttctcatttccacttgtacgtgtgcgctgcttttctcgtgag

SEQ ID NO: 405654 - DNA, 100 bp, Homo sapiens
cccagcccgggccgtccatcctcgcattgctgttgaatggttgtttgcattcgctccacttggaatgctctctctccaaagctgagttgtgacacaagac

SEQ ID NO: 405655 - DNA, 50 bp, Homo sapiens
caagaaaacatcaaagaggtctagcaaagtcctattttgtaacggattat

SEQ ID NO: 405656 - DNA, 98 bp, Homo sapiens
tcagaagaacttgtacagagatgtgatgttggagaactatagcaatctggttttcttggctattgacctgaaaagtggttctggaaaagtgtaccaag

SEQ ID NO: 405657 - DNA, 96 bp, Homo sapiens
agagacccctggatctgagcaatggaaatttcaggaattaagtcaaccacgttctcataccagcctgaaggttttgcactgattgcaaaaataaag

SEQ ID NO: 405658 - DNA, 74 bp, Homo sapiens
ttaaggttggaaagatggatgctacttcctattctaataagtgggcggaaaaaccagcctttgggactccccta

SEQ ID NO: 405659 - DNA, 90 bp, Homo sapiens
tgctgccggaaggggtcccgaagccccctgcaggaactctacaacccaatccaggaccaactgttgccaatcctgagctgttccgcaagt

SEQ ID NO: 405660 - DNA, 100 bp, Homo sapiens
attcctacgagtcttctagcttcatgttcctggtgtttgacctgtttcgagacaaggagtggatcaggccagataagtatggccatttctctcaggagtt

SEQ ID NO: 405661 - DNA, 82 bp, Homo sapiens
aagccaccagctcccgggacccgctcagcgataccacgtggccgtgaccatccagctcctccttagacgaggcaacatcttc

SEQ ID NO: 405662 - DNA, 75 bp, Homo sapiens
cctgcaccatgagctggggcaccgagctctgggtgtggacactgccagcggctgcagccgacttggaatgacctg

SEQ ID NO: 405663 - DNA, 50 bp, Homo sapiens
gcctcctgattagctgggactacagactccctgccctcggaccctgtaca

SEQ ID NO: 405664 - DNA, 100 bp, Homo sapiens
ctggacacagcaatatctctgggctttcacaggtgctggtctcagtgtcagtgataatgaatctggtcaaggcagccaggaggggggcaccttgactgac

SEQ ID NO: 405665 - DNA, 90 bp, Homo sapiens
tttcacccatctgtacatcctatgtcaactgcttctcaggtagcaagtacatggggagattcccagttctcaatcttccttcctccttac

SEQ ID NO: 405666 - DNA, 75 bp, Homo sapiens
cactgggacccccaggaggtgaccctgcaggtgaccattgtgaggtagatattttgttctaattttccagatgag

SEQ ID NO: 405667 - DNA, 88 bp, Homo sapiens
agcatccgctgtacaaagaccaggcctgctatatctttcaccaccgttgccgccttctcgaggatttacagaatgtcaacatcacact

SEQ ID NO: 405668 - DNA, 100 bp, Homo sapiens
cctgctggaagcactcaggaagacccaaggcatcgacatcctgtactcgggctcccagaaggccctgaacgcccctccagggacctcgctcatctccttc

SEQ ID NO: 405669 - DNA, 100 bp, Homo sapiens
gcggagtcggcgccgagaacatggttggggtgactcagtgggaacgccatctgagcggggcatgacctatgacgcactccacgtttttgactggatcaaa

SEQ ID NO: 405670 - DNA, 75 bp, Homo sapiens
ctgacttctgtgagctcattgcgcgggactagggagggtgctgataagactgtgaaaggcccagatggactgacc

SEQ ID NO: 405671 - DNA, 75 bp, Homo sapiens
ctatgtcagcacgcagaaggtttgaggagcattgcttctcatacagtaagcctggagcattggtaagcgtcacac

SEQ ID NO: 405672 - DNA, 76 bp, Homo sapiens
gagaccagcctgaacaacatagctgatgtttcagacaccgcaggaaatgggcttaatagtgatcgcggcccggcag

SEQ ID NO: 405673 - DNA, 90 bp, Homo sapiens
gcgacgcgcccggcccggagcccccagcgcagcggccgcgggttcatagtggcgtcatgcacgcagactcctgcaagttcccctaagttc

SEQ ID NO: 405674 - DNA, 82 bp, Homo sapiens
ttggacttgatagctcaaatttgaaaacaacctttcagcaaagagaaaccaacctttggaaagttgagtataaacaaaccga

SEQ ID NO: 405675 - DNA, 75 bp, Homo sapiens
aggcccaggctgctttcttcggtagctaccgaaacgctctgaaaatcgagccgtatagcttgctcgacttcaagg

SEQ ID NO: 405676 - DNA, 100 bp, Homo sapiens
gccgccccgaaactttcaccgcgagcggttgctgatagtccaactccaccgccaccacctccaccagatgacattcccatgtttgatgactctccacctc

SEQ ID NO: 405677 - DNA, 50 bp, Homo sapiens
ctggatgatatcaactgctatgacaggtgtgatgttagctgttgatgctg

SEQ ID NO: 405678 - DNA, 51 bp, Homo sapiens
cggatgttggtggttctccttcagggtccgcaagcaggtggtgaacatccc

SEQ ID NO: 405679 - DNA, 73 bp, Homo sapiens
gcctgggtgctggcgaagcggaggccggaggctctgtgtgctccgggatggagcaggtgtgcagagggtgaga

SEQ ID NO: 405680 - DNA, 50 bp, Homo sapiens
gagcatgttcacccaagcattaaacgccaagattgacagacacctaatat

SEQ ID NO: 405681 - DNA, 100 bp, Homo sapiens
aataggctgcttggagaaaatgatggggaaacaagagctttgtcttcccatgcacaagatgattaatacagatcttagcagaatcttgaaaagcccagag

SEQ ID NO: 405682 - DNA, 75 bp, Homo sapiens
tgaagtgcagaggtttttttctgggtggagagattcaaccagttagcgtgaaagttggagataaagttcttctcc

SEQ ID NO: 405683 - DNA, 100 bp, Homo sapiens
ccgccatttgcgacgcctcggaagcatgtgtttctgccttgctgggaaacgagagtgcctggaagagctgggatgtctggttgagtcctatggcatgaat

SEQ ID NO: 405684 - DNA, 75 bp, Homo sapiens
aacgcaagggaaaacaaatttgtaaatattttcttgaaaggaaatgtattaaggctatgtccaaactgggtcttc

SEQ ID NO: 405685 - DNA, 75 bp, Homo sapiens
aattgaaccaagtgtttccctctggcagttttatctctctaagctttatcctgtggataaacgcagagtgaacga

SEQ ID NO: 405686 - DNA, 83 bp, Homo sapiens
gaagaggagcaaggctccggcactaccacgggctgcgggctgcctagatttcgctgcctcatcacccacatctcccaatgcat

SEQ ID NO: 405687 - DNA, 151 bp, Homo sapiens
cactgagaagtgtatatcaagccacaatttccatcaaaaagtgattaagcagagaatggagaagaaggttgattccaggaatgaatctgaagtctgctgcagtaaaacacagaaggctttaaaatgttttcttgcataaaattcaaaactt

SEQ ID NO: 405688 - DNA, 75 bp, Homo sapiens
gtttctatcgggacgtcctggggatgaagttcagaagaacactcattacatgatgatctttgatgcctttgtcat

SEQ ID NO: 405689 - DNA, 83 bp, Homo sapiens
cttggactgagtcctgcaggacacaggacttctgcacggacctggccgtctccagtgccaacttcattcccacggtcactgcc

SEQ ID NO: 405690 - DNA, 100 bp, Homo sapiens
aagatctcttccccttgtccatagcctagatcgagctccctgtgtgcaccgcgcgctgcccgaggcgcattggagctggagtgagccttccaggaatttt

SEQ ID NO: 405691 - DNA, 83 bp, Homo sapiens
tgccctgcagtacctgcagaaggtctctggagacatcttcagcagataattcgtgtccagtccccggatggagtgaagcggat

SEQ ID NO: 405692 - DNA, 98 bp, Homo sapiens
ggatataaaacttcaaaaattaccattttatgatttactggatgaactgataaaacccaccagtctagaacatggtccaagacaattcctgggaaagt

SEQ ID NO: 405693 - DNA, 98 bp, Homo sapiens
ggatatcaagagtataatgtctatggtgaagtcttttgtacagtggttaggttctgtacagagtaatgagatgtgtgacggctgcaaaccaggtgttt

SEQ ID NO: 405694 - DNA, 98 bp, Homo sapiens
ctgagacgtgggtattaacattggctggagtagcaaggatcttcaacactagaagatatttgctgcagcctttagataattgtatggaagagatacag

SEQ ID NO: 405695 - DNA, 80 bp, Homo sapiens
aataaaagagaatgtaacatcatgcttccgggatggaagcttcctggcgccaggtggccggtggccgaggccgatcccgg

SEQ ID NO: 405696 - DNA, 113 bp, Homo sapiens
gcccggcccggcccggcccgccgagggccccagcgcaggagccgcgcccggacccagggtcgtgcacacacacaagccgcacttcatggccttgcactgtcaggagtttggag

SEQ ID NO: 405697 - DNA, 96 bp, Homo sapiens
tatagtgaagaggacaggagccattgtggacgttccagttggtggtagacttgctgctggctcgaggtgcaaataaagaacataggaacgtatctg

SEQ ID NO: 405698 - DNA, 82 bp, Homo sapiens
ccttcggcagtccacccaccgccgccgcctcccagttgattatggaagattcccacaagagtaccacgtcagagacagcacc

SEQ ID NO: 405699 - DNA, 99 bp, Homo sapiens
actgggtgctggggctgcacaagatcatccaccactcaggctccatggaccagcgtcagaagctacagcaatggcctcacctactgctattccatcgac

SEQ ID NO: 405700 - DNA, 75 bp, Homo sapiens
ctctcaatctctgtctgaactggatcataaatgacagttttaattcacaggtgttgcaagctgacatgttaagaa

SEQ ID NO: 405701 - DNA, 82 bp, Homo sapiens
tgtaaaccttattctggccaacagtgttaagtataatgtccacaggtcctggctaccctgggaagagacaagaagtaaatga

SEQ ID NO: 405702 - DNA, 100 bp, Homo sapiens
acgggcacattgacagcaagctggctgggctggagcagaaactacagggtacccccagcaacaaggagacgagctcttccagaaagtggcagaggattac

SEQ ID NO: 405703 - DNA, 97 bp, Homo sapiens
cttgtggccctgggctttaccatctttgtggctgtgcttgccaggcctggctccaggccactgctctccaggaagataaggcttttaaagcagccta

SEQ ID NO: 405704 - DNA, 100 bp, Homo sapiens
gcagagaggagcagctggaagccgtggctgcgctctcttccctctgctgggcgtcctgttcttccagggccagctgcgggccgtccagcggctgtgccac

SEQ ID NO: 405705 - DNA, 75 bp, Homo sapiens
tgtaaccgctataatgaggatgatgcaaaggcagcaagagatgcacaggaggtttcgacacagccccaactgctg

SEQ ID NO: 405706 - DNA, 100 bp, Homo sapiens
tgaacactcaagtgaagcaaaagccttccatgattactactatactggcaattgctggagaagattttgcaattgttgcttctgatactcgattgagtga

SEQ ID NO: 405707 - DNA, 75 bp, Homo sapiens
gacggcccggacttcctctcagaagaggaccgcggagtgggtcatgataactgggtacgtggagttctgttccat

SEQ ID NO: 405708 - DNA, 100 bp, Homo sapiens
gggaagtgtgaagcggccaatggcacggaggcctgcgtggtgaatcctggttctttcgttggctacctggaaagaaaaagacagaagcttatttgccaga

SEQ ID NO: 405709 - DNA, 80 bp, Homo sapiens
gctctgggccttgaacattccgaaactgtcaagattggcaaggcacctgaatggacagaagaggacctcagccaactgac

SEQ ID NO: 405710 - DNA, 82 bp, Homo sapiens
aagtggctgcggccgtcgcccaggagtcatcggacgccagaatctgatgcaatcttcttaccgcgaagaagccaggggaata

SEQ ID NO: 405711 - DNA, 78 bp, Homo sapiens
aacttacgcagggttacatatattttcacaagctggagaaggagtacgtgtgccgggtggaaggggagttccccactg

SEQ ID NO: 405712 - DNA, 90 bp, Homo sapiens
ctggacctgttcgagatcagccagccgaccgaggtcacaaggcacttaaagcattgttgaggtcattggtaggtcttcaggaagagttgc

SEQ ID NO: 405713 - DNA, 100 bp, Homo sapiens
gggggtcctctctgagtcaaatccagtggctggcgcccatgcggctctacacgctctccaagcgccactttgtcctcgtgtttgtcgtcttcttcatctg

SEQ ID NO: 405714 - DNA, 75 bp, Homo sapiens
tacatggattttaatgaagatgaagtggagagactgattttggacctcagctcaagaacctcaataagaagctct

SEQ ID NO: 405715 - DNA, 75 bp, Homo sapiens
ctagggtgcagcgggcgcgtctgcggctggtgttggcgcatctctagaaactcccatcaagactgaagcagacgt

SEQ ID NO: 405716 - DNA, 100 bp, Homo sapiens
gacaacttctggcagaaacagaggactaattttggcagttctaaatttgaatttgagaccagtgtgcttttcttggagaaagaagaaaagaagaaagaag

SEQ ID NO: 405717 - DNA, 75 bp, Homo sapiens
gcgggactctgaggaaaagctcgcaccaggaggccccgtgtgggccgcggcccggccctcaccatggagtccatg

SEQ ID NO: 405718 - DNA, 75 bp, Homo sapiens
cagaagacagagggttttcttttgagggggaaatttgcagtggtgagaaaatgtataaagaaagattctgggaaa

SEQ ID NO: 405719 - DNA, 100 bp, Homo sapiens
atgtacttgtacctgtctggattattcattattacatgaagtatcatgtttctatggcgggtgaaaaagttgagaagccagatactaaagagaagaaacc

SEQ ID NO: 405720 - DNA, 95 bp, Homo sapiens
atgtgctggcagcacttccctgagccactctccaggctgctccagtactcaagggaacggtactaaggctcgtacgtctgcatcgattatcttac

SEQ ID NO: 405721 - DNA, 100 bp, Homo sapiens
caccgtgctcctcgaccccccactgatcgcgctggataaagatgcgcctctgcgatttgcagcgacaaggtgctggggcaaccaatggaaaagacaagac

SEQ ID NO: 405722 - DNA, 97 bp, Homo sapiens
tgtggtctctgcacatagtactaatgaggtgctccttcagattgaccaagtccttggccacaggtccctgatccgagcagttggcagactaaaaaga

SEQ ID NO: 405723 - DNA, 75 bp, Homo sapiens
acaaaacagccagttaatgtggaaacaaggtcgacaactactcagacacactgccccccaggtgttgagtaccag

SEQ ID NO: 405724 - DNA, 98 bp, Homo sapiens
agaaggaggaaactatggcctccaggcttccgacggcctggtcctgtgtgttctccctcgatgctccccacagcacctacaacctctactgccccttc

SEQ ID NO: 405725 - DNA, 74 bp, Homo sapiens
ccctcctccgagggaggggggttgtgaccccagggtggtgacttcacacgccataatggcactggtggcaagtc

SEQ ID NO: 405726 - DNA, 100 bp, Homo sapiens
ggcattctcttagctgacagaaggggcacatggccatcccgagagtatgagtttaaagccaagaacatcaagaagaagaaagtgagcattatggtttcag

SEQ ID NO: 405727 - DNA, 99 bp, Homo sapiens
gatggctctgaaacagaaaccacctctgccatcctcgcctcagtcaaagaacaggccttgaaccggggcattgctgctgtcaaggaggatgcagtcgag

SEQ ID NO: 405728 - DNA, 112 bp, Homo sapiens
tagaaaacaacatcccttcatcctttcttcatcccaaccgggcatcacatagatgattcttttattaggccagtaactttttggattgttggggattttgatagcccttctg

SEQ ID NO: 405729 - DNA, 75 bp, Homo sapiens
gtgtctcttagcagcgcgcggagaagaacggggagccaggttaaataggattgcgaatcaggtggccattcagcg

SEQ ID NO: 405730 - DNA, 96 bp, Homo sapiens
gaattctataagaccattccccggttttattataggttaagtgggcagaccaacatccacctcagcaaaaacttcttcctgacgaatcgcgccagg

SEQ ID NO: 405731 - DNA, 100 bp, Homo sapiens
tgccaagctcatcgctgccctctccaccccctcccagcaggtaacatcctcaagcaaatcagaatgagagcacccattcaggaaacctgaacagggaagg

SEQ ID NO: 405732 - DNA, 74 bp, Homo sapiens
aagcgaagccgaaaaaggcagcagcgaagattcttacgctgtatgacagtattaatgttattgacgtaaataaa

SEQ ID NO: 405733 - DNA, 83 bp, Homo sapiens
ccacctccggccactgggacggcggcgcggagaaggcaggtgtcgtgaaaactacccctaaaagccaaaatgggaaaggaaaa

SEQ ID NO: 405734 - DNA, 50 bp, Homo sapiens
ctttgacaatacaggaaatgtttgccccttcacagatgtagtcactacaa

SEQ ID NO: 405735 - DNA, 75 bp, Homo sapiens
ggacggggagctgaacgtggacagcctcatcacccggctgctggagggaccgcagctgaatgcacagctagaagg

SEQ ID NO: 405736 - DNA, 74 bp, Homo sapiens
gcagccgatccagcctgcggagcctgtggggcagctttgcccgaagtttttacatacaaattctactagtcaca

SEQ ID NO: 405737 - DNA, 75 bp, Homo sapiens
gctgggctcctactgttcttagagatgtacctttctcaggttttcattcctccccagacttgatggaggcttggc

SEQ ID NO: 405738 - DNA, 88 bp, Homo sapiens
ggatatggctttgtctcctttttcaacaaatgggttacattgattacccacctagtacaacatcttacgggaagagcatagtatttcc

SEQ ID NO: 405739 - DNA, 83 bp, Homo sapiens
cgcgagcgaacgaccaagagggtgttcgactgctagagccgagcgaagcaaaggaagctgttgaagttattgaagtacctgtt

SEQ ID NO: 405740 - DNA, 131 bp, Homo sapiens
agcagatcgagaccgggcccttcctcgaggcggtgtcccacctgccgcccttcttcgggtggatgaggtgaactggtctcactggaaccagaacttgggcatcatcaacgaggacccgggcaagaatgaga

SEQ ID NO: 405741 - DNA, 90 bp, Homo sapiens
cagagatactggagatgccacctgaaaaagcagatggagtagtggaggggatagatgtaaatggtggcggcagagcgacgggccagcgag

SEQ ID NO: 405742 - DNA, 100 bp, Homo sapiens
gtccgtccgccgccaccacccactccggacacaggaaccaggtgcagatgggtctcttccttcctgcccccatctctctcactcctggctcagtgcggca

SEQ ID NO: 405743 - DNA, 100 bp, Homo sapiens
gccggctgcggaggcgaagaggtggcagcgcgagctgggaccagcgtctcggaggcgccgcaggtgactccccggacagctcaacaccaaagctttcgcg

SEQ ID NO: 405744 - DNA, 100 bp, Homo sapiens
gccgccggtccgagccttcctgctcatctccaccctgaaggacaagcgcgggacccgctatgagatgttcctgcagcagccagctgtatccctgagcttc

SEQ ID NO: 405745 - DNA, 98 bp, Homo sapiens
gtggtttgaaatggaaggaaacctggcccctgaaggctgctgtccccaaggcccagcctcctcaccccgactggcgacccccgggccaatgcctcacc

SEQ ID NO: 405746 - DNA, 90 bp, Homo sapiens
ccgccccagcccgggtgcccacactggccgtcccggccatctcgctgcccgacgatgtccgcaggcgtattagttcagaagcaggcctag

SEQ ID NO: 405747 - DNA, 75 bp, Homo sapiens
tggcctgaagacgggattctttagccccaggatgggtgagttcaacgagaagaagacaacatgtggcaccgtttg

SEQ ID NO: 405748 - DNA, 90 bp, Homo sapiens
cacacttctgatgacacctttattttaaaagctgatgttccaagttgatttggagcatatgcgaacaataaaacctgaaaaacacttacg

SEQ ID NO: 405749 - DNA, 51 bp, Homo sapiens
attccaagtaactcttatttgccacatgaaatgaagatcacctctgcctat

SEQ ID NO: 405750 - DNA, 100 bp, Homo sapiens
cacaactccggacacttgttttccagtgtgatcttacccttaaagctgaagagctaaggagcaaatccaagatctgtgccaatgtgttttgtggagccgg

SEQ ID NO: 405751 - DNA, 82 bp, Homo sapiens
gcgagagagcgcggccctcaggagcaaggcggccaaatagttgcatcacatgtatctaatccgagagtctcatgcttctggt

SEQ ID NO: 405752 - DNA, 75 bp, Homo sapiens
cttttccggcctgacaacttcatctttgattgcaacacctgctcggtataccgtgactttgggaggaacatctgt

SEQ ID NO: 405753 - DNA, 100 bp, Homo sapiens
atttgaaccagcaccttatcagcagggaaaatgcagagcaatccagagcggccatcaacaaatgggtgtccaataagaccgaaggccgaatcaccgatgt

SEQ ID NO: 405754 - DNA, 83 bp, Homo sapiens
cagatattcctccgagtagccaccccgcagaaggcgtgcgattcttccagcagatatgaagaaacgcttcgttaagggactca

SEQ ID NO: 405755 - DNA, 101 bp, Homo sapiens
ttcgtgttcgtccgcggagatctctctcatctcgctcggctgcgggaaatcgggctgaagcgactgagtccgcgatggagcccagaaaaattatatggcat

SEQ ID NO: 405756 - DNA, 96 bp, Homo sapiens
acaaaagccaagaggaggacagttcgctacacagcaatgcatcgagaaacgttcctggatccgaacactgccccctgacgacctagagagatcccg

SEQ ID NO: 405757 - DNA, 100 bp, Homo sapiens
gattcatctaagcaggcagaaacatatttaaccagggcaacaccctccactaaagagtcaagccagccggacgcattctcatctggtgggggaagcaaac

SEQ ID NO: 405758 - DNA, 100 bp, Homo sapiens
catggaccaggccctcaagtccctgatggcctcagaggaggagatcccgtacaaggtggtggcacggcgggaaggtgatgtggcagcctgttacgccaac

SEQ ID NO: 405759 - DNA, 96 bp, Homo sapiens
aaaaagcataggcggaccatgataatttccccagagcgtcttgatccttttgcagatgaaactgttcaggttccattatcaaaacgagcaaaattt

SEQ ID NO: 405760 - DNA, 100 bp, Homo sapiens
gaatataaagaagaaaggatacctaaacattcttctcaaaatagtaattcaggaaattcagttcatgaagataagaagtttcttgacaaatacatgcccc

SEQ ID NO: 405761 - DNA, 100 bp, Homo sapiens
ctgagatcaaatggcacttcattggccacctacagaaacaaaatgtcaacaaattgatggaaatacactttcgggaaatggcctctaaatcctggctgaa

SEQ ID NO: 405762 - DNA, 100 bp, Homo sapiens
cttgaatgactggaaactgattggaaactctttgggaaagccactcgaaaagaaaagttattgatgccaatcaaagagaagcctgggtttctaacgacac

SEQ ID NO: 405763 - DNA, 98 bp, Homo sapiens
caatacaaggacctgtggaatatgagtgatgacaaaccctttctatgtactgcgcctggatgtggccaggagattacctggggcaattgatgttatcg

SEQ ID NO: 405764 - DNA, 82 bp, Homo sapiens
aggcccaccctggagtaaccctcactggagaatccagagggaaaatggagctgatagtatcctggatcttggattagtagac

SEQ ID NO: 405765 - DNA, 96 bp, Homo sapiens
agtctctcgctctgcccaggacgcacagatgagagcgctccgaagactggaatcttgcctccacaccacgagtcccatgccaaggtgatgatgtat

SEQ ID NO: 405766 - DNA, 99 bp, Homo sapiens
tgtgtccctgtgggtggacgtggttggtgattggcaggatcctggtatccgctaacagttacagaatgtctgaaggggacagtgtgggagaatccgtcc

SEQ ID NO: 405767 - DNA, 95 bp, Homo sapiens
ggaataaaaaccaacatcaagtcggcttccatgcatccctaccagcgtattgtgtccagaattggttccttccggtgggttcttggtctcactga

SEQ ID NO: 405768 - DNA, 97 bp, Homo sapiens
aaattggcattccaacagaaaccaccacctccccctaagaaggagcaggaactcaaagcagccgctgatggcgtactatctgaagtgaggaaaaaac

SEQ ID NO: 405769 - DNA, 103 bp, Homo sapiens
tcaacttgaaggtcatttaaccaacctcagctttacaaaccctgaatttataactgagtttccctaggacttctgcatgcccatgccacacatatcctgtggc

SEQ ID NO: 405770 - DNA, 109 bp, Homo sapiens
aaggagagtctgtgccgacaagatggcggacggggagctgaacgtggacagcctcatcacccggctgctggaggcaaattgtggctactaatttgccccctgaagatca

SEQ ID NO: 405771 - DNA, 75 bp, Homo sapiens
ctgacctgaatcctgaattttccttgatggtcaaaagattaaggtacctccagtgggcgctgtgatttcgaattt

SEQ ID NO: 405772 - DNA, 100 bp, Homo sapiens
ctctgggagaactttttgatcatggctgtgattcactatcaacagtgaatggtagtgtctagaaagggtatgtcccttcaagagagaggtgccaatgtcc

SEQ ID NO: 405773 - DNA, 75 bp, Homo sapiens
ccagctccatcaacctcacgctgcacctggatgagattgtggggaacctgggtgaaggcacctttggcaaggtgg

SEQ ID NO: 405774 - DNA, 100 bp, Homo sapiens
aggcctgggactgggacaacgataccaccccgaatggcctcaggcccaggcccaaggccaagtgagagagcccaggccacaggacatgctgccattctgc

SEQ ID NO: 405775 - DNA, 75 bp, Homo sapiens
cccgcccatctaattggctttggtctagaacaccttccaccatgaccacctcagcaagttcccacttaaataaag

SEQ ID NO: 405776 - DNA, 87 bp, Homo sapiens
acggcagcaaccgcagcagcagccttcaggtccaggaggcccaggaggtcctgggggacccatgggtcgcatgggaggccgtggagg

SEQ ID NO: 405777 - DNA, 100 bp, Homo sapiens
cagctgagtatgctcgaaatagttcatccagttaagggaagaaagtcggaggctggctttggctgcgaaaagagaaaaaagaaaagagaagagaaggaag

SEQ ID NO: 405778 - DNA, 96 bp, Homo sapiens
ccttagctatttacatcccattccctgaagatgattctaattcaacaaatcataacttgtaccttctccaggcaaattccgttcccctgcagcacc

SEQ ID NO: 405779 - DNA, 100 bp, Homo sapiens
tcttcgggacaaccgggagcagcagcatttcctgcaagattgtcacgagggtgattctgggggtccacttgtctgtaatggtgtgcttcaaggtatcaca

SEQ ID NO: 405780 - DNA, 101 bp, Homo sapiens
ggacaatcgcgctccccaattgtggcgcaagcaatggctgccatccggaagaaactggtgattgttggtgatggagcctgtggaaagacatgcttgctcat

SEQ ID NO: 405781 - DNA, 50 bp, Homo sapiens
ttccactggattgggaaagaccatggcagacagttgatattcataaagag

SEQ ID NO: 405782 - DNA, 100 bp, Homo sapiens
tggtaatagaggacttgaagcagaaagcaagtgaatacgagtcagaaggtgaactccagtttgcttttgtgtgcttcctgctggggaatgtgtacgaggc

SEQ ID NO: 405783 - DNA, 75 bp, Homo sapiens
gcgcgcttcatcaaccacagctgcaacgacagagcgggatgccaccagcttgtccaaagggaagttccaggagct

SEQ ID NO: 405784 - DNA, 75 bp, Homo sapiens
cagaagaccgcagtgggataaatctcaaagatctcgtacaagatccttctttgtaccccaattatgaatttatta

SEQ ID NO: 405785 - DNA, 100 bp, Homo sapiens
cgggacccggagaagatgtcttcgcggacggtgctggccccgggcaacgatcggaactcggacacggtggagattctggacgcaaagacaagggagaagc

SEQ ID NO: 405786 - DNA, 100 bp, Homo sapiens
ggagcccgctgctcttccccactcaggcctgcactgcccaaagtcttggaaacttgctggatatgatgtaccgggagccagcacgatggtcctacacatt

SEQ ID NO: 405787 - DNA, 100 bp, Homo sapiens
cgttagcgtgagtgatcactctcaatcccgggtttggtgatggttatacagtcaaagtttggctctgtaaggaagcaaatcaacattgcactgtttctga

SEQ ID NO: 405788 - DNA, 82 bp, Homo sapiens
gaccggatcctgaggaggcagctgcggtggcagctgctgagttctcggtgaagaagctggaggatcaggagcagcgggcccg

SEQ ID NO: 405789 - DNA, 98 bp, Homo sapiens
tcgggccgagatgtctcgctccgtggccttagctgtgctcgcgctactctctctttctggcctggaggctatccagcctgccaaggggccaagggatg

SEQ ID NO: 405790 - DNA, 100 bp, Homo sapiens
cagacatctacaaccttcgatctcctgacgaggctgatggagttatgagaacaatgaacacagaaaaactcctaaaaactgtaccaattattcagaatca

SEQ ID NO: 405791 - DNA, 87 bp, Homo sapiens
catgcgcaggcggaggagcgcctctttcccttcggtgtggtgctggagaatctggtaaaagcaccattgtgaagcagatgaggatcc

SEQ ID NO: 405792 - DNA, 100 bp, Homo sapiens
cctgaaactgaaggcacagctgggtcctgatgaaagcaaacagaaatttgtgctcaaaacccccaaggctaaagaattacctccaaagccattgtcaaga

SEQ ID NO: 405793 - DNA, 100 bp, Homo sapiens
gccgatccagcctgcggagcctgtggggcaggaataatgtatttgtggccttggacatgaggcagtcagtcctctgttgctgttaacataaggtcaggga

SEQ ID NO: 405794 - DNA, 83 bp, Homo sapiens
tggggcccccagaagtgatcgctcagctggagaacgcggctaaagttctgatgattctggaaaccaaaatggaggaaatgatg

SEQ ID NO: 405795 - DNA, 75 bp, Homo sapiens
tggagatgagcgggtctgtcctcttcacggcgggagggagagtcccgtattctcagagtaaaagttgtttctgga

SEQ ID NO: 405796 - DNA, 100 bp, Homo sapiens
gaatctgcccacccctcctgtaacccagcctgtttcacttcttgaattagaggagacagcactgattgcagtgacagaagcggtgccagctaactcccca

SEQ ID NO: 405797 - DNA, 54 bp, Homo sapiens
tttatgagtgggaaccatttgcagaaggtgttccatgagcaaggcatcctgttc

SEQ ID NO: 405798 - DNA, 90 bp, Homo sapiens
aaacagtgtgaccgatgtcatatgctaggccactatacagatgagcatattaatgaaaagtgccataaactgaaaaaccaaacatgaggg

SEQ ID NO: 405799 - DNA, 53 bp, Homo sapiens
aagcccgggaccgtttaaaaaactggaagatcattaccattagaatatttgac

SEQ ID NO: 405800 - DNA, 83 bp, Homo sapiens
agccccgagccgcccgcagagcaagcgcggggaaccaaggagacgctcctggcactgcagcctgagcagcaacagcatctgcg

SEQ ID NO: 405801 - DNA, 50 bp, Homo sapiens
tggaacggaagtgaggatcacctacagagcccaaatcttgtgacaaaact

SEQ ID NO: 405802 - DNA, 102 bp, Homo sapiens
tcttcttcacccaccgtatcaggatcgtgcaggatacagcaccacccctcaattattactgggttcctatactgagtgctatgcaggttattgggatcccgc

SEQ ID NO: 405803 - DNA, 98 bp, Homo sapiens
ggtggaggtggtgcctctggcagtgacgaggacgaagtgtccgagattggccgctccacagagaacatgattgacttcgtggtaacagacacgtcccc

SEQ ID NO: 405804 - DNA, 74 bp, Homo sapiens
gccgagccctggacaccaactattgcttcagacagccagctaaaggtgtggatgagcaaatacggctggagtgc

SEQ ID NO: 405805 - DNA, 90 bp, Homo sapiens
cctcagctcatggctctgcttcaggttcaaaccttgtactactcagctgatcacaagctgcttgatgggaacctactagatggacaggct

SEQ ID NO: 405806 - DNA, 100 bp, Homo sapiens
agatggcgctgctggctacctcactgcctgagggcatcatggtcaagacttttgaagatagaatggaagaggagcaggacttggatggtgagaaggggcc

SEQ ID NO: 405807 - DNA, 71 bp, Homo sapiens
ctcagcctcttcagatccaaccaggtctgcttgcccaggaattatcttcgagtcttcatcagaagctctgt

SEQ ID NO: 405808 - DNA, 82 bp, Homo sapiens
agggtgttcgactgctagagccgagcgaagcggtggctgttgcaccacgccctccctcctgcccctgaggcccggaagccag

SEQ ID NO: 405809 - DNA, 89 bp, Homo sapiens
caccgcactgtcgctgcccgcctgccctgaggagtccccgctgcttgccatgtacatcttcatgtgatcagccaggattttgattctcc

SEQ ID NO: 405810 - DNA, 82 bp, Homo sapiens
tttctttctcgctgatcgcctaacttctactgacgaagcttggaagttgcagaagatttaaggaccatagtacagctatgga

SEQ ID NO: 405811 - DNA, 100 bp, Homo sapiens
ctgggtgcaaagcccagcgcgctaaccctttactcgcgacctttcgcttcaccttcacagcagccctgcgagcatattgagtatcagtgctgatattgaa

SEQ ID NO: 405812 - DNA, 98 bp, Homo sapiens
gcctctcggtgatgggctgcgatgtactcaaagctctcaccaaggaccgaggggccgtgggaaacgtctgacgcccacttcacggaggagcaaatgga

SEQ ID NO: 405813 - DNA, 73 bp, Homo sapiens
ccgtgaccagcacgacaccttcttccttcgagggtctccgtctctccaccgggggcttcatccttccagggag

SEQ ID NO: 405814 - DNA, 90 bp, Homo sapiens
gtccaatcgctatgaaacactgctgaagcagagacacgtccagtgccggtggtggtgtgcacattgagccccggtatagacagttccccc

SEQ ID NO: 405815 - DNA, 142 bp, Homo sapiens
ccttgtctgtgaagctaaactcaatgctgctgtgtgggaagaagatttgtaaagaaaactcttaggcacgtggaggagttcagccccagagctgtctacaccagtggtaaagcgtccagtgctgctggcttaacagcagctg

SEQ ID NO: 405816 - DNA, 87 bp, Homo sapiens
ggcgccgcccgcgcccgggaccgacccctctgctcgcggccgcgcctttgagggctcaaaatctccttcgccaagaccaaacatgcc

SEQ ID NO: 405817 - DNA, 100 bp, Homo sapiens
ccgagctggacccggaccggttttgggatgccacagctgagcctgtcctcgctgggcctttggccaatggcagcatccccgtggctgctcctgctgctgg

SEQ ID NO: 405818 - DNA, 75 bp, Homo sapiens
aggtcagaggcagagaaactcaccctggtgaccagagtacagcagttgcagggctacatccacgtgacgcagacc

SEQ ID NO: 405819 - DNA, 50 bp, Homo sapiens
cttaaagtggaaattcaggttcaccaggttgatgataattagaagcatgc

SEQ ID NO: 405820 - DNA, 100 bp, Homo sapiens
ggcggattcgggaactgactgctgtagttcagaagaggtttggctttccagagggcagtgtagaggctttcggacagtcctttctccagcccgacatcca

SEQ ID NO: 405821 - DNA, 100 bp, Homo sapiens
aggggatgatagtttaaggataggtggacaagttcatgctgtccaggctttagtgcagaattcatatgttggagccctcaccccaagtgtggtggtgttt

SEQ ID NO: 405822 - DNA, 100 bp, Homo sapiens
aggtgactctctggatggaccagaatacgaggaggaagaggtggccataccgttgaccgctcctccaactaaccaatatggcataatccacgctggtggg

SEQ ID NO: 405823 - DNA, 75 bp, Homo sapiens
ctgttacgtcaatgatatcgtcttggccatcctggaactgctaaaggaaaaactcacagaggtccatgaagaatt

SEQ ID NO: 405824 - DNA, 95 bp, Homo sapiens
tcctcagtcacagaaacatcatccagttttatggagtaattcttgaacctcccaactatggcattgtcacaggacagtaataccccacttttatt

SEQ ID NO: 405825 - DNA, 74 bp, Homo sapiens
cctcagcagggtcttttttgcctcctggagggtcgtgctggaagaaaaagcttgtggtgaaggggggcaaaaaa

SEQ ID NO: 405826 - DNA, 80 bp, Homo sapiens
gccgcagcgacggcggcgacagcaggaacaaactctagccctcaggaaagaagggattggagttgttttggattctgaac

SEQ ID NO: 405827 - DNA, 100 bp, Homo sapiens
cggctgctggaggatgacaagcggcagttcgactccgcctggcaggagatgctgaatcacgccactcagagggttcgagaacttgtcttggacaattgca

SEQ ID NO: 405828 - DNA, 100 bp, Homo sapiens
tttactgctgttcagctcatactgctctagacagtgctgccgatataactcaagtaactgttcttggtgctggagaatctggtaaaagcaccattgtgaa

SEQ ID NO: 405829 - DNA, 100 bp, Homo sapiens
gggtgtcctggtgcacccccagtgggtgctcacagctgcccattgcctaaagaagtttactcctggcttgggggcattaggaagcactggaggctcttcg

SEQ ID NO: 405830 - DNA, 99 bp, Homo sapiens
gaccgagcctgggaggccggccggtgccagcacctttcggcttctgagacggcggcagcagcggcattcagattcacagtctgagaatgaggcttcacc

SEQ ID NO: 405831 - DNA, 80 bp, Homo sapiens
aacaaatatttgcggtttcagcctcaacccagaggaatcgttactctttcaggtcatcatcagatttgaaatatttaaag

SEQ ID NO: 405832 - DNA, 83 bp, Homo sapiens
cttcaattcttgacttgtgtattttcaactctgggatcacctgatcatttcagaaaatgtttataggaggccttagctgggac

SEQ ID NO: 405833 - DNA, 97 bp, Homo sapiens
agatgaagtgcttaattcaaggtcacacaatgtcggggatggacctccagatttccttactgctcttgaggctagtgcgcctctaggcaagatgtcc

SEQ ID NO: 405834 - DNA, 83 bp, Homo sapiens
ctcattgccacggctgaaccctccttctcaatcttggaacagcacccccttctttaagatcaatgtccgagttaccaccatgg

SEQ ID NO: 405835 - DNA, 51 bp, Homo sapiens
ttcctctttgttggccaaaaggcaggaaaatgtttcaacgtgcgcaagagt

SEQ ID NO: 405836 - DNA, 96 bp, Homo sapiens
tttgtcttcattcactttcccccctcagtttctgaaatgattctccagaatttctcctcataaaaaagtaagactttgaccccgacgcaggcttca

SEQ ID NO: 405837 - DNA, 100 bp, Homo sapiens
gccgaggccgaacgcttcctcttgcaaatgcaccgtggcctggcggcgagcccccggtcaccttcctccgcacggaagaggggccggacgccaccttccc

SEQ ID NO: 405838 - DNA, 50 bp, Homo sapiens
ggggagcggagccatggcctccggtgaccattgtgaggtagatattttgt

SEQ ID NO: 405839 - DNA, 97 bp, Homo sapiens
ctaccacctcaggaatcaagattgcagaatacatcttcaagacctggaatgtatccgggtgccattattatccatgaagtttatgaagaaggagcag

SEQ ID NO: 405840 - DNA, 100 bp, Homo sapiens
catatatgttggcattgagtcaaaccatcttctcccaaggtttttgcagctttggaggaattttttacatcacttgtgaagcaagaaatggtgaatatgc

SEQ ID NO: 405841 - DNA, 75 bp, Homo sapiens
ccgagcttcagcaagctctctccaacgcatttgacattgtgcagcaaagaaatggttatggagaagcccagtccg

SEQ ID NO: 405842 - DNA, 75 bp, Homo sapiens
aaactgcaccggaaatgtgcctaccagggaaatgtttcaacgtgcgcaagcgttgcggcggcgggcagaggacta

SEQ ID NO: 405843 - DNA, 101 bp, Homo sapiens
gacgcgccccgcctcccccgtccggtccctctctccacggtaagggctataaggaagaccagatggatgagaaactaatggaacctctgaaatatgctgaa

SEQ ID NO: 405844 - DNA, 74 bp, Homo sapiens
gggggccttggcgaatggctttcttgctggccacttgcggagtttgggagttgagtgatattgaccatgatgga

SEQ ID NO: 405845 - DNA, 100 bp, Homo sapiens
gcatattggacatgccaaagccatcaatttcaactttggctatgccaaggtttgggtacccagaccccacctacctgacccgggtgcaagaggagctgag

SEQ ID NO: 405846 - DNA, 100 bp, Homo sapiens
ctcagtttgatgcgtcacactacgacagtgagaaaggagatgcacttttgtcttcctggccagtgttttactacaatgaggatggcaagtctggacaaca

SEQ ID NO: 405847 - DNA, 82 bp, Homo sapiens
aagtacactgaaattcatcctgagatgaggtgtccctggccagtgtccttccacctgtccacaagcatggggaacatcttcg

SEQ ID NO: 405848 - DNA, 82 bp, Homo sapiens
tgccgccctggccacggggactctcttctggatgcccgatggcaccagcaaggagtgtgtgttcatcgagaaggttctggag

SEQ ID NO: 405849 - DNA, 50 bp, Homo sapiens
cttgcaagaaagcagccccagagcaaagtgaaaaggagagcttgttgaag

SEQ ID NO: 405850 - DNA, 51 bp, Homo sapiens
atttcaagagagtaccattggggatatttggagtctgggagtgatcctttt

SEQ ID NO: 405851 - DNA, 100 bp, Homo sapiens
cccagggtggccccgtctaagctggaggcgttgcagaaggccctggagcctacaggccaggacggggaggtttactgcatcgacgcgcggttctacggga

SEQ ID NO: 405852 - DNA, 100 bp, Homo sapiens
tcgtgactattcagatcatccaagtggaggttcctacagagattcatatgagagttatgccgcttacaaacacgcagatggcaagaagattgatggcagg

SEQ ID NO: 405853 - DNA, 98 bp, Homo sapiens
agctattggatttcccacccagaatctttaggtaaatgaggttaaacccatccagagtaatggctgcggccttacccaggaccctgggggagttgcag

SEQ ID NO: 405854 - DNA, 100 bp, Homo sapiens
tcttcttcgtgaggctgctcttcgagcgagacagcctggagctgttgcccaaagaattggaagtcatttagttccaactgctactttatttctactgaat

SEQ ID NO: 405855 - DNA, 97 bp, Homo sapiens
gacgtttttacacctgcaaggtctctggaggaattcaatgatgtgcattatattgtacttctagcaagtgcaccaacagaaaaacaacgcctggaat

SEQ ID NO: 405856 - DNA, 82 bp, Homo sapiens
gtggccctggcgcccggggagacggtgatcggccgcgggccgctgctgggacacgagtacacgagacaggattgagaaagga

SEQ ID NO: 405857 - DNA, 75 bp, Homo sapiens
tgtagacatttctttgtggtttatctaaaaaccaaagattccaaatctatgcaagacggctggggggagagtgac

SEQ ID NO: 405858 - DNA, 96 bp, Homo sapiens
ttctgcagatatgaccattaaactatgggattttcagggctttgaatgcatcagaaccatgcacgtgagatgagtcagaaaccggccaaggagggt

SEQ ID NO: 405859 - DNA, 100 bp, Homo sapiens
ttgctaaatgtagacaatggttagagaagaattttccaaatgaatttgcaaaacttactgtagttcactttatccaaatgcatagatgccgtgatggtgc

SEQ ID NO: 405860 - DNA, 75 bp, Homo sapiens
agtctgaatcaacctaagttttaaacagaaggtgaacctctgagtattcaagtcaaacaacgttgaaatggattg

SEQ ID NO: 405861 - DNA, 100 bp, Homo sapiens
cacgtggcatcagtccccactgcggtccacggccaggtgaacaatgagcactccgctggtccaggcggcaacatgtccatgcttttagtgatgtccctgc

SEQ ID NO: 405862 - DNA, 82 bp, Homo sapiens
cggacgcacgccactttttctctgctgatccaggtgctggagaatctggtaaaagcaccattgtgaagcagatgaggatcct

SEQ ID NO: 405863 - DNA, 100 bp, Homo sapiens
aacatcacacagttgaagctccaggaggtcaaaagtcagctacggtgaagctatctaaaccggtggctctatggacccagcaggatgtctgcaagtggtt

SEQ ID NO: 405864 - DNA, 51 bp, Homo sapiens
agatttgttattggtgggcctcagagatcctgaaggagctagacgagtgct

SEQ ID NO: 405865 - DNA, 82 bp, Homo sapiens
ggggatgagtatgcggaggacagctctgatgaggaggttttaaaatcaaagatgggaaaatcggagaaaattgcccttcccc

SEQ ID NO: 405866 - DNA, 89 bp, Homo sapiens
ggaagaccctggaccctacctacatcctgagctacatggccccctggtttagggagggcagagattgtcaagaggctgaatgctatctg

SEQ ID NO: 405867 - DNA, 98 bp, Homo sapiens
gaagctttcgcagtctctcccggatcaccatgaagagctccatgcagaacaaatgcgttgcaagtttacaatgcactcagatcttggaaaaattattc

SEQ ID NO: 405868 - DNA, 90 bp, Homo sapiens
gggctgccgagggtgttcttgacgattaatcaacagggaacaatggcaaaagcctttgatgaagcattttcctctgagacaacagcggca

SEQ ID NO: 405869 - DNA, 90 bp, Homo sapiens
agcaggacaccatgctgaaggccatgttcagcgggcgcatggaagtgctcaccgacagtgaagtgtctcagtttgaaactgaattctaca

SEQ ID NO: 405870 - DNA, 100 bp, Homo sapiens
gaatgccggatcctccggggacctgatgggctgagtcgagatgctgcagttggagaagaaacttgaacgtgaacttgaggatgatgcacgagttattgct

SEQ ID NO: 405871 - DNA, 100 bp, Homo sapiens
aaagctagaagaaaaggtgtacttgcaagaaacctcaggacttgagtaacagcaacatgggtctcactccattgcccaggccagagtgcggggatatttg

SEQ ID NO: 405872 - DNA, 75 bp, Homo sapiens
cttcatggaaacgtctgctaagactgcttccaatgtagaagaggagagaagaccaagaggtcggagaagaggtag

SEQ ID NO: 405873 - DNA, 80 bp, Homo sapiens
gtgccaagaagcagctgtacacggctcaatcaagacatcacagatgtgtgtttttcccctgagaaagaccacagctccaa

SEQ ID NO: 405874 - DNA, 77 bp, Homo sapiens
actgccaggacactgagatttggagaggcagcacaacaagattcgcagcgtggaggggagccagctgaaggcctacc

SEQ ID NO: 405875 - DNA, 143 bp, Homo sapiens
atgacctggttatgacccatgctcttcagtggcccagtcttaccgttcagtggcttcctgaagtgactaatgccggtggtggtgtgcacattgagccccggtatagacagttcccccagctgaccagatcccaggtgttccag

SEQ ID NO: 405876 - DNA, 100 bp, Homo sapiens
gaaaacggaagcgcagggagaaggaagaggtgtttgaaaaggtgaaaggtgtagcagtcactcggcctacacccacagcatcgaccttgtgaacccagcg

SEQ ID NO: 405877 - DNA, 75 bp, Homo sapiens
gagaggaaaaaggaagagagcactgcagccagtgaaaccactgaggaggagatgttaaagtaacccatcttgcag

SEQ ID NO: 405878 - DNA, 100 bp, Homo sapiens
ggggaaaaacgaactccgtccactaacaaaagatggctacgagggtaacatgttcgagacagggcagggcattgttcatgcactgaccgacctcagcagc

SEQ ID NO: 405879 - DNA, 100 bp, Homo sapiens
ccgggatcgtgaccgagaccgtgaccgagagcgtgaccgagagcgcgaatatcgtcatcgttagaaggtgtgggttgctgaccgaggaaataaaagaatc

SEQ ID NO: 405880 - DNA, 83 bp, Homo sapiens
cttggcgatagttccctttctagaaaggccagtgaagaagcaaaggaagacatgaaaattgacgctcattcttcttcctattg

SEQ ID NO: 405881 - DNA, 75 bp, Homo sapiens
accattgcacccaaaattgcaagacctttcatagaggtactccaaagattcaggtttactcacgtcatccagcag

SEQ ID NO: 405882 - DNA, 101 bp, Homo sapiens
ccacccatctggccgggcagtaccttcttcaagagaaatggagcccttctccaagtgaacagagtatctgccaagcccgggcttccgtgatggtctacgat

SEQ ID NO: 405883 - DNA, 100 bp, Homo sapiens
acccccaggagtaagagcccatagcagtctgccagacaatagagcatatgggacggcggctccctggaccaggtgctgaaagaggccaagaggattcccg

SEQ ID NO: 405884 - DNA, 123 bp, Homo sapiens
cagaaggtgccctctttgcaacatttcaggaaaacagagaaagaagtgataggagggctctgtagggagtgcatccgccccaacccttttccccctcgtctcctgtgagaattccccgtcgga

SEQ ID NO: 405885 - DNA, 100 bp, Homo sapiens
tgaagaccttcagcgttgccctggcggagcagagacaggccctcggggtggagactagaagcagccaaagatgattatcgaatacgttgtgaagagttag

SEQ ID NO: 405886 - DNA, 75 bp, Homo sapiens
cggcagaggatccagtgttcaccatcctggccccggaaggggactcagaagaagatccttgacattgccaacatg

SEQ ID NO: 405887 - DNA, 134 bp, Homo sapiens
aggaaatcatgtcaagcgaagccttgaaaaagctgccctgagacggtgtcccgccgaaaggccgaatacatcaagcaatggtaacatctttaaatgaagataatgaaagtgtaactgttgaatggatagaaaat

SEQ ID NO: 405888 - DNA, 100 bp, Homo sapiens
atgagtgatcagacagacagtgtgagattcatggccacgcagtgctttgcaacgctaattagactcatgccacttgaggaattttctacttctggtcatg

SEQ ID NO: 405889 - DNA, 75 bp, Homo sapiens
gatatgaaactggaagacatcctggaagttcatgatttgttaaaagactatgacttaaaatattgttatgtggac

SEQ ID NO: 405890 - DNA, 75 bp, Homo sapiens
tactacacgaccatccaggacctgcgggacaagcttaattggcttagtgtcgacttcaataattggaaagactgg

SEQ ID NO: 405891 - DNA, 89 bp, Homo sapiens
gagttgcggagcccgcccgccggcagcgccgctccccagggagggagtccgcagcctgaggctggacgtaaagaaagaagtgatgcact

SEQ ID NO: 405892 - DNA, 87 bp, Homo sapiens
ttcttcgttatggacagcatccaaacattatcactctaaaggatacccctttgctgatgcaagtaagggtgatgacctgcttcctgc

SEQ ID NO: 405893 - DNA, 90 bp, Homo sapiens
gaccatcgaaaggagcaagagcaagatcaccgtgacatccgaggtgcctttctccaaaaggtactgccaaaattatgacatgataccaag

SEQ ID NO: 405894 - DNA, 73 bp, Homo sapiens
gaggtggaacgggccgaactgcagggcactgtgtttagtcttgagtcagaggaggaggaataccctggaatca

SEQ ID NO: 405895 - DNA, 83 bp, Homo sapiens
ggagcaggagcccgcggccggccagccgaagatggtggcggctactcctcctgggcagctggtggaatttttgaagaaaatgg

SEQ ID NO: 405896 - DNA, 51 bp, Homo sapiens
cacctccctgctgctgctggcgtcgacagactactccaaaggattcggcgg

SEQ ID NO: 405897 - DNA, 80 bp, Homo sapiens
attcctgaaatacatccaggaaagacatggagattctcttaaaaagttactccacaggatccgctgaacataggatgttg

SEQ ID NO: 405898 - DNA, 90 bp, Homo sapiens
gcgggcggcgggcgcgctgctgctggcgctgctgctgcacgggcggctgctggcggtgctggagaatctggtaaaagcaccattgtgaag

SEQ ID NO: 405899 - DNA, 100 bp, Homo sapiens
tcagctccctgaactccgtccactgtaaacacatcgaggaaggaggagagtccaggtcgttgatctgaggtggggtattcggaacattgaagccactgac

SEQ ID NO: 405900 - DNA, 88 bp, Homo sapiens
ggtttataaacatcacggatattaagactgcagccaagggtgaagttgaacaaattgctatgatgaaaccaaaaggccagactgaaca

SEQ ID NO: 405901 - DNA, 141 bp, Homo sapiens
ggcgagggcaagctctgcctcaaaggggcctgcgtggagagacacaacctcaacaagcacagggttaacgtccctaaaacccgccggactttctgtaagaagtgtggcaagcaccaaccccataaagtgacacagtacaag

SEQ ID NO: 405902 - DNA, 75 bp, Homo sapiens
gggagccccgcgcgcggcgtcggatgaccagtgtcccagtgaaggaacgagtgaaggtgtctcagaactggagac

SEQ ID NO: 405903 - DNA, 82 bp, Homo sapiens
tcttttattttcctgtaatatatctgtatcatcggaggtggactttcactgctggatgtgtgggaaaaactgcaacagtgag

SEQ ID NO: 405904 - DNA, 126 bp, Homo sapiens
gaaaaagtacggcaagtcctttagaaaattactttcactgtgtcttcagaaagatccttccaaaagccatgaagatggacctacagctaaaaaattaaagactgagcaagggggagcccacttcag

SEQ ID NO: 405905 - DNA, 101 bp, Homo sapiens
ctaggatctgtgactgccacccctccccccacccgggctcggcgggggagcgactcatggagctgccgtaagcaatgttgtggagaagtgtgttactcacg

SEQ ID NO: 405906 - DNA, 74 bp, Homo sapiens
cttttctgaatcctccagtgagtaagatgatggagcagtggtatcacctgaccttggggacatgtctcctgaag

SEQ ID NO: 405907 - DNA, 97 bp, Homo sapiens
cttgttctcggagagggtgagttgaaacgctgcctggaaaggaagtaccaggacttgcacaggaaacatgccctgaactgtcacagaatgaaaccag

SEQ ID NO: 405908 - DNA, 50 bp, Homo sapiens
gatgagttgcagcaagtcatacgggaggttacctacctgggcaaagtctc

SEQ ID NO: 405909 - DNA, 50 bp, Homo sapiens
caaaaaggtgcatataccactgatgctgagccttgacgcctcggccatgg

SEQ ID NO: 405910 - DNA, 100 bp, Homo sapiens
aattacctggaacttcatcatcatctacttcacaggaattgccatttgttgccctgtgtttagaaacagtgccagttcctgctggccaagaaaaccctgc

SEQ ID NO: 405911 - DNA, 99 bp, Homo sapiens
gtcatcattaagttggagcagggagaggagctgtggataacgggaggtgaatttccatgtcaacatagtcctgactctgaagcggctcatggcagatga

SEQ ID NO: 405912 - DNA, 100 bp, Homo sapiens
aaagttatgggactacaacagcagccacaggaaccttgagccatttcataattctgaatcatgtctgataacggagaactggaagataagcctccagcac

SEQ ID NO: 405913 - DNA, 74 bp, Homo sapiens
ccgagccatggctctcgccgtccgagtcgtttattggatctcgaggacctggaagaagcagaggagccagacat

SEQ ID NO: 405914 - DNA, 97 bp, Homo sapiens
agtatacaccaacaagtattccagaagtccaacaagagaatataatcaatcctcaagacctaacagctgctggagacccaaaagaagatgaactcta

SEQ ID NO: 405915 - DNA, 75 bp, Homo sapiens
tcgggccctcctcatttatgccatttcagctacagtgttcacaatgcgagccacccctctggctgctcctgcggg

SEQ ID NO: 405916 - DNA, 50 bp, Homo sapiens
acttctgcatgaacatctccagccagggctttcggacagtcctttctcca

SEQ ID NO: 405917 - DNA, 75 bp, Homo sapiens
gaccgatctgaggactttggtgtgaatgaagacttggctgattcagatgccaggactcagaaccgtgctgcatac

SEQ ID NO: 405918 - DNA, 88 bp, Homo sapiens
taatcttatcaaaaaaagacctgatttcaagcaacagcagatcttcatcgacagggaccctacagtcttcgcccccatcctcaacttc

SEQ ID NO: 405919 - DNA, 76 bp, Homo sapiens
ggaggaaagcgtgatcccaggaacagccccgtgccccccacaaagaaaggatgaccgagtgggagacagcagcacc

SEQ ID NO: 405920 - DNA, 75 bp, Homo sapiens
agcaaacatcgatggcctactggggataacattcatgcagaacatcaggttgtcctttgtggagggtcttctcga

SEQ ID NO: 405921 - DNA, 96 bp, Homo sapiens
ggtgctggtgtccgaccttaaccgttccaatggggtagcgctccccccattggacaagtggaagctctcagacaccttgagttccttggtttggtc

SEQ ID NO: 405922 - DNA, 101 bp, Homo sapiens
gtggacgaagctgaccttcttttttcctttggctttgaagaagagctcaagagtctcctctggtattcaaaacctttgaccacatggcccgtcaggatgat

SEQ ID NO: 405923 - DNA, 100 bp, Homo sapiens
ggcccctcttctcctccaacccagaactggacaatctgagagtgggaccgtggccgtgagcgccgtagtcggggtgaatatcgggactatgaccggaatc

SEQ ID NO: 405924 - DNA, 100 bp, Homo sapiens
ctgctgcctcgtgtcacatctgaaactcatctgtacctcacttagaaaggtagcaaattatggagttggaggacagtatgaaccccattttgactttgca

SEQ ID NO: 405925 - DNA, 88 bp, Homo sapiens
caactttgccaccagcagccacaacagatcaggttcagctgtttcagtccacaccttgttcacagtaagatattcaattcaattcagc

SEQ ID NO: 405926 - DNA, 101 bp, Homo sapiens
ctttccggaagcacacagtgcgcggggagcgttcctacagacaagttggatggcttgaggactggtactaaaaggaaacgtgactgggaggccattgccag

SEQ ID NO: 405927 - DNA, 98 bp, Homo sapiens
acctcctttacacagtatcagaactgtggaaaagccactggcagtgattcaagtggtgtcattgatctcacaatggatgatgaagagagtggagcttc

SEQ ID NO: 405928 - DNA, 82 bp, Homo sapiens
gtttgtatgccagaagaagggtttaaaggtgacttaagagattaaaattaatttggttgctgttggttctgaacaaataatg

SEQ ID NO: 405929 - DNA, 83 bp, Homo sapiens
cctgggctgccggcacttcgcggcagatgtcatgtggcctgtgttttggaccgtggttcgtacctatgctccttatgtcacat

SEQ ID NO: 405930 - DNA, 82 bp, Homo sapiens
ctgattctcctgtactgttgcaagcccagctcaacacgaaacagcttagtgatgaactctaactccttgccactcaagaaat

SEQ ID NO: 405931 - DNA, 50 bp, Homo sapiens
gatgaagaggatgatgtttttggtgaagaccattactgggacttccaccc

SEQ ID NO: 405932 - DNA, 100 bp, Homo sapiens
atttctacgacccggagcacccgacccctgaagttgctggagaatgtaaccctaatccataaaccagtgtcgttgcaaccccgtgggctgatcaataaag

SEQ ID NO: 405933 - DNA, 82 bp, Homo sapiens
ccaagaggaggacagttcgctacacagcaatgcatcgaggaattgcattttgtgaaaaaagaacaagaattttctgcaagga

SEQ ID NO: 405934 - DNA, 74 bp, Homo sapiens
aaagatcctactggacatgtcagtgtcctttcacacccatgtgaaagaggtggtgttatcaaggagaagaaatt

SEQ ID NO: 405935 - DNA, 75 bp, Homo sapiens
ggaaggactgcctgcctccaacaggcattgaagaaaaatttaggcctttttatttaagtcaattagaagaaagtg

SEQ ID NO: 405936 - DNA, 80 bp, Homo sapiens
cttttttgtcatataccagatcaaaaggaccagacaattccataatcaccaggagactaaagtccatcaaaaacatccag

SEQ ID NO: 405937 - DNA, 100 bp, Homo sapiens
ctgcaggccaagcgcctcacgccggacctggtgcaggggcactgcaattgcgggcattgtttttggaatagtatttatcatgggggtcattgctgggatt

SEQ ID NO: 405938 - DNA, 83 bp, Homo sapiens
gacgcaagactgtcccggcccgggttgaaaggattgttgacaaaaggaaaaataaaaaagggaagacagagtatttggttcgg

SEQ ID NO: 405939 - DNA, 83 bp, Homo sapiens
cagacgatgagacagagttgcgaccgcgcggcagaacacaccacagccatcagcactggaatgcaaagaccagaacaaacaga

SEQ ID NO: 405940 - DNA, 100 bp, Homo sapiens
tgcacacggcggaaaacagactccattgagaagaggttttgctttgatgtggaagcagtagacagatctgtgccatcattggcgggaccttcaccgtcgc

SEQ ID NO: 405941 - DNA, 100 bp, Homo sapiens
atacaggtcggagaggtcagcaacagggacatcgtggagacggtgctcaacctgtacaaaattggacagctgtacatgatcagcaaacacagccatgaac

SEQ ID NO: 405942 - DNA, 100 bp, Homo sapiens
ggggagacgccgtgacaactttcgtttccctctgagggaattgggaggtcggcggccccaaaaatgacgtccggttgtttgccttcgtgcgcttcaccac

SEQ ID NO: 405943 - DNA, 83 bp, Homo sapiens
ttaccattttatgatttactggatgaactgataaaacccaccagtctaggtgttgacttcaaaatcaaaactgtagagctaag

SEQ ID NO: 405944 - DNA, 75 bp, Homo sapiens
ctatttacaagatgggagaaggaaagcttaggcaaggatcaggaacaacagttccagggtcacccccgagaggac

SEQ ID NO: 405945 - DNA, 101 bp, Homo sapiens
ttatggacaaatctgtgtcccggctttgtgcttctcccgaatcagcttcgtttggttccttggtggtatcacggcaacctcacacgccatgctgctgaagc

SEQ ID NO: 405946 - DNA, 75 bp, Homo sapiens
cggatgctcactccaaagtctcagcaggtggcacatttagaacgaacagggcattacttaactgtgaaagataac

SEQ ID NO: 405947 - DNA, 90 bp, Homo sapiens
acatcgaccggcgacagcagccaggagtcatgagcgacagcggcgagcagaactacggcgagcgggccctgccctgggagaagccctgcc

SEQ ID NO: 405948 - DNA, 100 bp, Homo sapiens
ggagatgcctctttttgccaccaatcccttcgatcaggatgttggaatgtatcctgtcaggtataatgtcagtgaatggcaagaaagttcttcatatgga

SEQ ID NO: 405949 - DNA, 80 bp, Homo sapiens
cagctgcttccattggccagtatgaagtggtgaaggagtgtgtgcagcgattacacagacagaggtccagcaaggacagc

SEQ ID NO: 405950 - DNA, 90 bp, Homo sapiens
gattttcctgattaaaagcatccctcaagctttatttgaaggtagacgcatcgaatttgcagaacaaataaataaaatggaggctaggcc

SEQ ID NO: 405951 - DNA, 97 bp, Homo sapiens
gcgtgggcaccctgcaggtggtcagacatgtcatcaactcagctgattctgaggttgggaccaagaaggaactatctattttaaaccaaaaattttc

SEQ ID NO: 405952 - DNA, 80 bp, Homo sapiens
tctacagttactacaagtgcaagctggcgctggagcagcagcagctcaccacgttctgcgcttttccgagtcggacatat

SEQ ID NO: 405953 - DNA, 100 bp, Homo sapiens
ccgagctatagagaaaggagatgaggtcagctggttaagatgctgctttatacagaggtaactcgctatctggattttaaagtgactgaagggagctttg

SEQ ID NO: 405954 - DNA, 100 bp, Homo sapiens
ctcgtggtatccaccccatttggcgtggcggccatctggatcctggactccgtcgggctccgtgcggcggcgtcacaatgtagcagggaccccaggcgtc

SEQ ID NO: 405955 - DNA, 100 bp, Homo sapiens
ctccgccgccccgaaactttcaccgcgagcgggtccctcgtctgagctggctcactcgcccaccaacagcgggaagaagctctttgctcccgttccgttt

SEQ ID NO: 405956 - DNA, 101 bp, Homo sapiens
ctgaaggaatcaagacagcggaatcagacaggagagaagatgactgaggaggaggtggagaccgttctggcaggacacgaggacagcaacggctgcatcaa

SEQ ID NO: 405957 - DNA, 100 bp, Homo sapiens
gtttctaaaatgatcattgaaaacttcgaggcactcaagtcctggctcagcaagactctcgagcccatgctttccttaaagtttcccatgtctcaatgga

SEQ ID NO: 405958 - DNA, 82 bp, Homo sapiens
taggttctgcggcacgggatggcggaggcgcctcctgtctcaggattttttatcaagcagaaatgcatcgaacaacgagaat

SEQ ID NO: 405959 - DNA, 80 bp, Homo sapiens
caggaattgagagtcacagaggaaggacagtggagtctggcatcttattgaaatcccaagttgaccgtcaagtccaacgc

SEQ ID NO: 405960 - DNA, 90 bp, Homo sapiens
gagcagtttacggaagtgtaacgttgaggcccttcttgtgtatctggagaaaatagagaacattgacatcaccaatttcagcagcagctg

SEQ ID NO: 405961 - DNA, 97 bp, Homo sapiens
tacctgtttttccagctcacccactgccagcagaggtgtggccgacgacgatgccctcgctgaggagcgcatgcggagaggccagaacgccctgcca

SEQ ID NO: 405962 - DNA, 101 bp, Homo sapiens
aaaggagccctgaacggtcaaggagccctaaacagccaggaggaagaagaagtcattgtcacagaggacacgatgaggcgagtggtacgacagagcaagtt

SEQ ID NO: 405963 - DNA, 90 bp, Homo sapiens
cgtggacccagcgctccccactgtttaaagacgtcgtccacagcatccagggttgtgagtcccggcccagcccctccacccccctgcccc

SEQ ID NO: 405964 - DNA, 83 bp, Homo sapiens
gatgaatatgacatcctcgtctttgatgccttgtaaaattcagaagtactctccatctgaatctgcaaaagtatatgataaag

SEQ ID NO: 405965 - DNA, 100 bp, Homo sapiens
tagcaagccggacaaggatatggagggccgcgttcgcaccaaaaccgtgaagaaggcggcccgggtcatcatagaaaagtactacacgcgcctgggcaac

SEQ ID NO: 405966 - DNA, 98 bp, Homo sapiens
ctttcccgatgatgaactggatgacctctactcggggtcgggctcgggctattgtggtggtctgggtgggcaccaacaaccacggacacacagcagag

SEQ ID NO: 405967 - DNA, 98 bp, Homo sapiens
ccttgtggacgtggagaggggccgaaccgtgaagggctggaggccccggcggctagaacacggctctagataaggaggggcagattttctgcagcaag

SEQ ID NO: 405968 - DNA, 98 bp, Homo sapiens
gagtgaccaagagcaggtttgagacccaacatgagtgaagtttcctgcaagaaacgggacgactatttggaatggccagagtattttatggctgtggc

SEQ ID NO: 405969 - DNA, 99 bp, Homo sapiens
gcgcagtgacagcgcctcaccgccaccagctcctggaccaccatggccaagaaccgcagggacagaaacagttgggtactatactggcaattgctggag

SEQ ID NO: 405970 - DNA, 76 bp, Homo sapiens
tagatgatgacagagaagatctttttgcaggtttctaagcatgaattgaggaacagaagaagcagagcagatgatc

SEQ ID NO: 405971 - DNA, 100 bp, Homo sapiens
tggcggcgggcggcgggcggcaaaggagcagccatgagggccgggcccagtcaccgaccccctgaccctctattctgcaccctgtgagccaccgagactg

SEQ ID NO: 405972 - DNA, 74 bp, Homo sapiens
gaatacccaactgttcacgcagacctcgcctgtggcagatgcaccggcccgctacaacttcatccgaagcatgg

SEQ ID NO: 405973 - DNA, 100 bp, Homo sapiens
taattaccgtatgcagtcccccaggatacagggtcaaaggagagcacaaccatcgcagttggaagcccatggggcagggactttgaacatgtcggggatc

SEQ ID NO: 405974 - DNA, 85 bp, Homo sapiens
cccgcaggaactcggcagaggagaaattcagacggctcccgaggactggctttgggcctgggaggaaagaagagagtggagcccc

SEQ ID NO: 405975 - DNA, 100 bp, Homo sapiens
ctggattccctgctcagtgccctgagtctcaatgaagagcaaaactggttgaacagcggatgaagatatggaattcaaagctctaatggacctttttgaa

SEQ ID NO: 405976 - DNA, 51 bp, Homo sapiens
ctgcgtctgtagttcatttgaccaaacgggacaccacatcatttgaagcat

SEQ ID NO: 405977 - DNA, 83 bp, Homo sapiens
actgcgcggcattctttgagggacccccattcaagttcaagttcacaattggcacctgcctagagctggaacgttacctccag

SEQ ID NO: 405978 - DNA, 100 bp, Homo sapiens
cccatgccccagggccccccacctgtgcaggtatgggttcgaaggggtcatcctctccatctatggcttagaccgggaagatctgcactgtgacatcgac

SEQ ID NO: 405979 - DNA, 82 bp, Homo sapiens
ggaaggggaacctgaccctgagttcgaggcaatcctggacacggtggatccgaacagtttagcagccactgctgcatcaggg

SEQ ID NO: 405980 - DNA, 75 bp, Homo sapiens
tgaggcctctcccctgggggctctactcatagtggcacaaccttttagaggtggtggcagcagaggtagttatgg

SEQ ID NO: 405981 - DNA, 75 bp, Homo sapiens
ggaagcatatgcactgaagaaaatatcctatcaacttaagtttgcaggtcgaagtaagaaggaaaccaaatattc

SEQ ID NO: 405982 - DNA, 80 bp, Homo sapiens
agcggcaagatcaagcactggaaccgcttccgagacggggatatgagactttctactcggaatatcctgagtgttgcgtg

SEQ ID NO: 405983 - DNA, 90 bp, Homo sapiens
cctaacgctggccgacaacagcctggcgtccgccacgatgcgagccacccctctggctgctcctgcgggttccctgtccaggaagaagcg

SEQ ID NO: 405984 - DNA, 101 bp, Homo sapiens
gcaagatctaagaagttatcaaaactattctttaaaatgctaaagcagcttcaaaagcagtggactgtcttttggattcaaagtgggcaaaggccaagaaa

SEQ ID NO: 405985 - DNA, 90 bp, Homo sapiens
ccaggacagcacctagtcgtggccggaggagtctcagagctgtcagaaaggttcaaaccttgtactactcagctgatcacaagctgcttg

SEQ ID NO: 405986 - DNA, 75 bp, Homo sapiens
ccggtaccaagaaggggagtgcccgcggcagatacgaaaaccggtgaggtccaaacattgtggtgtgtgcaaccg

SEQ ID NO: 405987 - DNA, 100 bp, Homo sapiens
gaaagagactcggtgacagatacagaaattgcaggtgctgcagtgtctgaaatttccgggcctttctcaacagaggatgtagccagcaactgtgtccccg

SEQ ID NO: 405988 - DNA, 83 bp, Homo sapiens
ggctacgcccacttcctgaacgtgcagggccggacgctctatgacgtcatcttgtacggctcattgctatggacagtgctatc

SEQ ID NO: 405989 - DNA, 100 bp, Homo sapiens
cgcaggattcagtccatctgcataacagctgggtcctgaacagcaacataccattggagaccaggtagaggaggtaagaaaggagcagtagagtgctgtc

SEQ ID NO: 405990 - DNA, 83 bp, Homo sapiens
gacgcggacatggtcatgagctttgtgaacctgggttgacatcatggacatatgtgagtccatcctggagaggaagcggcatg

SEQ ID NO: 405991 - DNA, 96 bp, Homo sapiens
ccagttccccggcagcgggacccggcgaagacgcgaccgcggcgcgagtcaccatggagtctccccaggacagtgctatcacccgggatattaacc

SEQ ID NO: 405992 - DNA, 82 bp, Homo sapiens
gttggaacttaattactgcgtccccatgggagtacagacaggcgacaggttgtgaccgagattcccgacgagagagactgag

SEQ ID NO: 405993 - DNA, 100 bp, Homo sapiens
atgaattctgcatttcaactctagaggaaaaaattgaaagagaaaaggaattagcagaagacattatgtcagggatttcccagatgacccaggcatgcag

SEQ ID NO: 405994 - DNA, 75 bp, Homo sapiens
cgcgcgggaacaacgcgagtcggcgcgcgggacgaagatagtgtgtgtaccatatcagtggcgtgtaactatgct

SEQ ID NO: 405995 - DNA, 101 bp, Homo sapiens
gacggacggagcccggccactgctacagatgaagactggcccatttgcagagcactccaaccagctgtggaacatcagcgccgtcccttcctggtccaaag

SEQ ID NO: 405996 - DNA, 80 bp, Homo sapiens
catcactgctgtagcgcaggtggaaataagagggtacttaagagattatggcatcagaaacccacaatgttaaaaaacgg

SEQ ID NO: 405997 - DNA, 74 bp, Homo sapiens
gaggaaccctcgcaagggcagaaggttgaagaacaggagtctattatcctcccagtccacaacgctgaaccgtg

SEQ ID NO: 405998 - DNA, 100 bp, Homo sapiens
cagaggtacgccgaggaggttgggatcttcttcactgcctctggcatggatgagggagctgagcacataacgacttacacgttcaatactcacaaagccc

SEQ ID NO: 405999 - DNA, 82 bp, Homo sapiens
gacttattttatgtttctaatataaagatagaagttttcagaaaagccctgattttgatctcatggttgcagtgggtgaata

SEQ ID NO: 406000 - DNA, 100 bp, Homo sapiens
cccagcgccttggtgcagaagctggagctggacgtgaggagtgtcacttccgtcaggagaggagcaggccgggctctcgccatgggtcactgtcgcctct

SEQ ID NO: 406001 - DNA, 85 bp, Homo sapiens
cctgcctcctgttccgcttctcagaggacgccttcaacaccaccttcatctccaccatcgaaacagaaccctgtgtcaaatccag

SEQ ID NO: 406002 - DNA, 98 bp, Homo sapiens
ctctataagctgaattatggcagcccagtcaagtgggtgaatttgtaagtgatgtcctgctagttccagaaaagtgccagtttttccacaaagagcgg

SEQ ID NO: 406003 - DNA, 90 bp, Homo sapiens
atgccgaaaaaaggagattgtgacatatcactgcattcaatacctagatgatgcatctctgacacgctgtgggccatcgagatgtgggac

SEQ ID NO: 406004 - DNA, 75 bp, Homo sapiens
aggttctttgttcctgaagatgggtctccgaaaacaaccctttttgctgcacatgtaagtggagctgtgcttacc

SEQ ID NO: 406005 - DNA, 76 bp, Homo sapiens
agaagtccagagctgaggactgcctgtttgcaggcagagaattttttgtgggcctttccaaaaggacaaatcaacg

SEQ ID NO: 406006 - DNA, 83 bp, Homo sapiens
ggaaagtttgcagaagtggaaggagcagaacgtgagggtgtaacttacaaaaagttcaaatctgaacatcaatgatgtactag

SEQ ID NO: 406007 - DNA, 75 bp, Homo sapiens
aaaagaaaagggcaaagctgcttgcacgttatataccgcttattcaagcggaaggcagacagattgctgccaaca

SEQ ID NO: 406008 - DNA, 99 bp, Homo sapiens
ccctgagagaacagggtggccgcttggtccagcctacaacacagcagtcccctcaggatgagcaggaaaagctcttggatgaagccatacaggctgtga

SEQ ID NO: 406009 - DNA, 98 bp, Homo sapiens
ctgagtctgaggacaagtacaggaaaattaacgaagatattgatctaatgatcagcaggcaaagattgtgtgtccttcagttgagaccaaagaccggt

SEQ ID NO: 406010 - DNA, 83 bp, Homo sapiens
tggccgtggccgtggggagaccgtctgaatactcccccagttgcaagaggcgcaggaccgtggaagacttcaacaaattctgc

SEQ ID NO: 406011 - DNA, 73 bp, Homo sapiens
cgtccactctgcgagaatgggctgtcatctggcgaaagctctacgtgggatttagtgctggcagcatctgcgg

SEQ ID NO: 406012 - DNA, 75 bp, Homo sapiens
caactctgaggagtccactgcagcagtggaagatagatgataagcctgtaaaaattgacaagtgggatggatcag

SEQ ID NO: 406013 - DNA, 100 bp, Homo sapiens
gcccaactcggccatgagtccttctactggcagctgccggagacataccagggagacaagcaacagccaactcagtttataaatccagaaacacctggct

SEQ ID NO: 406014 - DNA, 75 bp, Homo sapiens
gtaaactggaggatgagaacaatagagttcttacggatatggtgacctattctccgacacatggaatgcatttac

SEQ ID NO: 406015 - DNA, 83 bp, Homo sapiens
gctatgaagacacgcttcttctggaagaccagccaacaggtcaaaaggctgagtttcaaattctggataatgtagactcaacg

SEQ ID NO: 406016 - DNA, 75 bp, Homo sapiens
ctggattgtgtccacatgttgctgcaaatgggtgctaatcacaccagccaggtggtgatctttgtgaagtctgtg

SEQ ID NO: 406017 - DNA, 90 bp, Homo sapiens
tcatagctctgcggaggtggaagttggggagctttgaggttctgctccagacgagcccttaccacgttgactcactcctgcagctcagcg

SEQ ID NO: 406018 - DNA, 90 bp, Homo sapiens
cccctatccaagtagcctgctgtcgcccagccgcgatttaacagaggctttggatgaagatgcagaccccacaaaatctgcactgtctgc

SEQ ID NO: 406019 - DNA, 75 bp, Homo sapiens
gtgcagcgatccgacgcaggaatctccttttccaacacggtccttcagtcttggagactataagggagcctctgc

SEQ ID NO: 406020 - DNA, 73 bp, Homo sapiens
ttctttccttctgggccatgaaatagcacatgcagtacttgggcatgctgtgctcctgacctctgataaagct

SEQ ID NO: 406021 - DNA, 75 bp, Homo sapiens
gaagcatgtctttcagagcccggcaccacccatcttgagtatctggttcttcacacacccccattcggcgtagta

SEQ ID NO: 406022 - DNA, 75 bp, Homo sapiens
gaaaaactggagagcttcatcaaaaatagtgatagctttgataacatgttggcagataaattgaacatgactcca

SEQ ID NO: 406023 - DNA, 82 bp, Homo sapiens
atgtgacgctgctggaggaaacacctcaggacacggcctacaacaccaagagcgggagatacagatgacccaccaagaatta

SEQ ID NO: 406024 - DNA, 82 bp, Homo sapiens
atggttgacacctttacacagagcagttgcatcttgtagtgaggtttgtcctggttgtggtcaagactggatgatgtaactg

SEQ ID NO: 406025 - DNA, 100 bp, Homo sapiens
aaaaaatcccaaggtctgcaaagcagcagcaacaacagcagcagcagcagcagcagcagcagcagcagcagcccatgccccgcagcagccaggaggagaa

SEQ ID NO: 406026 - DNA, 98 bp, Homo sapiens
gctgtgctgcgcggcccccgcgcatgtagaacttcatggaggaacacggagtgacccaaaccgaacatatggctaccatagaagcacatgcagtggcc

SEQ ID NO: 406027 - DNA, 83 bp, Homo sapiens
aagaaaaggcattgaggaactcaatcaaaccagtattcttttcacacagacttaattcagtgcacaaatgagatgaatgtgaa

SEQ ID NO: 406028 - DNA, 82 bp, Homo sapiens
tgcggtcgaagaaggggacgccgacaaggtggcatgtctgtgacccagtgctccaaggaggacggcagaagcagctcaggac

SEQ ID NO: 406029 - DNA, 82 bp, Homo sapiens
attttgattgatgcctgtgttttagactccgactcagggctcctccaacagtggtctcacgtgtgaaacatggctacagatt

SEQ ID NO: 406030 - DNA, 90 bp, Homo sapiens
ggaaatgaaatgctcttaactttacacaaaatgggtatcaccactgctacttttcccattttgcagctgcaggacaagttcgagcatctt

SEQ ID NO: 406031 - DNA, 98 bp, Homo sapiens
ctctgaaacagaaaccacctctgccatcctcgcctcagtcaaagaacaggtagcacagagctgacaggcagcacgaatctgatcacacactacaactt

SEQ ID NO: 406032 - DNA, 74 bp, Homo sapiens
tttgagacggtcaatccaaattctacctcttcatggtttacagaatcagtattgtccttgtgaacttccttgaa

SEQ ID NO: 406033 - DNA, 107 bp, Homo sapiens
gtttcgccacagttcctaccttatgagctcggttttcttatgcttataagagtggaacaggtgtggaccactacaacgaggtgaagagcgtcaccatctgcgattac

SEQ ID NO: 406034 - DNA, 100 bp, Homo sapiens
gagcaaattctcttcaagacagaattgatcgccttgctgtcaaagtcacccagctggattcaacagtggaagagggtactgggaacagcttttgatcctt

SEQ ID NO: 406035 - DNA, 82 bp, Homo sapiens
cgaccaagagggtgttcgactgctagagccgagcgaagcgtgcgcgcggagccatggttatcatgtcggagttcagcgcgga

SEQ ID NO: 406036 - DNA, 100 bp, Homo sapiens
cttgtacagggacgtgatgttggagaactacaggaacctgctttctctcgatgaggataacatccctccagaagatgatctttgtagaatttgatggctg

SEQ ID NO: 406037 - DNA, 87 bp, Homo sapiens
agactcagaatcgaatctcttctccctccccttcttgttgttgtggaattataagctgaacctaactacagatcccaaatttgaatc

SEQ ID NO: 406038 - DNA, 75 bp, Homo sapiens
aaagcctccgagctgaagcagctcatccaccagcagctgagcaaggcctggcagctgcgattcagccacctcgtg

SEQ ID NO: 406039 - DNA, 148 bp, Homo sapiens
aagacgtgtattcccaactggaagcgctgtgacggccaccaagattgccaggatggccgggacgaggccaattgccgtgcatgtgagggaaccctggcttgttcaacctgtcacctcatctttgaagatcacatatatgagaagttag

SEQ ID NO: 406040 - DNA, 75 bp, Homo sapiens
gacgccctggtgctcaccaagcaagctggacccacaaaccgtggagaccaagaactggcacacggacgtgattga

SEQ ID NO: 406041 - DNA, 129 bp, Homo sapiens
cacagaacaaagtcgttatcctcctcactctgtccagtatacatttcccaacacccgccaccagcaggttggagtgcaacggtgcgatctcggctcactgcaacctccgcttcccaggttcaagcgatt

SEQ ID NO: 406042 - DNA, 83 bp, Homo sapiens
acaatccgtctggatcacggatgtaggaagtgctctttcgacgtgtagcagcagctttgccgggaatggaaagcacacaggac

SEQ ID NO: 406043 - DNA, 75 bp, Homo sapiens
tgaacattgaaatgcacaagcaggtatctgcccaaactggaacttatgctgtagacatttctttgtggtttatct

SEQ ID NO: 406044 - DNA, 74 bp, Homo sapiens
gtttttggggccaaggaactgggcaagatggtggtggactgtgagcggttggttccccgaggcgtacgtgaagg

SEQ ID NO: 406045 - DNA, 100 bp, Homo sapiens
gcagtgggaaaaatggaccaacttctttggcaagtggacattttactggctcaaaaataagcgggttttgaaaacaaaaaaaagaaggagtggaagaggg

SEQ ID NO: 406046 - DNA, 100 bp, Homo sapiens
cgacgagcgggccctggctcaggaacagggacagcacctcatcccctggatgggggaccacaagatcctcatcgacagaccagcattctcgaaattggag

SEQ ID NO: 406047 - DNA, 83 bp, Homo sapiens
gatcctgagtgtctaccagaagtgcaaggacaagcaggctgctgctaaggggtccactggacggggcctgagctacaacttca

SEQ ID NO: 406048 - DNA, 74 bp, Homo sapiens
tcgagaccatcctggctaacaaggtaagaattgtgacaaaggccagtcttttttcattgacgccccagattccc

SEQ ID NO: 406049 - DNA, 50 bp, Homo sapiens
tttctcctgtgaaattaaagaggcagagtggagtcaacatatcaatggag

SEQ ID NO: 406050 - DNA, 101 bp, Homo sapiens
aggaaggcatgcgggccgtcctggacgcgctactggccagcaagcagcattgggaccgtgacctgcagatgttcgagcctgtgagctgcaccttcacgtac

SEQ ID NO: 406051 - DNA, 83 bp, Homo sapiens
cttcgcgccctcctcgccctccccaccgacatcatgctccagttcctggttgtgaccgagattcccgacgagagagactgagg

SEQ ID NO: 406052 - DNA, 84 bp, Homo sapiens
ccccatcgagaaaaccatctccaaagccaaaggtcagcccaaggccaaccccactgtcactctgttcccgccctcctctgagga

SEQ ID NO: 406053 - DNA, 96 bp, Homo sapiens
ctgcaggccgagaagcgggcagccgagaaggtgtccgaggcccgcaaaatggtgaactatgacaatgtagtggacacaggttctgaaacagatgag

SEQ ID NO: 406054 - DNA, 100 bp, Homo sapiens
ctcatctacctcatcaaaaagagagagttttaccgtgacaagaagtacgaggaagtgaggaatcttgtcgattggcctggctgctgcctactacagcgga

SEQ ID NO: 406055 - DNA, 100 bp, Homo sapiens
gcgcgaacatggacgccgtcaacgccttcaaccaggagtccattgaagacttgaacaagtgggccctatttcttgtgtctccttttatacttgaagcaga

SEQ ID NO: 406056 - DNA, 100 bp, Homo sapiens
agccccaagacagagcgctactcctggcagtgcgtcaatcagagcgtcctgtgcgattgtaaaccatggctgtgtggatacaagctcagcagctccaagg

SEQ ID NO: 406057 - DNA, 100 bp, Homo sapiens
cttaaaagagaatctgggagtgattctgacctctttcactcacccagtgatgacatggacagcatcatcttcccaaagtataaatcaaagccattctgtg

SEQ ID NO: 406058 - DNA, 50 bp, Homo sapiens
gcggcaaccagatcggggccaaggccacggcatatgcctccaaggacggg

SEQ ID NO: 406059 - DNA, 82 bp, Homo sapiens
agcagaggaagccttgaggacctactcacagataggaattgaaggtacaggtttgcagattccgccagcagcacagcaagct

SEQ ID NO: 406060 - DNA, 90 bp, Homo sapiens
gcgggtgagaaacaaaacttctttccattgtcctgcccgtttctgcggacttgttctgaggccgagctctgcttatgataatgtcaacaa

SEQ ID NO: 406061 - DNA, 80 bp, Homo sapiens
tgacccgcagctaccaaaacgtctatgtctgcacagggccactcttcctgcccaggctgtctgtccccagaccccagagc

SEQ ID NO: 406062 - DNA, 82 bp, Homo sapiens
gtccacgaggacaaggacatctttccaccgaatgccacctggtttataacaaaagaacccagcttagactagaaagtctaga

SEQ ID NO: 406063 - DNA, 75 bp, Homo sapiens
agcattttcggcaaccgctgctggcagttttgccaggtgtttgttaccttgttagagatgtttatgattacttcc

SEQ ID NO: 406064 - DNA, 100 bp, Homo sapiens
ggaagccacgtgcagacatctacaaccttcgatctcctgacgatttgacaacttaaatgctgcgcatgaaacctctaagttggaaattgaagctagccac

SEQ ID NO: 406065 - DNA, 100 bp, Homo sapiens
accaccgcttacagatattgggtactaggttttgacaagcttgcatcatgcgtgagtataagctagtcgttcttggctcaggaggcgttggaaagtctgc

SEQ ID NO: 406066 - DNA, 75 bp, Homo sapiens
ttcaatattccaagtctggacagcatcaagaattattacagttccagtgtctcgccccatcctcaccctcagggt

SEQ ID NO: 406067 - DNA, 75 bp, Homo sapiens
cggctcgaagcctggatgaaatagatctctcggctctgagggtcgaatcaaatattcggaacaggtgtatgatgc

SEQ ID NO: 406068 - DNA, 98 bp, Homo sapiens
ctgcatcctgcgttcccctccatccttctggatctggccaacaccaccggcacagtgacggcttcagaggatacaaggtctcgctgttctacctaggc

SEQ ID NO: 406069 - DNA, 50 bp, Homo sapiens
gctgggatcttagtacaaaacgtgttaaaagaatgaacattggtttacgg

SEQ ID NO: 406070 - DNA, 50 bp, Homo sapiens
cgacggcgacggcaccgtggagaaagggttcccatgtgaccaggtggccg

SEQ ID NO: 406071 - DNA, 84 bp, Homo sapiens
cggccgagctgaggcggtcgcggccatgaagaataagtcgcgctttcttcctcaaacttggcgaacttggagggagcttgtccc

SEQ ID NO: 406072 - DNA, 50 bp, Homo sapiens
ctacgacgcctttggagtggcccccgtgtttatctcagtggatgatctgg

SEQ ID NO: 406073 - DNA, 50 bp, Homo sapiens
attgcacatcaatgatatcatcccagacaagttggatggcttgaggactg

SEQ ID NO: 406074 - DNA, 104 bp, Homo sapiens
acctcgacgtcttgcctgtgtcccacttgttcgcggcctatagatcagcttgaacgggtctttttacgacttggccatgctgaaacagatgaacaattacagaa

SEQ ID NO: 406075 - DNA, 74 bp, Homo sapiens
tactctctctttctggcctggaggctatccagcgtttcccaggcagctgcagacttgaaacagttctgtctgca

SEQ ID NO: 406076 - DNA, 100 bp, Homo sapiens
aagagacctttgcgttcctctggggtggcactttccatagctgtaggactgctggaggctgggcggggagcgtcggaccagaagagaatcacgccaggaa

SEQ ID NO: 406077 - DNA, 74 bp, Homo sapiens
ggcgagagtgggcgagaacgtccactgcgggccggcgaaagctgtttttggtgttgagccagacttgaccaggg

SEQ ID NO: 406078 - DNA, 75 bp, Homo sapiens
cagagactgggctgccaaaggaccgtatttactgcttcttggacacttaatgattgttggcaagaaatgtgctgc

SEQ ID NO: 406079 - DNA, 76 bp, Homo sapiens
gaaaattccaggcacctgctgtgacacatatatacccctgctccctggctccccacgccggctgagccctcaggca

SEQ ID NO: 406080 - DNA, 88 bp, Homo sapiens
tcaagcttaggaccacccaccatgcctatccaggtcaagtttacccatgggggaactggttccagccaaaccgcaccaacctgtggca

SEQ ID NO: 406081 - DNA, 98 bp, Homo sapiens
ggcgtgtcaggtggttgcggagctggaagagagaagggcacagttacctaagtatcaacgtaatcttcctcggccaggacaggcccccatcggtaatc

SEQ ID NO: 406082 - DNA, 75 bp, Homo sapiens
tgggcaaagaaagtatccctttaaaggcctaaagaatgtatttgacgaagcaatattggctgccctggagcctcc

SEQ ID NO: 406083 - DNA, 82 bp, Homo sapiens
ataaccatgcttaatgcaaaagaccttctacaggacctgaacaaatgcagccctgaggatttggctactgcatataacaaca

SEQ ID NO: 406084 - DNA, 75 bp, Homo sapiens
aacaggagatgggcacatacctcagattcattgtctcccgcatgaaggagaggattgaccttgtacaaataaaac

SEQ ID NO: 406085 - DNA, 100 bp, Homo sapiens
ggccgagatgtctcgctccgtggccttagctgtgctcgcgctactctctctttctggcctggaggctatccagcatgacgtccggttgtttgccttcgtg

SEQ ID NO: 406086 - DNA, 96 bp, Homo sapiens
ctccagccctcgccgccctcgccaccgctcccggccgccgcgctccggtacacacagaacagtgctcggcatggcagggattccagggctcctctt

SEQ ID NO: 406087 - DNA, 50 bp, Homo sapiens
gtcgtgccggcgccgcccggaccgccagctctgctgtgtgcgtgcaccag

SEQ ID NO: 406088 - DNA, 97 bp, Homo sapiens
gaagcagaactcagacatgcaggctgagctccaaaagaagcaggaaaagaagccagaagcccccaagctgtccaagaagaagttgcgccgaatgaac

SEQ ID NO: 406089 - DNA, 82 bp, Homo sapiens
ctgtcccagagctggggccgcaggagcggaggcaagaggaggaagtgggacgcagagagaaacgcacatggggagaacgcca

SEQ ID NO: 406090 - DNA, 97 bp, Homo sapiens
tgggaggggggcagctggagcctcaggcggcagcgcttctagacaatgcagatcttcgtgaagactctgactggtaagaccatcaccctcgaggttg

SEQ ID NO: 406091 - DNA, 90 bp, Homo sapiens
cagccctcccgcgtccaccaccgcagcgtcaagagcgccgccctgtgctgggctgccgggagctcgtcttcaggaacctctccaagatcc

SEQ ID NO: 406092 - DNA, 88 bp, Homo sapiens
ctgggcggccggccgacccttcctgtcgctgacggcgactgcgggaggccagatgtcgacgtacaagcgggccacgctggacgaggag

SEQ ID NO: 406093 - DNA, 75 bp, Homo sapiens
taatgactgtctcacattggccggcaacttgttccagatttaaattccaggttgtcatcaatggccgagagtttc

SEQ ID NO: 406094 - DNA, 146 bp, Homo sapiens
gtctcttcagtcctcggcctctccagccaacgatgaccagtccaggcccagcctctcgaatgggcacacctgtgtaggtgctggagaatctggtaaaagcaccattgtgaagcagatgaggatcctgcatgttaatgggtttaatg

SEQ ID NO: 406095 - DNA, 75 bp, Homo sapiens
gtatgttaatttcatggtacatgagtggctatcatactggctattatatggatgccatggcttttaataagttta

SEQ ID NO: 406096 - DNA, 75 bp, Homo sapiens
ccaagacccagctcaagcagaggcctacacgatttactgtggaatcaactatgacaagccgctgcctcccatcca

SEQ ID NO: 406097 - DNA, 100 bp, Homo sapiens
gcaaggagcatcccggctggagcagagccaggtgtcatggagaaactccagctgggcccagagattctgcagcgggaaaatccaaggcttatttatgcca

SEQ ID NO: 406098 - DNA, 74 bp, Homo sapiens
gcgcagcgcgggaggcaggttccgcacgaagaacatgtgatcatccaggccgagttctatctgaatcctgacca

SEQ ID NO: 406099 - DNA, 75 bp, Homo sapiens
ctcaagagaagctgcaagagcaacatctttcctcaccccaagaggagaggagacgccgtgagcgggacgaccaga

SEQ ID NO: 406100 - DNA, 90 bp, Homo sapiens
caaaatctaaaactctttcgtcatcctcatattatcaaactgtcacactcagccggtaccagagggaagcagaacaaagtaatgtggccc

SEQ ID NO: 406101 - DNA, 50 bp, Homo sapiens
tctcagtgaaggaaatgaagtcctaatcactggccagcatcgaaatggtg

SEQ ID NO: 406102 - DNA, 82 bp, Homo sapiens
ccccgccaagggcgcagattctttctgtacggggccaaaccagtgctcctgccacctctctggctgccccctagagcctgcc

SEQ ID NO: 406103 - DNA, 100 bp, Homo sapiens
attcagaagctcagaacgctggactctccctttgcaggtctagatccagaagaagctcccgaaggcattatacccggtcacggtctcgctcccgctccca

SEQ ID NO: 406104 - DNA, 53 bp, Homo sapiens
acgacagcttcgacaacacataccaggtatgctataacccgagttttgcgttt

SEQ ID NO: 406105 - DNA, 101 bp, Homo sapiens
agatagtgaaaatacacctgttaaaggaggaactgtagcggatctaggaatagccaggccagaagaaggaaggcctgtggtgagtgggacaggaaatgaca

SEQ ID NO: 406106 - DNA, 95 bp, Homo sapiens
ccatatctgaaaaacttcaaaaggacattaaggatctgggagggaatttatccagttggcgaaggactttgaggatttccgtaaaaagtggcaga

SEQ ID NO: 406107 - DNA, 75 bp, Homo sapiens
ctccttgtggtcctgctcgttggaggctgtgcagcagaagggcctcctcccaaggagaacatgagaccacttcat

SEQ ID NO: 406108 - DNA, 75 bp, Homo sapiens
caaattaaagttcttaaatcaagcaaggatatagaagacttagatcactacgagatgaaagcagagcccattagt

SEQ ID NO: 406109 - DNA, 101 bp, Homo sapiens
gcagaaaccagaaactttaaatcttgagaaaagaagattgtctatcatgaaggaggttttgcacactagggaccaagaagccctcggggacactgctgaga

SEQ ID NO: 406110 - DNA, 75 bp, Homo sapiens
cttcaatgggcagcatatgaaagtggattatgggtggatccataaagaacccagccaacccgcagagggagggga

SEQ ID NO: 406111 - DNA, 89 bp, Homo sapiens
atcctgccgtcttcctatccttacccgacctcagatgctcccttctgctcctgatgattcacctccagcagaaagggaaccaggagaag

SEQ ID NO: 406112 - DNA, 100 bp, Homo sapiens
cgttggaggccgccttttcagaagcggctgcgcacggactgctggagatggtggagtccgtcacagtcctgcgttaactgcggccgggaggctatgagcg

SEQ ID NO: 406113 - DNA, 99 bp, Homo sapiens
aaaaggaagatgcccatgctgaccctgaaatccagcctatgaaggaagatgatgggacatttggagaatacagtggccataaaatgcagtaaaaacaaa

SEQ ID NO: 406114 - DNA, 100 bp, Homo sapiens
atgaatctctgcccgcaacacatatcagggtccgcaagcaggtggtgaacatcccgtccttcattgtccgcctggattcccagaagcacatcgacttctc

SEQ ID NO: 406115 - DNA, 96 bp, Homo sapiens
gccgactggagcaggcagcagcccagttgaggagctcaagcttgggaaaatggtgtgcattccttgtatcgtcattccagttctgctctggatcta

SEQ ID NO: 406116 - DNA, 88 bp, Homo sapiens
agagcgtctgtagcttccttggactttccttatcccagttgattgtgcagaatacactgcctgtcgcttgtcttctattcaccatggc

SEQ ID NO: 406117 - DNA, 100 bp, Homo sapiens
ggccatcttgagtctactctgtcgctcttgtgccctagcaccccgagaaccgtcagtttgagccagatgaacctgtcactatggacaaagttcattactg

SEQ ID NO: 406118 - DNA, 101 bp, Homo sapiens
gaccttacaatgaaccaacaaatgctcaatttctggagtctgttaagagagggcaacatttcatacaccatttagtcacctaggccaaagtccggaaggat

SEQ ID NO: 406119 - DNA, 100 bp, Homo sapiens
gatgtgggagacacgccaaagctcccaagaattctcccaataatatgagcctgagtaatcaaccgggcactccaagggatgatggcgaaatggggggaaa

SEQ ID NO: 406120 - DNA, 101 bp, Homo sapiens
cagacgagtaacttcggcaaagggatggggagaggtatcctccatgaaatgtgggatccttccaatttctcaagagtctcttcttctgggagatgttgcct

SEQ ID NO: 406121 - DNA, 100 bp, Homo sapiens
ctcctcgccagcagccgtccggagccagccaacgagcgaaaccaggcgatgcggaagaagctaatcttgtacttcaagaggaggaatcacgctcggaaac

SEQ ID NO: 406122 - DNA, 100 bp, Homo sapiens
ccgagagcgtgaccgagagcgcgaatatcgtcatcgttagaagggaacaccaggcacttatttgacttctcataatcaggcttcctacactcaagaaaca

SEQ ID NO: 406123 - DNA, 90 bp, Homo sapiens
ggagaacctggaggaggaggccatcatcatgaaggacgtgcccgactggaagttggagtgcttagtgcagttggtgagagcgggagccac

SEQ ID NO: 406124 - DNA, 100 bp, Homo sapiens
gtgcttcaaaaaactatggaacaaaacagatccttggagaagtctcttgcatggcaccaagaatgttaccaattcaagcagtttaagattgccaagacaa

SEQ ID NO: 406125 - DNA, 95 bp, Homo sapiens
ggccggcagggcagccgggggacagctgtagtgaagttccaaaagctgagacaagatcttgaaatggtactgtccactaaggagtcaaagaatga

SEQ ID NO: 406126 - DNA, 98 bp, Homo sapiens
ttctccagggcattcgagtctccattgcacaatggccagccctgatcactttgggaagcagtgacatccaacctgtatcaagtcttctaatctgtgaa

SEQ ID NO: 406127 - DNA, 100 bp, Homo sapiens
ggctgaggttgccgctggtgatgacaagaaagcattccaaaatatgcccggtgctatccgcccagctgctcctagaccaccatttagtactatgagacca

SEQ ID NO: 406128 - DNA, 100 bp, Homo sapiens
aatttgtgcaatgtttagccaacccaaattaccttaattgatcagctcagctactatttaataaaacaaaatctgtagaattcacgttttgtaatgacac

SEQ ID NO: 406129 - DNA, 50 bp, Homo sapiens
gggaactcttagctgagcaggcgagaggcagcatgatcccagtggccgag

SEQ ID NO: 406130 - DNA, 100 bp, Homo sapiens
cggaagtgccccttagcgggtgggggaagctggtaggcacgggcggctccgcagtgaccggactcgggggagaggtggggtttcaccatgttagccaggc

SEQ ID NO: 406131 - DNA, 100 bp, Homo sapiens
gcgagcgctggcggtgacggcgcggggtccgcgcccggagcgccccgccgcgcacatgccggtggtggtgtgcacattgagccccggtatagacagttcc

SEQ ID NO: 406132 - DNA, 95 bp, Homo sapiens
atccgggagaagctggcctgggccaagaatggagatgaggcgcctggtgtttggatgatcccaacttcagatccagcggctaacttgcatccagc

SEQ ID NO: 406133 - DNA, 82 bp, Homo sapiens
ctctgcctgtgttacatttagccaacaccacactttcagacgccacaggtcatcatctggatcatcccattctggttcccgt

SEQ ID NO: 406134 - DNA, 82 bp, Homo sapiens
gtgggaggcgccgtgagttcgccgctggtggctccggacaatgcagatcttcgtgaagactctgactggtaagaccatcacc

SEQ ID NO: 406135 - DNA, 82 bp, Homo sapiens
cttggcccttgttcccccaaatgtctgactctgactctcggactgagaaacgcaaggtttgcctgcaatgagatttcattct

SEQ ID NO: 406136 - DNA, 127 bp, Homo sapiens
cctttaaaaccccagaggtcatcagattgtttgcaaagaaacaaccaggtcagcttcggacaaggttagcagagggcggcaccttcctacttctgcccagccacagccctcccctcacagttgagca

SEQ ID NO: 406137 - DNA, 90 bp, Homo sapiens
cggctccaggagggcgcaggagcgggactgagagcgcctggaggctcgagcggaggacttaattcagtgcacaaatgagatgaatgtgaa

SEQ ID NO: 406138 - DNA, 83 bp, Homo sapiens
agtctccaaattcgcctccatctgtaccatgggtgtcttttatgaataatcaaaagcagcaaaagccaacgctatcaggccag

SEQ ID NO: 406139 - DNA, 96 bp, Homo sapiens
cttcctgcaggggctgctcggcgtcgtggccttcagcacgttaatgctcctggtacctgggataaaagttgcagcgtcccaccatccaccagacag

SEQ ID NO: 406140 - DNA, 74 bp, Homo sapiens
gcaatagtatgggggagcatctcttcagatgactgtccaagtgcctccaaagtgtacaaagcatcagattcagc

SEQ ID NO: 406141 - DNA, 100 bp, Homo sapiens
aatcattctgccttattacgccgtctccaagatgtagctaatgaccgtggttcccactgaggtgggatgtgtgtgggctgaaattccgagctgcggttgt

SEQ ID NO: 406142 - DNA, 82 bp, Homo sapiens
agattaagaaatacaggcgccatttcctacgagacaaggaaacaggtatcagcatgatggtagcagaaaccttatcaccaag

SEQ ID NO: 406143 - DNA, 90 bp, Homo sapiens
ccgggacccggttccccggcccacagtgggggtgtgcaaacccgagagaactggccacggaagagctgaaggaattctttgccaaggcac

SEQ ID NO: 406144 - DNA, 51 bp, Homo sapiens
ctggatcgaggagcactgtaagcctcaggagggtgaggacaaaatcttctt

SEQ ID NO: 406145 - DNA, 75 bp, Homo sapiens
gccgccaccacccactccggacacagccctgggcgctgcctatggcacagccaagagcggtaccggcattgcggc

SEQ ID NO: 406146 - DNA, 100 bp, Homo sapiens
tgtccagccacctacaggcctccaggaatggctaaaaatgtttcagctcccctcccacccggtcactccgtccagcaagcacgcagacagcaagcccgcg

SEQ ID NO: 406147 - DNA, 83 bp, Homo sapiens
atgttatccatgcccaatccagggacctgccacgcatctttagggtggggctcctgtacgaagagggtgttcgcaaggcccag

SEQ ID NO: 406148 - DNA, 90 bp, Homo sapiens
ttagtctcctcctcggcgggagccctcgcgacgcgcccggcccggagcccccagcgcagcggccgcggaagacagagatgtcaatgaccc

SEQ ID NO: 406149 - DNA, 90 bp, Homo sapiens
gcgagtgggagcaccaggatctcgggctcggaacgagactgcacgggcgcaccctacgacgcgcacaccaccggcatgaccggcgccatc

SEQ ID NO: 406150 - DNA, 100 bp, Homo sapiens
ccagcccattcaacagccatctggccctggtgaggtgaaggtgagtgaagatggcagagaggacgtgaccagcactcacccttgtccacctgcccagtgg

SEQ ID NO: 406151 - DNA, 75 bp, Homo sapiens
atcggggcctttatttctcgtcggcggcgccctgcaccgcgcctcgcaaagaagtgtttggattgtgagctattt

SEQ ID NO: 406152 - DNA, 100 bp, Homo sapiens
gaacgtgcgcggggtgatcaccatgaacgaggagtacgagacgaggttcctgtgcaactcttcacagggtgggtatatggctgccaaggtccagaaattg

SEQ ID NO: 406153 - DNA, 89 bp, Homo sapiens
ttcttctgaagcacgcagccgggttttggagactcgaagggctccgtggtgcccgggaggttgtccgggtgccaaaaagcatgagtttc

SEQ ID NO: 406154 - DNA, 75 bp, Homo sapiens
aaactcgtgaggggaacgtgcgcgtgagtcgtgagctggcaggacacacaggttaaacactttaagatgagaaaa

SEQ ID NO: 406155 - DNA, 75 bp, Homo sapiens
cgccacattgtggatgaggtcaatggattaataagtggtttgagtccagccaatgacactggagccaaaaagaag

SEQ ID NO: 406156 - DNA, 100 bp, Homo sapiens
cccctgcaggtggctgaaaatgtgtcctttgtggaggagtacagtctgcgctcctcagaccaccggcaggtgaacagcctgatgcagaccgaggagtgcc

SEQ ID NO: 406157 - DNA, 75 bp, Homo sapiens
ccagcgcctgagcatccccgtcatggtggtcaccctggtgctttggtcagttcatcctcactccccacatcatga

SEQ ID NO: 406158 - DNA, 90 bp, Homo sapiens
atgagatcgtggacaagatcatgggcaaaggacagatccaggccaccgtgaacgcccggccgcagcgcgtcctggacacctcctccctca

SEQ ID NO: 406159 - DNA, 50 bp, Homo sapiens
caggattccacagtgtcctctggaaaatgtgttggaaaaccttggacaga

SEQ ID NO: 406160 - DNA, 100 bp, Homo sapiens
gaggctgcgaggagccggcgcggtcgcagtctccacggcgcaggcccacggtagcgcagccgctctgagggcatgctgttgaagcgaagtggcaaatcgt

SEQ ID NO: 406161 - DNA, 99 bp, Homo sapiens
tggaatatgaagagacatgcgatggtagatcaacccccaggaaagaccacagcaagattctttcattcgtctcctcctagcctgggggaccaggctcga

SEQ ID NO: 406162 - DNA, 75 bp, Homo sapiens
tggccacctatggcttttggggtggagccccctgagctgcccgctgatctgcagcactggatctcctacaacgag

SEQ ID NO: 406163 - DNA, 83 bp, Homo sapiens
ggaaaaactgggcgtctgcttgggaatctattgtggaaacccaggcttcaacggaccacaccaaaatgccatctcaaatggaa

SEQ ID NO: 406164 - DNA, 75 bp, Homo sapiens
caacaactaagtctacagtaaataaatggattcaagatggaaaaggtgatgtaaccattacaaatgatggtgcta

SEQ ID NO: 406165 - DNA, 74 bp, Homo sapiens
cgaaggtggcggcgctgctgctcgggctgctcttggaggcggtgcgtctttctacgtgaataggattttgtggc

SEQ ID NO: 406166 - DNA, 75 bp, Homo sapiens
ctcacctggcggtgcccgaggagtagtcgctggagtccgcgcctccctgggtgaatgttggatgtgtacccaaaa

SEQ ID NO: 406167 - DNA, 74 bp, Homo sapiens
aaacagttgaattacaaggaaagaagatcaagctacagatatgaaaccgaaacttcattgccccttcaatgtgg

SEQ ID NO: 406168 - DNA, 82 bp, Homo sapiens
tgaggtcttggtcaccggggaacagctacggtgaaatgacaatggatgctctgttggctcgattgaaacttctgaatccaga

SEQ ID NO: 406169 - DNA, 90 bp, Homo sapiens
gttcattgttgagggcttaagagatttggaactatttggaggtaagtaaggaggtctctgtaccatggctcgtacaaagcagactgcccg

SEQ ID NO: 406170 - DNA, 100 bp, Homo sapiens
acactgaggatagaagataagaagttgtccaatatcacacaatctttggcgttgccagttccttttaccttttgtgagtttaggtttgatgtgctttggg

SEQ ID NO: 406171 - DNA, 48 bp, Homo sapiens
ggctccggctggtctgtggtgagaaatacccacctcggaaagacttgg

SEQ ID NO: 406172 - DNA, 82 bp, Homo sapiens
cagatgttggatatttgcttggaaaaacgtgtgggtacgaccttggttgaaaggattgttgacaaaaggaaaaataaaaaag

SEQ ID NO: 406173 - DNA, 95 bp, Homo sapiens
cgcgcccgggatgtattcgtccccgctctgcctcacccaggaagcgggagaacagcctccaggaagacagaggcagcttcgttaccacccccact

SEQ ID NO: 406174 - DNA, 75 bp, Homo sapiens
gggacctggaggggacgctggggccgaagcagcatgtgacaccgaccagcttcaaaagcagtggactgtcttttg

SEQ ID NO: 406175 - DNA, 97 bp, Homo sapiens
agaaacccagagagtggctacattgaggaacatcatttacagcgagcaatttcagcacagcaagtgtttagagaaaaaaaagagagtatggtcattc

SEQ ID NO: 406176 - DNA, 100 bp, Homo sapiens
ggccaccgggccgaggccaccacactgcatgtggctccccagggcacagccatggctgtcagtaccttccgaaagctggaacacagccgcacccgggtct

SEQ ID NO: 406177 - DNA, 100 bp, Homo sapiens
ccgcctccgccaactttcacgctgcctcggcggcccggcccggctcgacgccaatgggtgaaaggtgtagcagtcactcggcctacacccacagcatcga

SEQ ID NO: 406178 - DNA, 90 bp, Homo sapiens
cagacaccaagcaggtctatttctacctcttcaagcctgttaaagatgcagatcctcatttccatcatttcctgctaagccaaacagaga

SEQ ID NO: 406179 - DNA, 75 bp, Homo sapiens
tcaaggtctctaagaaggtgcccaagatcccactccatgtcagtgagtgttgcagagagctgctggacacagtgg

SEQ ID NO: 406180 - DNA, 101 bp, Homo sapiens
ggagagggagaagagcattgagatcgagaacctgcagaccaggctaaagaattacctccaaagccattgtcaagaccacagcagtcatctgcaccagtcca

SEQ ID NO: 406181 - DNA, 100 bp, Homo sapiens
ggaccctggaaaacctggccctcttcaatttctgacaaaagattcactgcgtgctgtcctcacttgttctacaatgagtgccaaatctgctatcagcaag

SEQ ID NO: 406182 - DNA, 100 bp, Homo sapiens
tgatagatacaatcagtttcacataagaattctgtagcaaagccaatacaaaaatcagctaaagctgccacagaagaggcatcttcaagatcaccaaaaa

SEQ ID NO: 406183 - DNA, 76 bp, Homo sapiens
ggggactgcacgtagcccggcgctcggcatggctctcctggtgctcggaaggcgacatgccaattcatgaacttct

SEQ ID NO: 406184 - DNA, 90 bp, Homo sapiens
attggactgacttttcttatgctgggatgtgccttagaggattatgggtaactcaactggacccaaataaatcattattggaggtaaagt

SEQ ID NO: 406185 - DNA, 50 bp, Homo sapiens
acagacgctgccagcatcgccgccgccagctattcaggattatgaaactg

SEQ ID NO: 406186 - DNA, 90 bp, Homo sapiens
cccgcagccgccacctacccagtgaccatgatagcaatcccacagagtattgatgaggaaactgaagtttggagcgatcacatcattttc

SEQ ID NO: 406187 - DNA, 50 bp, Homo sapiens
tacctttatgaaccagtgtatcccaaatgcctgaaatgtgcagatgcccc

SEQ ID NO: 406188 - DNA, 90 bp, Homo sapiens
tctcaatatctgtcttcggtggactccttcggcagtccacccaccgccgccgcctcccagatggtcagtaggacagaaggtaacattgat

SEQ ID NO: 406189 - DNA, 100 bp, Homo sapiens
cggcagtggtggaaaagatccatgccaaggggaaactgactctactctgtgatgccaagacagatgggagtttccttgtacaccactttctctccttcta

SEQ ID NO: 406190 - DNA, 80 bp, Homo sapiens
gcgcggcggccgcagctgccacaaaccaggctcatggaatccaggtccttctataccgcttacctgcagagactctctgg

SEQ ID NO: 406191 - DNA, 74 bp, Homo sapiens
cagagcgtgtggcatctccacctcaagggtgacttaagagattaaaattaatttggttgctgttggttctgaac

SEQ ID NO: 406192 - DNA, 74 bp, Homo sapiens
atttacttccggcagcaggtggtggggccatggtctcctgcaagcgcaaaatcttctaacgcaactacctcagc

SEQ ID NO: 406193 - DNA, 100 bp, Homo sapiens
gaagattctgggactatggccgcattgccctggtgtcagaagcagacaggttttcccatcatatgattcccggtcctcctggtccccacacaactggcat

SEQ ID NO: 406194 - DNA, 74 bp, Homo sapiens
tctcctatatctggctcatggacaaggccctgctctgcagcgctcctagagtggcctcagctaggtaaccaacg

SEQ ID NO: 406195 - DNA, 101 bp, Homo sapiens
gtgatgggaaacgcgtgagccaggccgagagggagactcatgcatctgtatgccgtgtgcgtggactgcctggaaggggttcacaagatcatctgcatcaa

SEQ ID NO: 406196 - DNA, 50 bp, Homo sapiens
gcggaacaggacgccctctgattgctgtacaagcgtcttgaattactctg

SEQ ID NO: 406197 - DNA, 75 bp, Homo sapiens
atgttatgaaagatctccttccagaaaccacctaccggctgtgagatttactctgattctgggaaccatgcctcc

SEQ ID NO: 406198 - DNA, 101 bp, Homo sapiens
ctggactggaccaacctcaaacgagagccggagctggagcaggaccagaacttggccaggatggccccggcaccagggtgttgaaagcagcaggggcctag

SEQ ID NO: 406199 - DNA, 85 bp, Homo sapiens
cacatcttgaaagagaagctcttcctgtgaggcctccccatggccacccatggaccagtcggcattcacttcctcccttctgcgg

SEQ ID NO: 406200 - DNA, 88 bp, Homo sapiens
ctgagcaagtccaccaacagtttctgtgtcccacttcatctttaataaggtggagattttcattttacctttatgtatttacctacgg

SEQ ID NO: 406201 - DNA, 75 bp, Homo sapiens
ccgtcctccgaggtggcagctgcgaagaaaaaatgctgggcatcttggtgcagcacaaagtccggagtggcgtct

SEQ ID NO: 406202 - DNA, 98 bp, Homo sapiens
cgtgaacggggtcctcttctgcaaggtccggctgctggatggaggggattttgtcagcttgtcgtcaaggctagatgaactgcagaagcaactacaag

SEQ ID NO: 406203 - DNA, 76 bp, Homo sapiens
gtgtcaaagccaagacataaactcaaccccttctcttccaaaaggtccaactggcccaccttcaacactccctcta

SEQ ID NO: 406204 - DNA, 74 bp, Homo sapiens
ttgacatctcataaacggctggttatgaaagacagtgcaacattcactactttcactgcctaagaatcctggac

SEQ ID NO: 406205 - DNA, 50 bp, Homo sapiens
ggatttctctttgggaaactaaaggagccagcgccggcagccaccatggc

SEQ ID NO: 406206 - DNA, 83 bp, Homo sapiens
ccgatccagcctgcggagcctgtggggcaggtcagtcattggcaccatgaactggaataaaggtggtcctggcactaagcgag

SEQ ID NO: 406207 - DNA, 100 bp, Homo sapiens
cgcgtttcccgcctgagcgcaactagcggcgggtcgtgggcacctccagttgccaccttccagagaagaggtacgagatgacaagacaaccataaagtgt

SEQ ID NO: 406208 - DNA, 52 bp, Homo sapiens
gagtagtccttggctgcaataatttccgcaataatgacgatgaggacctgac

SEQ ID NO: 406209 - DNA, 99 bp, Homo sapiens
aagcagccaggcagtatcgggagcaggaaagccagtgttgtggaccctagcacagagcgtcgtctcggagatgcagccaagaaagccatcagtaaattg

SEQ ID NO: 406210 - DNA, 100 bp, Homo sapiens
aaatgacattggcatccagattatccactgcagtacaacttggccaagtagaaatcaaatgccccatcacagagtgttttgaattcttggaagaaacaac

SEQ ID NO: 406211 - DNA, 100 bp, Homo sapiens
tcttccagtggctgtgctcagattccctgaagctctgctgccccgcaggcaccttcgggccctcctgccttcacttctgccagctgtctggcatgcacct

SEQ ID NO: 406212 - DNA, 75 bp, Homo sapiens
ctgaaatccatcttcatcctaccgctccgcccatgcagacagacatgctgaactatctggaagtccactgaaaag

SEQ ID NO: 406213 - DNA, 89 bp, Homo sapiens
tgcagacttcaggtcgtggcagagaaaaccagctgagacagggcgccacttactagggtttgccttcccggattgggcctacaagccag

SEQ ID NO: 406214 - DNA, 82 bp, Homo sapiens
tcctccactggcaaagagtcacctaaagttaggcggcactccagccccagctcgataagtttataccatggatagcacaaag

SEQ ID NO: 406215 - DNA, 100 bp, Homo sapiens
ctgggggttcgcgcccgccgacccgcgccctgctccctctcagcacctgggcggacggccgtcaccgatgggttgtatatactactgaaatgaatggcaa

SEQ ID NO: 406216 - DNA, 114 bp, Homo sapiens
ggctcgcgagctatagaagaatcaccagcagcaagtgtcccaaagaagctgtgatgaacatggacgttttgttctcatttcgtgatggagactgcagtaaaggattcttcctgg

SEQ ID NO: 406217 - DNA, 75 bp, Homo sapiens
ggacaccgacatggaacagggactcactggggaactggtcatgctgctggagtggtggtcctgcacggagtgtac

SEQ ID NO: 406218 - DNA, 100 bp, Homo sapiens
caaagataagaaaagaaaaagagaagaagatgaagaaacccagcttgatattgttggtatttatgagcctccatttcttatactactgcagtgaaccaac

SEQ ID NO: 406219 - DNA, 75 bp, Homo sapiens
atcagatcaaccaccaaagtgggaaacattgaaatcaagattcaaccctatgaaaagataaaggccaggggcttg

SEQ ID NO: 406220 - DNA, 100 bp, Homo sapiens
gtgcaggtcgtcatcttcataggctcgctgctcggtttccaatacttatctacaggaatcgccatgaccccagctctgagggaggcaacagcaaagggta

SEQ ID NO: 406221 - DNA, 100 bp, Homo sapiens
ctgcagtctctgagagaattcacgagcaggttcgggaccggcagtttaccaagtactggacagaatcaaatggggtggaatctaaatcattaactccagc

SEQ ID NO: 406222 - DNA, 90 bp, Homo sapiens
cgacatcgaaggtggaactgcagcactgtggataacacctctgtttttggcagggtgatgcagatagcaacaggtcaccttcaagccagt

SEQ ID NO: 406223 - DNA, 80 bp, Homo sapiens
gagcagctactgactctgtttcagccatcttcgataaaggcaaaaagacaacgactgaaagacctttcattcagaagctg

SEQ ID NO: 406224 - DNA, 82 bp, Homo sapiens
tatgaccagcaagaggatggggccctggatgagggggaagggcctcaaagccagaagacctgcctagagctggaacgttacc

SEQ ID NO: 406225 - DNA, 50 bp, Homo sapiens
ggccgcgggaacgagtgcgtgcagatcttttgccagaaatgagggcatac

SEQ ID NO: 406226 - DNA, 74 bp, Homo sapiens
cagttggagttggaatttgtgcaatgtttagccaacccaaattaccttaattgagatggaataaactgagactg

SEQ ID NO: 406227 - DNA, 75 bp, Homo sapiens
cacctccccaggtgatgcctgaagctcaagggactgtgtccaccctcaggctgaccccgcactacatctacccac

SEQ ID NO: 406228 - DNA, 100 bp, Homo sapiens
aacagaataaagattatcaagactgtagcaaaaccacttcattgtgcgcaggaccctcagatgtgctagtgctgctgatgacagatgtactggtgtttct

SEQ ID NO: 406229 - DNA, 84 bp, Homo sapiens
ctacgtctgtgcggctgcgtggggctcggccgcgcggactgaaggagactgaagacctcctgccccccgaggtctgcagtctcc

SEQ ID NO: 406230 - DNA, 98 bp, Homo sapiens
aaccatctccgccagaacgacaaagaggagggaactctaatgatccaggacaaagaagttaccctggagtatgtatcaagcctggatttttggtactg

SEQ ID NO: 406231 - DNA, 82 bp, Homo sapiens
tgaccaccaatcagatccgtaagtgccgtgttcacatggaccaacttgcttgtggtggttgtggaactgtgcggctctgaac

SEQ ID NO: 406232 - DNA, 87 bp, Homo sapiens
gagactctccttgcttggaattctgcccactctgcggagttagcagtcacgacctccagcacagggcgcaaaccagaagaagagggt

SEQ ID NO: 406233 - DNA, 97 bp, Homo sapiens
agctgatcaagtatatgactgaagaaggtgtcatggagaaactccagctgggcccagagattctgcagcgggaaaatccaaggcttatttatgccag

SEQ ID NO: 406234 - DNA, 116 bp, Homo sapiens
ctttcttccagcttctgctgtccttctttgtggagagcaagattggtccagaaaagggcgtggtgcacctggcgacagcggccgtcctaaacgcggtgtgggacttgtgggccaag

SEQ ID NO: 406235 - DNA, 99 bp, Homo sapiens
aagggaacatcagttctacgagaccctccctgctgagatgcgcaaattcactccccagtacaaagcctctgaagagccaatccattcaggatgggaaac

SEQ ID NO: 406236 - DNA, 90 bp, Homo sapiens
gtggatatcatagaaagtgtagtttcaaaggagatggacaaacgatacctacagtttgatattaaggaggacaaagacactgattctacc

SEQ ID NO: 406237 - DNA, 95 bp, Homo sapiens
tcggaagcctgcgtaactttctcccttgatccgggagtctttccactggcaaaatgatgcttcaacacccaggccaggtctctgcctcggaagtg

SEQ ID NO: 406238 - DNA, 80 bp, Homo sapiens
caaggagctaaagcagcgtgcgttcagccctgggggatacccacccaccatcccagggtctacaacatccacagccggac

SEQ ID NO: 406239 - DNA, 75 bp, Homo sapiens
gagaagattagcaaaggtgctaatccagtggaaatcaggagagcactgaacctaccagatgtatttgggttggtc

SEQ ID NO: 406240 - DNA, 100 bp, Homo sapiens
tttacatcatagactttcagctacttgaagatagccatcagccgctacgtgactcttttctccagctttagcgtcacctccctcactgggcagcatgggg

SEQ ID NO: 406241 - DNA, 97 bp, Homo sapiens
ttgcaactcaagcccgtgtgcgtgtccgacagcctcaagaagggcaccaaattcgtcaagtgggatgatgctcctctgaggagaggcaggtcatgga

SEQ ID NO: 406242 - DNA, 87 bp, Homo sapiens
ggcggcagcgggtcctacgaggagggctgtcagagcctcatggagtacgggaaagaatatggcaaagctgatgcaagatgggtttat

SEQ ID NO: 406243 - DNA, 75 bp, Homo sapiens
accacagatggcactgccaacagccgccgccatgtctgcgcatctgcaatggatggtcgtgcggaactgctccag

SEQ ID NO: 406244 - DNA, 102 bp, Homo sapiens
ggaagaccgcgcgcagggcctgcagcgggagctggacggcgagcgcgagcggcgcgagaaacatggcaccttgggcagtggccgctcctcggacaaaggccc

SEQ ID NO: 406245 - DNA, 75 bp, Homo sapiens
atttaaaagacagtcctcgtcagcactgactttcagctatggaatcgtcaggtcaattcagtgaagatatgatac

SEQ ID NO: 406246 - DNA, 101 bp, Homo sapiens
gaaacctggagagaggagttaggagaccagattggagatgatggatggcccaggagagaatgatcctgatttgaaacctgcagaccaccctcgcttctgtg

SEQ ID NO: 406247 - DNA, 100 bp, Homo sapiens
gctcagaatccattaaaaggagagctgggaggaggtggatatggttatagaagaagtggccgagataaatatggccctcctactcgcacagagtacagac

SEQ ID NO: 406248 - DNA, 100 bp, Homo sapiens
ccaatatataaactgcttcacccttcagggctccgtaggcaccaactgcaaggacccctccccctgcgggcgctcccatggcacagttcgcgttcgagag

SEQ ID NO: 406249 - DNA, 100 bp, Homo sapiens
gggaggtgaagttgctgctgttggcatacagtgaagttgttctctgaagttcctcatctgccttaagtctggacccaccaaagaagaaaacaatgaccac

SEQ ID NO: 406250 - DNA, 75 bp, Homo sapiens
cctctcggggcaacccagacgtgcaacaaagtgcgatgcacctgtggaatcctctcaagaggaacagtcattgtg

SEQ ID NO: 406251 - DNA, 50 bp, Homo sapiens
cgccggagcttgaatcgttttggatcatggcccaagttgcaatgtccacc

SEQ ID NO: 406252 - DNA, 76 bp, Homo sapiens
catgaagaaaagcatcttcaatgtctgtgggctgttgcaaggaattgcagaatgccgggacattctgcttcctgtc

SEQ ID NO: 406253 - DNA, 100 bp, Homo sapiens
atggcccgcactggcggcacgcagacagacctgttcacctgcggcaagtgcaggaaaaagaactgcacctacacacaggattctcccagcaacaagctgc

SEQ ID NO: 406254 - DNA, 100 bp, Homo sapiens
caagaaggccctggacacagcaatatctctgggctttcacagtgatgagttggaacaattcatggaaaatcaaggtgcatcgagcccaggtatcctcatt

SEQ ID NO: 406255 - DNA, 101 bp, Homo sapiens
catttaccagtcttccctggcaagattcttctgaattgtgctgccttggccaaaagaggtgcaaatatatacagagcttcataatcagcccaagaccacat

SEQ ID NO: 406256 - DNA, 50 bp, Homo sapiens
ctcagagcttggagacagacgccaacatcccatgcaccatcgtggagact

SEQ ID NO: 406257 - DNA, 100 bp, Homo sapiens
cgaggagtcagaaactcagccactggttgccttggtaggcaataaaaatggagtttcactcttgtctcccaggctggagtacaatggcatgatctcagct

SEQ ID NO: 406258 - DNA, 100 bp, Homo sapiens
gcgcattggaaagaagcgaccgcggcggctgatgaataatacggcagctagtccaatgtctactgcaacttcaagtagtggaaggagtacagggaagtct

SEQ ID NO: 406259 - DNA, 99 bp, Homo sapiens
ccaccatcaaagagatcagagaccagggctcctgtggctcctgctggaaacactgtgctcctgttctggcaaagctgcgcccaccgcctgacaatcagg

SEQ ID NO: 406260 - DNA, 51 bp, Homo sapiens
gcaggccttaaggagaaagtttcaggccaacaagctggcggagaagcggaa

SEQ ID NO: 406261 - DNA, 116 bp, Homo sapiens
tattcagcactcagaatgctccaggcagtgtaatctcattccatcttcattcatgactccagacagtgtaaacaggaacatcgataagtagtgtaaaaacttgcacaatgaaatcc

SEQ ID NO: 406262 - DNA, 100 bp, Homo sapiens
ggttattctcgttcaagttaatccaggtgagactttcacaataagagcagaggatggaacacttcagtgcattcaagaactcggttgcctttgaggatgt

SEQ ID NO: 406263 - DNA, 101 bp, Homo sapiens
accttagaaaggatcaggactggcggcaaaaagtggatgactgtgagcggtgccgggaatttttcaacaaagaagggcgtgtaaaaggcataagctcaacc

SEQ ID NO: 406264 - DNA, 98 bp, Homo sapiens
gccggaacaccctggaagccgagaaatggacctacaagaacagtgaggagcttcggtctcgtattgtgtctggaatcatcacacctatccatgagcag

SEQ ID NO: 406265 - DNA, 89 bp, Homo sapiens
agcaaatgacgacctggaaagagccaagcgatcagacctattgtgaccgcctggtgcaggacacgcctttcctgacaggccatgggcgc

SEQ ID NO: 406266 - DNA, 80 bp, Homo sapiens
cgcaaacccaaagatccccgttcctggagattctgattgaggttttaaaatcaaagatgggaaaatcggagaaaattgcc

SEQ ID NO: 406267 - DNA, 83 bp, Homo sapiens
ctgcccggcccggcccggccgccccgccgcccccgcggccccggccggaggagacagacaatgcagatcttcgtgaagactct

SEQ ID NO: 406268 - DNA, 75 bp, Homo sapiens
tggcaatgagaccagtggaagcagcaccatcggggagacaagcaaggccatggagttggggagagaatgtctaaa

SEQ ID NO: 406269 - DNA, 100 bp, Homo sapiens
aggaaaaaaatttgctggatattgatgcgccagtcactggcttgtctggagcgggaaagactactgtgagcatggccttggaggagtacctggtttgtca

SEQ ID NO: 406270 - DNA, 90 bp, Homo sapiens
cagccccaggaggtcctgagaacatgtgcacaaggtatctcaggagattacatttcagcttgaaaaagggtcggtggaatttaaaagaag

SEQ ID NO: 406271 - DNA, 100 bp, Homo sapiens
accagatcaacgtcctccgggaccggagtcagaaccctccgcagagtaaagtattgactcggagacaaaaagaggccaagaccaagagtgacagtgggac

SEQ ID NO: 406272 - DNA, 83 bp, Homo sapiens
ggcctgcagcgggagctggacggcgagcgcgagcggcgcgagaaagatcatccagcagctcgtcaacggcatcatcacgcccg

SEQ ID NO: 406273 - DNA, 100 bp, Homo sapiens
accttttggattacaactgttcatcctcacctatgcaaagaaagggaagctattgctgggattttgaggagtttgaaggatgacctctaggaagaaagtg

SEQ ID NO: 406274 - DNA, 90 bp, Homo sapiens
cgctctcagtcagcctggggaatgagacccaaactgctcatacagaattacgcatttccacttctaatgcaactccgaagtcaagcccgc

SEQ ID NO: 406275 - DNA, 80 bp, Homo sapiens
cgagctccagccgaaggagaaggggggtggactggctaactgtgggccctttgtgactttgatcttgaaagcaaactaaa

SEQ ID NO: 406276 - DNA, 95 bp, Homo sapiens
ccggccgctctcccctcctctcacggcacctcccaccatgaaggtaaggctggcctctctgcagtcagaggtctgagctctgccatggggatagg

SEQ ID NO: 406277 - DNA, 82 bp, Homo sapiens
gcggaccctgaagcggaccccgaggaaggttgaaccatgattccggtgacagagctccgctactttgcggacacgcagccag

SEQ ID NO: 406278 - DNA, 83 bp, Homo sapiens
gcacaggcatcagtcaggcagatgtttgtcgactggaatgggctgctccagttacagcaccacccggccgctgcacccggctg

SEQ ID NO: 406279 - DNA, 83 bp, Homo sapiens
ccgcgcgcagggcctgcagcgggagctggacggcgagcgcgagcggcgcgagaaacgtttgcctcagcatggagggcggggcc

SEQ ID NO: 406280 - DNA, 99 bp, Homo sapiens
tgcggcctcaccatacaggaacagggcagacgttagcgtgagtgatcactctcaatcccgggtgtctggtggcctgacatgcaccgcctggctgaccgc

SEQ ID NO: 406281 - DNA, 83 bp, Homo sapiens
cggaggcggaggcagaggtggaggcgctttgaaagatgtcacctgtgagaatcccagatgtcctttctcccagctcccagcac

SEQ ID NO: 406282 - DNA, 101 bp, Homo sapiens
ggagaactacgtcattgttcttacacactttgcaggacagtcattttgtttactcattcagccctgttgcaggtcccaataaactcttcataaggttgaca

SEQ ID NO: 406283 - DNA, 74 bp, Homo sapiens
gcccagtagcgtgagggctctgtccattgtcctccccatcgagctagagccggtgcaggccacgcagaacaaga

SEQ ID NO: 406284 - DNA, 98 bp, Homo sapiens
aggaaaatatactgattattatatctggcatgactgtacccatgaaaatggcaaaaccattccacccaacaactggactccagggattagagctcgat

SEQ ID NO: 406285 - DNA, 90 bp, Homo sapiens
tccaagactgcccatctggatgaggaggaaatggccagtgatgaactgagggagttgaggaatgccatgacccaggaggccatccgtgag

SEQ ID NO: 406286 - DNA, 82 bp, Homo sapiens
ctctctttctggcctggaggctatccagccattgcagtgtcgagatggctatgaaccctgtgtaaatgaaggaatgtgtgtt

SEQ ID NO: 406287 - DNA, 100 bp, Homo sapiens
gcggaccatgataatttccccagagcgtcttgatccttttgcagatgggtgaagtaccatgcaagcatttcttaaaggtacatccatcagtactaaaccc

SEQ ID NO: 406288 - DNA, 75 bp, Homo sapiens
caagtgtgtgcatctggctgttagaagaattcatgctcatccggcatcttcatgatacagttaagaggaatcttg

SEQ ID NO: 406289 - DNA, 80 bp, Homo sapiens
gggccgctcctggaggaggaggtgggagatgagtataggatcaaaccagtggaagaggtcaaatacatgaaaaatggggc

SEQ ID NO: 406290 - DNA, 83 bp, Homo sapiens
ccggatgtaaaagaactctggctagagaccctccaaggggccaattcctgtccccccagcagcatggcatcgtgtgctgaacc

SEQ ID NO: 406291 - DNA, 98 bp, Homo sapiens
ggaaacagagcctccagggccaaggatgctgtcctcttccataatactatttattacaacctcttatatggaaacatcagtgcttcacctgaggaagt

SEQ ID NO: 406292 - DNA, 83 bp, Homo sapiens
ccagcagctgtcgccgccgctctcagatcatggaagggaagtggttgctgtgtatgttactggtgcttggaactgctattgtt

SEQ ID NO: 406293 - DNA, 82 bp, Homo sapiens
agaagaggtcccaatcccccactctttccgccctaatggaggtctccagtttcgcacatgattaagtaccggtacatcccgt

SEQ ID NO: 406294 - DNA, 90 bp, Homo sapiens
gccccgagcattgtgggcctcatcatcttcctcctgtgcaccctcttcatcaggaaacttcctcctggccaaccctgtgtctggcagccc

SEQ ID NO: 406295 - DNA, 100 bp, Homo sapiens
cctcgtggtctaaagcttcggcacaagggcccaactggaattccacttacgggaaggtgggagtcaatcattttgacaagtctcctgaaaggaacagcta

SEQ ID NO: 406296 - DNA, 83 bp, Homo sapiens
cttctgatgtaccagaaaagcccaggacagagcgggatgccaccagcttgtccaaagggaagttccaggagctcctggtgggc

SEQ ID NO: 406297 - DNA, 88 bp, Homo sapiens
ccagaaggaagatggcggatctggaggagcagttgtctgatgaagagaaggaggacccctcgctggaaaggcattttaagggccaccg

SEQ ID NO: 406298 - DNA, 90 bp, Homo sapiens
cccccatggaggccctggcagagcagatcttgcaggagagagagttactgcctgtgaagaaatttgaaagtgagattctggaagcaatca

SEQ ID NO: 406299 - DNA, 82 bp, Homo sapiens
ggggaagaggaggacgccgtggatgccgcctcctatgaagtagaaatccagacataccgagagaaattgacttctaaagaag

SEQ ID NO: 406300 - DNA, 83 bp, Homo sapiens
agaggagctgaagactccagtatgcaactgactacaaggaggcggctatgagaggttttcctccgagtacccagaattctgtt

SEQ ID NO: 406301 - DNA, 100 bp, Homo sapiens
gatgggttaggaggaccaggtgtacaactaggaagcccagataagaaaaagcgcaaggcaaatacacagtgccaaacccaagtctgaaatccacgtgtct

SEQ ID NO: 406302 - DNA, 90 bp, Homo sapiens
gtagccggcttggcgtgaccctcgcctgatccagagtgaaagcagcagcagtagcaacatctccaccatgttggtgacacacgattacac

SEQ ID NO: 406303 - DNA, 90 bp, Homo sapiens
gtcaaaggagagcacaaccatcgcagttggaagcccatggggcaggtacgagtggctgctttacagaatctggtgaagataatgtcctta

SEQ ID NO: 406304 - DNA, 83 bp, Homo sapiens
cctcgggaccggctgtatgattaggccacaatcttcaatgagtaaacatattcctcaatggctgccatccggaagaaactggt

SEQ ID NO: 406305 - DNA, 101 bp, Homo sapiens
ctgagtttcccacttgattacccgttaagtcccccaaagatgagatttacctgtgagatgtttcatcccaacagaccctgatgctcccataagacagaaaa

SEQ ID NO: 406306 - DNA, 147 bp, Homo sapiens
agcctctgcttctcttttcccgttgaaggtgctaccgctgacgacacccctggtggatggcgaggatgagagggaggttatattcaaaagaaaaaggaactgtggggaatctgtatctttattgcagcagttgacctagatgagatg

SEQ ID NO: 406307 - DNA, 100 bp, Homo sapiens
ggaggcgactgggggctgaagagcgcgccgccctctcgtcccactttccagactgcctgcgctgctgacttaaggccccaacaccaaacacagaagcaac

SEQ ID NO: 406308 - DNA, 82 bp, Homo sapiens
cttgtgcaaacgcaagtcgtggatgagtaagacaatgcagatcttcgtgaagactctgactggtaagaccatcaccctcgag

SEQ ID NO: 406309 - DNA, 75 bp, Homo sapiens
aagtcattcaacgggaattgaatagcagtgagtcgcagccatgttcctggttaactcgttcttgaagggcggcgg

SEQ ID NO: 406310 - DNA, 90 bp, Homo sapiens
gccacagaggcagccaagtgtaacctgctggcagaaaaggccttcccttcttcttggtggtgttcttgagtaagataatctggactggcc

SEQ ID NO: 406311 - DNA, 98 bp, Homo sapiens
caccacttaaaactgtcattcgagctatcagaaagttcgtcgctgcttcctgtgctccaggagaggacatctcctgtattcctgtccagccccccttt

SEQ ID NO: 406312 - DNA, 100 bp, Homo sapiens
ttcaagcgcctccgctcggtgcccactaacaagtacgactttactccgtgacataaaagaaggactacagaaagctgtaatagaccatacaataaaagcc

SEQ ID NO: 406313 - DNA, 75 bp, Homo sapiens
gaaattcgtttcagaattgagcagaaaacaacactgacagccagtgcaggtatgggcactaggaaaagacttctt

SEQ ID NO: 406314 - DNA, 50 bp, Homo sapiens
agcacaggacctggaaaaattacatgggacaagggcctgtccgacacgcc

SEQ ID NO: 406315 - DNA, 74 bp, Homo sapiens
tgaatgttgttggaatggatctgacagcccttcgccacaagaagatgggcagatcatgtttgatgtggaaatgc

SEQ ID NO: 406316 - DNA, 75 bp, Homo sapiens
gaagcctcccctatctggctacagagctgcccaagggtggcccttgggtagggtgaagatcccctgtctttatcc

SEQ ID NO: 406317 - DNA, 120 bp, Homo sapiens
ctgctttcggtgtgtctgttgtgtcttgttgcgggcaccgcagtcgccgtgaagatggcgtctaccagccgggggattcccgaagtcttccgttttctgagaatgtgagtgctgttcaaa

SEQ ID NO: 406318 - DNA, 91 bp, Homo sapiens
tgtagccgcccaccggtttttctgccacttttgcaagggcgaggtcagccccaaactaccggtcaaaatgcagatcttcgtgaaaaccctt

SEQ ID NO: 406319 - DNA, 97 bp, Homo sapiens
gacaatgatttaacaacgttaccagcatccattgcaaaccttattaatctcagggaactggatgtcagcaagaatgaagagttaccttgtacatgcc

SEQ ID NO: 406320 - DNA, 101 bp, Homo sapiens
gcgcacctgccagccaggcctcggacgaggaggacgcgcccgccaccgacatctactttgctgaagccgacgtagcttctctgaacagacgcatccagctg

SEQ ID NO: 406321 - DNA, 82 bp, Homo sapiens
cagattgagccagaaggaagacaatgctgtaaaggcatgacttcctggcaccacagggaaaatcgggtgcaagcccagaaac

SEQ ID NO: 406322 - DNA, 75 bp, Homo sapiens
ctcggagctcaccggatttataacgacagaagtgcccccgatttctacgttgagatgaagtgggagttcaccagc

SEQ ID NO: 406323 - DNA, 100 bp, Homo sapiens
gtcgcggccgtggacggggccggggccgaggccgcggagctcgcggaggcaaggccgaggataaggagttccgccacaaagtccgctttgaagggatgga

SEQ ID NO: 406324 - DNA, 78 bp, Homo sapiens
ttcggatgatgccttcaatactacctttatttccaccataggtggaaaaccatgaattccttgtaaaaccttcatttg

SEQ ID NO: 406325 - DNA, 50 bp, Homo sapiens
ccagagcctgcagtcccacacgatcctggattagaaattctgaatatggc

SEQ ID NO: 406326 - DNA, 100 bp, Homo sapiens
cttgaatgttgaagatgtccttaccagctttgacaatacaggaaatgtttatatggagtctggagaacggttaccatcctcagcagcctcctctactaca

SEQ ID NO: 406327 - DNA, 74 bp, Homo sapiens
gaagagggaagacacgcggaaacagaacacagatatgtagaactcttcttgaattctacagcaggagcaagcgg

SEQ ID NO: 406328 - DNA, 75 bp, Homo sapiens
agtaacatgcctgatggtttcatttgccgttgtcccccggggagtgatgctgaagaaggggattcagagtctgaa

SEQ ID NO: 406329 - DNA, 74 bp, Homo sapiens
atcaacttgatgtctttttacaaaaagtattttcctgacagcagcccttggatttcccgaggctttgattcctg

SEQ ID NO: 406330 - DNA, 90 bp, Homo sapiens
caaaacacctgaggaatcatgtgcacagactatctggcttcctggtgatgctcacgctttgctaagtgttggcggccatcgtggttttcg

SEQ ID NO: 406331 - DNA, 101 bp, Homo sapiens
catgtgatggtggagtaggaggcaggtctccgcgcatgcttttcacttccactgcatctctcgctggctcaaaacacgacaggtgtgtccattggacaaca

SEQ ID NO: 406332 - DNA, 59 bp, Homo sapiens
acagaagaacggacgatctccttgaacttacagagatagatcagatactgattcatcag

SEQ ID NO: 406333 - DNA, 100 bp, Homo sapiens
agaggaaccacacgctgatcatggatgttgagaaagagaaggaaacccacagttacctcagcaaagaggagatcaaagagaaagttcataaatacaactt

SEQ ID NO: 406334 - DNA, 82 bp, Homo sapiens
cccgaagtcagaactttgacatcttgcaaagtgccatcagtaagcatttggaaaaatgccagctgtgggacaaggagtgcag

SEQ ID NO: 406335 - DNA, 100 bp, Homo sapiens
cggcgcgcggccgggctggcgatggaagatggaaggaaggagcgcagcggcaaaaactgattattccaagtggaagttgccctgttattctgaatactta

SEQ ID NO: 406336 - DNA, 74 bp, Homo sapiens
gaaagggatcaagtccgtgattttacctcaggtggccatcaaacacgtggagaaggaccggatttccgactggg

SEQ ID NO: 406337 - DNA, 90 bp, Homo sapiens
gaacaagttagtcgcagccagcaacgaggatctcccagccatccagccccggctagtggcggtcagcaaaaccaaacctgcagacatggt

SEQ ID NO: 406338 - DNA, 100 bp, Homo sapiens
atgaccatcggcacggactccgccctgcacaggatcatcgaggtcgtcgacgccatcatgaccacggcccagaggaactgtggctgcaccatctgtcttc

SEQ ID NO: 406339 - DNA, 75 bp, Homo sapiens
gcatcccggctggagcagagccagcccggtggttctttattcattactacaatcaacaaaacacaactttcctat

SEQ ID NO: 406340 - DNA, 83 bp, Homo sapiens
acaccctcttcttgaactggtgctgtctgggcttcatagcattcgcctactccgtgaaggctccataaaaatacagactcacc

SEQ ID NO: 406341 - DNA, 96 bp, Homo sapiens
cgccgcggaccttcagctgccgcggtcgctccgagcggcgggccgcagagatctatgggaccccctccagcagcccctatgagtgtctgcgccagt

SEQ ID NO: 406342 - DNA, 75 bp, Homo sapiens
tgcgaggcctgcaagtccaccgtggcactgtgacttctgccgtgttcaccgtgggagacaacgtggtttcaggca

SEQ ID NO: 406343 - DNA, 101 bp, Homo sapiens
aattgagcccatctttgggatcttggctctgtatgatgtgcgggagaaaaagaaggatgaagcctgctgggagcgtgaatgacatggccctggatgccttc

SEQ ID NO: 406344 - DNA, 100 bp, Homo sapiens
agcaggcatcatccgctatgcaattgggtactcccctgccctcaacaagatgttttgccaactggccaagacctgccctgtgcagctgtgggttgattcc

SEQ ID NO: 406345 - DNA, 96 bp, Homo sapiens
cctacgtcctgcctcgcaatgagggagcatgtaccccagccactcccatggttcaagctttgactacaaccagaattcagaggcaggcagaaggat

SEQ ID NO: 406346 - DNA, 96 bp, Homo sapiens
ccctgtgatccctcaagactggtccacggagtgtatgaccacaaacagccatcaagtttgctggagatccttcacgaacagcttcctgagagtacc

SEQ ID NO: 406347 - DNA, 75 bp, Homo sapiens
aacatcttccagcgctttggagaaattgtggactgcaggatcctcctgtctgtcgagcccacggaccaaggctgc

SEQ ID NO: 406348 - DNA, 75 bp, Homo sapiens
aacacgtggaaagaatcaatttggggacttggaccctctgtggaacacccgagtacctagcccccgaagtcattc

SEQ ID NO: 406349 - DNA, 98 bp, Homo sapiens
aacggcggcgacaagggtgttcccgaactagagtggactgtgccctgtccacggtgcctcctgcatgtcctgctgccctgagctgtcccgagctaggt

SEQ ID NO: 406350 - DNA, 75 bp, Homo sapiens
ctgcacaatattaaaactttacctgggtattggatgaacgaatatacctcatccattggaattggagtttttcat

SEQ ID NO: 406351 - DNA, 51 bp, Homo sapiens
aatgccaacgccgtgtctgaagcttctcaataggtttggcatggacaagat

SEQ ID NO: 406352 - DNA, 75 bp, Homo sapiens
tgtttgtctacactaagcaatatggcctgggggcacagattctgaaagtcaagaagacatcatccggaatattgc

SEQ ID NO: 406353 - DNA, 112 bp, Homo sapiens
cagaccctggagcctcagttggaagcagccgatccagcctgcggagcctgtggggcaggacgtggcccagtggaacatcgggagcctccggaccatcctggacatggtggag

SEQ ID NO: 406354 - DNA, 100 bp, Homo sapiens
ggccatggcataaggaactctatcccaggaatacagctttgcattaggacagcctttcctgcctcagggaagaagagagagacagactacagtgatggag

SEQ ID NO: 406355 - DNA, 100 bp, Homo sapiens
gctggactgcgagacggcccggctgcagcgagcgctggacggagaggaaagcgctctggattaatcgaattacagctgctagccaggaacatggactgaa

SEQ ID NO: 406356 - DNA, 100 bp, Homo sapiens
gagttctctaaaaaaactggctgtgaataatatagctggtattgaagagagccaggctttcgaggactgactcctccaattccttgggaacatgcaccgc

SEQ ID NO: 406357 - DNA, 83 bp, Homo sapiens
agagaagaggcggtggaggacacgacgcgcttaaagggagtcagtggatcggtggggaaaatgctgcttaccctgggccctgg

SEQ ID NO: 406358 - DNA, 100 bp, Homo sapiens
cttcagaaaaagcatccccgaggaggaagacgaatcgttaaacatcttaggtcagatcgacgtaattaacacattccagacgggagcctcttttaaggga

SEQ ID NO: 406359 - DNA, 90 bp, Homo sapiens
ggacgagctcggagcagcagccagcttctggagctatttgacagcgaagaccctcgggaacgggactacttaaaaacagtcttacacaga

SEQ ID NO: 406360 - DNA, 101 bp, Homo sapiens
acagtgacagcacaggtcacagtaaggccaaaaatgtgcatactcacagagttagagagagggatggtggctgctgatactttggctgtgaggcaaaaaag

SEQ ID NO: 406361 - DNA, 83 bp, Homo sapiens
ttcacagccacggcacatttccgttgcaatggataagtttggattcaggcatacccagatggaagtagcaaagaaaagagaag

SEQ ID NO: 406362 - DNA, 90 bp, Homo sapiens
tcagtgactgaattaaaaggtgtcaagaagctcagaatggccaagtataaggagcgagggacggtcttggctgaggaccagctagcccag

SEQ ID NO: 406363 - DNA, 100 bp, Homo sapiens
ggaagaagcctgggtgattggcagtgtggttgcacgagctgaagggcttccgagtggacctgccaatcaagtcggcccgctaccgtggccagtacaacac

SEQ ID NO: 406364 - DNA, 98 bp, Homo sapiens
tgggcttatgggatacagctggacaagaagattatgacagattacgccccctatcctatccgcaaacagacagaataacgggctcccagattcacaag

SEQ ID NO: 406365 - DNA, 100 bp, Homo sapiens
caaagtcttggaacagcgacgacaaggcttggaaacatacttacagtggcatgccctctcccgtgaagagcaggctaaatattatgaattagcacggaaa

SEQ ID NO: 406366 - DNA, 100 bp, Homo sapiens
tttgccacttcttcacggaccagtttcagttcgccgatgggaaacccggagaccaaatccttgtggaagtagtggaggaagtggaagtcgagaaaacagt

SEQ ID NO: 406367 - DNA, 50 bp, Homo sapiens
ctttttgactacaattctcaacaacagagctccttaataagcatttatag

SEQ ID NO: 406368 - DNA, 82 bp, Homo sapiens
agcatggcatttcagtcactggtttgcagagtccaggccctggccaacgtcaacattgggagcctcatctgcaatgtagggg

SEQ ID NO: 406369 - DNA, 100 bp, Homo sapiens
gcaaaatctgaagtgcccgttactgcttcagcaattctctaatgacaagcataattatttatctcagggcggcgactggcggcgcgatggacctgaccgg

SEQ ID NO: 406370 - DNA, 100 bp, Homo sapiens
ttcaccctctcgcctcgggtctcgggggccgctctgggatcccggccaccagcaattgtccggggtgatccattcatgttgcagcagtctacaaatccag

SEQ ID NO: 406371 - DNA, 100 bp, Homo sapiens
gactcggtcctgtttcgacagcgaacatgtcgcggcctgtcaggaagagagagaaaatccttcaaaacggagtagaattgaacgtgatatagataacaat

SEQ ID NO: 406372 - DNA, 98 bp, Homo sapiens
cgggaatccgcaaggacgctttcgccgacgccgtgcagcgggcccgccagcttgaggagttcctgaaccagagctcgcccttctacttctggatgaat

SEQ ID NO: 406373 - DNA, 100 bp, Homo sapiens
agacattcaacatgattgcatttgaaaacaccttccaccatgaccacctcagcaagttcccacttaaataaaggcatcaagcaggtgtacatgtccctgc

SEQ ID NO: 406374 - DNA, 100 bp, Homo sapiens
gccacgctgctgatcgtcctgctgctgatggtgtgcggaaaaaaccctgatccatgggctaagaatctgaatgaaaaagactatgagttgctgtgccttg

SEQ ID NO: 406375 - DNA, 86 bp, Homo sapiens
gtcagcactgactttcagctatggaatcgataacaacgaacttgatgcaagtgataggtttgccaaggtcagacctctcatcatcc

SEQ ID NO: 406376 - DNA, 100 bp, Homo sapiens
cgtctctgaggtggacgcgcggcacatcattgagatttgtacacacagatatgacgaaagacttgaaagaagaacatttaaagaaaaatattcctcttgg

SEQ ID NO: 406377 - DNA, 100 bp, Homo sapiens
ttgaaggcgagtaaagacgtaggagaccgaggaaagtgtgtgggaggcgttgacctgccccttgtcctggccccggtctcctctgagcctccggcctcca

SEQ ID NO: 406378 - DNA, 83 bp, Homo sapiens
gtttcatcattactaacaggatattcctcatgacattgctgtctgcatatagcactttctacattgtgggtttaatattatca

SEQ ID NO: 406379 - DNA, 100 bp, Homo sapiens
cgggaacacccaatctatggcttcccttccgttttcgcgtggttcttttgcaaggcagtggctctgccaatgatcctgtgagtattcaggaatcactgtt

SEQ ID NO: 406380 - DNA, 100 bp, Homo sapiens
gggcttcctggtttacctggcactcctggacaggatggattgccagggcttcctggcccgaaaggagagcctgcttccaaaagccaggatcgcaaatcag

SEQ ID NO: 406381 - DNA, 100 bp, Homo sapiens
ctgggtccagccccttacttaaagttggatatgtcaagtgaccagatagctgccaatctgcaagcagttattaatgaagtttgtaggcacagaccgctga

SEQ ID NO: 406382 - DNA, 131 bp, Homo sapiens
gctgaccgccgactgtcaatggagctggaaaacatcgtggccaacacggtcttgctgaaagccagggaaggtcactcctggaagcaaggcggctctagctaatttatgtattggagatgtaatcacagcca

SEQ ID NO: 406383 - DNA, 120 bp, Homo sapiens
gcagatgacaaaacttcaagccaaacatcaagcagaatgtgatttgcttgaagatatgagggctggcttgaaggctgtgtgagtctactcagaaacggtgccaagcacaatatcccagat

SEQ ID NO: 406384 - DNA, 89 bp, Homo sapiens
tgatttgatgcataaaggcagctttgaaacattccagaaagctgagtctgatctggattacattcaatacaggctggaatatgaaatca

SEQ ID NO: 406385 - DNA, 51 bp, Homo sapiens
tctcaggagagagcagccagagtgggactgttgacatttagggatgtggcc

SEQ ID NO: 406386 - DNA, 82 bp, Homo sapiens
cggcagcatgtcggtggcggggctgaagaagcagttctacaaggcgagccagatagcctgggctggaagctcttctacgtca

SEQ ID NO: 406387 - DNA, 80 bp, Homo sapiens
ttgttactcttcagtacaatgtcaccctcccagcaacaggtcttgaggaccggcccagctcaggctcctggggcagcggc

SEQ ID NO: 406388 - DNA, 51 bp, Homo sapiens
gagaggttccttcaggaggatcaggcataatgattataaagtggtttctcc

SEQ ID NO: 406389 - DNA, 50 bp, Homo sapiens
ccaaggcgctgccctgcgcagggttttcctcctccaccaggcgctccacc

SEQ ID NO: 406390 - DNA, 100 bp, Homo sapiens
gccatttcggtgtagaagtggcagcacggcagactgggatcagatccagacaatagactccttgctcaggaaaggtggctttaaagctccaattaccagt

SEQ ID NO: 406391 - DNA, 80 bp, Homo sapiens
aaagcaaacacaggattcaccacagtacttcacatcgtcgttcacatggggtatgtattgggtggaggagcattatgtat

SEQ ID NO: 406392 - DNA, 75 bp, Homo sapiens
cacaaagggacctgatgaagcgaagatcaagcacaaacatttcactgaagatattcaaacaaggcaatatcgttc

SEQ ID NO: 406393 - DNA, 98 bp, Homo sapiens
aggacctctatctcgcttttcccctggccttctgtatcttcatggtgcggctcatcttcgagagagttcctgagttggaggtagaagaagaaacccaa

SEQ ID NO: 406394 - DNA, 50 bp, Homo sapiens
cttgtagactgctacaaaccaacagagttatctgatgatggccgctatgt

SEQ ID NO: 406395 - DNA, 82 bp, Homo sapiens
tgtctttacctcagagaaagcaaaccaggaggaggacatccctgtgaagtgcctggaagcagcgagccctttatgacgcaag

SEQ ID NO: 406396 - DNA, 100 bp, Homo sapiens
gaaagcagaggctcagagcttggagacagacggtgaaagaaaagatgttgtcccggttaagagtagtttccaccacttgtactttggcatgtcgacattt

SEQ ID NO: 406397 - DNA, 90 bp, Homo sapiens
ctcagcttgatgatgtatctcagatgcttcaggactgccccaaggcccgcagggaggtggagctgcactggcgggcctcccagtgcccgc

SEQ ID NO: 406398 - DNA, 100 bp, Homo sapiens
aatgggtattgggcgtcactgtaataaggcgggactgtccaactacgggaaccctcgccatggcctgttgctgttcatgatggctggcatgacagtgtcc

SEQ ID NO: 406399 - DNA, 100 bp, Homo sapiens
agttttggtggcacgcagcctggggactctgcctcgtgccgctgagcctggcgcagatcgtatgctacctcttctattgaaggatgaactcctaatgccc

SEQ ID NO: 406400 - DNA, 90 bp, Homo sapiens
agatgctgtgagatccagagctaagactccacgacatcccggaagccgaaaaatgcgccgcgcggtgaggttctctagtccacgctcgca

SEQ ID NO: 406401 - DNA, 82 bp, Homo sapiens
caagagaaaaaggaagaaaaggagaaaagcacagctttgacgtggctctccaaagatggtaagtcaaatctcatggatgcca

SEQ ID NO: 406402 - DNA, 82 bp, Homo sapiens
accctgcccagcacgaccagctcatgcaggctttgccacaaatgtcagtgcagaactctggctggccccaccaagaagacag

SEQ ID NO: 406403 - DNA, 76 bp, Homo sapiens
gtgctggcgaagcggaggccggagaccaagccaccctggtagaacaagtaaaaagagtaaaagaaattgaagctat

SEQ ID NO: 406404 - DNA, 87 bp, Homo sapiens
aactttgtccttactcaagttctcagaagactcatctaactagacatatgcgtactcattcagttttgtttggctatgccaccacag

SEQ ID NO: 406405 - DNA, 83 bp, Homo sapiens
cctatttctacctgagcccgctgcagctctccgtgagcaacctgcaggatagctagcggccaggagaaatacagtggaaaatg

SEQ ID NO: 406406 - DNA, 100 bp, Homo sapiens
tgctagtgcaatgctgaaagaagttcaacctaggggtgtccgcaatgttgccagtgtctgtctgcagattggctacccaactgttgcatcagtaccccat

SEQ ID NO: 406407 - DNA, 82 bp, Homo sapiens
cgggctccaaggccgtcgccgaccgctacgctgtctactggaacagcagcaaccccagacaatgcagatcttcgtgaagact

SEQ ID NO: 406408 - DNA, 100 bp, Homo sapiens
agattgcgagggagcgatgcggtgcagcgcgggcgtctctggccgagcctctttttgtggaaaacgacagcagcagcagtggcctggaagacgccaccgc

SEQ ID NO: 406409 - DNA, 100 bp, Homo sapiens
atgaattcgaaaagcagttcaacgagaatgaagccatccaatggatgcaggaaaactgatatgctttcttcatcagcaagcagtcctgctcctgatcccg

SEQ ID NO: 406410 - DNA, 51 bp, Homo sapiens
gcctcatcacccggctgctggaggatgtaggtgcaaaaaactacagacatc

SEQ ID NO: 406411 - DNA, 75 bp, Homo sapiens
cagcctctgggtcctcggtcggtacagtctctgcacctcgcgccccagcagatatccacacagaagcagttcagg

SEQ ID NO: 406412 - DNA, 76 bp, Homo sapiens
taattttcatattacaaagttgggacgtgcttcatttaagggtgtaaaaccagtaagtgtacagcttaattctatg

SEQ ID NO: 406413 - DNA, 82 bp, Homo sapiens
acagattcgcagtggtcgcttcttctccttgtggggtgccgaggctcaggcagcatgacgacggagacctttgtgaaggata

SEQ ID NO: 406414 - DNA, 83 bp, Homo sapiens
gtggtcttgaaggacactgggatcctgtaacacaggtgctggttgccgaggagaacgtggacttccgcatccacgtggagaac

SEQ ID NO: 406415 - DNA, 75 bp, Homo sapiens
tgtgtgacaaaaaagctgcctatgaaagtctaatattagatggtggccacagatgtctttaattccaaaaacctg

SEQ ID NO: 406416 - DNA, 97 bp, Homo sapiens
agtgagcagtacgtgcctgatgtgttttataaggttaaatgggccagggaaaactatcaccataacattggctcaccatattgcttacggttagctt

SEQ ID NO: 406417 - DNA, 75 bp, Homo sapiens
cgccggcagcggcgggtccgggccccggggggtccaggattttccatctttgaccagaaatttgccaagccaaga

SEQ ID NO: 406418 - DNA, 74 bp, Homo sapiens
ctggttctggaatcctcagttcaagagctctcgatgttctgaagtatgaggaagttgacatggattcattagcc

SEQ ID NO: 406419 - DNA, 74 bp, Homo sapiens
ctcgaggctgctaagagactaaaggacagaaaaatggttcgtattgttcttacaaagacaaagagagatgcagc

SEQ ID NO: 406420 - DNA, 100 bp, Homo sapiens
tgaactctgtccagttttcaaaccacacaggtcttcgccttgatcgtgttctcctgcatctatggtgagggctacagcaatgcccacgagtctaagcaga

SEQ ID NO: 406421 - DNA, 75 bp, Homo sapiens
cgacgacgagatggtggaggaggcggtggaagctgaagacttacagtgagaaactggacaaagagcaagcagccc

SEQ ID NO: 406422 - DNA, 82 bp, Homo sapiens
tagatattcagaagaaggatgctgttaaaaggtctgagggtcatttatgcctgcccgttcgatatacacattcctttccaga

SEQ ID NO: 406423 - DNA, 100 bp, Homo sapiens
tcccgggcttcgtcggcgcgcaccgatttccgcatccggctccggacgcttccggtcttagctggacccgtctgggaggggcataaggaaatggtggcag

SEQ ID NO: 406424 - DNA, 50 bp, Homo sapiens
tgcgtgagaatagagaccaccgaggaaggaagcagccaccctcgccatgg

SEQ ID NO: 406425 - DNA, 100 bp, Homo sapiens
ccgatcagaatgccaaatgtgtttgcatgctggttgtattccctgaatgactataaaccacccatttcgaaagcgaaaatgacccaaattactaaggcag

SEQ ID NO: 406426 - DNA, 112 bp, Homo sapiens
cagcttgtgccctacatcatcgacctgcagtccatgcaccagtttcgccaggacacaggtttgatctgtggatgaaatgaatcatgattttcaagctcttgcattagaatct

SEQ ID NO: 406427 - DNA, 82 bp, Homo sapiens
aaaaagtcaccttgtctttccctagtactctgcaaacagggttaaagcacgaattgggagctctcagcgacatcaccagtca

SEQ ID NO: 406428 - DNA, 100 bp, Homo sapiens
tgcccgcgaccatggcctcctccgaggtggcgcggcacctgatgtatccagttaaagcaggcaatagatgaaaataaaaatgctcttcaaaaattaagca

SEQ ID NO: 406429 - DNA, 98 bp, Homo sapiens
gacagtggtatgaggaccccactctgccgcatctgcttccaggggccagaacagccatgaagatggacctacagctaaaaaattaaagactgagcaag

SEQ ID NO: 406430 - DNA, 98 bp, Homo sapiens
gagaaactacagactgatcaggccgaggcttctaaaccaacgaagatctgcctgcactgcaagtgtccccaggaggagcacatggtgacagtgatgcc

SEQ ID NO: 406431 - DNA, 97 bp, Homo sapiens
ttcaccctcagaaggtgaccaagttcatgctgtgtgctggacgctggacagggggcaaaagcacctgctcggcaacagttgcagcttttgcagctag

SEQ ID NO: 406432 - DNA, 82 bp, Homo sapiens
cccaggcgcgcagctgggcgcctccttcctgcaggccaggcctctggctgtacctggcagggagcagcctgccctgtctcac

SEQ ID NO: 406433 - DNA, 96 bp, Homo sapiens
ccttgggtgaaattgttaggcgtggagagggagtgatgtcttccagactcggtgctgtacccgccaaaatgcatccgatgcagatttatggctcct

SEQ ID NO: 406434 - DNA, 101 bp, Homo sapiens
cagtaagcgggattttatgctgatcacaaacaaatccttgaaagaagaagatggagaagaaatagttacctatgatcgaacttttaacttgctgtgaagaa

SEQ ID NO: 406435 - DNA, 100 bp, Homo sapiens
ctgcaggccgagaagcgggcagccgagaaggtgtccgaggcccgcaaaagaggaggaagccaagaatctggtgagcgaagccatcgcagctggcatcttc

SEQ ID NO: 406436 - DNA, 50 bp, Homo sapiens
ctcacttcttacagattgcaaccctggaaactcttatcactactattgat

SEQ ID NO: 406437 - DNA, 98 bp, Homo sapiens
ggggccgtcttcccggcgagtccgcgacggtcgccgcccacggcgagttgcaggaggccagagaactggaaaaaccaatccagtcaaaaccccagtcc

SEQ ID NO: 406438 - DNA, 75 bp, Homo sapiens
accccagtcggtgctccggggaggtcacctgacgaggagatgaagatctccttcaacgacaaaagcctgcagacc

SEQ ID NO: 406439 - DNA, 100 bp, Homo sapiens
cctcctggccctgactctgctcctgctggccggattcctgcactcggacttagagctggacacaccacgatgttccacaggagcccgtgcccacgctgtg

SEQ ID NO: 406440 - DNA, 74 bp, Homo sapiens
gtttaacctttattgtggtggagtccaccccgctgtgctttctgaaacaaaggtcttcactgcctcatctgctc

SEQ ID NO: 406441 - DNA, 75 bp, Homo sapiens
agaaccagatgtcaaaactgatttcagaaatgcatagttttatccagaaacctttcaacgaagtctaaaaatagg

SEQ ID NO: 406442 - DNA, 82 bp, Homo sapiens
tctccagaagctgctgtttggaaaggtggcaaaggatagcagcagatggagacctcacagacacggtcagtggtccccgctc

SEQ ID NO: 406443 - DNA, 75 bp, Homo sapiens
cctgtcattgtggccatggacggtgaccaaaagccagccccactgtgagttgaactctttcgtgttgaccggcca

SEQ ID NO: 406444 - DNA, 50 bp, Homo sapiens
aaaggagtcagggatggctcttcctcagcatccagtcctggatgagccaa

SEQ ID NO: 406445 - DNA, 83 bp, Homo sapiens
cagcagggcgttggctatgtgcccatcacagacgaagttatacggaagcgtctcctcattgatggagatggtgctggagatga

SEQ ID NO: 406446 - DNA, 83 bp, Homo sapiens
ggaccttggacattcagacttcagaatgagcggggatgatgaggagtaccagcgcatctacaccacgaagatcaagccacggc

SEQ ID NO: 406447 - DNA, 75 bp, Homo sapiens
cagaattgcaaagatgcatgagggctttttggattttggaactggggactcaaagtcaagtgcttcttacggcat

SEQ ID NO: 406448 - DNA, 96 bp, Homo sapiens
cttgtatctcaacaccctgagtgcggatttctgctatgatgacaggagctgtggctaaaggaagtggaggggccgtgggatgcggagagccgaggg

SEQ ID NO: 406449 - DNA, 130 bp, Homo sapiens
cccactacctcctcgtgctcagcctggcgccggagctgaaacacgacgtgaagtaacaaatgtggcaattattttggatctatcacctgtcatcataactggcttctgcttgtcatccacacaacaccag

SEQ ID NO: 406450 - DNA, 87 bp, Homo sapiens
tccgtcgcacccaccatgatggaagacgacgggcagccccggactctgaggagacatcacagctttcccagatcgggaggaaaaata

SEQ ID NO: 406451 - DNA, 82 bp, Homo sapiens
ggcggaacccgtgggcctgtggactgcagcctcggcggtcagcaggccagaagcggactcctagaagaggggagcagcaagg

SEQ ID NO: 406452 - DNA, 90 bp, Homo sapiens
agttaatccaggtgagactttcacaataagagcagaggatggaacacttcagtgcattcaagtactatactggcaattgctggagaagat

SEQ ID NO: 406453 - DNA, 100 bp, Homo sapiens
attcagcagcccatgtcctatgacaatctcacccagaggctaacggtggaggcggcccagttcatacagcggtggcatttttctgaagttgttcattaag

SEQ ID NO: 406454 - DNA, 82 bp, Homo sapiens
gcaccagatgtaccggaccctgttcttcaggacacaccagcccctcggataccacttggccactcccgctgaggccactccc

SEQ ID NO: 406455 - DNA, 100 bp, Homo sapiens
aagctcaacaaaattaacgatcgttggcaacatctttttgatgtcatcggatcaagcatgatgccttcttctgtagagtgggcgctttgcagaatacgtg

SEQ ID NO: 406456 - DNA, 98 bp, Homo sapiens
ccacttccggcaccgcggggcccggggctccggcgcgcccggtgacggcggagaggcgccccccgcagcaggtgctggagaatctggtaaaagcacca

SEQ ID NO: 406457 - DNA, 100 bp, Homo sapiens
aagcctggaggaggggaggagggccactgggctcccagcagcccaggttcagagccactgctggtgaagctggtctcggagctgacaccactcactgtcc

SEQ ID NO: 406458 - DNA, 136 bp, Homo sapiens
cgagacctgggtggtgggctggattcaggcgtgcaatcagatggagttcttcaacacctacagcgacctgggcatgcccagcgctggcgcagtgagaacttcgagagacccgtggacctggagggctctggggatg

SEQ ID NO: 406459 - DNA, 80 bp, Homo sapiens
ctccagacgtcccccagcccaggcgagtcggctctattaccaggttttaaacttcgccatgatcgtgtcttctgcactca

SEQ ID NO: 406460 - DNA, 101 bp, Homo sapiens
aagagctcagacacaaagcccaggtgcctggacactctgatgaccacagattccaggtgcagctaaatcaagtccagcagctaaaccaggatccacacctt

SEQ ID NO: 406461 - DNA, 74 bp, Homo sapiens
gaaagttcacacagaccaaattggactagctttgctgaagaatgaaatgcttccagagcagttgtagcgcagca

SEQ ID NO: 406462 - DNA, 100 bp, Homo sapiens
gtacaatccagtactgccaggccaacaggcatttttaaacaagttggttagtctgctgctaattggaattgctgcgtggggcattggcttcgggctgatt

SEQ ID NO: 406463 - DNA, 107 bp, Homo sapiens
tccgcgggaagatggcggcgccgctcatccccctctcccagcagatcgcccaggaccacaccgcagcgtaactgcaggcctctcagcgaaaaagggggaaagcaaag

SEQ ID NO: 406464 - DNA, 75 bp, Homo sapiens
ctccgccctggggtcattgtcagggccatcctaggttttgtgaataagcaacaggcccacgacctgctcatcaac

SEQ ID NO: 406465 - DNA, 75 bp, Homo sapiens
gggtaccggccgtggaagcggccaccgactactgtcagcagctgtgccaggtgctgactgggttacttttttaaa

SEQ ID NO: 406466 - DNA, 90 bp, Homo sapiens
gtatagtgatgaagttgaattgaaggttcttccagagccaaggattgtcaccagtgaagaggtcattattcgagacagccctgttctccc

SEQ ID NO: 406467 - DNA, 83 bp, Homo sapiens
tgatccgggagagtgagagctccccaggggagttctctgtgtctgtgaaatgacagatttgaagatctggaagaggcaaatcc

SEQ ID NO: 406468 - DNA, 100 bp, Homo sapiens
cttccttcagcagcgcaggcggtggtccctgaggcccgtggaaggagtcaaacttgcgggaattttgcaggactcgggtcaagctggaaagcctggaaga

SEQ ID NO: 406469 - DNA, 75 bp, Homo sapiens
gatccctatatgtatattgcaagagaatctatgtactttcatcagcgcggccagtaagtttgcacagctccagtg

SEQ ID NO: 406470 - DNA, 75 bp, Homo sapiens
ctccagagctcgctttaccccggggaatgcaggatggcacatttcctagaggcagaatcctacaacttccactcc

SEQ ID NO: 406471 - DNA, 96 bp, Homo sapiens
tattgctggcattccacaatccatcattgagtgtgtcaaacagatctgcgtggtcatgttggagctactgtgtgaagacattcacaggacacagag

SEQ ID NO: 406472 - DNA, 100 bp, Homo sapiens
cgccccgcgtcatgcggctcctcggctggtggcaagtattgctgtgggtgctgggacttcccgtccgcggcgtggaggtgtggtcccggaacagcaagcc

SEQ ID NO: 406473 - DNA, 100 bp, Homo sapiens
tttcggctcagctggaggaggccagctctacaggcggtcatggaactaaaggagtgtttgagcttctgtccggatggcggagaaccaaagagaacttgcc

SEQ ID NO: 406474 - DNA, 87 bp, Homo sapiens
tacacaggaactttaaatcttgacaggttacacctatgtttgaggattggactactattgattggtatcgatttttctgtttatggg

SEQ ID NO: 406475 - DNA, 83 bp, Homo sapiens
caacaatgcaaggaggtagacatccttatcagcacagcacttattccaggatgaccatgaaagctgtggttctaattctacca

SEQ ID NO: 406476 - DNA, 75 bp, Homo sapiens
gaaatagcgcggctgtgcaagtacctgccagagaacgacctgaaggcctggagctgctgaagactgctattggga

SEQ ID NO: 406477 - DNA, 100 bp, Homo sapiens
aaaaacagactctcctccctcaatagtgaagtgtccaccctccggaacacaaggcactgaacttaccttcaactacaacctagaatgtcttgggaatgga

SEQ ID NO: 406478 - DNA, 50 bp, Homo sapiens
cttccggccgcagatgtcccagtgtctgcgagattaatctctcatggccg

SEQ ID NO: 406479 - DNA, 90 bp, Homo sapiens
caagaagaccattcagatgggatctttccggatcaatccagatggcagccagtcagtggtggaggtggcacatttagaacgaacagggca

SEQ ID NO: 406480 - DNA, 75 bp, Homo sapiens
tctgtctgagatgtacgctaagactgaacaggatattcagagaagttcttgtggggtgatcagccccagatttga

SEQ ID NO: 406481 - DNA, 90 bp, Homo sapiens
tgacacttgggaacctccacgacatgtgaaacggaagctgtctaaatcagatgactgaaatgtcatccatctccagccccacctgaccag

SEQ ID NO: 406482 - DNA, 74 bp, Homo sapiens
ggcggtagcggcagtggcggcgcgtaggaggcggtgatggctcagtgttccgagacttggttattaagtacggt

SEQ ID NO: 406483 - DNA, 98 bp, Homo sapiens
agacctgccaatttaccagagataattgataacaccctgtaacagctgatttctgatgaagaattgaaaagaagagtagctgaggagctggcattgga

SEQ ID NO: 406484 - DNA, 75 bp, Homo sapiens
gtccatcgcggagaggtaccttgcacagtgacctctgcatctgttatcaatactctggctgaccatcatcatcgt

SEQ ID NO: 406485 - DNA, 90 bp, Homo sapiens
caccgacatggaacagggactcactgggggatcgaggccatcaagctacagatggtcttacaaatggaaccccaaatgagctcaattcac

SEQ ID NO: 406486 - DNA, 75 bp, Homo sapiens
cgcgtccggagtccccgtggccagctagtgtcagcagtgggatacctgcgcttgaaggacatcatccaccgtgac

SEQ ID NO: 406487 - DNA, 75 bp, Homo sapiens
tcagcatggaggctgctgggcaggtcatgagtcaccatggttggactccatgaaagaattgcacaaaacaaatcg

SEQ ID NO: 406488 - DNA, 50 bp, Homo sapiens
aaacagctgaagaaggaacaaggtgtattctggaggtcgaatggtcacat

SEQ ID NO: 406489 - DNA, 100 bp, Homo sapiens
tgataacctgtggatttccagcaaactccttagccatgatcttccgtacactcacgtggaagctgagtgtcctttcctgacttttgacgacctcctgaac

SEQ ID NO: 406490 - DNA, 83 bp, Homo sapiens
caagagccccatctcccagctggactgcctgttaccggtattgtaagaacaagccgtacccaaagtctcgcttctgccgaggt

SEQ ID NO: 406491 - DNA, 75 bp, Homo sapiens
cattttatgatttactggatgaactgataaaacccaccagtctagggccatgtttatgagtggactaagtgaaag

SEQ ID NO: 406492 - DNA, 75 bp, Homo sapiens
ggtccctcactatcgacaagctctagacatgatcttggacctggagcctgattccctcccaggctgtccctcgcc

SEQ ID NO: 406493 - DNA, 101 bp, Homo sapiens
ggagatccacagctaagatgccaggaccccctgggaagcctagaaaaatggtatggcacagtcacaagggtgggtgaaaagatacatcaaggccttttgta

SEQ ID NO: 406494 - DNA, 75 bp, Homo sapiens
ttgaagcttggaattacatagctggaaaggatcttacaggtacaagaatattccacagatgtcctttgatgatac

SEQ ID NO: 406495 - DNA, 101 bp, Homo sapiens
ggcagcgctcctggcgctgctggctgcgctctgcccggcgagtcgggctctggaggaaaagaaagatcaccacgcttattaatcataaagataataccaaa

SEQ ID NO: 406496 - DNA, 100 bp, Homo sapiens
ggtgtcaaggaaggatataagttttacccacctaaagtggagttgtttttcaaggatggccaggccatgttatgggatctcaacgaaggcaaacaccttt

SEQ ID NO: 406497 - DNA, 88 bp, Homo sapiens
tgaacgaattttctttcgatggcattaccagagtatagatatgttgatgatgtgatcagccgcattgacaggatgtttcctgaaatgt

SEQ ID NO: 406498 - DNA, 100 bp, Homo sapiens
ccagaaggcttatgaggatggctgcaagactgtcgacctaaagcctgactggggcaaggatggccatgagctacccccaccaattgcctttgatgttgaa

SEQ ID NO: 406499 - DNA, 138 bp, Homo sapiens
ctgcggaccgcggcggaggacgcgcccggcgcccctgagccggccgagcggcgacggaccgcgagatgttcctcctgctgatcaagagaagctttttatccagaagttacgtcagtgttgcgtcctctttgactttgt

SEQ ID NO: 406500 - DNA, 100 bp, Homo sapiens
gtagctggccatcacaactggattgtagctgcatatgcccattttgctgtgtgttacagaagtggaatgttagtcagaccaagattcgcatcatctcaac

SEQ ID NO: 406501 - DNA, 83 bp, Homo sapiens
ctggcgtgcgccagaggatccgcaaagtgctgaacagggacttcagtactagtgctaataacatccagattgataaaaccaag

SEQ ID NO: 406502 - DNA, 100 bp, Homo sapiens
ggtgtatttattgacagacaaaacagtgagatggaagattttcgaggtatagcagaagaatcatttccaagctttctcaccaattcattatttggtaaca

SEQ ID NO: 406503 - DNA, 96 bp, Homo sapiens
tagcagctgcctgccagaatggaagcatacagatctgggaccgaaatttgactgcaagacatctgtatagattctgcttcatccgtgagagagaat

SEQ ID NO: 406504 - DNA, 76 bp, Homo sapiens
tccgcccgggctacgctcctccatcacgtggatgagttccacccgttcatcgaggccctgctgcctcacgtccgcg

SEQ ID NO: 406505 - DNA, 100 bp, Homo sapiens
cctctgacagcgaagactccgaaacagttacagaatgtctgaaggggacagtgtgggagaatccgtccatgggaaaccttcggtggtgtacagatttttc

SEQ ID NO: 406506 - DNA, 80 bp, Homo sapiens
gaagaagcatcgttaaagtctctcttcaccctgccgtcatgtctaagtcagagggatcatagacggtatttctatgtaaa

SEQ ID NO: 406507 - DNA, 75 bp, Homo sapiens
cccaattctatggatcccacacgacaacaaggccactgtgcagatggagggcgggaagctggtggtgaatttccc

SEQ ID NO: 406508 - DNA, 90 bp, Homo sapiens
agattttgcattggatattcgcatgcctggggttacacctaaacaggtcaacgaagtgacggtggaacagctggtgcagcagtaccccca

SEQ ID NO: 406509 - DNA, 83 bp, Homo sapiens
gggagggtccgagccagccgctgttttgccggaggagcccctcaggccgacttctgtttcctgctctcgacaagggctggtgg

SEQ ID NO: 406510 - DNA, 96 bp, Homo sapiens
tttaaggaaacttgcagagaatgaaatcactttgtgtcaaaaagaaataactcagctgaagcatcaggtatgcagtgccattcagaatcaggattt

SEQ ID NO: 406511 - DNA, 75 bp, Homo sapiens
ccagtggacctgattgggtaactgtgattcccaggagaataaaaggcataatcaccagcaacacccgggacaata

SEQ ID NO: 406512 - DNA, 101 bp, Homo sapiens
ctctgatcatgggcccatgtgctggtggggccgtctactccccagccctaacagacttcacgttcatggtaaaggccttcatgccccgaggactagcagac

SEQ ID NO: 406513 - DNA, 101 bp, Homo sapiens
cggagccaggggcccgagggcggggaccggcggcgctggaggagcgaggcagctgtactaggactgggaacggataagctccgaagaagtatgcctaacct

SEQ ID NO: 406514 - DNA, 111 bp, Homo sapiens
acctccagtaagggagggcaagaagatatgaacctgagccttcagtcaagaccctccagcttgcctgttgtgcacagggacctgaagcccagcaacatcctgtatgtggac

SEQ ID NO: 406515 - DNA, 101 bp, Homo sapiens
ctgcacacacccgtgcagccactaaattcttctcccagtctccgggcgcaagtgcctccccagtttatttccccccagatggagtttcactcttgttgccc

SEQ ID NO: 406516 - DNA, 90 bp, Homo sapiens
cagcctcagcctacgattatggctcctcccatgggacttaaccaccaccatgtcgagcaaaagaacaaagaccaagaccaagaagcgccc

SEQ ID NO: 406517 - DNA, 98 bp, Homo sapiens
aaaacgagaggctcaccgcagtcgtgcaggatctgaaggagattgtatctgctgtacagtattgtcatcaaaagtacattgttcaccgtgatcttaag

SEQ ID NO: 406518 - DNA, 80 bp, Homo sapiens
gcgaatttttggagcatctccacccaggaacctcgccatccagaaaattcagaaggagctggcggacatcactttagacc

SEQ ID NO: 406519 - DNA, 115 bp, Homo sapiens
ggcagccacgtgtgctgggcctggctccctggctggccagcctctgcttggcatccccttgctggacagtggctgtggccgctacctgtctgaggaacccgagccctacctggca

SEQ ID NO: 406520 - DNA, 80 bp, Homo sapiens
gcccctgccgtgtggacccgtaaaataaaatggagatcctgaaggagctagacgagtgctacgagcgcttcagtcgcgag

SEQ ID NO: 406521 - DNA, 74 bp, Homo sapiens
aaataccagagtcaggcccggaaggcaatataaagtcctggttcactctcaggaacgagagctgacccagttaa

SEQ ID NO: 406522 - DNA, 90 bp, Homo sapiens
gcccctgttgcgatggcgcagaaaccccgttgacaaggcactgctttttcatgacggctgacagataaggcagtgaaggactattccgct

SEQ ID NO: 406523 - DNA, 100 bp, Homo sapiens
tggactatctgacaagtaaaattaaaagtcgtcttggagacaaggaagcagttctcaacaggaggaacatatgcagcagaaaaaagaggaggaagaagtt

SEQ ID NO: 406524 - DNA, 90 bp, Homo sapiens
aacttgccaatgtgcaaagctgcagaaaccacagtggtagagattgggaaaatgaggtacgttagtgttcgcgattttaaaggcaaagtg

SEQ ID NO: 406525 - DNA, 100 bp, Homo sapiens
gccttcgagatgaaggagttgccgcagctggtggcctcagtcatcgagaggtattttgaaggtggcgtctcatctgtctacctctgggatctggatcatg

SEQ ID NO: 406526 - DNA, 74 bp, Homo sapiens
gtttctactaagatgacatcatacatggctattgatggcagtgctcttattcatcaataagctgcagccaggct

SEQ ID NO: 406527 - DNA, 75 bp, Homo sapiens
tgacggtggccgtgaagaccttgaagggctccacgtgttccccacgtttgtggcgtacgagctcacggtgctggt

SEQ ID NO: 406528 - DNA, 137 bp, Homo sapiens
gcgacgggatggctaccttttccaattgctgcggattgctgatgcccacttggacagagtggccactggagaatgcacggcaaccgtggggaagaggagcagtacgaaattctccgtggctacccagacctgccaga

SEQ ID NO: 406529 - DNA, 100 bp, Homo sapiens
cgggatcccagcctcaggcgtgcgcggacggtgtgcggtttgccagtgctctgagcaagttcgtggaggagcagaacctgaaggacctgcgcgtgtggac

SEQ ID NO: 406530 - DNA, 101 bp, Homo sapiens
ctgttctcagcccattggaaggcaccaagatgactgtgaataatctgcaccctcgagtcactgaggaggacattgtttctctcatcacttttgtgaacaag

SEQ ID NO: 406531 - DNA, 100 bp, Homo sapiens
tggaggggtctgcattaactgtcaggttatcaatactctggctgaccatcatcatcgtgggactgactttggtggaagtccttggttacatgtcattatt

SEQ ID NO: 406532 - DNA, 102 bp, Homo sapiens
gagctgcagcagagggagcttgccttgaaggacaagaacagcgccgtcaccagcaggaccgaaagttaaccaaagctgagcagcaaagattcaaggaagaag

SEQ ID NO: 406533 - DNA, 90 bp, Homo sapiens
gcttgctctactagtggaaattctaatctttcacagacacagttctcctgtgcctcctgttggctctctttgcatctggcctcatccacc

SEQ ID NO: 406534 - DNA, 75 bp, Homo sapiens
ttgtagcatttagggcaaggtatcatctggtggataaagatcatgacagtcaccaggagactaaagtccatcaaa

SEQ ID NO: 406535 - DNA, 83 bp, Homo sapiens
gaagaattaaaagaaaagctttcagcactcaaattcaagaaatccatggtgaaaggtttggattcctatgaagaaaaggagga

SEQ ID NO: 406536 - DNA, 100 bp, Homo sapiens
gaagtcatcctgggtatgggctacaaagagaacgatctctcaaaggccttggttctgacagaaattggccccaaacgtgaccctgcgaccctgaagctgt

SEQ ID NO: 406537 - DNA, 74 bp, Homo sapiens
cgggtcttgggtcctccgagagcagcagcgcctgcacgtggaatgggcgtccctgcagcctgtctgtgcacatc

SEQ ID NO: 406538 - DNA, 100 bp, Homo sapiens
tgacatttaattttagggtcctttatatagaagggagagtaggtccccgagacagcagcaagatggggattctgtacatcttggtccccagcatcgcaat

SEQ ID NO: 406539 - DNA, 75 bp, Homo sapiens
gaaaatgtaaaggccaagatccaggataaggaaggagacagtgtttcacaaaatgattttccttctgaagctccc

SEQ ID NO: 406540 - DNA, 114 bp, Homo sapiens
gctcaaccgcttcgtgcaactctccgggcggccgcacctgccaggtgtcatggagaaactccagctgggcccagagattctgcagcgggaaaatccaaggcttatttatgccag

SEQ ID NO: 406541 - DNA, 100 bp, Homo sapiens
cctgaaaagtcgcagcgagctggagccgccggaggttcaggaagatttgactgaagagaaaaaaagggaactggagcataatgctgaagagacctatggt

SEQ ID NO: 406542 - DNA, 98 bp, Homo sapiens
aatccttgaattggctcggtatttccttaagcatggcccaaaaaagagtatgaagctgagcagcctccctttccagaaggatataaagtcaaacagga

SEQ ID NO: 406543 - DNA, 98 bp, Homo sapiens
acaccccactcattgggcgcgagtccccgccgccctcatctgcagggcaggcactcgggaagggaagatggatgtaaagtgtgggagaccgaggacac

SEQ ID NO: 406544 - DNA, 82 bp, Homo sapiens
cccccggggctaaaatggaagcacctgcgggatacagtggagctacaacttctgaaggagacggggttttgccacattggcc

SEQ ID NO: 406545 - DNA, 90 bp, Homo sapiens
ccttgactccttggtggttccctggccgcggcgaccggtggtcccacgtccagccgggctcagtgaggcatataaaacctttgctaaccg

SEQ ID NO: 406546 - DNA, 50 bp, Homo sapiens
aaactcatctcctgggtgactggatgtaaatgaagaccctggagaagatg

SEQ ID NO: 406547 - DNA, 90 bp, Homo sapiens
tttagagctgtttatgaagcactgagaaatgaggtcgagttgtgtcgtgttagcagtcaagagaagctgggcctgacagtctgttaccga

SEQ ID NO: 406548 - DNA, 100 bp, Homo sapiens
ctcattgacaaaacacaggaaccatttagcgtcagaaataagccgttttttgacatctgtacttcaagaaaggtctcgacacaggcgattttcttatagc

SEQ ID NO: 406549 - DNA, 75 bp, Homo sapiens
cagaaactaacccaacagcagaaagcgggcccgataaaagtgaaggatgtaatagatcgtggcccttcaatttag

SEQ ID NO: 406550 - DNA, 97 bp, Homo sapiens
agccagagagagactgaggtctgatgacatcacttgagccctgcagacttttcatttacgacaatctccgggaaggggcagagcagaaggtggtatt

SEQ ID NO: 406551 - DNA, 90 bp, Homo sapiens
ctttgctgctagaaacctaagcatgccggatctggaaaacaggtcgtcaaagtcctacattttagctttcagtgctgaacttccttctcc

SEQ ID NO: 406552 - DNA, 100 bp, Homo sapiens
ccgctgccgggcaccgaggaccagctcaatgacagatgggcggacaatttcatggccgagggctgtggagggagcaaggagcacagcttccagcatccct

SEQ ID NO: 406553 - DNA, 90 bp, Homo sapiens
cgaaccgggggagcgaggcacgtctgcagatctccaggggagcccaccagcctagtcaacatggcctcggaagacattgccaagctggca

SEQ ID NO: 406554 - DNA, 87 bp, Homo sapiens
caaaaccagctaaacctgatgagaaaggagagatgcaggtgccagcgagatttcagattcctgtaaacctctaaagaaaaggagtcg

SEQ ID NO: 406555 - DNA, 50 bp, Homo sapiens
aggaatacaagctctgctgtggaaatgtgggtaattccagaattgattgg

SEQ ID NO: 406556 - DNA, 100 bp, Homo sapiens
aatatcgacttcatgagatggacagacagaattgggaagcacgtctactgctggagaggtcacatgctgccaagtgcccagacattgccacccagctggc

SEQ ID NO: 406557 - DNA, 100 bp, Homo sapiens
ctggattttttaactgaagatagtgcctttcagccctaccaggcaccagaatttcctgagtttgccactaaagtccaggaagctatcaattccctcgggg

SEQ ID NO: 406558 - DNA, 100 bp, Homo sapiens
tgtgacaaccaggtctacgtgtatgtgtgtgccagcgatgtccccatccgccgccgagaggaggcctatgagaatcaggactatggctatgtacagacca

SEQ ID NO: 406559 - DNA, 100 bp, Homo sapiens
acggacaagcacagtcttcggaagttgcagagcttgaagtgaaaaccagagaaaaattagaagctgctaagaaaaaaacaagctttgagattgcagagct

SEQ ID NO: 406560 - DNA, 75 bp, Homo sapiens
gttttacaagatttaacctgtcatcaagacctgggattttggtggctcagagcccctacctcccacacagtggag

SEQ ID NO: 406561 - DNA, 82 bp, Homo sapiens
ggagggtcgggactcggaggaggggccaaggtgtggctcctctgaagacctgcacgagttttccggacagacttgatcacag

SEQ ID NO: 406562 - DNA, 100 bp, Homo sapiens
gcagttcgtgaagtctgtgaggaggtcggggtatgataggtcggggaagagggggctttggaggccgaggccgaggccgtggacgagggagaggtgccct

SEQ ID NO: 406563 - DNA, 74 bp, Homo sapiens
catccatatcataagtggaattttggagatattcaaaggtgcggacgaggggctcaataaaaaggcgccctccc

SEQ ID NO: 406564 - DNA, 75 bp, Homo sapiens
gttggttgtcgcccatgatctgatccggaagatgtcacctgaacaagatcactcaaggtgaaggataatctacta

SEQ ID NO: 406565 - DNA, 105 bp, Homo sapiens
tgctgctgctgctgctgctgctggtggcccctttgcagagattgagaatttatcacaagttgatggtcctcaagtggaagagcaacttctttcaaccacagttca

SEQ ID NO: 406566 - DNA, 98 bp, Homo sapiens
ggagcagatgggagccgcctcccgcgtgggcgtcccggagcctggccagctgcacttcaaccagaatgacagcccatatcaaggcggtgtattctttt

SEQ ID NO: 406567 - DNA, 100 bp, Homo sapiens
gggagcttccgggagggcggctcgcagctccctcgtgaaagatgcttctgttcctctgattgatgttacaaacctccctactcctcgaaaattccttgat

SEQ ID NO: 406568 - DNA, 80 bp, Homo sapiens
aattgaatgtggctggaaggatcagttgaaggcacactgtaaagctattgacctgaaaagtggttctggaaaagtgtacc

SEQ ID NO: 406569 - DNA, 75 bp, Homo sapiens
cctcccaagtggctgggattacagaatgcccaggaaaaccatgggctggctgtgcccaccccctcggttccagat

SEQ ID NO: 406570 - DNA, 75 bp, Homo sapiens
tatcagagccagaggaacatttggagtggcggagcgagggctactgcacagctagcagagtcgtggcgaggagga

SEQ ID NO: 406571 - DNA, 83 bp, Homo sapiens
agctccggcgcatcatggcggctggccgggcccaggtcccttcctccaaaaagcttgtggtgaaggggggcaaaaaaaagaag

SEQ ID NO: 406572 - DNA, 100 bp, Homo sapiens
gacctggccaaggccgttctgcggagaaaaggcatgctgggggcctcgccgaaccgcccagactcttcagggaaaagaaacctctgcgccatgagagcca

SEQ ID NO: 406573 - DNA, 75 bp, Homo sapiens
gatccttatggctcattatgacgtggagaaacatgcccctgattcagtgcctctgcttagctgtaacatgttaat

SEQ ID NO: 406574 - DNA, 101 bp, Homo sapiens
ttggagttccttaatgcatttggggaactttttgatcttcaagatgagtttcctgatggagtaaccctagcctcatgatgatcctgagacttgtcttgttg

SEQ ID NO: 406575 - DNA, 83 bp, Homo sapiens
ctcatacagtaatcggaagtacgagtctgacgaagacagcctgggcagctctggacggctggaggctctggcattcatcgccc

SEQ ID NO: 406576 - DNA, 74 bp, Homo sapiens
ttggcttctccttgcctgattgtttgcaggttgtcagagaagtacaggtttaatgatatccatgtaccaatccg

SEQ ID NO: 406577 - DNA, 97 bp, Homo sapiens
tactggaatgaaatgaaagtgaagaaaaatacagaatatcctctaaatttgccagttgaagatatacaatggagtctcggtctgtcgcccagcctgg

SEQ ID NO: 406578 - DNA, 90 bp, Homo sapiens
tagcagagtacgatactcaggtcaaagatgccttcaattaagttgcagagttctgatggagagatatttgaagttgatgtggaaattgcc

SEQ ID NO: 406579 - DNA, 90 bp, Homo sapiens
gggaggctctaggctccaagacgccgtcgcttgagaggctgacccgcggctgattgagtccctctcccagatgctgtccatgggcttctc

SEQ ID NO: 406580 - DNA, 100 bp, Homo sapiens
cttagatggagttttagaagtccgaaatgaacatttttggaccctaggttttggctcattgtatgagaataatgttatcactattgatctggttcaaaat

SEQ ID NO: 406581 - DNA, 90 bp, Homo sapiens
tttctgcggccgctgagggcgcgtctcccctccgccatgggtcatggaggacgctggcggcggcgaggagaccccggccccggaggcccc

SEQ ID NO: 406582 - DNA, 71 bp, Homo sapiens
gccgcatggaggccggctgaggagcgccgctgcctcgcctcggttggtgttcgaggaagagacattgttgt

SEQ ID NO: 406583 - DNA, 75 bp, Homo sapiens
tgatcgtcttcctcttcagccatccaggcgagtgttgtgtataaaggaagttgaaatcctgggccttatgtgtgt

SEQ ID NO: 406584 - DNA, 75 bp, Homo sapiens
gggaaaggagcacggcctgaagccggtggtgggcgaagtgtacgatcaagcttttcctccgcaaccatgtctgac

SEQ ID NO: 406585 - DNA, 100 bp, Homo sapiens
acaggactggctgatactacatattccagatggatctgtgccagttcagaagcaggcgagcctcttccctgatgaaaaagaagataacttgctgggtacc

SEQ ID NO: 406586 - DNA, 75 bp, Homo sapiens
gccgatccagcctgcggagcctgtggggcagatctccagtctatgtgctgaagaagcagcagcccaagagcagac

SEQ ID NO: 406587 - DNA, 83 bp, Homo sapiens
atggcgccaggacgaaggccctactgggcaagtgttcggctaatgaatgagttcactaatatgccagtacctccaaaaccccg

SEQ ID NO: 406588 - DNA, 90 bp, Homo sapiens
atccatctgactgctgccatggggctcaagacccggtgtggaggcaagctgggcttcctggccgttttttgcatgtctgacacccatgac

SEQ ID NO: 406589 - DNA, 101 bp, Homo sapiens
gcggctgcgggctgagcggcgagtttccgatttaaagctgagctgcgaggaaaatggcggcgggaggcaccgcctccaggacaacgtgcgcgaggacctct

SEQ ID NO: 406590 - DNA, 82 bp, Homo sapiens
cagagtgcagtcatgggccaccgcagcgccgtgccgtccctgcagtgacaccgaggtgctcctagccgtctgcaccagcgac

SEQ ID NO: 406591 - DNA, 82 bp, Homo sapiens
ctcaccgcccagcccaaaccaggagattgcgagggagcgatgcggtgcagcgcggtcagctggccgccggcacctgtgagat

SEQ ID NO: 406592 - DNA, 100 bp, Homo sapiens
tatacttcaaatcctacttataaagaagtctgctcaggggagttgctgagtcagcccagaccggaaggagtggcagagatcatttgccccaagaacggca

SEQ ID NO: 406593 - DNA, 75 bp, Homo sapiens
ggaggccgaggactcggagttcacctgcagggaaaaagaaatagtggtttcagacagtgcttcttcgggagccag

SEQ ID NO: 406594 - DNA, 100 bp, Homo sapiens
agagattggtgtttttgtgaggcagtgagacctaaggccctgctgctcctgggggccgccgccctggcctgcctcgccctggacctcctcttcctgctct

SEQ ID NO: 406595 - DNA, 100 bp, Homo sapiens
cgcttttctatggcgaatgcaacccgacgagggagtggggtgctaaaatgatgtattttctggacaagtcaaggcaggagaaagcaattgctatagccac

SEQ ID NO: 406596 - DNA, 75 bp, Homo sapiens
cgccgccgccgccgccgccgcccggaccccggcgcgctgaatgcaggcgggcgctaatattgacacctgctcaga

SEQ ID NO: 406597 - DNA, 82 bp, Homo sapiens
ttaaaacataaggatgtttcagttcctccatttaacagataacgaaggaggcccaacttcattcaataaggagcctgacgga

SEQ ID NO: 406598 - DNA, 75 bp, Homo sapiens
gcctcctcctcctcagtaacgcgggtgagaattatgaagatgatgacctagtaaattctgatgaggttatgaaga

SEQ ID NO: 406599 - DNA, 80 bp, Homo sapiens
acagttgttgcagcaagcgattcaggcctctgccttcagaagttacaagatgatcaattcaacctccacacagcctccag

SEQ ID NO: 406600 - DNA, 101 bp, Homo sapiens
cggcgctgctgctcgggctgctcttggagctttggggccatttggatcacacgatgttttttcaagattttagaccctttctaagtagcagtccactggac

SEQ ID NO: 406601 - DNA, 75 bp, Homo sapiens
agtcacagacctgcccaatgcctttgatggaccaattaccataataacaaatgtggcaattattttggatctatc

SEQ ID NO: 406602 - DNA, 75 bp, Homo sapiens
gttaaggacattccaggcagaggcaagcattgcattactttccagaataccagtggctggtggatttcacagtgg

SEQ ID NO: 406603 - DNA, 100 bp, Homo sapiens
gggagcagagcagcaactcacccagcacacaaaatggatctcttacgccgcagggccgtaggcagccatggcgcccagccggaatggcatggtcttgaag

SEQ ID NO: 406604 - DNA, 142 bp, Homo sapiens
gtgttacgcagtcggctagaagaagttcttggaagaagcttggagcgcttaaacaggctggagaccctggccgccattggagtgaatgtggtggaggcacttcaggaattctggcagatgaagcagtcccgtggtgctgact

SEQ ID NO: 406605 - DNA, 134 bp, Homo sapiens
ccgatatggaacccaagcagtggcgaagggaatcgcaaggctcttccctgaccattttctactgtccctgcgcgagggataggatgggatctgcactgatgattgaaacagcaagaaaccccacatgtcctaag

SEQ ID NO: 406606 - DNA, 100 bp, Homo sapiens
tctgaagaagttcatcgccaaaaaactcaacctttcatcctttaacgagatgcctgaaaacttcatgcctcctgttcccatcacatcaccaatcatgaac

SEQ ID NO: 406607 - DNA, 83 bp, Homo sapiens
cgtccatccatttcgtggttcacccgctgccgggcaccgaggaccagctcaatgacagaactcccccactggaaaggattctg

SEQ ID NO: 406608 - DNA, 96 bp, Homo sapiens
gtggcaagttgttctccgtaaccagaaacaggttcattcattgctgcagtgagaagaggagtttgttactttaaacagaggctgaagaaactatag

SEQ ID NO: 406609 - DNA, 102 bp, Homo sapiens
ccagaccctggagcctcagttggaagcagccgatccagcctgcggagcctgtggggcaggtggaagttaaacgagctgagcctcgggacagcaagagccaag

SEQ ID NO: 406610 - DNA, 100 bp, Homo sapiens
ctcgggaagagatgcgaggatgacaagcaaatggttatgagccttagagtttctgaactccaagtactgttgggctacgccgggagaaacaagcacggac

SEQ ID NO: 406611 - DNA, 75 bp, Homo sapiens
gccaacgccccggtggagaagctgaggtaagtaaggaggtctctgtaccatggctcgtacaaagcagactgcccg

SEQ ID NO: 406612 - DNA, 75 bp, Homo sapiens; identical to SEQ ID NO: 376343

SEQ ID NO: 406613 - DNA, 75 bp, Homo sapiens
cctactgttgcactgtctgctgttgaaactggcgatggaatatgagaggagccctctggaaagaaaaggacagac

SEQ ID NO: 406614 - DNA, 82 bp, Homo sapiens
gggtaatgaggatttgactgtgaagaaatctcctcagactgaaagttgcactgacagtggagcagaaaatgaaggtagttgt

SEQ ID NO: 406615 - DNA, 82 bp, Homo sapiens
ctgcgctggctccgtgaaccttagggacaacaccgggacacccgcgaggccggaaaatgctccgtggatggccgcgtgagac

SEQ ID NO: 406616 - DNA, 90 bp, Homo sapiens
ctgtgcttgccaggcctggctccagtgtcttcaaaaacaaacatatttaaaagattttacttctcatctccaggaagaaccagctaggag

SEQ ID NO: 406617 - DNA, 101 bp, Homo sapiens
ggacatcatttacagcaatattttaatttgtttgtaatgtatgccaatttagataaagtgaaatctttccgtgcagctctacaagaggaggaacaagccag

SEQ ID NO: 406618 - DNA, 90 bp, Homo sapiens
gcacactacagaactaaatatgcatgtgatctttgcagagctgtttcaacttccagcaccccctcacattgatgtgatgtacacaacact

SEQ ID NO: 406619 - DNA, 75 bp, Homo sapiens
actttggtttacatacaggaaaaactttccagccattggtgccaggaccattgacaccagaaatggaggcacggc

SEQ ID NO: 406620 - DNA, 100 bp, Homo sapiens
tgacattttgaagttacttttgaagcaaaacgtggatgtcgaagcagaggaaaaagcagttgatcctaagacacgtttacttatgtataaaatggtcaac

SEQ ID NO: 406621 - DNA, 100 bp, Homo sapiens
tttaagaaagtgctacgctatgaaggcttctttggactgtatagagaaagtggctctgaagatattgatatacttcctagtgggctggcttttatctcca

SEQ ID NO: 406622 - DNA, 106 bp, Homo sapiens
ggaagagaccacatcagaggcagacaaaaacctttccaagcaagcatgggacaccaagaaggtctgggacctcagtgacattgacaaggatgggcacttggatcga

SEQ ID NO: 406623 - DNA, 98 bp, Homo sapiens
tgagcctgacgcgggccgcgcgggtttccaatacttatctacaggaatcgccatgaccccagctctgagggaggcaacagcaaagggtatcagctttt

SEQ ID NO: 406624 - DNA, 125 bp, Homo sapiens
ccgcgtccgccccgcgagcacagagcctcgcctttgccgatccgccgcccgtccacacccgccgccaggttttaaaatcaaagatgggaaaatcggagaaaattgcccttccccatggccagctt

SEQ ID NO: 406625 - DNA, 82 bp, Homo sapiens
acatactatccgtttgttcaggaaccaccagtgacagaggacctgttgcaatgagagtggcaaaattagcaattaatcaagg

SEQ ID NO: 406626 - DNA, 118 bp, Homo sapiens
gaaggacgtggccactgtggccttctgcgacgcgcagtccacgcaggagatccatgagaagggaaagcaggcaggatgggagagtcgccgatagaaccacctcttccctgcctcctgg

SEQ ID NO: 406627 - DNA, 100 bp, Homo sapiens
gctcttcatggaaatgcattgtcagactggatacacgtctgtttaactacgcaaaaggtaatgctggcatggcttactgggaccctaagtgtggcgaagg

SEQ ID NO: 406628 - DNA, 99 bp, Homo sapiens
tgaaaaatgtaatcactcaatgggaggaaaagcaggtgatattctcagtggagaccaggacaaggaacagaaagacccttactttgtggagacccccta

SEQ ID NO: 406629 - DNA, 82 bp, Homo sapiens
gcagagatcagcaatccttggctcactgaggaggtttgctatatgttctcctttcagccaagacctttcaccagtgcagggg

SEQ ID NO: 406630 - DNA, 100 bp, Homo sapiens
gcgaggcgaccacgaaaacggtgaaggtcggaaccgacagcctcctccgagaagggacagaactgtaccgctctctttttggccagctccaccctcccga

SEQ ID NO: 406631 - DNA, 96 bp, Homo sapiens
agggagaaggaagaggtgtttgaaaagcgagggtgggtcctgggccccaacaactactacagttttgccagccagcagcagaagccggaagacacc

SEQ ID NO: 406632 - DNA, 80 bp, Homo sapiens
ggagcgcgtccccggggaaatgaggtgctggagaatctggtaaaagcaccattgtgaagcagatgaggatcctgcatgtt

SEQ ID NO: 406633 - DNA, 82 bp, Homo sapiens
cccaccctcccacacctccctgggcctgtcctcccaaagccaactctaaggagaggagaggaagagcagttcttggggcaga

SEQ ID NO: 406634 - DNA, 74 bp, Homo sapiens
cctaccctctgatgcaccaccagatgccaccacctcatccaccccagccagggccagatgcagatggctggaga

SEQ ID NO: 406635 - DNA, 75 bp, Homo sapiens
cacgcccccgtctctggtcctacctgggtccaaggccgatgtgtggatccaaacttctacagcaaaaacttactt

SEQ ID NO: 406636 - DNA, 100 bp, Homo sapiens
aagaagcagatcctgaaacacctgtcccgacaaatcttcctattttcaagctgaaagaatctactgttagaagaagatacagtgactttgaatggctgcg

SEQ ID NO: 406637 - DNA, 100 bp, Homo sapiens
ctggaaacaatggcatttacagaaagagtcaacagcagtggcaacagcatttttgaaacgttggggttgttggagtggttggattttccctggaattgag

SEQ ID NO: 406638 - DNA, 75 bp, Homo sapiens
cttgtttgtggatcgctgtgatcgtcacttgactgtgccctgtccacggtgcctcctgcatgtcctgctgccctg

SEQ ID NO: 406639 - DNA, 73 bp, Homo sapiens
cctacccgagtgtgcgaagctagccaagacgtgccaaatactggtgtaagcaaacctagagtttctgacgctg

SEQ ID NO: 406640 - DNA, 100 bp, Homo sapiens
ctgtgagatgtttcatcccaacaaaattacagaagacatccccgtgaagactttgaatatgaagactgtgtatgtttctgtgttaccaacaacagcagac

SEQ ID NO: 406641 - DNA, 90 bp, Homo sapiens
cgcgaagaggctggactcggattcgttgcctgaggcaatagccctctggaacaagacaattcatgtgagataagaaagaagagcccacaa

SEQ ID NO: 406642 - DNA, 100 bp, Homo sapiens
gatattatggctaataacacaacaagtttagggagtccatggccagaaaacttttggggcattcttacacagaatgaaccagtgtgcagcatcaaaagtt

SEQ ID NO: 406643 - DNA, 100 bp, Homo sapiens
ccccaagcgcagtccccggaagtgcgcgccggggccccagcaaagaatggactgctgaattatgaagtatttcagacccagtagtagaacatcactctgc

SEQ ID NO: 406644 - DNA, 82 bp, Homo sapiens
ccttacctgtcaccttggctctcccacccaatggagatggctctaatgcttactgaaacaaatgcaggtatcaagtgcttgg

SEQ ID NO: 406645 - DNA, 83 bp, Homo sapiens
gtgcactccgcacctcggggacattattgcgcgtggaacggctgcttttggaagtccacaggtcctggctaccctgggaagag

SEQ ID NO: 406646 - DNA, 90 bp, Homo sapiens
catgtccagaccaggtctcatgcttggtgcctggtgccagttgtgaaagattttcaagactatatggaacctgaagaaggttgtcaaggt

SEQ ID NO: 406647 - DNA, 100 bp, Homo sapiens
cctgcgtgaggccgcggagcgccagctcaatgaatgaaagtaagtgaacacagtctcctgccccttatgctggagcagtttccgtttctttatgtttctg

SEQ ID NO: 406648 - DNA, 83 bp, Homo sapiens
tgcggaacaggacgccctctgatgcccagctgagagccagcctggaggttacccagcagcaggccacccaggccgaaggccag

SEQ ID NO: 406649 - DNA, 100 bp, Homo sapiens
aagtaatggtgcaaagcctgaatctatgcatggaacattgaaaagtattgaagggcctccaaacttgggtataaacttgcctttgagcattaagcctgca

SEQ ID NO: 406650 - DNA, 90 bp, Homo sapiens
cttccgtgttcccttacaaccacaggatgaagaagtacctgagcaagaccggccgggaagcatgcttttcacttccactgcatctctcgc

SEQ ID NO: 406651 - DNA, 75 bp, Homo sapiens
cggtgccgagaagcagctgcgaggactaaaaacagcccttgtagaaagagatgatttctcatcagggaccagcag

SEQ ID NO: 406652 - DNA, 90 bp, Homo sapiens
tttttacaggtggaattagctcatacagcctaattttaatggccattagctttctacagccacgcaaaagagattctccattgcttaaag

SEQ ID NO: 406653 - DNA, 75 bp, Homo sapiens
ctgtagcattcgtgctatccctgggggttgcagctttgtataaggtttgggcaaaactacccctgatccttcagc

SEQ ID NO: 406654 - DNA, 96 bp, Homo sapiens
cttaaagagacaggacggtcgattggtctgaaattcttgaagagacagtacatgggctgcatcgaggttctccgctctatgcgctccctggacttt

SEQ ID NO: 406655 - DNA, 90 bp, Homo sapiens
cacaacaaaatgtttgagtcaattctgaaagctccggtattattctttgatagaaatccaataggttctttggcatggacacaagttcag

SEQ ID NO: 406656 - DNA, 98 bp, Homo sapiens
tattactgctggcaacagggctcaaatacagctggggccacaactttggtgaagaaggatatattcggatggcaagaaataaaggaaatcattgtggg

SEQ ID NO: 406657 - DNA, 98 bp, Homo sapiens
cgaccgcatgttcgacaagaatctgcaggacttggtccgcggcatccgtaaccacaaggaggacgaggttcattttccagacactgaaagagcagaat

SEQ ID NO: 406658 - DNA, 117 bp, Homo sapiens
ggaaattgccaaacaatctgtgactattaagaccatgttggaagcatcaaagctaagccagaagatttatcacattttcatcatcagctacaggattagaaaggaggctgggatgaa

SEQ ID NO: 406659 - DNA, 50 bp, Homo sapiens
aaggttctggtcttgcactaaggtggcttcgtggcccatgtggaaagcac

SEQ ID NO: 406660 - DNA, 76 bp, Homo sapiens
ccgacagccaggcccgggagaaaaaccaaggtgtatgttggtaacctgggaactggcgctggcaaaggagagttag

SEQ ID NO: 406661 - DNA, 100 bp, Homo sapiens
ggggatcaaagagcagtgggggttgctgacccagaggagagttctccaaacatgatcgtttactgcaaaggtacagagcagttattctccagactttgcc

SEQ ID NO: 406662 - DNA, 90 bp, Homo sapiens
gttcctggccagaagtaaaagcacagctgccttgtctggagaagcagattctggaacttttcaaagcctgactctcttcttgaaacagtg

SEQ ID NO: 406663 - DNA, 98 bp, Homo sapiens
gatccgcgggagctgcccggcagggcggagcctcccctcgcagatccagaatataagaagtttttagaaacctactgtgtggaggaagagaagaccag

SEQ ID NO: 406664 - DNA, 75 bp, Homo sapiens
gaaatatcttacctgatgaaggagagccaacagaccgttatggaacacctgaagagctacaagaactggtagaca

SEQ ID NO: 406665 - DNA, 100 bp, Homo sapiens
attagctaagaaagcagaggttaatacaatccctggctttgatggagtagtcaagatgtccggtctgtgctacgacagcaaaatgttccaggtgcatcag

SEQ ID NO: 406666 - DNA, 100 bp, Homo sapiens
cgccctctcgtgtgttccttgtggagctaaccagaggcaagatgcccgagattgtcactgctgttccaagggcacacgcagagggatttggaattcctgg

SEQ ID NO: 406667 - DNA, 90 bp, Homo sapiens
gttctaagtgccttaagagaggatcgcccaatccacatgcttttccagaaaaggcgacggcggattgacagaagtatgattggagagccc

SEQ ID NO: 406668 - DNA, 80 bp, Homo sapiens
gtggaagaaatccaggaacaactgtgtcagcagctagcccttttcctcaaggtatttctttaaatccagaacaatggagc

SEQ ID NO: 406669 - DNA, 78 bp, Homo sapiens
tgctcccggagggagacgcgctgccgaggagaacccagcggaggttggaaagaaccatgactgtattcaggaaggcac

SEQ ID NO: 406670 - DNA, 100 bp, Homo sapiens
gccgcgctccaaccgcctcctcctcctcagtaacgcggtaccattgtttgttgcaatgaccaaaacccatgtgatagcagcctcgaaagaagcattttat

SEQ ID NO: 406671 - DNA, 100 bp, Homo sapiens
gttgatttgaatcactatcgcatagggaagattgaaggatttgaggtactgaagaaagtgaaggctcataaagaactctcaaaggagatcaaaaggctga

SEQ ID NO: 406672 - DNA, 98 bp, Homo sapiens
caaagcaaatggagaatggcatgctggtgacggacagtgcagggaagcaactgcagagggtgattctgggggtccacttgtctgtaatggtgtgcttc

SEQ ID NO: 406673 - DNA, 83 bp, Homo sapiens
ctcctctcctcctcactctcctcgctcactgcacagtcccccttgccgtcccaagcaatggatgatttgatgctgtccccgga

SEQ ID NO: 406674 - DNA, 90 bp, Homo sapiens
ctgtgggagaagagtgtgacttcgagatgcgcctggagaaggacaggttctctgtcaacctggatgtgaagcacttctccccagaggaac

SEQ ID NO: 406675 - DNA, 75 bp, Homo sapiens
gccctgcgcaacatcaatctcatcgtgcagaaaagggagacattagagaagcaagtattttctctctggaggcag

SEQ ID NO: 406676 - DNA, 90 bp, Homo sapiens
agtgcatcaaaggtgtgaacacaggcctgaagaagtcagtgatttatagttcactaaaactgcacaaaatgtggaaagggtggctgagga

SEQ ID NO: 406677 - DNA, 75 bp, Homo sapiens
cttgacgaggctgcggtgtctgctgctattctccgagcttcgcaatgccgccttgctccgaaccttcagcttttt

SEQ ID NO: 406678 - DNA, 95 bp, Homo sapiens
ttaggtctgttagaggaagacgacgagtttgaagagttccctgccgaaggcctttctggagcaatgcattctcaagtgtttcctcacgctcattt

SEQ ID NO: 406679 - DNA, 100 bp, Homo sapiens
ggatctttacatgttgaatccttgcagcactaaaatttgagtctgaaaagtgtcgaagagacagttttcaggaacaacaagcaattattcctactttcca

SEQ ID NO: 406680 - DNA, 95 bp, Homo sapiens
gcgcttctggccgcgggaaggagaggatttgcatgggcaactgatttgtctacagacttagaaagtcaactctctgttagttgtaaatgttatga

SEQ ID NO: 406681 - DNA, 90 bp, Homo sapiens
ccctcctcacccgaacatcagggccctccagactcaggcgccccaacatatccatttgaggccctcttccgcagccagcactacgccctc

SEQ ID NO: 406682 - DNA, 75 bp, Homo sapiens
tggaagcaaccccttacagtgacagcccagaaacttgcaggacctgtgccgaattaaaattcgacaatgtatagg

SEQ ID NO: 406683 - DNA, 98 bp, Homo sapiens
cggcgcgcaccgttggcgctggacgcttcctccttggaagcgcctctccctcaggtaaaaagatggcctatcagaaggtccatgcagatcaaagagct

SEQ ID NO: 406684 - DNA, 82 bp, Homo sapiens
tgatggccagagagatgacgatcttaggtacaccaggggttggaaaaaccacactaggcaaagaacttgcgtcaaaatcagg

SEQ ID NO: 406685 - DNA, 88 bp, Homo sapiens
ccaacatgcctcaccctcatctatatcctttggcagctcacaggcgatccattttctcagcctattaaatttcccataaatggactct

SEQ ID NO: 406686 - DNA, 80 bp, Homo sapiens
taaactcccgggcctgcggacgctatgcacaggaactgtggctgcaccatctgtcttcatcttcccgccatctgatgagc

SEQ ID NO: 406687 - DNA, 75 bp, Homo sapiens
atgtagtattgatgaaaagagggactgccataacattcccaaaggggcaacaccctccactaaagagtcaagcca

SEQ ID NO: 406688 - DNA, 50 bp, Homo sapiens
ctggctgagggcagagactctcccggtcatcatcagatttgaaatattta

SEQ ID NO: 406689 - DNA, 98 bp, Homo sapiens
ggcacacaccccccgacaggcacgcacacccaccccacagtgcccggctcggctgcgttcctgggcttcccgatggactcgagtttttactatgtgag

SEQ ID NO: 406690 - DNA, 75 bp, Homo sapiens
gcacggcgaaaccttcaccttcagactctccagaaagagcaacagtaatggagtacatgagcactggaagtgaca

SEQ ID NO: 406691 - DNA, 75 bp, Homo sapiens
aactctttggaaatcatgggattcatactatagtaaagctttagccaaaactggacaagccaaggcatctgtagc

SEQ ID NO: 406692 - DNA, 90 bp, Homo sapiens
catcttccaagatccatctgccttctgcataggccaaacagggccaaataaacccacttggaattattcaacctttgctgaacttcttga

SEQ ID NO: 406693 - DNA, 98 bp, Homo sapiens
cctcatgaatctcatcgccaccatctttgtctttgcagtggtcatctatttccaggtggcaggtgtcacagctttagcctgtggaatgatagcagtag

SEQ ID NO: 406694 - DNA, 127 bp, Homo sapiens
agacaggcttccctccccctgatagcagatttgatgcctactgctttaaacgttggtcaaagaaaaagtgatgtatgaaaaagaggcaaaacaacaagaagaaaagattgaaaaaatgagagctgaa

SEQ ID NO: 406695 - DNA, 75 bp, Homo sapiens
gggagttcagaaaacagttccccctgcatgaaaagaatctgaattatccagaacagaaagttgtgactgttggac

SEQ ID NO: 406696 - DNA, 51 bp, Homo sapiens
tgaaacagtgtatcaaagtgtggactgagctgatacccaactcttgtgcaa

SEQ ID NO: 406697 - DNA, 125 bp, Homo sapiens
atctagtggaagcggcaagcagagaaaacctgccaatcaagatgagtatggcgatgaagaacgatacagatacagggaatatgcagaaagaggttatgagcgtcacagagcaagtcgagaaaaag

SEQ ID NO: 406698 - DNA, 83 bp, Homo sapiens
ctctgatgaagaagcttctccagaaaaaactacactgtctactgccaaggttcagcgtcttccatttctttcaagctcaaatc

SEQ ID NO: 406699 - DNA, 90 bp, Homo sapiens
gtcttgtatctctaattggaagcaaggaggatttctacgaaaagctggcagcttcaatcgccccagaaatatacgggcatgaagatgtga

SEQ ID NO: 406700 - DNA, 158 bp, Homo sapiens
tgtcgtctggtccctgttcaacaccctcttcttgaactggtgctgtctgggcttcatagcattcgcctactccgtgaagggtgtgaaggtcaaaggcctcatcctcatcagcccccagaaccctctgggtgatgtatactcccctgaagagctacagg

SEQ ID NO: 406701 - DNA, 98 bp, Homo sapiens
tatagaagaagttaatagtttaagaaagcaaagagcaggttcttcatcttcaaaaatgaacagtttgctaaaagatggcggcaaggcagcccaggcaa

SEQ ID NO: 406702 - DNA, 87 bp, Homo sapiens
catcacatgaccaaagcattcctcttctatgacagacctcttttcaagtacaaaacctcaagaagaacagaagacgagtctggtagc

SEQ ID NO: 406703 - DNA, 82 bp, Homo sapiens
tggacaaagctgttgtctcagggagcacagaattcacacaaaagatgttggacaatttctacaattttgcttcatcatttgc

SEQ ID NO: 406704 - DNA, 96 bp, Homo sapiens
tagcaatcagcgagattccgtgggcgtaggaccctctgagccagctgttggaaaaattagaggaaagcctcttccattactcttattttttgaggc

SEQ ID NO: 406705 - DNA, 100 bp, Homo sapiens
cgtctcttacgtctgcggaagtgcagctgcctcagttcttagcgcaggtatgataagtattatcagcaacataatagttctgggcatcttcattaagtac

SEQ ID NO: 406706 - DNA, 101 bp, Homo sapiens
agagagtctccgggtccctggaaagtggaaattaatctcactaatgactaccgtgtcagcggaggagtttcagaaatggtgtttaaagcaagcaagataac

SEQ ID NO: 406707 - DNA, 82 bp, Homo sapiens
cgctggccgcctcgatgcaggaggacgaacaggtgaggaattttaaattggaacaagagcaagaaaaaaacaaaatcttgtc

SEQ ID NO: 406708 - DNA, 73 bp, Homo sapiens
cagcttagcttctgtcctaaagcctcctgtataagaagtaccgtattttctgcccatcatactttgtaataaa

SEQ ID NO: 406709 - DNA, 90 bp, Homo sapiens
cgattaataaccaaccaatcaaaaatcagagtcacacttaaaagaagggctaaagaattacctccaaagccattgtcaagaccacagcag

SEQ ID NO: 406710 - DNA, 96 bp, Homo sapiens
aataaatgactggacccactgtgtagaaacaagtcaaaggagtacaagcgcaagctagccagagtttccctggtgcgcaaagaactcaggtcccgg

SEQ ID NO: 406711 - DNA, 75 bp, Homo sapiens
tacaaatgaatttgttagtgctgtgtgctggagggcactaccagatggggaacgtcaaggtcgtgggaaataaaa

SEQ ID NO: 406712 - DNA, 101 bp, Homo sapiens
caatgcagtaaagccagaaaagactgctgctccctcgccgtcactgttgtataaatgttgactatagtcaatggggccaatggagccaagtgtatggaaac

SEQ ID NO: 406713 - DNA, 75 bp, Homo sapiens
gcagctgcctcagttcttagcgcagacctgcctagagctggaacgttacctccagagcgagccctgctatgtttc

SEQ ID NO: 406714 - DNA, 75 bp, Homo sapiens
gctaaagagagcagtaccctgatggagtcccttgcagccttatgccagcctggaccatcttggaggcagtgtagg

SEQ ID NO: 406715 - DNA, 101 bp, Homo sapiens
cggcatggccaccacgtcggccgagatcgagctgccggacgtggagcccgcagccttcctggcgctgctgagggagcagtatgcagaggggaagatgagag

SEQ ID NO: 406716 - DNA, 82 bp, Homo sapiens
gctgggcttcgtccagatcgggaagggccgagcaggagctccgcgtggcccagacagagtttgaccggcaagcagaagtgac

SEQ ID NO: 406717 - DNA, 80 bp, Homo sapiens
cttcttttctctctcgtcctcgctgctgtacttcgtctatgtggcgcccggcataggtcaaaatgcagatcttcgtgaaa

SEQ ID NO: 406718 - DNA, 73 bp, Homo sapiens
ctgcctccgggcacacccggctccccggacgcctcggtactccaaagattcaggtttactcacgtcatccagc

SEQ ID NO: 406719 - DNA, 74 bp, Homo sapiens
cccaagctgaaccggcggctctcccaccctggacacttctggaagtcagctgatgtgagcagtcagcattggaa

SEQ ID NO: 406720 - DNA, 90 bp, Homo sapiens
gctgcgggaaatcgggctgaagcgactgagtccgcgatggagatcatccaattatgatgggttttgaaccccttgtgaaccagaggctac

SEQ ID NO: 406721 - DNA, 100 bp, Homo sapiens
ctttgtgaaattttttggaacagaagatcaaaactcaatgagatatgttgtcatcttccctgttttatggatgaagttctaagtagaggttcggagaagg

SEQ ID NO: 406722 - DNA, 100 bp, Homo sapiens
aatttgatgtttcgtcagagttactagagaatgaagtgtctatgttgaaaaatgaggtggcccagctgaaacagttgttgttaacacataaagactgccc

SEQ ID NO: 406723 - DNA, 51 bp, Homo sapiens
gaagaacatcccgcggatcacgacaaatttacatgtattggagaccagacc

SEQ ID NO: 406724 - DNA, 51 bp, Homo sapiens
gttgcggccagtcgccactgctaatcccaaggactgcagcaaagccaaaaa

SEQ ID NO: 406725 - DNA, 121 bp, Homo sapiens
gcggctctagggaccccccccgcgcctgcacttagccccgcgcccgagatgtggaagatgtcaagtttgtgatcaactatgactatccaaacagctcagaggattatgtgcaccgtattgg

SEQ ID NO: 406726 - DNA, 75 bp, Homo sapiens
caagaagaacgacattcccttcgagctgcgcatcgtggatctgattaaaggctctggctccgctactgcatcgtg

SEQ ID NO: 406727 - DNA, 76 bp, Homo sapiens
cgtgggcacgcgctcctacatggctaggctgacccgcggctgattgagtccctctcccagatgctgtccatgggct

SEQ ID NO: 406728 - DNA, 82 bp, Homo sapiens
aaaagggaagtgaaaagagatctgttttcaggttcactggttgaggacccagttcccatctttggatatagaggtcgatggt

SEQ ID NO: 406729 - DNA, 100 bp, Homo sapiens
cgttctaaaaagaggcgaaaggaagcaagcagttcagaagagccaaggaataaacatgcaatgaacccaaaaggactgccactctccgcccctacctgag

SEQ ID NO: 406730 - DNA, 100 bp, Homo sapiens
gaaattcagaacctcaagcttttcaggcatcctcatataattaaactggtgctgcgagtatacagtatacagaagaagcgtgtggctttcaatgtttcga

SEQ ID NO: 406731 - DNA, 80 bp, Homo sapiens
attacctggagatgatgacatggatagacgttccatcctcagagcagcctgaactgttcctaaagaaacttcagcagtgc

SEQ ID NO: 406732 - DNA, 75 bp, Homo sapiens
ataagattcctcaatcctgagagagagaattaaagtctaactctccaaatctagaacgagtaaatctgtctgcag

SEQ ID NO: 406733 - DNA, 80 bp, Homo sapiens
tggagcccgagcccgccccagccccggccccagaagagtggctggacattctgggaggtggacatctataccgtcaaggt

SEQ ID NO: 406734 - DNA, 75 bp, Homo sapiens
agaagtcagagatgcagcgtcactatgtgatggtgaaaggtgtagcagtcactcggcctacacccacagcatcga

SEQ ID NO: 406735 - DNA, 50 bp, Homo sapiens
ccagcctgcggagcctgtggggcagatccgggatcagttgaaggaagagg

SEQ ID NO: 406736 - DNA, 82 bp, Homo sapiens
cgacaagccgctggcagccgcggatctcaccgccgctcagggtcagaagttgagtagcaggggcctaggagggctcgaagcc

SEQ ID NO: 406737 - DNA, 100 bp, Homo sapiens
ggcgttatgacaggaagcagagtggctatggtgggcaaactaagccgattttccggaaaaagctgaattcttgccgccaggatggggaaacagaacagca

SEQ ID NO: 406738 - DNA, 100 bp, Homo sapiens
gcttttgagcatcctgaagaagttgattatatgacgaacggaaagatgctgaaggatgggagaccgttcagagaggaaggcctattcgttctcgatcaac

SEQ ID NO: 406739 - DNA, 50 bp, Homo sapiens
acacgtgcagcgccagccctgttgaggtaaccgggactcaggaagttaaa

SEQ ID NO: 406740 - DNA, 80 bp, Homo sapiens
cctgatgccttacacgaattacacatttgatttcaagctctattaccaggttttaaacttcgccatgatcgtgtcttctg

SEQ ID NO: 406741 - DNA, 100 bp, Homo sapiens
ctacttgccacagtatgcacatatgcagacgacagcggttcctgttgagggcttccgagtggacctgccaatcaagtcggcccgctaccgtggccagtac

SEQ ID NO: 406742 - DNA, 98 bp, Homo sapiens
ccatgcatctcctcggcccctggctcctgctcctgggatgccaaagaagagtgaatggcccacaaagagcctggtagcacatacgcttttcaaaaggt

SEQ ID NO: 406743 - DNA, 75 bp, Homo sapiens
gagtggagcccggaggccatgggcacgccttggacaggtaggcgaaaaccaagagtacatcggcctcgttctcct

SEQ ID NO: 406744 - DNA, 100 bp, Homo sapiens
ctggcggctgctggtagttccatgctgtctgttcagacttcagcttggtgaccaaccctgagaaaggaactgattttgtcttcaaatattggacaacatg

SEQ ID NO: 406745 - DNA, 50 bp, Homo sapiens
ggagtcttccatcaatcatatctcacagcctgattttccctacaaagatg

SEQ ID NO: 406746 - DNA, 89 bp, Homo sapiens
gtgaaactgctttctaaaacaccagaactcaacctgatccaaaatacggagctggcatatacttcaccaagaacctcaaaaacctggca

SEQ ID NO: 406747 - DNA, 100 bp, Homo sapiens
agccctgcctctccctgggctctggtgacgtgccgggccattgggattggggcttaccttgtccggctgggacagagaaccatccaggttgagaattctc

SEQ ID NO: 406748 - DNA, 82 bp, Homo sapiens
acaccaaccaggtccctgacagcccagctccagatgaggaccttgagattgaattggttgaggaagagcctccattcctgag

SEQ ID NO: 406749 - DNA, 78 bp, Homo sapiens
aggaagcgccaggaagctgtggctggccgcatacccgccatcttctccccaggagcatcagatccatgctgctgctga

SEQ ID NO: 406750 - DNA, 98 bp, Homo sapiens
tggaatgatgatgtctcatatgtctcaggcttccatgcagcctgccttaccgaaagcagagtgagggcactcactgccatcctgtggaagccaccatc

SEQ ID NO: 406751 - DNA, 101 bp, Homo sapiens
catacgcagctggcagatattatcatagttgctgcagaatgtgacagtgatgataacatgggtgccaaaaatacttcaataggagaagaatttatatccac

SEQ ID NO: 406752 - DNA, 82 bp, Homo sapiens
cgagccttggcggcggacgtgcagctacgagttccagggagctctgtcctggtgaccgtgcccgggttatgacgactaatcc

SEQ ID NO: 406753 - DNA, 75 bp, Homo sapiens
agacatcttctggtcagagatacttcttaaagggaaaaaagttgttccatgtagacatgactggcatcagactgg

SEQ ID NO: 406754 - DNA, 100 bp, Homo sapiens
cgcaccccagcagcagtcagagcccgccagaccttcctctgaaggcaaagtgacctgtggagaattcctgagttttgctgatgacttactctctggcctg

SEQ ID NO: 406755 - DNA, 82 bp, Homo sapiens
ccgcgcagggagctctcgaggcaacgccggggcgcccgaggtctggaaggcgcaggaaagcaaaatgaactctctgacacag

SEQ ID NO: 406756 - DNA, 75 bp, Homo sapiens
gaggagccacaatggagacgccgccgctgcctcccgctgacaccacagccaaagccctatgggaagctttactga

SEQ ID NO: 406757 - DNA, 82 bp, Homo sapiens
gcggatcgggtggagtgtaggtcatatcgccgcggtggcagtagagaagagcatcacagaagttgctcaggagctgacagag

SEQ ID NO: 406758 - DNA, 75 bp, Homo sapiens
tttgttaaggattccaagtaactcttatttgaaacgatggaaagaactttctaaggaagacttatctcctgcctt

SEQ ID NO: 406759 - DNA, 99 bp, Homo sapiens
cttcacaagttcctcatctgggacactgctggtcaggaacggatcatacatctgtcggtggcctgggagacagtttttatgaatacttactgaaagcat

SEQ ID NO: 406760 - DNA, 95 bp, Homo sapiens
aggaagagtgagcgccaggttcggtggctcacccagcaaagcagccaccgtgagatcacgtatcgggctttccgggatgacgatggacattattc

SEQ ID NO: 406761 - DNA, 90 bp, Homo sapiens
aagaaaactacaggcggggacggcttctcgacggttgatgatgaagcgccggccgtgtaaatgaagatcgggtgaggagcaggacgatgc

SEQ ID NO: 406762 - DNA, 90 bp, Homo sapiens
ctacctggatgagcagagagctgtgaaatatctttggcttgcagccaacaatgggctccatcaagtatgatggtgaaggatgaatatgtg

SEQ ID NO: 406763 - DNA, 83 bp, Homo sapiens
caaaagtcctccacactaagcggctttaccgcagcctcccgcgacgatgcccctcaacgttagcttcaccaacaggaactatg

SEQ ID NO: 406764 - DNA, 75 bp, Homo sapiens
gagatggaacccgaagaagaaaggattcgttacagccagagattgagccctatgagtttgtctctctggaatggc

SEQ ID NO: 406765 - DNA, 83 bp, Homo sapiens
ccttcggcagtccacccaccgccgccgcctcccaggtaagaatgattgatgttggctgatattggagtgctcattcacatgaa

SEQ ID NO: 406766 - DNA, 97 bp, Homo sapiens
catctgagactccacagaggcctggaagccaatgcccctgctttcgacaggaaggatttgatgccctggatccctttattcccatcctggtttccaa

SEQ ID NO: 406767 - DNA, 100 bp, Homo sapiens
ctctcctgttttttcaggcaattgaaaacactgcctcagtatctgaacacaagatttttgatgaaattgagtcatgaaactgtaaccattgaattgaaga

SEQ ID NO: 406768 - DNA, 97 bp, Homo sapiens
ccagtgatggcaataagaaacaaaatgatatcagaaggactagacccagatcttcttgatgtgaccgcaacaagggaaaacatggcttatactgtgg

SEQ ID NO: 406769 - DNA, 76 bp, Homo sapiens
tgctggcgctgaccttcatcacagacaacagcctggtggcagcggtgaaagacccctgacaaaagacaatcatctt

SEQ ID NO: 406770 - DNA, 100 bp, Homo sapiens
agtgggtaacctttatttcccttctttttctctttagctcggcttattccaggggtgtgtttcgtcgagatgcaccaccatcattgcatttgctcagtat

SEQ ID NO: 406771 - DNA, 100 bp, Homo sapiens
cagaaataggggacaagtcttggctctaccttagaaccctgaaacaagaggaggagacacatatacgaaatgagcagttcaacgaggatctgcataaaca

SEQ ID NO: 406772 - DNA, 100 bp, Homo sapiens
gttatctctgtaccgggcgatgctgagagagagcaagcgtttcagcgcctacaattacagtgtttacaggcattggagtttttacatgctaatcaagtga

SEQ ID NO: 406773 - DNA, 75 bp, Homo sapiens
aaaatgtgtaagacgggatattctcttctgtgctgtcaaggagaatgtccaagcacacagatgcagcagaagagg

SEQ ID NO: 406774 - DNA, 75 bp, Homo sapiens
atggctacttcatattttggaaagcagtttttaagacaagggcagaaagcgttttgtaagcgaaggagatggagg

SEQ ID NO: 406775 - DNA, 90 bp, Homo sapiens
ttgtttgtggatcgctgtgatcgtcacttggtgtcgtgaaaactacccctaaaagccaaaatgggaaaggaaaagactcatatcaacatt

SEQ ID NO: 406776 - DNA, 110 bp, Homo sapiens
ttctgggctctgtcagccatgtgactgtagtccacatggagctctcagcataccgtgcaacaggtccacgctgcttttatgagctgtaacactcaccgcgaagatctgca

SEQ ID NO: 406777 - DNA, 87 bp, Homo sapiens
cggacgcgtttggcaacagcgagggcaaagagctggtggcctcaggtgaaaaagggatcgtgatctggaactcgctgctcgaattgg

SEQ ID NO: 406778 - DNA, 75 bp, Homo sapiens
tgtttttctcaggtgaaaggagcagtagatgatgatgtagcagaaggtgactaataaaggtaccagaagaatatg

SEQ ID NO: 406779 - DNA, 100 bp, Homo sapiens
cagaattggtgcaggcatccccatgccgaagttcagatggaatcctctacatgggttttcccatcatatgattcccggtcctcctggtccccacacaact

SEQ ID NO: 406780 - DNA, 100 bp, Homo sapiens
atggagcgccctgtaaggtatattcggaaacctatcgattacacagttctggatgatgtgggccatggtgtcaagtcaggccttgaaaagaggatagacc

SEQ ID NO: 406781 - DNA, 83 bp, Homo sapiens
gcgagcgcgagcggcgcgagaaaatgctcagccagcattgggcagcccccgcttcctgctcccctacccccttcacatggcag

SEQ ID NO: 406782 - DNA, 74 bp, Homo sapiens
cagttcaaccggagttacctgagcccagaaggccagtacgggatccctgaaccatggaattttccttttcggag

SEQ ID NO: 406783 - DNA, 51 bp, Homo sapiens
cagccgctctgagggcgcctgctcagacactctcgaaagcgatgggaacgc

SEQ ID NO: 406784 - DNA, 75 bp, Homo sapiens
cgtggaatgacggtcacgccgcggcgggcgctgcgtgttcatctggcacctgggcccggagatcaccaactgcat

SEQ ID NO: 406785 - DNA, 87 bp, Homo sapiens
tgctgctttttctaactatttcaagatgatatttattcaccaaacaagctttagcgtcacctccctcactgggcagcatgggggaga

SEQ ID NO: 406786 - DNA, 82 bp, Homo sapiens
atcgattgcattggcaatgagacagattcgaatgcaggctcaaggaagcttgttccaagggagcatgattggaagctttatc

SEQ ID NO: 406787 - DNA, 100 bp, Homo sapiens
gaggaagacctggaagacagatctggttctgactttgctgctggaatccaacagtgcaaaagacctagcctgcctgattgctgggtactacaggctgttg

SEQ ID NO: 406788 - DNA, 75 bp, Homo sapiens
caagtgcattgcctttggaaacgaggtgtggcctctggaacctgactccgttaggacgaacatctgccccttcag

SEQ ID NO: 406789 - DNA, 91 bp, Homo sapiens
aaagaagatgcctcgaactaaacaaattcatcccagaaatctaagagatgacccctaaatccaaaaggaagagtatccatagccgaatgct

SEQ ID NO: 406790 - DNA, 77 bp, Homo sapiens
ccggcttggagaggccgagggtttgatgaaggtggaggcagcgcggctctcaggattatatctgtccaagatgcgag

SEQ ID NO: 406791 - DNA, 98 bp, Homo sapiens
gagaggaagaggcaactttggagggcagagtgagcaggagaacacactcaaccagctgctggtggagatggatggtggtctgtttttctggggggcca

SEQ ID NO: 406792 - DNA, 101 bp, Homo sapiens
caaattcagaagctcagaacgctggactctccctttgcaggtcatcatcagatttgaaatatttaaagtggatacaaaactatttcagcaatgcagacaat

SEQ ID NO: 406793 - DNA, 101 bp, Homo sapiens
aacttaaagaatcattgaaagcaaacaattataatgaagccgtgtatttggctcttctggagctggagatgaactcggacctcaaggctcagctcagggag

SEQ ID NO: 406794 - DNA, 75 bp, Homo sapiens
aagctcactcccaaaaaagatttctcggttcaaaccttgtactactcagctgatcacaagctgcttgatgggaac

SEQ ID NO: 406795 - DNA, 82 bp, Homo sapiens
tgtaaggaggagccagaaattgacagcccagggggtacttcctatttaacagacattgtgtggtgggctggcacaatcgcaa

SEQ ID NO: 406796 - DNA, 75 bp, Homo sapiens
ctcgaaggccggccagcaagcttcagggcttcaagcagcaagctcttacagtatccacagatcctgagcatcgtt

SEQ ID NO: 406797 - DNA, 96 bp, Homo sapiens
gagaggtctcgcattaaggctctggcagcggctccagcaggagaaccatgagctccggcgaggcctggcagcccgaggagccgagtgggaggcccg

SEQ ID NO: 406798 - DNA, 50 bp, Homo sapiens
atgagaagatcaagaaggatggtaactaggatttctacctcaaccgcgag

SEQ ID NO: 406799 - DNA, 100 bp, Homo sapiens
gcagaatatgatgaactcggcttcagattcgttgggcttttgccagctctttttagattgtcctcttgagacctgtttacagaggaatggccagaggcca

SEQ ID NO: 406800 - DNA, 98 bp, Homo sapiens
gtgtcatgcagaagattatacctcactattctcttgctcgatggctactctgtaatggcagctcagaggctgagaatggtgtggaggagaaaaagaaa

SEQ ID NO: 406801 - DNA, 100 bp, Homo sapiens
agttcttacaattctcaaagcatggcccattgacctggcttgtcctcagcgagatctaccctgtggagatacgaggaagagccttcgccttctgcaacag

SEQ ID NO: 406802 - DNA, 82 bp, Homo sapiens
gttttccttgtcccggggagtccgcgcctcccacgccggacctggtaatctgtaagtcagatgctccaacaggggatgttct

SEQ ID NO: 406803 - DNA, 100 bp, Homo sapiens
ggactaccaaggagaagctatagactacttctactccaccaggaagggcgccctgcgtccggcagaggaggcgagcatcccgctcaggtgatgaggaacc

SEQ ID NO: 406804 - DNA, 82 bp, Homo sapiens
ccttttctctgccttgcttgcttgagcttcagcggaattcgaaatggttgattcttcaccacactgaaaccattaggaaaaa

SEQ ID NO: 406805 - DNA, 109 bp, Homo sapiens
gcagctgttgaaaaatgcggttaaaaaggtgatgggtatctttaagagcagcttattccaagctttgctaggtaggtgatgctctgatgctgctgcctcttatgaattg

SEQ ID NO: 406806 - DNA, 98 bp, Homo sapiens
tctcggcttgaccgcattcttcctcccagcctgcctgctccgcttcagcggactctcgctggtctacctgctcttcctgctgctgctgccctggttcc

SEQ ID NO: 406807 - DNA, 100 bp, Homo sapiens
gagtggtggtaaccccatcctctttgaactggagaaaaatctgtatccaacagggggctgttgtggttccgactataaacagtacgtgtttggcggctgg

SEQ ID NO: 406808 - DNA, 88 bp, Homo sapiens
cgatctgcccgttgtgtttgtgaaacagagaaagataggcggccatggtccaaccttgaagagtatatgattgaacgaccagagccag

SEQ ID NO: 406809 - DNA, 82 bp, Homo sapiens
gagcaaaatctacaagatgatgcagggaggagggctggagcggctctgggctccggaatcgcccgcagccggtactgcggga

SEQ ID NO: 406810 - DNA, 127 bp, Homo sapiens
gcccgggtcctcctagaaattccccccgaagaagactcccccacatctggattggcagtatggagttactcaggccttccctcacacagaggaggaggtggaagttgattcacacgcgtacagccac

SEQ ID NO: 406811 - DNA, 75 bp, Homo sapiens
gtgcaaagttcctattgatggtccccccatagatattggtgctggaaaaggcaaatactatgctgtcaattttcc

SEQ ID NO: 406812 - DNA, 100 bp, Homo sapiens
gtttgatgagattttttcagcaacaagaaattcagagacgatcatgaaatttttgaaaatggggaacattagtcaggatattattccccatcatatcaac

SEQ ID NO: 406813 - DNA, 51 bp, Homo sapiens
cgggatattctcttctgtgctgtcaagggaatcccagtcagaagttccagc

SEQ ID NO: 406814 - DNA, 90 bp, Homo sapiens
ccaacatcgaggtcatcggcaggaaaaccagcattggaatcagctgattcaggatgctcagaagcgtggtgccattattaagacctgtga

SEQ ID NO: 406815 - DNA, 90 bp, Homo sapiens
cgagcaaccagaaccggagcatggaggcgcacaacatcctcagatgagcagcaccagcagtaagagggctccgaccacggcaacccagag

SEQ ID NO: 406816 - DNA, 83 bp, Homo sapiens
gacagaagcagatggattcgtccttttagaagttgagaggattctattttgcaaagctgtattatgaagctaaagaatatgat

SEQ ID NO: 406817 - DNA, 94 bp, Homo sapiens
cgttcccagcccgggtccccgcgttcacagccccagcgcaggtacaatgactcttcttgcttttcacctaagttgaataagcaccctgtgcact

SEQ ID NO: 406818 - DNA, 100 bp, Homo sapiens
tccggagctcgcccaagccgcgtccccagagagcgccctgagagaacagggtggccgcttggtccagatggcccctgagttctgcagcctcgaggaaggc

SEQ ID NO: 406819 - DNA, 101 bp, Homo sapiens
ccattatgcccaactccagtccaacatcattgaggcgattaatgagctgctagtggagctgggcacagatagatcattatctaggacttgcaaataagaat

SEQ ID NO: 406820 - DNA, 51 bp, Homo sapiens
cacacactgggaaacatcattaaatcggttctggctggtgtggaccatcat

SEQ ID NO: 406821 - DNA, 90 bp, Homo sapiens
ccaagaggcggttgaaggagcagtctatctttccttcaaatgtttatctggtgtgactgtattatgccctcagagagtactgtatgttgc

SEQ ID NO: 406822 - DNA, 75 bp, Homo sapiens
gcggaggggcgggggaggcgccgggaagtcgacggcgccggcggctcctgtgggcaatgggctggtggctggcag

SEQ ID NO: 406823 - DNA, 75 bp, Homo sapiens
atggccaccatgttccagaacctgttcccctccatcaacgtgcacaagctatcaagcccagagagagacgtggag

SEQ ID NO: 406824 - DNA, 74 bp, Homo sapiens
cttcttctaatattattggccagtctgtggaagaagctatcaggatggcctggtgggaatccaacaattaccag

SEQ ID NO: 406825 - DNA, 106 bp, Homo sapiens
ttttatattcatctcaaaaacaaaattctgaactcaggacttggcaatgagttattctccccacctcagaagtaccagcttttggtgtatcatgcagattctctct

SEQ ID NO: 406826 - DNA, 82 bp, Homo sapiens
cagcaaggtcggcagagcaaggggcttacgcagaaggacctggccacggagtccaaaactacttacctggaagaccttccac

SEQ ID NO: 406827 - DNA, 100 bp, Homo sapiens
ccgccgcttgtgctgcagccatggtacatggccacctctggcctagaccaccagctgaagatctttgacttgcgagggacgtaccagcctctgagcactc

SEQ ID NO: 406828 - DNA, 140 bp, Homo sapiens
tcagaagcatgtgtcttccccagctctgcagccacatactatccgtttgttcaggaaccaccagtgacagagttcaaaccttgtactactcagctgatcacaagctgcttgatgggaacctactagatggacaggctgag

SEQ ID NO: 406829 - DNA, 50 bp, Homo sapiens
caaatcctcaataccaaactagcagaaatccaggataaattggatcaaat

SEQ ID NO: 406830 - DNA, 83 bp, Homo sapiens
ctaagggaaaagttacgcgaagagaaaacattgaagcttcagaaattgttagaaagggctctcaactacaatctgagcaaaga

SEQ ID NO: 406831 - DNA, 98 bp, Homo sapiens
gaccgagaccgtgaccgagagcgtgaccgagagcgcgaatatcgtcatcgttagaaggagtccaatgtgctgattgctgctaacagtcagggtacaat

SEQ ID NO: 406832 - DNA, 75 bp, Homo sapiens
cttgaatgttgaagatgtccttaccagctttgacaatacaggaaatgtttcacttttgtgtaatggaaaatttca

SEQ ID NO: 406833 - DNA, 75 bp, Homo sapiens
ttccaaagcctcctggaccgtccaagaaaccagtgtgcttttcttggagaaagaagaaaagaagaaagaaggaag

SEQ ID NO: 406834 - DNA, 82 bp, Homo sapiens
ggaatttcttcgaaaaaagcttattgggaagaagattcgggaactggagcctctcctctgtcacagtgacaatccatctcag

SEQ ID NO: 406835 - DNA, 100 bp, Homo sapiens
caaaaacttgctggaaaccctgaaagatcttgctgggtcagaaatacaaccactctgtggactggtggtccttcggggttctcctttatgaaatgctgat

SEQ ID NO: 406836 - DNA, 74 bp, Homo sapiens
ggcgctcatcgagggacgcccggcccaagtggaatttcgtgaggatatgccctccattcttgctgatgtattct

SEQ ID NO: 406837 - DNA, 100 bp, Homo sapiens
gcattccagggtcggcagaaggattgtgttattgttacgtgtgtcagagcaaatagcatccaaggttcaattggctactgtgtgaagacattcacaggac

SEQ ID NO: 406838 - DNA, 100 bp, Homo sapiens
tatcacctgaccgatgaagactttgaccagtttgtgaaggaacactcctctgtcctcgtcatgttccacgccccatcggccctccaggcactgaagcgta

SEQ ID NO: 406839 - DNA, 90 bp, Homo sapiens
gacaggaagtggccgtagcggcttgttggataaggacaagctgggggcctccatgggcgcctgagggccaggcgccagggccgtgggcac

SEQ ID NO: 406840 - DNA, 98 bp, Homo sapiens
ctgggatgaactgatgaagacaaggccttccagtttggaaatccacaagaaggtgctgtggtggttctccctgcagactctcagcagcgtttggttca

SEQ ID NO: 406841 - DNA, 96 bp, Homo sapiens
cagcagcagcccaatgacaaaactattatcaacgcctgatgactgtggcagaaggcatcaccacacttttgttcccatttcaatggcaacatgttt

SEQ ID NO: 406842 - DNA, 75 bp, Homo sapiens
gctgcgattttcgccctacgttttcaacggaggtgagatgaacccggtacctcagatggaaatgcagaaatcacc

SEQ ID NO: 406843 - DNA, 80 bp, Homo sapiens
gaagaccagcccttgcctgcccgacggctctcctctgactgcagcgtcactcagaaggaggtcttcgaggggagaagagg

SEQ ID NO: 406844 - DNA, 100 bp, Homo sapiens
ggagaatatggtgcagaggccctccacgatctgggacataggaggacaaccccgatttcgaagcatgtgggagcggtattgcagaggagtcaatgctatt

SEQ ID NO: 406845 - DNA, 82 bp, Homo sapiens
cgagcggcggcgctccgagagctccaggagaagcaggctctgatggagcagcagagacgaaaaagcttgtggtgaagggggg

SEQ ID NO: 406846 - DNA, 101 bp, Homo sapiens
caaaggccggccatgtaagatcgtcgagatgtctacttcgaagactggcaagcacggccacgccaagaaatctgcaactcgacctagcccctctccggaaa

SEQ ID NO: 406847 - DNA, 82 bp, Homo sapiens
aagaacgctctcatccggaggcaggaccagctgcagctgcttttacaggctggtaacctacatctttgtctacgagaatccc

SEQ ID NO: 406848 - DNA, 101 bp, Homo sapiens
gggcctctgagatatgccgtttacgggtgtgatccctcacatccacaaatctctgattggaaagaagggacagcagaaaactgcttagagggatgctttaa

SEQ ID NO: 406849 - DNA, 100 bp, Homo sapiens
tgggatctttgaaatgctaagattcttggataccacagtatcataaaattcctctaaatgcagatgaccagtgtcccagtgaaggaacgagtgaaggtgt

SEQ ID NO: 406850 - DNA, 82 bp, Homo sapiens
cgactggattcctccatgactcaaggcacagactctccagcttcagcaagtgtcaacattggtcagttagagcatcaactta

SEQ ID NO: 406851 - DNA, 124 bp, Homo sapiens
ggaaatttggccagttatccaattgatgaactagtagatagagccaaacaatcttttcaaggtgtgaatcatggcaatacagtgaaagacagtgatttactgcttttgagggcgtgcatgtata

SEQ ID NO: 406852 - DNA, 82 bp, Homo sapiens
aggactctttctgttcaggccagaccctctgggagcttctcagccattttccacagatcagtgtggacgaatgtggaacctc

SEQ ID NO: 406853 - DNA, 75 bp, Homo sapiens
ctgagagagtgcaagccgtgggcaatcagccatgactgcctttgcactgtccatgctctcagcccaccacctcct

SEQ ID NO: 406854 - DNA, 90 bp, Homo sapiens
atagagtcactgtatttgaccttaaaaattgtgctgcatggaaacaacctgttagtatttggaggtacgggcatcccatttggagagagc

SEQ ID NO: 406855 - DNA, 100 bp, Homo sapiens
gtggccttcaccaacacctcggatcttgggcagcggatctgggatgtcgccgactacgtcattccagcccaggtgatgtagtcaaggtgatcgtctccgt

SEQ ID NO: 406856 - DNA, 73 bp, Homo sapiens
tgagtagcttggttggtggtaccctaaaattagggcatgattaaggtgatttctagcttgtctcatgccatag

SEQ ID NO: 406857 - DNA, 50 bp, Homo sapiens
ccggttgcgccacccgaggacaagttaataacgacatgatagtcactgac

SEQ ID NO: 406858 - DNA, 50 bp, Homo sapiens
ctgatactgttgacatgactaagtctgatcatcggatatcatggagtctg

SEQ ID NO: 406859 - DNA, 96 bp, Homo sapiens
gatctacattaaccagctggaagccctgttgctgattctcattcagattgtggatgcctcgtcagtcatcacttgggatttcgacgtgtgcaaagg

SEQ ID NO: 406860 - DNA, 75 bp, Homo sapiens
cagagtgagatacttgtggtgtcagaaggatcatgtgccacaggatgaagttgtgatatgtccatacgattccaa

SEQ ID NO: 406861 - DNA, 75 bp, Homo sapiens
aagtgaaaggaccagttcgaatgcctaccaaggtgttggagcgggccggagagaagtagagtgggctgcgaggag

SEQ ID NO: 406862 - DNA, 101 bp, Homo sapiens
cagccgatcatggcggatggcccccggtgcaagaggcgcaaacaagccaatcccaggaggaaaaacgactgtggctgaccatgggtaactgacaccgtgga

SEQ ID NO: 406863 - DNA, 82 bp, Homo sapiens
cctaatgacagtctccaaattcgcctccatctgtaccatggaagccacagatgatggacataacaacaaccttcttcctcag

SEQ ID NO: 406864 - DNA, 49 bp, Homo sapiens
ccagcttagcttctgtcctaaagtgtaaggcaaacattggtgggcaccg

SEQ ID NO: 406865 - DNA, 100 bp, Homo sapiens
cccgcagtcgcccgcaaccggggcgaatcatggcggccgccaagggaaatcctcattgacgattcaatttgttgaaggccaatttgtggactcctacgat

SEQ ID NO: 406866 - DNA, 82 bp, Homo sapiens
aggattctgtttcactgaggccatctatccgatttcaaggaagccaaggggacagagcgggatgccaccagcttgtccaaag

SEQ ID NO: 406867 - DNA, 75 bp, Homo sapiens
ggctcacgctgagagggacacgcagtgacgagcggccgaagcagctttgcgggcacaaatagtttacatttcatg

SEQ ID NO: 406868 - DNA, 100 bp, Homo sapiens
agttcatgaaggccggcagcatcaatgtctggaacatctgtcccttgttcaaaggacaaatgatgcgaaggttggtacattagtgggggaagacaaatat

SEQ ID NO: 406869 - DNA, 83 bp, Homo sapiens
cgagcctgagcgcggcggcggcccacgcgcagcgacagggagaggccacggcgtatgcctccgaggacggggtcctgaccgag

SEQ ID NO: 406870 - DNA, 100 bp, Homo sapiens
gaatctacgatggcgaggagaaggtaatagcctgcagctggtgttttgagaagccctactgctgaaaacttaacaattttgtgtaataaaaatggagaag

SEQ ID NO: 406871 - DNA, 50 bp, Homo sapiens
gtgaaggctcggggctgaagcggattgccctcttagactcccccacagct

SEQ ID NO: 406872 - DNA, 100 bp, Homo sapiens
ggtggaggctgctggcaatggcctacgtcgtcataccgggcttccttgccctgtccgggggtttggacagaggagccaaaggccaaatttccactttcag

SEQ ID NO: 406873 - DNA, 100 bp, Homo sapiens
atgtgctcttgtcctggcattgcatccacaggaggggcaggaaattctttgaagatgccatggacaatattaccaggcagaaccaattctacgataccca

SEQ ID NO: 406874 - DNA, 100 bp, Homo sapiens
tgtggggttggtgtgattagcttcgcagtctggaaagctttaggagttcacagtgggctatctgatgggttagagtgcctttgagaagaaatcagtggat

SEQ ID NO: 406875 - DNA, 75 bp, Homo sapiens
cggagcgcggtgctgccggtggagcttcagattcttcagcttgtctctaaccgaggaagcattgattgggagcta

SEQ ID NO: 406876 - DNA, 50 bp, Homo sapiens
gggtacaagtgcactggatataggaagcagtcaattatagatttcttcaa

SEQ ID NO: 406877 - DNA, 100 bp, Homo sapiens
ggaaacagtgaccctgagcgaagccaagccgggcggcagtgagacggtttaagcggaagcatcttactgccattgactgccagcatttggctcggagtca

SEQ ID NO: 406878 - DNA, 75 bp, Homo sapiens
ccaccctcccagccacctctgaagttgccaggcttcccaacattcttgtctgtgatctccagcaccctgccggtg

SEQ ID NO: 406879 - DNA, 98 bp, Homo sapiens
tccgaagatgccggactccggaacagcaagaactgcaccgaaccagacaagttggatggcttgaggactggtactaaaaggaaacgtgactgggaggc

SEQ ID NO: 406880 - DNA, 50 bp, Homo sapiens
agcgaccgggagaacatagacggactatacaggctccaacccaagttcca

SEQ ID NO: 406881 - DNA, 82 bp, Homo sapiens
gacagtcgcgaggttcgagtgttgcagagcctgcggggcaagatctttgtgacttctcaccaggagatttggtttgggccaa

SEQ ID NO: 406882 - DNA, 100 bp, Homo sapiens
gaagttcatcgccaggactgtgatggtacaggaagggaacgtggaaagcgcatacaggaccctaaacagtgcacgatctgattttctggagagatgtgaa

SEQ ID NO: 406883 - DNA, 100 bp, Homo sapiens
aagccggagcctgccagagccaaggccaagctctccaagttcagcatccccaagcagggggagtatcgtcagtgaagcaggagcatcaatctacagtgtc

SEQ ID NO: 406884 - DNA, 96 bp, Homo sapiens
cgaagatccggactctgggtgttttgctaccgtgaccgtttagatgttctcaaatagtgatgaagctgtaatcaataaaaaacttcccaaagaact

SEQ ID NO: 406885 - DNA, 89 bp, Homo sapiens
ggacctgagcaggaacctggagttttcagagctcccagctcctccagcagccgacaggaggcccgtcaagatgcaggcaggcattgcca

SEQ ID NO: 406886 - DNA, 75 bp, Homo sapiens
gcacagcagaagctctgaatcgtgttcctgaatgaaagaagtcaggtggtgaagcagtattttccaatttgaaga

SEQ ID NO: 406887 - DNA, 97 bp, Homo sapiens
cattcggaacactgatgggaaatcagccctggacctggcagatccttcagcaaaagctgtccttacagtttttcctactccacaaacgtaacagtaa

SEQ ID NO: 406888 - DNA, 98 bp, Homo sapiens
aacaacccgttcttgcctcaggccagtcgcctccaggccaagagggatccttcacccgtgtctgatggagttttaacattgaatgcggagaacactaa

SEQ ID NO: 406889 - DNA, 100 bp, Homo sapiens
cagtatgccgcctccctgggtctaggttgggacaaacattcctatggttaccatggtgatgatgggcattcgttctgctcctcggggactggccagccct

SEQ ID NO: 406890 - DNA, 76 bp, Homo sapiens
cagaagaagggcatcgtgcgtgccaagcggcgagggagttctgggaaatcgttcattcatttacagatgaacagaa

SEQ ID NO: 406891 - DNA, 75 bp, Homo sapiens
ccacgactgcctgggacctggccaagggctccacacaccaagaccaagagggctctgaactcctacttcgagcct

SEQ ID NO: 406892 - DNA, 80 bp, Homo sapiens
gcggagcgggaggaggaccgaaagagctggaagtcgagtgtgctactcaactcaggagatttggagacaaactgaacttc

SEQ ID NO: 406893 - DNA, 97 bp, Homo sapiens
tgaacagttgcactgtaaaaaacccagctgaagaccactttagaaactcaattaaccacaccatgttaccatatgtgcctcttccaggcatggaagc

SEQ ID NO: 406894 - DNA, 100 bp, Homo sapiens
ctcagccttgctgatcatctcgtacagcagcagaaaatgaccatgttacagactggattatggacagaacttggaaatattgagaataatttcttaaagc

SEQ ID NO: 406895 - DNA, 100 bp, Homo sapiens
ctgctcatcaccaaggccaagaacgggcacctggctgtgattgttgatccatttcagatacttgtggcagcaaacaaagcagttcacctctacaaactgg

SEQ ID NO: 406896 - DNA, 100 bp, Homo sapiens
tgcgcctgggggtgcgcgcctgcgacctgcccgcctgggcagaggtggaggagacactgaagcgactgcagagccagaagggagtgcagggaatcatcgt

SEQ ID NO: 406897 - DNA, 100 bp, Homo sapiens
cacctggtcacaggactatactgacctggaggtcagggtgccagtacccaagcacgtggtgaagggaaagcagacatatggcatccaggagaaagatgtc

SEQ ID NO: 406898 - DNA, 96 bp, Homo sapiens
ctggatgcagaatttgatcactttgtggttgatatgaagccctttgttctaaaattacctcataggacaggctgaagtgcaatgttgtgatctcgg

SEQ ID NO: 406899 - DNA, 100 bp, Homo sapiens
ggaaaatcatattatagatggagtaaagggttaaagcacgaattgggagctctcagcgacatcaccagtcagcagccaaagacctaactcagtcccctga

SEQ ID NO: 406900 - DNA, 83 bp, Homo sapiens
ccaacctcctgtatctggagctgggagacaagcccgcgcccaacaccttctatgtagttccagggtctccctccactgctgta

SEQ ID NO: 406901 - DNA, 100 bp, Homo sapiens
cctgtctcttgcaaattgtccaattggagatggaggtttagaaagtgggcagatggaaaaggacccctggcagctgcgttctcttccagtgaagtaaaag

SEQ ID NO: 406902 - DNA, 88 bp, Homo sapiens
cctgacctagagcccatcctaaggtggatctttcaacatatcgttgtttagttttcaagaataaagccatcataagacctcatgccac

SEQ ID NO: 406903 - DNA, 74 bp, Homo sapiens
gcggcccggagctcgggaccggaacagcgccttttgatagtcctaagtaattgctgctatctagaacgtcacac

SEQ ID NO: 406904 - DNA, 87 bp, Homo sapiens
tggagatggggaccgccctggacatcaagattaaaagagcgaataaagtttatcacgccgggtccattgaagacttgaacaagtggg

SEQ ID NO: 406905 - DNA, 75 bp, Homo sapiens
cccgtactgcccgtggcatgagggagccggaagagctgatgcccgattctataccagactgttacaggattgaag

SEQ ID NO: 406906 - DNA, 82 bp, Homo sapiens
tgatcccctggcatcatttattctccgtactgatcactacatcatggtactccaaagattcaggtttactcacgtcatccag

SEQ ID NO: 406907 - DNA, 98 bp, Homo sapiens
ccatcgttgctgccttcttcgtcaaggtacaccaggggttggaaaaaccacactaggcaaagaacttgcgtcaaaatcaggactgaaatacattaatg

SEQ ID NO: 406908 - DNA, 75 bp, Homo sapiens
gtcaaggtggcctaccaggaggccaggggtgtcgccatgtgaaaaatgtactctgacctgaatcctgaattttcc

SEQ ID NO: 406909 - DNA, 100 bp, Homo sapiens
cagagttcaaggaggccttccagctgtttgaccgaacaggtggaggcggcccgcaaggccatccgcgccgctcaggtggagcgctatgtgcccgaacacg

SEQ ID NO: 406910 - DNA, 83 bp, Homo sapiens
tctacaccatcgacaccgaaaactccaccgtagcccttgccaaaggcagaatccagagaccacatttgaagtatatgttgaag

SEQ ID NO: 406911 - DNA, 82 bp, Homo sapiens
cagaatccaccgtcaggcataaattgattattcctcgcccacatctgtgccaggtctcagccttagatccaaggacagtcca

SEQ ID NO: 406912 - DNA, 48 bp, Homo sapiens
gccgggctgcgtgagggaggagggtgctggagaatctggtaaaagcac

SEQ ID NO: 406913 - DNA, 100 bp, Homo sapiens
ttcgaaacttcagggccatccacacgctagtttttgtttcctgcaagctccatggtgaatccactaggaatgtcattgaagacagggtttcgccatgttg

SEQ ID NO: 406914 - DNA, 50 bp, Homo sapiens
gagggaaacattcactgcacagaaccgaagccggcaggagtgactctcgg

SEQ ID NO: 406915 - DNA, 83 bp, Homo sapiens
ccgccatgctgtctctagactttttggacgatgtgcggcggatgaacaagcggcaggacatggatttgattgacatactttgg

SEQ ID NO: 406916 - DNA, 98 bp, Homo sapiens
tctacctggtaatagaggacttgaagcagaaagcaagtgaatacgagtcagaagaataactgaagtgaagtgatggactccgatttggagagtagtaa

SEQ ID NO: 406917 - DNA, 96 bp, Homo sapiens
ttgagctcatgttcccgctgttgctcctccttctgcccttccttctgtatatggctgcgccccaaatcaggggacattctggagaaggtcagcgtg

SEQ ID NO: 406918 - DNA, 91 bp, Homo sapiens
cgctggtgggcctggcggccaacgtgggaccctatggctccggagacagtgcacccctcatagagacgggggttcaccatgttagccagga

SEQ ID NO: 406919 - DNA, 76 bp, Homo sapiens
gattcgcagtggtcgcttcttctccttgccgttgccgagagatggatgagcagattagactgatggaccagaacct

SEQ ID NO: 406920 - DNA, 100 bp, Homo sapiens
gggggatatgacaaggatggaagaggtcctatgacaggatcaagctttgcagttcctgaccccttaatgcctgacccttccaagcaaccaaagaaccagc

SEQ ID NO: 406921 - DNA, 100 bp, Homo sapiens
agggcaaatccagacagaacctttgacttggtgttgaaagtgaaatgtcatgcctctgaaaatgaagccaaatggagcggagtccctgaaagatttttgc

SEQ ID NO: 406922 - DNA, 96 bp, Homo sapiens
catcaacaacaccctcattgctttcttcattttgactacgataaaagcatcctgaggttagcattacacttctcccagtggagcccatgacttctg

SEQ ID NO: 406923 - DNA, 100 bp, Homo sapiens
cgggcatggaggcttcgcgctgccggctcagtcccagcggcgacagatgttcttggcagctctgtcactcagctttattgctaagacactaggtgcaatt

SEQ ID NO: 406924 - DNA, 73 bp, Homo sapiens
gtgaccgagagcgtgaccgagagcgcgaatatcgtcatcgttagaagagagatggagtccctccaacttcaaa

SEQ ID NO: 406925 - DNA, 90 bp, Homo sapiens
gcctggctctgtgctgcgggtgctctgaaagcgtggatacccatcaacgaagttttgatattggaattcagattggctatcagcgacgca

SEQ ID NO: 406926 - DNA, 75 bp, Homo sapiens
cacagagggcgagccagggtggagaagagccagcccagggggaacacacctgaaactagaggaacagcttatgtg

SEQ ID NO: 406927 - DNA, 82 bp, Homo sapiens
tggaggcggcgggagggccgccggaggaaacgctgtcactgtggaaacgatgaggtttatataactttccaagacaaggaag

SEQ ID NO: 406928 - DNA, 74 bp, Homo sapiens
ttacagagttggaaaaccgaaagcagagacagcagtgttggtgtaatacggtgcccagtatgccgccaagaatg

SEQ ID NO: 406929 - DNA, 100 bp, Homo sapiens
gttgattgaaattatctctggtgctgcagctctgatatcaatgagtgtattcttgaaaactatcccgagtgctccaaccccaggttattttacatcattc

SEQ ID NO: 406930 - DNA, 97 bp, Homo sapiens
ctggcgtgtgcagaccccccggcgcctaccatgctgtacgtcggtgaccccgcacggcacctcgccacggtaaaatctgtaaaaactgggtcagttt

SEQ ID NO: 406931 - DNA, 90 bp, Homo sapiens
ctgttctttcccaaacccatactaatgttcatatgcagaccatcgaaagactggttaatggaagtatgcgagacttaagagctcaagtga

SEQ ID NO: 406932 - DNA, 75 bp, Homo sapiens
ctcctgagtggctgggactacaggttcatgcatgggagatctcagaccagttgttacagatccggcaggatgtgg

SEQ ID NO: 406933 - DNA, 97 bp, Homo sapiens
cgtcagttacctgagagccaagagcttctttgatggccagacgggtgcagggaacaactgggcgaaagggcactacacggagggcgcggagctggtg

SEQ ID NO: 406934 - DNA, 115 bp, Homo sapiens
agcagcacttttcacagcatcagcagtcatctcactagttatgttcaaaaaaaatgttgtaccatctttgggtaggcagacttccctgacgacatcagtgatacccaaagctgag

SEQ ID NO: 406935 - DNA, 100 bp, Homo sapiens
tttgggtaatggcaattagtcagcatcagttttacttggaccggaagcaaagcaaatgttctggacttggtgcctctttctgttatatgctttcctattt

SEQ ID NO: 406936 - DNA, 50 bp, Homo sapiens
gtttgcttccccttccaccatgattcaaccatcaactgatctagaatttg

SEQ ID NO: 406937 - DNA, 96 bp, Homo sapiens
ggaacggcagtgatcacacgtcggctgctgggaagatctggattctcgtttcagctggaatagtcaaatgatttcagttcgtgaagccaaagccat

SEQ ID NO: 406938 - DNA, 100 bp, Homo sapiens
ccgaagtaccgacccgagttatgcccaccctccaactttgcgacggaaatgtgtcatcgaaagccagcaattaccagctctggctgggtcgccacaactt

SEQ ID NO: 406939 - DNA, 50 bp, Homo sapiens
gtggatcagttggtagaaataatcaagaccagcatctcagacatgtcgaa

SEQ ID NO: 406940 - DNA, 50 bp, Homo sapiens
catgaagttcgggactatcttctgcaattctgtggtgttcttggtcacac

SEQ ID NO: 406941 - DNA, 83 bp, Homo sapiens
cagaaggcgctgctggagttccgcgacaccatcttcgacaacatcctcaagagaggcggcatgggtttccggaagttctcccc

SEQ ID NO: 406942 - DNA, 111 bp, Homo sapiens
cggcggcgctggggcccccagaagtgatcgctcagctggagaacgcggctaaagttctgatggaatgtgttccagaagatctagaactgaagaagaagatttttgctcagt

SEQ ID NO: 406943 - DNA, 87 bp, Homo sapiens
cctcgatcgaggacgacttcaactatggcagcagcgtggcctccgccaccgtgcacatccgaatggcatcagaggctccttgaaatg

SEQ ID NO: 406944 - DNA, 50 bp, Homo sapiens
tatgggcacaggcagtgtctggaattgagccctaatttgtttagaactgt

SEQ ID NO: 406945 - DNA, 83 bp, Homo sapiens
ccccagccgccatggatagcgacgacgagatggtggaggaggcggtggaaggtcatcatcagatttgaaatatttaaagtgga

SEQ ID NO: 406946 - DNA, 100 bp, Homo sapiens
gtcaccgctgtcatatccaggaacacaggagcaatatgcgtgctatacgtattggtcacgttggaatgcaaattgagcacatcattgaaaacattgttgc

SEQ ID NO: 406947 - DNA, 100 bp, Homo sapiens
agaccagcccggccgagccgagggccaccccctggtcctctgccctcgcgccccgctagggccagttaccatagaggttggtgaattagctacatgagca

SEQ ID NO: 406948 - DNA, 83 bp, Homo sapiens
tccaaagtttatactatcagaccttattttcctaaggatgaggctaatggtcgatttgaagtgggcaagaaaatctgtttgag

SEQ ID NO: 406949 - DNA, 75 bp, Homo sapiens
agctgcggctgctgctggaagtcacctatgaagccatcgtggacggagggctgaagaagatgcagagcagcctga

SEQ ID NO: 406950 - DNA, 100 bp, Homo sapiens
aacctgggaaggtggtgcttgtcctggctggacgctactccggacgcaaagctgtcatcgtgaaggaaactatggtccaggaggcagtggaggaagtggg

SEQ ID NO: 406951 - DNA, 100 bp, Homo sapiens
aacagggaatcttccacattcatgaaggtacagtagcagagggagctcccattattccaatttcagctcagctgaaatacaatattgaagttgtttgtga

SEQ ID NO: 406952 - DNA, 100 bp, Homo sapiens
ccgggatcgtgaccgagaccgtgaccgagagcgtgaccgagagcgcgaatatcgtcatcgttagaaggagtctctaccacccgtccagtttgactggagt

SEQ ID NO: 406953 - DNA, 90 bp, Homo sapiens
ctcaatacataaagaacagcgtaactccagacatgtctggagaggtgttggtgaatgttaaggagcactcccggcagatcaacgacatcc

SEQ ID NO: 406954 - DNA, 100 bp, Homo sapiens
tgagatttttcagggaacgcttaccaatgaaactcgatgcttgaactgtgaaactccaaggaagtatcgcctggggatgctggaggagaggctagttccg

SEQ ID NO: 406955 - DNA, 75 bp, Homo sapiens
tttttcttcaatgggcagcatatgaaagtggattatgggttctgtacagagtaatgagatgtgtgacggctgcaa

SEQ ID NO: 406956 - DNA, 90 bp, Homo sapiens
acctagagctgccaagaagcattcttcatctaaagataaggatcaagaattggttaaaatagttggaatacgatatgaagttgggccccc

SEQ ID NO: 406957 - DNA, 98 bp, Homo sapiens
aaaccagtgacatcaaggagttgaatattgttttgcctgaatttgagaaaacccacctagagcatcagaaaatgtttataggaggccttagctgggac

SEQ ID NO: 406958 - DNA, 52 bp, Homo sapiens
ggaatagatctttttgttggaggtactaggttttgacaagcttgcatcatgc

SEQ ID NO: 406959 - DNA, 99 bp, Homo sapiens
ccgagtccagcccaggaaaatggagaggttctcagctgctgcgggagttgaaaaagatggacgacaaagctcttttggtggaagtacagcttttagaaa

SEQ ID NO: 406960 - DNA, 82 bp, Homo sapiens
atggagatgggcagacggattcatttagagctgcggaacaggacgccctctgatcacagctaactttggagacctaccaaga

SEQ ID NO: 406961 - DNA, 74 bp, Homo sapiens
aggaccagacaaatcaaattagtggttttggtcatagacatgaatgactaccagaggaggaggtttgcttcccg

SEQ ID NO: 406962 - DNA, 100 bp, Homo sapiens
cggtcaatgagcactattttggattagtcaatgggcaagattcttgccaagagaattaatgtgcgtattgagcacattaagcactctaagagccgagata

SEQ ID NO: 406963 - DNA, 101 bp, Homo sapiens
tttttcattgttccactggacgctcatcagagggaagatctttttcctcaattggtgctggagaatctggtaaaagcaccattgtgaagcagatgaggatc

SEQ ID NO: 406964 - DNA, 76 bp, Homo sapiens
tggtggctcctgtattaaaaagcttccaagccgagagacgagttgtactgctgtcacaggaaatggacgctggatt

SEQ ID NO: 406965 - DNA, 74 bp, Homo sapiens
gtgtgcggtgctgctgagcttggcctcggcgtcctcggtgctcccaagaagatattgctgataaactaggtgtg

SEQ ID NO: 406966 - DNA, 82 bp, Homo sapiens
ccgcgtgtacccggttgtcctcaggcgctgtcagaacccttaggagaaatcttgagagtggacagcaattgtgaagatcgcc

SEQ ID NO: 406967 - DNA, 100 bp, Homo sapiens
agtttgtcacctggctcgatggcattaactgctgatgcaaaagagaaacaattctgggtgactcagcttcgagcttgtgccaaataccacatggaaatga

SEQ ID NO: 406968 - DNA, 105 bp, Homo sapiens
gtggcctccgtgggacatggagtgttccttccgctagtgatcctttgcaccctgcttggagacggacttgcttccggttagcactctacgtatatgaatatctgc

SEQ ID NO: 406969 - DNA, 99 bp, Homo sapiens
ctgatttagaaggaggttcaggctacggtgagccgaaggccctcaggaaagcagagagcttgaagaaatgtctctctgtcatggaagccaaagtgaagg

SEQ ID NO: 406970 - DNA, 82 bp, Homo sapiens
cggccgccgaaggggcgggatccgaggcaagcgttggttctgtgcgcctcaggagccttcacgtaaatgggtccagtcatgc

SEQ ID NO: 406971 - DNA, 121 bp, Homo sapiens
ggaaaagctcaaagaactaatttttgaagagactgctagattccagccaggatacagatcttaaatttgtcagatggcccactgcgtgaccttggttcagctgtccatttcctgtgaccat

SEQ ID NO: 406972 - DNA, 98 bp, Homo sapiens
tggaatgtgtaaccaatatttccttggcaaatataattagacaactaagtagcctaatatcaccttttgccatgatagcatttctttcattggacagt

SEQ ID NO: 406973 - DNA, 75 bp, Homo sapiens
ctgccccgaactgcccacggccggcagcgcttccaggacatgggcggctttgccatctggtgcaagaaggccaag

SEQ ID NO: 406974 - DNA, 100 bp, Homo sapiens
cgccgaagaagcatcgttaaagtctctcttcaccctgccgtcatgtctaagtcagagatgcaagtgctgctggaccaggcgggctgctgtatcgtgggtc

SEQ ID NO: 406975 - DNA, 99 bp, Homo sapiens
ggcagcggctgcggagaaggcgagcgaagagcgtttcccaaagtgtattctgcggaactagcacctactgtgttctcaacaccgtgccacctatagaag

SEQ ID NO: 406976 - DNA, 96 bp, Homo sapiens
attgctgctgctacttctgtattaggtttaacttgccaacatgtaagtcatgctatcagcgtgaatcatgtaaagagagcaatagctgagaatctg

SEQ ID NO: 406977 - DNA, 75 bp, Homo sapiens
cgggatttggtcgcgagcggcgacgacaacagcagttctgtagagagtttaaatatgaaggaatggcaggacggg

SEQ ID NO: 406978 - DNA, 73 bp, Homo sapiens
tcgtgcgcggtaagaagctgcgcggtagcgcggtgaggcattcaaaagtgcggcagaagagtgaggtggacat

SEQ ID NO: 406979 - DNA, 83 bp, Homo sapiens
tgatgcaatcaaagctcgacttctcaatcccaagtggccaaagacttccttgtgaaacctcctagtagaaaaagttcttggga

SEQ ID NO: 406980 - DNA, 75 bp, Homo sapiens
ggctgcgtgcacagcgccttgttccagcagggcctgatccagctatgtgttctcatttcacccaagaccattggc

SEQ ID NO: 406981 - DNA, 75 bp, Homo sapiens
gcggcgcggcggccgggccctcgagacggggacgaaaaatggctacaaacttcctagcacatgagaagatctggt

SEQ ID NO: 406982 - DNA, 82 bp, Homo sapiens
tgaagagttgtcccagctcggcccgcgggggagccccgggagccgcacggttttgggatttgagattgacgcggtgaactct

SEQ ID NO: 406983 - DNA, 88 bp, Homo sapiens
acttccttgtgctgtggatttgctaactcacttggatcctagcatgactatacattgtgacatggtcattacatatggattagaccaa

SEQ ID NO: 406984 - DNA, 75 bp, Homo sapiens
gtgctgcccgctttggagaacaacaaggagcagggcaccactgcctatgtcccacagcagtcctggattcagaat

SEQ ID NO: 406985 - DNA, 82 bp, Homo sapiens
ctgaagacaaaaatccagaagtacaagcagtctgcagaagatggctgtgccacccacgtatgccgatcttggcaaatctgcc

SEQ ID NO: 406986 - DNA, 83 bp, Homo sapiens
ccagtttgaaacgtaactggttccctgaccagggggatatgagactttctactcggaatatcctgagtgttgcgtggatgtaa

SEQ ID NO: 406987 - DNA, 98 bp, Homo sapiens
ggcgtcggccgaacagccccgcgggaatgtcgacgaggagctgaggggagaagcccgaggaagattgaccaattttgtaattctagaaacatggtcca

SEQ ID NO: 406988 - DNA, 75 bp, Homo sapiens
gaattacaaggtgagatcagccgcccggccaagctatcttctcgctagcaggagtacatcgatgcccaccctgag

SEQ ID NO: 406989 - DNA, 98 bp, Homo sapiens
ctatggactttccgaagacgaggttggtttgttggaccttgaactcaatcggctgacgaaagcgctatttttggctttagttgctctttccattgtta

SEQ ID NO: 406990 - DNA, 74 bp, Homo sapiens
ttgggatcaaatgtgagcctatggatcaagttttgtttggctatgccaccacagtcatccccagggtctataca

SEQ ID NO: 406991 - DNA, 90 bp, Homo sapiens
gttggtcttttcaaatctcagaactcccctcaggccgtgattgccttcatgttgtggagcccatgcctgtgcgggggcctgatgtagaag

SEQ ID NO: 406992 - DNA, 134 bp, Homo sapiens
agagcgaggccgagagcctcaagggcaagctggaggaggagcgagccaagctgcacgatgtggagcgaacatttagaagactttgaaatgctgtccttttggctttccaacacttgtcattttctcaattgcct

SEQ ID NO: 406993 - DNA, 83 bp, Homo sapiens
cttcagcgaggaagctacacttttcaccaaggaactggtgctgcagcgagagtatcagaagctttgagatcagcagggctacc

SEQ ID NO: 406994 - DNA, 96 bp, Homo sapiens
ggaagagcatgcattgtgggttactggaggaacccgacatggattccacagacaaatttacatgtattggagaccagaccagaagcccttctgaat

SEQ ID NO: 406995 - DNA, 89 bp, Homo sapiens
cgaggggaacggaggccagagctgcgttttcggctttgtgagaaaccttaccatcaaacacgatggccagcaacgttaccaacaagaca

SEQ ID NO: 406996 - DNA, 100 bp, Homo sapiens
ctgggaggggaattccagcaccgcagcaaccactccagaaactttccctccttcagaatctttggaagaactaccagaaacgagtgggaaaacaacccgg

SEQ ID NO: 406997 - DNA, 98 bp, Homo sapiens
tgggactgcgaagctatacaggctgatgtacagttacccagcacgtgtacctcctcctcctcctattgctcgggctgtagtgccctcgaaacgtcagc

SEQ ID NO: 406998 - DNA, 100 bp, Homo sapiens
cgttacccggggcaacagctgagccgtctgggaagggatgcatctgcagcatgtcagctgaaacaccaatcacattgaatatcgatcctcaggatctgca

SEQ ID NO: 406999 - DNA, 100 bp, Homo sapiens
tggaatgagttctgaaatggccatgaagaagtatgctgggggcgtggctgagtacagtggccagacgcaccgggtctgcctcctcatctgcaactcaccc

SEQ ID NO: 407000 - DNA, 129 bp, Homo sapiens
ctcgccccagccgccgccatgaaggccgtggtgcagcgcgtcacccgggccagcgtcacagaagtggagcagatcgaggctattgccaagtttgactacatggggcggtccccgcgtgagctatccttc

SEQ ID NO: 407001 - DNA, 100 bp, Homo sapiens
atagaagaagagagaacgaagcagatttgtaagagctggaaagaagactcggaatggcaggcatctcatggttctgactctagagataagccaaagcttt

SEQ ID NO: 407002 - DNA, 82 bp, Homo sapiens
aggagctggccccgccgcccgccctaccccccaagcagcggcagctggtgtgaccatgaagctcatggatgaggtcgccggg

SEQ ID NO: 407003 - DNA, 90 bp, Homo sapiens
gtttgtgagccaccaaaaccacagtgttctttgcctcaagacccagctattgttcagcatccctctctacctgccaacatcctgtattag

SEQ ID NO: 407004 - DNA, 98 bp, Homo sapiens
gctacagtgaagattctcattacaacagtgccacccaatcttcgaaaactggatccagaactccattggaaatgtttcaacgtgcgcaagcgttgcgg

SEQ ID NO: 407005 - DNA, 101 bp, Homo sapiens
tgggaggattggatattgtgaagcaatggctgccatccggaagaaactggtgattgttggtgatggagcctgtggaaagacatgcttgctcatagtcttca

SEQ ID NO: 407006 - DNA, 82 bp, Homo sapiens
tccctctgcccccccttccccacgcaaccccagatccatttacactttacagtagttgatgtcacttggcgatattcctgca

SEQ ID NO: 407007 - DNA, 102 bp, Homo sapiens
gatattgaagagaagaaatcgattaagaaaaaaattaaagaacttaagtttttagattctaaaattgcccagaacctttgaggagatgttaaagtaacccat

SEQ ID NO: 407008 - DNA, 75 bp, Homo sapiens
aagaaattcaaagtgcatttgtttcagttctatcagaaaatgatgaattttagatgcattgaagttatctacaga

SEQ ID NO: 407009 - DNA, 75 bp, Homo sapiens
ccaggagaagtttttatcaacaaaggcaaaggattcggatttattaagcttatgggcactgtgccccgactgcgg

SEQ ID NO: 407010 - DNA, 100 bp, Homo sapiens
cccgtagggtccccggcgccaggccacccggccgtcagcagcatgcagggcctggcgcaagcgctggtttgtcctccggcgaggccgcatgagcggcaac

SEQ ID NO: 407011 - DNA, 83 bp, Homo sapiens
gtcaaagttcacgctgccagtgtaaatcctatagacgttaatatgagaatttctcctgaactgctcttggtctccatgaaggc

SEQ ID NO: 407012 - DNA, 75 bp, Homo sapiens
cgagacccagcacatcgccgaccaggcaactgaggagatagaggaccgggaaacgctggctctcctggcagcaag

SEQ ID NO: 407013 - DNA, 100 bp, Homo sapiens
tcttgaggtgaatgtcggaatccattatctttcgggaaagctctctggggcagggattgacttctaaggactcttggtacatgaggaagaaacccggaag

SEQ ID NO: 407014 - DNA, 75 bp, Homo sapiens
gctgatacatagatgttggtcttctagcctacggaattgcccgccagctcatcctgcagtatggcttgaccctca

SEQ ID NO: 407015 - DNA, 90 bp, Homo sapiens
gattgttttaaagggaaacgatggggagcccagcatgcaatgatgctacctgttctgacccatcatatccgctaccaccaatgcctaatg

SEQ ID NO: 407016 - DNA, 95 bp, Homo sapiens
ctgccaggcaaggccatcttagagataaagccaccaatccttccaaccgccaggaggactgggaatacataattggcttctgtgatcagatcaac

SEQ ID NO: 407017 - DNA, 130 bp, Homo sapiens
tgcaccgcaaagcggggacccagaccctggagcctcagttggaagcagccgatccagcctgcggagcctgtggggcagaaaaatggctacaaacttcctagcacatgagaagatctggttcgacaagttc

SEQ ID NO: 407018 - DNA, 74 bp, Homo sapiens
cggtttctcggaaagtagcctcttctgcaagtggggcattcacacaggccctgggtgccaggccctgtggatgc

SEQ ID NO: 407019 - DNA, 75 bp, Homo sapiens
gacgccgagaagtactccttcatggccaccgtcaccaaggcgcccaagaaggcaattaagttggaatatgcaagg

SEQ ID NO: 407020 - DNA, 96 bp, Homo sapiens
acctcctccgcggacgccggggagaacccagcctaaatgcgatggccaggtattactgacacaagtgtggaagcgtttaaacctggtagaatgtga

SEQ ID NO: 407021 - DNA, 82 bp, Homo sapiens
gtggtgcctctggcagtgacgaggacgaagtgtccgagatcatggaagggaagtggttgctgtgtatgttactggtgcttgg

SEQ ID NO: 407022 - DNA, 82 bp, Homo sapiens
cgggacgcgggcgccaggaccggccgaacgcagagcttatgttcctgaggaagaattgaaggcagcagaaatagatgaagag

SEQ ID NO: 407023 - DNA, 83 bp, Homo sapiens
agcgtcggcgcccgcggccccggcagggtggactccattatgctggtggaagagggcttcagtgtgacgagtgtggatgccag

SEQ ID NO: 407024 - DNA, 82 bp, Homo sapiens
ccatcatccgcaagtttgagggccagaatcaggatcctcatgaccagccaaagagaagaagaattaggaagcataaatcaaa

SEQ ID NO: 407025 - DNA, 90 bp, Homo sapiens
cacagaagaagaaatgaaactggtgcacagatataaagaaatgttcaacgttgctgatatgattctataacagactcttccagaaatgat

SEQ ID NO: 407026 - DNA, 75 bp, Homo sapiens
ggagcacctgaagagatgccagcagggcgtgatggtgggcatgggtcagaaggattcctatgtgggcgacgaggc

SEQ ID NO: 407027 - DNA, 100 bp, Homo sapiens
attcctcaaacagaatttcacacagggtattccatggagaatgagccaagaaatatttttcttcatggccctgatcagcaagtaaaaataggagactttg

SEQ ID NO: 407028 - DNA, 100 bp, Homo sapiens
cgcctgcctgctccgccccagacctgtcggcgaaaggagcttggaggactcctgaagtatgtacgacccttcttgaattccatcagcaaggctaaagcag

SEQ ID NO: 407029 - DNA, 90 bp, Homo sapiens
gaaagtgaattttgtagaaggagaagatacatccagaaagtgcccagaagaaacttcctgctggaaaaaatgaaaaagcagtatttataa

SEQ ID NO: 407030 - DNA, 75 bp, Homo sapiens
cggaggatgagcctgcagagcgcgcagtacctccgtctccagcttgtacctcatatcagatgactccgcaagggc

SEQ ID NO: 407031 - DNA, 89 bp, Homo sapiens
tctggataaggaccagtacctgcccaggaaactggtagctgcaatcaacccaaatcaccctcttgctcagatgcctttgcctccgtcga

SEQ ID NO: 407032 - DNA, 83 bp, Homo sapiens
ggcagtgacgaggacgaagtgtccgaggctggttggaaggaaaatcatgcaacattcatgagcgaactaaaaaatcttcaggc

SEQ ID NO: 407033 - DNA, 101 bp, Homo sapiens
agtgattttgaattttttggcagcagaagggcgactgagtactcaacatattgactgtatttgggctgcagcacagagaacccacaatcctattaacagcg

SEQ ID NO: 407034 - DNA, 76 bp, Homo sapiens
tacaaactcctaggagggcttgctgtgcggagagcctctggatttgtgtttactcgtttggatggttccatggccc

SEQ ID NO: 407035 - DNA, 90 bp, Homo sapiens
ggggccagttagaacagataactggcaaaggtgcttcggggacattccagatacgtaggtaacctttccagagatgtgacagaagtcctt

SEQ ID NO: 407036 - DNA, 83 bp, Homo sapiens
agcagctgccggagcccgagtggatcggggacggagagaacacgagcccatcagctgtgtcagcgtgttatgatgccgtcccg

SEQ ID NO: 407037 - DNA, 90 bp, Homo sapiens
caccggatcaacttcgacaaatagaggagagacttcagcatgcaaaccttcatctgttcggcttgcaccgtcattttcattccatgctgc

SEQ ID NO: 407038 - DNA, 75 bp, Homo sapiens
ggaagtataacattgttacactggacagattaattctctgcctgggagtatgagcctgatgtgggcagaatccag

SEQ ID NO: 407039 - DNA, 82 bp, Homo sapiens
cggagctgggcgcggattcgccgaggcaccgaggcactcagaggagatccacatgaagaccatgcccgccgccatgttcagg

SEQ ID NO: 407040 - DNA, 90 bp, Homo sapiens
gacgttgaagatgtcggccttctgagccgactgcggtggtcaagaggaggcagacagtggggaggaagaatgccggtcacagcccaggag

SEQ ID NO: 407041 - DNA, 100 bp, Homo sapiens
tgatgagctttgtgcaaaaggggagctggctacttctcgctctgcttcatcccactattattttggcacaacaggaaggaactgtctatcttgaccatgc

SEQ ID NO: 407042 - DNA, 75 bp, Homo sapiens
tgagccggccgcgggcgcgaccggaggcagttggaaaatggatataccttatttgattatgatgttggactgaat

SEQ ID NO: 407043 - DNA, 90 bp, Homo sapiens
gtatctaccgtcatcgtaaagattatgacaaatcacaacttgtagagggattaaagcctgtggtttccacagaagcaccacctatcatat

SEQ ID NO: 407044 - DNA, 100 bp, Homo sapiens
ggatgagagcaagatgctggtgatgcaggaccccatctacagtatgaagtgtaacagaacagactttaccacctgaaactgctgcttcaagttcagatca

SEQ ID NO: 407045 - DNA, 73 bp, Homo sapiens
gtgggcagtggcccagctggcttctacacggcccaacacctgctaaaggtcaacccccagaatcagctcttgt

SEQ ID NO: 407046 - DNA, 83 bp, Homo sapiens
aaaaatttgctggatattgatgcgccagtcactgatctgcaactatgtgggaccagcaaaggttattgttcagttggtcacaa

SEQ ID NO: 407047 - DNA, 89 bp, Homo sapiens
ggggccttccacaccccctccgtgggtgtgtggccggtctaattgaagccaacggagaactcaaggtcttcatagaccagaaccttagt

SEQ ID NO: 407048 - DNA, 82 bp, Homo sapiens
caggactgcctgagacaagccacaagctgggtaaatgggaagttggtagctctgaaggtgatcaggctgcaggaagaagaag

SEQ ID NO: 407049 - DNA, 83 bp, Homo sapiens
tcctgtaacccagcctgtttcacttcttgaaggggacatcagaaaagtgtgaagcatgagaagggttagaggcactgttgttg

SEQ ID NO: 407050 - DNA, 96 bp, Homo sapiens
gaaagtttttccaaatattcatctgtacagttggtcatgttcggagtttgacctgaatgagattcgcctgatagtttaccaggactgtgacaggag

SEQ ID NO: 407051 - DNA, 100 bp, Homo sapiens
gaacccactgaggcacccggacctcgtcaggccgctgcagatgaccattccagtgttgctaacaaccacaagcagaatttgatgacggtggcaaaccttg

SEQ ID NO: 407052 - DNA, 75 bp, Homo sapiens
tagattgtgtaggcgttggtcttctgatagcaactttaatgtggtggtttcagacaccctcacaggttttctacc

SEQ ID NO: 407053 - DNA, 100 bp, Homo sapiens
gtgacacatattctgtctgtccacgatagtgccaggcctatgttggaggtgtccctggccagtgtccttccacctgtccacaagcatggggaacatcttc

SEQ ID NO: 407054 - DNA, 96 bp, Homo sapiens
ttcggacagcaagcatgtggatgtacatctagttcaactaaagtccctggatggctttgtatttgcactaaatcaggaaggaaaatttttgtacat

SEQ ID NO: 407055 - DNA, 88 bp, Homo sapiens
aagacttgaacctagaaaatttcactgcaaagatccaaaattaacgggacaggctcttattccaggatcagtaatataccacaaacag

SEQ ID NO: 407056 - DNA, 98 bp, Homo sapiens
cgtcctggaattacttcaatcaagtacaccaggggttggaaaaaccacactaggcaaagaacttgcgtcaaaatcaggactgaaatacattaatgtgg

SEQ ID NO: 407057 - DNA, 50 bp, Homo sapiens
agattccaaaacttatgtcaaaaacagaagcctatcagttgctgaagaag

SEQ ID NO: 407058 - DNA, 100 bp, Homo sapiens
ccatccagtattgtgctagaggaggaccacaaagtggaagagtcctgtgccattaaaaacaacaaggaagctttcagtggccgcaagcttcttatcattg

SEQ ID NO: 407059 - DNA, 100 bp, Homo sapiens
aattcggagcctcccctgcagcgactcggaagattcgaggcggcgggggacaagtcggcgccccagagcggacgagatgggggactcaaggagatttcac

SEQ ID NO: 407060 - DNA, 100 bp, Homo sapiens
gaatttgctaaacttaaaagcaagctggttctctgggatataaataagatgtgtcttgctgaatcagggctctcttatccctgccatcgacttacagtgg

SEQ ID NO: 407061 - DNA, 98 bp, Homo sapiens
gtcctttgttttggattacataaaccagtcacccaagtgcattgcctttggaaacgaggttcaagcaattctgagaagaaactggaatcaatacaaaa

SEQ ID NO: 407062 - DNA, 98 bp, Homo sapiens
gcacctgcgcgaagctggccaaagcctgcccagacggctcacctgtgcgggatggaacaaaagagatcctgaaggagctagacgagtgctacgagcgc

SEQ ID NO: 407063 - DNA, 96 bp, Homo sapiens
gtcctgttccaccttcagagcgtcacggcgtacgccctcatggggaaaatctccccggtgactttcagatatgagggaaggcaccattggagatat

SEQ ID NO: 407064 - DNA, 100 bp, Homo sapiens
aaagcacaaagcatggagaccctccctccagatgctggcatcaccatctacatcaggtcagctgtctcagtttggggcaagtttatacgggcaacaaagt

SEQ ID NO: 407065 - DNA, 100 bp, Homo sapiens
gcagttttcatcatctaagtgaaagggaaagaatatggcaaagctgatgcaagatgggtttattttgatccaaccattgtgtctgtggaaattctgaccg

SEQ ID NO: 407066 - DNA, 75 bp, Homo sapiens
cagctatcccctgaggcccgacccagaaaggcctaaagaatgtatttgacgaagcaatattggctgccctggagc

SEQ ID NO: 407067 - DNA, 80 bp, Homo sapiens
cgccgccgctcaccgcagccccctcctggcgacccgcaaactacaaactcacacatacggtgtcccatttaaaacgtatt

SEQ ID NO: 407068 - DNA, 50 bp, Homo sapiens
cagggaactggatgtcagcaagaatgttggcaaacatgaattgactgggc

SEQ ID NO: 407069 - DNA, 82 bp, Homo sapiens
ctgccgaaggacaagccccgatatctgatgggggttggcagcctcccgcgacgatgcccctcaacgttagcttcaccaacag

SEQ ID NO: 407070 - DNA, 97 bp, Homo sapiens
cgcatcctatggctcaaagaaagatgattatcggttggattgcagccctgtctacactggataatcattccctggccatatcagtcatcatgatggt

SEQ ID NO: 407071 - DNA, 100 bp, Homo sapiens
acccttccatttcaaagaacagaatgctaaggaagctgtggcaattgccctcaaattggctgtagccacacggatataagaaagtcagatcttatccagg

SEQ ID NO: 407072 - DNA, 75 bp, Homo sapiens
caggtgggagcctggagggcaaagcgtggtgcgagcaggtgctgactctggctgcccaggagctgtctaggcctg

SEQ ID NO: 407073 - DNA, 98 bp, Homo sapiens
cacacaggcctccgtgaagaacttccagatcatccatggcaatgaccgacctgaaggagaagaaggagaaggtggaggagaaggcaagccggaaagag

SEQ ID NO: 407074 - DNA, 98 bp, Homo sapiens
ctctcgccctgcatataattagcctgcacacaaagggagcagctgaatggaggttgtcactctctggaaaagggtggcctcctgacaaggtgatccgg

SEQ ID NO: 407075 - DNA, 96 bp, Homo sapiens
tacgcctgttcccagagttcgattaccagttgaccagtgcagagctctcctccttaccagcctttagttcacctggggggctgtcgctaggcaatg

SEQ ID NO: 407076 - DNA, 100 bp, Homo sapiens
agcggctggagagcctgttggagaaacacaaagaggcaggcaatccatggaccttgtggaacttgtgtctctttttcccacgctggctggacttgcagga

SEQ ID NO: 407077 - DNA, 142 bp, Homo sapiens
agcggcgagctgggtggtctggagaccatggagaccctcacggagctgggcgacgagctgaccctgggagacatcgacgatggcagaaacggtggacacaagcgaaatggtcaacggcgctacagaacaaaggacgagctct

SEQ ID NO: 407078 - DNA, 75 bp, Homo sapiens
acattgtggacagtgacagcgatgctgaggatcgaggaacgttgtctgatgatatcatcaagttgaatcgaaagg

SEQ ID NO: 407079 - DNA, 90 bp, Homo sapiens
gaagagcgcttgggacctgaacaaccagcagcgatacccagattctctaagaggaactccggcgcgtcagagtaacagaagcgagagcac

SEQ ID NO: 407080 - DNA, 83 bp, Homo sapiens
ccgggatttgggtcgcagttcttgtttgtggatcgctgtgatcgtcacttgaaacgcttcgttaagggactcaggcagtacgg

SEQ ID NO: 407081 - DNA, 75 bp, Homo sapiens
agtgcgtttgggaatgtcaagctggtggtccacgactgtcccgtctgggatgggactgaggaagacccacaggca

SEQ ID NO: 407082 - DNA, 82 bp, Homo sapiens
aggactcgctcgacccgtccttcactcacgccatgcagctgctgacggcagctcctctggtgcaagtgtggtagctattgac

SEQ ID NO: 407083 - DNA, 82 bp, Homo sapiens
ggaacgaggcaaggagctaaagcagcgtgcgttcagccctggggtccctggtgctgaaccgcctgcgtccagttgccagcgg

SEQ ID NO: 407084 - DNA, 50 bp, Homo sapiens
tctggattgtagccataagtggacttgcacaccttgggcccaccccacct

SEQ ID NO: 407085 - DNA, 75 bp, Homo sapiens
ggcgccgtcgcgccactcctccgaaatgccgggacattctgcttcctgtcatcaccaaagagctgaaggagctgc

SEQ ID NO: 407086 - DNA, 83 bp, Homo sapiens
tgcaaagattacgtgagcatcttcgtctgcagtgattggcagctcctgcggatcccagtggtagctattatggccactggtgg

SEQ ID NO: 407087 - DNA, 75 bp, Homo sapiens
ggaaaatgcgctcgggctggaccagcaggccttcatgccccgaggactagcagacaaacaaggacctgaggaatg

SEQ ID NO: 407088 - DNA, 100 bp, Homo sapiens
ggaggaagtaggggtgcacctcagcactatcccaagactgctggcaacagtacgtagagaaatcgacactcttaatgaacgtttagctgctgaaggacaa

SEQ ID NO: 407089 - DNA, 100 bp, Homo sapiens
gacttgtctcttatttagttctggggagcgcctcgtcgacatgagtgatgtggaggaaaacaacttcgagggcagagccatccggctgtccttagagcaa

SEQ ID NO: 407090 - DNA, 90 bp, Homo sapiens
gtttatctcaaggcctgagtagccggtaacaaacgagggttcccgggattggaccgacgcagccatgaggcggggtttcaccatgttgcc

SEQ ID NO: 407091 - DNA, 75 bp, Homo sapiens
acctagtatttgaatttgctagtaacgtcatggaggatgaacgacagataaatttgcgcctcattttggtaagcg

SEQ ID NO: 407092 - DNA, 100 bp, Homo sapiens
ccccggctggggccgccgccttcgccgccaagatgccccggtaccgaggggcggcgctggcgcgggaggagatatcagttttagagaatgtggcgtggag

SEQ ID NO: 407093 - DNA, 100 bp, Homo sapiens
ctgaatcctgagacgacagtggtggccatcttcccatctcccatgatgtatgctggaccaactgaggagaacttgcgcctgtcaggggctggatccagaa

SEQ ID NO: 407094 - DNA, 100 bp, Homo sapiens
agggaaaagggacgtaggaagaagggcaggacctgggcggaggccgccaagacggacattggctccctggattatcaagagtttgtagttgacattgaat

SEQ ID NO: 407095 - DNA, 71 bp, Homo sapiens
tgatgggaaacagataaaacttcagatatgggatacgacttgggaagatccccatgaaaaagataagagca

SEQ ID NO: 407096 - DNA, 75 bp, Homo sapiens
cttcgtctttgcagcgtagcccgagtcggtcagcgccggagctcaccatggatgatgatatcgccgcgctcgtcg

SEQ ID NO: 407097 - DNA, 80 bp, Homo sapiens
tggaacgagaagacagcagtgaagaagaggaggaggaaattgatgatgaggaagaagaatttggacttgatgaagaagat

SEQ ID NO: 407098 - DNA, 100 bp, Homo sapiens
tgagcctcggaaagtgctcctgcggctgtatggagcgattttgcagatgctgccactgcagagccccgccatggaagacacgccgttggtgatatcgaag

SEQ ID NO: 407099 - DNA, 99 bp, Homo sapiens
ggacctgtgctggccgcgggagaggtaaacagaacaccaggacatcccagagtctgggaaatgaaaataccagagcagagtgttcttcttctgcatgcc

SEQ ID NO: 407100 - DNA, 88 bp, Homo sapiens
gaaggggtggcggagagggtacctggccccacaccagtgagaagcatcagcaccgtgaacttgtctgagaatagcagtgttgtcatcc

SEQ ID NO: 407101 - DNA, 100 bp, Homo sapiens
aggaaattcatccagagggtccaggccatgaagagtcctgaccacaatggggaggacaacttcgcccgggacttcatgatcttgatgtggaagaaatgga

SEQ ID NO: 407102 - DNA, 150 bp, Homo sapiens
tttttccggtgcacgcgagtgcttctgaaacgtcagctgcgctcccctaggagtgctgagcccgcggaaccgcagccatgatctatgggagtcgtcagattatactggagaaagaggaaacagaagagctaaaacggtttgatgatccag

SEQ ID NO: 407103 - DNA, 98 bp, Homo sapiens
tgaggaaagcagacattgacctcaccaagagggcgggagaactcactgaggatgaggaatagccaggtctggctgggtcggcacaacctgtttgagcc

SEQ ID NO: 407104 - DNA, 83 bp, Homo sapiens
cttattcccttcaattcaagtaacaggtgaaatgacaatggatgctctgttggctcgattgaaacttctgaatccagatgacc

SEQ ID NO: 407105 - DNA, 75 bp, Homo sapiens
ctctgagggagggtccgagccagccgctgttttgccggaggagcccctcaggccaatgattgaagatagtgggaa

SEQ ID NO: 407106 - DNA, 100 bp, Homo sapiens
aacgccgccttggacctcctgggaggcgaggacggtctctgccagtataaatgcagtgacggtgtcatggagaaactccagctgggcccagagattctgc

SEQ ID NO: 407107 - DNA, 100 bp, Homo sapiens
tcaacctcttccccaatttcaatgcgctcaccatctgctacctggatatgctgatgaccagtgaggagcgccggaagcagctgagggaccagtactgctt

SEQ ID NO: 407108 - DNA, 119 bp, Homo sapiens
aagtaacaaccagtttgtattgtaccgcataactgaagccactaagacggaatggaagttggatacactttgtgacttgtacgagacactgaccattacacaggctgttatttttctca

SEQ ID NO: 407109 - DNA, 100 bp, Homo sapiens
tcgcctcctccgctgtctccctggagttcttgcaagtcggccaggatgtctcaggagtgcatcaagcctgtcaaagtggaaaaaagggcgggaagtggcg

SEQ ID NO: 407110 - DNA, 50 bp, Homo sapiens
ctctgatctcaacattttggctgaacaatcttcctgagctcttttcgggt

SEQ ID NO: 407111 - DNA, 100 bp, Homo sapiens
tgggaggtggagcgggcggagctgcagatacaaggtctcgctgttctacctaggctgttctagaactcctaatgtcaagctatcctcctgcctcggcctc

SEQ ID NO: 407112 - DNA, 98 bp, Homo sapiens
ctcggttaagggaaagcgccgagatgacgggctttctgctgccgcccgcaagcagagctcgccaaggagagcgagcggctgcaggccatgatggccca

SEQ ID NO: 407113 - DNA, 83 bp, Homo sapiens
ggagtctctccaccgcagacatgacgaagactgaaatacagttggtgcagagtctgggggtgcctccagagaggattatctat

SEQ ID NO: 407114 - DNA, 100 bp, Homo sapiens
aggaaaacaacttcgagggcagaaataactgaagtgaagtgatggactccgatttggagagtagtaagacgtgaaaggaatacacttgtgtttaagcacc

SEQ ID NO: 407115 - DNA, 115 bp, Homo sapiens
gactcctgcccgcggcccccgcatgacacccagcgacctgcgcaacctcgacgagctgggaggaagagatagtcgctctggatcacccatggctagacgctgaaaacccacctgg

SEQ ID NO: 407116 - DNA, 100 bp, Homo sapiens
gcaaggaacaaaatgtttgtaaattctccttttaccaaggttggaaaagagactgttcaaaccactgaggatcagattttgaagagagatatgccaccag

SEQ ID NO: 407117 - DNA, 101 bp, Homo sapiens
cagtaaaaatcattaaattggagcctgctatgaaacccacgtagtcgaacaccgtgatgcttctcctgcagggcgtgtgatgaggaggcgagcttggcttt

SEQ ID NO: 407118 - DNA, 83 bp, Homo sapiens
aaggaactctatcccaggaatacagctttgcattaggaactgatgaggagtttcaacagagacaggcggattttttgtgccat

SEQ ID NO: 407119 - DNA, 100 bp, Homo sapiens
ggccatggcgtacgcctatctcttcaagtacatcataatcggcgacacagtgcatccactctgggagagcgtggacctggttcctgggggcgatcgccag

SEQ ID NO: 407120 - DNA, 100 bp, Homo sapiens
ccgtgacccacctggtacatcgcctcagggcattcatttcaggctccttctaaatggccaaggtatctctgcattagccagattggacatatgtaaaggg

SEQ ID NO: 407121 - DNA, 121 bp, Homo sapiens
tcttgatctttctggcagtttccctcccactccttgccactgacccttcttccttttatagcattgagaaggatgccaacacagctcagagtccttataagaaactgaaagaagcattatc

SEQ ID NO: 407122 - DNA, 90 bp, Homo sapiens
tcatctgtggatggagtattggaaagaccacagcaagattctttcattcgtctcctcctagcctgggggaccaggctcgaactgaccctg

SEQ ID NO: 407123 - DNA, 100 bp, Homo sapiens
cacagaaggactgggatgatacaccttttccacagggaattgagttggccccttcacagatgtagtcactacaaatcttaaattgcgaaatccatcggat

SEQ ID NO: 407124 - DNA, 83 bp, Homo sapiens
aaatgagcaacctggaatcatgggagaaaaccagacctccacttccaaggatatagagcagggtaatctacagttgctgcaga

SEQ ID NO: 407125 - DNA, 75 bp, Homo sapiens
ccggcgatagcccggcgctcatgacagataagccaatggacacgtcagtgttatctgaagaaggaggagagcctt

SEQ ID NO: 407126 - DNA, 98 bp, Homo sapiens
gggagcttctcagccattttccacagatcagaatttacatagtacatgacgaagttaaggataaagcttttgaactagaactcagctgggttggtgaa

SEQ ID NO: 407127 - DNA, 90 bp, Homo sapiens
cagggggcacaagaagtccggaaccatcccttcttccaggtggtactggccatgccctacgatacgcccgtgcctggctatcgcaacaat

SEQ ID NO: 407128 - DNA, 100 bp, Homo sapiens
gatgaggataacatccctccagaagatgcttgtacctccttttaaacctcaagtaacatctgagacagatactagatattttgatgaagaatttacagct

SEQ ID NO: 407129 - DNA, 75 bp, Homo sapiens
ctgcatcggctcccggactgtgggttatcaatactctggctgaccatcatcatcgtgggactgactttggtggaa

SEQ ID NO: 407130 - DNA, 90 bp, Homo sapiens
ggcctggaggaagcagtcccgcaggaaggctggatccagacccctttgtgcggcacaccttctggaccttggccttcgggggtgtcttca

SEQ ID NO: 407131 - DNA, 101 bp, Homo sapiens
ttccaaagagatacagggcagaggaaaatgcaagaagactgatggagcaggcttgcaatattaaagtactaggttttgacaagcttgcatcatgcgtgagt

SEQ ID NO: 407132 - DNA, 74 bp, Homo sapiens
tggaaggtgcgtgtggggctgggtctcggagtgggagacgtggagtgcagatgatgatgtacctattctcttat

SEQ ID NO: 407133 - DNA, 83 bp, Homo sapiens
cttcagacagcatatttgagtcatttccttcgtacccacagtgcttcatgagaggacttcattgacttaactagagagaccag

SEQ ID NO: 407134 - DNA, 97 bp, Homo sapiens
tttagagctgcggaacaggacgccctctgatgtggcttcgtcctgttcatcgccaactaggggaagcgaatgaggagtttgcactccgtgtacaaca

SEQ ID NO: 407135 - DNA, 51 bp, Homo sapiens
gtgaagaccaccgcagggcggccgagccatccgggtgacctgcataggttc

SEQ ID NO: 407136 - DNA, 51 bp, Homo sapiens
aagttctgttttccctttgacgttgaaagcactattcatggccgaattgat

SEQ ID NO: 407137 - DNA, 87 bp, Homo sapiens
cgggtcttgggtcctccgagagcagcagcgtgataacaatccatattcctcatttggagcaactctggtgagggatgatgagaagaa

SEQ ID NO: 407138 - DNA, 107 bp, Homo sapiens
agcctggaggctccgggcgcggggaagtcatgctcgcttcacggaggcaatagctagccggaaacttggatttaactggccagaagcaggtattcaaagcagagaac

SEQ ID NO: 407139 - DNA, 50 bp, Homo sapiens
ccatagtacctacagcagcactccaggtcagcccaaggccaaccccactg

SEQ ID NO: 407140 - DNA, 100 bp, Homo sapiens
cagctgccgaagtcagttccttgtggagccggagctgggcgcggattcgccgaggcaccgaggcactcagaggaggtggcagtgctccttttggactttt

SEQ ID NO: 407141 - DNA, 82 bp, Homo sapiens
caccctcaacaaacaccagcgctttggtgtactaatggtcacttgatgtgcgctggctgttttatccacctactagcagatg

SEQ ID NO: 407142 - DNA, 75 bp, Homo sapiens
cggagccctggaagcagcagctcaccgaggacggggactcgtcttcgccttgatcgtgttctcctgcatctatgg

SEQ ID NO: 407143 - DNA, 75 bp, Homo sapiens
aggatgagcctgcagagcgcgcagtacctccggtatggagatggtccacgtcctcccaagatggcccgatacgac

SEQ ID NO: 407144 - DNA, 100 bp, Homo sapiens
cgcggcgtgatcaccgaccagaactcggacggctactgactctaaaatagagctcaagcttgagaagagagaaccactaaagggcagagcaaagactcca

SEQ ID NO: 407145 - DNA, 87 bp, Homo sapiens
gccccctcccccctccggcgcggaccccgcgtgcgccttgctcgcccgcagccccgagaccgcagagctgagctcaatgtgcagcaa

SEQ ID NO: 407146 - DNA, 100 bp, Homo sapiens
ccgcctgccttctgccgccggccggcgcgtcgtccccacagctgcacagttggggatcttcaaaccaagatagatggcttggaaaagactaactcaaagc

SEQ ID NO: 407147 - DNA, 101 bp, Homo sapiens
ggtggccaaagtggatgaggtgaagtccacaatcaagttccaaatgaagaaggtgcaccaggccgtccagggagcccgggcctgccgggtatgccaggccg

SEQ ID NO: 407148 - DNA, 75 bp, Homo sapiens
catcgtgtctgcctctggtgacaggaccatcaaagagtgccccagtggtgtggtcaacgaagacacattcaagca

SEQ ID NO: 407149 - DNA, 97 bp, Homo sapiens
gggcagcaataaaatcaagctcaagagtcgcctttcaggcaccgaccgtcacgagctaacttcctggaagagctttccgtctattttcaaattcttt

SEQ ID NO: 407150 - DNA, 96 bp, Homo sapiens
gacattcccaagaatggcaagttaaacatacagtcgcctctgacaagccaggaagggaaaaggccgaggcatcagcgtgtgaagaccgcaaagacg

SEQ ID NO: 407151 - DNA, 75 bp, Homo sapiens
acaaactcgaagaacagctgtggaaagaagttgcaaaacactggggtgtcaaattgagaaccaggtagatcccca

SEQ ID NO: 407152 - DNA, 50 bp, Homo sapiens
tcctgcatagctgggactacagattcctataggcaatggaaactgatctc

SEQ ID NO: 407153 - DNA, 100 bp, Homo sapiens
caagacctgcctcctgttccgcttctcagaggacgccttcaacaccaccttcatctccaccatcgctaccaagtcaggattgttacccccaccacctgcg

SEQ ID NO: 407154 - DNA, 83 bp, Homo sapiens
ctacttttcaagacaccaagtgagaggccaaccaggtactccaaagattcaggtttactcacgtcatccagcagagaatggaa

SEQ ID NO: 407155 - DNA, 75 bp, Homo sapiens
ttgaagacttgctagttaggattttattactggcagcatgtatatcttttcttcaggatgagttagagaaaggtg

SEQ ID NO: 407156 - DNA, 97 bp, Homo sapiens
cgcaatcaccccttcctcactcagttgttctgctgctttcagacccccgcatgtaaggaggaatcaagaagctgtgacatattctgaggacctccaa

SEQ ID NO: 407157 - DNA, 100 bp, Homo sapiens
tttactgggacgtggaattttacatcctgcagtgaacgccactttgtgtctctctgtcagaaatattcaggtgcagtagacattgttgcaatcatgatcg

SEQ ID NO: 407158 - DNA, 51 bp, Homo sapiens
cgacggtgacacgcttccctggattggggtgctggtcaagataaactagga

SEQ ID NO: 407159 - DNA, 100 bp, Homo sapiens
accgtctgcggacagacctgcacaaaccctgtgaaagtgcctggggagtgttgccctgtgtgcgaaggacccatggatgaaggaccagatcttgatctag

SEQ ID NO: 407160 - DNA, 50 bp, Homo sapiens
tggtgcagtgcgagacgctagaggggagtgcatccgccccaacccttttc

SEQ ID NO: 407161 - DNA, 90 bp, Homo sapiens
ccacctccgctgctgctgctgctcttcccgctgctgctcttctccaggctctgtgtaattcgccaaaatgacgaacacaaagggaaagag

SEQ ID NO: 407162 - DNA, 98 bp, Homo sapiens
cagcgatcccacattttatatgaccgggcagataagggcctcgctctgttacccaggctggagtgctgtggtgtgtttgtgactcaccgtagccttga

SEQ ID NO: 407163 - DNA, 100 bp, Homo sapiens
gaggatggtcgaataaatctcttcagagctgatcacaaggaagctgtaagaaccataggcttcattgaggaccctgagaggaagtatcactttgagtgca

SEQ ID NO: 407164 - DNA, 50 bp, Homo sapiens
tggacacctaatacccacagtcctccaggacaaaggaaaggagctctctg

SEQ ID NO: 407165 - DNA, 101 bp, Homo sapiens
ttactcccaaatgtctcatcaaaaatgtgcaaatatgaagtaaatggggcaaaatcttaataagaagtgaatgtaggttgagcaatgtttaaagcgtttga

SEQ ID NO: 407166 - DNA, 90 bp, Homo sapiens
attttgaccaagcattttgtaaggaaagaccggcagagaccaatgccaatgtggacaactcggcgtccccctcggtggcccagctggccg

SEQ ID NO: 407167 - DNA, 101 bp, Homo sapiens
cagtacggagggaaggcctgcgtgggggatgtgcaggagcgtcagatgtgcaacaagaggagctgccccgtggggcgtgtggtggacatctactccaagtt

SEQ ID NO: 407168 - DNA, 99 bp, Homo sapiens
ggagctaggcaaggtggtgactaagaaattcagcaaccaggagacctgagttgctgtacctcaaccaggagcttctgtacaaacaaagggaattaaacc

SEQ ID NO: 407169 - DNA, 100 bp, Homo sapiens
ctcaaatataggcattctgatgggaacttgtgtgttaaagtaacagatgatttagttatcccaccaaatattttggttgtgagctgggagcacagaccca

SEQ ID NO: 407170 - DNA, 50 bp, Homo sapiens
ccggagcagatacgaccattgttaacaatattgagaggatccagaatcca

SEQ ID NO: 407171 - DNA, 83 bp, Homo sapiens
tggaacttcgttgcttgcttgcctgtgcgcgcgtgcgcggacatggcctcaaacgctcccggagccctgcctgttccctgtcc

SEQ ID NO: 407172 - DNA, 101 bp, Homo sapiens
agaagctttatcatcggttattaaggagcttcgcaaggctactgaagcactgaaggctgctggcaaaggggacgtcccaacgaagagaccacctgtccttc

SEQ ID NO: 407173 - DNA, 50 bp, Homo sapiens
aaatggagcagacctggacgaggttccagagagattcctggaagttgctc

SEQ ID NO: 407174 - DNA, 73 bp, Homo sapiens
gaagctggccgagcaggctgagcgatacgacggaaggcgctgcggcacatgcctccactctctctctcaccag

SEQ ID NO: 407175 - DNA, 87 bp, Homo sapiens
ccatacaggaacagggcagacgttagcgtgagtgatcactctcaatcccggattcatgatgttgctatcaaaagttgagaaattgtc

SEQ ID NO: 407176 - DNA, 98 bp, Homo sapiens
gtggtggtcggcgggggcggcgtgggcaagtcggcgctcaccatccagttcatccaggtactctttgagcacatcaaattcttccattgccgctcttc

SEQ ID NO: 407177 - DNA, 75 bp, Homo sapiens
gggctatctggtatctgtagatggctacatgaacatgcagctctggaggctgccatcgagaacctcaatgaagcc

SEQ ID NO: 407178 - DNA, 100 bp, Homo sapiens
tgcttacggttttgagaagccttccgctattcagcagagagctattattccctgtattaaagattgcaggacaaacaacgagtaaatgtatcgagtggat

SEQ ID NO: 407179 - DNA, 75 bp, Homo sapiens
ctggtttgtgctgactgccgagtcactgtcctggtacaaggatgaggaggtgaaccgggtttatgtgattttcga

SEQ ID NO: 407180 - DNA, 75 bp, Homo sapiens
gctatatactttggttacctatgtacctgttaccactttcaaaaggctgctaaggaagcaaaaaaggctaagcaa

SEQ ID NO: 407181 - DNA, 100 bp, Homo sapiens
gtgaggcccaacagcggaatcatcgatgcaggggcctcaattaatgtatctggtagaagaaggctggtggagtggaaccctgaataacaagttgggactg

SEQ ID NO: 407182 - DNA, 75 bp, Homo sapiens
ggccaaagcagtgaaacgctccatgaattgatggagtgaaggtacctgagcgcaggaaccatggtcttcattgct

SEQ ID NO: 407183 - DNA, 74 bp, Homo sapiens
cccttggccactgatcccccgaagagcttctgtcgccgctctaggatatgaggccccaggattcctggcgaggt

SEQ ID NO: 407184 - DNA, 75 bp, Homo sapiens
cggcgatggtaggcgtccctggagcggccgccttccagctttgaaggatgacctctaggaagaaagtgttgctga

SEQ ID NO: 407185 - DNA, 75 bp, Homo sapiens
acttggttataaagcatccactaatcttcaggatcaacttgagaaggctgctgatactttggctgtgaggcaaaa

SEQ ID NO: 407186 - DNA, 87 bp, Homo sapiens
gaggcctccctagccacgtggaactgaggcccagaagattaacaatggctcaagccaggcggatggcactctcaaaccagtggatga

SEQ ID NO: 407187 - DNA, 83 bp, Homo sapiens
gggagcggcgcccccgccgctgccgccgcgacccttggcgcctgcccctgcaacgggaggatgctccagaccttgtatgatta

SEQ ID NO: 407188 - DNA, 83 bp, Homo sapiens
gggctacccgctctttgccgtgacaacaccgttcccccagccgggctggagtccaaaactacttacctggaagaccttccacc

SEQ ID NO: 407189 - DNA, 82 bp, Homo sapiens
cctggagaagctggagaatgacaagagcttccgcggtgtcattctgacctcggtctcggcgcggaagatggccggcggcgtg

SEQ ID NO: 407190 - DNA, 100 bp, Homo sapiens
tcagcggaagccgccggggccgcctagagaagaggctgtgcttcggcgctccggctcctcagagagcctcggctagctctgcagccagatggaacagctg

SEQ ID NO: 407191 - DNA, 100 bp, Homo sapiens
attggactgggagactcagcaggtaaagctttccagtttgaatttagatgatcacgcaaagaagaaattaattaaacttgtaggagagcgatactgcaag

SEQ ID NO: 407192 - DNA, 83 bp, Homo sapiens
gctcggagcagcagcctctgagaaacgcttcgttaagggactcaggcagtacgggaagaacttcttcagaattagaaaggagc

SEQ ID NO: 407193 - DNA, 74 bp, Homo sapiens
ccagctgatgcccccaatcctgtggtgtttgtggccacaaaggataccaggaacccaagacagaccaggatgag

SEQ ID NO: 407194 - DNA, 83 bp, Homo sapiens
ccccatgttctgcagcgtggcttcctttggtgccagctctttgtctagattgaccctgctacgggaatggttatgaatctggc

SEQ ID NO: 407195 - DNA, 98 bp, Homo sapiens
cctcaccatgttggtgctgtttgaaacgtctgtgggttacgccatctttaagatgcttcctttaaataccaatattcgacttgcgtactcaaatggaa

SEQ ID NO: 407196 - DNA, 50 bp, Homo sapiens
ggaggctcatgcgggatttcaagcggttggtgaaaaccctgtgtccttgg

SEQ ID NO: 407197 - DNA, 82 bp, Homo sapiens
gcagctgcgattttcgccctacgttttcaacggaggctccccgcagccaccgccacccattggaatggccaacaggggacct

SEQ ID NO: 407198 - DNA, 100 bp, Homo sapiens
ccagagcctggagtctgcgaaggccgggacccggttccccggcccacagtgggggtgtgcaaacccgagagaactgggtgcagtcagcctcagtttccaa

SEQ ID NO: 407199 - DNA, 100 bp, Homo sapiens
ggtgggcctgggcgtggccaccgtcaaggccaacatcacgcccttcggcgccgaccagaggcagaagaggcctggaccttggcgcacacagacccaggaa

SEQ ID NO: 407200 - DNA, 100 bp, Homo sapiens
aaaaaccttcaggcggcccatgggatttccatttaaacagggttaatttggaagaatcttcaggagtggaaaactctccagctggtgctagaccaaagag

SEQ ID NO: 407201 - DNA, 51 bp, Homo sapiens
aagaaatccagagaggaaggaagttggtgttccagtcaaaagacgtacctg

SEQ ID NO: 407202 - DNA, 100 bp, Homo sapiens
cgtctgtctggtgataccaggggcagagggaccactctgacagggccaattcctgtccccccagcagcatggcatcgtgtgctgaaccctctgagccctc

SEQ ID NO: 407203 - DNA, 100 bp, Homo sapiens
agctcgtatggtcaacattgatggaaaacaaatcaaactgcaaatctgggatacggaagattttcagtcaatgacttatggatttaaaatggctaacagt

SEQ ID NO: 407204 - DNA, 83 bp, Homo sapiens
gtcttgaaacacaaatggtttttggctggaaacactctttttgtagaacatacaaatggacatttctaagcacattgaggcct

SEQ ID NO: 407205 - DNA, 75 bp, Homo sapiens
gagttagctaaagaactccctcaagtttcatttgtgaagatcagtcgcatcgaatacattcattcaaagaacttc

SEQ ID NO: 407206 - DNA, 98 bp, Homo sapiens
tcctacctccaggagagtgggatccttctatacgcatagaaccaccaaaaagtgtcccttctcaggagtgtatatgacaggaaaagaacttcgccagt

SEQ ID NO: 407207 - DNA, 97 bp, Homo sapiens
aacgagaccactgccgacagcaacgagacaaccacgacctcagttgttgacctcctgtactggagagacattaagaagactggagtggtgtttggtg

SEQ ID NO: 407208 - DNA, 108 bp, Homo sapiens
ctttccaacacagatgtccaagctgccaagacagtcattttgtttactcattcagccctgttgcaggtcccaataaactcttcataaggttgacagaagcaccctctg

SEQ ID NO: 407209 - DNA, 75 bp, Homo sapiens
tctctcatccgcacgcacaatatcgggcagaaagataatcacggttttcctaggacattaggacaagccgaagcc

SEQ ID NO: 407210 - DNA, 98 bp, Homo sapiens
cagcactgtagaacagctttatgaaacagcttgcttcctacaggtgactctcctattccatctgtttcttcgggatcatcttcacctctttcagccac

SEQ ID NO: 407211 - DNA, 100 bp, Homo sapiens
atctcccacctggagagaggggaagcaccatggggcccagatccctgggacaccgagattctgagaggcatcagtcaagaagcatcagatggtgaaggag

SEQ ID NO: 407212 - DNA, 83 bp, Homo sapiens
ccggctggatgggaagttaatgtttacggcgaagtctactcaacgtttccaagaccatggtgaatccgggcagcagctcgcag

SEQ ID NO: 407213 - DNA, 90 bp, Homo sapiens
ctagtcaagagccaccgcctgcaggtgctagtattgtctcaagactatggcaaacacttacttggtgtggaagacctgttacagaagcac

SEQ ID NO: 407214 - DNA, 101 bp, Homo sapiens
cccgagaagcggcggggcggcgggccggcgggcggggcgcagagccaggcagcgcagatgactgtccaagtgcctccaaagtgtacaaagcatcagattca

SEQ ID NO: 407215 - DNA, 83 bp, Homo sapiens
ggtacagtctctgcacctcgcgccccagcaggatttttagactctgaggagcagttggagctaatccacattatggaaatgga

SEQ ID NO: 407216 - DNA, 98 bp, Homo sapiens
cggactccctggaccctccctccagcccagcctcgctagctccgcctgcgagacctggaggatgccgacctgctgatccagctggaggctttcgagga

SEQ ID NO: 407217 - DNA, 115 bp, Homo sapiens
agtatctcaggcggcaccctgtccccgaggaggggaccatgacacagtactccaaagattcaggtttactcacgtcatccagcagagaatggaaagtcaaatttcctgaattgct

SEQ ID NO: 407218 - DNA, 100 bp, Homo sapiens
tgagccttacggagccgtctaccagatcaacgtcctccgggaccggagtcagaaccctccgcagagtaaaggtcactactgtttttaatgaagccacatc

SEQ ID NO: 407219 - DNA, 100 bp, Homo sapiens
agtagtatcttcttcagagaacttaagcattaaagggcagtatttaaagtcagttggcaagcagtggaataagatttttgtaaagaaaccttgtgcagca

SEQ ID NO: 407220 - DNA, 98 bp, Homo sapiens
gctgggccacagcctgaacgagaacgtcctcaagcctgcgcaggagaagtatctggagtccatctttcaccatcttctcctgagattgtactggaccg

SEQ ID NO: 407221 - DNA, 82 bp, Homo sapiens
gacgcacttgtcttagcagttctcgctgaccgcgctagctggacctctttgtttttagacatgaattggccataatgagact

SEQ ID NO: 407222 - DNA, 100 bp, Homo sapiens
tcggaacacttcagcacaagaacgctaccttttcttagtgctggagaatctggtaaaagcaccattgtgaagcagatgaggatcctgcatgttaatgggt

SEQ ID NO: 407223 - DNA, 100 bp, Homo sapiens
tcttgtgttgccaagtctacctgtgccatcaacaacaccctcattgctttcttcattttgactacgataaaagataaagactatttcctgattgtgattc

SEQ ID NO: 407224 - DNA, 78 bp, Homo sapiens
tgcagatggaattccttcggaacaaccggaccacagggctctcaaagacttcagaccaggcctacattgagtttgaga

SEQ ID NO: 407225 - DNA, 96 bp, Homo sapiens
ggaggcctctacaagccgcgccgtaggtacaagattctgctgtactcattggatggccggttgttgtccacgtacagcgcttacgagtggtccctg

SEQ ID NO: 407226 - DNA, 83 bp, Homo sapiens
gccgacaacgccttcatgctgctcacgcagggaatgcctggctgcgcacctaggcggtaacgatggaaatcactccctgttgt

SEQ ID NO: 407227 - DNA, 100 bp, Homo sapiens
ctccagccccatatgctccccagggatggggaaatgcatatccacactggcagcagcaggctcctcctgatccaggatcaaaatggtttcaatcccagaa

SEQ ID NO: 407228 - DNA, 50 bp, Homo sapiens
cctcaacatctctcagagacgaaagagaccatcatgcagacatcagagac

SEQ ID NO: 407229 - DNA, 90 bp, Homo sapiens
acccgtttcaagcctacccgcatcatcttctaccgagatggggtgcctgaaggccagctaccccagctctggaaaggaagagaaatggaa

SEQ ID NO: 407230 - DNA, 75 bp, Homo sapiens
cgtgtttgcggttcagccctttgatgaccgcagcagcatcacaagaggcaacaccaggagccaacatgagctcgg

SEQ ID NO: 407231 - DNA, 90 bp, Homo sapiens
cgcggagcccgggacgcgcgtacgccctgctgcttctcctggcatatcacacctgaaaaattttatgtggaagcttgtgatgatggagca

SEQ ID NO: 407232 - DNA, 74 bp, Homo sapiens
cctcagcctcctgcataactgggactacagacaaatcttcctattttcaagctgaaagaatctactgttagaag

SEQ ID NO: 407233 - DNA, 90 bp, Homo sapiens
ctccagcgccctggcctccctcaccttggacacctcgcttggggcgcaccctacgacgcgcacaccaccggcatgaccggcgccatcagc

SEQ ID NO: 407234 - DNA, 100 bp, Homo sapiens
ccaggcccagccgggccctggacaggaaggtgggagtcaatcattttgacaagtctcctgaaaggaacagctagcaggaactgaaacctttttccatttg

SEQ ID NO: 407235 - DNA, 50 bp, Homo sapiens
gccggttcagagcaaaccgcagaaggtcgtccgtactgccctttcataaa

SEQ ID NO: 407236 - DNA, 100 bp, Homo sapiens
cagaaccagatccgggagcacgtcatcgccatcgaaggcattcctgcatcgcatccggcagaacgtggccgactcagtggagaagggcctcacggaggag

SEQ ID NO: 407237 - DNA, 83 bp, Homo sapiens
cttgggcctcgcgccggctatggccgtgccctggggctgagccctcaggagggtgtgaagacagagaatgaccacatcaacct

SEQ ID NO: 407238 - DNA, 96 bp, Homo sapiens
caagttgtcgacgaccgacagggtggtgaaaggttgcttagccagacaatgaaggatcatctagtaagagtagcaaatgaagctgaatttatcctg

SEQ ID NO: 407239 - DNA, 100 bp, Homo sapiens
gggagatcccaggcggtgacagagtggagccatggctagagcggatctgaaaagaacaattgctgtccttctggatgacattttgcaacgattggtgaag

SEQ ID NO: 407240 - DNA, 100 bp, Homo sapiens
taacaaaggatttgacaagactaaaaacacttctctcagaaacagagggggacttaggagccattgatgaaaaatacgacgtggctatatcatcctgttg

SEQ ID NO: 407241 - DNA, 100 bp, Homo sapiens
gcggctgctgctgctgctgctgctgctggtggcccctttgcaggcagcaagagcaactcaccaccagccttgggcccagaagcatgccctgtctccctgc

SEQ ID NO: 407242 - DNA, 100 bp, Homo sapiens
attggaagatcttccgggagtgttggaagcaaggtcaggtgagcagaagtggcctatatcgctccccgtcgatgccagagaacttgaacaggccaagact

SEQ ID NO: 407243 - DNA, 82 bp, Homo sapiens
ttggtgtaccagaattcggccatgagccgctacatactcatcatggggctcctgtacaagaattcagaaggagctggcggac

SEQ ID NO: 407244 - DNA, 82 bp, Homo sapiens
gttttttctaatggctattcaagatgcagcagcttttttatgagaattacgagcagaacaaaaaggggtacattagagatct

SEQ ID NO: 407245 - DNA, 100 bp, Homo sapiens
tcgaggcctccggaccttcaagactgtctttgctgagcacatcagtgatgaatgcaagaggcgtttctataagaattgggagaacggggagagaaaggag

SEQ ID NO: 407246 - DNA, 75 bp, Homo sapiens
cggggaggcagcgcgggatcccagcctcaggcgtgcgcggacggtgtgcggaaatgcccggcgaagccacagaaa

SEQ ID NO: 407247 - DNA, 83 bp, Homo sapiens
ctactttgcatctgtaaatgcaccttcaaacccaccaagagttgatctctctaatgtattagatcttcatgcctttgatagtc

SEQ ID NO: 407248 - DNA, 101 bp, Homo sapiens
aatcaagatttaacattccaacacataaaaattatttatccaacagctcctcccagatcctcagtttgtggtctgccagctaaaggtgaagatatattcct

SEQ ID NO: 407249 - DNA, 82 bp, Homo sapiens
agctgtgcagacgccagatcctgccttcacctacgagtggaccaagggctggcagtgatggtgaaagcataggaaactgccc

SEQ ID NO: 407250 - DNA, 102 bp, Homo sapiens
gtgatgttggagaactacagaaacctggtctccctagatcaaagaccaagctcaccaattcgacatcagggaaggaatgacgagcttgagcgtgatgaaaga

SEQ ID NO: 407251 - DNA, 75 bp, Homo sapiens
ctggctgaagatggctactctggagttgagaggccccacagtatcaaatatccgcctggctggattagagtatgt

SEQ ID NO: 407252 - DNA, 100 bp, Homo sapiens
caagatgtctgacatggaggatgatttcatgtgcgatgatgaggaggactacgacctggagatcatgaatcagacagataaaaatcaacaagaaatccca

SEQ ID NO: 407253 - DNA, 88 bp, Homo sapiens
tttgtgttgttactgatgcagagatacagcaaaagagtctacatagactctttttgatcagaacaatgctgcaaaaaaagaagagtca

SEQ ID NO: 407254 - DNA, 100 bp, Homo sapiens
accaaggaggacctcactgagatcagggacatgttgctggccaataagggaatgggtactgttcaaaaaggaatgccccacaagtgttaccatggcaaaa

SEQ ID NO: 407255 - DNA, 100 bp, Homo sapiens
gtggattctgcttcccctgggacagcactgagcgagtgtggagagaggtacagccctcggcctacaagctctttaggctggaatgcaatggcgcaatctc

SEQ ID NO: 407256 - DNA, 90 bp, Homo sapiens
tcagagtgccggaccccagcacacagaagccgagacggccctttctggttactgtggctttatggcagccaacctttatgctcgttccat

SEQ ID NO: 407257 - DNA, 51 bp, Homo sapiens
gtacttcgacgaacactacgagtaccgaaaatatggacttgaaggagcagc

SEQ ID NO: 407258 - DNA, 100 bp, Homo sapiens
atttgtgttgaaaccagcctcaagtttcacctatcctcactgatccgtggacttctgtatgatcagatggcagtggcagcaccatgatgcaaaccaagac

SEQ ID NO: 407259 - DNA, 100 bp, Homo sapiens
gaaatacatctactaatgaaattggctggtttccttgtaacagggtgaagccctatgtccatgacctcagcaggaccccaggctatactggcaggggggc

SEQ ID NO: 407260 - DNA, 50 bp, Homo sapiens
atcggtagcgcctgctgcccccaccagggccaattcctgtccccccagca

SEQ ID NO: 407261 - DNA, 73 bp, Homo sapiens
agagcggggccggcaagaaggacaaggcttgcacagaaatctggaggcagtatcacctaacggtgagtagaaa

SEQ ID NO: 407262 - DNA, 75 bp, Homo sapiens
gccaggcagggaggagaccggcacccagacaggtggcgaaggcagaggaatccagacatttaatgtggatgcacc

SEQ ID NO: 407263 - DNA, 100 bp, Homo sapiens
catggcaccgtgcacgtggtcgtcaacaaccagtcttatgcagggaaatatgtgccagccattgcacacctcatccattccctcaaccctgtgagagagg

SEQ ID NO: 407264 - DNA, 75 bp, Homo sapiens
gcccgagaaggtggacgtgctggtgtctgagtggatggggacctgcctgctgcgtgccaagttggaggccgccat

SEQ ID NO: 407265 - DNA, 96 bp, Homo sapiens
cttctccttactatagtcgtggaggatacagatcacgttccagatctcgatcatactcacctcagttatgcccagccaagtcttcagtatatccag

SEQ ID NO: 407266 - DNA, 100 bp, Homo sapiens
cttgttggtttagtgctgttattcagagatctaaaattgcagtgtttgataaaatgtggacctacatgcggagtgcggagccctctgtgtttgtgaggac

SEQ ID NO: 407267 - DNA, 75 bp, Homo sapiens
ttcagcgcgagccaccgattgtacagggcgtgatggtgggcatgggtcagaaggattcctatgtgggcgacgagg

SEQ ID NO: 407268 - DNA, 101 bp, Homo sapiens
gagccccctaccgggccggatcccgaggctgacaaacgggctcatcataatgcactggaacgaaaacgtagggaccacatcaaagacagctttcacagttt

SEQ ID NO: 407269 - DNA, 101 bp, Homo sapiens
gattcttttcctgccatggggatatgacattagccaggtgaactttacagactagcatggcaaagcttctctccgatcttagtgtggacagtgctcgctgc

SEQ ID NO: 407270 - DNA, 82 bp, Homo sapiens
cacgacccctccctgccatgtatccgcagggcagacatccgtttaagctatgaagaaggacatccctcacactctgaaacag

SEQ ID NO: 407271 - DNA, 88 bp, Homo sapiens
ttcgcagtggtcgcttcttctccttgacactgaagagcagcagccggggaaggagggaccacgggtcatttatgacgagaagaaaggc

SEQ ID NO: 407272 - DNA, 74 bp, Homo sapiens
ggccccggcgccggcaaggggacccagtgcgcccgcatcgtcgagtattggtaaaggttttcaaggtgtcatga

SEQ ID NO: 407273 - DNA, 100 bp, Homo sapiens
gaggagaaggagccgcctgtgagtcagcctgcagcctcgtcagactcggagacgtctgacagtgacgatgagtcttattgccagcagttttgaagatgac

SEQ ID NO: 407274 - DNA, 75 bp, Homo sapiens
gccgtgggcatctcctacattagcgtctacgaccaccaagggtttcttggagcctctgcagagtctgggggccag

SEQ ID NO: 407275 - DNA, 82 bp, Homo sapiens
gcgcctgacagagctggagacagctgtacgttgtgatcaggatgctcaggaactgtggctgcaccatctgtcttcatcttcc

SEQ ID NO: 407276 - DNA, 100 bp, Homo sapiens
cgcagaggccatgctgacctacaagcagaagagtgtactaatggtcacttgatgtgcgctggctgttttatccacctactagcagatgcccggctgaagg

SEQ ID NO: 407277 - DNA, 100 bp, Homo sapiens
atcccgcggctctcctcctgtcggtcctgcagttcttttgtccccgggtagagcattcttgttatttaacacgggaaggaggtgacttcgcctgtgatgg

SEQ ID NO: 407278 - DNA, 50 bp, Homo sapiens
cagccaggtcaccagcaccaagagttatgaagacagtatggagtttccag

SEQ ID NO: 407279 - DNA, 78 bp, Homo sapiens
gtgagttcaacatgatagagcagagtggaccaccccatgaacctcggtacctggtgacctttagccccctgatggaca

SEQ ID NO: 407280 - DNA, 101 bp, Homo sapiens
ggatacagttcatgacaatgactttgagccctaccttactggacagtcaaatcagagctgatagacacacaccttagctggatacaaaacatattatgaaa

SEQ ID NO: 407281 - DNA, 101 bp, Homo sapiens
agcggatcgggtggagtgtaggtcatatcgccgcgttgtcgccgtgatcctgaaggcgctgacctacgacgagaagcggggtgcctgcagcgtgggcacca

SEQ ID NO: 407282 - DNA, 87 bp, Homo sapiens
gattcgcagtggtcgcttcttctccttgttgggcactgccaccctctcgtggtccaagcagcacatgagcagaaccaggtgctcaac

SEQ ID NO: 407283 - DNA, 98 bp, Homo sapiens
caacagctaaaatctcaaagacaagaggagacactgagggaacaaacacttctggatgcatcccctactcatgaaggttacttctcttgtttggatat

SEQ ID NO: 407284 - DNA, 90 bp, Homo sapiens
agaaaaacaggatggatatgactctctgcagcgggatcaagctgtgtgcattagtacaaatgggtgtcttttatgaataatcaaaagcag

SEQ ID NO: 407285 - DNA, 100 bp, Homo sapiens
aaattcgcctccatctgtaccatgatattacaccaccatattgcctcagtagagaaacttgctttgactacttctggatgcccccttgtgatacagtgca

SEQ ID NO: 407286 - DNA, 90 bp, Homo sapiens
gccggtcttggggggatggttccatcatggcgtcaatgcagacactacctattgcattaaaaaactcccacggaatcctcagagagaaga

SEQ ID NO: 407287 - DNA, 99 bp, Homo sapiens
gaatcagctgtgaatgcagaaagaggaggaacgccagcgcctggagaccatcctgaacctgtgtgccgaatacagccgggctgatgggggacctgaggc

SEQ ID NO: 407288 - DNA, 82 bp, Homo sapiens
aagcagggccgtcgcgaggctgtgaagctgcttcgccggtgcttggcggacagaagaggattatatctgtccaagatgcgag

SEQ ID NO: 407289 - DNA, 82 bp, Homo sapiens
aaaacctgcagaagaactggcttcgggaattttaccaggattttttatcaagcagaaatgcatcgaacaacgagaatcaaga

SEQ ID NO: 407290 - DNA, 96 bp, Homo sapiens
aatgaaacaaggagaaacattagccttaaatgaaagaatcatgttgtctcttgtcagcacaggaaaatatggctacacacacctttctgcaggaga

SEQ ID NO: 407291 - DNA, 82 bp, Homo sapiens
gcgctgacaggggggcctggccgcgcagccgactacatgaggaaataattgacttttataacttcatgtccccttgtcctga

SEQ ID NO: 407292 - DNA, 50 bp, Homo sapiens
aatccaggcaggcatctatcttgaaggtctcttttattcaaaaccttgta

SEQ ID NO: 407293 - DNA, 80 bp, Homo sapiens
tctctttctggcctggaggctatccagcgccccttcacagatgtagtcactacaaatcttaaattgcgaaatccatcgga

SEQ ID NO: 407294 - DNA, 90 bp, Homo sapiens
tccccgtcccggagctgccggcggcatgatccgacacgccggggcgcccgcgcgcggggaccccacgggaacaccttccaccatgaccac

SEQ ID NO: 407295 - DNA, 90 bp, Homo sapiens
ctggcagcgaagaagatcgaaaattaaacctcagggacgggtaaattgaagcaaaaagcagacaagttctatgggatttgctggcattga

SEQ ID NO: 407296 - DNA, 100 bp, Homo sapiens
tctaccatctcggactcccgacccgccgccggctccggccgcgtttcccgggtaaaggggttacactcctggcacaccttacaaagtgtcctgttccccc

SEQ ID NO: 407297 - DNA, 87 bp, Homo sapiens
agagcttcacagtgcagcggcgagtctatccttcactggagtctgatgatgatgaccctgctttgaaatctcgacccaagaaaaaga

SEQ ID NO: 407298 - DNA, 82 bp, Homo sapiens
ccccgaacgggttgcttcccccgctgcgagatgaggacggggacttggttgccttttccagtgacgaggaattgacaatggc

SEQ ID NO: 407299 - DNA, 101 bp, Homo sapiens
actgcacctccctgatggttgggctgatccggcagggctacgcctgcgaggaaggccggggtcagaaagaaaaaagagggtcccggggccgaggcaggagg

SEQ ID NO: 407300 - DNA, 101 bp, Homo sapiens
attcacatgccaacagattatgctgaagttacaaaactgttcaggttccattatcaaaacgagcaaaatttgttggacctggtggctataacttaaaaaaa

SEQ ID NO: 407301 - DNA, 75 bp, Homo sapiens
gtgccgcagatgcccaccggaatggagaaggaagaggagtcgcccgagcgggaagaagttccgcagcaagccgca

SEQ ID NO: 407302 - DNA, 49 bp, Homo sapiens
accatcgaggatgaagacaccaaagatcacaaactcctggaaggcaaga

SEQ ID NO: 407303 - DNA, 100 bp, Homo sapiens
tgccaccccagcccgtggtcctgatgccaacagtgtaccagcagggcgttggctatgtgcccatcacaggggataaaaacattcagatggcagatcacag

SEQ ID NO: 407304 - DNA, 100 bp, Homo sapiens
gcactgaaagctgagaaatgtccacacagcaaatcaaacagaaataaggtagactcaatggccgtgttgaaatccttgtctcctgtagacccagtggaac

SEQ ID NO: 407305 - DNA, 100 bp, Homo sapiens
caaaatgtcaacaaattgatgggagcctgtggtgctgaccgacacaaatcttgtgtatcctgccctgaaatgggaccttgaatacctgcaagagaatatt

SEQ ID NO: 407306 - DNA, 90 bp, Homo sapiens
catgaagaagctggcgtcggacgcgggcatcttcttcacccgggcggtgcaggaaatgtcagccatcttggaatgtcacaggaactggtt

SEQ ID NO: 407307 - DNA, 75 bp, Homo sapiens
gcatatttcaggagtgtcaactgattgctcatttagaaagtggatgtgtgggataacatgtccaatgtgtccgag

SEQ ID NO: 407308 - DNA, 100 bp, Homo sapiens
aaaactcctgaggagattcgcaagaccttcaatatcaaaaatgactttactgaagaggaggaagcccagtgagttattctccccacctcagaagtaccag

SEQ ID NO: 407309 - DNA, 78 bp, Homo sapiens
tctcattaatgacaatcagccatcctggattggacagcaggatgacgcaaaacacggtgattgtgaatggagttgcta

SEQ ID NO: 407310 - DNA, 76 bp, Homo sapiens
agctgctgaagtcaaaggagcaattgctggtcctgagcctgagttggtgatgtatattggccaagtggccaaggat

SEQ ID NO: 407311 - DNA, 75 bp, Homo sapiens
gggtgagcggcgcagcggcggcagcggagagcgagagaggggagcagggagttaaatacctgtgcatcccagcag

SEQ ID NO: 407312 - DNA, 100 bp, Homo sapiens
caggggacataaaagtaattggtggagatgatctctcaactttaactggaaaggtggacattgaagtggacctaattcggttttccttttaaaagccccg

SEQ ID NO: 407313 - DNA, 90 bp, Homo sapiens
ggagcgcgccgcgcccttctccctggagtaccgagtcttcctcaggtcgcggcgagcgcgcctatgacatctactcgcggctgctgcggg

SEQ ID NO: 407314 - DNA, 100 bp, Homo sapiens
agtgcattcatgaagcatctgaaaaagctgtggaaggctctggataaggaccagtacctgcccaggaaactgggacctccaggtgcatggattggtgctg

SEQ ID NO: 407315 - DNA, 100 bp, Homo sapiens
ctgggagcctagaatgcatcagtgcccttgtggcgaatggggctcacgtcgaggaagcagctatagagagggtctaactccagttctcagcttattaacc

SEQ ID NO: 407316 - DNA, 101 bp, Homo sapiens
ggagtcgctgggtgcgtggggctgcctcgccgcgtctcgccacgatcgcccaggaccacaccgcagcgtaactgcaggcctctcagcgaaaaagggggaaa

SEQ ID NO: 407317 - DNA, 127 bp, Homo sapiens
caagaatgaacaatccgtcagaaaccagtaaaccatctatggagagtggagatggcaacacagatgagctttgatccaaaccttctccacaacaatggacataatgggtaccctaatggtacttcag

SEQ ID NO: 407318 - DNA, 100 bp, Homo sapiens
gtaggatcatggcttactgcagtctggaactcctgggctcaaaccatcctcccacctcagccttaagccccatgtgccactcccctgatctgcagcttcg

SEQ ID NO: 407319 - DNA, 100 bp, Homo sapiens
tgggccgtcaggcagttggttgggacccgctccaaccctcgaaaaatggctacaaacttcctagcacatgagaagatctggttcgacaagttcaaatatg

SEQ ID NO: 407320 - DNA, 82 bp, Homo sapiens
ggaagagcaagacggccacgacctgggagcagcagggactttgaacatgtcggggatcgccctcagcagactcgcccaggag

SEQ ID NO: 407321 - DNA, 75 bp, Homo sapiens
tcagtgtctacctcacccccaagaccagttacgaagtgacagtgctggtgcgggactcctccaggctgccatcag

SEQ ID NO: 407322 - DNA, 100 bp, Homo sapiens
caacgtgttggaccttccggagcttctcagaagacagagggttttcttttgagggcagtccagatgaaaagagtaccaatgaatctgcctccagctgaat

SEQ ID NO: 407323 - DNA, 75 bp, Homo sapiens
aagacacatgatagaagaaattgttctagtagatgatgccagtgaaagaggttcgatacaagaggctgttttcct

SEQ ID NO: 407324 - DNA, 90 bp, Homo sapiens
gcacagctcactgcagcaactttgacaaaactggaagaatttcgcagtaagacagcaacaggttctggctccttggcagcaatggctgta

SEQ ID NO: 407325 - DNA, 82 bp, Homo sapiens
cgaggagctccagccagaggggtctccaggaaacctagagaaaaaccgttatggggatgtaccctgcctggaccaaactaga

SEQ ID NO: 407326 - DNA, 51 bp, Homo sapiens
gacctactgatgtccctgatacaggaggccccgtgtgggccgcggcccggc

SEQ ID NO: 407327 - DNA, 101 bp, Homo sapiens
aactgaaggacaacgagaagaaccggaagctctttgaccttctggatgtccttgagttcaaccagtcttgctggaatgagtacctgacaactcggatcgag

SEQ ID NO: 407328 - DNA, 88 bp, Homo sapiens
gagcaaagaacactgttgttgccacagggagtctcaggagcaggggctgcggcagaggctgctggacgagcagttcgcagtgttgcgg

SEQ ID NO: 407329 - DNA, 75 bp, Homo sapiens
caggacacacagacccagctggaactcgataagccaatggacacgtcagtgttatctgaagaaggaggagagcct

SEQ ID NO: 407330 - DNA, 50 bp, Homo sapiens
ctcggaagaaagtgaatctgatgatatgatttttcttcagggaacagagg

SEQ ID NO: 407331 - DNA, 75 bp, Homo sapiens
agggctcctaaggaaggacccgcctttagccttaaagaaggagaggatcagaaagagataaagattgagccagct

SEQ ID NO: 407332 - DNA, 110 bp, Homo sapiens
atgcaaaacctgtggatacagagggacagaggcctactgtacatggcacatggggcatatgatattttcctgaatgcaaaagagcaaaacattgtgtttaatgctgaaac

SEQ ID NO: 407333 - DNA, 100 bp, Homo sapiens
cgcaaagagctcagccactacacgggagtcacagatgctgggaagtatggcccgaaagaaacctcgaaatacctcaaggttgcccctggctttaaacccc

SEQ ID NO: 407334 - DNA, 95 bp, Homo sapiens
tacaaaggctccaccttccacagggtgatcccttccttcatgtgccagcccaactatggaaaccagcaatatggaccaaacagccagttccccac

SEQ ID NO: 407335 - DNA, 75 bp, Homo sapiens
ttggagtccggacatctgaaacttgtgccggtggtggtgtgcacattgagccccggtatagacagttcccccagc

SEQ ID NO: 407336 - DNA, 120 bp, Homo sapiens
gaaaattggcaaagctgtggaagactccaagccctactgggaggcacggagggtggcgaggcaggaagaagaaatactttcccagacaaataaaagctgaggaatatcatcaacatcaga

SEQ ID NO: 407337 - DNA, 83 bp, Homo sapiens
gaaggatcaaggacggatgatgaagtagtacagaggactctgatcactggcatggcttctggtagcattgtagcttttaatat

SEQ ID NO: 407338 - DNA, 82 bp, Homo sapiens
ggggcccaagagaagtaccatctcggtcaaaatgcagatcttcgtgaaaacccttaccggcaagaccatcacccttgaggtg

SEQ ID NO: 407339 - DNA, 82 bp, Homo sapiens
cttcatggctgggtccagcagaaaagagctccttcaccagtgcaaccgccatttttctctgaatgttcattggggtattttt

SEQ ID NO: 407340 - DNA, 50 bp, Homo sapiens
cttagaggaagttctggagatgaagtaccttgtggtctataatcctttag

SEQ ID NO: 407341 - DNA, 100 bp, Homo sapiens
atcaacctcctgctgtccatgtatttcttcgtgctgggaatcctggccctgtcccacaccatcagctactcccgagcccggagaggacccacgcgtgacc

SEQ ID NO: 407342 - DNA, 100 bp, Homo sapiens
cacctctgtattcagcatagctattcctgttgatggtgatgaagacagggccgcgatgggcctcttggaacattggtgtgttcatctgcattcgatgtgc

SEQ ID NO: 407343 - DNA, 74 bp, Homo sapiens
ggctatggtgggcaaactaagccgattttccggaaaaaggttggatggcaagcatgtggtgtttggcaaagtga

SEQ ID NO: 407344 - DNA, 100 bp, Homo sapiens
ggactttcaaacatctgaagatgacaatttattagatggtgacactgcagttgatcactttgggaagcagtgacatccaacctgtatcaagtcttctaat

SEQ ID NO: 407345 - DNA, 82 bp, Homo sapiens
tctcaaggcaagcctattgagttaacacctctgccgctgctaaaagatcttgatgtggaagaaatggaggactcagaaccaa

SEQ ID NO: 407346 - DNA, 82 bp, Homo sapiens
ctgctggggacagctgctggtgtggttcggagccgcggatcagtcgcatcgaatacattcattcaaagaacttcatccaccg

SEQ ID NO: 407347 - DNA, 100 bp, Homo sapiens
cttcaatgatatggaagatgatgatcctcagatgggcactgtgccccgactgcggcctcgcctcaatgccattctcttcaagctacaattcagcgagcaa

SEQ ID NO: 407348 - DNA, 90 bp, Homo sapiens
cccgactctggaccgacgtgatgggtatcctgatgctgatgaatggcaagaatcagaagaaaatgttgaacacatccccttctctcataa

SEQ ID NO: 407349 - DNA, 74 bp, Homo sapiens
tatcaatgcactgggcactttcgattccttctttccaggctctaggggatctctcaatgctatttgccttcatt

SEQ ID NO: 407350 - DNA, 74 bp, Homo sapiens
ggtgacctcatccgtattctgagcaaggcatcctctggtatcacgattccaaaacccccaaagccaccagataa

SEQ ID NO: 407351 - DNA, 100 bp, Homo sapiens
ccgtcgatatgcagaaacactctttgacattctggtggctggtggaatgctgggggtcggcaccaggaattattatagaaagatcggctacagattacaa

SEQ ID NO: 407352 - DNA, 110 bp, Homo sapiens
ctcgaaaaaaaccttcaggcggcccatgggtaataatagacgtggatggaatacaactagccagagatattccaatgtcatccagccatccagtttctccaaatccacac

SEQ ID NO: 407353 - DNA, 75 bp, Homo sapiens
gaaccatggacaatggaagatgaaaggcacagtcgaatctgtccagatggagtctcactttgtcacccaggctgg

SEQ ID NO: 407354 - DNA, 74 bp, Homo sapiens
ccgagagtccccagcactgaaaacggggatctcctcttctccaactcagacagtaatgccaggacaagtcatgc

SEQ ID NO: 407355 - DNA, 122 bp, Homo sapiens
gccgcgtctcgcgggaagacttcgagtgggtctacaccgaccagccgcacgccgaccggcgccgggagatcctggctaaaccatttacttctaaagtgaaacaaatgcgattacatagagaa

SEQ ID NO: 407356 - DNA, 83 bp, Homo sapiens
caagaccctggagggcgagttctcggtcaccatgtggtcctcaggttgacatcatggacatatgtgagtccatcctggagagg

SEQ ID NO: 407357 - DNA, 124 bp, Homo sapiens
atttatcactgccttcttgggaattgcttcgtttgccattttcttatggagaactgtccttgttatctgaatggcatagacttaactcctgtgcaagatactcctgtggcttcaagaaaagaag

SEQ ID NO: 407358 - DNA, 98 bp, Homo sapiens
gaagctgctaacccgacccggattggcgctgaggtggcccgtggggcagggatcatggcccaagttgcaatgtccaccctccccgttgaagatgagga

SEQ ID NO: 407359 - DNA, 75 bp, Homo sapiens
cttcacaatagcagcggagaaggtgtacaacacccgccatcaggaactgtggctgcaccatctgtcttcatcttc

SEQ ID NO: 407360 - DNA, 100 bp, Homo sapiens
tcgcctcagtccagctctgtcatcactcaggcaccttccaccaaccgccagatcgggtctgcgcgtctgttcccagcgctctgcgaggcctaaaaaggag

SEQ ID NO: 407361 - DNA, 97 bp, Homo sapiens
gcagcccaccgacatggcccggaggcagcagaagattctgaagggagtggtaatggaagtgaagatgcttcaaaggacagtggagaaggttcctgta

SEQ ID NO: 407362 - DNA, 75 bp, Homo sapiens
gcggctcagaagataaacgaggggctggaacacctcgccaaagcagagaaatattcaaatctgaacatcaatgat

SEQ ID NO: 407363 - DNA, 75 bp, Homo sapiens
tccactcccggctgttcccccggaggttcatgcatgggagatctcagaccagttgttacagatccggcaggatgt

SEQ ID NO: 407364 - DNA, 100 bp, Homo sapiens
cttcaggctggaacaaggagaagaaccatggagactggaggaagaattcccaagccagagctttccagtgtttcctgaggttataggcgggtgtttgagg

SEQ ID NO: 407365 - DNA, 115 bp, Homo sapiens
gagcggcggccgaggcggcggtgtgggcgcgtcaggccgcgacgagggcgctgagcgtctgcttctgcgctttgcctgggagaggccctggtggcctcgttcctggcgcccggag

SEQ ID NO: 407366 - DNA, 90 bp, Homo sapiens
tgaagggaattattttcatgcagacagcttgtcaagctgtgcagcatcaaagaggcaggagatattatcgtggagctgtaggtgccttat

SEQ ID NO: 407367 - DNA, 119 bp, Homo sapiens
gagcagcgccagcggccgagcgggcggcttcctggcctgggcgctccggtggcggcggagaataccctctaccatctgctttggtcagggtgccgctcgaggatttaaaagcaacaaga

SEQ ID NO: 407368 - DNA, 87 bp, Homo sapiens
cgcacctcagtggtacctgcacctgtctggcctgggcgccagcgcggctgcaggccaaggtctccgtgttggtcctcttcgccctgg

SEQ ID NO: 407369 - DNA, 75 bp, Homo sapiens
cgtgcgggtgctggacgagaggaaggcgctgatcccctgcaagagggagcagattttaagagtaaaagaagatga

SEQ ID NO: 407370 - DNA, 50 bp, Homo sapiens
gtacaggcggatgctccccatggagttgctaatctatgccagcaattatg

SEQ ID NO: 407371 - DNA, 87 bp, Homo sapiens
accgtgctgcagatgaaatagaaaaggagaaagaattgcttatacatgaaagaggggcatcagcgcctgcctccagcaccctgaaga

SEQ ID NO: 407372 - DNA, 82 bp, Homo sapiens
gtcagtgtgaatttgtgacagctgcagttgctccccgcccccgagcagccgagttacttgtggaaattgttgattacccgga

SEQ ID NO: 407373 - DNA, 100 bp, Homo sapiens
ccaaggagtcacggatcggattcctcagctacgaggaggcgctgaggagagggtcagttaaatgaaagcatggaccatgggggagttggaccatatgaac

SEQ ID NO: 407374 - DNA, 98 bp, Homo sapiens
cgactttgatcaccatcaccaacaacattggctcaatagcaagaatgtgtgcccttaatgaagcacgtctgagaatggtggatgtggtggagaaagaa

SEQ ID NO: 407375 - DNA, 100 bp, Homo sapiens
ctggcgacctatccagaatgatcaagagactctgacctgtttttgttggacacccgtgtagtatgggcctcagaagaaggctggctggaatttgacatca

SEQ ID NO: 407376 - DNA, 99 bp, Homo sapiens
ggagaagtgattcttgtgggtggcatgactaggatgcccaagctgtctgcgagcctggctgtggtgcacatggaacctgccatgaacccaacaaatgcc

SEQ ID NO: 407377 - DNA, 74 bp, Homo sapiens
gaatctagacagacaggcctttctaggagcaactacagcgagccctagattttcgaaactcttcagctacttgc

SEQ ID NO: 407378 - DNA, 82 bp, Homo sapiens
gcgctcgccatggccgacgaaaagcccaaggaatactcccccagttgcaagaggcgcaggaccgtggaagacttcaacaaat

SEQ ID NO: 407379 - DNA, 74 bp, Homo sapiens
ttgttgatgtggaagaaatgaattacatggctgccgagggcgagggcgagatgccgcagtatcagcaggctttc

SEQ ID NO: 407380 - DNA, 80 bp, Homo sapiens
ggaacagggcagacgttagcgtgagtgatcactctcaatcccggtttttcagaagaagtgaagtcaagatgaagaaccat

SEQ ID NO: 407381 - DNA, 105 bp, Homo sapiens
tcatggtgcagaaataccagtccccagtgagggtgtacaaatacccctttgaattaattatggctgtggaatgaatcttacttgttgaatatcttctggttacta

SEQ ID NO: 407382 - DNA, 89 bp, Homo sapiens
cggtcccagcccggccactgcggatccctgaaaccaactgcgctgagcacagacccaagtgtgctggggaagtaccgagccggcttcag

SEQ ID NO: 407383 - DNA, 82 bp, Homo sapiens
caacgcctggctcggagcagcagcctctgaggaagtcctgacggccacgctggatctggaggacgtccggagctacagggcg

SEQ ID NO: 407384 - DNA, 100 bp, Homo sapiens
gcgagctgagtggttgtgtggtcgcgtctcggaaaccggtagcgcttgcagcatgctgcggttggatttctcacgatgtccagtgttatctccatgtctg

SEQ ID NO: 407385 - DNA, 118 bp, Homo sapiens
tgatgctcgacagcctggactctgcaacacctgtcaactccatctgcagtgttcaaggagcatcagatccatgctgctgctgactcggagccccacagcttggcacaggctctctcag

SEQ ID NO: 407386 - DNA, 88 bp, Homo sapiens
gcgattatggacccggccgaggcggtgctgcaagagaaggcactcaagtttatgagccccccaagatgaacccagtggtggagccact

SEQ ID NO: 407387 - DNA, 100 bp, Homo sapiens
gggagcagaagggaggctccaagacctcatcaacaattaagtgttgtctcagcttggctctgccgagaacagacctgagcaaagccttcctcagcagaga

SEQ ID NO: 407388 - DNA, 74 bp, Homo sapiens
ctttgctcaaggatcccagttttctctggatgacgtggctttccatctgatggtcccctggtgtgtgccctgga

SEQ ID NO: 407389 - DNA, 100 bp, Homo sapiens
cggcgattatggacccggccgaggcggtgctgcaagagaaggcactcaagtttatggcccagctgtgagatacagtaagttcaagatgtcagaggccagg

SEQ ID NO: 407390 - DNA, 101 bp, Homo sapiens
gccacaggtacagacttcagtacatggagaaactctggaaaccttgacaatggcaacagtgtgtctcttcagcgcacaacctcagctggcagatcaggtcc

SEQ ID NO: 407391 - DNA, 82 bp, Homo sapiens
cgagctcattccgggattggagagaagtgatgctccagaccttgtatgattacttctggtgggaacgtctgtggctgcctgt

SEQ ID NO: 407392 - DNA, 100 bp, Homo sapiens
gagttcggtgctcgaatgataactattgatgggaaacagataaaacttcagatatgggatacgggttttggccaaattgggcgagggcacaaaataacca

SEQ ID NO: 407393 - DNA, 50 bp, Homo sapiens
gccacatcaacctcctcacccaacaggcctgaagaagtcagtgatttata

SEQ ID NO: 407394 - DNA, 90 bp, Homo sapiens
ggctggtagaccaggagcgctctctgtcgctgagtaacgtcaaaggaaacctgtaggaagtgtcagggactctggaaagaacataatggc

SEQ ID NO: 407395 - DNA, 98 bp, Homo sapiens
ggccagcgcgcattcggccccggacgaaggtactcgcagcacttggagcgcagaaccggccgcgcccgagctcccagctcctccagcagccgacagga

SEQ ID NO: 407396 - DNA, 100 bp, Homo sapiens
tcaaggtcggacaatgagatgggccttagcttggagtttttatgatgatgtcacagtaccaatgtttactgaactgcaacagatgaggcaacagttacca

SEQ ID NO: 407397 - DNA, 100 bp, Homo sapiens
ctcggtgaaatcctgtcctgaagactgtaagatgggagtccgaaaagtgtttctaaaatactggcatgctgaccaactcaatgatttgtgcctacagttg

SEQ ID NO: 407398 - DNA, 82 bp, Homo sapiens
gctgacgctgctgctgtgtgcggtgctgctgagcttggcctcggcgtcctcgggattgggtactagtacagctaaagaagca

SEQ ID NO: 407399 - DNA, 96 bp, Homo sapiens
ctgggggccacccttcctgcaggccccatcaggtgcagagctgtgggtctggttccaagacactgtcactgaatcctggcatatggcgacatgaac

SEQ ID NO: 407400 - DNA, 75 bp, Homo sapiens
gcccagggggtgcgaggataccccacgctaaacacagcagagataccatgtccagaaccaataatgctaagaagt

SEQ ID NO: 407401 - DNA, 100 bp, Homo sapiens
gtggtctggtgcctgtcttggcagaaaactacaatagtgtcatctctgagcagggccttcgagaggaggtgcctcccattctgcagcaccacatgctgaa

SEQ ID NO: 407402 - DNA, 82 bp, Homo sapiens
tctccactttcgccagcccgtgccgcgagcgcggcctgcaggaggtgctcttacagcctgttccaagtgtggcttaatccgt

SEQ ID NO: 407403 - DNA, 101 bp, Homo sapiens
atggacagccgatccacgccgagctgtcacccgtgacggacttcagagaagcctgctgccgtcagtatgagatggggatcccatgacagattctgttgtca

SEQ ID NO: 407404 - DNA, 83 bp, Homo sapiens
gcttcaagccctggctcaaaatattgtcactcagcccagtccatcagtttctcagcccagtacttctcagagtgaagaaaaag

SEQ ID NO: 407405 - DNA, 100 bp, Homo sapiens
cccaacccagaccacacccttgagcctgagcccgacattattcctgaggcctcagcaactgttgccattcccaaagaacaccatcgctttgttattggca

SEQ ID NO: 407406 - DNA, 59 bp, Homo sapiens
aaataagagccctgaggatccacaggtcttggataaaaaacatcggttgtgaagagaaa

SEQ ID NO: 407407 - DNA, 96 bp, Homo sapiens
caaaagaaatgtaagcgagagtgcaccaccatcctttcaaactcctgtgaatacaggtcttggctgttcaaccgtactttctccagaaggatcagc

SEQ ID NO: 407408 - DNA, 100 bp, Homo sapiens
gggaccgccagctctgtccgctgcccacagcctagcagtcgggaccgtactgaggtttcatatacactggagaagtcgtacatcgaatgctaacagccac

SEQ ID NO: 407409 - DNA, 78 bp, Homo sapiens
ttctatcatttttgttactcttcagtacaatgtcaccctcccagcaacagaagaagccactaaagcagttacagaaat

SEQ ID NO: 407410 - DNA, 89 bp, Homo sapiens
gaagcaacacgcaaacgagagctgaggctaatgaaaaacagaatgcgattcacacctttgtgcagtccggatctcacttggcggcaagg

SEQ ID NO: 407411 - DNA, 100 bp, Homo sapiens
agcagtgagaaagcaaaggctgctctgaagcgcacgacctccgactactttctccttcaaggtggaatgaggtaccatctactgtctccagaggaccgag

SEQ ID NO: 407412 - DNA, 100 bp, Homo sapiens
caagaacaggctacagatactgaaattttgtttgcagtgttgatgtgggtatttacctatgttggtgccttgtttaatggtctgacactactgattttgg

SEQ ID NO: 407413 - DNA, 100 bp, Homo sapiens
gtgattaccggctggatgcagacgatgtcttcgatcttctaaaggctatgtccaaactgggtcttcggcaggttacaggagttactagagtcactatccg

SEQ ID NO: 407414 - DNA, 75 bp, Homo sapiens
ctgctgcctctgtcactcctggtgaccagcattcaaggtacatcaggaacgtctctatcaagaatacaatttcag

SEQ ID NO: 407415 - DNA, 80 bp, Homo sapiens
gaggacccagtcccttctggagctagagcttgacagcggcccacgacccttcctcagggcaccatcaacatgaaccagtg

SEQ ID NO: 407416 - DNA, 83 bp, Homo sapiens
aaaaacattatttaatctatctgggatttactccggcttatgatttgaggagggaaaacccctgatcctaaaatgaatgctag

SEQ ID NO: 407417 - DNA, 130 bp, Homo sapiens
atcattttcacctcgcgtcgcgcccgggaggaaggaacgaggcaaggagctaaagcagcgtgcgttcagccctgggtttctgatgaagaattgaaaagaagagtagctgaggagctggcattggagcaag

SEQ ID NO: 407418 - DNA, 75 bp, Homo sapiens
gaaagttcagtggtgctcactctcagtcatcaaatgtttgaatcttcagacaaacttctgggaggactcggtccc

SEQ ID NO: 407419 - DNA, 50 bp, Homo sapiens
cagattattcacgaagctctagaaagattacaattcctagaccttctgtg

SEQ ID NO: 407420 - DNA, 82 bp, Homo sapiens
cgaccgggacagctaccggcgcatccttatgacacgcagcccaagaaggtccggaaggtcccgccgggtcttccatcctcgg

SEQ ID NO: 407421 - DNA, 82 bp, Homo sapiens
cccggagcaagcggagctcccccaagagccggaaaggaatctggtggacagtaacaaactttggtgaaatttcaggaaccat

SEQ ID NO: 407422 - DNA, 99 bp, Homo sapiens
aggctcagtctgcggccaagactccgtcctgcaaggcatgtcagagcgggagcgacaggtgatgaagaagctgaaggaggtggtggacaaacaacgcga

SEQ ID NO: 407423 - DNA, 76 bp, Homo sapiens
gcggccaatggcacggaggcctgcgtgtactccaaagattcaggtttactcacgtcatccagcagagaatggaaag

SEQ ID NO: 407424 - DNA, 140 bp, Homo sapiens
tggacctaaatggcgcagcatgactttgctccagcctggcttaatttccctactccaccatcatcaacaaaggcagcataattcgttgtatgaggcgcctggaagaattgcttcgacaaatgtgtcaagcagcaaaagcc

SEQ ID NO: 407425 - DNA, 75 bp, Homo sapiens
gctcagcccacctgtgattatggaatgtatcctgtcaggtataatgtcagtgaatggcaagaaagttcttcatat

SEQ ID NO: 407426 - DNA, 83 bp, Homo sapiens
gggcgccctccccgccaaggcccgtgcgagtgcaccaattccagctggacatcactgtgaaaatgggacgggataaagtccga

SEQ ID NO: 407427 - DNA, 100 bp, Homo sapiens
tgtcggatgaagataagacactttctcagttacagagaggaaggcgcaatggcgaggaagttatctgtaatcttgatcctgacctttgccctctctgtca

SEQ ID NO: 407428 - DNA, 101 bp, Homo sapiens
aggacattcagtcagaagaaggctgctattgaaagagagtatgcacagtttggaaattttagcattcaggtgccaggaatgcagatgggacagccagtgcc

SEQ ID NO: 407429 - DNA, 76 bp, Homo sapiens
cgcgaggggagactgaagttcacgttccgctcttagtgcgcgtggtgaagttcatggatgtctatcagcgcagcta

SEQ ID NO: 407430 - DNA, 100 bp, Homo sapiens
gaggaaagcaaaggagtcagggatggctcttcctcagccggatccagagcaatgtagaaggcctatacctgactgatggggtccctttctcctgttgcaa

SEQ ID NO: 407431 - DNA, 83 bp, Homo sapiens
ctggctccgtgaaccttagggacaacaccgggacacccgcgaggccggaaaatggaaatctggcattttttaaagtttgcgcc

SEQ ID NO: 407432 - DNA, 90 bp, Homo sapiens
gcacaccatcggctttggcatctatgagggtttagatgtagattctctggtcattgagcatatccaagtgaacaaagcacctaagatgcg

SEQ ID NO: 407433 - DNA, 100 bp, Homo sapiens
cgacgccaccaagtgcggcaacttcgcgcgcttcatcaaccacagctgcaacacaatgcagatcttcgtgaagactctgactggtaagaccatcaccctc

SEQ ID NO: 407434 - DNA, 75 bp, Homo sapiens
agaggctgcacacccctgcactatgcagctacatcagacacagatggcaagttgtgtgcacatcgaaaaggcaga

SEQ ID NO: 407435 - DNA, 101 bp, Homo sapiens
gacctgccctcctcctccagccgcccgcttcctccttgccaggaggatgactcactggttgtgtggaaggaagtcgatttgacccggctgtctgagaagga

SEQ ID NO: 407436 - DNA, 100 bp, Homo sapiens
cagccgctcgtcagactccagcagccaagatggtgaagcagatcgagagcaagatgcttgtgaccacaccagaaaaatgggatgtagtgacaagaaagag

SEQ ID NO: 407437 - DNA, 98 bp, Homo sapiens
ccggcacccccgcacaggcgcctctgccctgcacgtggctgctgccaagggctacattgaggtgatgaggttatcaatactctggctgaccatcatca

SEQ ID NO: 407438 - DNA, 104 bp, Homo sapiens
agagagacccagctcagatggggagggtgttgtggaaaatggaattaccacatgtaatggaaaggagcaaggtactaggttttgacaagcttgcatcatgcgtg

SEQ ID NO: 407439 - DNA, 80 bp, Homo sapiens
gtttgccaaccgcccggaccccaacaccccgatggaagggggatatgagactttctactcggaatatcctgagtgttgcg

SEQ ID NO: 407440 - DNA, 100 bp, Homo sapiens
aaatgctgaccctcgaaaaaaagatggagccctgcatatgattggctctttagctgaaatacttctgaagctacgaaagtgccaacatcgagagcttctt

SEQ ID NO: 407441 - DNA, 90 bp, Homo sapiens
cttggcaaggcaagtagcggcggcgcttcaaggctgttcggctcttgaatcccagcgatgaaaccaggaactcactttcccgggatgccg

SEQ ID NO: 407442 - DNA, 100 bp, Homo sapiens
gtccccagtgagggtgtacaaatacccctttgaattaattatggctagatgctgcctatggaagttgcaatttctacattacacttcttgactgttttca

SEQ ID NO: 407443 - DNA, 75 bp, Homo sapiens
ggttctgttgatgaccctcttccagttggttgaaagactggaaaagaagagctgaattggaagaaaggcagaatc

SEQ ID NO: 407444 - DNA, 100 bp, Homo sapiens
tcttgatattcctttgtaccatgggtggttagtagaccctcagtacagctattggaatcagatgcaaagatggtgttgtctttggggtagaaaaattagt

SEQ ID NO: 407445 - DNA, 117 bp, Homo sapiens
ggcgaaaggaagcaagcagttcagaagagccaaggaataaacatgcaatgaacccaaaagggtaccttctggatacctccacatggtccgagtgcactgaacccaagcacattgtgg

SEQ ID NO: 407446 - DNA, 82 bp, Homo sapiens
agctaggccatctgaataactttactaagtggtgaaatagggccttctaaacctgtggagaagtgagagatctgaatttgga

SEQ ID NO: 407447 - DNA, 76 bp, Homo sapiens
tccaacaagatgtgggcacaaaaactaccattcgcctgatgaactctcagccacagtacacgaacctggggctcct

SEQ ID NO: 407448 - DNA, 97 bp, Homo sapiens
ggtctgcagggcctgggccgccgctgctacctgcagcgccgtgtggcacgacacaaaaatcagaacatggctctctatgctgacgtcggtggaaaac

SEQ ID NO: 407449 - DNA, 50 bp, Homo sapiens
ttgatgtggcccaggacttgaaggtgaagatgcttttgatgccctccctc

SEQ ID NO: 407450 - DNA, 100 bp, Homo sapiens
agtcccaactcatgaaatttagagttcaagcaagcaagatacgagagcttttagcagagaagccctttctaaggcacaaaatgatgtgatggaaatgaag

SEQ ID NO: 407451 - DNA, 80 bp, Homo sapiens
gacgccgggaccgggaccgccgccgccgccgccaccatggtatgatgccgggcgggacggcttcatcgacctgatggagc

SEQ ID NO: 407452 - DNA, 75 bp, Homo sapiens
gcggcgtctccggggaaagccgtggccccgagggcggatccgagaacaagttgggagatacagctttgcatgctg

SEQ ID NO: 407453 - DNA, 50 bp, Homo sapiens
tgaccagctacgcctcggggccaaggtcctgcagacattcgctttgtctg

SEQ ID NO: 407454 - DNA, 82 bp, Homo sapiens
ctgtgaaagcgggcgttttggaagataccggaagtagagtcacggagaggattgggccgagcctatgccctggcttttgcag

SEQ ID NO: 407455 - DNA, 100 bp, Homo sapiens
agagctctcgtactggacagattagcaagcaatgtggcaaaacgaaaaagctcaatgcctcagaaattcattgatctactttctgggaacctttctgcta

SEQ ID NO: 407456 - DNA, 74 bp, Homo sapiens
cagaatcagttgttggagaaaattaaagactttgagagttttgacctgcctgaagagcaccagattgcgcacct

SEQ ID NO: 407457 - DNA, 97 bp, Homo sapiens
tcatgcaggaagtagaacatgcattaagttcaggactatctgctgccaaactcttgactgaatatggcgttagtgttttggttttagaagctcggga

SEQ ID NO: 407458 - DNA, 75 bp, Homo sapiens
cgagacgccctcatcagcagagtcacaggagttttggaagtgagaggcccaagtctgttttggtggtctgagagg

SEQ ID NO: 407459 - DNA, 100 bp, Homo sapiens
gacaacggagaccagacctactgcagccacgcgggcgagcggctgtgtggatgtcggcgaagccgcgggcgagggtcaacatatttcactggcacctatt

SEQ ID NO: 407460 - DNA, 90 bp, Homo sapiens
cgcgggcgcggccggagaccgtggggcccccggttgccgccccctcgggctggatccagacccctttgtgcggcacaccttctggacctt

SEQ ID NO: 407461 - DNA, 97 bp, Homo sapiens
ggcggacgggaaggcgggagacgagaagcctgaaaagtcgcagcgagctggagccgccggagactgtgccctgtccacggtgcctcctgcatgtcct

SEQ ID NO: 407462 - DNA, 75 bp, Homo sapiens
tcctgataaggacgatgggaaccagctagtgtcagcagtgggatacctgcgcttgaaggacatcatccaccgtga

SEQ ID NO: 407463 - DNA, 100 bp, Homo sapiens
gaaacttccacgaggtgtcctagaaaggatcatgggagacaaagtggcttccgaaggctctgagtaccaggtcctgtacatcgctgatgacaatgagatc

SEQ ID NO: 407464 - DNA, 82 bp, Homo sapiens
tactctgcctcggggacgaaagcaggaaaagtacccagatgccgtgtacctctcggaggggccctcctcctgctccatgggg

SEQ ID NO: 407465 - DNA, 83 bp, Homo sapiens
gtacctgaaacagaagatgtgcaggattgtcagaagcttcagttctggtaaaagagaaggtggggactttgtttgctgtgccc

SEQ ID NO: 407466 - DNA, 80 bp, Homo sapiens
ttggggacggagcagcgcgtcgtggggcgagcggcaggtgaaagaaaatggcccgaaccaagcagactgctcgtaagtcc

SEQ ID NO: 407467 - DNA, 49 bp, Homo sapiens
cagttagtcacccacctacatgttgagaacttggtgagaacttgcccat

SEQ ID NO: 407468 - DNA, 82 bp, Homo sapiens
cgcagttcttgtttgtggatcgctgtgatcgtcacttggtggcatgtctgtgacccagtgctccaaggaggacggcagaagc

SEQ ID NO: 407469 - DNA, 100 bp, Homo sapiens
ttgaaaaatgcaaagatgtagatgagagaaatgaggcatttcagaagatggacacaaagaagaaggaggaacagttgaagcttctcaaggagaaatatgg

SEQ ID NO: 407470 - DNA, 83 bp, Homo sapiens
ggctgaggcccgcaagcgcaaggtatcgagaaccttccctgcgaacttcagaggaacttccagctgatgcgagagctggacca

SEQ ID NO: 407471 - DNA, 75 bp, Homo sapiens
gcttttggagccaattattcctcacagcctctggatgagagttggccaagtgagaaagatcagtctaaagaaaag

SEQ ID NO: 407472 - DNA, 75 bp, Homo sapiens
cgagcagtctcaggcctttagtgatgatgctgcagaaccttggcctgaaaatgctacattatatcagcaattgaa

SEQ ID NO: 407473 - DNA, 83 bp, Homo sapiens
cctttggttctgcatcaaaaatatcaacgatgaaagagtatttgagaaaatacggtacatgtccccatggaggatatggcttg

SEQ ID NO: 407474 - DNA, 75 bp, Homo sapiens
cggccagatcggcttcatgctgtgcagcaagaacccgatgcttcctgaaacttggagagtggcagctgaatctac

SEQ ID NO: 407475 - DNA, 73 bp, Homo sapiens
gcagctatgtgtcttggattggctcacaggtatggtgctgggtgcagatgcagtgtggctctggatagcacct

SEQ ID NO: 407476 - DNA, 100 bp, Homo sapiens
tcctgaagaaatttctgccatggttctcactaaaatgaaagaaaccgctgaggcttatttgggaaagaagtttttttcaccgctcaaccctgtgagagta

SEQ ID NO: 407477 - DNA, 75 bp, Homo sapiens
cgcgagcgaggaggagccgagccgcgggcacaggcacgtgtggttctcaaatataggcattctgatgggaacttg

SEQ ID NO: 407478 - DNA, 98 bp, Homo sapiens
atcgaaaggagcaagagcaagatcaccgtgacatccgaggtgcctttctccaaaaggccatgactgttccatcagattatggaatttagacagcaaga

SEQ ID NO: 407479 - DNA, 95 bp, Homo sapiens
ttttatattcatctcaaaaacaaaattctgaactcaggacttggcaagttttcagctgctactaaagataatgagcataagcgttcactgaccaa

SEQ ID NO: 407480 - DNA, 73 bp, Homo sapiens
ccagcgcccctggtaactgacaaggaggccaggaagaaggttctcaaacaagtgctgggctttgacaaacttc

SEQ ID NO: 407481 - DNA, 100 bp, Homo sapiens
tcttccaaagcacaggaatctcactctgttaaagctggtctgttctaactgaggggaagacggaatctatcactgtggtgaagctgctgagctgctttga

SEQ ID NO: 407482 - DNA, 82 bp, Homo sapiens
cgagagccctgtcatcttctaaacagagcagcagcagcagagatgataacatgtttcaggaggcaagtgaggcctatctggt

SEQ ID NO: 407483 - DNA, 100 bp, Homo sapiens
acgtccaagctgctgcttccggatgactttaaggagtgtttttgggcctaggcctgagtggaatcattcctaccttgcactatgtcatctcggaggggtt

SEQ ID NO: 407484 - DNA, 80 bp, Homo sapiens
cccggtactgtgcactattctttcccaggaaccattggataaggataaaggatctcatagatcagaacatactggagcct

SEQ ID NO: 407485 - DNA, 100 bp, Homo sapiens
acctggaggacttcggcggagggcggttcatgttcatggaggagggtgccaacaagacggtggagccgagagctgaagatctgaaacttctataagccca

SEQ ID NO: 407486 - DNA, 82 bp, Homo sapiens
tcgatcgtcttcctactgtcttgttttttccctgcaacaggtaaagaaactgcggcaatgaaagctgatctcctgagggcca

SEQ ID NO: 407487 - DNA, 75 bp, Homo sapiens
gaacctgcgcggctactacaaccagagcgaggccgggcagctgtgcggagggtagtggcagccatgaaccggatg

SEQ ID NO: 407488 - DNA, 74 bp, Homo sapiens
gggattacagtgcggacggccagcttcttcactacagtaagactttgaccccgacgcaggcttcagtgattgcc

SEQ ID NO: 407489 - DNA, 98 bp, Homo sapiens
cacgagcccacagcagtcctggcactccttgttccagccgcccactgccgtggagagtgatagattcgtgtggcctttcaaatgattgtgaagtggtg

SEQ ID NO: 407490 - DNA, 82 bp, Homo sapiens
cgctgccgctgccgctgccgcacctccgtagctgactcgctggacccacaaaccgtggagaccaagaactggcacacggacg

SEQ ID NO: 407491 - DNA, 100 bp, Homo sapiens
gtgacccgagatattgtcagcagagagagagtatggaggacacgaacaactatcttacaaagcacaggaaagattgctgtgctaaggagacagcaacgta

SEQ ID NO: 407492 - DNA, 100 bp, Homo sapiens
ttgcattgtttgtttgaaattgcattgacgactggtctcacagtagtaacccgctctccagacagcaataatgtagccagcagtgctgttggaactgctc

SEQ ID NO: 407493 - DNA, 100 bp, Homo sapiens
agcgggccgggaaaagtggcactgaggctctggaacttctgcccagctctccttgatgccgctcctacgaggactgctgtggctccaggtgctgtgtgcg

SEQ ID NO: 407494 - DNA, 100 bp, Homo sapiens
tggcagccctgcatggagcaagtctgtcagcaccatctttctaacatacaaggcgagtggataattccaacacaagactggcagtccaaattgaaagaga

SEQ ID NO: 407495 - DNA, 83 bp, Homo sapiens
gttatggaggaggtgatggtggatataatggatttggaggtgatggaaacgtaaatattttcaccacgatcgattagactggg

SEQ ID NO: 407496 - DNA, 99 bp, Homo sapiens
cgagagcgtgaccgagagcgcgaatatcgtcatcgttagaagacctgtgttgcgtggtgggtctgctgccgccacttctaatcctcatcatgacaacgt

SEQ ID NO: 407497 - DNA, 74 bp, Homo sapiens
tcgaagccgccacccaaaccagtcaaaccagcggggatctgatgagcttctttcttctggcatcattaacggac

SEQ ID NO: 407498 - DNA, 125 bp, Homo sapiens
ggaagtgggggttatggtgggaggagccgatactgagcttcttcctatttgccatgggtggataatattaatgcagctgtgatggatttgaaaaaaaagaagatccgcagtctaagtgaagaggt

SEQ ID NO: 407499 - DNA, 78 bp, Homo sapiens
ggaaggaaaaccgcgcagagaggctccctggggaagggaatgcagggttgctggggctgggcccagaagcagcagcac

SEQ ID NO: 407500 - DNA, 100 bp, Homo sapiens
gctctgcaaaagtgccgccctgacttgtgcagcaaagtggcccaaatccatggcattatctgctctggcagcagccattctggcgacaacattgactggg

SEQ ID NO: 407501 - DNA, 74 bp, Homo sapiens
ggatccctcaaccctggaaaacagctatttctctatgaatcatcatcaagaactctgggagaacttttgaattc

SEQ ID NO: 407502 - DNA, 100 bp, Homo sapiens
ctgtgttagcaatgcatgaagaaaacgtttacacggtggagtcaaaccgagttcaagttcgaacctggcagatggagtcttgccttgtcgcccaggctgg

SEQ ID NO: 407503 - DNA, 98 bp, Homo sapiens
ctgctggtaactggacatatcccaacagaggaacagatcgaagatttatcccagcaagcacaactagcagctgctgagaaattcaaagttcaaggtga

SEQ ID NO: 407504 - DNA, 80 bp, Homo sapiens
ctgagcgggcggtcattcgcatcgcaggcatgtcagagcgggagcgacaggtgatgaagaagctgaaggaggtggtggac

SEQ ID NO: 407505 - DNA, 50 bp, Homo sapiens
ctgggacaccgcggaagtcgggaaatggaagccatcttcgacaagagcac

SEQ ID NO: 407506 - DNA, 100 bp, Homo sapiens
gaaacgggccgcgaaccgcagtatcatgctggccaagaagatcatcattaaggacggaggcacgagtatcctggctttaaatcctcgaacacaaactcat

SEQ ID NO: 407507 - DNA, 100 bp, Homo sapiens
aaagcaatctgctggatgatttgaaaagtgtaatgaaaacaaatgacattgttcgatacagggtgtatgagtgttctcaggcgctgtggtctcaccttcc

SEQ ID NO: 407508 - DNA, 100 bp, Homo sapiens
agatgggcatgcccagcagcctggcccaccgcatcgctgcccagaccctgctgagctcaggccccggggcctccagcggcaccagcggagaccacggtga

SEQ ID NO: 407509 - DNA, 90 bp, Homo sapiens
cctaccatcctcctaggtcttgtcctgggcaccacggggactcggagacaggaaatcaaatgttggacgaaggatttgtggaagattttt

SEQ ID NO: 407510 - DNA, 83 bp, Homo sapiens
gggagctggacggcgagcgcgagcggcgcgagaaacatcccggagttccttcccgtcctcccacatgcatcccctgtgcagag

SEQ ID NO: 407511 - DNA, 75 bp, Homo sapiens
tgcgcatctccaacagcgacctgagcggaatgggtaccacagaccatgtcatcgtcctggcgtccacgaaccgag

SEQ ID NO: 407512 - DNA, 88 bp, Homo sapiens
gagactaccagaaggcttatgaggatggctgcaagactgtcgacctaaagcctgactggggcaagatttggtgcttccagatgtgagt

SEQ ID NO: 407513 - DNA, 51 bp, Homo sapiens
cctcccaaagtgctggtattacagcaatactacatcctgctgatcctgacg

SEQ ID NO: 407514 - DNA, 75 bp, Homo sapiens
ggtggaaaacggacatcagacaaagtcaaggtaatttctaatgcaaagaacacagtccaaggatttaaaagattc

SEQ ID NO: 407515 - DNA, 82 bp, Homo sapiens
agaacagtcaccctcctgaggaatcaccttaacacacacacagatgcttttcatcagatcattcgcgatgaaggaatctcgg

SEQ ID NO: 407516 - DNA, 50 bp, Homo sapiens
tggccagcaacccttattctggtaaatgggcttgatactgtgagagtgcc

SEQ ID NO: 407517 - DNA, 83 bp, Homo sapiens
gccgaattacatctgtccagccacctacaggcctccaggaatggctaaaaatgtttcagaaattgcatctgatggtctcaagg

SEQ ID NO: 407518 - DNA, 75 bp, Homo sapiens
gactggatcgaggcgcagatcaacaacgaggacctcttccccaccaacgttggcttggccttcgtgcctctgcag

SEQ ID NO: 407519 - DNA, 100 bp, Homo sapiens
gccacgccttggtgggctggatgctggagcacacggaggccgtgatgaagccccacagccaagctcttcaggatgttgaaaaggccatcatggtgtttga

SEQ ID NO: 407520 - DNA, 100 bp, Homo sapiens
cggaggcggcagcggcgggcctgaggcgaaggagcggccgggagcccgccgcgctggtagcgagagcccagcgacgtggatggggcagctaggggcagca

SEQ ID NO: 407521 - DNA, 80 bp, Homo sapiens
ccagagataattgataacaccctgtaacagctgaaaattcggaactatccgggcagatttgattgaacagatgagattca

SEQ ID NO: 407522 - DNA, 100 bp, Homo sapiens
atttaccaggtgtcctacttctcatttaagctactcaagaaagagtgcccaattccaaatgtacagaccacattgtgcaacacatcattggacaacccaa

SEQ ID NO: 407523 - DNA, 100 bp, Homo sapiens
agaaatgctagccaaaatggcagagcctttcaccaaggctctggatatgcttgacgcggaaaaatctgctatattagtgtgtaaatatgttgctgtggag

SEQ ID NO: 407524 - DNA, 101 bp, Homo sapiens
agatcaacggggtgactggtctctttccttcaaactacgttaagatgacgacagactcagatccaagtcaacagtaatgtgtgaatgacaactactggttt

SEQ ID NO: 407525 - DNA, 120 bp, Homo sapiens
gaagcaggaggctaagaaagtggtgaatcccctgtttgagaaaaggcctaagaattttggcattgatgatccagatcctgatgatggatttaactataaacagatgatggttagagatga

SEQ ID NO: 407526 - DNA, 100 bp, Homo sapiens
ccgagcggaaggtgtctgcctccgtggccgaggtccaggagcagtacaccgagcgcctccaggcaacggggtggtcatccacttgccaggcttgtttgag

SEQ ID NO: 407527 - DNA, 82 bp, Homo sapiens
ccgcgccgccaccgtctgaactaggatgtcccgacatgaagggggatatgagactttctactcggaatatcctgagtgttgc

SEQ ID NO: 407528 - DNA, 90 bp, Homo sapiens
tcgagaggaacaccaagttcatcgccccctggttccatgaatgagatgctggaggaaggacatgagtatgcggtcatgctgtacacctgg

SEQ ID NO: 407529 - DNA, 74 bp, Homo sapiens
ctagtgcaaatcccctgctcagggtcttcatccagaaacgagggactcagaatattatgactatggacatgggg

SEQ ID NO: 407530 - DNA, 83 bp, Homo sapiens
acggaatttgtcaaaaacctgctgccaaagtctatagcttggtcgggaggaacctgccatgtccatggatgccaatggaaaga

SEQ ID NO: 407531 - DNA, 100 bp, Homo sapiens
tggtggtggatatggtggcagtggggatggctataatggatttggtaatgatgaaaactctcaacaacgacctgggccccaactggcgggacaagttgga

SEQ ID NO: 407532 - DNA, 75 bp, Homo sapiens
ttttttgtggagtggtttgaatatcgtaagcgcacgtttaaacatctcaagggcggcgactggcggcgcgatgga

SEQ ID NO: 407533 - DNA, 100 bp, Homo sapiens
tccagccccatgggccggacatctactgggtcagcttcatcctcggcggcggtggccgctagctccaaggaaggatgatgtgggctgctggggcagtagc

SEQ ID NO: 407534 - DNA, 90 bp, Homo sapiens
ctcctttgtgccttttatatcatggcaaagtgggttgccagcgttgatgtggtggagaatgaagaggccagcgctagcatcattgttaaa

SEQ ID NO: 407535 - DNA, 49 bp, Homo sapiens
ctcaaatcaaccacaagctggaggtggcctttttgaagatgtaactatt

SEQ ID NO: 407536 - DNA, 100 bp, Homo sapiens
gccgcacggatcatggccgcagccgctctggggcaggacctgaaggagaagaaggagaaggtggaggagaaggcaagccggaaagagcgaaagaaagaag

SEQ ID NO: 407537 - DNA, 100 bp, Homo sapiens
cacgatgtgactccgccgccggggacccgtgaggtttgtgtggaccccgaggctcatcttcaggtggaactaatctggttaagattcctacagaaaaaag

SEQ ID NO: 407538 - DNA, 75 bp, Homo sapiens
caggggcaacctgttcacatgggcgacccagctggttttcccatgggctatgcagcagcagctcctgcctattct

SEQ ID NO: 407539 - DNA, 83 bp, Homo sapiens
gccatgggccgccgccccgcccgttgggggatatgagactttctactcggaatatcctgagtgttgcgtggatgtaaaaccca

SEQ ID NO: 407540 - DNA, 79 bp, Homo sapiens
gagtggttgtgtggtcgcgtctcggaaaccggtagcgcttgcagcatgttgagaagctgatgtctcctcgacttccaac

SEQ ID NO: 407541 - DNA, 82 bp, Homo sapiens
cagttggaagcagccgatccagcctgcggagcctgtggggcagaggttttatacacctgaaagaagagaatgtcaagacgaa

SEQ ID NO: 407542 - DNA, 100 bp, Homo sapiens
ggagaatatatggctggacagctagctgcttatggctataaaattacaggtatatttgcttacttaaactaccatgttcctcgaacgagacgagaaatcc

SEQ ID NO: 407543 - DNA, 100 bp, Homo sapiens
gtgaccgagaccgcggccgggaccgagggctcttgcagccaatgccggaacaggatttgctgttgctgagcctcaaatcgcaatgttttgtgggaagtta

SEQ ID NO: 407544 - DNA, 90 bp, Homo sapiens
ggtgctcgggaaaaaccacagatttcagcagcacaatcaacgcaaccacagaaacaagtggtacagtaccttccactggaagaatctcaa

SEQ ID NO: 407545 - DNA, 90 bp, Homo sapiens
cgcccgcccgccctctccccgtggcgcggcggcggggaggcgagaggctgacccgcggctgattgagtccctctcccagatgctgtccat

SEQ ID NO: 407546 - DNA, 50 bp, Homo sapiens
ccagaccaaggcaggtgaggcgcaaaagtactttgactcaggagactaca

SEQ ID NO: 407547 - DNA, 100 bp, Homo sapiens
ttatcgtaggaggagtcctccacctcgtcgcaggttgtatggctcgacactcaacatcgacctgtttccggcgctcgtggtggaggacctggtgcctggc

SEQ ID NO: 407548 - DNA, 90 bp, Homo sapiens
gcttcgctggccatttaggagctctgctcaaagccagacgagccccccaagatgaacccagtggtggagccactgtcctggatgctgggc

SEQ ID NO: 407549 - DNA, 82 bp, Homo sapiens
aaaggagttcgagcagatcgacaagtccgggagctgggcggccatttaccagttggaggagagcagattagtgccattggaa

SEQ ID NO: 407550 - DNA, 90 bp, Homo sapiens
ctttcctgctggtggcaaccgcctacgagacactcaaggttcttgatagtccacaatgggtgaaccacagcaagtgagtgcacttccacc

SEQ ID NO: 407551 - DNA, 90 bp, Homo sapiens
atgagggaaatcgtgcacatccaggctggtcagtgtggcaaccagatcggtgccaagattacccgtgaggcagccgagagcgacccaccc

SEQ ID NO: 407552 - DNA, 100 bp, Homo sapiens
tcactgccttcagcagcaccgagactggctctgcggaggcatgatgttgcagcccccctgagcccccattcacaggaggtctcctgctacattgactata

SEQ ID NO: 407553 - DNA, 90 bp, Homo sapiens
cgtgaccgagagcgcgaatatcgtcatcgttagaagtgggttacccagaccaaactttggccatttaacggatccatttgacacaccagc

SEQ ID NO: 407554 - DNA, 89 bp, Homo sapiens
gaaatcagctcaaacatttttatcagagattgaaaatcttcaagagcagcttagagacaaggaaaagcagatgagcagcttgaaagaac

SEQ ID NO: 407555 - DNA, 82 bp, Homo sapiens
tttggcggctcggaggagcggctgctgctgctgctgctgctgctggtggcccctttgcagggcagcttttggcaaggagtct

SEQ ID NO: 407556 - DNA, 90 bp, Homo sapiens
tcatcagcttctgaggaatctgtgctttctgtcccagaactccaggtgggcagcaatgctggcatcgtggggatgaccaaagaacacctg

SEQ ID NO: 407557 - DNA, 88 bp, Homo sapiens
ccagtatgatagcaatgatggcaggttgtctgcattcaaaagagcattctattaaagctaccttaatttggcgcttatttttcttaat

SEQ ID NO: 407558 - DNA, 75 bp, Homo sapiens
cagctgaggagactccggcgctcgccatggccgacgaaaagcccaaggtagtgggcagcagtcagtgacaggtgt

SEQ ID NO: 407559 - DNA, 90 bp, Homo sapiens
gcaccacgggctccaccctgctgcagcccctcagcaacgccgtgcagctgcccatcgaccaggctttggacgtggaccggatggttcttt

SEQ ID NO: 407560 - DNA, 80 bp, Homo sapiens
gtatatgcgtttaaaggaggagctgcaactgtctgatgaacagctacagaagagcctgcctagggtagttaaaagacgag

SEQ ID NO: 407561 - DNA, 100 bp, Homo sapiens
gcgcgggccgggaggggacggccgccggagccgcgaggccaaataacgaaggaggcccaacttcattcaataaggagcctgacggatttatcccagacgg

SEQ ID NO: 407562 - DNA, 89 bp, Homo sapiens
tatactactttttccagaattcatacaaagagtatcagcggtttgagtgctacgtttgcagaaattttcttggaaataatccaaagcag

SEQ ID NO: 407563 - DNA, 100 bp, Homo sapiens
tctggaactgccaccattgctgaacggagaggtagccatgatgccccacttggtgaatggagatgcagctcagcagcttcaaaagcagtggactgtcttt

SEQ ID NO: 407564 - DNA, 50 bp, Homo sapiens
gcagattcccagactctgccactggaaatattctctcgggcctagccgtc

SEQ ID NO: 407565 - DNA, 90 bp, Homo sapiens
aaacgtgatagtgtgggatctggcaagaggagtcaaaatacgatcttatttcaatatggaccctgatgctcccataagacagaaaatgcc

SEQ ID NO: 407566 - DNA, 75 bp, Homo sapiens
acaatggattaccgacagtgactaagggcagcatgtttaacccagagaaaatttgtcaaaggatctttacttgat

SEQ ID NO: 407567 - DNA, 50 bp, Homo sapiens
ctgaagagggaagacacgcggaaacaggatggcacatttcctagaggcag

SEQ ID NO: 407568 - DNA, 96 bp, Homo sapiens
aaagaagcatttgcagacgttgtctcatgggtaccgcttgccaactttggaggaattacagtttgaaaggctgacccgagagctggaggctgaacg

SEQ ID NO: 407569 - DNA, 98 bp, Homo sapiens
ggagccacccgcacagacatctgccaaggagccctgggtctggtgagctgtaccttctttctggcagtgaatggtctgtattcctctagtgatgatgt

SEQ ID NO: 407570 - DNA, 78 bp, Homo sapiens
ccaatgaccgtggaggagtaccgcatcgcccagctgtacatgatacagggctgacaggacaactggatcagtttcatt

SEQ ID NO: 407571 - DNA, 100 bp, Homo sapiens
acagagatttattcgtaatgcgactcaaagctgcacggcagtctgtttatgaggagcagtatgtgtttatccacgatgcgatcctggaagcctgtctttg

SEQ ID NO: 407572 - DNA, 83 bp, Homo sapiens
cccaatggcaggacagtgcccagcgatggtaagcaggaagagaacgacgtggtggagaagctgaacctcttcttggatctgct

SEQ ID NO: 407573 - DNA, 96 bp, Homo sapiens
ctcgttcccaagtctctttccagaggccaggctttatgggagcatgggttaccagcgacgcaccctaatgtgaaggctgtgtctgagactcctgca

SEQ ID NO: 407574 - DNA, 88 bp, Homo sapiens
gcgagaagcaagcggaacttcctgaggtgatgcagaagatggggaagaatatgatgacccttttgctgggcctccagacactatttca

SEQ ID NO: 407575 - DNA, 83 bp, Homo sapiens
aggccgggggcagccgccatcggcagcgccagttctgcctcctgggggcattgctggcccccatccgagtgcttctggccttt

SEQ ID NO: 407576 - DNA, 100 bp, Homo sapiens
ctctggccatcttttcccagccacagaatcaggtgatggtccagaattaagagatgcgctggctccctccctccgaggctacttctcagggctggaagtc

SEQ ID NO: 407577 - DNA, 85 bp, Homo sapiens
agcaatgacattgggggcctgtggaaattttcatttccctgaaacctgggctcttgaagacgcatcactggagcagatggataat

SEQ ID NO: 407578 - DNA, 89 bp, Homo sapiens
actgtaacattattcacactgaggattttgcctaccattttacagtatttgtcttctattttggagcctttttattggaagcagcagcc

SEQ ID NO: 407579 - DNA, 98 bp, Homo sapiens
tgggaagagcataccaggcagagggaactgccactgcgagggcccctgggcgggactgtgctcgcttgtattggttggtgatggtggtactggaaaaa

SEQ ID NO: 407580 - DNA, 100 bp, Homo sapiens
tgggaagatatatcttccttatctacatgaatggaaacacaaggtgcttcctggaggggcctgccccactgttcctgtgctgagttccaggacagcctca

SEQ ID NO: 407581 - DNA, 90 bp, Homo sapiens
atctggtagcccacttaaactagaatgtccatgacagctcattcacatggctagtgccttggctggaggcaaagctggaaaggacagtgg

SEQ ID NO: 407582 - DNA, 75 bp, Homo sapiens
tgcccaaggagatggtctcattaaggtatctcgggggagctttgtgccttgatggatcaagttcatcatatgcag

SEQ ID NO: 407583 - DNA, 50 bp, Homo sapiens
ccaccttcgtcaatgtcatcgcggtgcctcactcctgatgcggaagctcg

SEQ ID NO: 407584 - DNA, 100 bp, Homo sapiens
cgggactggtcagatgaacccatcaaagagtgcgaaagctgacttcatgagaccgaggatctcgttcgttgatcgatgctacatattcagcatgttagat

SEQ ID NO: 407585 - DNA, 82 bp, Homo sapiens
aagtagtggatctggtggatgtcaatacccctgatttaatgttgatcatggccttgccaggttggtgacagtatattgtgag

SEQ ID NO: 407586 - DNA, 50 bp, Homo sapiens
cttctggatctcacttggtagaagatgagtggacttttgctctgtcctcc

SEQ ID NO: 407587 - DNA, 76 bp, Homo sapiens
cctcgagccgcagcacgagctcaaattccgaggagtatgctgctgctgttccgctttgcgtcctcgctacaaacgc

SEQ ID NO: 407588 - DNA, 100 bp, Homo sapiens
agaggggagtcatcatgagcgatgttaccattgtgaaagaaggttgggttcagaagaggggaacgacttagctgaatatcagagaacttgtgaagatctt

SEQ ID NO: 407589 - DNA, 83 bp, Homo sapiens
gaaaagtgcccaagatcctttcagggacccgagtgtatagccctccagagtggatccgctaccatcgctaccatggcaggtcg

SEQ ID NO: 407590 - DNA, 51 bp, Homo sapiens
aagagatgctggcgtgaagggttacgccccatggtgtccatcctgccagca

SEQ ID NO: 407591 - DNA, 75 bp, Homo sapiens
cgtcttccggacagactatggtcaggattaaccacaatgaacggttggaattcctgggtgatgctgttgttgaat

SEQ ID NO: 407592 - DNA, 100 bp, Homo sapiens
caccgtggaagtcgcctggtgtgaactgcaggagatgcatcgaaggtttgagaatgctcctgattctgccaaaacaaaagctctgcaaactgttattgag

SEQ ID NO: 407593 - DNA, 98 bp, Homo sapiens
tccctgcggcggctgcaagaggactaagcatggatggcagccggagaggctatttttatgattcccacaaatccaccaccaacattcagaaagccaga

SEQ ID NO: 407594 - DNA, 75 bp, Homo sapiens
actgacgaagcttggaagttgcagaagtctgctcgtctgatggttcacaccgtggccacctttaattccatcaag

SEQ ID NO: 407595 - DNA, 90 bp, Homo sapiens
gtaatggtggatgaagttgttcattgtttgtcaccacaaaaaggacagtatgtccgtggttcagaccctgtattaaagcttttggacgac

SEQ ID NO: 407596 - DNA, 100 bp, Homo sapiens
gctgcagccgcagccgcctccgaagatgggggatttctacgacccggagcacccgacccctgagctctgggcgtggggaggctgagacacgggagtgcat

SEQ ID NO: 407597 - DNA, 98 bp, Homo sapiens
agctggacgcgggaggaggcggcggcggcgcccggaagctgaagaaacttggtaatctgaaactacaggaggaaggagaggcttccagcaccaccagc

SEQ ID NO: 407598 - DNA, 124 bp, Homo sapiens
tgttaaccaggatcctgaacaagcatctactcctgcagggctgaattccacagctaaaaagagaatcctcattgacactggagaaccagcaattccagaatacatcagctgtttaaagcaggct

SEQ ID NO: 407599 - DNA, 100 bp, Homo sapiens
gcacctggccaggctgcggctggaggtttgtggtaaatatgccagctctagaacacatgaatcagattttacacatcttgtttgtatttttaccctttct

SEQ ID NO: 407600 - DNA, 98 bp, Homo sapiens
gcagccgtccttttggatttctttttaataatgtgtgacccttcacctttgatcccctgacctgcattaccttggcatgtactggcattgaaaacatt

SEQ ID NO: 407601 - DNA, 88 bp, Homo sapiens
acactgcgagctactttctgactgcccgcctggcactgaagccgagctcaaagccggagcggttgcagggcacacattactcggtgca

SEQ ID NO: 407602 - DNA, 100 bp, Homo sapiens
gaaatatgaatatgttttacatccaagaactacaggctttacttttgtggtagaccgtctaagagaagaacggcctgcagagataatacttctgtctatc

SEQ ID NO: 407603 - DNA, 75 bp, Homo sapiens
ctcgatccagcaccatggggaagcgggacaatcgggtggaagccattaatttgctagaaccaatgacaaacgacc

SEQ ID NO: 407604 - DNA, 113 bp, Homo sapiens
gatgaattaaaagtatctatagggaatataacactctccccagcaatatctgatcttttgccagaaatgagggcatactggcctgacgtaattcactcgtttcccaatcgcag

SEQ ID NO: 407605 - DNA, 98 bp, Homo sapiens
gagattcatctttcatgcagtgacatgttgataaaaaatgatggtaagaaccttgatgctgtccatgatatcactgtggcgtatcctcacaacattcc

SEQ ID NO: 407606 - DNA, 100 bp, Homo sapiens
cgctcatggacggaagacccctggctctataagctgaattatggcagcccagtcaagatgatgacttttttcatgaactcccagaaacttttccttctga

SEQ ID NO: 407607 - DNA, 83 bp, Homo sapiens
ggtcggactcccgcggcgggaggagcctgttcccctgagatgccactgccgccaggagccctgtaacatcagccatcgtcaac

SEQ ID NO: 407608 - DNA, 136 bp, Homo sapiens
ggtccttatcgtagattgggatgtgcaccacggtcaaggaacacagttcaccttcgaccaggaccccaggtcagcccaaggccaaccccactgtcactctgttcccgccctcctctgaggagctccaagccaacaa

SEQ ID NO: 407609 - DNA, 100 bp, Homo sapiens
ctaaaaacaaagagttatatgaaatcaatcctccagttaatttggagtggcccctggagtcagtttcctacaccatccgaggccccacccagcacgagct

SEQ ID NO: 407610 - DNA, 74 bp, Homo sapiens
tggtctcgacgtggggcggccagcgatgaagccgggaaacctcaaatgaattctgaaggggagataccttccct

SEQ ID NO: 407611 - DNA, 74 bp, Homo sapiens
gccgcccctggtgcacacaccctcgtattctcctgcccttccccagccggagtcagagtggtggctacagtgac

SEQ ID NO: 407612 - DNA, 50 bp, Homo sapiens
ggaagatggcggctgggttcaagctgccaaacgagggattctttcatctg

SEQ ID NO: 407613 - DNA, 98 bp, Homo sapiens
tgagagcacacgtcctcgtctcgttcctgatcgaacgtggtgagcctaatgggaggtgactggatcatgggagcagagttctcttggatggtttagca

SEQ ID NO: 407614 - DNA, 100 bp, Homo sapiens
ggacaaggacaagctcagccgcaatgacgtcatcggcaaggacgagattgaggagctgcgggccgagatgctggagatgcgggacgtctatatggaggag

SEQ ID NO: 407615 - DNA, 100 bp, Homo sapiens
gtcatggagtagaagggagcgatactacagagttatgcccagccaagtcttcagtatatccaggggcaacagattttcacagctcatccacaaggagtgg

SEQ ID NO: 407616 - DNA, 96 bp, Homo sapiens
agaggtggaagtccaagtcaaacgcagaaggactgcctcactgagcaaccaagagtatttgtaggcaaaataccaagggatttatatgaggatgag

SEQ ID NO: 407617 - DNA, 100 bp, Homo sapiens
ttcttggagctgatgttcaagcaatttcagggttattggccaatatggtttgtcccgctggctggaagcctggcagtgacacgattaagcccaacgtgga

SEQ ID NO: 407618 - DNA, 75 bp, Homo sapiens
cggagctgcagtcggcactgctactgcgaagacagctggcagtttgatgaaggccggaacaactttgaaggggag

SEQ ID NO: 407619 - DNA, 101 bp, Homo sapiens
gaaaaattaacgtgcatgactttaagaaggaattacgtatggaaattgcaaaacaagaattaatcgctcatgcccgggaagcagcatccagggtcctgagt

SEQ ID NO: 407620 - DNA, 75 bp, Homo sapiens
acagaaagaatctgaggtggctcacgttgaccaactctttgatgatgcatccagccttgaaaagatcttttgagg

SEQ ID NO: 407621 - DNA, 99 bp, Homo sapiens
agcggcgatcctgccaccgggaggtgtggaagagccgggatactgctggtcaagagaggtttagaacattaactcccagctattatagaggtgcacagg

SEQ ID NO: 407622 - DNA, 75 bp, Homo sapiens
agttcaaggaggtgctgaagagcgaggaggcctccggtgtggctgtctctgatggtgtcatcaaggtgttcaacg

SEQ ID NO: 407623 - DNA, 90 bp, Homo sapiens
gcggacttccactcttctttgtcattactgtgacggctatcaaacagaacttgatcttttccctgaattaattggaactgaagaaataat

SEQ ID NO: 407624 - DNA, 97 bp, Homo sapiens
tcctattggctggtgaggacagagcttctggaaacccttgcagagattgacttcagggcttttttccagacttcaagctcccattccaacagtaaga

SEQ ID NO: 407625 - DNA, 100 bp, Homo sapiens
ggctgtgtgtgctgcaaaccgagacaagttcaccccgaagtctgccggtaaagccttggaaaaggctgggggaaaagagttcttggaaacggtaaaggag

SEQ ID NO: 407626 - DNA, 82 bp, Homo sapiens
tcgtatcgtatgtccgctatccagaacctccactctttcgactgaaatacagttggtgcagagtctgggggtgcctccagag

SEQ ID NO: 407627 - DNA, 75 bp, Homo sapiens
gcggccgcgaggccccggcgccgcccggaactgcagcggagtcaaagccaagagctccctgctgattcacaagca

SEQ ID NO: 407628 - DNA, 74 bp, Homo sapiens
aacatgacggcctgcttcagcagagtgagcagaaatcatgttgttgatgtcagtgttgcggtcagtactcctgc

SEQ ID NO: 407629 - DNA, 83 bp, Homo sapiens
ttgtacttaaatgcagacacaagtggaggccatagtggagtttgactaccaggcccagcacgatgatgagctgacgatcagcg

SEQ ID NO: 407630 - DNA, 100 bp, Homo sapiens
ccgttgttccagcaaccacttgtacaggaggtagctttggatatgttaaatcctcatgttactttgcctgttttttacccacatcttaagcatggtggtg

SEQ ID NO: 407631 - DNA, 50 bp, Homo sapiens
tgagatccccagtcagagccgtccagagacggggtttcgccatgttggcc

SEQ ID NO: 407632 - DNA, 80 bp, Homo sapiens
cttcagagagaggaagccgaaaacaccctgcaatctttcagacagggaaatcctcattgacgattcaatttgttgaaggc

SEQ ID NO: 407633 - DNA, 87 bp, Homo sapiens
tccagctctgtgaatctgttgccaacaagttggaagggaaggtgatggggacgttcagcaattggtggaacgagaatgcctacacgc

SEQ ID NO: 407634 - DNA, 97 bp, Homo sapiens
gggacaacagtgacgaagagaactgtctcctggtgaccgagcacccgcctccgggcatcttcaactatattctctaagccgctttcatcatgggaga

SEQ ID NO: 407635 - DNA, 96 bp, Homo sapiens
acgacatggaagaatttttgcaacgcgccaaatctaaactggtgtcatggagaaactccagctgggcccagagattctgcagcgggaaaatccaag

SEQ ID NO: 407636 - DNA, 75 bp, Homo sapiens
agctcccccgcctcggggagggcaccaggccagggctttgaccgacacttgtttgctctgcggcatctggcagca

SEQ ID NO: 407637 - DNA, 108 bp, Homo sapiens
atgtcgatcaagacttgaccacttacttggataaagttccagagcctggagtgcccactgaaaccataaagcctaaaatgaccaatgtgtgatttcagtggaataaat

SEQ ID NO: 407638 - DNA, 96 bp, Homo sapiens
agcaggttcccaccttcacccctggcttctaagcccacagaatttattgccatgtacacttacgagagttctgagcaaggagatttaacctttcag

SEQ ID NO: 407639 - DNA, 100 bp, Homo sapiens
tgggcacccacggagcctccggggctggctttgtccagggatctgaaaccactttgcagtcgacatactcggataccagcgctcagcccacctgtgatta

SEQ ID NO: 407640 - DNA, 51 bp, Homo sapiens
atggaagtcatgtacgggaccaagaaggaaagagccagacttctcagaggt

SEQ ID NO: 407641 - DNA, 100 bp, Homo sapiens
tggagtaggaggcaggtctccgcggaggagcaactgaagtcacatgaaagtaagctgaagcagatcaccaccgagctggccgagcaccgctcatatcccc

SEQ ID NO: 407642 - DNA, 75 bp, Homo sapiens
cttttatacactcttagtgctgtccagcttcgagattcaacagaacaatttcaagaatattataggcaaagatta

SEQ ID NO: 407643 - DNA, 98 bp, Homo sapiens
gcgcaggatgggatccggctcctccagctaccggcccaaggccatctacctggacatcgatggacgcattcagaaggatccttgccacggctggaact

SEQ ID NO: 407644 - DNA, 74 bp, Homo sapiens
tctttctcgagaagcaggtggaaacatgagcattcagtttcttggtacagtggctgtggaaaatctctgttctc

SEQ ID NO: 407645 - DNA, 100 bp, Homo sapiens
ccaggcgctctgaccactctccagcaccagcttccagttagtggatatagcacaccatccccagccagttacaagccctgtgacccccaggtgatccgag

SEQ ID NO: 407646 - DNA, 83 bp, Homo sapiens
ggaggactctggagctgacagcgcgcacttcacccgcagttggtgaaatgacaatggatgctctgttggctcgattgaaactt

SEQ ID NO: 407647 - DNA, 82 bp, Homo sapiens
gctcagagggacctgtactgggacgtgatgctggagaactacagtaacttggtctcactggagacaggatttcaccatgttg

SEQ ID NO: 407648 - DNA, 109 bp, Homo sapiens
atgaatccagcctctaaggtgatagctctgaaagaagtgaccggggaggtgcgtcctcatcatgggaaggaggctgtggatccgcggcaggggcgggccagaggaggcg

SEQ ID NO: 407649 - DNA, 90 bp, Homo sapiens
gcggcggcggcggccggagcttctctcagccgagaagatggcgaattagaagatggtgaaatagacgatgcaggatttgaagaaatacaa

SEQ ID NO: 407650 - DNA, 75 bp, Homo sapiens
ctgcagcctgcctccactgtgaaaagactttgcagcaggaatctggaaaaccaggggctcatgtaactgtgaaga

SEQ ID NO: 407651 - DNA, 74 bp, Homo sapiens
gaaaaactggagaacagggagatccagccaccattcaagcccaaagtgtatatttgccttccctccatgatctc

SEQ ID NO: 407652 - DNA, 50 bp, Homo sapiens
gtgggctggtgtgtggaactgcatcagaagagctaacaattgctggaatg

SEQ ID NO: 407653 - DNA, 74 bp, Homo sapiens
gatcatgtctggtggctccgcggattataacaggatgacgtagctttgccaaagacttagaagctaagcagaaa

SEQ ID NO: 407654 - DNA, 75 bp, Homo sapiens
cagtacaagaggctacttctactaggacccttgattcctgaagagaacaaggagagggtacaagaactccctgat

SEQ ID NO: 407655 - DNA, 122 bp, Homo sapiens
cagaggacagcaggacttccaaggagagcatgtcggaggctgatcgcgcccagaaggtttggtgcacctcgatttggaggaagtagggcagggcccttatctggaaagaagtttggaaaccc

SEQ ID NO: 407656 - DNA, 101 bp, Homo sapiens
acttcctagcctccagaaccgtgagaagtaaatttctgtttccccggatatctgtgttaccagccttgtctcggccacctcaaggataatcactaaattct

SEQ ID NO: 407657 - DNA, 94 bp, Homo sapiens
agctgcagcacgtggacgctgactcggaagtgcaggctgaccccgcactacatctacccaccagccatcgtgcagcccagcgtggtgatcccag

SEQ ID NO: 407658 - DNA, 75 bp, Homo sapiens
gtggggtcggagctgggcgcggagcccctcacagtgcagttggtgatgtatattggccaagtggccaaggatgtc

SEQ ID NO: 407659 - DNA, 98 bp, Homo sapiens
aacctatcgggttctctctccgcgcgttcagagttgtcaggggagtgtccattggcagcacctgcctcctgagtgtctcccaggccatcaccatcagc

SEQ ID NO: 407660 - DNA, 98 bp, Homo sapiens
tctgcctcagcctcatgagtagctgggactacaggatgtgctaggtgtgggccggcccccacccgaccctgacaagtgaccatggatcctggagccgg

SEQ ID NO: 407661 - DNA, 75 bp, Homo sapiens
cgatgaagaggatgatgtttttggtgaaggttatccggtgttggctcctgctgcttactatgaccaaactggtgc

SEQ ID NO: 407662 - DNA, 75 bp, Homo sapiens
gtattttgtgatcgcagcgatgaaaggtagctcagtggcatttctgagcaggggccaccctgacttcaccttggc

SEQ ID NO: 407663 - DNA, 100 bp, Homo sapiens
ccatgttcaggcttgtggagaggtacgagatgccacggcacgaagtctacgttctcctgatccggttgtgccaaccatcttggagaaattcaaagagaag

SEQ ID NO: 407664 - DNA, 97 bp, Homo sapiens
tccgtcccccgcgggtctgctctgtgtgccatggacgggcatgaacgctgctgtccgggctgtgacgcgcatgggcatttatgtgggtgccaaagtc

SEQ ID NO: 407665 - DNA, 100 bp, Homo sapiens
ttatctttatctgtggcatgcaactggtacacactggtggatattttgcgtgccatcttactttctttagaagccatgattgaagatcctgagcttcaag

SEQ ID NO: 407666 - DNA, 75 bp, Homo sapiens
gcggccgctcacaacatgcacagcctggcgacggctgcgggtggacaatgtcccagaaggaagcctgccagtgca

SEQ ID NO: 407667 - DNA, 100 bp, Homo sapiens
aggagcgcgggggcggctcctgctcttcctggactcctgagcagagtgcaccaattccagctggacatcactgtgaaaatgggacgggataaagtccgag

SEQ ID NO: 407668 - DNA, 50 bp, Homo sapiens
gtctggatccattttgtggatggggctatcaacagcaggacgcccatgaa

SEQ ID NO: 407669 - DNA, 100 bp, Homo sapiens
gtgaccttgcagccagtgacctcaaaggatttcagccacagagctccttaataagcatttatagtcagtttttggcagcaatagaatcactaaaggcatt

SEQ ID NO: 407670 - DNA, 82 bp, Homo sapiens
ggaccgcggggttagccactgctggctgcttccagtgttcgccgagagtacctggagtagaacagaaaaattattatgtctg

SEQ ID NO: 407671 - DNA, 100 bp, Homo sapiens
tggcggcaagatcatcgtgggcgacgccacagagaaaggggaagccagtttattaggaaccatttgcagatggatgacatcacctgttactgggagaacc

SEQ ID NO: 407672 - DNA, 83 bp, Homo sapiens
tgaatccagggcctaacatgggacagccgcaaccaggaatgacttctaaaattgataaagaaggtgtgattgaaccagacact

SEQ ID NO: 407673 - DNA, 100 bp, Homo sapiens
cgcagcggcggcagcggagagcgagagaggggagcaggacctttgcaagaatgtggaactgctgagtgcaaagctaaggatgtatcaaatggaggcagag

SEQ ID NO: 407674 - DNA, 83 bp, Homo sapiens
ctcaaggacacggtctacaccgacttcgacggtgaggcggaaccaaccctcctggccatgggaggggccgtggtggacgaggg

SEQ ID NO: 407675 - DNA, 90 bp, Homo sapiens
cgcagtggtcgcttcttctccttgggaaatcctcattgacgattcaatttgttgaaggccaatttgtggactcctacgatccaaccatag

SEQ ID NO: 407676 - DNA, 75 bp, Homo sapiens
ctcgcgcgggtgtcgctgggctgtcggcctggaccttgcagccgcaatggacatgaaagatcagatgtcaacttc

SEQ ID NO: 407677 - DNA, 85 bp, Homo sapiens
gggtcactgttaagaatggatctggagacatgcccagcagaccgggttatcccagtccgaggtccagcgaaggattttatcccag

SEQ ID NO: 407678 - DNA, 90 bp, Homo sapiens
agcacgtaattttttcctacaatcaggtctgccggcccctgttttagctgaaatatgaaaatgtcttctgaggctgatctggtgtctcac

SEQ ID NO: 407679 - DNA, 83 bp, Homo sapiens
cgagaagagcagagcggagggagccccagacacgggagcatcgagtacagctgtccggcctccaacgagtgtgagatcaccaa

SEQ ID NO: 407680 - DNA, 74 bp, Homo sapiens
ctctccaggtttctgcaaacaaagttcctacctgtgaagaacaaagccttctagacaagctcagtggaatctga

SEQ ID NO: 407681 - DNA, 50 bp, Homo sapiens
gcagctggctggcttcagtggaccaatggaagtttactgttctgattttc

SEQ ID NO: 407682 - DNA, 100 bp, Homo sapiens
ccggcgcgcgcgcggcggaggacgaggaagagttgtggcgaggcagatcctgccccgtggccgcggccgtctcgtaggtactccaaagattcaggtttac

SEQ ID NO: 407683 - DNA, 82 bp, Homo sapiens
cctccttcccagccgcgcggcttcctccagacctctcggcgcggtacctggagtagaacagaaaaattattatgtctgtgtt

SEQ ID NO: 407684 - DNA, 90 bp, Homo sapiens
ccagtgcgtctgccccgccggctgggtgggcgagcaatgccagcactgcgggggccgcttcagggtgttctgagaatcagccatgtcatc

SEQ ID NO: 407685 - DNA, 113 bp, Homo sapiens
caatatctgtcttcggtggactccttcggcagtccacccaccgccgccgcctcccagcatcctgaggttagcattacacttctcccagtggagcccatgacttctgatcagga

SEQ ID NO: 407686 - DNA, 83 bp, Homo sapiens
cttagccctctacttttcaagacaccaagtgagaggccaaccagggtttgccttcccggattgggcctacaagccagagtcgt

SEQ ID NO: 407687 - DNA, 100 bp, Homo sapiens
gagcaccaggcccaccgtgaaagcggagctccctgggtcctcagcagtgaggctggcctccctgcgtgacctgcccgcccagctcctggagctgtaccag

SEQ ID NO: 407688 - DNA, 100 bp, Homo sapiens
gccgctgctcgagctgctgctggattgaactcagagaagccgggggacaaactctgcctgggcgagtccttttcctgcgttatgtcgttcagaccctaga

SEQ ID NO: 407689 - DNA, 83 bp, Homo sapiens
cgggcggcttcctggcctgggcgctccggtggcggcggaggatccctccccgcggcggcgatggcccgagccatgagagtgag

SEQ ID NO: 407690 - DNA, 73 bp, Homo sapiens
tggcactgaggagaaggaggaggagatgagttggaaggctccttctcctgaaaaagccgaggaggagagtgag

SEQ ID NO: 407691 - DNA, 100 bp, Homo sapiens
aaaatgcccagcgcggcgcggggctgcggagtcgtccggagccgctgcgcgcctcgtgtgcaagctgaacacaaggaccaccatcctggcagcaacgaac

SEQ ID NO: 407692 - DNA, 98 bp, Homo sapiens
cagatgagagacgacttggagaaagagaggggaagtgttcgccagttactacatgaaaagataagagatgcttatactcacccacaatttgtgaccga

SEQ ID NO: 407693 - DNA, 74 bp, Homo sapiens
taactcatatatttaacccccctccaaaaacatattgagtatcagtgctgatattgaaacaattggagaaattc

SEQ ID NO: 407694 - DNA, 90 bp, Homo sapiens
actgtcgctaatgaagtatacaagtataattttcctcacacacagttacttgccaagacgattgaaagcccacaggcggttttgtgagct

SEQ ID NO: 407695 - DNA, 82 bp, Homo sapiens
aaaagactcagagactatataagtagcttaaagatgacaccttgcattccctatttagttctttaaggaaaaacagtagtgc

SEQ ID NO: 407696 - DNA, 100 bp, Homo sapiens
acaaaaatcacaagattctctgccacaaaaaaatataataaggctgagtgcggagccaaggaagatgttaccgagtacttcagtgaattccttagtgcag

SEQ ID NO: 407697 - DNA, 100 bp, Homo sapiens
gtcatgccggtgtggtggcggcggcggagactgcgggcccgtagctgggctctgcgagtcggagtctagccagtcagaggcgtctgtccggagggaggaa

SEQ ID NO: 407698 - DNA, 75 bp, Homo sapiens
cgcgggggctgtggctccgggactgcgttacagaatgtctgaaggggacagtgtgggagaatccgtccatgggaa

SEQ ID NO: 407699 - DNA, 100 bp, Homo sapiens
tgacccatccagtccacaaaccagccaggagctcttgtccctggcaaagcgaaagcgcagtgactctgaggagaaggagccgcctgtgagtcagcctgca

SEQ ID NO: 407700 - DNA, 83 bp, Homo sapiens
ccaggccccgccgaggcggccaggtgaaagaaaatggcccgaaccaagcagactgctcgtaagtccaccggtgggaaagcccc

SEQ ID NO: 407701 - DNA, 108 bp, Homo sapiens
gttttcgagggacagttcgttatgcatcaatcaacgcacatcggaacagggaagagagaagggcacagttacctaagtatcaacgtaatcttcctcggccaggacagg

SEQ ID NO: 407702 - DNA, 100 bp, Homo sapiens
aaggatgccaatgatgtaccaatccaatgtgaaatctctcctcttatctcctatgctggagaaatatgtgtcctaaaaatgctagctattatggtaatcg

SEQ ID NO: 407703 - DNA, 101 bp, Homo sapiens
gaaggctacggcaccatgtacatgaagacacggcttttccagtagctgctgctggtggtgacaatgtcaaataacggcctagacattcaagacaaaccccc

SEQ ID NO: 407704 - DNA, 98 bp, Homo sapiens
caaaggaggaatttgcctcttctacagatagagctgttaagggccgttgctccagggagaactgcaaatatcttcatccacccccacatttaaaaacg

SEQ ID NO: 407705 - DNA, 90 bp, Homo sapiens
atataccttggggaaagctgatagtggtgcacgtatcaacatctcagaagggaattgtcctgagagaattatcactttggctggacccac

SEQ ID NO: 407706 - DNA, 74 bp, Homo sapiens
cagcctatgggtgaaatttggctttcattcatgaatgaggaatgctgtctctgcaatttgagaggaggtgctct

SEQ ID NO: 407707 - DNA, 50 bp, Homo sapiens
ggcggcgatcgagaaagtgcgcaaatgggcgtctctggccgagcctcttt

SEQ ID NO: 407708 - DNA, 100 bp, Homo sapiens
tcaaatataggcattctgatgggaacttgtgtgttaaagtaacagatgatttagttgtgacagattccgctctattattgatgatgcttggtggtttgga

SEQ ID NO: 407709 - DNA, 100 bp, Homo sapiens
cattgctgataccaatatcaccagcattcctcaaggtaaggagagctgctttgagagaattgtgtcaaggtttggaaagaaagtcacatatgtagtgatt

SEQ ID NO: 407710 - DNA, 82 bp, Homo sapiens
ggtgaactctgtccagttttcaaaccacacagcttgctcacttccgacagagaaaaacaaaaggtgacagttcgcattcgga

SEQ ID NO: 407711 - DNA, 50 bp, Homo sapiens
gactccattccatctcttctcatccttctttggtagctggcagtgttgtg

SEQ ID NO: 407712 - DNA, 82 bp, Homo sapiens
agtcatttatcaaaaagccaggcagtcttgtttctggcgctggagacatcaagcttactaaagacacaggagttgacgatca

SEQ ID NO: 407713 - DNA, 100 bp, Homo sapiens
tgaactgcgatgtgtgtggattatcctgcatcagcttcaatgtcttaatggttcataagcgaagccatactgcgaaaactagaagctgaacttcttcaaa

SEQ ID NO: 407714 - DNA, 100 bp, Homo sapiens
ccgccatggcccgggactacgaccacctcttcaagctgctcatcatcggcgacagcggtaaccatgtgcgaccgaaaggccgtgatcaaaaatgcggaca

SEQ ID NO: 407715 - DNA, 87 bp, Homo sapiens
cctctttcaggccgctcctagtggacgcagaggcgggccgaggacgagttgatctctctaatgtattagatcttcatgcctttgata

SEQ ID NO: 407716 - DNA, 75 bp, Homo sapiens
gacggaagtgtggtgaaggtggacacagaagccgcaggatcagcggcaaactgaagccatccagttgctacaggc

SEQ ID NO: 407717 - DNA, 76 bp, Homo sapiens
ctttgaagtgaagattgtcagcaaaggaagagatggtatcccagtcgacatcagtgacagtgatatgatgctgaac

SEQ ID NO: 407718 - DNA, 51 bp, Homo sapiens
ggcttcggcccccaccagagactcggtcgcctggtcggcgctctggatgca

SEQ ID NO: 407719 - DNA, 75 bp, Homo sapiens
ccgcaactccgccgcccaccatggcttccgaggagctgtacgaggaccaagaatcgccttcagccctgtctggtg

SEQ ID NO: 407720 - DNA, 101 bp, Homo sapiens
gaagagtgagagatggaacccgaagaagaaaggattcgttacagccagagattgattagcctgaggcctgctcagtcgttcctaatgaataaaaatcaagt

SEQ ID NO: 407721 - DNA, 100 bp, Homo sapiens
aatgctaggtgcaaagtttgtcgaaagaaaggtgtggatgaagcaaccatcattgacattctaactaagcgaaacaatgcacagcgtcaacagatcaaag

SEQ ID NO: 407722 - DNA, 75 bp, Homo sapiens
ctggaagttttccacctaccatgctctcggagtccaacctataccttctcagggaggcaaactagaaatagctgg

SEQ ID NO: 407723 - DNA, 60 bp, Homo sapiens
agatgtcggagacacggtggaaacgcttatgtaatctatgccagcaattatgacaatgtt

SEQ ID NO: 407724 - DNA, 90 bp, Homo sapiens
gcgaccagaccattgattcccgactgaaggtgctggagaatctggtaaaagcaccattgtgaagcagatgaggatcctgcatgttaatgg

SEQ ID NO: 407725 - DNA, 75 bp, Homo sapiens
cttcactcacagctaccctttttgctggaggtaccacgaaaggcagtggtagaaaagccagctcgggcagcagag

SEQ ID NO: 407726 - DNA, 50 bp, Homo sapiens
ttgatactgacctgtaaatcatcctttagtgttttccaagcagtgaagca

SEQ ID NO: 407727 - DNA, 74 bp, Homo sapiens
gccactccccttcagtgacccaaagaaatgccatggacaatattaccaggcagaaccaattctacgatacccaa

SEQ ID NO: 407728 - DNA, 100 bp, Homo sapiens
caggtgcccccggcctgcgctcccatccacacgctcgatttgttcccgacaaggagttttctggttcagaccgtagacagagaggccgagaaggaccagt

SEQ ID NO: 407729 - DNA, 90 bp, Homo sapiens
gaagggggaccatcctctgcaggtaattccactgcttcaagcctccagggtcgtatagacctccccctcctatgggcaaaccaccaggtt

SEQ ID NO: 407730 - DNA, 76 bp, Homo sapiens
cgcgcgcgaagcgagcgagaaggcacggagtcgccgcggagcgcagagtatggtgtttgcgaaaacttgcggaagc

SEQ ID NO: 407731 - DNA, 87 bp, Homo sapiens
atcgaccagaccatgctctccatcctgctcttcttccacagtgccggtggtggtgtgcacattgagccccggtatagacagttcccc

SEQ ID NO: 407732 - DNA, 88 bp, Homo sapiens
gccaagctcgaagagcagaaccgaactcagcctcctcccaagctccctgtgggtcctagccacaagctctccaacaattactattgca

SEQ ID NO: 407733 - DNA, 83 bp, Homo sapiens
gcggcggcaagaaaaatgccagccagaagaggcgttcgctgcgcgtgcacattccgggggatatgagactttctactcggaat

SEQ ID NO: 407734 - DNA, 83 bp, Homo sapiens
cttttccatgatatcattatatggacagtttagggtagaggaagaagaacccactggatacattcgattcgaaaaatttcttc

SEQ ID NO: 407735 - DNA, 82 bp, Homo sapiens
ccgcgaaccgcagtatcatgctggccaagaagatcatcattaaggacggaggcacgcccgagcgggaagaagttccgcagca

SEQ ID NO: 407736 - DNA, 100 bp, Homo sapiens
cgcagtggtcgcttcttctccttgtccccacgacagtccggtttgtagattccctgatctgcaattcttcccgttccttcatggatttgaaggctctcct

SEQ ID NO: 407737 - DNA, 100 bp, Homo sapiens
agaaaaactcggtctcctgttgctcactttcctgggtattgtagccgctgtgcttgtcaagctctcaaaggtctatggccctgtgttcactctgtatttt

SEQ ID NO: 407738 - DNA, 98 bp, Homo sapiens
ttaaatatttgatgaaattcaccagtgaagccgtgacatcctgggatattctttgttgagagagaatttcaagattgtggagttggactgaatgctgc

SEQ ID NO: 407739 - DNA, 82 bp, Homo sapiens
agggaccaaggtggagatcaaacagctccttaataagcatttatagtcagtttttggcagcaatagaatcactaaaggcatt

SEQ ID NO: 407740 - DNA, 101 bp, Homo sapiens
ctcacactgtcaccatggcttgtatctctgccaaccaagccatgaccacagctgtcggaaaaggtaacagaagatggaactcgaaatcccaatgaaaaacc

SEQ ID NO: 407741 - DNA, 90 bp, Homo sapiens
gcagcagccgcggagcagtagccgccgtgggagggagccatgaagcattacgaggagagcacagaatggggattcaacacctcggcaatg

SEQ ID NO: 407742 - DNA, 100 bp, Homo sapiens
atcctattcagaggggccggtctctctaaatatgccccagaaatatggctacacacacctttctgcaggagagctgcttcgtgatgaaaggaagaaccca

SEQ ID NO: 407743 - DNA, 75 bp, Homo sapiens
aatttttcataactccatatggcttggcgattcagaagggagcagtgggaagtaatcagtttgtggatcttgagg

SEQ ID NO: 407744 - DNA, 75 bp, Homo sapiens
tgtgaaggagaagtccattctgatgctctgagtattagaaaactactcggatgctccaatgacaccaaaacagat

SEQ ID NO: 407745 - DNA, 82 bp, Homo sapiens
cacgcgggcgagcggctgtgtggatgtcggcgaagccgcgggcgagacctcctgccccccgaggtctgcagtctcctgaacc

SEQ ID NO: 407746 - DNA, 97 bp, Homo sapiens
ctgaagttgttaccaatggtgaaactacatgttcagaaacggccctccaggcactgaagcgtaagaagaggtatgagaagcagctggcgcagatcga

SEQ ID NO: 407747 - DNA, 100 bp, Homo sapiens
cggcggtcgacatgttccaggtcccggatagcgagggcggccgcgccggctccagctatacacagaatgggattttacatatgctggacagaaataagag

SEQ ID NO: 407748 - DNA, 82 bp, Homo sapiens
atccgcggctacgtgggcaaccgggcggccacgttcccgctgcaggacatcgcgttgatggatgaccaccagagggaagagt

SEQ ID NO: 407749 - DNA, 50 bp, Homo sapiens
cggaaagtggtatctcgggaatcagagacggggtttcactatgttgacca

SEQ ID NO: 407750 - DNA, 97 bp, Homo sapiens
aacttcttgtcctcaagtgatcctcccaccttagcctcctaagtagctgggaccacagagcaaaggcacaacaccacttgctccaccacctaaacct

SEQ ID NO: 407751 - DNA, 97 bp, Homo sapiens
tttgaagagatcgactacaaggagatcgaggtggaagagcctgtggccgtgggttctacaagtcttcctctcaagatcttcagtgctctcgttgtcc

SEQ ID NO: 407752 - DNA, 98 bp, Homo sapiens
ccgatctaaactattggataaacttcagaattatactgacctggccatgagcacggtgaagcagacccaagccattccatatactggtccctttaatt

SEQ ID NO: 407753 - DNA, 75 bp, Homo sapiens
gagagcttcatcaaaaatagtgatagctttgataagaagctggacgccttcatctacgatgctgcagtgctcaat

SEQ ID NO: 407754 - DNA, 85 bp, Homo sapiens
ttctgcggcacgggatggcggaggcgcctcctgtctcaggcattgaatgccccagaggagcccgaaacctcccaggcttggtgca

SEQ ID NO: 407755 - DNA, 75 bp, Homo sapiens
ggcctgcacagtcacttattactgatggcccactgcgtgaccttggttcagctgtccatttcctgtgaccatctc

SEQ ID NO: 407756 - DNA, 95 bp, Homo sapiens
ggcatttaggcagctatagcttcttcagtttcccagaactgcaggtgctggatttatccagatgttactcctccacaaacatctggttatataga

SEQ ID NO: 407757 - DNA, 100 bp, Homo sapiens
gcaggtgccctcggcctgagtcgggatggagctgcctgctgtgaacctgaaggtgaagacattcagtgaagcttgcctgatggtaaggaaaccagcccta

SEQ ID NO: 407758 - DNA, 98 bp, Homo sapiens
ggcgcgcgagctggagcactcgcacgggcaccctcactgaggacggcttagacgtgatgggggtggtgcccctgaaggggcaggcattcctgcccctg

SEQ ID NO: 407759 - DNA, 82 bp, Homo sapiens
ttcgagagtgtatacaaatgacaggcaagaaaaactttgactgcagataaattggagcatttgaaatctcagctggaccatg

SEQ ID NO: 407760 - DNA, 82 bp, Homo sapiens
ccagacgtgcaacaaagtgcgatggagacagaagaaattctggcagatgtgctcaaggtggaagtcttcagacagacagtgg

SEQ ID NO: 407761 - DNA, 98 bp, Homo sapiens
acccctggatatacttctttgtcaagagaagcagaggtgtggacgctgtgtatgatggtaaggttgaagttacaaaagaaggtgtgaagttgtgtacc

SEQ ID NO: 407762 - DNA, 75 bp, Homo sapiens
gaaagcagtgacggaggagcttgtaccaccggataagttctgaacgtcgaaaagaaaagtctcgagatgcagcca

SEQ ID NO: 407763 - DNA, 98 bp, Homo sapiens
aatccttcctgtaccgcttatgccaggccgatcccgacctggactcagacaagaatttcgctaaggagtttgtgatcagtgatcggaaggagctggag

SEQ ID NO: 407764 - DNA, 98 bp, Homo sapiens
agaaagaaaagtcaaccaaatcagagggaaaacatgaaggtgtctatagagaactgcaccagtggcagttcgcagcctccaggacttggctcgcatcg

SEQ ID NO: 407765 - DNA, 88 bp, Homo sapiens
cccagagtgctccaacgggactgaaccacatgggctggccagagcacacaccaggcactgatcaacagtacaaattctgaagtttgta

SEQ ID NO: 407766 - DNA, 73 bp, Homo sapiens
gaccagccgcacgccgaccggcgccgggagatcctgggttgctatcaaacaaattaatttacagaaacagcca

SEQ ID NO: 407767 - DNA, 100 bp, Homo sapiens
aaaggcggccacgcgcggcgccgctcgccgcggaccaggtgcccttgatggaggacctggagcagatcttcctgcgctcttggcgcgagtcgcacctgac

SEQ ID NO: 407768 - DNA, 82 bp, Homo sapiens
gagcagcccatcgtgcttaaagaaggtacctggagtagaacagaaaaattattatgtctgtgttcccttgggactcattgga

SEQ ID NO: 407769 - DNA, 100 bp, Homo sapiens
cgcgaatatcgtcatcgttagaaggtggtcgttctcgttaccggaccacttcttcagccaacaatcccaatctgatgtatcaggatgagtgtgaccgaag

SEQ ID NO: 407770 - DNA, 75 bp, Homo sapiens
tcagcccacgaccaactcaccagttctctccaccacagatttacccttccaatgagaaagatcagtctaaagaaa

SEQ ID NO: 407771 - DNA, 87 bp, Homo sapiens
cggatgccctgcagtacctgcagaaggtctctggagacatcttcagcaggaaactcccagtacagccagcagcaggccgggtaccag

SEQ ID NO: 407772 - DNA, 75 bp, Homo sapiens
ctggcatctgtaaggtgcggccgccgccggtggcttcggtgctgctccagtgtttggcagccctcctacttttgg

SEQ ID NO: 407773 - DNA, 75 bp, Homo sapiens
cgggtactaccagaccacactccctgccattgtcttccagatacccagaaataatcgcttaatgtatattcatag

SEQ ID NO: 407774 - DNA, 80 bp, Homo sapiens
ctgtcacagaggggctaccgggccgtggcccttgaccttccagatcaggagaacctcagtctgacgacattgaagctagc

SEQ ID NO: 407775 - DNA, 100 bp, Homo sapiens
gctcagcggtgggcagtcctagtccgaggtgccaccgtggaaggacagaatgggctgctggtcaacctctccctcatcccagtcatgggcgggctggcgc

SEQ ID NO: 407776 - DNA, 90 bp, Homo sapiens
ggcaggggcggaggcggaggcagaggtggaggcgctttgaaaggaaataatgaagatgtttcattttcaagaccagcagatcttgacctt

SEQ ID NO: 407777 - DNA, 100 bp, Homo sapiens
agtttggcagatgtgagcaaactatgtataggaattccaaagtgaatggtagtgtctagaaagggtatgtcccttcaagagagaggtgccaatgtccaac

SEQ ID NO: 407778 - DNA, 97 bp, Homo sapiens
tcatgccagcccagaacagagaatcagtgttatccaagataaattctgtgggattataaacatttcagtagaaggcctgcatgatgtcatgacggaa

SEQ ID NO: 407779 - DNA, 83 bp, Homo sapiens
ggctgtgctgcgcgacccccgcgcatgcgccatcatgaccgggtcctataacaacttcttcaggatgtttgatagagacacgc

SEQ ID NO: 407780 - DNA, 75 bp, Homo sapiens
ctgcgcagtgcaggcagataccgtttgacaccaccaacctgcctagagctggaacgttacctccagagcgagccc

SEQ ID NO: 407781 - DNA, 83 bp, Homo sapiens
cgagtcaacaaccgcttcgagctggcctccaggcccaaggtcagcatcccactgtcagccatcattgaggtccgcaccaccat

SEQ ID NO: 407782 - DNA, 75 bp, Homo sapiens
gttgtatccaggtgcatgttacaggtgtccaaggcagctgcagatttgatggcctactgtgaagcacatgccaag

SEQ ID NO: 407783 - DNA, 75 bp, Homo sapiens
cggaacatggactctgactcttgcgccgccgccttccacccggaggatgatcggctgaatgtaacagaggaacta

SEQ ID NO: 407784 - DNA, 80 bp, Homo sapiens
ccttcgtacccgtcttgattgagttacagaatgtctgaaggggacagtgtgggagaatccgtccatgggaaaccttcggt

SEQ ID NO: 407785 - DNA, 98 bp, Homo sapiens
tccatgtaagcaaagaaaccatcgggaagatttcagctgccagcaaaaggtgtgccatgtgacttggtgacaggtgaagagcgtgtgacagttcagcc

SEQ ID NO: 407786 - DNA, 99 bp, Homo sapiens
cgaagaaggttcctgggagactgtcagaaatgctgtgtacgccatggaaattaatgtggagaaagacaaacaaacaggagagaccaagattctctctac

SEQ ID NO: 407787 - DNA, 100 bp, Homo sapiens
ccaatgtggacggactcactgccctgcaccagcacgtcagctaactgttcagatgatgcaaaatcctcagattcttgcagcccttcaagaaagacttgat

SEQ ID NO: 407788 - DNA, 83 bp, Homo sapiens
ctcaagttgtttggctaaattcttcagtttaaggaagaaatctctaaacgttttaaatcacatactgaccaacttgtgttgat

SEQ ID NO: 407789 - DNA, 101 bp, Homo sapiens
ctttcccgaagttatgcagctcccagagatcaaggactgctgtgtaagctatggtggcatgtggtaccttaaagggacagtacagtcttgacaatagtagc

SEQ ID NO: 407790 - DNA, 100 bp, Homo sapiens
tccccgtattacccactatcgcctggcaccgtaggacaaatcccccatccgctaggatggttagtaccacacacccaatcaatgtgagacgagaccccag

SEQ ID NO: 407791 - DNA, 75 bp, Homo sapiens
tgggaaagacagtgattgttataatcaaagcctcatgcgctcacgggttcggggggccgatgctgcccaagccaa

SEQ ID NO: 407792 - DNA, 75 bp, Homo sapiens
cgaaatagactctgaagtaatatctggactttgaaattcctgccacagtgactcaggtcactcaaggaactatcc

SEQ ID NO: 407793 - DNA, 97 bp, Homo sapiens
atttgctgctagagagtttaaagcccgagtggattcatttttctacatattaggatataaccctgagacaaggtggatcatccatgccatggagtat

SEQ ID NO: 407794 - DNA, 75 bp, Homo sapiens
agcggcctcggctacctggtgcaggtgaagcccatggcagtcttggccaccatcaacttgcagtcaacacacgag

SEQ ID NO: 407795 - DNA, 83 bp, Homo sapiens
agtgtcactcccaccacccaccagggcccctggctcccgtagggccattgaaatgtgaagaatccttcgtctatgaagtgtcc

SEQ ID NO: 407796 - DNA, 100 bp, Homo sapiens
agacgcactactataactacagggtatagacttcagacagtaaagtccttagctggagtgagcctgatgttacggttactgtgggcaagtttgagatggg

SEQ ID NO: 407797 - DNA, 99 bp, Homo sapiens
aaagatccccgttcctggagattctgattgagatgggaaagggctccttcaagtatgcctgggtcttggataaactgaaagctgagcgtgaacgtggta

SEQ ID NO: 407798 - DNA, 83 bp, Homo sapiens
tgacaagagtggaaatggagaggtgacatttggaactgtggctgcaccatctgtcttcatcttcccgccatctgatgagcagt

SEQ ID NO: 407799 - DNA, 100 bp, Homo sapiens
tactaatggacagttagtcacccacctacatgttgaggtttctgggtgtctctggggagcccctgggccagattttcctctagactccagcccatctctt

SEQ ID NO: 407800 - DNA, 83 bp, Homo sapiens
cgcccgtccacacccgccgccaggtcctcagccctcgctctcgctggcggagcagcacctggagtcgcccgtgcccagcgccc

SEQ ID NO: 407801 - DNA, 75 bp, Homo sapiens
gccgtctcgctctgggtctccaggcccgcgaccgtccgccagtcgtcccgagcttgccttgcgccatggactggc

SEQ ID NO: 407802 - DNA, 100 bp, Homo sapiens
ttcctggtagagccggccgagctgaggcggtcgcggccatgaagcaaggggaagttgattgttggcccctgccttgcccagatgtggagtgtgaattcag

SEQ ID NO: 407803 - DNA, 100 bp, Homo sapiens
actggtaaaaagcttgaattttgcacggaacaagactgccaatggagactgccgcagagacccccgggagcggagccgcagccccatcgagcgcgctgtg

SEQ ID NO: 407804 - DNA, 90 bp, Homo sapiens
agcataagaaattgccccttggcctaactttttctttcccctgtcgacagactaaactggaagagaagtctgggccaacggtcacaaaag

SEQ ID NO: 407805 - DNA, 101 bp, Homo sapiens
ggtacagcatgaagagttcattcttctgagtcaaggagaggtggaaaagctaatcaagtgcgacgaaattcagttccatgccattgcagtgtcaactaggc

SEQ ID NO: 407806 - DNA, 100 bp, Homo sapiens
ctccgagcccggcgggaccatgttcaccagcaccggctccagtgggctctttactggggcttccggatgcagatgacgatgcgtttgaagagtacagtgc

SEQ ID NO: 407807 - DNA, 75 bp, Homo sapiens
actccagggtgtctggtccacgacctatcctaggcgccatggaggactcagagagagtaatgataattaccggac

SEQ ID NO: 407808 - DNA, 83 bp, Homo sapiens
cttgaaccttgggaatattgaggccatttgtgtaggaccagaaaacatgcagataatgtatccagctatatttgaccagttgt

SEQ ID NO: 407809 - DNA, 100 bp, Homo sapiens
gtccgactgtacccagaggtgcctgaggtcctaaaacgattgcagagccttggggtgcccggtgcggctgcttcaagctcctctggtgcaagtgtggtag

SEQ ID NO: 407810 - DNA, 75 bp, Homo sapiens
acggggctgctggtgggccgcgtcgaagacatggaccagggctacggagaaatgactgctgtccatgcaggcaac

SEQ ID NO: 407811 - DNA, 100 bp, Homo sapiens
gaatatcgtcatcgttagaagaacctcaagaaggcatgaagccagcccctgcagtgccgtccacccgcccctctgggcctgcctgtggctctgttgccct

SEQ ID NO: 407812 - DNA, 90 bp, Homo sapiens
tgctcatcccggtggccgccgcgcaggagcctcccggagctggtatctcagatgaagacatcatcaacattactcttcctactggagtcc

SEQ ID NO: 407813 - DNA, 75 bp, Homo sapiens
ctcccaaagtgctgggattgcaggcacttgaaaataactatgaagttatattccgagaacctgacactcgctgga

SEQ ID NO: 407814 - DNA, 90 bp, Homo sapiens
gccgcctcctcctcggccagcaacagcgagattcttctaacagagaaaatgccattgaggatgaagaggaggaggaggaggaagatgatg

SEQ ID NO: 407815 - DNA, 83 bp, Homo sapiens
ccgtgaccgagagcgtgaccgagagcgcgaatatcgtcatcgttagaaggaataatcggtggagatggattgtgaaatggagg

SEQ ID NO: 407816 - DNA, 100 bp, Homo sapiens
aatctgattccaagcaaaaaccaggtgcagctcagtggaagatgatgacaaccagaagacatgagctaaggtttctgtcctataaaagatttattaaaaa

SEQ ID NO: 407817 - DNA, 98 bp, Homo sapiens
ggatcccagttttctgttgcccttaccaaatctggagctgtttatacctgaatcaccacgacagcagcatgcatgatggacctcaggagataccccct

SEQ ID NO: 407818 - DNA, 96 bp, Homo sapiens
gcctcctgagtagctaggattacaggatgccatggcttttaataagtttaatgttcttcactggcacatagttgatgaccagtctttcccatatca

SEQ ID NO: 407819 - DNA, 101 bp, Homo sapiens
ggagcctgtccgaacgctttgggctgttagggttcaactttgtggggaaacttttgggtccacgtggcaattctctgaagcgtttacaagaagaaaccttg

SEQ ID NO: 407820 - DNA, 75 bp, Homo sapiens
aaaagagaggcaccgctggaacactaatgagcaggactctggactgtcttcacactaggtggtgtgggcagcaaa

SEQ ID NO: 407821 - DNA, 100 bp, Homo sapiens
caggcactgagctggagcccgcctggagagacagacacgtgttcatctgcagaagccagcggacgcctctgttcaacttgtgggttacctggctcatgag

SEQ ID NO: 407822 - DNA, 100 bp, Homo sapiens
taggcgtgagccactgcacctggcacagaatactcggtggagcaggcgcagcaggtgcttcaccagtcagtgtccatgtccacggtgtcagcccaccctt

SEQ ID NO: 407823 - DNA, 100 bp, Homo sapiens
ttatgaacgccttgttgcccagttccccagttctggcagattctggaaactgtacattgaagcagaggctcagctgtcgcaggccctggaggagctggga

SEQ ID NO: 407824 - DNA, 82 bp, Homo sapiens
tgcaattaccatcttagaaactgctcagaaaattgcaaaagttggacaactagtggtttgaagagccagggccgtctgtcag

SEQ ID NO: 407825 - DNA, 50 bp, Homo sapiens
tgggtgtaatacatcatgaactgcagggttatcaatactctggctgacca

SEQ ID NO: 407826 - DNA, 98 bp, Homo sapiens
cgcggccgaccatagagatgcggctcccgccggctctgggtctggaggggctgataggatgtcttcatttggtgattttgttgcattgtccgatgttt

SEQ ID NO: 407827 - DNA, 100 bp, Homo sapiens
tttagtgatgtggtggtaagatgtatggcaccacaccaaccccgtgggcactgagtggcggtggaagatggaccagcctgaaatgatcttgaaggaagcc

SEQ ID NO: 407828 - DNA, 75 bp, Homo sapiens
ggctcctgtggctcctgctggtgggcaccgtgactgtgatcagccccctggagcttatgcggacaaagctgcagg

SEQ ID NO: 407829 - DNA, 78 bp, Homo sapiens
cctctgggtcctcggtcggtacagtctctgcacctcgcgccccagcagcatccttttatcaagaatgccaaacctgta

SEQ ID NO: 407830 - DNA, 88 bp, Homo sapiens
gcgagctctgggtgtgcgggcggcctggcgcggcgctccggtctgcactacagagcttacacaaggcttgtgaagtcgccagagcgca

SEQ ID NO: 407831 - DNA, 83 bp, Homo sapiens
aactttatttcctcccagaagacactccccagggcagaaatagcgaccatggcgaggtctggccagcatgacccagaacttag

SEQ ID NO: 407832 - DNA, 100 bp, Homo sapiens
atgtatctggctcagaactatgatcttaacaaacaacagttgcagttactgaaagaacggttccaggccttcctcaatggggaaacccaaattgtagctg

SEQ ID NO: 407833 - DNA, 83 bp, Homo sapiens
tgcaaatttacatacgagaatggcttgtgaaatcatgcctctgcaaaggaaaattgcctaagaattatgacccaaaagttacc

SEQ ID NO: 407834 - DNA, 51 bp, Homo sapiens
cccctacgtgcacaacatcacccgcaagttgtccgaacagacagcctgaag

SEQ ID NO: 407835 - DNA, 75 bp, Homo sapiens
agctggaatgactggcaacccaggttcctggtagagttacacagttgtgccgccagtatagcgacatgcctcctt

SEQ ID NO: 407836 - DNA, 100 bp, Homo sapiens
atcgtccttatgacaagaacattagcccccgggagaatatcctggtttcacttggagctgtggactcctcagacccctgcacaattgagagaaaagcccg

SEQ ID NO: 407837 - DNA, 75 bp, Homo sapiens
tttgcctcagatactattttgaagccttgtcatgttatttacacagattatcggcccactccattgcaacactac

SEQ ID NO: 407838 - DNA, 90 bp, Homo sapiens
gctgaaggtgcgagaagaagtcagaaatctacagttactcacacaaggtggtcttcaagctgacagagaagctgacggaacagaaggagt

SEQ ID NO: 407839 - DNA, 75 bp, Homo sapiens
gggcggtgccggcgccggagacgatgccgttcacatcaggtccacccatctggccgggcagtaccttcttcaaga

SEQ ID NO: 407840 - DNA, 116 bp, Homo sapiens
aaggaagccgcccgccccccaccgccgccccctccggcgtgttcatgcccccggggtgagaagccctaccactgcaactgggacggctgcggctggaagtttgcgcgctcagacga

SEQ ID NO: 407841 - DNA, 100 bp, Homo sapiens
ctggtcatcctggctaaaggagcagaggaaatggagacggtcatccctgtagatgtcatgaggcgagctggggaatgaatctgaagtctgctgcagtaaa

SEQ ID NO: 407842 - DNA, 101 bp, Homo sapiens
agaagcgcggccttcacacatcccagccggtgactgcagtgaggtggattttcggaaaagacatatgaatggagctcagaagaggaggagccagtgaaaaa

SEQ ID NO: 407843 - DNA, 96 bp, Homo sapiens
aacgagtgcaagcagctgtccgagtcccaggtcaagagcctctgcgagaagagtgcctggtgaagaatgtgatgggatcactagcatgtctgcgga

SEQ ID NO: 407844 - DNA, 84 bp, Homo sapiens
gcacttcgtcatgttcttcgcgccctggctgaccccgcactacatctacccaccagccatcgtgcagcccagcgtggtgatccc

SEQ ID NO: 407845 - DNA, 82 bp, Homo sapiens
tgtcagagagagagcttggttaacttgggagaaagtttcatctgtggatggagtattggtgacttaagagattaaaattaat

SEQ ID NO: 407846 - DNA, 97 bp, Homo sapiens
gaaaccccgccatggaggcttcattctggacgaggctgatgacgagttccagttattacagagaaatttcatggacaagtactacctggagtttgaa

SEQ ID NO: 407847 - DNA, 100 bp, Homo sapiens
gtttgactttatggaacctgaaaagcccaagtcgccctttccagaccacaattccacatggagaatgtcaaaatactccaggagagaagcattgcttata

SEQ ID NO: 407848 - DNA, 100 bp, Homo sapiens
tatttacctacggagtcagattcctgaaaaagattttgatggatcatcaaaatctgtcagaacatgtactctgcatggttttatatctgattgaattagg

SEQ ID NO: 407849 - DNA, 101 bp, Homo sapiens
agatgtgcaacaaagtgcgatggtgtggacactgccagcggctgcagccgacttggaatgacctgggagacaaatacaacagcatggaagatgccaaagtc

SEQ ID NO: 407850 - DNA, 82 bp, Homo sapiens
aggaacgaggcaaggagctaaagcagcgtgcgttcagccctgggccattgagacccagagcagcagttctgaagagatagtg

SEQ ID NO: 407851 - DNA, 82 bp, Homo sapiens
acagtatggctgagggtcaggtgtgctgccagtgagcactgtgaggtgagtgctcgctcaggccgttgcaccccgggtgtct

SEQ ID NO: 407852 - DNA, 88 bp, Homo sapiens
acgagcggaagatcaagctggacatcttcctgcaactgcgcatctttgagcagtacaccatcgagggtctcgctctgtcacccaagct

SEQ ID NO: 407853 - DNA, 104 bp, Homo sapiens
cagaaagtgcatcctggcgggcgatcacaagcagctgccccccaccacagtctctcacaaatccgcctcacggacacgctgggcaggctctcgcacatcctgga

SEQ ID NO: 407854 - DNA, 90 bp, Homo sapiens
attgacctcacaaccgagcaaattgaagagacgttaaaatacttcctttgtcccatgaggagcacccccatagccatcctctctatggac

SEQ ID NO: 407855 - DNA, 100 bp, Homo sapiens
cgggagctgtaccttagccacaatggcatcgaggtcatcgagggcctggagaacaatcgtgccaagttggaggccgccattgccgaggctgaggagcgtg

SEQ ID NO: 407856 - DNA, 74 bp, Homo sapiens
ccccggcccacagtgggggtgtgcaaacccgagagaactggaccatgacctggtcgtttggatggaacagttct

SEQ ID NO: 407857 - DNA, 98 bp, Homo sapiens
gcaagttagtggattaaaatctcccaagaggaatgacaaacaaccagctcttcagcatgctacaagtgaaaactgatgagaaactgaatgtgtctgat

SEQ ID NO: 407858 - DNA, 90 bp, Homo sapiens
gttctcagctacttgggactcctctctcaagagaagctgcaagagcaacatctttcctcaccccaagagattttattccctcaaagttgc

SEQ ID NO: 407859 - DNA, 100 bp, Homo sapiens
gtcagaggcggacgccgcagcagcaaccttccgggcaaacgccgcttacaaacacgcagatggcaagaagattgatggcaggagggtccttgtggacgtg

SEQ ID NO: 407860 - DNA, 97 bp, Homo sapiens
agaaaattccatccttggacagttaaaagcagagcgttgttcctcaaagtcattcaagctgtactcgccgaaggagcccccgaacggcaacgccttt

SEQ ID NO: 407861 - DNA, 90 bp, Homo sapiens
cacccctcctgtaacccagcctgtttcacttcttggttgtttacattcagagctctatcaataagaggaatacatattacagtgaattcg

SEQ ID NO: 407862 - DNA, 83 bp, Homo sapiens
gcaacgctgggcatgaggagcggagcggagaatgccaaggaaatgggtcctgatgaatatgaagagatggaagaagaggagga

SEQ ID NO: 407863 - DNA, 100 bp, Homo sapiens
cacagtggggacaacagcagtgagcaaggtgacagagctgaatgaacctctctccaatgaagatcgaaatctcctctctgtggcctacaagaatgtggtt

SEQ ID NO: 407864 - DNA, 100 bp, Homo sapiens
tgatcggcgccgccttctatcccatctacttccggcccctaatgagattggaggagtacaatgtggttgccctgcttggctttccttatgcctccagtgg

SEQ ID NO: 407865 - DNA, 100 bp, Homo sapiens
cacacagtgtgcctgcaacctgtccggggatcccagggaggtgtggacactgccagcggctgcagccgacttggaatgacctgggagacaaatacaacag

SEQ ID NO: 407866 - DNA, 75 bp, Homo sapiens
tcggtcgccgcagtcacggagcgcacgtctgtgagctttacttctctatataatttgctgaagacaaaactttgc

SEQ ID NO: 407867 - DNA, 80 bp, Homo sapiens
gccgcttatcttcaggagcgaagagctgcttctgtatcttaaggtgacttaagagattaaaattaatttggttgctgttg

SEQ ID NO: 407868 - DNA, 76 bp, Homo sapiens
gaccgcaaacaaggagagcctactgagcagcctgagtggtttccctgaaacctgggctcttgaagacgcatcactg

SEQ ID NO: 407869 - DNA, 96 bp, Homo sapiens
agacccgacgcattagacaatgagagcatccaactggtccatcacagtgctattcagaaatctaccaaggagcttcgagacatgtccaagaataga

SEQ ID NO: 407870 - DNA, 75 bp, Homo sapiens
tcagtgcgaagaagctgcagccgcacctggccaagggctgctcccggcagatcggcttctcctttgtacgaccca

SEQ ID NO: 407871 - DNA, 82 bp, Homo sapiens
ctgacatcagcggctctttgtatgatgacgctaaccttgccgcgggccgagccctgcctcgccatggaccaggactatgagc

SEQ ID NO: 407872 - DNA, 100 bp, Homo sapiens
gaagtggaggtgtcactggccccggcctttgccccaatcttgtgtgggcactgaagggggactacaggttcgagaatgattctttgggattgggacttaa

SEQ ID NO: 407873 - DNA, 76 bp, Homo sapiens
ctcgactcggtcctgtttcgacagcgaacatgtcgcggcctgtcagttgattgatattacaggcaagaaccaggat

SEQ ID NO: 407874 - DNA, 75 bp, Homo sapiens
gagaagtttccgcaggactacttccccgagggggatatgagactttctactcggaatatcctgagtgttgcgtgg

SEQ ID NO: 407875 - DNA, 76 bp, Homo sapiens
cgatctggagcttttcccctccccgggcgaaacctaaccaaactgtccctcatcttcagccacatgctggcagaac

SEQ ID NO: 407876 - DNA, 100 bp, Homo sapiens
agcgtcaacagcagcaccatggtgggtgaatttgtaagtgatgtcctgctagttccagaaaagtgccagtttttccacaaagagcggatggaggtgtgtg

SEQ ID NO: 407877 - DNA, 100 bp, Homo sapiens
gccggagctacagaatccttgcagggccaagatctcttcaacagggcttcaccactggaacaagcacaagggttcatgtaatcaaagaagtttctttgtt

SEQ ID NO: 407878 - DNA, 50 bp, Homo sapiens
tcgagagctaccgcgccagacagataccggggagaccacgacgctgcctc

SEQ ID NO: 407879 - DNA, 95 bp, Homo sapiens
aacgtttaccctagcaaaccaggtatgatgtgattgctcaagctcagtcaggtactggcaagacagccacatttgctatttccatcctgcaacag

SEQ ID NO: 407880 - DNA, 74 bp, Homo sapiens
cgcgtctctctgctgcggcgcggggaccgctgtgctctcgaccctgctctcagcggcccacgaggtggagttgc

SEQ ID NO: 407881 - DNA, 100 bp, Homo sapiens
gaatcaaaagcagagctcatatagccagcaaccatataataaccagggacagcagcaaaacatggaatcatcaggaagctttgtcacccgaaagaaccgc

SEQ ID NO: 407882 - DNA, 53 bp, Homo sapiens
caccgactactgtcagcagctgtgccagcagtgtatgtatgaggaagtgccca

SEQ ID NO: 407883 - DNA, 94 bp, Homo sapiens
ctgatgaagttcgagcactaatatttaagaaagaagatgttaactttcagaaatgagccgtcagactgctacagcattacctaccggtacctcg

SEQ ID NO: 407884 - DNA, 74 bp, Homo sapiens
tacctcaaacttcgatgagtttccagaatctgatattcttaagccaacaggtgctttactccatgaactgtcta

SEQ ID NO: 407885 - DNA, 51 bp, Homo sapiens
ggatgagcagtatttgtttctgaaatcatagcccactaatgagttttggag

SEQ ID NO: 407886 - DNA, 100 bp, Homo sapiens
ttaatccagtgactgtcaggtcgatcatataaatacatgctacaggatttaactatcagaatgaagatgaaaaagtcaccttgtctttccctagtactct

SEQ ID NO: 407887 - DNA, 96 bp, Homo sapiens
gcggcggtggcgacggccgcggggactcggagctgagaggagctgctgctcggaccagcgcgagtttacagatgcttcctcagcaacggaaagcca

SEQ ID NO: 407888 - DNA, 97 bp, Homo sapiens
ggtgcctgtgcaagttgttgaggtactggcggaggacattgggcatgcaagtccgctatgttcaccatgaagactatcagttctgttattccttccg

SEQ ID NO: 407889 - DNA, 100 bp, Homo sapiens
gtgggactctgggacattcgaaaacctcagaggtttaactatagatcaacacatcatcttgcatctcatgggttctatgaatttttaaattggtttgatg

SEQ ID NO: 407890 - DNA, 100 bp, Homo sapiens
agtcagggccacgccacctgcagggaagaacccgagtcgaagcgggaagatggctgcagacaagcctgcaggtgaaaattatctcagtgaacgaggatgt

SEQ ID NO: 407891 - DNA, 159 bp, Homo sapiens
caaatttgaaattaacattgatctctgaagatatcaagtcatattatacagtgcgacagctagaattggaaaaccttacaatggcccactgcgtgaccttggttcagctgtccatttcctgtgaccatctcattgacaaggacatcggctccaagtctg

SEQ ID NO: 407892 - DNA, 90 bp, Homo sapiens
agattgtggatcaaataagagtgaacacacagtgttcatcccctcaggaggacacagcttttgaggtaccatcttggaagcagagaccag

SEQ ID NO: 407893 - DNA, 74 bp, Homo sapiens
ggcaggctcaggtgcagccgctgtggcaccctgtgctgcgcacactaaagaaccgcattgaagagaacactggc

SEQ ID NO: 407894 - DNA, 97 bp, Homo sapiens
gatcgccattcttgattatcataatcaagttcggggcaaagtgttcccaccggcagcaaatatggaatatatgttcaactttgtggggaaacttttg

SEQ ID NO: 407895 - DNA, 100 bp, Homo sapiens
aggcgggtggcatggcggagaaggatgacaccggagtttgacgaagaggtggtttttgagggaaagaatatggcaaagctgatgcaagatgggtttattt

SEQ ID NO: 407896 - DNA, 100 bp, Homo sapiens
gctacatgttgcaaaggttaaattccagtgaaaatgcctcgtgtaaaagcagctcaagctggaagacagagctctgcaaagagacatcttgcagaacaat

SEQ ID NO: 407897 - DNA, 50 bp, Homo sapiens
gttttccacaggcatcaaaatggcaacctaatgaggcctctcttgaatta

SEQ ID NO: 407898 - DNA, 75 bp, Homo sapiens
ctgatttagaaggaggttcaggctacggtgagccgaagtgggtgggaggacgctactcgctgtggtcggccatcg

SEQ ID NO: 407899 - DNA, 90 bp, Homo sapiens
ggaggccgagagatgaggccggagcccaccaagttctgggaaacgcaaacatgcagatctttgtgaagaccctcactggcaaaaccatca

SEQ ID NO: 407900 - DNA, 95 bp, Homo sapiens
cggagccgaaacaccggtaggagcggggaggttcagtgtatctttgcctgcctacatcaatctgcaagggagttgcagaaagcctcatgttcatc

SEQ ID NO: 407901 - DNA, 83 bp, Homo sapiens
cgggaccggctgtatgattaggccacaatcttcaatgagtaaacatattcctgactgatcctttgaaatactccagccatgac

SEQ ID NO: 407902 - DNA, 75 bp, Homo sapiens
cgctgacatcaatgtcacaaaagcggatgttgaaaagtcatccgtccttggctcaggatttggagagcttgcacc

SEQ ID NO: 407903 - DNA, 75 bp, Homo sapiens
gcgcgagcaaggccgccagatgtgcagaaatggcacctcgaaaggggaaggaaaagaaggaagaacaggtcatca

SEQ ID NO: 407904 - DNA, 90 bp, Homo sapiens
gtcagaattgatcgccaaaatcccaaatttttgggtaacaacatttgtcaaccatccacaaggcctagaatatcctgcagtggtagagtt

SEQ ID NO: 407905 - DNA, 75 bp, Homo sapiens
aggagaaaatacggcattgctagaacgccaatctgaattgccaacgcaaagcaaagcgagcttccccagtattct

SEQ ID NO: 407906 - DNA, 90 bp, Homo sapiens
acgggcagtttgtcgaacgatgttggactcatagtcactgccagaaaggtgtcatggagaaactccagctgggcccagagattctgcagc

SEQ ID NO: 407907 - DNA, 75 bp, Homo sapiens
tggcggaggcaatggccggcaaccagctgtaagcgaggttgacgtggagaatcccgacctggaaaagttccccaa

SEQ ID NO: 407908 - DNA, 96 bp, Homo sapiens
gaagctgcctttggtgcctcctgcctcctccctgctttgttccaataattttgtgctcgtactgtaagattgatgttaaaggcatggtgttcaccc

SEQ ID NO: 407909 - DNA, 83 bp, Homo sapiens
atcatgtcgcgttacgggcggtacggaggagagctggccacggtagtacggcggttctcccagaccggcatccaggacttcct

SEQ ID NO: 407910 - DNA, 90 bp, Homo sapiens
atcagatcaataatggaggcaatgaaatacccgcagcccaaagggcagaagaagaagaagatcgtcaagtacggcatgggtggcctcatc

SEQ ID NO: 407911 - DNA, 83 bp, Homo sapiens
ctccacatcgccttttgccacctttccctttatttccggagctctaagcgaaagacatgaggcctcagcctgaaatgaggttg

SEQ ID NO: 407912 - DNA, 75 bp, Homo sapiens
caccgagaagcgggtgtatctcaacaggtgaaaggaagcatgtttacaccaatgccaaaaagcagatgctaattt

SEQ ID NO: 407913 - DNA, 83 bp, Homo sapiens
cttagaaaggatcaggactggcggatctaaccatgagctaccctggctatcccccgcccccaggtggctacccaccagctgca

SEQ ID NO: 407914 - DNA, 83 bp, Homo sapiens
gcgctgtgtgtacatcacccccatggaggccctggcagagcagattatgagcctcaaacaatttgtgagcatctccagtactt

SEQ ID NO: 407915 - DNA, 98 bp, Homo sapiens
gtagtttctgcatttagtgagataaggggtgaaagatttgaaagttgaagatgacatctcaatgaaggtgatacctattttatctacccttaattgtg

SEQ ID NO: 407916 - DNA, 87 bp, Homo sapiens
tttggacctgaaacagaaattctggaacacctatatgtccaatggatgggaccccaatgaaatgttcaagttcaatgaggagaacta

SEQ ID NO: 407917 - DNA, 100 bp, Homo sapiens
cggctttttgtggtgattgtgatgtttgcctggtctatagttggagccctggatgggaactcccctcctcaacgccaggatgtagaccatgatttcttcc

SEQ ID NO: 407918 - DNA, 90 bp, Homo sapiens
agaaaatacaaatcacacgcataatggatgaaaggaaccgacagttggaagatgctggctcaagtagtttagataatctactaagtagat

SEQ ID NO: 407919 - DNA, 100 bp, Homo sapiens
atggaggaagctatgagcaatacagtacgagctcaactggaggcagtcctgtgcggaaatctgaagaaaaaacagatacaaagcgaactgtgattaaaac

SEQ ID NO: 407920 - DNA, 75 bp, Homo sapiens
gggggtgtgcaaacccgagagaactgggccttctggcggccgcccctggtttctcctggggggtgatgagcggga

SEQ ID NO: 407921 - DNA, 50 bp, Homo sapiens
ctcaggacacggcctacaacaccaagaggctcttgtcaggatggtgaagc

SEQ ID NO: 407922 - DNA, 100 bp, Homo sapiens
actcggaccgcggaggtgagcgggagctgaggctgaggagaggggagcttggggggcgcctgctgccaaggagaaaatattctctttggaatgggaaatc

SEQ ID NO: 407923 - DNA, 50 bp, Homo sapiens
attacagattcaatttcagcaaggtcctgcctcagttggcggaatggcgg

SEQ ID NO: 407924 - DNA, 80 bp, Homo sapiens
gctcgcggggcccggcgaagggcagatatgattctataacagactcttccagaaatgatatgaagaggaaatttgccctg

SEQ ID NO: 407925 - DNA, 75 bp, Homo sapiens
ggaggacgccatggacgacaaggatttggaacttggccacaaatcgcctcacttttctaaactctttcaaaatga

SEQ ID NO: 407926 - DNA, 101 bp, Homo sapiens
ggagggaggaagctgggacacccgggagtcaggaaatgggatgctgagaacttgctggagtcacagccactgggatcctttctcatcagggtcagtcacag

SEQ ID NO: 407927 - DNA, 82 bp, Homo sapiens
ccgcgagcagaccggcctggaagcctacgccctggggctggacaccggcttgtcaatgaggcagatcagattcaggttcgac

SEQ ID NO: 407928 - DNA, 75 bp, Homo sapiens
cctacgtgcatgaagatggacgaggtcctgtacagcatcgccgagaaggtgttctgggactcagtgttagaagct

SEQ ID NO: 407929 - DNA, 92 bp, Homo sapiens
gtgtgccatattccaatggctgagccgttttgccccaaaacgagagagccaaaccactgagcatattgttaaactagtggaacaacacggca

SEQ ID NO: 407930 - DNA, 76 bp, Homo sapiens
agacctccaccacgcagagaatccagcctggttgttcctcaaagtcattcaagctgtactcgccgaaggagccccc

SEQ ID NO: 407931 - DNA, 75 bp, Homo sapiens
caatgtgctctgggacctggttgacaggatagggtggtggagacactgccacttgctgtgccaaatggaacacgg

SEQ ID NO: 407932 - DNA, 100 bp, Homo sapiens
ctcaacatgaagctaccggccagggttttctttactctggggtcccggctgccctgtggcctcgctcctcggagggtcactttagacaactgtgttgaag

SEQ ID NO: 407933 - DNA, 124 bp, Homo sapiens
tcatactcatcttatgggagagaatcaaacttacagggttgccaccaggtgtgggccatgtttgaggattgccccagcattcagttctatgagtaataaatatccacaggctgttttcttggaa

SEQ ID NO: 407934 - DNA, 51 bp, Homo sapiens
atgtgaaacctccaaatgtggagtcctgtgtatggaaactcacatgagtca

SEQ ID NO: 407935 - DNA, 50 bp, Homo sapiens
caaccacgttctcataccagcctgaagcatatgggtgattttggaagcat

SEQ ID NO: 407936 - DNA, 100 bp, Homo sapiens
tacttaaaaacatcatggatcaatctcaaacaaagacactcctagaatatgcagagaaatggaaaacttcagaagatcctttacctttattggaggtata

SEQ ID NO: 407937 - DNA, 74 bp, Homo sapiens
ctgcggcccatgcgggagcggactgctgtccaggagataccttcccggatgcagatgctgatgaagacagtctg

SEQ ID NO: 407938 - DNA, 50 bp, Homo sapiens
cctgaaccgcgcggccgaaccctccgccaaaacaacttcccgacaagtgg

SEQ ID NO: 407939 - DNA, 82 bp, Homo sapiens
aacaaagtcatcaagctagtggacatcacggacatccagaaggttttaaaatcaaagatgggaaaatcggagaaaattgccc

SEQ ID NO: 407940 - DNA, 100 bp, Homo sapiens
catggttatagctgtagtgaaaaattatccaaagctcagttgacaaaatttttccgagagctcctggagaatgcagaaaagtcactaaatgatatgtttg

SEQ ID NO: 407941 - DNA, 98 bp, Homo sapiens
tcttcattggtggtatcaactgccatcagggaaagccgttgcctatggcaagaaacctattggaattcgagacttaattaatgaagctttgcatcgag

SEQ ID NO: 407942 - DNA, 98 bp, Homo sapiens
aaaatgttagaaccaccaccctcagccaagcccttcaccattgatgtggacaagaagttagaagagggccagaagggctccattggcctccagaggac

SEQ ID NO: 407943 - DNA, 97 bp, Homo sapiens
gctgagttcctcttgctcacagagctctgtaaagaggtcggatccgcagctgcttgcccggttctactatgccgacgaggagctgaaccaggtggcc

SEQ ID NO: 407944 - DNA, 100 bp, Homo sapiens
aattagtggagctgacacagaagctatttgaatgtgatagagaccagatgtactacaatctgctaaaactgtataggctgccacacttgtgtatcccttc

SEQ ID NO: 407945 - DNA, 83 bp, Homo sapiens
ggaaataggatttaaccgctctctgcctcccagccacacccactcgcccgggtctatggccacggtcggagagtggtcctgtg

SEQ ID NO: 407946 - DNA, 100 bp, Homo sapiens
aaagactttccaggatgaacaacgtttccagctgggaattatggatgatgctgcagagtgctttagcaatgttgatcccagggatgatgtatttggatat

SEQ ID NO: 407947 - DNA, 89 bp, Homo sapiens
ccttcacgtcctcctccatgctgaggcgcaatacaccgcttctgggtcaggctcacgaggcccagggaatcctctggaccatcagatta

SEQ ID NO: 407948 - DNA, 82 bp, Homo sapiens
gggggttccgggaagatggtgctgatcaaggaattctattgacctgaaaagtggttctggaaaagtgtaccaaggccctgca

SEQ ID NO: 407949 - DNA, 75 bp, Homo sapiens
acatggccaacgaaagaccctgaactagagtcccaggtcaacctgtgcactcagctaaacacaaaagtggccaaa

SEQ ID NO: 407950 - DNA, 100 bp, Homo sapiens
acggtccacagctcatcatgatggacttggagctgccgccgccgggactcccgtcccagcagaaaatgtggacacagacttgccaggcagcctggggcag

SEQ ID NO: 407951 - DNA, 100 bp, Homo sapiens
gtgctcacagctgcccattgcctaaagaagtccgatgtggcctccgtgaactggagtgcaccttcccaggccttcccacgcatcacccagctccttgggc

SEQ ID NO: 407952 - DNA, 76 bp, Homo sapiens
tccagactcagagtgtgagaaaaaaataaactcctatttgtttatggcaagcgggacgaccctgggacagtctcca

SEQ ID NO: 407953 - DNA, 51 bp, Homo sapiens
ccaatctttctacatcccagaaacatgatgagtgtatcacaaatcagcaca

SEQ ID NO: 407954 - DNA, 96 bp, Homo sapiens
cagacaaaccccacaagcactgcatacggcatggaaaagaccttgccagagcctgtgggcacccaagtcagcatggaagagattcagaatgagtcg

SEQ ID NO: 407955 - DNA, 80 bp, Homo sapiens
tgttttgtggagactaaagaatggagaactggagaatattaagcctaagggagaccagtgtaaatttgatcatgatgcag

SEQ ID NO: 407956 - DNA, 90 bp, Homo sapiens
caggcagcgtgtgtcggtcgcctagtctggagaactagtcctcgactcacggtacactgaggaggggacggctccgtcttcacattgtgc

SEQ ID NO: 407957 - DNA, 75 bp, Homo sapiens
gcaagcaggcttgccaagagcggaggtttgaggagttcctacagcggaagtggtcctctgagaagcgctttggtc

SEQ ID NO: 407958 - DNA, 92 bp, Homo sapiens
gctgatttagaaggaggttcaggctacggtgagccgaagcaggtggcctgacggagcaagagctgatggaacagctggaacactgtgagctg

SEQ ID NO: 407959 - DNA, 104 bp, Homo sapiens
gtacctggatgaatgccaacttttgcatttcccatgtgtatcctgtgaccattctatctgggcatcagaattttgaagaacaaatgcaaggcatgaagacccag

SEQ ID NO: 407960 - DNA, 83 bp, Homo sapiens
cgaaggacttcggcgcgggactcaagtacaactcccggcacgagagtgaagacatttccacctggacacctgaccatgtgcct

SEQ ID NO: 407961 - DNA, 95 bp, Homo sapiens
gcagatggtgcagctaatgatggcctaagatctggcaaacttggtgaacagtgtgaagcagttgttcgctttcccagactttttcagaagtatcc

SEQ ID NO: 407962 - DNA, 83 bp, Homo sapiens
atcgccggagcctgaggacacttctctgtcgtcacagatatgatcatcgtggcgcatgtattactcatccttttgggggccac

SEQ ID NO: 407963 - DNA, 83 bp, Homo sapiens
gacaatcactgcagagataccagcatcaagatggtgctcatgtggaccagtggtgacgccttcaagacggcctacttcctgct

SEQ ID NO: 407964 - DNA, 75 bp, Homo sapiens
ccgggtcttcctggccccaagggctcgccgctcagaggccctatggacagcgatgacagccatggatctgtgcta

SEQ ID NO: 407965 - DNA, 100 bp, Homo sapiens
atgatgtatttgatcctgattctacccaagtacatatgatttcagctgcaatggcaggaacagtaagaggaccttgtgcatgaataatttgtttccacac

SEQ ID NO: 407966 - DNA, 88 bp, Homo sapiens
aagagatgtggggggattctcgacctgctaacagaactggaccttttcgcctaccgatgttcaccgtgctcaggaaattcaccattcc

SEQ ID NO: 407967 - DNA, 98 bp, Homo sapiens
ttaccctcccaaagtggtgagattacagaaactccacttggagatgttggcagaccagccacgaacaactaaataccacagtgtcatcctgcagaata

SEQ ID NO: 407968 - DNA, 95 bp, Homo sapiens
ctggggaaaatggctgcgtcttcgagtggaatgtgttccagaagatctagaactgaagaagaagatttttgctcagttagattccatcattgatg

SEQ ID NO: 407969 - DNA, 100 bp, Homo sapiens
gccccaaggagccacacctggaccagaccccaggaaaggaaagtgaaaaggtttctgaatatccagcagtgattgtggagccagttccaagtgccagatt

SEQ ID NO: 407970 - DNA, 82 bp, Homo sapiens
tcttgccttctccacacttgtttgccctcggaaggctcggtcacactctccgagcacagccatcatctcccacggtaccaca

SEQ ID NO: 407971 - DNA, 82 bp, Homo sapiens
gcgggagcgagctcaaggcggcgcggcggccactgggcgcagcacccaggtatcgagaaccttccctgcgaacttcagagga

SEQ ID NO: 407972 - DNA, 100 bp, Homo sapiens
acctggctagaagcagagacaccaggacagaaaagacagtgttctgctttcatggagttcacagaagagtcgaggagtgggaggcgaaagtgcaacaagg

SEQ ID NO: 407973 - DNA, 75 bp, Homo sapiens
tgggatctgacaagaggaccccgctgctaactcggctacaacatttggcagagggggtgctcaaaggatttaaag

SEQ ID NO: 407974 - DNA, 100 bp, Homo sapiens
cgccgtgctggatgccgtgatctccagcgccggcctcctcagtgcgaagaagctgcagccgcacctggccaagggtgcccctgggcgctgggattgctct

SEQ ID NO: 407975 - DNA, 100 bp, Homo sapiens
tttgtctcacaagatgaaatgttgacgcccctggggagattggacaagtatgctgcaagtgagaacatatttaacagtataaatcaaagccattctgtga

SEQ ID NO: 407976 - DNA, 75 bp, Homo sapiens
agacttgctaaaggagaagtctggtgtaatacaagatgctttaaagaaggtgttggggatgtcctttgcactgac

SEQ ID NO: 407977 - DNA, 88 bp, Homo sapiens
gactcttctaggagacgagagagcgaacgccagggaccctgtgcaggcctgctcctccgtttgcaagtccaaaagaaactcttccttc

SEQ ID NO: 407978 - DNA, 100 bp, Homo sapiens
agcaggaggctaagaaagtggtgaatcccctgtttgagaaaaggcctaagaattttggcattggatttaagtgccctgtatgctcaaaatttgtatcctc

SEQ ID NO: 407979 - DNA, 75 bp, Homo sapiens
ctgagggcggggtgtacgaaagagaaacccggagggcgccgggaatggcattgtgcccatcgtggagcctgagat

SEQ ID NO: 407980 - DNA, 90 bp, Homo sapiens
gccttaagagaggatcgcccaatccacatgcttttccagatttggagcaagaggtggtggtggccttcccccgaagaaatttggtaatcc

SEQ ID NO: 407981 - DNA, 100 bp, Homo sapiens
tcctcggacggcggaattgcagtgtggaacatggatgttagcagagaagaggacccagatgatgtggtaccagttggccaaagaagagcctggtgttggt

SEQ ID NO: 407982 - DNA, 101 bp, Homo sapiens
gtctccatccccgaccgccctcttctgtcttgaatgtttctccatcccagagagatgaagtaattcaatggctggccaaactcaagtaccaattcaacctt

SEQ ID NO: 407983 - DNA, 75 bp, Homo sapiens
aagcagccttagccctagtgtagagtaatctatgccagcaattatgacaatgttagcagaccatgcagctcgtca

SEQ ID NO: 407984 - DNA, 48 bp, Homo sapiens
ctggcctgccatgtccgggagaagacatgtctgcacatcaccgaacga

SEQ ID NO: 407985 - DNA, 51 bp, Homo sapiens
ccaggaacggctagctttttgacctgaaccagcacctatgacagaagatct

SEQ ID NO: 407986 - DNA, 101 bp, Homo sapiens
ttcaccaatagaggaatcccatggagcattaattagttcttgcaattccagaaccatgactgatgcatgatttcaccttcacttgaactgcttcattcagg

SEQ ID NO: 407987 - DNA, 110 bp, Homo sapiens
gcgagcccttccttataggcgtcagcgggggaacagctagcggcaaggaatgtatacaaagactatcgcttccttgagctggcatgtgattcccaggaggatgtcgacag

SEQ ID NO: 407988 - DNA, 75 bp, Homo sapiens
gccgggcctccaggctgaatctgttcttccaggacactgcccatctctaagataagaacctggaaaggggactct

SEQ ID NO: 407989 - DNA, 96 bp, Homo sapiens
ctgcagaggggtccatacggcgttgttctgggttcggagcgaccttggccgttggcctgaccatctttgtgctgtctgtcgtcactatcatcatct

SEQ ID NO: 407990 - DNA, 98 bp, Homo sapiens
agcgaactgcggtcgctggaatgtgtgtctcacgaggtaatcttcagcaagtactgcaactccagcgacatcatggacctgttctgcatcgccaccgg

SEQ ID NO: 407991 - DNA, 75 bp, Homo sapiens
gtgaagctggatttctcctgccaggagaatctcctgcaggatctcagtgatgtgctctacggaaacgtattcgag

SEQ ID NO: 407992 - DNA, 114 bp, Homo sapiens
cagctgaagagcgacaagccgctggcagccgcggatctcaccgccgctcagggattttttatcaagcagaaatgcatcgaacaacgagaatcaagatcactgagctaaatcccc

SEQ ID NO: 407993 - DNA, 100 bp, Homo sapiens
accagccactattgaaaacgaacttataaagttctgccgggaagcaagaggcaaagagaatcggttggcaacagagatgcttatttttggaaagaagtta

SEQ ID NO: 407994 - DNA, 95 bp, Homo sapiens
ctgtgggttacgccatctttaaggtgctggagaatctggtaaaagcaccattgtgaagcagatgaggatcctgcatgttaatgggtttaatggag

SEQ ID NO: 407995 - DNA, 73 bp, Homo sapiens
tcactgttcaccgtcaaggcgtggccctcggaatgaaggcagcaggcatcgttggcttcacagtatgactgat

SEQ ID NO: 407996 - DNA, 98 bp, Homo sapiens
tgttttaatgcatcagtttgatgatgccgtcagtatcactgtgacaaaacttgccaatggcacttccagtatgattgtgcccaagcaacggaaactct

SEQ ID NO: 407997 - DNA, 82 bp, Homo sapiens
gtaaacccagttcaagtacatctgggcttatccaggtagttgatgtcacttggcgatattcctgcaaacatgaagaggtgat

SEQ ID NO: 407998 - DNA, 101 bp, Homo sapiens
acatgttgtctcttagaagtgggagctgaacggaaagaccacagcaagattctttcattcgtctcctcctagcctgggggaccaggctcgaactgaccctg

SEQ ID NO: 407999 - DNA, 82 bp, Homo sapiens
cgaagattgacgccagtaagaacgaggaggatgaaggggcgtcttactactgcaggcactaacaagaagcaatggtgcaatc

SEQ ID NO: 408000 - DNA, 82 bp, Homo sapiens
cagacggcgcgtttctatcgggacgtcctggggatgaaggtgcataagctggagcctgaggcgtggaaacacgtggaagccg

SEQ ID NO: 408001 - DNA, 74 bp, Homo sapiens
caacatctgcaaggtccgcttcaccagggtgtcctgttcccaaagctgagctgatctgccacctagagcatggg

SEQ ID NO: 408002 - DNA, 95 bp, Homo sapiens
gtaaatcctgccaggcttgccgcttcatgaagtgtttaaaagtgggcatgctgaaagaaggacatacgggacggttattaaagtctctgtgcttc

SEQ ID NO: 408003 - DNA, 82 bp, Homo sapiens
agatgttgtcctgtgctggggctgacagggtgatttgtggctcccgagtgagggttgaactatcgacaggcatgcctcggag

SEQ ID NO: 408004 - DNA, 74 bp, Homo sapiens
aagcaatcctaccatgtcagccttcccagtagctggaactacagaggtctgcggggtttccgagaggctcgccg

SEQ ID NO: 408005 - DNA, 101 bp, Homo sapiens
cctcctccgggaccctccccttggaccgagccgatcgccgcggggcagttcgggccggctgtcctggcgcggcaacctcccgacttctagtaaattaccca

SEQ ID NO: 408006 - DNA, 90 bp, Homo sapiens
gagaggggccgtggcccctgcagcggaaccggacccagtccctgagccgcccctacacccacaggtactttgaactcaagtaaacaaaag

SEQ ID NO: 408007 - DNA, 100 bp, Homo sapiens
cctactactctttcccctgttaatcatagcttggactgctctggcccatttagagtctcttgcagtggatgttgaggtggccaatccaccagctagtaag

SEQ ID NO: 408008 - DNA, 150 bp, Homo sapiens
gtcatattgaacattccagatacctatcattactcgatgctgttgataacagcaagatggctttgaactcattaaactccattgatgatgcacagttgacaagaattgcccctccaagatctcattgctgtttctgggaagtaaacgctc

SEQ ID NO: 408009 - DNA, 100 bp, Homo sapiens
aatgagcagatactgaatgtaaaccctgcagacatgtagactgccaaagtgtatgggatgctttcaagggtgcatttatttcaaaacatccttgcaacat

SEQ ID NO: 408010 - DNA, 82 bp, Homo sapiens
ctaaatgatgggcagtcatggtcccagaaacgtcactatcaagaaggttgcagatatcaagaaagtcaacaacttcatcaga

SEQ ID NO: 408011 - DNA, 83 bp, Homo sapiens
cagtcgggccgcgccgcgcctcagctctgctctacgaactcgacggggaccccaagaggaaggaattcctggatgacttgttc

SEQ ID NO: 408012 - DNA, 99 bp, Homo sapiens
ctcactcctgtcaatatattcttgggattgccccagtggaaaatgacaatagctacgatgaactgaaaagagatgcaaagttatgtttatcattaatgt

SEQ ID NO: 408013 - DNA, 90 bp, Homo sapiens
gggaaatgaaagagcgccttgggacagggggatttggaaatgtcatccgatggcacaatcagctgtatgcaggagctattcttgaagttt

SEQ ID NO: 408014 - DNA, 50 bp, Homo sapiens
ctttgatttacagcagctgcaggtgaaagaaaatggcccgaaccaagcag

SEQ ID NO: 408015 - DNA, 83 bp, Homo sapiens
tgtcctcctgcatctcctcctgctccccatcgccatcccctatgcagacctgcctagagctggaacgttacctccagagcgag

SEQ ID NO: 408016 - DNA, 50 bp, Homo sapiens
gccgctcggaaacacatggacaaggtggaggagtctggcgagcatgtgat

SEQ ID NO: 408017 - DNA, 97 bp, Homo sapiens
atgcatttcacggtggccttgtggagacaacgccttaacccaaggaagtgactcaaactgtgagaacttcagattctgattttgcaagtctgagatg

SEQ ID NO: 408018 - DNA, 75 bp, Homo sapiens
tttacagaaagagtcaacagcagtggcaacagttccatgccattgcagtgtcaactaggcctcagttacttttca

SEQ ID NO: 408019 - DNA, 100 bp, Homo sapiens
cacgacgtgtacatctccctgatacgccttgcaaggccaggacacccaagagttccttcgctgcctgatggaccagctgcacgaggagctcaaggagccg

SEQ ID NO: 408020 - DNA, 51 bp, Homo sapiens
ttcctttacactgggtgtgtaagaagaaataggaaggttgttgattactca

SEQ ID NO: 408021 - DNA, 74 bp, Homo sapiens
caagatgatgagggcgcggcagtatccttggggcactgtgcagggaatttcgtgaggatatgccctccattctt

SEQ ID NO: 408022 - DNA, 100 bp, Homo sapiens
ataactctagaatctgaaagaaaacgaatatttaaagattttatgcatgtgcttgaggagtctactcttcatcttgtgttgagacttcgtggtggtgcta

SEQ ID NO: 408023 - DNA, 128 bp, Homo sapiens
accttccggcggccgaagacactgcgactccggagacagcccaaatatcctcggaagagcgctcccaggagaaacaaaaactcctgattggtccgaagggccacgtgatctcccagatagcacaggag

SEQ ID NO: 408024 - DNA, 75 bp, Homo sapiens
ccggattccagactcgtgggggaaaggctgacagctttattaaaccgcctggagcgaattttcgaagcatgtttt

SEQ ID NO: 408025 - DNA, 83 bp, Homo sapiens
gaacagaaaacagtctgtggagagaatctgcctcctttaacttatgaccaggtcctcatgctgataccgccagtggatgccag

SEQ ID NO: 408026 - DNA, 83 bp, Homo sapiens
atttaactacagtgtggggtttaaagatttaaatggcacagaccccacaggctcctcggacactgggtccatcacctcctgcc

SEQ ID NO: 408027 - DNA, 75 bp, Homo sapiens
atgaaggagaaggggcgcatcgcggcacagctgcagggcattgaggcagccaacatgcctgactctgagctattc

SEQ ID NO: 408028 - DNA, 100 bp, Homo sapiens
gacagtagtttaactgatacccgggaaacttcagaagagatgcaaaagaccaacaatgctatttcaaatttgaaagacatattggctgacctgataccta

SEQ ID NO: 408029 - DNA, 100 bp, Homo sapiens
ccgccgccgccgccgcggtttgtcgccagaaggaagatggcggatctggaggagcagttgtctgatgaagagaaggcacgagatgtgcgtaccaatgaag

SEQ ID NO: 408030 - DNA, 100 bp, Homo sapiens
tagcgtcctggaattacttcaatcaataccttaaggcaggttctatgaaagatcctctgctagatgaccatggtgattttattagaatgtgcacggctat

SEQ ID NO: 408031 - DNA, 100 bp, Homo sapiens
agcctggagaagctgcggctgcacacggtcaactccaggcacgaggccagcctgaagttgtacaagttgttgtggaattataagctgaacctaactacag

SEQ ID NO: 408032 - DNA, 75 bp, Homo sapiens
caggagcagcccgcggcgaccaagatcaggaacctgccctgattttgaagatgtaactgagtttctggaagaggt

SEQ ID NO: 408033 - DNA, 140 bp, Homo sapiens
aagtcttcagaccgtggacaatgtgctctttgcccctattatggagaaaggtgttccctaggttgttcctactgaaggattggtctccatattaaagaagaggaatgatactgtaggagatcatcctgcccaaatgcaac

SEQ ID NO: 408034 - DNA, 101 bp, Homo sapiens
tatgggagacgacagaccgtttgtgtgcaatgccccgggctgtggacagctggatcatgaatctaattgggcgatttcacagagtttctggatcagaaaag

SEQ ID NO: 408035 - DNA, 89 bp, Homo sapiens
cctgacgctcgtcctcatcctggtcactagcggactcttcttcgccttcgaacaatgcagatcttcgtgaagactctgactggtaagac

SEQ ID NO: 408036 - DNA, 75 bp, Homo sapiens
cagggccttgatgggcacagccatcttgtcatgtacctgggaaccaatggagtttcactcttgttgcccaggctg

SEQ ID NO: 408037 - DNA, 90 bp, Homo sapiens
actcttcatcctgtacaccagtggctccacaggcaaacccaagaatcttgattggagttggttaacagaatgagttgtcacttgttcact

SEQ ID NO: 408038 - DNA, 98 bp, Homo sapiens
tgctacgaagacagcagatcaaggtgagctgggttgggagctgtatcacagaagagaagattctgtggcgctgtatgacgctatcatgaatgcaggcc

SEQ ID NO: 408039 - DNA, 80 bp, Homo sapiens
gctgcggatccagggggtcggctgccaggtacagaggaatgttacggcatccggagtcatccctcagatttctctgatca

SEQ ID NO: 408040 - DNA, 100 bp, Homo sapiens
atttctagtcagatttcaggttcagtgacatcagaaaatgtgtccagagattacaagattgggctaatggatactacagacaacagagaaaacttgttga

SEQ ID NO: 408041 - DNA, 75 bp, Homo sapiens
cctccccctaaaccagctcacagaaatagcaaccctgtcattgccttcacagttgttgatcacatagcatggtca

SEQ ID NO: 408042 - DNA, 99 bp, Homo sapiens
gtggatatgcccaggtcatccccatggaggagattccagagtgtttgagggatagttatcccagacctgatcagccctgttacctgtatgtgataggaa

SEQ ID NO: 408043 - DNA, 100 bp, Homo sapiens
gctcctgcgagaagcaagcggaacttcctgagtacatcgcggtgcacgtggtcccggaccagctcatggccttcggcggctccagcgagccgtgcgcgct

SEQ ID NO: 408044 - DNA, 51 bp, Homo sapiens
agaaacatctcaccaatttcaaatccgatgctaatactggagaccgtggac

SEQ ID NO: 408045 - DNA, 83 bp, Homo sapiens
cgagtgtcagccatcgcttcggaggggaaggctgaggaaaggtcagcccaaggctgccccctcggtcactctgttcccgccct

SEQ ID NO: 408046 - DNA, 51 bp, Homo sapiens
ggccgtgtcccgaggaagtgcaagacccgtttaagcggctgcagggcaaga

SEQ ID NO: 408047 - DNA, 100 bp, Homo sapiens
ccggaatcattcccttggctgttaatttctcagagagttcttcgtaagtacatcttaaagctgtcaagatggttctagcagaccttggaagaaaaataac

SEQ ID NO: 408048 - DNA, 98 bp, Homo sapiens
cgcgatgacacaggagtacgacaagaccatggccaacctggagcgcaccttcatcgccatcaagccggacggcgtgcagcgcggcctggtgggcgaga

SEQ ID NO: 408049 - DNA, 80 bp, Homo sapiens
cagcggagctgacacagccaaaacacttcagttatggaagatcaaaatgaagatgagtccccaaagaaaaatactctttg

SEQ ID NO: 408050 - DNA, 96 bp, Homo sapiens
cggtacttctgccactgctgctccgtggagatcgtcccgcgcctgccgggccaattcctgtccccccagcagcatggcatcgtgtgctgaaccctc

SEQ ID NO: 408051 - DNA, 51 bp, Homo sapiens
gttcttacaacatggcagacattgacaaaattcctagaggacctgtgcaac

SEQ ID NO: 408052 - DNA, 100 bp, Homo sapiens
tcctcaaggagcagatgagggtttcccatgaagaaaatcagattccctataaggagcccctgctggtgcaccagaactaccgggggccatctgcccaact

SEQ ID NO: 408053 - DNA, 100 bp, Homo sapiens
gcagctcagcagccacatataggcttttattgagatggagacaagagaagatgcaatggcaatggttgaccattgtttgaaaaaagccctttggtttcag

SEQ ID NO: 408054 - DNA, 100 bp, Homo sapiens
acaacagtgatgaggaaagctgtgaaagttctcaagaatgttacacaaatgccaagggagagagtggtttagaagaatatccagatgctaaagagacacc

SEQ ID NO: 408055 - DNA, 100 bp, Homo sapiens
tttccggatcaatccagatggcagccagtcagtggtggaggagcatggggaagtgattgactgtgtgcaggagctgagccactccgtgaacaagctgttt

SEQ ID NO: 408056 - DNA, 75 bp, Homo sapiens
atgtcggacctgggctcggaggagttggaggaggagggagagaatgatattgggatggacttcagcagaaatctt

SEQ ID NO: 408057 - DNA, 90 bp, Homo sapiens
agcagcaccaagttcacggccaacgccttggcactagggtatgatgtggaactcttccagcgcatagaacacttaattgggaagaaacta

SEQ ID NO: 408058 - DNA, 89 bp, Homo sapiens
tgaaatagaaaaggagaaagaattgcttatacatgaaagaggggcatcaggtctcggtgattcagaatacacctacttttgcaatgggg

SEQ ID NO: 408059 - DNA, 95 bp, Homo sapiens
gcccggcggctgctgctgctgctgacgctgctgctgcccggcctcggggtgctggagaatctggtaaaagcaccattgtgaagcagatgaggatc

SEQ ID NO: 408060 - DNA, 74 bp, Homo sapiens
catgtcctgttgtggggcttttacagcctttggattgtgttcaattagaccttcaggacctctccaagaagcct

SEQ ID NO: 408061 - DNA, 80 bp, Homo sapiens
caccactgcagccagaaagcgagtgtactaatggtcacttgatgtgcgctggctgttttatccacctactagcagatgcc

SEQ ID NO: 408062 - DNA, 100 bp, Homo sapiens
agttacccaacattacgccaagatcagtgatttcggactttccaaagcactgcgtgctgatgaaaactactacaagggtcacaagccaattctattgaga

SEQ ID NO: 408063 - DNA, 100 bp, Homo sapiens
ggaagctggagctgtctggttgtgagcagggtctgcacgaaataaagctcctgggcaaggggacgtctgcagctgagtatgttgaagaaagtacgcacat

SEQ ID NO: 408064 - DNA, 100 bp, Homo sapiens
cctggaggcatcattgtacgatggtgtaagacatacggctatgagcacatattgaccttacacaacctggagaaggccggcctgctgaaaccgcagacgg

SEQ ID NO: 408065 - DNA, 100 bp, Homo sapiens
ggaaggctgtgagcaagctgtatgcatccaaagcacacatgaactcagtgctcatggggatgaagaaccagctcggtgcttttgaagatgatgatatcac

SEQ ID NO: 408066 - DNA, 96 bp, Homo sapiens
tgagagtgttaattctgctcctctcctgggcggcggggatgggagaaaatgtcttcatgaggtctggtggtctttttccctgacaatttgtatctg

SEQ ID NO: 408067 - DNA, 51 bp, Homo sapiens
cagattcgcagtggtcgcttcttctccttgtctccttaaccaaaactgcca

SEQ ID NO: 408068 - DNA, 74 bp, Homo sapiens
cagcgcgccggtcgagctgattctgagcgatgtggagctggtcgcagatcctgagacccggacagtggcagtga

SEQ ID NO: 408069 - DNA, 74 bp, Homo sapiens
cagtctccactggaaaaaaagatcttgggcgaaatgaccctgaatgtgacctgtgtggtggagacccagaaaag

SEQ ID NO: 408070 - DNA, 100 bp, Homo sapiens
gacaagaactccctgggagcaattctgcaacagagatttatggagaatagcagcataattgcttgctataatgaactgattcaaatagaacatggggaag

SEQ ID NO: 408071 - DNA, 75 bp, Homo sapiens
cgatgaccttggacacctccatgttatggacacggtctttcttattcaggttcagcctggagaaggaaataaagc

SEQ ID NO: 408072 - DNA, 97 bp, Homo sapiens
gaaaaagcttggagataaagttgctttttactgtgtttgaaagatgtatggtgatcttgaaacctccagacacaagaaaacttctagcaaattcagg

SEQ ID NO: 408073 - DNA, 100 bp, Homo sapiens
gttttgtccagggcagcatctctggtgcatgctgatgacgaaaaacgttttataggatcacattgacaaaagtaccatggagttttatgagtcagcatat

SEQ ID NO: 408074 - DNA, 82 bp, Homo sapiens
acacaactccagtgctaactcaacagttgagccccatatgggggttggcaggcagcagagaggcccctttcaaggtgttcgg

SEQ ID NO: 408075 - DNA, 82 bp, Homo sapiens
ggtgctgtctgggcttcatagcattcgcctactccgtgaaggtgcacgacgccagctcccttctggggggccggggcctggg

SEQ ID NO: 408076 - DNA, 75 bp, Homo sapiens
gaagtgaagctgctgctactcgtctatgactttgaaagaagccatcaagtcttcactcatcatcctcaaacaagt

SEQ ID NO: 408077 - DNA, 90 bp, Homo sapiens
taattgctgaacttaaaaagcagtctaaacctgtgaccacccctgaagaaattgcacagaaagtggaatctcaagaacgagaagatgttc

SEQ ID NO: 408078 - DNA, 50 bp, Homo sapiens
attccaagtaactcttatttgaattctatcgtgatgcagagaagaaagaa

SEQ ID NO: 408079 - DNA, 74 bp, Homo sapiens
ctgtccaggagctctgctctcccctccaggatattaatgcacacgcctgtgttactggtaaacccatcagccaa

SEQ ID NO: 408080 - DNA, 90 bp, Homo sapiens
ccccgacgaacatttctgggtgacactcaacaggattcccgatgatgattattctccaccgtctaagagaccaaaggccaatgagctacc

SEQ ID NO: 408081 - DNA, 90 bp, Homo sapiens
tggactgctcagggtgccagacctcatcaacatccatgatagcagtcttctgtaaatcgaacttttcaagaattctctgaaggaaccaag

SEQ ID NO: 408082 - DNA, 74 bp, Homo sapiens
gtccttcgcccccaagactgcgactctaaacggactcatgtactttgtcagacctgcaggctgggacaatgaaa

SEQ ID NO: 408083 - DNA, 73 bp, Homo sapiens
aactccagatatctacctaattgattggagaatgacatcttcctgggctgggaaaaaggagcttataagaaat

SEQ ID NO: 408084 - DNA, 90 bp, Homo sapiens
acagcctctgccctgggaacttcgactgggcctactgctaagcggaggccactgtctgcagctcccgtgaagatgtccactccagaccca

SEQ ID NO: 408085 - DNA, 75 bp, Homo sapiens
ggagcctcgccattcccgacgcgtgaagcctctgcgggccttcttttcgtcttatttgaagtcattgccggatgt

SEQ ID NO: 408086 - DNA, 73 bp, Homo sapiens
ggtgatttacatcgatgtgcccgttccagaggtcctcagtctcctccaacccctctggctcccggccaagaaa

SEQ ID NO: 408087 - DNA, 90 bp, Homo sapiens
cgtggccgagttcctcgagtgggatgaggaaaatgaggcccaaagaagtgatgccacttggttaaggtcccagagcaggtcagaatcaga

SEQ ID NO: 408088 - DNA, 82 bp, Homo sapiens
cttgtatgactcaaactgccaactgaacttcatcgctcctgacaagcatgagtagacccaaatgatttgtacattgtagaac

SEQ ID NO: 408089 - DNA, 96 bp, Homo sapiens
tgtcgattgcactttactgggggatttgcctcagatggagttacagttgcagagctattttgctgcatgtgaggatgagatccctgccatccggaa

SEQ ID NO: 408090 - DNA, 76 bp, Homo sapiens
ggatatgtgcatggatctgaaagttcatcctgaacaggaaaaggatgccgaggaatgtgacagggctgggagtgtg

SEQ ID NO: 408091 - DNA, 82 bp, Homo sapiens
ctctctcatctcgctcggctgcgggaaatcgggctgaagcgactgagtccgcgatggagaaaccaaggtgtatgttggtaac

SEQ ID NO: 408092 - DNA, 83 bp, Homo sapiens
ccccaacccccacgagtccaagccgtggtcattgggactcccacacttaaacaaagaaaggaaattctgcaagtgattacctc

SEQ ID NO: 408093 - DNA, 75 bp, Homo sapiens
gccggggcggcgaggcgcgaggagctaggtgacagaaactccatttgcaccagcttacattaaaaaaagaggagg

SEQ ID NO: 408094 - DNA, 75 bp, Homo sapiens
tcttgctgtattggagctcatgcagtcttcagtggataataccaaaatggttcactattatgaagatggcaatgt

SEQ ID NO: 408095 - DNA, 75 bp, Homo sapiens
cggagaactgtgcccattacttctgcctggactgcattgtcgaatggtccaagcaaccatgtccaagggacctgc

SEQ ID NO: 408096 - DNA, 98 bp, Homo sapiens
actgtgggacttggtttgcctatgtcaagatcacagaatgccgggacattctgcttcctgtcatcaccaaagagctgaaggagctgctggagcagaag

SEQ ID NO: 408097 - DNA, 100 bp, Homo sapiens
gaaagattgaagaagttcatcttcctgtagaaaaagtagatgttatcatatctgagtggatggtcatgctaaatgtgtagaagttgtaaaaacttttaac

SEQ ID NO: 408098 - DNA, 74 bp, Homo sapiens
aggagccagacgacaagcacacactatggcgctgaaacggattaataaggccctggagagtgaatttgtttcct

SEQ ID NO: 408099 - DNA, 75 bp, Homo sapiens
agtgcggatttctgctatgatgacagcagatatctggggaagatgaagtagagtgctctgacaaggacgagcccg

SEQ ID NO: 408100 - DNA, 75 bp, Homo sapiens
cgagcaggaggcgccatcatggatgatgatgacgacatgggagaggatgaagatgaggacgatggtttctttgtg

SEQ ID NO: 408101 - DNA, 90 bp, Homo sapiens
ccctattgtaagtgcagatggaacacaacaggactgttatgaacactatccaacaattaatgatgattttaaattcagcaagtgatcaac

SEQ ID NO: 408102 - DNA, 137 bp, Homo sapiens
gcgtggtcagagcgagcttcggagaagcagtggtgggttccatgtgatggtggagtaggaggcaggtctccgcgcagctaccaagggggtgccagctggaaacagtgacacagaggggggccagcctggtcggaaac

SEQ ID NO: 408103 - DNA, 110 bp, Homo sapiens
aacatggtgctgcacatagccatgatcatgctcatggacatggacactttcattctcatgtgatggaatggggagaagatattaaagcagtttcaaaagatgaagcagtg

SEQ ID NO: 408104 - DNA, 75 bp, Homo sapiens
gtgggcggcaaggacttcgagcagcctctcgccatttcccgggttcgagaaatggctgctactaccttaagcggt

SEQ ID NO: 408105 - DNA, 96 bp, Homo sapiens
ctttggaaactaaatcaagtctgccaatggtgcatgtgtctttgagctgcagcagctggttgaggggcaccaagaatcctacctcctctgctggga

SEQ ID NO: 408106 - DNA, 83 bp, Homo sapiens
agcaaaacaggcagaaatggaagtcaagagggaatcttatgcaagagaaagaaggtatccagggtgtgagcaagcagaactca

SEQ ID NO: 408107 - DNA, 96 bp, Homo sapiens
aaagatccaaaacaagtggctgcggccgtcgcccaggagtcatcggacgccagaatctgagttcaaggaggccttctccctctttgacaaggatgg

SEQ ID NO: 408108 - DNA, 134 bp, Homo sapiens
agaggctaagcgtcctgagccaccctcgacatccactttgaaacaagttactaaaggtgtggcagagaagacacagcttctgaaattgagtgtacctgctacttttatgcttgtgtctttagatgaaggtccag

SEQ ID NO: 408109 - DNA, 119 bp, Homo sapiens
gcctgacttggaccctggaaaacctggccctcttcaatttctgacaaaaggtgctggagaatctggtaaaagcaccattgtgaagcagatgaggatcctgcatgttaatgggtttaatg

SEQ ID NO: 408110 - DNA, 99 bp, Homo sapiens
ggacatggccatgaatgcccaacaagataatgatatgctgcaggctgctagtcattatcgccaaaatagaaactctttgtatagaagagaagaatcact

SEQ ID NO: 408111 - DNA, 98 bp, Homo sapiens
aacactccgaggccaggaacgctccgtctggaacggcgcagggaccctccattttccatatccaggaaaatgtgatgcgccacaggtatcagcgtctg

SEQ ID NO: 408112 - DNA, 99 bp, Homo sapiens
ctgggcttctctgaggcggcgagagatggtcaggtctggagctcgaccgggccagggcctgtgccagcagtgagacagagagtgaagcgggagacatca

SEQ ID NO: 408113 - DNA, 83 bp, Homo sapiens
acgtcgtgatccagaagtccagagctgaggactgcctgtttgcagatgtggtggtacagtgggagctattctgacatgtccac

SEQ ID NO: 408114 - DNA, 100 bp, Homo sapiens
cagcacatggtgggggccacaccatttgccgtggccaggctagaggtggtatggtcaggaaaaagactacaatgtactagtcatggatcttctgggacct

SEQ ID NO: 408115 - DNA, 100 bp, Homo sapiens
ggaatcagacctccaggagataatcaaagaaatctctataatgcagcaatgtgacaggaatacctgtaccgctatggttacactcgggtggcagagatgc

SEQ ID NO: 408116 - DNA, 75 bp, Homo sapiens
agacaaatgctaaattcttgtcagattacgcaatcttatgccttcattcatccggcatggtccaacaattccaag

SEQ ID NO: 408117 - DNA, 75 bp, Homo sapiens
accttccggagcttctcagaagacagagggttttcttttgagcttaataccaaaacatccccagcaaccaaccag

SEQ ID NO: 408118 - DNA, 82 bp, Homo sapiens
cccgctcacctgcgctgtgatgcctgcagagctgtggcttaccaggcgccatgtcagaaccggctggggatgtccgtcagaa

SEQ ID NO: 408119 - DNA, 82 bp, Homo sapiens
agcctgcggagcctgtggggcagcagggcatatacttctcttgtcttggttggatgcacaaatctgtgtgcagtgctttttg

SEQ ID NO: 408120 - DNA, 95 bp, Homo sapiens
tttggcactgctcctgctggccgcctggacggctcgggcgctggaggaatgtatcctgtcaggtataatgtcagtgaatggcaagaaagttcttc

SEQ ID NO: 408121 - DNA, 75 bp, Homo sapiens
agatccacagctaagacgccaggacccactggaagcctagaaatgaacattcctgatgtagatgaagaaggctac

SEQ ID NO: 408122 - DNA, 100 bp, Homo sapiens
ggacccaaaggcatcagaggccgaaggggaactcaaagttggcattcccgtcacggatgagaatgggaaccgcttgggggagtcggcgaacgctgcgaaa

SEQ ID NO: 408123 - DNA, 83 bp, Homo sapiens
gcaagggaaagagtcctgcatggtttcaagggacgtaccaggaggatggtgcccagaagggcgtataccgcatctctaggaga

SEQ ID NO: 408124 - DNA, 95 bp, Homo sapiens
gcggcgggagcttccgggagggcggctcgcaggtcactgcagccagaggggtccagaagagagaggaggcactgcctccactacagcaactgcac

SEQ ID NO: 408125 - DNA, 75 bp, Homo sapiens
ctgggttcatttaccctttggtcggaacgatcaatgtccgagttaccaccatggatgcagagctggagtttgcaa

SEQ ID NO: 408126 - DNA, 82 bp, Homo sapiens
ccccacagagcaagttttctgaaacgtttacagaatgtctgaaggggacagtgtgggagaatccgtccatgggaaaccttcg

SEQ ID NO: 408127 - DNA, 90 bp, Homo sapiens
gattaaagaggaaggggcagtgctcacatttctgggcaggtgaagaatttcatgacgtggaggatgcagagacctacaaaaagatgctgg

SEQ ID NO: 408128 - DNA, 98 bp, Homo sapiens
agaaagccagttatccacggactggaagatcaaaagagggctaaggcagctggataagcacagccaggccacagcccagcagctggtgcagctcctca

SEQ ID NO: 408129 - DNA, 100 bp, Homo sapiens
agctatccagacagagcagctaccctcagctctagctgatactacagacagtacaacagctataaggaagaccagatggatgagaaactaatggaacctc

SEQ ID NO: 408130 - DNA, 116 bp, Homo sapiens
cgcgtcatgcggctcctcggctggtggcaagtattgctgtgggtgctgggacttcccgtccgcggcgtggaggtcatcaggtactcacaggttgactgcagaggagaggaaccaag

SEQ ID NO: 408131 - DNA, 82 bp, Homo sapiens
tttgtgtatgacgccgagggacctcacatcaacttctaccagctgattgactggggcgactttggggtagaggcagtgtctg

SEQ ID NO: 408132 - DNA, 90 bp, Homo sapiens
ggcagcggagcacgcgggctgctcatcgtcagcagggagaggctgctcgggttcatgacgctctcgatattcctgtgcagaaacctggac

SEQ ID NO: 408133 - DNA, 78 bp, Homo sapiens
tccagtctggtagcaaaaaggggtgtctcagtctctgctttctatccgtcaagatgataaagtcgtgtgcccgagaac

SEQ ID NO: 408134 - DNA, 100 bp, Homo sapiens
tgctaaatgtggtaagagcgctcagtggaaggagcctgggagaggccaggcctccccggactgctagcctgcttttcctggggtccctggagccggagga

SEQ ID NO: 408135 - DNA, 50 bp, Homo sapiens
cttggttaccaagaagccatacatgatcatatactcctatgaaaggagga

SEQ ID NO: 408136 - DNA, 100 bp, Homo sapiens
cagggctctagagaccacgtgaagtctcctcggtttgctgtaatggcacaagagtatttgtgcagaaagaaattcttgataaatttacagaggaagtggt

SEQ ID NO: 408137 - DNA, 96 bp, Homo sapiens
aggtcactacagaattagcccaagcagattcctcccagatgtccagaaggcttcttgggggaatattgtcaacatcgagacccctgtgagaagaac

SEQ ID NO: 408138 - DNA, 50 bp, Homo sapiens
tttcactttggacacgtgagtcagagaatctcattttcagcttctgccag

SEQ ID NO: 408139 - DNA, 75 bp, Homo sapiens
tggaaactggacggaaccacctcaatgcaaagatactctggatgaatattttgaatatgatgcagaggagttctt

SEQ ID NO: 408140 - DNA, 100 bp, Homo sapiens
ttttgatcttcatgacccaccacaagatgttgtttgcattgacttggatacgaacatgttatatgtgaacatgtttgacaagctgaaccgtgatgccttt

SEQ ID NO: 408141 - DNA, 83 bp, Homo sapiens
gaccggctgtatgattaggccacaatcttcaatgagtaaacatattcctctggagcagatccgcagggacatccgagacttcc

SEQ ID NO: 408142 - DNA, 98 bp, Homo sapiens
cgcgagtccagcgtcgccgcagccccccaatgcggccgcgagaagcagcgggggggcaggcgatcgaaggggctttgttatgcacctaaagccatatt

SEQ ID NO: 408143 - DNA, 100 bp, Homo sapiens
agcctcattatctaccacccgagatgccccaagggtgataaaagaaaatgtggctgaagttacccgaagttcagcttgcagtgtaattcagaagagttaa

SEQ ID NO: 408144 - DNA, 91 bp, Homo sapiens
ctggtgagcaccgccgaggcgcgggccagctcttcgagacaatgcagatcttcgtgaagactctgactggtaagaccatcaccctcgaggt

SEQ ID NO: 408145 - DNA, 82 bp, Homo sapiens
gtggaagcggccaccgactactgtcagcagctgtgccagtgtctttggtgcaacactaacaaggcttgtctggactacccag

SEQ ID NO: 408146 - DNA, 96 bp, Homo sapiens
acaattcatacctcagtgaaaaaatttcactggaccgttccattccggattatcgtcccaccaaaataataataacctggatgcctgctgtgctgt

SEQ ID NO: 408147 - DNA, 96 bp, Homo sapiens
gaagaacacatcaaggagcgccaagagctagagcagactcagaatgagctcaccagggagctgaaactcaatctcttgcatggcaccaagaatgtt

SEQ ID NO: 408148 - DNA, 100 bp, Homo sapiens
tgcacttcgcattttggcattgacatttaattttagggtcctttatatagaagggagagtagtgcaaagaaaggaggtacaggcccgagctgtgttctac

SEQ ID NO: 408149 - DNA, 76 bp, Homo sapiens
gctgtgtatgagcttgatggaaaagaactctgtagtgaaaggagaagaaggaagttgtggaagaggcagaaaatgg

SEQ ID NO: 408150 - DNA, 82 bp, Homo sapiens
gccgctgtgtggttgcaacggagataaattcccggaaccgcgattcggcgtgtcaggaactgtggctgcaccatctgtcttc

SEQ ID NO: 408151 - DNA, 95 bp, Homo sapiens
ggagaatgacaccatttctaagcaacttacattagaacaggatgaccaaacaccactccacatttcagcccgactggggaaagcagacatagtac

SEQ ID NO: 408152 - DNA, 98 bp, Homo sapiens
caagaccctcaggctggtagtgcgcaggtggattctccacagttttcctcgtgcgtactcacggtggaatccgatgtgcattgaagcgaatgtatgtc

SEQ ID NO: 408153 - DNA, 100 bp, Homo sapiens
cgttggggagggggctgtgccgggcggagagaactcagcgaggattctgaggcataagatgcacatttttctgctctggagccgggaatgaaatattctt

SEQ ID NO: 408154 - DNA, 90 bp, Homo sapiens
ccggcttattgaacacatcagaatccacacagaggaagaatacaagcgattgagtgaagcactagcagaggatgggagctacaatgccgt

SEQ ID NO: 408155 - DNA, 51 bp, Homo sapiens
ctctgatcttcctgcatggctcagatgccatcccgcccactttctacagac

SEQ ID NO: 408156 - DNA, 74 bp, Homo sapiens
tgaaggaaaaggttccacctttgctaaggtatcgaaggatgatcgcagtgatgtggagagcagctcagaggaag

SEQ ID NO: 408157 - DNA, 100 bp, Homo sapiens
acgaaattgtcacctatgggaaaattccctacccagccctggtacctgacagtgtaaagaaggagctcctacaaagaataagaacattccttgctcagca

SEQ ID NO: 408158 - DNA, 98 bp, Homo sapiens
ggcattgtgtctggaatgctcaatgtcaaatgggaccggattgccccctgcctgggaggggtggctgtatccctgtcccacatcagaaactgatcctc

SEQ ID NO: 408159 - DNA, 80 bp, Homo sapiens
gggatggagattttcctcaccagaaactcctcttgcaaggtctgatggattctgtggagagtctcactgtgttgcccagg

SEQ ID NO: 408160 - DNA, 100 bp, Homo sapiens
atgatgccttcaatactacctttatttccaccataggtatcgagaaccttccctgcgaacttcagaggaacttccagctgatgcgagagctggaccagag

SEQ ID NO: 408161 - DNA, 75 bp, Homo sapiens
ggaagcggcggcggcggctccagcgtcctaagagtgctgggattacaagcgtgagctaccacacccagcgaggaa

SEQ ID NO: 408162 - DNA, 83 bp, Homo sapiens
gctgcctgccgggcggccgggcgcggcgagcccaggtcaaaatgcagatcttcgtgaaaacccttaccggcaagaccatcacc

SEQ ID NO: 408163 - DNA, 82 bp, Homo sapiens
atgatttaaacaagagatttccacagaagtgttgacccgaatgatcagaaaaagacagcttgttatgacattgatgttgaag

SEQ ID NO: 408164 - DNA, 73 bp, Homo sapiens
agacctggctgtggtcaaacccacccggcccaactcactgtggaggaactgcaatgtctggtggagaacagaa

SEQ ID NO: 408165 - DNA, 74 bp, Homo sapiens
gaagaatcacatgttcttcatcgcgataacgaagaaacctgaggtaccaaccaagaagctgaagaaatatgaga

SEQ ID NO: 408166 - DNA, 100 bp, Homo sapiens
gggactcttggcctgtccctcacatccgatgcaccctttttgtcagattatcaggatgaggctgccgggccgcaagtacagccctgggtacaacaccgag

SEQ ID NO: 408167 - DNA, 140 bp, Homo sapiens
ttctgcaccaccctcccaccctccttcctccgtgtggacgatagagccacatccagcaccacggacagctcccgggcggccagaacacaaagcgtgaatccggaagaaaagttcaatctggaaacatcaatgctgccaag

SEQ ID NO: 408168 - DNA, 100 bp, Homo sapiens
gagtcgaagcaccgcagcctggtgcagatcatctacgacgagaaccggacaaactgggaagattgagcctgtggtcctgccgctgctctggtttgcagag

SEQ ID NO: 408169 - DNA, 100 bp, Homo sapiens
gtgagccagagggagttgagccgcggcgtgtgcgccgagcgctactcgcaggaggtcttcgataagtaatggaacatcatctgtgatcgtctccagaaag

SEQ ID NO: 408170 - DNA, 51 bp, Homo sapiens
gtgcagaggcatcacctgaaagttaagtgggcagaccaacatccacctcag

SEQ ID NO: 408171 - DNA, 83 bp, Homo sapiens
ccgaggtccgtgtggccaacgagctcaacgccaggcgccgctcctttacagttgatattcactgatggactccaaagaatcat

SEQ ID NO: 408172 - DNA, 100 bp, Homo sapiens
gaaaaccatgattgtgaggaaaagccacaagacattgtacagaacattgtagaagaaatggtgaacattgttgttggagccctacctgaacccatccttc

SEQ ID NO: 408173 - DNA, 100 bp, Homo sapiens
ctccgagctcgcctgcatctactcggccctcattctgcacgacgatgaggtgacagtcacggttatcaatactctggctgaccatcatcatcgtgggact

SEQ ID NO: 408174 - DNA, 50 bp, Homo sapiens
agagaatccaagtgaagaggcacaaaggcgtcatggccttgacctatgac

SEQ ID NO: 408175 - DNA, 75 bp, Homo sapiens
cccggacctcgcttacctgcatgctggtctgtcgagttgcttatgaaattatgcaaacactacatcctgatgcct

SEQ ID NO: 408176 - DNA, 101 bp, Homo sapiens
cggcgccatcaccgagcgcttgatgtgcgcggagagcaatcgccgggacagctgcaaggcgaccgtggcaaaattggggcctctccctcgtgttcttgctg

SEQ ID NO: 408177 - DNA, 100 bp, Homo sapiens
tgggccatctccacaggagatgccagaggacgagtgcccacttgctggtcttcacagagcacgctgaaagccgccgctgcccagcagatcccgatctccc

SEQ ID NO: 408178 - DNA, 71 bp, Homo sapiens
gggggagcggaccctgacaagttccaggcggagttcgccatgttcagcgggacccacgtggagcgggactt

SEQ ID NO: 408179 - DNA, 134 bp, Homo sapiens
ttatggcatatgaattgctgaagttgaagtacaaccagcatatcaatagattaccagaagcccagttggggagatggaaccctgagcagcccatgtacatggaagatctttattgcagagatcttcaaaccagg

SEQ ID NO: 408180 - DNA, 100 bp, Homo sapiens
ctgatgccacccagaggatgttctaccggccctccagttaccagccccctctgcagaatgccaagccgagagacacacaagattgcagtattttatgttg

SEQ ID NO: 408181 - DNA, 112 bp, Homo sapiens
cgccgcgtgtcctcggagcgcggtccctgtattggtctcctgctcctagagggtttccaggcctgaggtgcccgccctggccccaggagaatgaaccagccgcagaggatgg

SEQ ID NO: 408182 - DNA, 74 bp, Homo sapiens
ggagagtgagagaaaggctggaagacgagaaactggcgatggaatatgagaggagccctctggaaagaaaagga

SEQ ID NO: 408183 - DNA, 100 bp, Homo sapiens
tgggatccacataatggagacattctgatggaatttgggttcaggcatggctcctccaagccagggaccccctggccctctgtcagccacatcattgcag

SEQ ID NO: 408184 - DNA, 119 bp, Homo sapiens
gcctctggaaaaggccagcgttgtctccaaactttttttcaggtgtgttccagagaacaagccttcagacatttgctatattgacgctgagctgtcaggggactcaggcttatgaggag

SEQ ID NO: 408185 - DNA, 100 bp, Homo sapiens
cgggcccggagcgcagcgcggccgcacagtatgacgaggaagcgatggtggaggctgtggccctctacaaccctgtgagctttgcctttgaggtgactca

SEQ ID NO: 408186 - DNA, 100 bp, Homo sapiens
cgggaacgtccactcccgcgcgcccctctcggggaccagggcggcctcccaggaggagcttgcttgatcctctcccagaaaaggttttacagcaaagacc

SEQ ID NO: 408187 - DNA, 101 bp, Homo sapiens
ctatggctgtcagaggtgggcggctttgaccgagaggctgctggagctcgtgtttggacgcgcagcacacttctgcttttgttccttcatcaggacgaatt

SEQ ID NO: 408188 - DNA, 100 bp, Homo sapiens
atgtggggcagatgctgatgggcaaactagatccaggtccagagagcatcgcagacatcgatctcgctccatgtcacgtgaacgcaagaggagaactcga

SEQ ID NO: 408189 - DNA, 96 bp, Homo sapiens
gttgcactggatccacccagtgaccggacttctcacccccaggatgtcatcgagggagctggtcgctgtcggctaagcaagattggagctactcgt

SEQ ID NO: 408190 - DNA, 93 bp, Homo sapiens
tgcagcgggagctggacggcgagcgcgagcggcgcgagaaaataaaccctcgtctggatggctgcatgaggagctggaactggctgaacggag

SEQ ID NO: 408191 - DNA, 90 bp, Homo sapiens
tggacattggagagagtggtattatggtgtaaacaacgattctttggagactccactccacttggctgtgatcaccaaccagccagaaat

SEQ ID NO: 408192 - DNA, 75 bp, Homo sapiens
ggcggtcgcggggcccgcgcccggagctggcgccagcaagccctggatgaaaacatggacctcttggaaggtata

SEQ ID NO: 408193 - DNA, 99 bp, Homo sapiens
ataaaaatttccagaaggtgcctgaccagaaaggaactcccaagcgactgcaggcagaagctgagacggctaagaattggagcgttattcagtatatta

SEQ ID NO: 408194 - DNA, 100 bp, Homo sapiens
atgaaaggaatgggtctgggaccttaacagggagccatgatgatgaaactgaggcacaaactgcttaatgaacttgtccatggtaaagaagaaaggaccc

SEQ ID NO: 408195 - DNA, 111 bp, Homo sapiens
ccgcgccgcccgtcgggcatggactcgggccgggacttcctgaccctgcacgggggggccctcagcctcttggccttgaacgggctgttcatcttgattcacaaacacaac

SEQ ID NO: 408196 - DNA, 75 bp, Homo sapiens
ccggtttctcccacatcgacctgcatcactgcaggaaatgcgggcaggctgtctgcgggaagtgcagcagcaagc

SEQ ID NO: 408197 - DNA, 100 bp, Homo sapiens
atccaggcctacgaggaggtgcgcgagaagtacaaaggccagcactccttgcccgaggacagagatggcgagcgcccggattggggatgagtatgcggag

SEQ ID NO: 408198 - DNA, 126 bp, Homo sapiens
cctgtgtttctccattctgttggttttatgcatctttatccaatcaagtgcccttggacaaagcctgaaaccagatacctcaagaagaacatgctgctaatggtccagaacttctgaggaaaaaac

SEQ ID NO: 408199 - DNA, 117 bp, Homo sapiens
cgcggcgaaggtgaagagttgtcccagctcggcccgcgggggagccccgggagccgcacgacaatgcagatcttcgtgaagactctgactggtaagaccatcaccctcgaggttgag

SEQ ID NO: 408200 - DNA, 51 bp, Homo sapiens
ttccgtttccagggttccgaccaggcttgaagtagaaaatgccatgatgag

SEQ ID NO: 408201 - DNA, 73 bp, Homo sapiens
gcggaatcggggagcgtccggagctagctggatcctctaggcagctacttcagaatcttggttcagcaatttg

SEQ ID NO: 408202 - DNA, 100 bp, Homo sapiens
gaatatgcattgaagcaaattgaaggcacaggaatatccatgtcggcttgtagagagattgcaaaatgcactcggtgatggaaagagagccactattctg

SEQ ID NO: 408203 - DNA, 100 bp, Homo sapiens
acccacgtctgtctggtgataccaggggcagagggaccactctgacagatgccgacaaaaggatcaaggtggcgaagcccgtggtggagatggatggtga

SEQ ID NO: 408204 - DNA, 100 bp, Homo sapiens
acatgaatgtggtggaataagtgctagtatcggacatgatcctcatcttttatacactcttagtgctgtccaggaaaaccagtagattcccagacatcgc

SEQ ID NO: 408205 - DNA, 97 bp, Homo sapiens
cgtgtgccccatctacacctgcctcagggagcttggggccctggtccacagtcctgtcaactgtcccctgctgggtttctcagcagtcagcacctcc

SEQ ID NO: 408206 - DNA, 98 bp, Homo sapiens
ctcacgttgaccaactctttgatgatgcatccagcttcacgcaggccatgctgagccagcccaggatggagagcctggacacccccgcggcctacagc

SEQ ID NO: 408207 - DNA, 73 bp, Homo sapiens
cggaccagcaaggacctcatcagaatagacccgtttgatggagctgcaccgccagtgggaattacttttggag

SEQ ID NO: 408208 - DNA, 96 bp, Homo sapiens
ctgctccgcagcgacatcaccaagctggaggtggacgccatcgtcaacgccggatgccttccgtgccttccatcaagatctcaattttgtgcgcaa

SEQ ID NO: 408209 - DNA, 76 bp, Homo sapiens
ccggggccagcacctcaggcttaggggactgcacagagacaggatctcactgtgttgtgcaggctggtctcaaact

SEQ ID NO: 408210 - DNA, 75 bp, Homo sapiens
tatggttccatccctaaacttatacaggatctctgggaaagtttagaaaatgctagtggtaaacctatagcagct

SEQ ID NO: 408211 - DNA, 100 bp, Homo sapiens
ctcacaccgggtcatctgattgaagccccttggcatcacgcacctccctctgggctatggcatctctgagccagctgagtggccacctgaactacacctg

SEQ ID NO: 408212 - DNA, 105 bp, Homo sapiens
cccggcggggagcgccggagttccttgtggccgacgtgcaccaagttaattggccttggtcctcacagctccaaaaagaaacaggatctcgataagctctatgag

SEQ ID NO: 408213 - DNA, 82 bp, Homo sapiens
gaattatatgcttttggcaaaacgtcttcaggaggagaaggagaaaggctcacttatgtctgtaaagatgggaaaaaaatac

SEQ ID NO: 408214 - DNA, 74 bp, Homo sapiens
taattcccagccttgttcctttatagcctgaactctttgcttccggaatccgggattgttgctgacatagaatt

SEQ ID NO: 408215 - DNA, 103 bp, Homo sapiens
cctgaatacagcccaccgccccattgaccactgggatgcagtcaacctgggcctgacatggaagcttttcaacaggaactggctctgcttaagatagaggatg

SEQ ID NO: 408216 - DNA, 100 bp, Homo sapiens
ttcagcaaagcaccacggcaaaacttcgagaagctcaggaaaccactgattgcttgtgtggagaaacagctattaggagaacatttaacagcaattctgc

SEQ ID NO: 408217 - DNA, 100 bp, Homo sapiens
gtcaggacgcggccctggcggtgctagaagaccggttccagccgaacatgacgacagaagccctgcagcagctgcagaaggactctgaggccatccgcag

SEQ ID NO: 408218 - DNA, 51 bp, Homo sapiens
atcggcattgccgtggtcatgaatgtttccattggaattgttggtaaagac

SEQ ID NO: 408219 - DNA, 100 bp, Homo sapiens
catcttcaaagcctttgctatgatcattgacaaactggaagaggatgaaatgtataatcctgagtttttctatgaaaatgtgaagataccttcgattact

SEQ ID NO: 408220 - DNA, 82 bp, Homo sapiens
gcacccctgccagtcctgctctgccgcctgccaccgctgcccgagcccgcaaaatgatgcttcaacacccaggccaggtctc

SEQ ID NO: 408221 - DNA, 75 bp, Homo sapiens
cggcaagttctgtagagaaactcgggcaacctttgcgttgacagaaggctacgttggggccctgcacgagaatag

SEQ ID NO: 408222 - DNA, 97 bp, Homo sapiens
aagcaaagcaaatggagaatggcatgctggtgacggacagtgcagggaagcaactgcagaggtgaaagacccctgacaaaagacaatcatcttctgg

SEQ ID NO: 408223 - DNA, 82 bp, Homo sapiens
gcggcaggacttggctggacggcgcggccacggagaagggcgcgcgtgagtgcatctccatccacgttggccaggctggtgt

SEQ ID NO: 408224 - DNA, 75 bp, Homo sapiens
gatccagcctgcggagcctgtggggcaggcactgaacttaccttcaactacaacctagaatgtcttgggaatgga

SEQ ID NO: 408225 - DNA, 87 bp, Homo sapiens
acccaatggtctctacgtcctggcaggagttgcagaaagcatccacctgtgggaggccgccatggcatcagatgaaggcaaactttt

SEQ ID NO: 408226 - DNA, 100 bp, Homo sapiens
ctggaacaaggagaagaaccatggagactggaggaagaattcccaagccagagctttccagataaactcaagccatggagggattactgcattacatcaa

SEQ ID NO: 408227 - DNA, 83 bp, Homo sapiens
tggcaacgaaaatgagcctcgcgaggccgacaagagccacccggagcaggattgtcagtggcttcgccccgaggagagctgac

SEQ ID NO: 408228 - DNA, 90 bp, Homo sapiens
acccattcctttaaatccggagggggaaaaaatcccaaggtctgcaaaggaaggaaaagctgatgcgatgctctcagtgccgcgtcgcca

SEQ ID NO: 408229 - DNA, 75 bp, Homo sapiens
gatagtgaaaaaggagtggactttgttctgaattactccaaagcattattgcttgggttagaatatgccctactg

SEQ ID NO: 408230 - DNA, 90 bp, Homo sapiens
cgctggcagctgagcggcggaacccttcgctggcgggagcgcggttcggggccgcagaggcctcttctgaagagctgaaagctgcctacc

SEQ ID NO: 408231 - DNA, 100 bp, Homo sapiens
cggcacctgacggcgtgaccgacccgagccgtttctggcccccaaagacaaaccaagtggagacacagcagctgtatttgaagaaggtggtgatgtggac

SEQ ID NO: 408232 - DNA, 100 bp, Homo sapiens
cgactactgtgacctgaacaaagacaaggtcatttcactgcctgagctgaagggctgcctgggtgttagcaaagaaggtctctaattaacagaagatggc

SEQ ID NO: 408233 - DNA, 83 bp, Homo sapiens
cgccaggatctccttcgccaaggagccccacgtagagcagatgcaggccctgacttcctgtgagtgcaccatctgtcctgact

SEQ ID NO: 408234 - DNA, 82 bp, Homo sapiens
gaccttcctggacatatcctggaccaggcttttctggcagcttgaaaactccaggagggagcagcgtgggcatgctggactt

SEQ ID NO: 408235 - DNA, 50 bp, Homo sapiens
gaaagattctgccagaagaagagtgtaagaagaagcttgggaagctgcca

SEQ ID NO: 408236 - DNA, 75 bp, Homo sapiens
aaacgcagtgcttatgcaggagctcatggccatgaagcgaagaaagctaccgtgaatttactgggtgaagaaaag

SEQ ID NO: 408237 - DNA, 100 bp, Homo sapiens
gttgcccagtatgatggggcatacaagaaagaagatgctgatatgctacaacacggatgaacctggaggacgtggtgcagtgaaataagctggtcacaga

SEQ ID NO: 408238 - DNA, 90 bp, Homo sapiens
ctttgactcagatgaggatgactccaccagcagcccgtgctttgaagaagaggagcacttcaaggtgctggtgaagatgaccgcccagga

SEQ ID NO: 408239 - DNA, 108 bp, Homo sapiens
atgatatccttctcaaccttgtgggatgtgaaaactctgttactgaaggcgcatattaaatttcctattgactacccctattcaccacctaccttcagattcttgacc

SEQ ID NO: 408240 - DNA, 83 bp, Homo sapiens
ccatcctgccgtccttctccactttcgccagcccgtgccgcgagcgcggcctgcaggagccgccaccggcacggccaggccag

SEQ ID NO: 408241 - DNA, 87 bp, Homo sapiens
gggatgtctttggcccagagctggacaccctcctggactcgctgctactacccacagatggcatgatccgaaaacactctcatgtca

SEQ ID NO: 408242 - DNA, 98 bp, Homo sapiens
cgcatgagcacctcatacggctgcttctggagaaggtctcgctctcgaagcagacattcccgtaagagcagaagccgaagtggcagcagcaaaagcag

SEQ ID NO: 408243 - DNA, 96 bp, Homo sapiens
ctgttggcccctgccacggcccagcccctgctgctctggaagcactggctccgggagccggctttctaccagtctcaggcctcaaggccggaacag

SEQ ID NO: 408244 - DNA, 50 bp, Homo sapiens
gctcctctcctccaaacaagctgtcagaaggacagaataacgggctccca

SEQ ID NO: 408245 - DNA, 98 bp, Homo sapiens
acagagttatcaggttccagaccctgccttctcttctgaaagatatgaaaaacagtagctccgtatcgaatacattgacaaatggatgtgtcatcaat

SEQ ID NO: 408246 - DNA, 50 bp, Homo sapiens
tctaacctaccagctgccactttccaggtatatcccgtgccttacctgac

SEQ ID NO: 408247 - DNA, 98 bp, Homo sapiens
aaaaactgtgggtggtgaacagagagaacagaccaaacggaccctgtgagcatggggctgccagtgaaaggaggatgcctgggaatgaaatcaataga

SEQ ID NO: 408248 - DNA, 50 bp, Homo sapiens
ggatattcctcatgacattgctgtctggagggagcactggcagttgctgg

SEQ ID NO: 408249 - DNA, 82 bp, Homo sapiens
tcttctaattttcattccttcaaagattcaggcttcttcaggagaaagcaagtacactggtaccttggactgtgcaaagaag

SEQ ID NO: 408250 - DNA, 73 bp, Homo sapiens
cggcaagcgcgacgccaggctgagaccgtccagattggcaagttatgtgcccattctcaacaacgccaatata

SEQ ID NO: 408251 - DNA, 100 bp, Homo sapiens
agtcaggaatcgatctcgtgaagcccgcaaggaccgaacacccccaccccgatttagacctgcggcttttatcttgagaacatggtgtctggagttaaag

SEQ ID NO: 408252 - DNA, 96 bp, Homo sapiens
gaggcagaagcatgctaagaacaacagtcaggccaagccttctgcctgtgatgatccaattctggtacagcagttgcgccggacatacaaatattt

SEQ ID NO: 408253 - DNA, 100 bp, Homo sapiens
agtcatggatgggcacactgtgggggtgtcctggtgcacccccagtgggtgctcacagctgcccattgcctaaagaagatatgtttgccttcatgggcag

SEQ ID NO: 408254 - DNA, 98 bp, Homo sapiens
tcaacgagacttcatttcattgctccctaaagagtattttaataagcggaaaacctactttgctcacgatgcccttcagcagtgcacagttggggata

SEQ ID NO: 408255 - DNA, 100 bp, Homo sapiens
ctcaggatcagaccgtagcccttccggaaacctccatgctgataggaagatgtcttcaggaaatgctaaaattgggcaccctgcccccaacttcaaagcc

SEQ ID NO: 408256 - DNA, 83 bp, Homo sapiens
tgaataaagaagtggagcgtgtcctgaaggagttccaccaggccgggaagcccatcgggggaccagattgtgggtgccaccat

SEQ ID NO: 408257 - DNA, 50 bp, Homo sapiens
caacagcaggaatagctcccgccctgggcgctgcctatggcacagccaag

SEQ ID NO: 408258 - DNA, 99 bp, Homo sapiens
ttaaacgaacatctacaactgaaaaaggaagcagcaaatgcataccaaagggagacctgtgtacatttcacttcctcattttctgtatgcaagtcctga

SEQ ID NO: 408259 - DNA, 103 bp, Homo sapiens
gagactccttgggggtcgagcacataacggggttcgggtgtctcgtgtgtgaacatcacagacaatgcagatcttcgtgaagactctgactggtaagaccatc

SEQ ID NO: 408260 - DNA, 75 bp, Homo sapiens
cgacctgctgctggagacctggatctcgcgccacaaggagatgggcgaagctgtgctcaggcccgggctggacgc

SEQ ID NO: 408261 - DNA, 100 bp, Homo sapiens
gtgttagaaacagtagtggagaatcaagcttgtcaaaattcccaaaaatgatcccctcaatgaagttcataactttaacttttatttgtcaaatgtgggc

SEQ ID NO: 408262 - DNA, 100 bp, Homo sapiens
ggcacccgggcgccgggcctcccagccgacatgtctctagtggcggaagccttcgtctcccagattgcaggttctgttcaagttgtaacatggaatgagc

SEQ ID NO: 408263 - DNA, 82 bp, Homo sapiens
actgaccacagtgctcaccacccaccaccactggccccccggacagaccacccagccctgtacagggacctgctgaggacca

SEQ ID NO: 408264 - DNA, 104 bp, Homo sapiens
gacgttctcttctacccactgagaccagagttagtggaatccacatatctcctctaccagcctgctgagggatgcccaagaagttccagggtgagaacaccaag

SEQ ID NO: 408265 - DNA, 82 bp, Homo sapiens
ggaggtgttcgagaacgaccccgagacggaggccgccgagcggctgaattccgtggagccggtcaggttcaccatctccagc

SEQ ID NO: 408266 - DNA, 80 bp, Homo sapiens
ggactaaggacaagcaggagctgggagccccagcttttcctccgcaaccatgtctgacaaacccgatatggctgagatcg

SEQ ID NO: 408267 - DNA, 100 bp, Homo sapiens
ggggccctctccatttctcctctcagcagaagtccaggttcccatgcaggtggctccgctgccggatgggagtgccccagtgtgctggatgaagctggcg

SEQ ID NO: 408268 - DNA, 100 bp, Homo sapiens
tgctgatcaagtggaagagattttaagtgtggcatacaagaaagctcctgaagctgaaggagaagtgccagagctttatcatcaaagaaagggggaaata

SEQ ID NO: 408269 - DNA, 96 bp, Homo sapiens
gaaggcaaggagccaggccacggggccacagccgcgggggccaccacactggcccaaatatttcctgcagatgatagtatttctgctgcaagtact

SEQ ID NO: 408270 - DNA, 98 bp, Homo sapiens
gtcctaatatgttgatggcattccagaatatctcagatgagcaggtatggctatcctgatccttcttacctgaaacgtgtcaaagaggagctgaaagc

SEQ ID NO: 408271 - DNA, 60 bp, Homo sapiens
gcctttgttgattaactggacaaattcagttgaaaacaatcctcgaacaggaaatcttgg

SEQ ID NO: 408272 - DNA, 75 bp, Homo sapiens
gaatgagatagccgtcctgagaaaggctaccagggcatggtggacggaggctcaaacatcgcagaggccgactgg

SEQ ID NO: 408273 - DNA, 97 bp, Homo sapiens
tggccctcgatgtgctctgcgtgttgctggaaagtctggagtaagtgaccactgggctttggatgatcatcatgcccttcacttaactaggaaggtt

SEQ ID NO: 408274 - DNA, 82 bp, Homo sapiens
ggcggcagcggcgctcgcagcgcccgggcaacaggtttgtctatgctggctctaactcgggcgtggtccaggccccgctggc

SEQ ID NO: 408275 - DNA, 100 bp, Homo sapiens
cctgctctggcactgctctcagactatgttctccacaacagcaacaccatgagacttggttccatctttggggaatctaagggaggaaattatcaactgt

SEQ ID NO: 408276 - DNA, 83 bp, Homo sapiens
agcgtttcttgcaagaatgggagagcctgagcccttgtgaagccggcaatgacaagtctgtatggtcgccatgccgagaaaac

SEQ ID NO: 408277 - DNA, 83 bp, Homo sapiens
ctggagctctacgcctcctacgtttacctgtccatggtcccgcagcccccggaagccaatagactccctcagggactctcggt

SEQ ID NO: 408278 - DNA, 75 bp, Homo sapiens
aagattgtcctcaacttcaaccctcactttgaaatcgagaagcacgactgcaaaatgacagggagagagtttttc

SEQ ID NO: 408279 - DNA, 100 bp, Homo sapiens
gacggcggcggctccaagatggcgcaggcgatctttgaggccctggaggcggccctccaggcactgaagcgtaagaagaggtatgagaagcagctggcgc

SEQ ID NO: 408280 - DNA, 83 bp, Homo sapiens
aacggctccccgtcgtcctggtgctgcagcggatgatcggctgaatgtaacagaggaactaacgtccaacgacaagacgagga

SEQ ID NO: 408281 - DNA, 50 bp, Homo sapiens
cttgcggcttgagctagagaaactcatgtttgcagaagccaaacctgacc

SEQ ID NO: 408282 - DNA, 83 bp, Homo sapiens
cgctgttctcgctccggagccgctgcacatttcgcaattctgtggtgttcttggtcacacatttatggagtttctgaagggca

SEQ ID NO: 408283 - DNA, 100 bp, Homo sapiens
gagaaactgcaccttatcacccggaacctgcagccttgttagatgacttggataaagaactaaacaactacattatgcgatgtagagaatggtatggctg

SEQ ID NO: 408284 - DNA, 100 bp, Homo sapiens
ggcgtctccgccggctactgccgcttcagttctcccggtgtggccacgagtcggatggcccactgcgtgaccttggttcagctgtccatttcctgtgacc

SEQ ID NO: 408285 - DNA, 82 bp, Homo sapiens
cgagcagcgccagcggccgagcgggcggcttcctggcctgggcgctccggtggcggcggagtgtactaatggtcacttgatg

SEQ ID NO: 408286 - DNA, 83 bp, Homo sapiens
ccagcacctacgtcccgctgccgtcgccgccgccaccatgcccaagagaaaggggcgcagcccagtggtttggagtcagcggc

SEQ ID NO: 408287 - DNA, 75 bp, Homo sapiens
gcccgcgtcggcgctggggacaaaggtggaggatctgattgtgaaatatcggaaaaagaagaagacggtggccgg

SEQ ID NO: 408288 - DNA, 100 bp, Homo sapiens
cagcggcggcggaagcggagggggaccaccgtggagagcgcggtcccagcccggccactgcggatccctgaaaccaagagccaagccgccatggcctacc

SEQ ID NO: 408289 - DNA, 95 bp, Homo sapiens
aaagccctcagtaccagagacagaagcagatggattcgtccttttagttgttaacaggcctttatagagacactcagacgtccattactgacagc

SEQ ID NO: 408290 - DNA, 100 bp, Homo sapiens
aagagctgtggcaagaagatccatatgagtatataaggatgaaatttgggcaagatcacctgttgcctgaagcagaagaaatcactatgatcagtattca

SEQ ID NO: 408291 - DNA, 100 bp, Homo sapiens
agccctagttccaccctggaaagcaaggacagtggaattataggtgctggagaatctggtaaaagcaccattgtgaagcagatgaggatcctgcatgtta

SEQ ID NO: 408292 - DNA, 83 bp, Homo sapiens
aacctctattgtggacaaaataagaaatgatttttgtaataaacagagtgacagaactggtcatgctgctggagtggtggtcc

SEQ ID NO: 408293 - DNA, 75 bp, Homo sapiens
ccagctcagacctcccggctcgacaggcggcgcgggcggcgaaaggacctaagtgtgaaataccccgaagacgtc

SEQ ID NO: 408294 - DNA, 75 bp, Homo sapiens
cttcaacaagaggacccaggagaaattcgccctcaaagctgaagctcagggccctgtctgctctgtggactcaac

SEQ ID NO: 408295 - DNA, 100 bp, Homo sapiens
ggcccgggcatgggctgcaagggagacgcgagcgaacgccaatctgaattgccaacgcaaagcaaagcgagcttccccagtattctcagtgacccagacc

SEQ ID NO: 408296 - DNA, 74 bp, Homo sapiens
gggaaccagcgctaccgggaagggaagtaccgagatgctattttcttcaatcacatctgaataaatcacttgaa

SEQ ID NO: 408297 - DNA, 75 bp, Homo sapiens
ggcggcagcgggtcctacgaggagggctgtcagagcctcatggagtacgttccctgtgtctctggtggtttgcct

SEQ ID NO: 408298 - DNA, 90 bp, Homo sapiens
gtctgcggaagtgcagctgcctcagttcttagcgcaggttagcactctacgtatatgaatatctgctccatgtaggagctcagaaatcag

SEQ ID NO: 408299 - DNA, 96 bp, Homo sapiens
acagtgtcaagcccacagctctccaaggaggaagatggtccaggctgggagcatccccttagcagcagcctctgatgctcgtggtccccagcatcc

SEQ ID NO: 408300 - DNA, 75 bp, Homo sapiens
ccatccacaggctccggaagcagctggtgtgggctctgtccagcagtgtaagctccagcaagctgttctccagca

SEQ ID NO: 408301 - DNA, 100 bp, Homo sapiens
cggaggcagcggctggaggagcgcgagcggcggtttccttgcccggggccgcgggaaggccgaccgactgccgcgttcattcggctcctaaagaagtagc

SEQ ID NO: 408302 - DNA, 51 bp, Homo sapiens
attccaagtaactcttatttgtgtgtgctgtatttatggagtttaaagatt

SEQ ID NO: 408303 - DNA, 100 bp, Homo sapiens
ctacctggccgtcagtggtatgaaattcaagcatacagggccttaaaccaggcccttggtagtgaccatctttccaccgtagaaaaggacacaaatggag

SEQ ID NO: 408304 - DNA, 50 bp, Homo sapiens
gataacaccctgtaacagctgagttaaagctgaagctcaacaaagatata

SEQ ID NO: 408305 - DNA, 100 bp, Homo sapiens
ttccaccaaaacctcaaaaacctgctgacaaagatcatcctagaacatgtgcgaaggcatgcaatccacagtagtgactcgacttcatcttcctcctctg

SEQ ID NO: 408306 - DNA, 82 bp, Homo sapiens
ggacagatgcaaatgaaagctcttcttcccctgaaatcaggcacagttggtggatctgaaatctgaactgacagaaacccaa

SEQ ID NO: 408307 - DNA, 100 bp, Homo sapiens
agacatcgtagtgggacgaatcacagagtctccaaaaaaagttggtgatgacattgccaaggcaacgggtgactggaagggcctgaggattacagtgaaa

SEQ ID NO: 408308 - DNA, 75 bp, Homo sapiens
agtgctccacctataacaagtcttagtctcctaggaaattttgagctgtgctccattgaagtgacttgtgaatca

SEQ ID NO: 408309 - DNA, 100 bp, Homo sapiens
tgcagcccgggcggctgccgagaaggagggaggggaaacacaaagccggctacgcgctgcgagggtgaagttgaacaaattgctatgatgaaaccaaaag

SEQ ID NO: 408310 - DNA, 75 bp, Homo sapiens
cctctggatggcttcgacgtgtggaaaaccatcagctggaatagtcaaatgatttcagttcgtgaagccaaagcc

SEQ ID NO: 408311 - DNA, 83 bp, Homo sapiens
ccattttttaaacttaggtatttaagtactgaaaggaaacgtaaatattttcaccacgatcgattagactgggatgaacacag

SEQ ID NO: 408312 - DNA, 99 bp, Homo sapiens
ctggctggtgccgcgttcctgctgctctgcctgctccacaagcggcgccgcgccctcggcctgcacggcatgattccacctttccactgatagactcaa

SEQ ID NO: 408313 - DNA, 100 bp, Homo sapiens
agtgtggtttgggcccaaagaggtgtccacagcttgtgccaccgccgtgctgggcaatcaggtggttgctgtatatggaactttatctgatttgctttct

SEQ ID NO: 408314 - DNA, 50 bp, Homo sapiens
gtttggtctcctgccgtgcccggtactccaaagattcaggtttactcacg

SEQ ID NO: 408315 - DNA, 100 bp, Homo sapiens
tggatcacggatgtaggaagtgagagctcagaaatatgctcagcaagtcttgcagaaggaatgtcgtcccaagtttgccaagacatcaatggcgctgtta

SEQ ID NO: 408316 - DNA, 90 bp, Homo sapiens
gacggtggagtctccgcactgtcggcggggtacgcatagccgggcactaggtttggtgcacctcgatttggaggaagtagggcagggccc

SEQ ID NO: 408317 - DNA, 89 bp, Homo sapiens
gggggcgcgggcggcggcgccggcaggaaggaaacccagcgtttgctggcagaaccagttcctggcatcaaagccgaaccagatgagag

SEQ ID NO: 408318 - DNA, 82 bp, Homo sapiens
gcagaaagcatttaaccagcatggctacttcatattttggaaagcagtttttaagacaaatatatttttgccatcatggatc

SEQ ID NO: 408319 - DNA, 51 bp, Homo sapiens
ctgcagaggacttagtccgagaagcaaactcattattacattgggtaagaa

SEQ ID NO: 408320 - DNA, 75 bp, Homo sapiens
cgctaggtggcatctcctctcacggatgcctcggacatctggaggacctgttgatgctagttcagagtatcagca

SEQ ID NO: 408321 - DNA, 75 bp, Homo sapiens
ttacagatggcttcagcctgcctgcattgaaggggtacttcggtccttggtggaagcatctagctcaggtgtgtc

SEQ ID NO: 408322 - DNA, 100 bp, Homo sapiens
acctagctttctgggctgccgggagctcgcggcgagcgccccagccaggcctgcgccggcatcctccgaggtcctggatgcctcatcccttagtttcaac

SEQ ID NO: 408323 - DNA, 74 bp, Homo sapiens
gaaagagctagagattacaaatgtccatgtggccagactccactgatgatagctgccgaacaaggcaatctgga

SEQ ID NO: 408324 - DNA, 74 bp, Homo sapiens
aagtacatgaactcagggccggttgtggccatgcttgaggcagccctaggtgaggccaagaagcaacttcagga

SEQ ID NO: 408325 - DNA, 100 bp, Homo sapiens
tttcataaatctgcctggcaatgagcatcacaaggccctgcatgagaacaggccccagaaatggagagacaatggagtctcattctgtcacccaggctgg

SEQ ID NO: 408326 - DNA, 96 bp, Homo sapiens
ccatcgacaccgaaaactccaccgtagcccttgccaaaggtagcagtagctgatgtgcagtttggccccatgagatttcatcaagatcaacttcag

SEQ ID NO: 408327 - DNA, 100 bp, Homo sapiens
gggagatcccaggcggtgacagagtggagccatggctagaggccagaagccaaggagtcctcagtgacggtgggatccacaacatctccacatcgctgtc

SEQ ID NO: 408328 - DNA, 97 bp, Homo sapiens
catcaggctgtggggaatcatcagccgagagagctccattcccgtggacgtggctcggcagcgggagctcaaatggctggacatgttcagtaactgg

SEQ ID NO: 408329 - DNA, 75 bp, Homo sapiens
ttggtttggctgctaaacttatggagttactagaggagatttcagaaaggttcatgtagtattgaaactctggaa

SEQ ID NO: 408330 - DNA, 90 bp, Homo sapiens
cacctcaatctcttggagaaagactactttggacttttgtttcaggaaagccctgagcagaaaggaagaaacccttttttcttggagcca

SEQ ID NO: 408331 - DNA, 74 bp, Homo sapiens
gaagccaagaagcacacaggaaaaggagcttagctgctgaacattaaccaggtggtatttgttggaaatttctt

SEQ ID NO: 408332 - DNA, 75 bp, Homo sapiens
ggaaaacaaggaaaatggctctgtcggtgtaaaaaaaccaagatcactccatggatgaaatgacagctgtggtga

SEQ ID NO: 408333 - DNA, 97 bp, Homo sapiens
gggccttaaagccccttcgtctccccagcacccactctctgggggcaggtgggcccggtgacaggtcaacgtggaggtaccaggccaccatgctcag

SEQ ID NO: 408334 - DNA, 90 bp, Homo sapiens
cagcctggcactgttttcacttgcctttggaaatgaaggtgcagaaaccatgggaggttgcttttaactttgacagaggaagaattttcc

SEQ ID NO: 408335 - DNA, 100 bp, Homo sapiens
cggcgccgtccagcccggagggacctgtttgcaggtcgaagtaagaaggaaaccaaatattctcttaaggctgtcgaagacatgttggaaacattgcaga

SEQ ID NO: 408336 - DNA, 75 bp, Homo sapiens
aagtccattgtgttgaagagattctgaaggtgtaccaacattcgaccaggagagactggaatggatgtaacaagc

SEQ ID NO: 408337 - DNA, 90 bp, Homo sapiens
gggcgcagcagtactttgagaaaatggacgctgacatcaatgtcacaaaagcggatgttgaaaagtcctcctccgcctcctcctctctgc

SEQ ID NO: 408338 - DNA, 76 bp, Homo sapiens
gtgtataatgactgtgcaaagaagattgttaaagaaattatggatccggatgagcaattggaaacccttcatgaag

SEQ ID NO: 408339 - DNA, 101 bp, Homo sapiens
ctgtgctgtgccgcgcagttaggcagcagcagccgcggagcagtagccgccgtgggagggagccatgaagcattacgagcaagtacagatgaagctcaggt

SEQ ID NO: 408340 - DNA, 100 bp, Homo sapiens
gaggggccccagcagcccccgaaggccctatcaggacatggagtatgaaagacggctggcgcccatgcggctctacacgctctccaagcgccactttgtc

SEQ ID NO: 408341 - DNA, 100 bp, Homo sapiens
tggatgggctgcctccaggtgacagcaatcagctggcctggtttgatactgacctgtaaatcatcctttagggagaaaactggttgtcctggatgtttga

SEQ ID NO: 408342 - DNA, 82 bp, Homo sapiens
acacggtgtgggctgaatgaagagctgccagatcccacagctgccttcctatttcaaggaaagacgccaaggtaattttgac

SEQ ID NO: 408343 - DNA, 99 bp, Homo sapiens
ctctgtttctctgctgcaccgacctcgacgtcttgcctgtgtcccacttgttcgcggcctatagttttccaagagataacttcaccaagatgtccagtg

SEQ ID NO: 408344 - DNA, 110 bp, Homo sapiens
aggttatattccttttgggacgccaattgtctgtttatgatggtgaagaacatggacgtttcatggagaagcttgaaactcgtatccgtaatcacgaccgagaaattgag

SEQ ID NO: 408345 - DNA, 74 bp, Homo sapiens
tggattccaagacatccctgctgagagagccaaggagtgctcagattgctgacctacagcagaagctgctggat

SEQ ID NO: 408346 - DNA, 88 bp, Homo sapiens
cacatctcccctggggactttcctgattgccagaaaatgcagcttggaagtctttttgcatgttactgttccactgaagtcactcagg

SEQ ID NO: 408347 - DNA, 100 bp, Homo sapiens
cgcggagccggtggtgccttcgctcgtggatcgatacttcactcgctggtacaaaccgggtacatcgagtgaaagcattcctcaaactgccacacaacca

SEQ ID NO: 408348 - DNA, 82 bp, Homo sapiens
cgtcatcatgctgaccaccaatcagatccgtaaggccctgggaggagcggggacactgaggacctctctccaaattggcctc

SEQ ID NO: 408349 - DNA, 84 bp, Homo sapiens
ctactcagcatggatatccaggtgctgagccaggagcagcagcctttctgattttttatcaagcagaaatgcatcgaacaacga

SEQ ID NO: 408350 - DNA, 90 bp, Homo sapiens
ctcctctggcaggatgaggcgtgcaggcctgggtcgtcacgctgtggtacagagcacccgaagtcttgctccagtccagctacgccaccc

SEQ ID NO: 408351 - DNA, 74 bp, Homo sapiens
acaggatatgactacagtagatgaaggcggatggcaggatgaaacctggccagatggttggactgcggtgacaa

SEQ ID NO: 408352 - DNA, 95 bp, Homo sapiens
gacgagaagcctgaaaagtcgcagcgagctggagccgccggagttaatggccagccaagaccccttgaatcaagtcaggtgaaatatctccgtcg

SEQ ID NO: 408353 - DNA, 100 bp, Homo sapiens
gcgttggctatgtgcccatcacaggaactgtggctgcaccatctgtcttcatcttcccgccatctgatgagcagttgaaatctggaactgcctctgttgt

SEQ ID NO: 408354 - DNA, 90 bp, Homo sapiens
gcgattgtggaagctgctcggcttcgacaaaatttggatgccctcctgaaccagctgaaaagcttccctgcccggttgcgacagtatgcg

SEQ ID NO: 408355 - DNA, 100 bp, Homo sapiens
cgccctggggccggggccgggcggcaccgcggtgcgcaagcgcaaccgtcggtgggtcggggatcggtcgcctgagaggataaacatcacgatgctgctc

SEQ ID NO: 408356 - DNA, 90 bp, Homo sapiens
gagcacatgaccagcttagcttctgtcctaaagaggtgaatacgctttggccgaatacacagaagtgaaaactgtcaccatcaaacttgg

SEQ ID NO: 408357 - DNA, 98 bp, Homo sapiens
cgtgggcctgtggactgcagcctcggcggtcagcaggtgtggccgacgacgatgccctcgctgaggagcgcatgcggagaggccagaacgccctgcca

SEQ ID NO: 408358 - DNA, 88 bp, Homo sapiens
gggagaagttctgaacaactatatctgggatacacagaaaattgacggactggacaaagcttctatagcaaactcagatggccccaca

SEQ ID NO: 408359 - DNA, 82 bp, Homo sapiens
agaagtcccgtgttgccatcctcaaggctaacctgcgcaagtccccagttgccaaggtcaaaatgcagatcttcgtgaaaac

SEQ ID NO: 408360 - DNA, 74 bp, Homo sapiens
ggttggtgtgattagcttcgcagtctggaaagctttaggagttcacagtgaaattgcccggcatttacgccctg

SEQ ID NO: 408361 - DNA, 75 bp, Homo sapiens
gacggggagctgaacgtggacagcctcatcacccggctgctggaggattttgacttcagcgttccaggatccatg

SEQ ID NO: 408362 - DNA, 100 bp, Homo sapiens
ctcttggggctctacctctttttcaaagtgtgtttccattgtagaaaacctggtcatggaattgcagattgccccgccgcccttgaaaatcaagacatgg

SEQ ID NO: 408363 - DNA, 100 bp, Homo sapiens
tggaaggtcttggagcgaagagctcggaccaagcgctcaggaaacactgcgctaacttatgcatgtgctggaggatttgttgacattgttaaagtgctcc

SEQ ID NO: 408364 - DNA, 99 bp, Homo sapiens
cggcgctgaaccggggcgagcagagagctgtcaggtctcggcgcggaagatggccggcggcgtggacggccccatcgggatcccgttccccgaccacag

SEQ ID NO: 408365 - DNA, 101 bp, Homo sapiens
atcaaaccagatattgttgacaaagaggaggagatacaagatattattcttagatccggattcaccattgttcaggtttttagaacttcagccataaaaat

SEQ ID NO: 408366 - DNA, 100 bp, Homo sapiens
cactcaccaaatcagagctgttggtagaacagtacctccctctcactgaggaagaactagggtgataaaagaaaatgtggctgaagttacccgaagttca

SEQ ID NO: 408367 - DNA, 100 bp, Homo sapiens
tttgaccatgagtcgaataatacagtggatgtgaggatttttttcccaggaagccatcccgtcagaggggttcaagtgatgaaagttggcaaactgcagc

SEQ ID NO: 408368 - DNA, 90 bp, Homo sapiens
atggacttctggctttggccactttacttcctgccagagaaatcatgccctaatccgggagaaatacgaaatggtcagattgatgtacca

SEQ ID NO: 408369 - DNA, 83 bp, Homo sapiens
tgtcagaactgcttcaagccccgcgagtcgcatctgctcaacgacgaggacctgacgcagccgaggtgctcggtggagtcatg

SEQ ID NO: 408370 - DNA, 82 bp, Homo sapiens
ttttagtgctttttatttttccccaattcagcagagaatattttcaagggggaccaagatcactccatggatgaaatgacag

SEQ ID NO: 408371 - DNA, 78 bp, Homo sapiens
cggcgcggcagagtccccgtacgcctacagtaacggccaagactaaggggctgcagagcggggtggacattggcgtca

SEQ ID NO: 408372 - DNA, 100 bp, Homo sapiens
gcggccgccggtcgctccgggacgcggaccgccagaatatgacagatacctagcatctagcaaaataatggcagctgcttaccttgaccccaacttgaat

SEQ ID NO: 408373 - DNA, 90 bp, Homo sapiens
gcgcggagagcaatcgccgggacagctgcaagatgatttcagatatcgaaaagaaaaggcagcgtatgattgaagtccaggatgaactgc

SEQ ID NO: 408374 - DNA, 100 bp, Homo sapiens
ttccgggagctctttgggatccggccagatgattacttggtccgctgccagccccaagccccccaccagccatgagctcctccagaaaggaccacctcgg

SEQ ID NO: 408375 - DNA, 100 bp, Homo sapiens
cgctgctgctgctgctgctcctggaaaccggtgacattgcattccggttccttaattatgttcagtcccagcatcagagaaaacagaagaggcagttaag

SEQ ID NO: 408376 - DNA, 100 bp, Homo sapiens
acccagaatattttaccggaacaacattttgtgttgcagttgactccctcaatggattggtttacataggtcaagtaaccaaggagcagtgaacagcagc

SEQ ID NO: 408377 - DNA, 74 bp, Homo sapiens
catggatttgtttctcattctcatatttcaccaataaaggtggagccgccaccaaaatgcagattttcgtgaaa

SEQ ID NO: 408378 - DNA, 97 bp, Homo sapiens
gtcggcgccccagagcggacgagaacaaaatccagtctcatagcagaggagaatataatgtttacagcaccttccagagccatgaaccagagtttga

SEQ ID NO: 408379 - DNA, 74 bp, Homo sapiens
acgtgtttggagaactgctggacatgcccaatgttagagagtgggctcgggatgagtttgaaggcctcttcaag

SEQ ID NO: 408380 - DNA, 100 bp, Homo sapiens
cgaagaggaagaccctcctgccaaaaggaaatgcatctttatgtcagaaacacaaagcagcccaaccaaagggtcatttggatccaggattcctagcaag

SEQ ID NO: 408381 - DNA, 75 bp, Homo sapiens
cgcgaatatcgtcatcgttagaagcgaagggagcaatctgaccccagcacatcactacccagactttagatttaa

SEQ ID NO: 408382 - DNA, 89 bp, Homo sapiens
ccgctccccgccgggacgccccgcgccgagccggaggccgcgtggacccgaaagccgctgggaaaagctgaaggggatgctaagggaga

SEQ ID NO: 408383 - DNA, 90 bp, Homo sapiens
tattccctttgatgaaatgaaggaaagaatactgaaaattgtcactggatttaatgggtttctttacctccagaaagaagaatattggcc

SEQ ID NO: 408384 - DNA, 100 bp, Homo sapiens
ccgagctccagccgaaggagaaggggggtgaggctccaggttgggctctatgctgtgtaccttctggactggctcagcgtttttgacaagcaacagtttc

SEQ ID NO: 408385 - DNA, 90 bp, Homo sapiens
aatcagtatgttgtgcaagaggtactgtccatcaaacatcttccaccacagcttagagaacctgcacttgttgccaagtcttccatctta

SEQ ID NO: 408386 - DNA, 114 bp, Homo sapiens
gggagctggacggcgagcgcgagcggcgcgagaaagtcgcgtggggcaggcagtggcgctgcgggccaaggccttcggcttcaacgtgctcttctacgacccttacttgtcgga

SEQ ID NO: 408387 - DNA, 75 bp, Homo sapiens
cagaaggaagatggcggatctggaggagcagttgtctgatgaagagaagggcatgaccattcggcccctggtaga

SEQ ID NO: 408388 - DNA, 83 bp, Homo sapiens
agttccttgtggagccggagctgggcgcggattcgccgaggcaccgaggcactcagaggagttgactatattgtggagtatga

SEQ ID NO: 408389 - DNA, 98 bp, Homo sapiens
gtgctacggggacgacgcgtgcttcgtggcccggcaccgttccgcggacgtgctcgacaatgtggagctcatactgaaaaccatcaataaccagcaca

SEQ ID NO: 408390 - DNA, 101 bp, Homo sapiens
gccgaagaagcatcgttaaagtctctcttcaccctgccgtcatgtctaagtcagaggctactgcagcactggggtgtcagttgttggtccgacccagaacg

SEQ ID NO: 408391 - DNA, 99 bp, Homo sapiens
agacgaccggttcgtcgcctccttgcccgtgaccgtcgctagaactcagttgtgcgttgcggccagtcgccactgctatcagtcgcatcgaatacattc

SEQ ID NO: 408392 - DNA, 100 bp, Homo sapiens
aggcacccgagccctgagagtccgccgccaacgcgcaggtgctagcggccccttcgccctgcagtgccttgctttccatgacatttcccctcaagcacca

SEQ ID NO: 408393 - DNA, 100 bp, Homo sapiens
ggaacttggaactctgggacaaatagaggctgaccccgcactacatctacccaccagccatcgtgcagcccagcgtggtgatcccagccgcccctgtccc

SEQ ID NO: 408394 - DNA, 101 bp, Homo sapiens
cagaagtatgaggccagccgggaggacatctacaagcgggaaatcagggatcctcttatgcagtggcttgggaaacatgtggactccgagggagaaataaa

SEQ ID NO: 408395 - DNA, 75 bp, Homo sapiens
gggggagcggcgttggaggccaccgtttccagattttaccaaatgttgcaagaactctggagttcttatggtagt

SEQ ID NO: 408396 - DNA, 100 bp, Homo sapiens
ctttgatcttctcttctggaagagatggaccaaaagcctctccagcaataatccaacaatccatttcacagatgaagaaacagactcagtgagcacgtga

SEQ ID NO: 408397 - DNA, 75 bp, Homo sapiens
aaccccttcaagtctttgtggtgcctcattcccataacgacccaggtgcttttcagtgggaagaattggaagaag

SEQ ID NO: 408398 - DNA, 80 bp, Homo sapiens
agagttcatatccggagccacacaggaggcaggtggaagtcatcataaagtttctgtttcacccgtcgtccatgttcgag

SEQ ID NO: 408399 - DNA, 100 bp, Homo sapiens
tggcccctctgttggaagtcatcaaacatttctgccaaacaaatagtgttcaggtgcgccgcctggagttcaaccaggccatggacgacttcaagaccat

SEQ ID NO: 408400 - DNA, 98 bp, Homo sapiens
gccaaaatgacgaacacaaagggaaagaggagaggcacccgatatatgttctctaggccttttagaaaacatgaatttggaaattaagactgatacag

SEQ ID NO: 408401 - DNA, 101 bp, Homo sapiens
gagacaagttcaccccgaagtctgccgaaaaagcttgagtctccacccccatctaccaatcccttcctggaagatgagccaacaccagagatggaggaact

SEQ ID NO: 408402 - DNA, 100 bp, Homo sapiens
tttttcccaaggcatccacagtttgcttttacctattttggtgactgttacagggttatgtggtccgaatcagtggtgggaacgacaaacaaggtttccc

SEQ ID NO: 408403 - DNA, 101 bp, Homo sapiens
gcatttcctcagtcacgggcctagaactccaaggagaaaggcggcggggccacctacagatgctcctgcagtggacacagcagaacaagtctatatctctt

SEQ ID NO: 408404 - DNA, 82 bp, Homo sapiens
cagaaccggagcatggaggcgcacaacatcctcagggtatcgggaacacgtttcagggaggtgccaactgcatcatgttcgt

SEQ ID NO: 408405 - DNA, 91 bp, Homo sapiens
acattctattaaagagaaaaagaagaaaaagaaacttaatttgttttttgggggatagttgagatgcgtttagcccagcccctgctggtaa

SEQ ID NO: 408406 - DNA, 82 bp, Homo sapiens
attttatgatttactggatgaactgataaaacccaccagtctagagtggtggacatgacaacagagtcaactgcatacagtg

SEQ ID NO: 408407 - DNA, 82 bp, Homo sapiens
cttggagcagctgaacgtcattaacggcatcctcttcattcctctcagggtccaaaaggtgaagcggttggatccattactc

SEQ ID NO: 408408 - DNA, 100 bp, Homo sapiens
atgaggccacggagagcaacgaggccatgggccgcgaggtgaacgcactcaagagcaagctcagttccgatgaagttaaattccgtcaagatttaatgaa

SEQ ID NO: 408409 - DNA, 100 bp, Homo sapiens
agggcccatctccttctctaagagatgcctgcagcctgccatgggacgtggggtccaccggtacagaacatacggtccctaatgagcacagagaagacca

SEQ ID NO: 408410 - DNA, 100 bp, Homo sapiens
ctggtatcaaagaatggattttttcagggatataaccgactgacctggatagtagttgttcttcagacatttgaagacagtgatttgttccatttgattg

SEQ ID NO: 408411 - DNA, 106 bp, Homo sapiens
ggctgatggcggaggcttcgagtgacccgggtgccgaggagcgggaagagttgctgggggggatatgagactttctactcggaatatcctgagtgttgcgtggatg

SEQ ID NO: 408412 - DNA, 85 bp, Homo sapiens
acaggcatcagcccacttgctctcatcaaaggcatgacatcagactgcgggttcgggctgaatactgccagcatgagactgctct

SEQ ID NO: 408413 - DNA, 100 bp, Homo sapiens
aagaggcctcgtccctccactcctgctgaggaagatgaagacggcgttacatagccatgtgccgcgagaagcagcccatggtgccagagtctctggctga

SEQ ID NO: 408414 - DNA, 96 bp, Homo sapiens
accaacacggccggactgcagaagctggcggacattatccaggatctttatgtcgctgaagctttatccactctggaatcctggaggagccgctac

SEQ ID NO: 408415 - DNA, 100 bp, Homo sapiens
gggctcctgggatttctgtccgcgctcctggccctcgtccttcgcgccagagcaggctgaccccgcactacatctacccaccagccatcgtgcagcccag

SEQ ID NO: 408416 - DNA, 100 bp, Homo sapiens
ctttccgagtgccaggcgccggccggctgcgaagacgcggtgggccgcccctccggctgtagaaaatctctgttcttacaagatttctgcaaacttgtac

SEQ ID NO: 408417 - DNA, 100 bp, Homo sapiens
aagtcggtgactgcccacttggccgcgaagtggcccgagaccccgctgctgctggaggcaagtccagttacaacacagggatcacaacaaacacaaccgc

SEQ ID NO: 408418 - DNA, 98 bp, Homo sapiens
tcatccagcagcagcatcagcagtttctggagaaacacaagcagcagttccagcagcagcaactgcagatgaacaagtttggaaattttagcattcag

SEQ ID NO: 408419 - DNA, 115 bp, Homo sapiens
aacaaaaggtcccggaccccccggatctgacggggcgggacctggcgccaccttgcagatcccctctgagcagctgggagctcagaagctctgtccaaccctgaggagtgggtca

SEQ ID NO: 408420 - DNA, 90 bp, Homo sapiens
tctttggcgaggccttgcttccttccactcgagggtgtcacacctgctgccctacttctacctcctctacttcaccgcgctgctggtgca

SEQ ID NO: 408421 - DNA, 90 bp, Homo sapiens
ggcaagacctgcctcctgttccgcttctcagaggacgccttcaacaccaccttcatctccaccatcgatttccttgatagctgccgtgcc

SEQ ID NO: 408422 - DNA, 100 bp, Homo sapiens
ccctggcggtggacgagcaggaagctgcggctgagtcgtttgaagaaaacaggtctgaaacaaggtcttacccccagctgcttctgaacacagtgactgc

SEQ ID NO: 408423 - DNA, 100 bp, Homo sapiens
gagaccgtgaccgagagcgtgaccgagagcgcgaatatcgtcatcgttagaagggcatggtgctgatgtgaaatgtgtagactggcatccaaccaaaggg

SEQ ID NO: 408424 - DNA, 85 bp, Homo sapiens
cggcgatcctgggctgcgggcaaggcggtcctcgaggccacacgggttaatcgaagaaagagcgcactggctttgcgctgggaag

SEQ ID NO: 408425 - DNA, 97 bp, Homo sapiens
tctgggggtcatcacagagaaggagacccaggtgtggtggacttgctttgtgaagagacagttcatgaacaagagtctttcaggacctggacagtga

SEQ ID NO: 408426 - DNA, 90 bp, Homo sapiens
gtttctggacgcggatttttggcctcatactctgttatagataaacaagcttcctgtgcttcccagaattccatcatctgactgccatcc

SEQ ID NO: 408427 - DNA, 74 bp, Homo sapiens
agaggacgccttcaacaccaccttcatctccaccatcgtttggtgccctggttgtcagatgttggaaagcagta

SEQ ID NO: 408428 - DNA, 101 bp, Homo sapiens
gagaaaaagggttttctatcagcaccccagtctttacttgaagacaaaaaggaaccattttctcagctccagcggcgccatgagcaaatgaaaaagaattt

SEQ ID NO: 408429 - DNA, 98 bp, Homo sapiens
ttggctccttgcggcctcctcttcccttcgctccggcccggtgaaactgaacttataatcgtcactggattctactggtcagaagttatatgtaaggc

SEQ ID NO: 408430 - DNA, 99 bp, Homo sapiens
tttgagcaggcatccagcaaccccttcctggtcggattacactcctgcttccagacgacaagtcggtctcctctgagcctccggcctccataagaccca

SEQ ID NO: 408431 - DNA, 90 bp, Homo sapiens
agcaacgtgcagaagaagctcacccgcgcgcaggagaaggaagtcctggctgagcaaggttggaagccctagttctcgcattgaccgcac

SEQ ID NO: 408432 - DNA, 83 bp, Homo sapiens
tctggtctgtgagatgtcctcactgtttcaggagtgcctacaccaactaatgttacaattgaatcctataacatgaaccctat

SEQ ID NO: 408433 - DNA, 75 bp, Homo sapiens
gctcctggtgcgtggcccagcctcagagtctcggcgcggaagatggccggcggcgtggacggccccatcgggatc

SEQ ID NO: 408434 - DNA, 82 bp, Homo sapiens
cttcaacacatgtagaaacactactaactttttcagctttgaaaagtgtaatggagagagggctaaagaagaagcaattaca

SEQ ID NO: 408435 - DNA, 74 bp, Homo sapiens
aggactgatgaggctgatgcagaggagaggggtcctgaggagaactatagcagctgagatctgtatctgtggac

SEQ ID NO: 408436 - DNA, 98 bp, Homo sapiens
gtgcatcctccgatctgcgactgcccgggctgccgaatatcctccccggtgggggggccctcagcctcttggccttgaacgggctgttcatcttgatt

SEQ ID NO: 408437 - DNA, 100 bp, Homo sapiens
cgcgacactaagaaacatctagtggtgccgggggatacaatcactacggacacaggattcatgcgcatgaagaggaaccacctcagaatatgaaaccaca

SEQ ID NO: 408438 - DNA, 97 bp, Homo sapiens
accctccctgctgagatgcgcaaattcactccccagtacaaaggatctgacatgaagaatcaaattgaacagttaggcaagaaatataatattaatc

SEQ ID NO: 408439 - DNA, 74 bp, Homo sapiens
cggacagtacctcttctgcaggtactggaaacccacaggcacacccaaggtgatacaattctggagactggaga

SEQ ID NO: 408440 - DNA, 75 bp, Homo sapiens
tgatgaagataacagtgaaatatcagattcagaggatgacagttgcaaaactgataaatttcaaacggaagagag

SEQ ID NO: 408441 - DNA, 75 bp, Homo sapiens
cgttaccttcttgctggcgttggtgggagccgtgctctacctctatccgggaagcagtgggacttgcagttccct

SEQ ID NO: 408442 - DNA, 98 bp, Homo sapiens
aaatgtaaacaagtatcagcaagtgagctcacaatgtctctctgcaccaagctccatgactcaggatttgcctggagttcctgggaaagaccagttgt

SEQ ID NO: 408443 - DNA, 98 bp, Homo sapiens
tcttcttctgcaacacggccactgtgtacaagatatgtgcctggatgcagctcacctccgatgccacctcagtatggacagcaaggtgtgagtggtta

SEQ ID NO: 408444 - DNA, 90 bp, Homo sapiens
tacgcctggttacccaagtgtcggtttccttaatgacaacaaaaaagggagtaatcctacccactgtaagagtcatgactcttgattgca

SEQ ID NO: 408445 - DNA, 75 bp, Homo sapiens
cgaacaggcagcccatcaaacctgagctccaaacgagaatggaagccgctggaggaccgtagctgcacagacata

SEQ ID NO: 408446 - DNA, 75 bp, Homo sapiens
tttcttccagcttctgctgtccttctttgtggagagcaagtacaagccagctgccatgttgtgagcacataccac

SEQ ID NO: 408447 - DNA, 74 bp, Homo sapiens
cggtggtaacgacggcctcagcaggcggggaagatgaaagggagacaaggacggcagcaaggtgacaacagtgg

SEQ ID NO: 408448 - DNA, 82 bp, Homo sapiens
gtcctgccgtccatgcggaagatcgtcgccacctggatgctggagcccgtggaccgggagcccgtggaccgggagccggtgg

SEQ ID NO: 408449 - DNA, 73 bp, Homo sapiens
aagaagctcattaagagcttggaggcggcccgcggggggtgaagccagccagttttgacaaagtagcaattcc

SEQ ID NO: 408450 - DNA, 74 bp, Homo sapiens
tgtcggccgcggggcggaggcactcgcgcgggggggcccatctggttagacaatctccactgtactggcaacga

SEQ ID NO: 408451 - DNA, 83 bp, Homo sapiens
gctgcctgccgggcggccgggcgcggcgagcccaggtattgacctgatggacatggcttcggacatcctgcagcccaaaggag

SEQ ID NO: 408452 - DNA, 75 bp, Homo sapiens
atccatgctgctttcatttttgtgatgactatgtacacacagctttatcatcggcacccatatatctcccatcag

SEQ ID NO: 408453 - DNA, 75 bp, Homo sapiens
atgaagactattactcgttgctgaacgtgcgcagggaggggttggtgtgtgctggattggctgatatggccagac

SEQ ID NO: 408454 - DNA, 83 bp, Homo sapiens
cagccgatccagcctgcggagcctgtggggcaggctttttcttctggggtggatctttccatggcttctccaaagctggtgac

SEQ ID NO: 408455 - DNA, 100 bp, Homo sapiens
ctcagacagatcgccggggaggcagcgcgggatcccagcctcaggcgtgcgcggacggtgtgcggctgtgaaagttgtgtagatttactgtttgtgagag

SEQ ID NO: 408456 - DNA, 51 bp, Homo sapiens
gcacggggaacgggtcggatggttttgagcaaaattttggactgtgaagca

SEQ ID NO: 408457 - DNA, 100 bp, Homo sapiens
cggcccccttaaagggacagggactgctgcaacctacggggtgtacttgggaacgaggggtgaagcggcccaggtgaggatggagtctcgctctgtcgcc

SEQ ID NO: 408458 - DNA, 75 bp, Homo sapiens
gggctggaggccccggcggctagactactccaaaggattcggcgggaagtatggggtgcagaaggatcggatgga

SEQ ID NO: 408459 - DNA, 95 bp, Homo sapiens
ctaaaaagtaatgggatgaataaaattggactcagagtttccattgacactgatatggtactagcaaaggccagacgtcttactcaacaacttcc

SEQ ID NO: 408460 - DNA, 100 bp, Homo sapiens
caggcttgtccggggagcagtatgccggaagctggttttcaggccacaaatgctttcacaggccccttcacagatgtagtcactacaaatcttaaattgc

SEQ ID NO: 408461 - DNA, 82 bp, Homo sapiens
cgataacgcgcttttgctcctcctgaagtgtctttggtccaacgttgttccagccggcccaggcctttgtggtgaagcgggg

SEQ ID NO: 408462 - DNA, 80 bp, Homo sapiens
cttttcccaaaagacaggctcttcacctgaagtttctgatgaagaattgaaaagaagagtagctgaggagctggcattgg

SEQ ID NO: 408463 - DNA, 75 bp, Homo sapiens
ctatgggctctcggccgaagtcaagaacaaggttttagatggagcaggattagatattgatttccatcttgcctc

SEQ ID NO: 408464 - DNA, 100 bp, Homo sapiens
cgcggggcgacgctggctgcagggacccggtgacagcgtgagaggccatcagcatcagcaaagccatcaacacccaggaggcccccgtgaaggagaagca

SEQ ID NO: 408465 - DNA, 75 bp, Homo sapiens
cccaggtgtctgagcacagcatcatcaaggacttcaccaagcagatcctcacagccaccgtggacaatgccaaca

SEQ ID NO: 408466 - DNA, 90 bp, Homo sapiens
tgcaggactctagtaacccgcgaaatgatgggatagcgttgcaaatccttaaaagagtcttaacgctcggtcaaggagtgtgatgactgg

SEQ ID NO: 408467 - DNA, 74 bp, Homo sapiens
cgttaaggaccgttacgtttcccgggtatgcccaagaggacagagaacgaatgcacagaaatattgtcagcctt

SEQ ID NO: 408468 - DNA, 74 bp, Homo sapiens
ttgaagaaatacagcttggtgaagagttactagctcaagaaattgcatctgatggtctcaagggtcgtgtgttt

SEQ ID NO: 408469 - DNA, 100 bp, Homo sapiens
tgactccattgacaacctagaggcggctcctcatgatatcggctacgtcaaacaggccatgttccactatttccagccttcatctcctcgtcctccaggc

SEQ ID NO: 408470 - DNA, 100 bp, Homo sapiens
agatgctaaatgtgacattgtcattgaaaaaccaacatatttcatgaaattagatgcagcgatcatagaagccattgagatcccgcagtttatcggccgc

SEQ ID NO: 408471 - DNA, 75 bp, Homo sapiens
tccatttctcctattgaggagtcaacccccgagcctggagatgagggggagccggggcggtcgggactggagctt

SEQ ID NO: 408472 - DNA, 75 bp, Homo sapiens
aatcagtgccgagcaattgtgatgagatattctgctgagtggaagtctccaaaaaaagttggtgatgacattgcc

SEQ ID NO: 408473 - DNA, 90 bp, Homo sapiens
cccagaccagctcggctacctggtactgagtgaaggtgcagtgctggcggtgttggggatgtcctttgcactgaccctgaactgccagat

SEQ ID NO: 408474 - DNA, 100 bp, Homo sapiens
caccaaagtgggaaacattgaaatcaagattgtagggaatggaagtgaacagcagctgcaaaaagagctagcagatgtactgatggatcctccaatggac

SEQ ID NO: 408475 - DNA, 78 bp, Homo sapiens
ctcaaaaccgtcctgctgcttgctgaccaaatgctggtaggtgagtgctgtcctcggctcactttcctcaagctctcc

SEQ ID NO: 408476 - DNA, 116 bp, Homo sapiens
ggctgcggaacagggcggcactggcccgccacagcgacgccggcgccgagggacaccgcagtatgaggcagaggaggcagacagtggggaggaagaatgccggtcacagcccagga

SEQ ID NO: 408477 - DNA, 75 bp, Homo sapiens
agaagtggagcaccaggagactgcctatgccaaaactggacaagccaaggcatctgtagccaaagtaaacaaatc

SEQ ID NO: 408478 - DNA, 74 bp, Homo sapiens
agatgactccagccccagccccaagggcagagggcacaagagactatagtccccggcagatggcagttcgcgag

SEQ ID NO: 408479 - DNA, 100 bp, Homo sapiens
ccgcgcgcctatcacggggactcggtggcctcgctgggcacccagccggacttgggctctgccctctaccaggatggtgattgctcacaccaaagccttg

SEQ ID NO: 408480 - DNA, 56 bp, Homo sapiens
tcccctggcaggggcttctgctcacagcctcacttctaaccttctggaacccgccc

SEQ ID NO: 408481 - DNA, 100 bp, Homo sapiens
gggaacttagggggctcccgcctccccggccacgcgagcgggaacagtctcctccactcggagcggtggaatccacacagagtatgataaggattctcgg

SEQ ID NO: 408482 - DNA, 97 bp, Homo sapiens
gcaacctctgggaacacaaccaagcaatcatcaagcacctcctcggtactccaaagattcaggtttactcacgtcatccagcagagaatggaaagtc

SEQ ID NO: 408483 - DNA, 51 bp, Homo sapiens
ctcatcatgaagatttagtagccattggaggaggccagataaccatgtcag

SEQ ID NO: 408484 - DNA, 100 bp, Homo sapiens
ggggagtcaatacctccggatactcagtttgtaaaaacatggcggatccagaattctgggagactcatgcatctgtatgccgtgtgcgtggactgcctgg

SEQ ID NO: 408485 - DNA, 75 bp, Homo sapiens
cacgccatgaaggcctcgggcacggtcgcgtggggcaggcagtggcgctgcgggccaaggccttcggcttcaacg

SEQ ID NO: 408486 - DNA, 80 bp, Homo sapiens
gctgaggagctcctggtcgatgaagaggatgatgtttttggtgaaggatggtgatgggaatctttgcaaattgtatcttc

SEQ ID NO: 408487 - DNA, 74 bp, Homo sapiens
ctgggtgatgacatgggacttggaaaaacagtacaggtcccacccgaaagatgccccccagcgccagtgccgtg

SEQ ID NO: 408488 - DNA, 96 bp, Homo sapiens
cggcgagcgccccagccaggcctgcgccggcatcctccgagatcaatgaactgagccatgttcaaatccctgttatgttgatgccagatgacttca

SEQ ID NO: 408489 - DNA, 75 bp, Homo sapiens
tgcagatcaatgacatttccctgcaggttatcaatagtctggctgtctatcgtcatcgtgagactgactttggtg

SEQ ID NO: 408490 - DNA, 98 bp, Homo sapiens
gggggcgccgcggcgggtggatgagagttggccccgatatccgctcaggtttgtgaagcctggagctgagaattcaagagactaccctgacttggcag

SEQ ID NO: 408491 - DNA, 75 bp, Homo sapiens
tggattccatgttcatgagtttggagataatacagcaggttgccgaggagcccaagtagaagaaatatggagttt

SEQ ID NO: 408492 - DNA, 100 bp, Homo sapiens
ccgagcgcggggcgccggaggcagtgtactaatggtcacttgatgtgcgctggctgttttatccacctactagcagatgcccggctgaaggaggagcagg

SEQ ID NO: 408493 - DNA, 96 bp, Homo sapiens
tgaaacatggcggtaggctgggaccataacacaagctctattaccaggttttaaacttcgccatgatcgtgtcttctgcactcatgatatggaaag

SEQ ID NO: 408494 - DNA, 50 bp, Homo sapiens
tctctcaattgatggtggaggaacaaggtttttgaatctgaaaattcaag

SEQ ID NO: 408495 - DNA, 101 bp, Homo sapiens
gggaacatcactcagaagtttgatgtatcgttcccagatttcctaaactttccagagaaaatggtcttctccctggctcagcaagaagatgaactttaaac

SEQ ID NO: 408496 - DNA, 80 bp, Homo sapiens
ggacgcggctgtgatatacgaaggatggcttaaattccttggtccttgatttagattttcctgctttgaggaaaaacaag

SEQ ID NO: 408497 - DNA, 100 bp, Homo sapiens
agcagaagccagggcagctgaaagacagagaccttcagatatgaaaaacagtagctccgtatcgaatacattgacaaatggatgtgtcatcaatggacat

SEQ ID NO: 408498 - DNA, 75 bp, Homo sapiens
atttggaacctcactgaaaattggtattgttggattgccaaatgttgggtcttccgaccccgaactccaccggag

SEQ ID NO: 408499 - DNA, 98 bp, Homo sapiens
ctcaagcaggccctgttggaattgaagaagataatgtcctgccattgactctaccagaggagattcttcaagcttagttgctgaacttcaagaaaagc

SEQ ID NO: 408500 - DNA, 74 bp, Homo sapiens
gtttcaactctccgccgagggcgagcaggagcgagagtgtgtcgagagccttcacgtaaatgggtccagtcatg

SEQ ID NO: 408501 - DNA, 75 bp, Homo sapiens
ccaactagacatcttgagcctcctgaaacagaggcggggtttcaccatgttgcccagactggtcttgaactcctg

SEQ ID NO: 408502 - DNA, 95 bp, Homo sapiens
ttacagaaatgtgtcttgttgcatttggtaatttagcagaacttggtataaatgaccaaggattgtacagagttgtgggggtgagttcaaaggtc

SEQ ID NO: 408503 - DNA, 83 bp, Homo sapiens
ccctgttccccgcgctgcggcctggcggcttccaggcgcactaccgcgccgcttacaaacacgcagatggcaagaagattgat

SEQ ID NO: 408504 - DNA, 96 bp, Homo sapiens
aaacccttgctgtaaattatgagaaagaagaagaattcctcactaatgagctctccagaaaattgatgcagattgcctttctgggcctgacctccc

SEQ ID NO: 408505 - DNA, 83 bp, Homo sapiens
cactgttcctggaggaatccgagaagagcagagcggagggagccccagacacggccaacgtggaacctgttgtgccgtcagag

SEQ ID NO: 408506 - DNA, 51 bp, Homo sapiens
atccaccggcactgccaagatcaggttgtaagacaccaataggaaaaccag

SEQ ID NO: 408507 - DNA, 83 bp, Homo sapiens
ccctcagtttctgaaatgattctccagaatttctcctcataaaaaagagggaccacagagcaccagcctgcatggaacttcct

SEQ ID NO: 408508 - DNA, 90 bp, Homo sapiens
gtgatgctgtcttgaattgtcctgcctgcatgaccacactttgccttgattgccaaagatggagtctcgctttgttgcccaggctggagt

SEQ ID NO: 408509 - DNA, 75 bp, Homo sapiens
ggagcggaaacagcggcagccagaggccagtgacatatcaggcatttcgggaatgtacactggagaccacagttc

SEQ ID NO: 408510 - DNA, 100 bp, Homo sapiens
gggcccggaccccgaatatgacggattcaggagcagttccagaaaaatcccgacagttacaatggtgctgtccgagagaactacacctggtcacaggact

SEQ ID NO: 408511 - DNA, 74 bp, Homo sapiens
tctccgtctggcgacgcccgccgcctcactgtttctagccttcaggagaaggagccatttacttgttcaatatg

SEQ ID NO: 408512 - DNA, 73 bp, Homo sapiens
gaagatggcggatctggaggagcagttgtctgatgaagagaaggctattgagggcacctacattgacaagaaa

SEQ ID NO: 408513 - DNA, 78 bp, Homo sapiens
tggtagagaagaatgaacattgtattgagaacaatatagatttgcagaacattaaccaggtggtatttgttggaaatt

SEQ ID NO: 408514 - DNA, 75 bp, Homo sapiens
tagcaaatgagatgaaccatcttcctgcacacagccacgatttgcaaaggtcccagtagggatggcacaatcagc

SEQ ID NO: 408515 - DNA, 100 bp, Homo sapiens
caggacttgagtaacagcaacatggtctcctctgagcctccggcctccataagacccaaaacagatgacacctcttcccagtcccccgcgccttccgaaa

SEQ ID NO: 408516 - DNA, 100 bp, Homo sapiens
gccgacttcgagaacaagcccatgatcctgctggtgggccagtacagcaccggcaagaccaccttcatcaggcaggggaaatggaaggtgatgcagtcga

SEQ ID NO: 408517 - DNA, 83 bp, Homo sapiens
ccaggctaccatggtctacaagactctcttcgctctttgcatcttaactgcagacagagtttcactcctgttacccaggctgg

SEQ ID NO: 408518 - DNA, 96 bp, Homo sapiens
ctcctatagcagtcatgggcgagggaatagcatttcaaggttcagtggaggagaaccccaagagcaccaaaatggaaagatgatttgtaaagctga

SEQ ID NO: 408519 - DNA, 100 bp, Homo sapiens
ggtggatgtcttaagacaagcttctaagatggctcatgatgccctcaatgcccctctgcacattctccgggccatatacgaactgcagatgaaaaagacc

SEQ ID NO: 408520 - DNA, 100 bp, Homo sapiens
acagatcccaatttccaagttggtatcataactgtgaagaaggaaacatgttcaaccaaatggcaaagtgggtgaaacaggacaatgaaacaggaattta

SEQ ID NO: 408521 - DNA, 75 bp, Homo sapiens
tgcctggcctggtgccatgacaacaagtcccggctccggaagatgaaggtttacccaaggtccagcctagcccct

SEQ ID NO: 408522 - DNA, 100 bp, Homo sapiens
ggcggatgttcatgggcagcaccatcgagccagaagcagtatttgtcctggtgctgacgtacagaaaggcaaatattgggatactccattacatgctgct

SEQ ID NO: 408523 - DNA, 76 bp, Homo sapiens
ccgcccttctgctccacgaggagcacagccgggccgctgcgaaggctcttgtcaggatggtgaagctgttcatcgg

SEQ ID NO: 408524 - DNA, 80 bp, Homo sapiens
tcgccaaattaaagttttacaagatttaacctgtcatcaagacctgggattttggtgggcagcccaatggatccaatggt

SEQ ID NO: 408525 - DNA, 75 bp, Homo sapiens
ctgacctgaatcctgaattttccttgatggtcaaaagattaagatatcaatgatgtcaaacggctgaaacctggc

SEQ ID NO: 408526 - DNA, 83 bp, Homo sapiens
tgaccattttctactgtccctgcgcgagttggtgttggtattaggagatctgcacatcccacaccggtgcaacagtttgccag

SEQ ID NO: 408527 - DNA, 51 bp, Homo sapiens
gggtcataggtggaaaagacatgcacctgtggaatcctctcaagaggaaca

SEQ ID NO: 408528 - DNA, 83 bp, Homo sapiens
tctaaaatacgaaggtttctggctggggagtggagcttggtttcgggatctcggtgctgcagacggcgagacctcctgcacag

SEQ ID NO: 408529 - DNA, 116 bp, Homo sapiens
accaggcccgggagcgcgatgtggagcgcttctttaagggctacgggaagatcctggaggtggatctgaagaacgggaacctgttttgttcactggaacaatgaggaaaaacctgg

SEQ ID NO: 408530 - DNA, 100 bp, Homo sapiens
ttgcgactcgcggaccggcgtccccggcgcgaagaggctggactcggattcgttgcctgagggctggtgaattaccatatctccgtcaagtgcagtaacc

SEQ ID NO: 408531 - DNA, 76 bp, Homo sapiens
ccaagaagtatcttcgaacagatgacagagtagaacgtgtacgcagtgtggctggtaaagaggataatacagacac

SEQ ID NO: 408532 - DNA, 74 bp, Homo sapiens
ggacagtgcagggaagcaactgcagaggtggaacggcacatgtgtgatggggacattgttatcttcaaccggca

SEQ ID NO: 408533 - DNA, 73 bp, Homo sapiens
tttgaggacattgtagccgaaagatatgggcacctgtggccttgccgaagaactggaaaaagagaagtcaagg

SEQ ID NO: 408534 - DNA, 100 bp, Homo sapiens
cgcccgggaggaaggaacgaggcaaggagctaaagcagcgtgcgttcagccctgggccggaagaattaacctcgagtctgcacgcttttaagaacaaggc

SEQ ID NO: 408535 - DNA, 80 bp, Homo sapiens
tgcagtcggcactgctactgcgaagacagctggcaggtctctaattaacagaagatggcaaagcccagccacagcagcta

SEQ ID NO: 408536 - DNA, 83 bp, Homo sapiens
cagagccatccctgacacccggcatgaccaatacaaggcagatccaaccatccccaccgtggtcctacgatcagtcctaccaa

SEQ ID NO: 408537 - DNA, 50 bp, Homo sapiens
gacggggatgagctcaggacaggcatccgtgtcattctggaccttactcc

SEQ ID NO: 408538 - DNA, 100 bp, Homo sapiens
gcacctcagagtaaagctgctggacaacaccatggaaatatttgacattgaggaggaagacaatgtgtgggacactggactacttgccgccagaaatgat

SEQ ID NO: 408539 - DNA, 117 bp, Homo sapiens
gcgcctgtgtcgcctctccgtgtggatctggcagtcggtcatccacctgctgcagatggggcaggtgtggagcttgaccacatattatcccctccacccatgccgtttcggaaatgc

SEQ ID NO: 408540 - DNA, 100 bp, Homo sapiens
tttgccattggggtgcagcagctgcaccccaccttgatccagcggacttacgggaaatctggcattttttaaagtttgcgccccacaaagaggaaatatt

SEQ ID NO: 408541 - DNA, 50 bp, Homo sapiens
ctgctgtggaagaccagccccaaaggatcagttcgacagcttagacaagc

SEQ ID NO: 408542 - DNA, 100 bp, Homo sapiens
aaatgacagagctctaccagtctttagacatcccagttaccagtgtccttgaattgatagtggcttctgtttgtcagtctcatataagaactacagctca

SEQ ID NO: 408543 - DNA, 100 bp, Homo sapiens
cccccaacatcctgctcctgctcatggacgactgcttcaccgatatagacacattttgggattgtggcagccagatatcgggccatacggaggactgctg

SEQ ID NO: 408544 - DNA, 83 bp, Homo sapiens
gctccttttcctccacctaccttcccgagtgtggatgaggtcaccattgtcaacattttgaccaaccgcagcaatgcacagag

SEQ ID NO: 408545 - DNA, 82 bp, Homo sapiens
ataaataggctgcttggagaaaatgatggggaaacaagagctttgagtaccaagttcgatccatagcaagtcatgttcgtcc

SEQ ID NO: 408546 - DNA, 100 bp, Homo sapiens
ccgatcccaagttccagctagagaaggtgggcggcagcgccagcccggcgccccctcccagctcccagcggtcctcagaatggttggaatgaccctccag

SEQ ID NO: 408547 - DNA, 90 bp, Homo sapiens
cgtcgccatcttggatccgcgggacaagaaaattcatgcggatttaggtcctgaatatgaaggtatatttaacacttcattgcagtggat

SEQ ID NO: 408548 - DNA, 100 bp, Homo sapiens
cagcacggagggacttctgcagagagagtgcgcagaaggattccgggagcacagttccgccgagactttgtttggagaagctgcctatttcttcttctac

SEQ ID NO: 408549 - DNA, 100 bp, Homo sapiens
cgacgatgtggtcattggaaaggtgttcatgcaggtttacaaagatgagcaggtggtggtgataaaggataaatacccaaaggcccgttaccattggctg

SEQ ID NO: 408550 - DNA, 96 bp, Homo sapiens
atcgcggtgctcatagacgaactccgcaatgaggacgttcaggtcatcatcagatttgaaatatttaaagtggatacaaaactatttcagcaatgc

SEQ ID NO: 408551 - DNA, 102 bp, Homo sapiens
acagtgggggtgtgcaaacccgagagaactggcatcccagccatcactcttccacctgctccttagagaagggaagatgagtgagtcgagctcgaagtccag

SEQ ID NO: 408552 - DNA, 100 bp, Homo sapiens
ctagaagtgggaatcctggctatatagttgggaagccactcttggctctgactgatgatataagttactcaagcgacgagctggggctgcagaagaagct

SEQ ID NO: 408553 - DNA, 98 bp, Homo sapiens
agacgaccacaccaatcgttacattggatgtggacaacaaagtagagaggatttggggtgattgtacagtcaggaagaagtactctcatgtggacctg

SEQ ID NO: 408554 - DNA, 75 bp, Homo sapiens
ttccacaacagctatgtgaagaactcgtgtccctgaagccttgtaaagctgcggagctggttgccacccactttt

SEQ ID NO: 408555 - DNA, 50 bp, Homo sapiens
gtgactgttctcagtgagaacgagttccagtgtctcgccccatcctcacc

SEQ ID NO: 408556 - DNA, 96 bp, Homo sapiens
tgatgggtcattatgaccagagtattgccgcggtggaaatggagcattcccatggtttggcatggacatcggtggaacgctggttaaattggtgta

SEQ ID NO: 408557 - DNA, 75 bp, Homo sapiens
agatagaggcagcagaagccagggcagctgaaagacagagaccttcaggtatctttcagatgaaggcattgaagc

SEQ ID NO: 408558 - DNA, 51 bp, Homo sapiens
gttattgaatatcaagaggaggagttgttgctgtgaagagggataccaagg

SEQ ID NO: 408559 - DNA, 100 bp, Homo sapiens
ctcaccttcaccccatcttgggacgtgaaactttttgaaagtttagaagcgaacttactgtgggggggtgagaacatcaaaagcatcaaccagcagtcag

SEQ ID NO: 408560 - DNA, 90 bp, Homo sapiens
tgtctcttgattggacgtcaggatctttccaagcaggcctgcgaaggaaacttacccaaagggaagtctaaaactctcccaccatgtcgc

SEQ ID NO: 408561 - DNA, 100 bp, Homo sapiens
atgggggagacgcagctgtgcaccacaagcttggagatttccttgattaagaagaatgaaggactgacctggccagagctagtaattggagataaacaag

SEQ ID NO: 408562 - DNA, 90 bp, Homo sapiens
gagatttgcgtcctagagtgggaaaaaagcagaggccagggcgccggagcagtctcacaggtgctggacagcctggaagagattcatgcg

SEQ ID NO: 408563 - DNA, 90 bp, Homo sapiens
cggctccctgcctccgcgtcgcagcccccgccgtagccgcctccgagcccgccgccacatcctctgagcgccagccagcctttgacacct

SEQ ID NO: 408564 - DNA, 75 bp, Homo sapiens
ttcatctccttctgcatccttaactgagaatgagtgtcccttttgatgagaagaataagcctcattctgattcaa

SEQ ID NO: 408565 - DNA, 80 bp, Homo sapiens
gaggcaagatgatccaccagcggttccatcctacacttggccgttggacataccagatggtcgaagagctccacttcctg

SEQ ID NO: 408566 - DNA, 100 bp, Homo sapiens
ggaggacctccgctgcaaatacatctccctcatctacaccaactatggggccgaaggccagagaccaggatttggctacggaggcagagcgtccgactat

SEQ ID NO: 408567 - DNA, 89 bp, Homo sapiens
aaggattccaagtaactcttatttgctgaaacagctttaagagaatttcaaaggcaatatgaaaaaatggagtttggagtattcccaat

SEQ ID NO: 408568 - DNA, 90 bp, Homo sapiens
tccggagccggctgcaggccggggcagacctccatgcccccctggaccacggggccacgctggctccaaacaggcatgcgaggtgccttt

SEQ ID NO: 408569 - DNA, 116 bp, Homo sapiens
catcaaccgccagatcaacctggagctctacgcctcctacgtttacctgtccatgtttcaggagacaagtattatctttaaatctaaatgggtgcaattcattaatgaaaaaatta

SEQ ID NO: 408570 - DNA, 96 bp, Homo sapiens
tttgatcaggagaaagaagacagccatcatttgaaaggatggtgattgctcacaccaaagccttggacccctcccagcctgtgacctttgtgacca

SEQ ID NO: 408571 - DNA, 98 bp, Homo sapiens
agagctgcagctcctcctgtgcggtatcttaaatagtgaagatggagaaatattcaataatgaagagcatgaatatgcatcgaaaaaaaggaaaaagg

SEQ ID NO: 408572 - DNA, 98 bp, Homo sapiens
tcctcttctacatcaacttggctgaccattggaaagagtgcctggaagagctgggatgtctggttgagtcctatggcatgaatgtttgccaaccaacc

SEQ ID NO: 408573 - DNA, 98 bp, Homo sapiens
gttgagcagatgacaaaacttcaagccaaacatcaagcagaatgtgatttgcttgaagatatgaggaaattcctttatctgaaattttgtctctggaa

SEQ ID NO: 408574 - DNA, 130 bp, Homo sapiens
gtaaaatccgttttgaagattgttgagaaattggatcttacacttgaaatacagactgttggggaacaagagatttcaggtatgctgctgaaagtgggaatcctctacattggtgggcagctggtgacca

SEQ ID NO: 408575 - DNA, 73 bp, Homo sapiens
tgtggccctcagaatttaaacttaaggaaagagtgggaaagtgaggattcatgatgttgctatcaaaagttga

SEQ ID NO: 408576 - DNA, 75 bp, Homo sapiens
ggtcagtgaacctatcgaaggacatgaagactaccacatgatggatgaaaactttcggaagagaaagttgcctgt

SEQ ID NO: 408577 - DNA, 50 bp, Homo sapiens
ccgagctccagccgaaggagaagggggatgcctgaggaagtgcaccatgg

SEQ ID NO: 408578 - DNA, 97 bp, Homo sapiens
aagtgctccgccgcccttgcctccagtttaaaattggtggtgaatggtggacatggatcgattataaccgcttccaggagctcatccaggaatatga

SEQ ID NO: 408579 - DNA, 100 bp, Homo sapiens
cattgggtgctgccacaaaggatgcctccacacctaccactacccgtgtgccagcgatgcaggtattgttgcagcatctggcagtgagactgaggatgag

SEQ ID NO: 408580 - DNA, 83 bp, Homo sapiens
ggaaaaccacgcagaagcaggagctgaagacctcagaccggcaccagacagcccacctgaggatattgaccataaggactcat

SEQ ID NO: 408581 - DNA, 100 bp, Homo sapiens
aagtgaaagccctacactgctgtagaggtcatgctggaagtgtagattctatagctgttgatggctcaggaactaaacaccctttgacaatgataatgct

SEQ ID NO: 408582 - DNA, 112 bp, Homo sapiens
gtcgtctaccgtctcgctatagccgtttgagggaagaaggaggaaaattacccggtatcgttagaggttcctctcctggctgaaatttatggtatagaaggaaacattttca

SEQ ID NO: 408583 - DNA, 75 bp, Homo sapiens
gtctcaatgtccacaacatgaccccagctacctccccaataggtgcatcaggatggacgtggtagaggtcgcggg

SEQ ID NO: 408584 - DNA, 82 bp, Homo sapiens
cgaaggcaccgacgtcatcatgctgaccaccaatcagatccgtaagaccatggtgaatccgggcagcagctcgcagccgccc

SEQ ID NO: 408585 - DNA, 97 bp, Homo sapiens
accggcatttatattttgcttgccgagatgatcgggagcgtttttgtgaaaatcagcccatgacccatcgagaaactgcacctgtttcccagcctga

SEQ ID NO: 408586 - DNA, 74 bp, Homo sapiens
agtcccgggcgggccgtcgcgggagagcccgagctacactggaaatcctcatccctgactttgttaaacagacc

SEQ ID NO: 408587 - DNA, 100 bp, Homo sapiens
acactgcacttaaataagggcacacctagtcagaacaaaatccagtctcatagcagaggagaatataatgtttacagcaccttccagagccatgaaccag

SEQ ID NO: 408588 - DNA, 82 bp, Homo sapiens
ggggattgacagccacgggaaggctgaaggtgatgtggccgccctcaaccgacgcatccagctcgttgaggaggagttggac

SEQ ID NO: 408589 - DNA, 88 bp, Homo sapiens
acacttgtgaacattcaagtgaagcaaaagcctttcatgattatgtgcgggaatggaaggagcagggtagcaagaccttcatgtgcac

SEQ ID NO: 408590 - DNA, 75 bp, Homo sapiens
tctagtcagatttcaggttcagtgacatcagaaaatgtgtccagagattacaagccactgtatgatgctgcttac

SEQ ID NO: 408591 - DNA, 100 bp, Homo sapiens
cgtgccgccacccgatggaagattcgatggacatggacatgagccccctgaggccccagaactatcttttcggtaccatcaaggatggagggattctccc

SEQ ID NO: 408592 - DNA, 100 bp, Homo sapiens
gttgagaacttcagtaactttaccaacagaatggttcgatacaagaggctgttttcctagcgtggcttgctgcctttggtaagaacatgtcgtccatctt

SEQ ID NO: 408593 - DNA, 74 bp, Homo sapiens
tgggctgtgagtccggagacagagctcactgggacagtttccggatctttcagaagctgtcagagatcttctca

SEQ ID NO: 408594 - DNA, 100 bp, Homo sapiens
acctcctggccatgggggacgtgctgtccacgcacctggacgacgcccggcgccagcacatcgcaggtatgatctcgtgaaaccttgagagaaactgaat

SEQ ID NO: 408595 - DNA, 75 bp, Homo sapiens
ttgaaatcgacacacaaagaatagagttgagcctgtgggacacttcgggtaactaggatttctacctcaaccgcg

SEQ ID NO: 408596 - DNA, 75 bp, Homo sapiens
cttaagccattttgtaattgcaggagctgactggaaataccggcatgcaggattgatggccttatctgccattgg

SEQ ID NO: 408597 - DNA, 75 bp, Homo sapiens
cgtgtttgcggttcagccctttgatgaccgcagcagaggccatgtggaagtgttacatcaccttttgcttggaaa

SEQ ID NO: 408598 - DNA, 100 bp, Homo sapiens
tcccatcgtcccaggaactagaggatgcctcctgctgttctcttaagaaagattccaacccaatgattacgtgtgaaaatgaacttgtgcaaacccaacc

SEQ ID NO: 408599 - DNA, 100 bp, Homo sapiens
ctctagttttaaagcagcgttgctgtcaggccctcctggtgttggcaaaaccaccacagcttccctggtgtgtcagtccactggggatcaggcattagaa

SEQ ID NO: 408600 - DNA, 74 bp, Homo sapiens
ttggagaaaacccatatatccgaatgcttcctggggttgaggcatgtgaaaattataccttccgatacggccga

SEQ ID NO: 408601 - DNA, 74 bp, Homo sapiens
aggagtcatcggacgccagaatctgataaccttctgttcggtgatgaaattatcactaatggttttcattcctg

SEQ ID NO: 408602 - DNA, 100 bp, Homo sapiens
agtttcacctgctattgtttcccccacccagtactggagaaaatgaaactgggattgacccatcaagatgcttggctcaataagaaaaccacgttaggag

SEQ ID NO: 408603 - DNA, 74 bp, Homo sapiens
ctggagcctcagttggaagcagccgatccagcctgcggagcctgtggggcagtcgctgggtaagtcggagtgcc

SEQ ID NO: 408604 - DNA, 74 bp, Homo sapiens
aggaagaggacaggtagtggagatcctgcaatctgaaaagcagactgaaaggtgtcatcaagctgaagaacaac

SEQ ID NO: 408605 - DNA, 88 bp, Homo sapiens
gagaaataaaagtggccattagtactgtgagcatgaaccttgagggctggggagcagaataccaccgccaggatgttactagcacccc

SEQ ID NO: 408606 - DNA, 82 bp, Homo sapiens
aaaacaccaagatacctgtggaaaacatccttggagaggtcggagatgggtttaaggtaaaggatcagatttgtgatgtgag

SEQ ID NO: 408607 - DNA, 75 bp, Homo sapiens
tttgcaacgaattcaatgaacattcctgctcttgttggcaaagttctgagatgcagtaaaatcgctggtgtgaaa

SEQ ID NO: 408608 - DNA, 100 bp, Homo sapiens
gatttggacatggatgaagagattaaaccccaaatgagtgagggtatggcctcacaagtcttggtctacccaccatatgtttatcaaactcagtcaagtg

SEQ ID NO: 408609 - DNA, 108 bp, Homo sapiens
gcctggggacttagtttcctgcttgccttcccccaggtttattcactggatctctgaatacccaggccccctccaccatggccagccggggtgggggccggggtcgtg

SEQ ID NO: 408610 - DNA, 88 bp, Homo sapiens
ccagatgagagccttcaaaagcagtgcaactggctcagtattcacagggaaagctgtgaggggtacccagtgtgttgaacaaattcaa

SEQ ID NO: 408611 - DNA, 83 bp, Homo sapiens
atcagaaataatatccaatcagtacaacaatgagccttcaaacatatttgagaatgcaggctcaacagtaccagcagcagcgt

SEQ ID NO: 408612 - DNA, 90 bp, Homo sapiens
ggattacccgctccatccatccaagatagaaactcagctcgtggtgggggcttgctggcaaggagtgactccaaatttgcatatactgga

SEQ ID NO: 408613 - DNA, 101 bp, Homo sapiens
ctttactctggggtcccggctgccctgtggcctcgctcctcggaggtccagtgtgaaaaaagccagtattaaaatactgaaaaattttgatgaagcgataa

SEQ ID NO: 408614 - DNA, 96 bp, Homo sapiens
gtctgccgcaaggtcctggaggcaccggcgctccactgcgaagatggcagccgggagtatgtgaatgtgtcccaggaactgcatcctggagcggct

SEQ ID NO: 408615 - DNA, 107 bp, Homo sapiens
acatactatccgtttgttcaggaaccaccagtgacagactgtgtgttctcatttcacccaaaacctttggacagtgcagggcatagaagattcattccacaaactta

SEQ ID NO: 408616 - DNA, 75 bp, Homo sapiens
gggaaaatctccccggtgactttcagacacagggtctcactgtgttggccaggctggagtgcggcagtctggaac

SEQ ID NO: 408617 - DNA, 75 bp, Homo sapiens
tgccgccgccggctctcgggagcgcaacactgcaggtcagaagccaatgacctggccctgaggctggctcgccac

SEQ ID NO: 408618 - DNA, 59 bp, Homo sapiens
ctgtacctggcctggagctccagggaaaaccttagcactggcaagaaccatggacattc

SEQ ID NO: 408619 - DNA, 110 bp, Homo sapiens
tgatccttgtaggactctggttaattcagtggctgctcttaaaatacaacctagcatgtgcattgctaagggacctggacaggatatgtttgacagcacacaaattatag

SEQ ID NO: 408620 - DNA, 75 bp, Homo sapiens
aagttccccaacggctccccgtcgtcctggtgctgcagcggttttgtttatcagaaaccagttgtccacaagaag

SEQ ID NO: 408621 - DNA, 50 bp, Homo sapiens
gtgggggaccggctgttggcgggagcggttggttccccgaggcgtacgtg

SEQ ID NO: 408622 - DNA, 123 bp, Homo sapiens
ccaccgccgccgctcggtgcggctctcggactctgctcctcactcaccgcgtggacacgatcggtgatgcagacagaaagcattgtaaatttaagcctgatcccaatatccctccaaccttca

SEQ ID NO: 408623 - DNA, 101 bp, Homo sapiens
tactctctctttctggcctggaggctatccagcaccgagaaggacatcctgctgcgacctgagctggaggaactcaggaacaaacattctgcacgcttcaa

SEQ ID NO: 408624 - DNA, 105 bp, Homo sapiens
ccagtgtgaatttggaagggatcgtgtggcatgaaacagaagaagacatatgtagagtgtgtcggtcagaaggaacacctgagaaaccgctttatcatccttgtg

SEQ ID NO: 408625 - DNA, 75 bp, Homo sapiens
ccgggccccgcggctgccgcagcattcccgggaagggccaattcctgtccccccagcagcatggcatcgtgtgct

SEQ ID NO: 408626 - DNA, 90 bp, Homo sapiens
ccgggagcccttagggaggcaggccagtcatggtttcattactcagcacccctgggctagcttgattcgtgcattcattaacctagaggc

SEQ ID NO: 408627 - DNA, 88 bp, Homo sapiens
agcgggcggcggcgggcccggcaccgggccgggactgggggaggcaggccaaagaactgccaactctgaaagataatgatttcattaa

SEQ ID NO: 408628 - DNA, 97 bp, Homo sapiens
caactctgcagtggaccacagcattcctgaaatacatccaggaaagacatggagattctcttaaaaaggagagatgaatggagagtatagaggcaga

SEQ ID NO: 408629 - DNA, 122 bp, Homo sapiens
gcggcaggtgggcaggaggaggaagagggagaggacgaggaagagctgagtgggacaaaggaagaacggcgccggatcccaagctgaccgtgtccacggctgcagcccagcagctggacccc

SEQ ID NO: 408630 - DNA, 90 bp, Homo sapiens
cattcttttccttattcttctgatgtggatccaggagagatgaatggagagtatagaggcagaggatttggacgaggaagatttcaaagc

SEQ ID NO: 408631 - DNA, 75 bp, Homo sapiens
atctggaacgggtggccgattactgcgagaacaactacatacagatgccttcaattaagttgcagagttctgatg

SEQ ID NO: 408632 - DNA, 95 bp, Homo sapiens
cggccctcaccgccctcaccacccctatccagacggctgcccttcaagtaccagacagagcgggatgccaccagcttgtccaaagggaagttcca

SEQ ID NO: 408633 - DNA, 83 bp, Homo sapiens
ctcaaacgtggagatcaactcctctctgttaatggagtgcggagcgtgctttggacaccatgaattttgatgttataaagggc

SEQ ID NO: 408634 - DNA, 78 bp, Homo sapiens
ttccatttggggaccagagatggacggtcactcagcctatggagcctcccgcgacgatgcccctcaacgttagcttca

SEQ ID NO: 408635 - DNA, 90 bp, Homo sapiens
ggcctctggaatttagcgctcgcccagctagccgcagtaccttctccaggcaaattccgttcccctgcagcaccatctcctttggctctt

SEQ ID NO: 408636 - DNA, 100 bp, Homo sapiens
gagctggtggacgccttcgtggagcacaggccagaaatcagcgaggagctcaaggacctgatcctgaagatgttagacaagaatcccgagacgagaattg

SEQ ID NO: 408637 - DNA, 98 bp, Homo sapiens
cgtctccagcgagcggcgcggagctggacgccgcgatcgtggggcccgcgaggcgggcagccggggcgtccaggtccacctgggcttgcgaaggcaca

SEQ ID NO: 408638 - DNA, 100 bp, Homo sapiens
gggcactttcgattccttctttccaggctctaggctccctcccaggatccttgatctgatctgtcagcctttaccactgagcacggaagcaccaggagac

SEQ ID NO: 408639 - DNA, 95 bp, Homo sapiens
tacatagaccacacgaaccgcaccaccagctggatcgacccgcgggacagagccagtcttggtgctctgtgttcacctggttcatctgaggagct

SEQ ID NO: 408640 - DNA, 50 bp, Homo sapiens
ccccgccagcgccccatcctgagccggtacctactgtcaacaacgggaag

SEQ ID NO: 408641 - DNA, 100 bp, Homo sapiens
agaagcagttcaaccgcatgaagcagctggctaaccagaccgtgggcagacaaagccacagacccaagcatgtcggaacaggattggtcagctatccaga

SEQ ID NO: 408642 - DNA, 100 bp, Homo sapiens
ccctcaagtccctgatggcctcagaggaggagggctctcggcggtactcctgggtctcagaggagccgctgaactacgtgggctggcaggacggggagcc

SEQ ID NO: 408643 - DNA, 75 bp, Homo sapiens
gtagctttcatgagcacaggcatcagtcaggcagatgtttgtcgactggaatggacacacaaactcgggccactt

SEQ ID NO: 408644 - DNA, 50 bp, Homo sapiens
cggacagtgcagggaagcaactgcagagactccccatccccaggatgtca

SEQ ID NO: 408645 - DNA, 96 bp, Homo sapiens
caatgctgacctcggtttcctggacccattccgactcagaagcctggctacagataagggaccaaaatgactgactcaaaatatttcaccacgacc

SEQ ID NO: 408646 - DNA, 90 bp, Homo sapiens
gtttgctgagagtagtatctgttctgattaagcagttttacagtcttttgctggttatattctgggcactaaatgaaggcgtttctaggc

SEQ ID NO: 408647 - DNA, 100 bp, Homo sapiens
tcctgtgagcagtgggaaaaatggaccaacttctttggcaagtggacattttactggctcaaagttggccaccctgttcaagggcttaggagaaagtcaa

SEQ ID NO: 408648 - DNA, 75 bp, Homo sapiens
cgccactgcagagcctgtccgtcagtccctaggtatccgcactgctcagggggcaccatgccggtggaaaggatg

SEQ ID NO: 408649 - DNA, 97 bp, Homo sapiens
cgggtcgcaacgctgtgggcgttccaggaggtggtcgtggcgaacctggcagctgcggagaactacgatgacccgcacaaaacccctgcctccccag

SEQ ID NO: 408650 - DNA, 100 bp, Homo sapiens
tagtaacccgcgaaatgatgggatagcgttgcaaatccttaaaagagtcttaacgggttcagctccagagattgatccttcatctgatggttcaaatttt

SEQ ID NO: 408651 - DNA, 51 bp, Homo sapiens
gaagagcgccaggcgccgcgggggaggaagttaacatccctaataggaggg

SEQ ID NO: 408652 - DNA, 100 bp, Homo sapiens
ggattatgaagtattaattcttccactgatatctcaaaaggtgatctggacaaaggaacaggtatctcaggtcaagctgaactagcagaaattccagaag

SEQ ID NO: 408653 - DNA, 90 bp, Homo sapiens
acacttcaactactccgtgatggctgattatggtgacaagctgaacatggagctgagtgagaaatacaagctggacaaagagagctaccc

SEQ ID NO: 408654 - DNA, 82 bp, Homo sapiens
tcttctggtgtcaaagcttttggacattcctggggactccatgttttcgttggccctgaaatgccttatcagtctgtccacc

SEQ ID NO: 408655 - DNA, 101 bp, Homo sapiens
gcggcggcctgggctgctgactgcgcacttggaatagtagcaggcggcggcggcggaacgccaggcagagagaactcgatgccaccgcaacggtattggcg

SEQ ID NO: 408656 - DNA, 98 bp, Homo sapiens
attccttaatgaatcctatatggatggttaaaacccgaatgcagctagaacagaactgcaagctttcttcctggtggcagatgacatcatggattcat

SEQ ID NO: 408657 - DNA, 95 bp, Homo sapiens
ccagactcgtgggggaaaggctggagaccctttaaagagatcatccttcatcatttatgatataatgaatgaattaatgggaaagagattttctc

SEQ ID NO: 408658 - DNA, 90 bp, Homo sapiens
ttggccgcagcttctatatccatggactcagtattatcaagcgcatttgtagccatgaagtgccatcttgcccaatatgcctctatccac

SEQ ID NO: 408659 - DNA, 74 bp, Homo sapiens
gagcttcaggttgtccgagcatctgggaagtgtaaagaagacattccagtgtgagctttgcagttacacgtgtc

SEQ ID NO: 408660 - DNA, 100 bp, Homo sapiens
ctgaattagaactgcagaggttcctctacagcaagatggtggatgcttccaaaagcatcgaagctgtccatgaggacatccgcgtgctctctgaggacgc

SEQ ID NO: 408661 - DNA, 100 bp, Homo sapiens
ttcttaatgcttttcggactcctgatggcatgcctgtaaagaacttgcagttgaaggagtataacacagactcgagaacaggaagaactggaagaagctt

SEQ ID NO: 408662 - DNA, 75 bp, Homo sapiens
gttcatcaacatcaactacgtccctctgaaggtgacaaccagggcatccccatcatgtccagcatcaagctgaaa

SEQ ID NO: 408663 - DNA, 97 bp, Homo sapiens
acatgcagccccccatagacgggcaggcccacatcaaagaggtggtgcggaagatgatcagccaggcacagaaggcataatcaccagcaacacccgg

SEQ ID NO: 408664 - DNA, 100 bp, Homo sapiens
atagatctcctcgcaaaaaatgccaaaacttataatgagcctggctctcaagtattcaagctttggacatcagacagtgcaggagaagaatgtgatgcgg

SEQ ID NO: 408665 - DNA, 87 bp, Homo sapiens
gtcgtcttccacttgcacgaaagctttcctaggccaaaaagagctgacatagcccagagatacaggataagcaaatacccaaccctc

SEQ ID NO: 408666 - DNA, 132 bp, Homo sapiens
gcgcggcgcgggagcccgaggctgagactcaccggaggaagcggcgcgagcgccccgccatcgtcccggaagtgctctctggcgtggtggtcatatcgagtaaggattcagtccaacaccagggagtgtctt

SEQ ID NO: 408667 - DNA, 82 bp, Homo sapiens
ctctggaataccttgggcattgctgaatatgaaaagatatctgtatgcccttggacagaaggtttggaaaagatggaaaaaa

SEQ ID NO: 408668 - DNA, 97 bp, Homo sapiens
cacaagttccaaggttacgtttcacatccagtcctggatgagccaatagctgaagctgtctgtattatcgcagacacggataaatggagtgtgcagg

SEQ ID NO: 408669 - DNA, 98 bp, Homo sapiens
tgaactccaagccaaaatcacagctttgagtgagaaacaggaagatgaagtcctcagtacattctgaagaagatgattttgttccagagctacataga

SEQ ID NO: 408670 - DNA, 97 bp, Homo sapiens
tggctccctcattaccgtcgccagcggagcgaacccgagagcgtggagcgggctgggccagagataatagtagcagaatttcacaaaaaaatcaaag

SEQ ID NO: 408671 - DNA, 100 bp, Homo sapiens
ttggagatggggaccgccctggacatcaagattaaaagagcgaataaagtttatcacgccggggtggtttcagacaccctcacaggttttctaccatgca

SEQ ID NO: 408672 - DNA, 75 bp, Homo sapiens
agcaggatgcattctacaaagaacagctggctagactggaggagagggtggctccgctgccggatgggagtgccc

SEQ ID NO: 408673 - DNA, 98 bp, Homo sapiens
gacaaggagctacagctaaaccttatgtttgatcatcggccaaggtcctggcgagaactgcctctgcggctagctgattttggggtacttcataggaa

SEQ ID NO: 408674 - DNA, 100 bp, Homo sapiens
tctgtgccactttgcatcccacgccggaggaggcattaacgagaccggctgccactgcagagccccgccatggaagacacgccgttggtgatatcgaagc

SEQ ID NO: 408675 - DNA, 100 bp, Homo sapiens
gcctgcggaacgaaagtgaacaggagccgctcttaggcgacacacctggaagcagatttgagggccacttccacctcactaggccttaactaaagacctt

SEQ ID NO: 408676 - DNA, 82 bp, Homo sapiens
cttttccctgagcttgttgatgattttcagattgaggaacttcagcaggctttaatagtaaagcaaaatgaagagcttgacc

SEQ ID NO: 408677 - DNA, 105 bp, Homo sapiens
tgatgaaaaatatgttcctgcccacaaggagttagcgacctactgggctcttcacagatggaatcacaaataaacttattggctgttacgtgggaaacaccatgg

SEQ ID NO: 408678 - DNA, 115 bp, Homo sapiens
agagatgtgatgttggagaactacagaaacctcgtctccctgggatgagttagatgaactccgtgctgagatggaagagatgagagacagttatttagaggaagatgtttaccag

SEQ ID NO: 408679 - DNA, 96 bp, Homo sapiens
gggagggttcgaggccaatgatgggagaccaccgggatgggcagagtgcctggtgaagaatgtgatgggatcactagcatgtctgcggagagcggc

SEQ ID NO: 408680 - DNA, 75 bp, Homo sapiens
cggaaacgccgaggaacccggctgaggcggcagctatccccagctttttgcagctgggatgttatctggcgtatt

SEQ ID NO: 408681 - DNA, 50 bp, Homo sapiens
aatcatctgaagaaattggtcccaaggtgtaccaacagtaccgttattgc

SEQ ID NO: 408682 - DNA, 83 bp, Homo sapiens
tgctactgctgcctctgtcactcctggtgaccagcattcaagatgtgatgactgaagcccaccacaaatatgaccactctgag

SEQ ID NO: 408683 - DNA, 76 bp, Homo sapiens
gcgttcccagcccgggtccccgcgttcacagccccagcgcaggtgttcttcttttgggagacgcatataatatgag

SEQ ID NO: 408684 - DNA, 75 bp, Homo sapiens
gatgagaagctgaagcagtgcctggtggccgaccttgtccacacagtccataaaagaggcacagttagatgaaga

SEQ ID NO: 408685 - DNA, 83 bp, Homo sapiens
ctgatacgctgggactcgtacgagaacctcagtgcagatggagaaggtcaaaatgcagatcttcgtgaaaacccttaccggca

SEQ ID NO: 408686 - DNA, 100 bp, Homo sapiens
aatcgatagttttagagcctatctattggaattcctcgaactccaaacagtgagaccgtgcactaccactatggccctaaggacctggtcacaatcttgt

SEQ ID NO: 408687 - DNA, 100 bp, Homo sapiens
gctcagccagcagtatgccgcctccctgggtctaggatgccatgttggtggcccttaagagcctcatgccagcctgcctcttcaatatcattgggtttgg

SEQ ID NO: 408688 - DNA, 100 bp, Homo sapiens
tatatttaacggagatcctgatgaagttcgagcactaatatttaagaaagaagatgttaactttcagggtgacatccagcagctgctctttgtctcggac

SEQ ID NO: 408689 - DNA, 50 bp, Homo sapiens
actcgatactcttctgaatcatccagggctgctaaggaagcaaaaaaggc

SEQ ID NO: 408690 - DNA, 99 bp, Homo sapiens
ctggtagtggtgaaggtggaaaaggctataccaaagaccaagtagatggagttctcagaattcagagttcaagagctccttaaaggatacacaaaactg

SEQ ID NO: 408691 - DNA, 75 bp, Homo sapiens
tgaagaacactttcaagaaccaggagtgggaatagctttgcgaaaaatgggcgcaatggccaagccagattgtat

SEQ ID NO: 408692 - DNA, 98 bp, Homo sapiens
gtggccccgccatgggcttcctgcaccagctgcagctgctgctctggaagaacgtgacgctcaaacgccggagcccgaaaaatggctacaaacttcct

SEQ ID NO: 408693 - DNA, 82 bp, Homo sapiens
cgcaggcccgcggggagcgcagcccggcggagttgaagaagctggatctggcagctgcggcagcacacaccttctttgtagc

SEQ ID NO: 408694 - DNA, 100 bp, Homo sapiens
aattaccaaacagaatggacaagcttaataaaataaccgtccccgccagtcagaagttgagctgcagaaccttggcctgaaaatgctacattatatcagc

SEQ ID NO: 408695 - DNA, 83 bp, Homo sapiens
tcacggatttgattgtgcaggacggacaggaggcacccaggttgcatagcagtagaaaaatccctgaatagccgaaactttag

SEQ ID NO: 408696 - DNA, 100 bp, Homo sapiens
ttgaaccaggtcatgctccaaatattgaatttagtggaagcttttgtagaagatgcagaattgaggcagactttacaagaagatttacttcgtcgattcc

SEQ ID NO: 408697 - DNA, 98 bp, Homo sapiens
ctccagcccagcctcgctagctccgcctgcggtacgtgctcccgcctccgactcaagaatgtcggattgcacaccctgttgtgaagtgcacctactgc

SEQ ID NO: 408698 - DNA, 75 bp, Homo sapiens
aagctcaactctagccagctaggttcctggtgctttgggggacagctttcctgcccgctttggaggagtccactt

SEQ ID NO: 408699 - DNA, 100 bp, Homo sapiens
tggagagggagtgatgtcttccagactcggtgctgtacccgccatttgggaatggatgatgaaggagatgatgacccagttcctctaccaaatgtgaatg

SEQ ID NO: 408700 - DNA, 103 bp, Homo sapiens
ccgcggcccgcgcgcccgcgcggcggaggagaggttgcacgttttcaaaaaatacctaatggtgaaaatgagacaatgattcctgtattgacatcaaaaaaag

SEQ ID NO: 408701 - DNA, 50 bp, Homo sapiens
aaatgtacagcttgttcttccaaagtggaggaaggagaggccagtctacc

SEQ ID NO: 408702 - DNA, 75 bp, Homo sapiens
ggaaagtggactgtccggggccgggctcaggagcagagcttgtactcccagagtacctcatccacgctttcttct

SEQ ID NO: 408703 - DNA, 75 bp, Homo sapiens
ccgccggacttcaatgcccagtccccagctcgccagcgtttggtgcacctcgatttggaggaagtagggcagggc

SEQ ID NO: 408704 - DNA, 75 bp, Homo sapiens
ccatcgctgccgtctttcacacactgatagcgaagaatagccagaattcagcaaatcgaaaaggacatacttcgt

SEQ ID NO: 408705 - DNA, 100 bp, Homo sapiens
agaaagttgggtttcttttactggcaaatagtacttcaagagcacagtcttatgtaaggacgactgggtttggattcagaagaggattattatacaccac

SEQ ID NO: 408706 - DNA, 82 bp, Homo sapiens
cgacctcgacgtcttgcctgtgtcccacttgttcgcggcctataggctgaaggtgatgtggccgccctcaaccgacgcatcc

SEQ ID NO: 408707 - DNA, 95 bp, Homo sapiens
ccgtcgcttccatgaaagctacaacttcaatatgaagtgtcctacaccaggctgtaactctctaggtctccaggtcctgacctggccttcctgac

SEQ ID NO: 408708 - DNA, 101 bp, Homo sapiens
cttgcctaaatgaggaatgtctttcctaccatctaaaatacgaaggtttctggctgggctttctccaccaccacaacagcatgtggtctgacagaattggc

SEQ ID NO: 408709 - DNA, 75 bp, Homo sapiens
aaaacgttcaccaagtgggtcaacaagcacttaatgaaggctctcaccacacacttgttcatgggcgcagcaaag

SEQ ID NO: 408710 - DNA, 75 bp, Homo sapiens
aacttattcccttcaattcaagtaacaggcaacttttaagggatggacgattattatgtatgcagcagtggattc

SEQ ID NO: 408711 - DNA, 100 bp, Homo sapiens
tatatgccttacctcgctgaatcatcacagccctaggagactgaaaaagatgtgaattgccttgaaccatggttaataaaggaaatggatgcttgccttt

SEQ ID NO: 408712 - DNA, 74 bp, Homo sapiens
ttgcaaagggcacgtatagcattggtaaagaacgatcgtccagtggaggttcattttccagacactgaaagagc

SEQ ID NO: 408713 - DNA, 51 bp, Homo sapiens
ggggtcctctctgagtcaaatccagtggccagaagaatgtttgaaggtgag

SEQ ID NO: 408714 - DNA, 89 bp, Homo sapiens
gcagaaagcaggcgaacccgcggcgcaataacggttcagccgtctgtatatctccccagatacctgaaactgaccacctgagtacgttt

SEQ ID NO: 408715 - DNA, 75 bp, Homo sapiens
aaggcaagtgggactttgccttctcagcccaaagtcagcatgttatacatccaggctctaccagggcctttcctt

SEQ ID NO: 408716 - DNA, 100 bp, Homo sapiens
aaacggcaaagaacttactgattcttgaggtcagaagagatcaattctacagaaatttccagtggttctgttgaggctttatggaattcagcatgtcaaa

SEQ ID NO: 408717 - DNA, 51 bp, Homo sapiens
acacatctttagaagacctaagctgtagtacatgagcgagctagagaaatc

SEQ ID NO: 408718 - DNA, 100 bp, Homo sapiens
acagcagccgcaagacattgtttctctccctctgcccccccttccccacgcaaccccagatccatttacactttacagaccagaggagcgagagcagcaa

SEQ ID NO: 408719 - DNA, 101 bp, Homo sapiens
tgtattctacccatgctgccctggctgccttgagaggtcacttctgcctttccagtgacaaaatggtgtggagattagcagaggcatttcatatcagtgag

SEQ ID NO: 408720 - DNA, 80 bp, Homo sapiens
agagctgaggactgcctgtttgcaggttgaagaaatatggagatcaacacaaaactgctcatcagtgttacctgtatcag

SEQ ID NO: 408721 - DNA, 73 bp, Homo sapiens
tcaaggaggccttccagctgtttgaccgaacagatggaggagatgtataagaaagctcatgctgctatacgag

SEQ ID NO: 408722 - DNA, 96 bp, Homo sapiens
tcgaagatttattggcagcccacgaacacctgtcagagaaccatggagtctggcagtaccgccgccagtgaggaggcacgcagccttcgagaatgt

SEQ ID NO: 408723 - DNA, 83 bp, Homo sapiens
tctcatctcgctcggctgcgggaaatcgggctgaagcgactgagtccgcgatggagcgtcagcctcgagtttgaccagcagca

SEQ ID NO: 408724 - DNA, 75 bp, Homo sapiens
tctgaccgtgactagccagcaaggagtcaaaggagtgaaaaggctctcagtgtctgagttaaatgaaatcctgga

SEQ ID NO: 408725 - DNA, 98 bp, Homo sapiens
ggagcgcggtgctgccggtggagcttcagctatgctaagaaggaatctgatcttaatggcgcccagatcaagcttcgagaatatgaagcagcactgaa

SEQ ID NO: 408726 - DNA, 90 bp, Homo sapiens
gccagctcgaagaaggcgagcagggtgcgggagagccccttgcagaagacgccgtacgaggtgcaaatatatacagagcttcataatcag

SEQ ID NO: 408727 - DNA, 98 bp, Homo sapiens
cgtgctgcttatggcggcgctggagagggggcgctgagctgttggggtgcatgtgagggaaccctggcttgttcaacctgtcacctcatctttgaaga

SEQ ID NO: 408728 - DNA, 100 bp, Homo sapiens
ccacgcggaccccgggcagtagcccgagtatcagcagcgtcgccagcaggagaatatgcagcgccagagccgaggagaacccccgctccctgaggaggac

SEQ ID NO: 408729 - DNA, 99 bp, Homo sapiens
gccgattacccacttcgagtcctttattgtggagactcgtagaggatgaggagaggcgttggactgatgagaacatcgacacggttgctctgaagcact

SEQ ID NO: 408730 - DNA, 100 bp, Homo sapiens
ggggtgcgcagtccagcgtgaactacagtcagggcagcctgaaggatgcagcactgcaggaaaggaaaaggaaaattttggacgaagctgtggaattaag

SEQ ID NO: 408731 - DNA, 114 bp, Homo sapiens
gctgtctgggcttcatagcattcgcctactccgtgaaggggaccagtgtgtgccaggcggccgcgatgggtggcgccatggtcctgctctatgccagccgggcctgctacaacc

SEQ ID NO: 408732 - DNA, 100 bp, Homo sapiens
tgctaaaaattactgcggtgaacaggataagaaactctttaagcctccagtgttagtatttgtggactgcaaactaggagcagatcttttgagtgaagcc

SEQ ID NO: 408733 - DNA, 100 bp, Homo sapiens
ttacgacttgggcttatgttcaaagtgaacacagactatgagtctagtttaaaggaaccagcacctatgacagaagatctgctagaagagcagtctgaag

SEQ ID NO: 408734 - DNA, 74 bp, Homo sapiens
gcaaaacttgcagattttggggtagcaggtcaacttacaattcctggattttgtgaagggggatttaaaatcca

SEQ ID NO: 408735 - DNA, 98 bp, Homo sapiens
acaagccgctggcagccgcggatctcaccgccgctcaggaacttaaggcatacagaacgatggagtatatggcagaatccaccgaccgcagccctgga

SEQ ID NO: 408736 - DNA, 135 bp, Homo sapiens
cctcgccgaccgccatttcacatccagcagaggaggcgggggcagccgctgagacggtttttcacaaggaatttagataatgggctgtgtgcaatgtaaggataaagaagcaacaaaactgacggaggagaggga

SEQ ID NO: 408737 - DNA, 82 bp, Homo sapiens
tgcaggaccatggcaaggagaggaaggagcttttctccacaaccacttcccaggctaacagagaccctgatgctggaattga

SEQ ID NO: 408738 - DNA, 100 bp, Homo sapiens
aaatgatgccagtcgtggtactttaagcagctatagtcttgtattgatggttttgcactatttacaaaggtggttctcttcccaaagtggaagccaaatt

SEQ ID NO: 408739 - DNA, 100 bp, Homo sapiens
cagagaagaacttatcagagattgagaatgtccatggatttgtttctcattctcatatttcaccaataaaggccccgcagggtggagcccgtctgctcag

SEQ ID NO: 408740 - DNA, 100 bp, Homo sapiens
ccgggaccggcggttgtctgtggccggaggctgatcagctttggggccatttggatcacacgatgttttttcaagattttagaccctttctaagtagcag

SEQ ID NO: 408741 - DNA, 100 bp, Homo sapiens
gcgaggagccatgaggcgccagcctgcgaaggtggcggcgctgctgctcgggctgctcttggagttattttaccaagaaaatggtttgcacgactttgaa

SEQ ID NO: 408742 - DNA, 90 bp, Homo sapiens
agttcgtcatggggctgtttggaaagacccaggagaagccgcccaaagaactggttagcatggcctcattgaaagaactagatcaaagac

SEQ ID NO: 408743 - DNA, 98 bp, Homo sapiens
agaaggcttatgaggatggctgcaagactgtcgacctaaagcctgactggggcaaggtcctgaggcacgtgaatggccaggatcagattgtgcccggc

SEQ ID NO: 408744 - DNA, 100 bp, Homo sapiens
tcatgagcaaggtggcaagatcatcaagtgagtcagacgtgcagctctgggaaacagaagaggatgacatgacagaagaatttatccagttggcgaagga

SEQ ID NO: 408745 - DNA, 90 bp, Homo sapiens
ccaatgtcttcgcaagtgccatgatgcatgccttagaagtgttaaattcacaggaaacagaccattcctcaagaattttgtatccaaggc

SEQ ID NO: 408746 - DNA, 96 bp, Homo sapiens
aacacctatggccggataactaaggatgtggtgctccaatggggagaaatgcccacgtctgtgggaaggtgtcttgctgcaggtaactaatgaaga

SEQ ID NO: 408747 - DNA, 74 bp, Homo sapiens
cggcgctggaagggatgtcgtctcagcagtgctcgggcgcaggttctgcggggagtgtctccagccctgcctgc

SEQ ID NO: 408748 - DNA, 98 bp, Homo sapiens
cgaaatgggcccctggatggatagctactccggaccttacggggacatgcgaacttcatggaggaacacggagtgacccaaaccgaacatatggctac

SEQ ID NO: 408749 - DNA, 83 bp, Homo sapiens
agaggattgtgtctgcttggtgtggagccatgaaggtgatgtgtccaatctagatcccaacttctcatttgaaggcaccaaac

SEQ ID NO: 408750 - DNA, 83 bp, Homo sapiens
ctcggaagccagggcccgcggcctacaacgtggatcagcgccgtgccgtccctgcagtgacaccgaggtgctcctagccgtct

SEQ ID NO: 408751 - DNA, 100 bp, Homo sapiens
gtgcaggagcaggacttacggcagtgggggctgacagtttcaccagtgatcattaaagaatgggcagcttacaaaggaaagtctcctcaaaccccggaac

SEQ ID NO: 408752 - DNA, 100 bp, Homo sapiens
aactttcccagtccccgaggcggatccggtgttgcatccttggagcgagctgagagctcgagtgaacaaggggagaagaattgccttcagctccacgtcg

SEQ ID NO: 408753 - DNA, 100 bp, Homo sapiens
gcggatttttggcctcatactctgttatagataaacaaggagtacaagcgcaagctagccagagtttccctggtgcgcaaagaactcaggtcccggatcc

SEQ ID NO: 408754 - DNA, 90 bp, Homo sapiens
ctgagctagagggtgaagctggcggagcaggaggatgggcgaactgtcaagtaatccacctctggctaccatccttattcctcctcatgc

SEQ ID NO: 408755 - DNA, 75 bp, Homo sapiens
cggcatctagtctttccgcttcttgaatttctctctgtaaaggagattgctgctaaaattgattcaattcctcac

SEQ ID NO: 408756 - DNA, 100 bp, Homo sapiens
ccagaatggctgtctcagtacttcgcctgacagttgtcctgggactgcttgtcttattcctgacctgctatgcagccaaaactggacaagccaaggcatc

SEQ ID NO: 408757 - DNA, 100 bp, Homo sapiens
ctgcagccacaggcaagcctccacttgaaggggcaagctctgtgtgattgattggaagacatcagagaaaccaaagccttttattcaaagtacatttgac

SEQ ID NO: 408758 - DNA, 96 bp, Homo sapiens
tcaaacattccggccactgcgagaccgtacaggcccaagctggatggctgcaacatgattatggccacctgtctgtctacagaaaacccaagtgga

SEQ ID NO: 408759 - DNA, 74 bp, Homo sapiens
cagttaggatggaggcgggatttcctatggcaagtggtccagattatgtgtgacaatccaagaagccaaccaat

SEQ ID NO: 408760 - DNA, 98 bp, Homo sapiens
gtcggtgagcgcgtttcccgcctgagcgcaactagcggcgggtcgtgggcacctccagtctctgctttctatccgtcaagatgataaagtcgtgtgcc

SEQ ID NO: 408761 - DNA, 100 bp, Homo sapiens
tgacagagacaacaccgagtatgagaactgaactagatgcagagcacgcccagaaggtcctggaaatggagcacacccagcaaatgaagctgaaggagcg

SEQ ID NO: 408762 - DNA, 100 bp, Homo sapiens
gttgaacatctgtgcccctggggaccaggagctcattgctctggccaaaaatcgatttagcctgaatataaaaaggcttctgcagaaccccaaagtgaca

SEQ ID NO: 408763 - DNA, 100 bp, Homo sapiens
atatttgatgaggtggatctgacagatgccagcgtagctgaatccagtaccaaaaacgtcaacaacagttttacgtagagacggggtttcactgtgttag

SEQ ID NO: 408764 - DNA, 83 bp, Homo sapiens
tcggttctctacttccaacagaagcacttcagaatccagaggtggtggcccttcgaggtggactaaacaccatcttgaaaaat

SEQ ID NO: 408765 - DNA, 135 bp, Homo sapiens
gaggccacggcgagccccaggagccgggggacgacttcttcaacatgctcatcaagtaccaggaaagaccacagcaagattctttcattcgtctcctcctagcctgggggaccaggctcgaactgaccctggaca

SEQ ID NO: 408766 - DNA, 100 bp, Homo sapiens
ggaacagctggatttacctgtgagacaggcagaacaacatagacgtttgtcctgaatgtggtcacctgaaacagaaacatgtcctttgtgcctactgcta

SEQ ID NO: 408767 - DNA, 100 bp, Homo sapiens
gctcaaaacgcccgtgcggaccacggcctgtcagcacgtgaggtcccaggtgattgaaaagtttgaggccttggacattgagaaggcagagcacatggag

SEQ ID NO: 408768 - DNA, 82 bp, Homo sapiens
ctgcagcgggagctggacggcgagcgcgagcggcgcgagaaagctacagcatgctggccatagggattggaaccctgatcta

SEQ ID NO: 408769 - DNA, 100 bp, Homo sapiens
ctcagctcgggccacggagaggagcagcccccggagacagcggcacagaggtgcttctgccaggttctaaatggcttctaagaagttgggtgcagatttt

SEQ ID NO: 408770 - DNA, 95 bp, Homo sapiens
gcttcacatgtttcttgtacagttgagatgtgcagtgttacaactccttgccgaggagtgaccttcctatttcctatacaagcaaagacattcca

SEQ ID NO: 408771 - DNA, 73 bp, Homo sapiens
ttttgttcctgcttggctaaatttctcaacaccacagtcagctaagaattgaagatgttcctgctccttctac

SEQ ID NO: 408772 - DNA, 51 bp, Homo sapiens
gaggagtcgccgccgccccgagtcccgtgagaaagatcagtctaaagaaaa

SEQ ID NO: 408773 - DNA, 83 bp, Homo sapiens
cacagggtatcagccgaaccaagtactgggaggtcagggccaaaactggaaccaaggatttaataactattatgatcaaggat

SEQ ID NO: 408774 - DNA, 90 bp, Homo sapiens
ccaacatggcggaacgcaggagacacaagaagcggatccaggagacccgtgtacagtatcatctcagttggagttagaagaagcctttag

SEQ ID NO: 408775 - DNA, 73 bp, Homo sapiens
aatctttacaagcttgtaaaatctcagagccagagcccagaggtggagcagttagggagggttgtggaactgg

SEQ ID NO: 408776 - DNA, 71 bp, Homo sapiens
ggcggtcgcggcggcgggccgagccctgcggcgggcgggaggagccaaaaacctgtatatcatctccgtga

SEQ ID NO: 408777 - DNA, 51 bp, Homo sapiens
gtacacagacgagcatggggaaggcaaccctgctcagcccacttccctcca

SEQ ID NO: 408778 - DNA, 74 bp, Homo sapiens
gcggagtcggggctcctgacgttcctgagggaagacctcaattaccatgacccaacagtgaaacacagcacctt

SEQ ID NO: 408779 - DNA, 50 bp, Homo sapiens
cctcattgctctttggcgactcttattgagcgatcgtcttctgatcaaag

SEQ ID NO: 408780 - DNA, 75 bp, Homo sapiens
ctcttctccgccgcggcactgatccccacagttcatagccctgatgaagcaagttactctgctctcctaataaat

SEQ ID NO: 408781 - DNA, 100 bp, Homo sapiens
gaccttttggacaggaaagtgtaacatcagttacagaccacaactcacactcttttggaccactgtacttttgagaaggcaaacatctgtggaatgattc

SEQ ID NO: 408782 - DNA, 100 bp, Homo sapiens
gttccatcatggcgtcaatgcaggtttcgacacagccccaactgctggtacctgagaaactggactatccacacctggattaggcagtgtctaaaatatg

SEQ ID NO: 408783 - DNA, 100 bp, Homo sapiens
ttgcagttgttgaaattgtccccgcagttttcaatcatggtagacatagctgacattgagaatgaagagaaccgctactgtctattcatggaactcctgg

SEQ ID NO: 408784 - DNA, 100 bp, Homo sapiens
ctggttggcccagctccttggggtttccggctgcagggcggtaaggatttcaacatgcctctgacaatctctagtgtaatcaaatgcaaagcagctgtgc

SEQ ID NO: 408785 - DNA, 100 bp, Homo sapiens
aaaagcaagaaatcaaataacacagttggaatccttggaggaactctctggaatgaaaaataaaatacaagtagttgtgcttgaaaacgaagggctccag

SEQ ID NO: 408786 - DNA, 82 bp, Homo sapiens
ccgcggcggcagcagcagtgagaggtcagcccaaggccaaccccactgtcactctgttcccgccctcctctgaggagctcca

SEQ ID NO: 408787 - DNA, 100 bp, Homo sapiens
cgacaacagcttgacgagcagatacttctgctgcagcattccaagttgctctatatgcaatcagtgctgtctactttgctggagtgatggtgcgactgat

SEQ ID NO: 408788 - DNA, 100 bp, Homo sapiens
atccatatcataagtggaattttggagatattcaaagtcaatcaccttctgctgcttggatgggtggatttggtgctcagcctccccaaggacaagctcc

SEQ ID NO: 408789 - DNA, 82 bp, Homo sapiens
cgcacaggaacaggagggtctgatgtcctccagcttgctttgaccagatcaagttctttaagtgacttttcctggtctcaaa

SEQ ID NO: 408790 - DNA, 51 bp, Homo sapiens
cagattcgcagtggtcgcttcttctccttgcaatggcagatgagtctgggg

SEQ ID NO: 408791 - DNA, 100 bp, Homo sapiens
ttcctggtttacctggcactcctggacaggatggattgccagggcttcctggcccgaaaggagagcctgttcagaaaagagaccctcgtgactggactgc

SEQ ID NO: 408792 - DNA, 132 bp, Homo sapiens
ctggtgtttcacaagcaatccagaggtacgctacgaagtctgtgacattcctcagtgttcagaagccatgctgtgacctacaagcaaactaaatagccaacatttctgaacccctaagtctcctgtgccaag

SEQ ID NO: 408793 - DNA, 74 bp, Homo sapiens
gaagtcatggaactgaaaaagcactgactgctctgcttaatctcttcaagaaaatgaggaggaggagattggga

SEQ ID NO: 408794 - DNA, 71 bp, Homo sapiens
gagaaggagaacgacggctactttcggaagaaatgcgtgtactgccggaagcggatgaagaaggtgtcagg

SEQ ID NO: 408795 - DNA, 82 bp, Homo sapiens
tgatatgcaatgtcacttacaacattaatcagatactgcatttaagtacctggagtagaacagaaaaattattatgtctgtg

SEQ ID NO: 408796 - DNA, 85 bp, Homo sapiens
ctcaatatctgtcttcggtggactccttcggcagtccacccaccgccgccgcctcccagcctcaggcccagagccagcacgagac

SEQ ID NO: 408797 - DNA, 100 bp, Homo sapiens
gtaggctccttcaacccgtggctgatagctgaaagatgatactctccaagctgtaaggaagaagtcaaggattaaggagacctggactggagaggagcct

SEQ ID NO: 408798 - DNA, 82 bp, Homo sapiens
attttggtttaatatctgattgggacaacattcagacccatttccagtcatgaattgggaaaatgaggtacgttagtgttcg

SEQ ID NO: 408799 - DNA, 75 bp, Homo sapiens
cccaggccctggagtgcatgcgcaggtttggtgcacctcgatttggaggaagtagggcagggcccttatctggaa

SEQ ID NO: 408800 - DNA, 83 bp, Homo sapiens
tgcaccgacctcgacgtcttgcctgtgtcccacttgttcgcggcctatagtgagtccattcttgcacaccgagaaaatatgcg

SEQ ID NO: 408801 - DNA, 75 bp, Homo sapiens
actgtgagagctgtcggcactgtaactctgacctcctgccccccgaggtctgcagtctcctgaacccagcagcca

SEQ ID NO: 408802 - DNA, 98 bp, Homo sapiens
ggcggtggggctgcggcgcctgggactgcaccgcaccgagggcgagctccaggtccagatggctgtggaggccaagtttgtccaggacaccctgaaag

SEQ ID NO: 408803 - DNA, 82 bp, Homo sapiens
cttcagaccccaggttctttggttaatttggagtggcccctggagtcagtttcctacaccatccgaggccccacccagcacg

SEQ ID NO: 408804 - DNA, 100 bp, Homo sapiens
tggtttagaaatggaaaaatgtgtttctcagtttgggtgcagatcatttgctttgctttttgatgatatagaccataatatgtgtgcagcagacaaagag

SEQ ID NO: 408805 - DNA, 74 bp, Homo sapiens
ggtataccatcgtcaccatgacaacactaggcagaaacagtcctgctccagctgtaacagcagcatctgtgacc

SEQ ID NO: 408806 - DNA, 50 bp, Homo sapiens
taccaaggacagcttttttcctgcaagaagatcacccttagttcttcctc

SEQ ID NO: 408807 - DNA, 82 bp, Homo sapiens
agcgagctgagtggttgtgtggtcgcgtctcggaaaccggtagcgcttgcagcatgtattctaccttgtaaatactgttatt

SEQ ID NO: 408808 - DNA, 90 bp, Homo sapiens
cggtgctgctgctcctgcagctgccttttctgccatcagggtggttctcttcccaaagtggaagccaaattcatcaattatgtgaagaat

SEQ ID NO: 408809 - DNA, 98 bp, Homo sapiens
ggagatggttcagcaggacaaggaggtgaatacgctttggccgaatacacagaagtgaaaactgtcaccatcaaacttggcgacaagaacccctgaag

SEQ ID NO: 408810 - DNA, 74 bp, Homo sapiens
agaaagtgaacttggcattttagatctaattcaaaatctcacaaactatgatctctgcagcatttttcttggaa

SEQ ID NO: 408811 - DNA, 78 bp, Homo sapiens
tttcattgtctcggacgtgcggggcctgggcctcccggtccgcaagcagaatgggtgcgcacagcctcgggaccgcga

SEQ ID NO: 408812 - DNA, 87 bp, Homo sapiens
cgcaacaagatcccctatgagagtcccatcttcagcagagactactccagtggttttggcggcaagtatggcgtgcaggccgaccga

SEQ ID NO: 408813 - DNA, 51 bp, Homo sapiens
aaggattccaagtaactcttatttgggagtaaggcatgtcgaggctttggc

SEQ ID NO: 408814 - DNA, 75 bp, Homo sapiens
aacacctttctcctgatggccagtatgtccccaggattatgtttgttgctctggatgagggggatattgccttgt

SEQ ID NO: 408815 - DNA, 89 bp, Homo sapiens
gctagtctgaccctccgccaggcaaaaggaaggcgggtgccccggtgatgactggtgcgggagagagcaccaatcccgagaacagcgag

SEQ ID NO: 408816 - DNA, 98 bp, Homo sapiens
gttttcgaagttacagagatcaaacaattgtagatcccttcagttcaaaacataatgtgattgcttgtacatgcagtggccatgcaaatatctgtcat

SEQ ID NO: 408817 - DNA, 100 bp, Homo sapiens
atgaaggtgaaacagattggaaattaattgctatcaatgcgaatgatcctgaagcctcaaagtttcatgctgtcggaaaaggtaacagaagatggaactc

SEQ ID NO: 408818 - DNA, 100 bp, Homo sapiens
gatttgttaaggattccaagtaactcttatttgcccaatagtattaagaatgatgaatgatcaactcatgtttctggaaagagcatttattgatccatta

SEQ ID NO: 408819 - DNA, 73 bp, Homo sapiens
gacagttcgctacacagcaatgcatcgaggtttctaagcatgaattgaggaacagaagaagcagagcagatga

SEQ ID NO: 408820 - DNA, 90 bp, Homo sapiens
atttgttaaggattccaagtaactcttatttggaggaagacaatggtcctataatgcccttggataagaaaaggaaacttttgagctgca

SEQ ID NO: 408821 - DNA, 100 bp, Homo sapiens
ctatattcagtggctaaatggctccctgattcatggattgaaagaaggtggcaagaggaagaagcagaagcagagagaggagtcgaagaagaagaagtcg

SEQ ID NO: 408822 - DNA, 51 bp, Homo sapiens
atacagttgataaaattgttgaattggcagagggggtcgatttgggaggaa

SEQ ID NO: 408823 - DNA, 100 bp, Homo sapiens
ttcttccattaataaatcaactcagtgatcctgattatattaatcagtatgtcatatggatgacatcacttagtgctcttacccagctgatgaaaaagat

SEQ ID NO: 408824 - DNA, 90 bp, Homo sapiens
caaaagtgatgaaacagtccatttgtcataaagtaagatgcagctgtggcatgtcaaccagcttgattcctaagcggctgtacaaggccc

SEQ ID NO: 408825 - DNA, 100 bp, Homo sapiens
gggagcgcggggcgacgctggctgcagggacccggtgacagcgtgagagggtgtactctgtgtgaccgcgcctatccctcggactgtcccgaacatggac

SEQ ID NO: 408826 - DNA, 85 bp, Homo sapiens
tgaagagcgacaagccgctggcagccgcggatctcaccgccgctcagggtactaccattaaagataccttcttctcagcaaatct

SEQ ID NO: 408827 - DNA, 90 bp, Homo sapiens
tcgctttgattgctaccctggtatatgcacttttcaggacccagagttcaacaatacagatcagattgacctgtatgatgatgtgctgac

SEQ ID NO: 408828 - DNA, 100 bp, Homo sapiens
tcactcccgctgtctcagcagtctacagcacgacaatccatggacacaagggaccaatcactgcagtggcttttgctcctgatggaagatatcttgccac

SEQ ID NO: 408829 - DNA, 98 bp, Homo sapiens
tcgctgggcaggggtaccttcgggaatctatttggagtccaggaatgagactaagcatttatctgtaggaaaagatattattcaaaacactggttctc

SEQ ID NO: 408830 - DNA, 100 bp, Homo sapiens
ggaaggctggctgcacacgggtgatgctggccgcctggacgccgatggcttcctctacatcactgggcgcctcaaaggagggccctcctggacccgggag

SEQ ID NO: 408831 - DNA, 100 bp, Homo sapiens
acctgtgaaagaccgattttctgcagaagatgaagctttgagtaacattgccagagagctagttcttctggagctcaacttcttgccaaccacagggacc

SEQ ID NO: 408832 - DNA, 50 bp, Homo sapiens
agatgatcgtggtcatgacactattgtatgtccgtggttcagaccctgta

SEQ ID NO: 408833 - DNA, 50 bp, Homo sapiens
cagtccctgatcagtgtaccattgaagccaaaccctctgcccccgtggta

SEQ ID NO: 408834 - DNA, 75 bp, Homo sapiens
gagaagagcgaccagctcactaagaacatggacttcactgaggatgtcaactgtgcttttgagttcctgctgaag

SEQ ID NO: 408835 - DNA, 50 bp, Homo sapiens
gacgagggcaagtgcgcttacatccgaggccttagaaaatttacgtgtat

SEQ ID NO: 408836 - DNA, 97 bp, Homo sapiens
acaatggccatgtcctacgtgaaggatgacatcttccgaatctacattaaagtcttgctggtggatgccctccttactccccaatatatacgtcttg

SEQ ID NO: 408837 - DNA, 83 bp, Homo sapiens
ctgagcaacccactggatatatgctatgacgtgctctgtgaaaatgcctactttcaggatgatggcttggaaaaaagtccaat

SEQ ID NO: 408838 - DNA, 90 bp, Homo sapiens
cttttgacaactccaatgttgactcatatcgacaaagtcttcaaacacaaggacctacaacagcagctggtggatgccaagctccagcag

SEQ ID NO: 408839 - DNA, 87 bp, Homo sapiens
atgagaccctggtggagtttgctattggtacatgtcccagagcaagcacacggaggcccgggagctcatgtactcgggagccctgct

SEQ ID NO: 408840 - DNA, 49 bp, Homo sapiens
ctacaacctgcccgagagcgccccgatgcaccagcaaggaatactgaag

SEQ ID NO: 408841 - DNA, 75 bp, Homo sapiens
accgggacagctaccggcgcatccttatgcctgacatttaccccggtaactgctgggcatttaaaggctcccagg

SEQ ID NO: 408842 - DNA, 100 bp, Homo sapiens
ttttggaagaagttcgggaaagataccagctgcatgacaggacatggactttgtacgctttatcatcaactgctttaaggtttattaccctaaatacctc

SEQ ID NO: 408843 - DNA, 98 bp, Homo sapiens
atactgtgtagtgcagtttttagaaaaggacagcaccctcacggaaccagtcgttccaggggtagaggaggcatgaaggatgaccgtcgggacagata

SEQ ID NO: 408844 - DNA, 101 bp, Homo sapiens
gccccctcctggcgacccgcaagtactccaaagattcaggtttactcacgtcatccagcagagaatggaaagtcaaatttcctgaattgctatgtgtctgg

SEQ ID NO: 408845 - DNA, 75 bp, Homo sapiens
ctggcatcagggaggctttcagccggagaagcgagtttcagctgggagatgacagtctgtctgcagtcacctttg

SEQ ID NO: 408846 - DNA, 90 bp, Homo sapiens
ttatgaacgagctcgccaaaagatgttattggagctattttgtaaggattcactccttctccagttgcacagccacacccttcagctggc

SEQ ID NO: 408847 - DNA, 75 bp, Homo sapiens
gccaagggggtgcagtacaacagagggccctcctggacccgggagcggaccctggtggcggtgaagcccgatggc

SEQ ID NO: 408848 - DNA, 100 bp, Homo sapiens
agagtcccccccaggaaacctgagcccctggttaagctggcagccaggaggcaggagcagcgggcgacagtgcgggccctgtggttctgggccttctcgc

SEQ ID NO: 408849 - DNA, 83 bp, Homo sapiens
cccgatggtagccgaggagctgataaccagcccgagtcatgcagtcttttcgagaaaggtgtggtttccatggcaaacaacag

SEQ ID NO: 408850 - DNA, 100 bp, Homo sapiens
gtctagcatttccttttaaacatcctgatgaatggagagcatatcataggtatattgaactgttcctgaattcatgtccaaaaggaaaataagactctag

SEQ ID NO: 408851 - DNA, 82 bp, Homo sapiens
cctgctgcggagcagacgtgaagtgatcagggccaaagcggtcagtgagaaggaagtggactctggaaacgacatttatggc

SEQ ID NO: 408852 - DNA, 75 bp, Homo sapiens
tcccttatctccctcattgaggattttgggagccttggagagtgtgacccaaatcttcaggtgttcaatgttttc

SEQ ID NO: 408853 - DNA, 100 bp, Homo sapiens
cctgccgcgaagccccggcgcaccgcaaacttcattccagggtctccctccactgctgtagtaacccgggtccggggcctcggtggtgctcctgatgccc

SEQ ID NO: 408854 - DNA, 75 bp, Homo sapiens
gaagattgtgaagcaatagcctaagagcgcttcgaccatcactgcccctgggtggggaattgtgttggaaagagg

SEQ ID NO: 408855 - DNA, 100 bp, Homo sapiens
gggcaagaagaggcacgagatgccccctcacatctatgccatcacagacaccgcctacaggagtatgatgcaaggtcgccactgggacactgtgaaccag

SEQ ID NO: 408856 - DNA, 100 bp, Homo sapiens
acagagttgttgttcagcagaaataatcaagagttgacatcataccagattccaacatgccatgggaggagtacctgcctgggcagagactactaagcgg

SEQ ID NO: 408857 - DNA, 74 bp, Homo sapiens
agcacaagagcaccatactttgaggaaattccaacagaatgggtttcctgaaacggatttgcaggaattcctga

SEQ ID NO: 408858 - DNA, 116 bp, Homo sapiens
tgttgatctgggaaatgtgcctaatggcagtgccctgacagatggtttgaagatgccgcatttggattggatgaattccaaattctgcttgcttgctttttaatattgatatgctt

SEQ ID NO: 408859 - DNA, 100 bp, Homo sapiens
catggcctttgagggcattcatctgcctcaggcgacacaagatgtacagagagcagatgaaccttacctccctggaccccccactgcagctccgactcga

SEQ ID NO: 408860 - DNA, 97 bp, Homo sapiens
ctttataactccaaacgagtggctgaaactgcctacaagatacatagaaagtgaattttgtagaaggagaagtattggatacaaatgaccgatttct

SEQ ID NO: 408861 - DNA, 100 bp, Homo sapiens
gagcatatcaatgcaggacgtacagttcagcagaaagatgaaggtcttagaatcattgattggaatgatccagaaattcccttatgatgaccctacttac

SEQ ID NO: 408862 - DNA, 100 bp, Homo sapiens
gaggccaatgatgggagaccaccgggatgggcagatccggaacatggtggcggtgctggaagtcatctccagcctggagaaataccctattaccaaagag

SEQ ID NO: 408863 - DNA, 97 bp, Homo sapiens
ttccccaaggaaaatcttttcagcttccagacagcaaccacaactatgcaagcgctggagcagctggggttcaacgccctcctgcagctgatgatcg

SEQ ID NO: 408864 - DNA, 80 bp, Homo sapiens
ggaaggaagatccggcgcggggcacaggatccggagctggagcccccagcaaacggggattcagcgtccgatcctttgga

SEQ ID NO: 408865 - DNA, 83 bp, Homo sapiens
agagcaagcgcggggaaccaaggagacgctcctggcactgcaggggtcttgctcctcagaacaaaccagaattgcagaaggtg

SEQ ID NO: 408866 - DNA, 50 bp, Homo sapiens
acttccagtttttcaagaagtaagaccaagactggagtaagaccttttaa

SEQ ID NO: 408867 - DNA, 73 bp, Homo sapiens
gcagcctcaacctcctggactcaggtaaatgagctggatggtatcccgttgatcctggacaactgcaacatca

SEQ ID NO: 408868 - DNA, 75 bp, Homo sapiens
agtatggctgcagaggatccatctgtcttagcaaggctgtcatcacagctttggggtgaacctgttaatctccgt

SEQ ID NO: 408869 - DNA, 50 bp, Homo sapiens
tgactttttacttgatccatacaaggcatgttatgttacccagagaactt

SEQ ID NO: 408870 - DNA, 75 bp, Homo sapiens
caaggacaaacccaccttcatcaaaggggttgtgccaaccatcttggagaaattcaaagagaagaaacctcaagt

SEQ ID NO: 408871 - DNA, 82 bp, Homo sapiens
tgggccagcaactacgtagatcatgattccacctttccactgatagactcaagttcccagaaccagattagaaaacgcatcg

SEQ ID NO: 408872 - DNA, 100 bp, Homo sapiens
caacatccagtttgaagcctttcatgtttttaagttgatgacagtgcaattttggattgccagttcagtgagttttatcatacgcctccacctggttttg

SEQ ID NO: 408873 - DNA, 97 bp, Homo sapiens
tcagagccccttacccgccgccgcggccaggccccccaacatggactgtctctgtatagtgacaaccaagatcttcgcaaatactgtggacaatgcc

SEQ ID NO: 408874 - DNA, 100 bp, Homo sapiens
catcatgaaagcatttatcaatggaaggaaactttttggtacccctttttatccactcattggcagagaagctgctgcagttcatggagctcgtttcaaa

SEQ ID NO: 408875 - DNA, 75 bp, Homo sapiens
gtcgcggcggccgaggctcgggaatcctgttacacctgggatttaggcactttcaatctgaaaaaatacatatcc

SEQ ID NO: 408876 - DNA, 83 bp, Homo sapiens
gctttccactcggctcctgtcgtccgttctctcaggctcccgttcagggtgtcttttatgaataatcaaaagcagcaaaagcc

SEQ ID NO: 408877 - DNA, 100 bp, Homo sapiens
gccccgcacgcgcgacttcgccactgcagccgctgagctccgtgtgctggacccaccggagctggagtatcaggaggcagtcagcaagagcacctttcag

SEQ ID NO: 408878 - DNA, 102 bp, Homo sapiens
aacaccgttcccccagccgggctgggactttgaacatgtcggggatcgccctcagcagactcgcccaggagaggaaagcatggaggaaagaccacccatttg

SEQ ID NO: 408879 - DNA, 90 bp, Homo sapiens
aagaaatgtatcaaatctgaaacctgtcccgctcattggtccaaaattgaagagaagagtggagttctgtcctccctgccttttattgct

SEQ ID NO: 408880 - DNA, 100 bp, Homo sapiens
gtgccggctgtggaactccagtagagcctagagttcatgatcaagtgttgcccacaccaaatgcttcatccagagtcatagtacatgtggatctggattg

SEQ ID NO: 408881 - DNA, 75 bp, Homo sapiens
cgcgaaggcagtaccgtttcctcagcggcgggtcctgctcaatctggaattttgtcagatcgtgaagtggtaaac

SEQ ID NO: 408882 - DNA, 80 bp, Homo sapiens
ggaaaaattaatcaacagagtgggacctaatggtgagaggttgtagatgagcatgagagtgtggagcagagtcggcgagc

SEQ ID NO: 408883 - DNA, 51 bp, Homo sapiens
ctcacaccccttccagctacatcgaaacgttggtacaggtcttgggcctac

SEQ ID NO: 408884 - DNA, 100 bp, Homo sapiens
gcacttcctattccactggattgggaaagaccatggcagacacttcgtgtatgatcatgtgttcgctgagaagatcacttccttgcaaggtcagccaagc

SEQ ID NO: 408885 - DNA, 83 bp, Homo sapiens
tgcagagccaagcctgatgccagcatggaacccaagacagaccaggatgaggagcattgccggaaagtcaacgagtatctgaa

SEQ ID NO: 408886 - DNA, 83 bp, Homo sapiens
tgaaccttcgcattcagaatttgaccatcttggtgagaaacattaagacctactaccaggatattagaaatggctactcccca

SEQ ID NO: 408887 - DNA, 96 bp, Homo sapiens
aagaaggagcaaaactaaatgtggcaattgtaaggccatcgattgttggtgccagttggaaagaaccttttccaatgatccacaagctggcagccc

SEQ ID NO: 408888 - DNA, 51 bp, Homo sapiens
cggagttcaaacctaagcagctggaagggatgaatttttagatgtgatcta

SEQ ID NO: 408889 - DNA, 100 bp, Homo sapiens
ccccatgctgggtgtgcgggacgacgtgacagctgtctttaaagagaacctcaattctggcttctcatcgaatgaaaactccagtcaagtacatgaccgg

SEQ ID NO: 408890 - DNA, 100 bp, Homo sapiens
gcaatccacgccacggaatccccgagacaatgcagatcttcgtgaagactctgactggtaagaccatcaccctcgaggttgagcccagtgacaccatcga

SEQ ID NO: 408891 - DNA, 75 bp, Homo sapiens
atgttttggacaagagacgtggccgggaccctgagatggggggaaagccggctctcaaaattagagagatgtgta

SEQ ID NO: 408892 - DNA, 80 bp, Homo sapiens
acaagatcaagaactccatctggcaccccagcctgcggtccatgtgcaggggcaggagccactgactgcctccatgctgg

SEQ ID NO: 408893 - DNA, 100 bp, Homo sapiens
ttcctggaggcctcctgtcctcggggaccccagcacctcatcatcagcattgctggagccaagggcccagacatgtccgtccttgtaagttaaaagcttc

SEQ ID NO: 408894 - DNA, 83 bp, Homo sapiens
agagattcagttgcaaaaggacccgggttttcgaaattcttcttatccagagacaggcttgaagtagaaaatgccatgatgag

SEQ ID NO: 408895 - DNA, 82 bp, Homo sapiens
atcctgggccccacgtgttgcctgaccattcctgagcccagttgatattcactgatggactccaaagaatcattaactcctg

SEQ ID NO: 408896 - DNA, 100 bp, Homo sapiens
cctctgtgtccctgtgacctgcagatattgggagatccacagctaagacgccgggactccctggaaacctagaaatgagaatggatcttggagaatgtct

SEQ ID NO: 408897 - DNA, 80 bp, Homo sapiens
caggacacggcctacaacaccaagaggggtattccctcagcggatactacacccatccatttcaaggctatgagcacaga

SEQ ID NO: 408898 - DNA, 82 bp, Homo sapiens
ggaaccagtgccagtactgccgtctcaagaagtgcttccgggtgggcatgaggaaggagggccgccatggcatcagatgaag

SEQ ID NO: 408899 - DNA, 83 bp, Homo sapiens
catctcgctcggctgcgggaaatcgggctgaagcgactgagtccgcgatggaggcctccggtgtggctgtctctgatggtgtc

SEQ ID NO: 408900 - DNA, 75 bp, Homo sapiens
ctcggggacattattgcgcgtggaacggctgcttttggaagggccaattcctgtccccccagcagcatggcatcg

SEQ ID NO: 408901 - DNA, 74 bp, Homo sapiens
tgaagtacatgaactcagggccggttgtggccatggtgttcaggcgcttcgtggaggttggccgggtggcctat

SEQ ID NO: 408902 - DNA, 100 bp, Homo sapiens
caagatcgaggggcttcaggacagtgaacatagataattgacgaccttgccaacctagtggagaacacagatgaaaaacttcgcaatgaaaccaggcggg

SEQ ID NO: 408903 - DNA, 90 bp, Homo sapiens
gtgtgggtttcccaagcaaggttccttggaagaagatgtctgcagaggccccttcacagatgtagtcactacaaatcttaaattgcgaaa

SEQ ID NO: 408904 - DNA, 85 bp, Homo sapiens
ggggccctgggtgaagtgctccgtcgcccttgcctccaggtctataagggagaattccaactacctgactttcttaaagaaaaac

SEQ ID NO: 408905 - DNA, 95 bp, Homo sapiens
tacaccgtggtgacattgtatcattggtctactctccagagagaccggatcttcaaacattttaccaggaagcgccaaagggctatgcgaaggcg

SEQ ID NO: 408906 - DNA, 100 bp, Homo sapiens
acacagtgtgtttgattttactcatccatgtgaccatgaggaaatgagagaaatgcttacacacagaaatgggaagaaggagaaagggccaacccctgaa

SEQ ID NO: 408907 - DNA, 100 bp, Homo sapiens
ctgtggagcaagtcaccaactttgaagaggacttggaaaaggagagtgacacacccctccagcaagtatccattgaagaaattctagaagaacaaagggt

SEQ ID NO: 408908 - DNA, 98 bp, Homo sapiens
gtgggatcgatgtttcaatattggaagcgctttgatttacagcagctgcaggaaatgcttccagactgcacacttttacttagaggacagtacatccc

SEQ ID NO: 408909 - DNA, 75 bp, Homo sapiens
aagttgaaaatggacgagtaatcgcctgctttgattcattgaaagttgaatcaagggattctttgaatagcatag

SEQ ID NO: 408910 - DNA, 75 bp, Homo sapiens
ggtatttcaaaatgagtgaagcatgactctcacagatgaaggcctagacgcagggccgttgctccagggagaact

SEQ ID NO: 408911 - DNA, 100 bp, Homo sapiens
tggagcaattgaagctgactactaaggagaataaggagctgctgacgtgctgtgaggaaggaaagggagagattaaagatggcctggaggtgatgctcag

SEQ ID NO: 408912 - DNA, 100 bp, Homo sapiens
tttccgagcgggtggaggtggtgtccccactgagctcttggaagagagacataaccagtgcggtgcaatccaagcgaagaaaatccaagtaaacaagcag

SEQ ID NO: 408913 - DNA, 100 bp, Homo sapiens
agcggacacgggaatatatccgaagcctgaagatggttccaagtattccctatctagattacatgcagcaaactggaggtcaagcacatctattcttttg

SEQ ID NO: 408914 - DNA, 135 bp, Homo sapiens
catcacacaaaatgtgctggttgatggtgttaagaaactctcagtttgtgtttctgagaaagtgcctacaccaactaatgttacaattgaatcctataacatgaaccctatcgtatattgggagtaccagatcat

SEQ ID NO: 408915 - DNA, 100 bp, Homo sapiens
aggaatgcagcagagaggactcgccatcgtggccttggctgtctgtgcggccctacatgcctcagaagagcagcccgacggccatggaggctgaagagac

SEQ ID NO: 408916 - DNA, 98 bp, Homo sapiens
agggaggtgaacagccaggaggaggaagaagaggagctcttgaggaaagccattgctgaaagcctgaatgaggatgtcctcaacacccagtgtggcta

SEQ ID NO: 408917 - DNA, 97 bp, Homo sapiens
tatcgcatctcttaatcaacaagttgcttttggaatcaataaggtttccaagagtcggatggtcagggctgccctttctgtcgttgtgaaataaaag

SEQ ID NO: 408918 - DNA, 95 bp, Homo sapiens
gcccatcagaatggcagatggcttatgaaccacagaatgtcacaggtagactaatggttggcctacgttggtggaatcacattgatgaagatgga

SEQ ID NO: 408919 - DNA, 75 bp, Homo sapiens
ggaagatcctggaggtggatctgaagaacggatctctgagctgcccagcatagtccaagacctagccaatggcaa

SEQ ID NO: 408920 - DNA, 100 bp, Homo sapiens
gaacagcttctcatctttccacaggataggtcccgttcaagaagttcttccagttcgcagtcaagatctcgttccagttccagagaacgttcgagatctc

SEQ ID NO: 408921 - DNA, 82 bp, Homo sapiens
catcctgccgtccttctccactttcgccagcccgtgccgcgagcgcggcctgcaggagaaaactctcccaccatgtcgcaga

SEQ ID NO: 408922 - DNA, 112 bp, Homo sapiens
tcctccacagaggctttttgtgtgttttatcatctaaaatccaatccctcgtataataagcctagtgaaacggtcatccctgaatctgtagatggcttgcaagagaatctgg

SEQ ID NO: 408923 - DNA, 97 bp, Homo sapiens
aaaagagccctacaatgtgaagatacataagatcgtagccagacccccaggtctcttgatgggaaggaccatttctggactacagctgagattgaga

SEQ ID NO: 408924 - DNA, 75 bp, Homo sapiens
cgtctggatttccaaggaagaatttcctctgaagcaccgggactttgaacatgtcggggatcgccctcagcagac

SEQ ID NO: 408925 - DNA, 74 bp, Homo sapiens
ggcattgacatttaattttagggtcctttatatagaagggagagtaggtgtggatgtggaagcagccaagcggg

SEQ ID NO: 408926 - DNA, 74 bp, Homo sapiens
ggaacctgggcgagcagcggcgggggcccgaggggctacgtgcaggcctgccgcgccctgatgattgctgcctc

SEQ ID NO: 408927 - DNA, 82 bp, Homo sapiens
tatcattcccatcctcatataactgtttggccttcacatgttgatcccagatgcagtgactggttactacctgaaccgtgct

SEQ ID NO: 408928 - DNA, 74 bp, Homo sapiens
ggtgcctgccacctgcaaggcagctgccgtccttgggatggcctgggcaatatttaagggaaagtataaggagg

SEQ ID NO: 408929 - DNA, 101 bp, Homo sapiens
gcctctccaaagcctgcgcgagaggagccgggacacgcctagcgcgggctccaggggatcccaacaagccctcaggattcagaagtgttaaagctcctgtc

SEQ ID NO: 408930 - DNA, 88 bp, Homo sapiens
catggatacatagcagcccatccttcgtgatcagtcctatgtgatcagttttgtggttcctaaccagaaaaggttgacacttttggca

SEQ ID NO: 408931 - DNA, 50 bp, Homo sapiens
ggatggacaaatacgtgggacagaagaagctcattcacacagaagaccca

SEQ ID NO: 408932 - DNA, 100 bp, Homo sapiens
tatgtcattgggccaaagatagagattccggtacattatgcagatggtgagaacaagaccaagattggaaagccagcttcagaggagggaattacagcaa

SEQ ID NO: 408933 - DNA, 49 bp, Homo sapiens
ggacgaggacgaggacgtcaaggtctctgcatggattcccccagcccta

SEQ ID NO: 408934 - DNA, 100 bp, Homo sapiens
ctaacatagtgctacttcatgacatcatccataccaaggagacgctgacacttgtgtttgaatatgtggagctgactaaggctttggaacagaaaccaga

SEQ ID NO: 408935 - DNA, 75 bp, Homo sapiens
tagggatcggccatcacaacagcagcctcttcgaaatcaggccaacactggacaaattgatgacccccaggagca

SEQ ID NO: 408936 - DNA, 51 bp, Homo sapiens
aagagggaagacacgcggaaacaggaacttgctactaccagcaccatgccc

SEQ ID NO: 408937 - DNA, 75 bp, Homo sapiens
cggaacaggacgccctctgatgtcagggaagtcaaagatgcatccctgagttcttcctagcaggcaagcagccgt

SEQ ID NO: 408938 - DNA, 76 bp, Homo sapiens
agctgagtcagctacgggcaagcgggcagctgaagatgatgagggtggtgatgggactgatccaggtacagaaaca

SEQ ID NO: 408939 - DNA, 100 bp, Homo sapiens
gagaaagtcgtcttccacttgcacgaaagctttcctaggccaaaaagagattctggacaatcaggaagtccaagccacaatgatcctgccaagaatcctc

SEQ ID NO: 408940 - DNA, 100 bp, Homo sapiens
ccgcggatcgccgcgctcagcgacaaacaaatgtccagctcgccgctgtccaagaaacgtcgcgtgtccgggcctgatccaaagccgggttctaactgct

SEQ ID NO: 408941 - DNA, 75 bp, Homo sapiens
gatttgttaaggattccaagtaactcttatttggtattgaaaaccttccctttgaattacagagaaactttcagc

SEQ ID NO: 408942 - DNA, 100 bp, Homo sapiens
tacaaattatgattggaaggaactggaaaagtatgagaataatgttatcactattgatctggttcaaaattcttctcaaaaaactcagaatgatgtggac

SEQ ID NO: 408943 - DNA, 50 bp, Homo sapiens
gccgctgcactctacaggcaagatgacatcatggattcatcccttacccg

SEQ ID NO: 408944 - DNA, 100 bp, Homo sapiens
agccgatagcgtccgctaggctgtctgcctcggtacctgttactgctgctacttcctcgtttgacaccttcctgggagtgtacatttacaaagatgcgtt

SEQ ID NO: 408945 - DNA, 100 bp, Homo sapiens
ctacctggatgcattttaactaatcctgaggacttcatccggtcaccatctacctattcttcaaatgaggactttatcagctcagactccaaggtccgcg

SEQ ID NO: 408946 - DNA, 75 bp, Homo sapiens
ccatgtccgcgcacaatcggggcaccgagctcggcaaatcgaagggagagtggttgagatttccagactccaaga

SEQ ID NO: 408947 - DNA, 100 bp, Homo sapiens
ggaccagctcatgggcacggctcgggacggcgttcccacagctgtgcagaacttagcgccacgcgctgctgttgctgctgctgctccccgggctgttgcc

SEQ ID NO: 408948 - DNA, 100 bp, Homo sapiens
tctgagggtgccctcaatgagcacatgaccagcttagcttctgtcctaaagcacttttccagccattaactccaggctctcgagaatttgaagatgttgt

SEQ ID NO: 408949 - DNA, 90 bp, Homo sapiens
cagctttgtggctgccgtcatcaccatcaccttcaatccgctctactggaatgtggtgatggcatcagctgagaagggaaggaagcccat

SEQ ID NO: 408950 - DNA, 100 bp, Homo sapiens
gaagaatgaatataacttcaaaatgaggcaactagaacatgtgatggattctgctgctgaggatccccagcctccttctgaagaaataaaaacaggtgag

SEQ ID NO: 408951 - DNA, 90 bp, Homo sapiens
aggatattgtccttttggagcagggcaggcccaagaggatgctgagaaacttcggtccgttgtgatgccaatggaaaaggaaattgcagc

SEQ ID NO: 408952 - DNA, 100 bp, Homo sapiens
ttgctgcggcaaggacgagccggggcgctgaagatgccaattctcggaagcaagaagcagagtggaaagaaaaggcaataaaggagctagaagaatggta

SEQ ID NO: 408953 - DNA, 119 bp, Homo sapiens
aagaaggccctggacacagcaatatctctgggctttcacaggatattggtgctggaaaaggcaaatactatgctgtcaattttccaatgagagatggtatagatgatgagtcatatggg

SEQ ID NO: 408954 - DNA, 100 bp, Homo sapiens
gatcaagaagaatttgctaaaagagcggccagagttgttcatccagggagacagcgtagaatccaggagtcctgccaaagtggcaccaagtggctggtgg

SEQ ID NO: 408955 - DNA, 100 bp, Homo sapiens
gaaatgggaatgtacacgataattaaagagtaaagttgtgctcaacgcactgaaagagaacagctcagaggttgtacagccttttttaatgggttgtgga

SEQ ID NO: 408956 - DNA, 71 bp, Homo sapiens
gacaacgtggatcgttgttttgaaacgtgccagcgagatttcagattcctgtaaacctctaaagaaaagga

SEQ ID NO: 408957 - DNA, 127 bp, Homo sapiens
acaccgatggaatcccagaggaaactgacggagacgcagatgtggacttgaaagaagctgcagcggaggaaggcgagctggtgccgacaagaaagccgaggctggggctgggtcagcaaccgaattc

SEQ ID NO: 408958 - DNA, 90 bp, Homo sapiens
cgagggcgcccgacccgggactagaggacggaagggtctggaagccaaatgatttctcagtatcactaaaagcacaagggaaaaacaagc

SEQ ID NO: 408959 - DNA, 82 bp, Homo sapiens
gcagccaagcgggagcaggagaagaaacctaagaaggaagcaaatcaggccccgagtttggtgcacctcgatttggaggaag

SEQ ID NO: 408960 - DNA, 100 bp, Homo sapiens
aatgatggctttgtacggcttagaggacttccctttggatgtagcaaggaagaaattgttcagttcttctcaggttatggaggttttgatgactatggtg

SEQ ID NO: 408961 - DNA, 100 bp, Homo sapiens
ctctttccactcggctggcctctgcgcctttctctcatcccggccccagttgtgacagcgttgaggaagatatgaatgcttctgcccaaggtgcttctgc

SEQ ID NO: 408962 - DNA, 97 bp, Homo sapiens
gaagctcaacaaggcttcgattaacatgctgaggattgtagagccatatattgcatgggggtttgaagcaaagaagagatgggaaaccaaaagcaac

SEQ ID NO: 408963 - DNA, 75 bp, Homo sapiens
tccgagacaacaacggcaccgcgggtcagtatagaccttctgatttgctgtgccctgagacatatgtttgggtac

SEQ ID NO: 408964 - DNA, 98 bp, Homo sapiens
tggctcagaggctctatgcaggttccactgtcaaggtgcccctgggcgctgggattgctctagcctgtaagtataatggaaaagatgaggtctgcctg

SEQ ID NO: 408965 - DNA, 75 bp, Homo sapiens
actgtggaggtgttacttctgggctaacagctggaggaaagcaggaatgttcagaggcaaatgaagattctgcag

SEQ ID NO: 408966 - DNA, 100 bp, Homo sapiens
catttgacttggaagcaatgtttgaacaaactcgaagaacagctgtggaaagaagttgcaaaacactgggttcttatgagtgcatcaatactgggggccc

SEQ ID NO: 408967 - DNA, 100 bp, Homo sapiens
cggcggtcgacatgttccaggtcccggatagcgagggcggccgcgccggctccagttgcagagtgggcaggatcttaagacccgataggtgcagaaccca

SEQ ID NO: 408968 - DNA, 100 bp, Homo sapiens
agggtggtacaattgtcaatgtctatggtgttgtgaagttctttaagcccccatatctaagcaaaggaactgccttgcattgcatcctgaacgagtgttg

SEQ ID NO: 408969 - DNA, 75 bp, Homo sapiens
cacatggttaaggaacaggaggaaaccattcagagaaaagcaccaaggattctcttttgttgaatttgagttggc

SEQ ID NO: 408970 - DNA, 75 bp, Homo sapiens
gaagaaccattgggtctgccgcagaagatggctgtgccacccacgtatgccgatcttggcaaatctgccagggat

SEQ ID NO: 408971 - DNA, 98 bp, Homo sapiens
aattcccagtatcttctcagaccagcagctaatgttactcccacaaagttatctgaaaaactgcaagacacagagaatgaagccatgtccaagattgt

SEQ ID NO: 408972 - DNA, 74 bp, Homo sapiens
gccgacatcatcagccgctgccaggtctgcagcggcggcgcctgattcccgccccactgcccgacaccactgcc

SEQ ID NO: 408973 - DNA, 82 bp, Homo sapiens
atgacttcaaagcctattcaaaaataaaggtggacaatcacctttttaacaagatctgccactgtgaaggagatgatgagag

SEQ ID NO: 408974 - DNA, 90 bp, Homo sapiens
gcggctccggcatggccgggatcattaagaagcagatcctgaaacacctgtcccggctggcgcccatgcggctctacacgctctccaagc

SEQ ID NO: 408975 - DNA, 74 bp, Homo sapiens
agaagacgaggcagacgtggctcctgctgcacatgtatgacagtgacaaggtggacgtgcaagtcagagaaatg

SEQ ID NO: 408976 - DNA, 90 bp, Homo sapiens
atatttttggacctgaaacagaaattctggaacacctatatgatgaagtggccattctgcctgcccctcagaacctctctgtactctcaa

SEQ ID NO: 408977 - DNA, 89 bp, Homo sapiens
ggagccaccatcaagctgtctaagtccaaagatttttacccaggtacagaaggtttgggattcagcatcacttccagagatgtaacaat

SEQ ID NO: 408978 - DNA, 101 bp, Homo sapiens
ctcagtttatatgatgtcgctgggcaggggtaccttcgggaatctgatttttcaagccacattcaattgataggatgaaaaaatttaagagaaggctatcc

SEQ ID NO: 408979 - DNA, 100 bp, Homo sapiens
gcgtcggggatgtccccttcacggttaccttttcgacaaaatgattcatctagtcattgccagaagagtgggtctcctatttcctcagaagagcggcggc

SEQ ID NO: 408980 - DNA, 75 bp, Homo sapiens
ctttactactaagcaccgttggtatcctcatggacggtttcctatcctgggagcaggagagtgtgcctatttgaa

SEQ ID NO: 408981 - DNA, 95 bp, Homo sapiens
ggccgcgaaccgcagtatcatgctggccaagaagatcatcattaaggacggaggcacgagagcagagccactgccagaaggaaggggacaagacc

SEQ ID NO: 408982 - DNA, 50 bp, Homo sapiens
tggaggtctgtgcatgcatgttcaggtggtgactatcctgttgagaagca

SEQ ID NO: 408983 - DNA, 94 bp, Homo sapiens
ccggagaggagcatgaatggagcaaaatggcggatcatgtgcagacaatgcagatcttcgtgaagactctgactggtaagaccatcaccctcga

SEQ ID NO: 408984 - DNA, 100 bp, Homo sapiens
catggaattgaatttcatctgtctgtgggaattgtaagcaagcatgggtggtaaagtaccacctgctactcagaaagctaaatcagaagaaaataccaag

SEQ ID NO: 408985 - DNA, 50 bp, Homo sapiens
ctggagtccgcgcctccctggaaactggaggaagcagcatctcgtgcagc

SEQ ID NO: 408986 - DNA, 100 bp, Homo sapiens
tccgctcccgccgagacatccgctccttgcccgagaacatccagtttgatgtttactacaagaacactggagttcctgatgagacacttgtctcttctag

SEQ ID NO: 408987 - DNA, 100 bp, Homo sapiens
ggcttttgctctgggaatcttgaaaatctgtgacattgcaagggaaaaagtaaataaagctgctgtttttgaagagccctaccacttatgtcttggatga

SEQ ID NO: 408988 - DNA, 90 bp, Homo sapiens
tcgctactaccccgcagttcccggacatgatcctctccgcctctcgaggaatgctcgccgtatgcagcccacctctatgacgccgaggac

SEQ ID NO: 408989 - DNA, 75 bp, Homo sapiens
tggacaggcgggtgcgatagaacatggcactgtaaattggtctgttgatgacattgtcaaaggcataaatagcag

SEQ ID NO: 408990 - DNA, 73 bp, Homo sapiens
gcagcctcatcctacagccccctagggacctgatttcccatcgccttctgtccccctaaaggcttcagatcct

SEQ ID NO: 408991 - DNA, 75 bp, Homo sapiens
ggccgcaagatcccgcccagcagccgcatgtcaaaatgcagatcttcgtgaaaacccttaccggcaagaccatca

SEQ ID NO: 408992 - DNA, 97 bp, Homo sapiens
gtggcagggaaggaggtggctcttggcccaggcctaaaccaggaaagcctgggaaactgggacccacaggtctggagagggacaagtttgataacaa

SEQ ID NO: 408993 - DNA, 100 bp, Homo sapiens
gcaactgtgaggactaccttatgatttcctgacattctgagcatgtgagacctgaggactgcaaacagctataagaggctccaaattaatcatatctttc

SEQ ID NO: 408994 - DNA, 75 bp, Homo sapiens
gaacagaagctttatctgtgatagaattgctgcttaaaaaacttgaaggaagaaagaagggtggtcttcattgga

SEQ ID NO: 408995 - DNA, 76 bp, Homo sapiens
cctgggccgagccgcacctggagcgcctgctgcgggaggcacaaatatttaaacatggaaaacgtgaagactgttt

SEQ ID NO: 408996 - DNA, 100 bp, Homo sapiens
ctgcgggtctgctcgggggtctacttcgaggacatcacggctgcagccctggctacgggtgcctgcatcgtaggaatcctctgcctccccctcatcctgc

SEQ ID NO: 408997 - DNA, 90 bp, Homo sapiens
ggcggatctggaggagcagttgtctgatgaagagaaggtccccttcccctgagcccatctacaatagcgaggggaagcggcttaacaccc

SEQ ID NO: 408998 - DNA, 99 bp, Homo sapiens
gagtgaggaaaggaggtactgtagatgaacaagagaactgggcaacccatgatccacatctacctggacaaggaaacaggaaagcccaaaggcgatgcc

SEQ ID NO: 408999 - DNA, 88 bp, Homo sapiens
gcagcacaggacctggaaaaattacatgaccgtataatagacgctggccccaaaggaaactactctcgatttatgaatcacagctgcc

SEQ ID NO: 409000 - DNA, 82 bp, Homo sapiens
ttcctgcttcatctctaaaggtccttctaggagagaggtgaaagagctccaaacgagaatggaagccgctggaggaccgtag

SEQ ID NO: 409001 - DNA, 100 bp, Homo sapiens
ccggggtggaagctgagcgcgtggtggagttttcctgtggcccattacgcagtccaggcaagaagatcccggagcatcactaggaaaagaaagcgggaag

SEQ ID NO: 409002 - DNA, 50 bp, Homo sapiens
ggtcatctcttctattgtacctgcagtttgattagaatcagcctcaagag

SEQ ID NO: 409003 - DNA, 100 bp, Homo sapiens
cttgggatcccccagttccaaagtgtcttaaagaagacccttttgaggacttctttgggaatcgaaggggtccccgaggaagcagaagccgagggacggg

SEQ ID NO: 409004 - DNA, 90 bp, Homo sapiens
tatgtgtcacctgaccgtgcgaatcaattttctcacccacggataataaatttgctacatgctctgatgacggcactgttagaatctggg

SEQ ID NO: 409005 - DNA, 100 bp, Homo sapiens
gaggggccgcctgctcccccaaagcagcacagcagtaccagtcccttccccacctccacgcccctccgcagatttgtttcgacgccggaccgcgtaagag

SEQ ID NO: 409006 - DNA, 75 bp, Homo sapiens
cgcagtcggcaaggagagacgtcgctgaggggcttgcctgaagcgaggggcagatgatgttgagggcaaaattag

SEQ ID NO: 409007 - DNA, 100 bp, Homo sapiens
acatatgccagttcctcgtagaggtcaaaatgcagatcttcgtgaaaacccttaccggcaagaccatcacccttgaggtggagcccagtgacaccatcga

SEQ ID NO: 409008 - DNA, 75 bp, Homo sapiens
ccgggtcctcagcttccacagcgtgtctgcattccaagaatcaagcactacaaagtgatgagcgtaggacaaaac

SEQ ID NO: 409009 - DNA, 90 bp, Homo sapiens
gcaatcctggagccccccagtgagggcaaaaagggcagctagctgtagaaagagctaaacaagtagaagagttcctgcagcgaaaacggg

SEQ ID NO: 409010 - DNA, 74 bp, Homo sapiens
aggctatcacaagctgcaccagcttctaaccgagtaatggaactgctggtccatctgaataaacgtataaaaag

SEQ ID NO: 409011 - DNA, 90 bp, Homo sapiens
gtgatcgctctcaactaactacaattgtattggcagctagagaggcaaattgcaacttgatctgtggtgatgaatatggtccagaaacaa

SEQ ID NO: 409012 - DNA, 83 bp, Homo sapiens
cgcttcccctttccagagagccagaaagaaccacgccgcaatgaagagcttcttacagtgaaagcaaagtaggtcgagtccac

SEQ ID NO: 409013 - DNA, 100 bp, Homo sapiens
tacgaactcatgttccacgtgtcaaccctgcttccctacatgcccaacaacagacaacagggcaacacaactatttatgtgctggaagaaatgattgcat

SEQ ID NO: 409014 - DNA, 75 bp, Homo sapiens
caggactccaaaatggcgtcagttggtgagtgtccggccccaggttgcctgtgatttgcttcggaggattattcg

SEQ ID NO: 409015 - DNA, 90 bp, Homo sapiens
gcgccggctatggccgtgccctggggctgagccctcagggtgactatgaccagagcaggaccaaagtgctgcacatgagcctgaacccca

SEQ ID NO: 409016 - DNA, 50 bp, Homo sapiens
tcctgagtggctgggactacagggcattcttcttgagcaccgagaaaaag

SEQ ID NO: 409017 - DNA, 96 bp, Homo sapiens
gttactcaaactgaaacgtctcctgcatcagtaccaaggcttccgggtccagctggaatccatgaagaagctgagtgacctggaggcacagtgggc

SEQ ID NO: 409018 - DNA, 100 bp, Homo sapiens
ggaaaacgtggacgtgaaggaggaatggcaggacgaagatcttcccagccacccgcgagtcggccttcgttcacgccatcgcctcggccggcgtggcctt

SEQ ID NO: 409019 - DNA, 100 bp, Homo sapiens
tcttctccatgctctgctgcttctggcctctgggcatcgcagccttctacttgtcccatgagctgcagaaccttggcctgaaaatgctacattatatcag

SEQ ID NO: 409020 - DNA, 83 bp, Homo sapiens
cctgtctcgtcccgaggccgtggctgaggtgaagagcttaaatgattctggggaccattctgaccacatgcattactatcagg

SEQ ID NO: 409021 - DNA, 100 bp, Homo sapiens
tgaggattccaagccaaaggcaagctattggtattgaggtgtctgctttttcaacgtgggagaaggagttgcacaagatagtttttgatccccggtactt

SEQ ID NO: 409022 - DNA, 75 bp, Homo sapiens
ctccttgcttaccacacacccccagaacaaaatccagtctcatagcagaggagaatataatgtttacagcacctt

SEQ ID NO: 409023 - DNA, 50 bp, Homo sapiens
ctctccccgcccgcggcccgtgcagggggggccctcagcctcttggcctt

SEQ ID NO: 409024 - DNA, 51 bp, Homo sapiens
ggcaggaggaagagagagagaggatcactttgggaagcagtgacatccaac

SEQ ID NO: 409025 - DNA, 100 bp, Homo sapiens
taggactcccacttctcagcacaatacaatggtatgtgacgcattcccagactcttcagccaactgagcatcagcttcttcacagcaattgggtcctgat

SEQ ID NO: 409026 - DNA, 74 bp, Homo sapiens
ggagtaggagactcagaatcgaatctcttctccctccccttcttgccatcactggtgcaagctatatttaacgg

SEQ ID NO: 409027 - DNA, 51 bp, Homo sapiens
ttgccggaggaaccttggagacagatggaacagatttggagttgaggctgg

SEQ ID NO: 409028 - DNA, 82 bp, Homo sapiens
gaaaaggctttttcagaaagtcttaaaagaccctgggaagatggccactcctcaggatagtcaggaaggaacctttgggtca

SEQ ID NO: 409029 - DNA, 100 bp, Homo sapiens
gcagcagccatggaggacgagatgcccaagactctgtggtgccaccaccacaacagaatgatcttgagattcctgaaagtcctacctatgaaaatttcac

SEQ ID NO: 409030 - DNA, 83 bp, Homo sapiens
tggcgggtgatcgagccaccctgcccaggggcgcccagcactggtggagtattgctcctggaaaatccaaaaggtgacaatag

SEQ ID NO: 409031 - DNA, 74 bp, Homo sapiens
aaatagcaaacgatccagacggcagggagtgcatcaaaggtgtgaacacaggatgtatgttgtgttcacagcga

SEQ ID NO: 409032 - DNA, 80 bp, Homo sapiens
ctcggacccacggagccggcagcccagcactccgaataccctctaccatctgctttggtcagggtgccgctcgaggattt

SEQ ID NO: 409033 - DNA, 50 bp, Homo sapiens
ggaccatgtgatgcacctgctccagggacctcaggatggaaaccagcagc

SEQ ID NO: 409034 - DNA, 74 bp, Homo sapiens
aggacagaccaagagaataaggaccctatgccaacgtccggcggtacctccagctgacacagtcagaactcagc

SEQ ID NO: 409035 - DNA, 123 bp, Homo sapiens
acatgtgtagaatgaattaagatttatgccagttgcaaagaagaatattggctcactatttttcctctgggcatgtgtgggccatgtttgaggattgccccagcattcagttctatgagtaat

SEQ ID NO: 409036 - DNA, 100 bp, Homo sapiens
atcgcactcctgtatctccaagagatagaaagggtgtctgcaattgaactccaaggtgcagaatggtttggaaagtagctgtattcctcagtgtggccct

SEQ ID NO: 409037 - DNA, 49 bp, Homo sapiens
tctctggtgcatgctgatgacgaaaaacttctcagcacagatattctac

SEQ ID NO: 409038 - DNA, 100 bp, Homo sapiens
aacgcagacggtgcgcctgtgcagccctcccaggtggagtacacggcagactctgcagaaccttggcctgaaaatgctacattatatcagcaattgaaag

SEQ ID NO: 409039 - DNA, 100 bp, Homo sapiens
tcgccagcatcgccaacccggactggatcaacaccggggagtctgcgggtgtgagtcatcctgttctaaagcaagttgctgaacagtttctcaacatgag

SEQ ID NO: 409040 - DNA, 80 bp, Homo sapiens
caggctgccatgacaaccaggcaatgctggatagataccgaattcttatcacaaagggtcctatccttcccccaaagctg

SEQ ID NO: 409041 - DNA, 87 bp, Homo sapiens
cttgctgcaccagagaaagaagcagcgattcctcagtaaacacatctctcaccgcggaggcaaacctgtcttcattaaagtccctga

SEQ ID NO: 409042 - DNA, 101 bp, Homo sapiens
tttcagttcctccatttaacagcacgtattgaaaaagcttctggctataacagaactgcttcaacaaaaacaaaaccagtatacaaaaaccaatgatgtca

SEQ ID NO: 409043 - DNA, 98 bp, Homo sapiens
gcatcatgaagggcctaaaccaccccaacatcgggcaattgaaggaacagactaaaaatcgtgtcctggaaggaaactacaggtactaccagggattt

SEQ ID NO: 409044 - DNA, 87 bp, Homo sapiens
ggggcccaagaaaaagcacctggactatgtttctttctcagcaaaatagaggagaagcttacccctcttccagaagataatagtatg

SEQ ID NO: 409045 - DNA, 100 bp, Homo sapiens
tctctggaggcacctgttgcaagtgacagatgtgaatgaatgtgaactgctcagtggggtgtgtggtgaagccttctgtgaaaacgtggaagggtccttc

SEQ ID NO: 409046 - DNA, 131 bp, Homo sapiens
tggtggtcctccaccagacagtgtgtactctggcgtgcaacctggaattggaacggagcgctgtctgctagctgcttttcctgctctctctccctggaggcgaacccttgtgctcgagatggcagccaccc

SEQ ID NO: 409047 - DNA, 82 bp, Homo sapiens
aacagggtcacagctctcacccagagtgtcacaccctccgcagattgttctgcccattcataactgggaaccagaagaggag

SEQ ID NO: 409048 - DNA, 101 bp, Homo sapiens
aaacaaacaactttatgagctttcaaagctattttctacagaagggtttagcgctggtggatagacactcgagaccagaaatcatatttttgctgaaagta

SEQ ID NO: 409049 - DNA, 90 bp, Homo sapiens
cagcatgctgtgctctgcagctggagagaagtcgggggtccctcccttctctctgagcccatgaagacttgcttcactgggggcaatgtg

SEQ ID NO: 409050 - DNA, 75 bp, Homo sapiens
ttccgcttcttgaatttctctctgtaaaggaggtgtgaccatgaagctcatggatgaggtcgccgggatcgtggc

SEQ ID NO: 409051 - DNA, 75 bp, Homo sapiens
gaaggctctggataaggaccagtacctgcccaggaaactgatggatgcatgcagtttgtcagaacttaaatactg

SEQ ID NO: 409052 - DNA, 50 bp, Homo sapiens
gaaagatgggaaattagtggtggatgaaagtcaaacttctgcatcctctt

SEQ ID NO: 409053 - DNA, 97 bp, Homo sapiens
gctaagaagagtcttggtcttgatgaattcaaagcacacttttctggccttgtgttttatgacttacctagtggagcctttatttacagaatgggcc

SEQ ID NO: 409054 - DNA, 100 bp, Homo sapiens
ccgcggcgaaggtgaagagttgtcccagctcggcccgcgggggagccccgggagccgcacgagctattctcaagctggaataactgagactgaatggaca

SEQ ID NO: 409055 - DNA, 50 bp, Homo sapiens
cgacatacaagcaccctggcagctgctgcagaagaatattttgcctgctg

SEQ ID NO: 409056 - DNA, 100 bp, Homo sapiens
gttacagacacaactgaggccccctttcaaggggatcagaggtccctggagtttctgcttcctccagagccaggcacagaaaactgaatctgtagataac

SEQ ID NO: 409057 - DNA, 74 bp, Homo sapiens
gaggagactcctgaccctcagaatgccaatggagatcttcgtggatgatgagacgaagttgacgctgcatgggt

SEQ ID NO: 409058 - DNA, 100 bp, Homo sapiens
tgcttgaaaggagaagacttggattctcagtggtatgtccaggccacctgtgccacccaaggcacaggtctgtacgatggtctggactggctgtcccacg

SEQ ID NO: 409059 - DNA, 98 bp, Homo sapiens
gctgcgcggcgcggcggccgggccctcgagacggggacgatgaggagcgggaaggcctcctgcaccctggagaccgtgtgggaagacaagcacaagta

SEQ ID NO: 409060 - DNA, 75 bp, Homo sapiens
cagaaacctcctgcaaaagtggaagcgaagccgaaaaaggcagcagcgaagtgaagctgtggtctaccaatctag

SEQ ID NO: 409061 - DNA, 75 bp, Homo sapiens
gggaggatgttaaagccccgcgatgccagatatacgaaacccagaaggaactcagtacagttcccatcctcagat

SEQ ID NO: 409062 - DNA, 100 bp, Homo sapiens
cgagcgaggcctgggccttgcctgaggtccagtggtttacgtcttggatcttgcagatagactgatctcaaaagcctgtccatttgctgcagcaggaata

SEQ ID NO: 409063 - DNA, 76 bp, Homo sapiens
gctgttgaaggcgtgatgagagtcattggggagggccgcaagaacgagatgctgctgtccaaggtgaaagcgaagg

SEQ ID NO: 409064 - DNA, 51 bp, Homo sapiens
gacggaaatagagaagcttcaggactcaaatccaaaagcatgaagcaacag

SEQ ID NO: 409065 - DNA, 75 bp, Homo sapiens
aagctgacttggaagactttgactccaaggtgcaaggtaccctcttagtggcatgggtttaccaacatttaaaga

SEQ ID NO: 409066 - DNA, 75 bp, Homo sapiens
gaaatatctagtccagcaagaccttgctcttttgaagaggccatgaaagatggaggagatgtataagaaagctca

SEQ ID NO: 409067 - DNA, 75 bp, Homo sapiens
gctgctcttcctgaggttttcctaagccatcccctggcggaaccgcccccaggaagccttggaatcctgccagac

SEQ ID NO: 409068 - DNA, 98 bp, Homo sapiens
atgccagtggatccatacaactgctccgcctggtggaatctgagttctttatagctccaagctctacagattcttcaaatatattgagaatagggatg

SEQ ID NO: 409069 - DNA, 78 bp, Homo sapiens
agacatggaccgcggcgagcaaggtgaatcttggaagcaaccagtaccttttctctgtcatagtggatcctaaagaaa

SEQ ID NO: 409070 - DNA, 90 bp, Homo sapiens
gcattcggggaatctgcagggcagaaacttgtggtggagaatgttgatgtgttaacacaaatgaggaccagctttgacaaaccagaccag

SEQ ID NO: 409071 - DNA, 75 bp, Homo sapiens
ctttagtgaaatgggctaataatgctggcaaagtggaaaaatgtgcgtgagaaagatcagtctaaagaaaaggag

SEQ ID NO: 409072 - DNA, 101 bp, Homo sapiens
caaacaaggactctctgtataagaaaatatttacaccagcagctccagttcataccaataaagaagatcctgctacccaaactaatttgggatttatccat

SEQ ID NO: 409073 - DNA, 75 bp, Homo sapiens
agcctcctgagtagctcggattacaggtatcgaaggatgatcgcagtgatgtggagagcagctcagaggaagaag

SEQ ID NO: 409074 - DNA, 74 bp, Homo sapiens
cgaagacgccgacctcttccactccgaggaaatcaagataatcagggaggctatggatcagttggaagaatggg

SEQ ID NO: 409075 - DNA, 82 bp, Homo sapiens
ggcaagcgcagcaacaacagagagcacgtgttgagaagctgatgtctcctcgacttccaactggaaccttgaacccccacat

SEQ ID NO: 409076 - DNA, 134 bp, Homo sapiens
cgcactctggagggattctggcatcagggaggctttcagccggagaagcgagtttcagctggtctctcaggcagctgcagagcttcaacagtactgtatgcagaatgcctgcaaggatgccctgctggtgggtg

SEQ ID NO: 409077 - DNA, 75 bp, Homo sapiens
tccaaacgtcaagtcaatttttgtcacctgtggagactgggacttaaaagtcataaatgcactcggtgatggaaa

SEQ ID NO: 409078 - DNA, 83 bp, Homo sapiens
taccatctttgtggctgtgcttgccaggcctggctccaatagcctgggctggaagctcttctacgtcacaggctgcctgtttg

SEQ ID NO: 409079 - DNA, 100 bp, Homo sapiens
caggactccaaaatggcgtcagttggggagtgcagcaacaaggaatgtcccttcctgcacatcgaccccgagtccaagatcaaggactgtccttggtatg

SEQ ID NO: 409080 - DNA, 115 bp, Homo sapiens
cgggggtgctgcagaggacacgaggcggcgggctggagacatggaccgcggcgagcaagagtttattaaccacttaacctctcagaactgaacaaagacaacattgttcctggaa

SEQ ID NO: 409081 - DNA, 119 bp, Homo sapiens
cgaacacttgccaagtatttcaatccttgctatgccactgctaggttaaaaccaacattcatcagcaagggacagaagatgagcctgtcggtcctggagggtatggggttccgtgtggg

SEQ ID NO: 409082 - DNA, 50 bp, Homo sapiens
caggagcggggtctgctccgagaccggccagaatttagcttcacttgaga

SEQ ID NO: 409083 - DNA, 96 bp, Homo sapiens
gggcagctcgggaacatggccctggagcggctctgctcggtcctcaaagaggaaggcatcaaccacgagtgtaagctgtgcaaccagatgttcgac

SEQ ID NO: 409084 - DNA, 90 bp, Homo sapiens
atttttagcagtgaaattgaccagtaccagaaatatcttccagatatacaagtgagggtcgctgtctgcccattgatagaggccagattg

SEQ ID NO: 409085 - DNA, 75 bp, Homo sapiens
ggaaggacaccaagatgcggatccgggcctttccggtggtccattatggctgacatgcaaaatctggtagaaaga

SEQ ID NO: 409086 - DNA, 83 bp, Homo sapiens
cagagctccgtggaatttcctttctctgctttaacgtacttttaaaaggcggggagacaaccccttccccaagaatgctgatg

SEQ ID NO: 409087 - DNA, 100 bp, Homo sapiens
gtgggggaacctcacctgcccaatctgcaaaggtctattcaccgccatcaacctcgggctgaagggtgcggaggcagcaaatgttacaggtcctggtggt

SEQ ID NO: 409088 - DNA, 100 bp, Homo sapiens
gctggagcttcaacgaccgaacccgcttccggccctcgctgcgcctcaaaagttctcagccaaaaccagtgatagatgtataacactgcctttaaattca

SEQ ID NO: 409089 - DNA, 50 bp, Homo sapiens
ctgcgcgccgctgcccgcgccacagagagaagaagaaggaggttcctgct

SEQ ID NO: 409090 - DNA, 83 bp, Homo sapiens
gaagcatgtcaccaacccggccttcaccaaactccctacccctctgccatgaaccagtccatcccagtggctcccaccccacc

SEQ ID NO: 409091 - DNA, 100 bp, Homo sapiens
tggctctccggggtgaatgtcgtgctggtgatggcctacgggagcctgggcttcgtgggacacatatgcaacatgcctatgatttttacaagcctgatat

SEQ ID NO: 409092 - DNA, 100 bp, Homo sapiens
ctcagatgctagtgtagctgaagcaagcacgaaaaatgctaacaacagcttcacgtattgtgtatggatgcaaagatcaattttgactctaattcagcct

SEQ ID NO: 409093 - DNA, 100 bp, Homo sapiens
tggacaccttgaagcagaggagcagcaggaccagaccctggtttctgagaccatccgccgatttggccgcctggattgtgttgtcaacaacgctggccac

SEQ ID NO: 409094 - DNA, 100 bp, Homo sapiens
gaggtttatcagtgaatatgaccccaacttgggtgagccagccatgagagggtatcttgtggccatattcctgagtgctgtcttcctctattatgtactg

SEQ ID NO: 409095 - DNA, 100 bp, Homo sapiens
caaacaaagaggccgcggaggagaagccggaggaggacaacgactaccaccgcagcgacgagcaggaccagctgtactggcgctacgatgaccacacgag

SEQ ID NO: 409096 - DNA, 100 bp, Homo sapiens
aactgtcattttgggactgctgtgcctcctcctcctgtggtggaggagaaggaaaggaacagaggcggctgagccaggaacgggatcgcctagagggtct

SEQ ID NO: 409097 - DNA, 51 bp, Homo sapiens
caccgccatgcccaagaataaaggaccatggccaacctggagcgcaccttc

SEQ ID NO: 409098 - DNA, 100 bp, Homo sapiens
tgcaactttataagatgcgaaatggtgtgatccctcacatccacaaatctctgattggaaagaagggacagcagaaaactgcttagagggatgctttaac

SEQ ID NO: 409099 - DNA, 78 bp, Homo sapiens
ggacttggcttccctcaagtctatccgagagtttgcagcaaagatcattgaagagtccgccatggagagggaccgcta

SEQ ID NO: 409100 - DNA, 75 bp, Homo sapiens
gccctgcgcgtgcgccgtggcgcggcccggctgacagattggccatctgcaagcttcccttctccgtggagagca

SEQ ID NO: 409101 - DNA, 83 bp, Homo sapiens
cgccgccgccgccttgctgctgctcaaagctgctgccgccccttgggctaaaagaattcagaaggagctggcggacatcactt

SEQ ID NO: 409102 - DNA, 74 bp, Homo sapiens
cttccacctctccaccaccgaccgcgtcatcaaagacggagctaatagatctgtctacagtagatgtgattctc

SEQ ID NO: 409103 - DNA, 90 bp, Homo sapiens
gtcgtgatccagaagtccagagctgaggactgcctgtttgcaggttctcgactggaccgggttggtggcctgaatgtattagcttcgctg

SEQ ID NO: 409104 - DNA, 94 bp, Homo sapiens
caaacagcccgcccgaccccgtcccgaccctggccgccccgagcggagcctggaggaatactcccccagttgcaagaggcgcaggaccgtggaa

SEQ ID NO: 409105 - DNA, 76 bp, Homo sapiens
acaacagtggccttctgatgaatactttaagtgctgctcctctgaagattcaagcttatttcaatgagactgcaga

SEQ ID NO: 409106 - DNA, 96 bp, Homo sapiens
gggagcgcgaacgagcgacggcggaacccgtgggcctgtggactgcagcctcggcggtcagcaggttatgaagacagtatggagtttccagaccat

SEQ ID NO: 409107 - DNA, 75 bp, Homo sapiens
agaatggccgggcgcctaccccaaactcatggaaattgatcagttgagccccatatgggggttggcaggcagcag

SEQ ID NO: 409108 - DNA, 100 bp, Homo sapiens
ggtggcggggctgaagaagcagttctacaaggcgagccaggttccctctcccagcctgtgctgactcagccatcttcccattctgcatcttctggagcat

SEQ ID NO: 409109 - DNA, 75 bp, Homo sapiens
gatatttctccgtggatccagacagccatcagggaaagctatcagttgagggatttgcagttgataaaatggctg

SEQ ID NO: 409110 - DNA, 100 bp, Homo sapiens
gccctggccatctaccatgtggcccagcgctggcgcagtgagaacttcgagagacccgtggacctggagggctctggggatgatgactcctttcccgatg

SEQ ID NO: 409111 - DNA, 83 bp, Homo sapiens
cgggaccccagttcctccgccaagcgcggccgccgcccccgcctcagatactgaccgagctttatcattactggaagaatact

SEQ ID NO: 409112 - DNA, 76 bp, Homo sapiens
gtatcacaaaagcagatgctgctgaattctggagaaagttttttggagacaacactcctgtaggaggcctgctgat

SEQ ID NO: 409113 - DNA, 100 bp, Homo sapiens
tcgtcgatgagcttcaggaatgccaggagcaggatctgcagaagacgcagggctcaaggaagatgttaccgagtacttcagtgaattccttagtgcaggg

SEQ ID NO: 409114 - DNA, 82 bp, Homo sapiens
cgactgccgaggaacgagagcgcgaagctaaggttttcatcctgcagctggagggagagaaacactggcgcctctaccaccc

SEQ ID NO: 409115 - DNA, 83 bp, Homo sapiens
cttcactcacgtgctctactacatgtacagcgaccacactgagtgaagcccaaggcctggctgtcccgtggccccagtcctgg

SEQ ID NO: 409116 - DNA, 75 bp, Homo sapiens
caatgaagcaagggactatgaagaaaccaatagagccatggcgactccctctgctgccttcgaggcccttatgaa

SEQ ID NO: 409117 - DNA, 96 bp, Homo sapiens
atagagctgacattaactgtcagatcacttgaaaaactgactgttgatgggaatgaactgagttttttcccccatggaattttgaagcttaacctg

SEQ ID NO: 409118 - DNA, 75 bp, Homo sapiens
tatgatcaagttctcgtggagtcagacaatgaggttgttggaagaggagcctttggagttgtttgcaaagctaag

SEQ ID NO: 409119 - DNA, 82 bp, Homo sapiens
ccttcggcagtccacccaccgccgccgcctcccagaaagaagatgctgatatgctacaacacggatgaacctggaggacgtg

SEQ ID NO: 409120 - DNA, 98 bp, Homo sapiens
ctcctgagtagctgggactacagatttggagtcaaaaacgtatgagaccaaaaaaatattttcagaaaatgatatttttgaaataaatttttcccagt

SEQ ID NO: 409121 - DNA, 85 bp, Homo sapiens
tctacccgacacttacatgccatggccttctacgttgtgaaaatggtgcgaatcataaacatgtacaaggaaattgatcaaacac

SEQ ID NO: 409122 - DNA, 50 bp, Homo sapiens
gcggggctgccggagaccggccgcatggctcgggttcatgacgctctcga

SEQ ID NO: 409123 - DNA, 75 bp, Homo sapiens
ctccgtcttggctcagacgctcatggctgactgtgctgtcctgattgttgctgctggtgttggtgaatttgaagc

SEQ ID NO: 409124 - DNA, 75 bp, Homo sapiens
acaaatgcatttctagtggctacaaatgcccctcaggattgttcaagtttagaagaatacaacattgccgcagca

SEQ ID NO: 409125 - DNA, 99 bp, Homo sapiens
cagctgcctacagaaccgtcccaaaatatggcaaagaaacctattctgaggagccaggaggaactctctcccagtccgcctttgttgaatccatccacg

SEQ ID NO: 409126 - DNA, 89 bp, Homo sapiens
cccgagtgtgcgaagctagccaaggtaggcgaaaaccaagagtacatcggcctcgttctcctatattggaagaaaaagacatcccgccc

SEQ ID NO: 409127 - DNA, 83 bp, Homo sapiens
cccactcctccaagaaccaacccccaaattggctgggacaggaaccagagcctgaaacagaagcagtaagttctagccaggaa

SEQ ID NO: 409128 - DNA, 90 bp, Homo sapiens
ccagcacgtccaccaacctgaccatgacctttaacaaccagctgaccactgtccacaaccaggcagaacgtgttcatgagttaaatgaag

SEQ ID NO: 409129 - DNA, 100 bp, Homo sapiens
catttctgtacaacacaagctggccttggcagtttcggtgcatagaaaatcaggtacatgtactgggcagattggggtgagacgccctggatcgagcagg

SEQ ID NO: 409130 - DNA, 100 bp, Homo sapiens
gcaatatccccacataccttctcaagatccttccgctgaggaattgagaaaactaatgatgttgcatggaggtcaataccatgtatattattccagatct

SEQ ID NO: 409131 - DNA, 82 bp, Homo sapiens
aaaagaaaggctcacggaaaatgtaagcatatcgcacggatgactgccatccctgggttttgccagtagtgaagaaagtgga

SEQ ID NO: 409132 - DNA, 51 bp, Homo sapiens
ccttgctgctctacctccaccatgccaagatgcctgaggaaacccagaccc

SEQ ID NO: 409133 - DNA, 75 bp, Homo sapiens
gagtgcgtgggggaccggctgttggcggggcgccctgcgtccggcagaggaggcgagcatcccgctcaggtgatg

SEQ ID NO: 409134 - DNA, 82 bp, Homo sapiens
gtgaaactgaccacagtgctcaccacccaccaccactggtacccagactcatggtatcgtgatatcacatccaacaagaagt

SEQ ID NO: 409135 - DNA, 51 bp, Homo sapiens
ccgggagaagagcgaccctcacacacaaacgtgcagatatctgatagccct

SEQ ID NO: 409136 - DNA, 74 bp, Homo sapiens
agtaatgatcctgtggcaagagccatcaccctccgtaacagtaacgagtagccagagtactcctgccaaagccc

SEQ ID NO: 409137 - DNA, 100 bp, Homo sapiens
attaaaatcttatcactgcagttgctcttcgaggcagcattggaaggatttctgcccctccaagcttcctttccaggacaccattcgcttttcacccaag

SEQ ID NO: 409138 - DNA, 87 bp, Homo sapiens
ggtataccctcaaacccctcagacaatgaattcacaacctcaaacccgttctccgttgaaaccaagactgaagactgaacctgaaga

SEQ ID NO: 409139 - DNA, 90 bp, Homo sapiens
aagaaaatacaaatcacacgcataatggatgaaaggaaccgacagctttgtgtccctggtgatgttggaacattaatgatggaacatggc

SEQ ID NO: 409140 - DNA, 98 bp, Homo sapiens
agagagatcgctgtctcgggagagaaatcacaagccgtcccgatccttctctaggtctcgtaggcagcctgcttctgcaaagtggtacgatcgaaggg

SEQ ID NO: 409141 - DNA, 50 bp, Homo sapiens
gctcagcccacctgtgattatggtcatcatcagatttgaaatatttaaag

SEQ ID NO: 409142 - DNA, 75 bp, Homo sapiens
caaggagctaaagcagcgtgcgttcagccctgggatttctgcgccaggagatgaggggcggtagagccctggaat

SEQ ID NO: 409143 - DNA, 114 bp, Homo sapiens
caagaggacccacctgtgggtgtcagtggcgcaccatctgaaaacaacatcatgcagtggaatgcagttatatttgggtcaattgttttcgaagcccgaggtgataaagcagaa

SEQ ID NO: 409144 - DNA, 75 bp, Homo sapiens
tggtcgcgtctcggaaaccggtagcgcttgcagcatggtgctactcgtgagcagtagtcgccatccagacagatg

SEQ ID NO: 409145 - DNA, 110 bp, Homo sapiens
gccgtcccaggactgtgcaggggactctgtcacagtacacactggcagctcaggacctggtgatgcgtgcccggggtgtgctgaaggacagaggatggcggatatctaat

SEQ ID NO: 409146 - DNA, 100 bp, Homo sapiens
cttgtcgccacttccctcaggagcaggtgcgtcctggctgagagttggagctctccagcaacatgcctgagcagagtaacgattaccgggtggccgtgtt

SEQ ID NO: 409147 - DNA, 60 bp, Homo sapiens
gcagtggtggcggccctggctggaccacgccacaggaagctggagaagcttcgagagaag

SEQ ID NO: 409148 - DNA, 83 bp, Homo sapiens
gcagtgaacggcattctcttcaatcatgagagtcccagaagagttccagtgtctcgccccatcctcaccctcagggttcccag

SEQ ID NO: 409149 - DNA, 100 bp, Homo sapiens
accaaattgtcgccattaagaaaacgaagggaacgtcatcgtttggaaagcgtcgcaataagacgcacacgttgtgccgccgctgtggctctaaggccta

SEQ ID NO: 409150 - DNA, 50 bp, Homo sapiens
aggaaacagccacctagccaacggaaggaggctgcagtgtgccagtagcc

SEQ ID NO: 409151 - DNA, 87 bp, Homo sapiens
gcaactgcctgccgcgccgagggaccgccgggcggcggaaagcaggggatcccaacaagccctcaggattcagaagtgttaaagctc

SEQ ID NO: 409152 - DNA, 74 bp, Homo sapiens
ttttagaaaatcataacaagcggttctctaccctgtaaagtgtatgggtttcgacagaccatgatgaaattgag

SEQ ID NO: 409153 - DNA, 100 bp, Homo sapiens
atcgtgtatgccacggagaagaagcagaccaaggtggaagaagagcccgaagaagaacctgaagagacagcagaagacacaacagaagacacagagcaag

SEQ ID NO: 409154 - DNA, 75 bp, Homo sapiens
gtcgggtagaaacctcagtgaagggcaagaatatcacggcatgggcatgagtagcttgaaactgctgaagtatgt

SEQ ID NO: 409155 - DNA, 98 bp, Homo sapiens
tccagcctgctgcgcaggataaaaggcaaactcttcacctgacttaattcagtgcacaaatgagatgaatgtgaacatcccacagttggcagacagtt

SEQ ID NO: 409156 - DNA, 82 bp, Homo sapiens
tggaagtcccacagaagctacagctgccagccccttggatctcccttcgtggagacgacaccggggtcctcctgcccacccc

SEQ ID NO: 409157 - DNA, 101 bp, Homo sapiens
ggtcctgctcagcccagctcaccgcgcgccggccctcggcgccctggttctgcggatcaggcatagaatgtcaagctaaccaggcgtccgctacttcagaa

SEQ ID NO: 409158 - DNA, 100 bp, Homo sapiens
gtcaggaggaacctcagaacatgggtccgtggtcgtttgtttctccaaggtttgaaaagcagctggcctgcaagttcctgctcattttccacaaggccgc

SEQ ID NO: 409159 - DNA, 50 bp, Homo sapiens
tgaggacaagaccatcgagctcatgtctccatctgctgctgcctcttcat

SEQ ID NO: 409160 - DNA, 96 bp, Homo sapiens
ttagtttcatctctctataaagttatccaggagccacaaagtgagggattcgggttcgtaactttcgagaatagtgctgatgcagacagggccagg

SEQ ID NO: 409161 - DNA, 103 bp, Homo sapiens
agcagcagcttacagcccaacatgaactccagtgacccagacctggctgtggtcaaacccacccggcccaactcactactggagtgcaatggcatgatctctg

SEQ ID NO: 409162 - DNA, 75 bp, Homo sapiens
accgagagcgtgaccgagagcgcgaatatcgtcatcgttagaaggtcggccacacacccggagcaccgtcatcac

SEQ ID NO: 409163 - DNA, 100 bp, Homo sapiens
cccgtgccgcgagcgcggcctgcaggagaaaccgaccagagggcaaagtgttggagacagttggtgtgtttgaggtgccaaaacagaatggaaaatatga

SEQ ID NO: 409164 - DNA, 98 bp, Homo sapiens
acatccggcagctgctgcacaacttccctcctgaccaggaacgacaagctgaagatccacatgcggaagcacacgggagagcgcccctactcatgccc

SEQ ID NO: 409165 - DNA, 90 bp, Homo sapiens
ctcagcctcctgagtagctgggactacaggtgcccgcctggctgggtgggtgagcggtgtcagctggaggacccctgtcactcaggcccc

SEQ ID NO: 409166 - DNA, 82 bp, Homo sapiens
gatggtcttcctgctggggctcatgtttgagatcacaaaatttgtccaggatagacatagagctagaagaaacagacttcgt

SEQ ID NO: 409167 - DNA, 50 bp, Homo sapiens
ccagtcgctacgggagcagccagaggtgcaacaccggaggatttcagcaa

SEQ ID NO: 409168 - DNA, 90 bp, Homo sapiens
gggagagcaggcgtgggcaagtcaggtctgcggatcaatggagagctaatcactgcctacccacaagtggtggtagtcagagtaccaacc

SEQ ID NO: 409169 - DNA, 100 bp, Homo sapiens
tcctgaacgggaaggagatctccgcgataaaattgtccatggaccacgtgtgccttggtcactactgaagagctgcctcctggaagcttttccaagtgtg

SEQ ID NO: 409170 - DNA, 73 bp, Homo sapiens
tggcaccatatactactttttccagaattcatacaaagagtgaaggaaaatcacctcggcagtgtttgaagga

SEQ ID NO: 409171 - DNA, 100 bp, Homo sapiens
gaaaatgtccagagccctgcgccactactacaaactaaacattatcaggaaggagccaggacaaaggcttttgttcagatctcattcgtcggttcggatc

SEQ ID NO: 409172 - DNA, 100 bp, Homo sapiens
gtgcactcggcaggcagtacccctcttctctggccgagatggacgaaaaaatgtggttccttgtgttctctctgtaaatggggacctagaccgaggcatg

SEQ ID NO: 409173 - DNA, 100 bp, Homo sapiens
ggcgctcctgctgtgcttcgtgctcctgtgcggagtagtggagtcttattctgtcacctaggctggagtacagtggtgcaatcacagctcactgcagcct

SEQ ID NO: 409174 - DNA, 98 bp, Homo sapiens
agacaccctccgaagaggtggccctgcctgcgctcctcctggctgcagagtaccccaccagcgcgcatcaagcatgatggaaccatgtgtgatacctg

SEQ ID NO: 409175 - DNA, 75 bp, Homo sapiens
ctgataccagagctatacagctgctattaggcagaaaccgaaacttcattgccccttcaatgtgggaatccagcc

SEQ ID NO: 409176 - DNA, 75 bp, Homo sapiens
ctgtgccttctctactgatggcagtgttttagctgctgggaatgatgagaagacagcagctgattacaagatttt

SEQ ID NO: 409177 - DNA, 90 bp, Homo sapiens
atcgcggaaccttccaccatcaagggaccgcagggccggatatggtgtaagatacttcttcaagattggacagctggggaccttcttctg

SEQ ID NO: 409178 - DNA, 75 bp, Homo sapiens
caaaaccaccgcccagcttgatcttctagactccatggcaccgggctgagcgggaactgtggctgcaccatctgt

SEQ ID NO: 409179 - DNA, 98 bp, Homo sapiens
ggcggcgcagtcgccgcagcagccgagtctgacggcgccggttcgctgcccggtccgcccgcggtgagaggagtttcggacgtggctgagggaggaat

SEQ ID NO: 409180 - DNA, 99 bp, Homo sapiens
tttccttgatggtcaaaagattaagccagtcggatgatgattctgggtcagcttcaggctctggatctggttcgagttctggaagcagtagtgatggaa

SEQ ID NO: 409181 - DNA, 73 bp, Homo sapiens
cctgcccgaacaggaggcgtctccagcaaggcctgcaggtcctggctataagtcaccatggcacagcaagctg

SEQ ID NO: 409182 - DNA, 74 bp, Homo sapiens
ctggatgtccttgagttcaaccagggttgtgagtcccggcccagcccctccacccccctgcccccccgatgcga

SEQ ID NO: 409183 - DNA, 98 bp, Homo sapiens
tcctggccggagcaagatggctgagggcgagcggcagccgccgccaggtttactcctggcttgggggcattaggaagcactggaggctcttcgggaac

SEQ ID NO: 409184 - DNA, 148 bp, Homo sapiens
ccgagatgtctcgctccgtggccttagctgtgctcgcgctactctctctttctggcctggaggctatccagcgaaggttgtgcaggaccagcgttccctgtgcaggcgccactgcgtttcctgcagattccgaccggcactgcaacgg

SEQ ID NO: 409185 - DNA, 75 bp, Homo sapiens
gctgccgagaagctttacctcgctgaccctatgaaggtagaggaaggatggtgggaaggtgttctcaacgggaag

SEQ ID NO: 409186 - DNA, 100 bp, Homo sapiens
ctcaggagaatatcactgtcaagaaacaaaattgcagatctgtgccatactttcatcaaagatggagcggttgcagtgagagcagatgctggcaagaagc

SEQ ID NO: 409187 - DNA, 100 bp, Homo sapiens
tgagctggccgcccgggagacccagaagcacaagaaggaccttcacccattgtttgatgagacctttgaattgtacaggtttgcagattccgccagcagc

SEQ ID NO: 409188 - DNA, 100 bp, Homo sapiens
aaatccgagctgaaccgctactcttccctcaagaggctggtgcaaccagagacccctctacctctgtcccagcctccggggcccaccagcccccccagac

SEQ ID NO: 409189 - DNA, 74 bp, Homo sapiens
cagcctggccaccctcaccaaataccctgaatccagggcttaaaagacaaccttcttgcttctgggacatccag

SEQ ID NO: 409190 - DNA, 89 bp, Homo sapiens
tgtggggtttctcagataactgggcccctgcgctcaggaggccttcaccctctgctctgggtgtggggatattcagctttgccaggtat

SEQ ID NO: 409191 - DNA, 100 bp, Homo sapiens
tttcttctggcatcattaacggaccttttaccatgaatagttctactccttctacaggtgtgtatggcaggggtgatgtgcaagctccaggaaagagatg

SEQ ID NO: 409192 - DNA, 82 bp, Homo sapiens
agacaaatgcgctcagcttcaattgatgctgatggaaagttaagcgtgaaatttggggtcctcttccgtgatgataaatgtg

SEQ ID NO: 409193 - DNA, 95 bp, Homo sapiens
cagcatataagccaggcatgtctcccgaggagtgcaggcgcttcaccacagacggaaactttgagggaaattttgagtcactggaccttgcggaa

SEQ ID NO: 409194 - DNA, 98 bp, Homo sapiens
tctacattttgttgcttagaaaagcctaggcatttctgtaacatttgaacttggagcgtgatgcccagaagtgtgtgaactggtctgtgaccacaaag

SEQ ID NO: 409195 - DNA, 74 bp, Homo sapiens
aagctggctgtcctgaaatattataaggtggataaccgaatccggattctcattgagaatggagtagctgagcg

SEQ ID NO: 409196 - DNA, 101 bp, Homo sapiens
agaagcaaacattcatatcccaacattcctgtgtcaattcgacggagctggatgaactcattcagtttgtgaatagcacaatggaagaagctggactttgt

SEQ ID NO: 409197 - DNA, 50 bp, Homo sapiens
gtgctgtggtcagagtcgctgctggcctgtggacctggctccggaattca

SEQ ID NO: 409198 - DNA, 75 bp, Homo sapiens
cggggaaggcgctggctgtctggagcctggactggcagcaggccctgcaggaaagaaggatggtgagatggaccg

SEQ ID NO: 409199 - DNA, 80 bp, Homo sapiens
cgctgagccgtcgcggagccgcgcagccctcggagcacgaggactaccccaatggcacctggctgggcgacgagaacaac

SEQ ID NO: 409200 - DNA, 100 bp, Homo sapiens
tctatttagatgctaatcagattgaagagcttccaaagacatcaagccctacagctgcgagcagtgcggcaaagtgttcaggcgaaactgtgatctgcgg

SEQ ID NO: 409201 - DNA, 100 bp, Homo sapiens
ggcaccgggatcgtgaccgagaccgtgaccgagagcgtgaccgagagcgcgaatatcgtcatcgttagaagatactagagtaaaaggatggtttcttctg

SEQ ID NO: 409202 - DNA, 101 bp, Homo sapiens
caagcaggttttaaatcaagatttaacattccaacacataaaaattatttatccaacagctcctcccaggaaaatcctgccttgcttcgttgggcctatgc

SEQ ID NO: 409203 - DNA, 83 bp, Homo sapiens
attgacgccatgtcgggttattcgagtgaccgagaccgcggccgggaccgagggtgaggtttatacatggggcgacaatgatg

SEQ ID NO: 409204 - DNA, 50 bp, Homo sapiens
cagcaccggtgtacccgaccgcatccagagcttactcacatagcatattg

SEQ ID NO: 409205 - DNA, 75 bp, Homo sapiens
aagaggcctgcaaagctgtacaagagatcatgcagcacacagcatgcctctgcaatgccatcattgctttgctga

SEQ ID NO: 409206 - DNA, 74 bp, Homo sapiens
ccggtctgggagttgggggcaaggagaagatcctgctttccccagacatggccaacaagggtccttcctatggc

SEQ ID NO: 409207 - DNA, 88 bp, Homo sapiens
atcaagtgcccttggacaaagcctgaaaccagctccagtcagcccggtcaagcatgacagcaactcaaactcggcaaacttccaagac

SEQ ID NO: 409208 - DNA, 100 bp, Homo sapiens
ctggtgtcacctatcagtaaaagggtttctatcttactaaaggatatttcagaaaatctatattcactgaggaggatgataattgggtctactaacattg

SEQ ID NO: 409209 - DNA, 100 bp, Homo sapiens
tgccgtacgtggccctcgatgtgctctgcgtgttgctgggtttacacagtaaacaatgtgaatgtgatcaccaaaatacgcacagaacatctgaccgagg

SEQ ID NO: 409210 - DNA, 100 bp, Homo sapiens
ccgtgatccacaaggcattagagcatgtgagaaagatcagtctaaagaaaaggagaagaaagtgaaaaaaacaattccttcctgggctaccctttctgcc

SEQ ID NO: 409211 - DNA, 83 bp, Homo sapiens
tgtgcacgagggtctcggcctcgcggtgcaggccacggaaaggtatgatatatttgatccaagacagtccattccagtccggg

SEQ ID NO: 409212 - DNA, 90 bp, Homo sapiens
ctggaaacagctccttgtacaacacgcctccatgtttcagatatgtaactggttcatcaatgcccggcggcggcttctcccagacatgct

SEQ ID NO: 409213 - DNA, 75 bp, Homo sapiens
gaaaatccacaagaacgcactttcctcccaggtcaccttccgcaaccctgtcattgagaggattcctcggctccg

SEQ ID NO: 409214 - DNA, 100 bp, Homo sapiens
cggggcgggacctggcgccaccttgcaggttgtcttttggaaatgcaggtttaaggacaaattatctgcttaagctagaagatgggatcgaatagcagca

SEQ ID NO: 409215 - DNA, 85 bp, Homo sapiens
ggtctgacggtgtcctttataccttatttcaaaggacaaccctccatatgataagggagccttcagaatcgaaatcaactttcca

SEQ ID NO: 409216 - DNA, 95 bp, Homo sapiens
ggagatgaataagtgggttcgttgtatttgtgacatctgtgggtttaatccaacagaagaagaatctgtcactgcgaaggggatgaagagagccc

SEQ ID NO: 409217 - DNA, 100 bp, Homo sapiens
acgacggcctcagcaggcggggaagatgaaagggtcttccgaccccgaactccaccggaggcaattgcactgtgtagccgtctgctggagtatacaccaa

SEQ ID NO: 409218 - DNA, 74 bp, Homo sapiens
cccactttcccctgagcctcagcacctgcttgtttggaagattggctcaagctacccaggaaagaacggatctt

SEQ ID NO: 409219 - DNA, 98 bp, Homo sapiens
tttgaacagcatagagccaatcacattttgcacaagggcagtcaccatgaaagaacaaaatccagtctcatagcagaggagaatataatgtttacagc

SEQ ID NO: 409220 - DNA, 83 bp, Homo sapiens
ggaactaaaaacttttctcaaagttggtcacagtaatgaaaggcagtaatagaaataaggatcattcagcagaaggagaaggg

SEQ ID NO: 409221 - DNA, 96 bp, Homo sapiens
tcacgctcatcaccctgaactcggaagcacttcactacgcttagcagatgtcctctggaattcccagattcctcttttgatctgtaggacatatgg

SEQ ID NO: 409222 - DNA, 82 bp, Homo sapiens
ggctcctcggccgtgggccagttcgtgtccctggacgggcgccatgttttggaagtttgacctgcacacaagctcgcacctg

SEQ ID NO: 409223 - DNA, 83 bp, Homo sapiens
atcgtctccatcctctacctcaagtatgagccaggggacggcaaaacagaacagaaaggcggagataaaaagaggggtgttaa

SEQ ID NO: 409224 - DNA, 100 bp, Homo sapiens
tggcaggtcgagcgcgagagtatcagccgcctcatgcagaactatgaaaagaggcgtggagctatttcctatgacagttctgatcagactgcattataca

SEQ ID NO: 409225 - DNA, 97 bp, Homo sapiens
gttcgaggggccaaggcagaagaaatcttggagaagggtctaaagatcagcacttgactgtttattttcaaatctcacgaacctcaccccaagatct

SEQ ID NO: 409226 - DNA, 80 bp, Homo sapiens
tctgcattaccttctacaattggtccagctttggaggaattttttacatcacttgtgaagcaagaaatggtgaatatgcc

SEQ ID NO: 409227 - DNA, 98 bp, Homo sapiens
tttgaactactgccggagcttctgccaggtgaccaagaatatggcccaggtgaccaaagccctggacaaggccctgagcaccatggacctgcagaagg

SEQ ID NO: 409228 - DNA, 100 bp, Homo sapiens
ccagtttgatagtgaaaaaggagtggactttgttctgaattactccaaagcggcgaactttctgaccaagtatacaactacccagagggcctaggagaag

SEQ ID NO: 409229 - DNA, 101 bp, Homo sapiens
cggccgctctgggcgactgtgctggcgctgggggcgctggcgggcgttggcgtaggagggtctccgtctctccaccgggggcttcatccttccagggagga

SEQ ID NO: 409230 - DNA, 100 bp, Homo sapiens
aaccgcttcttgctgctgctggccctggctgcgctgctggcctttgtgagcctcagcctgcagttctatgacagtcatgtccctttccagggacctcaag

SEQ ID NO: 409231 - DNA, 83 bp, Homo sapiens
aactccaggacagcatccaggcctcattggacagcattcgagcttccccgggcgctgcctggacaggcctgcctgcgtgctgg

SEQ ID NO: 409232 - DNA, 75 bp, Homo sapiens
ggaaatcagggagctcttaacccagtttgaaacgtaactggttccctgaccagaacatggtgatgagttttcgag

SEQ ID NO: 409233 - DNA, 129 bp, Homo sapiens
cagaaagtgaagctgtttcgggccagcgacccgctgctcagcgtcctcatgtggggggtaaaccactcggactcacaccacccggcaagaactgctcactacggctccctgccccagaagtcacacggc

SEQ ID NO: 409234 - DNA, 75 bp, Homo sapiens
ccatgatgctgctggaatctcctatagatccacagcctctcagcttcctttgctccaataagctttgcaatcaag

SEQ ID NO: 409235 - DNA, 100 bp, Homo sapiens
tgcgagcgagccgcgaaccgagcgggcggcgggcgcgcgcaccatgggggagaaacccgggaccaggccctgggaggagcggggacactgaggacctctc

SEQ ID NO: 409236 - DNA, 98 bp, Homo sapiens
ggggattcaaacttcaacagaatgtggcaaccaggtttgccctgagatatttcaaggacacatccccagtctttcaaagacttttcctagagagttca

SEQ ID NO: 409237 - DNA, 87 bp, Homo sapiens
agatgtgaataaaactgaccatagccagagaacagccctccatcttgcagcccagaagtgagccatctttatggatttggactgatg

SEQ ID NO: 409238 - DNA, 83 bp, Homo sapiens
acagattatcggaccatttcagaggttcaccgccatcattggacccaatggctctgttctttggggtgactttcaagatggac

SEQ ID NO: 409239 - DNA, 80 bp, Homo sapiens
tagcttcgcagtctggaaagctttaggagttcacagtggtgctgtgccgttcctggtcagtgccacctctggcaccactg

SEQ ID NO: 409240 - DNA, 100 bp, Homo sapiens
ggtaccctcgctcctcgatcgaggacgacttcaactatggcagcagcgtggcctccgccaccgtgcacatccgaatggatgttgcaagagcaattgaatt

SEQ ID NO: 409241 - DNA, 90 bp, Homo sapiens
gaaattacttgctaataaaacaccacatacttggagtagggagaatattcaggaagctctatgcagaactgtgccaaggcatcgtggaca

SEQ ID NO: 409242 - DNA, 90 bp, Homo sapiens
agaagccggtacaggtgccctgcggacacgtggaaaagaagatctcccggagcagtgccctgaaagtgctggaccatgccatgattggcc

SEQ ID NO: 409243 - DNA, 100 bp, Homo sapiens
tttgctacttgaaaactaccagccatggctagacctgaaaatttcttccaaggttgatgcatctctctcagaggctatagaaagcgcaattggtggtaac

SEQ ID NO: 409244 - DNA, 75 bp, Homo sapiens
gtttttgaggatcctgctccacagagaatgctctgcacccgttgatggaaacatgcacaattcttggattacaac

SEQ ID NO: 409245 - DNA, 96 bp, Homo sapiens
gtggcgaaggagccggctccaagattcacaatgacatcctttcaagaagtcccattgcagacttccaactttgcccatgtcatctttcaaaatgtg

SEQ ID NO: 409246 - DNA, 80 bp, Homo sapiens
gtgaaatacaggctgaacaggacagaaagatatcaacctatgaattgcctctaccaaaaagcctacaatattgacacaaa

SEQ ID NO: 409247 - DNA, 90 bp, Homo sapiens
ccaaaccaacgcagctttgggaagttcaacagcatgatcctttactgtgtgcccaagctgcggctcatgggccagaagttcagcgtccgg

SEQ ID NO: 409248 - DNA, 127 bp, Homo sapiens
cgggaggaaggaacgaggcaaggagctaaagcagcgtgcgttcagccctgggctgatccaccttgagatcaagccggccatccggaaccagatcatccgcgagctgcaggtcctgcacgaatgcaac

SEQ ID NO: 409249 - DNA, 74 bp, Homo sapiens
gagagcatgtcggaggctgatcgcgcccagaagctctacattaatcatactcctccaccactgtccaagagtaa

SEQ ID NO: 409250 - DNA, 96 bp, Homo sapiens
cggagacgagaccagaggccgaactcgggttctgacaagatggccgggctgccccgcaggatcatcaaggaacttagtgatttggcccgtgaccct

SEQ ID NO: 409251 - DNA, 75 bp, Homo sapiens
ctcaggaggttaagatttgcattgaaggccggtctaatgtaggatttttgtccctgagtcatggaagacagaaga

SEQ ID NO: 409252 - DNA, 75 bp, Homo sapiens
cagatggcagccagtcagtggtggagatcatcagccatgacacccggcgcttccgctttgccctgccgtcacccc

SEQ ID NO: 409253 - DNA, 83 bp, Homo sapiens
tgacaaccaggcaatgctggatagataccgaattcttatcacaaaggtgcgtataacccgtatatagagataattgaacaacc

SEQ ID NO: 409254 - DNA, 80 bp, Homo sapiens
ctcatctcctccaatgttggcgaggtcgtctgccctgttacagaagtacttggacaactacgacctgagcgtcagggtga

SEQ ID NO: 409255 - DNA, 82 bp, Homo sapiens
ctattacccccagtatctgcaagccaaggtcaaaatgcagatcttcgtgaaaacccttaccggcaagaccatcacccttgag

SEQ ID NO: 409256 - DNA, 51 bp, Homo sapiens
caacccccacaaatgccacagcagcgtcagagctccaagagtcaggatcgc

SEQ ID NO: 409257 - DNA, 90 bp, Homo sapiens
ctactcagaagaacttgtacagagatgtgatgttggagaactatagcaatctggttttcttgggtcgcacggggcaggcggttgcagttc

SEQ ID NO: 409258 - DNA, 84 bp, Homo sapiens
cagctggctctgggccttgaacattccgaaactgtcaagattggcaaggaactgtggctgcaccatctgtcttcatcttcccgc

SEQ ID NO: 409259 - DNA, 82 bp, Homo sapiens
gacgatgaggtgacagtcacggtttatgatagttctcaatctcatgagagcttctcagactggcgaggtgaactactgcttg

SEQ ID NO: 409260 - DNA, 51 bp, Homo sapiens
ttctggggccatcgcggccatgaggaaaatgtttataggaggccttagctg

SEQ ID NO: 409261 - DNA, 75 bp, Homo sapiens
tgctgatgtgaaaaataccacgacaaaaccaccctagaaggcaacagcccccaggggagcaaccagggagtcaaa

SEQ ID NO: 409262 - DNA, 105 bp, Homo sapiens
ctccgtggccttagctgtgctcgcgctactctctctttctggcctggaggctatccagcgcgtccgagctgggccacagcctgaacgagaacgtcctcaagcctg

SEQ ID NO: 409263 - DNA, 96 bp, Homo sapiens
cagcctcatcacccggctgctggagggctttaccgccagcacctgttcagaatcacacaaataagcatcaggtattcaatgcatctcttcaagacc

SEQ ID NO: 409264 - DNA, 82 bp, Homo sapiens
tcggcacccccggccccggagctgcctggaggcggccgcactcgggaaggatgccaattctgcgcttctcagtaactacgag

SEQ ID NO: 409265 - DNA, 100 bp, Homo sapiens
tgttaaatattgttcaagattcagcacttttggaagccattggttgccagatggagatgtactgaagataacagccagggaggacaagcagggctgggcc

SEQ ID NO: 409266 - DNA, 98 bp, Homo sapiens
gaggctggaactgggttgatgttgtgaaggcatggaagaggagatggttcgtgttacgcagtggccgtttaactggagatccagatgttttggaatat

SEQ ID NO: 409267 - DNA, 100 bp, Homo sapiens
tggatgtcctgcgtgtcgcagagcaccgggcagatccagtgcaaagtctttgactccttgctgaatctgagcaagaatcacattttggaagatgtgaaca

SEQ ID NO: 409268 - DNA, 75 bp, Homo sapiens
tacaaggacagcagcgactttggggcccgtcaccctcagacctcgaagtagggggaaaactgcagtggaagatga

SEQ ID NO: 409269 - DNA, 82 bp, Homo sapiens
ttccctacgctggcctgagcttcttcacctatgagacgctcaagagcttgcacagagggttttcagagaaagatgctgatga

SEQ ID NO: 409270 - DNA, 73 bp, Homo sapiens
gaacgggcggcccctggagatgattgagccgcgcacgctacagtacaaggattattgaacatggggaaggaag

SEQ ID NO: 409271 - DNA, 100 bp, Homo sapiens
ccttccttcctccccacccattcctttaaatccggagggggaaaaaatcccaaggtctgcaaagtaattcgccaaaatgacgaacacaaagggaaagagg

SEQ ID NO: 409272 - DNA, 95 bp, Homo sapiens
cacgaaggctccttctcacctccggacgtgagaattacaggcttggatctcaaaccgccgcggtatggacctgtctgccaatcaggacgaggaga

SEQ ID NO: 409273 - DNA, 75 bp, Homo sapiens
gcatccccatgcgcttctcggtgctggtcaaaatgcagatcttcgtgaaaacccttaccggcaagaccatcaccc

SEQ ID NO: 409274 - DNA, 80 bp, Homo sapiens
tgtgtggcgcgcccagagccccgcgtttcagccctagggaagggtggcccagttgaaatccttcccttcctctaccttgg

SEQ ID NO: 409275 - DNA, 75 bp, Homo sapiens
cacccgggcctcgccgccgcggcctctgccagagccagataacacagcaggcgtgtacgcccggcgtggagggtt

SEQ ID NO: 409276 - DNA, 88 bp, Homo sapiens
cagctatggagataggcagatgaactatagggtatgaccccatcatttccccagaggtctcggcctcctttggtgttcagcagctgcc

SEQ ID NO: 409277 - DNA, 83 bp, Homo sapiens
tatctgcatgcgtttgctgagagtagtatctgttctgattaagcagttttacagtcttttgacagtctagcagtgcttccttg

SEQ ID NO: 409278 - DNA, 90 bp, Homo sapiens
tgccatgattgtgaagcctccccaccacatggaacgtactatactggcaattgctggagaagattttgcaattgttgcttctgatactcg

SEQ ID NO: 409279 - DNA, 90 bp, Homo sapiens
tcggcgggctgcagcgagaagcacctgctggacaagcccttctacaacgacttcgagcgtggcgcggacgccaggaaagcatgtgcagat

SEQ ID NO: 409280 - DNA, 82 bp, Homo sapiens
ggaagatactgcagagatattctactccatctcattcattgtacaggtaatctgtaagtcagatgctccaacaggggatgtt

SEQ ID NO: 409281 - DNA, 50 bp, Homo sapiens
ccagcacctgttgatccaccagtgatgcaggacaagtactccaaaagtgg

SEQ ID NO: 409282 - DNA, 100 bp, Homo sapiens
tgagaaaatgagtatgcaggagctgaatccagaaaccagcacagactgtgacgggattttagccattggtttaattaatgaagccctggatgaaggtgat

SEQ ID NO: 409283 - DNA, 100 bp, Homo sapiens
ggaccccgatggtgtcatcgagcatgtctggccaccgagtgttacccctgtctgtgacccacttctatagtgccaccaagtatgccgtcactgcgctgac

SEQ ID NO: 409284 - DNA, 100 bp, Homo sapiens
gctactggatctcagccttgtcaaagatgccagatgtgggagacacgccaaagctcccaagagcaatgaagttgtctactacaatgcaaaggatgatctc

SEQ ID NO: 409285 - DNA, 100 bp, Homo sapiens
ccaaagccattcccaaattatagagctaattacaactttcggggcatgtacaatcagagaatctgcaaaatggctgataatttggatgaatttattgaag

SEQ ID NO: 409286 - DNA, 74 bp, Homo sapiens
ggaagaggaggcggccatgtatgaggaggagatggaaagggaaggagatggcgtctaccagaaggggatggact

SEQ ID NO: 409287 - DNA, 76 bp, Homo sapiens
ctctgatgacccatttggattctctgatttcactgccaagattctcatgtaaacaggaacatcgataagtagtgta

SEQ ID NO: 409288 - DNA, 98 bp, Homo sapiens
ccaagtctctttccagaggccaggctttatgggagcatgggttaccagcgacgcaccctgtgcgaggaagtggctggagtggaggaaggaggttgagc

SEQ ID NO: 409289 - DNA, 75 bp, Homo sapiens
gtggtcagtattttggattttcaccattctaataggtttttcacgactgaaaacaacatagcaaaataagccaag

SEQ ID NO: 409290 - DNA, 100 bp, Homo sapiens
cacctatgacaaagttcagagctacaattccgatatcaacgaatggagcctcatcacctccagtccacatccaggcagtggagctactgctgtggttcag

SEQ ID NO: 409291 - DNA, 88 bp, Homo sapiens
tggcagtgctcaaactcaccgaccagctgtgcagcaagatcttggagaagacggccaaccctcagtggaaccagaacatcacactgcc

SEQ ID NO: 409292 - DNA, 98 bp, Homo sapiens
gagagccacgcatgcgcactggtgcagcggaactgctgcctgacgctctgcaacttcagcatccccgaggagctggaattccagtaccgccgggtcaa

SEQ ID NO: 409293 - DNA, 75 bp, Homo sapiens
gtccaagtcaaacgcagaaggactgcctcactgagcaaccaagagctctcccggctgtgatagaccttcagttac

SEQ ID NO: 409294 - DNA, 73 bp, Homo sapiens
cgaccttccttgctttcagaatttcacccaggttctgacaggtaatgagagatccaaacaccaagcgctccag

SEQ ID NO: 409295 - DNA, 82 bp, Homo sapiens
tcaaatccatcaagctcatcaaaaggacactcccagttgccgggatgacctgctgagtgactacttccgaaaggccagcgat

SEQ ID NO: 409296 - DNA, 126 bp, Homo sapiens
gaacatccgcgtggttcgttgtggcggcagcgagttgaactttaggagagctgtgttctctgcagattctaagtattttggagataacggcagtggaggtgggcattgtggccatcaggggtctct

SEQ ID NO: 409297 - DNA, 83 bp, Homo sapiens
agtagatggcagtgaaggtgcctctcgactgggagatgcagtgtgcattggctggacatgggaaagtctctttctcatttgcc

SEQ ID NO: 409298 - DNA, 100 bp, Homo sapiens
gggccgggacttgggcgcttacctgcgacagcgggtagcacaggcctttcgggagggagagaatacccaggctggtggatgaccgctgtgtggtggagcc

SEQ ID NO: 409299 - DNA, 74 bp, Homo sapiens
ctggcggactgccttctggtcaacctggcctacgagtcctccgttgaggactcttgtgaagatatgagttgtgg

SEQ ID NO: 409300 - DNA, 74 bp, Homo sapiens
ctagcaccccgagaaccgtcagtttgagccagatgtgattcgcctttgccagtctcatctcgtgtctgctttgt

SEQ ID NO: 409301 - DNA, 50 bp, Homo sapiens
tgtggcatctccacctcaagggcaagaagagaggcggaggcgatccttcc

SEQ ID NO: 409302 - DNA, 74 bp, Homo sapiens
atgaagaaagacgtgcggatcctgctggtgggagaacgtcagtaacagatccaagagatggaaagagagtagcg

SEQ ID NO: 409303 - DNA, 74 bp, Homo sapiens
atgctcttcaggatagtatcttggccagggaactcaaacagcagatgcagtactatactggcaattgctggaga

SEQ ID NO: 409304 - DNA, 100 bp, Homo sapiens
acagcagaagaaaaaagcctccttgacttctaagaccaccaggactattgcgaggtgtgccagcaaggcggtgagatcatcctgtgtgatacctgtcccc

SEQ ID NO: 409305 - DNA, 48 bp, Homo sapiens
acaaagccacgaataacctataatgttactggggcttccggatgcaga

SEQ ID NO: 409306 - DNA, 75 bp, Homo sapiens
cttgctggctgcccctcaggacccctgctacgtggagaaaacctcggataaggccggagctattgggagtggcgg

SEQ ID NO: 409307 - DNA, 75 bp, Homo sapiens
tgtgactacaactgttctaatgaggtcctatctattactgctatgttgtcaggtgtggatgaggtcaccattgtc

SEQ ID NO: 409308 - DNA, 100 bp, Homo sapiens
actgggcagagcttgaaataagtgttgctgatcatctgggctgtgatccacaaacccggttctttgtccctcctaatatcaaacagtggattgccttgct

SEQ ID NO: 409309 - DNA, 110 bp, Homo sapiens
agccgcaggagagacacgctgggccgaccccagagcggcgctggacaggtgaaaggtgtagcagtcactcggcctacacccacagcatcgaccttgtgaacccagcgacc

SEQ ID NO: 409310 - DNA, 50 bp, Homo sapiens
actatgctccctccaaagccgaaaatgtctaatcaacaggagaagtatga

SEQ ID NO: 409311 - DNA, 75 bp, Homo sapiens
tgatgaatggctgaagatgtcataccccactgtgttctccttgcctcaaaagaaaactcggcacctgttaaactt

SEQ ID NO: 409312 - DNA, 51 bp, Homo sapiens
agcccggccactgcggatccctgaaaccaaagatgttcgacaagcagcagg

SEQ ID NO: 409313 - DNA, 100 bp, Homo sapiens
ttgagaattttgaaccagcaactcagagaacaacagaaaactcaaaaaccatctggtgctgtggattgcaaccttgaatactcagattgatggacaactt

SEQ ID NO: 409314 - DNA, 75 bp, Homo sapiens
catcctgacctagagcccatcctaaggactgcatcgacgtaggctggtgggaaggagagctgaacggcagacgag

SEQ ID NO: 409315 - DNA, 90 bp, Homo sapiens
cgagaagcctgaaaagtcgcagcgagctggagccgccggaggtatctacgagaccccagcaggcaccatcctttaccatgctcatttaga

SEQ ID NO: 409316 - DNA, 100 bp, Homo sapiens
tgacgtttttccctaatctgatgggtcattatgaccagagtattgccgcggtggaaatggagcatagggctactttcaaatttgaatcaacagatgaaga

SEQ ID NO: 409317 - DNA, 100 bp, Homo sapiens
ccttgaatgttgaagatgtccttaccagctttgacaatacaggaaatgtttcatcaccaaatgccccaaaacttggacccatggagctggccatcattat

SEQ ID NO: 409318 - DNA, 96 bp, Homo sapiens
cctggggacgaagagctgcagctcctcctgtgcggaatgcctaccgcaggaatgggatggcttttctagcctgctgatgtgacaactgtgatgtgc

SEQ ID NO: 409319 - DNA, 98 bp, Homo sapiens
tactacgagacgtgtgctacatacgggctgaatgtggagagggtcttccaggacgtggaagccgctgaacatcccgaggaactggcacgctgggggct

SEQ ID NO: 409320 - DNA, 51 bp, Homo sapiens
aggacggcgttctggatctcaaagcggtgcttgtgaatgacttcttcttgg

SEQ ID NO: 409321 - DNA, 73 bp, Homo sapiens
agacctcgctggcccccatcattgtttacatcaagatcacctctcccaagtcgcaatgtatctgctgagcaaa

SEQ ID NO: 409322 - DNA, 75 bp, Homo sapiens
tggggggctcgctgtatttactgggaactagtcttgcaggaagagcaggacaggctgctttggtttgtgacctcc

SEQ ID NO: 409323 - DNA, 51 bp, Homo sapiens
aaaaaaaccttcaggcggcccatggctattgagaagaatctacaaatgtgg

SEQ ID NO: 409324 - DNA, 80 bp, Homo sapiens
atttacatcgtcacggagtacatgagcaagggcttgggcctggaacaggacaggcaggggcccgaagaaagtgatgaatt

SEQ ID NO: 409325 - DNA, 98 bp, Homo sapiens
aagaatcgccttcagccctgtctggtgcatccttggcagaaagtgaggaggaaaacacccccattgtttttggattcaaagcataaaaaccattacaa

SEQ ID NO: 409326 - DNA, 100 bp, Homo sapiens
gaaaactggtctccatggcggtggctgtgtgtcgaatcccggtgttggagtgtgctgcctcctggcttcaggccataggaaaaggatacagagtagagtt

SEQ ID NO: 409327 - DNA, 82 bp, Homo sapiens
taattaatgaccgaacagaaacccctcctcccctagcttcactcaatgttagtaagaagtctggaacgttttttcttagagt

SEQ ID NO: 409328 - DNA, 82 bp, Homo sapiens
ctgagctctggactttggggacagctgtcagtggcctaggccgcaggtggatccaaccgaagagaaaggggtgctccaccac

SEQ ID NO: 409329 - DNA, 82 bp, Homo sapiens
agaaataaggacaaaagccaagaggaggacagttcgctacacagcaatgcatcgagctccctagatctttagcttctactcc

SEQ ID NO: 409330 - DNA, 80 bp, Homo sapiens
ccgcgggcgccaatggggagcagaaggactcggacacaggctttatcctgtggataaacgcagagtgaacgagtttgggg

SEQ ID NO: 409331 - DNA, 80 bp, Homo sapiens
gaaatttggagtgtgcgtgcgcgccgagcgatctgagtgggacatacttttgaaggatgtgcaatgttcaatcataagtg

SEQ ID NO: 409332 - DNA, 75 bp, Homo sapiens
ggcatggaggcgcgaggaggagttactcgggaggctgaggcaggagaatcgcttgaaccggagaggcggacgttg

SEQ ID NO: 409333 - DNA, 51 bp, Homo sapiens
cctgaatgtggcttggttgtagcctgtgcagggatgattgctgagtgtcct

SEQ ID NO: 409334 - DNA, 76 bp, Homo sapiens
gagtataagactggcatcaagaaaggacccacagcctccactgccctccaaacagtgggagacgagaaagctccag

SEQ ID NO: 409335 - DNA, 98 bp, Homo sapiens
ccaaaaaaactccagctgtgaaagcaacataaatggatggagctatgacattgaagagaggaaggttccaaaacccaagtccaagtcttatggtgcaa

SEQ ID NO: 409336 - DNA, 142 bp, Homo sapiens
cgctctagcggccagaagcgcggccaccttcccctgctgaagcgttcactttaattttggccggggaaactgactctactctgtgatgccaagacagatgggagtttccttgtacaccactttctctccttctatctcaaag

SEQ ID NO: 409337 - DNA, 98 bp, Homo sapiens
cccgccggcttggttcatccacccttggatccaagtcttcaggtcgtggagtcagatttgagtgatgatggcaaagcatctttggtgagcgaggaaga

SEQ ID NO: 409338 - DNA, 100 bp, Homo sapiens
cctgatgaaagcaaacagaaatttgtgctcaaaacccccaagttcagacttggttccttcaacctagagaaagttgaaaacccagctgaagtcattagag

SEQ ID NO: 409339 - DNA, 75 bp, Homo sapiens
cgaggaacgagagcgcgaagctaaggcacgtgtggttctcaaatataggcattctgatgggaacttgtgtgttaa

SEQ ID NO: 409340 - DNA, 95 bp, Homo sapiens
ttgaaagaagaagatggagaagaaatagttacctatgatctgtgccccctaccaccggagccagagaatggtggctacatctgccacccccggcc

SEQ ID NO: 409341 - DNA, 76 bp, Homo sapiens
ttctgttgtgacagacacttcacatactgctggagccattatttccatttaatttggatgaatttgttactgtgga

SEQ ID NO: 409342 - DNA, 90 bp, Homo sapiens
atactgtcatcagggagactgtgaacatgtcattgtcattactgacataaggaaaaaaggggtgctggaaacattctccggaacagaaac

SEQ ID NO: 409343 - DNA, 75 bp, Homo sapiens
tcgcatgcctggggttacacctaaacagaagagttaccttgtacatgcccactatgtacctcagacagagggagc

SEQ ID NO: 409344 - DNA, 123 bp, Homo sapiens
aagcccggggacttggtgttcgctaagatgaagggctaccctcactggcctgccaggggcgccatgttttggaagtttgacctgcacacaagctcgcacctggacacgctgctggagcgggag

SEQ ID NO: 409345 - DNA, 100 bp, Homo sapiens
aggtggctgtgctgggccccacagatctaattatcatggacctgcgacagtttcttatgtgcctgtccctgtgcacagcctttgccttgagcaaacccac

SEQ ID NO: 409346 - DNA, 83 bp, Homo sapiens
ctgaaatcgccaagagattgaatacgatttgtgcacaagtcatcccatttctgtctcaggaatgattcgcctttgccagtctc

SEQ ID NO: 409347 - DNA, 100 bp, Homo sapiens
cggaagatgagtgagcttgaccagttacggcaggaggccgagcaacttaagaaccagattcgagcgtgcaatggaattgagttttgccctggtaaatggg

SEQ ID NO: 409348 - DNA, 100 bp, Homo sapiens
tctctgttcaagggaattttgatctaaatagtattgcggaatgctgcagcactccttactctcttttgggtttggtcttcacggtttcttttgttgcctt

SEQ ID NO: 409349 - DNA, 103 bp, Homo sapiens
gccttcatccacacggacctcccagagccaccgccctcgctgaccgtgcagaggtcagcccaaggccaaccccactgtcactctgttcccgccctcctctgag

SEQ ID NO: 409350 - DNA, 75 bp, Homo sapiens
ctgtgcaagagctaccagaagctggtctctgaggtctggcataagaaacggatcagtttgacaacttagaaaaac

SEQ ID NO: 409351 - DNA, 102 bp, Homo sapiens
cgggaggtttggagcagatggataccgtatcgacgtggggcctccggtatgttgccgctgcgttgaggttcttgattattacagacctctttctgaaaagcc

SEQ ID NO: 409352 - DNA, 82 bp, Homo sapiens
aaatactcaaggtcactacagaattagcccaagcagattcctcccagccatgaagctcatgactgctctggtgaatgttgcc

SEQ ID NO: 409353 - DNA, 100 bp, Homo sapiens
ggagagcaggagccactgagatgaggaggcgtcgcgcgcgcctgtagctcgcgggcctcgcagaacaagttgaaatcatcgcagaaggataaagttcgtc

SEQ ID NO: 409354 - DNA, 100 bp, Homo sapiens
cgcatgtttgctgactacctcgcccacgagagtcggagatttacagatattaacgactccttgggaaaactggacttcagtcgcctctctccaacaaaaa

SEQ ID NO: 409355 - DNA, 88 bp, Homo sapiens
tacttcaaggataagggtgacagcaacagctcggcgggctggaagggcgccaatgcttcggcattagagaaagagattggtccagaac

SEQ ID NO: 409356 - DNA, 88 bp, Homo sapiens
ctttccagaatgtctttgcaccaagaaacaagaacttcaacatccatggaacgttcctctgtgacgagggtgcaggtatctctgggga

SEQ ID NO: 409357 - DNA, 75 bp, Homo sapiens
agcagccgatccagcctgcggagcctgtggggcagaggacagagctgcccagtccttactcaacaagctgatcag

SEQ ID NO: 409358 - DNA, 99 bp, Homo sapiens
gatttgggcttgaagacccagaagatgacatatgcaagtatcctgagcatgattatcattcggaccctccggaaggacattgccaactacaacaaggag

SEQ ID NO: 409359 - DNA, 100 bp, Homo sapiens
atcagacagaacagttaatcctcaatttaagcctgatctaacccctagaaacagacttaatgaacaagccagtgaggagattttgaaagtagaacagaaa

SEQ ID NO: 409360 - DNA, 89 bp, Homo sapiens
gcgaccgcctctgcttcaatgtgggccgggagctgtacttctatatctacaagggggtccgcaaggtttgtctacagattttgagcgtt

SEQ ID NO: 409361 - DNA, 90 bp, Homo sapiens
cttcattggccacctacagaaacaaaatgtcaacaaattgatgggctggagcagccctacttcagcgccaacgcccagttcttccaggcg

SEQ ID NO: 409362 - DNA, 97 bp, Homo sapiens
gtttgcgctgccatccgcaaaggctttctcgcttgtcaccttgccatgtggaagaaactggttataaaccggtggaccataagcttatttggctacc

SEQ ID NO: 409363 - DNA, 100 bp, Homo sapiens
ggaggagggtgcattctgggtgatgacatgggacttggaaaaacagtacagctatgtgatgatgatgccatttaaacgacaggctctagtggaatttgaa

SEQ ID NO: 409364 - DNA, 90 bp, Homo sapiens
cttgccctggtcttgctcggccgatgaagtgcagaggtttttttctgagttgtaaagatgtggcacctgtggagaagactattaagttgc

SEQ ID NO: 409365 - DNA, 75 bp, Homo sapiens
atcatcacccaggcgcggagggaagacgccctggtgctcaccaagcaagacgccctgctggcggacttggagtct

SEQ ID NO: 409366 - DNA, 75 bp, Homo sapiens
gccacattgtggatgaggtcaatggattaataagatactaatggaccatactaccaaggaccagtccacctgaac

SEQ ID NO: 409367 - DNA, 74 bp, Homo sapiens
tccatcacccaccaacaacaccacaataatccacagccaagggtaaaccagacttgaatacaacattgccaatt

SEQ ID NO: 409368 - DNA, 98 bp, Homo sapiens
cactgtgtgtggccagtcatttaccaccaatgggaacatgcacagcagtagaagactcagaaagtggtgtttacatgcgattcatgaggtcacacaag

SEQ ID NO: 409369 - DNA, 75 bp, Homo sapiens
tgaacattggtctaaagtctttccaaaaggtcaaggttcacaaggttgtttacattcagagctctatcaataaga

SEQ ID NO: 409370 - DNA, 100 bp, Homo sapiens
aaaggacagccaagctcagcggatggccgaaaatctaggcttcgttgggcctttgaaaagccagttttaacttctagtcatggcgaatgatcgcaggaga

SEQ ID NO: 409371 - DNA, 75 bp, Homo sapiens
gcggagactgcgggcccgtagctgggctctgcgagtcaccattactttaagtactgcaaaatctcagcattggct

SEQ ID NO: 409372 - DNA, 98 bp, Homo sapiens
cccatagatggccagctttcccccgagggtcaacgagaaagagatcggtttttcgttggaatatacgttgcacatttatggcgattctgagtgtgagg

SEQ ID NO: 409373 - DNA, 83 bp, Homo sapiens
ctttggacgccggtggagacgcaggcgaggagccttcacgtaaatgggtccagtcatgcctcccagtaagaagccagaaagct

SEQ ID NO: 409374 - DNA, 100 bp, Homo sapiens
caggacttcggcactgcctatgcccactacctcctcgtgctcagcctggcgccggagctgaaacacgacgtgaaggtgacaatccttacccttccaagga

SEQ ID NO: 409375 - DNA, 83 bp, Homo sapiens
taagacttcgcgacacccttgaagctgagaaatgttgctgccttcactgaagtcttgaacccctcaaagtcattcatgaaatt

SEQ ID NO: 409376 - DNA, 76 bp, Homo sapiens
gttgaacttgtaaaatcttggaataattctcttcttatgaagattgcccccgaggaattagcacttgttcacaact

SEQ ID NO: 409377 - DNA, 87 bp, Homo sapiens
acagacacagagaaccttgctcttcatatcagcatgccagagcctaagcctggagacctgattgagatttttcgccctttctacaga

SEQ ID NO: 409378 - DNA, 74 bp, Homo sapiens
caacgagcacaacaggagctacgaggagttggtgacaccggaaactggtactcaagtgatgaggatgagggtgg

SEQ ID NO: 409379 - DNA, 83 bp, Homo sapiens
ggctgtcggccggccacagggatgtcttttactatagacgggaggcgtgggcagcttcgacatcgccggcctgctgaacaacc

SEQ ID NO: 409380 - DNA, 100 bp, Homo sapiens
gcatcgacttccagcctgagatctatgtaactatccaggcctactcctccatcattggactgcagtcccaccagctggtggttaagcgtctgggatatga

SEQ ID NO: 409381 - DNA, 98 bp, Homo sapiens
acgcagcggagatgcctctttttgccaccaatcccttcgatcaggatgttggttctcagaggcactgtgactgacttccctggatttgatgagcgggc

SEQ ID NO: 409382 - DNA, 100 bp, Homo sapiens
ctgtacacctgtccccctgcttcaggttctaagcacaaactccagatacgtcatgttatggacttgcttcctgaagatgaaatcagcagttgatggaaag

SEQ ID NO: 409383 - DNA, 90 bp, Homo sapiens
ccggatccgttcccattcctggcttgagtcctgcattgtgggctggcgctgccgcgtgggtcagtgggtgtttccccccgggccggcctg

SEQ ID NO: 409384 - DNA, 129 bp, Homo sapiens
aacaagctgaaccccaaacccaaattcttcgttctgtgcggcgacctcatccacgccatgccagagactctccaacatgtgccttctgaccatacaaatgaaacttccaacagtactgtgaaaccacca

SEQ ID NO: 409385 - DNA, 100 bp, Homo sapiens
gaatatactgacggcataaaagggcagaaccatagcagggtgcgcgagtggcatcgtgttccagtgggggactggtttggcatcatgtggacgacggttg

SEQ ID NO: 409386 - DNA, 99 bp, Homo sapiens
attgctgctgccattctgaacaccccagatttgcgaaaacaatgctgtttttctgatcgaggctctctgaagagcataatgcagtccaacacattaacc

SEQ ID NO: 409387 - DNA, 83 bp, Homo sapiens
agccattgctgaaagcctgaatgttaatgttgaagaaggaaaatgcggaagtcgtcatttgacaagttttataaatgagtatt

SEQ ID NO: 409388 - DNA, 98 bp, Homo sapiens
ctcagaagaaagattctggaggaaaggtttacaagcaggccacgattgaatctctgaaggtgaaagaacttgtcctggacaacagtcggtcgaatgaa

SEQ ID NO: 409389 - DNA, 100 bp, Homo sapiens
ggagttcatggtgttagcgcaaaagttctgaatggcatccgtcctaccggaaacctaggaaaaggatttgtacacacagatatgacgaaagacttgaaag

SEQ ID NO: 409390 - DNA, 90 bp, Homo sapiens
ctgatgactatggcaaagacctgaccagtgtcaatatcctgctgaaaaagcaacagatttccaaagagtcagaggacttcattgtggagc

SEQ ID NO: 409391 - DNA, 100 bp, Homo sapiens
gagatggtatggaatcgtttgaaatcacaacggactatgaaacacaggagggggtgataaagctgaaaaagttgagacatttgggaaatgatgaagtgca

SEQ ID NO: 409392 - DNA, 96 bp, Homo sapiens
atctgggaggttgaacttattaatgatgctcgtcagaagttccgctctgttctggttgaagcaacggtgaaactggatgaactggtgaagaaaatt

SEQ ID NO: 409393 - DNA, 75 bp, Homo sapiens
cttctgtgactgatgatgattttggaaagaaagattgtccctggccttgcttcttggacacttaatgattgttgg

SEQ ID NO: 409394 - DNA, 83 bp, Homo sapiens
agcgattctcgtgcctcagcctctccagcagctgggattacaggtgcaggtgatggtcctaccagtgtgtctgttgaggtcac

SEQ ID NO: 409395 - DNA, 100 bp, Homo sapiens
ggctggcgatggaagatggaaggaaggagcgcagcgtcagcagataagcagagagccctagaagaaaccaaagcctacaccacccaatccttagcaagtg

SEQ ID NO: 409396 - DNA, 112 bp, Homo sapiens
ctgttcatccacccatccgtctgtccatccgcccactcagctatctgtttatcaagctctattaccaggttttaaacttcgccatgatcgtgtcttctgcactcatgatatg

SEQ ID NO: 409397 - DNA, 75 bp, Homo sapiens
ggtggactccttcggcagtccacccaccgccgccgcctcccagatttggcaattcttcgctgaagtcatcatgag

SEQ ID NO: 409398 - DNA, 75 bp, Homo sapiens
ggaggggcgggggaggcgccgggaagtcgacggcgccggcggctcctgagatcctcaccatggagaaggaagtgg

SEQ ID NO: 409399 - DNA, 82 bp, Homo sapiens
caggaagctggaaaggaaggtactgcaccatctgaaaatggtgaaactaaagctgaagagacagacacatgttggattcacc

SEQ ID NO: 409400 - DNA, 100 bp, Homo sapiens
gaaaaagcttggagataaagttgctttttactgtggatcaatcttcctgtcctacaactgacaaaggatcccctaaagacccctggaaggctggaccatg

SEQ ID NO: 409401 - DNA, 82 bp, Homo sapiens
tgcaagctctttgacacacagcagttcttgtcagtaagcaagctgtgtgggaagtgcagccccactgacgtggacatcctgc

SEQ ID NO: 409402 - DNA, 100 bp, Homo sapiens
tccgggattcgctccgcgcccgcggttgtagcagctgccgctgcagccatagcagcaggtacggacattgctgcaggagaagaggttgccatcaagcttg

SEQ ID NO: 409403 - DNA, 75 bp, Homo sapiens
gtcattattgcaaccaaatgattccagaaaataagtatttccaccatatggaccaggaggcactgatgaagtcgg

SEQ ID NO: 409404 - DNA, 100 bp, Homo sapiens
acatgacacttacaagatggacagggatgataattgggcctccaagagtaaactttggagtcggagtttaaaactagcttatactctacttaataaactg

SEQ ID NO: 409405 - DNA, 90 bp, Homo sapiens
caagattgtgccacatatatgcaacttacttggagatccaaacagccaggtaaaatgtttcaagcgccggatcttactctgattgtagaa

SEQ ID NO: 409406 - DNA, 116 bp, Homo sapiens
gcaaaaaacagccaccgattttgctatgtctctgagctgcgaggcaaaaagggcagctagctgtagaaagagctaaacaagtagaagagttcctgcagcgaaaacgggaagctatg

SEQ ID NO: 409407 - DNA, 98 bp, Homo sapiens
ttttgcttatataatcccaaaattacctcagaattatcaggaattagcttaccgaaaggagatggtgagagctgacctaattaacaaaaaagttggaa

SEQ ID NO: 409408 - DNA, 75 bp, Homo sapiens
ggagcagtagatgatgatgtagcagaaggaatgggatgtttctggggagctgaaaggaaattctgggtcttgaaa

SEQ ID NO: 409409 - DNA, 97 bp, Homo sapiens
taggcttggactccagagtcctcgtggatttagttgtggtgggatccgtcgccgtttctgaaaaagactggcaagcgtgtgggcaaggtactgcatg

SEQ ID NO: 409410 - DNA, 75 bp, Homo sapiens
tgaccggatattcagttgcacatccccacatcaatgcactgccaatggagtcggatggtcagggctgccctttct

SEQ ID NO: 409411 - DNA, 100 bp, Homo sapiens
aacgttttcattacttcggaggggaggtcactcctcccggatgcagaaaatgcgattgtgcatatgggcggtcagtggttgggtggtcgtcaaatccgaa

SEQ ID NO: 409412 - DNA, 74 bp, Homo sapiens
actgcgccaacacagaaattatcctggaattgtctcgccatttaaacgagtattcctaaaaggtgaaaagagta

SEQ ID NO: 409413 - DNA, 138 bp, Homo sapiens
gaaaccccaggcagagacgggggaagcagcacgggatcccagcctcaggcctgcacggacggtgttggttggggcaggtgacagcagggacatgtctcgggagatgcaggatgtagacctcgctgaggtgaagccttt

SEQ ID NO: 409414 - DNA, 75 bp, Homo sapiens
cctagtttgcatatgagtgctgctgcagcttcccgagacatcaccttggtgaaagtgggagatacattggatctt

SEQ ID NO: 409415 - DNA, 141 bp, Homo sapiens
gcctgtgatggacttccagtgtgagcactggccagagtgaccaggctgaccagcaccagccctgatccaggcaaggatatcctgaaggatactatagttccaaaagtggatggagcagtcagagcgattactatgcaagct

SEQ ID NO: 409416 - DNA, 80 bp, Homo sapiens
aagtggaatcaaattggaactttgtagaagaactgctgaaaaagtccatcagtgttcagcttattcagctgattctgaat

SEQ ID NO: 409417 - DNA, 96 bp, Homo sapiens
ggagcgcgggccgcggccatgggcaccctgggcaaggcgagagaggctccgcgaggaaagaatgttttggaatctgatgccttttaccaccagaga

SEQ ID NO: 409418 - DNA, 100 bp, Homo sapiens
tctgggttctggtgccgcgcagctttccccgaaactggcgatggaatatgagaggagccctctggaaagaaaaggacagaccctgtgctttcatgaaagt

SEQ ID NO: 409419 - DNA, 90 bp, Homo sapiens
taagatgctgccgactctgggcggcgaggaaggcgtctcccgggttatatacaggcatgtagaggacttatgatcgctgctgtcagcctg

SEQ ID NO: 409420 - DNA, 100 bp, Homo sapiens
ggcggggcttcacgctggtggggatgaagatgctgcaggcacccaagtggatgagggggttcgctcagccagcaagcgcatcgtggcgcccccaggcggc

SEQ ID NO: 409421 - DNA, 100 bp, Homo sapiens
gttgcttttaggcttgctggcccgcggggctgtccaggcacgcgaggcccctcagtgaacagcagagaatttcaaaggaccttgctaatatctgtaagac

SEQ ID NO: 409422 - DNA, 98 bp, Homo sapiens
tgcaagtgctggagaacatcatggaaaacaacactcagtggctaatgaaggtggaagttgatgggtcgaaactaaatgtgaccagcacgtggaacctg

SEQ ID NO: 409423 - DNA, 75 bp, Homo sapiens
aaccgggacaagaatttcctcaagtcacatggccgggacaactccagcattcgacttaagagtctcaatgccaac

SEQ ID NO: 409424 - DNA, 83 bp, Homo sapiens
tgcagctcaaagaggccaagcacattgcggaagaggctgaccgcaaatacgaggagactccatcaagaatgctggaggaaggg

SEQ ID NO: 409425 - DNA, 100 bp, Homo sapiens
ctcgcagtgacattaagaatgggacaatcttacaactggctatctccccgattttggaattacagatgcaaagtataatggaaaagaaaatgaaaaccaa

SEQ ID NO: 409426 - DNA, 75 bp, Homo sapiens
ccccgaacggggggagattctgctcacggaactgcagaacacggagagttcctggctctggatcttggagggacc

SEQ ID NO: 409427 - DNA, 51 bp, Homo sapiens
ccttccacagtgcaaggaagacgccgaggcccggaggctgtttgatgtcct

SEQ ID NO: 409428 - DNA, 74 bp, Homo sapiens
aaggattgtgacatatcgttggacccagaattgagaacagacaactccagggtctgaagggactgttcaataag

SEQ ID NO: 409429 - DNA, 100 bp, Homo sapiens
tgaacaactctcattattaccatatggcccatggaaaagattttgcatctagaggaattgaaagtttttgacctatctgtggaaggatcactgatttcag

SEQ ID NO: 409430 - DNA, 74 bp, Homo sapiens
agatcatcctcgggccagcacaatattcctcagtaaatctcagacggacgtagcctctagttcgttagtcaaaa

SEQ ID NO: 409431 - DNA, 75 bp, Homo sapiens
tgctggagacctggatctcgcgccacaaggagatggtgaccagaagtcagcagcttcccagaagccccgaagccg

SEQ ID NO: 409432 - DNA, 100 bp, Homo sapiens
ggaagtggcatggaaaatggaagagatgaagaggagaatttcttcaagcgtcttgtgccaggtggagctcaacaggaaagtcctagcggatctggccatc

SEQ ID NO: 409433 - DNA, 98 bp, Homo sapiens
agaaaaatatattatgacatctgcaaaactcattgctcctgtaattgaaacatcttttgctgcaggttatgattggttgaaagaagctcaaaggcaag

SEQ ID NO: 409434 - DNA, 100 bp, Homo sapiens
tgaaggctgtcttgatcaggaaactgaagactctctgcttttgccacagcagttcctgcagcttccttgagttctccaaggagaagtacatcctggactc

SEQ ID NO: 409435 - DNA, 100 bp, Homo sapiens
atcagtgacctgattgcctgcctgcttcagggctgctatcaacgaagagatatcacgcagaagaagagttcaacatagagaaaggtcggcttgtgcaaac

SEQ ID NO: 409436 - DNA, 98 bp, Homo sapiens
caccatccagtttgaggagctgctgcagaacgggagccgccacttcgaggactgggatggtgaagtggatgctgaagaacttcagagatgtttgacac

SEQ ID NO: 409437 - DNA, 95 bp, Homo sapiens
tgatgtcagtgttatatcctccaggaatactggccagatcagacactcctctaatttacaaagcagtgcccagctggtttgtgcgagtggagaac

SEQ ID NO: 409438 - DNA, 100 bp, Homo sapiens
aagcagcacagcaggcagcctcttccagtgggcagggtcagcaggcccaaacccccacagaatatatcactgatgtccattcgaatgacctgtctacacc

SEQ ID NO: 409439 - DNA, 100 bp, Homo sapiens
agggagctctcgaggcaacgccggggcgcccgaggtctggaaggcgcagaatgtcgtactctcaggaggctccaccatgttcagggatttcggacgccga

SEQ ID NO: 409440 - DNA, 90 bp, Homo sapiens
cctttacaaatcttcagggaatggccaagtgacaaagaataactgaagtgaagtgatggactccgatttggagagtagtaagacgtgaaa

SEQ ID NO: 409441 - DNA, 50 bp, Homo sapiens
ctcaaagtctacctgagcgcccagccatcaaacacagaccacctgttggg

SEQ ID NO: 409442 - DNA, 75 bp, Homo sapiens
ctctttgggtggtctcagcttatctacaatcatatcacagaaattgagaggctgactgagcgactagaagaaaaa

SEQ ID NO: 409443 - DNA, 85 bp, Homo sapiens
gacaaagatcttagtcgggactagccggccaaggatgaagcctcacttcaggtggatcctgagacccattgtcatgcagaaaggt

SEQ ID NO: 409444 - DNA, 82 bp, Homo sapiens
gttgcacgtcttcgaaacctgctataaccccaaaggctgtgtggatgcctgggagcccaaagtgctccgggcgggtatgggc

SEQ ID NO: 409445 - DNA, 125 bp, Homo sapiens
aacctgaaggctcaggctgataccgcccgcgctcgcattgggagaaaagtcttcgccaaacaatgcagatcttcgtgaagactctgactggtaagaccatcaccctcgaggttgagcccagtgac

SEQ ID NO: 409446 - DNA, 76 bp, Homo sapiens
cagattcgcagtggtcgcttcttctccttggggctgccgggaggctatcaaaaggatcgcctatgagtttgtagag

SEQ ID NO: 409447 - DNA, 85 bp, Homo sapiens
gagctacctggtaaccccaacgctgtctggacagtgcgtcgacacattgaaggacaatctctatgggaagcagaaggcaaggacc

SEQ ID NO: 409448 - DNA, 75 bp, Homo sapiens
gacctctacttagctcagcaattcttaccttattgctaagaagcctcgaacgccaacctctggtccagtaatcac

SEQ ID NO: 409449 - DNA, 71 bp, Homo sapiens
gaccttatgggtccagccaagcatttgctagtgtgggcttccgagtggacctgccaatcaagtcggcccgc

SEQ ID NO: 409450 - DNA, 75 bp, Homo sapiens
ttgaccactgggatgcagtcaacctgttttcatggagtgataatgaaaggagcagcagccgcattaatatcccag

SEQ ID NO: 409451 - DNA, 100 bp, Homo sapiens
ctgttaacagactgcttttacacctaccctgaagcaggacattctaaatgaaaagactgaattggaagcaacacttaaggaagcggagttggtaactcat

SEQ ID NO: 409452 - DNA, 90 bp, Homo sapiens
gtttttagtccattgactatgcagcctaatggtgaggtttttgtgctggatgatggtggggaagtagaccttgacctgggtaactatgag

SEQ ID NO: 409453 - DNA, 86 bp, Homo sapiens
cggtgaaactgaacttataatcgtcactggattatattgctggaattcctctgcctcagaacctgagtggatactctttgttgccg

SEQ ID NO: 409454 - DNA, 75 bp, Homo sapiens
cgacaaggcagtgtccatcattgagtgtgacatgaaccgcgttccttcacctcgggcagaataactttgcagaag

SEQ ID NO: 409455 - DNA, 101 bp, Homo sapiens
cctgatgcttggagaagctgaggacacacagggaactgcaagcacatgttgaccagataactgaaatggcagcagtaatgaggaaagccattgaaattgac

SEQ ID NO: 409456 - DNA, 100 bp, Homo sapiens
cgcacgtctgccgctgccaccggcgcgcccgacggcagtacatacctgtgaaaatgaagagcaaagccttctggatcttttcttgggagtatgccatgat

SEQ ID NO: 409457 - DNA, 50 bp, Homo sapiens
cacttacatctccgaggacggagacacggcgtgatggtgggcatgggtca

SEQ ID NO: 409458 - DNA, 80 bp, Homo sapiens
gctcttcctgaacgaagtggccaagaaggagaagcagctgcggaaaatgctagaaggagaatggggtactaagagaaaag

SEQ ID NO: 409459 - DNA, 75 bp, Homo sapiens
cccaaggccaaccgcgagaagatgacccaggtggaagttaaacgagctgagcctcgggacagcaagagccaagcg

SEQ ID NO: 409460 - DNA, 50 bp, Homo sapiens
gatgaagtgcagaggtttttttctggatcaccattgtggaccaaagaaaa

SEQ ID NO: 409461 - DNA, 100 bp, Homo sapiens
ctccccatcaaggaggaggaagagagaagtgcagatgtcgaaggacaaggaagctgttgatgtatataatgtttacatggcagggaggcagctgtgttct

SEQ ID NO: 409462 - DNA, 82 bp, Homo sapiens
tcaccacagacctcatcgtccagcggatcatcaccaacagagctgttgcgcagccattggtacctgtattggggaaacatag

SEQ ID NO: 409463 - DNA, 89 bp, Homo sapiens
tggggggaaactaggtcgatggtcggcggcgcccggatgggcagctgaggaattgattcggaaggccatgcagctaactttgtagaaac

SEQ ID NO: 409464 - DNA, 100 bp, Homo sapiens
cggaagaccgcgcgcagggcctgcagcgggagctggacggcgagcgcgagcggcgcgagaaaatccgggtcttcctccagcagctcaagggccgcgtagc

SEQ ID NO: 409465 - DNA, 83 bp, Homo sapiens
gggagatgaacccaacctagtgggtgtaatacatcatgaactgcaggaaactgctctgtgaaaaattagaggaacagttgcag

SEQ ID NO: 409466 - DNA, 98 bp, Homo sapiens
gcaggatgggatccggctcctccagctaccggcccaaggccatctacctggacatcgatggacgcattcagaaggagtcagaaataccatcagaggag

SEQ ID NO: 409467 - DNA, 122 bp, Homo sapiens
atcaatgctgaggagcagacgagtggccaggcttctggggctgactcaactgatagggccagatttgagtgtgtgaatttttgagtgaaacctggaacccaaatgagaagaaatctgcaagg

SEQ ID NO: 409468 - DNA, 76 bp, Homo sapiens
ctcatgaacagaaacacctaggaagggagaactggagaccaagacacattccaccccagtggggggtcccatacca

SEQ ID NO: 409469 - DNA, 138 bp, Homo sapiens
cagagatggttgagctcatgttcccgctgttgctcctccttctgcccttccttctgtatatggctgcgccccaaatcagggagaaggaaggttcactatttattcccagacggcaaggaaatggctgaagaatatgac

SEQ ID NO: 409470 - DNA, 96 bp, Homo sapiens
gccacctaaaaacaaagaggattttgagaaggtgtgcagcaatgacaacaagaccttcgactcttcctgccacttctttgccacaaagtgcaccct

SEQ ID NO: 409471 - DNA, 75 bp, Homo sapiens
aggcgccgcacggagttgcgtcccggggacttggggccgcagggaggtcaccttccgcaaccctgtcattgagag

SEQ ID NO: 409472 - DNA, 133 bp, Homo sapiens
tgaagcgtgaggccggcatcgtctttccgtcctctgaggcgacggccgcggctgcacagatttaatccagagactgacttcactatagaacccacagttgtatcaatggttggggaaagatagtggcaacagg

SEQ ID NO: 409473 - DNA, 98 bp, Homo sapiens
cgagatccacgaggcctcggcgtgacagtggatagtggaaacaggagatcgtggatcctccttcaaaaatggaggatggaaagcccgtttgggcgcca

SEQ ID NO: 409474 - DNA, 73 bp, Homo sapiens
aagctgagcttgccgcacaaaaagctagagaggaagcggctcagccccagggcagcacatcagagacaccatg

SEQ ID NO: 409475 - DNA, 100 bp, Homo sapiens
cggcccctcagcgcccccagcacgccgccgagtcccgctcgccatggggctttttgtagaaagcacccgcaaggggagtgtagtgtccagagctaatagc

SEQ ID NO: 409476 - DNA, 109 bp, Homo sapiens
ctgcgggcccgggccatggccgccgccgatgccgagtactatactggcaattgctggagaagattttgcaattgttgcttctgatactcgattgagtgaagggttttca

SEQ ID NO: 409477 - DNA, 80 bp, Homo sapiens
ctgtcctactaccgcctcacacgcttcctctccagagtgatcaagtgtgacccggacatggatttgattgacatactttg

SEQ ID NO: 409478 - DNA, 50 bp, Homo sapiens
ggacctgatgaagcgaagatcaagaacaatgtctcccttttgcagagctg

SEQ ID NO: 409479 - DNA, 100 bp, Homo sapiens
ggagttagagagtgaagaggagagaagccggaaaatccaggtgtgtgcagtggcctcagggatccggaaagtctaggactgaacttctcctaacatccag

SEQ ID NO: 409480 - DNA, 95 bp, Homo sapiens
tcctggtccagctctcaggacaagaacaaagtgtgctgactttgagagttttgacctgcctgaagagcaccagattgcgcacctccccttgagtg

SEQ ID NO: 409481 - DNA, 82 bp, Homo sapiens
cggccgggggcgtctttcagagcattacgcttaaagcttttcaagccaggccaagaagctgtgaagtaccagggtcctcggg

SEQ ID NO: 409482 - DNA, 83 bp, Homo sapiens
aaacgcgctcttagaccatggcgacccaggcgaagcgtccacggacaatgcagatcttcgtgaagactctgactggtaagacc

SEQ ID NO: 409483 - DNA, 51 bp, Homo sapiens
tggaagactaccaggctgcggaggagcttcgcctcaacagcatcaagaagc

SEQ ID NO: 409484 - DNA, 100 bp, Homo sapiens
gaacaagaagtaggcattgaccccttgtccagttactctaacaagtctggagtgctggacccaaaggagacaacatttatgaatggaggtcaactatatt

SEQ ID NO: 409485 - DNA, 83 bp, Homo sapiens
gagaacaacggaggcagaggagctgaagactccagtatgcaactgactacaaggaggtgagaagccctaccactgcaactggg

SEQ ID NO: 409486 - DNA, 50 bp, Homo sapiens
cgccgccaccacccactccggacacaggaagtactagccggacatcatga

SEQ ID NO: 409487 - DNA, 75 bp, Homo sapiens
tatgaacaaaaccagtctgatgttgagaaagatcagtctaaagaaaaggagaagaaagtgaaaaaaacaattcct

SEQ ID NO: 409488 - DNA, 100 bp, Homo sapiens
cgccgcctggacggccgcactctccctgcccgagacccggcactactgcagtcttcagttaagcaacaagtagaagctattgaaaaacagtacatttctg

SEQ ID NO: 409489 - DNA, 116 bp, Homo sapiens
cagaccctggagcctcagttggaagcagccgatccagcctgcggagcctgtggggcagcttcctgcctgacacagctcacttcaagaagtgcacaatgtcagaacgtggaattaag

SEQ ID NO: 409490 - DNA, 101 bp, Homo sapiens
tgatagataacccaaaatacaaaggagtatggagacctccactggtcgataatcctaactatcagcattacaacacctccttgcttgccgctgcagcagca

SEQ ID NO: 409491 - DNA, 83 bp, Homo sapiens
cccacccaacattgactgcacatggaacattgaggtgctatgcttacatttgaaaagatttcattggacagcatatttaagaa

SEQ ID NO: 409492 - DNA, 90 bp, Homo sapiens
cccgccttggcctcccgaagtgctgggattacagaactcccccactggaaaggattctgaaagaaatgaagtcagccctcagaaatgaag

SEQ ID NO: 409493 - DNA, 75 bp, Homo sapiens
ctggaccaatgcatcttcccaccaccttaaaccactgcaaacttaaactatttccagaagcttcaaaaggtcaat

SEQ ID NO: 409494 - DNA, 50 bp, Homo sapiens
cagcaccctctgcttaccacagccagacctgatggccaaaagaaaggaag

SEQ ID NO: 409495 - DNA, 75 bp, Homo sapiens
ttttgtcttctgttgggcttggaacagggctgcacacctttctgctttatctggaggaggcaaaacagattcaga

SEQ ID NO: 409496 - DNA, 100 bp, Homo sapiens
aagatgaattaatccttgaaggaaatgacattgagcttgtttcaaattcagcgggaacttcattgcaggccgtgtgtcaccctgaccacgtctatctctg

SEQ ID NO: 409497 - DNA, 74 bp, Homo sapiens
agcgaggagttcttccgggaggacgacggtggaggtgtattcccagcctgagcaccacgcagaaatgtgcttcc

SEQ ID NO: 409498 - DNA, 90 bp, Homo sapiens
ggttccccggcccacagtgggggtgtgcaaacccgagagaactgggtcttcaataaactcatcaggagatataagtatttggagaaggca

SEQ ID NO: 409499 - DNA, 82 bp, Homo sapiens
gggaccacggtcaccgtctcctcagattcctggtcgggtggcttccagtggtcttcagtctgtcgtgcaccgatgagaactc

SEQ ID NO: 409500 - DNA, 97 bp, Homo sapiens
tgtgtacttatcctggatgatgccaccagtgccctggatgcaaacagccagttacagtggaagacctggagcggaacaacggctccctggaccggcc

SEQ ID NO: 409501 - DNA, 82 bp, Homo sapiens
gtatgccttcttaggcttgacagccccacctggttcaaagaggacgattatttatcatttctactaaagcaggatctctagg

SEQ ID NO: 409502 - DNA, 90 bp, Homo sapiens
ctcaatatctaatcaatgtcagcctccagggtcgtatagacctccccctcctatgggcaaaccaccaggttcaattgtaagaccctctgc

SEQ ID NO: 409503 - DNA, 90 bp, Homo sapiens
aaaccggtagcgcttgcagcatggtccggcctctttggcctacccccgttggctccgctgccccaggtcgatgagtcccctgtcaacgac

SEQ ID NO: 409504 - DNA, 82 bp, Homo sapiens
gaaatggaatctatttggaatttgcagaagcaaggattatattccatcacaacaagatattctgcttgccagaagacccacc

SEQ ID NO: 409505 - DNA, 98 bp, Homo sapiens
aggcattgtgggtgtcctggttctccatcattgtcaccctggccctcgcggtggctgcctttagtactccaaagattcaggtttactcacgtcatcca

SEQ ID NO: 409506 - DNA, 101 bp, Homo sapiens
cgaaaagcaaggcatgcggacacacgccgtctctgtgtcaggtactccaaagattcaggtttactcacgtcatccagcagagaatggaaagtcaaatttcc

SEQ ID NO: 409507 - DNA, 75 bp, Homo sapiens
cggagcgcggagcccggctcccgcaccatggaggaggacgacagctacggaaggcttcaccaatgaccagtacca

SEQ ID NO: 409508 - DNA, 90 bp, Homo sapiens
tgcacctcagagtaaagctgctggacaacaccatggaaatatttgacattgaggaggcaggtggaagtcatcataaagtttctgtttcac

SEQ ID NO: 409509 - DNA, 75 bp, Homo sapiens
gtgatattgaccatgatggaatgcttgacagagatgagtttgcagttagctgtgccaggcctgaagctcaagatt

SEQ ID NO: 409510 - DNA, 101 bp, Homo sapiens
ggccacgctgacctacgagacgccacaggcacgagacattcagaagtgggagtatgtccctctcgggccattccttgggaagagttttgggaccactgtct

SEQ ID NO: 409511 - DNA, 90 bp, Homo sapiens
gaagaatggcagtgctcaaactcaccgaccagacatgcacatgatggtgtccaagccagaacagtgggtaaagccaatggctgtagcagg

SEQ ID NO: 409512 - DNA, 75 bp, Homo sapiens
cagcatgaaatccacccctgcgcctgccgagaggcccctgcccaacccggaggatgacagacaaccttctgtgcc

SEQ ID NO: 409513 - DNA, 100 bp, Homo sapiens
cagacagatgaagatgaacacagtattgaaatgcatttgccttatacagctaaagccatggaaaggtgcaaattgagcatgacccagaattagaaaaaga

SEQ ID NO: 409514 - DNA, 100 bp, Homo sapiens
agaagagagcctaactgaaaggaagagggagcagagcaagaaaaaaaggaagacgatgacttcagctgtaagagctcattttggaggaataatggatgaa

SEQ ID NO: 409515 - DNA, 51 bp, Homo sapiens
caccaagcatcgccagcaccaggacatggatttgattgacatactttggag

SEQ ID NO: 409516 - DNA, 75 bp, Homo sapiens
ggaaaagcgagcgatcgagcgagcgcgcgcgcgaaaactccgggcagggatcgcttacacctgagacgaactaca

SEQ ID NO: 409517 - DNA, 98 bp, Homo sapiens
ccccagtgcactagccattgaagtatttgaagcacatttgggaagccacattttgcagccctttctaaggcacaaaatgatgtgatggaaatgaagat

SEQ ID NO: 409518 - DNA, 100 bp, Homo sapiens
tgcttccaaatacaagctgtatagggttacccaccactgacgaagatcctggcaagtttctttggggagctgctgggtcaggagatagacccgctcagga

SEQ ID NO: 409519 - DNA, 88 bp, Homo sapiens
caccctggaagagtcgctggccgaagacttgtgcaccatggacaattttgctgagggagatttcactgtggcggattatgccttgtta

SEQ ID NO: 409520 - DNA, 75 bp, Homo sapiens
tgagtacggtctcacagacaacgttgaggagagctcaaaggatggctactgacatgcagaggaagagaagcagcg

SEQ ID NO: 409521 - DNA, 100 bp, Homo sapiens
agggatgcaatctctacactctctgtgggatggagggggaagaactccatccggcacaacctgtcactgcatagtcgattcatgcgggtccagaatgagg

SEQ ID NO: 409522 - DNA, 75 bp, Homo sapiens
atccattcacactccccaaaccaggtcccagcacacctggaaagttctgcaaggcctcagctacagaaagcccag

SEQ ID NO: 409523 - DNA, 75 bp, Homo sapiens
tgataatgaggaagatcttcaaatgggcattcacaaggtcaatgtgacggtggactacattagaccagccagccc

SEQ ID NO: 409524 - DNA, 96 bp, Homo sapiens
gtacctctaattgtaaccttggataaacctctcataatgaaggcccccgctgtgcttgcacctggcatcctcgtgctcctgtttaccttggtgcag

SEQ ID NO: 409525 - DNA, 100 bp, Homo sapiens
ctcttcatccggcccatccagcgttaccacagatgacctcacaggagcccactgtggctttgccagccttctggactccgacagtgcttaccatctgtgt

SEQ ID NO: 409526 - DNA, 82 bp, Homo sapiens
agatgctgaagggcagaattctagtggggcacgctctgcataatgacctaaagagctttgtcaagcaagttggagatggagg

SEQ ID NO: 409527 - DNA, 50 bp, Homo sapiens
atcaaagttatggatgtcactgagcttaccctgaaagaagcagatcccag

SEQ ID NO: 409528 - DNA, 100 bp, Homo sapiens
ttcctgctctttgtgctggagaacatgctggggcttttgcggcaccgagggctcaggccagttgcccccaagtttcctggcagtgtgtgatactgaggag

SEQ ID NO: 409529 - DNA, 74 bp, Homo sapiens
gttcctggtgatattgtagaaattgctggtccctatcactgttcagtccatcgtcattcagtctctaaataaaa

SEQ ID NO: 409530 - DNA, 90 bp, Homo sapiens
cgcgttcctcccgccggccccaaagacgctaaacgtgccctactctgccccgggggagaggtgctggagaatctggtaaaagcaccattg

SEQ ID NO: 409531 - DNA, 96 bp, Homo sapiens
atcactgacggctatgtccccattctcggcaacaaggaacgccagcgcctggagaccatcctgaacctgtgtgccgaatacagccgggctgatggg

SEQ ID NO: 409532 - DNA, 80 bp, Homo sapiens
gaccagtccaggcccagcctctcgaatgggcacacctgtgtagtggaagagaaagccaatacccacctcctcttgggcat

SEQ ID NO: 409533 - DNA, 83 bp, Homo sapiens
agaatgtcccaaggaacacctgggcaacagaatattggtcaagttgctgaccttgaaggagcatttcctgaagacgtagtcat

SEQ ID NO: 409534 - DNA, 83 bp, Homo sapiens
ggacgaggacgaggagtcggaggagccgcgggcggcgcggcccagctcgttccaggcgtccgagctgggccacagcctgaacg

SEQ ID NO: 409535 - DNA, 75 bp, Homo sapiens
gactgcactcacacgacgtgcgctatgggtcagctattgttaaccgtgatggcacccgctatgtccagaaaggag

SEQ ID NO: 409536 - DNA, 97 bp, Homo sapiens
ttctactgatcacattcctatactctacagaacaggacggctctcctgcaggcacgcccccggctgctcctccctgtgcaaagcctcgtgtgcctgg

SEQ ID NO: 409537 - DNA, 100 bp, Homo sapiens
gtcgggtgccaagcagagagtgagccgcggagttattcctgatgaagctaaagctttgtctctgttggcaccagctaatgcagtggcaggtcttctgcct

SEQ ID NO: 409538 - DNA, 75 bp, Homo sapiens
gcctccagtgatccttctgcctcagcctcccaaggagcgaggaccacagcgaggatgccatgaggaaagctggtg

SEQ ID NO: 409539 - DNA, 100 bp, Homo sapiens
ctgaagccctacggggccctcgtggacaaagtcaagtccttcaccaagcgcttcatcgacaacctgagggacaggcatcaccccgatgctgcaggtgatc

SEQ ID NO: 409540 - DNA, 71 bp, Homo sapiens
tactgagcctgttggaggaactggcccggaaacaggaggacatccagagacaatggccccgatgggatgga

SEQ ID NO: 409541 - DNA, 100 bp, Homo sapiens
acaaacgagatgtaaaagtgtcactgtgctgatttggagcaatataaaaaagctttaactgatgcaggatgcaaccttaatcctttacaatatatcaaac

SEQ ID NO: 409542 - DNA, 83 bp, Homo sapiens
ggatcgcctcacagtgggggtgtacgagtcggccaagttgatgaatgtcagcccctgtcaaagggaacaggaagcagtccacg

SEQ ID NO: 409543 - DNA, 75 bp, Homo sapiens
tggtgcagggagtggccatatctcggtcaagacaagaagatccagaacagttaaggctgaaacagaaggcaaagg

SEQ ID NO: 409544 - DNA, 100 bp, Homo sapiens
ctgggtgaagtgctccgtcgcccttgcctccaggctccaaccaggaatggagacgccattggatgttttgtccagggcagcatctctggtgcatgctgat

SEQ ID NO: 409545 - DNA, 113 bp, Homo sapiens
agatgacaacttgacttctctggggactctgaacttccctggtcgaacagttttttctaatggctattcaaggccaggggttatcaccatgcaagctttgtcggaagaggacc

SEQ ID NO: 409546 - DNA, 90 bp, Homo sapiens
gagaccatcctggccaacacggcctgagggaagacatgctggagaccctggttcccaaggcagagggtgaccgtgtgatggtggtgctgg

SEQ ID NO: 409547 - DNA, 99 bp, Homo sapiens
aagaggagctcttgaggaaagccattgctgaaagcctgaatgtgcaggagtgcctgcagcagttcaaggtgacaagggcacagctacagcagatccaag

SEQ ID NO: 409548 - DNA, 100 bp, Homo sapiens
cgggctgctgtagcaggagaggatggcagaatgattgctggccaggttttaggtacatcaggaacgtctctatcaagaatacaatttcagcaaggctgag

SEQ ID NO: 409549 - DNA, 100 bp, Homo sapiens
accaatcagcatgctgtgtctagctcaaggccgaatacatcaagcaatggtaacatctttaaatgaagataatgaaagtgtaactgttgaatggatagaa

SEQ ID NO: 409550 - DNA, 100 bp, Homo sapiens
gggttggtggcgctcggctctcatgacctgcagggcctggtggcggtaataaccggaggagcctcgggcctgggcctggccacggcggagcgacttgtgg

SEQ ID NO: 409551 - DNA, 98 bp, Homo sapiens
ctctgctctgcctgtgatgtcgagaacactggagcttgtggacaaatgtataggatcaagaattcacatcgtgatgaagagtgataaggaaattgttg

SEQ ID NO: 409552 - DNA, 82 bp, Homo sapiens
aaggcattgaagatgactattttttggagaggcctgatgcccgaatttcagccacatgaaatgaagatcacctctgcctatc

SEQ ID NO: 409553 - DNA, 75 bp, Homo sapiens
ggccggctgaccaggaacctgggcgagcagcggcgggggcccgagggcttcctgcctgacacagctcacttcaag

SEQ ID NO: 409554 - DNA, 90 bp, Homo sapiens
ggcgagcagccctgcctccggacggccccttcacagatgtagtcactacaaatcttaaattgcgaaatccatcggatagaaaagtgtgtt

SEQ ID NO: 409555 - DNA, 83 bp, Homo sapiens
cgtgaaacatgtgaacactcaagtgaagcaaaagccttccatgattacacaaactttccagaaatgatgaatagatataagca

SEQ ID NO: 409556 - DNA, 83 bp, Homo sapiens
gggaagcggcggcggcaaaggacaatgcagatcttcgtgaagactctgactggtaagaccatcaccctcgaggttgagcccag

SEQ ID NO: 409557 - DNA, 90 bp, Homo sapiens
tgctaagttggacacgtctcagtggccccttttgctaaaggtgctggacgtcattgctcctccttatacctctgacttcgtgcaactttt

SEQ ID NO: 409558 - DNA, 76 bp, Homo sapiens
acgtcttccacctggagggcatgactacatctgtcatgtattcccggcaggagcaggaggaggagggccggaagcg

SEQ ID NO: 409559 - DNA, 83 bp, Homo sapiens
cccgagcggcggcggtggcggcgaaggccgaggcgggactccagaacgggtggaactggcacccctcccctcttggcagccag

SEQ ID NO: 409560 - DNA, 100 bp, Homo sapiens
cgccggagcccggaatcccgctcggagccagccagccgtcccgagctaccagcaggtggccaaggtggaatacgtcaggaagaagccaaaattaaaagaa

SEQ ID NO: 409561 - DNA, 98 bp, Homo sapiens
ccctcgccaccgcccgagcccaggtgaaagaaaagatgttgtcccggttaagagtagtttccaccacttgtactttggcatgtcgacatttgcacata

SEQ ID NO: 409562 - DNA, 82 bp, Homo sapiens
cgggaagagccggggccgtggctgacatggagcagctgctccctgcatgaggaggacacccagagacatgagacctaccacc

SEQ ID NO: 409563 - DNA, 100 bp, Homo sapiens
atggctctctcaaagcaccgtggaatcaaccaagccctcgatgggatggaggtggataccacaccaacagttgctggacagtttgaggatgcagatgttg

SEQ ID NO: 409564 - DNA, 80 bp, Homo sapiens
gaccaagatcgagcccagcgtcaacttcctcaagtcgcccaaaggcctgccttgctctgccaggaaccatgagtgaggcc

SEQ ID NO: 409565 - DNA, 74 bp, Homo sapiens
cagcaaacagtcttccgcaggaaggagatgtgccctgcctgatgtggctctgggaattcctgcagagaagagca

SEQ ID NO: 409566 - DNA, 90 bp, Homo sapiens
tgctgtacaagttcaatggcagcccttctaaggtgcgcatccttaatcacgtgacttggaaaatgatcacggagtttgggcatcctgcag

SEQ ID NO: 409567 - DNA, 100 bp, Homo sapiens
aaaagaaggaatgccagagattgaggtggtgatcgtggcagaggtggccctggtggcatgcggggaggaagaggtggcctcatggatcgtggtggtcccg

SEQ ID NO: 409568 - DNA, 79 bp, Homo sapiens
gctaagaactgctgggaggatgacatccaagccttatgcatttgatcgggtgttccagtcaagcacatctcaagagcaa

SEQ ID NO: 409569 - DNA, 51 bp, Homo sapiens
gccaggaacacaacctcaccttgatcaggatgcagcccatgagactgttcc

SEQ ID NO: 409570 - DNA, 100 bp, Homo sapiens
ggacaactggtttgcaaagtgctcagcaaagcaggctgtaggtttagttgagcaccggaaagaacgggtaccaaagtctgatctcttgcacaccaaatca

SEQ ID NO: 409571 - DNA, 90 bp, Homo sapiens
ggggaacagaagtatgaatataagtcagatgaatgagaacagccacatcatcctgtgtggtcaaatttctcagtacaacaaagatgtgcc

SEQ ID NO: 409572 - DNA, 90 bp, Homo sapiens
caaccacctcgagcggctgctggacgaagctcttcagtaggttacctgcaacatccaggatcagaacaagtacaatttcctcgaaccact

SEQ ID NO: 409573 - DNA, 51 bp, Homo sapiens
atgctgtgggagaagagtgtgacttcgagggtcttactgaagtaacacaaa

SEQ ID NO: 409574 - DNA, 82 bp, Homo sapiens
gaccccacgtggcaggagatgctgaaccatgctacctgcaagagcaattgtatgatggctatgatgaagagtatgactgtcc

SEQ ID NO: 409575 - DNA, 90 bp, Homo sapiens
ctttttccagagaagagaagctttactggtgttccagccctaaggccaagatcaaggctcgagatcttcgcgggaagaagaaggaggagc

SEQ ID NO: 409576 - DNA, 82 bp, Homo sapiens
agcggacgggccatacccaataaccaggtgcttggcaaaatcgagcgggccattgccaaaacagagtggagtacgagaaaag

SEQ ID NO: 409577 - DNA, 51 bp, Homo sapiens
caggtgtgcaccaccacgcccaggtgatactatcaaccaaagcaccctgcc

SEQ ID NO: 409578 - DNA, 82 bp, Homo sapiens
ccctgctggccacgggccagcctgcgggatctgaagacctcaccaaggagaaccaggtgcatcagcgcattgcggagctgag

SEQ ID NO: 409579 - DNA, 98 bp, Homo sapiens
tttgacacaggactgaggaataagatggtacaagttggactgcttcccaagctcactgcactcctagcgcgtacttgctttgtaagtgatctgaagcg

SEQ ID NO: 409580 - DNA, 101 bp, Homo sapiens
gtggccagtccaaactgtgcagtgcgcaaacggggattcagcgtccgatcctttggaacagggactcacgtgaagcttccaggaccagctcccgacaagcc

SEQ ID NO: 409581 - DNA, 82 bp, Homo sapiens
ctgctttggacgtgggagtcacctgaaagccaggaaatgggggggctgtcggggggctgttaggtgcctggatgacaagtgg

SEQ ID NO: 409582 - DNA, 100 bp, Homo sapiens
catggggctgtttggaaagacccaggagaagccgcccaaagaactgataaaataccatgaggagtttgagaagagccgcatgggccctagcgggggcgag

SEQ ID NO: 409583 - DNA, 83 bp, Homo sapiens
agtacctgcagaaggtctctggagacatcttcagcagcgggctgacgcacgaggcacacaggaaggaggtggagcaggtgtat

SEQ ID NO: 409584 - DNA, 80 bp, Homo sapiens
cgcggatctcaccgccgctcaggtggctgtttggtggccattctccgtccctaggactgcccccctcttccacagtggag

SEQ ID NO: 409585 - DNA, 83 bp, Homo sapiens
ctcctcaagtggttgttaatcctggagccaatcaaaatttgcggatgaatgcacaagaaggtggcccggaccatcggcatttc

SEQ ID NO: 409586 - DNA, 100 bp, Homo sapiens
gtcagcagtctccactggaaaaaaagatcttgccaacttctctttgcctgaaaaatgcgactatatggatgaggtgacatatggggagctggagaaggag

SEQ ID NO: 409587 - DNA, 74 bp, Homo sapiens
gctttgtctccttcgacttggagtctttgtccaggacgtttatgcaactactgctgccaaccccagagagtcgt

SEQ ID NO: 409588 - DNA, 75 bp, Homo sapiens
cgacattcgaaggatggaagaagagacgaagagacagctggatgaaactgcctcttcaaggtgtgccccatgaac

SEQ ID NO: 409589 - DNA, 50 bp, Homo sapiens
gagatgcaggacgtgatttcaaagtatgacatgatgggaagaaatcagac

SEQ ID NO: 409590 - DNA, 100 bp, Homo sapiens
actgactgctgccatgagcagtgtgctgccggctgcacgggccccaagcactctgactgcctggcctgcctgctgctccagaagaccctgtccatgcggg

SEQ ID NO: 409591 - DNA, 100 bp, Homo sapiens
gtgatggtacaggaagggaacgtggaaagcgcatacaggaccctaaacaggattacggggcgctgaaagacatcgtgatcaacgcaaacccggcctcccc

SEQ ID NO: 409592 - DNA, 100 bp, Homo sapiens
tgcagaatcagatgaagatgaagattttaaagagcagactagacttctcaaggttggatggcaagcatgtggtgtttggcaaagtgaaagaaggcatgaa

SEQ ID NO: 409593 - DNA, 74 bp, Homo sapiens
taaagacatagttcctggtgatattgtagaaattgctgtgtaaacaggaacatcgataagtagtgtaaaaactt

SEQ ID NO: 409594 - DNA, 100 bp, Homo sapiens
tatagatcctgtattaatggctcctacatgtgtgtttttggcatccaaagtagagacaaatcttcctattttcaagctgaaagaatctactgttagaaga

SEQ ID NO: 409595 - DNA, 109 bp, Homo sapiens
aagacttggcgaagcgctgcgctcgcgcccggatccctcaggtactccaaagattcaggtttactcacgtcatccagcagagaatggaaagtcaaatttcctgaattgc

SEQ ID NO: 409596 - DNA, 100 bp, Homo sapiens
ggaccataactgatgatgtgcgggttcaggaggtacccaaactgaaggtgtgcctaccgcatgttgccgctgctgtttctgctgggacgtctgactccag

SEQ ID NO: 409597 - DNA, 90 bp, Homo sapiens
aacaacagaggagtggcgggggagaatctcttggagtacaagcgcaagctagccagagtttccctggtgcgcaaagaactcaggtcccgg

SEQ ID NO: 409598 - DNA, 82 bp, Homo sapiens
attctgaggaccagcagatggccagtcacgagaacccaggagtctgtgaccttcgaggatgtggctgtgacatttacccagg

SEQ ID NO: 409599 - DNA, 97 bp, Homo sapiens
gaaacagtgcgacttcaaccaaggtgcagtctttgcaagccacatttggaacttttgagtccatcttgagaagctcccaacataaacaagacctcac

SEQ ID NO: 409600 - DNA, 100 bp, Homo sapiens
atcatcacgaagtatgtatatgagctcctggaaaaggattgtaatttgaaaaaagtatctattccaatggattttaactaggaattacaaagccctcagc

SEQ ID NO: 409601 - DNA, 75 bp, Homo sapiens
gagacagctcaggaagcaactttggcatccgtgtcattctggaccttactcccaactaccggggtgagaactcgt

SEQ ID NO: 409602 - DNA, 75 bp, Homo sapiens
tcaagtattcaccagttaatagcaccagggtatttgaagtataccatacaactgttttgaaaatccagcgtggac

SEQ ID NO: 409603 - DNA, 100 bp, Homo sapiens
caggacccgaagcctaaattccaggaggaaccgggctgtgggtcggcccaaggggaagctgggcccggcctccgcggtgaagttggccgccaaccggaca

SEQ ID NO: 409604 - DNA, 90 bp, Homo sapiens
ggcggacggggagctgaacgtggacagcctcatcacccggctgctggaggacaatgcagatcttcgtgaagactctgactggtaagacca

SEQ ID NO: 409605 - DNA, 97 bp, Homo sapiens
gggagaggagccgcacccggccggcccggccccagccccatggacctccgagcaggtgctggagaatctggtaaaagcaccattgtgaagcagatga

SEQ ID NO: 409606 - DNA, 75 bp, Homo sapiens
aggaggaggaggaggcgaggaggagagactgtttggtgcacctcgatttggaggaagtagggcagggcccttatc

SEQ ID NO: 409607 - DNA, 85 bp, Homo sapiens
tggggccagggaaccctggtcaccgtctcctcaggccctgggctgcatcttgtacctgctgtgcttccggcagcacccttttgag

SEQ ID NO: 409608 - DNA, 96 bp, Homo sapiens
ccactacatcctgcagcagggcgagcgcgcgctgtggtgcagccgccgcgacggcggcctccagctccgacccgcccctgagttttgaaagcaaga

SEQ ID NO: 409609 - DNA, 101 bp, Homo sapiens
atcatgaaagacaattctgtcacacggctgacagctgagcagtgggtggtcatgatgctggatactcagtcaggtgcctgattattacaaaataattaaaa

SEQ ID NO: 409610 - DNA, 90 bp, Homo sapiens
ctgacagccctgtcagataagagaccaaactatggggaaatccctgttcaagaatggtcttcagcagagaagccgtcaggagacttctcg

SEQ ID NO: 409611 - DNA, 50 bp, Homo sapiens
ctacgaccttcagagcaaatgtcagggacggagttttgctcttgttgccc

SEQ ID NO: 409612 - DNA, 100 bp, Homo sapiens
cagcagacccccaccatccctaaccggctggctgcagacccgaaatcttcccaaggctgcagacaccgacggatttgctttgggagccagagtagctgcc

SEQ ID NO: 409613 - DNA, 95 bp, Homo sapiens
acattttcgagtctggcactaaagtaccttctccaggcaaattccgttcccctgcagcaccatctcctttggctcttcggcaaccagtgaaagca

SEQ ID NO: 409614 - DNA, 81 bp, Homo sapiens
aataaagattacagagaaaaaaccaacaccttcctgtgcagtcctgttggaatttggtctcattctatcacccaggctgga

SEQ ID NO: 409615 - DNA, 74 bp, Homo sapiens
ggagaagtgacagaaaaagtgagagttacagcgaaagttcaaggaaaagagcactggttgccattggtacccat

SEQ ID NO: 409616 - DNA, 103 bp, Homo sapiens
agggtcgccagcgcctcagctctgtggaggagcagcagtagtcggagggtgcagacaatgcagatcttcgtgaagactctgactggtaagaccatcaccctcg

SEQ ID NO: 409617 - DNA, 75 bp, Homo sapiens
aagctgtcccaggacatggacacctgtgaggtggcctgtgagaagaccgtgtctaccttgcaccacgttctgcag

SEQ ID NO: 409618 - DNA, 95 bp, Homo sapiens
agagtgagatcatccccatgttctccaacctggcctctgacgagcaggactacaaatccctccaggatatcattgccatcctgggtatggatgaa

SEQ ID NO: 409619 - DNA, 75 bp, Homo sapiens
gaagggatctgtcaacgtggtgacccatggcaaggtgccatcgcctgcaggattctttattcagctctgacagtg

SEQ ID NO: 409620 - DNA, 50 bp, Homo sapiens
tggtgatattgtagaaattgctgatctgactgcagccatgagcagcaatg

SEQ ID NO: 409621 - DNA, 100 bp, Homo sapiens
gagccgggcacggagccgcccgcgcacttccaggtgcacagcgcgggagccgtcacggtgctcaaggtcagtatgggaatcctttaaataaatatatcag

SEQ ID NO: 409622 - DNA, 76 bp, Homo sapiens
aatggactttaattgctatggtgttgctgtcatttgtgacaagtacaagactggagttattgatgggcctgcatgt

SEQ ID NO: 409623 - DNA, 78 bp, Homo sapiens
ccagggtggctgaatcacggaatggttctcactctgtagcccagtctggagtgcagtggtacaataatggctcacttc

SEQ ID NO: 409624 - DNA, 83 bp, Homo sapiens
gagggaaaaaggaagaggagaaggaaattgtcccgaatccctgcagatgttgccgatgactatatccacaccgcagcctgctt

SEQ ID NO: 409625 - DNA, 101 bp, Homo sapiens
tatcattgtaatcagcttcttaccaaatacagaaggagatgcctacatagaagagtgacagcagctagactaaatgtttaactgctgaactagttcctcag

SEQ ID NO: 409626 - DNA, 100 bp, Homo sapiens
cagatggcccaggagggggaccaggtggctctcacatggggacaatttctccctcccccagagcagcccctgaccccatctgtgaatgaggctgtgactg

SEQ ID NO: 409627 - DNA, 100 bp, Homo sapiens
ggattaaaagcagcgaacctcgagaccaacgtggaggagctgtgggtggaagctgcggtttgcactcaagacctactttccttacacttctccatctctt

SEQ ID NO: 409628 - DNA, 50 bp, Homo sapiens
tcgcccaagtccctctactcgcgagattggctcacagtggttgattgatc

SEQ ID NO: 409629 - DNA, 74 bp, Homo sapiens
atccacctatgtgtcacctgaccgtgcgaatcaatgtcccgcagcccccggaagccaatagactccctcaggga

SEQ ID NO: 409630 - DNA, 98 bp, Homo sapiens
ccacccagaaggtgctagacaccaagaaggacgcactgactcgcctcaagcacctgcgcatcgtcatcgacttccttgccgtccaggaagggatttcg

SEQ ID NO: 409631 - DNA, 75 bp, Homo sapiens
tagtcttgggacccttgcatggtgtttcaaagggtggtgaagaactaaggttgtcccagttttggtgcatctcct

SEQ ID NO: 409632 - DNA, 50 bp, Homo sapiens
ggtcagaggccctttcatcatcagctgttttcaagtcagcaaacatttac

SEQ ID NO: 409633 - DNA, 74 bp, Homo sapiens
cgacggtcgccgcccacggcgaggtacggttcctggagcagcagaacaagatgctggagaccaagtggagcctc

SEQ ID NO: 409634 - DNA, 88 bp, Homo sapiens
cactgccaagcagccttagccctagtgtagagttgatattcactgatggactccaaagaatcattaactcctggtagagaagaaaacc

SEQ ID NO: 409635 - DNA, 100 bp, Homo sapiens
tggcaagttatggcaatgtgatcgtcatcacagtcaactatcgacttggagtactcgaaccattcagcgcctctgtctgggtgatgatgtttgtgatgct

SEQ ID NO: 409636 - DNA, 100 bp, Homo sapiens
tggttttgtctctgctgggcctgtgtgcctggaaaggaattgttttggcctaggatcatccagcctggaatggacaatgtgctggactacggcctggacc

SEQ ID NO: 409637 - DNA, 100 bp, Homo sapiens
agttcctggccgaccacctgctgcttatgggggcagtgggcatcggggtggcctgcctgcaggacctgaaggagaagaaggagaaggtggaggagaaggc

SEQ ID NO: 409638 - DNA, 75 bp, Homo sapiens
ttttcggatgatgccttcaatactacctttatttccaccatagggtaatcactttgatcagtatgaggaaggaca

SEQ ID NO: 409639 - DNA, 80 bp, Homo sapiens
cagataagccaggataatctccctatcttattatgagccaatgttttcagttgcaccaagcttagccaccaatgcatcag

SEQ ID NO: 409640 - DNA, 74 bp, Homo sapiens
gtcatcacaaaagagttgattgaaattatctctggtgctgcagctctaaaatcagaaagtgcagttgacagaag

SEQ ID NO: 409641 - DNA, 97 bp, Homo sapiens
gaagtactggtcagcgagaggaatggaacttatcaactggacaggccaggagaataaaggcagccccgttgatgactgaaaatgacaaagcatccac

SEQ ID NO: 409642 - DNA, 100 bp, Homo sapiens
ggcttggccatggtcagcgtgaacgcgcccctcggggctccagtggagagttcttacgctgcaggtggagctggagcaagaataccaagacaaattcaaa

SEQ ID NO: 409643 - DNA, 99 bp, Homo sapiens
ctgtacgtgtacatcatttacggcatgtacttctgcatgaacatctccagccagggaatggccaacctgctgacgggccccaaacggaacctgatggcc

SEQ ID NO: 409644 - DNA, 100 bp, Homo sapiens
gggctgcctcgccgcgtctcgccacggcaggggaaatggaaggtgatgcagtcgaagccattgtggaggagtccgaaacttttattaaaggaaaggagag

SEQ ID NO: 409645 - DNA, 101 bp, Homo sapiens
gaaaaaacctgagaacttcctgatctctctcgctgtgagacatgtctgagactcctgctcagtgtagcattaaggtaaatgagctggatggtatcccgttg

SEQ ID NO: 409646 - DNA, 82 bp, Homo sapiens
gaaaatacaaatcacacgcataatggatgaaaggaaccgacagtttggtgccctggttgtcagatgttggaaagcagtagga

SEQ ID NO: 409647 - DNA, 126 bp, Homo sapiens
agcagctggtggcccgcagcaacatcatgacattgctgttccagtgcatgcagcaaatcagccggcaccaggagcagttcatccagatgctgaacgagccccctggggagctggcggacatctcag

SEQ ID NO: 409648 - DNA, 100 bp, Homo sapiens
gtactttaggagaaaagccagtcaactcctagtaataacagacaacgactgaaagacctttcattcagaagctgtttcgtcctgtggctgcagatggaca

SEQ ID NO: 409649 - DNA, 100 bp, Homo sapiens
cgcttggggatcctctgtacgcccgttcactggtctcagtccggcacaggaaaaacagccaccttcagtatctcagtcctccagtgtttggatattcagg

SEQ ID NO: 409650 - DNA, 51 bp, Homo sapiens
gcgctgctcgccgacaaggctgcacaacagaccatcaacgcactgaagggg

SEQ ID NO: 409651 - DNA, 82 bp, Homo sapiens
ccagaaggaaccaattccggacacataacaagcagcagtgaggacaccaaaggtgctttgaagaagagtctcacagccaagc

SEQ ID NO: 409652 - DNA, 98 bp, Homo sapiens
ctttagacacattaactgggaagaacttctggctcgaaaggtggagcccccctttaaacctctgttggctaaagaattacctccaaagccattgtcaa

SEQ ID NO: 409653 - DNA, 50 bp, Homo sapiens
gacccagaatatgccaagtatctaaacaactgcttcgagaacgacagcag

SEQ ID NO: 409654 - DNA, 100 bp, Homo sapiens
ttcagatctcagaggtggatgccccgccggagggtgaccagatgccaagctccacagactgccctagtgagctttgccaccactggggagaagacggtgg

SEQ ID NO: 409655 - DNA, 90 bp, Homo sapiens
cgaggagcgggaagagttgctggggagcttactccacgggaacagcctctagataatctgagttgttgaaaatacgaagcctgttactcg

SEQ ID NO: 409656 - DNA, 100 bp, Homo sapiens
cttgaactctgggctcaagtgatctgcctgcttcagcttcccaaagttctgggattacagggtgtgggttgtctcttcatgaagaaccagcggaactcaa

SEQ ID NO: 409657 - DNA, 100 bp, Homo sapiens
tcctaaatacaacctctgtgcagtggtggccatctgaagaaggaacattaaatggtgagtctgtgtggtagattgaacgtgaaaaaaatgagaatcttac

SEQ ID NO: 409658 - DNA, 90 bp, Homo sapiens
gggcgccgggttagggcagacgctgtgctcgctggcaccccgaacgggttgcttcccccgctgcgagggacccagcctccaacactgccc

SEQ ID NO: 409659 - DNA, 87 bp, Homo sapiens
ctgcctatatcaaactcgaggataaagtttcagatgctgaggtgctgctggacagtgacggcgagtttctgcccgtaagggactttg

SEQ ID NO: 409660 - DNA, 83 bp, Homo sapiens
ctgcagaagcccattatggctgtaactggagatgacacaggttcctggtagagttacacagttgtgccgccagtatagcgaca

SEQ ID NO: 409661 - DNA, 80 bp, Homo sapiens
ttgacacacagcagttcttgtcagaccggccagaatttagcttcacttgagagagatctggaatggtcgccatgattgaa

SEQ ID NO: 409662 - DNA, 75 bp, Homo sapiens
attgggttcttggtgcttggcatgaggggactgttgacattcagggatgtggccatagaattctctcgggaggag

SEQ ID NO: 409663 - DNA, 100 bp, Homo sapiens
cgcgggatggtcgcgcgtcccctgcacagcacagaggggcagccggagagcctgggaaaggctcccaggccagtgccagtacttgggcttgccagtggcg

SEQ ID NO: 409664 - DNA, 50 bp, Homo sapiens
gaaaccttcacatcttggtcaagttacatcatgctgatgacagcttcctg

SEQ ID NO: 409665 - DNA, 100 bp, Homo sapiens
gaggaaccagtcactcctactagtggagggggtccaatgtcaccccaggatgatgaagcagaagagggtgctggagaatctggtaaaagcaccattgtga

SEQ ID NO: 409666 - DNA, 50 bp, Homo sapiens
ctcctcctccacaggggagacagagaaaatatttacaccagcagctccag

SEQ ID NO: 409667 - DNA, 90 bp, Homo sapiens
agaaactcagctcgtggtgggggcttgctggcaaggtgacctgtcttcactgaccagcagccctggagccctccccagcctgttgcagcc

SEQ ID NO: 409668 - DNA, 74 bp, Homo sapiens
cgccggccctggccctcactgtgttggaagtgcaggcctgagtgttccttccagcatgtcggagggggagtccc

SEQ ID NO: 409669 - DNA, 87 bp, Homo sapiens
gattacaagaatcctatagaccagtgtaataccctgaatcccgaccttcgggagaaaaactgggaagcaatggaagcattggcatca

SEQ ID NO: 409670 - DNA, 100 bp, Homo sapiens
gatctggtgtaccaggcgaagctggccgagcaggctgagcgatacgacgagcgcatcagcgaggaggtggggctgctgcagctccttggggaccccccgc

SEQ ID NO: 409671 - DNA, 100 bp, Homo sapiens
tgggaacctactgtggggccgcggccggaccgagcgcctcgacctcggtctgagcttcctgcagatttcacaaaactgcatcttactgacagtctccacc

SEQ ID NO: 409672 - DNA, 82 bp, Homo sapiens
cagctgttcctggaggaggagcggcggatcaatcacacggtatggatcctggcgggagccagtcaacccctattatgtcaat

SEQ ID NO: 409673 - DNA, 82 bp, Homo sapiens
ctcgatccagcaccatggggaagcgggacaatcgggtgggtggcccagttgaaatccttcccttcctctaccttggaagtgc

SEQ ID NO: 409674 - DNA, 133 bp, Homo sapiens
cctgatctctctcgctgtgagacatgtctgagactcctgctcagtgtagcattaagggagctgacacgtttctcccagcacaaagttgggagtgacaccagagcctcctgcaagatgcttctgattctgctgt

SEQ ID NO: 409675 - DNA, 75 bp, Homo sapiens
ccccacacctgcgtcacaaacttgcctaagcctcgacagaagcagccaggcaaactgtccttggaagaattcatc

SEQ ID NO: 409676 - DNA, 89 bp, Homo sapiens
gaagaacaaagaacagtgggaccagttgccccggggggcaatggcggcttcctgtgttctactgcacactgggcagaagatgcctctga

SEQ ID NO: 409677 - DNA, 96 bp, Homo sapiens
ggagtggggacctctggatcccagtgaagagcttcgactccaaggtatgaacgctgccgtccgtgccgtggtgcgcatgggtatctacgtgggggc

SEQ ID NO: 409678 - DNA, 98 bp, Homo sapiens
gtatcgttctatttctctagctattgccttattttttctcatggatgttcttcttcgagtatttgtagaaggagaaagtctattcgtgtgaccaggag

SEQ ID NO: 409679 - DNA, 74 bp, Homo sapiens
ctcatgtaagacaacctcaccaaatacaagaaaacagtgtccagggtttttaatgaccacaacaagcaagcatg

SEQ ID NO: 409680 - DNA, 82 bp, Homo sapiens
tcagaggtgcttgtaccgtgatgtgatgctagagaacctggctctcatatcctcgctggtagagacggagtttcaccgtgtt

SEQ ID NO: 409681 - DNA, 78 bp, Homo sapiens
acagaaatcaatgttagcagatagccagcccatacaagatcgtggtgtcgtagtcattcttcagcacaattcttaatt

SEQ ID NO: 409682 - DNA, 100 bp, Homo sapiens
agtctgccggcagccaataaaagaatgtccctcttccagtggaaagcccaaccatgcagacatcttgctcataaacttacagtatgtttcagaagtggaa

SEQ ID NO: 409683 - DNA, 50 bp, Homo sapiens
gcgggacctggcgccaccttgcagctagtgagacctgcaacgacttccac

SEQ ID NO: 409684 - DNA, 95 bp, Homo sapiens
ttcaatattccaagtctggacagcatcaagaattattacagattctgcagaaggagagtacagtgcactctgtagctatctatctttacctacaa

SEQ ID NO: 409685 - DNA, 75 bp, Homo sapiens
acagatgccactgtaagtggggagagaagctgctcagaacctcaagaaggcatgaagccagcccctgcagtgccg

SEQ ID NO: 409686 - DNA, 100 bp, Homo sapiens
ctattgctgggaatattttctgtcttcaaacacactgcaggaacaccagtgtattcagtagcgtggggccctgattcagaaaaggttctttatacagcag

SEQ ID NO: 409687 - DNA, 83 bp, Homo sapiens
gtggatggacttgattctgatgagagaaccagacgtcctgggtcctctccagcatggcagccctctactggagggtgaaaggc

SEQ ID NO: 409688 - DNA, 83 bp, Homo sapiens
ccgtccgccccagccgcgtctgggccaggagaaaagacaatgcagatcttcgtgaagactctgactggtaagaccatcaccct

SEQ ID NO: 409689 - DNA, 128 bp, Homo sapiens
ctgaggatagtttagaaggatgcttggattgtctgcttcaagccctggctcaaaatagctgcagaagatgtcaatgttactttcgaagatcaacaaaagataaacaaatttgcacggaatacaagtag

SEQ ID NO: 409690 - DNA, 100 bp, Homo sapiens
gccgctcttccccacctgcccggtgcccgaggaggcagccaagctcgtggcctgcctctgcgtgcgaactgtggctgcaccatctgtcttcatcttcccg

SEQ ID NO: 409691 - DNA, 98 bp, Homo sapiens
attcaccagtgaagccgtgacatcctgggatattctttgttgagagtgctcctcacatgggtcaactgttccagtgtgcggtgggccacccgggttca

SEQ ID NO: 409692 - DNA, 99 bp, Homo sapiens
aagaagacttatgagatctggcatcgacggcatgactactggctgctagccggcattataaacactgagcaagaaccctggctacatcaaacttcgcaa

SEQ ID NO: 409693 - DNA, 90 bp, Homo sapiens
gacgcgcccggcccggagcccccagcgcagcggccgcggtggtgagagcggctgaggaggctgcgtccacactggccagttccatccacc

SEQ ID NO: 409694 - DNA, 100 bp, Homo sapiens
ttttacagaaatgggagaagacatcccttcttgctccgtgccatgacagacttcaaaaatcttcagagggttcccagcaccatgagggcctggatcttct

SEQ ID NO: 409695 - DNA, 101 bp, Homo sapiens
ctgcgcgcccgcctcggcccgcacgccaagcacgtggtgggctatggccaccttggttctgcggggagtgtctccagccctgcctgcaggtgccatccccg

SEQ ID NO: 409696 - DNA, 101 bp, Homo sapiens
ctgaaacagaaaccacctctgccatcctcgcctcagtcaaagaacaggtactgcacatggtgaggaatgccaaactagttggccagtctattattgcttat

SEQ ID NO: 409697 - DNA, 76 bp, Homo sapiens
gtcagcttttggactccctattgtatttgccagagcacatctggcctcaggagtgcaagtagctgatgaagtatgt

SEQ ID NO: 409698 - DNA, 75 bp, Homo sapiens
gctgtgctcgcgctactctctctttctggcctggaggctatccagcattgtagaaggcatgaaacaaaaaatgtg

SEQ ID NO: 409699 - DNA, 75 bp, Homo sapiens
aaaggaaatgcttcgaaataatgaatccaaaatccttcatttacagaaaccccaatgatgggaatctgccctgct

SEQ ID NO: 409700 - DNA, 75 bp, Homo sapiens
cgtgtgcctgatgatcacgcagctggctggcttcagtggaccagcagacctcaacaccaacatcgaggatgaagg

SEQ ID NO: 409701 - DNA, 80 bp, Homo sapiens
gtgagacatgtctgagactcctgctcagtgtagcattaagtggcttacagaagagacgaaatgtggtctgagggacgata

SEQ ID NO: 409702 - DNA, 87 bp, Homo sapiens
gactccgcggccggcccggcgcggcccagcgccctcagaacccttaggagaaatcttgagagtggacagcaattgtgaagatcgcca

SEQ ID NO: 409703 - DNA, 50 bp, Homo sapiens
aatggcatagtcacctgggcagcatgaagaagttatttctggacagtcta

SEQ ID NO: 409704 - DNA, 75 bp, Homo sapiens
cgctgagcctgctgcgccgtgccaggatgcacatccagccagctgaggtgggtgtcctggttggcaaagaccggt

SEQ ID NO: 409705 - DNA, 82 bp, Homo sapiens
gctttctttggacccttgacatcaaccagttactatttggaacaagtggtgatgaacttggacagcaggcttctgatcttcc

SEQ ID NO: 409706 - DNA, 80 bp, Homo sapiens
gcggtttttgggctgtgttgacatcaaggatctaccagctctttcgacgtgtagcagcagctttgccgggaatggaaagc

SEQ ID NO: 409707 - DNA, 75 bp, Homo sapiens
aggaagacgacgagtttgaagagttccctgccgaagttgatgctgatgtaacagttataggttctggtcctggag

SEQ ID NO: 409708 - DNA, 90 bp, Homo sapiens
gtattctttacctgcttcccaatcccactgatgaggatcagcccatgacatagatgagtgtgaagtttctggcctgtgcaggcatggagg

SEQ ID NO: 409709 - DNA, 75 bp, Homo sapiens
ctaatgacagtctccaaattcgcctccatctgtaccatgattccctataaggagcccctgctggtgcaccagaac

SEQ ID NO: 409710 - DNA, 96 bp, Homo sapiens
ggcgggtctacccgcgcggccgcggcggcggagaagcagctcgccagccagcagcccgccagccgccgggagccaaaccaaacaggaagcttactt

SEQ ID NO: 409711 - DNA, 98 bp, Homo sapiens
cacgagcctcagcttcacctccatgggcatcaacatggttgttcctcaaagtcattcaagctgtactcgccgaaggagcccccgaacggcaacgcctt

SEQ ID NO: 409712 - DNA, 90 bp, Homo sapiens
tcgtgtctgccaccatcttcgacttgagcgaagttttatgcaagaaatcgtggatgggaatgtgaagatgaccctgggcatgatctggac

SEQ ID NO: 409713 - DNA, 100 bp, Homo sapiens
attgcctcacctgctcaccgaaaggtgcaagtggtgacccaggatgaaagagagcagctgtacacacctgcttccttaaaatgctctctgcaaaatgccc

SEQ ID NO: 409714 - DNA, 100 bp, Homo sapiens
ccttaacgactttgaagaagatgacacagtggccacagatgtctttaattccaaaaacctggccgttcaggcacaaaagaagatcttgggtaaaatggtg

SEQ ID NO: 409715 - DNA, 120 bp, Homo sapiens
cttcagtggggctattggactgacttttcttatgctgggatgtgccttagaggattatgggaacgggaggatgaaattgctactatggagtgcatcaacaatggcaagtccatctttgag

SEQ ID NO: 409716 - DNA, 50 bp, Homo sapiens
gttttggaactgtcaggtacctcaaagcgattaaagcaaggagagccaat

SEQ ID NO: 409717 - DNA, 75 bp, Homo sapiens
atgttgagaaattagaaaaggggctaaatgatctacagccttggcctattgactatccaccatttgaaaaaaact

SEQ ID NO: 409718 - DNA, 74 bp, Homo sapiens
ggccaagaagggccttactccttcacagatcgggacgtccagatcggtgacatcgtcacagtgggcgagtgccg

SEQ ID NO: 409719 - DNA, 90 bp, Homo sapiens
gaaagctgccgctgaagctgccgccgttgcctccgccgccaagagtgagcgagcggacccgcgatggattcctccttatggacaacaagg

SEQ ID NO: 409720 - DNA, 120 bp, Homo sapiens
caagttggcgacgtccctgggcgcgtcagaacaggcgctgcggctgatcatctccatcttcctggctgatgtagcccagcagttccagtatgctgtgcgggtgattggcagcaacttcgc

SEQ ID NO: 409721 - DNA, 82 bp, Homo sapiens
ctgatggcgaacgttttatgcagctggctagagatatggcaaattgtggacatcggatacccaaggagacgaagctgaagca

SEQ ID NO: 409722 - DNA, 75 bp, Homo sapiens
gttggaagcagccgatccagcctgcggagcctgtggggcaggtgctccatacttgcttgcagtgcctacgtggct

SEQ ID NO: 409723 - DNA, 75 bp, Homo sapiens
aaacgccgaggaacccggctgaggcggcaggccgagacgcatccagagctttcgtgaccggggactgttctgaag

SEQ ID NO: 409724 - DNA, 50 bp, Homo sapiens
cattctgattcttgacaccagatgcagaaatctgactacctgtcctctgg

SEQ ID NO: 409725 - DNA, 98 bp, Homo sapiens
accaccagcagcagcagcagcagcagaaagcgggcgagcagcagttgagcgagcccgaggacatggagatggaagatgtcatccgtgggtctttaagc

SEQ ID NO: 409726 - DNA, 80 bp, Homo sapiens
gggcgccgcgccgcacgagcaccagcctagagccagcccagtacctcctgaccctgctggagacagacgggggcctgcct

SEQ ID NO: 409727 - DNA, 75 bp, Homo sapiens
gccagggtccctgaagagggaagacacgcggaaacagtggaaccacaactgccctcaaaagagggtcctgaacca

SEQ ID NO: 409728 - DNA, 131 bp, Homo sapiens
gccgtcaccttaccttaaaccttttaagcaaggaaattgaactaagaaatggagagcttcttggacacttaatgattgttggcaagaaatgtgctgctgatctgggcctgaataagggttatcgaatggtg

SEQ ID NO: 409729 - DNA, 75 bp, Homo sapiens
ccggacgttgctggagttcttgaagagagataaagaggtgtgttgcagtcactcattgaaaaacattttcctgct

SEQ ID NO: 409730 - DNA, 74 bp, Homo sapiens
agagatcgcgcgcctgccgccgccggagcctgcgagccgagaccgtaagtaaggaggtctctgtaccatggctc

SEQ ID NO: 409731 - DNA, 82 bp, Homo sapiens
ccactggctgctggagcttgtcaccaccagaaaccaaggtgtatgttggtaacctgggaactggcgctggcaaaggagagtt

SEQ ID NO: 409732 - DNA, 90 bp, Homo sapiens
cagccatcgaggcgagccagagcctgcagtcccacacgctccagaaacatgacaaggaggactttcctgcctcttggagatcagaggagg

SEQ ID NO: 409733 - DNA, 51 bp, Homo sapiens
cgtagaccagaccagtgacttataagaatgacagcccatatcaaggcggtg

SEQ ID NO: 409734 - DNA, 100 bp, Homo sapiens
aaggccgaggtctgcagcgacttcctcaaaggctactgccccctgggtgcaaaggttttgggctggaggatagttgcaagtattgtttggtcagtgctat

SEQ ID NO: 409735 - DNA, 87 bp, Homo sapiens
cagctgcgccgcgtccaggaccttgtgaggcaggttggatggcaagcatgtggtgtttggcaaagtgaaagaaggcatgaatattgt

SEQ ID NO: 409736 - DNA, 100 bp, Homo sapiens
gatgattccagcagtggtcttgctcttactccttttggttgaacaagcaggggggcatgtgctctgtgtacctgaaggacagtgagaaggttgtcagcat

SEQ ID NO: 409737 - DNA, 90 bp, Homo sapiens
gagatggcctggtggaaagcctgggttcatgacatcttctatcccttcccccaatcagagggagaggacgagctctgctttctccgcgcc

SEQ ID NO: 409738 - DNA, 75 bp, Homo sapiens
ggaggacaacaagtactgcgccgactgcgaggccaaaggtacatctccgttcatggatgcattaacagccaatgg

SEQ ID NO: 409739 - DNA, 90 bp, Homo sapiens
cgtagagtcgctggagcgggcggagctgtgcgagagcctcctcacttgggcacttccgttccggcgcccctccggtcatcaacccgctgg

SEQ ID NO: 409740 - DNA, 50 bp, Homo sapiens
agatatagccgttggtacaaagccttatgccagcctggaccatcttggag

SEQ ID NO: 409741 - DNA, 82 bp, Homo sapiens
gcgaccccagtcggtgctccggggaggtcacctgacgaggagctgaaaatgtgtgtctgacatgcaagctcagtggggcaga

SEQ ID NO: 409742 - DNA, 75 bp, Homo sapiens
gagaaacttgaacgcaaagagatccagcccccttataagccaaaagctttccagggtcacccccgagaggacaac

SEQ ID NO: 409743 - DNA, 100 bp, Homo sapiens
ccctcatggtattgatattttgaccacagctgactattttgccgtcggtaacagatccaactgtttcctggttataaggctcctgctccagcccagcccc

SEQ ID NO: 409744 - DNA, 82 bp, Homo sapiens
gaccgggggaggcgacgctaagttgctgatcgtggcgactgggccagtgccattcgcgtcgcagctctggactgcatggaag

SEQ ID NO: 409745 - DNA, 83 bp, Homo sapiens
cctgttccgcgtctgtgcgaccgtccgtcccgagcgcgcagccgcggcaggatcaagcgcatggcaggcatgaaggaatcgca

SEQ ID NO: 409746 - DNA, 100 bp, Homo sapiens
tcgggggtgtaggttatggggtttgaagaaaacaggtctgaaacaaggtcttacccccagctgcttctgaacacagtgactgccagatctccaaacatca

SEQ ID NO: 409747 - DNA, 100 bp, Homo sapiens
tagcggcttctcctcagcccacatgggcagtcacgtttttagccagacgccaattctccaggcgctgcagcatgtccaagcgagctgtgacgaagcccac

SEQ ID NO: 409748 - DNA, 100 bp, Homo sapiens
cgcaaagtggaatctttgcaagaagagattgcctttttgaagaaactccacgaagaggaggttcgggaactccaggagcagctggcccgacagcaggtcc

SEQ ID NO: 409749 - DNA, 95 bp, Homo sapiens
tggccagctgccgcgactgggaggagcgccggaacgccgaggcccaggagctttgctggcagtagaacacgtgaaagacgatgtcagcatttccg

SEQ ID NO: 409750 - DNA, 100 bp, Homo sapiens
caaacacacagtgcaagtggcagttcggagagaaagccaagctctgcatgctggactttaaaaaggaggatggactcagacaagttctggaggagatgaa

SEQ ID NO: 409751 - DNA, 100 bp, Homo sapiens
tcgccctgtggatgactgagtacctgaaccggcacctgcacacctggatccaggataacggaggctgggaaagtatgcctcagactcctcccttttcagc

SEQ ID NO: 409752 - DNA, 100 bp, Homo sapiens
cagctggccgccgatattcaccaagcgcttcgctacaagaaaaagtcgctggagtcgatcaactctaggctccaactcgttatgaaaagtgggaagtacg

SEQ ID NO: 409753 - DNA, 100 bp, Homo sapiens
tgcaatgtttttgtggaacatgttggaggagagcagattagtgccattggaaggggcatatgtgtgttgctgggtatttccctggaggatacgcagaagg

SEQ ID NO: 409754 - DNA, 88 bp, Homo sapiens
accgcccattggaaggggactcttctctagagctgcttacatttgataatgaggaagctcaagctatggagtcttactctgtcgccca

SEQ ID NO: 409755 - DNA, 98 bp, Homo sapiens
ctcaatcctcctcctactgaaccggtttcatgtggacaggtcccagaatggtgcttagatgactggcatccttctgagaaggcaatgtatcctgatta

SEQ ID NO: 409756 - DNA, 82 bp, Homo sapiens
gtcggcagagcaaggggcttacgcagaaggacctggccacggcactgggaatctgaagaggtgtctgtggccagagtaaagc

SEQ ID NO: 409757 - DNA, 82 bp, Homo sapiens
agggcctgcagcgggagctggacggcgagcgcgagcggcgcgagaaagcccagctgagagccagcctggaggttacccagca

SEQ ID NO: 409758 - DNA, 90 bp, Homo sapiens
gcctggggactctgcctcgtgccgctgagcctggcgcagatcgagactctccaacatgtgccttctgaccatacaaatgaaacttccaac

SEQ ID NO: 409759 - DNA, 101 bp, Homo sapiens
cgctttgttgcttctaaacctctggaggaggaggttcgcctgccattgttgccggttgattttcttatgggtgttgtggcaaaagaacagattgtcaagca

SEQ ID NO: 409760 - DNA, 88 bp, Homo sapiens
tcggagaataatttctttctcgctgatcgcctaacttctactgacgaagcttggaagttgcagaaggatttaggtcctgaatatgaag

SEQ ID NO: 409761 - DNA, 75 bp, Homo sapiens
aggtccactactccctcctgaaaggaattcctcctgatcagcagagactgatctttgctggcaagcagctggaag

SEQ ID NO: 409762 - DNA, 75 bp, Homo sapiens
agccactggctttgtcaaaaaggaccagttgggcaagccgggggccatcaagtataagaccacaggaccacgtga

SEQ ID NO: 409763 - DNA, 75 bp, Homo sapiens
gggccaggcatttagcaagagctcccaaggctactgccccaacagagattgattataccggaacagagccttcca

SEQ ID NO: 409764 - DNA, 100 bp, Homo sapiens
gccccaccatgtcagacgcagccgtagacaccagctccgaaatcaccaccaaggtagcacaggcggagtgcagcggaggcccctgccgctgccgtcatgc

SEQ ID NO: 409765 - DNA, 101 bp, Homo sapiens
gttgaacctcaagcctgtagaagaaggaaggaaggcaaaggaggacagtggcaacaaacccatgtcaaagtatgggaggacatggctatggtggagctggt

SEQ ID NO: 409766 - DNA, 100 bp, Homo sapiens
aaatgcctagaccctgcccaacagaatttatatagagatgtgatgttggagaactacagaaacctcgtctccctgggggccgttgacatttagggatgtg

SEQ ID NO: 409767 - DNA, 99 bp, Homo sapiens
cttgttctggatccctatttattaaagggaaagttccccaagggagacaaagctgaggatggcttccatggagtctccccagtgaatgctttccccgcc

SEQ ID NO: 409768 - DNA, 100 bp, Homo sapiens
aagtggaatcggagctgttgtattacctggggaactcgtgtccctgaagccttgtaaagctgcggagctggttgccacccacttttctggacatattgaa

SEQ ID NO: 409769 - DNA, 100 bp, Homo sapiens
tgctgcaggcggcccactggcagttcgagctcaccatggatgatgatatcgccgcgctcgtcgtcgacaacggctccggcatgtgcaaggccggcttcgc

SEQ ID NO: 409770 - DNA, 75 bp, Homo sapiens
agacctgtgcttctgactatcttctcttcaccagctcttcagatcaatatggtggtgcccaggcaacatgggtga

SEQ ID NO: 409771 - DNA, 99 bp, Homo sapiens
caaccacaagacgactcaataggaggaagggcagagcggcttgggtaaatccaccttaatcaacaccctcttcaaatccaaaatcagccggaagtcggt

SEQ ID NO: 409772 - DNA, 100 bp, Homo sapiens
cagacatctacaaccttcgatctcctgacgagtacaactccaaaaggagacattggagaagaaccaagctgggtctataaggaattgcacatgagatggc

SEQ ID NO: 409773 - DNA, 75 bp, Homo sapiens
cgagccgatcgccgcggggcagttcgggccggctgtcctggcgcgatctccagcaccctgccggtggcactactg

SEQ ID NO: 409774 - DNA, 50 bp, Homo sapiens
aagggtggtcagcgccgtggaggaggtgctggggagtcagggaagagcac

SEQ ID NO: 409775 - DNA, 80 bp, Homo sapiens
cgaggacccgagccaggcggggacaggacggcggggcgagccagaacattctagtatgccagtagaaaaaaatatcactt

SEQ ID NO: 409776 - DNA, 96 bp, Homo sapiens
gacgtcgtgatccagaagtccagagctgaggactgcctgtttgcagatcagggagctgattttggatggatctttacagttgatccaggaaggtct

SEQ ID NO: 409777 - DNA, 100 bp, Homo sapiens
aaaaacaatgagtcatctgatagctcatcagagcaggagaaggaggcccggagcagggcggcctacatctctgcactccccacatctccgcactggggga

SEQ ID NO: 409778 - DNA, 74 bp, Homo sapiens
acagctaagacgccaggacccactggaagcctagaaatgactcatgaaatggccacagatgataagacgtcccc

SEQ ID NO: 409779 - DNA, 83 bp, Homo sapiens
gccgccaccacccactccggacacaggtggagccatcgaagcccccacccacaggctgacagaggcaccgttcaccagagggc

SEQ ID NO: 409780 - DNA, 100 bp, Homo sapiens
gcttcattcagatgtggtggaatatgccaaggaaaaactggagagcttcatcaaaaatagtgatagctttgataaagatgcccgagtggtaaaagacatg

SEQ ID NO: 409781 - DNA, 80 bp, Homo sapiens
cctcaacatacagtttaagatccagcagcttgctatttcagggctggtggacgaagccattgataccaaatctctgttgg

SEQ ID NO: 409782 - DNA, 99 bp, Homo sapiens
tttggggcagaatacagagatatggaatcaggttgctccttgagggcaggacagttcttatggctttatccgttgcgtaagcacagagaggtctgcgag

SEQ ID NO: 409783 - DNA, 75 bp, Homo sapiens
tagccccagctgtacctctaattgtaaccttggctttaatgaagcaccagttgagattcccagtccttctgaaac

SEQ ID NO: 409784 - DNA, 80 bp, Homo sapiens
tcagaggtccatggcagtatcccagccaaatctcgtatgccgagattttgctgtcctggaggaccacaccctggctcaca

SEQ ID NO: 409785 - DNA, 100 bp, Homo sapiens
tattttcagaactccacagaaaacttcattcacaggtacccatgaagagattatgaactacttgaaggtggagactgtacggtggtgtgttggagctggc

SEQ ID NO: 409786 - DNA, 90 bp, Homo sapiens
ctgctttcaggaacattgctgtggattcccaggctcgtggaggagttcatgctcttggccaacatggcagtggcccacaagatccaccgc

SEQ ID NO: 409787 - DNA, 90 bp, Homo sapiens
agctgccatgagcgagcgcctccgtcccaggctggcgcccatgcggctctacacgctctccaagcgccactttgtcctcgtgtttgtcgt

SEQ ID NO: 409788 - DNA, 100 bp, Homo sapiens
aaaccaaaatttcacgaaaaacgaggaatccgacattcaatgaaatgttctctgtggacattgactcggagctggtggaggagctgccggccgaaatcga

SEQ ID NO: 409789 - DNA, 51 bp, Homo sapiens
cagtatcccagatgccaaatgtaaacgccctgcagaagatatggaagagga

SEQ ID NO: 409790 - DNA, 90 bp, Homo sapiens
ggccaaccatgggaaaggagagtggatgggactcaggggtttgttaaagttgttaagaataaggcctactttaagagataccaagtgaaa

SEQ ID NO: 409791 - DNA, 75 bp, Homo sapiens
gacgctcatcagagggaagatctttttcctcaattgattgagaggatccagaatccagatctctggaatagctac

SEQ ID NO: 409792 - DNA, 50 bp, Homo sapiens
gcacaatcggggcaccgagctcggggttgtagaaggtgatttagctgcca

SEQ ID NO: 409793 - DNA, 98 bp, Homo sapiens
cggagggagctggaaattcctgacgttcattgatctggtgaagtattacagacacttagcacctgatcacttgctgcaaatatgtcatcgactaggac

SEQ ID NO: 409794 - DNA, 90 bp, Homo sapiens
attgaccaaggggtgagcagtaacagcagctacttgaagtggaacaagcctgtcccctggctctcagagaccattcctcaagaattttgt

SEQ ID NO: 409795 - DNA, 99 bp, Homo sapiens
ccgagaccgcggccgggaccgagggtgtggccgacgacgatgccctcgctgaggagcgcatgcggagaggccagaacgccctgccagcccagcctgccg

SEQ ID NO: 409796 - DNA, 90 bp, Homo sapiens
cccagcaccaccatgtccagaaagtccagtgtctgcagatatcattctctgctggaactgggtgagaagcgtaaaggcatgttggagaag

SEQ ID NO: 409797 - DNA, 100 bp, Homo sapiens
cgcttatagtggaggctgctaggagccggtcagaggcaaattcaacacccaacagcttccttaatagcaaaggtagcaacagcccaggatgatataactg

SEQ ID NO: 409798 - DNA, 125 bp, Homo sapiens
ggccctctagccccgctaccggactacatgtcggaggagaagctgcaggagaaaggcccaagagctcccagctcccactcccagcagcaggcactgcgagcaagactggccgccggattccagcg

SEQ ID NO: 409799 - DNA, 74 bp, Homo sapiens
cctgtacctcaacacccccgacaagatggttttcctttggaatatggataaatacaccatgatacggaaactag

SEQ ID NO: 409800 - DNA, 134 bp, Homo sapiens
ggttctttggccaacatgggggtgaaagccaacacaccattcatgccacagggcactgccacattgatacagatacagatgtggtgtataaaagcgagaatggacatgtcattaaactgaatatagaaacaaat

SEQ ID NO: 409801 - DNA, 50 bp, Homo sapiens
aatatgcagtctcttttaccagcagcaagtgaaaattacatcctgtgtag

SEQ ID NO: 409802 - DNA, 75 bp, Homo sapiens
cttttctgttgtgacagacacttcacatactgctgactataatgtaactgcaaactccaagctggtcattatcac

SEQ ID NO: 409803 - DNA, 75 bp, Homo sapiens
tggacgaagccttcaaatccatcaagctcatcaaaaggcggctgagccagaggccaactgcagaggaactggaac

SEQ ID NO: 409804 - DNA, 83 bp, Homo sapiens
gtccaaatgaattatgtcagcaacgtatccaagagcactacaaacaccactggtttcccgaaaagccgtccaagggctccggc

SEQ ID NO: 409805 - DNA, 90 bp, Homo sapiens
gccgggactccctggaaacctagaaatggttcgttccaccagtcataaaccagatgaaatctatggcatgattgaaagactatctcctgg

SEQ ID NO: 409806 - DNA, 82 bp, Homo sapiens
aggacaacctcggcctgagacaccggaggaccgggccagaagcggactcctagaagaggggagcagcaaggatggaatgaca

SEQ ID NO: 409807 - DNA, 75 bp, Homo sapiens
tgggagtccccaaaattacattgccaagttgacttttgtgccctggtaattctgtatcctgtttaccgtttacct

SEQ ID NO: 409808 - DNA, 87 bp, Homo sapiens
agactgtacagcaattggcgggttggccgccttgaaaatgcaatcgggtggtatcatagccaccctggctatggctgctggctttct

SEQ ID NO: 409809 - DNA, 75 bp, Homo sapiens
tcaaaatggagttgccggagagacagcccagcaattaccagctctggctgggtcgccacaacttgtttgacgacg

SEQ ID NO: 409810 - DNA, 83 bp, Homo sapiens
tataccagccaccctgcccccaagaaggaagtcatcatgggccggcctggaacaggttttgagcaaaattttggactgtgaag

SEQ ID NO: 409811 - DNA, 73 bp, Homo sapiens
cgcaccatggaggaggacgacagctacgtggtcccaggctgcacccatggcagaaggaggagggcagaatcat

SEQ ID NO: 409812 - DNA, 75 bp, Homo sapiens
accaagtcctcgctggactgctcagggtgccagacctcatcgagttaaagttcctcgtaattttcgcttgttgga

SEQ ID NO: 409813 - DNA, 98 bp, Homo sapiens
caatgtagccttatgggacctatgatgtctttctacctaaagatattgacctagacagtgtggatatggatgagacagagagggaagtggaatatttc

SEQ ID NO: 409814 - DNA, 104 bp, Homo sapiens
ttgcattgactggaaacaatggcatttacagaaagagtcaacagcagtggcaacagcatggactggaggaaacagctgccaaatgcaagggactgggtgccaag

SEQ ID NO: 409815 - DNA, 90 bp, Homo sapiens
gttgatgactgtctgctatcagtttttaagggtgtgtttgaccatcgaatgaagtgctggcagaaatgggaagatgctcaaattactttg

SEQ ID NO: 409816 - DNA, 76 bp, Homo sapiens
gcctgtagtccttattttcatgccatgtttacagctgacctcaagagaatttgcaagacaatagttgaggctgcaa

SEQ ID NO: 409817 - DNA, 75 bp, Homo sapiens
gccttgacctcctgggctcaagtgatcctcccacctcagcttgaagtgcacctttgacatgttcaacttcctggc

SEQ ID NO: 409818 - DNA, 83 bp, Homo sapiens
gtgagagacctgctcaagctctcttaagagattatgtacgtagagaaatcgacactcttaatgaacgtttagctgctgaagga

SEQ ID NO: 409819 - DNA, 100 bp, Homo sapiens
tcgggttattcgagtgaccgagaccgcggccgggaccgagggtacactgaggaggggacggctccgtcttcacattgtgcacagatctgaggatgggatt

SEQ ID NO: 409820 - DNA, 73 bp, Homo sapiens
ggcggctgggcgggagccccagagagatggacagagacgtatgtgcgttggtctcctaagggcacctacctgg

SEQ ID NO: 409821 - DNA, 100 bp, Homo sapiens
ttatgattacacttttgatgggaacgaagaggataaaacagagactatagattacaaggacccgtgtaaagccggcttgcagatgggtcaagggttgtgg

SEQ ID NO: 409822 - DNA, 82 bp, Homo sapiens
tttgtgggcgcgcggcacgcagccgggaggccgaggactcggagttcacctgcagacctcctgccccccgaggtctgcagtc

SEQ ID NO: 409823 - DNA, 83 bp, Homo sapiens
gccgccgagtcgcgcggaggcggaggcttgggagtttgaaacagctgagacacttctaaattcagaagttcatatgcttctgg

SEQ ID NO: 409824 - DNA, 75 bp, Homo sapiens
ccactccaaccgcatctatcgcatgatcaagctaggtctaggtaccaacagctctgagtcacggaaaaccaagaa

SEQ ID NO: 409825 - DNA, 100 bp, Homo sapiens
gagaagcggcacacacgggactccgaagcccagcggctccccgactccttcaaggattatgtgtgacaatccaagaagccaaccaattaagaaccgaaaa

SEQ ID NO: 409826 - DNA, 97 bp, Homo sapiens
gcggcggggccggggctggggtcggggccagttggaagctgaaggtgttcctgaagtatctgaaaaatatgaaattagctctgttcccacttttctg

SEQ ID NO: 409827 - DNA, 100 bp, Homo sapiens
tggagcacttcctattccactggattgggaaagaccatggcagacagtgtttaagaatgaaagcctcaacgcagaatcaaaatctggctgcaaacttcag

SEQ ID NO: 409828 - DNA, 83 bp, Homo sapiens
gcggtggctcccaagaagtccgagacacgcggtgaggcggcgacgggctccggttaagtatgagagagaagctagtaaatact

SEQ ID NO: 409829 - DNA, 154 bp, Homo sapiens
ttgcctgcctcttcctttctacgctgctccttgtgctcaacaaatgtggacggagaaacaagtttgggatcaaccggttgtataccggaccgtgtaccgtcaggtggtgaagacggaccaccgccagcgcctgcagtgctgccatggcttctat

SEQ ID NO: 409830 - DNA, 100 bp, Homo sapiens
ctgtctttgtgtcctgagatcaaatggcacttcattggccacctacagaaacaaaatgtcaacaaattgatgggtgcttttgaagatgatgatatcacgc

SEQ ID NO: 409831 - DNA, 100 bp, Homo sapiens
tgtacaaggtcaggaacctttgactgcttccatgttggcatctgcccctcctcaagagcaaaagcaaatgttggttctttattggtgaaaacatgaatcc

SEQ ID NO: 409832 - DNA, 82 bp, Homo sapiens
taccacaaaaaagttctcattttgtgtcctcccatcccattctcctcactaaccaaaggcctccggtgtggctgtctctgat

SEQ ID NO: 409833 - DNA, 74 bp, Homo sapiens
ctagtgatcctttgcaccctgcttggagacggacttgcttccggttttatgaatgaagctatggctacagattc

SEQ ID NO: 409834 - DNA, 75 bp, Homo sapiens
tttgccagagaaaggacgagcagcaagtcagggagcttaagcagcatctggaatcaagagacccatggcatctga

SEQ ID NO: 409835 - DNA, 100 bp, Homo sapiens
cgaggagaagcgcagcgacggcgtcgggagagcgcgcctagccggctcgcgagatttctataattggcctgatgaatcctttgatgaaatggacagtaca

SEQ ID NO: 409836 - DNA, 88 bp, Homo sapiens
ctcgcgagatccgcatgaaggagctggagcggcagcagaaggagccccctgcctgggatgcgccagccactgagccttcagggaccca

SEQ ID NO: 409837 - DNA, 90 bp, Homo sapiens
ggttatcatggattcccagcgcgggacagccaggctattgagggcacctacattgacaagaaatgccccttcactggtaatgtgtccatt

SEQ ID NO: 409838 - DNA, 74 bp, Homo sapiens
gaccgccatctccgccctggaatacggcgtacccgtcaccctcattggctgtacaagaagcatgatgccagcat

SEQ ID NO: 409839 - DNA, 100 bp, Homo sapiens
gtatgtagaagaccagaagtggatggagattctctctttccagacgtagtgaactgtatgcagactgacaatctggaactaaagaagcttgtgtatctct

SEQ ID NO: 409840 - DNA, 100 bp, Homo sapiens
gaaaacaaaggccgagagaccctgatgcccacagcccccaatgtgtcaccggtggtggccggcctcatcggggcctctgtgctggtggtgtgtgtctcgg

SEQ ID NO: 409841 - DNA, 96 bp, Homo sapiens
caacaatcagtgctccacacatggtgtatagtgttgattggagccaaaccagaggtgaacagcttgtggtgtctggctcatgggatcaaactgtca

SEQ ID NO: 409842 - DNA, 100 bp, Homo sapiens
gagagcaaacccttcttcgctgtgcagttccacccagaggtcaccccggggccaatagacactgaggatcacagaagaactgcagcttcctggggagcag

SEQ ID NO: 409843 - DNA, 74 bp, Homo sapiens
gaaaactggatccagaactccattgctaccacatactgttgattgtgatgaaatgccagttgaagcacctgtcc

SEQ ID NO: 409844 - DNA, 90 bp, Homo sapiens
ggaggaggtggcaggcctcggcgacaggggcaagtgtccgagtggtgaatcagctacttacagagatggatggtctggaagcacgccagc

SEQ ID NO: 409845 - DNA, 75 bp, Homo sapiens
aaaggacactgccaaccttgataagatggcttcggagggaatgaggtaaaagtttcatttgatctgaatagtatt

SEQ ID NO: 409846 - DNA, 111 bp, Homo sapiens
accgaggaaaaggaatcgtatcgtatgtccgctatccagaacctccactctttcggtgagaagccctaccactgcaactgggacggctgcggctggaagtttgcgcgctca

SEQ ID NO: 409847 - DNA, 75 bp, Homo sapiens
tctggctgactttggcagggcccatctggcacggcctccgcggcgcgcaggacctgaaggagaagaaggagaagg

SEQ ID NO: 409848 - DNA, 52 bp, Homo sapiens
ggggagagctggagaaagaggagaaagtagagacagagtttcaccatgttag

SEQ ID NO: 409849 - DNA, 89 bp, Homo sapiens
ggggagcagtatgccggaagctggttttcaggccacaaatgctttcacaggtgaggtttatacatggggcgacaatgatgagggacaac

SEQ ID NO: 409850 - DNA, 83 bp, Homo sapiens
cttggactgagtcctgcaggacacaggttatggaaacaaaggacatgctttacatcgtcactgaatttgctaaaaatggagaa

SEQ ID NO: 409851 - DNA, 100 bp, Homo sapiens
ctgtggaccgtgtgctgccactgcgggggcaagacgaagctgattggggccctggtcctgtctgtgggcatctatgcagaggttgagcggcagaaatata

SEQ ID NO: 409852 - DNA, 74 bp, Homo sapiens
aatttttctgggagaatgccatgcattgaggtgtacaaagataatcaatgctgattcggaggacccaaaataca

SEQ ID NO: 409853 - DNA, 100 bp, Homo sapiens
tgcactcacacgacgtgcgctatgggtcagcctgtgggccaaagctgaccaactcccccaccgtcatcgtcatggtgggcctccccgcccggggcaagac

SEQ ID NO: 409854 - DNA, 150 bp, Homo sapiens
gatccggctgctcttcaacgacgtgcagaccctcaaggatggacggcacccgcagggcgagcagatgtaccgcaggtataaaggatcttcatgcagatcatgctgcaagtcatattggaaaagcacaaggcattgtcacttgcttgagag

SEQ ID NO: 409855 - DNA, 97 bp, Homo sapiens
aagttgggggctcagaggggagtcatcatgagcgatgttaccattgtgaaagaaggttgggttcagaagaggggcaattaagttggaatatgcaagg

SEQ ID NO: 409856 - DNA, 58 bp, Homo sapiens
tccttcgtacccacagtgcttcatgagagtttcgggtaaatgagtttggagccctgga

SEQ ID NO: 409857 - DNA, 123 bp, Homo sapiens
tttacttctggctcaatgtataggatcaagtcaaaaattccaaatgaacacaagaaacctgctgaggtcctgttattgccttggagtttaatggggatggtgctgtagaagtatgtcaactta

SEQ ID NO: 409858 - DNA, 82 bp, Homo sapiens
gaaaaagagaaaagaaatgaaccagtattcttaaattgatttcaagtttgaacaagtagatctctggcttcctgctctgttt

SEQ ID NO: 409859 - DNA, 100 bp, Homo sapiens
cttcagctcttgggtttagcaaaagttcatctccttctgcatccttaactgagaatgagttttctggatatgccgcagaaggatccgtgccagaagcaag

SEQ ID NO: 409860 - DNA, 50 bp, Homo sapiens
gcacgacagactgcacagggcatggaaggaggctgcggaggaggaggagg

SEQ ID NO: 409861 - DNA, 74 bp, Homo sapiens
cccaagtgaggcatctgaaacacacaccgtggcctccaacactgcttcagcccagcgatctgctcacgagctgc

SEQ ID NO: 409862 - DNA, 75 bp, Homo sapiens
gtgatatctcagatgctgctgcttgacaatccacacaaaggattcgcagaggcatttttggaacatctttggaaa

SEQ ID NO: 409863 - DNA, 97 bp, Homo sapiens
aattactaagtaccgcaaaggagcatgtgaaaattgtggggccatgacacacaaaaagaaagactgctttgagggagaagatctcttggtcaggagc

SEQ ID NO: 409864 - DNA, 82 bp, Homo sapiens
agcagtctatcatgacttacgtggcacagtttctagaacgttttccggagttggaagccgtttcagatcgggtggagcggcg

SEQ ID NO: 409865 - DNA, 90 bp, Homo sapiens
ttaaagtctgttggtgcacaaaaagacacttatactatgaaagagatttcctgtgcttcatcagctagagagatgaaatccattaccagg

SEQ ID NO: 409866 - DNA, 100 bp, Homo sapiens
gtcgaaggccgtgaggtatttttctaagctatgtgatgatgatgccatttaaacgacaggctctagtggaatttgaaaacatagatagtgccaaagaatg

SEQ ID NO: 409867 - DNA, 100 bp, Homo sapiens
tggtcaagcgggccacgcacctcgtcaccaaggccaagggtaagcttgatgattaccaggaacgaatgaacaaaggggaaaggcttaatcaagatcagct

SEQ ID NO: 409868 - DNA, 101 bp, Homo sapiens
gggacatcagtggagccttctcagacccacaggggagacaatccagggtctgagggcgaatctcaccagtgccatagaaaccctgtgtggtgtggactcct

SEQ ID NO: 409869 - DNA, 90 bp, Homo sapiens
ccgcctgaagtgcgggcgcagctggcggagctggagctggagctctcggagggtttatggctacaaatgatttgatgacggaactgcaga

SEQ ID NO: 409870 - DNA, 75 bp, Homo sapiens
ggtgcagcgaatcctcaagcataacatggtgcgcttcccttcccacttcagctctgacttgaaggacctgctgcg

SEQ ID NO: 409871 - DNA, 76 bp, Homo sapiens
tgcagctcacgcccgaggtgcagctggccatcgagcaggcaatggcagcagataaaagtgacgagtggtttgccaa

SEQ ID NO: 409872 - DNA, 100 bp, Homo sapiens
tgaagagtcctggatggcagatggggggaccccggtacggacctgtgcaggtgaggacaggccagtatctggagtccatctttcaccatcttctcctgag

SEQ ID NO: 409873 - DNA, 83 bp, Homo sapiens
agaaagtggacaaagagaggagtcagtttttcagttatgggacaaaaatattatatcaaaacactgaagctttgcaatctaaa

SEQ ID NO: 409874 - DNA, 73 bp, Homo sapiens
agagatatctgcaatgatgtactggtattgaagcccctgggtgataatttgatggaggaaaacataaggcagt

SEQ ID NO: 409875 - DNA, 75 bp, Homo sapiens
gagctggccccgccgcccgccctaccccccaagcagcggcagctgggcaattgaaggaacagactaaaaatcgtg

SEQ ID NO: 409876 - DNA, 97 bp, Homo sapiens
tgacgaagctattacattgcttgaacaaaataattgggacttagtggacaggcgacactaacaggtgaagatctcgggagaccatgactaagaaaag

SEQ ID NO: 409877 - DNA, 74 bp, Homo sapiens
cacccccggccgccctcgtacccaccagagcctgggctctgtcaagggagcttactccacgggaacagcctcta

SEQ ID NO: 409878 - DNA, 80 bp, Homo sapiens
caggcccaagcgatcctcccaccgcagcctcacaggtagctgggattacagctgtccaggcagccatcttgtctggagac

SEQ ID NO: 409879 - DNA, 82 bp, Homo sapiens
caacagccaaggactgaggatgaaatttctgaataaattggcagaagaacgcagacagaagaaggaaacttaagatgtgcaa

SEQ ID NO: 409880 - DNA, 75 bp, Homo sapiens
cgcgctcctggccccgcgcgggcggacggcggaggcgcctcccaggaatgtatcctgtcaggtataatgtcagtg

SEQ ID NO: 409881 - DNA, 100 bp, Homo sapiens
cacttgtgcgaacaaagcttttctgatatgatgggaaatacaaatgaaccaagcacacgtgtccgagagcttcagtttcagcgactcacccgagaactgg

SEQ ID NO: 409882 - DNA, 100 bp, Homo sapiens
ggctggggctccctgtatgcatggtgtggggttggtgtgattagcttcgcagtctggaaagctttaggagttcacagtaggtatatggaggtcagtggga

SEQ ID NO: 409883 - DNA, 83 bp, Homo sapiens
gatcaagaagccggactacaaggtcgcctacgtgcagctggcatctgcatctgggaccgacctcctgggctggctgatcaaag

SEQ ID NO: 409884 - DNA, 75 bp, Homo sapiens
gaaaatgcaagaagactgatggagcaggcttgcaatattaaaactgggcggtgatcaggatctgaatgcacaggg

SEQ ID NO: 409885 - DNA, 73 bp, Homo sapiens
tggaagtcacctatgaagccatcgtggacggaggcattgccacctggggtatcgttgtcatggcagaccccaa

SEQ ID NO: 409886 - DNA, 88 bp, Homo sapiens
ggagatgaagaagaagattaacctggagttaaggaacagatccccggaggaggtgctgaaggtcgccatcctggctgagaagtacgcg

SEQ ID NO: 409887 - DNA, 50 bp, Homo sapiens
cgacgaggaagaggaggtttctgagatgccagaccagtttgaccaggcgg

SEQ ID NO: 409888 - DNA, 96 bp, Homo sapiens
gcaattcagaccctcgaggattcggaagcggctcagccccagggcagcacatcagagacaccatggaacacagccattcctctgccgtcgtgctgg

SEQ ID NO: 409889 - DNA, 108 bp, Homo sapiens
ccatggttctcctaggggcaaagggaaacaccgcaacccagatggcccaggaagagagaagggcacagttacctaagtatcaacgtaatcttcctcggccaggacagg

SEQ ID NO: 409890 - DNA, 90 bp, Homo sapiens
ggcggaggcttcgagtgacccgggtgccgaggagcgggaagagttgctggggggtcctgctgtcacccaggctggagggcagtggcacca

SEQ ID NO: 409891 - DNA, 97 bp, Homo sapiens
gagctatgctcaagtgcctgagtgaagggcagccccctccctcatacaactggacacgtgctctggtgctactgattgctcaagagaaggaaagaaa

SEQ ID NO: 409892 - DNA, 75 bp, Homo sapiens
ctcaagggagtcaccttcaatgttaccaccgttgacaccaaaaggcagaccgggaagagggcaaagaacggcgcc

SEQ ID NO: 409893 - DNA, 98 bp, Homo sapiens
gcgattatggacccggccgaggcggtgctgcaagagaaggcactcaagtttatggtcatattgaacattccagatacctatcattactcgatgctgtt

SEQ ID NO: 409894 - DNA, 102 bp, Homo sapiens
atcgctgacagctgaggaagtctgcatccacattgcacataaagttgattctcgggattcgaagatggctgcacagtcagcgccgaaagttgtgctaaaaag

SEQ ID NO: 409895 - DNA, 51 bp, Homo sapiens
agacacagaaggccgacaccctgcacctggactcagcccaggagagtgtta

SEQ ID NO: 409896 - DNA, 100 bp, Homo sapiens
tggaaacagcggatgattctggaactgggagaagatggctttaaagaatacacttcaagtcagctgagggaacagctcagttaccttaagggtgataatt

SEQ ID NO: 409897 - DNA, 89 bp, Homo sapiens
gcagactcttcaaaacgcactcattcagtttgctactaggtatattgaagcaagtcaaagattacattaaacagtgtagcaaatgccag

SEQ ID NO: 409898 - DNA, 100 bp, Homo sapiens
gtgttcttctctggactccttagatgactctgtggtgggtccctcagcccttctgagctctgtgctgaacaagcccaccttgggacaccttgactccaag

SEQ ID NO: 409899 - DNA, 98 bp, Homo sapiens
gtggaccgtgtgctgccactgcgggggcaagacgaaggtgaatgaaaactttgccattgatttgatagcagagcagcccgtgagcgaggtggagactc

SEQ ID NO: 409900 - DNA, 51 bp, Homo sapiens
tcagagtactgggaaaagatgtttattacccagaactctttgtctgggtca

SEQ ID NO: 409901 - DNA, 75 bp, Homo sapiens
catctggataaattctcttcttatcatgtgaaaactgccttctttcacatggagtgtcgctctgtcgcccaggct

SEQ ID NO: 409902 - DNA, 99 bp, Homo sapiens
accaggcgaagctggccgagcaggctgagcgatacgacgggatcatggcccaagttgcaatgtccaccctccccgttgaagatgaggagtcctcggaga

SEQ ID NO: 409903 - DNA, 100 bp, Homo sapiens
gggaggtgggtactacacaaccgtctccagccttggtctgagtggactgtcctgcagagctgaagaagcaggtggagagtgccgagctgaagaaccagcg

SEQ ID NO: 409904 - DNA, 75 bp, Homo sapiens
gggtttgtcacatatgccactgtggaggaggtggatgcagctatgaatgcaaggtcatccctgagctgaacggga

SEQ ID NO: 409905 - DNA, 100 bp, Homo sapiens
cgcctcccgcgcacacacggccatggcggagctctacgaactcgacggggaccccaagaggaaggaattcctggatgacttgttcagcttcatgcagaag

SEQ ID NO: 409906 - DNA, 82 bp, Homo sapiens
ccctgggattcagcttcttcttcaacatgctcttcgtgccttcaataatctggagaatcttgtctttggcaaaggattccaa

SEQ ID NO: 409907 - DNA, 75 bp, Homo sapiens
agaaggagcaggattaccaaagggtcatgatgatgggcagcgcccgagtggcggagctgctgctgctccacggcg

SEQ ID NO: 409908 - DNA, 100 bp, Homo sapiens
agtggcaggcgccctggattttgcatcagaaacagcccaggcggtgagagacacagccacactcagcggccccagagataatcattcaggtcttcgtgag

SEQ ID NO: 409909 - DNA, 101 bp, Homo sapiens
agagggactctgaaagggccccggccagcgtccctgagacgccaacggcagtcactgccccccattccagctcctggatatttggagttcttacaacatgg

SEQ ID NO: 409910 - DNA, 74 bp, Homo sapiens
ccgtggctacactctggaccccaatggcaaaacctgcagccagatcctgagtcatgtgttccagtggcttgggt

SEQ ID NO: 409911 - DNA, 100 bp, Homo sapiens
tggtagattttgctcattcttggaatgaatcatgggtaaatcgaatggaagaaggaaacccaaggttgtggtatgctgggctacttctacaagtccgaac

SEQ ID NO: 409912 - DNA, 50 bp, Homo sapiens
cctttgttgattaactggacaaattcagagttttgccgaattgacaagcc

SEQ ID NO: 409913 - DNA, 74 bp, Homo sapiens
tgatgagctgatcttaatcaaaaagaactgatgaggagtttcaacagagacaggcggattttttgtgccattct

SEQ ID NO: 409914 - DNA, 82 bp, Homo sapiens
ctctgcagtgtcttccacaacctggtttgccattgtcttcaaaactccaaagtataaagatattaatattacaaaaccagcc

SEQ ID NO: 409915 - DNA, 83 bp, Homo sapiens
tgggcggccagagcgccggcaagagctcggtgctggagaacttcgtgggccgttcaaatctgaacatcaatgatgtactaggg

SEQ ID NO: 409916 - DNA, 96 bp, Homo sapiens
taaagaacagcgtaactccagacatggacattagctgtcagcacgcagccctgctgagcctcgacccagcggctgttagcgctggttgcctggcca

SEQ ID NO: 409917 - DNA, 100 bp, Homo sapiens
acgacaggacgttggggcggcctggctccctcagggactttgaacatgtcggggatcgccctcagcagactcgcccaggagaggaaagcatggaggaaag

SEQ ID NO: 409918 - DNA, 100 bp, Homo sapiens
cctgttcatcaggaacgtcgcggacgccaccagaacccttaggagaaatcttgagagtggacagcaattgtgaagatcgccagagagttctgtgtttcat

SEQ ID NO: 409919 - DNA, 90 bp, Homo sapiens
cctgggcactcaggagtgagctgcgaggaagcctcgatgacttacgagccctcaaggggaagcattttctcctggaccccttgatgccgg

SEQ ID NO: 409920 - DNA, 95 bp, Homo sapiens
ctcttcgtctttgcagcgtagcccgagtcggtcagcgccggagctgagctgactgctgcccactttggaggaggcggtgggctccttcacaagaa

SEQ ID NO: 409921 - DNA, 74 bp, Homo sapiens
cgagaccatcctggctaacacggtcactgcagccagaggggtccagaagagagaggaggcactgcctccactac

SEQ ID NO: 409922 - DNA, 82 bp, Homo sapiens
tgcctggccgcctcagccgggccctctctctgggaaccataccctctctgactcgagcagtgtgggttgtctcttcatgaag

SEQ ID NO: 409923 - DNA, 51 bp, Homo sapiens
agacagaaagctggaagttgaaatggtgcggccgggtgtgtggcaacatta

SEQ ID NO: 409924 - DNA, 74 bp, Homo sapiens
gaagcatcgttaaagtctctcttcaccctgccgtcatgtctaagtcagaggctacgtatgtcttccttcatacg

SEQ ID NO: 409925 - DNA, 100 bp, Homo sapiens
cgaggtggagccgctgcggcccgacgagctggagcgcctgtcaggctgggaggaggaggaggagagctggtttgttaacactttgcataaagatgtcaac

SEQ ID NO: 409926 - DNA, 97 bp, Homo sapiens
ccagggaaaggatgacatatttttggacctgaaacagaaattctggaacacctatatggttatgatgtgattgctcaagcccaatctgggactggga

SEQ ID NO: 409927 - DNA, 100 bp, Homo sapiens
tacatttctccgccaattcaccttgactctgagctagaaagaccctctgttaaagtatgcctgggtggagaagtactttggccctgactttctggagcag

SEQ ID NO: 409928 - DNA, 75 bp, Homo sapiens
ccgggacccggttccccggcccacagtgggggtgtgcaaacccgagagaactggactcctgcccctgccacgaga

SEQ ID NO: 409929 - DNA, 87 bp, Homo sapiens
gcggtgacagagtggagccatggctagagatttaatccagagactgacttcactatagaacccacagttgtatcaatggttggggaa

SEQ ID NO: 409930 - DNA, 83 bp, Homo sapiens
attataccttcacccagcatttcatccctcgtcgaaaggattggattggcatctttagagaaactctttatacagtgaaacag

SEQ ID NO: 409931 - DNA, 75 bp, Homo sapiens
gacggccggcgggggcggcgtgcggcctagcgtctcaggacccttgaacatctgtgaagaaatgactattctgca

SEQ ID NO: 409932 - DNA, 74 bp, Homo sapiens
gacaatccagtttcctgctaatttgcagcttcctccaggtgacatcactcaaaaaggatatgaaaagaaaaggg

SEQ ID NO: 409933 - DNA, 75 bp, Homo sapiens
ggcggaggcgtcgcgggagcctttggggcaccacagagatgcgggccgactcgcgggccgctgcacccaccgcca

SEQ ID NO: 409934 - DNA, 96 bp, Homo sapiens
atcagcatacaattcttacatattcctggtgtagaatctgcaaacaggtggatactttaatactgataagccacaccccaggggtgaaattcttat

SEQ ID NO: 409935 - DNA, 75 bp, Homo sapiens
aggggacatcatctgtgtgttctcacaatggaacagattaaaagggccaataaactgtttaccaatgattgtata

SEQ ID NO: 409936 - DNA, 75 bp, Homo sapiens
ttggcaccactgaagtgaccgaatgagaaatggaatctagttcatcagactactataataaagacaatgaagagg

SEQ ID NO: 409937 - DNA, 82 bp, Homo sapiens
ctgactgatacactccaagcgactgttaccaatgctgtggtcacagtgccagcttactttaatgactctcagcgtcaggcta

SEQ ID NO: 409938 - DNA, 100 bp, Homo sapiens
ttcgaattctggtgaaaaaggaagaattgacccttgaaggaatcaaacagttttatattaatgttgagagagagatctgggacttggctagtggcaaatt
